United States Patent Application Publication US 2014/0004565 A1 - sequence listing, part 118

SEQ ID NO: 2957955 - RNA, 19 nt, Artificial Sequence
  Description of Artificial Sequence: Synthetic oligonucleotide
cagcaucucgguacuuccc

SEQ ID NO: 2957956 - RNA, 19 nt, Artificial Sequence
  Description of Artificial Sequence: Synthetic oligonucleotide
cuuucugacuguauucccu

SEQ ID NO: 2957957 - RNA, 19 nt, Artificial Sequence
  Description of Artificial Sequence: Synthetic oligonucleotide
cuccugcccgauacaaggc

SEQ ID NO: 2957958 - RNA, 19 nt, Artificial Sequence
  Description of Artificial Sequence: Synthetic oligonucleotide
caucuagcagguggugccg

SEQ ID NO: 2957959 - RNA, 19 nt, Artificial Sequence
  Description of Artificial Sequence: Synthetic oligonucleotide
gguccuagauuggguaucg

SEQ ID NO: 2957960 - RNA, 19 nt, Artificial Sequence
  Description of Artificial Sequence: Synthetic oligonucleotide
gcugaguucugacuguguc

SEQ ID NO: 2957961 - RNA, 19 nt, Artificial Sequence
  Description of Artificial Sequence: Synthetic oligonucleotide
agucugucuggguggugug

SEQ ID NO: 2957962 - RNA, 19 nt, Artificial Sequence
  Description of Artificial Sequence: Synthetic oligonucleotide
gaaggcuacuccugcccga

SEQ ID NO: 2957963 - RNA, 19 nt, Artificial Sequence
  Description of Artificial Sequence: Synthetic oligonucleotide
ccgacucacagcaucucgg

SEQ ID NO: 2957964 - RNA, 19 nt, Artificial Sequence
  Description of Artificial Sequence: Synthetic oligonucleotide
guggugccgagccugguca

SEQ ID NO: 2957965 - RNA, 19 nt, Artificial Sequence
  Description of Artificial Sequence: Synthetic oligonucleotide
cuucccuucccgguagcgc

SEQ ID NO: 2957966 - RNA, 19 nt, Artificial Sequence
  Description of Artificial Sequence: Synthetic oligonucleotide
acuucccuucccgguagcg

SEQ ID NO: 2957967 - RNA, 19 nt, Artificial Sequence
  Description of Artificial Sequence: Synthetic oligonucleotide
ccaucuggaggagacaggc

SEQ ID NO: 2957968 - RNA, 19 nt, Artificial Sequence
  Description of Artificial Sequence: Synthetic oligonucleotide
ggcuacuccugcccgauac

SEQ ID NO: 2957969 - RNA, 19 nt, Artificial Sequence
  Description of Artificial Sequence: Synthetic oligonucleotide
accgccggacauuggcauc

SEQ ID NO: 2957970 - RNA, 19 nt, Artificial Sequence
  Description of Artificial Sequence: Synthetic oligonucleotide
gccgcuagguuguuguagc

SEQ ID NO: 2957971 - RNA, 19 nt, Artificial Sequence
  Description of Artificial Sequence: Synthetic oligonucleotide
uauucagguugucguucua

SEQ ID NO: 2957972 - RNA, 19 nt, Artificial Sequence
  Description of Artificial Sequence: Synthetic oligonucleotide
cacagcaucucgguacuuc

SEQ ID NO: 2957973 - RNA, 19 nt, Artificial Sequence
  Description of Artificial Sequence: Synthetic oligonucleotide
cugguucccuuccuccuug

SEQ ID NO: 2957974 - RNA, 19 nt, Artificial Sequence
  Description of Artificial Sequence: Synthetic oligonucleotide
ugccuauugauugcaucua

SEQ ID NO: 2957975 - RNA, 19 nt, Artificial Sequence
  Description of Artificial Sequence: Synthetic oligonucleotide
uucugacuguauucccuua

SEQ ID NO: 2957976 - RNA, 19 nt, Artificial Sequence
  Description of Artificial Sequence: Synthetic oligonucleotide
uaccgccggacauuggcau

SEQ ID NO: 2957977 - RNA, 19 nt, Artificial Sequence
  Description of Artificial Sequence: Synthetic oligonucleotide
cuuuaggcugccuauugau

SEQ ID NO: 2957978 - RNA, 19 nt, Artificial Sequence
  Description of Artificial Sequence: Synthetic oligonucleotide
aguccugcagauggaagaa

SEQ ID NO: 2957979 - RNA, 19 nt, Artificial Sequence
  Description of Artificial Sequence: Synthetic oligonucleotide
ucccgguagcgcugguucc

SEQ ID NO: 2957980 - RNA, 19 nt, Artificial Sequence
  Description of Artificial Sequence: Synthetic oligonucleotide
aaggcuacuccugcccgau

SEQ ID NO: 2957981 - RNA, 19 nt, Artificial Sequence
  Description of Artificial Sequence: Synthetic oligonucleotide
gauccagaccucgcagcug

SEQ ID NO: 2957982 - RNA, 19 nt, Artificial Sequence
  Description of Artificial Sequence: Synthetic oligonucleotide
uugcaucuagcagguggug

SEQ ID NO: 2957983 - RNA, 19 nt, Artificial Sequence
  Description of Artificial Sequence: Synthetic oligonucleotide
cuagcagguggugccgagc

SEQ ID NO: 2957984 - RNA, 19 nt, Artificial Sequence
  Description of Artificial Sequence: Synthetic oligonucleotide
uuggcaucuuuaggcugcc

SEQ ID NO: 2957985 - RNA, 19 nt, Artificial Sequence
  Description of Artificial Sequence: Synthetic oligonucleotide
cggacauuggcaucuuuag

SEQ ID NO: 2957986 - RNA, 19 nt, Artificial Sequence
  Description of Artificial Sequence: Synthetic oligonucleotide
cagguggugccgagccugg

SEQ ID NO: 2957987 - RNA, 19 nt, Artificial Sequence
  Description of Artificial Sequence: Synthetic oligonucleotide
gcagauggaagaaggcuac

SEQ ID NO: 2957988 - RNA, 19 nt, Artificial Sequence
  Description of Artificial Sequence: Synthetic oligonucleotide
gugccgagccuggucauag

SEQ ID NO: 2957989 - RNA, 19 nt, Artificial Sequence
  Description of Artificial Sequence: Synthetic oligonucleotide
agacaggccgcuagguugu

SEQ ID NO: 2957990 - RNA, 19 nt, Artificial Sequence
  Description of Artificial Sequence: Synthetic oligonucleotide
gcugccuauugauugcauc

SEQ ID NO: 2957991 - RNA, 19 nt, Artificial Sequence
  Description of Artificial Sequence: Synthetic oligonucleotide
guaguucacuggcuccauc

SEQ ID NO: 2957992 - RNA, 19 nt, Artificial Sequence
  Description of Artificial Sequence: Synthetic oligonucleotide
ggcagacuuggauccagac

SEQ ID NO: 2957993 - RNA, 19 nt, Artificial Sequence
  Description of Artificial Sequence: Synthetic oligonucleotide
ucccuucccgguagcgcug

SEQ ID NO: 2957994 - RNA, 19 nt, Artificial Sequence
  Description of Artificial Sequence: Synthetic oligonucleotide
gcaguauguuuucuugcuc

SEQ ID NO: 2957995 - RNA, 19 nt, Artificial Sequence
  Description of Artificial Sequence: Synthetic oligonucleotide
cccgauacaaggccuuggc

SEQ ID NO: 2957996 - RNA, 19 nt, Artificial Sequence
  Description of Artificial Sequence: Synthetic oligonucleotide
gaguucugacugugucaac

SEQ ID NO: 2957997 - RNA, 19 nt, Artificial Sequence
  Description of Artificial Sequence: Synthetic oligonucleotide
ugggcccucagguccuaga

SEQ ID NO: 2957998 - RNA, 19 nt, Artificial Sequence
  Description of Artificial Sequence: Synthetic oligonucleotide
ccgagccuggucauagucc

SEQ ID NO: 2957999 - RNA, 19 nt, Artificial Sequence
  Description of Artificial Sequence: Synthetic oligonucleotide
cagaccucgcagcuggaga

SEQ ID NO: 2958000 - RNA, 19 nt, Artificial Sequence
  Description of Artificial Sequence: Synthetic oligonucleotide
gcuagguuguuguagcagu

SEQ ID NO: 2958001 - RNA, 19 nt, Artificial Sequence
  Description of Artificial Sequence: Synthetic oligonucleotide
cauaguccugcagauggaa

SEQ ID NO: 2958002 - RNA, 19 nt, Artificial Sequence
  Description of Artificial Sequence: Synthetic oligonucleotide
uucuugcucuggcgugaga

SEQ ID NO: 2958003 - RNA, 19 nt, Artificial Sequence
  Description of Artificial Sequence: Synthetic oligonucleotide
auucccuuacucguucgua

SEQ ID NO: 2958004 - RNA, 19 nt, Artificial Sequence
  Description of Artificial Sequence: Synthetic oligonucleotide
guccugcagauggaagaag

SEQ ID NO: 2958005 - RNA, 19 nt, Artificial Sequence
  Description of Artificial Sequence: Synthetic oligonucleotide
gaccucgcagcuggagaag

SEQ ID NO: 2958006 - RNA, 19 nt, Artificial Sequence
  Description of Artificial Sequence: Synthetic oligonucleotide
gacucacagcaucucggua

SEQ ID NO: 2958007 - RNA, 19 nt, Artificial Sequence
  Description of Artificial Sequence: Synthetic oligonucleotide
cugcugaguucugacugug

SEQ ID NO: 2958008 - RNA, 19 nt, Artificial Sequence
  Description of Artificial Sequence: Synthetic oligonucleotide
gugagagcugggcccucag

SEQ ID NO: 2958009 - RNA, 19 nt, Artificial Sequence
  Description of Artificial Sequence: Synthetic oligonucleotide
ggcaucuuuaggcugccua

SEQ ID NO: 2958010 - RNA, 19 nt, Artificial Sequence
  Description of Artificial Sequence: Synthetic oligonucleotide
aggagacaggccgcuaggu

SEQ ID NO: 2958011 - RNA, 19 nt, Artificial Sequence
  Description of Artificial Sequence: Synthetic oligonucleotide
ugcccgauacaaggccuug

SEQ ID NO: 2958012 - RNA, 19 nt, Artificial Sequence
  Description of Artificial Sequence: Synthetic oligonucleotide
auacaaggccuuggcauua

SEQ ID NO: 2958013 - RNA, 19 nt, Artificial Sequence
  Description of Artificial Sequence: Synthetic oligonucleotide
auaccgccggacauuggca

SEQ ID NO: 2958014 - RNA, 19 nt, Artificial Sequence
  Description of Artificial Sequence: Synthetic oligonucleotide
gguacuucccuucccggua

SEQ ID NO: 2958015 - RNA, 19 nt, Artificial Sequence
  Description of Artificial Sequence: Synthetic oligonucleotide
gaaggcagacuuggaucca

SEQ ID NO: 2958016 - RNA, 19 nt, Artificial Sequence
  Description of Artificial Sequence: Synthetic oligonucleotide
guccuagauuggguaucgg

SEQ ID NO: 2958017 - RNA, 19 nt, Artificial Sequence
  Description of Artificial Sequence: Synthetic oligonucleotide
guucuaggacuuucugacu

SEQ ID NO: 2958018 - RNA, 19 nt, Artificial Sequence
  Description of Artificial Sequence: Synthetic oligonucleotide
ugauugcaucuagcaggug

SEQ ID NO: 2958019 - RNA, 19 nt, Artificial Sequence
  Description of Artificial Sequence: Synthetic oligonucleotide
gucugucuggguggugugc

SEQ ID NO: 2958020 - RNA, 19 nt, Artificial Sequence
  Description of Artificial Sequence: Synthetic oligonucleotide
gguagcgcugguucccuuc

SEQ ID NO: 2958021 - RNA, 19 nt, Artificial Sequence
  Description of Artificial Sequence: Synthetic oligonucleotide
ccucagguccuagauuggg

SEQ ID NO: 2958022 - RNA, 19 nt, Artificial Sequence
  Description of Artificial Sequence: Synthetic oligonucleotide
cgaugguaccgacucacag

SEQ ID NO: 2958023 - RNA, 19 nt, Artificial Sequence
  Description of Artificial Sequence: Synthetic oligonucleotide
ggucauaguccugcagaug

SEQ ID NO: 2958024 - RNA, 19 nt, Artificial Sequence
  Description of Artificial Sequence: Synthetic oligonucleotide
accucgcagcuggagaaga

SEQ ID NO: 2958025 - RNA, 19 nt, Artificial Sequence
  Description of Artificial Sequence: Synthetic oligonucleotide
ggcuccaucuggaggagac

SEQ ID NO: 2958026 - RNA, 19 nt, Artificial Sequence
  Description of Artificial Sequence: Synthetic oligonucleotide
gguaucggggaaggcagac

SEQ ID NO: 2958027 - RNA, 19 nt, Artificial Sequence
  Description of Artificial Sequence: Synthetic oligonucleotide
agcagucugucuggguggu

SEQ ID NO: 2958028 - RNA, 19 nt, Artificial Sequence
  Description of Artificial Sequence: Synthetic oligonucleotide
gaagauaccgccggacauu

SEQ ID NO: 2958029 - RNA, 19 nt, Artificial Sequence
  Description of Artificial Sequence: Synthetic oligonucleotide
cugacuguauucccuuacu

SEQ ID NO: 2958030 - RNA, 19 nt, Artificial Sequence
  Description of Artificial Sequence: Synthetic oligonucleotide
cugcagauggaagaaggcu

SEQ ID NO: 2958031 - RNA, 19 nt, Artificial Sequence
  Description of Artificial Sequence: Synthetic oligonucleotide
ucuggguggugugcaguau

SEQ ID NO: 2958032 - RNA, 19 nt, Artificial Sequence
  Description of Artificial Sequence: Synthetic oligonucleotide
uagcgcugguucccuuccu

SEQ ID NO: 2958033 - RNA, 19 nt, Artificial Sequence
  Description of Artificial Sequence: Synthetic oligonucleotide
ggccgcuagguuguuguag

SEQ ID NO: 2958034 - RNA, 19 nt, Artificial Sequence
  Description of Artificial Sequence: Synthetic oligonucleotide
uacaaggccuuggcauuau

SEQ ID NO: 2958035 - RNA, 19 nt, Artificial Sequence
  Description of Artificial Sequence: Synthetic oligonucleotide
gcagguggugccgagccug

SEQ ID NO: 2958036 - RNA, 19 nt, Artificial Sequence
  Description of Artificial Sequence: Synthetic oligonucleotide
aucuagcagguggugccga

SEQ ID NO: 2958037 - RNA, 19 nt, Artificial Sequence
  Description of Artificial Sequence: Synthetic oligonucleotide
aggcugccuauugauugca

SEQ ID NO: 2958038 - RNA, 19 nt, Artificial Sequence
  Description of Artificial Sequence: Synthetic oligonucleotide
uaccgacucacagcaucuc

SEQ ID NO: 2958039 - RNA, 19 nt, Artificial Sequence
  Description of Artificial Sequence: Synthetic oligonucleotide
cuacuccugcccgauacaa

SEQ ID NO: 2958040 - RNA, 19 nt, Artificial Sequence
  Description of Artificial Sequence: Synthetic oligonucleotide
guggugugcaguauguuuu

SEQ ID NO: 2958041 - RNA, 19 nt, Artificial Sequence
  Description of Artificial Sequence: Synthetic oligonucleotide
cucagguccuagauugggu

SEQ ID NO: 2958042 - RNA, 19 nt, Artificial Sequence
  Description of Artificial Sequence: Synthetic oligonucleotide
gguggugugcaguauguuu

SEQ ID NO: 2958043 - RNA, 19 nt, Artificial Sequence
  Description of Artificial Sequence: Synthetic oligonucleotide
agauaccgccggacauugg

SEQ ID NO: 2958044 - RNA, 19 nt, Artificial Sequence
  Description of Artificial Sequence: Synthetic oligonucleotide
ccuuacucguucguaguuc

SEQ ID NO: 2958045 - RNA, 19 nt, Artificial Sequence
  Description of Artificial Sequence: Synthetic oligonucleotide
uggcauuauucagguuguc

SEQ ID NO: 2958046 - RNA, 19 nt, Artificial Sequence
  Description of Artificial Sequence: Synthetic oligonucleotide
cucacagcaucucgguacu

SEQ ID NO: 2958047 - RNA, 19 nt, Artificial Sequence
  Description of Artificial Sequence: Synthetic oligonucleotide
caggccgcuagguuguugu

SEQ ID NO: 2958048 - RNA, 19 nt, Artificial Sequence
  Description of Artificial Sequence: Synthetic oligonucleotide
acaaggccuuggcauuauu

SEQ ID NO: 2958049 - RNA, 19 nt, Artificial Sequence
  Description of Artificial Sequence: Synthetic oligonucleotide
agcuggagaagagcucgau

SEQ ID NO: 2958050 - RNA, 19 nt, Artificial Sequence
  Description of Artificial Sequence: Synthetic oligonucleotide
ugguaccgacucacagcau

SEQ ID NO: 2958051 - RNA, 19 nt, Artificial Sequence
  Description of Artificial Sequence: Synthetic oligonucleotide
gguggugccgagccugguc

SEQ ID NO: 2958052 - RNA, 19 nt, Artificial Sequence
  Description of Artificial Sequence: Synthetic oligonucleotide
ggagaagagcucgauggua

SEQ ID NO: 2958053 - RNA, 19 nt, Artificial Sequence
  Description of Artificial Sequence: Synthetic oligonucleotide
ugccgagccuggucauagu

SEQ ID NO: 2958054 - RNA, 19 nt, Artificial Sequence
  Description of Artificial Sequence: Synthetic oligonucleotide
ggauccagaccucgcagcu

SEQ ID NO: 2958055 - RNA, 19 nt, Artificial Sequence
  Description of Artificial Sequence: Synthetic oligonucleotide
guaccgacucacagcaucu

SEQ ID NO: 2958056 - RNA, 19 nt, Artificial Sequence
  Description of Artificial Sequence: Synthetic oligonucleotide
cuggcuccaucuggaggag

SEQ ID NO: 2958057 - RNA, 19 nt, Artificial Sequence
  Description of Artificial Sequence: Synthetic oligonucleotide
gugugcaguauguuuucuu

SEQ ID NO: 2958058 - RNA, 19 nt, Artificial Sequence
  Description of Artificial Sequence: Synthetic oligonucleotide
cuaggacuuucugacugua

SEQ ID NO: 2958059 - RNA, 19 nt, Artificial Sequence
  Description of Artificial Sequence: Synthetic oligonucleotide
gcaucuuuaggcugccuau

SEQ ID NO: 2958060 - RNA, 19 nt, Artificial Sequence
  Description of Artificial Sequence: Synthetic oligonucleotide
gccuuggcauuauucaggu

SEQ ID NO: 2958061 - RNA, 19 nt, Artificial Sequence
  Description of Artificial Sequence: Synthetic oligonucleotide
gcccgauacaaggccuugg

SEQ ID NO: 2958062 - RNA, 19 nt, Artificial Sequence
  Description of Artificial Sequence: Synthetic oligonucleotide
acaggccgcuagguuguug

SEQ ID NO: 2958063 - RNA, 19 nt, Artificial Sequence
  Description of Artificial Sequence: Synthetic oligonucleotide
cccucagguccuagauugg

SEQ ID NO: 2958064 - RNA, 19 nt, Artificial Sequence
  Description of Artificial Sequence: Synthetic oligonucleotide
uggugccgagccuggucau

SEQ ID NO: 2958065 - RNA, 19 nt, Artificial Sequence
  Description of Artificial Sequence: Synthetic oligonucleotide
uggcuccaucuggaggaga

SEQ ID NO: 2958066 - RNA, 19 nt, Artificial Sequence
  Description of Artificial Sequence: Synthetic oligonucleotide
cucuggcgugagagcuggg

SEQ ID NO: 2958067 - RNA, 19 nt, Artificial Sequence
  Description of Artificial Sequence: Synthetic oligonucleotide
ccucgcagcuggagaagag

SEQ ID NO: 2958068 - RNA, 19 nt, Artificial Sequence
  Description of Artificial Sequence: Synthetic oligonucleotide
cgauacaaggccuuggcau

SEQ ID NO: 2958069 - RNA, 19 nt, Artificial Sequence
  Description of Artificial Sequence: Synthetic oligonucleotide
aggcagacuuggauccaga

SEQ ID NO: 2958070 - RNA, 19 nt, Artificial Sequence
  Description of Artificial Sequence: Synthetic oligonucleotide
cagucugucuggguggugu

SEQ ID NO: 2958071 - RNA, 19 nt, Artificial Sequence
  Description of Artificial Sequence: Synthetic oligonucleotide
gcuacuccugcccgauaca

SEQ ID NO: 2958072 - RNA, 19 nt, Artificial Sequence
  Description of Artificial Sequence: Synthetic oligonucleotide
cuguauucccuuacucguu

SEQ ID NO: 2958073 - RNA, 19 nt, Artificial Sequence
  Description of Artificial Sequence: Synthetic oligonucleotide
ggggaaggcagacuuggau

SEQ ID NO: 2958074 - RNA, 19 nt, Artificial Sequence
  Description of Artificial Sequence: Synthetic oligonucleotide
cagcuggagaagagcucga

SEQ ID NO: 2958075 - RNA, 19 nt, Artificial Sequence
  Description of Artificial Sequence: Synthetic oligonucleotide
ccggacauuggcaucuuua

SEQ ID NO: 2958076 - RNA, 19 nt, Artificial Sequence
  Description of Artificial Sequence: Synthetic oligonucleotide
cagguccuagauuggguau

SEQ ID NO: 2958077 - RNA, 19 nt, Artificial Sequence
  Description of Artificial Sequence: Synthetic oligonucleotide
gguuguuguagcagucugu

SEQ ID NO: 2958078 - RNA, 19 nt, Artificial Sequence
  Description of Artificial Sequence: Synthetic oligonucleotide
uggcaucuuuaggcugccu

SEQ ID NO: 2958079 - RNA, 19 nt, Artificial Sequence
  Description of Artificial Sequence: Synthetic oligonucleotide
cgcuagguuguuguagcag

SEQ ID NO: 2958080 - RNA, 19 nt, Artificial Sequence
  Description of Artificial Sequence: Synthetic oligonucleotide
ccgauacaaggccuuggca

SEQ ID NO: 2958081 - RNA, 19 nt, Artificial Sequence
  Description of Artificial Sequence: Synthetic oligonucleotide
gcugcugaguucugacugu

SEQ ID NO: 2958082 - RNA, 19 nt, Artificial Sequence
  Description of Artificial Sequence: Synthetic oligonucleotide
guaucggggaaggcagacu

SEQ ID NO: 2958083 - RNA, 19 nt, Artificial Sequence
  Description of Artificial Sequence: Synthetic oligonucleotide
aggccgcuagguuguugua

SEQ ID NO: 2958084 - RNA, 19 nt, Artificial Sequence
  Description of Artificial Sequence: Synthetic oligonucleotide
ucacagcaucucgguacuu

SEQ ID NO: 2958085 - RNA, 19 nt, Artificial Sequence
  Description of Artificial Sequence: Synthetic oligonucleotide
gcucgaugguaccgacuca

SEQ ID NO: 2958086 - RNA, 19 nt, Artificial Sequence
  Description of Artificial Sequence: Synthetic oligonucleotide
cccgguagcgcugguuccc

SEQ ID NO: 2958087 - RNA, 19 nt, Artificial Sequence
  Description of Artificial Sequence: Synthetic oligonucleotide
gagcucgaugguaccgacu

SEQ ID NO: 2958088 - RNA, 19 nt, Artificial Sequence
  Description of Artificial Sequence: Synthetic oligonucleotide
caucuuuaggcugccuauu

SEQ ID NO: 2958089 - RNA, 19 nt, Artificial Sequence
  Description of Artificial Sequence: Synthetic oligonucleotide
aggcuacuccugcccgaua

SEQ ID NO: 2958090 - RNA, 19 nt, Artificial Sequence
  Description of Artificial Sequence: Synthetic oligonucleotide
ggagacaggccgcuagguu

SEQ ID NO: 2958091 - RNA, 19 nt, Artificial Sequence
  Description of Artificial Sequence: Synthetic oligonucleotide
cugggcccucagguccuag

SEQ ID NO: 2958092 - RNA, 19 nt, Artificial Sequence
  Description of Artificial Sequence: Synthetic oligonucleotide
cgcagcuggagaagagcuc

SEQ ID NO: 2958093 - RNA, 19 nt, Artificial Sequence
  Description of Artificial Sequence: Synthetic oligonucleotide
ggugugcaguauguuuucu

SEQ ID NO: 2958094 - RNA, 19 nt, Artificial Sequence
  Description of Artificial Sequence: Synthetic oligonucleotide
agguggugccgagccuggu

SEQ ID NO: 2958095 - RNA, 19 nt, Artificial Sequence
  Description of Artificial Sequence: Synthetic oligonucleotide
gccuggucauaguccugca

SEQ ID NO: 2958096 - RNA, 19 nt, Artificial Sequence
  Description of Artificial Sequence: Synthetic oligonucleotide
cgagccuggucauaguccu

SEQ ID NO: 2958097 - RNA, 19 nt, Artificial Sequence
  Description of Artificial Sequence: Synthetic oligonucleotide
cagauggaagaaggcuacu

SEQ ID NO: 2958098 - RNA, 19 nt, Artificial Sequence
  Description of Artificial Sequence: Synthetic oligonucleotide
gcuccaucuggaggagaca

SEQ ID NO: 2958099 - RNA, 19 nt, Artificial Sequence
  Description of Artificial Sequence: Synthetic oligonucleotide
ccugcccgauacaaggccu

SEQ ID NO: 2958100 - RNA, 19 nt, Artificial Sequence
  Description of Artificial Sequence: Synthetic oligonucleotide
cccuucccgguagcgcugg

SEQ ID NO: 2958101 - RNA, 19 nt, Artificial Sequence
  Description of Artificial Sequence: Synthetic oligonucleotide
cugcccgauacaaggccuu

SEQ ID NO: 2958102 - RNA, 19 nt, Artificial Sequence
  Description of Artificial Sequence: Synthetic oligonucleotide
ggguaucggggaaggcaga

SEQ ID NO: 2958103 - RNA, 19 nt, Artificial Sequence
  Description of Artificial Sequence: Synthetic oligonucleotide
ccgcuagguuguuguagca

SEQ ID NO: 2958104 - RNA, 19 nt, Artificial Sequence
  Description of Artificial Sequence: Synthetic oligonucleotide
guugucguucuaggacuuu

SEQ ID NO: 2958105 - RNA, 19 nt, Artificial Sequence
  Description of Artificial Sequence: Synthetic oligonucleotide
gggcccucagguccuagau

SEQ ID NO: 2958106 - RNA, 19 nt, Artificial Sequence
  Description of Artificial Sequence: Synthetic oligonucleotide
gcagucugucuggguggug

SEQ ID NO: 2958107 - RNA, 19 nt, Artificial Sequence
  Description of Artificial Sequence: Synthetic oligonucleotide
gcugguucccuuccuccuu

SEQ ID NO: 2958108 - RNA, 19 nt, Artificial Sequence
  Description of Artificial Sequence: Synthetic oligonucleotide
gguugucguucuaggacuu

SEQ ID NO: 2958109 - RNA, 19 nt, Artificial Sequence
  Description of Artificial Sequence: Synthetic oligonucleotide
ggcgugagagcugggcccu

SEQ ID NO: 2958110 - RNA, 19 nt, Artificial Sequence
  Description of Artificial Sequence: Synthetic oligonucleotide
gcaucucgguacuucccuu

SEQ ID NO: 2958111 - RNA, 19 nt, Artificial Sequence
  Description of Artificial Sequence: Synthetic oligonucleotide
cguucguaguucacuggcu

SEQ ID NO: 2958112 - RNA, 19 nt, Artificial Sequence
  Description of Artificial Sequence: Synthetic oligonucleotide
ggcccucagguccuagauu

SEQ ID NO: 2958113 - RNA, 19 nt, Artificial Sequence
  Description of Artificial Sequence: Synthetic oligonucleotide
cgacucacagcaucucggu

SEQ ID NO: 2958114 - RNA, 19 nt, Artificial Sequence
  Description of Artificial Sequence: Synthetic oligonucleotide
ggugccgagccuggucaua

SEQ ID NO: 2958115 - RNA, 19 nt, Artificial Sequence
  Description of Artificial Sequence: Synthetic oligonucleotide
cuucccgguagcgcugguu

SEQ ID NO: 2958116 - RNA, 19 nt, Artificial Sequence
  Description of Artificial Sequence: Synthetic oligonucleotide
cccuuacucguucguaguu

SEQ ID NO: 2958117 - RNA, 19 nt, Artificial Sequence
  Description of Artificial Sequence: Synthetic oligonucleotide
cgguacuucccuucccggu

SEQ ID NO: 2958118 - RNA, 19 nt, Artificial Sequence
  Description of Artificial Sequence: Synthetic oligonucleotide
cggggaaggcagacuugga

SEQ ID NO: 2958119 - RNA, 19 nt, Artificial Sequence
  Description of Artificial Sequence: Synthetic oligonucleotide
ggcugccuauugauugcau

SEQ ID NO: 2958120 - RNA, 19 nt, Artificial Sequence
  Description of Artificial Sequence: Synthetic oligonucleotide
ccgccggacauuggcaucu

SEQ ID NO: 2958121 - RNA, 19 nt, Artificial Sequence
  Description of Artificial Sequence: Synthetic oligonucleotide
ggguggugugcaguauguu

SEQ ID NO: 2958122 - RNA, 19 nt, Artificial Sequence
  Description of Artificial Sequence: Synthetic oligonucleotide
cgugagagcugggcccuca

SEQ ID NO: 2958123 - RNA, 19 nt, Artificial Sequence
  Description of Artificial Sequence: Synthetic oligonucleotide
cgcugguucccuuccuccu

SEQ ID NO: 2958124 - RNA, 19 nt, Artificial Sequence
  Description of Artificial Sequence: Synthetic oligonucleotide
gacaggccgcuagguuguu

SEQ ID NO: 2958125 - RNA, 19 nt, Artificial Sequence
  Description of Artificial Sequence: Synthetic oligonucleotide
gccggacauuggcaucuuu

SEQ ID NO: 2958126 - RNA, 19 nt, Artificial Sequence
  Description of Artificial Sequence: Synthetic oligonucleotide
gcgugagagcugggcccuc

SEQ ID NO: 2958127 - RNA, 19 nt, Artificial Sequence
  Description of Artificial Sequence: Synthetic oligonucleotide
cguaguucacuggcuccau

SEQ ID NO: 2958128 - RNA, 19 nt, Artificial Sequence
  Description of Artificial Sequence: Synthetic oligonucleotide
ccgguagcgcugguucccu

SEQ ID NO: 2958129 - RNA, 19 nt, Artificial Sequence
  Description of Artificial Sequence: Synthetic oligonucleotide
ccuucccgguagcgcuggu

SEQ ID NO: 2958130 - RNA, 19 nt, Artificial Sequence
  Description of Artificial Sequence: Synthetic oligonucleotide
cgguagcgcugguucccuu

SEQ ID NO: 2958131 - RNA, 19 nt, Artificial Sequence
  Description of Artificial Sequence: Synthetic oligonucleotide
cgccggacauuggcaucuu

SEQ ID NO: 2958132 - RNA, 19 nt, Artificial Sequence
  Description of Artificial Sequence: Synthetic oligonucleotide
ugaaauauacauuagaccc

SEQ ID NO: 2958133 - RNA, 19 nt, Artificial Sequence
  Description of Artificial Sequence: Synthetic oligonucleotide
auuuucgcaacauagcucc

SEQ ID NO: 2958134 - RNA, 19 nt, Artificial Sequence
  Description of Artificial Sequence: Synthetic oligonucleotide
uccaacaucacucugaccu

SEQ ID NO: 2958135 - RNA, 19 nt, Artificial Sequence
  Description of Artificial Sequence: Synthetic oligonucleotide
aauuccuccugaaauauac

SEQ ID NO: 2958136 - RNA, 19 nt, Artificial Sequence
  Description of Artificial Sequence: Synthetic oligonucleotide
aucacauacagcuugucuc

SEQ ID NO: 2958137 - RNA, 19 nt, Artificial Sequence
  Description of Artificial Sequence: Synthetic oligonucleotide
agaacaucaucauaaucac

SEQ ID NO: 2958138 - RNA, 19 nt, Artificial Sequence
  Description of Artificial Sequence: Synthetic oligonucleotide
ucugggucaaaacacauga

SEQ ID NO: 2958139 - RNA, 19 nt, Artificial Sequence
  Description of Artificial Sequence: Synthetic oligonucleotide
uccggcaugaccauagugg

SEQ ID NO: 2958140 - RNA, 19 nt, Artificial Sequence
  Description of Artificial Sequence: Synthetic oligonucleotide
aacacaugagcucauuuug

SEQ ID NO: 2958141 - RNA, 19 nt, Artificial Sequence
  Description of Artificial Sequence: Synthetic oligonucleotide
uguaacauucuacuguggc

SEQ ID NO: 2958142 - RNA, 19 nt, Artificial Sequence
  Description of Artificial Sequence: Synthetic oligonucleotide
cugaaauauacauuagacc

SEQ ID NO: 2958143 - RNA, 19 nt, Artificial Sequence
  Description of Artificial Sequence: Synthetic oligonucleotide
aaaacagcaacuccaacau

SEQ ID NO: 2958144 - RNA, 19 nt, Artificial Sequence
  Description of Artificial Sequence: Synthetic oligonucleotide
uggugaauaauauucgcag

SEQ ID NO: 2958145 - RNA, 19 nt, Artificial Sequence
  Description of Artificial Sequence: Synthetic oligonucleotide
ucuccaacuguacacaugc

SEQ ID NO: 2958146 - RNA, 19 nt, Artificial Sequence
  Description of Artificial Sequence: Synthetic oligonucleotide
guugccaccaaucacauac

SEQ ID NO: 2958147 - RNA, 19 nt, Artificial Sequence
  Description of Artificial Sequence: Synthetic oligonucleotide
uguaucugggucaaaacac

SEQ ID NO: 2958148 - RNA, 19 nt, Artificial Sequence
  Description of Artificial Sequence: Synthetic oligonucleotide
aacauagcuccauucguuc

SEQ ID NO: 2958149 - RNA, 19 nt, Artificial Sequence
  Description of Artificial Sequence: Synthetic oligonucleotide
acaacauagauuuguuuuc

SEQ ID NO: 2958150 - RNA, 19 nt, Artificial Sequence
  Description of Artificial Sequence: Synthetic oligonucleotide
ucauuuucgcaacauagcu

SEQ ID NO: 2958151 - RNA, 19 nt, Artificial Sequence
  Description of Artificial Sequence: Synthetic oligonucleotide
agaauauccaccaacaaca

SEQ ID NO: 2958152 - RNA, 19 nt, Artificial Sequence
  Description of Artificial Sequence: Synthetic oligonucleotide
aagugucaugaguaauucc

SEQ ID NO: 2958153 - RNA, 19 nt, Artificial Sequence
  Description of Artificial Sequence: Synthetic oligonucleotide
caucauaaucacuuguucc

SEQ ID NO: 2958154 - RNA, 19 nt, Artificial Sequence
  Description of Artificial Sequence: Synthetic oligonucleotide
aaagugucaugaguaauuc

SEQ ID NO: 2958155 - RNA, 19 nt, Artificial Sequence
  Description of Artificial Sequence: Synthetic oligonucleotide
uuuggaaagugucaugagu

SEQ ID NO: 2958156 - RNA, 19 nt, Artificial Sequence
  Description of Artificial Sequence: Synthetic oligonucleotide
aucauaaucacuuguuccu

SEQ ID NO: 2958157 - RNA, 19 nt, Artificial Sequence
  Description of Artificial Sequence: Synthetic oligonucleotide
uccaacuguacacaugcag

SEQ ID NO: 2958158 - RNA, 19 nt, Artificial Sequence
  Description of Artificial Sequence: Synthetic oligonucleotide
aaucacauacagcuugucu

SEQ ID NO: 2958159 - RNA, 19 nt, Artificial Sequence
  Description of Artificial Sequence: Synthetic oligonucleotide
aacaucaucauaaucacuu

SEQ ID NO: 2958160 - RNA, 19 nt, Artificial Sequence
  Description of Artificial Sequence: Synthetic oligonucleotide
aacagcaacuccaacauca

SEQ ID NO: 2958161 - RNA, 19 nt, Artificial Sequence
  Description of Artificial Sequence: Synthetic oligonucleotide
ucagcauagcagcaauugg

SEQ ID NO: 2958162 - RNA, 19 nt, Artificial Sequence
  Description of Artificial Sequence: Synthetic oligonucleotide
aucacucugaccucucagc

SEQ ID NO: 2958163 - RNA, 19 nt, Artificial Sequence
  Description of Artificial Sequence: Synthetic oligonucleotide
aauuggaguccacugguca

SEQ ID NO: 2958164 - RNA, 19 nt, Artificial Sequence
  Description of Artificial Sequence: Synthetic oligonucleotide
uuggugaauaauauucgca

SEQ ID NO: 2958165 - RNA, 19 nt, Artificial Sequence
  Description of Artificial Sequence: Synthetic oligonucleotide
cauagcagcaauuggaguc

SEQ ID NO: 2958166 - RNA, 19 nt, Artificial Sequence
  Description of Artificial Sequence: Synthetic oligonucleotide
auuugucuguaucuggguc

SEQ ID NO: 2958167 - RNA, 19 nt, Artificial Sequence
  Description of Artificial Sequence: Synthetic oligonucleotide
guuguaacauucuacugug

SEQ ID NO: 2958168 - RNA, 19 nt, Artificial Sequence
  Description of Artificial Sequence: Synthetic oligonucleotide
ucacuuguuccucugaagu

SEQ ID NO: 2958169 - RNA, 19 nt, Artificial Sequence
  Description of Artificial Sequence: Synthetic oligonucleotide
uccugaaauauacauuaga

SEQ ID NO: 2958170 - RNA, 19 nt, Artificial Sequence
  Description of Artificial Sequence: Synthetic oligonucleotide
gaaauauacauuagacccc

SEQ ID NO: 2958171 - RNA, 19 nt, Artificial Sequence
  Description of Artificial Sequence: Synthetic oligonucleotide
accauagugggguucacuc

SEQ ID NO: 2958172 - RNA, 19 nt, Artificial Sequence
  Description of Artificial Sequence: Synthetic oligonucleotide
uaacauucuacuguggcca

SEQ ID NO: 2958173 - RNA, 19 nt, Artificial Sequence
  Description of Artificial Sequence: Synthetic oligonucleotide
agcaauuggaguccacugg

SEQ ID NO: 2958174 - RNA, 19 nt, Artificial Sequence
  Description of Artificial Sequence: Synthetic oligonucleotide
agcaacuccaacaucacuc

SEQ ID NO: 2958175 - RNA, 19 nt, Artificial Sequence
  Description of Artificial Sequence: Synthetic oligonucleotide
aaacacaugagcucauuuu

SEQ ID NO: 2958176 - RNA, 19 nt, Artificial Sequence
  Description of Artificial Sequence: Synthetic oligonucleotide
ucggacuguagucauagga

SEQ ID NO: 2958177 - RNA, 19 nt, Artificial Sequence
  Description of Artificial Sequence: Synthetic oligonucleotide
ugggguucacucauuuucg

SEQ ID NO: 2958178 - RNA, 19 nt, Artificial Sequence
  Description of Artificial Sequence: Synthetic oligonucleotide
ucauucuuggguuguaaca

SEQ ID NO: 2958179 - RNA, 19 nt, Artificial Sequence
  Description of Artificial Sequence: Synthetic oligonucleotide
uccauuugucuguaucugg

SEQ ID NO: 2958180 - RNA, 19 nt, Artificial Sequence
  Description of Artificial Sequence: Synthetic oligonucleotide
ugaccucucagcauagcag

SEQ ID NO: 2958181 - RNA, 19 nt, Artificial Sequence
  Description of Artificial Sequence: Synthetic oligonucleotide
auagcagcaauuggagucc

SEQ ID NO: 2958182 - RNA, 19 nt, Artificial Sequence
  Description of Artificial Sequence: Synthetic oligonucleotide
uucgcagcugagaacauca

SEQ ID NO: 2958183 - RNA, 19 nt, Artificial Sequence
  Description of Artificial Sequence: Synthetic oligonucleotide
ucaugaguaauuccuccug

SEQ ID NO: 2958184 - RNA, 19 nt, Artificial Sequence
  Description of Artificial Sequence: Synthetic oligonucleotide
cucauuuucgcaacauagc

SEQ ID NO: 2958185 - RNA, 19 nt, Artificial Sequence
  Description of Artificial Sequence: Synthetic oligonucleotide
uguuccggcaugaccauag

SEQ ID NO: 2958186 - RNA, 19 nt, Artificial Sequence
  Description of Artificial Sequence: Synthetic oligonucleotide
cauagauuuguuuucaaaa

SEQ ID NO: 2958187 - RNA, 19 nt, Artificial Sequence
  Description of Artificial Sequence: Synthetic oligonucleotide
ugucaugaguaauuccucc

SEQ ID NO: 2958188 - RNA, 19 nt, Artificial Sequence
  Description of Artificial Sequence: Synthetic oligonucleotide
agugguugccaccaaucac

SEQ ID NO: 2958189 - RNA, 19 nt, Artificial Sequence
  Description of Artificial Sequence: Synthetic oligonucleotide
cuugucuccaacuguacac

SEQ ID NO: 2958190 - RNA, 19 nt, Artificial Sequence
  Description of Artificial Sequence: Synthetic oligonucleotide
ucaucauaaucacuuguuc

SEQ ID NO: 2958191 - RNA, 19 nt, Artificial Sequence
  Description of Artificial Sequence: Synthetic oligonucleotide
acuuguuccucugaagugg

SEQ ID NO: 2958192 - RNA, 19 nt, Artificial Sequence
  Description of Artificial Sequence: Synthetic oligonucleotide
acucauuuucgcaacauag

SEQ ID NO: 2958193 - RNA, 19 nt, Artificial Sequence
  Description of Artificial Sequence: Synthetic oligonucleotide
agucauaggagccuucugu

SEQ ID NO: 2958194 - RNA, 19 nt, Artificial Sequence
  Description of Artificial Sequence: Synthetic oligonucleotide
acuccaacaucacucugac

SEQ ID NO: 2958195 - RNA, 19 nt, Artificial Sequence
  Description of Artificial Sequence: Synthetic oligonucleotide
guaacauucuacuguggcc

SEQ ID NO: 2958196 - RNA, 19 nt, Artificial Sequence
  Description of Artificial Sequence: Synthetic oligonucleotide
gaauaauauucgcagcuga

SEQ ID NO: 2958197 - RNA, 19 nt, Artificial Sequence
  Description of Artificial Sequence: Synthetic oligonucleotide
uuggguuguaacauucuac

SEQ ID NO: 2958198 - RNA, 19 nt, Artificial Sequence
  Description of Artificial Sequence: Synthetic oligonucleotide
uucuacuguggccaguuca

SEQ ID NO: 2958199 - RNA, 19 nt, Artificial Sequence
  Description of Artificial Sequence: Synthetic oligonucleotide
augagcucauuuuggaaag

SEQ ID NO: 2958200 - RNA, 19 nt, Artificial Sequence
  Description of Artificial Sequence: Synthetic oligonucleotide
aguuggugaauaauauucg

SEQ ID NO: 2958201 - RNA, 19 nt, Artificial Sequence
  Description of Artificial Sequence: Synthetic oligonucleotide
uacagcuugucuccaacug

SEQ ID NO: 2958202 - RNA, 19 nt, Artificial Sequence
  Description of Artificial Sequence: Synthetic oligonucleotide
uccaccaacaacauagauu

SEQ ID NO: 2958203 - RNA, 19 nt, Artificial Sequence
  Description of Artificial Sequence: Synthetic oligonucleotide
ccugaaauauacauuagac

SEQ ID NO: 2958204 - RNA, 19 nt, Artificial Sequence
  Description of Artificial Sequence: Synthetic oligonucleotide
acacuguuccggcaugacc

SEQ ID NO: 2958205 - RNA, 19 nt, Artificial Sequence
  Description of Artificial Sequence: Synthetic oligonucleotide
ugaauaauauucgcagcug

SEQ ID NO: 2958206 - RNA, 19 nt, Artificial Sequence
  Description of Artificial Sequence: Synthetic oligonucleotide
aaacagcaacuccaacauc

SEQ ID NO: 2958207 - RNA, 19 nt, Artificial Sequence
  Description of Artificial Sequence: Synthetic oligonucleotide
ucuacuguggccaguucac

SEQ ID NO: 2958208 - RNA, 19 nt, Artificial Sequence
  Description of Artificial Sequence: Synthetic oligonucleotide
aagugguugccaccaauca

SEQ ID NO: 2958209 - RNA, 19 nt, Artificial Sequence
  Description of Artificial Sequence: Synthetic oligonucleotide
aaucacuuguuccucugaa

SEQ ID NO: 2958210 - RNA, 19 nt, Artificial Sequence
  Description of Artificial Sequence: Synthetic oligonucleotide
ugagaacaucaucauaauc

SEQ ID NO: 2958211 - RNA, 19 nt, Artificial Sequence
  Description of Artificial Sequence: Synthetic oligonucleotide
aguaauuccuccugaaaua

SEQ ID NO: 2958212 - RNA, 19 nt, Artificial Sequence
  Description of Artificial Sequence: Synthetic oligonucleotide
uuguaacauucuacugugg

SEQ ID NO: 2958213 - RNA, 19 nt, Artificial Sequence
  Description of Artificial Sequence: Synthetic oligonucleotide
accaacaacauagauuugu

SEQ ID NO: 2958214 - RNA, 19 nt, Artificial Sequence
  Description of Artificial Sequence: Synthetic oligonucleotide
aacauucuacuguggccag

SEQ ID NO: 2958215 - RNA, 19 nt, Artificial Sequence
  Description of Artificial Sequence: Synthetic oligonucleotide
ucacucugaccucucagca

SEQ ID NO: 2958216 - RNA, 19 nt, Artificial Sequence
  Description of Artificial Sequence: Synthetic oligonucleotide
ugaguaauuccuccugaaa

SEQ ID NO: 2958217 - RNA, 19 nt, Artificial Sequence
  Description of Artificial Sequence: Synthetic oligonucleotide
ucuguguccauuugucugu

SEQ ID NO: 2958218 - RNA, 19 nt, Artificial Sequence
  Description of Artificial Sequence: Synthetic oligonucleotide
acuguacacaugcagugca

SEQ ID NO: 2958219 - RNA, 19 nt, Artificial Sequence
  Description of Artificial Sequence: Synthetic oligonucleotide
caacuguacacaugcagug

SEQ ID NO: 2958220 - RNA, 19 nt, Artificial Sequence
  Description of Artificial Sequence: Synthetic oligonucleotide
uccauucguucauucuugg

SEQ ID NO: 2958221 - RNA, 19 nt, Artificial Sequence
  Description of Artificial Sequence: Synthetic oligonucleotide
uguuccucugaagugguug

SEQ ID NO: 2958222 - RNA, 19 nt, Artificial Sequence
  Description of Artificial Sequence: Synthetic oligonucleotide
uccacuggucaagaguugg

SEQ ID NO: 2958223 - RNA, 19 nt, Artificial Sequence
  Description of Artificial Sequence: Synthetic oligonucleotide
ucuguaucugggucaaaac

SEQ ID NO: 2958224 - RNA, 19 nt, Artificial Sequence
  Description of Artificial Sequence: Synthetic oligonucleotide
uucauucuuggguuguaac

SEQ ID NO: 2958225 - RNA, 19 nt, Artificial Sequence
  Description of Artificial Sequence: Synthetic oligonucleotide
aagaguuggugaauaauau

SEQ ID NO: 2958226 - RNA, 19 nt, Artificial Sequence
  Description of Artificial Sequence: Synthetic oligonucleotide
cauuuucgcaacauagcuc

SEQ ID NO: 2958227 - RNA, 19 nt, Artificial Sequence
  Description of Artificial Sequence: Synthetic oligonucleotide
acauagauuuguuuucaaa

SEQ ID NO: 2958228 - RNA, 19 nt, Artificial Sequence
  Description of Artificial Sequence: Synthetic oligonucleotide
aacauagauuuguuuucaa

SEQ ID NO: 2958229 - RNA, 19 nt, Artificial Sequence
  Description of Artificial Sequence: Synthetic oligonucleotide
aucacuuguuccucugaag

SEQ ID NO: 2958230 - RNA, 19 nt, Artificial Sequence
  Description of Artificial Sequence: Synthetic oligonucleotide
auaauauucgcagcugaga

SEQ ID NO: 2958231 - RNA, 19 nt, Artificial Sequence
  Description of Artificial Sequence: Synthetic oligonucleotide
gugggguucacucauuuuc

SEQ ID NO: 2958232 - RNA, 19 nt, Artificial Sequence
  Description of Artificial Sequence: Synthetic oligonucleotide
gacuguagucauaggagcc

SEQ ID NO: 2958233 - RNA, 19 nt, Artificial Sequence
  Description of Artificial Sequence: Synthetic oligonucleotide
auucguucauucuuggguu

SEQ ID NO: 2958234 - RNA, 19 nt, Artificial Sequence
  Description of Artificial Sequence: Synthetic oligonucleotide
uggccaguucaccagcugc

SEQ ID NO: 2958235 - RNA, 19 nt, Artificial Sequence
  Description of Artificial Sequence: Synthetic oligonucleotide
gugaauaauauucgcagcu

SEQ ID NO: 2958236 - RNA, 19 nt, Artificial Sequence
  Description of Artificial Sequence: Synthetic oligonucleotide
cacuguuccggcaugacca

SEQ ID NO: 2958237 - RNA, 19 nt, Artificial Sequence
  Description of Artificial Sequence: Synthetic oligonucleotide
acuggucaagaguugguga

SEQ ID NO: 2958238 - RNA, 19 nt, Artificial Sequence
  Description of Artificial Sequence: Synthetic oligonucleotide
caugagcucauuuuggaaa

SEQ ID NO: 2958239 - RNA, 19 nt, Artificial Sequence
  Description of Artificial Sequence: Synthetic oligonucleotide
ugccaccaaucacauacag

SEQ ID NO: 2958240 - RNA, 19 nt, Artificial Sequence
  Description of Artificial Sequence: Synthetic oligonucleotide
acuguggccaguucaccag

SEQ ID NO: 2958241 - RNA, 19 nt, Artificial Sequence
  Description of Artificial Sequence: Synthetic oligonucleotide
ggugaauaauauucgcagc

SEQ ID NO: 2958242 - RNA, 19 nt, Artificial Sequence
  Description of Artificial Sequence: Synthetic oligonucleotide
cucauuuuggaaaguguca

SEQ ID NO: 2958243 - RNA, 19 nt, Artificial Sequence
  Description of Artificial Sequence: Synthetic oligonucleotide
uaaucacuuguuccucuga

SEQ ID NO: 2958244 - RNA, 19 nt, Artificial Sequence
  Description of Artificial Sequence: Synthetic oligonucleotide
gaguaauuccuccugaaau

SEQ ID NO: 2958245 - RNA, 19 nt, Artificial Sequence
  Description of Artificial Sequence: Synthetic oligonucleotide
ugcagugcaggccucggac

SEQ ID NO: 2958246 - RNA, 19 nt, Artificial Sequence
  Description of Artificial Sequence: Synthetic oligonucleotide
agcauagcagcaauuggag

SEQ ID NO: 2958247 - RNA, 19 nt, Artificial Sequence
  Description of Artificial Sequence: Synthetic oligonucleotide
cucagcauagcagcaauug

SEQ ID NO: 2958248 - RNA, 19 nt, Artificial Sequence
  Description of Artificial Sequence: Synthetic oligonucleotide
ucuuggguuguaacauucu

SEQ ID NO: 2958249 - RNA, 19 nt, Artificial Sequence
  Description of Artificial Sequence: Synthetic oligonucleotide
uacuguggccaguucacca

SEQ ID NO: 2958250 - RNA, 19 nt, Artificial Sequence
  Description of Artificial Sequence: Synthetic oligonucleotide
cuguaucugggucaaaaca

SEQ ID NO: 2958251 - RNA, 19 nt, Artificial Sequence
  Description of Artificial Sequence: Synthetic oligonucleotide
uggaaagugucaugaguaa

SEQ ID NO: 2958252 - RNA, 19 nt, Artificial Sequence
  Description of Artificial Sequence: Synthetic oligonucleotide
acacaugagcucauuuugg

SEQ ID NO: 2958253 - RNA, 19 nt, Artificial Sequence
  Description of Artificial Sequence: Synthetic oligonucleotide
cauuuuggaaagugucaug

SEQ ID NO: 2958254 - RNA, 19 nt, Artificial Sequence
  Description of Artificial Sequence: Synthetic oligonucleotide
acagcuugucuccaacugu

SEQ ID NO: 2958255 - RNA, 19 nt, Artificial Sequence
  Description of Artificial Sequence: Synthetic oligonucleotide
uaucugggucaaaacacau

SEQ ID NO: 2958256 - RNA, 19 nt, Artificial Sequence
  Description of Artificial Sequence: Synthetic oligonucleotide
cuccauucguucauucuug

SEQ ID NO: 2958257 - RNA, 19 nt, Artificial Sequence
  Description of Artificial Sequence: Synthetic oligonucleotide
ucaagaguuggugaauaau

SEQ ID NO: 2958258 - RNA, 19 nt, Artificial Sequence
  Description of Artificial Sequence: Synthetic oligonucleotide
guuccucugaagugguugc

SEQ ID NO: 2958259 - RNA, 19 nt, Artificial Sequence
  Description of Artificial Sequence: Synthetic oligonucleotide
ggacuguagucauaggagc

SEQ ID NO: 2958260 - RNA, 19 nt, Artificial Sequence
  Description of Artificial Sequence: Synthetic oligonucleotide
uucguucauucuuggguug

SEQ ID NO: 2958261 - RNA, 19 nt, Artificial Sequence
  Description of Artificial Sequence: Synthetic oligonucleotide
cagcauagcagcaauugga

SEQ ID NO: 2958262 - RNA, 19 nt, Artificial Sequence
  Description of Artificial Sequence: Synthetic oligonucleotide
agaguuggugaauaauauu

SEQ ID NO: 2958263 - RNA, 19 nt, Artificial Sequence
  Description of Artificial Sequence: Synthetic oligonucleotide
cauacagcuugucuccaac

SEQ ID NO: 2958264 - RNA, 19 nt, Artificial Sequence
  Description of Artificial Sequence: Synthetic oligonucleotide
ccauuugucuguaucuggg

SEQ ID NO: 2958265 - RNA, 19 nt, Artificial Sequence
  Description of Artificial Sequence: Synthetic oligonucleotide
cacuuguuccucugaagug

SEQ ID NO: 2958266 - RNA, 19 nt, Artificial Sequence
  Description of Artificial Sequence: Synthetic oligonucleotide
ugaagugguugccaccaau

SEQ ID NO: 2958267 - RNA, 19 nt, Artificial Sequence
  Description of Artificial Sequence: Synthetic oligonucleotide
uuccggcaugaccauagug

SEQ ID NO: 2958268 - RNA, 19 nt, Artificial Sequence
  Description of Artificial Sequence: Synthetic oligonucleotide
acauagcuccauucguuca

SEQ ID NO: 2958269 - RNA, 19 nt, Artificial Sequence
  Description of Artificial Sequence: Synthetic oligonucleotide
gguuguaacauucuacugu

SEQ ID NO: 2958270 - RNA, 19 nt, Artificial Sequence
  Description of Artificial Sequence: Synthetic oligonucleotide
gagcucauuuuggaaagug

SEQ ID NO: 2958271 - RNA, 19 nt, Artificial Sequence
  Description of Artificial Sequence: Synthetic oligonucleotide
gcugagaacaucaucauaa

SEQ ID NO: 2958272 - RNA, 19 nt, Artificial Sequence
  Description of Artificial Sequence: Synthetic oligonucleotide
cuccugaaauauacauuag

SEQ ID NO: 2958273 - RNA, 19 nt, Artificial Sequence
  Description of Artificial Sequence: Synthetic oligonucleotide
acucugaccucucagcaua

SEQ ID NO: 2958274 - RNA, 19 nt, Artificial Sequence
  Description of Artificial Sequence: Synthetic oligonucleotide
auacagcuugucuccaacu

SEQ ID NO: 2958275 - RNA, 19 nt, Artificial Sequence
  Description of Artificial Sequence: Synthetic oligonucleotide
uugucuccaacuguacaca

SEQ ID NO: 2958276 - RNA, 19 nt, Artificial Sequence
  Description of Artificial Sequence: Synthetic oligonucleotide
gaagugguugccaccaauc

SEQ ID NO: 2958277 - RNA, 19 nt, Artificial Sequence
  Description of Artificial Sequence: Synthetic oligonucleotide
cagcaauuggaguccacug

SEQ ID NO: 2958278 - RNA, 19 nt, Artificial Sequence
  Description of Artificial Sequence: Synthetic oligonucleotide
ucauaaucacuuguuccuc

SEQ ID NO: 2958279 - RNA, 19 nt, Artificial Sequence
  Description of Artificial Sequence: Synthetic oligonucleotide
caucacucugaccucucag

SEQ ID NO: 2958280 - RNA, 19 nt, Artificial Sequence
  Description of Artificial Sequence: Synthetic oligonucleotide
uagucauaggagccuucug

SEQ ID NO: 2958281 - RNA, 19 nt, Artificial Sequence
  Description of Artificial Sequence: Synthetic oligonucleotide
gcagcugagaacaucauca

SEQ ID NO: 2958282 - RNA, 19 nt, Artificial Sequence
  Description of Artificial Sequence: Synthetic oligonucleotide
cauucguucauucuugggu

SEQ ID NO: 2958283 - RNA, 19 nt, Artificial Sequence
  Description of Artificial Sequence: Synthetic oligonucleotide
augaguaauuccuccugaa

SEQ ID NO: 2958284 - RNA, 19 nt, Artificial Sequence
  Description of Artificial Sequence: Synthetic oligonucleotide
uuggaguccacuggucaag

SEQ ID NO: 2958285 - RNA, 19 nt, Artificial Sequence
  Description of Artificial Sequence: Synthetic oligonucleotide
guucacucauuuucgcaac

SEQ ID NO: 2958286 - RNA, 19 nt, Artificial Sequence
  Description of Artificial Sequence: Synthetic oligonucleotide
auuggaguccacuggucaa

SEQ ID NO: 2958287 - RNA, 19 nt, Artificial Sequence
  Description of Artificial Sequence: Synthetic oligonucleotide
ggucaaaacacaugagcuc

SEQ ID NO: 2958288 - RNA, 19 nt, Artificial Sequence
  Description of Artificial Sequence: Synthetic oligonucleotide
acaugagcucauuuuggaa

SEQ ID NO: 2958289 - RNA, 19 nt, Artificial Sequence
  Description of Artificial Sequence: Synthetic oligonucleotide
gugguugccaccaaucaca

SEQ ID NO: 2958290 - RNA, 19 nt, Artificial Sequence
  Description of Artificial Sequence: Synthetic oligonucleotide
guguccauuugucuguauc

SEQ ID NO: 2958291 - RNA, 19 nt, Artificial Sequence
  Description of Artificial Sequence: Synthetic oligonucleotide
acuguagucauaggagccu

SEQ ID NO: 2958292 - RNA, 19 nt, Artificial Sequence
  Description of Artificial Sequence: Synthetic oligonucleotide
cugggucaaaacacaugag

SEQ ID NO: 2958293 - RNA, 19 nt, Artificial Sequence
  Description of Artificial Sequence: Synthetic oligonucleotide
caugaguaauuccuccuga

SEQ ID NO: 2958294 - RNA, 19 nt, Artificial Sequence
  Description of Artificial Sequence: Synthetic oligonucleotide
aacaucacucugaccucuc

SEQ ID NO: 2958295 - RNA, 19 nt, Artificial Sequence
  Description of Artificial Sequence: Synthetic oligonucleotide
uaauuccuccugaaauaua

SEQ ID NO: 2958296 - RNA, 19 nt, Artificial Sequence
  Description of Artificial Sequence: Synthetic oligonucleotide
aucaucauaaucacuuguu

SEQ ID NO: 2958297 - RNA, 19 nt, Artificial Sequence
  Description of Artificial Sequence: Synthetic oligonucleotide
cucugaagugguugccacc

SEQ ID NO: 2958298 - RNA, 19 nt, Artificial Sequence
  Description of Artificial Sequence: Synthetic oligonucleotide
uguagucauaggagccuuc

SEQ ID NO: 2958299 - RNA, 19 nt, Artificial Sequence
  Description of Artificial Sequence: Synthetic oligonucleotide
ccaccaaucacauacagcu

SEQ ID NO: 2958300 - RNA, 19 nt, Artificial Sequence
  Description of Artificial Sequence: Synthetic oligonucleotide
cacaugagcucauuuugga

SEQ ID NO: 2958301 - RNA, 19 nt, Artificial Sequence
  Description of Artificial Sequence: Synthetic oligonucleotide
auucgcagcugagaacauc

SEQ ID NO: 2958302 - RNA, 19 nt, Artificial Sequence
  Description of Artificial Sequence: Synthetic oligonucleotide
uucgcaacauagcuccauu

SEQ ID NO: 2958303 - RNA, 19 nt, Artificial Sequence
  Description of Artificial Sequence: Synthetic oligonucleotide
gguucacucauuuucgcaa

SEQ ID NO: 2958304 - RNA, 19 nt, Artificial Sequence
  Description of Artificial Sequence: Synthetic oligonucleotide
aguccacuggucaagaguu

SEQ ID NO: 2958305 - RNA, 19 nt, Artificial Sequence
  Description of Artificial Sequence: Synthetic oligonucleotide
cauacacuguuccggcaug

SEQ ID NO: 2958306 - RNA, 19 nt, Artificial Sequence
  Description of Artificial Sequence: Synthetic oligonucleotide
ccaagaauauccaccaaca

SEQ ID NO: 2958307 - RNA, 19 nt, Artificial Sequence
  Description of Artificial Sequence: Synthetic oligonucleotide
uugccaccaaucacauaca

SEQ ID NO: 2958308 - RNA, 19 nt, Artificial Sequence
  Description of Artificial Sequence: Synthetic oligonucleotide
uuuucgcaacauagcucca

SEQ ID NO: 2958309 - RNA, 19 nt, Artificial Sequence
  Description of Artificial Sequence: Synthetic oligonucleotide
ucgcaacauagcuccauuc

SEQ ID NO: 2958310 - RNA, 19 nt, Artificial Sequence
  Description of Artificial Sequence: Synthetic oligonucleotide
uccucugaagugguugcca

SEQ ID NO: 2958311 - RNA, 19 nt, Artificial Sequence
  Description of Artificial Sequence: Synthetic oligonucleotide
ugucuccaacuguacacau

SEQ ID NO: 2958312 - RNA, 19 nt, Artificial Sequence
  Description of Artificial Sequence: Synthetic oligonucleotide
caacauagauuuguuuuca

SEQ ID NO: 2958313 - RNA, 19 nt, Artificial Sequence
  Description of Artificial Sequence: Synthetic oligonucleotide
augaccauagugggguuca

SEQ ID NO: 2958314 - RNA, 19 nt, Artificial Sequence
  Description of Artificial Sequence: Synthetic oligonucleotide
gaaagugucaugaguaauu

SEQ ID NO: 2958315 - RNA, 19 nt, Artificial Sequence
  Description of Artificial Sequence: Synthetic oligonucleotide
caauuggaguccacugguc

SEQ ID NO: 2958316 - RNA, 19 nt, Artificial Sequence
  Description of Artificial Sequence: Synthetic oligonucleotide
auucuuggguuguaacauu

SEQ ID NO: 2958317 - RNA, 19 nt, Artificial Sequence
  Description of Artificial Sequence: Synthetic oligonucleotide
agcucauuuuggaaagugu

SEQ ID NO: 2958318 - RNA, 19 nt, Artificial Sequence
  Description of Artificial Sequence: Synthetic oligonucleotide
gaguccacuggucaagagu

SEQ ID NO: 2958319 - RNA, 19 nt, Artificial Sequence
  Description of Artificial Sequence: Synthetic oligonucleotide
uagugggguucacucauuu

SEQ ID NO: 2958320 - RNA, 19 nt, Artificial Sequence
  Description of Artificial Sequence: Synthetic oligonucleotide
cugaccucucagcauagca

SEQ ID NO: 2958321 - RNA, 19 nt, Artificial Sequence
  Description of Artificial Sequence: Synthetic oligonucleotide
ggguuguaacauucuacug

SEQ ID NO: 2958322 - RNA, 19 nt, Artificial Sequence
  Description of Artificial Sequence: Synthetic oligonucleotide
uuucgcaacauagcuccau

SEQ ID NO: 2958323 - RNA, 19 nt, Artificial Sequence
  Description of Artificial Sequence: Synthetic oligonucleotide
cgcaacauagcuccauucg

SEQ ID NO: 2958324 - RNA, 19 nt, Artificial Sequence
  Description of Artificial Sequence: Synthetic oligonucleotide
ugguugccaccaaucacau

SEQ ID NO: 2958325 - RNA, 19 nt, Artificial Sequence
  Description of Artificial Sequence: Synthetic oligonucleotide
ucacucauuuucgcaacau

SEQ ID NO: 2958326 - RNA, 19 nt, Artificial Sequence
  Description of Artificial Sequence: Synthetic oligonucleotide
ccggcaugaccauaguggg

SEQ ID NO: 2958327 - RNA, 19 nt, Artificial Sequence
  Description of Artificial Sequence: Synthetic oligonucleotide
cacuggucaagaguuggug

SEQ ID NO: 2958328 - RNA, 19 nt, Artificial Sequence
  Description of Artificial Sequence: Synthetic oligonucleotide
agcugagaacaucaucaua

SEQ ID NO: 2958329 - RNA, 19 nt, Artificial Sequence
  Description of Artificial Sequence: Synthetic oligonucleotide
uugucuguaucugggucaa

SEQ ID NO: 2958330 - RNA, 19 nt, Artificial Sequence
  Description of Artificial Sequence: Synthetic oligonucleotide
caggccucggacuguaguc

SEQ ID NO: 2958331 - RNA, 19 nt, Artificial Sequence
  Description of Artificial Sequence: Synthetic oligonucleotide
aucugggucaaaacacaug

SEQ ID NO: 2958332 - RNA, 19 nt, Artificial Sequence
  Description of Artificial Sequence: Synthetic oligonucleotide
cggacuguagucauaggag

SEQ ID NO: 2958333 - RNA, 19 nt, Artificial Sequence
  Description of Artificial Sequence: Synthetic oligonucleotide
acaucacucugaccucuca

SEQ ID NO: 2958334 - RNA, 19 nt, Artificial Sequence
  Description of Artificial Sequence: Synthetic oligonucleotide
agcuugucuccaacuguac

SEQ ID NO: 2958335 - RNA, 19 nt, Artificial Sequence
  Description of Artificial Sequence: Synthetic oligonucleotide
ucucagcauagcagcaauu

SEQ ID NO: 2958336 - RNA, 19 nt, Artificial Sequence
  Description of Artificial Sequence: Synthetic oligonucleotide
ucguucauucuuggguugu

SEQ ID NO: 2958337 - RNA, 19 nt, Artificial Sequence
  Description of Artificial Sequence: Synthetic oligonucleotide
acaugcagugcaggccucg

SEQ ID NO: 2958338 - RNA, 19 nt, Artificial Sequence
  Description of Artificial Sequence: Synthetic oligonucleotide
ccuucuguguccauuuguc

SEQ ID NO: 2958339 - RNA, 19 nt, Artificial Sequence
  Description of Artificial Sequence: Synthetic oligonucleotide
cagugcaggccucggacug

SEQ ID NO: 2958340 - RNA, 19 nt, Artificial Sequence
  Description of Artificial Sequence: Synthetic oligonucleotide
caucaucauaaucacuugu

SEQ ID NO: 2958341 - RNA, 19 nt, Artificial Sequence
  Description of Artificial Sequence: Synthetic oligonucleotide
cuguggccaguucaccagc

SEQ ID NO: 2958342 - RNA, 19 nt, Artificial Sequence
  Description of Artificial Sequence: Synthetic oligonucleotide
cucugaccucucagcauag

SEQ ID NO: 2958343 - RNA, 19 nt, Artificial Sequence
  Description of Artificial Sequence: Synthetic oligonucleotide
gucuguaucugggucaaaa

SEQ ID NO: 2958344 - RNA, 19 nt, Artificial Sequence
  Description of Artificial Sequence: Synthetic oligonucleotide
cuuggguuguaacauucua

SEQ ID NO: 2958345 - RNA, 19 nt, Artificial Sequence
  Description of Artificial Sequence: Synthetic oligonucleotide
uuccucugaagugguugcc

SEQ ID NO: 2958346 - RNA, 19 nt, Artificial Sequence
  Description of Artificial Sequence: Synthetic oligonucleotide
cauaaucacuuguuccucu

SEQ ID NO: 2958347 - RNA, 19 nt, Artificial Sequence
  Description of Artificial Sequence: Synthetic oligonucleotide
acauacagcuugucuccaa

SEQ ID NO: 2958348 - RNA, 19 nt, Artificial Sequence
  Description of Artificial Sequence: Synthetic oligonucleotide
ugagcucauuuuggaaagu

SEQ ID NO: 2958349 - RNA, 19 nt, Artificial Sequence
  Description of Artificial Sequence: Synthetic oligonucleotide
cucggacuguagucauagg

SEQ ID NO: 2958350 - RNA, 19 nt, Artificial Sequence
  Description of Artificial Sequence: Synthetic oligonucleotide
gucaagaguuggugaauaa

SEQ ID NO: 2958351 - RNA, 19 nt, Artificial Sequence
  Description of Artificial Sequence: Synthetic oligonucleotide
uauucgcagcugagaacau

SEQ ID NO: 2958352 - RNA, 19 nt, Artificial Sequence
  Description of Artificial Sequence: Synthetic oligonucleotide
ucugaccucucagcauagc

SEQ ID NO: 2958353 - RNA, 19 nt, Artificial Sequence
  Description of Artificial Sequence: Synthetic oligonucleotide
caacuccaacaucacucug

SEQ ID NO: 2958354 - RNA, 19 nt, Artificial Sequence
  Description of Artificial Sequence: Synthetic oligonucleotide
uggaguccacuggucaaga

SEQ ID NO: 2958355 - RNA, 19 nt, Artificial Sequence
  Description of Artificial Sequence: Synthetic oligonucleotide
cuacuguggccaguucacc

SEQ ID NO: 2958356 - RNA, 19 nt, Artificial Sequence
  Description of Artificial Sequence: Synthetic oligonucleotide
guaauuccuccugaaauau

SEQ ID NO: 2958357 - RNA, 19 nt, Artificial Sequence
  Description of Artificial Sequence: Synthetic oligonucleotide
cuccaacaucacucugacc

SEQ ID NO: 2958358 - RNA, 19 nt, Artificial Sequence
  Description of Artificial Sequence: Synthetic oligonucleotide
ccauucguucauucuuggg

SEQ ID NO: 2958359 - RNA, 19 nt, Artificial Sequence
  Description of Artificial Sequence: Synthetic oligonucleotide
agugggguucacucauuuu

SEQ ID NO: 2958360 - RNA, 19 nt, Artificial Sequence
  Description of Artificial Sequence: Synthetic oligonucleotide
caugaccauagugggguuc

SEQ ID NO: 2958361 - RNA, 19 nt, Artificial Sequence
  Description of Artificial Sequence: Synthetic oligonucleotide
caugcagugcaggccucgg

SEQ ID NO: 2958362 - RNA, 19 nt, Artificial Sequence
  Description of Artificial Sequence: Synthetic oligonucleotide
gucuccaacuguacacaug

SEQ ID NO: 2958363 - RNA, 19 nt, Artificial Sequence
  Description of Artificial Sequence: Synthetic oligonucleotide
uacacuguuccggcaugac

SEQ ID NO: 2958364 - RNA, 19 nt, Artificial Sequence
  Description of Artificial Sequence: Synthetic oligonucleotide
auacacuguuccggcauga

SEQ ID NO: 2958365 - RNA, 19 nt, Artificial Sequence
  Description of Artificial Sequence: Synthetic oligonucleotide
agccuucuguguccauuug

SEQ ID NO: 2958366 - RNA, 19 nt, Artificial Sequence
  Description of Artificial Sequence: Synthetic oligonucleotide
acuguuccggcaugaccau

SEQ ID NO: 2958367 - RNA, 19 nt, Artificial Sequence
  Description of Artificial Sequence: Synthetic oligonucleotide
uggucaagaguuggugaau

SEQ ID NO: 2958368 - RNA, 19 nt, Artificial Sequence
  Description of Artificial Sequence: Synthetic oligonucleotide
gggguucacucauuuucgc

SEQ ID NO: 2958369 - RNA, 19 nt, Artificial Sequence
  Description of Artificial Sequence: Synthetic oligonucleotide
cauucuuggguuguaacau

SEQ ID NO: 2958370 - RNA, 19 nt, Artificial Sequence
  Description of Artificial Sequence: Synthetic oligonucleotide
cauagugggguucacucau

SEQ ID NO: 2958371 - RNA, 19 nt, Artificial Sequence
  Description of Artificial Sequence: Synthetic oligonucleotide
cagcuugucuccaacugua

SEQ ID NO: 2958372 - RNA, 19 nt, Artificial Sequence
  Description of Artificial Sequence: Synthetic oligonucleotide
ggguucacucauuuucgca

SEQ ID NO: 2958373 - RNA, 19 nt, Artificial Sequence
  Description of Artificial Sequence: Synthetic oligonucleotide
gcuugucuccaacuguaca

SEQ ID NO: 2958374 - RNA, 19 nt, Artificial Sequence
  Description of Artificial Sequence: Synthetic oligonucleotide
gaacaucaucauaaucacu

SEQ ID NO: 2958375 - RNA, 19 nt, Artificial Sequence
  Description of Artificial Sequence: Synthetic oligonucleotide
caaucacauacagcuuguc

SEQ ID NO: 2958376 - RNA, 19 nt, Artificial Sequence
  Description of Artificial Sequence: Synthetic oligonucleotide
uguguccauuugucuguau

SEQ ID NO: 2958377 - RNA, 19 nt, Artificial Sequence
  Description of Artificial Sequence: Synthetic oligonucleotide
aggccucggacuguaguca

SEQ ID NO: 2958378 - RNA, 19 nt, Artificial Sequence
  Description of Artificial Sequence: Synthetic oligonucleotide
ccucggacuguagucauag

SEQ ID NO: 2958379 - RNA, 19 nt, Artificial Sequence
  Description of Artificial Sequence: Synthetic oligonucleotide
gcaauuggaguccacuggu

SEQ ID NO: 2958380 - RNA, 19 nt, Artificial Sequence
  Description of Artificial Sequence: Synthetic oligonucleotide
caccaacaacauagauuug

SEQ ID NO: 2958381 - RNA, 19 nt, Artificial Sequence
  Description of Artificial Sequence: Synthetic oligonucleotide
cauuugucuguaucugggu

SEQ ID NO: 2958382 - RNA, 19 nt, Artificial Sequence
  Description of Artificial Sequence: Synthetic oligonucleotide
ggaguccacuggucaagag

SEQ ID NO: 2958383 - RNA, 19 nt, Artificial Sequence
  Description of Artificial Sequence: Synthetic oligonucleotide
cuucuguguccauuugucu

SEQ ID NO: 2958384 - RNA, 19 nt, Artificial Sequence
  Description of Artificial Sequence: Synthetic oligonucleotide
ggcaugaccauaguggggu

SEQ ID NO: 2958385 - RNA, 19 nt, Artificial Sequence
  Description of Artificial Sequence: Synthetic oligonucleotide
agcagcaauuggaguccac

SEQ ID NO: 2958386 - RNA, 19 nt, Artificial Sequence
  Description of Artificial Sequence: Synthetic oligonucleotide
ucgcagcugagaacaucau

SEQ ID NO: 2958387 - RNA, 19 nt, Artificial Sequence
  Description of Artificial Sequence: Synthetic oligonucleotide
gaauauccaccaacaacau

SEQ ID NO: 2958388 - RNA, 19 nt, Artificial Sequence
  Description of Artificial Sequence: Synthetic oligonucleotide
ugcaggccucggacuguag

SEQ ID NO: 2958389 - RNA, 19 nt, Artificial Sequence
  Description of Artificial Sequence: Synthetic oligonucleotide
guagucauaggagccuucu

SEQ ID NO: 2958390 - RNA, 19 nt, Artificial Sequence
  Description of Artificial Sequence: Synthetic oligonucleotide
augcagugcaggccucgga

SEQ ID NO: 2958391 - RNA, 19 nt, Artificial Sequence
  Description of Artificial Sequence: Synthetic oligonucleotide
guucauucuuggguuguaa

SEQ ID NO: 2958392 - RNA, 19 nt, Artificial Sequence
  Description of Artificial Sequence: Synthetic oligonucleotide
gcaacauagcuccauucgu

SEQ ID NO: 2958393 - RNA, 19 nt, Artificial Sequence
  Description of Artificial Sequence: Synthetic oligonucleotide
cuuguuccucugaaguggu

SEQ ID NO: 2958394 - RNA, 19 nt, Artificial Sequence
  Description of Artificial Sequence: Synthetic oligonucleotide
ccucugaagugguugccac

SEQ ID NO: 2958395 - RNA, 19 nt, Artificial Sequence
  Description of Artificial Sequence: Synthetic oligonucleotide
ccccauacacuguuccggc

SEQ ID NO: 2958396 - RNA, 19 nt, Artificial Sequence
  Description of Artificial Sequence: Synthetic oligonucleotide
uagcagcaauuggagucca

SEQ ID NO: 2958397 - RNA, 19 nt, Artificial Sequence
  Description of Artificial Sequence: Synthetic oligonucleotide
gccaccaaucacauacagc

SEQ ID NO: 2958398 - RNA, 19 nt, Artificial Sequence
  Description of Artificial Sequence: Synthetic oligonucleotide
caacauagcuccauucguu

SEQ ID NO: 2958399 - RNA, 19 nt, Artificial Sequence
  Description of Artificial Sequence: Synthetic oligonucleotide
cacucauuuucgcaacaua

SEQ ID NO: 2958400 - RNA, 19 nt, Artificial Sequence
  Description of Artificial Sequence: Synthetic oligonucleotide
ccaacuguacacaugcagu

SEQ ID NO: 2958401 - RNA, 19 nt, Artificial Sequence
  Description of Artificial Sequence: Synthetic oligonucleotide
uuguuccucugaagugguu

SEQ ID NO: 2958402 - RNA, 19 nt, Artificial Sequence
  Description of Artificial Sequence: Synthetic oligonucleotide
acauucuacuguggccagu

SEQ ID NO: 2958403 - RNA, 19 nt, Artificial Sequence
  Description of Artificial Sequence: Synthetic oligonucleotide
auagcuccauucguucauu

SEQ ID NO: 2958404 - RNA, 19 nt, Artificial Sequence
  Description of Artificial Sequence: Synthetic oligonucleotide
gcaacuccaacaucacucu

SEQ ID NO: 2958405 - RNA, 19 nt, Artificial Sequence
  Description of Artificial Sequence: Synthetic oligonucleotide
cauagcuccauucguucau

SEQ ID NO: 2958406 - RNA, 19 nt, Artificial Sequence
  Description of Artificial Sequence: Synthetic oligonucleotide
cugagaacaucaucauaau

SEQ ID NO: 2958407 - RNA, 19 nt, Artificial Sequence
  Description of Artificial Sequence: Synthetic oligonucleotide
ccaacaucacucugaccuc

SEQ ID NO: 2958408 - RNA, 19 nt, Artificial Sequence
  Description of Artificial Sequence: Synthetic oligonucleotide
accucucagcauagcagca

SEQ ID NO: 2958409 - RNA, 19 nt, Artificial Sequence
  Description of Artificial Sequence: Synthetic oligonucleotide
gagccuucuguguccauuu

SEQ ID NO: 2958410 - RNA, 19 nt, Artificial Sequence
  Description of Artificial Sequence: Synthetic oligonucleotide
cuccaacuguacacaugca

SEQ ID NO: 2958411 - RNA, 19 nt, Artificial Sequence
  Description of Artificial Sequence: Synthetic oligonucleotide
guccacuggucaagaguug

SEQ ID NO: 2958412 - RNA, 19 nt, Artificial Sequence
  Description of Artificial Sequence: Synthetic oligonucleotide
agugcaggccucggacugu

SEQ ID NO: 2958413 - RNA, 19 nt, Artificial Sequence
  Description of Artificial Sequence: Synthetic oligonucleotide
ggucaagaguuggugaaua

SEQ ID NO: 2958414 - RNA, 19 nt, Artificial Sequence
  Description of Artificial Sequence: Synthetic oligonucleotide
ugaccauagugggguucac

SEQ ID NO: 2958415 - RNA, 19 nt, Artificial Sequence
  Description of Artificial Sequence: Synthetic oligonucleotide
gcuccauucguucauucuu

SEQ ID NO: 2958416 - RNA, 19 nt, Artificial Sequence
  Description of Artificial Sequence: Synthetic oligonucleotide
gaccauagugggguucacu

SEQ ID NO: 2958417 - RNA, 19 nt, Artificial Sequence
  Description of Artificial Sequence: Synthetic oligonucleotide
ccauagugggguucacuca

SEQ ID NO: 2958418 - RNA, 19 nt, Artificial Sequence
  Description of Artificial Sequence: Synthetic oligonucleotide
cucucagcauagcagcaau

SEQ ID NO: 2958419 - RNA, 19 nt, Artificial Sequence
  Description of Artificial Sequence: Synthetic oligonucleotide
caacaucacucugaccucu

SEQ ID NO: 2958420 - RNA, 19 nt, Artificial Sequence
  Description of Artificial Sequence: Synthetic oligonucleotide
gcauagcagcaauuggagu

SEQ ID NO: 2958421 - RNA, 19 nt, Artificial Sequence
  Description of Artificial Sequence: Synthetic oligonucleotide
ggaaagugucaugaguaau

SEQ ID NO: 2958422 - RNA, 19 nt, Artificial Sequence
  Description of Artificial Sequence: Synthetic oligonucleotide
cauucuacuguggccaguu

SEQ ID NO: 2958423 - RNA, 19 nt, Artificial Sequence
  Description of Artificial Sequence: Synthetic oligonucleotide
gcagcaauuggaguccacu

SEQ ID NO: 2958424 - RNA, 19 nt, Artificial Sequence
  Description of Artificial Sequence: Synthetic oligonucleotide
auagugggguucacucauu

SEQ ID NO: 2958425 - RNA, 19 nt, Artificial Sequence
  Description of Artificial Sequence: Synthetic oligonucleotide
cagcugagaacaucaucau

SEQ ID NO: 2958426 - RNA, 19 nt, Artificial Sequence
  Description of Artificial Sequence: Synthetic oligonucleotide
cggcaugaccauagugggg

SEQ ID NO: 2958427 - RNA, 19 nt, Artificial Sequence
  Description of Artificial Sequence: Synthetic oligonucleotide
ugucuguaucugggucaaa

SEQ ID NO: 2958428 - RNA, 19 nt, Artificial Sequence
  Description of Artificial Sequence: Synthetic oligonucleotide
cagcaacuccaacaucacu

SEQ ID NO: 2958429 - RNA, 19 nt, Artificial Sequence
  Description of Artificial Sequence: Synthetic oligonucleotide
gccuucuguguccauuugu

SEQ ID NO: 2958430 - RNA, 19 nt, Artificial Sequence
  Description of Artificial Sequence: Synthetic oligonucleotide
guuccggcaugaccauagu

SEQ ID NO: 2958431 - RNA, 19 nt, Artificial Sequence
  Description of Artificial Sequence: Synthetic oligonucleotide
gcaggccucggacuguagu

SEQ ID NO: 2958432 - RNA, 19 nt, Artificial Sequence
  Description of Artificial Sequence: Synthetic oligonucleotide
cccauacacuguuccggca

SEQ ID NO: 2958433 - RNA, 19 nt, Artificial Sequence
  Description of Artificial Sequence: Synthetic oligonucleotide
cuguguccauuugucugua

SEQ ID NO: 2958434 - RNA, 19 nt, Artificial Sequence
  Description of Artificial Sequence: Synthetic oligonucleotide
ccauacacuguuccggcau

SEQ ID NO: 2958435 - RNA, 19 nt, Artificial Sequence
  Description of Artificial Sequence: Synthetic oligonucleotide
cuguagucauaggagccuu

SEQ ID NO: 2958436 - RNA, 19 nt, Artificial Sequence
  Description of Artificial Sequence: Synthetic oligonucleotide
gguugccaccaaucacaua

SEQ ID NO: 2958437 - RNA, 19 nt, Artificial Sequence
  Description of Artificial Sequence: Synthetic oligonucleotide
gugcaggccucggacugua

SEQ ID NO: 2958438 - RNA, 19 nt, Artificial Sequence
  Description of Artificial Sequence: Synthetic oligonucleotide
ggagccuucuguguccauu

SEQ ID NO: 2958439 - RNA, 19 nt, Artificial Sequence
  Description of Artificial Sequence: Synthetic oligonucleotide
cuguuccggcaugaccaua

SEQ ID NO: 2958440 - RNA, 19 nt, Artificial Sequence
  Description of Artificial Sequence: Synthetic oligonucleotide
ccacuggucaagaguuggu

SEQ ID NO: 2958441 - RNA, 19 nt, Artificial Sequence
  Description of Artificial Sequence: Synthetic oligonucleotide
ggccucggacuguagucau

SEQ ID NO: 2958442 - RNA, 19 nt, Artificial Sequence
  Description of Artificial Sequence: Synthetic oligonucleotide
gcaugaccauagugggguu

SEQ ID NO: 2958443 - RNA, 19 nt, Artificial Sequence
  Description of Artificial Sequence: Synthetic oligonucleotide
gccucggacuguagucaua

SEQ ID NO: 2958444 - RNA, 19 nt, Artificial Sequence
  Description of Artificial Sequence: Synthetic oligonucleotide
cguucauucuuggguugua

SEQ ID NO: 2958445 - RNA, 19 nt, Artificial Sequence
  Description of Artificial Sequence: Synthetic oligonucleotide
uuaugaaugaccucgaugg

SEQ ID NO: 2958446 - RNA, 19 nt, Artificial Sequence
  Description of Artificial Sequence: Synthetic oligonucleotide
ucugcagauacauggaugg

SEQ ID NO: 2958447 - RNA, 19 nt, Artificial Sequence
  Description of Artificial Sequence: Synthetic oligonucleotide
aaucggacacuguugcggc

SEQ ID NO: 2958448 - RNA, 19 nt, Artificial Sequence
  Description of Artificial Sequence: Synthetic oligonucleotide
gagcuuaugaaugaccucg

SEQ ID NO: 2958449 - RNA, 19 nt, Artificial Sequence
  Description of Artificial Sequence: Synthetic oligonucleotide
aggaaucggacacuguugc

SEQ ID NO: 2958450 - RNA, 19 nt, Artificial Sequence
  Description of Artificial Sequence: Synthetic oligonucleotide
uguucuuugagcccugggc

SEQ ID NO: 2958451 - RNA, 19 nt, Artificial Sequence
  Description of Artificial Sequence: Synthetic oligonucleotide
ucuaaucagccucugggcc

SEQ ID NO: 2958452 - RNA, 19 nt, Artificial Sequence
  Description of Artificial Sequence: Synthetic oligonucleotide
ugugcagcgaugcaggaug

SEQ ID NO: 2958453 - RNA, 19 nt, Artificial Sequence
  Description of Artificial Sequence: Synthetic oligonucleotide
auggaugggaaguagccgg

SEQ ID NO: 2958454 - RNA, 19 nt, Artificial Sequence
  Description of Artificial Sequence: Synthetic oligonucleotide
guucuuugagcccugggcg

SEQ ID NO: 2958455 - RNA, 19 nt, Artificial Sequence
  Description of Artificial Sequence: Synthetic oligonucleotide
cuuccgagaacgcuggugg

SEQ ID NO: 2958456 - RNA, 19 nt, Artificial Sequence
  Description of Artificial Sequence: Synthetic oligonucleotide
gauggcuucacccucugac

SEQ ID NO: 2958457 - RNA, 19 nt, Artificial Sequence
  Description of Artificial Sequence: Synthetic oligonucleotide
ugacuuggcagauuguucu

SEQ ID NO: 2958458 - RNA, 19 nt, Artificial Sequence
  Description of Artificial Sequence: Synthetic oligonucleotide
gaaucggacacuguugcgg

SEQ ID NO: 2958459 - RNA, 19 nt, Artificial Sequence
  Description of Artificial Sequence: Synthetic oligonucleotide
cuuaugaaugaccucgaug

SEQ ID NO: 2958460 - RNA, 19 nt, Artificial Sequence
  Description of Artificial Sequence: Synthetic oligonucleotide
uucugcagauacauggaug

SEQ ID NO: 2958461 - RNA, 19 nt, Artificial Sequence
  Description of Artificial Sequence: Synthetic oligonucleotide
gaugggaaguagccggugg

SEQ ID NO: 2958462 - RNA, 19 nt, Artificial Sequence
  Description of Artificial Sequence: Synthetic oligonucleotide
ugaggcgcuuccgagaacg

SEQ ID NO: 2958463 - RNA, 19 nt, Artificial Sequence
  Description of Artificial Sequence: Synthetic oligonucleotide
uaggcguccugacugaggc

SEQ ID NO: 2958464 - RNA, 19 nt, Artificial Sequence
  Description of Artificial Sequence: Synthetic oligonucleotide
augggaaguagccgguggc

SEQ ID NO: 2958465 - RNA, 19 nt, Artificial Sequence
  Description of Artificial Sequence: Synthetic oligonucleotide
augaggucugcacuggguc

SEQ ID NO: 2958466 - RNA, 19 nt, Artificial Sequence
  Description of Artificial Sequence: Synthetic oligonucleotide
gcagauuguucuuugagcc

SEQ ID NO: 2958467 - RNA, 19 nt, Artificial Sequence
  Description of Artificial Sequence: Synthetic oligonucleotide
uuucggaugguugaccugc

SEQ ID NO: 2958468 - RNA, 19 nt, Artificial Sequence
  Description of Artificial Sequence: Synthetic oligonucleotide
aacgcugguggauacucug

SEQ ID NO: 2958469 - RNA, 19 nt, Artificial Sequence
  Description of Artificial Sequence: Synthetic oligonucleotide
cugguggauacucugcacg

SEQ ID NO: 2958470 - RNA, 19 nt, Artificial Sequence
  Description of Artificial Sequence: Synthetic oligonucleotide
ugaggucugcacugggucg

SEQ ID NO: 2958471 - RNA, 19 nt, Artificial Sequence
  Description of Artificial Sequence: Synthetic oligonucleotide
uaugaaugaccucgauggc

SEQ ID NO: 2958472 - RNA, 19 nt, Artificial Sequence
  Description of Artificial Sequence: Synthetic oligonucleotide
uggcaugcugacuuggcag

SEQ ID NO: 2958473 - RNA, 19 nt, Artificial Sequence
  Description of Artificial Sequence: Synthetic oligonucleotide
agauacauggaugggaagu

SEQ ID NO: 2958474 - RNA, 19 nt, Artificial Sequence
  Description of Artificial Sequence: Synthetic oligonucleotide
gauacucugcacguuucgg

SEQ ID NO: 2958475 - RNA, 19 nt, Artificial Sequence
  Description of Artificial Sequence: Synthetic oligonucleotide
cucuaaucagccucugggc

SEQ ID NO: 2958476 - RNA, 19 nt, Artificial Sequence
  Description of Artificial Sequence: Synthetic oligonucleotide
ugaaugaccucgauggcuu

SEQ ID NO: 2958477 - RNA, 19 nt, Artificial Sequence
  Description of Artificial Sequence: Synthetic oligonucleotide
cucugcacguuucggaugg

SEQ ID NO: 2958478 - RNA, 19 nt, Artificial Sequence
  Description of Artificial Sequence: Synthetic oligonucleotide
cucugugcagcgaugcagg

SEQ ID NO: 2958479 - RNA, 19 nt, Artificial Sequence
  Description of Artificial Sequence: Synthetic oligonucleotide
ugcagauacauggauggga

SEQ ID NO: 2958480 - RNA, 19 nt, Artificial Sequence
  Description of Artificial Sequence: Synthetic oligonucleotide
augcugacuuggcagauug

SEQ ID NO: 2958481 - RNA, 19 nt, Artificial Sequence
  Description of Artificial Sequence: Synthetic oligonucleotide
uuguucuuugagcccuggg

SEQ ID NO: 2958482 - RNA, 19 nt, Artificial Sequence
  Description of Artificial Sequence: Synthetic oligonucleotide
uucuuugagcccugggcgc

SEQ ID NO: 2958483 - RNA, 19 nt, Artificial Sequence
  Description of Artificial Sequence: Synthetic oligonucleotide
ucucugugcagcgaugcag

SEQ ID NO: 2958484 - RNA, 19 nt, Artificial Sequence
  Description of Artificial Sequence: Synthetic oligonucleotide
gaccucgauggcuucaccc

SEQ ID NO: 2958485 - RNA, 19 nt, Artificial Sequence
  Description of Artificial Sequence: Synthetic oligonucleotide
gaaguagccgguggcaucc

SEQ ID NO: 2958486 - RNA, 19 nt, Artificial Sequence
  Description of Artificial Sequence: Synthetic oligonucleotide
agauuguucuuugagcccu

SEQ ID NO: 2958487 - RNA, 19 nt, Artificial Sequence
  Description of Artificial Sequence: Synthetic oligonucleotide
uucacccucugacagugac

SEQ ID NO: 2958488 - RNA, 19 nt, Artificial Sequence
  Description of Artificial Sequence: Synthetic oligonucleotide
uccaggagcuuaugaauga

SEQ ID NO: 2958489 - RNA, 19 nt, Artificial Sequence
  Description of Artificial Sequence: Synthetic oligonucleotide
agaacgcugguggauacuc

SEQ ID NO: 2958490 - RNA, 19 nt, Artificial Sequence
  Description of Artificial Sequence: Synthetic oligonucleotide
cagauuguucuuugagccc

SEQ ID NO: 2958491 - RNA, 19 nt, Artificial Sequence
  Description of Artificial Sequence: Synthetic oligonucleotide
caggagcuuaugaaugacc

SEQ ID NO: 2958492 - RNA, 19 nt, Artificial Sequence
  Description of Artificial Sequence: Synthetic oligonucleotide
uuggcaugcugacuuggca

SEQ ID NO: 2958493 - RNA, 19 nt, Artificial Sequence
  Description of Artificial Sequence: Synthetic oligonucleotide
auacucugcacguuucgga

SEQ ID NO: 2958494 - RNA, 19 nt, Artificial Sequence
  Description of Artificial Sequence: Synthetic oligonucleotide
ucugcacugggucgucggg

SEQ ID NO: 2958495 - RNA, 19 nt, Artificial Sequence
  Description of Artificial Sequence: Synthetic oligonucleotide
cauggaugggaaguagccg

SEQ ID NO: 2958496 - RNA, 19 nt, Artificial Sequence
  Description of Artificial Sequence: Synthetic oligonucleotide
ggaugguugaccugcgcgg

SEQ ID NO: 2958497 - RNA, 19 nt, Artificial Sequence
  Description of Artificial Sequence: Synthetic oligonucleotide
agcgaugcaggaugagguc

SEQ ID NO: 2958498 - RNA, 19 nt, Artificial Sequence
  Description of Artificial Sequence: Synthetic oligonucleotide
cuuggcagauuguucuuug

SEQ ID NO: 2958499 - RNA, 19 nt, Artificial Sequence
  Description of Artificial Sequence: Synthetic oligonucleotide
acuguugcggcgguaggcg

SEQ ID NO: 2958500 - RNA, 19 nt, Artificial Sequence
  Description of Artificial Sequence: Synthetic oligonucleotide
aggagcuuaugaaugaccu

SEQ ID NO: 2958501 - RNA, 19 nt, Artificial Sequence
  Description of Artificial Sequence: Synthetic oligonucleotide
gacacuguugcggcgguag

SEQ ID NO: 2958502 - RNA, 19 nt, Artificial Sequence
  Description of Artificial Sequence: Synthetic oligonucleotide
ugacugaggcgcuuccgag

SEQ ID NO: 2958503 - RNA, 19 nt, Artificial Sequence
  Description of Artificial Sequence: Synthetic oligonucleotide
augaaugaccucgauggcu

SEQ ID NO: 2958504 - RNA, 19 nt, Artificial Sequence
  Description of Artificial Sequence: Synthetic oligonucleotide
caggaaucggacacuguug

SEQ ID NO: 2958505 - RNA, 19 nt, Artificial Sequence
  Description of Artificial Sequence: Synthetic oligonucleotide
ugguggauacucugcacgu

SEQ ID NO: 2958506 - RNA, 19 nt, Artificial Sequence
  Description of Artificial Sequence: Synthetic oligonucleotide
cuuggcaugcugacuuggc

SEQ ID NO: 2958507 - RNA, 19 nt, Artificial Sequence
  Description of Artificial Sequence: Synthetic oligonucleotide
auccccuuuccugaccacc

SEQ ID NO: 2958508 - RNA, 19 nt, Artificial Sequence
  Description of Artificial Sequence: Synthetic oligonucleotide
uucggaugguugaccugcg

SEQ ID NO: 2958509 - RNA, 19 nt, Artificial Sequence
  Description of Artificial Sequence: Synthetic oligonucleotide
aguagccgguggcaucccc

SEQ ID NO: 2958510 - RNA, 19 nt, Artificial Sequence
  Description of Artificial Sequence: Synthetic oligonucleotide
uacucugcacguuucggau

SEQ ID NO: 2958511 - RNA, 19 nt, Artificial Sequence
  Description of Artificial Sequence: Synthetic oligonucleotide
cugacuuggcagauuguuc

SEQ ID NO: 2958512 - RNA, 19 nt, Artificial Sequence
  Description of Artificial Sequence: Synthetic oligonucleotide
ucucccuggggcgacggcg

SEQ ID NO: 2958513 - RNA, 19 nt, Artificial Sequence
  Description of Artificial Sequence: Synthetic oligonucleotide
cuuggugcgucucugugca

SEQ ID NO: 2958514 - RNA, 19 nt, Artificial Sequence
  Description of Artificial Sequence: Synthetic oligonucleotide
cacccucugacagugacac

SEQ ID NO: 2958515 - RNA, 19 nt, Artificial Sequence
  Description of Artificial Sequence: Synthetic oligonucleotide
acguuucggaugguugacc

SEQ ID NO: 2958516 - RNA, 19 nt, Artificial Sequence
  Description of Artificial Sequence: Synthetic oligonucleotide
acugaggcgcuuccgagaa

SEQ ID NO: 2958517 - RNA, 19 nt, Artificial Sequence
  Description of Artificial Sequence: Synthetic oligonucleotide
aaugaccucgauggcuuca

SEQ ID NO: 2958518 - RNA, 19 nt, Artificial Sequence
  Description of Artificial Sequence: Synthetic oligonucleotide
gaugguugaccugcgcggc

SEQ ID NO: 2958519 - RNA, 19 nt, Artificial Sequence
  Description of Artificial Sequence: Synthetic oligonucleotide
gacgccagcuuccgcuugg

SEQ ID NO: 2958520 - RNA, 19 nt, Artificial Sequence
  Description of Artificial Sequence: Synthetic oligonucleotide
uggauacucugcacguuuc

SEQ ID NO: 2958521 - RNA, 19 nt, Artificial Sequence
  Description of Artificial Sequence: Synthetic oligonucleotide
gguggcauccccuuuccug

SEQ ID NO: 2958522 - RNA, 19 nt, Artificial Sequence
  Description of Artificial Sequence: Synthetic oligonucleotide
guccaggagcuuaugaaug

SEQ ID NO: 2958523 - RNA, 19 nt, Artificial Sequence
  Description of Artificial Sequence: Synthetic oligonucleotide
ggauacucugcacguuucg

SEQ ID NO: 2958524 - RNA, 19 nt, Artificial Sequence
  Description of Artificial Sequence: Synthetic oligonucleotide
cagauacauggaugggaag

SEQ ID NO: 2958525 - RNA, 19 nt, Artificial Sequence
  Description of Artificial Sequence: Synthetic oligonucleotide
uccugaccacccaccagcc

SEQ ID NO: 2958526 - RNA, 19 nt, Artificial Sequence
  Description of Artificial Sequence: Synthetic oligonucleotide
uggaugggaaguagccggu

SEQ ID NO: 2958527 - RNA, 19 nt, Artificial Sequence
  Description of Artificial Sequence: Synthetic oligonucleotide
gauacauggaugggaagua

SEQ ID NO: 2958528 - RNA, 19 nt, Artificial Sequence
  Description of Artificial Sequence: Synthetic oligonucleotide
augguugaccugcgcggcg

SEQ ID NO: 2958529 - RNA, 19 nt, Artificial Sequence
  Description of Artificial Sequence: Synthetic oligonucleotide
ucacccucugacagugaca

SEQ ID NO: 2958530 - RNA, 19 nt, Artificial Sequence
  Description of Artificial Sequence: Synthetic oligonucleotide
ugcgucucugugcagcgau

SEQ ID NO: 2958531 - RNA, 19 nt, Artificial Sequence
  Description of Artificial Sequence: Synthetic oligonucleotide
ugguugaccugcgcggcgg

SEQ ID NO: 2958532 - RNA, 19 nt, Artificial Sequence
  Description of Artificial Sequence: Synthetic oligonucleotide
acucugcacguuucggaug

SEQ ID NO: 2958533 - RNA, 19 nt, Artificial Sequence
  Description of Artificial Sequence: Synthetic oligonucleotide
gguaccggcaggcugcgcc

SEQ ID NO: 2958534 - RNA, 19 nt, Artificial Sequence
  Description of Artificial Sequence: Synthetic oligonucleotide
gucugcacugggucgucgg

SEQ ID NO: 2958535 - RNA, 19 nt, Artificial Sequence
  Description of Artificial Sequence: Synthetic oligonucleotide
auuguucuuugagcccugg

SEQ ID NO: 2958536 - RNA, 19 nt, Artificial Sequence
  Description of Artificial Sequence: Synthetic oligonucleotide
guggcauccccuuuccuga

SEQ ID NO: 2958537 - RNA, 19 nt, Artificial Sequence
  Description of Artificial Sequence: Synthetic oligonucleotide
uggugcgucucugugcagc

SEQ ID NO: 2958538 - RNA, 19 nt, Artificial Sequence
  Description of Artificial Sequence: Synthetic oligonucleotide
acacuguugcggcgguagg

SEQ ID NO: 2958539 - RNA, 19 nt, Artificial Sequence
  Description of Artificial Sequence: Synthetic oligonucleotide
ugcgccuuggcaugcugac

SEQ ID NO: 2958540 - RNA, 19 nt, Artificial Sequence
  Description of Artificial Sequence: Synthetic oligonucleotide
guuucggaugguugaccug

SEQ ID NO: 2958541 - RNA, 19 nt, Artificial Sequence
  Description of Artificial Sequence: Synthetic oligonucleotide
gagcccugggcgcucugcg

SEQ ID NO: 2958542 - RNA, 19 nt, Artificial Sequence
  Description of Artificial Sequence: Synthetic oligonucleotide
uugaccugcgcggcggugc

SEQ ID NO: 2958543 - RNA, 19 nt, Artificial Sequence
  Description of Artificial Sequence: Synthetic oligonucleotide
ggaaucggacacuguugcg

SEQ ID NO: 2958544 - RNA, 19 nt, Artificial Sequence
  Description of Artificial Sequence: Synthetic oligonucleotide
ucugugcagcgaugcagga

SEQ ID NO: 2958545 - RNA, 19 nt, Artificial Sequence
  Description of Artificial Sequence: Synthetic oligonucleotide
ugggaaguagccgguggca

SEQ ID NO: 2958546 - RNA, 19 nt, Artificial Sequence
  Description of Artificial Sequence: Synthetic oligonucleotide
cugggccugggucaccucc

SEQ ID NO: 2958547 - RNA, 19 nt, Artificial Sequence
  Description of Artificial Sequence: Synthetic oligonucleotide
gacugaggcgcuuccgaga

SEQ ID NO: 2958548 - RNA, 19 nt, Artificial Sequence
  Description of Artificial Sequence: Synthetic oligonucleotide
aaguagccgguggcauccc

SEQ ID NO: 2958549 - RNA, 19 nt, Artificial Sequence
  Description of Artificial Sequence: Synthetic oligonucleotide
acgcugguggauacucugc

SEQ ID NO: 2958550 - RNA, 19 nt, Artificial Sequence
  Description of Artificial Sequence: Synthetic oligonucleotide
ucggaugguugaccugcgc

SEQ ID NO: 2958551 - RNA, 19 nt, Artificial Sequence
  Description of Artificial Sequence: Synthetic oligonucleotide
ucuuugagcccugggcgcu

SEQ ID NO: 2958552 - RNA, 19 nt, Artificial Sequence
  Description of Artificial Sequence: Synthetic oligonucleotide
uguugcggcgguaggcguc

SEQ ID NO: 2958553 - RNA, 19 nt, Artificial Sequence
  Description of Artificial Sequence: Synthetic oligonucleotide
ggugcgucucugugcagcg

SEQ ID NO: 2958554 - RNA, 19 nt, Artificial Sequence
  Description of Artificial Sequence: Synthetic oligonucleotide
ugaccucgauggcuucacc

SEQ ID NO: 2958555 - RNA, 19 nt, Artificial Sequence
  Description of Artificial Sequence: Synthetic oligonucleotide
ugcaggaaucggacacugu

SEQ ID NO: 2958556 - RNA, 19 nt, Artificial Sequence
  Description of Artificial Sequence: Synthetic oligonucleotide
ucgauggcuucacccucug

SEQ ID NO: 2958557 - RNA, 19 nt, Artificial Sequence
  Description of Artificial Sequence: Synthetic oligonucleotide
gauuguucuuugagcccug

SEQ ID NO: 2958558 - RNA, 19 nt, Artificial Sequence
  Description of Artificial Sequence: Synthetic oligonucleotide
agccucugggccuggguca

SEQ ID NO: 2958559 - RNA, 19 nt, Artificial Sequence
  Description of Artificial Sequence: Synthetic oligonucleotide
uuccgagaacgcuggugga

SEQ ID NO: 2958560 - RNA, 19 nt, Artificial Sequence
  Description of Artificial Sequence: Synthetic oligonucleotide
cuccuccccagccuucugc

SEQ ID NO: 2958561 - RNA, 19 nt, Artificial Sequence
  Description of Artificial Sequence: Synthetic oligonucleotide
guaggcguccugacugagg

SEQ ID NO: 2958562 - RNA, 19 nt, Artificial Sequence
  Description of Artificial Sequence: Synthetic oligonucleotide
ucagccucugggccugggu

SEQ ID NO: 2958563 - RNA, 19 nt, Artificial Sequence
  Description of Artificial Sequence: Synthetic oligonucleotide
cugcagauacauggauggg

SEQ ID NO: 2958564 - RNA, 19 nt, Artificial Sequence
  Description of Artificial Sequence: Synthetic oligonucleotide
cacuguugcggcgguaggc

SEQ ID NO: 2958565 - RNA, 19 nt, Artificial Sequence
  Description of Artificial Sequence: Synthetic oligonucleotide
ugaccugcgcggcggugcc

SEQ ID NO: 2958566 - RNA, 19 nt, Artificial Sequence
  Description of Artificial Sequence: Synthetic oligonucleotide
acccucugacagugacacc

SEQ ID NO: 2958567 - RNA, 19 nt, Artificial Sequence
  Description of Artificial Sequence: Synthetic oligonucleotide
accugcgcggcggugcccc

SEQ ID NO: 2958568 - RNA, 19 nt, Artificial Sequence
  Description of Artificial Sequence: Synthetic oligonucleotide
caggcugcgccuuggcaug

SEQ ID NO: 2958569 - RNA, 19 nt, Artificial Sequence
  Description of Artificial Sequence: Synthetic oligonucleotide
ugcugacuuggcagauugu

SEQ ID NO: 2958570 - RNA, 19 nt, Artificial Sequence
  Description of Artificial Sequence: Synthetic oligonucleotide
cuaaucagccucugggccu

SEQ ID NO: 2958571 - RNA, 19 nt, Artificial Sequence
  Description of Artificial Sequence: Synthetic oligonucleotide
ugaccacccaccagccguc

SEQ ID NO: 2958572 - RNA, 19 nt, Artificial Sequence
  Description of Artificial Sequence: Synthetic oligonucleotide
cugacugaggcgcuuccga

SEQ ID NO: 2958573 - RNA, 19 nt, Artificial Sequence
  Description of Artificial Sequence: Synthetic oligonucleotide
gaaugaccucgauggcuuc

SEQ ID NO: 2958574 - RNA, 19 nt, Artificial Sequence
  Description of Artificial Sequence: Synthetic oligonucleotide
uuccgcuuggugcgucucu

SEQ ID NO: 2958575 - RNA, 19 nt, Artificial Sequence
  Description of Artificial Sequence: Synthetic oligonucleotide
cugcacugggucgucgggg

SEQ ID NO: 2958576 - RNA, 19 nt, Artificial Sequence
  Description of Artificial Sequence: Synthetic oligonucleotide
gcuuggugcgucucugugc

SEQ ID NO: 2958577 - RNA, 19 nt, Artificial Sequence
  Description of Artificial Sequence: Synthetic oligonucleotide
ugccccgcggccucuaauc

SEQ ID NO: 2958578 - RNA, 19 nt, Artificial Sequence
  Description of Artificial Sequence: Synthetic oligonucleotide
ggcguccugacugaggcgc

SEQ ID NO: 2958579 - RNA, 19 nt, Artificial Sequence
  Description of Artificial Sequence: Synthetic oligonucleotide
ugcgcggcggugccccgcg

SEQ ID NO: 2958580 - RNA, 19 nt, Artificial Sequence
  Description of Artificial Sequence: Synthetic oligonucleotide
uccgcuuggugcgucucug

SEQ ID NO: 2958581 - RNA, 19 nt, Artificial Sequence
  Description of Artificial Sequence: Synthetic oligonucleotide
agcccugggcgcucugcgg

SEQ ID NO: 2958582 - RNA, 19 nt, Artificial Sequence
  Description of Artificial Sequence: Synthetic oligonucleotide
cucccuggggcgacggcgc

SEQ ID NO: 2958583 - RNA, 19 nt, Artificial Sequence
  Description of Artificial Sequence: Synthetic oligonucleotide
aggcguccugacugaggcg

SEQ ID NO: 2958584 - RNA, 19 nt, Artificial Sequence
  Description of Artificial Sequence: Synthetic oligonucleotide
uccgagaacgcugguggau

SEQ ID NO: 2958585 - RNA, 19 nt, Artificial Sequence
  Description of Artificial Sequence: Synthetic oligonucleotide
uccccagccuucugcagau

SEQ ID NO: 2958586 - RNA, 19 nt, Artificial Sequence
  Description of Artificial Sequence: Synthetic oligonucleotide
ggggcgacggcgcugcugc

SEQ ID NO: 2958587 - RNA, 19 nt, Artificial Sequence
  Description of Artificial Sequence: Synthetic oligonucleotide
cugcaggaaucggacacug

SEQ ID NO: 2958588 - RNA, 19 nt, Artificial Sequence
  Description of Artificial Sequence: Synthetic oligonucleotide
ccuuuccugaccacccacc

SEQ ID NO: 2958589 - RNA, 19 nt, Artificial Sequence
  Description of Artificial Sequence: Synthetic oligonucleotide
gcuucacccucugacagug

SEQ ID NO: 2958590 - RNA, 19 nt, Artificial Sequence
  Description of Artificial Sequence: Synthetic oligonucleotide
ggcgcugcugcaggaaucg

SEQ ID NO: 2958591 - RNA, 19 nt, Artificial Sequence
  Description of Artificial Sequence: Synthetic oligonucleotide
ggagcuuaugaaugaccuc

SEQ ID NO: 2958592 - RNA, 19 nt, Artificial Sequence
  Description of Artificial Sequence: Synthetic oligonucleotide
cagcgaugcaggaugaggu

SEQ ID NO: 2958593 - RNA, 19 nt, Artificial Sequence
  Description of Artificial Sequence: Synthetic oligonucleotide
ugcagcgaugcaggaugag

SEQ ID NO: 2958594 - RNA, 19 nt, Artificial Sequence
  Description of Artificial Sequence: Synthetic oligonucleotide
cacguuucggaugguugac

SEQ ID NO: 2958595 - RNA, 19 nt, Artificial Sequence
  Description of Artificial Sequence: Synthetic oligonucleotide
cagccucugggccuggguc

SEQ ID NO: 2958596 - RNA, 19 nt, Artificial Sequence
  Description of Artificial Sequence: Synthetic oligonucleotide
agcuuaugaaugaccucga

SEQ ID NO: 2958597 - RNA, 19 nt, Artificial Sequence
  Description of Artificial Sequence: Synthetic oligonucleotide
gccucuaaucagccucugg

SEQ ID NO: 2958598 - RNA, 19 nt, Artificial Sequence
  Description of Artificial Sequence: Synthetic oligonucleotide
gcggccucuaaucagccuc

SEQ ID NO: 2958599 - RNA, 19 nt, Artificial Sequence
  Description of Artificial Sequence: Synthetic oligonucleotide
ggcgcuuccgagaacgcug

SEQ ID NO: 2958600 - RNA, 19 nt, Artificial Sequence
  Description of Artificial Sequence: Synthetic oligonucleotide
guugcggcgguaggcgucc

SEQ ID NO: 2958601 - RNA, 19 nt, Artificial Sequence
  Description of Artificial Sequence: Synthetic oligonucleotide
cggaugguugaccugcgcg

SEQ ID NO: 2958602 - RNA, 19 nt, Artificial Sequence
  Description of Artificial Sequence: Synthetic oligonucleotide
cugaccacccaccagccgu

SEQ ID NO: 2958603 - RNA, 19 nt, Artificial Sequence
  Description of Artificial Sequence: Synthetic oligonucleotide
gcugcugcaggaaucggac

SEQ ID NO: 2958604 - RNA, 19 nt, Artificial Sequence
  Description of Artificial Sequence: Synthetic oligonucleotide
gcagauacauggaugggaa

SEQ ID NO: 2958605 - RNA, 19 nt, Artificial Sequence
  Description of Artificial Sequence: Synthetic oligonucleotide
acuuggcagauuguucuuu

SEQ ID NO: 2958606 - RNA, 19 nt, Artificial Sequence
  Description of Artificial Sequence: Synthetic oligonucleotide
ugagcccugggcgcucugc

SEQ ID NO: 2958607 - RNA, 19 nt, Artificial Sequence
  Description of Artificial Sequence: Synthetic oligonucleotide
ugcggcccgggucucccug

SEQ ID NO: 2958608 - RNA, 19 nt, Artificial Sequence
  Description of Artificial Sequence: Synthetic oligonucleotide
gccugggucaccuccuccc

SEQ ID NO: 2958609 - RNA, 19 nt, Artificial Sequence
  Description of Artificial Sequence: Synthetic oligonucleotide
ggaaguagccgguggcauc

SEQ ID NO: 2958610 - RNA, 19 nt, Artificial Sequence
  Description of Artificial Sequence: Synthetic oligonucleotide
gaugaggucugcacugggu

SEQ ID NO: 2958611 - RNA, 19 nt, Artificial Sequence
  Description of Artificial Sequence: Synthetic oligonucleotide
ggucaccuccuccccagcc

SEQ ID NO: 2958612 - RNA, 19 nt, Artificial Sequence
  Description of Artificial Sequence: Synthetic oligonucleotide
ucugcggcccgggucuccc

SEQ ID NO: 2958613 - RNA, 19 nt, Artificial Sequence
  Description of Artificial Sequence: Synthetic oligonucleotide
aaucagccucugggccugg

SEQ ID NO: 2958614 - RNA, 19 nt, Artificial Sequence
  Description of Artificial Sequence: Synthetic oligonucleotide
uuggugcgucucugugcag

SEQ ID NO: 2958615 - RNA, 19 nt, Artificial Sequence
  Description of Artificial Sequence: Synthetic oligonucleotide
uggcauccccuuuccugac

SEQ ID NO: 2958616 - RNA, 19 nt, Artificial Sequence
  Description of Artificial Sequence: Synthetic oligonucleotide
cuccccagccuucugcaga

SEQ ID NO: 2958617 - RNA, 19 nt, Artificial Sequence
  Description of Artificial Sequence: Synthetic oligonucleotide
uuugagcccugggcgcucu

SEQ ID NO: 2958618 - RNA, 19 nt, Artificial Sequence
  Description of Artificial Sequence: Synthetic oligonucleotide
guggauacucugcacguuu

SEQ ID NO: 2958619 - RNA, 19 nt, Artificial Sequence
  Description of Artificial Sequence: Synthetic oligonucleotide
gcugguggauacucugcac

SEQ ID NO: 2958620 - RNA, 19 nt, Artificial Sequence
  Description of Artificial Sequence: Synthetic oligonucleotide
acggcgcugcugcaggaau

SEQ ID NO: 2958621 - RNA, 19 nt, Artificial Sequence
  Description of Artificial Sequence: Synthetic oligonucleotide
gcauccccuuuccugacca

SEQ ID NO: 2958622 - RNA, 19 nt, Artificial Sequence
  Description of Artificial Sequence: Synthetic oligonucleotide
cccgcggccucuaaucagc

SEQ ID NO: 2958623 - RNA, 19 nt, Artificial Sequence
  Description of Artificial Sequence: Synthetic oligonucleotide
cccagccuucugcagauac

SEQ ID NO: 2958624 - RNA, 19 nt, Artificial Sequence
  Description of Artificial Sequence: Synthetic oligonucleotide
gcgacggcgcugcugcagg

SEQ ID NO: 2958625 - RNA, 19 nt, Artificial Sequence
  Description of Artificial Sequence: Synthetic oligonucleotide
cuucugcagauacauggau

SEQ ID NO: 2958626 - RNA, 19 nt, Artificial Sequence
  Description of Artificial Sequence: Synthetic oligonucleotide
gcuuccgagaacgcuggug

SEQ ID NO: 2958627 - RNA, 19 nt, Artificial Sequence
  Description of Artificial Sequence: Synthetic oligonucleotide
cacccaccagccguccagg

SEQ ID NO: 2958628 - RNA, 19 nt, Artificial Sequence
  Description of Artificial Sequence: Synthetic oligonucleotide
cauccccuuuccugaccac

SEQ ID NO: 2958629 - RNA, 19 nt, Artificial Sequence
  Description of Artificial Sequence: Synthetic oligonucleotide
ccuucugcagauacaugga

SEQ ID NO: 2958630 - RNA, 19 nt, Artificial Sequence
  Description of Artificial Sequence: Synthetic oligonucleotide
aggcugcgccuuggcaugc

SEQ ID NO: 2958631 - RNA, 19 nt, Artificial Sequence
  Description of Artificial Sequence: Synthetic oligonucleotide
ugcggcgguaggcguccug

SEQ ID NO: 2958632 - RNA, 19 nt, Artificial Sequence
  Description of Artificial Sequence: Synthetic oligonucleotide
ccuuggcaugcugacuugg

SEQ ID NO: 2958633 - RNA, 19 nt, Artificial Sequence
  Description of Artificial Sequence: Synthetic oligonucleotide
aggcgcuuccgagaacgcu

SEQ ID NO: 2958634 - RNA, 19 nt, Artificial Sequence
  Description of Artificial Sequence: Synthetic oligonucleotide
cugcgccuuggcaugcuga

SEQ ID NO: 2958635 - RNA, 19 nt, Artificial Sequence
  Description of Artificial Sequence: Synthetic oligonucleotide
gcaggaaucggacacuguu

SEQ ID NO: 2958636 - RNA, 19 nt, Artificial Sequence
  Description of Artificial Sequence: Synthetic oligonucleotide
gaggcgcuuccgagaacgc

SEQ ID NO: 2958637 - RNA, 19 nt, Artificial Sequence
  Description of Artificial Sequence: Synthetic oligonucleotide
agcuuccgcuuggugcguc

SEQ ID NO: 2958638 - RNA, 19 nt, Artificial Sequence
  Description of Artificial Sequence: Synthetic oligonucleotide
ggcauccccuuuccugacc

SEQ ID NO: 2958639 - RNA, 19 nt, Artificial Sequence
  Description of Artificial Sequence: Synthetic oligonucleotide
augcaggaugaggucugca

SEQ ID NO: 2958640 - RNA, 19 nt, Artificial Sequence
  Description of Artificial Sequence: Synthetic oligonucleotide
gaggucugcacugggucgu

SEQ ID NO: 2958641 - RNA, 19 nt, Artificial Sequence
  Description of Artificial Sequence: Synthetic oligonucleotide
uugagcccugggcgcucug

SEQ ID NO: 2958642 - RNA, 19 nt, Artificial Sequence
  Description of Artificial Sequence: Synthetic oligonucleotide
aggucugcacugggucguc

SEQ ID NO: 2958643 - RNA, 19 nt, Artificial Sequence
  Description of Artificial Sequence: Synthetic oligonucleotide
aucagccucugggccuggg

SEQ ID NO: 2958644 - RNA, 19 nt, Artificial Sequence
  Description of Artificial Sequence: Synthetic oligonucleotide
uggggcgacggcgcugcug

SEQ ID NO: 2958645 - RNA, 19 nt, Artificial Sequence
  Description of Artificial Sequence: Synthetic oligonucleotide
accacccaccagccgucca

SEQ ID NO: 2958646 - RNA, 19 nt, Artificial Sequence
  Description of Artificial Sequence: Synthetic oligonucleotide
gcgcuuccgagaacgcugg

SEQ ID NO: 2958647 - RNA, 19 nt, Artificial Sequence
  Description of Artificial Sequence: Synthetic oligonucleotide
cucgauggcuucacccucu

SEQ ID NO: 2958648 - RNA, 19 nt, Artificial Sequence
  Description of Artificial Sequence: Synthetic oligonucleotide
ggaugggaaguagccggug

SEQ ID NO: 2958649 - RNA, 19 nt, Artificial Sequence
  Description of Artificial Sequence: Synthetic oligonucleotide
accggcaggcugcgccuug

SEQ ID NO: 2958650 - RNA, 19 nt, Artificial Sequence
  Description of Artificial Sequence: Synthetic oligonucleotide
gacuuggcagauuguucuu

SEQ ID NO: 2958651 - RNA, 19 nt, Artificial Sequence
  Description of Artificial Sequence: Synthetic oligonucleotide
cgaugcaggaugaggucug

SEQ ID NO: 2958652 - RNA, 19 nt, Artificial Sequence
  Description of Artificial Sequence: Synthetic oligonucleotide
ccaggagcuuaugaaugac

SEQ ID NO: 2958653 - RNA, 19 nt, Artificial Sequence
  Description of Artificial Sequence: Synthetic oligonucleotide
gcccugggcgcucugcggc

SEQ ID NO: 2958654 - RNA, 19 nt, Artificial Sequence
  Description of Artificial Sequence: Synthetic oligonucleotide
ccacccaccagccguccag

SEQ ID NO: 2958655 - RNA, 19 nt, Artificial Sequence
  Description of Artificial Sequence: Synthetic oligonucleotide
guugaccugcgcggcggug

SEQ ID NO: 2958656 - RNA, 19 nt, Artificial Sequence
  Description of Artificial Sequence: Synthetic oligonucleotide
cugggcgcucugcggcccg

SEQ ID NO: 2958657 - RNA, 19 nt, Artificial Sequence
  Description of Artificial Sequence: Synthetic oligonucleotide
ccugacugaggcgcuuccg

SEQ ID NO: 2958658 - RNA, 19 nt, Artificial Sequence
  Description of Artificial Sequence: Synthetic oligonucleotide
gaccacccaccagccgucc

SEQ ID NO: 2958659 - RNA, 19 nt, Artificial Sequence
  Description of Artificial Sequence: Synthetic oligonucleotide
ggucugcacugggucgucg

SEQ ID NO: 2958660 - RNA, 19 nt, Artificial Sequence
  Description of Artificial Sequence: Synthetic oligonucleotide
gccguccaggagcuuauga

SEQ ID NO: 2958661 - RNA, 19 nt, Artificial Sequence
  Description of Artificial Sequence: Synthetic oligonucleotide
ccugaccacccaccagccg

SEQ ID NO: 2958662 - RNA, 19 nt, Artificial Sequence
  Description of Artificial Sequence: Synthetic oligonucleotide
ucugcacguuucggauggu

SEQ ID NO: 2958663 - RNA, 19 nt, Artificial Sequence
  Description of Artificial Sequence: Synthetic oligonucleotide
cuuugagcccugggcgcuc

SEQ ID NO: 2958664 - RNA, 19 nt, Artificial Sequence
  Description of Artificial Sequence: Synthetic oligonucleotide
cuuccgcuuggugcgucuc

SEQ ID NO: 2958665 - RNA, 19 nt, Artificial Sequence
  Description of Artificial Sequence: Synthetic oligonucleotide
ccguccaggagcuuaugaa

SEQ ID NO: 2958666 - RNA, 19 nt, Artificial Sequence
  Description of Artificial Sequence: Synthetic oligonucleotide
cugaggcgcuuccgagaac

SEQ ID NO: 2958667 - RNA, 19 nt, Artificial Sequence
  Description of Artificial Sequence: Synthetic oligonucleotide
gccgguggcauccccuuuc

SEQ ID NO: 2958668 - RNA, 19 nt, Artificial Sequence
  Description of Artificial Sequence: Synthetic oligonucleotide
cgucucugugcagcgaugc

SEQ ID NO: 2958669 - RNA, 19 nt, Artificial Sequence
  Description of Artificial Sequence: Synthetic oligonucleotide
ucugggccugggucaccuc

SEQ ID NO: 2958670 - RNA, 19 nt, Artificial Sequence
  Description of Artificial Sequence: Synthetic oligonucleotide
ccucgauggcuucacccuc

SEQ ID NO: 2958671 - RNA, 19 nt, Artificial Sequence
  Description of Artificial Sequence: Synthetic oligonucleotide
cccuuuccugaccacccac

SEQ ID NO: 2958672 - RNA, 19 nt, Artificial Sequence
  Description of Artificial Sequence: Synthetic oligonucleotide
gaacgcugguggauacucu

SEQ ID NO: 2958673 - RNA, 19 nt, Artificial Sequence
  Description of Artificial Sequence: Synthetic oligonucleotide
gucucccuggggcgacggc

SEQ ID NO: 2958674 - RNA, 19 nt, Artificial Sequence
  Description of Artificial Sequence: Synthetic oligonucleotide
gcaggcugcgccuuggcau

SEQ ID NO: 2958675 - RNA, 19 nt, Artificial Sequence
  Description of Artificial Sequence: Synthetic oligonucleotide
cuucacccucugacaguga

SEQ ID NO: 2958676 - RNA, 19 nt, Artificial Sequence
  Description of Artificial Sequence: Synthetic oligonucleotide
gccuuggcaugcugacuug

SEQ ID NO: 2958677 - RNA, 19 nt, Artificial Sequence
  Description of Artificial Sequence: Synthetic oligonucleotide
cccucugacagugacaccu

SEQ ID NO: 2958678 - RNA, 19 nt, Artificial Sequence
  Description of Artificial Sequence: Synthetic oligonucleotide
cgagaacgcugguggauac

SEQ ID NO: 2958679 - RNA, 19 nt, Artificial Sequence
  Description of Artificial Sequence: Synthetic oligonucleotide
ugggcgcucugcggcccgg

SEQ ID NO: 2958680 - RNA, 19 nt, Artificial Sequence
  Description of Artificial Sequence: Synthetic oligonucleotide
ccucugacagugacaccuc

SEQ ID NO: 2958681 - RNA, 19 nt, Artificial Sequence
  Description of Artificial Sequence: Synthetic oligonucleotide
ggccugggucaccuccucc

SEQ ID NO: 2958682 - RNA, 19 nt, Artificial Sequence
  Description of Artificial Sequence: Synthetic oligonucleotide
caccuccuccccagccuuc

SEQ ID NO: 2958683 - RNA, 19 nt, Artificial Sequence
  Description of Artificial Sequence: Synthetic oligonucleotide
ggcaggcugcgccuuggca

SEQ ID NO: 2958684 - RNA, 19 nt, Artificial Sequence
  Description of Artificial Sequence: Synthetic oligonucleotide
gagaacgcugguggauacu

SEQ ID NO: 2958685 - RNA, 19 nt, Artificial Sequence
  Description of Artificial Sequence: Synthetic oligonucleotide
ggucucccuggggcgacgg

SEQ ID NO: 2958686 - RNA, 19 nt, Artificial Sequence
  Description of Artificial Sequence: Synthetic oligonucleotide
guaccggcaggcugcgccu

SEQ ID NO: 2958687 - RNA, 19 nt, Artificial Sequence
  Description of Artificial Sequence: Synthetic oligonucleotide
ggacgccagcuuccgcuug

SEQ ID NO: 2958688 - RNA, 19 nt, Artificial Sequence
  Description of Artificial Sequence: Synthetic oligonucleotide
ggcgacggcgcugcugcag

SEQ ID NO: 2958689 - RNA, 19 nt, Artificial Sequence
  Description of Artificial Sequence: Synthetic oligonucleotide
gacggcgcugcugcaggaa

SEQ ID NO: 2958690 - RNA, 19 nt, Artificial Sequence
  Description of Artificial Sequence: Synthetic oligonucleotide
gugcagcgaugcaggauga

SEQ ID NO: 2958691 - RNA, 19 nt, Artificial Sequence
  Description of Artificial Sequence: Synthetic oligonucleotide
gcggacgccagcuuccgcu

SEQ ID NO: 2958692 - RNA, 19 nt, Artificial Sequence
  Description of Artificial Sequence: Synthetic oligonucleotide
ccuggggcgacggcgcugc

SEQ ID NO: 2958693 - RNA, 19 nt, Artificial Sequence
  Description of Artificial Sequence: Synthetic oligonucleotide
guagccgguggcauccccu

SEQ ID NO: 2958694 - RNA, 19 nt, Artificial Sequence
  Description of Artificial Sequence: Synthetic oligonucleotide
ccagccuucugcagauaca

SEQ ID NO: 2958695 - RNA, 19 nt, Artificial Sequence
  Description of Artificial Sequence: Synthetic oligonucleotide
gcugcgccuuggcaugcug

SEQ ID NO: 2958696 - RNA, 19 nt, Artificial Sequence
  Description of Artificial Sequence: Synthetic oligonucleotide
gcugacuuggcagauuguu

SEQ ID NO: 2958697 - RNA, 19 nt, Artificial Sequence
  Description of Artificial Sequence: Synthetic oligonucleotide
ccgguggcauccccuuucc

SEQ ID NO: 2958698 - RNA, 19 nt, Artificial Sequence
  Description of Artificial Sequence: Synthetic oligonucleotide
gcuuaugaaugaccucgau

SEQ ID NO: 2958699 - RNA, 19 nt, Artificial Sequence
  Description of Artificial Sequence: Synthetic oligonucleotide
gcgaugcaggaugaggucu

SEQ ID NO: 2958700 - RNA, 19 nt, Artificial Sequence
  Description of Artificial Sequence: Synthetic oligonucleotide
agccguccaggagcuuaug

SEQ ID NO: 2958701 - RNA, 19 nt, Artificial Sequence
  Description of Artificial Sequence: Synthetic oligonucleotide
ccccgcggccucuaaucag

SEQ ID NO: 2958702 - RNA, 19 nt, Artificial Sequence
  Description of Artificial Sequence: Synthetic oligonucleotide
agccgguggcauccccuuu

SEQ ID NO: 2958703 - RNA, 19 nt, Artificial Sequence
  Description of Artificial Sequence: Synthetic oligonucleotide
gggguaccggcaggcugcg

SEQ ID NO: 2958704 - RNA, 19 nt, Artificial Sequence
  Description of Artificial Sequence: Synthetic oligonucleotide
cucugcggcccgggucucc

SEQ ID NO: 2958705 - RNA, 19 nt, Artificial Sequence
  Description of Artificial Sequence: Synthetic oligonucleotide
ccgcggccucuaaucagcc

SEQ ID NO: 2958706 - RNA, 19 nt, Artificial Sequence
  Description of Artificial Sequence: Synthetic oligonucleotide
cgcuuggugcgucucugug

SEQ ID NO: 2958707 - RNA, 19 nt, Artificial Sequence
  Description of Artificial Sequence: Synthetic oligonucleotide
caccagccguccaggagcu

SEQ ID NO: 2958708 - RNA, 19 nt, Artificial Sequence
  Description of Artificial Sequence: Synthetic oligonucleotide
ggcccgggucucccugggg

SEQ ID NO: 2958709 - RNA, 19 nt, Artificial Sequence
  Description of Artificial Sequence: Synthetic oligonucleotide
ggcuucacccucugacagu

SEQ ID NO: 2958710 - RNA, 19 nt, Artificial Sequence
  Description of Artificial Sequence: Synthetic oligonucleotide
cguuucggaugguugaccu

SEQ ID NO: 2958711 - RNA, 19 nt, Artificial Sequence
  Description of Artificial Sequence: Synthetic oligonucleotide
gaccugcgcggcggugccc

SEQ ID NO: 2958712 - RNA, 19 nt, Artificial Sequence
  Description of Artificial Sequence: Synthetic oligonucleotide
gcggcggugccccgcggcc

SEQ ID NO: 2958713 - RNA, 19 nt, Artificial Sequence
  Description of Artificial Sequence: Synthetic oligonucleotide
ggcgguaggcguccugacu

SEQ ID NO: 2958714 - RNA, 19 nt, Artificial Sequence
  Description of Artificial Sequence: Synthetic oligonucleotide
gccccgcggccucuaauca

SEQ ID NO: 2958715 - RNA, 19 nt, Artificial Sequence
  Description of Artificial Sequence: Synthetic oligonucleotide
ggccucuaaucagccucug

SEQ ID NO: 2958716 - RNA, 19 nt, Artificial Sequence
  Description of Artificial Sequence: Synthetic oligonucleotide
cccugggcgcucugcggcc

SEQ ID NO: 2958717 - RNA, 19 nt, Artificial Sequence
  Description of Artificial Sequence: Synthetic oligonucleotide
gcggcgguaggcguccuga

SEQ ID NO: 2958718 - RNA, 19 nt, Artificial Sequence
  Description of Artificial Sequence: Synthetic oligonucleotide
cgcugguggauacucugca

SEQ ID NO: 2958719 - RNA, 19 nt, Artificial Sequence
  Description of Artificial Sequence: Synthetic oligonucleotide
gugcgucucugugcagcga

SEQ ID NO: 2958720 - RNA, 19 nt, Artificial Sequence
  Description of Artificial Sequence: Synthetic oligonucleotide
gcgucucugugcagcgaug

SEQ ID NO: 2958721 - RNA, 19 nt, Artificial Sequence
  Description of Artificial Sequence: Synthetic oligonucleotide
uaccggcaggcugcgccuu

SEQ ID NO: 2958722 - RNA, 19 nt, Artificial Sequence
  Description of Artificial Sequence: Synthetic oligonucleotide
cugcgcggcggugccccgc

SEQ ID NO: 2958723 - RNA, 19 nt, Artificial Sequence
  Description of Artificial Sequence: Synthetic oligonucleotide
cucugggccugggucaccu

SEQ ID NO: 2958724 - RNA, 19 nt, Artificial Sequence
  Description of Artificial Sequence: Synthetic oligonucleotide
gggaaguagccgguggcau

SEQ ID NO: 2958725 - RNA, 19 nt, Artificial Sequence
  Description of Artificial Sequence: Synthetic oligonucleotide
gcugcaggaaucggacacu

SEQ ID NO: 2958726 - RNA, 19 nt, Artificial Sequence
  Description of Artificial Sequence: Synthetic oligonucleotide
gcgcucugcggcccggguc

SEQ ID NO: 2958727 - RNA, 19 nt, Artificial Sequence
  Description of Artificial Sequence: Synthetic oligonucleotide
cugugcagcgaugcaggau

SEQ ID NO: 2958728 - RNA, 19 nt, Artificial Sequence
  Description of Artificial Sequence: Synthetic oligonucleotide
gggucucccuggggcgacg

SEQ ID NO: 2958729 - RNA, 19 nt, Artificial Sequence
  Description of Artificial Sequence: Synthetic oligonucleotide
gccucugggccugggucac

SEQ ID NO: 2958730 - RNA, 19 nt, Artificial Sequence
  Description of Artificial Sequence: Synthetic oligonucleotide
cagccguccaggagcuuau

SEQ ID NO: 2958731 - RNA, 19 nt, Artificial Sequence
  Description of Artificial Sequence: Synthetic oligonucleotide
ggcggugccccgcggccuc

SEQ ID NO: 2958732 - RNA, 19 nt, Artificial Sequence
  Description of Artificial Sequence: Synthetic oligonucleotide
caugcugacuuggcagauu

SEQ ID NO: 2958733 - RNA, 19 nt, Artificial Sequence
  Description of Artificial Sequence: Synthetic oligonucleotide
ccagccguccaggagcuua

SEQ ID NO: 2958734 - RNA, 19 nt, Artificial Sequence
  Description of Artificial Sequence: Synthetic oligonucleotide
ccggcaggcugcgccuugg

SEQ ID NO: 2958735 - RNA, 19 nt, Artificial Sequence
  Description of Artificial Sequence: Synthetic oligonucleotide
ccgagaacgcugguggaua

SEQ ID NO: 2958736 - RNA, 19 nt, Artificial Sequence
  Description of Artificial Sequence: Synthetic oligonucleotide
ccugggcgcucugcggccc

SEQ ID NO: 2958737 - RNA, 19 nt, Artificial Sequence
  Description of Artificial Sequence: Synthetic oligonucleotide
uugcggcgguaggcguccu

SEQ ID NO: 2958738 - RNA, 19 nt, Artificial Sequence
  Description of Artificial Sequence: Synthetic oligonucleotide
gguggauacucugcacguu

SEQ ID NO: 2958739 - RNA, 19 nt, Artificial Sequence
  Description of Artificial Sequence: Synthetic oligonucleotide
gcuuccgcuuggugcgucu

SEQ ID NO: 2958740 - RNA, 19 nt, Artificial Sequence
  Description of Artificial Sequence: Synthetic oligonucleotide
gguugaccugcgcggcggu

SEQ ID NO: 2958741 - RNA, 19 nt, Artificial Sequence
  Description of Artificial Sequence: Synthetic oligonucleotide
cggcgcugcugcaggaauc

SEQ ID NO: 2958742 - RNA, 19 nt, Artificial Sequence
  Description of Artificial Sequence: Synthetic oligonucleotide
gggcgcucugcggcccggg

SEQ ID NO: 2958743 - RNA, 19 nt, Artificial Sequence
  Description of Artificial Sequence: Synthetic oligonucleotide
cugcacguuucggaugguu

SEQ ID NO: 2958744 - RNA, 19 nt, Artificial Sequence
  Description of Artificial Sequence: Synthetic oligonucleotide
ccuccuccccagccuucug

SEQ ID NO: 2958745 - RNA, 19 nt, Artificial Sequence
  Description of Artificial Sequence: Synthetic oligonucleotide
ccugcgcggcggugccccg

SEQ ID NO: 2958746 - RNA, 19 nt, Artificial Sequence
  Description of Artificial Sequence: Synthetic oligonucleotide
gcaugcugacuuggcagau

SEQ ID NO: 2958747 - RNA, 19 nt, Artificial Sequence
  Description of Artificial Sequence: Synthetic oligonucleotide
cgccuuggcaugcugacuu

SEQ ID NO: 2958748 - RNA, 19 nt, Artificial Sequence
  Description of Artificial Sequence: Synthetic oligonucleotide
cgcggcggugccccgcggc

SEQ ID NO: 2958749 - RNA, 19 nt, Artificial Sequence
  Description of Artificial Sequence: Synthetic oligonucleotide
cggcgguaggcguccugac

SEQ ID NO: 2958750 - RNA, 19 nt, Artificial Sequence
  Description of Artificial Sequence: Synthetic oligonucleotide
gugccccgcggccucuaau

SEQ ID NO: 2958751 - RNA, 19 nt, Artificial Sequence
  Description of Artificial Sequence: Synthetic oligonucleotide
ggugccccgcggccucuaa

SEQ ID NO: 2958752 - RNA, 19 nt, Artificial Sequence
  Description of Artificial Sequence: Synthetic oligonucleotide
cgcucugcggcccgggucu

SEQ ID NO: 2958753 - RNA, 19 nt, Artificial Sequence
  Description of Artificial Sequence: Synthetic oligonucleotide
ggguaccggcaggcugcgc

SEQ ID NO: 2958754 - RNA, 19 nt, Artificial Sequence
  Description of Artificial Sequence: Synthetic oligonucleotide
cggcccgggucucccuggg

SEQ ID NO: 2958755 - RNA, 19 nt, Artificial Sequence
  Description of Artificial Sequence: Synthetic oligonucleotide
accagccguccaggagcuu

SEQ ID NO: 2958756 - RNA, 19 nt, Artificial Sequence
  Description of Artificial Sequence: Synthetic oligonucleotide
ggacacuguugcggcggua

SEQ ID NO: 2958757 - RNA, 19 nt, Artificial Sequence
  Description of Artificial Sequence: Synthetic oligonucleotide
cgauggcuucacccucuga

SEQ ID NO: 2958758 - RNA, 19 nt, Artificial Sequence
  Description of Artificial Sequence: Synthetic oligonucleotide
gcgcggcggugccccgcgg

SEQ ID NO: 2958759 - RNA, 19 nt, Artificial Sequence
  Description of Artificial Sequence: Synthetic oligonucleotide
cggccucuaaucagccucu

SEQ ID NO: 2958760 - RNA, 19 nt, Artificial Sequence
  Description of Artificial Sequence: Synthetic oligonucleotide
ggcgcucugcggcccgggu

SEQ ID NO: 2958761 - RNA, 19 nt, Artificial Sequence
  Description of Artificial Sequence: Synthetic oligonucleotide
cccuggggcgacggcgcug

SEQ ID NO: 2958762 - RNA, 19 nt, Artificial Sequence
  Description of Artificial Sequence: Synthetic oligonucleotide
gggcgacggcgcugcugca

SEQ ID NO: 2958763 - RNA, 19 nt, Artificial Sequence
  Description of Artificial Sequence: Synthetic oligonucleotide
ccgggucucccuggggcga

SEQ ID NO: 2958764 - RNA, 19 nt, Artificial Sequence
  Description of Artificial Sequence: Synthetic oligonucleotide
gcgccuuggcaugcugacu

SEQ ID NO: 2958765 - RNA, 19 nt, Artificial Sequence
  Description of Artificial Sequence: Synthetic oligonucleotide
cagcuuccgcuuggugcgu

SEQ ID NO: 2958766 - RNA, 19 nt, Artificial Sequence
  Description of Artificial Sequence: Synthetic oligonucleotide
cugcggcccgggucucccu

SEQ ID NO: 2958767 - RNA, 19 nt, Artificial Sequence
  Description of Artificial Sequence: Synthetic oligonucleotide
ccgcuuggugcgucucugu

SEQ ID NO: 2958768 - RNA, 19 nt, Artificial Sequence
  Description of Artificial Sequence: Synthetic oligonucleotide
gcucugcggcccgggucuc

SEQ ID NO: 2958769 - RNA, 19 nt, Artificial Sequence
  Description of Artificial Sequence: Synthetic oligonucleotide
gcguccugacugaggcgcu

SEQ ID NO: 2958770 - RNA, 19 nt, Artificial Sequence
  Description of Artificial Sequence: Synthetic oligonucleotide
cgacggcgcugcugcagga

SEQ ID NO: 2958771 - RNA, 19 nt, Artificial Sequence
  Description of Artificial Sequence: Synthetic oligonucleotide
ggcugcgccuuggcaugcu

SEQ ID NO: 2958772 - RNA, 19 nt, Artificial Sequence
  Description of Artificial Sequence: Synthetic oligonucleotide
cgcggccucuaaucagccu

SEQ ID NO: 2958773 - RNA, 19 nt, Artificial Sequence
  Description of Artificial Sequence: Synthetic oligonucleotide
cuggggcgacggcgcugcu

SEQ ID NO: 2958774 - RNA, 19 nt, Artificial Sequence
  Description of Artificial Sequence: Synthetic oligonucleotide
cggacacuguugcggcggu

SEQ ID NO: 2958775 - RNA, 19 nt, Artificial Sequence
  Description of Artificial Sequence: Synthetic oligonucleotide
cggacgccagcuuccgcuu

SEQ ID NO: 2958776 - RNA, 19 nt, Artificial Sequence
  Description of Artificial Sequence: Synthetic oligonucleotide
cgguggcauccccuuuccu

SEQ ID NO: 2958777 - RNA, 19 nt, Artificial Sequence
  Description of Artificial Sequence: Synthetic oligonucleotide
cgcuuccgagaacgcuggu

SEQ ID NO: 2958778 - RNA, 19 nt, Artificial Sequence
  Description of Artificial Sequence: Synthetic oligonucleotide
ccccagccuucugcagaua

SEQ ID NO: 2958779 - RNA, 19 nt, Artificial Sequence
  Description of Artificial Sequence: Synthetic oligonucleotide
gcggugccccgcggccucu

SEQ ID NO: 2958780 - RNA, 19 nt, Artificial Sequence
  Description of Artificial Sequence: Synthetic oligonucleotide
cguccugacugaggcgcuu

SEQ ID NO: 2958781 - RNA, 19 nt, Artificial Sequence
  Description of Artificial Sequence: Synthetic oligonucleotide
cggcggugccccgcggccu

SEQ ID NO: 2958782 - RNA, 19 nt, Artificial Sequence
  Description of Artificial Sequence: Synthetic oligonucleotide
cggugccccgcggccucua

SEQ ID NO: 2958783 - RNA, 19 nt, Artificial Sequence
  Description of Artificial Sequence: Synthetic oligonucleotide
gauccguucaucaauaugg

SEQ ID NO: 2958784 - RNA, 19 nt, Artificial Sequence
  Description of Artificial Sequence: Synthetic oligonucleotide
uuucuuuccaaucugccag

SEQ ID NO: 2958785 - RNA, 19 nt, Artificial Sequence
  Description of Artificial Sequence: Synthetic oligonucleotide
uaacguaacgcucacgcgg

SEQ ID NO: 2958786 - RNA, 19 nt, Artificial Sequence
  Description of Artificial Sequence: Synthetic oligonucleotide
ucauaagcuggacacaggg

SEQ ID NO: 2958787 - RNA, 19 nt, Artificial Sequence
  Description of Artificial Sequence: Synthetic oligonucleotide
aauauggucaugccagguc

SEQ ID NO: 2958788 - RNA, 19 nt, Artificial Sequence
  Description of Artificial Sequence: Synthetic oligonucleotide
cacagaaacgucaugacag

SEQ ID NO: 2958789 - RNA, 19 nt, Artificial Sequence
  Description of Artificial Sequence: Synthetic oligonucleotide
aacucgaagaagcgggagc

SEQ ID NO: 2958790 - RNA, 19 nt, Artificial Sequence
  Description of Artificial Sequence: Synthetic oligonucleotide
gagaucauaagcuggacac

SEQ ID NO: 2958791 - RNA, 19 nt, Artificial Sequence
  Description of Artificial Sequence: Synthetic oligonucleotide
uucaaucacagaaacguca

SEQ ID NO: 2958792 - RNA, 19 nt, Artificial Sequence
  Description of Artificial Sequence: Synthetic oligonucleotide
uuuccaaucugccagggcu

SEQ ID NO: 2958793 - RNA, 19 nt, Artificial Sequence
  Description of Artificial Sequence: Synthetic oligonucleotide
auauggucaugccaggucg

SEQ ID NO: 2958794 - RNA, 19 nt, Artificial Sequence
  Description of Artificial Sequence: Synthetic oligonucleotide
gaaacgucaugacaguucc

SEQ ID NO: 2958795 - RNA, 19 nt, Artificial Sequence
  Description of Artificial Sequence: Synthetic oligonucleotide
auaagcuggacacagggcu

SEQ ID NO: 2958796 - RNA, 19 nt, Artificial Sequence
  Description of Artificial Sequence: Synthetic oligonucleotide
guucguuuccaacucaacg

SEQ ID NO: 2958797 - RNA, 19 nt, Artificial Sequence
  Description of Artificial Sequence: Synthetic oligonucleotide
aucaauauggucaugccag

SEQ ID NO: 2958798 - RNA, 19 nt, Artificial Sequence
  Description of Artificial Sequence: Synthetic oligonucleotide
uuuccaacucaacgaaugg

SEQ ID NO: 2958799 - RNA, 19 nt, Artificial Sequence
  Description of Artificial Sequence: Synthetic oligonucleotide
uucguuuccaacucaacga

SEQ ID NO: 2958800 - RNA, 19 nt, Artificial Sequence
  Description of Artificial Sequence: Synthetic oligonucleotide
gauuauccgguccuggucc

SEQ ID NO: 2958801 - RNA, 19 nt, Artificial Sequence
  Description of Artificial Sequence: Synthetic oligonucleotide
uccaacucaacgaauggca

SEQ ID NO: 2958802 - RNA, 19 nt, Artificial Sequence
  Description of Artificial Sequence: Synthetic oligonucleotide
uucaucaauauggucaugc

SEQ ID NO: 2958803 - RNA, 19 nt, Artificial Sequence
  Description of Artificial Sequence: Synthetic oligonucleotide
guuucucuagcccagcggg

SEQ ID NO: 2958804 - RNA, 19 nt, Artificial Sequence
  Description of Artificial Sequence: Synthetic oligonucleotide
cuugguuucaaucacagaa

SEQ ID NO: 2958805 - RNA, 19 nt, Artificial Sequence
  Description of Artificial Sequence: Synthetic oligonucleotide
ucugccagggcuccaaggg

SEQ ID NO: 2958806 - RNA, 19 nt, Artificial Sequence
  Description of Artificial Sequence: Synthetic oligonucleotide
aaggggaugaagcggauga

SEQ ID NO: 2958807 - RNA, 19 nt, Artificial Sequence
  Description of Artificial Sequence: Synthetic oligonucleotide
gaagcggaugauuauccgg

SEQ ID NO: 2958808 - RNA, 19 nt, Artificial Sequence
  Description of Artificial Sequence: Synthetic oligonucleotide
ugcggugcccacaacaccg

SEQ ID NO: 2958809 - RNA, 19 nt, Artificial Sequence
  Description of Artificial Sequence: Synthetic oligonucleotide
uuggugaggaacucgaaga

SEQ ID NO: 2958810 - RNA, 19 nt, Artificial Sequence
  Description of Artificial Sequence: Synthetic oligonucleotide
ugaggaacucgaagaagcg

SEQ ID NO: 2958811 - RNA, 19 nt, Artificial Sequence
  Description of Artificial Sequence: Synthetic oligonucleotide
aucacagaaacgucaugac

SEQ ID NO: 2958812 - RNA, 19 nt, Artificial Sequence
  Description of Artificial Sequence: Synthetic oligonucleotide
aguuccuuucuuuccaauc

SEQ ID NO: 2958813 - RNA, 19 nt, Artificial Sequence
  Description of Artificial Sequence: Synthetic oligonucleotide
ucuagaagggcccugggua

SEQ ID NO: 2958814 - RNA, 19 nt, Artificial Sequence
  Description of Artificial Sequence: Synthetic oligonucleotide
gaucauaagcuggacacag

SEQ ID NO: 2958815 - RNA, 19 nt, Artificial Sequence
  Description of Artificial Sequence: Synthetic oligonucleotide
acagccguuucucuagccc

SEQ ID NO: 2958816 - RNA, 19 nt, Artificial Sequence
  Description of Artificial Sequence: Synthetic oligonucleotide
uggaagagaucauaagcug

SEQ ID NO: 2958817 - RNA, 19 nt, Artificial Sequence
  Description of Artificial Sequence: Synthetic oligonucleotide
aaaugcccuggauucuugg

SEQ ID NO: 2958818 - RNA, 19 nt, Artificial Sequence
  Description of Artificial Sequence: Synthetic oligonucleotide
ucgggcuuguccaggaugg

SEQ ID NO: 2958819 - RNA, 19 nt, Artificial Sequence
  Description of Artificial Sequence: Synthetic oligonucleotide
ugguuucaaucacagaaac

SEQ ID NO: 2958820 - RNA, 19 nt, Artificial Sequence
  Description of Artificial Sequence: Synthetic oligonucleotide
gugcccacaacaccgaugg

SEQ ID NO: 2958821 - RNA, 19 nt, Artificial Sequence
  Description of Artificial Sequence: Synthetic oligonucleotide
gauucuugguuucaaucac

SEQ ID NO: 2958822 - RNA, 19 nt, Artificial Sequence
  Description of Artificial Sequence: Synthetic oligonucleotide
ucacagaaacgucaugaca

SEQ ID NO: 2958823 - RNA, 19 nt, Artificial Sequence
  Description of Artificial Sequence: Synthetic oligonucleotide
ucaauauggucaugccagg

SEQ ID NO: 2958824 - RNA, 19 nt, Artificial Sequence
  Description of Artificial Sequence: Synthetic oligonucleotide
uuguccaggauggaggcgg

SEQ ID NO: 2958825 - RNA, 19 nt, Artificial Sequence
  Description of Artificial Sequence: Synthetic oligonucleotide
guuucaaucacagaaacgu

SEQ ID NO: 2958826 - RNA, 19 nt, Artificial Sequence
  Description of Artificial Sequence: Synthetic oligonucleotide
ucagcaaaugcccuggauu

SEQ ID NO: 2958827 - RNA, 19 nt, Artificial Sequence
  Description of Artificial Sequence: Synthetic oligonucleotide
augaagcggaugauuaucc

SEQ ID NO: 2958828 - RNA, 19 nt, Artificial Sequence
  Description of Artificial Sequence: Synthetic oligonucleotide
acaccgauggaagagauca

SEQ ID NO: 2958829 - RNA, 19 nt, Artificial Sequence
  Description of Artificial Sequence: Synthetic oligonucleotide
ugaagcggaugauuauccg

SEQ ID NO: 2958830 - RNA, 19 nt, Artificial Sequence
  Description of Artificial Sequence: Synthetic oligonucleotide
ucaucaauauggucaugcc

SEQ ID NO: 2958831 - RNA, 19 nt, Artificial Sequence
  Description of Artificial Sequence: Synthetic oligonucleotide
ucaaucacagaaacgucau

SEQ ID NO: 2958832 - RNA, 19 nt, Artificial Sequence
  Description of Artificial Sequence: Synthetic oligonucleotide
uccaaggggaugaagcgga

SEQ ID NO: 2958833 - RNA, 19 nt, Artificial Sequence
  Description of Artificial Sequence: Synthetic oligonucleotide
uugguuucaaucacagaaa

SEQ ID NO: 2958834 - RNA, 19 nt, Artificial Sequence
  Description of Artificial Sequence: Synthetic oligonucleotide
uguggauccguucaucaau

SEQ ID NO: 2958835 - RNA, 19 nt, Artificial Sequence
  Description of Artificial Sequence: Synthetic oligonucleotide
cacaacucugccaggaggc

SEQ ID NO: 2958836 - RNA, 19 nt, Artificial Sequence
  Description of Artificial Sequence: Synthetic oligonucleotide
gaugauuauccgguccugg

SEQ ID NO: 2958837 - RNA, 19 nt, Artificial Sequence
  Description of Artificial Sequence: Synthetic oligonucleotide
auggaagagaucauaagcu

SEQ ID NO: 2958838 - RNA, 19 nt, Artificial Sequence
  Description of Artificial Sequence: Synthetic oligonucleotide
uggauucuugguuucaauc

SEQ ID NO: 2958839 - RNA, 19 nt, Artificial Sequence
  Description of Artificial Sequence: Synthetic oligonucleotide
uccuuucuuuccaaucugc

SEQ ID NO: 2958840 - RNA, 19 nt, Artificial Sequence
  Description of Artificial Sequence: Synthetic oligonucleotide
ucuguggauccguucauca

SEQ ID NO: 2958841 - RNA, 19 nt, Artificial Sequence
  Description of Artificial Sequence: Synthetic oligonucleotide
agaaacgucaugacaguuc

SEQ ID NO: 2958842 - RNA, 19 nt, Artificial Sequence
  Description of Artificial Sequence: Synthetic oligonucleotide
uucuuuccaaucugccagg

SEQ ID NO: 2958843 - RNA, 19 nt, Artificial Sequence
  Description of Artificial Sequence: Synthetic oligonucleotide
aggaggccucucuagaagg

SEQ ID NO: 2958844 - RNA, 19 nt, Artificial Sequence
  Description of Artificial Sequence: Synthetic oligonucleotide
guuuccaacucaacgaaug

SEQ ID NO: 2958845 - RNA, 19 nt, Artificial Sequence
  Description of Artificial Sequence: Synthetic oligonucleotide
ucuaccggaccacaacucu

SEQ ID NO: 2958846 - RNA, 19 nt, Artificial Sequence
  Description of Artificial Sequence: Synthetic oligonucleotide
guaacguaacgcucacgcg

SEQ ID NO: 2958847 - RNA, 19 nt, Artificial Sequence
  Description of Artificial Sequence: Synthetic oligonucleotide
aaugcccuggauucuuggu

SEQ ID NO: 2958848 - RNA, 19 nt, Artificial Sequence
  Description of Artificial Sequence: Synthetic oligonucleotide
uccuuggugaggaacucga

SEQ ID NO: 2958849 - RNA, 19 nt, Artificial Sequence
  Description of Artificial Sequence: Synthetic oligonucleotide
ucguuuccaacucaacgaa

SEQ ID NO: 2958850 - RNA, 19 nt, Artificial Sequence
  Description of Artificial Sequence: Synthetic oligonucleotide
cauaagcuggacacagggc

SEQ ID NO: 2958851 - RNA, 19 nt, Artificial Sequence
  Description of Artificial Sequence: Synthetic oligonucleotide
ugauuauccgguccugguc

SEQ ID NO: 2958852 - RNA, 19 nt, Artificial Sequence
  Description of Artificial Sequence: Synthetic oligonucleotide
ugcgguucugcucugcggu

SEQ ID NO: 2958853 - RNA, 19 nt, Artificial Sequence
  Description of Artificial Sequence: Synthetic oligonucleotide
uaccggaccacaacucugc

SEQ ID NO: 2958854 - RNA, 19 nt, Artificial Sequence
  Description of Artificial Sequence: Synthetic oligonucleotide
gaagaagcgggagcugugg

SEQ ID NO: 2958855 - RNA, 19 nt, Artificial Sequence
  Description of Artificial Sequence: Synthetic oligonucleotide
aagcggaugauuauccggu

SEQ ID NO: 2958856 - RNA, 19 nt, Artificial Sequence
  Description of Artificial Sequence: Synthetic oligonucleotide
cuagaagggcccuggguag

SEQ ID NO: 2958857 - RNA, 19 nt, Artificial Sequence
  Description of Artificial Sequence: Synthetic oligonucleotide
uccaggauggaggcggugg

SEQ ID NO: 2958858 - RNA, 19 nt, Artificial Sequence
  Description of Artificial Sequence: Synthetic oligonucleotide
ucugcggugcccacaacac

SEQ ID NO: 2958859 - RNA, 19 nt, Artificial Sequence
  Description of Artificial Sequence: Synthetic oligonucleotide
uucgggcuuguccaggaug

SEQ ID NO: 2958860 - RNA, 19 nt, Artificial Sequence
  Description of Artificial Sequence: Synthetic oligonucleotide
uuccaacucaacgaauggc

SEQ ID NO: 2958861 - RNA, 19 nt, Artificial Sequence
  Description of Artificial Sequence: Synthetic oligonucleotide
aacgucaugacaguuccuu

SEQ ID NO: 2958862 - RNA, 19 nt, Artificial Sequence
  Description of Artificial Sequence: Synthetic oligonucleotide
ggauucuugguuucaauca

SEQ ID NO: 2958863 - RNA, 19 nt, Artificial Sequence
  Description of Artificial Sequence: Synthetic oligonucleotide
guaggcucagcaaaugccc

SEQ ID NO: 2958864 - RNA, 19 nt, Artificial Sequence
  Description of Artificial Sequence: Synthetic oligonucleotide
gaagcgggagcugugguug

SEQ ID NO: 2958865 - RNA, 19 nt, Artificial Sequence
  Description of Artificial Sequence: Synthetic oligonucleotide
cacacagccguuucucuag

SEQ ID NO: 2958866 - RNA, 19 nt, Artificial Sequence
  Description of Artificial Sequence: Synthetic oligonucleotide
cuuucuuuccaaucugcca

SEQ ID NO: 2958867 - RNA, 19 nt, Artificial Sequence
  Description of Artificial Sequence: Synthetic oligonucleotide
augauuauccgguccuggu

SEQ ID NO: 2958868 - RNA, 19 nt, Artificial Sequence
  Description of Artificial Sequence: Synthetic oligonucleotide
ucucuagaagggcccuggg

SEQ ID NO: 2958869 - RNA, 19 nt, Artificial Sequence
  Description of Artificial Sequence: Synthetic oligonucleotide
uggugaggaacucgaagaa

SEQ ID NO: 2958870 - RNA, 19 nt, Artificial Sequence
  Description of Artificial Sequence: Synthetic oligonucleotide
aagcgggagcugugguugc

SEQ ID NO: 2958871 - RNA, 19 nt, Artificial Sequence
  Description of Artificial Sequence: Synthetic oligonucleotide
aacgcucacgcggucuucg

SEQ ID NO: 2958872 - RNA, 19 nt, Artificial Sequence
  Description of Artificial Sequence: Synthetic oligonucleotide
acagaaacgucaugacagu

SEQ ID NO: 2958873 - RNA, 19 nt, Artificial Sequence
  Description of Artificial Sequence: Synthetic oligonucleotide
cacaacaccgauggaagag

SEQ ID NO: 2958874 - RNA, 19 nt, Artificial Sequence
  Description of Artificial Sequence: Synthetic oligonucleotide
ucuuuccaaucugccaggg

SEQ ID NO: 2958875 - RNA, 19 nt, Artificial Sequence
  Description of Artificial Sequence: Synthetic oligonucleotide
aacucugccaggaggccuc

SEQ ID NO: 2958876 - RNA, 19 nt, Artificial Sequence
  Description of Artificial Sequence: Synthetic oligonucleotide
uuucucuagcccagcgggc

SEQ ID NO: 2958877 - RNA, 19 nt, Artificial Sequence
  Description of Artificial Sequence: Synthetic oligonucleotide
uagcccagcgggcacgcgg

SEQ ID NO: 2958878 - RNA, 19 nt, Artificial Sequence
  Description of Artificial Sequence: Synthetic oligonucleotide
caucaauauggucaugcca

SEQ ID NO: 2958879 - RNA, 19 nt, Artificial Sequence
  Description of Artificial Sequence: Synthetic oligonucleotide
acacagccguuucucuagc

SEQ ID NO: 2958880 - RNA, 19 nt, Artificial Sequence
  Description of Artificial Sequence: Synthetic oligonucleotide
cguaacguaacgcucacgc

SEQ ID NO: 2958881 - RNA, 19 nt, Artificial Sequence
  Description of Artificial Sequence: Synthetic oligonucleotide
aagaagcgggagcuguggu

SEQ ID NO: 2958882 - RNA, 19 nt, Artificial Sequence
  Description of Artificial Sequence: Synthetic oligonucleotide
guugcgguucugcucugcg

SEQ ID NO: 2958883 - RNA, 19 nt, Artificial Sequence
  Description of Artificial Sequence: Synthetic oligonucleotide
aaucugccagggcuccaag

SEQ ID NO: 2958884 - RNA, 19 nt, Artificial Sequence
  Description of Artificial Sequence: Synthetic oligonucleotide
ugugguugcgguucugcuc

SEQ ID NO: 2958885 - RNA, 19 nt, Artificial Sequence
  Description of Artificial Sequence: Synthetic oligonucleotide
ucuugguuucaaucacaga

SEQ ID NO: 2958886 - RNA, 19 nt, Artificial Sequence
  Description of Artificial Sequence: Synthetic oligonucleotide
uaagcuggacacagggcuc

SEQ ID NO: 2958887 - RNA, 19 nt, Artificial Sequence
  Description of Artificial Sequence: Synthetic oligonucleotide
gguuucaaucacagaaacg

SEQ ID NO: 2958888 - RNA, 19 nt, Artificial Sequence
  Description of Artificial Sequence: Synthetic oligonucleotide
ccguucaucaauaugguca

SEQ ID NO: 2958889 - RNA, 19 nt, Artificial Sequence
  Description of Artificial Sequence: Synthetic oligonucleotide
gucaugccaggucguaacg

SEQ ID NO: 2958890 - RNA, 19 nt, Artificial Sequence
  Description of Artificial Sequence: Synthetic oligonucleotide
ugccagggcuccaagggga

SEQ ID NO: 2958891 - RNA, 19 nt, Artificial Sequence
  Description of Artificial Sequence: Synthetic oligonucleotide
acaacucugccaggaggcc

SEQ ID NO: 2958892 - RNA, 19 nt, Artificial Sequence
  Description of Artificial Sequence: Synthetic oligonucleotide
uugcgguucugcucugcgg

SEQ ID NO: 2958893 - RNA, 19 nt, Artificial Sequence
  Description of Artificial Sequence: Synthetic oligonucleotide
acucgaagaagcgggagcu

SEQ ID NO: 2958894 - RNA, 19 nt, Artificial Sequence
  Description of Artificial Sequence: Synthetic oligonucleotide
aucugccagggcuccaagg

SEQ ID NO: 2958895 - RNA, 19 nt, Artificial Sequence
  Description of Artificial Sequence: Synthetic oligonucleotide
uauggucaugccaggucgu

SEQ ID NO: 2958896 - RNA, 19 nt, Artificial Sequence
  Description of Artificial Sequence: Synthetic oligonucleotide
aacguaacgcucacgcggu

SEQ ID NO: 2958897 - RNA, 19 nt, Artificial Sequence
  Description of Artificial Sequence: Synthetic oligonucleotide
aacaccgauggaagagauc

SEQ ID NO: 2958898 - RNA, 19 nt, Artificial Sequence
  Description of Artificial Sequence: Synthetic oligonucleotide
uaggcucagcaaaugcccu

SEQ ID NO: 2958899 - RNA, 19 nt, Artificial Sequence
  Description of Artificial Sequence: Synthetic oligonucleotide
uugcuggcaaguucguuuc

SEQ ID NO: 2958900 - RNA, 19 nt, Artificial Sequence
  Description of Artificial Sequence: Synthetic oligonucleotide
agcggaugauuauccgguc

SEQ ID NO: 2958901 - RNA, 19 nt, Artificial Sequence
  Description of Artificial Sequence: Synthetic oligonucleotide
gcuccaaggggaugaagcg

SEQ ID NO: 2958902 - RNA, 19 nt, Artificial Sequence
  Description of Artificial Sequence: Synthetic oligonucleotide
uuccaaucugccagggcuc

SEQ ID NO: 2958903 - RNA, 19 nt, Artificial Sequence
  Description of Artificial Sequence: Synthetic oligonucleotide
aggccucucuagaagggcc

SEQ ID NO: 2958904 - RNA, 19 nt, Artificial Sequence
  Description of Artificial Sequence: Synthetic oligonucleotide
ucgaagaagcgggagcugu

SEQ ID NO: 2958905 - RNA, 19 nt, Artificial Sequence
  Description of Artificial Sequence: Synthetic oligonucleotide
aguucguuuccaacucaac

SEQ ID NO: 2958906 - RNA, 19 nt, Artificial Sequence
  Description of Artificial Sequence: Synthetic oligonucleotide
accggaccacaacucugcc

SEQ ID NO: 2958907 - RNA, 19 nt, Artificial Sequence
  Description of Artificial Sequence: Synthetic oligonucleotide
gaacucgaagaagcgggag

SEQ ID NO: 2958908 - RNA, 19 nt, Artificial Sequence
  Description of Artificial Sequence: Synthetic oligonucleotide
ugccaggucguaacguaac

SEQ ID NO: 2958909 - RNA, 19 nt, Artificial Sequence
  Description of Artificial Sequence: Synthetic oligonucleotide
uucucuagcccagcgggca

SEQ ID NO: 2958910 - RNA, 19 nt, Artificial Sequence
  Description of Artificial Sequence: Synthetic oligonucleotide
cuuuccaaucugccagggc

SEQ ID NO: 2958911 - RNA, 19 nt, Artificial Sequence
  Description of Artificial Sequence: Synthetic oligonucleotide
gguaggcucagcaaaugcc

SEQ ID NO: 2958912 - RNA, 19 nt, Artificial Sequence
  Description of Artificial Sequence: Synthetic oligonucleotide
ucuucgggcuuguccagga

SEQ ID NO: 2958913 - RNA, 19 nt, Artificial Sequence
  Description of Artificial Sequence: Synthetic oligonucleotide
cuccaaggggaugaagcgg

SEQ ID NO: 2958914 - RNA, 19 nt, Artificial Sequence
  Description of Artificial Sequence: Synthetic oligonucleotide
cacagggcucuguggaucc

SEQ ID NO: 2958915 - RNA, 19 nt, Artificial Sequence
  Description of Artificial Sequence: Synthetic oligonucleotide
cuaccggaccacaacucug

SEQ ID NO: 2958916 - RNA, 19 nt, Artificial Sequence
  Description of Artificial Sequence: Synthetic oligonucleotide
accacaacucugccaggag

SEQ ID NO: 2958917 - RNA, 19 nt, Artificial Sequence
  Description of Artificial Sequence: Synthetic oligonucleotide
cucucuagaagggcccugg

SEQ ID NO: 2958918 - RNA, 19 nt, Artificial Sequence
  Description of Artificial Sequence: Synthetic oligonucleotide
uggcaaguucguuuccaac

SEQ ID NO: 2958919 - RNA, 19 nt, Artificial Sequence
  Description of Artificial Sequence: Synthetic oligonucleotide
ugccaggaggccucucuag

SEQ ID NO: 2958920 - RNA, 19 nt, Artificial Sequence
  Description of Artificial Sequence: Synthetic oligonucleotide
cugguccagggccagcucc

SEQ ID NO: 2958921 - RNA, 19 nt, Artificial Sequence
  Description of Artificial Sequence: Synthetic oligonucleotide
ggcuuguccaggauggagg

SEQ ID NO: 2958922 - RNA, 19 nt, Artificial Sequence
  Description of Artificial Sequence: Synthetic oligonucleotide
acaacaccgauggaagaga

SEQ ID NO: 2958923 - RNA, 19 nt, Artificial Sequence
  Description of Artificial Sequence: Synthetic oligonucleotide
aggucguaacguaacgcuc

SEQ ID NO: 2958924 - RNA, 19 nt, Artificial Sequence
  Description of Artificial Sequence: Synthetic oligonucleotide
caggaggccucucuagaag

SEQ ID NO: 2958925 - RNA, 19 nt, Artificial Sequence
  Description of Artificial Sequence: Synthetic oligonucleotide
uccguucaucaauaugguc

SEQ ID NO: 2958926 - RNA, 19 nt, Artificial Sequence
  Description of Artificial Sequence: Synthetic oligonucleotide
aaguucguuuccaacucaa

SEQ ID NO: 2958927 - RNA, 19 nt, Artificial Sequence
  Description of Artificial Sequence: Synthetic oligonucleotide
aucauaagcuggacacagg

SEQ ID NO: 2958928 - RNA, 19 nt, Artificial Sequence
  Description of Artificial Sequence: Synthetic oligonucleotide
uauccgguccugguccagg

SEQ ID NO: 2958929 - RNA, 19 nt, Artificial Sequence
  Description of Artificial Sequence: Synthetic oligonucleotide
acacagggcucuguggauc

SEQ ID NO: 2958930 - RNA, 19 nt, Artificial Sequence
  Description of Artificial Sequence: Synthetic oligonucleotide
ggauccguucaucaauaug

SEQ ID NO: 2958931 - RNA, 19 nt, Artificial Sequence
  Description of Artificial Sequence: Synthetic oligonucleotide
auuauccgguccuggucca

SEQ ID NO: 2958932 - RNA, 19 nt, Artificial Sequence
  Description of Artificial Sequence: Synthetic oligonucleotide
cccacaacaccgauggaag

SEQ ID NO: 2958933 - RNA, 19 nt, Artificial Sequence
  Description of Artificial Sequence: Synthetic oligonucleotide
aagcuggacacagggcucu

SEQ ID NO: 2958934 - RNA, 19 nt, Artificial Sequence
  Description of Artificial Sequence: Synthetic oligonucleotide
ugcccuggauucuugguuu

SEQ ID NO: 2958935 - RNA, 19 nt, Artificial Sequence
  Description of Artificial Sequence: Synthetic oligonucleotide
ugcucugcggugcccacaa

SEQ ID NO: 2958936 - RNA, 19 nt, Artificial Sequence
  Description of Artificial Sequence: Synthetic oligonucleotide
ggcuccaaggggaugaagc

SEQ ID NO: 2958937 - RNA, 19 nt, Artificial Sequence
  Description of Artificial Sequence: Synthetic oligonucleotide
caaucacagaaacgucaug

SEQ ID NO: 2958938 - RNA, 19 nt, Artificial Sequence
  Description of Artificial Sequence: Synthetic oligonucleotide
auccgguccugguccaggg

SEQ ID NO: 2958939 - RNA, 19 nt, Artificial Sequence
  Description of Artificial Sequence: Synthetic oligonucleotide
uccaaucugccagggcucc

SEQ ID NO: 2958940 - RNA, 19 nt, Artificial Sequence
  Description of Artificial Sequence: Synthetic oligonucleotide
agaucauaagcuggacaca

SEQ ID NO: 2958941 - RNA, 19 nt, Artificial Sequence
  Description of Artificial Sequence: Synthetic oligonucleotide
ucaugccaggucguaacgu

SEQ ID NO: 2958942 - RNA, 19 nt, Artificial Sequence
  Description of Artificial Sequence: Synthetic oligonucleotide
caaaugcccuggauucuug

SEQ ID NO: 2958943 - RNA, 19 nt, Artificial Sequence
  Description of Artificial Sequence: Synthetic oligonucleotide
cuggacacagggcucugug

SEQ ID NO: 2958944 - RNA, 19 nt, Artificial Sequence
  Description of Artificial Sequence: Synthetic oligonucleotide
cugccagggcuccaagggg

SEQ ID NO: 2958945 - RNA, 19 nt, Artificial Sequence
  Description of Artificial Sequence: Synthetic oligonucleotide
aggcucagcaaaugcccug

SEQ ID NO: 2958946 - RNA, 19 nt, Artificial Sequence
  Description of Artificial Sequence: Synthetic oligonucleotide
ucguaacguaacgcucacg

SEQ ID NO: 2958947 - RNA, 19 nt, Artificial Sequence
  Description of Artificial Sequence: Synthetic oligonucleotide
ggucaugccaggucguaac

SEQ ID NO: 2958948 - RNA, 19 nt, Artificial Sequence
  Description of Artificial Sequence: Synthetic oligonucleotide
ggugaggaacucgaagaag

SEQ ID NO: 2958949 - RNA, 19 nt, Artificial Sequence
  Description of Artificial Sequence: Synthetic oligonucleotide
gcaaguucguuuccaacuc

SEQ ID NO: 2958950 - RNA, 19 nt, Artificial Sequence
  Description of Artificial Sequence: Synthetic oligonucleotide
gaggccucucuagaagggc

SEQ ID NO: 2958951 - RNA, 19 nt, Artificial Sequence
  Description of Artificial Sequence: Synthetic oligonucleotide
augcccuggauucuugguu

SEQ ID NO: 2958952 - RNA, 19 nt, Artificial Sequence
  Description of Artificial Sequence: Synthetic oligonucleotide
gcuuguccaggauggaggc

SEQ ID NO: 2958953 - RNA, 19 nt, Artificial Sequence
  Description of Artificial Sequence: Synthetic oligonucleotide
acaguuccuuucuuuccaa

SEQ ID NO: 2958954 - RNA, 19 nt, Artificial Sequence
  Description of Artificial Sequence: Synthetic oligonucleotide
ugcuggcaaguucguuucc

SEQ ID NO: 2958955 - RNA, 19 nt, Artificial Sequence
  Description of Artificial Sequence: Synthetic oligonucleotide
gugguugcgguucugcucu

SEQ ID NO: 2958956 - RNA, 19 nt, Artificial Sequence
  Description of Artificial Sequence: Synthetic oligonucleotide
ucucuagcccagcgggcac

SEQ ID NO: 2958957 - RNA, 19 nt, Artificial Sequence
  Description of Artificial Sequence: Synthetic oligonucleotide
cggaccacaacucugccag

SEQ ID NO: 2958958 - RNA, 19 nt, Artificial Sequence
  Description of Artificial Sequence: Synthetic oligonucleotide
uggguaggcucagcaaaug

SEQ ID NO: 2958959 - RNA, 19 nt, Artificial Sequence
  Description of Artificial Sequence: Synthetic oligonucleotide
ggguaggcucagcaaaugc

SEQ ID NO: 2958960 - RNA, 19 nt, Artificial Sequence
  Description of Artificial Sequence: Synthetic oligonucleotide
ucaugacaguuccuuucuu

SEQ ID NO: 2958961 - RNA, 19 nt, Artificial Sequence
  Description of Artificial Sequence: Synthetic oligonucleotide
ggcaaguucguuuccaacu

SEQ ID NO: 2958962 - RNA, 19 nt, Artificial Sequence
  Description of Artificial Sequence: Synthetic oligonucleotide
agaagcgggagcugugguu

SEQ ID NO: 2958963 - RNA, 19 nt, Artificial Sequence
  Description of Artificial Sequence: Synthetic oligonucleotide
ccacaacucugccaggagg

SEQ ID NO: 2958964 - RNA, 19 nt, Artificial Sequence
  Description of Artificial Sequence: Synthetic oligonucleotide
cacagccguuucucuagcc

SEQ ID NO: 2958965 - RNA, 19 nt, Artificial Sequence
  Description of Artificial Sequence: Synthetic oligonucleotide
gcgguggccgcacacagcc

SEQ ID NO: 2958966 - RNA, 19 nt, Artificial Sequence
  Description of Artificial Sequence: Synthetic oligonucleotide
cucugcggugcccacaaca

SEQ ID NO: 2958967 - RNA, 19 nt, Artificial Sequence
  Description of Artificial Sequence: Synthetic oligonucleotide
cuuguccaggauggaggcg

SEQ ID NO: 2958968 - RNA, 19 nt, Artificial Sequence
  Description of Artificial Sequence: Synthetic oligonucleotide
gucguaacguaacgcucac

SEQ ID NO: 2958969 - RNA, 19 nt, Artificial Sequence
  Description of Artificial Sequence: Synthetic oligonucleotide
ggcucuguggauccguuca

SEQ ID NO: 2958970 - RNA, 19 nt, Artificial Sequence
  Description of Artificial Sequence: Synthetic oligonucleotide
gccaggucguaacguaacg

SEQ ID NO: 2958971 - RNA, 19 nt, Artificial Sequence
  Description of Artificial Sequence: Synthetic oligonucleotide
caaguucguuuccaacuca

SEQ ID NO: 2958972 - RNA, 19 nt, Artificial Sequence
  Description of Artificial Sequence: Synthetic oligonucleotide
ggcucagcaaaugcccugg

SEQ ID NO: 2958973 - RNA, 19 nt, Artificial Sequence
  Description of Artificial Sequence: Synthetic oligonucleotide
gcggaugauuauccggucc

SEQ ID NO: 2958974 - RNA, 19 nt, Artificial Sequence
  Description of Artificial Sequence: Synthetic oligonucleotide
uggauccguucaucaauau

SEQ ID NO: 2958975 - RNA, 19 nt, Artificial Sequence
  Description of Artificial Sequence: Synthetic oligonucleotide
caggucguaacguaacgcu

SEQ ID NO: 2958976 - RNA, 19 nt, Artificial Sequence
  Description of Artificial Sequence: Synthetic oligonucleotide
cagccguuucucuagccca

SEQ ID NO: 2958977 - RNA, 19 nt, Artificial Sequence
  Description of Artificial Sequence: Synthetic oligonucleotide
cuugcuggcaaguucguuu

SEQ ID NO: 2958978 - RNA, 19 nt, Artificial Sequence
  Description of Artificial Sequence: Synthetic oligonucleotide
gcucacgcggucuucgggc

SEQ ID NO: 2958979 - RNA, 19 nt, Artificial Sequence
  Description of Artificial Sequence: Synthetic oligonucleotide
auccguucaucaauauggu

SEQ ID NO: 2958980 - RNA, 19 nt, Artificial Sequence
  Description of Artificial Sequence: Synthetic oligonucleotide
accgauggaagagaucaua

SEQ ID NO: 2958981 - RNA, 19 nt, Artificial Sequence
  Description of Artificial Sequence: Synthetic oligonucleotide
ggucguaacguaacgcuca

SEQ ID NO: 2958982 - RNA, 19 nt, Artificial Sequence
  Description of Artificial Sequence: Synthetic oligonucleotide
cugcggugcccacaacacc

SEQ ID NO: 2958983 - RNA, 19 nt, Artificial Sequence
  Description of Artificial Sequence: Synthetic oligonucleotide
uccgguccugguccagggc

SEQ ID NO: 2958984 - RNA, 19 nt, Artificial Sequence
  Description of Artificial Sequence: Synthetic oligonucleotide
uguccaggauggaggcggu

SEQ ID NO: 2958985 - RNA, 19 nt, Artificial Sequence
  Description of Artificial Sequence: Synthetic oligonucleotide
agcccagcgggcacgcggc

SEQ ID NO: 2958986 - RNA, 19 nt, Artificial Sequence
  Description of Artificial Sequence: Synthetic oligonucleotide
ggagcugugguugcgguuc

SEQ ID NO: 2958987 - RNA, 19 nt, Artificial Sequence
  Description of Artificial Sequence: Synthetic oligonucleotide
caugccaggucguaacgua

SEQ ID NO: 2958988 - RNA, 19 nt, Artificial Sequence
  Description of Artificial Sequence: Synthetic oligonucleotide
cgauggaagagaucauaag

SEQ ID NO: 2958989 - RNA, 19 nt, Artificial Sequence
  Description of Artificial Sequence: Synthetic oligonucleotide
aaacgucaugacaguuccu

SEQ ID NO: 2958990 - RNA, 19 nt, Artificial Sequence
  Description of Artificial Sequence: Synthetic oligonucleotide
gcggucuucgggcuugucc

SEQ ID NO: 2958991 - RNA, 19 nt, Artificial Sequence
  Description of Artificial Sequence: Synthetic oligonucleotide
ucuagcccagcgggcacgc

SEQ ID NO: 2958992 - RNA, 19 nt, Artificial Sequence
  Description of Artificial Sequence: Synthetic oligonucleotide
acgucaugacaguuccuuu

SEQ ID NO: 2958993 - RNA, 19 nt, Artificial Sequence
  Description of Artificial Sequence: Synthetic oligonucleotide
uuauccgguccugguccag

SEQ ID NO: 2958994 - RNA, 19 nt, Artificial Sequence
  Description of Artificial Sequence: Synthetic oligonucleotide
acguaacgcucacgcgguc

SEQ ID NO: 2958995 - RNA, 19 nt, Artificial Sequence
  Description of Artificial Sequence: Synthetic oligonucleotide
ggaggccucucuagaaggg

SEQ ID NO: 2958996 - RNA, 19 nt, Artificial Sequence
  Description of Artificial Sequence: Synthetic oligonucleotide
acgcucacgcggucuucgg

SEQ ID NO: 2958997 - RNA, 19 nt, Artificial Sequence
  Description of Artificial Sequence: Synthetic oligonucleotide
cucuagcccagcgggcacg

SEQ ID NO: 2958998 - RNA, 19 nt, Artificial Sequence
  Description of Artificial Sequence: Synthetic oligonucleotide
cggcuugcuggcaaguucg

SEQ ID NO: 2958999 - RNA, 19 nt, Artificial Sequence
  Description of Artificial Sequence: Synthetic oligonucleotide
caaggggaugaagcggaug

SEQ ID NO: 2959000 - RNA, 19 nt, Artificial Sequence
  Description of Artificial Sequence: Synthetic oligonucleotide
uggucaugccaggucguaa

SEQ ID NO: 2959001 - RNA, 19 nt, Artificial Sequence
  Description of Artificial Sequence: Synthetic oligonucleotide
agccguuucucuagcccag

SEQ ID NO: 2959002 - RNA, 19 nt, Artificial Sequence
  Description of Artificial Sequence: Synthetic oligonucleotide
ucugcucugcggugcccac

SEQ ID NO: 2959003 - RNA, 19 nt, Artificial Sequence
  Description of Artificial Sequence: Synthetic oligonucleotide
gggaugaagcggaugauua

SEQ ID NO: 2959004 - RNA, 19 nt, Artificial Sequence
  Description of Artificial Sequence: Synthetic oligonucleotide
ccaggucguaacguaacgc

SEQ ID NO: 2959005 - RNA, 19 nt, Artificial Sequence
  Description of Artificial Sequence: Synthetic oligonucleotide
auggaggcgguggccgcac

SEQ ID NO: 2959006 - RNA, 19 nt, Artificial Sequence
  Description of Artificial Sequence: Synthetic oligonucleotide
cgucaugacaguuccuuuc

SEQ ID NO: 2959007 - RNA, 19 nt, Artificial Sequence
  Description of Artificial Sequence: Synthetic oligonucleotide
cacgcggcuugcuggcaag

SEQ ID NO: 2959008 - RNA, 19 nt, Artificial Sequence
  Description of Artificial Sequence: Synthetic oligonucleotide
cguuucucuagcccagcgg

SEQ ID NO: 2959009 - RNA, 19 nt, Artificial Sequence
  Description of Artificial Sequence: Synthetic oligonucleotide
gguucugcucugcggugcc

SEQ ID NO: 2959010 - RNA, 19 nt, Artificial Sequence
  Description of Artificial Sequence: Synthetic oligonucleotide
cucuguggauccguucauc

SEQ ID NO: 2959011 - RNA, 19 nt, Artificial Sequence
  Description of Artificial Sequence: Synthetic oligonucleotide
cuggcaaguucguuuccaa

SEQ ID NO: 2959012 - RNA, 19 nt, Artificial Sequence
  Description of Artificial Sequence: Synthetic oligonucleotide
cuguggauccguucaucaa

SEQ ID NO: 2959013 - RNA, 19 nt, Artificial Sequence
  Description of Artificial Sequence: Synthetic oligonucleotide
guucaucaauauggucaug

SEQ ID NO: 2959014 - RNA, 19 nt, Artificial Sequence
  Description of Artificial Sequence: Synthetic oligonucleotide
agcgggagcugugguugcg

SEQ ID NO: 2959015 - RNA, 19 nt, Artificial Sequence
  Description of Artificial Sequence: Synthetic oligonucleotide
ccgguccugguccagggcc

SEQ ID NO: 2959016 - RNA, 19 nt, Artificial Sequence
  Description of Artificial Sequence: Synthetic oligonucleotide
ggaugauuauccgguccug

SEQ ID NO: 2959017 - RNA, 19 nt, Artificial Sequence
  Description of Artificial Sequence: Synthetic oligonucleotide
cucgaagaagcgggagcug

SEQ ID NO: 2959018 - RNA, 19 nt, Artificial Sequence
  Description of Artificial Sequence: Synthetic oligonucleotide
cagggcuccaaggggauga

SEQ ID NO: 2959019 - RNA, 19 nt, Artificial Sequence
  Description of Artificial Sequence: Synthetic oligonucleotide
guggauccguucaucaaua

SEQ ID NO: 2959020 - RNA, 19 nt, Artificial Sequence
  Description of Artificial Sequence: Synthetic oligonucleotide
ggucuucgggcuuguccag

SEQ ID NO: 2959021 - RNA, 19 nt, Artificial Sequence
  Description of Artificial Sequence: Synthetic oligonucleotide
gcugugguugcgguucugc

SEQ ID NO: 2959022 - RNA, 19 nt, Artificial Sequence
  Description of Artificial Sequence: Synthetic oligonucleotide
acagggcucuguggauccg

SEQ ID NO: 2959023 - RNA, 19 nt, Artificial Sequence
  Description of Artificial Sequence: Synthetic oligonucleotide
ggugcccacaacaccgaug

SEQ ID NO: 2959024 - RNA, 19 nt, Artificial Sequence
  Description of Artificial Sequence: Synthetic oligonucleotide
ccguuucucuagcccagcg

SEQ ID NO: 2959025 - RNA, 19 nt, Artificial Sequence
  Description of Artificial Sequence: Synthetic oligonucleotide
ccgauggaagagaucauaa

SEQ ID NO: 2959026 - RNA, 19 nt, Artificial Sequence
  Description of Artificial Sequence: Synthetic oligonucleotide
ugcccacaacaccgaugga

SEQ ID NO: 2959027 - RNA, 19 nt, Artificial Sequence
  Description of Artificial Sequence: Synthetic oligonucleotide
ccuggguaggcucagcaaa

SEQ ID NO: 2959028 - RNA, 19 nt, Artificial Sequence
  Description of Artificial Sequence: Synthetic oligonucleotide
cacgcggucuucgggcuug

SEQ ID NO: 2959029 - RNA, 19 nt, Artificial Sequence
  Description of Artificial Sequence: Synthetic oligonucleotide
augccaggucguaacguaa

SEQ ID NO: 2959030 - RNA, 19 nt, Artificial Sequence
  Description of Artificial Sequence: Synthetic oligonucleotide
cucuagaagggcccugggu

SEQ ID NO: 2959031 - RNA, 19 nt, Artificial Sequence
  Description of Artificial Sequence: Synthetic oligonucleotide
gcccacaacaccgauggaa

SEQ ID NO: 2959032 - RNA, 19 nt, Artificial Sequence
  Description of Artificial Sequence: Synthetic oligonucleotide
ugguugcgguucugcucug

SEQ ID NO: 2959033 - RNA, 19 nt, Artificial Sequence
  Description of Artificial Sequence: Synthetic oligonucleotide
gacacagggcucuguggau

SEQ ID NO: 2959034 - RNA, 19 nt, Artificial Sequence
  Description of Artificial Sequence: Synthetic oligonucleotide
ggaacucgaagaagcggga

SEQ ID NO: 2959035 - RNA, 19 nt, Artificial Sequence
  Description of Artificial Sequence: Synthetic oligonucleotide
ggccucucuagaagggccc

SEQ ID NO: 2959036 - RNA, 19 nt, Artificial Sequence
  Description of Artificial Sequence: Synthetic oligonucleotide
gcggcuugcuggcaaguuc

SEQ ID NO: 2959037 - RNA, 19 nt, Artificial Sequence
  Description of Artificial Sequence: Synthetic oligonucleotide
caauauggucaugccaggu

SEQ ID NO: 2959038 - RNA, 19 nt, Artificial Sequence
  Description of Artificial Sequence: Synthetic oligonucleotide
aggggaugaagcggaugau

SEQ ID NO: 2959039 - RNA, 19 nt, Artificial Sequence
  Description of Artificial Sequence: Synthetic oligonucleotide
uaacgcucacgcggucuuc

SEQ ID NO: 2959040 - RNA, 19 nt, Artificial Sequence
  Description of Artificial Sequence: Synthetic oligonucleotide
gccaggaggccucucuaga

SEQ ID NO: 2959041 - RNA, 19 nt, Artificial Sequence
  Description of Artificial Sequence: Synthetic oligonucleotide
gcuggcaaguucguuucca

SEQ ID NO: 2959042 - RNA, 19 nt, Artificial Sequence
  Description of Artificial Sequence: Synthetic oligonucleotide
ucacgcggucuucgggcuu

SEQ ID NO: 2959043 - RNA, 19 nt, Artificial Sequence
  Description of Artificial Sequence: Synthetic oligonucleotide
cuggguaggcucagcaaau

SEQ ID NO: 2959044 - RNA, 19 nt, Artificial Sequence
  Description of Artificial Sequence: Synthetic oligonucleotide
caacaccgauggaagagau

SEQ ID NO: 2959045 - RNA, 19 nt, Artificial Sequence
  Description of Artificial Sequence: Synthetic oligonucleotide
cuggauucuugguuucaau

SEQ ID NO: 2959046 - RNA, 19 nt, Artificial Sequence
  Description of Artificial Sequence: Synthetic oligonucleotide
caaucugccagggcuccaa

SEQ ID NO: 2959047 - RNA, 19 nt, Artificial Sequence
  Description of Artificial Sequence: Synthetic oligonucleotide
auggucaugccaggucgua

SEQ ID NO: 2959048 - RNA, 19 nt, Artificial Sequence
  Description of Artificial Sequence: Synthetic oligonucleotide
ggaugaagcggaugauuau

SEQ ID NO: 2959049 - RNA, 19 nt, Artificial Sequence
  Description of Artificial Sequence: Synthetic oligonucleotide
guaacgcucacgcggucuu

SEQ ID NO: 2959050 - RNA, 19 nt, Artificial Sequence
  Description of Artificial Sequence: Synthetic oligonucleotide
guucugcucugcggugccc

SEQ ID NO: 2959051 - RNA, 19 nt, Artificial Sequence
  Description of Artificial Sequence: Synthetic oligonucleotide
cugugguugcgguucugcu

SEQ ID NO: 2959052 - RNA, 19 nt, Artificial Sequence
  Description of Artificial Sequence: Synthetic oligonucleotide
gguggccgcacacagccgu

SEQ ID NO: 2959053 - RNA, 19 nt, Artificial Sequence
  Description of Artificial Sequence: Synthetic oligonucleotide
cggucuucgggcuugucca

SEQ ID NO: 2959054 - RNA, 19 nt, Artificial Sequence
  Description of Artificial Sequence: Synthetic oligonucleotide
cgggcacgcggcuugcugg

SEQ ID NO: 2959055 - RNA, 19 nt, Artificial Sequence
  Description of Artificial Sequence: Synthetic oligonucleotide
gggcacgcggcuugcuggc

SEQ ID NO: 2959056 - RNA, 19 nt, Artificial Sequence
  Description of Artificial Sequence: Synthetic oligonucleotide
cgaagaagcgggagcugug

SEQ ID NO: 2959057 - RNA, 19 nt, Artificial Sequence
  Description of Artificial Sequence: Synthetic oligonucleotide
cucagcaaaugcccuggau

SEQ ID NO: 2959058 - RNA, 19 nt, Artificial Sequence
  Description of Artificial Sequence: Synthetic oligonucleotide
gcgguucugcucugcggug

SEQ ID NO: 2959059 - RNA, 19 nt, Artificial Sequence
  Description of Artificial Sequence: Synthetic oligonucleotide
cuagcccagcgggcacgcg

SEQ ID NO: 2959060 - RNA, 19 nt, Artificial Sequence
  Description of Artificial Sequence: Synthetic oligonucleotide
gguugcgguucugcucugc

SEQ ID NO: 2959061 - RNA, 19 nt, Artificial Sequence
  Description of Artificial Sequence: Synthetic oligonucleotide
agcuggacacagggcucug

SEQ ID NO: 2959062 - RNA, 19 nt, Artificial Sequence
  Description of Artificial Sequence: Synthetic oligonucleotide
ccagcgggcacgcggcuug

SEQ ID NO: 2959063 - RNA, 19 nt, Artificial Sequence
  Description of Artificial Sequence: Synthetic oligonucleotide
gcccuggguaggcucagca

SEQ ID NO: 2959064 - RNA, 19 nt, Artificial Sequence
  Description of Artificial Sequence: Synthetic oligonucleotide
ccacaacaccgauggaaga

SEQ ID NO: 2959065 - RNA, 19 nt, Artificial Sequence
  Description of Artificial Sequence: Synthetic oligonucleotide
agcugugguugcgguucug

SEQ ID NO: 2959066 - RNA, 19 nt, Artificial Sequence
  Description of Artificial Sequence: Synthetic oligonucleotide
cucacgcggucuucgggcu

SEQ ID NO: 2959067 - RNA, 19 nt, Artificial Sequence
  Description of Artificial Sequence: Synthetic oligonucleotide
gagcugugguugcgguucu

SEQ ID NO: 2959068 - RNA, 19 nt, Artificial Sequence
  Description of Artificial Sequence: Synthetic oligonucleotide
ccaggaggccucucuagaa

SEQ ID NO: 2959069 - RNA, 19 nt, Artificial Sequence
  Description of Artificial Sequence: Synthetic oligonucleotide
caguuccuuucuuuccaau

SEQ ID NO: 2959070 - RNA, 19 nt, Artificial Sequence
  Description of Artificial Sequence: Synthetic oligonucleotide
cugccaggaggccucucua

SEQ ID NO: 2959071 - RNA, 19 nt, Artificial Sequence
  Description of Artificial Sequence: Synthetic oligonucleotide
caacucugccaggaggccu

SEQ ID NO: 2959072 - RNA, 19 nt, Artificial Sequence
  Description of Artificial Sequence: Synthetic oligonucleotide
gggcucuguggauccguuc

SEQ ID NO: 2959073 - RNA, 19 nt, Artificial Sequence
  Description of Artificial Sequence: Synthetic oligonucleotide
gcccuggauucuugguuuc

SEQ ID NO: 2959074 - RNA, 19 nt, Artificial Sequence
  Description of Artificial Sequence: Synthetic oligonucleotide
uggccgcacacagccguuu

SEQ ID NO: 2959075 - RNA, 19 nt, Artificial Sequence
  Description of Artificial Sequence: Synthetic oligonucleotide
acucugccaggaggccucu

SEQ ID NO: 2959076 - RNA, 19 nt, Artificial Sequence
  Description of Artificial Sequence: Synthetic oligonucleotide
cguucaucaauauggucau

SEQ ID NO: 2959077 - RNA, 19 nt, Artificial Sequence
  Description of Artificial Sequence: Synthetic oligonucleotide
ccaacucaacgaauggcau

SEQ ID NO: 2959078 - RNA, 19 nt, Artificial Sequence
  Description of Artificial Sequence: Synthetic oligonucleotide
cagaaacgucaugacaguu

SEQ ID NO: 2959079 - RNA, 19 nt, Artificial Sequence
  Description of Artificial Sequence: Synthetic oligonucleotide
acgcggcuugcuggcaagu

SEQ ID NO: 2959080 - RNA, 19 nt, Artificial Sequence
  Description of Artificial Sequence: Synthetic oligonucleotide
cgcucacgcggucuucggg

SEQ ID NO: 2959081 - RNA, 19 nt, Artificial Sequence
  Description of Artificial Sequence: Synthetic oligonucleotide
gcucagcaaaugcccugga

SEQ ID NO: 2959082 - RNA, 19 nt, Artificial Sequence
  Description of Artificial Sequence: Synthetic oligonucleotide
ggccgcacacagccguuuc

SEQ ID NO: 2959083 - RNA, 19 nt, Artificial Sequence
  Description of Artificial Sequence: Synthetic oligonucleotide
gccguuucucuagcccagc

SEQ ID NO: 2959084 - RNA, 19 nt, Artificial Sequence
  Description of Artificial Sequence: Synthetic oligonucleotide
gggcuccaaggggaugaag

SEQ ID NO: 2959085 - RNA, 19 nt, Artificial Sequence
  Description of Artificial Sequence: Synthetic oligonucleotide
agggcucuguggauccguu

SEQ ID NO: 2959086 - RNA, 19 nt, Artificial Sequence
  Description of Artificial Sequence: Synthetic oligonucleotide
ccggaccacaacucugcca

SEQ ID NO: 2959087 - RNA, 19 nt, Artificial Sequence
  Description of Artificial Sequence: Synthetic oligonucleotide
agggcuccaaggggaugaa

SEQ ID NO: 2959088 - RNA, 19 nt, Artificial Sequence
  Description of Artificial Sequence: Synthetic oligonucleotide
ccgcacacagccguuucuc

SEQ ID NO: 2959089 - RNA, 19 nt, Artificial Sequence
  Description of Artificial Sequence: Synthetic oligonucleotide
guccugguccagggccagc

SEQ ID NO: 2959090 - RNA, 19 nt, Artificial Sequence
  Description of Artificial Sequence: Synthetic oligonucleotide
gaagggcccuggguaggcu

SEQ ID NO: 2959091 - RNA, 19 nt, Artificial Sequence
  Description of Artificial Sequence: Synthetic oligonucleotide
cgguucugcucugcggugc

SEQ ID NO: 2959092 - RNA, 19 nt, Artificial Sequence
  Description of Artificial Sequence: Synthetic oligonucleotide
cggaugauuauccgguccu

SEQ ID NO: 2959093 - RNA, 19 nt, Artificial Sequence
  Description of Artificial Sequence: Synthetic oligonucleotide
ccuggauucuugguuucaa

SEQ ID NO: 2959094 - RNA, 19 nt, Artificial Sequence
  Description of Artificial Sequence: Synthetic oligonucleotide
ccucucuagaagggcccug

SEQ ID NO: 2959095 - RNA, 19 nt, Artificial Sequence
  Description of Artificial Sequence: Synthetic oligonucleotide
gcaaaugcccuggauucuu

SEQ ID NO: 2959096 - RNA, 19 nt, Artificial Sequence
  Description of Artificial Sequence: Synthetic oligonucleotide
caccgauggaagagaucau

SEQ ID NO: 2959097 - RNA, 19 nt, Artificial Sequence
  Description of Artificial Sequence: Synthetic oligonucleotide
cagcgggcacgcggcuugc

SEQ ID NO: 2959098 - RNA, 19 nt, Artificial Sequence
  Description of Artificial Sequence: Synthetic oligonucleotide
gcacgcggcuugcuggcaa

SEQ ID NO: 2959099 - RNA, 19 nt, Artificial Sequence
  Description of Artificial Sequence: Synthetic oligonucleotide
cccuggguaggcucagcaa

SEQ ID NO: 2959100 - RNA, 19 nt, Artificial Sequence
  Description of Artificial Sequence: Synthetic oligonucleotide
ccugguccagggccagcuc

SEQ ID NO: 2959101 - RNA, 19 nt, Artificial Sequence
  Description of Artificial Sequence: Synthetic oligonucleotide
gcucuguggauccguucau

SEQ ID NO: 2959102 - RNA, 19 nt, Artificial Sequence
  Description of Artificial Sequence: Synthetic oligonucleotide
gccgcacacagccguuucu

SEQ ID NO: 2959103 - RNA, 19 nt, Artificial Sequence
  Description of Artificial Sequence: Synthetic oligonucleotide
cuucgggcuuguccaggau

SEQ ID NO: 2959104 - RNA, 19 nt, Artificial Sequence
  Description of Artificial Sequence: Synthetic oligonucleotide
cagggcucuguggauccgu

SEQ ID NO: 2959105 - RNA, 19 nt, Artificial Sequence
  Description of Artificial Sequence: Synthetic oligonucleotide
gggcccuggguaggcucag

SEQ ID NO: 2959106 - RNA, 19 nt, Artificial Sequence
  Description of Artificial Sequence: Synthetic oligonucleotide
ccagggcuccaaggggaug

SEQ ID NO: 2959107 - RNA, 19 nt, Artificial Sequence
  Description of Artificial Sequence: Synthetic oligonucleotide
acgcggucuucgggcuugu

SEQ ID NO: 2959108 - RNA, 19 nt, Artificial Sequence
  Description of Artificial Sequence: Synthetic oligonucleotide
cccuggauucuugguuuca

SEQ ID NO: 2959109 - RNA, 19 nt, Artificial Sequence
  Description of Artificial Sequence: Synthetic oligonucleotide
gcggugcccacaacaccga

SEQ ID NO: 2959110 - RNA, 19 nt, Artificial Sequence
  Description of Artificial Sequence: Synthetic oligonucleotide
ggcccuggguaggcucagc

SEQ ID NO: 2959111 - RNA, 19 nt, Artificial Sequence
  Description of Artificial Sequence: Synthetic oligonucleotide
cgguggccgcacacagccg

SEQ ID NO: 2959112 - RNA, 19 nt, Artificial Sequence
  Description of Artificial Sequence: Synthetic oligonucleotide
cguuuccaacucaacgaau

SEQ ID NO: 2959113 - RNA, 19 nt, Artificial Sequence
  Description of Artificial Sequence: Synthetic oligonucleotide
gccucucuagaagggcccu

SEQ ID NO: 2959114 - RNA, 19 nt, Artificial Sequence
  Description of Artificial Sequence: Synthetic oligonucleotide
ggcacgcggcuugcuggca

SEQ ID NO: 2959115 - RNA, 19 nt, Artificial Sequence
  Description of Artificial Sequence: Synthetic oligonucleotide
gcuggacacagggcucugu

SEQ ID NO: 2959116 - RNA, 19 nt, Artificial Sequence
  Description of Artificial Sequence: Synthetic oligonucleotide
ccaaucugccagggcucca

SEQ ID NO: 2959117 - RNA, 19 nt, Artificial Sequence
  Description of Artificial Sequence: Synthetic oligonucleotide
cguaacgcucacgcggucu

SEQ ID NO: 2959118 - RNA, 19 nt, Artificial Sequence
  Description of Artificial Sequence: Synthetic oligonucleotide
cgcacacagccguuucucu

SEQ ID NO: 2959119 - RNA, 19 nt, Artificial Sequence
  Description of Artificial Sequence: Synthetic oligonucleotide
gcuugcuggcaaguucguu

SEQ ID NO: 2959120 - RNA, 19 nt, Artificial Sequence
  Description of Artificial Sequence: Synthetic oligonucleotide
ccaaggggaugaagcggau

SEQ ID NO: 2959121 - RNA, 19 nt, Artificial Sequence
  Description of Artificial Sequence: Synthetic oligonucleotide
guggccgcacacagccguu

SEQ ID NO: 2959122 - RNA, 19 nt, Artificial Sequence
  Description of Artificial Sequence: Synthetic oligonucleotide
gccagggcuccaaggggau

SEQ ID NO: 2959123 - RNA, 19 nt, Artificial Sequence
  Description of Artificial Sequence: Synthetic oligonucleotide
cgggcuuguccaggaugga

SEQ ID NO: 2959124 - RNA, 19 nt, Artificial Sequence
  Description of Artificial Sequence: Synthetic oligonucleotide
gcccagcgggcacgcggcu

SEQ ID NO: 2959125 - RNA, 19 nt, Artificial Sequence
  Description of Artificial Sequence: Synthetic oligonucleotide
cgcggucuucgggcuuguc

SEQ ID NO: 2959126 - RNA, 19 nt, Artificial Sequence
  Description of Artificial Sequence: Synthetic oligonucleotide
cggugcccacaacaccgau

SEQ ID NO: 2959127 - RNA, 19 nt, Artificial Sequence
  Description of Artificial Sequence: Synthetic oligonucleotide
cgcggcuugcuggcaaguu

SEQ ID NO: 2959128 - RNA, 19 nt, Artificial Sequence
  Description of Artificial Sequence: Synthetic oligonucleotide
cccagcgggcacgcggcuu

SEQ ID NO: 2959129 - RNA, 19 nt, Artificial Sequence
  Description of Artificial Sequence: Synthetic oligonucleotide
aauaauguaucccagaggu

SEQ ID NO: 2959130 - RNA, 19 nt, Artificial Sequence
  Description of Artificial Sequence: Synthetic oligonucleotide
aaaacagauugacugacuc

SEQ ID NO: 2959131 - RNA, 19 nt, Artificial Sequence
  Description of Artificial Sequence: Synthetic oligonucleotide
aguccaacaaaacagauug

SEQ ID NO: 2959132 - RNA, 19 nt, Artificial Sequence
  Description of Artificial Sequence: Synthetic oligonucleotide
aauacaugagugaacaugg

SEQ ID NO: 2959133 - RNA, 19 nt, Artificial Sequence
  Description of Artificial Sequence: Synthetic oligonucleotide
uguacaaucaacagagaag

SEQ ID NO: 2959134 - RNA, 19 nt, Artificial Sequence
  Description of Artificial Sequence: Synthetic oligonucleotide
gaagccauuagccaaaagc

SEQ ID NO: 2959135 - RNA, 19 nt, Artificial Sequence
  Description of Artificial Sequence: Synthetic oligonucleotide
auucauugaagccauuagc

SEQ ID NO: 2959136 - RNA, 19 nt, Artificial Sequence
  Description of Artificial Sequence: Synthetic oligonucleotide
aagccauuagccaaaagcc

SEQ ID NO: 2959137 - RNA, 19 nt, Artificial Sequence
  Description of Artificial Sequence: Synthetic oligonucleotide
ucaauuucugguaagucag

SEQ ID NO: 2959138 - RNA, 19 nt, Artificial Sequence
  Description of Artificial Sequence: Synthetic oligonucleotide
uaauguaucccagaggugg

SEQ ID NO: 2959139 - RNA, 19 nt, Artificial Sequence
  Description of Artificial Sequence: Synthetic oligonucleotide
uaggaguccaacaaaacag

SEQ ID NO: 2959140 - RNA, 19 nt, Artificial Sequence
  Description of Artificial Sequence: Synthetic oligonucleotide
caacaaaacagauugacug

SEQ ID NO: 2959141 - RNA, 19 nt, Artificial Sequence
  Description of Artificial Sequence: Synthetic oligonucleotide
ucagagaagagaaggaugc

SEQ ID NO: 2959142 - RNA, 19 nt, Artificial Sequence
  Description of Artificial Sequence: Synthetic oligonucleotide
uaagucagagaagagaagg

SEQ ID NO: 2959143 - RNA, 19 nt, Artificial Sequence
  Description of Artificial Sequence: Synthetic oligonucleotide
uuucugguaagucagagaa

SEQ ID NO: 2959144 - RNA, 19 nt, Artificial Sequence
  Description of Artificial Sequence: Synthetic oligonucleotide
aaauacaugagugaacaug

SEQ ID NO: 2959145 - RNA, 19 nt, Artificial Sequence
  Description of Artificial Sequence: Synthetic oligonucleotide
ucaacagagaaguagggug

SEQ ID NO: 2959146 - RNA, 19 nt, Artificial Sequence
  Description of Artificial Sequence: Synthetic oligonucleotide
aacagauugacugacucuc

SEQ ID NO: 2959147 - RNA, 19 nt, Artificial Sequence
  Description of Artificial Sequence: Synthetic oligonucleotide
uagagaucaggaaugaagc

SEQ ID NO: 2959148 - RNA, 19 nt, Artificial Sequence
  Description of Artificial Sequence: Synthetic oligonucleotide
uucaaugucaauuucuggu

SEQ ID NO: 2959149 - RNA, 19 nt, Artificial Sequence
  Description of Artificial Sequence: Synthetic oligonucleotide
caugguaagaaaccaaggg

SEQ ID NO: 2959150 - RNA, 19 nt, Artificial Sequence
  Description of Artificial Sequence: Synthetic oligonucleotide
uaauaauguaucccagagg

SEQ ID NO: 2959151 - RNA, 19 nt, Artificial Sequence
  Description of Artificial Sequence: Synthetic oligonucleotide
guaauaauguaucccagag

SEQ ID NO: 2959152 - RNA, 19 nt, Artificial Sequence
  Description of Artificial Sequence: Synthetic oligonucleotide
caaucaacagagaaguagg

SEQ ID NO: 2959153 - RNA, 19 nt, Artificial Sequence
  Description of Artificial Sequence: Synthetic oligonucleotide
uuaggaguccaacaaaaca

SEQ ID NO: 2959154 - RNA, 19 nt, Artificial Sequence
  Description of Artificial Sequence: Synthetic oligonucleotide
guauguagcacuuuuagga

SEQ ID NO: 2959155 - RNA, 19 nt, Artificial Sequence
  Description of Artificial Sequence: Synthetic oligonucleotide
ucagaagucgguuuuggag

SEQ ID NO: 2959156 - RNA, 19 nt, Artificial Sequence
  Description of Artificial Sequence: Synthetic oligonucleotide
auuacucagcucuggaucg

SEQ ID NO: 2959157 - RNA, 19 nt, Artificial Sequence
  Description of Artificial Sequence: Synthetic oligonucleotide
uguauguagcacuuuuagg

SEQ ID NO: 2959158 - RNA, 19 nt, Artificial Sequence
  Description of Artificial Sequence: Synthetic oligonucleotide
aucuguacaaucaacagag

SEQ ID NO: 2959159 - RNA, 19 nt, Artificial Sequence
  Description of Artificial Sequence: Synthetic oligonucleotide
uuuccaaguaauaauguau

SEQ ID NO: 2959160 - RNA, 19 nt, Artificial Sequence
  Description of Artificial Sequence: Synthetic oligonucleotide
ucaggaaugaagccaaucu

SEQ ID NO: 2959161 - RNA, 19 nt, Artificial Sequence
  Description of Artificial Sequence: Synthetic oligonucleotide
aacaaaacagauugacuga

SEQ ID NO: 2959162 - RNA, 19 nt, Artificial Sequence
  Description of Artificial Sequence: Synthetic oligonucleotide
aaugucaauuucugguaag

SEQ ID NO: 2959163 - RNA, 19 nt, Artificial Sequence
  Description of Artificial Sequence: Synthetic oligonucleotide
aggauggcuacuccaaugc

SEQ ID NO: 2959164 - RNA, 19 nt, Artificial Sequence
  Description of Artificial Sequence: Synthetic oligonucleotide
agagaucaggaaugaagcc

SEQ ID NO: 2959165 - RNA, 19 nt, Artificial Sequence
  Description of Artificial Sequence: Synthetic oligonucleotide
acaaucaacagagaaguag

SEQ ID NO: 2959166 - RNA, 19 nt, Artificial Sequence
  Description of Artificial Sequence: Synthetic oligonucleotide
agaaguagggugcugagcu

SEQ ID NO: 2959167 - RNA, 19 nt, Artificial Sequence
  Description of Artificial Sequence: Synthetic oligonucleotide
uauguagcacuuuuaggag

SEQ ID NO: 2959168 - RNA, 19 nt, Artificial Sequence
  Description of Artificial Sequence: Synthetic oligonucleotide
aacaugguaagaaaccaag

SEQ ID NO: 2959169 - RNA, 19 nt, Artificial Sequence
  Description of Artificial Sequence: Synthetic oligonucleotide
ugguaagaaaccaagggau

SEQ ID NO: 2959170 - RNA, 19 nt, Artificial Sequence
  Description of Artificial Sequence: Synthetic oligonucleotide
gagaaggaugcauucauug

SEQ ID NO: 2959171 - RNA, 19 nt, Artificial Sequence
  Description of Artificial Sequence: Synthetic oligonucleotide
auuagccaaaagccggucc

SEQ ID NO: 2959172 - RNA, 19 nt, Artificial Sequence
  Description of Artificial Sequence: Synthetic oligonucleotide
agaagagaaggaugcauuc

SEQ ID NO: 2959173 - RNA, 19 nt, Artificial Sequence
  Description of Artificial Sequence: Synthetic oligonucleotide
gagguggaaaauuuugugc

SEQ ID NO: 2959174 - RNA, 19 nt, Artificial Sequence
  Description of Artificial Sequence: Synthetic oligonucleotide
cagaagucgguuuuggagg

SEQ ID NO: 2959175 - RNA, 19 nt, Artificial Sequence
  Description of Artificial Sequence: Synthetic oligonucleotide
aaugggaaagaggaauuuc

SEQ ID NO: 2959176 - RNA, 19 nt, Artificial Sequence
  Description of Artificial Sequence: Synthetic oligonucleotide
aagccaaucucguugagau

SEQ ID NO: 2959177 - RNA, 19 nt, Artificial Sequence
  Description of Artificial Sequence: Synthetic oligonucleotide
aggaugcauucauugaagc

SEQ ID NO: 2959178 - RNA, 19 nt, Artificial Sequence
  Description of Artificial Sequence: Synthetic oligonucleotide
cugacucucguacacagcg

SEQ ID NO: 2959179 - RNA, 19 nt, Artificial Sequence
  Description of Artificial Sequence: Synthetic oligonucleotide
uuagccaaaagccgguccc

SEQ ID NO: 2959180 - RNA, 19 nt, Artificial Sequence
  Description of Artificial Sequence: Synthetic oligonucleotide
agugaacaugguaagaaac

SEQ ID NO: 2959181 - RNA, 19 nt, Artificial Sequence
  Description of Artificial Sequence: Synthetic oligonucleotide
caugcugucuguauguagc

SEQ ID NO: 2959182 - RNA, 19 nt, Artificial Sequence
  Description of Artificial Sequence: Synthetic oligonucleotide
guagagaucaggaaugaag

SEQ ID NO: 2959183 - RNA, 19 nt, Artificial Sequence
  Description of Artificial Sequence: Synthetic oligonucleotide
augggaaagaggaauuucc

SEQ ID NO: 2959184 - RNA, 19 nt, Artificial Sequence
  Description of Artificial Sequence: Synthetic oligonucleotide
gaugcauucauugaagcca

SEQ ID NO: 2959185 - RNA, 19 nt, Artificial Sequence
  Description of Artificial Sequence: Synthetic oligonucleotide
uuccaaguaauaauguauc

SEQ ID NO: 2959186 - RNA, 19 nt, Artificial Sequence
  Description of Artificial Sequence: Synthetic oligonucleotide
gauuacucagcucuggauc

SEQ ID NO: 2959187 - RNA, 19 nt, Artificial Sequence
  Description of Artificial Sequence: Synthetic oligonucleotide
aauuucugguaagucagag

SEQ ID NO: 2959188 - RNA, 19 nt, Artificial Sequence
  Description of Artificial Sequence: Synthetic oligonucleotide
caaguaauaauguauccca

SEQ ID NO: 2959189 - RNA, 19 nt, Artificial Sequence
  Description of Artificial Sequence: Synthetic oligonucleotide
gauugacugacucucguac

SEQ ID NO: 2959190 - RNA, 19 nt, Artificial Sequence
  Description of Artificial Sequence: Synthetic oligonucleotide
augguaagaaaccaaggga

SEQ ID NO: 2959191 - RNA, 19 nt, Artificial Sequence
  Description of Artificial Sequence: Synthetic oligonucleotide
gagaugauuacucagcucu

SEQ ID NO: 2959192 - RNA, 19 nt, Artificial Sequence
  Description of Artificial Sequence: Synthetic oligonucleotide
uacacagcguucaauguca

SEQ ID NO: 2959193 - RNA, 19 nt, Artificial Sequence
  Description of Artificial Sequence: Synthetic oligonucleotide
guaagaaaccaagggaugg

SEQ ID NO: 2959194 - RNA, 19 nt, Artificial Sequence
  Description of Artificial Sequence: Synthetic oligonucleotide
ucuuuggaggaucuguaca

SEQ ID NO: 2959195 - RNA, 19 nt, Artificial Sequence
  Description of Artificial Sequence: Synthetic oligonucleotide
ucguggaacgcaaucaucu

SEQ ID NO: 2959196 - RNA, 19 nt, Artificial Sequence
  Description of Artificial Sequence: Synthetic oligonucleotide
aggaaugaagccaaucucg

SEQ ID NO: 2959197 - RNA, 19 nt, Artificial Sequence
  Description of Artificial Sequence: Synthetic oligonucleotide
agguggaaaauuuugugca

SEQ ID NO: 2959198 - RNA, 19 nt, Artificial Sequence
  Description of Artificial Sequence: Synthetic oligonucleotide
aaacagauugacugacucu

SEQ ID NO: 2959199 - RNA, 19 nt, Artificial Sequence
  Description of Artificial Sequence: Synthetic oligonucleotide
uccaaguaauaauguaucc

SEQ ID NO: 2959200 - RNA, 19 nt, Artificial Sequence
  Description of Artificial Sequence: Synthetic oligonucleotide
aagaaaccaagggauggcg

SEQ ID NO: 2959201 - RNA, 19 nt, Artificial Sequence
  Description of Artificial Sequence: Synthetic oligonucleotide
aguaauaauguaucccaga

SEQ ID NO: 2959202 - RNA, 19 nt, Artificial Sequence
  Description of Artificial Sequence: Synthetic oligonucleotide
ggaaagaggaauuuccaag

SEQ ID NO: 2959203 - RNA, 19 nt, Artificial Sequence
  Description of Artificial Sequence: Synthetic oligonucleotide
aagccggucccgcagcugc

SEQ ID NO: 2959204 - RNA, 19 nt, Artificial Sequence
  Description of Artificial Sequence: Synthetic oligonucleotide
uugagaugauuacucagcu

SEQ ID NO: 2959205 - RNA, 19 nt, Artificial Sequence
  Description of Artificial Sequence: Synthetic oligonucleotide
uggaggaucuguacaauca

SEQ ID NO: 2959206 - RNA, 19 nt, Artificial Sequence
  Description of Artificial Sequence: Synthetic oligonucleotide
aucucguugagaugauuac

SEQ ID NO: 2959207 - RNA, 19 nt, Artificial Sequence
  Description of Artificial Sequence: Synthetic oligonucleotide
ucguacacagcguucaaug

SEQ ID NO: 2959208 - RNA, 19 nt, Artificial Sequence
  Description of Artificial Sequence: Synthetic oligonucleotide
aaucaacagagaaguaggg

SEQ ID NO: 2959209 - RNA, 19 nt, Artificial Sequence
  Description of Artificial Sequence: Synthetic oligonucleotide
agagguggaaaauuuugug

SEQ ID NO: 2959210 - RNA, 19 nt, Artificial Sequence
  Description of Artificial Sequence: Synthetic oligonucleotide
ucauugaagccauuagcca

SEQ ID NO: 2959211 - RNA, 19 nt, Artificial Sequence
  Description of Artificial Sequence: Synthetic oligonucleotide
ugaacaugguaagaaacca

SEQ ID NO: 2959212 - RNA, 19 nt, Artificial Sequence
  Description of Artificial Sequence: Synthetic oligonucleotide
aagaggaauuuccaaguaa

SEQ ID NO: 2959213 - RNA, 19 nt, Artificial Sequence
  Description of Artificial Sequence: Synthetic oligonucleotide
aaggauggcuacuccaaug

SEQ ID NO: 2959214 - RNA, 19 nt, Artificial Sequence
  Description of Artificial Sequence: Synthetic oligonucleotide
uccaacaaaacagauugac

SEQ ID NO: 2959215 - RNA, 19 nt, Artificial Sequence
  Description of Artificial Sequence: Synthetic oligonucleotide
acuuuuaggaguccaacaa

SEQ ID NO: 2959216 - RNA, 19 nt, Artificial Sequence
  Description of Artificial Sequence: Synthetic oligonucleotide
aguggaaauacaugaguga

SEQ ID NO: 2959217 - RNA, 19 nt, Artificial Sequence
  Description of Artificial Sequence: Synthetic oligonucleotide
cuguauguagcacuuuuag

SEQ ID NO: 2959218 - RNA, 19 nt, Artificial Sequence
  Description of Artificial Sequence: Synthetic oligonucleotide
ugcaguggaaauacaugag

SEQ ID NO: 2959219 - RNA, 19 nt, Artificial Sequence
  Description of Artificial Sequence: Synthetic oligonucleotide
uuuaggaguccaacaaaac

SEQ ID NO: 2959220 - RNA, 19 nt, Artificial Sequence
  Description of Artificial Sequence: Synthetic oligonucleotide
aauuuccaaguaauaaugu

SEQ ID NO: 2959221 - RNA, 19 nt, Artificial Sequence
  Description of Artificial Sequence: Synthetic oligonucleotide
uggaaaauuuugugcagug

SEQ ID NO: 2959222 - RNA, 19 nt, Artificial Sequence
  Description of Artificial Sequence: Synthetic oligonucleotide
gaucuguacaaucaacaga

SEQ ID NO: 2959223 - RNA, 19 nt, Artificial Sequence
  Description of Artificial Sequence: Synthetic oligonucleotide
uguagcacuuuuaggaguc

SEQ ID NO: 2959224 - RNA, 19 nt, Artificial Sequence
  Description of Artificial Sequence: Synthetic oligonucleotide
caacagagaaguagggugc

SEQ ID NO: 2959225 - RNA, 19 nt, Artificial Sequence
  Description of Artificial Sequence: Synthetic oligonucleotide
ugagcuucggacugcacug

SEQ ID NO: 2959226 - RNA, 19 nt, Artificial Sequence
  Description of Artificial Sequence: Synthetic oligonucleotide
caguggaaauacaugagug

SEQ ID NO: 2959227 - RNA, 19 nt, Artificial Sequence
  Description of Artificial Sequence: Synthetic oligonucleotide
ugagcaugcugucuguaug

SEQ ID NO: 2959228 - RNA, 19 nt, Artificial Sequence
  Description of Artificial Sequence: Synthetic oligonucleotide
gucaauuucugguaaguca

SEQ ID NO: 2959229 - RNA, 19 nt, Artificial Sequence
  Description of Artificial Sequence: Synthetic oligonucleotide
caugagugaacaugguaag

SEQ ID NO: 2959230 - RNA, 19 nt, Artificial Sequence
  Description of Artificial Sequence: Synthetic oligonucleotide
cauucauugaagccauuag

SEQ ID NO: 2959231 - RNA, 19 nt, Artificial Sequence
  Description of Artificial Sequence: Synthetic oligonucleotide
gaugauuacucagcucugg

SEQ ID NO: 2959232 - RNA, 19 nt, Artificial Sequence
  Description of Artificial Sequence: Synthetic oligonucleotide
guucaaugucaauuucugg

SEQ ID NO: 2959233 - RNA, 19 nt, Artificial Sequence
  Description of Artificial Sequence: Synthetic oligonucleotide
guugagaugauuacucagc

SEQ ID NO: 2959234 - RNA, 19 nt, Artificial Sequence
  Description of Artificial Sequence: Synthetic oligonucleotide
aaguaauaauguaucccag

SEQ ID NO: 2959235 - RNA, 19 nt, Artificial Sequence
  Description of Artificial Sequence: Synthetic oligonucleotide
cucguugagaugauuacuc

SEQ ID NO: 2959236 - RNA, 19 nt, Artificial Sequence
  Description of Artificial Sequence: Synthetic oligonucleotide
aaguagggugcugagcuuc

SEQ ID NO: 2959237 - RNA, 19 nt, Artificial Sequence
  Description of Artificial Sequence: Synthetic oligonucleotide
ucaaugucaauuucuggua

SEQ ID NO: 2959238 - RNA, 19 nt, Artificial Sequence
  Description of Artificial Sequence: Synthetic oligonucleotide
gaaggaugcauucauugaa

SEQ ID NO: 2959239 - RNA, 19 nt, Artificial Sequence
  Description of Artificial Sequence: Synthetic oligonucleotide
uacuccaaugcagaauggg

SEQ ID NO: 2959240 - RNA, 19 nt, Artificial Sequence
  Description of Artificial Sequence: Synthetic oligonucleotide
aaggaugcauucauugaag

SEQ ID NO: 2959241 - RNA, 19 nt, Artificial Sequence
  Description of Artificial Sequence: Synthetic oligonucleotide
uuuuggagguugagcaugc

SEQ ID NO: 2959242 - RNA, 19 nt, Artificial Sequence
  Description of Artificial Sequence: Synthetic oligonucleotide
ugggaaagaggaauuucca

SEQ ID NO: 2959243 - RNA, 19 nt, Artificial Sequence
  Description of Artificial Sequence: Synthetic oligonucleotide
uggaaauacaugagugaac

SEQ ID NO: 2959244 - RNA, 19 nt, Artificial Sequence
  Description of Artificial Sequence: Synthetic oligonucleotide
gacugacucucguacacag

SEQ ID NO: 2959245 - RNA, 19 nt, Artificial Sequence
  Description of Artificial Sequence: Synthetic oligonucleotide
gauggcuacuccaaugcag

SEQ ID NO: 2959246 - RNA, 19 nt, Artificial Sequence
  Description of Artificial Sequence: Synthetic oligonucleotide
uuucagaagucgguuuugg

SEQ ID NO: 2959247 - RNA, 19 nt, Artificial Sequence
  Description of Artificial Sequence: Synthetic oligonucleotide
ugguaagucagagaagaga

SEQ ID NO: 2959248 - RNA, 19 nt, Artificial Sequence
  Description of Artificial Sequence: Synthetic oligonucleotide
uugacugacucucguacac

SEQ ID NO: 2959249 - RNA, 19 nt, Artificial Sequence
  Description of Artificial Sequence: Synthetic oligonucleotide
aaagaggaauuuccaagua

SEQ ID NO: 2959250 - RNA, 19 nt, Artificial Sequence
  Description of Artificial Sequence: Synthetic oligonucleotide
ugaaggauggcuacuccaa

SEQ ID NO: 2959251 - RNA, 19 nt, Artificial Sequence
  Description of Artificial Sequence: Synthetic oligonucleotide
agaaggaugcauucauuga

SEQ ID NO: 2959252 - RNA, 19 nt, Artificial Sequence
  Description of Artificial Sequence: Synthetic oligonucleotide
gaaagaggaauuuccaagu

SEQ ID NO: 2959253 - RNA, 19 nt, Artificial Sequence
  Description of Artificial Sequence: Synthetic oligonucleotide
auuuccaaguaauaaugua

SEQ ID NO: 2959254 - RNA, 19 nt, Artificial Sequence
  Description of Artificial Sequence: Synthetic oligonucleotide
gugaacaugguaagaaacc

SEQ ID NO: 2959255 - RNA, 19 nt, Artificial Sequence
  Description of Artificial Sequence: Synthetic oligonucleotide
gcuacuccaaugcagaaug

SEQ ID NO: 2959256 - RNA, 19 nt, Artificial Sequence
  Description of Artificial Sequence: Synthetic oligonucleotide
uacaugagugaacauggua

SEQ ID NO: 2959257 - RNA, 19 nt, Artificial Sequence
  Description of Artificial Sequence: Synthetic oligonucleotide
acaugagugaacaugguaa

SEQ ID NO: 2959258 - RNA, 19 nt, Artificial Sequence
  Description of Artificial Sequence: Synthetic oligonucleotide
agggugcugagcuucggac

SEQ ID NO: 2959259 - RNA, 19 nt, Artificial Sequence
  Description of Artificial Sequence: Synthetic oligonucleotide
uaagaaaccaagggauggc

SEQ ID NO: 2959260 - RNA, 19 nt, Artificial Sequence
  Description of Artificial Sequence: Synthetic oligonucleotide
uuggagguugagcaugcug

SEQ ID NO: 2959261 - RNA, 19 nt, Artificial Sequence
  Description of Artificial Sequence: Synthetic oligonucleotide
gagaucaggaaugaagcca

SEQ ID NO: 2959262 - RNA, 19 nt, Artificial Sequence
  Description of Artificial Sequence: Synthetic oligonucleotide
agcucuggaucguggaacg

SEQ ID NO: 2959263 - RNA, 19 nt, Artificial Sequence
  Description of Artificial Sequence: Synthetic oligonucleotide
aggaauuuccaaguaauaa

SEQ ID NO: 2959264 - RNA, 19 nt, Artificial Sequence
  Description of Artificial Sequence: Synthetic oligonucleotide
uggcguagagaucaggaau

SEQ ID NO: 2959265 - RNA, 19 nt, Artificial Sequence
  Description of Artificial Sequence: Synthetic oligonucleotide
aaaccaagggauggcguag

SEQ ID NO: 2959266 - RNA, 19 nt, Artificial Sequence
  Description of Artificial Sequence: Synthetic oligonucleotide
ggaaauacaugagugaaca

SEQ ID NO: 2959267 - RNA, 19 nt, Artificial Sequence
  Description of Artificial Sequence: Synthetic oligonucleotide
aaucucguugagaugauua

SEQ ID NO: 2959268 - RNA, 19 nt, Artificial Sequence
  Description of Artificial Sequence: Synthetic oligonucleotide
uucugguaagucagagaag

SEQ ID NO: 2959269 - RNA, 19 nt, Artificial Sequence
  Description of Artificial Sequence: Synthetic oligonucleotide
gacugcacugcuuucagaa

SEQ ID NO: 2959270 - RNA, 19 nt, Artificial Sequence
  Description of Artificial Sequence: Synthetic oligonucleotide
agggauggcguagagauca

SEQ ID NO: 2959271 - RNA, 19 nt, Artificial Sequence
  Description of Artificial Sequence: Synthetic oligonucleotide
uccaaugcagaaugggaaa

SEQ ID NO: 2959272 - RNA, 19 nt, Artificial Sequence
  Description of Artificial Sequence: Synthetic oligonucleotide
agcguucaaugucaauuuc

SEQ ID NO: 2959273 - RNA, 19 nt, Artificial Sequence
  Description of Artificial Sequence: Synthetic oligonucleotide
agguugagcaugcugucug

SEQ ID NO: 2959274 - RNA, 19 nt, Artificial Sequence
  Description of Artificial Sequence: Synthetic oligonucleotide
guacaaucaacagagaagu

SEQ ID NO: 2959275 - RNA, 19 nt, Artificial Sequence
  Description of Artificial Sequence: Synthetic oligonucleotide
acaugguaagaaaccaagg

SEQ ID NO: 2959276 - RNA, 19 nt, Artificial Sequence
  Description of Artificial Sequence: Synthetic oligonucleotide
cacugcuuucagaagucgg

SEQ ID NO: 2959277 - RNA, 19 nt, Artificial Sequence
  Description of Artificial Sequence: Synthetic oligonucleotide
ucuguauguagcacuuuua

SEQ ID NO: 2959278 - RNA, 19 nt, Artificial Sequence
  Description of Artificial Sequence: Synthetic oligonucleotide
agagaaguagggugcugag

SEQ ID NO: 2959279 - RNA, 19 nt, Artificial Sequence
  Description of Artificial Sequence: Synthetic oligonucleotide
auugacugacucucguaca

SEQ ID NO: 2959280 - RNA, 19 nt, Artificial Sequence
  Description of Artificial Sequence: Synthetic oligonucleotide
guuuuggagguugagcaug

SEQ ID NO: 2959281 - RNA, 19 nt, Artificial Sequence
  Description of Artificial Sequence: Synthetic oligonucleotide
auguagcacuuuuaggagu

SEQ ID NO: 2959282 - RNA, 19 nt, Artificial Sequence
  Description of Artificial Sequence: Synthetic oligonucleotide
ugauuacucagcucuggau

SEQ ID NO: 2959283 - RNA, 19 nt, Artificial Sequence
  Description of Artificial Sequence: Synthetic oligonucleotide
augaagccaaucucguuga

SEQ ID NO: 2959284 - RNA, 19 nt, Artificial Sequence
  Description of Artificial Sequence: Synthetic oligonucleotide
ucguugagaugauuacuca

SEQ ID NO: 2959285 - RNA, 19 nt, Artificial Sequence
  Description of Artificial Sequence: Synthetic oligonucleotide
agccauuagccaaaagccg

SEQ ID NO: 2959286 - RNA, 19 nt, Artificial Sequence
  Description of Artificial Sequence: Synthetic oligonucleotide
acagcguucaaugucaauu

SEQ ID NO: 2959287 - RNA, 19 nt, Artificial Sequence
  Description of Artificial Sequence: Synthetic oligonucleotide
gucagagaagagaaggaug

SEQ ID NO: 2959288 - RNA, 19 nt, Artificial Sequence
  Description of Artificial Sequence: Synthetic oligonucleotide
aggaucuguacaaucaaca

SEQ ID NO: 2959289 - RNA, 19 nt, Artificial Sequence
  Description of Artificial Sequence: Synthetic oligonucleotide
aagucgguuuuggagguug

SEQ ID NO: 2959290 - RNA, 19 nt, Artificial Sequence
  Description of Artificial Sequence: Synthetic oligonucleotide
agaggaauuuccaaguaau

SEQ ID NO: 2959291 - RNA, 19 nt, Artificial Sequence
  Description of Artificial Sequence: Synthetic oligonucleotide
aucaggaaugaagccaauc

SEQ ID NO: 2959292 - RNA, 19 nt, Artificial Sequence
  Description of Artificial Sequence: Synthetic oligonucleotide
cauugaagccauuagccaa

SEQ ID NO: 2959293 - RNA, 19 nt, Artificial Sequence
  Description of Artificial Sequence: Synthetic oligonucleotide
agaagucgguuuuggaggu

SEQ ID NO: 2959294 - RNA, 19 nt, Artificial Sequence
  Description of Artificial Sequence: Synthetic oligonucleotide
augauuacucagcucugga

SEQ ID NO: 2959295 - RNA, 19 nt, Artificial Sequence
  Description of Artificial Sequence: Synthetic oligonucleotide
gauggcguagagaucagga

SEQ ID NO: 2959296 - RNA, 19 nt, Artificial Sequence
  Description of Artificial Sequence: Synthetic oligonucleotide
caggaaugaagccaaucuc

SEQ ID NO: 2959297 - RNA, 19 nt, Artificial Sequence
  Description of Artificial Sequence: Synthetic oligonucleotide
ugucuuuggaggaucugua

SEQ ID NO: 2959298 - RNA, 19 nt, Artificial Sequence
  Description of Artificial Sequence: Synthetic oligonucleotide
ucuggaucguggaacgcaa

SEQ ID NO: 2959299 - RNA, 19 nt, Artificial Sequence
  Description of Artificial Sequence: Synthetic oligonucleotide
uucagaagucgguuuugga

SEQ ID NO: 2959300 - RNA, 19 nt, Artificial Sequence
  Description of Artificial Sequence: Synthetic oligonucleotide
ggaugcauucauugaagcc

SEQ ID NO: 2959301 - RNA, 19 nt, Artificial Sequence
  Description of Artificial Sequence: Synthetic oligonucleotide
cuguacaaucaacagagaa

SEQ ID NO: 2959302 - RNA, 19 nt, Artificial Sequence
  Description of Artificial Sequence: Synthetic oligonucleotide
guacacagcguucaauguc

SEQ ID NO: 2959303 - RNA, 19 nt, Artificial Sequence
  Description of Artificial Sequence: Synthetic oligonucleotide
uggaucguggaacgcaauc

SEQ ID NO: 2959304 - RNA, 19 nt, Artificial Sequence
  Description of Artificial Sequence: Synthetic oligonucleotide
ggaaaauuuugugcagugg

SEQ ID NO: 2959305 - RNA, 19 nt, Artificial Sequence
  Description of Artificial Sequence: Synthetic oligonucleotide
uuggaggaucuguacaauc

SEQ ID NO: 2959306 - RNA, 19 nt, Artificial Sequence
  Description of Artificial Sequence: Synthetic oligonucleotide
ccaaguaauaauguauccc

SEQ ID NO: 2959307 - RNA, 19 nt, Artificial Sequence
  Description of Artificial Sequence: Synthetic oligonucleotide
ugagaugauuacucagcuc

SEQ ID NO: 2959308 - RNA, 19 nt, Artificial Sequence
  Description of Artificial Sequence: Synthetic oligonucleotide
ucucguugagaugauuacu

SEQ ID NO: 2959309 - RNA, 19 nt, Artificial Sequence
  Description of Artificial Sequence: Synthetic oligonucleotide
ucuguacaaucaacagaga

SEQ ID NO: 2959310 - RNA, 19 nt, Artificial Sequence
  Description of Artificial Sequence: Synthetic oligonucleotide
gguggaaaauuuugugcag

SEQ ID NO: 2959311 - RNA, 19 nt, Artificial Sequence
  Description of Artificial Sequence: Synthetic oligonucleotide
aucaacagagaaguagggu

SEQ ID NO: 2959312 - RNA, 19 nt, Artificial Sequence
  Description of Artificial Sequence: Synthetic oligonucleotide
ugucaauuucugguaaguc

SEQ ID NO: 2959313 - RNA, 19 nt, Artificial Sequence
  Description of Artificial Sequence: Synthetic oligonucleotide
cuuuggaggaucuguacaa

SEQ ID NO: 2959314 - RNA, 19 nt, Artificial Sequence
  Description of Artificial Sequence: Synthetic oligonucleotide
aacagagaaguagggugcu

SEQ ID NO: 2959315 - RNA, 19 nt, Artificial Sequence
  Description of Artificial Sequence: Synthetic oligonucleotide
gaaaccaagggauggcgua

SEQ ID NO: 2959316 - RNA, 19 nt, Artificial Sequence
  Description of Artificial Sequence: Synthetic oligonucleotide
ugaagccauuagccaaaag

SEQ ID NO: 2959317 - RNA, 19 nt, Artificial Sequence
  Description of Artificial Sequence: Synthetic oligonucleotide
gguaagucagagaagagaa

SEQ ID NO: 2959318 - RNA, 19 nt, Artificial Sequence
  Description of Artificial Sequence: Synthetic oligonucleotide
aaaagccggucccgcagcu

SEQ ID NO: 2959319 - RNA, 19 nt, Artificial Sequence
  Description of Artificial Sequence: Synthetic oligonucleotide
caagggauggcguagagau

SEQ ID NO: 2959320 - RNA, 19 nt, Artificial Sequence
  Description of Artificial Sequence: Synthetic oligonucleotide
gccauuagccaaaagccgg

SEQ ID NO: 2959321 - RNA, 19 nt, Artificial Sequence
  Description of Artificial Sequence: Synthetic oligonucleotide
agagaagagaaggaugcau

SEQ ID NO: 2959322 - RNA, 19 nt, Artificial Sequence
  Description of Artificial Sequence: Synthetic oligonucleotide
gagugaacaugguaagaaa

SEQ ID NO: 2959323 - RNA, 19 nt, Artificial Sequence
  Description of Artificial Sequence: Synthetic oligonucleotide
cuacuccaaugcagaaugg

SEQ ID NO: 2959324 - RNA, 19 nt, Artificial Sequence
  Description of Artificial Sequence: Synthetic oligonucleotide
aauguaucccagaggugga

SEQ ID NO: 2959325 - RNA, 19 nt, Artificial Sequence
  Description of Artificial Sequence: Synthetic oligonucleotide
guaagucagagaagagaag

SEQ ID NO: 2959326 - RNA, 19 nt, Artificial Sequence
  Description of Artificial Sequence: Synthetic oligonucleotide
ugaagccaaucucguugag

SEQ ID NO: 2959327 - RNA, 19 nt, Artificial Sequence
  Description of Artificial Sequence: Synthetic oligonucleotide
guggaaauacaugagugaa

SEQ ID NO: 2959328 - RNA, 19 nt, Artificial Sequence
  Description of Artificial Sequence: Synthetic oligonucleotide
cacuuuuaggaguccaaca

SEQ ID NO: 2959329 - RNA, 19 nt, Artificial Sequence
  Description of Artificial Sequence: Synthetic oligonucleotide
acugcuuucagaagucggu

SEQ ID NO: 2959330 - RNA, 19 nt, Artificial Sequence
  Description of Artificial Sequence: Synthetic oligonucleotide
cugguaagucagagaagag

SEQ ID NO: 2959331 - RNA, 19 nt, Artificial Sequence
  Description of Artificial Sequence: Synthetic oligonucleotide
uugagcaugcugucuguau

SEQ ID NO: 2959332 - RNA, 19 nt, Artificial Sequence
  Description of Artificial Sequence: Synthetic oligonucleotide
augucaauuucugguaagu

SEQ ID NO: 2959333 - RNA, 19 nt, Artificial Sequence
  Description of Artificial Sequence: Synthetic oligonucleotide
cuccaaugcagaaugggaa

SEQ ID NO: 2959334 - RNA, 19 nt, Artificial Sequence
  Description of Artificial Sequence: Synthetic oligonucleotide
gaggaucuguacaaucaac

SEQ ID NO: 2959335 - RNA, 19 nt, Artificial Sequence
  Description of Artificial Sequence: Synthetic oligonucleotide
agaucaggaaugaagccaa

SEQ ID NO: 2959336 - RNA, 19 nt, Artificial Sequence
  Description of Artificial Sequence: Synthetic oligonucleotide
ucagcucuggaucguggaa

SEQ ID NO: 2959337 - RNA, 19 nt, Artificial Sequence
  Description of Artificial Sequence: Synthetic oligonucleotide
gagaaguagggugcugagc

SEQ ID NO: 2959338 - RNA, 19 nt, Artificial Sequence
  Description of Artificial Sequence: Synthetic oligonucleotide
acuccaaugcagaauggga

SEQ ID NO: 2959339 - RNA, 19 nt, Artificial Sequence
  Description of Artificial Sequence: Synthetic oligonucleotide
ucccagagguggaaaauuu

SEQ ID NO: 2959340 - RNA, 19 nt, Artificial Sequence
  Description of Artificial Sequence: Synthetic oligonucleotide
uagccaaaagccggucccg

SEQ ID NO: 2959341 - RNA, 19 nt, Artificial Sequence
  Description of Artificial Sequence: Synthetic oligonucleotide
ccagagguggaaaauuuug

SEQ ID NO: 2959342 - RNA, 19 nt, Artificial Sequence
  Description of Artificial Sequence: Synthetic oligonucleotide
acagauugacugacucucg

SEQ ID NO: 2959343 - RNA, 19 nt, Artificial Sequence
  Description of Artificial Sequence: Synthetic oligonucleotide
cuuuuaggaguccaacaaa

SEQ ID NO: 2959344 - RNA, 19 nt, Artificial Sequence
  Description of Artificial Sequence: Synthetic oligonucleotide
gucuuuggaggaucuguac

SEQ ID NO: 2959345 - RNA, 19 nt, Artificial Sequence
  Description of Artificial Sequence: Synthetic oligonucleotide
gguaagaaaccaagggaug

SEQ ID NO: 2959346 - RNA, 19 nt, Artificial Sequence
  Description of Artificial Sequence: Synthetic oligonucleotide
acugacucucguacacagc

SEQ ID NO: 2959347 - RNA, 19 nt, Artificial Sequence
  Description of Artificial Sequence: Synthetic oligonucleotide
ggaauuuccaaguaauaau

SEQ ID NO: 2959348 - RNA, 19 nt, Artificial Sequence
  Description of Artificial Sequence: Synthetic oligonucleotide
uacaaucaacagagaagua

SEQ ID NO: 2959349 - RNA, 19 nt, Artificial Sequence
  Description of Artificial Sequence: Synthetic oligonucleotide
uagggugcugagcuucgga

SEQ ID NO: 2959350 - RNA, 19 nt, Artificial Sequence
  Description of Artificial Sequence: Synthetic oligonucleotide
ggugcugagcuucggacug

SEQ ID NO: 2959351 - RNA, 19 nt, Artificial Sequence
  Description of Artificial Sequence: Synthetic oligonucleotide
cugaaggauggcuacucca

SEQ ID NO: 2959352 - RNA, 19 nt, Artificial Sequence
  Description of Artificial Sequence: Synthetic oligonucleotide
caaaagccggucccgcagc

SEQ ID NO: 2959353 - RNA, 19 nt, Artificial Sequence
  Description of Artificial Sequence: Synthetic oligonucleotide
gccaaucucguugagauga

SEQ ID NO: 2959354 - RNA, 19 nt, Artificial Sequence
  Description of Artificial Sequence: Synthetic oligonucleotide
auggcguagagaucaggaa

SEQ ID NO: 2959355 - RNA, 19 nt, Artificial Sequence
  Description of Artificial Sequence: Synthetic oligonucleotide
agccaaaagccggucccgc

SEQ ID NO: 2959356 - RNA, 19 nt, Artificial Sequence
  Description of Artificial Sequence: Synthetic oligonucleotide
ugcuuucagaagucgguuu

SEQ ID NO: 2959357 - RNA, 19 nt, Artificial Sequence
  Description of Artificial Sequence: Synthetic oligonucleotide
augcugucuguauguagca

SEQ ID NO: 2959358 - RNA, 19 nt, Artificial Sequence
  Description of Artificial Sequence: Synthetic oligonucleotide
auggcuacuccaaugcaga

SEQ ID NO: 2959359 - RNA, 19 nt, Artificial Sequence
  Description of Artificial Sequence: Synthetic oligonucleotide
gaagccaaucucguugaga

SEQ ID NO: 2959360 - RNA, 19 nt, Artificial Sequence
  Description of Artificial Sequence: Synthetic oligonucleotide
aggaguccaacaaaacaga

SEQ ID NO: 2959361 - RNA, 19 nt, Artificial Sequence
  Description of Artificial Sequence: Synthetic oligonucleotide
ugacucucguacacagcgu

SEQ ID NO: 2959362 - RNA, 19 nt, Artificial Sequence
  Description of Artificial Sequence: Synthetic oligonucleotide
gaacaugguaagaaaccaa

SEQ ID NO: 2959363 - RNA, 19 nt, Artificial Sequence
  Description of Artificial Sequence: Synthetic oligonucleotide
agauugacugacucucgua

SEQ ID NO: 2959364 - RNA, 19 nt, Artificial Sequence
  Description of Artificial Sequence: Synthetic oligonucleotide
auugaagccauuagccaaa

SEQ ID NO: 2959365 - RNA, 19 nt, Artificial Sequence
  Description of Artificial Sequence: Synthetic oligonucleotide
auaauguaucccagaggug

SEQ ID NO: 2959366 - RNA, 19 nt, Artificial Sequence
  Description of Artificial Sequence: Synthetic oligonucleotide
auuuugugcaguggaaaua

SEQ ID NO: 2959367 - RNA, 19 nt, Artificial Sequence
  Description of Artificial Sequence: Synthetic oligonucleotide
ggcguagagaucaggaaug

SEQ ID NO: 2959368 - RNA, 19 nt, Artificial Sequence
  Description of Artificial Sequence: Synthetic oligonucleotide
aucguggaacgcaaucauc

SEQ ID NO: 2959369 - RNA, 19 nt, Artificial Sequence
  Description of Artificial Sequence: Synthetic oligonucleotide
cuuucagaagucgguuuug

SEQ ID NO: 2959370 - RNA, 19 nt, Artificial Sequence
  Description of Artificial Sequence: Synthetic oligonucleotide
ucggacugcacugcuuuca

SEQ ID NO: 2959371 - RNA, 19 nt, Artificial Sequence
  Description of Artificial Sequence: Synthetic oligonucleotide
caaugucaauuucugguaa

SEQ ID NO: 2959372 - RNA, 19 nt, Artificial Sequence
  Description of Artificial Sequence: Synthetic oligonucleotide
aagggauggcguagagauc

SEQ ID NO: 2959373 - RNA, 19 nt, Artificial Sequence
  Description of Artificial Sequence: Synthetic oligonucleotide
uguaucccagagguggaaa

SEQ ID NO: 2959374 - RNA, 19 nt, Artificial Sequence
  Description of Artificial Sequence: Synthetic oligonucleotide
uuuggaggaucuguacaau

SEQ ID NO: 2959375 - RNA, 19 nt, Artificial Sequence
  Description of Artificial Sequence: Synthetic oligonucleotide
augagugaacaugguaaga

SEQ ID NO: 2959376 - RNA, 19 nt, Artificial Sequence
  Description of Artificial Sequence: Synthetic oligonucleotide
ugcugaaggauggcuacuc

SEQ ID NO: 2959377 - RNA, 19 nt, Artificial Sequence
  Description of Artificial Sequence: Synthetic oligonucleotide
agaaugggaaagaggaauu

SEQ ID NO: 2959378 - RNA, 19 nt, Artificial Sequence
  Description of Artificial Sequence: Synthetic oligonucleotide
accaagggauggcguagag

SEQ ID NO: 2959379 - RNA, 19 nt, Artificial Sequence
  Description of Artificial Sequence: Synthetic oligonucleotide
ucugucuuuggaggaucug

SEQ ID NO: 2959380 - RNA, 19 nt, Artificial Sequence
  Description of Artificial Sequence: Synthetic oligonucleotide
aguagggugcugagcuucg

SEQ ID NO: 2959381 - RNA, 19 nt, Artificial Sequence
  Description of Artificial Sequence: Synthetic oligonucleotide
agaaaccaagggauggcgu

SEQ ID NO: 2959382 - RNA, 19 nt, Artificial Sequence
  Description of Artificial Sequence: Synthetic oligonucleotide
ugacugacucucguacaca

SEQ ID NO: 2959383 - RNA, 19 nt, Artificial Sequence
  Description of Artificial Sequence: Synthetic oligonucleotide
aaccaagggauggcguaga

SEQ ID NO: 2959384 - RNA, 19 nt, Artificial Sequence
  Description of Artificial Sequence: Synthetic oligonucleotide
agaugauuacucagcucug

SEQ ID NO: 2959385 - RNA, 19 nt, Artificial Sequence
  Description of Artificial Sequence: Synthetic oligonucleotide
gucccgcagcugcugaagg

SEQ ID NO: 2959386 - RNA, 19 nt, Artificial Sequence
  Description of Artificial Sequence: Synthetic oligonucleotide
guaucccagagguggaaaa

SEQ ID NO: 2959387 - RNA, 19 nt, Artificial Sequence
  Description of Artificial Sequence: Synthetic oligonucleotide
cguugagaugauuacucag

SEQ ID NO: 2959388 - RNA, 19 nt, Artificial Sequence
  Description of Artificial Sequence: Synthetic oligonucleotide
cagcucuggaucguggaac

SEQ ID NO: 2959389 - RNA, 19 nt, Artificial Sequence
  Description of Artificial Sequence: Synthetic oligonucleotide
agccaaucucguugagaug

SEQ ID NO: 2959390 - RNA, 19 nt, Artificial Sequence
  Description of Artificial Sequence: Synthetic oligonucleotide
gagcaugcugucuguaugu

SEQ ID NO: 2959391 - RNA, 19 nt, Artificial Sequence
  Description of Artificial Sequence: Synthetic oligonucleotide
ucucguacacagcguucaa

SEQ ID NO: 2959392 - RNA, 19 nt, Artificial Sequence
  Description of Artificial Sequence: Synthetic oligonucleotide
caauuucugguaagucaga

SEQ ID NO: 2959393 - RNA, 19 nt, Artificial Sequence
  Description of Artificial Sequence: Synthetic oligonucleotide
gaucguggaacgcaaucau

SEQ ID NO: 2959394 - RNA, 19 nt, Artificial Sequence
  Description of Artificial Sequence: Synthetic oligonucleotide
ugcugucuguauguagcac

SEQ ID NO: 2959395 - RNA, 19 nt, Artificial Sequence
  Description of Artificial Sequence: Synthetic oligonucleotide
gcugcugaaggauggcuac

SEQ ID NO: 2959396 - RNA, 19 nt, Artificial Sequence
  Description of Artificial Sequence: Synthetic oligonucleotide
acucucguacacagcguuc

SEQ ID NO: 2959397 - RNA, 19 nt, Artificial Sequence
  Description of Artificial Sequence: Synthetic oligonucleotide
gaggaauuuccaaguaaua

SEQ ID NO: 2959398 - RNA, 19 nt, Artificial Sequence
  Description of Artificial Sequence: Synthetic oligonucleotide
acucagcucuggaucgugg

SEQ ID NO: 2959399 - RNA, 19 nt, Artificial Sequence
  Description of Artificial Sequence: Synthetic oligonucleotide
uacucagcucuggaucgug

SEQ ID NO: 2959400 - RNA, 19 nt, Artificial Sequence
  Description of Artificial Sequence: Synthetic oligonucleotide
ucccgcagcugcugaagga

SEQ ID NO: 2959401 - RNA, 19 nt, Artificial Sequence
  Description of Artificial Sequence: Synthetic oligonucleotide
gaaauacaugagugaacau

SEQ ID NO: 2959402 - RNA, 19 nt, Artificial Sequence
  Description of Artificial Sequence: Synthetic oligonucleotide
gggaaagaggaauuuccaa

SEQ ID NO: 2959403 - RNA, 19 nt, Artificial Sequence
  Description of Artificial Sequence: Synthetic oligonucleotide
cagagguggaaaauuuugu

SEQ ID NO: 2959404 - RNA, 19 nt, Artificial Sequence
  Description of Artificial Sequence: Synthetic oligonucleotide
cucucguacacagcguuca

SEQ ID NO: 2959405 - RNA, 19 nt, Artificial Sequence
  Description of Artificial Sequence: Synthetic oligonucleotide
augcauucauugaagccau

SEQ ID NO: 2959406 - RNA, 19 nt, Artificial Sequence
  Description of Artificial Sequence: Synthetic oligonucleotide
gagaagagaaggaugcauu

SEQ ID NO: 2959407 - RNA, 19 nt, Artificial Sequence
  Description of Artificial Sequence: Synthetic oligonucleotide
gcugaaggauggcuacucc

SEQ ID NO: 2959408 - RNA, 19 nt, Artificial Sequence
  Description of Artificial Sequence: Synthetic oligonucleotide
caaugcagaaugggaaaga

SEQ ID NO: 2959409 - RNA, 19 nt, Artificial Sequence
  Description of Artificial Sequence: Synthetic oligonucleotide
uggcuacuccaaugcagaa

SEQ ID NO: 2959410 - RNA, 19 nt, Artificial Sequence
  Description of Artificial Sequence: Synthetic oligonucleotide
ggaucguggaacgcaauca

SEQ ID NO: 2959411 - RNA, 19 nt, Artificial Sequence
  Description of Artificial Sequence: Synthetic oligonucleotide
ccaaugcagaaugggaaag

SEQ ID NO: 2959412 - RNA, 19 nt, Artificial Sequence
  Description of Artificial Sequence: Synthetic oligonucleotide
aaagccggucccgcagcug

SEQ ID NO: 2959413 - RNA, 19 nt, Artificial Sequence
  Description of Artificial Sequence: Synthetic oligonucleotide
cucagcucuggaucgugga

SEQ ID NO: 2959414 - RNA, 19 nt, Artificial Sequence
  Description of Artificial Sequence: Synthetic oligonucleotide
agcuucggacugcacugcu

SEQ ID NO: 2959415 - RNA, 19 nt, Artificial Sequence
  Description of Artificial Sequence: Synthetic oligonucleotide
auacaugagugaacauggu

SEQ ID NO: 2959416 - RNA, 19 nt, Artificial Sequence
  Description of Artificial Sequence: Synthetic oligonucleotide
cagaaugggaaagaggaau

SEQ ID NO: 2959417 - RNA, 19 nt, Artificial Sequence
  Description of Artificial Sequence: Synthetic oligonucleotide
ccaaaagccggucccgcag

SEQ ID NO: 2959418 - RNA, 19 nt, Artificial Sequence
  Description of Artificial Sequence: Synthetic oligonucleotide
cugcacugcuuucagaagu

SEQ ID NO: 2959419 - RNA, 19 nt, Artificial Sequence
  Description of Artificial Sequence: Synthetic oligonucleotide
uuacucagcucuggaucgu

SEQ ID NO: 2959420 - RNA, 19 nt, Artificial Sequence
  Description of Artificial Sequence: Synthetic oligonucleotide
gucgguuuuggagguugag

SEQ ID NO: 2959421 - RNA, 19 nt, Artificial Sequence
  Description of Artificial Sequence: Synthetic oligonucleotide
cugagcuucggacugcacu

SEQ ID NO: 2959422 - RNA, 19 nt, Artificial Sequence
  Description of Artificial Sequence: Synthetic oligonucleotide
uugaagccauuagccaaaa

SEQ ID NO: 2959423 - RNA, 19 nt, Artificial Sequence
  Description of Artificial Sequence: Synthetic oligonucleotide
guagcacuuuuaggagucc

SEQ ID NO: 2959424 - RNA, 19 nt, Artificial Sequence
  Description of Artificial Sequence: Synthetic oligonucleotide
gcaguggaaauacaugagu

SEQ ID NO: 2959425 - RNA, 19 nt, Artificial Sequence
  Description of Artificial Sequence: Synthetic oligonucleotide
cucuggaucguggaacgca

SEQ ID NO: 2959426 - RNA, 19 nt, Artificial Sequence
  Description of Artificial Sequence: Synthetic oligonucleotide
acagagaaguagggugcug

SEQ ID NO: 2959427 - RNA, 19 nt, Artificial Sequence
  Description of Artificial Sequence: Synthetic oligonucleotide
uucggacugcacugcuuuc

SEQ ID NO: 2959428 - RNA, 19 nt, Artificial Sequence
  Description of Artificial Sequence: Synthetic oligonucleotide
gucuguauguagcacuuuu

SEQ ID NO: 2959429 - RNA, 19 nt, Artificial Sequence
  Description of Artificial Sequence: Synthetic oligonucleotide
aucccagagguggaaaauu

SEQ ID NO: 2959430 - RNA, 19 nt, Artificial Sequence
  Description of Artificial Sequence: Synthetic oligonucleotide
ugcugagcuucggacugca

SEQ ID NO: 2959431 - RNA, 19 nt, Artificial Sequence
  Description of Artificial Sequence: Synthetic oligonucleotide
agcacuuuuaggaguccaa

SEQ ID NO: 2959432 - RNA, 19 nt, Artificial Sequence
  Description of Artificial Sequence: Synthetic oligonucleotide
gagcuucggacugcacugc

SEQ ID NO: 2959433 - RNA, 19 nt, Artificial Sequence
  Description of Artificial Sequence: Synthetic oligonucleotide
guggaaaauuuugugcagu

SEQ ID NO: 2959434 - RNA, 19 nt, Artificial Sequence
  Description of Artificial Sequence: Synthetic oligonucleotide
gacucucguacacagcguu

SEQ ID NO: 2959435 - RNA, 19 nt, Artificial Sequence
  Description of Artificial Sequence: Synthetic oligonucleotide
uuuggagguugagcaugcu

SEQ ID NO: 2959436 - RNA, 19 nt, Artificial Sequence
  Description of Artificial Sequence: Synthetic oligonucleotide
gaaggauggcuacuccaau

SEQ ID NO: 2959437 - RNA, 19 nt, Artificial Sequence
  Description of Artificial Sequence: Synthetic oligonucleotide
gcugucuguauguagcacu

SEQ ID NO: 2959438 - RNA, 19 nt, Artificial Sequence
  Description of Artificial Sequence: Synthetic oligonucleotide
agagaaggaugcauucauu

SEQ ID NO: 2959439 - RNA, 19 nt, Artificial Sequence
  Description of Artificial Sequence: Synthetic oligonucleotide
gcacuuuuaggaguccaac

SEQ ID NO: 2959440 - RNA, 19 nt, Artificial Sequence
  Description of Artificial Sequence: Synthetic oligonucleotide
guagggugcugagcuucgg

SEQ ID NO: 2959441 - RNA, 19 nt, Artificial Sequence
  Description of Artificial Sequence: Synthetic oligonucleotide
gaaugggaaagaggaauuu

SEQ ID NO: 2959442 - RNA, 19 nt, Artificial Sequence
  Description of Artificial Sequence: Synthetic oligonucleotide
ggauggcguagagaucagg

SEQ ID NO: 2959443 - RNA, 19 nt, Artificial Sequence
  Description of Artificial Sequence: Synthetic oligonucleotide
gcacugcuuucagaagucg

SEQ ID NO: 2959444 - RNA, 19 nt, Artificial Sequence
  Description of Artificial Sequence: Synthetic oligonucleotide
gaguccaacaaaacagauu

SEQ ID NO: 2959445 - RNA, 19 nt, Artificial Sequence
  Description of Artificial Sequence: Synthetic oligonucleotide
ggauggcuacuccaaugca

SEQ ID NO: 2959446 - RNA, 19 nt, Artificial Sequence
  Description of Artificial Sequence: Synthetic oligonucleotide
cugucuuuggaggaucugu

SEQ ID NO: 2959447 - RNA, 19 nt, Artificial Sequence
  Description of Artificial Sequence: Synthetic oligonucleotide
ugcauucauugaagccauu

SEQ ID NO: 2959448 - RNA, 19 nt, Artificial Sequence
  Description of Artificial Sequence: Synthetic oligonucleotide
ugucuguauguagcacuuu

SEQ ID NO: 2959449 - RNA, 19 nt, Artificial Sequence
  Description of Artificial Sequence: Synthetic oligonucleotide
guccaacaaaacagauuga

SEQ ID NO: 2959450 - RNA, 19 nt, Artificial Sequence
  Description of Artificial Sequence: Synthetic oligonucleotide
ccaacaaaacagauugacu

SEQ ID NO: 2959451 - RNA, 19 nt, Artificial Sequence
  Description of Artificial Sequence: Synthetic oligonucleotide
cagauugacugacucucgu

SEQ ID NO: 2959452 - RNA, 19 nt, Artificial Sequence
  Description of Artificial Sequence: Synthetic oligonucleotide
auguaucccagagguggaa

SEQ ID NO: 2959453 - RNA, 19 nt, Artificial Sequence
  Description of Artificial Sequence: Synthetic oligonucleotide
gcauucauugaagccauua

SEQ ID NO: 2959454 - RNA, 19 nt, Artificial Sequence
  Description of Artificial Sequence: Synthetic oligonucleotide
cagagaagagaaggaugca

SEQ ID NO: 2959455 - RNA, 19 nt, Artificial Sequence
  Description of Artificial Sequence: Synthetic oligonucleotide
gagguugagcaugcugucu

SEQ ID NO: 2959456 - RNA, 19 nt, Artificial Sequence
  Description of Artificial Sequence: Synthetic oligonucleotide
cagcguucaaugucaauuu

SEQ ID NO: 2959457 - RNA, 19 nt, Artificial Sequence
  Description of Artificial Sequence: Synthetic oligonucleotide
cuucggacugcacugcuuu

SEQ ID NO: 2959458 - RNA, 19 nt, Artificial Sequence
  Description of Artificial Sequence: Synthetic oligonucleotide
agcaugcugucuguaugua

SEQ ID NO: 2959459 - RNA, 19 nt, Artificial Sequence
  Description of Artificial Sequence: Synthetic oligonucleotide
agucgguuuuggagguuga

SEQ ID NO: 2959460 - RNA, 19 nt, Artificial Sequence
  Description of Artificial Sequence: Synthetic oligonucleotide
cugucuguauguagcacuu

SEQ ID NO: 2959461 - RNA, 19 nt, Artificial Sequence
  Description of Artificial Sequence: Synthetic oligonucleotide
gaaguagggugcugagcuu

SEQ ID NO: 2959462 - RNA, 19 nt, Artificial Sequence
  Description of Artificial Sequence: Synthetic oligonucleotide
cguggaacgcaaucaucug

SEQ ID NO: 2959463 - RNA, 19 nt, Artificial Sequence
  Description of Artificial Sequence: Synthetic oligonucleotide
ggucccgcagcugcugaag

SEQ ID NO: 2959464 - RNA, 19 nt, Artificial Sequence
  Description of Artificial Sequence: Synthetic oligonucleotide
guugagcaugcugucugua

SEQ ID NO: 2959465 - RNA, 19 nt, Artificial Sequence
  Description of Artificial Sequence: Synthetic oligonucleotide
gcuuucagaagucgguuuu

SEQ ID NO: 2959466 - RNA, 19 nt, Artificial Sequence
  Description of Artificial Sequence: Synthetic oligonucleotide
gcguucaaugucaauuucu

SEQ ID NO: 2959467 - RNA, 19 nt, Artificial Sequence
  Description of Artificial Sequence: Synthetic oligonucleotide
gugcugagcuucggacugc

SEQ ID NO: 2959468 - RNA, 19 nt, Artificial Sequence
  Description of Artificial Sequence: Synthetic oligonucleotide
gguuuuggagguugagcau

SEQ ID NO: 2959469 - RNA, 19 nt, Artificial Sequence
  Description of Artificial Sequence: Synthetic oligonucleotide
gccaaaagccggucccgca

SEQ ID NO: 2959470 - RNA, 19 nt, Artificial Sequence
  Description of Artificial Sequence: Synthetic oligonucleotide
acacagcguucaaugucaa

SEQ ID NO: 2959471 - RNA, 19 nt, Artificial Sequence
  Description of Artificial Sequence: Synthetic oligonucleotide
gcguagagaucaggaauga

SEQ ID NO: 2959472 - RNA, 19 nt, Artificial Sequence
  Description of Artificial Sequence: Synthetic oligonucleotide
gggugcugagcuucggacu

SEQ ID NO: 2959473 - RNA, 19 nt, Artificial Sequence
  Description of Artificial Sequence: Synthetic oligonucleotide
gguugagcaugcugucugu

SEQ ID NO: 2959474 - RNA, 19 nt, Artificial Sequence
  Description of Artificial Sequence: Synthetic oligonucleotide
ggaguccaacaaaacagau

SEQ ID NO: 2959475 - RNA, 19 nt, Artificial Sequence
  Description of Artificial Sequence: Synthetic oligonucleotide
ccgcagcugcugaaggaug

SEQ ID NO: 2959476 - RNA, 19 nt, Artificial Sequence
  Description of Artificial Sequence: Synthetic oligonucleotide
ccauuagccaaaagccggu

SEQ ID NO: 2959477 - RNA, 19 nt, Artificial Sequence
  Description of Artificial Sequence: Synthetic oligonucleotide
gggauggcguagagaucag

SEQ ID NO: 2959478 - RNA, 19 nt, Artificial Sequence
  Description of Artificial Sequence: Synthetic oligonucleotide
gcucuggaucguggaacgc

SEQ ID NO: 2959479 - RNA, 19 nt, Artificial Sequence
  Description of Artificial Sequence: Synthetic oligonucleotide
gaucaggaaugaagccaau

SEQ ID NO: 2959480 - RNA, 19 nt, Artificial Sequence
  Description of Artificial Sequence: Synthetic oligonucleotide
cugcuuucagaagucgguu

SEQ ID NO: 2959481 - RNA, 19 nt, Artificial Sequence
  Description of Artificial Sequence: Synthetic oligonucleotide
cucguacacagcguucaau

SEQ ID NO: 2959482 - RNA, 19 nt, Artificial Sequence
  Description of Artificial Sequence: Synthetic oligonucleotide
ccaagggauggcguagaga

SEQ ID NO: 2959483 - RNA, 19 nt, Artificial Sequence
  Description of Artificial Sequence: Synthetic oligonucleotide
ggcuacuccaaugcagaau

SEQ ID NO: 2959484 - RNA, 19 nt, Artificial Sequence
  Description of Artificial Sequence: Synthetic oligonucleotide
cacagcguucaaugucaau

SEQ ID NO: 2959485 - RNA, 19 nt, Artificial Sequence
  Description of Artificial Sequence: Synthetic oligonucleotide
cuggaucguggaacgcaau

SEQ ID NO: 2959486 - RNA, 19 nt, Artificial Sequence
  Description of Artificial Sequence: Synthetic oligonucleotide
cguacacagcguucaaugu

SEQ ID NO: 2959487 - RNA, 19 nt, Artificial Sequence
  Description of Artificial Sequence: Synthetic oligonucleotide
gaagucgguuuuggagguu

SEQ ID NO: 2959488 - RNA, 19 nt, Artificial Sequence
  Description of Artificial Sequence: Synthetic oligonucleotide
cugcugaaggauggcuacu

SEQ ID NO: 2959489 - RNA, 19 nt, Artificial Sequence
  Description of Artificial Sequence: Synthetic oligonucleotide
caaucucguugagaugauu

SEQ ID NO: 2959490 - RNA, 19 nt, Artificial Sequence
  Description of Artificial Sequence: Synthetic oligonucleotide
gcugagcuucggacugcac

SEQ ID NO: 2959491 - RNA, 19 nt, Artificial Sequence
  Description of Artificial Sequence: Synthetic oligonucleotide
cccagagguggaaaauuuu

SEQ ID NO: 2959492 - RNA, 19 nt, Artificial Sequence
  Description of Artificial Sequence: Synthetic oligonucleotide
gccggucccgcagcugcug

SEQ ID NO: 2959493 - RNA, 19 nt, Artificial Sequence
  Description of Artificial Sequence: Synthetic oligonucleotide
cguagagaucaggaaugaa

SEQ ID NO: 2959494 - RNA, 19 nt, Artificial Sequence
  Description of Artificial Sequence: Synthetic oligonucleotide
ccaaucucguugagaugau

SEQ ID NO: 2959495 - RNA, 19 nt, Artificial Sequence
  Description of Artificial Sequence: Synthetic oligonucleotide
ccggucccgcagcugcuga

SEQ ID NO: 2959496 - RNA, 19 nt, Artificial Sequence
  Description of Artificial Sequence: Synthetic oligonucleotide
cccgcagcugcugaaggau

SEQ ID NO: 2959497 - RNA, 19 nt, Artificial Sequence
  Description of Artificial Sequence: Synthetic oligonucleotide
gcuucggacugcacugcuu

SEQ ID NO: 2959498 - RNA, 19 nt, Artificial Sequence
  Description of Artificial Sequence: Synthetic oligonucleotide
cggucccgcagcugcugaa

SEQ ID NO: 2959499 - RNA, 19 nt, Artificial Sequence
  Description of Artificial Sequence: Synthetic oligonucleotide
aaaaccuugaguuuaacuc

SEQ ID NO: 2959500 - RNA, 19 nt, Artificial Sequence
  Description of Artificial Sequence: Synthetic oligonucleotide
aaaccuugaguuuaacucc

SEQ ID NO: 2959501 - RNA, 19 nt, Artificial Sequence
  Description of Artificial Sequence: Synthetic oligonucleotide
uuuaacuccaggcaggucu

SEQ ID NO: 2959502 - RNA, 19 nt, Artificial Sequence
  Description of Artificial Sequence: Synthetic oligonucleotide
auacuugccccucaaaacc

SEQ ID NO: 2959503 - RNA, 19 nt, Artificial Sequence
  Description of Artificial Sequence: Synthetic oligonucleotide
uucgguaggacccaaacgc

SEQ ID NO: 2959504 - RNA, 19 nt, Artificial Sequence
  Description of Artificial Sequence: Synthetic oligonucleotide
gacccaaacgcuuaggagg

SEQ ID NO: 2959505 - RNA, 19 nt, Artificial Sequence
  Description of Artificial Sequence: Synthetic oligonucleotide
aagcaaacagccucuuugc

SEQ ID NO: 2959506 - RNA, 19 nt, Artificial Sequence
  Description of Artificial Sequence: Synthetic oligonucleotide
ugaguuuaacuccaggcag

SEQ ID NO: 2959507 - RNA, 19 nt, Artificial Sequence
  Description of Artificial Sequence: Synthetic oligonucleotide
gaagcaaacagccucuuug

SEQ ID NO: 2959508 - RNA, 19 nt, Artificial Sequence
  Description of Artificial Sequence: Synthetic oligonucleotide
aacaccacacccuucagcu

SEQ ID NO: 2959509 - RNA, 19 nt, Artificial Sequence
  Description of Artificial Sequence: Synthetic oligonucleotide
cuugaguuuaacuccaggc

SEQ ID NO: 2959510 - RNA, 19 nt, Artificial Sequence
  Description of Artificial Sequence: Synthetic oligonucleotide
uguacugaggcgcacucgg

SEQ ID NO: 2959511 - RNA, 19 nt, Artificial Sequence
  Description of Artificial Sequence: Synthetic oligonucleotide
uugaguuuaacuccaggca

SEQ ID NO: 2959512 - RNA, 19 nt, Artificial Sequence
  Description of Artificial Sequence: Synthetic oligonucleotide
ugugcguaacaccacaccc

SEQ ID NO: 2959513 - RNA, 19 nt, Artificial Sequence
  Description of Artificial Sequence: Synthetic oligonucleotide
uaagcggugcaucugguug

SEQ ID NO: 2959514 - RNA, 19 nt, Artificial Sequence
  Description of Artificial Sequence: Synthetic oligonucleotide
gauuguguggcccagagcu

SEQ ID NO: 2959515 - RNA, 19 nt, Artificial Sequence
  Description of Artificial Sequence: Synthetic oligonucleotide
agagcuggggaccuagggc

SEQ ID NO: 2959516 - RNA, 19 nt, Artificial Sequence
  Description of Artificial Sequence: Synthetic oligonucleotide
ucauacuugccccucaaaa

SEQ ID NO: 2959517 - RNA, 19 nt, Artificial Sequence
  Description of Artificial Sequence: Synthetic oligonucleotide
agaguugggcuucuuuggc

SEQ ID NO: 2959518 - RNA, 19 nt, Artificial Sequence
  Description of Artificial Sequence: Synthetic oligonucleotide
uuugccuguacugaggcgc

SEQ ID NO: 2959519 - RNA, 19 nt, Artificial Sequence
  Description of Artificial Sequence: Synthetic oligonucleotide
ucuucuuuugcacguggcc

SEQ ID NO: 2959520 - RNA, 19 nt, Artificial Sequence
  Description of Artificial Sequence: Synthetic oligonucleotide
uuccacgaggaccacgugg

SEQ ID NO: 2959521 - RNA, 19 nt, Artificial Sequence
  Description of Artificial Sequence: Synthetic oligonucleotide
acacccuucagcuguggcc

SEQ ID NO: 2959522 - RNA, 19 nt, Artificial Sequence
  Description of Artificial Sequence: Synthetic oligonucleotide
uucuuuggcuuucugguga

SEQ ID NO: 2959523 - RNA, 19 nt, Artificial Sequence
  Description of Artificial Sequence: Synthetic oligonucleotide
augugcguaacaccacacc

SEQ ID NO: 2959524 - RNA, 19 nt, Artificial Sequence
  Description of Artificial Sequence: Synthetic oligonucleotide
cauacuugccccucaaaac

SEQ ID NO: 2959525 - RNA, 19 nt, Artificial Sequence
  Description of Artificial Sequence: Synthetic oligonucleotide
caaacagccucuuugccug

SEQ ID NO: 2959526 - RNA, 19 nt, Artificial Sequence
  Description of Artificial Sequence: Synthetic oligonucleotide
auggauuauggucacuucu

SEQ ID NO: 2959527 - RNA, 19 nt, Artificial Sequence
  Description of Artificial Sequence: Synthetic oligonucleotide
aaugugcguaacaccacac

SEQ ID NO: 2959528 - RNA, 19 nt, Artificial Sequence
  Description of Artificial Sequence: Synthetic oligonucleotide
uaggagguuccuucgggcg

SEQ ID NO: 2959529 - RNA, 19 nt, Artificial Sequence
  Description of Artificial Sequence: Synthetic oligonucleotide
cuuaggagguuccuucggg

SEQ ID NO: 2959530 - RNA, 19 nt, Artificial Sequence
  Description of Artificial Sequence: Synthetic oligonucleotide
gagcuggggaccuagggcc

SEQ ID NO: 2959531 - RNA, 19 nt, Artificial Sequence
  Description of Artificial Sequence: Synthetic oligonucleotide
auuauggucacuucuucuu

SEQ ID NO: 2959532 - RNA, 19 nt, Artificial Sequence
  Description of Artificial Sequence: Synthetic oligonucleotide
gaguuuaacuccaggcagg

SEQ ID NO: 2959533 - RNA, 19 nt, Artificial Sequence
  Description of Artificial Sequence: Synthetic oligonucleotide
gaggguguggcccuccccg

SEQ ID NO: 2959534 - RNA, 19 nt, Artificial Sequence
  Description of Artificial Sequence: Synthetic oligonucleotide
guggccauggauugugugg

SEQ ID NO: 2959535 - RNA, 19 nt, Artificial Sequence
  Description of Artificial Sequence: Synthetic oligonucleotide
uggauuguguggcccagag

SEQ ID NO: 2959536 - RNA, 19 nt, Artificial Sequence
  Description of Artificial Sequence: Synthetic oligonucleotide
uaacaccacacccuucagc

SEQ ID NO: 2959537 - RNA, 19 nt, Artificial Sequence
  Description of Artificial Sequence: Synthetic oligonucleotide
uugcgguuggcagaguugg

SEQ ID NO: 2959538 - RNA, 19 nt, Artificial Sequence
  Description of Artificial Sequence: Synthetic oligonucleotide
uuuggcuuucuggugaaug

SEQ ID NO: 2959539 - RNA, 19 nt, Artificial Sequence
  Description of Artificial Sequence: Synthetic oligonucleotide
cagaguugggcuucuuugg

SEQ ID NO: 2959540 - RNA, 19 nt, Artificial Sequence
  Description of Artificial Sequence: Synthetic oligonucleotide
uuaggagguuccuucgggc

SEQ ID NO: 2959541 - RNA, 19 nt, Artificial Sequence
  Description of Artificial Sequence: Synthetic oligonucleotide
acgcuuaggagguuccuuc

SEQ ID NO: 2959542 - RNA, 19 nt, Artificial Sequence
  Description of Artificial Sequence: Synthetic oligonucleotide
uccacgaggaccacguggu

SEQ ID NO: 2959543 - RNA, 19 nt, Artificial Sequence
  Description of Artificial Sequence: Synthetic oligonucleotide
accgccuuccacgaggacc

SEQ ID NO: 2959544 - RNA, 19 nt, Artificial Sequence
  Description of Artificial Sequence: Synthetic oligonucleotide
gucacuucuucuuuugcac

SEQ ID NO: 2959545 - RNA, 19 nt, Artificial Sequence
  Description of Artificial Sequence: Synthetic oligonucleotide
ugggccagggacaugucgc

SEQ ID NO: 2959546 - RNA, 19 nt, Artificial Sequence
  Description of Artificial Sequence: Synthetic oligonucleotide
cuucgguaggacccaaacg

SEQ ID NO: 2959547 - RNA, 19 nt, Artificial Sequence
  Description of Artificial Sequence: Synthetic oligonucleotide
cuucgggcggccuaagcgg

SEQ ID NO: 2959548 - RNA, 19 nt, Artificial Sequence
  Description of Artificial Sequence: Synthetic oligonucleotide
gugaaugugcguaacacca

SEQ ID NO: 2959549 - RNA, 19 nt, Artificial Sequence
  Description of Artificial Sequence: Synthetic oligonucleotide
uuugcacguggccacaguc

SEQ ID NO: 2959550 - RNA, 19 nt, Artificial Sequence
  Description of Artificial Sequence: Synthetic oligonucleotide
uuguguggcccagagcugg

SEQ ID NO: 2959551 - RNA, 19 nt, Artificial Sequence
  Description of Artificial Sequence: Synthetic oligonucleotide
ugcaucugguugagggugg

SEQ ID NO: 2959552 - RNA, 19 nt, Artificial Sequence
  Description of Artificial Sequence: Synthetic oligonucleotide
uugaggguggccauggauu

SEQ ID NO: 2959553 - RNA, 19 nt, Artificial Sequence
  Description of Artificial Sequence: Synthetic oligonucleotide
ugaggguggccauggauug

SEQ ID NO: 2959554 - RNA, 19 nt, Artificial Sequence
  Description of Artificial Sequence: Synthetic oligonucleotide
uggauuauggucacuucuu

SEQ ID NO: 2959555 - RNA, 19 nt, Artificial Sequence
  Description of Artificial Sequence: Synthetic oligonucleotide
uuggcuuucuggugaaugu

SEQ ID NO: 2959556 - RNA, 19 nt, Artificial Sequence
  Description of Artificial Sequence: Synthetic oligonucleotide
uucuuuugcacguggccac

SEQ ID NO: 2959557 - RNA, 19 nt, Artificial Sequence
  Description of Artificial Sequence: Synthetic oligonucleotide
ggugcgaccgccuuccacg

SEQ ID NO: 2959558 - RNA, 19 nt, Artificial Sequence
  Description of Artificial Sequence: Synthetic oligonucleotide
gaaugugcguaacaccaca

SEQ ID NO: 2959559 - RNA, 19 nt, Artificial Sequence
  Description of Artificial Sequence: Synthetic oligonucleotide
ggaugaagcaaacagccuc

SEQ ID NO: 2959560 - RNA, 19 nt, Artificial Sequence
  Description of Artificial Sequence: Synthetic oligonucleotide
ugaaugugcguaacaccac

SEQ ID NO: 2959561 - RNA, 19 nt, Artificial Sequence
  Description of Artificial Sequence: Synthetic oligonucleotide
uggugaaugugcguaacac

SEQ ID NO: 2959562 - RNA, 19 nt, Artificial Sequence
  Description of Artificial Sequence: Synthetic oligonucleotide
uacuugccccucaaaaccu

SEQ ID NO: 2959563 - RNA, 19 nt, Artificial Sequence
  Description of Artificial Sequence: Synthetic oligonucleotide
uacugaggcgcacucggca

SEQ ID NO: 2959564 - RNA, 19 nt, Artificial Sequence
  Description of Artificial Sequence: Synthetic oligonucleotide
uuucuggugaaugugcgua

SEQ ID NO: 2959565 - RNA, 19 nt, Artificial Sequence
  Description of Artificial Sequence: Synthetic oligonucleotide
cucuuugccuguacugagg

SEQ ID NO: 2959566 - RNA, 19 nt, Artificial Sequence
  Description of Artificial Sequence: Synthetic oligonucleotide
aggagguuccuucgggcgg

SEQ ID NO: 2959567 - RNA, 19 nt, Artificial Sequence
  Description of Artificial Sequence: Synthetic oligonucleotide
aagcggugcaucugguuga

SEQ ID NO: 2959568 - RNA, 19 nt, Artificial Sequence
  Description of Artificial Sequence: Synthetic oligonucleotide
caaacgcuuaggagguucc

SEQ ID NO: 2959569 - RNA, 19 nt, Artificial Sequence
  Description of Artificial Sequence: Synthetic oligonucleotide
gaccacguggugcuccugg

SEQ ID NO: 2959570 - RNA, 19 nt, Artificial Sequence
  Description of Artificial Sequence: Synthetic oligonucleotide
ggggaugaagcaaacagcc

SEQ ID NO: 2959571 - RNA, 19 nt, Artificial Sequence
  Description of Artificial Sequence: Synthetic oligonucleotide
cacguggugcuccuggagg

SEQ ID NO: 2959572 - RNA, 19 nt, Artificial Sequence
  Description of Artificial Sequence: Synthetic oligonucleotide
uuauggucacuucuucuuu

SEQ ID NO: 2959573 - RNA, 19 nt, Artificial Sequence
  Description of Artificial Sequence: Synthetic oligonucleotide
gccacagucauacuugccc

SEQ ID NO: 2959574 - RNA, 19 nt, Artificial Sequence
  Description of Artificial Sequence: Synthetic oligonucleotide
acguggugcuccuggaggg

SEQ ID NO: 2959575 - RNA, 19 nt, Artificial Sequence
  Description of Artificial Sequence: Synthetic oligonucleotide
uauggauuauggucacuuc

SEQ ID NO: 2959576 - RNA, 19 nt, Artificial Sequence
  Description of Artificial Sequence: Synthetic oligonucleotide
ggugaaugugcguaacacc

SEQ ID NO: 2959577 - RNA, 19 nt, Artificial Sequence
  Description of Artificial Sequence: Synthetic oligonucleotide
uugcacguggccacaguca

SEQ ID NO: 2959578 - RNA, 19 nt, Artificial Sequence
  Description of Artificial Sequence: Synthetic oligonucleotide
aggacccaaacgcuuagga

SEQ ID NO: 2959579 - RNA, 19 nt, Artificial Sequence
  Description of Artificial Sequence: Synthetic oligonucleotide
acugaggcgcacucggcag

SEQ ID NO: 2959580 - RNA, 19 nt, Artificial Sequence
  Description of Artificial Sequence: Synthetic oligonucleotide
uggucacuucuucuuuugc

SEQ ID NO: 2959581 - RNA, 19 nt, Artificial Sequence
  Description of Artificial Sequence: Synthetic oligonucleotide
aaccuugaguuuaacucca

SEQ ID NO: 2959582 - RNA, 19 nt, Artificial Sequence
  Description of Artificial Sequence: Synthetic oligonucleotide
cacccuucagcuguggccg

SEQ ID NO: 2959583 - RNA, 19 nt, Artificial Sequence
  Description of Artificial Sequence: Synthetic oligonucleotide
caggucuugggugcgaccg

SEQ ID NO: 2959584 - RNA, 19 nt, Artificial Sequence
  Description of Artificial Sequence: Synthetic oligonucleotide
auggucacuucuucuuuug

SEQ ID NO: 2959585 - RNA, 19 nt, Artificial Sequence
  Description of Artificial Sequence: Synthetic oligonucleotide
ugccccucaaaaccuugag

SEQ ID NO: 2959586 - RNA, 19 nt, Artificial Sequence
  Description of Artificial Sequence: Synthetic oligonucleotide
gauuauggucacuucuucu

SEQ ID NO: 2959587 - RNA, 19 nt, Artificial Sequence
  Description of Artificial Sequence: Synthetic oligonucleotide
uggccauggauuguguggc

SEQ ID NO: 2959588 - RNA, 19 nt, Artificial Sequence
  Description of Artificial Sequence: Synthetic oligonucleotide
acuccaggcaggucuuggg

SEQ ID NO: 2959589 - RNA, 19 nt, Artificial Sequence
  Description of Artificial Sequence: Synthetic oligonucleotide
ucgguaggacccaaacgcu

SEQ ID NO: 2959590 - RNA, 19 nt, Artificial Sequence
  Description of Artificial Sequence: Synthetic oligonucleotide
cuucuuuggcuuucuggug

SEQ ID NO: 2959591 - RNA, 19 nt, Artificial Sequence
  Description of Artificial Sequence: Synthetic oligonucleotide
cacguggccacagucauac

SEQ ID NO: 2959592 - RNA, 19 nt, Artificial Sequence
  Description of Artificial Sequence: Synthetic oligonucleotide
agcacuugcgguuggcaga

SEQ ID NO: 2959593 - RNA, 19 nt, Artificial Sequence
  Description of Artificial Sequence: Synthetic oligonucleotide
ugguugaggguggccaugg

SEQ ID NO: 2959594 - RNA, 19 nt, Artificial Sequence
  Description of Artificial Sequence: Synthetic oligonucleotide
ugcguaacaccacacccuu

SEQ ID NO: 2959595 - RNA, 19 nt, Artificial Sequence
  Description of Artificial Sequence: Synthetic oligonucleotide
agccucuuugccuguacug

SEQ ID NO: 2959596 - RNA, 19 nt, Artificial Sequence
  Description of Artificial Sequence: Synthetic oligonucleotide
gcagaguugggcuucuuug

SEQ ID NO: 2959597 - RNA, 19 nt, Artificial Sequence
  Description of Artificial Sequence: Synthetic oligonucleotide
cacucggcagcacuugcgg

SEQ ID NO: 2959598 - RNA, 19 nt, Artificial Sequence
  Description of Artificial Sequence: Synthetic oligonucleotide
cuuugccuguacugaggcg

SEQ ID NO: 2959599 - RNA, 19 nt, Artificial Sequence
  Description of Artificial Sequence: Synthetic oligonucleotide
acgaggaccacguggugcu

SEQ ID NO: 2959600 - RNA, 19 nt, Artificial Sequence
  Description of Artificial Sequence: Synthetic oligonucleotide
ugcacguggccacagucau

SEQ ID NO: 2959601 - RNA, 19 nt, Artificial Sequence
  Description of Artificial Sequence: Synthetic oligonucleotide
acagccucuuugccuguac

SEQ ID NO: 2959602 - RNA, 19 nt, Artificial Sequence
  Description of Artificial Sequence: Synthetic oligonucleotide
uauggucacuucuucuuuu

SEQ ID NO: 2959603 - RNA, 19 nt, Artificial Sequence
  Description of Artificial Sequence: Synthetic oligonucleotide
cuugcgguuggcagaguug

SEQ ID NO: 2959604 - RNA, 19 nt, Artificial Sequence
  Description of Artificial Sequence: Synthetic oligonucleotide
cagagcuggggaccuaggg

SEQ ID NO: 2959605 - RNA, 19 nt, Artificial Sequence
  Description of Artificial Sequence: Synthetic oligonucleotide
uuaacuccaggcaggucuu

SEQ ID NO: 2959606 - RNA, 19 nt, Artificial Sequence
  Description of Artificial Sequence: Synthetic oligonucleotide
uguggcccagagcugggga

SEQ ID NO: 2959607 - RNA, 19 nt, Artificial Sequence
  Description of Artificial Sequence: Synthetic oligonucleotide
guaggacccaaacgcuuag

SEQ ID NO: 2959608 - RNA, 19 nt, Artificial Sequence
  Description of Artificial Sequence: Synthetic oligonucleotide
aggucuugggugcgaccgc

SEQ ID NO: 2959609 - RNA, 19 nt, Artificial Sequence
  Description of Artificial Sequence: Synthetic oligonucleotide
aguugggcuucuuuggcuu

SEQ ID NO: 2959610 - RNA, 19 nt, Artificial Sequence
  Description of Artificial Sequence: Synthetic oligonucleotide
uugggugcgaccgccuucc

SEQ ID NO: 2959611 - RNA, 19 nt, Artificial Sequence
  Description of Artificial Sequence: Synthetic oligonucleotide
acagucauacuugccccuc

SEQ ID NO: 2959612 - RNA, 19 nt, Artificial Sequence
  Description of Artificial Sequence: Synthetic oligonucleotide
uggccacagucauacuugc

SEQ ID NO: 2959613 - RNA, 19 nt, Artificial Sequence
  Description of Artificial Sequence: Synthetic oligonucleotide
cuucuuuugcacguggcca

SEQ ID NO: 2959614 - RNA, 19 nt, Artificial Sequence
  Description of Artificial Sequence: Synthetic oligonucleotide
ggacccaaacgcuuaggag

SEQ ID NO: 2959615 - RNA, 19 nt, Artificial Sequence
  Description of Artificial Sequence: Synthetic oligonucleotide
guggccacagucauacuug

SEQ ID NO: 2959616 - RNA, 19 nt, Artificial Sequence
  Description of Artificial Sequence: Synthetic oligonucleotide
cagcacuugcgguuggcag

SEQ ID NO: 2959617 - RNA, 19 nt, Artificial Sequence
  Description of Artificial Sequence: Synthetic oligonucleotide
aucugguugaggguggcca

SEQ ID NO: 2959618 - RNA, 19 nt, Artificial Sequence
  Description of Artificial Sequence: Synthetic oligonucleotide
ccggggaugaagcaaacag

SEQ ID NO: 2959619 - RNA, 19 nt, Artificial Sequence
  Description of Artificial Sequence: Synthetic oligonucleotide
uguggccggccuucgguag

SEQ ID NO: 2959620 - RNA, 19 nt, Artificial Sequence
  Description of Artificial Sequence: Synthetic oligonucleotide
uggcuuucuggugaaugug

SEQ ID NO: 2959621 - RNA, 19 nt, Artificial Sequence
  Description of Artificial Sequence: Synthetic oligonucleotide
uuuugcacguggccacagu

SEQ ID NO: 2959622 - RNA, 19 nt, Artificial Sequence
  Description of Artificial Sequence: Synthetic oligonucleotide
cugggccagggacaugucg

SEQ ID NO: 2959623 - RNA, 19 nt, Artificial Sequence
  Description of Artificial Sequence: Synthetic oligonucleotide
uugccccucaaaaccuuga

SEQ ID NO: 2959624 - RNA, 19 nt, Artificial Sequence
  Description of Artificial Sequence: Synthetic oligonucleotide
caggccacggcagagggac

SEQ ID NO: 2959625 - RNA, 19 nt, Artificial Sequence
  Description of Artificial Sequence: Synthetic oligonucleotide
ugaagcaaacagccucuuu

SEQ ID NO: 2959626 - RNA, 19 nt, Artificial Sequence
  Description of Artificial Sequence: Synthetic oligonucleotide
gaugaagcaaacagccucu

SEQ ID NO: 2959627 - RNA, 19 nt, Artificial Sequence
  Description of Artificial Sequence: Synthetic oligonucleotide
ucuggugaaugugcguaac

SEQ ID NO: 2959628 - RNA, 19 nt, Artificial Sequence
  Description of Artificial Sequence: Synthetic oligonucleotide
ugcgguuggcagaguuggg

SEQ ID NO: 2959629 - RNA, 19 nt, Artificial Sequence
  Description of Artificial Sequence: Synthetic oligonucleotide
ucuuuggcuuucuggugaa

SEQ ID NO: 2959630 - RNA, 19 nt, Artificial Sequence
  Description of Artificial Sequence: Synthetic oligonucleotide
guaacaccacacccuucag

SEQ ID NO: 2959631 - RNA, 19 nt, Artificial Sequence
  Description of Artificial Sequence: Synthetic oligonucleotide
cuugccccucaaaaccuug

SEQ ID NO: 2959632 - RNA, 19 nt, Artificial Sequence
  Description of Artificial Sequence: Synthetic oligonucleotide
caaaaccuugaguuuaacu

SEQ ID NO: 2959633 - RNA, 19 nt, Artificial Sequence
  Description of Artificial Sequence: Synthetic oligonucleotide
cacgaggaccacguggugc

SEQ ID NO: 2959634 - RNA, 19 nt, Artificial Sequence
  Description of Artificial Sequence: Synthetic oligonucleotide
uaggacccaaacgcuuagg

SEQ ID NO: 2959635 - RNA, 19 nt, Artificial Sequence
  Description of Artificial Sequence: Synthetic oligonucleotide
uugccuguacugaggcgca

SEQ ID NO: 2959636 - RNA, 19 nt, Artificial Sequence
  Description of Artificial Sequence: Synthetic oligonucleotide
ugcuccuggaggguguggc

SEQ ID NO: 2959637 - RNA, 19 nt, Artificial Sequence
  Description of Artificial Sequence: Synthetic oligonucleotide
gccuaagcggugcaucugg

SEQ ID NO: 2959638 - RNA, 19 nt, Artificial Sequence
  Description of Artificial Sequence: Synthetic oligonucleotide
uccccggggaugaagcaaa

SEQ ID NO: 2959639 - RNA, 19 nt, Artificial Sequence
  Description of Artificial Sequence: Synthetic oligonucleotide
acggcagagggacgugggg

SEQ ID NO: 2959640 - RNA, 19 nt, Artificial Sequence
  Description of Artificial Sequence: Synthetic oligonucleotide
ggucacuucuucuuuugca

SEQ ID NO: 2959641 - RNA, 19 nt, Artificial Sequence
  Description of Artificial Sequence: Synthetic oligonucleotide
ucaaaaccuugaguuuaac

SEQ ID NO: 2959642 - RNA, 19 nt, Artificial Sequence
  Description of Artificial Sequence: Synthetic oligonucleotide
gcuuucuggugaaugugcg

SEQ ID NO: 2959643 - RNA, 19 nt, Artificial Sequence
  Description of Artificial Sequence: Synthetic oligonucleotide
cacggcagagggacguggg

SEQ ID NO: 2959644 - RNA, 19 nt, Artificial Sequence
  Description of Artificial Sequence: Synthetic oligonucleotide
aaacgcuuaggagguuccu

SEQ ID NO: 2959645 - RNA, 19 nt, Artificial Sequence
  Description of Artificial Sequence: Synthetic oligonucleotide
gcuuaggagguuccuucgg

SEQ ID NO: 2959646 - RNA, 19 nt, Artificial Sequence
  Description of Artificial Sequence: Synthetic oligonucleotide
ggauuauggucacuucuuc

SEQ ID NO: 2959647 - RNA, 19 nt, Artificial Sequence
  Description of Artificial Sequence: Synthetic oligonucleotide
aaacagccucuuugccugu

SEQ ID NO: 2959648 - RNA, 19 nt, Artificial Sequence
  Description of Artificial Sequence: Synthetic oligonucleotide
acuugcgguuggcagaguu

SEQ ID NO: 2959649 - RNA, 19 nt, Artificial Sequence
  Description of Artificial Sequence: Synthetic oligonucleotide
ccuucgggcggccuaagcg

SEQ ID NO: 2959650 - RNA, 19 nt, Artificial Sequence
  Description of Artificial Sequence: Synthetic oligonucleotide
aacgcuuaggagguuccuu

SEQ ID NO: 2959651 - RNA, 19 nt, Artificial Sequence
  Description of Artificial Sequence: Synthetic oligonucleotide
agucauacuugccccucaa

SEQ ID NO: 2959652 - RNA, 19 nt, Artificial Sequence
  Description of Artificial Sequence: Synthetic oligonucleotide
uucgggcggccuaagcggu

SEQ ID NO: 2959653 - RNA, 19 nt, Artificial Sequence
  Description of Artificial Sequence: Synthetic oligonucleotide
acuucuucuuuugcacgug

SEQ ID NO: 2959654 - RNA, 19 nt, Artificial Sequence
  Description of Artificial Sequence: Synthetic oligonucleotide
ccuugaguuuaacuccagg

SEQ ID NO: 2959655 - RNA, 19 nt, Artificial Sequence
  Description of Artificial Sequence: Synthetic oligonucleotide
cggugcaucugguugaggg

SEQ ID NO: 2959656 - RNA, 19 nt, Artificial Sequence
  Description of Artificial Sequence: Synthetic oligonucleotide
acccaaacgcuuaggaggu

SEQ ID NO: 2959657 - RNA, 19 nt, Artificial Sequence
  Description of Artificial Sequence: Synthetic oligonucleotide
ggggaggccacggaggagg

SEQ ID NO: 2959658 - RNA, 19 nt, Artificial Sequence
  Description of Artificial Sequence: Synthetic oligonucleotide
ucuuuugcacguggccaca

SEQ ID NO: 2959659 - RNA, 19 nt, Artificial Sequence
  Description of Artificial Sequence: Synthetic oligonucleotide
ggcagagggacguggggag

SEQ ID NO: 2959660 - RNA, 19 nt, Artificial Sequence
  Description of Artificial Sequence: Synthetic oligonucleotide
cucaaaaccuugaguuuaa

SEQ ID NO: 2959661 - RNA, 19 nt, Artificial Sequence
  Description of Artificial Sequence: Synthetic oligonucleotide
gggaccuagggccaggcca

SEQ ID NO: 2959662 - RNA, 19 nt, Artificial Sequence
  Description of Artificial Sequence: Synthetic oligonucleotide
ucggcagcacuugcgguug

SEQ ID NO: 2959663 - RNA, 19 nt, Artificial Sequence
  Description of Artificial Sequence: Synthetic oligonucleotide
ucagcuguggccggccuuc

SEQ ID NO: 2959664 - RNA, 19 nt, Artificial Sequence
  Description of Artificial Sequence: Synthetic oligonucleotide
agagggacguggggaggcc

SEQ ID NO: 2959665 - RNA, 19 nt, Artificial Sequence
  Description of Artificial Sequence: Synthetic oligonucleotide
cuguacugaggcgcacucg

SEQ ID NO: 2959666 - RNA, 19 nt, Artificial Sequence
  Description of Artificial Sequence: Synthetic oligonucleotide
cacacccuucagcuguggc

SEQ ID NO: 2959667 - RNA, 19 nt, Artificial Sequence
  Description of Artificial Sequence: Synthetic oligonucleotide
aggguguggcccuccccgg

SEQ ID NO: 2959668 - RNA, 19 nt, Artificial Sequence
  Description of Artificial Sequence: Synthetic oligonucleotide
aggguggccauggauugug

SEQ ID NO: 2959669 - RNA, 19 nt, Artificial Sequence
  Description of Artificial Sequence: Synthetic oligonucleotide
gaggaccacguggugcucc

SEQ ID NO: 2959670 - RNA, 19 nt, Artificial Sequence
  Description of Artificial Sequence: Synthetic oligonucleotide
ggcuuucuggugaaugugc

SEQ ID NO: 2959671 - RNA, 19 nt, Artificial Sequence
  Description of Artificial Sequence: Synthetic oligonucleotide
uccuucgggcggccuaagc

SEQ ID NO: 2959672 - RNA, 19 nt, Artificial Sequence
  Description of Artificial Sequence: Synthetic oligonucleotide
gcgaccgccuuccacgagg

SEQ ID NO: 2959673 - RNA, 19 nt, Artificial Sequence
  Description of Artificial Sequence: Synthetic oligonucleotide
cauggauuguguggcccag

SEQ ID NO: 2959674 - RNA, 19 nt, Artificial Sequence
  Description of Artificial Sequence: Synthetic oligonucleotide
ccggccuucgguaggaccc

SEQ ID NO: 2959675 - RNA, 19 nt, Artificial Sequence
  Description of Artificial Sequence: Synthetic oligonucleotide
cugaggcgcacucggcagc

SEQ ID NO: 2959676 - RNA, 19 nt, Artificial Sequence
  Description of Artificial Sequence: Synthetic oligonucleotide
uggugcuccuggagggugu

SEQ ID NO: 2959677 - RNA, 19 nt, Artificial Sequence
  Description of Artificial Sequence: Synthetic oligonucleotide
cuuuugcacguggccacag

SEQ ID NO: 2959678 - RNA, 19 nt, Artificial Sequence
  Description of Artificial Sequence: Synthetic oligonucleotide
ucuugggugcgaccgccuu

SEQ ID NO: 2959679 - RNA, 19 nt, Artificial Sequence
  Description of Artificial Sequence: Synthetic oligonucleotide
cagagggacguggggaggc

SEQ ID NO: 2959680 - RNA, 19 nt, Artificial Sequence
  Description of Artificial Sequence: Synthetic oligonucleotide
acucggcagcacuugcggu

SEQ ID NO: 2959681 - RNA, 19 nt, Artificial Sequence
  Description of Artificial Sequence: Synthetic oligonucleotide
gaguugggcuucuuuggcu

SEQ ID NO: 2959682 - RNA, 19 nt, Artificial Sequence
  Description of Artificial Sequence: Synthetic oligonucleotide
uggcccagagcuggggacc

SEQ ID NO: 2959683 - RNA, 19 nt, Artificial Sequence
  Description of Artificial Sequence: Synthetic oligonucleotide
cuggugaaugugcguaaca

SEQ ID NO: 2959684 - RNA, 19 nt, Artificial Sequence
  Description of Artificial Sequence: Synthetic oligonucleotide
gguggccauggauugugug

SEQ ID NO: 2959685 - RNA, 19 nt, Artificial Sequence
  Description of Artificial Sequence: Synthetic oligonucleotide
ugaggcgcacucggcagca

SEQ ID NO: 2959686 - RNA, 19 nt, Artificial Sequence
  Description of Artificial Sequence: Synthetic oligonucleotide
cuugggugcgaccgccuuc

SEQ ID NO: 2959687 - RNA, 19 nt, Artificial Sequence
  Description of Artificial Sequence: Synthetic oligonucleotide
guggccggccuucgguagg

SEQ ID NO: 2959688 - RNA, 19 nt, Artificial Sequence
  Description of Artificial Sequence: Synthetic oligonucleotide
ccuucgguaggacccaaac

SEQ ID NO: 2959689 - RNA, 19 nt, Artificial Sequence
  Description of Artificial Sequence: Synthetic oligonucleotide
acuauggauuauggucacu

SEQ ID NO: 2959690 - RNA, 19 nt, Artificial Sequence
  Description of Artificial Sequence: Synthetic oligonucleotide
cggggaugaagcaaacagc

SEQ ID NO: 2959691 - RNA, 19 nt, Artificial Sequence
  Description of Artificial Sequence: Synthetic oligonucleotide
cacuucuucuuuugcacgu

SEQ ID NO: 2959692 - RNA, 19 nt, Artificial Sequence
  Description of Artificial Sequence: Synthetic oligonucleotide
ggauuguguggcccagagc

SEQ ID NO: 2959693 - RNA, 19 nt, Artificial Sequence
  Description of Artificial Sequence: Synthetic oligonucleotide
accacguggugcuccugga

SEQ ID NO: 2959694 - RNA, 19 nt, Artificial Sequence
  Description of Artificial Sequence: Synthetic oligonucleotide
gcaaacagccucuuugccu

SEQ ID NO: 2959695 - RNA, 19 nt, Artificial Sequence
  Description of Artificial Sequence: Synthetic oligonucleotide
gguguggcccuccccgggg

SEQ ID NO: 2959696 - RNA, 19 nt, Artificial Sequence
  Description of Artificial Sequence: Synthetic oligonucleotide
gccaggccacggcagaggg

SEQ ID NO: 2959697 - RNA, 19 nt, Artificial Sequence
  Description of Artificial Sequence: Synthetic oligonucleotide
agggacguggggaggccac

SEQ ID NO: 2959698 - RNA, 19 nt, Artificial Sequence
  Description of Artificial Sequence: Synthetic oligonucleotide
uucagcuguggccggccuu

SEQ ID NO: 2959699 - RNA, 19 nt, Artificial Sequence
  Description of Artificial Sequence: Synthetic oligonucleotide
agcuguggccggccuucgg

SEQ ID NO: 2959700 - RNA, 19 nt, Artificial Sequence
  Description of Artificial Sequence: Synthetic oligonucleotide
guggggaggccacggagga

SEQ ID NO: 2959701 - RNA, 19 nt, Artificial Sequence
  Description of Artificial Sequence: Synthetic oligonucleotide
ccacggaggaggcugggcc

SEQ ID NO: 2959702 - RNA, 19 nt, Artificial Sequence
  Description of Artificial Sequence: Synthetic oligonucleotide
ugcgaccgccuuccacgag

SEQ ID NO: 2959703 - RNA, 19 nt, Artificial Sequence
  Description of Artificial Sequence: Synthetic oligonucleotide
cuauggauuauggucacuu

SEQ ID NO: 2959704 - RNA, 19 nt, Artificial Sequence
  Description of Artificial Sequence: Synthetic oligonucleotide
aggcgcacucggcagcacu

SEQ ID NO: 2959705 - RNA, 19 nt, Artificial Sequence
  Description of Artificial Sequence: Synthetic oligonucleotide
cuagggccaggccacggca

SEQ ID NO: 2959706 - RNA, 19 nt, Artificial Sequence
  Description of Artificial Sequence: Synthetic oligonucleotide
uugggcuucuuuggcuuuc

SEQ ID NO: 2959707 - RNA, 19 nt, Artificial Sequence
  Description of Artificial Sequence: Synthetic oligonucleotide
cguaacaccacacccuuca

SEQ ID NO: 2959708 - RNA, 19 nt, Artificial Sequence
  Description of Artificial Sequence: Synthetic oligonucleotide
caccacacccuucagcugu

SEQ ID NO: 2959709 - RNA, 19 nt, Artificial Sequence
  Description of Artificial Sequence: Synthetic oligonucleotide
guugaggguggccauggau

SEQ ID NO: 2959710 - RNA, 19 nt, Artificial Sequence
  Description of Artificial Sequence: Synthetic oligonucleotide
caucugguugaggguggcc

SEQ ID NO: 2959711 - RNA, 19 nt, Artificial Sequence
  Description of Artificial Sequence: Synthetic oligonucleotide
gucauacuugccccucaaa

SEQ ID NO: 2959712 - RNA, 19 nt, Artificial Sequence
  Description of Artificial Sequence: Synthetic oligonucleotide
agcggugcaucugguugag

SEQ ID NO: 2959713 - RNA, 19 nt, Artificial Sequence
  Description of Artificial Sequence: Synthetic oligonucleotide
accuugaguuuaacuccag

SEQ ID NO: 2959714 - RNA, 19 nt, Artificial Sequence
  Description of Artificial Sequence: Synthetic oligonucleotide
acggaggaggcugggccag

SEQ ID NO: 2959715 - RNA, 19 nt, Artificial Sequence
  Description of Artificial Sequence: Synthetic oligonucleotide
cuuucuggugaaugugcgu

SEQ ID NO: 2959716 - RNA, 19 nt, Artificial Sequence
  Description of Artificial Sequence: Synthetic oligonucleotide
guacugaggcgcacucggc

SEQ ID NO: 2959717 - RNA, 19 nt, Artificial Sequence
  Description of Artificial Sequence: Synthetic oligonucleotide
gcacuugcgguuggcagag

SEQ ID NO: 2959718 - RNA, 19 nt, Artificial Sequence
  Description of Artificial Sequence: Synthetic oligonucleotide
accuagggccaggccacgg

SEQ ID NO: 2959719 - RNA, 19 nt, Artificial Sequence
  Description of Artificial Sequence: Synthetic oligonucleotide
gcgguuggcagaguugggc

SEQ ID NO: 2959720 - RNA, 19 nt, Artificial Sequence
  Description of Artificial Sequence: Synthetic oligonucleotide
guggugcuccuggagggug

SEQ ID NO: 2959721 - RNA, 19 nt, Artificial Sequence
  Description of Artificial Sequence: Synthetic oligonucleotide
ucgggcggccuaagcggug

SEQ ID NO: 2959722 - RNA, 19 nt, Artificial Sequence
  Description of Artificial Sequence: Synthetic oligonucleotide
cacggaggaggcugggcca

SEQ ID NO: 2959723 - RNA, 19 nt, Artificial Sequence
  Description of Artificial Sequence: Synthetic oligonucleotide
caggcaggucuugggugcg

SEQ ID NO: 2959724 - RNA, 19 nt, Artificial Sequence
  Description of Artificial Sequence: Synthetic oligonucleotide
cugguugaggguggccaug

SEQ ID NO: 2959725 - RNA, 19 nt, Artificial Sequence
  Description of Artificial Sequence: Synthetic oligonucleotide
cuuccacgaggaccacgug

SEQ ID NO: 2959726 - RNA, 19 nt, Artificial Sequence
  Description of Artificial Sequence: Synthetic oligonucleotide
gaccuagggccaggccacg

SEQ ID NO: 2959727 - RNA, 19 nt, Artificial Sequence
  Description of Artificial Sequence: Synthetic oligonucleotide
gccauggauuguguggccc

SEQ ID NO: 2959728 - RNA, 19 nt, Artificial Sequence
  Description of Artificial Sequence: Synthetic oligonucleotide
guuuaacuccaggcagguc

SEQ ID NO: 2959729 - RNA, 19 nt, Artificial Sequence
  Description of Artificial Sequence: Synthetic oligonucleotide
ggucuugggugcgaccgcc

SEQ ID NO: 2959730 - RNA, 19 nt, Artificial Sequence
  Description of Artificial Sequence: Synthetic oligonucleotide
cagucauacuugccccuca

SEQ ID NO: 2959731 - RNA, 19 nt, Artificial Sequence
  Description of Artificial Sequence: Synthetic oligonucleotide
cgcuuaggagguuccuucg

SEQ ID NO: 2959732 - RNA, 19 nt, Artificial Sequence
  Description of Artificial Sequence: Synthetic oligonucleotide
ggagguuccuucgggcggc

SEQ ID NO: 2959733 - RNA, 19 nt, Artificial Sequence
  Description of Artificial Sequence: Synthetic oligonucleotide
ccaaacgcuuaggagguuc

SEQ ID NO: 2959734 - RNA, 19 nt, Artificial Sequence
  Description of Artificial Sequence: Synthetic oligonucleotide
uggcccuccccggggauga

SEQ ID NO: 2959735 - RNA, 19 nt, Artificial Sequence
  Description of Artificial Sequence: Synthetic oligonucleotide
ggaccuagggccaggccac

SEQ ID NO: 2959736 - RNA, 19 nt, Artificial Sequence
  Description of Artificial Sequence: Synthetic oligonucleotide
gcacucggcagcacuugcg

SEQ ID NO: 2959737 - RNA, 19 nt, Artificial Sequence
  Description of Artificial Sequence: Synthetic oligonucleotide
gggccagggacaugucgcc

SEQ ID NO: 2959738 - RNA, 19 nt, Artificial Sequence
  Description of Artificial Sequence: Synthetic oligonucleotide
aacagccucuuugccugua

SEQ ID NO: 2959739 - RNA, 19 nt, Artificial Sequence
  Description of Artificial Sequence: Synthetic oligonucleotide
gugcguaacaccacacccu

SEQ ID NO: 2959740 - RNA, 19 nt, Artificial Sequence
  Description of Artificial Sequence: Synthetic oligonucleotide
uguggcccuccccggggau

SEQ ID NO: 2959741 - RNA, 19 nt, Artificial Sequence
  Description of Artificial Sequence: Synthetic oligonucleotide
auggauuguguggcccaga

SEQ ID NO: 2959742 - RNA, 19 nt, Artificial Sequence
  Description of Artificial Sequence: Synthetic oligonucleotide
uggggaggccacggaggag

SEQ ID NO: 2959743 - RNA, 19 nt, Artificial Sequence
  Description of Artificial Sequence: Synthetic oligonucleotide
gccucuuugccuguacuga

SEQ ID NO: 2959744 - RNA, 19 nt, Artificial Sequence
  Description of Artificial Sequence: Synthetic oligonucleotide
augaagcaaacagccucuu

SEQ ID NO: 2959745 - RNA, 19 nt, Artificial Sequence
  Description of Artificial Sequence: Synthetic oligonucleotide
gaggaggcugggccaggga

SEQ ID NO: 2959746 - RNA, 19 nt, Artificial Sequence
  Description of Artificial Sequence: Synthetic oligonucleotide
cccuccccggggaugaagc

SEQ ID NO: 2959747 - RNA, 19 nt, Artificial Sequence
  Description of Artificial Sequence: Synthetic oligonucleotide
ccccucaaaaccuugaguu

SEQ ID NO: 2959748 - RNA, 19 nt, Artificial Sequence
  Description of Artificial Sequence: Synthetic oligonucleotide
ggguguggcccuccccggg

SEQ ID NO: 2959749 - RNA, 19 nt, Artificial Sequence
  Description of Artificial Sequence: Synthetic oligonucleotide
gguaggacccaaacgcuua

SEQ ID NO: 2959750 - RNA, 19 nt, Artificial Sequence
  Description of Artificial Sequence: Synthetic oligonucleotide
ccuguacugaggcgcacuc

SEQ ID NO: 2959751 - RNA, 19 nt, Artificial Sequence
  Description of Artificial Sequence: Synthetic oligonucleotide
ccucaaaaccuugaguuua

SEQ ID NO: 2959752 - RNA, 19 nt, Artificial Sequence
  Description of Artificial Sequence: Synthetic oligonucleotide
ggugcaucugguugagggu

SEQ ID NO: 2959753 - RNA, 19 nt, Artificial Sequence
  Description of Artificial Sequence: Synthetic oligonucleotide
ccuagggccaggccacggc

SEQ ID NO: 2959754 - RNA, 19 nt, Artificial Sequence
  Description of Artificial Sequence: Synthetic oligonucleotide
ggccauggauuguguggcc

SEQ ID NO: 2959755 - RNA, 19 nt, Artificial Sequence
  Description of Artificial Sequence: Synthetic oligonucleotide
gcuccuggaggguguggcc

SEQ ID NO: 2959756 - RNA, 19 nt, Artificial Sequence
  Description of Artificial Sequence: Synthetic oligonucleotide
uggccggccuucgguagga

SEQ ID NO: 2959757 - RNA, 19 nt, Artificial Sequence
  Description of Artificial Sequence: Synthetic oligonucleotide
uuccuucgggcggccuaag

SEQ ID NO: 2959758 - RNA, 19 nt, Artificial Sequence
  Description of Artificial Sequence: Synthetic oligonucleotide
ccgccuuccacgaggacca

SEQ ID NO: 2959759 - RNA, 19 nt, Artificial Sequence
  Description of Artificial Sequence: Synthetic oligonucleotide
ggaggguguggcccucccc

SEQ ID NO: 2959760 - RNA, 19 nt, Artificial Sequence
  Description of Artificial Sequence: Synthetic oligonucleotide
gcaggucuugggugcgacc

SEQ ID NO: 2959761 - RNA, 19 nt, Artificial Sequence
  Description of Artificial Sequence: Synthetic oligonucleotide
cuggggaccuagggccagg

SEQ ID NO: 2959762 - RNA, 19 nt, Artificial Sequence
  Description of Artificial Sequence: Synthetic oligonucleotide
gugcgaccgccuuccacga

SEQ ID NO: 2959763 - RNA, 19 nt, Artificial Sequence
  Description of Artificial Sequence: Synthetic oligonucleotide
gcagagggacguggggagg

SEQ ID NO: 2959764 - RNA, 19 nt, Artificial Sequence
  Description of Artificial Sequence: Synthetic oligonucleotide
ccagagcuggggaccuagg

SEQ ID NO: 2959765 - RNA, 19 nt, Artificial Sequence
  Description of Artificial Sequence: Synthetic oligonucleotide
gagggacguggggaggcca

SEQ ID NO: 2959766 - RNA, 19 nt, Artificial Sequence
  Description of Artificial Sequence: Synthetic oligonucleotide
guuccuucgggcggccuaa

SEQ ID NO: 2959767 - RNA, 19 nt, Artificial Sequence
  Description of Artificial Sequence: Synthetic oligonucleotide
acuugccccucaaaaccuu

SEQ ID NO: 2959768 - RNA, 19 nt, Artificial Sequence
  Description of Artificial Sequence: Synthetic oligonucleotide
gccggccuucgguaggacc

SEQ ID NO: 2959769 - RNA, 19 nt, Artificial Sequence
  Description of Artificial Sequence: Synthetic oligonucleotide
accacacccuucagcugug

SEQ ID NO: 2959770 - RNA, 19 nt, Artificial Sequence
  Description of Artificial Sequence: Synthetic oligonucleotide
ugccuguacugaggcgcac

SEQ ID NO: 2959771 - RNA, 19 nt, Artificial Sequence
  Description of Artificial Sequence: Synthetic oligonucleotide
cuccaggcaggucuugggu

SEQ ID NO: 2959772 - RNA, 19 nt, Artificial Sequence
  Description of Artificial Sequence: Synthetic oligonucleotide
gugcuccuggagggugugg

SEQ ID NO: 2959773 - RNA, 19 nt, Artificial Sequence
  Description of Artificial Sequence: Synthetic oligonucleotide
gagguuccuucgggcggcc

SEQ ID NO: 2959774 - RNA, 19 nt, Artificial Sequence
  Description of Artificial Sequence: Synthetic oligonucleotide
ccacguggugcuccuggag

SEQ ID NO: 2959775 - RNA, 19 nt, Artificial Sequence
  Description of Artificial Sequence: Synthetic oligonucleotide
ggaggcugggccagggaca

SEQ ID NO: 2959776 - RNA, 19 nt, Artificial Sequence
  Description of Artificial Sequence: Synthetic oligonucleotide
ggccaggccacggcagagg

SEQ ID NO: 2959777 - RNA, 19 nt, Artificial Sequence
  Description of Artificial Sequence: Synthetic oligonucleotide
cucggcagcacuugcgguu

SEQ ID NO: 2959778 - RNA, 19 nt, Artificial Sequence
  Description of Artificial Sequence: Synthetic oligonucleotide
ugggugcgaccgccuucca

SEQ ID NO: 2959779 - RNA, 19 nt, Artificial Sequence
  Description of Artificial Sequence: Synthetic oligonucleotide
gaccgccuuccacgaggac

SEQ ID NO: 2959780 - RNA, 19 nt, Artificial Sequence
  Description of Artificial Sequence: Synthetic oligonucleotide
ccuuccacgaggaccacgu

SEQ ID NO: 2959781 - RNA, 19 nt, Artificial Sequence
  Description of Artificial Sequence: Synthetic oligonucleotide
gccuuccacgaggaccacg

SEQ ID NO: 2959782 - RNA, 19 nt, Artificial Sequence
  Description of Artificial Sequence: Synthetic oligonucleotide
cuaagcggugcaucugguu

SEQ ID NO: 2959783 - RNA, 19 nt, Artificial Sequence
  Description of Artificial Sequence: Synthetic oligonucleotide
ggccacagucauacuugcc

SEQ ID NO: 2959784 - RNA, 19 nt, Artificial Sequence
  Description of Artificial Sequence: Synthetic oligonucleotide
gguuccuucgggcggccua

SEQ ID NO: 2959785 - RNA, 19 nt, Artificial Sequence
  Description of Artificial Sequence: Synthetic oligonucleotide
ggggaccuagggccaggcc

SEQ ID NO: 2959786 - RNA, 19 nt, Artificial Sequence
  Description of Artificial Sequence: Synthetic oligonucleotide
gggugcgaccgccuuccac

SEQ ID NO: 2959787 - RNA, 19 nt, Artificial Sequence
  Description of Artificial Sequence: Synthetic oligonucleotide
gggacguggggaggccacg

SEQ ID NO: 2959788 - RNA, 19 nt, Artificial Sequence
  Description of Artificial Sequence: Synthetic oligonucleotide
ggccuaagcggugcaucug

SEQ ID NO: 2959789 - RNA, 19 nt, Artificial Sequence
  Description of Artificial Sequence: Synthetic oligonucleotide
acguggccacagucauacu

SEQ ID NO: 2959790 - RNA, 19 nt, Artificial Sequence
  Description of Artificial Sequence: Synthetic oligonucleotide
guguggcccuccccgggga

SEQ ID NO: 2959791 - RNA, 19 nt, Artificial Sequence
  Description of Artificial Sequence: Synthetic oligonucleotide
gggcuucuuuggcuuucug

SEQ ID NO: 2959792 - RNA, 19 nt, Artificial Sequence
  Description of Artificial Sequence: Synthetic oligonucleotide
cagcuguggccggccuucg

SEQ ID NO: 2959793 - RNA, 19 nt, Artificial Sequence
  Description of Artificial Sequence: Synthetic oligonucleotide
ccacggcagagggacgugg

SEQ ID NO: 2959794 - RNA, 19 nt, Artificial Sequence
  Description of Artificial Sequence: Synthetic oligonucleotide
cccagagcuggggaccuag

SEQ ID NO: 2959795 - RNA, 19 nt, Artificial Sequence
  Description of Artificial Sequence: Synthetic oligonucleotide
gcaucugguugaggguggc

SEQ ID NO: 2959796 - RNA, 19 nt, Artificial Sequence
  Description of Artificial Sequence: Synthetic oligonucleotide
ggugcuccuggagggugug

SEQ ID NO: 2959797 - RNA, 19 nt, Artificial Sequence
  Description of Artificial Sequence: Synthetic oligonucleotide
cuccccggggaugaagcaa

SEQ ID NO: 2959798 - RNA, 19 nt, Artificial Sequence
  Description of Artificial Sequence: Synthetic oligonucleotide
ccuucagcuguggccggcc

SEQ ID NO: 2959799 - RNA, 19 nt, Artificial Sequence
  Description of Artificial Sequence: Synthetic oligonucleotide
guugggcuucuuuggcuuu

SEQ ID NO: 2959800 - RNA, 19 nt, Artificial Sequence
  Description of Artificial Sequence: Synthetic oligonucleotide
gcagcacuugcgguuggca

SEQ ID NO: 2959801 - RNA, 19 nt, Artificial Sequence
  Description of Artificial Sequence: Synthetic oligonucleotide
ggcaggucuugggugcgac

SEQ ID NO: 2959802 - RNA, 19 nt, Artificial Sequence
  Description of Artificial Sequence: Synthetic oligonucleotide
gccccucaaaaccuugagu

SEQ ID NO: 2959803 - RNA, 19 nt, Artificial Sequence
  Description of Artificial Sequence: Synthetic oligonucleotide
aggccacggcagagggacg

SEQ ID NO: 2959804 - RNA, 19 nt, Artificial Sequence
  Description of Artificial Sequence: Synthetic oligonucleotide
ggcagcacuugcgguuggc

SEQ ID NO: 2959805 - RNA, 19 nt, Artificial Sequence
  Description of Artificial Sequence: Synthetic oligonucleotide
gguugaggguggccaugga

SEQ ID NO: 2959806 - RNA, 19 nt, Artificial Sequence
  Description of Artificial Sequence: Synthetic oligonucleotide
cagccucuuugccuguacu

SEQ ID NO: 2959807 - RNA, 19 nt, Artificial Sequence
  Description of Artificial Sequence: Synthetic oligonucleotide
gggaugaagcaaacagccu

SEQ ID NO: 2959808 - RNA, 19 nt, Artificial Sequence
  Description of Artificial Sequence: Synthetic oligonucleotide
aggcaggucuugggugcga

SEQ ID NO: 2959809 - RNA, 19 nt, Artificial Sequence
  Description of Artificial Sequence: Synthetic oligonucleotide
cgcacucggcagcacuugc

SEQ ID NO: 2959810 - RNA, 19 nt, Artificial Sequence
  Description of Artificial Sequence: Synthetic oligonucleotide
gcggccuaagcggugcauc

SEQ ID NO: 2959811 - RNA, 19 nt, Artificial Sequence
  Description of Artificial Sequence: Synthetic oligonucleotide
ggcagaguugggcuucuuu

SEQ ID NO: 2959812 - RNA, 19 nt, Artificial Sequence
  Description of Artificial Sequence: Synthetic oligonucleotide
gaggguggccauggauugu

SEQ ID NO: 2959813 - RNA, 19 nt, Artificial Sequence
  Description of Artificial Sequence: Synthetic oligonucleotide
gaggcgcacucggcagcac

SEQ ID NO: 2959814 - RNA, 19 nt, Artificial Sequence
  Description of Artificial Sequence: Synthetic oligonucleotide
agguuccuucgggcggccu

SEQ ID NO: 2959815 - RNA, 19 nt, Artificial Sequence
  Description of Artificial Sequence: Synthetic oligonucleotide
gggaggccacggaggaggc

SEQ ID NO: 2959816 - RNA, 19 nt, Artificial Sequence
  Description of Artificial Sequence: Synthetic oligonucleotide
gccacggaggaggcugggc

SEQ ID NO: 2959817 - RNA, 19 nt, Artificial Sequence
  Description of Artificial Sequence: Synthetic oligonucleotide
cuucagcuguggccggccu

SEQ ID NO: 2959818 - RNA, 19 nt, Artificial Sequence
  Description of Artificial Sequence: Synthetic oligonucleotide
gcgcacucggcagcacuug

SEQ ID NO: 2959819 - RNA, 19 nt, Artificial Sequence
  Description of Artificial Sequence: Synthetic oligonucleotide
ccacgaggaccacguggug

SEQ ID NO: 2959820 - RNA, 19 nt, Artificial Sequence
  Description of Artificial Sequence: Synthetic oligonucleotide
ggccacggaggaggcuggg

SEQ ID NO: 2959821 - RNA, 19 nt, Artificial Sequence
  Description of Artificial Sequence: Synthetic oligonucleotide
gcggugcaucugguugagg

SEQ ID NO: 2959822 - RNA, 19 nt, Artificial Sequence
  Description of Artificial Sequence: Synthetic oligonucleotide
ccacacccuucagcugugg

SEQ ID NO: 2959823 - RNA, 19 nt, Artificial Sequence
  Description of Artificial Sequence: Synthetic oligonucleotide
ccccggggaugaagcaaac

SEQ ID NO: 2959824 - RNA, 19 nt, Artificial Sequence
  Description of Artificial Sequence: Synthetic oligonucleotide
cccucaaaaccuugaguuu

SEQ ID NO: 2959825 - RNA, 19 nt, Artificial Sequence
  Description of Artificial Sequence: Synthetic oligonucleotide
gcguaacaccacacccuuc

SEQ ID NO: 2959826 - RNA, 19 nt, Artificial Sequence
  Description of Artificial Sequence: Synthetic oligonucleotide
cccuucagcuguggccggc

SEQ ID NO: 2959827 - RNA, 19 nt, Artificial Sequence
  Description of Artificial Sequence: Synthetic oligonucleotide
gucuugggugcgaccgccu

SEQ ID NO: 2959828 - RNA, 19 nt, Artificial Sequence
  Description of Artificial Sequence: Synthetic oligonucleotide
gcccuccccggggaugaag

SEQ ID NO: 2959829 - RNA, 19 nt, Artificial Sequence
  Description of Artificial Sequence: Synthetic oligonucleotide
ccuaagcggugcaucuggu

SEQ ID NO: 2959830 - RNA, 19 nt, Artificial Sequence
  Description of Artificial Sequence: Synthetic oligonucleotide
gccacggcagagggacgug

SEQ ID NO: 2959831 - RNA, 19 nt, Artificial Sequence
  Description of Artificial Sequence: Synthetic oligonucleotide
ccuccccggggaugaagca

SEQ ID NO: 2959832 - RNA, 19 nt, Artificial Sequence
  Description of Artificial Sequence: Synthetic oligonucleotide
ggccacggcagagggacgu

SEQ ID NO: 2959833 - RNA, 19 nt, Artificial Sequence
  Description of Artificial Sequence: Synthetic oligonucleotide
cgguuggcagaguugggcu

SEQ ID NO: 2959834 - RNA, 19 nt, Artificial Sequence
  Description of Artificial Sequence: Synthetic oligonucleotide
aggcugggccagggacaug

SEQ ID NO: 2959835 - RNA, 19 nt, Artificial Sequence
  Description of Artificial Sequence: Synthetic oligonucleotide
cuuuggcuuucuggugaau

SEQ ID NO: 2959836 - RNA, 19 nt, Artificial Sequence
  Description of Artificial Sequence: Synthetic oligonucleotide
gccuguacugaggcgcacu

SEQ ID NO: 2959837 - RNA, 19 nt, Artificial Sequence
  Description of Artificial Sequence: Synthetic oligonucleotide
cgggcggccuaagcggugc

SEQ ID NO: 2959838 - RNA, 19 nt, Artificial Sequence
  Description of Artificial Sequence: Synthetic oligonucleotide
ccaggccacggcagaggga

SEQ ID NO: 2959839 - RNA, 19 nt, Artificial Sequence
  Description of Artificial Sequence: Synthetic oligonucleotide
cccggggaugaagcaaaca

SEQ ID NO: 2959840 - RNA, 19 nt, Artificial Sequence
  Description of Artificial Sequence: Synthetic oligonucleotide
cgaccgccuuccacgagga

SEQ ID NO: 2959841 - RNA, 19 nt, Artificial Sequence
  Description of Artificial Sequence: Synthetic oligonucleotide
gggcggccuaagcggugca

SEQ ID NO: 2959842 - RNA, 19 nt, Artificial Sequence
  Description of Artificial Sequence: Synthetic oligonucleotide
cggcagcacuugcgguugg

SEQ ID NO: 2959843 - RNA, 19 nt, Artificial Sequence
  Description of Artificial Sequence: Synthetic oligonucleotide
gcugggccagggacauguc

SEQ ID NO: 2959844 - RNA, 19 nt, Artificial Sequence
  Description of Artificial Sequence: Synthetic oligonucleotide
gccuucgguaggacccaaa

SEQ ID NO: 2959845 - RNA, 19 nt, Artificial Sequence
  Description of Artificial Sequence: Synthetic oligonucleotide
ggcgcacucggcagcacuu

SEQ ID NO: 2959846 - RNA, 19 nt, Artificial Sequence
  Description of Artificial Sequence: Synthetic oligonucleotide
cggccuaagcggugcaucu

SEQ ID NO: 2959847 - RNA, 19 nt, Artificial Sequence
  Description of Artificial Sequence: Synthetic oligonucleotide
ggcccagagcuggggaccu

SEQ ID NO: 2959848 - RNA, 19 nt, Artificial Sequence
  Description of Artificial Sequence: Synthetic oligonucleotide
gcacguggccacagucaua

SEQ ID NO: 2959849 - RNA, 19 nt, Artificial Sequence
  Description of Artificial Sequence: Synthetic oligonucleotide
ggguggccauggauugugu

SEQ ID NO: 2959850 - RNA, 19 nt, Artificial Sequence
  Description of Artificial Sequence: Synthetic oligonucleotide
ggccuucgguaggacccaa

SEQ ID NO: 2959851 - RNA, 19 nt, Artificial Sequence
  Description of Artificial Sequence: Synthetic oligonucleotide
cgguaggacccaaacgcuu

SEQ ID NO: 2959852 - RNA, 19 nt, Artificial Sequence
  Description of Artificial Sequence: Synthetic oligonucleotide
ggccggccuucgguaggac

SEQ ID NO: 2959853 - RNA, 19 nt, Artificial Sequence
  Description of Artificial Sequence: Synthetic oligonucleotide
ggaggccacggaggaggcu

SEQ ID NO: 2959854 - RNA, 19 nt, Artificial Sequence
  Description of Artificial Sequence: Synthetic oligonucleotide
ggcggccuaagcggugcau

SEQ ID NO: 2959855 - RNA, 19 nt, Artificial Sequence
  Description of Artificial Sequence: Synthetic oligonucleotide
cgaggaccacguggugcuc

SEQ ID NO: 2959856 - RNA, 19 nt, Artificial Sequence
  Description of Artificial Sequence: Synthetic oligonucleotide
cacuugcgguuggcagagu

SEQ ID NO: 2959857 - RNA, 19 nt, Artificial Sequence
  Description of Artificial Sequence: Synthetic oligonucleotide
cggccuucgguaggaccca

SEQ ID NO: 2959858 - RNA, 19 nt, Artificial Sequence
  Description of Artificial Sequence: Synthetic oligonucleotide
gcccagagcuggggaccua

SEQ ID NO: 2959859 - RNA, 19 nt, Artificial Sequence
  Description of Artificial Sequence: Synthetic oligonucleotide
cgccuuccacgaggaccac

SEQ ID NO: 2959860 - RNA, 19 nt, Artificial Sequence
  Description of Artificial Sequence: Synthetic oligonucleotide
ggcccuccccggggaugaa

SEQ ID NO: 2959861 - RNA, 19 nt, Artificial Sequence
  Description of Artificial Sequence: Synthetic oligonucleotide
cccaaacgcuuaggagguu

SEQ ID NO: 2959862 - RNA, 19 nt, Artificial Sequence
  Description of Artificial Sequence: Synthetic oligonucleotide
uaggguuagaagcccaugg

SEQ ID NO: 2959863 - RNA, 19 nt, Artificial Sequence
  Description of Artificial Sequence: Synthetic oligonucleotide
acuuccccaauccagguac

SEQ ID NO: 2959864 - RNA, 19 nt, Artificial Sequence
  Description of Artificial Sequence: Synthetic oligonucleotide
gucagcuaggguuagaagc

SEQ ID NO: 2959865 - RNA, 19 nt, Artificial Sequence
  Description of Artificial Sequence: Synthetic oligonucleotide
ucagcuaggguuagaagcc

SEQ ID NO: 2959866 - RNA, 19 nt, Artificial Sequence
  Description of Artificial Sequence: Synthetic oligonucleotide
aagacaguggacugaggag

SEQ ID NO: 2959867 - RNA, 19 nt, Artificial Sequence
  Description of Artificial Sequence: Synthetic oligonucleotide
ucgacuuccccaauccagg

SEQ ID NO: 2959868 - RNA, 19 nt, Artificial Sequence
  Description of Artificial Sequence: Synthetic oligonucleotide
aggguuagaagcccauggc

SEQ ID NO: 2959869 - RNA, 19 nt, Artificial Sequence
  Description of Artificial Sequence: Synthetic oligonucleotide
gaagacaguggacugagga

SEQ ID NO: 2959870 - RNA, 19 nt, Artificial Sequence
  Description of Artificial Sequence: Synthetic oligonucleotide
ucagggugaugucagcuag

SEQ ID NO: 2959871 - RNA, 19 nt, Artificial Sequence
  Description of Artificial Sequence: Synthetic oligonucleotide
augaugaagacaguggacu

SEQ ID NO: 2959872 - RNA, 19 nt, Artificial Sequence
  Description of Artificial Sequence: Synthetic oligonucleotide
ugaugaagacaguggacug

SEQ ID NO: 2959873 - RNA, 19 nt, Artificial Sequence
  Description of Artificial Sequence: Synthetic oligonucleotide
uucagcagccacucuaaug

SEQ ID NO: 2959874 - RNA, 19 nt, Artificial Sequence
  Description of Artificial Sequence: Synthetic oligonucleotide
uaaugcacgggcccugcag

SEQ ID NO: 2959875 - RNA, 19 nt, Artificial Sequence
  Description of Artificial Sequence: Synthetic oligonucleotide
caugaugaagacaguggac

SEQ ID NO: 2959876 - RNA, 19 nt, Artificial Sequence
  Description of Artificial Sequence: Synthetic oligonucleotide
gagucgacuuccccaaucc

SEQ ID NO: 2959877 - RNA, 19 nt, Artificial Sequence
  Description of Artificial Sequence: Synthetic oligonucleotide
cacucuaaugcacgggccc

SEQ ID NO: 2959878 - RNA, 19 nt, Artificial Sequence
  Description of Artificial Sequence: Synthetic oligonucleotide
augaagacaguggacugag

SEQ ID NO: 2959879 - RNA, 19 nt, Artificial Sequence
  Description of Artificial Sequence: Synthetic oligonucleotide
ugucagcuaggguuagaag

SEQ ID NO: 2959880 - RNA, 19 nt, Artificial Sequence
  Description of Artificial Sequence: Synthetic oligonucleotide
caaugagaaccagagcagc

SEQ ID NO: 2959881 - RNA, 19 nt, Artificial Sequence
  Description of Artificial Sequence: Synthetic oligonucleotide
ugaagacaguggacugagg

SEQ ID NO: 2959882 - RNA, 19 nt, Artificial Sequence
  Description of Artificial Sequence: Synthetic oligonucleotide
gguuagaagcccauggccc

SEQ ID NO: 2959883 - RNA, 19 nt, Artificial Sequence
  Description of Artificial Sequence: Synthetic oligonucleotide
guuagaagcccauggccca

SEQ ID NO: 2959884 - RNA, 19 nt, Artificial Sequence
  Description of Artificial Sequence: Synthetic oligonucleotide
gucgacuuccccaauccag

SEQ ID NO: 2959885 - RNA, 19 nt, Artificial Sequence
  Description of Artificial Sequence: Synthetic oligonucleotide
gaugaagacaguggacuga

SEQ ID NO: 2959886 - RNA, 19 nt, Artificial Sequence
  Description of Artificial Sequence: Synthetic oligonucleotide
ggguuagaagcccauggcc

SEQ ID NO: 2959887 - RNA, 19 nt, Artificial Sequence
  Description of Artificial Sequence: Synthetic oligonucleotide
ggugaugucagcuaggguu

SEQ ID NO: 2959888 - RNA, 19 nt, Artificial Sequence
  Description of Artificial Sequence: Synthetic oligonucleotide
ucuaaugcacgggcccugc

SEQ ID NO: 2959889 - RNA, 19 nt, Artificial Sequence
  Description of Artificial Sequence: Synthetic oligonucleotide
gccacucuaaugcacgggc

SEQ ID NO: 2959890 - RNA, 19 nt, Artificial Sequence
  Description of Artificial Sequence: Synthetic oligonucleotide
cagccacucuaaugcacgg

SEQ ID NO: 2959891 - RNA, 19 nt, Artificial Sequence
  Description of Artificial Sequence: Synthetic oligonucleotide
agucgacuuccccaaucca

SEQ ID NO: 2959892 - RNA, 19 nt, Artificial Sequence
  Description of Artificial Sequence: Synthetic oligonucleotide
augagaaccagagcagcaa

SEQ ID NO: 2959893 - RNA, 19 nt, Artificial Sequence
  Description of Artificial Sequence: Synthetic oligonucleotide
augucagcuaggguuagaa

SEQ ID NO: 2959894 - RNA, 19 nt, Artificial Sequence
  Description of Artificial Sequence: Synthetic oligonucleotide
agccacucuaaugcacggg

SEQ ID NO: 2959895 - RNA, 19 nt, Artificial Sequence
  Description of Artificial Sequence: Synthetic oligonucleotide
acucuaaugcacgggcccu

SEQ ID NO: 2959896 - RNA, 19 nt, Artificial Sequence
  Description of Artificial Sequence: Synthetic oligonucleotide
cuaggguuagaagcccaug

SEQ ID NO: 2959897 - RNA, 19 nt, Artificial Sequence
  Description of Artificial Sequence: Synthetic oligonucleotide
ggcugagagcagcagaguc

SEQ ID NO: 2959898 - RNA, 19 nt, Artificial Sequence
  Description of Artificial Sequence: Synthetic oligonucleotide
uccccaauccagguacuuc

SEQ ID NO: 2959899 - RNA, 19 nt, Artificial Sequence
  Description of Artificial Sequence: Synthetic oligonucleotide
cagcuaggguuagaagccc

SEQ ID NO: 2959900 - RNA, 19 nt, Artificial Sequence
  Description of Artificial Sequence: Synthetic oligonucleotide
gugaugucagcuaggguua

SEQ ID NO: 2959901 - RNA, 19 nt, Artificial Sequence
  Description of Artificial Sequence: Synthetic oligonucleotide
ccacucuaaugcacgggcc

SEQ ID NO: 2959902 - RNA, 19 nt, Artificial Sequence
  Description of Artificial Sequence: Synthetic oligonucleotide
cucuaaugcacgggcccug

SEQ ID NO: 2959903 - RNA, 19 nt, Artificial Sequence
  Description of Artificial Sequence: Synthetic oligonucleotide
gacuuccccaauccaggua

SEQ ID NO: 2959904 - RNA, 19 nt, Artificial Sequence
  Description of Artificial Sequence: Synthetic oligonucleotide
agcuaggguuagaagccca

SEQ ID NO: 2959905 - RNA, 19 nt, Artificial Sequence
  Description of Artificial Sequence: Synthetic oligonucleotide
gaugucagcuaggguuaga

SEQ ID NO: 2959906 - RNA, 19 nt, Artificial Sequence
  Description of Artificial Sequence: Synthetic oligonucleotide
cccaauccagguacuucag

SEQ ID NO: 2959907 - RNA, 19 nt, Artificial Sequence
  Description of Artificial Sequence: Synthetic oligonucleotide
uuccccaauccagguacuu

SEQ ID NO: 2959908 - RNA, 19 nt, Artificial Sequence
  Description of Artificial Sequence: Synthetic oligonucleotide
cagcagccacucuaaugca

SEQ ID NO: 2959909 - RNA, 19 nt, Artificial Sequence
  Description of Artificial Sequence: Synthetic oligonucleotide
cuaaugcacgggcccugca

SEQ ID NO: 2959910 - RNA, 19 nt, Artificial Sequence
  Description of Artificial Sequence: Synthetic oligonucleotide
gggugaugucagcuagggu

SEQ ID NO: 2959911 - RNA, 19 nt, Artificial Sequence
  Description of Artificial Sequence: Synthetic oligonucleotide
gcuaggguuagaagcccau

SEQ ID NO: 2959912 - RNA, 19 nt, Artificial Sequence
  Description of Artificial Sequence: Synthetic oligonucleotide
gggcugagagcagcagagu

SEQ ID NO: 2959913 - RNA, 19 nt, Artificial Sequence
  Description of Artificial Sequence: Synthetic oligonucleotide
aaucaaacaagccaaaucc

SEQ ID NO: 2959914 - RNA, 19 nt, Artificial Sequence
  Description of Artificial Sequence: Synthetic oligonucleotide
ucuagaaucuucuuaaugu

SEQ ID NO: 2959915 - RNA, 19 nt, Artificial Sequence
  Description of Artificial Sequence: Synthetic oligonucleotide
cuucuuaaugucuuuagcg

SEQ ID NO: 2959916 - RNA, 19 nt, Artificial Sequence
  Description of Artificial Sequence: Synthetic oligonucleotide
cuugccaacacccugggcg

SEQ ID NO: 2959917 - RNA, 19 nt, Artificial Sequence
  Description of Artificial Sequence: Synthetic oligonucleotide
guuuuaaucaaacaagcca

SEQ ID NO: 2959918 - RNA, 19 nt, Artificial Sequence
  Description of Artificial Sequence: Synthetic oligonucleotide
cugauaaccuuguugagcc

SEQ ID NO: 2959919 - RNA, 19 nt, Artificial Sequence
  Description of Artificial Sequence: Synthetic oligonucleotide
auucagcucacugauaacc

SEQ ID NO: 2959920 - RNA, 19 nt, Artificial Sequence
  Description of Artificial Sequence: Synthetic oligonucleotide
uucuuaaugucuuuagcgc

SEQ ID NO: 2959921 - RNA, 19 nt, Artificial Sequence
  Description of Artificial Sequence: Synthetic oligonucleotide
ucaaacaagccaaauccca

SEQ ID NO: 2959922 - RNA, 19 nt, Artificial Sequence
  Description of Artificial Sequence: Synthetic oligonucleotide
acugauaaccuuguugagc

SEQ ID NO: 2959923 - RNA, 19 nt, Artificial Sequence
  Description of Artificial Sequence: Synthetic oligonucleotide
uaaucaaacaagccaaauc

SEQ ID NO: 2959924 - RNA, 19 nt, Artificial Sequence
  Description of Artificial Sequence: Synthetic oligonucleotide
uuuuccauucagcucacug

SEQ ID NO: 2959925 - RNA, 19 nt, Artificial Sequence
  Description of Artificial Sequence: Synthetic oligonucleotide
ucuucuuaaugucuuuagc

SEQ ID NO: 2959926 - RNA, 19 nt, Artificial Sequence
  Description of Artificial Sequence: Synthetic oligonucleotide
uaagaggcgacguagcgca

SEQ ID NO: 2959927 - RNA, 19 nt, Artificial Sequence
  Description of Artificial Sequence: Synthetic oligonucleotide
aaacaagccaaaucccaug

SEQ ID NO: 2959928 - RNA, 19 nt, Artificial Sequence
  Description of Artificial Sequence: Synthetic oligonucleotide
ucuuaaugucuuuagcgcu

SEQ ID NO: 2959929 - RNA, 19 nt, Artificial Sequence
  Description of Artificial Sequence: Synthetic oligonucleotide
aacaagccaaaucccaugu

SEQ ID NO: 2959930 - RNA, 19 nt, Artificial Sequence
  Description of Artificial Sequence: Synthetic oligonucleotide
ugucuuuagcgcuaggaga

SEQ ID NO: 2959931 - RNA, 19 nt, Artificial Sequence
  Description of Artificial Sequence: Synthetic oligonucleotide
uuauuugcaggggagcagg

SEQ ID NO: 2959932 - RNA, 19 nt, Artificial Sequence
  Description of Artificial Sequence: Synthetic oligonucleotide
gauaaccuuguugagccgg

SEQ ID NO: 2959933 - RNA, 19 nt, Artificial Sequence
  Description of Artificial Sequence: Synthetic oligonucleotide
ucaucguccgccucaaugc

SEQ ID NO: 2959934 - RNA, 19 nt, Artificial Sequence
  Description of Artificial Sequence: Synthetic oligonucleotide
aguaagaggcgacguagcg

SEQ ID NO: 2959935 - RNA, 19 nt, Artificial Sequence
  Description of Artificial Sequence: Synthetic oligonucleotide
aaugucuuuagcgcuagga

SEQ ID NO: 2959936 - RNA, 19 nt, Artificial Sequence
  Description of Artificial Sequence: Synthetic oligonucleotide
augucuuuagcgcuaggag

SEQ ID NO: 2959937 - RNA, 19 nt, Artificial Sequence
  Description of Artificial Sequence: Synthetic oligonucleotide
aggguuuuaaucaaacaag

SEQ ID NO: 2959938 - RNA, 19 nt, Artificial Sequence
  Description of Artificial Sequence: Synthetic oligonucleotide
aucaaacaagccaaauccc

SEQ ID NO: 2959939 - RNA, 19 nt, Artificial Sequence
  Description of Artificial Sequence: Synthetic oligonucleotide
aaucccaugucaucaucug

SEQ ID NO: 2959940 - RNA, 19 nt, Artificial Sequence
  Description of Artificial Sequence: Synthetic oligonucleotide
agaacuagcagcaggagcu

SEQ ID NO: 2959941 - RNA, 19 nt, Artificial Sequence
  Description of Artificial Sequence: Synthetic oligonucleotide
uuuaaucaaacaagccaaa

SEQ ID NO: 2959942 - RNA, 19 nt, Artificial Sequence
  Description of Artificial Sequence: Synthetic oligonucleotide
ugacucuucggacucuucc

SEQ ID NO: 2959943 - RNA, 19 nt, Artificial Sequence
  Description of Artificial Sequence: Synthetic oligonucleotide
agcaagcuugccaacaccc

SEQ ID NO: 2959944 - RNA, 19 nt, Artificial Sequence
  Description of Artificial Sequence: Synthetic oligonucleotide
aaguaagaggcgacguagc

SEQ ID NO: 2959945 - RNA, 19 nt, Artificial Sequence
  Description of Artificial Sequence: Synthetic oligonucleotide
aaacagccacagcaccacc

SEQ ID NO: 2959946 - RNA, 19 nt, Artificial Sequence
  Description of Artificial Sequence: Synthetic oligonucleotide
aaggcuuuauuugcagggg

SEQ ID NO: 2959947 - RNA, 19 nt, Artificial Sequence
  Description of Artificial Sequence: Synthetic oligonucleotide
cuuguugagccggucaucg

SEQ ID NO: 2959948 - RNA, 19 nt, Artificial Sequence
  Description of Artificial Sequence: Synthetic oligonucleotide
gucuagaaucuucuuaaug

SEQ ID NO: 2959949 - RNA, 19 nt, Artificial Sequence
  Description of Artificial Sequence: Synthetic oligonucleotide
gucuuuagcgcuaggagag

SEQ ID NO: 2959950 - RNA, 19 nt, Artificial Sequence
  Description of Artificial Sequence: Synthetic oligonucleotide
cuaggagaggaguugcccc

SEQ ID NO: 2959951 - RNA, 19 nt, Artificial Sequence
  Description of Artificial Sequence: Synthetic oligonucleotide
uuuauuugcaggggagcag

SEQ ID NO: 2959952 - RNA, 19 nt, Artificial Sequence
  Description of Artificial Sequence: Synthetic oligonucleotide
caaguaagaggcgacguag

SEQ ID NO: 2959953 - RNA, 19 nt, Artificial Sequence
  Description of Artificial Sequence: Synthetic oligonucleotide
uucagcucacugauaaccu

SEQ ID NO: 2959954 - RNA, 19 nt, Artificial Sequence
  Description of Artificial Sequence: Synthetic oligonucleotide
uuuagcgcuaggagaggag

SEQ ID NO: 2959955 - RNA, 19 nt, Artificial Sequence
  Description of Artificial Sequence: Synthetic oligonucleotide
aagcaaguaagaggcgacg

SEQ ID NO: 2959956 - RNA, 19 nt, Artificial Sequence
  Description of Artificial Sequence: Synthetic oligonucleotide
ggcgaugacauccucaaug

SEQ ID NO: 2959957 - RNA, 19 nt, Artificial Sequence
  Description of Artificial Sequence: Synthetic oligonucleotide
uguugagccggucaucguc

SEQ ID NO: 2959958 - RNA, 19 nt, Artificial Sequence
  Description of Artificial Sequence: Synthetic oligonucleotide
aacuagcagcaggagcugc

SEQ ID NO: 2959959 - RNA, 19 nt, Artificial Sequence
  Description of Artificial Sequence: Synthetic oligonucleotide
uauuugcaggggagcaggg

SEQ ID NO: 2959960 - RNA, 19 nt, Artificial Sequence
  Description of Artificial Sequence: Synthetic oligonucleotide
aagcuugccaacacccugg

SEQ ID NO: 2959961 - RNA, 19 nt, Artificial Sequence
  Description of Artificial Sequence: Synthetic oligonucleotide
cuucucgucuuucuucucc

SEQ ID NO: 2959962 - RNA, 19 nt, Artificial Sequence
  Description of Artificial Sequence: Synthetic oligonucleotide
caggguuuuaaucaaacaa

SEQ ID NO: 2959963 - RNA, 19 nt, Artificial Sequence
  Description of Artificial Sequence: Synthetic oligonucleotide
aaccuuguugagccgguca

SEQ ID NO: 2959964 - RNA, 19 nt, Artificial Sequence
  Description of Artificial Sequence: Synthetic oligonucleotide
uuaaugucuuuagcgcuag

SEQ ID NO: 2959965 - RNA, 19 nt, Artificial Sequence
  Description of Artificial Sequence: Synthetic oligonucleotide
cagaacuagcagcaggagc

SEQ ID NO: 2959966 - RNA, 19 nt, Artificial Sequence
  Description of Artificial Sequence: Synthetic oligonucleotide
agcaggguuuuaaucaaac

SEQ ID NO: 2959967 - RNA, 19 nt, Artificial Sequence
  Description of Artificial Sequence: Synthetic oligonucleotide
uuaaucaaacaagccaaau

SEQ ID NO: 2959968 - RNA, 19 nt, Artificial Sequence
  Description of Artificial Sequence: Synthetic oligonucleotide
uuugcaggggagcaggguu

SEQ ID NO: 2959969 - RNA, 19 nt, Artificial Sequence
  Description of Artificial Sequence: Synthetic oligonucleotide
agcgcauguuggcugcugc

SEQ ID NO: 2959970 - RNA, 19 nt, Artificial Sequence
  Description of Artificial Sequence: Synthetic oligonucleotide
gucaucguccgccucaaug

SEQ ID NO: 2959971 - RNA, 19 nt, Artificial Sequence
  Description of Artificial Sequence: Synthetic oligonucleotide
cugucuagaaucuucuuaa

SEQ ID NO: 2959972 - RNA, 19 nt, Artificial Sequence
  Description of Artificial Sequence: Synthetic oligonucleotide
acccugggcgaugacaucc

SEQ ID NO: 2959973 - RNA, 19 nt, Artificial Sequence
  Description of Artificial Sequence: Synthetic oligonucleotide
caagccaaaucccauguca

SEQ ID NO: 2959974 - RNA, 19 nt, Artificial Sequence
  Description of Artificial Sequence: Synthetic oligonucleotide
ugauaaccuuguugagccg

SEQ ID NO: 2959975 - RNA, 19 nt, Artificial Sequence
  Description of Artificial Sequence: Synthetic oligonucleotide
gcggcaagcaaguaagagg

SEQ ID NO: 2959976 - RNA, 19 nt, Artificial Sequence
  Description of Artificial Sequence: Synthetic oligonucleotide
aagggcggcaagcaaguaa

SEQ ID NO: 2959977 - RNA, 19 nt, Artificial Sequence
  Description of Artificial Sequence: Synthetic oligonucleotide
agccaaaucccaugucauc

SEQ ID NO: 2959978 - RNA, 19 nt, Artificial Sequence
  Description of Artificial Sequence: Synthetic oligonucleotide
agccaggggcagcagaaac

SEQ ID NO: 2959979 - RNA, 19 nt, Artificial Sequence
  Description of Artificial Sequence: Synthetic oligonucleotide
caagcaaguaagaggcgac

SEQ ID NO: 2959980 - RNA, 19 nt, Artificial Sequence
  Description of Artificial Sequence: Synthetic oligonucleotide
cagaaacagccacagcacc

SEQ ID NO: 2959981 - RNA, 19 nt, Artificial Sequence
  Description of Artificial Sequence: Synthetic oligonucleotide
ggguuuuaaucaaacaagc

SEQ ID NO: 2959982 - RNA, 19 nt, Artificial Sequence
  Description of Artificial Sequence: Synthetic oligonucleotide
uccgccucaaugcccacgc

SEQ ID NO: 2959983 - RNA, 19 nt, Artificial Sequence
  Description of Artificial Sequence: Synthetic oligonucleotide
acaagccaaaucccauguc

SEQ ID NO: 2959984 - RNA, 19 nt, Artificial Sequence
  Description of Artificial Sequence: Synthetic oligonucleotide
ucgucuuucuucuccucug

SEQ ID NO: 2959985 - RNA, 19 nt, Artificial Sequence
  Description of Artificial Sequence: Synthetic oligonucleotide
gguuuuaaucaaacaagcc

SEQ ID NO: 2959986 - RNA, 19 nt, Artificial Sequence
  Description of Artificial Sequence: Synthetic oligonucleotide
agcaggcacacuagcaagc

SEQ ID NO: 2959987 - RNA, 19 nt, Artificial Sequence
  Description of Artificial Sequence: Synthetic oligonucleotide
uagcaagcuugccaacacc

SEQ ID NO: 2959988 - RNA, 19 nt, Artificial Sequence
  Description of Artificial Sequence: Synthetic oligonucleotide
ggacucuuccuucuucucg

SEQ ID NO: 2959989 - RNA, 19 nt, Artificial Sequence
  Description of Artificial Sequence: Synthetic oligonucleotide
ucuucggacucuuccuucu

SEQ ID NO: 2959990 - RNA, 19 nt, Artificial Sequence
  Description of Artificial Sequence: Synthetic oligonucleotide
acgcgugcgaccucgucgg

SEQ ID NO: 2959991 - RNA, 19 nt, Artificial Sequence
  Description of Artificial Sequence: Synthetic oligonucleotide
ucaaugcccacgcugucua

SEQ ID NO: 2959992 - RNA, 19 nt, Artificial Sequence
  Description of Artificial Sequence: Synthetic oligonucleotide
ugggcgaugacauccucaa

SEQ ID NO: 2959993 - RNA, 19 nt, Artificial Sequence
  Description of Artificial Sequence: Synthetic oligonucleotide
uaaugucuuuagcgcuagg

SEQ ID NO: 2959994 - RNA, 19 nt, Artificial Sequence
  Description of Artificial Sequence: Synthetic oligonucleotide
cuagcaagcuugccaacac

SEQ ID NO: 2959995 - RNA, 19 nt, Artificial Sequence
  Description of Artificial Sequence: Synthetic oligonucleotide
uuagcgcuaggagaggagu

SEQ ID NO: 2959996 - RNA, 19 nt, Artificial Sequence
  Description of Artificial Sequence: Synthetic oligonucleotide
aggcacacuagcaagcuug

SEQ ID NO: 2959997 - RNA, 19 nt, Artificial Sequence
  Description of Artificial Sequence: Synthetic oligonucleotide
caagcuugccaacacccug

SEQ ID NO: 2959998 - RNA, 19 nt, Artificial Sequence
  Description of Artificial Sequence: Synthetic oligonucleotide
cacgcgugcgaccucgucg

SEQ ID NO: 2959999 - RNA, 19 nt, Artificial Sequence
  Description of Artificial Sequence: Synthetic oligonucleotide
gggagcaggguuuuaauca

SEQ ID NO: 2960000 - RNA, 19 nt, Artificial Sequence
  Description of Artificial Sequence: Synthetic oligonucleotide
ucggacucuuccuucuucu

SEQ ID NO: 2960001 - RNA, 19 nt, Artificial Sequence
  Description of Artificial Sequence: Synthetic oligonucleotide
aacacccugggcgaugaca

SEQ ID NO: 2960002 - RNA, 19 nt, Artificial Sequence
  Description of Artificial Sequence: Synthetic oligonucleotide
uucucgucuuucuucuccu

SEQ ID NO: 2960003 - RNA, 19 nt, Artificial Sequence
  Description of Artificial Sequence: Synthetic oligonucleotide
uguuggcugcugcggacag

SEQ ID NO: 2960004 - RNA, 19 nt, Artificial Sequence
  Description of Artificial Sequence: Synthetic oligonucleotide
caucaucugacucuucgga

SEQ ID NO: 2960005 - RNA, 19 nt, Artificial Sequence
  Description of Artificial Sequence: Synthetic oligonucleotide
ucuuuagcgcuaggagagg

SEQ ID NO: 2960006 - RNA, 19 nt, Artificial Sequence
  Description of Artificial Sequence: Synthetic oligonucleotide
agggcggcaagcaaguaag

SEQ ID NO: 2960007 - RNA, 19 nt, Artificial Sequence
  Description of Artificial Sequence: Synthetic oligonucleotide
guaagaggcgacguagcgc

SEQ ID NO: 2960008 - RNA, 19 nt, Artificial Sequence
  Description of Artificial Sequence: Synthetic oligonucleotide
ucguccgccucaaugccca

SEQ ID NO: 2960009 - RNA, 19 nt, Artificial Sequence
  Description of Artificial Sequence: Synthetic oligonucleotide
cugcggacaggccucacgc

SEQ ID NO: 2960010 - RNA, 19 nt, Artificial Sequence
  Description of Artificial Sequence: Synthetic oligonucleotide
cagcaggagcugcagagcc

SEQ ID NO: 2960011 - RNA, 19 nt, Artificial Sequence
  Description of Artificial Sequence: Synthetic oligonucleotide
uugccaacacccugggcga

SEQ ID NO: 2960012 - RNA, 19 nt, Artificial Sequence
  Description of Artificial Sequence: Synthetic oligonucleotide
acuagcaagcuugccaaca

SEQ ID NO: 2960013 - RNA, 19 nt, Artificial Sequence
  Description of Artificial Sequence: Synthetic oligonucleotide
aggcuuuauuugcagggga

SEQ ID NO: 2960014 - RNA, 19 nt, Artificial Sequence
  Description of Artificial Sequence: Synthetic oligonucleotide
cggcaagcaaguaagaggc

SEQ ID NO: 2960015 - RNA, 19 nt, Artificial Sequence
  Description of Artificial Sequence: Synthetic oligonucleotide
aggagcugcagagccaggg

SEQ ID NO: 2960016 - RNA, 19 nt, Artificial Sequence
  Description of Artificial Sequence: Synthetic oligonucleotide
cuuuauuugcaggggagca

SEQ ID NO: 2960017 - RNA, 19 nt, Artificial Sequence
  Description of Artificial Sequence: Synthetic oligonucleotide
cuuaaugucuuuagcgcua

SEQ ID NO: 2960018 - RNA, 19 nt, Artificial Sequence
  Description of Artificial Sequence: Synthetic oligonucleotide
aaugcccacgcugucuaga

SEQ ID NO: 2960019 - RNA, 19 nt, Artificial Sequence
  Description of Artificial Sequence: Synthetic oligonucleotide
ugucuagaaucuucuuaau

SEQ ID NO: 2960020 - RNA, 19 nt, Artificial Sequence
  Description of Artificial Sequence: Synthetic oligonucleotide
uucggacucuuccuucuuc

SEQ ID NO: 2960021 - RNA, 19 nt, Artificial Sequence
  Description of Artificial Sequence: Synthetic oligonucleotide
aagccaaaucccaugucau

SEQ ID NO: 2960022 - RNA, 19 nt, Artificial Sequence
  Description of Artificial Sequence: Synthetic oligonucleotide
uugagccggucaucguccg

SEQ ID NO: 2960023 - RNA, 19 nt, Artificial Sequence
  Description of Artificial Sequence: Synthetic oligonucleotide
guugagccggucaucgucc

SEQ ID NO: 2960024 - RNA, 19 nt, Artificial Sequence
  Description of Artificial Sequence: Synthetic oligonucleotide
acguagcgcauguuggcug

SEQ ID NO: 2960025 - RNA, 19 nt, Artificial Sequence
  Description of Artificial Sequence: Synthetic oligonucleotide
aucccaugucaucaucuga

SEQ ID NO: 2960026 - RNA, 19 nt, Artificial Sequence
  Description of Artificial Sequence: Synthetic oligonucleotide
agcuugccaacacccuggg

SEQ ID NO: 2960027 - RNA, 19 nt, Artificial Sequence
  Description of Artificial Sequence: Synthetic oligonucleotide
caucugacucuucggacuc

SEQ ID NO: 2960028 - RNA, 19 nt, Artificial Sequence
  Description of Artificial Sequence: Synthetic oligonucleotide
agcaaguaagaggcgacgu

SEQ ID NO: 2960029 - RNA, 19 nt, Artificial Sequence
  Description of Artificial Sequence: Synthetic oligonucleotide
ugcggacaggccucacgcg

SEQ ID NO: 2960030 - RNA, 19 nt, Artificial Sequence
  Description of Artificial Sequence: Synthetic oligonucleotide
caucguccgccucaaugcc

SEQ ID NO: 2960031 - RNA, 19 nt, Artificial Sequence
  Description of Artificial Sequence: Synthetic oligonucleotide
ugcagcaggggcagaacua

SEQ ID NO: 2960032 - RNA, 19 nt, Artificial Sequence
  Description of Artificial Sequence: Synthetic oligonucleotide
uccucugcugcagcagggg

SEQ ID NO: 2960033 - RNA, 19 nt, Artificial Sequence
  Description of Artificial Sequence: Synthetic oligonucleotide
cauguuggcugcugcggac

SEQ ID NO: 2960034 - RNA, 19 nt, Artificial Sequence
  Description of Artificial Sequence: Synthetic oligonucleotide
gggcagaacuagcagcagg

SEQ ID NO: 2960035 - RNA, 19 nt, Artificial Sequence
  Description of Artificial Sequence: Synthetic oligonucleotide
cauucagcucacugauaac

SEQ ID NO: 2960036 - RNA, 19 nt, Artificial Sequence
  Description of Artificial Sequence: Synthetic oligonucleotide
accuuguugagccggucau

SEQ ID NO: 2960037 - RNA, 19 nt, Artificial Sequence
  Description of Artificial Sequence: Synthetic oligonucleotide
gacucuuccuucuucucgu

SEQ ID NO: 2960038 - RNA, 19 nt, Artificial Sequence
  Description of Artificial Sequence: Synthetic oligonucleotide
gagccggucaucguccgcc

SEQ ID NO: 2960039 - RNA, 19 nt, Artificial Sequence
  Description of Artificial Sequence: Synthetic oligonucleotide
ggcgacguagcgcauguug

SEQ ID NO: 2960040 - RNA, 19 nt, Artificial Sequence
  Description of Artificial Sequence: Synthetic oligonucleotide
aucguccgccucaaugccc

SEQ ID NO: 2960041 - RNA, 19 nt, Artificial Sequence
  Description of Artificial Sequence: Synthetic oligonucleotide
cuccucugcugcagcaggg

SEQ ID NO: 2960042 - RNA, 19 nt, Artificial Sequence
  Description of Artificial Sequence: Synthetic oligonucleotide
ggcuuuauuugcaggggag

SEQ ID NO: 2960043 - RNA, 19 nt, Artificial Sequence
  Description of Artificial Sequence: Synthetic oligonucleotide
ggagcugcagagccagggg

SEQ ID NO: 2960044 - RNA, 19 nt, Artificial Sequence
  Description of Artificial Sequence: Synthetic oligonucleotide
cucuucggacucuuccuuc

SEQ ID NO: 2960045 - RNA, 19 nt, Artificial Sequence
  Description of Artificial Sequence: Synthetic oligonucleotide
aggccucacgcgugcgacc

SEQ ID NO: 2960046 - RNA, 19 nt, Artificial Sequence
  Description of Artificial Sequence: Synthetic oligonucleotide
gaacuagcagcaggagcug

SEQ ID NO: 2960047 - RNA, 19 nt, Artificial Sequence
  Description of Artificial Sequence: Synthetic oligonucleotide
acucuucggacucuuccuu

SEQ ID NO: 2960048 - RNA, 19 nt, Artificial Sequence
  Description of Artificial Sequence: Synthetic oligonucleotide
gacucuucggacucuuccu

SEQ ID NO: 2960049 - RNA, 19 nt, Artificial Sequence
  Description of Artificial Sequence: Synthetic oligonucleotide
gcuuuauuugcaggggagc

SEQ ID NO: 2960050 - RNA, 19 nt, Artificial Sequence
  Description of Artificial Sequence: Synthetic oligonucleotide
uugcaggggagcaggguuu

SEQ ID NO: 2960051 - RNA, 19 nt, Artificial Sequence
  Description of Artificial Sequence: Synthetic oligonucleotide
accucgucggcgucgggca

SEQ ID NO: 2960052 - RNA, 19 nt, Artificial Sequence
  Description of Artificial Sequence: Synthetic oligonucleotide
ugcgaccucgucggcgucg

SEQ ID NO: 2960053 - RNA, 19 nt, Artificial Sequence
  Description of Artificial Sequence: Synthetic oligonucleotide
uccauucagcucacugaua

SEQ ID NO: 2960054 - RNA, 19 nt, Artificial Sequence
  Description of Artificial Sequence: Synthetic oligonucleotide
gcugucuagaaucuucuua

SEQ ID NO: 2960055 - RNA, 19 nt, Artificial Sequence
  Description of Artificial Sequence: Synthetic oligonucleotide
gaccucgucggcgucgggc

SEQ ID NO: 2960056 - RNA, 19 nt, Artificial Sequence
  Description of Artificial Sequence: Synthetic oligonucleotide
gcgacguagcgcauguugg

SEQ ID NO: 2960057 - RNA, 19 nt, Artificial Sequence
  Description of Artificial Sequence: Synthetic oligonucleotide
cccaagggcggcaagcaag

SEQ ID NO: 2960058 - RNA, 19 nt, Artificial Sequence
  Description of Artificial Sequence: Synthetic oligonucleotide
uagcgcuaggagaggaguu

SEQ ID NO: 2960059 - RNA, 19 nt, Artificial Sequence
  Description of Artificial Sequence: Synthetic oligonucleotide
caaacaagccaaaucccau

SEQ ID NO: 2960060 - RNA, 19 nt, Artificial Sequence
  Description of Artificial Sequence: Synthetic oligonucleotide
ggcggcaagcaaguaagag

SEQ ID NO: 2960061 - RNA, 19 nt, Artificial Sequence
  Description of Artificial Sequence: Synthetic oligonucleotide
auuugcaggggagcagggu

SEQ ID NO: 2960062 - RNA, 19 nt, Artificial Sequence
  Description of Artificial Sequence: Synthetic oligonucleotide
gcagaaacagccacagcac

SEQ ID NO: 2960063 - RNA, 19 nt, Artificial Sequence
  Description of Artificial Sequence: Synthetic oligonucleotide
ugagccggucaucguccgc

SEQ ID NO: 2960064 - RNA, 19 nt, Artificial Sequence
  Description of Artificial Sequence: Synthetic oligonucleotide
gcaagcaaguaagaggcga

SEQ ID NO: 2960065 - RNA, 19 nt, Artificial Sequence
  Description of Artificial Sequence: Synthetic oligonucleotide
ccauucagcucacugauaa

SEQ ID NO: 2960066 - RNA, 19 nt, Artificial Sequence
  Description of Artificial Sequence: Synthetic oligonucleotide
uuguugagccggucaucgu

SEQ ID NO: 2960067 - RNA, 19 nt, Artificial Sequence
  Description of Artificial Sequence: Synthetic oligonucleotide
acuagcagcaggagcugca

SEQ ID NO: 2960068 - RNA, 19 nt, Artificial Sequence
  Description of Artificial Sequence: Synthetic oligonucleotide
gcccacgcugucuagaauc

SEQ ID NO: 2960069 - RNA, 19 nt, Artificial Sequence
  Description of Artificial Sequence: Synthetic oligonucleotide
cuuuagcgcuaggagagga

SEQ ID NO: 2960070 - RNA, 19 nt, Artificial Sequence
  Description of Artificial Sequence: Synthetic oligonucleotide
aggggagcaggguuuuaau

SEQ ID NO: 2960071 - RNA, 19 nt, Artificial Sequence
  Description of Artificial Sequence: Synthetic oligonucleotide
ucuucucgucuuucuucuc

SEQ ID NO: 2960072 - RNA, 19 nt, Artificial Sequence
  Description of Artificial Sequence: Synthetic oligonucleotide
gcaggguuuuaaucaaaca

SEQ ID NO: 2960073 - RNA, 19 nt, Artificial Sequence
  Description of Artificial Sequence: Synthetic oligonucleotide
auaaccuuguugagccggu

SEQ ID NO: 2960074 - RNA, 19 nt, Artificial Sequence
  Description of Artificial Sequence: Synthetic oligonucleotide
ggcagaacuagcagcagga

SEQ ID NO: 2960075 - RNA, 19 nt, Artificial Sequence
  Description of Artificial Sequence: Synthetic oligonucleotide
agcucacugauaaccuugu

SEQ ID NO: 2960076 - RNA, 19 nt, Artificial Sequence
  Description of Artificial Sequence: Synthetic oligonucleotide
acacccugggcgaugacau

SEQ ID NO: 2960077 - RNA, 19 nt, Artificial Sequence
  Description of Artificial Sequence: Synthetic oligonucleotide
augcccacgcugucuagaa

SEQ ID NO: 2960078 - RNA, 19 nt, Artificial Sequence
  Description of Artificial Sequence: Synthetic oligonucleotide
ggagcaggguuuuaaucaa

SEQ ID NO: 2960079 - RNA, 19 nt, Artificial Sequence
  Description of Artificial Sequence: Synthetic oligonucleotide
agaggcgacguagcgcaug

SEQ ID NO: 2960080 - RNA, 19 nt, Artificial Sequence
  Description of Artificial Sequence: Synthetic oligonucleotide
gcagcaggggcagaacuag

SEQ ID NO: 2960081 - RNA, 19 nt, Artificial Sequence
  Description of Artificial Sequence: Synthetic oligonucleotide
cagcaggggcagaacuagc

SEQ ID NO: 2960082 - RNA, 19 nt, Artificial Sequence
  Description of Artificial Sequence: Synthetic oligonucleotide
gcugcggacaggccucacg

SEQ ID NO: 2960083 - RNA, 19 nt, Artificial Sequence
  Description of Artificial Sequence: Synthetic oligonucleotide
ggggagcaggguuuuaauc

SEQ ID NO: 2960084 - RNA, 19 nt, Artificial Sequence
  Description of Artificial Sequence: Synthetic oligonucleotide
ucugacucuucggacucuu

SEQ ID NO: 2960085 - RNA, 19 nt, Artificial Sequence
  Description of Artificial Sequence: Synthetic oligonucleotide
cuucuccucugcugcagca

SEQ ID NO: 2960086 - RNA, 19 nt, Artificial Sequence
  Description of Artificial Sequence: Synthetic oligonucleotide
agagccaggggcagcagaa

SEQ ID NO: 2960087 - RNA, 19 nt, Artificial Sequence
  Description of Artificial Sequence: Synthetic oligonucleotide
acaggccucacgcgugcga

SEQ ID NO: 2960088 - RNA, 19 nt, Artificial Sequence
  Description of Artificial Sequence: Synthetic oligonucleotide
auguuggcugcugcggaca

SEQ ID NO: 2960089 - RNA, 19 nt, Artificial Sequence
  Description of Artificial Sequence: Synthetic oligonucleotide
ucgucggcgucgggcagcg

SEQ ID NO: 2960090 - RNA, 19 nt, Artificial Sequence
  Description of Artificial Sequence: Synthetic oligonucleotide
ucggcgucgggcagcgaaa

SEQ ID NO: 2960091 - RNA, 19 nt, Artificial Sequence
  Description of Artificial Sequence: Synthetic oligonucleotide
ccaggggcagcagaaacag

SEQ ID NO: 2960092 - RNA, 19 nt, Artificial Sequence
  Description of Artificial Sequence: Synthetic oligonucleotide
caaugcccacgcugucuag

SEQ ID NO: 2960093 - RNA, 19 nt, Artificial Sequence
  Description of Artificial Sequence: Synthetic oligonucleotide
agcugcagagccaggggca

SEQ ID NO: 2960094 - RNA, 19 nt, Artificial Sequence
  Description of Artificial Sequence: Synthetic oligonucleotide
gcgcauguuggcugcugcg

SEQ ID NO: 2960095 - RNA, 19 nt, Artificial Sequence
  Description of Artificial Sequence: Synthetic oligonucleotide
gacaggccucacgcgugcg

SEQ ID NO: 2960096 - RNA, 19 nt, Artificial Sequence
  Description of Artificial Sequence: Synthetic oligonucleotide
gucggcgucgggcagcgaa

SEQ ID NO: 2960097 - RNA, 19 nt, Artificial Sequence
  Description of Artificial Sequence: Synthetic oligonucleotide
ggcaagcaaguaagaggcg

SEQ ID NO: 2960098 - RNA, 19 nt, Artificial Sequence
  Description of Artificial Sequence: Synthetic oligonucleotide
cugacucuucggacucuuc

SEQ ID NO: 2960099 - RNA, 19 nt, Artificial Sequence
  Description of Artificial Sequence: Synthetic oligonucleotide
gcgaugacauccucaaugu

SEQ ID NO: 2960100 - RNA, 19 nt, Artificial Sequence
  Description of Artificial Sequence: Synthetic oligonucleotide
uaaccuuguugagccgguc

SEQ ID NO: 2960101 - RNA, 19 nt, Artificial Sequence
  Description of Artificial Sequence: Synthetic oligonucleotide
ucacgcgugcgaccucguc

SEQ ID NO: 2960102 - RNA, 19 nt, Artificial Sequence
  Description of Artificial Sequence: Synthetic oligonucleotide
gcagaacuagcagcaggag

SEQ ID NO: 2960103 - RNA, 19 nt, Artificial Sequence
  Description of Artificial Sequence: Synthetic oligonucleotide
uagcgcauguuggcugcug

SEQ ID NO: 2960104 - RNA, 19 nt, Artificial Sequence
  Description of Artificial Sequence: Synthetic oligonucleotide
gaggcgacguagcgcaugu

SEQ ID NO: 2960105 - RNA, 19 nt, Artificial Sequence
  Description of Artificial Sequence: Synthetic oligonucleotide
guccgccucaaugcccacg

SEQ ID NO: 2960106 - RNA, 19 nt, Artificial Sequence
  Description of Artificial Sequence: Synthetic oligonucleotide
cucgucuuucuucuccucu

SEQ ID NO: 2960107 - RNA, 19 nt, Artificial Sequence
  Description of Artificial Sequence: Synthetic oligonucleotide
ugcccacgcugucuagaau

SEQ ID NO: 2960108 - RNA, 19 nt, Artificial Sequence
  Description of Artificial Sequence: Synthetic oligonucleotide
gacguagcgcauguuggcu

SEQ ID NO: 2960109 - RNA, 19 nt, Artificial Sequence
  Description of Artificial Sequence: Synthetic oligonucleotide
caggccucacgcgugcgac

SEQ ID NO: 2960110 - RNA, 19 nt, Artificial Sequence
  Description of Artificial Sequence: Synthetic oligonucleotide
ggcacacuagcaagcuugc

SEQ ID NO: 2960111 - RNA, 19 nt, Artificial Sequence
  Description of Artificial Sequence: Synthetic oligonucleotide
gcaaguaagaggcgacgua

SEQ ID NO: 2960112 - RNA, 19 nt, Artificial Sequence
  Description of Artificial Sequence: Synthetic oligonucleotide
gcauguuggcugcugcgga

SEQ ID NO: 2960113 - RNA, 19 nt, Artificial Sequence
  Description of Artificial Sequence: Synthetic oligonucleotide
ggacaggccucacgcgugc

SEQ ID NO: 2960114 - RNA, 19 nt, Artificial Sequence
  Description of Artificial Sequence: Synthetic oligonucleotide
cucgucggcgucgggcagc

SEQ ID NO: 2960115 - RNA, 19 nt, Artificial Sequence
  Description of Artificial Sequence: Synthetic oligonucleotide
uggcugcugcggacaggcc

SEQ ID NO: 2960116 - RNA, 19 nt, Artificial Sequence
  Description of Artificial Sequence: Synthetic oligonucleotide
agccggucaucguccgccu

SEQ ID NO: 2960117 - RNA, 19 nt, Artificial Sequence
  Description of Artificial Sequence: Synthetic oligonucleotide
aucugacucuucggacucu

SEQ ID NO: 2960118 - RNA, 19 nt, Artificial Sequence
  Description of Artificial Sequence: Synthetic oligonucleotide
cgacguagcgcauguuggc

SEQ ID NO: 2960119 - RNA, 19 nt, Artificial Sequence
  Description of Artificial Sequence: Synthetic oligonucleotide
ggcagcagaaacagccaca

SEQ ID NO: 2960120 - RNA, 19 nt, Artificial Sequence
  Description of Artificial Sequence: Synthetic oligonucleotide
cagagccaggggcagcaga

SEQ ID NO: 2960121 - RNA, 19 nt, Artificial Sequence
  Description of Artificial Sequence: Synthetic oligonucleotide
ggcgucgggcagcgaaagg

SEQ ID NO: 2960122 - RNA, 19 nt, Artificial Sequence
  Description of Artificial Sequence: Synthetic oligonucleotide
ugcaggggagcaggguuuu

SEQ ID NO: 2960123 - RNA, 19 nt, Artificial Sequence
  Description of Artificial Sequence: Synthetic oligonucleotide
ccagcaggcacacuagcaa

SEQ ID NO: 2960124 - RNA, 19 nt, Artificial Sequence
  Description of Artificial Sequence: Synthetic oligonucleotide
gcagcaggagcugcagagc

SEQ ID NO: 2960125 - RNA, 19 nt, Artificial Sequence
  Description of Artificial Sequence: Synthetic oligonucleotide
ccucacgcgugcgaccucg

SEQ ID NO: 2960126 - RNA, 19 nt, Artificial Sequence
  Description of Artificial Sequence: Synthetic oligonucleotide
gcgcuaggagaggaguugc

SEQ ID NO: 2960127 - RNA, 19 nt, Artificial Sequence
  Description of Artificial Sequence: Synthetic oligonucleotide
cgcauguuggcugcugcgg

SEQ ID NO: 2960128 - RNA, 19 nt, Artificial Sequence
  Description of Artificial Sequence: Synthetic oligonucleotide
cucaaugcccacgcugucu

SEQ ID NO: 2960129 - RNA, 19 nt, Artificial Sequence
  Description of Artificial Sequence: Synthetic oligonucleotide
cugcagcaggggcagaacu

SEQ ID NO: 2960130 - RNA, 19 nt, Artificial Sequence
  Description of Artificial Sequence: Synthetic oligonucleotide
ggcugcugcggacaggccu

SEQ ID NO: 2960131 - RNA, 19 nt, Artificial Sequence
  Description of Artificial Sequence: Synthetic oligonucleotide
cacccugggcgaugacauc

SEQ ID NO: 2960132 - RNA, 19 nt, Artificial Sequence
  Description of Artificial Sequence: Synthetic oligonucleotide
gcgugcgaccucgucggcg

SEQ ID NO: 2960133 - RNA, 19 nt, Artificial Sequence
  Description of Artificial Sequence: Synthetic oligonucleotide
gcuugccaacacccugggc

SEQ ID NO: 2960134 - RNA, 19 nt, Artificial Sequence
  Description of Artificial Sequence: Synthetic oligonucleotide
gcugcugcggacaggccuc

SEQ ID NO: 2960135 - RNA, 19 nt, Artificial Sequence
  Description of Artificial Sequence: Synthetic oligonucleotide
cgccucaaugcccacgcug

SEQ ID NO: 2960136 - RNA, 19 nt, Artificial Sequence
  Description of Artificial Sequence: Synthetic oligonucleotide
gccaggggcagcagaaaca

SEQ ID NO: 2960137 - RNA, 19 nt, Artificial Sequence
  Description of Artificial Sequence: Synthetic oligonucleotide
aagaggcgacguagcgcau

SEQ ID NO: 2960138 - RNA, 19 nt, Artificial Sequence
  Description of Artificial Sequence: Synthetic oligonucleotide
gcacacuagcaagcuugcc

SEQ ID NO: 2960139 - RNA, 19 nt, Artificial Sequence
  Description of Artificial Sequence: Synthetic oligonucleotide
cgcuaggagaggaguugcc

SEQ ID NO: 2960140 - RNA, 19 nt, Artificial Sequence
  Description of Artificial Sequence: Synthetic oligonucleotide
ugccaacacccugggcgau

SEQ ID NO: 2960141 - RNA, 19 nt, Artificial Sequence
  Description of Artificial Sequence: Synthetic oligonucleotide
caacacccugggcgaugac

SEQ ID NO: 2960142 - RNA, 19 nt, Artificial Sequence
  Description of Artificial Sequence: Synthetic oligonucleotide
gagccaggggcagcagaaa

SEQ ID NO: 2960143 - RNA, 19 nt, Artificial Sequence
  Description of Artificial Sequence: Synthetic oligonucleotide
gcgaccucgucggcgucgg

SEQ ID NO: 2960144 - RNA, 19 nt, Artificial Sequence
  Description of Artificial Sequence: Synthetic oligonucleotide
gccucaaugcccacgcugu

SEQ ID NO: 2960145 - RNA, 19 nt, Artificial Sequence
  Description of Artificial Sequence: Synthetic oligonucleotide
gcggacaggccucacgcgu

SEQ ID NO: 2960146 - RNA, 19 nt, Artificial Sequence
  Description of Artificial Sequence: Synthetic oligonucleotide
ccuuguugagccggucauc

SEQ ID NO: 2960147 - RNA, 19 nt, Artificial Sequence
  Description of Artificial Sequence: Synthetic oligonucleotide
ccggucaucguccgccuca

SEQ ID NO: 2960148 - RNA, 19 nt, Artificial Sequence
  Description of Artificial Sequence: Synthetic oligonucleotide
gcugcagcaggggcagaac

SEQ ID NO: 2960149 - RNA, 19 nt, Artificial Sequence
  Description of Artificial Sequence: Synthetic oligonucleotide
ccucaaugcccacgcuguc

SEQ ID NO: 2960150 - RNA, 19 nt, Artificial Sequence
  Description of Artificial Sequence: Synthetic oligonucleotide
gccaacacccugggcgaug

SEQ ID NO: 2960151 - RNA, 19 nt, Artificial Sequence
  Description of Artificial Sequence: Synthetic oligonucleotide
cggacaggccucacgcgug

SEQ ID NO: 2960152 - RNA, 19 nt, Artificial Sequence
  Description of Artificial Sequence: Synthetic oligonucleotide
ccaagggcggcaagcaagu

SEQ ID NO: 2960153 - RNA, 19 nt, Artificial Sequence
  Description of Artificial Sequence: Synthetic oligonucleotide
ugcugcggacaggccucac

SEQ ID NO: 2960154 - RNA, 19 nt, Artificial Sequence
  Description of Artificial Sequence: Synthetic oligonucleotide
gcaggcacacuagcaagcu

SEQ ID NO: 2960155 - RNA, 19 nt, Artificial Sequence
  Description of Artificial Sequence: Synthetic oligonucleotide
gcaagcuugccaacacccu

SEQ ID NO: 2960156 - RNA, 19 nt, Artificial Sequence
  Description of Artificial Sequence: Synthetic oligonucleotide
gcaccaccagcaggcacac

SEQ ID NO: 2960157 - RNA, 19 nt, Artificial Sequence
  Description of Artificial Sequence: Synthetic oligonucleotide
cggacucuuccuucuucuc

SEQ ID NO: 2960158 - RNA, 19 nt, Artificial Sequence
  Description of Artificial Sequence: Synthetic oligonucleotide
ccaacacccugggcgauga

SEQ ID NO: 2960159 - RNA, 19 nt, Artificial Sequence
  Description of Artificial Sequence: Synthetic oligonucleotide
ccugggcgaugacauccuc

SEQ ID NO: 2960160 - RNA, 19 nt, Artificial Sequence
  Description of Artificial Sequence: Synthetic oligonucleotide
cccacgcugucuagaaucu

SEQ ID NO: 2960161 - RNA, 19 nt, Artificial Sequence
  Description of Artificial Sequence: Synthetic oligonucleotide
cuucggacucuuccuucuu

SEQ ID NO: 2960162 - RNA, 19 nt, Artificial Sequence
  Description of Artificial Sequence: Synthetic oligonucleotide
gugcgaccucgucggcguc

SEQ ID NO: 2960163 - RNA, 19 nt, Artificial Sequence
  Description of Artificial Sequence: Synthetic oligonucleotide
ccucgucggcgucgggcag

SEQ ID NO: 2960164 - RNA, 19 nt, Artificial Sequence
  Description of Artificial Sequence: Synthetic oligonucleotide
caggcacacuagcaagcuu

SEQ ID NO: 2960165 - RNA, 19 nt, Artificial Sequence
  Description of Artificial Sequence: Synthetic oligonucleotide
ggccucacgcgugcgaccu

SEQ ID NO: 2960166 - RNA, 19 nt, Artificial Sequence
  Description of Artificial Sequence: Synthetic oligonucleotide
gggcggcaagcaaguaaga

SEQ ID NO: 2960167 - RNA, 19 nt, Artificial Sequence
  Description of Artificial Sequence: Synthetic oligonucleotide
cugcugcggacaggccuca

SEQ ID NO: 2960168 - RNA, 19 nt, Artificial Sequence
  Description of Artificial Sequence: Synthetic oligonucleotide
caagggcggcaagcaagua

SEQ ID NO: 2960169 - RNA, 19 nt, Artificial Sequence
  Description of Artificial Sequence: Synthetic oligonucleotide
gccggucaucguccgccuc

SEQ ID NO: 2960170 - RNA, 19 nt, Artificial Sequence
  Description of Artificial Sequence: Synthetic oligonucleotide
cucacgcgugcgaccucgu

SEQ ID NO: 2960171 - RNA, 19 nt, Artificial Sequence
  Description of Artificial Sequence: Synthetic oligonucleotide
aggcgacguagcgcauguu

SEQ ID NO: 2960172 - RNA, 19 nt, Artificial Sequence
  Description of Artificial Sequence: Synthetic oligonucleotide
cgugcgaccucgucggcgu

SEQ ID NO: 2960173 - RNA, 19 nt, Artificial Sequence
  Description of Artificial Sequence: Synthetic oligonucleotide
gcucacugauaaccuuguu

SEQ ID NO: 2960174 - RNA, 19 nt, Artificial Sequence
  Description of Artificial Sequence: Synthetic oligonucleotide
cggcgucgggcagcgaaag

SEQ ID NO: 2960175 - RNA, 19 nt, Artificial Sequence
  Description of Artificial Sequence: Synthetic oligonucleotide
gggcgaugacauccucaau

SEQ ID NO: 2960176 - RNA, 19 nt, Artificial Sequence
  Description of Artificial Sequence: Synthetic oligonucleotide
ccccaagggcggcaagcaa

SEQ ID NO: 2960177 - RNA, 19 nt, Artificial Sequence
  Description of Artificial Sequence: Synthetic oligonucleotide
gccucacgcgugcgaccuc

SEQ ID NO: 2960178 - RNA, 19 nt, Artificial Sequence
  Description of Artificial Sequence: Synthetic oligonucleotide
cgcgugcgaccucgucggc

SEQ ID NO: 2960179 - RNA, 19 nt, Artificial Sequence
  Description of Artificial Sequence: Synthetic oligonucleotide
cguccgccucaaugcccac

SEQ ID NO: 2960180 - RNA, 19 nt, Artificial Sequence
  Description of Artificial Sequence: Synthetic oligonucleotide
ggucaucguccgccucaau

SEQ ID NO: 2960181 - RNA, 19 nt, Artificial Sequence
  Description of Artificial Sequence: Synthetic oligonucleotide
cgaccucgucggcgucggg

SEQ ID NO: 2960182 - RNA, 19 nt, Artificial Sequence
  Description of Artificial Sequence: Synthetic oligonucleotide
cgcugucuagaaucuucuu

SEQ ID NO: 2960183 - RNA, 19 nt, Artificial Sequence
  Description of Artificial Sequence: Synthetic oligonucleotide
cggucaucguccgccucaa

SEQ ID NO: 2960184 - RNA, 19 nt, Artificial Sequence
  Description of Artificial Sequence: Synthetic oligonucleotide
ccacgcugucuagaaucuu

SEQ ID NO: 2960185 - RNA, 19 nt, Artificial Sequence
  Description of Artificial Sequence: Synthetic oligonucleotide
ccgccucaaugcccacgcu

SEQ ID NO: 2960186 - RNA, 19 nt, Artificial Sequence
  Description of Artificial Sequence: Synthetic oligonucleotide
cgucggcgucgggcagcga

SEQ ID NO: 2960187 - RNA, 19 nt, Artificial Sequence
  Description of Artificial Sequence: Synthetic oligonucleotide
aaagcaaaagcaaugaacg

SEQ ID NO: 2960188 - RNA, 19 nt, Artificial Sequence
  Description of Artificial Sequence: Synthetic oligonucleotide
aagucauuucuucagguac

SEQ ID NO: 2960189 - RNA, 19 nt, Artificial Sequence
  Description of Artificial Sequence: Synthetic oligonucleotide
aagcaaugaacgcagcucc

SEQ ID NO: 2960190 - RNA, 19 nt, Artificial Sequence
  Description of Artificial Sequence: Synthetic oligonucleotide
aaaacaacugcugcuaugg

SEQ ID NO: 2960191 - RNA, 19 nt, Artificial Sequence
  Description of Artificial Sequence: Synthetic oligonucleotide
aaugaacgcagcuccagac

SEQ ID NO: 2960192 - RNA, 19 nt, Artificial Sequence
  Description of Artificial Sequence: Synthetic oligonucleotide
acacuaagucacuugaccc

SEQ ID NO: 2960193 - RNA, 19 nt, Artificial Sequence
  Description of Artificial Sequence: Synthetic oligonucleotide
aagcaaaagcaaugaacgc

SEQ ID NO: 2960194 - RNA, 19 nt, Artificial Sequence
  Description of Artificial Sequence: Synthetic oligonucleotide
uugguauuuucucaggaag

SEQ ID NO: 2960195 - RNA, 19 nt, Artificial Sequence
  Description of Artificial Sequence: Synthetic oligonucleotide
gauuuugguauuuucucag

SEQ ID NO: 2960196 - RNA, 19 nt, Artificial Sequence
  Description of Artificial Sequence: Synthetic oligonucleotide
agagcugcagucccgagcc

SEQ ID NO: 2960197 - RNA, 19 nt, Artificial Sequence
  Description of Artificial Sequence: Synthetic oligonucleotide
aaagcaaugaacgcagcuc

SEQ ID NO: 2960198 - RNA, 19 nt, Artificial Sequence
  Description of Artificial Sequence: Synthetic oligonucleotide
agucacuugacccuccugg

SEQ ID NO: 2960199 - RNA, 19 nt, Artificial Sequence
  Description of Artificial Sequence: Synthetic oligonucleotide
ucugaaagcacgagccugg

SEQ ID NO: 2960200 - RNA, 19 nt, Artificial Sequence
  Description of Artificial Sequence: Synthetic oligonucleotide
aaaagcaaugaacgcagcu

SEQ ID NO: 2960201 - RNA, 19 nt, Artificial Sequence
  Description of Artificial Sequence: Synthetic oligonucleotide
gacacuaagucacuugacc

SEQ ID NO: 2960202 - RNA, 19 nt, Artificial Sequence
  Description of Artificial Sequence: Synthetic oligonucleotide
aaggggaccccaucagucc

SEQ ID NO: 2960203 - RNA, 19 nt, Artificial Sequence
  Description of Artificial Sequence: Synthetic oligonucleotide
ucuucagguacuuugguuc

SEQ ID NO: 2960204 - RNA, 19 nt, Artificial Sequence
  Description of Artificial Sequence: Synthetic oligonucleotide
uauggaaugagcagcucug

SEQ ID NO: 2960205 - RNA, 19 nt, Artificial Sequence
  Description of Artificial Sequence: Synthetic oligonucleotide
cauuucuucagguacuuug

SEQ ID NO: 2960206 - RNA, 19 nt, Artificial Sequence
  Description of Artificial Sequence: Synthetic oligonucleotide
uuuugguauuuucucagga

SEQ ID NO: 2960207 - RNA, 19 nt, Artificial Sequence
  Description of Artificial Sequence: Synthetic oligonucleotide
ugaacgcagcuccagacag

SEQ ID NO: 2960208 - RNA, 19 nt, Artificial Sequence
  Description of Artificial Sequence: Synthetic oligonucleotide
gaaugagcagcucugccag

SEQ ID NO: 2960209 - RNA, 19 nt, Artificial Sequence
  Description of Artificial Sequence: Synthetic oligonucleotide
ugauuuugguauuuucuca

SEQ ID NO: 2960210 - RNA, 19 nt, Artificial Sequence
  Description of Artificial Sequence: Synthetic oligonucleotide
gaaagcacgagccugguaa

SEQ ID NO: 2960211 - RNA, 19 nt, Artificial Sequence
  Description of Artificial Sequence: Synthetic oligonucleotide
gguaauuucugccuccugg

SEQ ID NO: 2960212 - RNA, 19 nt, Artificial Sequence
  Description of Artificial Sequence: Synthetic oligonucleotide
uggaagucauuucuucagg

SEQ ID NO: 2960213 - RNA, 19 nt, Artificial Sequence
  Description of Artificial Sequence: Synthetic oligonucleotide
accccaucaguccagugcc

SEQ ID NO: 2960214 - RNA, 19 nt, Artificial Sequence
  Description of Artificial Sequence: Synthetic oligonucleotide
acuuugguuccaccaaagc

SEQ ID NO: 2960215 - RNA, 19 nt, Artificial Sequence
  Description of Artificial Sequence: Synthetic oligonucleotide
ugucucaaaacaacugcug

SEQ ID NO: 2960216 - RNA, 19 nt, Artificial Sequence
  Description of Artificial Sequence: Synthetic oligonucleotide
auuuugguauuuucucagg

SEQ ID NO: 2960217 - RNA, 19 nt, Artificial Sequence
  Description of Artificial Sequence: Synthetic oligonucleotide
uccaccaaagcaaaagcaa

SEQ ID NO: 2960218 - RNA, 19 nt, Artificial Sequence
  Description of Artificial Sequence: Synthetic oligonucleotide
uuccaccaaagcaaaagca

SEQ ID NO: 2960219 - RNA, 19 nt, Artificial Sequence
  Description of Artificial Sequence: Synthetic oligonucleotide
acccuccuggcacagaccc

SEQ ID NO: 2960220 - RNA, 19 nt, Artificial Sequence
  Description of Artificial Sequence: Synthetic oligonucleotide
ucugggaacagcuggggug

SEQ ID NO: 2960221 - RNA, 19 nt, Artificial Sequence
  Description of Artificial Sequence: Synthetic oligonucleotide
ucucaaaacaacugcugcu

SEQ ID NO: 2960222 - RNA, 19 nt, Artificial Sequence
  Description of Artificial Sequence: Synthetic oligonucleotide
ugcugcuauggaaugagca

SEQ ID NO: 2960223 - RNA, 19 nt, Artificial Sequence
  Description of Artificial Sequence: Synthetic oligonucleotide
aacaacugcugcuauggaa

SEQ ID NO: 2960224 - RNA, 19 nt, Artificial Sequence
  Description of Artificial Sequence: Synthetic oligonucleotide
uuucucaggaaguccuggg

SEQ ID NO: 2960225 - RNA, 19 nt, Artificial Sequence
  Description of Artificial Sequence: Synthetic oligonucleotide
ucucaggaaguccugggug

SEQ ID NO: 2960226 - RNA, 19 nt, Artificial Sequence
  Description of Artificial Sequence: Synthetic oligonucleotide
ugguauuuucucaggaagu

SEQ ID NO: 2960227 - RNA, 19 nt, Artificial Sequence
  Description of Artificial Sequence: Synthetic oligonucleotide
aacgcagcuccagacaggg

SEQ ID NO: 2960228 - RNA, 19 nt, Artificial Sequence
  Description of Artificial Sequence: Synthetic oligonucleotide
uuugguauuuucucaggaa

SEQ ID NO: 2960229 - RNA, 19 nt, Artificial Sequence
  Description of Artificial Sequence: Synthetic oligonucleotide
gucucaaaacaacugcugc

SEQ ID NO: 2960230 - RNA, 19 nt, Artificial Sequence
  Description of Artificial Sequence: Synthetic oligonucleotide
cuggaagucauuucuucag

SEQ ID NO: 2960231 - RNA, 19 nt, Artificial Sequence
  Description of Artificial Sequence: Synthetic oligonucleotide
agcaaaagcaaugaacgca

SEQ ID NO: 2960232 - RNA, 19 nt, Artificial Sequence
  Description of Artificial Sequence: Synthetic oligonucleotide
auuucuucagguacuuugg

SEQ ID NO: 2960233 - RNA, 19 nt, Artificial Sequence
  Description of Artificial Sequence: Synthetic oligonucleotide
uucagcaggggcagugugg

SEQ ID NO: 2960234 - RNA, 19 nt, Artificial Sequence
  Description of Artificial Sequence: Synthetic oligonucleotide
aggugcagccuucugaaag

SEQ ID NO: 2960235 - RNA, 19 nt, Artificial Sequence
  Description of Artificial Sequence: Synthetic oligonucleotide
uucuuccagacucccacag

SEQ ID NO: 2960236 - RNA, 19 nt, Artificial Sequence
  Description of Artificial Sequence: Synthetic oligonucleotide
gugauuuugguauuuucuc

SEQ ID NO: 2960237 - RNA, 19 nt, Artificial Sequence
  Description of Artificial Sequence: Synthetic oligonucleotide
uacuuugguuccaccaaag

SEQ ID NO: 2960238 - RNA, 19 nt, Artificial Sequence
  Description of Artificial Sequence: Synthetic oligonucleotide
aggacacuaagucacuuga

SEQ ID NO: 2960239 - RNA, 19 nt, Artificial Sequence
  Description of Artificial Sequence: Synthetic oligonucleotide
gagucuuugggugauuuug

SEQ ID NO: 2960240 - RNA, 19 nt, Artificial Sequence
  Description of Artificial Sequence: Synthetic oligonucleotide
guuccaccaaagcaaaagc

SEQ ID NO: 2960241 - RNA, 19 nt, Artificial Sequence
  Description of Artificial Sequence: Synthetic oligonucleotide
ucaagggccucguugggcc

SEQ ID NO: 2960242 - RNA, 19 nt, Artificial Sequence
  Description of Artificial Sequence: Synthetic oligonucleotide
ccuucugaaagcacgagcc

SEQ ID NO: 2960243 - RNA, 19 nt, Artificial Sequence
  Description of Artificial Sequence: Synthetic oligonucleotide
gucugggugauccucacug

SEQ ID NO: 2960244 - RNA, 19 nt, Artificial Sequence
  Description of Artificial Sequence: Synthetic oligonucleotide
gaccccaucaguccagugc

SEQ ID NO: 2960245 - RNA, 19 nt, Artificial Sequence
  Description of Artificial Sequence: Synthetic oligonucleotide
aagucugggugauccucac

SEQ ID NO: 2960246 - RNA, 19 nt, Artificial Sequence
  Description of Artificial Sequence: Synthetic oligonucleotide
ugggugauccucacugucc

SEQ ID NO: 2960247 - RNA, 19 nt, Artificial Sequence
  Description of Artificial Sequence: Synthetic oligonucleotide
cuucagguacuuugguucc

SEQ ID NO: 2960248 - RNA, 19 nt, Artificial Sequence
  Description of Artificial Sequence: Synthetic oligonucleotide
ugcuauggaaugagcagcu

SEQ ID NO: 2960249 - RNA, 19 nt, Artificial Sequence
  Description of Artificial Sequence: Synthetic oligonucleotide
uccucugggaacagcuggg

SEQ ID NO: 2960250 - RNA, 19 nt, Artificial Sequence
  Description of Artificial Sequence: Synthetic oligonucleotide
uccagacucccacagcuga

SEQ ID NO: 2960251 - RNA, 19 nt, Artificial Sequence
  Description of Artificial Sequence: Synthetic oligonucleotide
acuaagucacuugacccuc

SEQ ID NO: 2960252 - RNA, 19 nt, Artificial Sequence
  Description of Artificial Sequence: Synthetic oligonucleotide
uggaaugagcagcucugcc

SEQ ID NO: 2960253 - RNA, 19 nt, Artificial Sequence
  Description of Artificial Sequence: Synthetic oligonucleotide
aaugagcagcucugccagg

SEQ ID NO: 2960254 - RNA, 19 nt, Artificial Sequence
  Description of Artificial Sequence: Synthetic oligonucleotide
uucugaaagcacgagccug

SEQ ID NO: 2960255 - RNA, 19 nt, Artificial Sequence
  Description of Artificial Sequence: Synthetic oligonucleotide
accacaggacacuaaguca

SEQ ID NO: 2960256 - RNA, 19 nt, Artificial Sequence
  Description of Artificial Sequence: Synthetic oligonucleotide
auccucacuguccucuggg

SEQ ID NO: 2960257 - RNA, 19 nt, Artificial Sequence
  Description of Artificial Sequence: Synthetic oligonucleotide
aacagcugggguggcaagg

SEQ ID NO: 2960258 - RNA, 19 nt, Artificial Sequence
  Description of Artificial Sequence: Synthetic oligonucleotide
agguacuuugguuccacca

SEQ ID NO: 2960259 - RNA, 19 nt, Artificial Sequence
  Description of Artificial Sequence: Synthetic oligonucleotide
caaaacaacugcugcuaug

SEQ ID NO: 2960260 - RNA, 19 nt, Artificial Sequence
  Description of Artificial Sequence: Synthetic oligonucleotide
uugggagagcugcaguccc

SEQ ID NO: 2960261 - RNA, 19 nt, Artificial Sequence
  Description of Artificial Sequence: Synthetic oligonucleotide
accaaagcaaaagcaauga

SEQ ID NO: 2960262 - RNA, 19 nt, Artificial Sequence
  Description of Artificial Sequence: Synthetic oligonucleotide
ucaaaacaacugcugcuau

SEQ ID NO: 2960263 - RNA, 19 nt, Artificial Sequence
  Description of Artificial Sequence: Synthetic oligonucleotide
cucacuguccucugggaac

SEQ ID NO: 2960264 - RNA, 19 nt, Artificial Sequence
  Description of Artificial Sequence: Synthetic oligonucleotide
guaauuucugccuccugga

SEQ ID NO: 2960265 - RNA, 19 nt, Artificial Sequence
  Description of Artificial Sequence: Synthetic oligonucleotide
ugggugugguucagcaggg

SEQ ID NO: 2960266 - RNA, 19 nt, Artificial Sequence
  Description of Artificial Sequence: Synthetic oligonucleotide
uucucaggaaguccugggu

SEQ ID NO: 2960267 - RNA, 19 nt, Artificial Sequence
  Description of Artificial Sequence: Synthetic oligonucleotide
cugcuauggaaugagcagc

SEQ ID NO: 2960268 - RNA, 19 nt, Artificial Sequence
  Description of Artificial Sequence: Synthetic oligonucleotide
uccuggcacagacccaggg

SEQ ID NO: 2960269 - RNA, 19 nt, Artificial Sequence
  Description of Artificial Sequence: Synthetic oligonucleotide
gcaaaagcaaugaacgcag

SEQ ID NO: 2960270 - RNA, 19 nt, Artificial Sequence
  Description of Artificial Sequence: Synthetic oligonucleotide
agucuuugggugauuuugg

SEQ ID NO: 2960271 - RNA, 19 nt, Artificial Sequence
  Description of Artificial Sequence: Synthetic oligonucleotide
acugcugcuauggaaugag

SEQ ID NO: 2960272 - RNA, 19 nt, Artificial Sequence
  Description of Artificial Sequence: Synthetic oligonucleotide
aaacaacugcugcuaugga

SEQ ID NO: 2960273 - RNA, 19 nt, Artificial Sequence
  Description of Artificial Sequence: Synthetic oligonucleotide
gcuaccacaggacacuaag

SEQ ID NO: 2960274 - RNA, 19 nt, Artificial Sequence
  Description of Artificial Sequence: Synthetic oligonucleotide
caucaguccagugccagcc

SEQ ID NO: 2960275 - RNA, 19 nt, Artificial Sequence
  Description of Artificial Sequence: Synthetic oligonucleotide
ugacccuccuggcacagac

SEQ ID NO: 2960276 - RNA, 19 nt, Artificial Sequence
  Description of Artificial Sequence: Synthetic oligonucleotide
uugguuccaccaaagcaaa

SEQ ID NO: 2960277 - RNA, 19 nt, Artificial Sequence
  Description of Artificial Sequence: Synthetic oligonucleotide
gcugcuauggaaugagcag

SEQ ID NO: 2960278 - RNA, 19 nt, Artificial Sequence
  Description of Artificial Sequence: Synthetic oligonucleotide
cuuugggugauuuugguau

SEQ ID NO: 2960279 - RNA, 19 nt, Artificial Sequence
  Description of Artificial Sequence: Synthetic oligonucleotide
agacagggcuaccacagga

SEQ ID NO: 2960280 - RNA, 19 nt, Artificial Sequence
  Description of Artificial Sequence: Synthetic oligonucleotide
uaauuucugccuccuggaa

SEQ ID NO: 2960281 - RNA, 19 nt, Artificial Sequence
  Description of Artificial Sequence: Synthetic oligonucleotide
ucuuccagacucccacagc

SEQ ID NO: 2960282 - RNA, 19 nt, Artificial Sequence
  Description of Artificial Sequence: Synthetic oligonucleotide
ccugucucaaaacaacugc

SEQ ID NO: 2960283 - RNA, 19 nt, Artificial Sequence
  Description of Artificial Sequence: Synthetic oligonucleotide
ucuuugggugauuuuggua

SEQ ID NO: 2960284 - RNA, 19 nt, Artificial Sequence
  Description of Artificial Sequence: Synthetic oligonucleotide
uccuggaagucauuucuuc

SEQ ID NO: 2960285 - RNA, 19 nt, Artificial Sequence
  Description of Artificial Sequence: Synthetic oligonucleotide
acucccacagcugaagucu

SEQ ID NO: 2960286 - RNA, 19 nt, Artificial Sequence
  Description of Artificial Sequence: Synthetic oligonucleotide
aaagcacgagccugguaau

SEQ ID NO: 2960287 - RNA, 19 nt, Artificial Sequence
  Description of Artificial Sequence: Synthetic oligonucleotide
gaagucauuucuucaggua

SEQ ID NO: 2960288 - RNA, 19 nt, Artificial Sequence
  Description of Artificial Sequence: Synthetic oligonucleotide
guuugggagagcugcaguc

SEQ ID NO: 2960289 - RNA, 19 nt, Artificial Sequence
  Description of Artificial Sequence: Synthetic oligonucleotide
cagacccaggguuugggag

SEQ ID NO: 2960290 - RNA, 19 nt, Artificial Sequence
  Description of Artificial Sequence: Synthetic oligonucleotide
ucugccuccuggaagucau

SEQ ID NO: 2960291 - RNA, 19 nt, Artificial Sequence
  Description of Artificial Sequence: Synthetic oligonucleotide
caaggggaccccaucaguc

SEQ ID NO: 2960292 - RNA, 19 nt, Artificial Sequence
  Description of Artificial Sequence: Synthetic oligonucleotide
ccuucaagggccucguugg

SEQ ID NO: 2960293 - RNA, 19 nt, Artificial Sequence
  Description of Artificial Sequence: Synthetic oligonucleotide
gauccucacuguccucugg

SEQ ID NO: 2960294 - RNA, 19 nt, Artificial Sequence
  Description of Artificial Sequence: Synthetic oligonucleotide
caaaagcaaugaacgcagc

SEQ ID NO: 2960295 - RNA, 19 nt, Artificial Sequence
  Description of Artificial Sequence: Synthetic oligonucleotide
uccagacagggcuaccaca

SEQ ID NO: 2960296 - RNA, 19 nt, Artificial Sequence
  Description of Artificial Sequence: Synthetic oligonucleotide
uccugggugugguucagca

SEQ ID NO: 2960297 - RNA, 19 nt, Artificial Sequence
  Description of Artificial Sequence: Synthetic oligonucleotide
cugggaacagcuggggugg

SEQ ID NO: 2960298 - RNA, 19 nt, Artificial Sequence
  Description of Artificial Sequence: Synthetic oligonucleotide
augaacgcagcuccagaca

SEQ ID NO: 2960299 - RNA, 19 nt, Artificial Sequence
  Description of Artificial Sequence: Synthetic oligonucleotide
cacuugacccuccuggcac

SEQ ID NO: 2960300 - RNA, 19 nt, Artificial Sequence
  Description of Artificial Sequence: Synthetic oligonucleotide
agccugguaauuucugccu

SEQ ID NO: 2960301 - RNA, 19 nt, Artificial Sequence
  Description of Artificial Sequence: Synthetic oligonucleotide
aagucacuugacccuccug

SEQ ID NO: 2960302 - RNA, 19 nt, Artificial Sequence
  Description of Artificial Sequence: Synthetic oligonucleotide
acagggcuaccacaggaca

SEQ ID NO: 2960303 - RNA, 19 nt, Artificial Sequence
  Description of Artificial Sequence: Synthetic oligonucleotide
uaagucacuugacccuccu

SEQ ID NO: 2960304 - RNA, 19 nt, Artificial Sequence
  Description of Artificial Sequence: Synthetic oligonucleotide
ugggagagcugcagucccg

SEQ ID NO: 2960305 - RNA, 19 nt, Artificial Sequence
  Description of Artificial Sequence: Synthetic oligonucleotide
cacccagggagucuuuggg

SEQ ID NO: 2960306 - RNA, 19 nt, Artificial Sequence
  Description of Artificial Sequence: Synthetic oligonucleotide
cuaagucacuugacccucc

SEQ ID NO: 2960307 - RNA, 19 nt, Artificial Sequence
  Description of Artificial Sequence: Synthetic oligonucleotide
caggacacuaagucacuug

SEQ ID NO: 2960308 - RNA, 19 nt, Artificial Sequence
  Description of Artificial Sequence: Synthetic oligonucleotide
gcagccuucugaaagcacg

SEQ ID NO: 2960309 - RNA, 19 nt, Artificial Sequence
  Description of Artificial Sequence: Synthetic oligonucleotide
gcugaagucugggugaucc

SEQ ID NO: 2960310 - RNA, 19 nt, Artificial Sequence
  Description of Artificial Sequence: Synthetic oligonucleotide
gucacuugacccuccuggc

SEQ ID NO: 2960311 - RNA, 19 nt, Artificial Sequence
  Description of Artificial Sequence: Synthetic oligonucleotide
ccacaggacacuaagucac

SEQ ID NO: 2960312 - RNA, 19 nt, Artificial Sequence
  Description of Artificial Sequence: Synthetic oligonucleotide
agacccaggguuugggaga

SEQ ID NO: 2960313 - RNA, 19 nt, Artificial Sequence
  Description of Artificial Sequence: Synthetic oligonucleotide
aagggccucguugggcccc

SEQ ID NO: 2960314 - RNA, 19 nt, Artificial Sequence
  Description of Artificial Sequence: Synthetic oligonucleotide
agucauuucuucagguacu

SEQ ID NO: 2960315 - RNA, 19 nt, Artificial Sequence
  Description of Artificial Sequence: Synthetic oligonucleotide
ucacuguccucugggaaca

SEQ ID NO: 2960316 - RNA, 19 nt, Artificial Sequence
  Description of Artificial Sequence: Synthetic oligonucleotide
ggaaugagcagcucugcca

SEQ ID NO: 2960317 - RNA, 19 nt, Artificial Sequence
  Description of Artificial Sequence: Synthetic oligonucleotide
ccugccuucuuccagacuc

SEQ ID NO: 2960318 - RNA, 19 nt, Artificial Sequence
  Description of Artificial Sequence: Synthetic oligonucleotide
ugguaauuucugccuccug

SEQ ID NO: 2960319 - RNA, 19 nt, Artificial Sequence
  Description of Artificial Sequence: Synthetic oligonucleotide
ggugcagccuucugaaagc

SEQ ID NO: 2960320 - RNA, 19 nt, Artificial Sequence
  Description of Artificial Sequence: Synthetic oligonucleotide
ucugggugauccucacugu

SEQ ID NO: 2960321 - RNA, 19 nt, Artificial Sequence
  Description of Artificial Sequence: Synthetic oligonucleotide
acuguccucugggaacagc

SEQ ID NO: 2960322 - RNA, 19 nt, Artificial Sequence
  Description of Artificial Sequence: Synthetic oligonucleotide
gacucccacagcugaaguc

SEQ ID NO: 2960323 - RNA, 19 nt, Artificial Sequence
  Description of Artificial Sequence: Synthetic oligonucleotide
gguauuuucucaggaaguc

SEQ ID NO: 2960324 - RNA, 19 nt, Artificial Sequence
  Description of Artificial Sequence: Synthetic oligonucleotide
ggugugguucagcaggggc

SEQ ID NO: 2960325 - RNA, 19 nt, Artificial Sequence
  Description of Artificial Sequence: Synthetic oligonucleotide
agcugcagucccgagccac

SEQ ID NO: 2960326 - RNA, 19 nt, Artificial Sequence
  Description of Artificial Sequence: Synthetic oligonucleotide
ugauccucacuguccucug

SEQ ID NO: 2960327 - RNA, 19 nt, Artificial Sequence
  Description of Artificial Sequence: Synthetic oligonucleotide
caacugcugcuauggaaug

SEQ ID NO: 2960328 - RNA, 19 nt, Artificial Sequence
  Description of Artificial Sequence: Synthetic oligonucleotide
ccagacagggcuaccacag

SEQ ID NO: 2960329 - RNA, 19 nt, Artificial Sequence
  Description of Artificial Sequence: Synthetic oligonucleotide
cuucaagggccucguuggg

SEQ ID NO: 2960330 - RNA, 19 nt, Artificial Sequence
  Description of Artificial Sequence: Synthetic oligonucleotide
uuugggugauuuugguauu

SEQ ID NO: 2960331 - RNA, 19 nt, Artificial Sequence
  Description of Artificial Sequence: Synthetic oligonucleotide
cagucccgagccacgagcc

SEQ ID NO: 2960332 - RNA, 19 nt, Artificial Sequence
  Description of Artificial Sequence: Synthetic oligonucleotide
cagggcuaccacaggacac

SEQ ID NO: 2960333 - RNA, 19 nt, Artificial Sequence
  Description of Artificial Sequence: Synthetic oligonucleotide
gaagucugggugauccuca

SEQ ID NO: 2960334 - RNA, 19 nt, Artificial Sequence
  Description of Artificial Sequence: Synthetic oligonucleotide
ccagugccagccuucaagg

SEQ ID NO: 2960335 - RNA, 19 nt, Artificial Sequence
  Description of Artificial Sequence: Synthetic oligonucleotide
ugggguggcaaggggaccc

SEQ ID NO: 2960336 - RNA, 19 nt, Artificial Sequence
  Description of Artificial Sequence: Synthetic oligonucleotide
ucagguacuuugguuccac

SEQ ID NO: 2960337 - RNA, 19 nt, Artificial Sequence
  Description of Artificial Sequence: Synthetic oligonucleotide
ccuucuuccagacucccac

SEQ ID NO: 2960338 - RNA, 19 nt, Artificial Sequence
  Description of Artificial Sequence: Synthetic oligonucleotide
agacucccacagcugaagu

SEQ ID NO: 2960339 - RNA, 19 nt, Artificial Sequence
  Description of Artificial Sequence: Synthetic oligonucleotide
gaacgcagcuccagacagg

SEQ ID NO: 2960340 - RNA, 19 nt, Artificial Sequence
  Description of Artificial Sequence: Synthetic oligonucleotide
ucaggaaguccugggugug

SEQ ID NO: 2960341 - RNA, 19 nt, Artificial Sequence
  Description of Artificial Sequence: Synthetic oligonucleotide
ugguucagcaggggcagug

SEQ ID NO: 2960342 - RNA, 19 nt, Artificial Sequence
  Description of Artificial Sequence: Synthetic oligonucleotide
gacagggcuaccacaggac

SEQ ID NO: 2960343 - RNA, 19 nt, Artificial Sequence
  Description of Artificial Sequence: Synthetic oligonucleotide
ugcagccuucugaaagcac

SEQ ID NO: 2960344 - RNA, 19 nt, Artificial Sequence
  Description of Artificial Sequence: Synthetic oligonucleotide
cuauggaaugagcagcucu

SEQ ID NO: 2960345 - RNA, 19 nt, Artificial Sequence
  Description of Artificial Sequence: Synthetic oligonucleotide
guucagcaggggcagugug

SEQ ID NO: 2960346 - RNA, 19 nt, Artificial Sequence
  Description of Artificial Sequence: Synthetic oligonucleotide
gguacuuugguuccaccaa

SEQ ID NO: 2960347 - RNA, 19 nt, Artificial Sequence
  Description of Artificial Sequence: Synthetic oligonucleotide
cuuccagacucccacagcu

SEQ ID NO: 2960348 - RNA, 19 nt, Artificial Sequence
  Description of Artificial Sequence: Synthetic oligonucleotide
guacuuugguuccaccaaa

SEQ ID NO: 2960349 - RNA, 19 nt, Artificial Sequence
  Description of Artificial Sequence: Synthetic oligonucleotide
acagacccaggguuuggga

SEQ ID NO: 2960350 - RNA, 19 nt, Artificial Sequence
  Description of Artificial Sequence: Synthetic oligonucleotide
cugccuucuuccagacucc

SEQ ID NO: 2960351 - RNA, 19 nt, Artificial Sequence
  Description of Artificial Sequence: Synthetic oligonucleotide
ucugccaggugcagccuuc

SEQ ID NO: 2960352 - RNA, 19 nt, Artificial Sequence
  Description of Artificial Sequence: Synthetic oligonucleotide
cucaaaacaacugcugcua

SEQ ID NO: 2960353 - RNA, 19 nt, Artificial Sequence
  Description of Artificial Sequence: Synthetic oligonucleotide
auuuucucaggaaguccug

SEQ ID NO: 2960354 - RNA, 19 nt, Artificial Sequence
  Description of Artificial Sequence: Synthetic oligonucleotide
ugcagucccgagccacgag

SEQ ID NO: 2960355 - RNA, 19 nt, Artificial Sequence
  Description of Artificial Sequence: Synthetic oligonucleotide
cugggugauccucacuguc

SEQ ID NO: 2960356 - RNA, 19 nt, Artificial Sequence
  Description of Artificial Sequence: Synthetic oligonucleotide
gagccugccuucuuccaga

SEQ ID NO: 2960357 - RNA, 19 nt, Artificial Sequence
  Description of Artificial Sequence: Synthetic oligonucleotide
ucccgagccacgagccugc

SEQ ID NO: 2960358 - RNA, 19 nt, Artificial Sequence
  Description of Artificial Sequence: Synthetic oligonucleotide
ucaguccagugccagccuu

SEQ ID NO: 2960359 - RNA, 19 nt, Artificial Sequence
  Description of Artificial Sequence: Synthetic oligonucleotide
gccuucugaaagcacgagc

SEQ ID NO: 2960360 - RNA, 19 nt, Artificial Sequence
  Description of Artificial Sequence: Synthetic oligonucleotide
gacccaggguuugggagag

SEQ ID NO: 2960361 - RNA, 19 nt, Artificial Sequence
  Description of Artificial Sequence: Synthetic oligonucleotide
cugucucaaaacaacugcu

SEQ ID NO: 2960362 - RNA, 19 nt, Artificial Sequence
  Description of Artificial Sequence: Synthetic oligonucleotide
cagguacuuugguuccacc

SEQ ID NO: 2960363 - RNA, 19 nt, Artificial Sequence
  Description of Artificial Sequence: Synthetic oligonucleotide
ugaaagcacgagccuggua

SEQ ID NO: 2960364 - RNA, 19 nt, Artificial Sequence
  Description of Artificial Sequence: Synthetic oligonucleotide
acuugacccuccuggcaca

SEQ ID NO: 2960365 - RNA, 19 nt, Artificial Sequence
  Description of Artificial Sequence: Synthetic oligonucleotide
aggggaccccaucagucca

SEQ ID NO: 2960366 - RNA, 19 nt, Artificial Sequence
  Description of Artificial Sequence: Synthetic oligonucleotide
ggugauuuugguauuuucu

SEQ ID NO: 2960367 - RNA, 19 nt, Artificial Sequence
  Description of Artificial Sequence: Synthetic oligonucleotide
ccugguaauuucugccucc

SEQ ID NO: 2960368 - RNA, 19 nt, Artificial Sequence
  Description of Artificial Sequence: Synthetic oligonucleotide
agggcuaccacaggacacu

SEQ ID NO: 2960369 - RNA, 19 nt, Artificial Sequence
  Description of Artificial Sequence: Synthetic oligonucleotide
gccuucaagggccucguug

SEQ ID NO: 2960370 - RNA, 19 nt, Artificial Sequence
  Description of Artificial Sequence: Synthetic oligonucleotide
cugcugcuauggaaugagc

SEQ ID NO: 2960371 - RNA, 19 nt, Artificial Sequence
  Description of Artificial Sequence: Synthetic oligonucleotide
cagacagggcuaccacagg

SEQ ID NO: 2960372 - RNA, 19 nt, Artificial Sequence
  Description of Artificial Sequence: Synthetic oligonucleotide
cacagacccaggguuuggg

SEQ ID NO: 2960373 - RNA, 19 nt, Artificial Sequence
  Description of Artificial Sequence: Synthetic oligonucleotide
cagacucccacagcugaag

SEQ ID NO: 2960374 - RNA, 19 nt, Artificial Sequence
  Description of Artificial Sequence: Synthetic oligonucleotide
caaugaacgcagcuccaga

SEQ ID NO: 2960375 - RNA, 19 nt, Artificial Sequence
  Description of Artificial Sequence: Synthetic oligonucleotide
uucagguacuuugguucca

SEQ ID NO: 2960376 - RNA, 19 nt, Artificial Sequence
  Description of Artificial Sequence: Synthetic oligonucleotide
cacuaagucacuugacccu

SEQ ID NO: 2960377 - RNA, 19 nt, Artificial Sequence
  Description of Artificial Sequence: Synthetic oligonucleotide
cuccagacagggcuaccac

SEQ ID NO: 2960378 - RNA, 19 nt, Artificial Sequence
  Description of Artificial Sequence: Synthetic oligonucleotide
aucaguccagugccagccu

SEQ ID NO: 2960379 - RNA, 19 nt, Artificial Sequence
  Description of Artificial Sequence: Synthetic oligonucleotide
ugccuucuuccagacuccc

SEQ ID NO: 2960380 - RNA, 19 nt, Artificial Sequence
  Description of Artificial Sequence: Synthetic oligonucleotide
uggcacagacccaggguuu

SEQ ID NO: 2960381 - RNA, 19 nt, Artificial Sequence
  Description of Artificial Sequence: Synthetic oligonucleotide
gggugauuuugguauuuuc

SEQ ID NO: 2960382 - RNA, 19 nt, Artificial Sequence
  Description of Artificial Sequence: Synthetic oligonucleotide
ugguuccaccaaagcaaaa

SEQ ID NO: 2960383 - RNA, 19 nt, Artificial Sequence
  Description of Artificial Sequence: Synthetic oligonucleotide
gcagucccgagccacgagc

SEQ ID NO: 2960384 - RNA, 19 nt, Artificial Sequence
  Description of Artificial Sequence: Synthetic oligonucleotide
gcaaugaacgcagcuccag

SEQ ID NO: 2960385 - RNA, 19 nt, Artificial Sequence
  Description of Artificial Sequence: Synthetic oligonucleotide
cucccacagcugaagucug

SEQ ID NO: 2960386 - RNA, 19 nt, Artificial Sequence
  Description of Artificial Sequence: Synthetic oligonucleotide
caggaaguccugggugugg

SEQ ID NO: 2960387 - RNA, 19 nt, Artificial Sequence
  Description of Artificial Sequence: Synthetic oligonucleotide
agucugggugauccucacu

SEQ ID NO: 2960388 - RNA, 19 nt, Artificial Sequence
  Description of Artificial Sequence: Synthetic oligonucleotide
agccuucugaaagcacgag

SEQ ID NO: 2960389 - RNA, 19 nt, Artificial Sequence
  Description of Artificial Sequence: Synthetic oligonucleotide
ggaagucauuucuucaggu

SEQ ID NO: 2960390 - RNA, 19 nt, Artificial Sequence
  Description of Artificial Sequence: Synthetic oligonucleotide
agcacgagccugguaauuu

SEQ ID NO: 2960391 - RNA, 19 nt, Artificial Sequence
  Description of Artificial Sequence: Synthetic oligonucleotide
uugggugauuuugguauuu

SEQ ID NO: 2960392 - RNA, 19 nt, Artificial Sequence
  Description of Artificial Sequence: Synthetic oligonucleotide
cuucuuccagacucccaca

SEQ ID NO: 2960393 - RNA, 19 nt, Artificial Sequence
  Description of Artificial Sequence: Synthetic oligonucleotide
cucaggaaguccugggugu

SEQ ID NO: 2960394 - RNA, 19 nt, Artificial Sequence
  Description of Artificial Sequence: Synthetic oligonucleotide
cagccuucugaaagcacga

SEQ ID NO: 2960395 - RNA, 19 nt, Artificial Sequence
  Description of Artificial Sequence: Synthetic oligonucleotide
caguccagugccagccuuc

SEQ ID NO: 2960396 - RNA, 19 nt, Artificial Sequence
  Description of Artificial Sequence: Synthetic oligonucleotide
agcuccagacagggcuacc

SEQ ID NO: 2960397 - RNA, 19 nt, Artificial Sequence
  Description of Artificial Sequence: Synthetic oligonucleotide
caagggccucguugggccc

SEQ ID NO: 2960398 - RNA, 19 nt, Artificial Sequence
  Description of Artificial Sequence: Synthetic oligonucleotide
ugggugauuuugguauuuu

SEQ ID NO: 2960399 - RNA, 19 nt, Artificial Sequence
  Description of Artificial Sequence: Synthetic oligonucleotide
agcaaugaacgcagcucca

SEQ ID NO: 2960400 - RNA, 19 nt, Artificial Sequence
  Description of Artificial Sequence: Synthetic oligonucleotide
aguccagugccagccuuca

SEQ ID NO: 2960401 - RNA, 19 nt, Artificial Sequence
  Description of Artificial Sequence: Synthetic oligonucleotide
ugccaggugcagccuucug

SEQ ID NO: 2960402 - RNA, 19 nt, Artificial Sequence
  Description of Artificial Sequence: Synthetic oligonucleotide
acgagccugguaauuucug

SEQ ID NO: 2960403 - RNA, 19 nt, Artificial Sequence
  Description of Artificial Sequence: Synthetic oligonucleotide
ucauuucuucagguacuuu

SEQ ID NO: 2960404 - RNA, 19 nt, Artificial Sequence
  Description of Artificial Sequence: Synthetic oligonucleotide
ccuggaagucauuucuuca

SEQ ID NO: 2960405 - RNA, 19 nt, Artificial Sequence
  Description of Artificial Sequence: Synthetic oligonucleotide
cagcugggguggcaagggg

SEQ ID NO: 2960406 - RNA, 19 nt, Artificial Sequence
  Description of Artificial Sequence: Synthetic oligonucleotide
cuugacccuccuggcacag

SEQ ID NO: 2960407 - RNA, 19 nt, Artificial Sequence
  Description of Artificial Sequence: Synthetic oligonucleotide
gucuuugggugauuuuggu

SEQ ID NO: 2960408 - RNA, 19 nt, Artificial Sequence
  Description of Artificial Sequence: Synthetic oligonucleotide
ugccuccuggaagucauuu

SEQ ID NO: 2960409 - RNA, 19 nt, Artificial Sequence
  Description of Artificial Sequence: Synthetic oligonucleotide
agucccgagccacgagccu

SEQ ID NO: 2960410 - RNA, 19 nt, Artificial Sequence
  Description of Artificial Sequence: Synthetic oligonucleotide
gucccgagccacgagccug

SEQ ID NO: 2960411 - RNA, 19 nt, Artificial Sequence
  Description of Artificial Sequence: Synthetic oligonucleotide
gugauccucacuguccucu

SEQ ID NO: 2960412 - RNA, 19 nt, Artificial Sequence
  Description of Artificial Sequence: Synthetic oligonucleotide
acaggacacuaagucacuu

SEQ ID NO: 2960413 - RNA, 19 nt, Artificial Sequence
  Description of Artificial Sequence: Synthetic oligonucleotide
guggcaaggggaccccauc

SEQ ID NO: 2960414 - RNA, 19 nt, Artificial Sequence
  Description of Artificial Sequence: Synthetic oligonucleotide
aagcacgagccugguaauu

SEQ ID NO: 2960415 - RNA, 19 nt, Artificial Sequence
  Description of Artificial Sequence: Synthetic oligonucleotide
cuucugaaagcacgagccu

SEQ ID NO: 2960416 - RNA, 19 nt, Artificial Sequence
  Description of Artificial Sequence: Synthetic oligonucleotide
ccuccuggcacagacccag

SEQ ID NO: 2960417 - RNA, 19 nt, Artificial Sequence
  Description of Artificial Sequence: Synthetic oligonucleotide
cuaccacaggacacuaagu

SEQ ID NO: 2960418 - RNA, 19 nt, Artificial Sequence
  Description of Artificial Sequence: Synthetic oligonucleotide
ggacacuaagucacuugac

SEQ ID NO: 2960419 - RNA, 19 nt, Artificial Sequence
  Description of Artificial Sequence: Synthetic oligonucleotide
agcugaagucugggugauc

SEQ ID NO: 2960420 - RNA, 19 nt, Artificial Sequence
  Description of Artificial Sequence: Synthetic oligonucleotide
gacccuccuggcacagacc

SEQ ID NO: 2960421 - RNA, 19 nt, Artificial Sequence
  Description of Artificial Sequence: Synthetic oligonucleotide
ccagccuucaagggccucg

SEQ ID NO: 2960422 - RNA, 19 nt, Artificial Sequence
  Description of Artificial Sequence: Synthetic oligonucleotide
ggguuugggagagcugcag

SEQ ID NO: 2960423 - RNA, 19 nt, Artificial Sequence
  Description of Artificial Sequence: Synthetic oligonucleotide
gccugguaauuucugccuc

SEQ ID NO: 2960424 - RNA, 19 nt, Artificial Sequence
  Description of Artificial Sequence: Synthetic oligonucleotide
uuucugccuccuggaaguc

SEQ ID NO: 2960425 - RNA, 19 nt, Artificial Sequence
  Description of Artificial Sequence: Synthetic oligonucleotide
ccugggugugguucagcag

SEQ ID NO: 2960426 - RNA, 19 nt, Artificial Sequence
  Description of Artificial Sequence: Synthetic oligonucleotide
gugcagccuucugaaagca

SEQ ID NO: 2960427 - RNA, 19 nt, Artificial Sequence
  Description of Artificial Sequence: Synthetic oligonucleotide
gcugcagucccgagccacg

SEQ ID NO: 2960428 - RNA, 19 nt, Artificial Sequence
  Description of Artificial Sequence: Synthetic oligonucleotide
gcacgagccugguaauuuc

SEQ ID NO: 2960429 - RNA, 19 nt, Artificial Sequence
  Description of Artificial Sequence: Synthetic oligonucleotide
ggcacagacccaggguuug

SEQ ID NO: 2960430 - RNA, 19 nt, Artificial Sequence
  Description of Artificial Sequence: Synthetic oligonucleotide
ggagagcugcagucccgag

SEQ ID NO: 2960431 - RNA, 19 nt, Artificial Sequence
  Description of Artificial Sequence: Synthetic oligonucleotide
gagccacgagccugccuuc

SEQ ID NO: 2960432 - RNA, 19 nt, Artificial Sequence
  Description of Artificial Sequence: Synthetic oligonucleotide
cugggguggcaaggggacc

SEQ ID NO: 2960433 - RNA, 19 nt, Artificial Sequence
  Description of Artificial Sequence: Synthetic oligonucleotide
ccaaagcaaaagcaaugaa

SEQ ID NO: 2960434 - RNA, 19 nt, Artificial Sequence
  Description of Artificial Sequence: Synthetic oligonucleotide
cagcucugccaggugcagc

SEQ ID NO: 2960435 - RNA, 19 nt, Artificial Sequence
  Description of Artificial Sequence: Synthetic oligonucleotide
cacgagccugguaauuucu

SEQ ID NO: 2960436 - RNA, 19 nt, Artificial Sequence
  Description of Artificial Sequence: Synthetic oligonucleotide
aggguuugggagagcugca

SEQ ID NO: 2960437 - RNA, 19 nt, Artificial Sequence
  Description of Artificial Sequence: Synthetic oligonucleotide
acgcagcuccagacagggc

SEQ ID NO: 2960438 - RNA, 19 nt, Artificial Sequence
  Description of Artificial Sequence: Synthetic oligonucleotide
gcugggguggcaaggggac

SEQ ID NO: 2960439 - RNA, 19 nt, Artificial Sequence
  Description of Artificial Sequence: Synthetic oligonucleotide
ggaacagcugggguggcaa

SEQ ID NO: 2960440 - RNA, 19 nt, Artificial Sequence
  Description of Artificial Sequence: Synthetic oligonucleotide
gggugauccucacuguccu

SEQ ID NO: 2960441 - RNA, 19 nt, Artificial Sequence
  Description of Artificial Sequence: Synthetic oligonucleotide
ugggaacagcugggguggc

SEQ ID NO: 2960442 - RNA, 19 nt, Artificial Sequence
  Description of Artificial Sequence: Synthetic oligonucleotide
gguuugggagagcugcagu

SEQ ID NO: 2960443 - RNA, 19 nt, Artificial Sequence
  Description of Artificial Sequence: Synthetic oligonucleotide
uugacccuccuggcacaga

SEQ ID NO: 2960444 - RNA, 19 nt, Artificial Sequence
  Description of Artificial Sequence: Synthetic oligonucleotide
cccaucaguccagugccag

SEQ ID NO: 2960445 - RNA, 19 nt, Artificial Sequence
  Description of Artificial Sequence: Synthetic oligonucleotide
cacaggacacuaagucacu

SEQ ID NO: 2960446 - RNA, 19 nt, Artificial Sequence
  Description of Artificial Sequence: Synthetic oligonucleotide
cagcuccagacagggcuac

SEQ ID NO: 2960447 - RNA, 19 nt, Artificial Sequence
  Description of Artificial Sequence: Synthetic oligonucleotide
ggugauccucacuguccuc

SEQ ID NO: 2960448 - RNA, 19 nt, Artificial Sequence
  Description of Artificial Sequence: Synthetic oligonucleotide
gcuccagacagggcuacca

SEQ ID NO: 2960449 - RNA, 19 nt, Artificial Sequence
  Description of Artificial Sequence: Synthetic oligonucleotide
acccaggguuugggagagc

SEQ ID NO: 2960450 - RNA, 19 nt, Artificial Sequence
  Description of Artificial Sequence: Synthetic oligonucleotide
gcacagacccaggguuugg

SEQ ID NO: 2960451 - RNA, 19 nt, Artificial Sequence
  Description of Artificial Sequence: Synthetic oligonucleotide
cugguaauuucugccuccu

SEQ ID NO: 2960452 - RNA, 19 nt, Artificial Sequence
  Description of Artificial Sequence: Synthetic oligonucleotide
agccacgagccugccuucu

SEQ ID NO: 2960453 - RNA, 19 nt, Artificial Sequence
  Description of Artificial Sequence: Synthetic oligonucleotide
gucauuucuucagguacuu

SEQ ID NO: 2960454 - RNA, 19 nt, Artificial Sequence
  Description of Artificial Sequence: Synthetic oligonucleotide
gggugugguucagcagggg

SEQ ID NO: 2960455 - RNA, 19 nt, Artificial Sequence
  Description of Artificial Sequence: Synthetic oligonucleotide
ccaccaaagcaaaagcaau

SEQ ID NO: 2960456 - RNA, 19 nt, Artificial Sequence
  Description of Artificial Sequence: Synthetic oligonucleotide
ccagggagucuuuggguga

SEQ ID NO: 2960457 - RNA, 19 nt, Artificial Sequence
  Description of Artificial Sequence: Synthetic oligonucleotide
ccaggguuugggagagcug

SEQ ID NO: 2960458 - RNA, 19 nt, Artificial Sequence
  Description of Artificial Sequence: Synthetic oligonucleotide
ggaccccaucaguccagug

SEQ ID NO: 2960459 - RNA, 19 nt, Artificial Sequence
  Description of Artificial Sequence: Synthetic oligonucleotide
cugaagucugggugauccu

SEQ ID NO: 2960460 - RNA, 19 nt, Artificial Sequence
  Description of Artificial Sequence: Synthetic oligonucleotide
cacuguccucugggaacag

SEQ ID NO: 2960461 - RNA, 19 nt, Artificial Sequence
  Description of Artificial Sequence: Synthetic oligonucleotide
gagcugcagucccgagcca

SEQ ID NO: 2960462 - RNA, 19 nt, Artificial Sequence
  Description of Artificial Sequence: Synthetic oligonucleotide
gcuauggaaugagcagcuc

SEQ ID NO: 2960463 - RNA, 19 nt, Artificial Sequence
  Description of Artificial Sequence: Synthetic oligonucleotide
ggggaccccaucaguccag

SEQ ID NO: 2960464 - RNA, 19 nt, Artificial Sequence
  Description of Artificial Sequence: Synthetic oligonucleotide
gcaaggggaccccaucagu

SEQ ID NO: 2960465 - RNA, 19 nt, Artificial Sequence
  Description of Artificial Sequence: Synthetic oligonucleotide
cuccuggaagucauuucuu

SEQ ID NO: 2960466 - RNA, 19 nt, Artificial Sequence
  Description of Artificial Sequence: Synthetic oligonucleotide
gggagagcugcagucccga

SEQ ID NO: 2960467 - RNA, 19 nt, Artificial Sequence
  Description of Artificial Sequence: Synthetic oligonucleotide
caggugcagccuucugaaa

SEQ ID NO: 2960468 - RNA, 19 nt, Artificial Sequence
  Description of Artificial Sequence: Synthetic oligonucleotide
gcagcucugccaggugcag

SEQ ID NO: 2960469 - RNA, 19 nt, Artificial Sequence
  Description of Artificial Sequence: Synthetic oligonucleotide
ccucacuguccucugggaa

SEQ ID NO: 2960470 - RNA, 19 nt, Artificial Sequence
  Description of Artificial Sequence: Synthetic oligonucleotide
cugcagucccgagccacga

SEQ ID NO: 2960471 - RNA, 19 nt, Artificial Sequence
  Description of Artificial Sequence: Synthetic oligonucleotide
agccuucaagggccucguu

SEQ ID NO: 2960472 - RNA, 19 nt, Artificial Sequence
  Description of Artificial Sequence: Synthetic oligonucleotide
ggagucuuugggugauuuu

SEQ ID NO: 2960473 - RNA, 19 nt, Artificial Sequence
  Description of Artificial Sequence: Synthetic oligonucleotide
cugaaagcacgagccuggu

SEQ ID NO: 2960474 - RNA, 19 nt, Artificial Sequence
  Description of Artificial Sequence: Synthetic oligonucleotide
guccagugccagccuucaa

SEQ ID NO: 2960475 - RNA, 19 nt, Artificial Sequence
  Description of Artificial Sequence: Synthetic oligonucleotide
gggguggcaaggggacccc

SEQ ID NO: 2960476 - RNA, 19 nt, Artificial Sequence
  Description of Artificial Sequence: Synthetic oligonucleotide
ccagacucccacagcugaa

SEQ ID NO: 2960477 - RNA, 19 nt, Artificial Sequence
  Description of Artificial Sequence: Synthetic oligonucleotide
cccacccagggagucuuug

SEQ ID NO: 2960478 - RNA, 19 nt, Artificial Sequence
  Description of Artificial Sequence: Synthetic oligonucleotide
gggaacagcugggguggca

SEQ ID NO: 2960479 - RNA, 19 nt, Artificial Sequence
  Description of Artificial Sequence: Synthetic oligonucleotide
agggagucuuugggugauu

SEQ ID NO: 2960480 - RNA, 19 nt, Artificial Sequence
  Description of Artificial Sequence: Synthetic oligonucleotide
gccuucuuccagacuccca

SEQ ID NO: 2960481 - RNA, 19 nt, Artificial Sequence
  Description of Artificial Sequence: Synthetic oligonucleotide
ccuggcacagacccagggu

SEQ ID NO: 2960482 - RNA, 19 nt, Artificial Sequence
  Description of Artificial Sequence: Synthetic oligonucleotide
ggcuaccacaggacacuaa

SEQ ID NO: 2960483 - RNA, 19 nt, Artificial Sequence
  Description of Artificial Sequence: Synthetic oligonucleotide
cagggagucuuugggugau

SEQ ID NO: 2960484 - RNA, 19 nt, Artificial Sequence
  Description of Artificial Sequence: Synthetic oligonucleotide
cccaggguuugggagagcu

SEQ ID NO: 2960485 - RNA, 19 nt, Artificial Sequence
  Description of Artificial Sequence: Synthetic oligonucleotide
cgagccacgagccugccuu

SEQ ID NO: 2960486 - RNA, 19 nt, Artificial Sequence
  Description of Artificial Sequence: Synthetic oligonucleotide
ccccaucaguccagugcca

SEQ ID NO: 2960487 - RNA, 19 nt, Artificial Sequence
  Description of Artificial Sequence: Synthetic oligonucleotide
gguggcaaggggaccccau

SEQ ID NO: 2960488 - RNA, 19 nt, Artificial Sequence
  Description of Artificial Sequence: Synthetic oligonucleotide
ggguggcaaggggacccca

SEQ ID NO: 2960489 - RNA, 19 nt, Artificial Sequence
  Description of Artificial Sequence: Synthetic oligonucleotide
cugccaggugcagccuucu

SEQ ID NO: 2960490 - RNA, 19 nt, Artificial Sequence
  Description of Artificial Sequence: Synthetic oligonucleotide
gugguucagcaggggcagu

SEQ ID NO: 2960491 - RNA, 19 nt, Artificial Sequence
  Description of Artificial Sequence: Synthetic oligonucleotide
gggaccccaucaguccagu

SEQ ID NO: 2960492 - RNA, 19 nt, Artificial Sequence
  Description of Artificial Sequence: Synthetic oligonucleotide
gccugccuucuuccagacu

SEQ ID NO: 2960493 - RNA, 19 nt, Artificial Sequence
  Description of Artificial Sequence: Synthetic oligonucleotide
gccagccuucaagggccuc

SEQ ID NO: 2960494 - RNA, 19 nt, Artificial Sequence
  Description of Artificial Sequence: Synthetic oligonucleotide
cugccuccuggaagucauu

SEQ ID NO: 2960495 - RNA, 19 nt, Artificial Sequence
  Description of Artificial Sequence: Synthetic oligonucleotide
cccgagccacgagccugcc

SEQ ID NO: 2960496 - RNA, 19 nt, Artificial Sequence
  Description of Artificial Sequence: Synthetic oligonucleotide
gccacgagccugccuucuu

SEQ ID NO: 2960497 - RNA, 19 nt, Artificial Sequence
  Description of Artificial Sequence: Synthetic oligonucleotide
ccgagccacgagccugccu

SEQ ID NO: 2960498 - RNA, 19 nt, Artificial Sequence
  Description of Artificial Sequence: Synthetic oligonucleotide
ccccacccagggagucuuu

SEQ ID NO: 2960499 - RNA, 19 nt, Artificial Sequence
  Description of Artificial Sequence: Synthetic oligonucleotide
aaagccuggagccucauac

SEQ ID NO: 2960500 - RNA, 19 nt, Artificial Sequence
  Description of Artificial Sequence: Synthetic oligonucleotide
aacaagaugugcucccagc

SEQ ID NO: 2960501 - RNA, 19 nt, Artificial Sequence
  Description of Artificial Sequence: Synthetic oligonucleotide
ucuuugucaucaaugagca

SEQ ID NO: 2960502 - RNA, 19 nt, Artificial Sequence
  Description of Artificial Sequence: Synthetic oligonucleotide
acaguggucauacuuccgc

SEQ ID NO: 2960503 - RNA, 19 nt, Artificial Sequence
  Description of Artificial Sequence: Synthetic oligonucleotide
acgaccacugucuuguccc

SEQ ID NO: 2960504 - RNA, 19 nt, Artificial Sequence
  Description of Artificial Sequence: Synthetic oligonucleotide
cuugcugucuauaaucccc

SEQ ID NO: 2960505 - RNA, 19 nt, Artificial Sequence
  Description of Artificial Sequence: Synthetic oligonucleotide
auacacacuggccaguuuc

SEQ ID NO: 2960506 - RNA, 19 nt, Artificial Sequence
  Description of Artificial Sequence: Synthetic oligonucleotide
aagaugugcucccagcuug

SEQ ID NO: 2960507 - RNA, 19 nt, Artificial Sequence
  Description of Artificial Sequence: Synthetic oligonucleotide
ucccuagucaggauaaucc

SEQ ID NO: 2960508 - RNA, 19 nt, Artificial Sequence
  Description of Artificial Sequence: Synthetic oligonucleotide
agucaggauaauccgcucc

SEQ ID NO: 2960509 - RNA, 19 nt, Artificial Sequence
  Description of Artificial Sequence: Synthetic oligonucleotide
gauaauccgcuccacaaac

SEQ ID NO: 2960510 - RNA, 19 nt, Artificial Sequence
  Description of Artificial Sequence: Synthetic oligonucleotide
acacaguggucauacuucc

SEQ ID NO: 2960511 - RNA, 19 nt, Artificial Sequence
  Description of Artificial Sequence: Synthetic oligonucleotide
ugucacuccaggaaagcag

SEQ ID NO: 2960512 - RNA, 19 nt, Artificial Sequence
  Description of Artificial Sequence: Synthetic oligonucleotide
ucaucaaugagcaggucuc

SEQ ID NO: 2960513 - RNA, 19 nt, Artificial Sequence
  Description of Artificial Sequence: Synthetic oligonucleotide
gaaagcagccgucuccugg

SEQ ID NO: 2960514 - RNA, 19 nt, Artificial Sequence
  Description of Artificial Sequence: Synthetic oligonucleotide
uggagccucauacacacug

SEQ ID NO: 2960515 - RNA, 19 nt, Artificial Sequence
  Description of Artificial Sequence: Synthetic oligonucleotide
gucuuugucaucaaugagc

SEQ ID NO: 2960516 - RNA, 19 nt, Artificial Sequence
  Description of Artificial Sequence: Synthetic oligonucleotide
uaauccgcuccacaaacug

SEQ ID NO: 2960517 - RNA, 19 nt, Artificial Sequence
  Description of Artificial Sequence: Synthetic oligonucleotide
ugcugauuguggcagcagg

SEQ ID NO: 2960518 - RNA, 19 nt, Artificial Sequence
  Description of Artificial Sequence: Synthetic oligonucleotide
guucaucucucgcacagcg

SEQ ID NO: 2960519 - RNA, 19 nt, Artificial Sequence
  Description of Artificial Sequence: Synthetic oligonucleotide
aaugagcaggucucccacg

SEQ ID NO: 2960520 - RNA, 19 nt, Artificial Sequence
  Description of Artificial Sequence: Synthetic oligonucleotide
ugucuuugucaucaaugag

SEQ ID NO: 2960521 - RNA, 19 nt, Artificial Sequence
  Description of Artificial Sequence: Synthetic oligonucleotide
guacuucucgcccacacag

SEQ ID NO: 2960522 - RNA, 19 nt, Artificial Sequence
  Description of Artificial Sequence: Synthetic oligonucleotide
ugaauggugucuuugucau

SEQ ID NO: 2960523 - RNA, 19 nt, Artificial Sequence
  Description of Artificial Sequence: Synthetic oligonucleotide
ucguucaucucucgcacag

SEQ ID NO: 2960524 - RNA, 19 nt, Artificial Sequence
  Description of Artificial Sequence: Synthetic oligonucleotide
ugugcucccagcuuggggu

SEQ ID NO: 2960525 - RNA, 19 nt, Artificial Sequence
  Description of Artificial Sequence: Synthetic oligonucleotide
ugucuugucccuagucagg

SEQ ID NO: 2960526 - RNA, 19 nt, Artificial Sequence
  Description of Artificial Sequence: Synthetic oligonucleotide
ucaucucucgcacagcguc

SEQ ID NO: 2960527 - RNA, 19 nt, Artificial Sequence
  Description of Artificial Sequence: Synthetic oligonucleotide
ucguucacaggcuggcucg

SEQ ID NO: 2960528 - RNA, 19 nt, Artificial Sequence
  Description of Artificial Sequence: Synthetic oligonucleotide
uccuccaggccuugaaugg

SEQ ID NO: 2960529 - RNA, 19 nt, Artificial Sequence
  Description of Artificial Sequence: Synthetic oligonucleotide
uugucaucaaugagcaggu

SEQ ID NO: 2960530 - RNA, 19 nt, Artificial Sequence
  Description of Artificial Sequence: Synthetic oligonucleotide
acugucuugucccuaguca

SEQ ID NO: 2960531 - RNA, 19 nt, Artificial Sequence
  Description of Artificial Sequence: Synthetic oligonucleotide
aggugaacaagaugugcuc

SEQ ID NO: 2960532 - RNA, 19 nt, Artificial Sequence
  Description of Artificial Sequence: Synthetic oligonucleotide
aaagcagccgucuccuggu

SEQ ID NO: 2960533 - RNA, 19 nt, Artificial Sequence
  Description of Artificial Sequence: Synthetic oligonucleotide
ucucgcacagcguccacgg

SEQ ID NO: 2960534 - RNA, 19 nt, Artificial Sequence
  Description of Artificial Sequence: Synthetic oligonucleotide
agccuggagccucauacac

SEQ ID NO: 2960535 - RNA, 19 nt, Artificial Sequence
  Description of Artificial Sequence: Synthetic oligonucleotide
cucggugucuugcaugucg

SEQ ID NO: 2960536 - RNA, 19 nt, Artificial Sequence
  Description of Artificial Sequence: Synthetic oligonucleotide
agaugaagaccucgguguc

SEQ ID NO: 2960537 - RNA, 19 nt, Artificial Sequence
  Description of Artificial Sequence: Synthetic oligonucleotide
ugucguucaucucucgcac

SEQ ID NO: 2960538 - RNA, 19 nt, Artificial Sequence
  Description of Artificial Sequence: Synthetic oligonucleotide
augggcuccaaguucagga

SEQ ID NO: 2960539 - RNA, 19 nt, Artificial Sequence
  Description of Artificial Sequence: Synthetic oligonucleotide
ucaaugagcaggucuccca

SEQ ID NO: 2960540 - RNA, 19 nt, Artificial Sequence
  Description of Artificial Sequence: Synthetic oligonucleotide
agggaugggcuccaaguuc

SEQ ID NO: 2960541 - RNA, 19 nt, Artificial Sequence
  Description of Artificial Sequence: Synthetic oligonucleotide
acaagaugugcucccagcu

SEQ ID NO: 2960542 - RNA, 19 nt, Artificial Sequence
  Description of Artificial Sequence: Synthetic oligonucleotide
cugucuugucccuagucag

SEQ ID NO: 2960543 - RNA, 19 nt, Artificial Sequence
  Description of Artificial Sequence: Synthetic oligonucleotide
ucauacuuccgcagugggc

SEQ ID NO: 2960544 - RNA, 19 nt, Artificial Sequence
  Description of Artificial Sequence: Synthetic oligonucleotide
agugggcuggugcagauga

SEQ ID NO: 2960545 - RNA, 19 nt, Artificial Sequence
  Description of Artificial Sequence: Synthetic oligonucleotide
cacacaguggucauacuuc

SEQ ID NO: 2960546 - RNA, 19 nt, Artificial Sequence
  Description of Artificial Sequence: Synthetic oligonucleotide
aguggucauacuuccgcag

SEQ ID NO: 2960547 - RNA, 19 nt, Artificial Sequence
  Description of Artificial Sequence: Synthetic oligonucleotide
aggauaauccgcuccacaa

SEQ ID NO: 2960548 - RNA, 19 nt, Artificial Sequence
  Description of Artificial Sequence: Synthetic oligonucleotide
aucaaugagcaggucuccc

SEQ ID NO: 2960549 - RNA, 19 nt, Artificial Sequence
  Description of Artificial Sequence: Synthetic oligonucleotide
acuucucgcccacacagug

SEQ ID NO: 2960550 - RNA, 19 nt, Artificial Sequence
  Description of Artificial Sequence: Synthetic oligonucleotide
ucgcuugcugucuauaauc

SEQ ID NO: 2960551 - RNA, 19 nt, Artificial Sequence
  Description of Artificial Sequence: Synthetic oligonucleotide
acaaacugaggccccaggu

SEQ ID NO: 2960552 - RNA, 19 nt, Artificial Sequence
  Description of Artificial Sequence: Synthetic oligonucleotide
ucgcacagcguccacggcc

SEQ ID NO: 2960553 - RNA, 19 nt, Artificial Sequence
  Description of Artificial Sequence: Synthetic oligonucleotide
augucguucaucucucgca

SEQ ID NO: 2960554 - RNA, 19 nt, Artificial Sequence
  Description of Artificial Sequence: Synthetic oligonucleotide
uggucauacuuccgcagug

SEQ ID NO: 2960555 - RNA, 19 nt, Artificial Sequence
  Description of Artificial Sequence: Synthetic oligonucleotide
gucauacuuccgcaguggg

SEQ ID NO: 2960556 - RNA, 19 nt, Artificial Sequence
  Description of Artificial Sequence: Synthetic oligonucleotide
gugaacaagaugugcuccc

SEQ ID NO: 2960557 - RNA, 19 nt, Artificial Sequence
  Description of Artificial Sequence: Synthetic oligonucleotide
gaacaagaugugcucccag

SEQ ID NO: 2960558 - RNA, 19 nt, Artificial Sequence
  Description of Artificial Sequence: Synthetic oligonucleotide
gagcaggucucccacgacc

SEQ ID NO: 2960559 - RNA, 19 nt, Artificial Sequence
  Description of Artificial Sequence: Synthetic oligonucleotide
uugucccuagucaggauaa

SEQ ID NO: 2960560 - RNA, 19 nt, Artificial Sequence
  Description of Artificial Sequence: Synthetic oligonucleotide
aagaccucggugucuugca

SEQ ID NO: 2960561 - RNA, 19 nt, Artificial Sequence
  Description of Artificial Sequence: Synthetic oligonucleotide
uccaguugucacuccagga

SEQ ID NO: 2960562 - RNA, 19 nt, Artificial Sequence
  Description of Artificial Sequence: Synthetic oligonucleotide
uguggcagcaggugaacaa

SEQ ID NO: 2960563 - RNA, 19 nt, Artificial Sequence
  Description of Artificial Sequence: Synthetic oligonucleotide
cuugaauggugucuuuguc

SEQ ID NO: 2960564 - RNA, 19 nt, Artificial Sequence
  Description of Artificial Sequence: Synthetic oligonucleotide
caugucguucaucucucgc

SEQ ID NO: 2960565 - RNA, 19 nt, Artificial Sequence
  Description of Artificial Sequence: Synthetic oligonucleotide
caggaaagcagccgucucc

SEQ ID NO: 2960566 - RNA, 19 nt, Artificial Sequence
  Description of Artificial Sequence: Synthetic oligonucleotide
accucagggucguucacag

SEQ ID NO: 2960567 - RNA, 19 nt, Artificial Sequence
  Description of Artificial Sequence: Synthetic oligonucleotide
cagcaggugaacaagaugu

SEQ ID NO: 2960568 - RNA, 19 nt, Artificial Sequence
  Description of Artificial Sequence: Synthetic oligonucleotide
ugcagaugaagaccucggu

SEQ ID NO: 2960569 - RNA, 19 nt, Artificial Sequence
  Description of Artificial Sequence: Synthetic oligonucleotide
cacacuggccaguuucucc

SEQ ID NO: 2960570 - RNA, 19 nt, Artificial Sequence
  Description of Artificial Sequence: Synthetic oligonucleotide
gagccucauacacacuggc

SEQ ID NO: 2960571 - RNA, 19 nt, Artificial Sequence
  Description of Artificial Sequence: Synthetic oligonucleotide
accacugucuugucccuag

SEQ ID NO: 2960572 - RNA, 19 nt, Artificial Sequence
  Description of Artificial Sequence: Synthetic oligonucleotide
aggccccagguucugcucc

SEQ ID NO: 2960573 - RNA, 19 nt, Artificial Sequence
  Description of Artificial Sequence: Synthetic oligonucleotide
cuccaguugucacuccagg

SEQ ID NO: 2960574 - RNA, 19 nt, Artificial Sequence
  Description of Artificial Sequence: Synthetic oligonucleotide
gaagaccucggugucuugc

SEQ ID NO: 2960575 - RNA, 19 nt, Artificial Sequence
  Description of Artificial Sequence: Synthetic oligonucleotide
aagccuggagccucauaca

SEQ ID NO: 2960576 - RNA, 19 nt, Artificial Sequence
  Description of Artificial Sequence: Synthetic oligonucleotide
uuccgcagugggcuggugc

SEQ ID NO: 2960577 - RNA, 19 nt, Artificial Sequence
  Description of Artificial Sequence: Synthetic oligonucleotide
uccacggccccagggaugg

SEQ ID NO: 2960578 - RNA, 19 nt, Artificial Sequence
  Description of Artificial Sequence: Synthetic oligonucleotide
cuccuccaggccuugaaug

SEQ ID NO: 2960579 - RNA, 19 nt, Artificial Sequence
  Description of Artificial Sequence: Synthetic oligonucleotide
caaugagcaggucucccac

SEQ ID NO: 2960580 - RNA, 19 nt, Artificial Sequence
  Description of Artificial Sequence: Synthetic oligonucleotide
gucaucaaugagcaggucu

SEQ ID NO: 2960581 - RNA, 19 nt, Artificial Sequence
  Description of Artificial Sequence: Synthetic oligonucleotide
ucacuccaggaaagcagcc

SEQ ID NO: 2960582 - RNA, 19 nt, Artificial Sequence
  Description of Artificial Sequence: Synthetic oligonucleotide
gugucuugcaugucguuca

SEQ ID NO: 2960583 - RNA, 19 nt, Artificial Sequence
  Description of Artificial Sequence: Synthetic oligonucleotide
ugaacaagaugugcuccca

SEQ ID NO: 2960584 - RNA, 19 nt, Artificial Sequence
  Description of Artificial Sequence: Synthetic oligonucleotide
agccucauacacacuggcc

SEQ ID NO: 2960585 - RNA, 19 nt, Artificial Sequence
  Description of Artificial Sequence: Synthetic oligonucleotide
aguugucacuccaggaaag

SEQ ID NO: 2960586 - RNA, 19 nt, Artificial Sequence
  Description of Artificial Sequence: Synthetic oligonucleotide
gcagaugaagaccucggug

SEQ ID NO: 2960587 - RNA, 19 nt, Artificial Sequence
  Description of Artificial Sequence: Synthetic oligonucleotide
ggugcagaugaagaccucg

SEQ ID NO: 2960588 - RNA, 19 nt, Artificial Sequence
  Description of Artificial Sequence: Synthetic oligonucleotide
agcgguacuucucgcccac

SEQ ID NO: 2960589 - RNA, 19 nt, Artificial Sequence
  Description of Artificial Sequence: Synthetic oligonucleotide
gucaggauaauccgcucca

SEQ ID NO: 2960590 - RNA, 19 nt, Artificial Sequence
  Description of Artificial Sequence: Synthetic oligonucleotide
uugucacuccaggaaagca

SEQ ID NO: 2960591 - RNA, 19 nt, Artificial Sequence
  Description of Artificial Sequence: Synthetic oligonucleotide
uccgcagugggcuggugca

SEQ ID NO: 2960592 - RNA, 19 nt, Artificial Sequence
  Description of Artificial Sequence: Synthetic oligonucleotide
cacccagcgguacuucucg

SEQ ID NO: 2960593 - RNA, 19 nt, Artificial Sequence
  Description of Artificial Sequence: Synthetic oligonucleotide
accucggugucuugcaugu

SEQ ID NO: 2960594 - RNA, 19 nt, Artificial Sequence
  Description of Artificial Sequence: Synthetic oligonucleotide
ugggcuggugcagaugaag

SEQ ID NO: 2960595 - RNA, 19 nt, Artificial Sequence
  Description of Artificial Sequence: Synthetic oligonucleotide
uccgcuccacaaacugagg

SEQ ID NO: 2960596 - RNA, 19 nt, Artificial Sequence
  Description of Artificial Sequence: Synthetic oligonucleotide
cagaugaagaccucggugu

SEQ ID NO: 2960597 - RNA, 19 nt, Artificial Sequence
  Description of Artificial Sequence: Synthetic oligonucleotide
ucacaggcuggcucgcuug

SEQ ID NO: 2960598 - RNA, 19 nt, Artificial Sequence
  Description of Artificial Sequence: Synthetic oligonucleotide
cacaaacugaggccccagg

SEQ ID NO: 2960599 - RNA, 19 nt, Artificial Sequence
  Description of Artificial Sequence: Synthetic oligonucleotide
cacaguggucauacuuccg

SEQ ID NO: 2960600 - RNA, 19 nt, Artificial Sequence
  Description of Artificial Sequence: Synthetic oligonucleotide
ucggugucuugcaugucgu

SEQ ID NO: 2960601 - RNA, 19 nt, Artificial Sequence
  Description of Artificial Sequence: Synthetic oligonucleotide
aauccgcuccacaaacuga

SEQ ID NO: 2960602 - RNA, 19 nt, Artificial Sequence
  Description of Artificial Sequence: Synthetic oligonucleotide
gaccucggugucuugcaug

SEQ ID NO: 2960603 - RNA, 19 nt, Artificial Sequence
  Description of Artificial Sequence: Synthetic oligonucleotide
uggcagcaggugaacaaga

SEQ ID NO: 2960604 - RNA, 19 nt, Artificial Sequence
  Description of Artificial Sequence: Synthetic oligonucleotide
uucaucucucgcacagcgu

SEQ ID NO: 2960605 - RNA, 19 nt, Artificial Sequence
  Description of Artificial Sequence: Synthetic oligonucleotide
ccuagucaggauaauccgc

SEQ ID NO: 2960606 - RNA, 19 nt, Artificial Sequence
  Description of Artificial Sequence: Synthetic oligonucleotide
cagagccaggugcugauug

SEQ ID NO: 2960607 - RNA, 19 nt, Artificial Sequence
  Description of Artificial Sequence: Synthetic oligonucleotide
aggugcugauuguggcagc

SEQ ID NO: 2960608 - RNA, 19 nt, Artificial Sequence
  Description of Artificial Sequence: Synthetic oligonucleotide
cuagucaggauaauccgcu

SEQ ID NO: 2960609 - RNA, 19 nt, Artificial Sequence
  Description of Artificial Sequence: Synthetic oligonucleotide
gaugggcuccaaguucagg

SEQ ID NO: 2960610 - RNA, 19 nt, Artificial Sequence
  Description of Artificial Sequence: Synthetic oligonucleotide
caucucucgcacagcgucc

SEQ ID NO: 2960611 - RNA, 19 nt, Artificial Sequence
  Description of Artificial Sequence: Synthetic oligonucleotide
gugcagaugaagaccucgg

SEQ ID NO: 2960612 - RNA, 19 nt, Artificial Sequence
  Description of Artificial Sequence: Synthetic oligonucleotide
agcagccgucuccuggugg

SEQ ID NO: 2960613 - RNA, 19 nt, Artificial Sequence
  Description of Artificial Sequence: Synthetic oligonucleotide
ggugaacaagaugugcucc

SEQ ID NO: 2960614 - RNA, 19 nt, Artificial Sequence
  Description of Artificial Sequence: Synthetic oligonucleotide
ccuggagccucauacacac

SEQ ID NO: 2960615 - RNA, 19 nt, Artificial Sequence
  Description of Artificial Sequence: Synthetic oligonucleotide
caggugcugauuguggcag

SEQ ID NO: 2960616 - RNA, 19 nt, Artificial Sequence
  Description of Artificial Sequence: Synthetic oligonucleotide
gccucauacacacuggcca

SEQ ID NO: 2960617 - RNA, 19 nt, Artificial Sequence
  Description of Artificial Sequence: Synthetic oligonucleotide
guugucacuccaggaaagc

SEQ ID NO: 2960618 - RNA, 19 nt, Artificial Sequence
  Description of Artificial Sequence: Synthetic oligonucleotide
uccaggaaagcagccgucu

SEQ ID NO: 2960619 - RNA, 19 nt, Artificial Sequence
  Description of Artificial Sequence: Synthetic oligonucleotide
cacuccaggaaagcagccg

SEQ ID NO: 2960620 - RNA, 19 nt, Artificial Sequence
  Description of Artificial Sequence: Synthetic oligonucleotide
cccuagucaggauaauccg

SEQ ID NO: 2960621 - RNA, 19 nt, Artificial Sequence
  Description of Artificial Sequence: Synthetic oligonucleotide
cuuugucaucaaugagcag

SEQ ID NO: 2960622 - RNA, 19 nt, Artificial Sequence
  Description of Artificial Sequence: Synthetic oligonucleotide
uccaggccuugaauggugu

SEQ ID NO: 2960623 - RNA, 19 nt, Artificial Sequence
  Description of Artificial Sequence: Synthetic oligonucleotide
cauacuuccgcagugggcu

SEQ ID NO: 2960624 - RNA, 19 nt, Artificial Sequence
  Description of Artificial Sequence: Synthetic oligonucleotide
cacgaccacugucuugucc

SEQ ID NO: 2960625 - RNA, 19 nt, Artificial Sequence
  Description of Artificial Sequence: Synthetic oligonucleotide
aggaaagcagccgucuccu

SEQ ID NO: 2960626 - RNA, 19 nt, Artificial Sequence
  Description of Artificial Sequence: Synthetic oligonucleotide
uacuucucgcccacacagu

SEQ ID NO: 2960627 - RNA, 19 nt, Artificial Sequence
  Description of Artificial Sequence: Synthetic oligonucleotide
agcguccacggccccaggg

SEQ ID NO: 2960628 - RNA, 19 nt, Artificial Sequence
  Description of Artificial Sequence: Synthetic oligonucleotide
caucaaugagcaggucucc

SEQ ID NO: 2960629 - RNA, 19 nt, Artificial Sequence
  Description of Artificial Sequence: Synthetic oligonucleotide
guggcagcaggugaacaag

SEQ ID NO: 2960630 - RNA, 19 nt, Artificial Sequence
  Description of Artificial Sequence: Synthetic oligonucleotide
agagccaggugcugauugu

SEQ ID NO: 2960631 - RNA, 19 nt, Artificial Sequence
  Description of Artificial Sequence: Synthetic oligonucleotide
uacuuccgcagugggcugg

SEQ ID NO: 2960632 - RNA, 19 nt, Artificial Sequence
  Description of Artificial Sequence: Synthetic oligonucleotide
ugaggccccagguucugcu

SEQ ID NO: 2960633 - RNA, 19 nt, Artificial Sequence
  Description of Artificial Sequence: Synthetic oligonucleotide
ugggcuccaaguucaggaa

SEQ ID NO: 2960634 - RNA, 19 nt, Artificial Sequence
  Description of Artificial Sequence: Synthetic oligonucleotide
gucguucacaggcuggcuc

SEQ ID NO: 2960635 - RNA, 19 nt, Artificial Sequence
  Description of Artificial Sequence: Synthetic oligonucleotide
cagguucugcuccacccag

SEQ ID NO: 2960636 - RNA, 19 nt, Artificial Sequence
  Description of Artificial Sequence: Synthetic oligonucleotide
ggucauacuuccgcagugg

SEQ ID NO: 2960637 - RNA, 19 nt, Artificial Sequence
  Description of Artificial Sequence: Synthetic oligonucleotide
caggugaacaagaugugcu

SEQ ID NO: 2960638 - RNA, 19 nt, Artificial Sequence
  Description of Artificial Sequence: Synthetic oligonucleotide
uggugucuuugucaucaau

SEQ ID NO: 2960639 - RNA, 19 nt, Artificial Sequence
  Description of Artificial Sequence: Synthetic oligonucleotide
aaaagccuggagccucaua

SEQ ID NO: 2960640 - RNA, 19 nt, Artificial Sequence
  Description of Artificial Sequence: Synthetic oligonucleotide
cuccacaaacugaggcccc

SEQ ID NO: 2960641 - RNA, 19 nt, Artificial Sequence
  Description of Artificial Sequence: Synthetic oligonucleotide
acccagcgguacuucucgc

SEQ ID NO: 2960642 - RNA, 19 nt, Artificial Sequence
  Description of Artificial Sequence: Synthetic oligonucleotide
cuugucccuagucaggaua

SEQ ID NO: 2960643 - RNA, 19 nt, Artificial Sequence
  Description of Artificial Sequence: Synthetic oligonucleotide
cuccaggccuugaauggug

SEQ ID NO: 2960644 - RNA, 19 nt, Artificial Sequence
  Description of Artificial Sequence: Synthetic oligonucleotide
gcuccacaaacugaggccc

SEQ ID NO: 2960645 - RNA, 19 nt, Artificial Sequence
  Description of Artificial Sequence: Synthetic oligonucleotide
gcagcaggugaacaagaug

SEQ ID NO: 2960646 - RNA, 19 nt, Artificial Sequence
  Description of Artificial Sequence: Synthetic oligonucleotide
uagucaggauaauccgcuc

SEQ ID NO: 2960647 - RNA, 19 nt, Artificial Sequence
  Description of Artificial Sequence: Synthetic oligonucleotide
aacugaggccccagguucu

SEQ ID NO: 2960648 - RNA, 19 nt, Artificial Sequence
  Description of Artificial Sequence: Synthetic oligonucleotide
ucaggauaauccgcuccac

SEQ ID NO: 2960649 - RNA, 19 nt, Artificial Sequence
  Description of Artificial Sequence: Synthetic oligonucleotide
ugucuugcaugucguucau

SEQ ID NO: 2960650 - RNA, 19 nt, Artificial Sequence
  Description of Artificial Sequence: Synthetic oligonucleotide
auaauccgcuccacaaacu

SEQ ID NO: 2960651 - RNA, 19 nt, Artificial Sequence
  Description of Artificial Sequence: Synthetic oligonucleotide
agccaggugcugauugugg

SEQ ID NO: 2960652 - RNA, 19 nt, Artificial Sequence
  Description of Artificial Sequence: Synthetic oligonucleotide
guucugcuccacccagcgg

SEQ ID NO: 2960653 - RNA, 19 nt, Artificial Sequence
  Description of Artificial Sequence: Synthetic oligonucleotide
ugagcaggucucccacgac

SEQ ID NO: 2960654 - RNA, 19 nt, Artificial Sequence
  Description of Artificial Sequence: Synthetic oligonucleotide
ccagcuuggggucuccucc

SEQ ID NO: 2960655 - RNA, 19 nt, Artificial Sequence
  Description of Artificial Sequence: Synthetic oligonucleotide
gcagccgucuccugguggg

SEQ ID NO: 2960656 - RNA, 19 nt, Artificial Sequence
  Description of Artificial Sequence: Synthetic oligonucleotide
uucacaggcuggcucgcuu

SEQ ID NO: 2960657 - RNA, 19 nt, Artificial Sequence
  Description of Artificial Sequence: Synthetic oligonucleotide
cacugucuugucccuaguc

SEQ ID NO: 2960658 - RNA, 19 nt, Artificial Sequence
  Description of Artificial Sequence: Synthetic oligonucleotide
ugcuccacccagcgguacu

SEQ ID NO: 2960659 - RNA, 19 nt, Artificial Sequence
  Description of Artificial Sequence: Synthetic oligonucleotide
gcuugcugucuauaauccc

SEQ ID NO: 2960660 - RNA, 19 nt, Artificial Sequence
  Description of Artificial Sequence: Synthetic oligonucleotide
uccacccagcgguacuucu

SEQ ID NO: 2960661 - RNA, 19 nt, Artificial Sequence
  Description of Artificial Sequence: Synthetic oligonucleotide
uccacaaacugaggcccca

SEQ ID NO: 2960662 - RNA, 19 nt, Artificial Sequence
  Description of Artificial Sequence: Synthetic oligonucleotide
ccucauacacacuggccag

SEQ ID NO: 2960663 - RNA, 19 nt, Artificial Sequence
  Description of Artificial Sequence: Synthetic oligonucleotide
cucucgcacagcguccacg

SEQ ID NO: 2960664 - RNA, 19 nt, Artificial Sequence
  Description of Artificial Sequence: Synthetic oligonucleotide
aagcagccgucuccuggug

SEQ ID NO: 2960665 - RNA, 19 nt, Artificial Sequence
  Description of Artificial Sequence: Synthetic oligonucleotide
auacuuccgcagugggcug

SEQ ID NO: 2960666 - RNA, 19 nt, Artificial Sequence
  Description of Artificial Sequence: Synthetic oligonucleotide
gagccaggugcugauugug

SEQ ID NO: 2960667 - RNA, 19 nt, Artificial Sequence
  Description of Artificial Sequence: Synthetic oligonucleotide
agguucugcuccacccagc

SEQ ID NO: 2960668 - RNA, 19 nt, Artificial Sequence
  Description of Artificial Sequence: Synthetic oligonucleotide
gcaggugaacaagaugugc

SEQ ID NO: 2960669 - RNA, 19 nt, Artificial Sequence
  Description of Artificial Sequence: Synthetic oligonucleotide
caguugucacuccaggaaa

SEQ ID NO: 2960670 - RNA, 19 nt, Artificial Sequence
  Description of Artificial Sequence: Synthetic oligonucleotide
uuguggcagcaggugaaca

SEQ ID NO: 2960671 - RNA, 19 nt, Artificial Sequence
  Description of Artificial Sequence: Synthetic oligonucleotide
caggauaauccgcuccaca

SEQ ID NO: 2960672 - RNA, 19 nt, Artificial Sequence
  Description of Artificial Sequence: Synthetic oligonucleotide
agcaggucucccacgacca

SEQ ID NO: 2960673 - RNA, 19 nt, Artificial Sequence
  Description of Artificial Sequence: Synthetic oligonucleotide
ggagccucauacacacugg

SEQ ID NO: 2960674 - RNA, 19 nt, Artificial Sequence
  Description of Artificial Sequence: Synthetic oligonucleotide
ucccacgaccacugucuug

SEQ ID NO: 2960675 - RNA, 19 nt, Artificial Sequence
  Description of Artificial Sequence: Synthetic oligonucleotide
agggucguucacaggcugg

SEQ ID NO: 2960676 - RNA, 19 nt, Artificial Sequence
  Description of Artificial Sequence: Synthetic oligonucleotide
cacaggcuggcucgcuugc

SEQ ID NO: 2960677 - RNA, 19 nt, Artificial Sequence
  Description of Artificial Sequence: Synthetic oligonucleotide
agcuuggggucuccuccag

SEQ ID NO: 2960678 - RNA, 19 nt, Artificial Sequence
  Description of Artificial Sequence: Synthetic oligonucleotide
caguggucauacuuccgca

SEQ ID NO: 2960679 - RNA, 19 nt, Artificial Sequence
  Description of Artificial Sequence: Synthetic oligonucleotide
ggugucuugcaugucguuc

SEQ ID NO: 2960680 - RNA, 19 nt, Artificial Sequence
  Description of Artificial Sequence: Synthetic oligonucleotide
ucuugucccuagucaggau

SEQ ID NO: 2960681 - RNA, 19 nt, Artificial Sequence
  Description of Artificial Sequence: Synthetic oligonucleotide
ggauaauccgcuccacaaa

SEQ ID NO: 2960682 - RNA, 19 nt, Artificial Sequence
  Description of Artificial Sequence: Synthetic oligonucleotide
aggcuggcucgcuugcugu

SEQ ID NO: 2960683 - RNA, 19 nt, Artificial Sequence
  Description of Artificial Sequence: Synthetic oligonucleotide
gccaggugcugauuguggc

SEQ ID NO: 2960684 - RNA, 19 nt, Artificial Sequence
  Description of Artificial Sequence: Synthetic oligonucleotide
cgcuugcugucuauaaucc

SEQ ID NO: 2960685 - RNA, 19 nt, Artificial Sequence
  Description of Artificial Sequence: Synthetic oligonucleotide
acagcguccacggccccag

SEQ ID NO: 2960686 - RNA, 19 nt, Artificial Sequence
  Description of Artificial Sequence: Synthetic oligonucleotide
aggucucccacgaccacug

SEQ ID NO: 2960687 - RNA, 19 nt, Artificial Sequence
  Description of Artificial Sequence: Synthetic oligonucleotide
ccagcgguacuucucgccc

SEQ ID NO: 2960688 - RNA, 19 nt, Artificial Sequence
  Description of Artificial Sequence: Synthetic oligonucleotide
gucccuagucaggauaauc

SEQ ID NO: 2960689 - RNA, 19 nt, Artificial Sequence
  Description of Artificial Sequence: Synthetic oligonucleotide
ccgcuccacaaacugaggc

SEQ ID NO: 2960690 - RNA, 19 nt, Artificial Sequence
  Description of Artificial Sequence: Synthetic oligonucleotide
aucucucgcacagcgucca

SEQ ID NO: 2960691 - RNA, 19 nt, Artificial Sequence
  Description of Artificial Sequence: Synthetic oligonucleotide
cucgcccacacagugguca

SEQ ID NO: 2960692 - RNA, 19 nt, Artificial Sequence
  Description of Artificial Sequence: Synthetic oligonucleotide
gucucccacgaccacuguc

SEQ ID NO: 2960693 - RNA, 19 nt, Artificial Sequence
  Description of Artificial Sequence: Synthetic oligonucleotide
gaugaagaccucggugucu

SEQ ID NO: 2960694 - RNA, 19 nt, Artificial Sequence
  Description of Artificial Sequence: Synthetic oligonucleotide
guggucauacuuccgcagu

SEQ ID NO: 2960695 - RNA, 19 nt, Artificial Sequence
  Description of Artificial Sequence: Synthetic oligonucleotide
agaccucggugucuugcau

SEQ ID NO: 2960696 - RNA, 19 nt, Artificial Sequence
  Description of Artificial Sequence: Synthetic oligonucleotide
gguacuucucgcccacaca

SEQ ID NO: 2960697 - RNA, 19 nt, Artificial Sequence
  Description of Artificial Sequence: Synthetic oligonucleotide
cgcuccacaaacugaggcc

SEQ ID NO: 2960698 - RNA, 19 nt, Artificial Sequence
  Description of Artificial Sequence: Synthetic oligonucleotide
gucguucaucucucgcaca

SEQ ID NO: 2960699 - RNA, 19 nt, Artificial Sequence
  Description of Artificial Sequence: Synthetic oligonucleotide
ccaguugucacuccaggaa

SEQ ID NO: 2960700 - RNA, 19 nt, Artificial Sequence
  Description of Artificial Sequence: Synthetic oligonucleotide
ugucaucaaugagcagguc

SEQ ID NO: 2960701 - RNA, 19 nt, Artificial Sequence
  Description of Artificial Sequence: Synthetic oligonucleotide
ucucucgcacagcguccac

SEQ ID NO: 2960702 - RNA, 19 nt, Artificial Sequence
  Description of Artificial Sequence: Synthetic oligonucleotide
gugcugauuguggcagcag

SEQ ID NO: 2960703 - RNA, 19 nt, Artificial Sequence
  Description of Artificial Sequence: Synthetic oligonucleotide
gccuugaauggugucuuug

SEQ ID NO: 2960704 - RNA, 19 nt, Artificial Sequence
  Description of Artificial Sequence: Synthetic oligonucleotide
aggccuugaauggugucuu

SEQ ID NO: 2960705 - RNA, 19 nt, Artificial Sequence
  Description of Artificial Sequence: Synthetic oligonucleotide
ccuccaguugucacuccag

SEQ ID NO: 2960706 - RNA, 19 nt, Artificial Sequence
  Description of Artificial Sequence: Synthetic oligonucleotide
gaggccccagguucugcuc

SEQ ID NO: 2960707 - RNA, 19 nt, Artificial Sequence
  Description of Artificial Sequence: Synthetic oligonucleotide
auggugucuuugucaucaa

SEQ ID NO: 2960708 - RNA, 19 nt, Artificial Sequence
  Description of Artificial Sequence: Synthetic oligonucleotide
cccagcgguacuucucgcc

SEQ ID NO: 2960709 - RNA, 19 nt, Artificial Sequence
  Description of Artificial Sequence: Synthetic oligonucleotide
acugaggccccagguucug

SEQ ID NO: 2960710 - RNA, 19 nt, Artificial Sequence
  Description of Artificial Sequence: Synthetic oligonucleotide
gggucguucacaggcuggc

SEQ ID NO: 2960711 - RNA, 19 nt, Artificial Sequence
  Description of Artificial Sequence: Synthetic oligonucleotide
gcccacacaguggucauac

SEQ ID NO: 2960712 - RNA, 19 nt, Artificial Sequence
  Description of Artificial Sequence: Synthetic oligonucleotide
ucgcccacacaguggucau

SEQ ID NO: 2960713 - RNA, 19 nt, Artificial Sequence
  Description of Artificial Sequence: Synthetic oligonucleotide
ugucccuagucaggauaau

SEQ ID NO: 2960714 - RNA, 19 nt, Artificial Sequence
  Description of Artificial Sequence: Synthetic oligonucleotide
ggcuccaaguucaggaaaa

SEQ ID NO: 2960715 - RNA, 19 nt, Artificial Sequence
  Description of Artificial Sequence: Synthetic oligonucleotide
ggaaagcagccgucuccug

SEQ ID NO: 2960716 - RNA, 19 nt, Artificial Sequence
  Description of Artificial Sequence: Synthetic oligonucleotide
ggugcugauuguggcagca

SEQ ID NO: 2960717 - RNA, 19 nt, Artificial Sequence
  Description of Artificial Sequence: Synthetic oligonucleotide
cagcuuggggucuccucca

SEQ ID NO: 2960718 - RNA, 19 nt, Artificial Sequence
  Description of Artificial Sequence: Synthetic oligonucleotide
gugcucccagcuugggguc

SEQ ID NO: 2960719 - RNA, 19 nt, Artificial Sequence
  Description of Artificial Sequence: Synthetic oligonucleotide
cgcacagcguccacggccc

SEQ ID NO: 2960720 - RNA, 19 nt, Artificial Sequence
  Description of Artificial Sequence: Synthetic oligonucleotide
ugcucccagcuuggggucu

SEQ ID NO: 2960721 - RNA, 19 nt, Artificial Sequence
  Description of Artificial Sequence: Synthetic oligonucleotide
cagcgguacuucucgccca

SEQ ID NO: 2960722 - RNA, 19 nt, Artificial Sequence
  Description of Artificial Sequence: Synthetic oligonucleotide
gcucgcuugcugucuauaa

SEQ ID NO: 2960723 - RNA, 19 nt, Artificial Sequence
  Description of Artificial Sequence: Synthetic oligonucleotide
cugaggccccagguucugc

SEQ ID NO: 2960724 - RNA, 19 nt, Artificial Sequence
  Description of Artificial Sequence: Synthetic oligonucleotide
caccucagggucguucaca

SEQ ID NO: 2960725 - RNA, 19 nt, Artificial Sequence
  Description of Artificial Sequence: Synthetic oligonucleotide
gggcuggugcagaugaaga

SEQ ID NO: 2960726 - RNA, 19 nt, Artificial Sequence
  Description of Artificial Sequence: Synthetic oligonucleotide
caggccuugaauggugucu

SEQ ID NO: 2960727 - RNA, 19 nt, Artificial Sequence
  Description of Artificial Sequence: Synthetic oligonucleotide
gggcuccaaguucaggaaa

SEQ ID NO: 2960728 - RNA, 19 nt, Artificial Sequence
  Description of Artificial Sequence: Synthetic oligonucleotide
cucgcuugcugucuauaau

SEQ ID NO: 2960729 - RNA, 19 nt, Artificial Sequence
  Description of Artificial Sequence: Synthetic oligonucleotide
acuuccgcagugggcuggu

SEQ ID NO: 2960730 - RNA, 19 nt, Artificial Sequence
  Description of Artificial Sequence: Synthetic oligonucleotide
acaggcuggcucgcuugcu

SEQ ID NO: 2960731 - RNA, 19 nt, Artificial Sequence
  Description of Artificial Sequence: Synthetic oligonucleotide
ccuugaauggugucuuugu

SEQ ID NO: 2960732 - RNA, 19 nt, Artificial Sequence
  Description of Artificial Sequence: Synthetic oligonucleotide
guccacggccccagggaug

SEQ ID NO: 2960733 - RNA, 19 nt, Artificial Sequence
  Description of Artificial Sequence: Synthetic oligonucleotide
gucuugcaugucguucauc

SEQ ID NO: 2960734 - RNA, 19 nt, Artificial Sequence
  Description of Artificial Sequence: Synthetic oligonucleotide
ccaggaaagcagccgucuc

SEQ ID NO: 2960735 - RNA, 19 nt, Artificial Sequence
  Description of Artificial Sequence: Synthetic oligonucleotide
uggcucgcuugcugucuau

SEQ ID NO: 2960736 - RNA, 19 nt, Artificial Sequence
  Description of Artificial Sequence: Synthetic oligonucleotide
ccaggugcugauuguggca

SEQ ID NO: 2960737 - RNA, 19 nt, Artificial Sequence
  Description of Artificial Sequence: Synthetic oligonucleotide
cagccgucuccuggugggg

SEQ ID NO: 2960738 - RNA, 19 nt, Artificial Sequence
  Description of Artificial Sequence: Synthetic oligonucleotide
ccagggaugggcuccaagu

SEQ ID NO: 2960739 - RNA, 19 nt, Artificial Sequence
  Description of Artificial Sequence: Synthetic oligonucleotide
cagugggcuggugcagaug

SEQ ID NO: 2960740 - RNA, 19 nt, Artificial Sequence
  Description of Artificial Sequence: Synthetic oligonucleotide
gcugauuguggcagcaggu

SEQ ID NO: 2960741 - RNA, 19 nt, Artificial Sequence
  Description of Artificial Sequence: Synthetic oligonucleotide
ucccagcuuggggucuccu

SEQ ID NO: 2960742 - RNA, 19 nt, Artificial Sequence
  Description of Artificial Sequence: Synthetic oligonucleotide
ccacccagcgguacuucuc

SEQ ID NO: 2960743 - RNA, 19 nt, Artificial Sequence
  Description of Artificial Sequence: Synthetic oligonucleotide
gcguccacggccccaggga

SEQ ID NO: 2960744 - RNA, 19 nt, Artificial Sequence
  Description of Artificial Sequence: Synthetic oligonucleotide
ggccccagggaugggcucc

SEQ ID NO: 2960745 - RNA, 19 nt, Artificial Sequence
  Description of Artificial Sequence: Synthetic oligonucleotide
ccagguucugcuccaccca

SEQ ID NO: 2960746 - RNA, 19 nt, Artificial Sequence
  Description of Artificial Sequence: Synthetic oligonucleotide
cagggaugggcuccaaguu

SEQ ID NO: 2960747 - RNA, 19 nt, Artificial Sequence
  Description of Artificial Sequence: Synthetic oligonucleotide
cgguacuucucgcccacac

SEQ ID NO: 2960748 - RNA, 19 nt, Artificial Sequence
  Description of Artificial Sequence: Synthetic oligonucleotide
cuccacccagcgguacuuc

SEQ ID NO: 2960749 - RNA, 19 nt, Artificial Sequence
  Description of Artificial Sequence: Synthetic oligonucleotide
cucauacacacuggccagu

SEQ ID NO: 2960750 - RNA, 19 nt, Artificial Sequence
  Description of Artificial Sequence: Synthetic oligonucleotide
ccaggccuugaaugguguc

SEQ ID NO: 2960751 - RNA, 19 nt, Artificial Sequence
  Description of Artificial Sequence: Synthetic oligonucleotide
cccagggaugggcuccaag

SEQ ID NO: 2960752 - RNA, 19 nt, Artificial Sequence
  Description of Artificial Sequence: Synthetic oligonucleotide
gaccacugucuugucccua

SEQ ID NO: 2960753 - RNA, 19 nt, Artificial Sequence
  Description of Artificial Sequence: Synthetic oligonucleotide
cccagcuuggggucuccuc

SEQ ID NO: 2960754 - RNA, 19 nt, Artificial Sequence
  Description of Artificial Sequence: Synthetic oligonucleotide
ccacaaacugaggccccag

SEQ ID NO: 2960755 - RNA, 19 nt, Artificial Sequence
  Description of Artificial Sequence: Synthetic oligonucleotide
ggcuggcucgcuugcuguc

SEQ ID NO: 2960756 - RNA, 19 nt, Artificial Sequence
  Description of Artificial Sequence: Synthetic oligonucleotide
cccacgaccacugucuugu

SEQ ID NO: 2960757 - RNA, 19 nt, Artificial Sequence
  Description of Artificial Sequence: Synthetic oligonucleotide
gccuggagccucauacaca

SEQ ID NO: 2960758 - RNA, 19 nt, Artificial Sequence
  Description of Artificial Sequence: Synthetic oligonucleotide
cagcguccacggccccagg

SEQ ID NO: 2960759 - RNA, 19 nt, Artificial Sequence
  Description of Artificial Sequence: Synthetic oligonucleotide
cuggcucgcuugcugucua

SEQ ID NO: 2960760 - RNA, 19 nt, Artificial Sequence
  Description of Artificial Sequence: Synthetic oligonucleotide
ccacacaguggucauacuu

SEQ ID NO: 2960761 - RNA, 19 nt, Artificial Sequence
  Description of Artificial Sequence: Synthetic oligonucleotide
cacagcguccacggcccca

SEQ ID NO: 2960762 - RNA, 19 nt, Artificial Sequence
  Description of Artificial Sequence: Synthetic oligonucleotide
cauacacacuggccaguuu

SEQ ID NO: 2960763 - RNA, 19 nt, Artificial Sequence
  Description of Artificial Sequence: Synthetic oligonucleotide
cuuccgcagugggcuggug

SEQ ID NO: 2960764 - RNA, 19 nt, Artificial Sequence
  Description of Artificial Sequence: Synthetic oligonucleotide
ggccccagguucugcucca

SEQ ID NO: 2960765 - RNA, 19 nt, Artificial Sequence
  Description of Artificial Sequence: Synthetic oligonucleotide
ggcagcaggugaacaagau

SEQ ID NO: 2960766 - RNA, 19 nt, Artificial Sequence
  Description of Artificial Sequence: Synthetic oligonucleotide
guucacaggcuggcucgcu

SEQ ID NO: 2960767 - RNA, 19 nt, Artificial Sequence
  Description of Artificial Sequence: Synthetic oligonucleotide
cuggagccucauacacacu

SEQ ID NO: 2960768 - RNA, 19 nt, Artificial Sequence
  Description of Artificial Sequence: Synthetic oligonucleotide
gugggcuggugcagaugaa

SEQ ID NO: 2960769 - RNA, 19 nt, Artificial Sequence
  Description of Artificial Sequence: Synthetic oligonucleotide
cguucacaggcuggcucgc

SEQ ID NO: 2960770 - RNA, 19 nt, Artificial Sequence
  Description of Artificial Sequence: Synthetic oligonucleotide
gcacagcguccacggcccc

SEQ ID NO: 2960771 - RNA, 19 nt, Artificial Sequence
  Description of Artificial Sequence: Synthetic oligonucleotide
gcuggcucgcuugcugucu

SEQ ID NO: 2960772 - RNA, 19 nt, Artificial Sequence
  Description of Artificial Sequence: Synthetic oligonucleotide
ggucguucacaggcuggcu

SEQ ID NO: 2960773 - RNA, 19 nt, Artificial Sequence
  Description of Artificial Sequence: Synthetic oligonucleotide
ccacgaccacugucuuguc

SEQ ID NO: 2960774 - RNA, 19 nt, Artificial Sequence
  Description of Artificial Sequence: Synthetic oligonucleotide
gcucccagcuuggggucuc

SEQ ID NO: 2960775 - RNA, 19 nt, Artificial Sequence
  Description of Artificial Sequence: Synthetic oligonucleotide
ggucuccuccaggccuuga

SEQ ID NO: 2960776 - RNA, 19 nt, Artificial Sequence
  Description of Artificial Sequence: Synthetic oligonucleotide
ggucucccacgaccacugu

SEQ ID NO: 2960777 - RNA, 19 nt, Artificial Sequence
  Description of Artificial Sequence: Synthetic oligonucleotide
ggccuugaauggugucuuu

SEQ ID NO: 2960778 - RNA, 19 nt, Artificial Sequence
  Description of Artificial Sequence: Synthetic oligonucleotide
gcgguacuucucgcccaca

SEQ ID NO: 2960779 - RNA, 19 nt, Artificial Sequence
  Description of Artificial Sequence: Synthetic oligonucleotide
ccucggugucuugcauguc

SEQ ID NO: 2960780 - RNA, 19 nt, Artificial Sequence
  Description of Artificial Sequence: Synthetic oligonucleotide
gccccagguucugcuccac

SEQ ID NO: 2960781 - RNA, 19 nt, Artificial Sequence
  Description of Artificial Sequence: Synthetic oligonucleotide
gcuccacccagcgguacuu

SEQ ID NO: 2960782 - RNA, 19 nt, Artificial Sequence
  Description of Artificial Sequence: Synthetic oligonucleotide
gccccagggaugggcucca

SEQ ID NO: 2960783 - RNA, 19 nt, Artificial Sequence
  Description of Artificial Sequence: Synthetic oligonucleotide
cccacacaguggucauacu

SEQ ID NO: 2960784 - RNA, 19 nt, Artificial Sequence
  Description of Artificial Sequence: Synthetic oligonucleotide
cggccccagggaugggcuc

SEQ ID NO: 2960785 - RNA, 19 nt, Artificial Sequence
  Description of Artificial Sequence: Synthetic oligonucleotide
cgaccacugucuugucccu

SEQ ID NO: 2960786 - RNA, 19 nt, Artificial Sequence
  Description of Artificial Sequence: Synthetic oligonucleotide
gcagagccaggugcugauu

SEQ ID NO: 2960787 - RNA, 19 nt, Artificial Sequence
  Description of Artificial Sequence: Synthetic oligonucleotide
cguccacggccccagggau

SEQ ID NO: 2960788 - RNA, 19 nt, Artificial Sequence
  Description of Artificial Sequence: Synthetic oligonucleotide
ccacggccccagggauggg

SEQ ID NO: 2960789 - RNA, 19 nt, Artificial Sequence
  Description of Artificial Sequence: Synthetic oligonucleotide
cggugucuugcaugucguu

SEQ ID NO: 2960790 - RNA, 19 nt, Artificial Sequence
  Description of Artificial Sequence: Synthetic oligonucleotide
cgcccacacaguggucaua

SEQ ID NO: 2960791 - RNA, 19 nt, Artificial Sequence
  Description of Artificial Sequence: Synthetic oligonucleotide
ccccagggaugggcuccaa

SEQ ID NO: 2960792 - RNA, 19 nt, Artificial Sequence
  Description of Artificial Sequence: Synthetic oligonucleotide
aauaaaauacucguaagcc

SEQ ID NO: 2960793 - RNA, 19 nt, Artificial Sequence
  Description of Artificial Sequence: Synthetic oligonucleotide
uguuguaaaagaaauagug

SEQ ID NO: 2960794 - RNA, 19 nt, Artificial Sequence
  Description of Artificial Sequence: Synthetic oligonucleotide
aagauaauaaaauacucgu

SEQ ID NO: 2960795 - RNA, 19 nt, Artificial Sequence
  Description of Artificial Sequence: Synthetic oligonucleotide
aauccaauaagacuaaaga

SEQ ID NO: 2960796 - RNA, 19 nt, Artificial Sequence
  Description of Artificial Sequence: Synthetic oligonucleotide
uauguuguaaaagaaauag

SEQ ID NO: 2960797 - RNA, 19 nt, Artificial Sequence
  Description of Artificial Sequence: Synthetic oligonucleotide
agaaauaguguucaucacc

SEQ ID NO: 2960798 - RNA, 19 nt, Artificial Sequence
  Description of Artificial Sequence: Synthetic oligonucleotide
gaaguuuuccgucaggucg

SEQ ID NO: 2960799 - RNA, 19 nt, Artificial Sequence
  Description of Artificial Sequence: Synthetic oligonucleotide
aaagacuaaacauuucaag

SEQ ID NO: 2960800 - RNA, 19 nt, Artificial Sequence
  Description of Artificial Sequence: Synthetic oligonucleotide
accaaugacgauuucaagc

SEQ ID NO: 2960801 - RNA, 19 nt, Artificial Sequence
  Description of Artificial Sequence: Synthetic oligonucleotide
aagacuaaagacuaaacau

SEQ ID NO: 2960802 - RNA, 19 nt, Artificial Sequence
  Description of Artificial Sequence: Synthetic oligonucleotide
uccaauaagacuaaagacu

SEQ ID NO: 2960803 - RNA, 19 nt, Artificial Sequence
  Description of Artificial Sequence: Synthetic oligonucleotide
caagauaauaaaauacucg

SEQ ID NO: 2960804 - RNA, 19 nt, Artificial Sequence
  Description of Artificial Sequence: Synthetic oligonucleotide
uaauaaaauacucguaagc

SEQ ID NO: 2960805 - RNA, 19 nt, Artificial Sequence
  Description of Artificial Sequence: Synthetic oligonucleotide
aacauuucaaguccuggac

SEQ ID NO: 2960806 - RNA, 19 nt, Artificial Sequence
  Description of Artificial Sequence: Synthetic oligonucleotide
aagacuaaacauuucaagu

SEQ ID NO: 2960807 - RNA, 19 nt, Artificial Sequence
  Description of Artificial Sequence: Synthetic oligonucleotide
uuuauguuguaaaagaaau

SEQ ID NO: 2960808 - RNA, 19 nt, Artificial Sequence
  Description of Artificial Sequence: Synthetic oligonucleotide
uuuaauucuuccaucacac

SEQ ID NO: 2960809 - RNA, 19 nt, Artificial Sequence
  Description of Artificial Sequence: Synthetic oligonucleotide
auccaauaagacuaaagac

SEQ ID NO: 2960810 - RNA, 19 nt, Artificial Sequence
  Description of Artificial Sequence: Synthetic oligonucleotide
uaagacuaaagacuaaaca

SEQ ID NO: 2960811 - RNA, 19 nt, Artificial Sequence
  Description of Artificial Sequence: Synthetic oligonucleotide
cugguugacaucaauaagg

SEQ ID NO: 2960812 - RNA, 19 nt, Artificial Sequence
  Description of Artificial Sequence: Synthetic oligonucleotide
aaaagaaauaguguucauc

SEQ ID NO: 2960813 - RNA, 19 nt, Artificial Sequence
  Description of Artificial Sequence: Synthetic oligonucleotide
agacuaaacauuucaaguc

SEQ ID NO: 2960814 - RNA, 19 nt, Artificial Sequence
  Description of Artificial Sequence: Synthetic oligonucleotide
aaugacgauuucaagcucc

SEQ ID NO: 2960815 - RNA, 19 nt, Artificial Sequence
  Description of Artificial Sequence: Synthetic oligonucleotide
uuuuauguuguaaaagaaa

SEQ ID NO: 2960816 - RNA, 19 nt, Artificial Sequence
  Description of Artificial Sequence: Synthetic oligonucleotide
uguucaucaccaaugacga

SEQ ID NO: 2960817 - RNA, 19 nt, Artificial Sequence
  Description of Artificial Sequence: Synthetic oligonucleotide
uaauccaauaagacuaaag

SEQ ID NO: 2960818 - RNA, 19 nt, Artificial Sequence
  Description of Artificial Sequence: Synthetic oligonucleotide
gacuaaacauuucaagucc

SEQ ID NO: 2960819 - RNA, 19 nt, Artificial Sequence
  Description of Artificial Sequence: Synthetic oligonucleotide
ugguugacaucaauaaggg

SEQ ID NO: 2960820 - RNA, 19 nt, Artificial Sequence
  Description of Artificial Sequence: Synthetic oligonucleotide
uuguaauugcuguuguugg

SEQ ID NO: 2960821 - RNA, 19 nt, Artificial Sequence
  Description of Artificial Sequence: Synthetic oligonucleotide
aguaacguagguaaaaguc

SEQ ID NO: 2960822 - RNA, 19 nt, Artificial Sequence
  Description of Artificial Sequence: Synthetic oligonucleotide
aagaaauaguguucaucac

SEQ ID NO: 2960823 - RNA, 19 nt, Artificial Sequence
  Description of Artificial Sequence: Synthetic oligonucleotide
acuuuuauguacauaugcc

SEQ ID NO: 2960824 - RNA, 19 nt, Artificial Sequence
  Description of Artificial Sequence: Synthetic oligonucleotide
guaaaagucacucuccaug

SEQ ID NO: 2960825 - RNA, 19 nt, Artificial Sequence
  Description of Artificial Sequence: Synthetic oligonucleotide
uuuuauguacauaugccuc

SEQ ID NO: 2960826 - RNA, 19 nt, Artificial Sequence
  Description of Artificial Sequence: Synthetic oligonucleotide
uuuguaauugcuguuguug

SEQ ID NO: 2960827 - RNA, 19 nt, Artificial Sequence
  Description of Artificial Sequence: Synthetic oligonucleotide
aaaagucacucuccauggc

SEQ ID NO: 2960828 - RNA, 19 nt, Artificial Sequence
  Description of Artificial Sequence: Synthetic oligonucleotide
aacuccaggaacucaugac

SEQ ID NO: 2960829 - RNA, 19 nt, Artificial Sequence
  Description of Artificial Sequence: Synthetic oligonucleotide
gauuucaagcuccugccgg

SEQ ID NO: 2960830 - RNA, 19 nt, Artificial Sequence
  Description of Artificial Sequence: Synthetic oligonucleotide
cucuccauggcucacacgg

SEQ ID NO: 2960831 - RNA, 19 nt, Artificial Sequence
  Description of Artificial Sequence: Synthetic oligonucleotide
acgauuucaagcuccugcc

SEQ ID NO: 2960832 - RNA, 19 nt, Artificial Sequence
  Description of Artificial Sequence: Synthetic oligonucleotide
guguucaucaccaaugacg

SEQ ID NO: 2960833 - RNA, 19 nt, Artificial Sequence
  Description of Artificial Sequence: Synthetic oligonucleotide
auaaaauacucguaagccu

SEQ ID NO: 2960834 - RNA, 19 nt, Artificial Sequence
  Description of Artificial Sequence: Synthetic oligonucleotide
cacuuuuauguacauaugc

SEQ ID NO: 2960835 - RNA, 19 nt, Artificial Sequence
  Description of Artificial Sequence: Synthetic oligonucleotide
aaacauuucaaguccugga

SEQ ID NO: 2960836 - RNA, 19 nt, Artificial Sequence
  Description of Artificial Sequence: Synthetic oligonucleotide
gaauucaaacuccaggaac

SEQ ID NO: 2960837 - RNA, 19 nt, Artificial Sequence
  Description of Artificial Sequence: Synthetic oligonucleotide
uaaaauacucguaagccuu

SEQ ID NO: 2960838 - RNA, 19 nt, Artificial Sequence
  Description of Artificial Sequence: Synthetic oligonucleotide
gacgauuucaagcuccugc

SEQ ID NO: 2960839 - RNA, 19 nt, Artificial Sequence
  Description of Artificial Sequence: Synthetic oligonucleotide
aauaagacuaaagacuaaa

SEQ ID NO: 2960840 - RNA, 19 nt, Artificial Sequence
  Description of Artificial Sequence: Synthetic oligonucleotide
aauaguguucaucaccaau

SEQ ID NO: 2960841 - RNA, 19 nt, Artificial Sequence
  Description of Artificial Sequence: Synthetic oligonucleotide
aauucaaacuccaggaacu

SEQ ID NO: 2960842 - RNA, 19 nt, Artificial Sequence
  Description of Artificial Sequence: Synthetic oligonucleotide
auacucguaagccuucugg

SEQ ID NO: 2960843 - RNA, 19 nt, Artificial Sequence
  Description of Artificial Sequence: Synthetic oligonucleotide
uaaacauuucaaguccugg

SEQ ID NO: 2960844 - RNA, 19 nt, Artificial Sequence
  Description of Artificial Sequence: Synthetic oligonucleotide
aaagucacucuccauggcu

SEQ ID NO: 2960845 - RNA, 19 nt, Artificial Sequence
  Description of Artificial Sequence: Synthetic oligonucleotide
uuccaucacacuuuuaugu

SEQ ID NO: 2960846 - RNA, 19 nt, Artificial Sequence
  Description of Artificial Sequence: Synthetic oligonucleotide
ucaauaagggaaccgauuu

SEQ ID NO: 2960847 - RNA, 19 nt, Artificial Sequence
  Description of Artificial Sequence: Synthetic oligonucleotide
uucucuuuaauucuuccau

SEQ ID NO: 2960848 - RNA, 19 nt, Artificial Sequence
  Description of Artificial Sequence: Synthetic oligonucleotide
uuuucugaucaugacauca

SEQ ID NO: 2960849 - RNA, 19 nt, Artificial Sequence
  Description of Artificial Sequence: Synthetic oligonucleotide
uguuguuggcauaucgaag

SEQ ID NO: 2960850 - RNA, 19 nt, Artificial Sequence
  Description of Artificial Sequence: Synthetic oligonucleotide
uaaagacuaaacauuucaa

SEQ ID NO: 2960851 - RNA, 19 nt, Artificial Sequence
  Description of Artificial Sequence: Synthetic oligonucleotide
uucuuuggugauuucacug

SEQ ID NO: 2960852 - RNA, 19 nt, Artificial Sequence
  Description of Artificial Sequence: Synthetic oligonucleotide
auuucaagcuccugccggc

SEQ ID NO: 2960853 - RNA, 19 nt, Artificial Sequence
  Description of Artificial Sequence: Synthetic oligonucleotide
ugcuguuguuggcauaucg

SEQ ID NO: 2960854 - RNA, 19 nt, Artificial Sequence
  Description of Artificial Sequence: Synthetic oligonucleotide
cuaaagacuaaacauuuca

SEQ ID NO: 2960855 - RNA, 19 nt, Artificial Sequence
  Description of Artificial Sequence: Synthetic oligonucleotide
ucuucuuuggugauuucac

SEQ ID NO: 2960856 - RNA, 19 nt, Artificial Sequence
  Description of Artificial Sequence: Synthetic oligonucleotide
gaacucaugaccgaacuug

SEQ ID NO: 2960857 - RNA, 19 nt, Artificial Sequence
  Description of Artificial Sequence: Synthetic oligonucleotide
gaaauaguguucaucacca

SEQ ID NO: 2960858 - RNA, 19 nt, Artificial Sequence
  Description of Artificial Sequence: Synthetic oligonucleotide
uaacguagguaaaagucac

SEQ ID NO: 2960859 - RNA, 19 nt, Artificial Sequence
  Description of Artificial Sequence: Synthetic oligonucleotide
aacucaugaccgaacuugc

SEQ ID NO: 2960860 - RNA, 19 nt, Artificial Sequence
  Description of Artificial Sequence: Synthetic oligonucleotide
uggacaagauaauaaaaua

SEQ ID NO: 2960861 - RNA, 19 nt, Artificial Sequence
  Description of Artificial Sequence: Synthetic oligonucleotide
auaagacuaaagacuaaac

SEQ ID NO: 2960862 - RNA, 19 nt, Artificial Sequence
  Description of Artificial Sequence: Synthetic oligonucleotide
ucaccaaugacgauuucaa

SEQ ID NO: 2960863 - RNA, 19 nt, Artificial Sequence
  Description of Artificial Sequence: Synthetic oligonucleotide
ucuuuggugauuucacugu

SEQ ID NO: 2960864 - RNA, 19 nt, Artificial Sequence
  Description of Artificial Sequence: Synthetic oligonucleotide
cuucuggauccuuagacug

SEQ ID NO: 2960865 - RNA, 19 nt, Artificial Sequence
  Description of Artificial Sequence: Synthetic oligonucleotide
uggauccuuagacugguug

SEQ ID NO: 2960866 - RNA, 19 nt, Artificial Sequence
  Description of Artificial Sequence: Synthetic oligonucleotide
uuauguuguaaaagaaaua

SEQ ID NO: 2960867 - RNA, 19 nt, Artificial Sequence
  Description of Artificial Sequence: Synthetic oligonucleotide
ggugauuucacugucauca

SEQ ID NO: 2960868 - RNA, 19 nt, Artificial Sequence
  Description of Artificial Sequence: Synthetic oligonucleotide
uguaauugcuguuguuggc

SEQ ID NO: 2960869 - RNA, 19 nt, Artificial Sequence
  Description of Artificial Sequence: Synthetic oligonucleotide
uucuggauccuuagacugg

SEQ ID NO: 2960870 - RNA, 19 nt, Artificial Sequence
  Description of Artificial Sequence: Synthetic oligonucleotide
gaacuugccuuugugaccc

SEQ ID NO: 2960871 - RNA, 19 nt, Artificial Sequence
  Description of Artificial Sequence: Synthetic oligonucleotide
ucguaagccuucuggaucc

SEQ ID NO: 2960872 - RNA, 19 nt, Artificial Sequence
  Description of Artificial Sequence: Synthetic oligonucleotide
acauaugccucuuuucuga

SEQ ID NO: 2960873 - RNA, 19 nt, Artificial Sequence
  Description of Artificial Sequence: Synthetic oligonucleotide
acugguugacaucaauaag

SEQ ID NO: 2960874 - RNA, 19 nt, Artificial Sequence
  Description of Artificial Sequence: Synthetic oligonucleotide
auaguguucaucaccaaug

SEQ ID NO: 2960875 - RNA, 19 nt, Artificial Sequence
  Description of Artificial Sequence: Synthetic oligonucleotide
gaaguguaauccaauaaga

SEQ ID NO: 2960876 - RNA, 19 nt, Artificial Sequence
  Description of Artificial Sequence: Synthetic oligonucleotide
aaaauacucguaagccuuc

SEQ ID NO: 2960877 - RNA, 19 nt, Artificial Sequence
  Description of Artificial Sequence: Synthetic oligonucleotide
aucaauaauucucuuuaau

SEQ ID NO: 2960878 - RNA, 19 nt, Artificial Sequence
  Description of Artificial Sequence: Synthetic oligonucleotide
aaguuuuccgucaggucgg

SEQ ID NO: 2960879 - RNA, 19 nt, Artificial Sequence
  Description of Artificial Sequence: Synthetic oligonucleotide
uacauaugccucuuuucug

SEQ ID NO: 2960880 - RNA, 19 nt, Artificial Sequence
  Description of Artificial Sequence: Synthetic oligonucleotide
uaguguucaucaccaauga

SEQ ID NO: 2960881 - RNA, 19 nt, Artificial Sequence
  Description of Artificial Sequence: Synthetic oligonucleotide
uguacauaugccucuuuuc

SEQ ID NO: 2960882 - RNA, 19 nt, Artificial Sequence
  Description of Artificial Sequence: Synthetic oligonucleotide
acguagguaaaagucacuc

SEQ ID NO: 2960883 - RNA, 19 nt, Artificial Sequence
  Description of Artificial Sequence: Synthetic oligonucleotide
gacaagauaauaaaauacu

SEQ ID NO: 2960884 - RNA, 19 nt, Artificial Sequence
  Description of Artificial Sequence: Synthetic oligonucleotide
cuuuaauucuuccaucaca

SEQ ID NO: 2960885 - RNA, 19 nt, Artificial Sequence
  Description of Artificial Sequence: Synthetic oligonucleotide
uuuggugauuucacuguca

SEQ ID NO: 2960886 - RNA, 19 nt, Artificial Sequence
  Description of Artificial Sequence: Synthetic oligonucleotide
ggcauaucgaaguuuuccg

SEQ ID NO: 2960887 - RNA, 19 nt, Artificial Sequence
  Description of Artificial Sequence: Synthetic oligonucleotide
uggcauaucgaaguuuucc

SEQ ID NO: 2960888 - RNA, 19 nt, Artificial Sequence
  Description of Artificial Sequence: Synthetic oligonucleotide
auaucgaaguuuuccguca

SEQ ID NO: 2960889 - RNA, 19 nt, Artificial Sequence
  Description of Artificial Sequence: Synthetic oligonucleotide
cauaucgaaguuuuccguc

SEQ ID NO: 2960890 - RNA, 19 nt, Artificial Sequence
  Description of Artificial Sequence: Synthetic oligonucleotide
gacugguugacaucaauaa

SEQ ID NO: 2960891 - RNA, 19 nt, Artificial Sequence
  Description of Artificial Sequence: Synthetic oligonucleotide
guaguaacguagguaaaag

SEQ ID NO: 2960892 - RNA, 19 nt, Artificial Sequence
  Description of Artificial Sequence: Synthetic oligonucleotide
uuucaaguccuggacaaga

SEQ ID NO: 2960893 - RNA, 19 nt, Artificial Sequence
  Description of Artificial Sequence: Synthetic oligonucleotide
aauacucguaagccuucug

SEQ ID NO: 2960894 - RNA, 19 nt, Artificial Sequence
  Description of Artificial Sequence: Synthetic oligonucleotide
uccuggacaagauaauaaa

SEQ ID NO: 2960895 - RNA, 19 nt, Artificial Sequence
  Description of Artificial Sequence: Synthetic oligonucleotide
uaucgaaguuuuccgucag

SEQ ID NO: 2960896 - RNA, 19 nt, Artificial Sequence
  Description of Artificial Sequence: Synthetic oligonucleotide
ugugacccacguaguaacg

SEQ ID NO: 2960897 - RNA, 19 nt, Artificial Sequence
  Description of Artificial Sequence: Synthetic oligonucleotide
gucaggucggaauucaaac

SEQ ID NO: 2960898 - RNA, 19 nt, Artificial Sequence
  Description of Artificial Sequence: Synthetic oligonucleotide
ggacaagauaauaaaauac

SEQ ID NO: 2960899 - RNA, 19 nt, Artificial Sequence
  Description of Artificial Sequence: Synthetic oligonucleotide
cuaaacauuucaaguccug

SEQ ID NO: 2960900 - RNA, 19 nt, Artificial Sequence
  Description of Artificial Sequence: Synthetic oligonucleotide
ucaggucggaauucaaacu

SEQ ID NO: 2960901 - RNA, 19 nt, Artificial Sequence
  Description of Artificial Sequence: Synthetic oligonucleotide
aauucuuccaucacacuuu

SEQ ID NO: 2960902 - RNA, 19 nt, Artificial Sequence
  Description of Artificial Sequence: Synthetic oligonucleotide
cacguaguaacguagguaa

SEQ ID NO: 2960903 - RNA, 19 nt, Artificial Sequence
  Description of Artificial Sequence: Synthetic oligonucleotide
uaguaacguagguaaaagu

SEQ ID NO: 2960904 - RNA, 19 nt, Artificial Sequence
  Description of Artificial Sequence: Synthetic oligonucleotide
uacucguaagccuucugga

SEQ ID NO: 2960905 - RNA, 19 nt, Artificial Sequence
  Description of Artificial Sequence: Synthetic oligonucleotide
uuuuccgucaggucggaau

SEQ ID NO: 2960906 - RNA, 19 nt, Artificial Sequence
  Description of Artificial Sequence: Synthetic oligonucleotide
guaacguagguaaaaguca

SEQ ID NO: 2960907 - RNA, 19 nt, Artificial Sequence
  Description of Artificial Sequence: Synthetic oligonucleotide
uuucugaucaugacaucau

SEQ ID NO: 2960908 - RNA, 19 nt, Artificial Sequence
  Description of Artificial Sequence: Synthetic oligonucleotide
ucucuuuaauucuuccauc

SEQ ID NO: 2960909 - RNA, 19 nt, Artificial Sequence
  Description of Artificial Sequence: Synthetic oligonucleotide
acaucaauaagggaaccga

SEQ ID NO: 2960910 - RNA, 19 nt, Artificial Sequence
  Description of Artificial Sequence: Synthetic oligonucleotide
uuggugauuucacugucau

SEQ ID NO: 2960911 - RNA, 19 nt, Artificial Sequence
  Description of Artificial Sequence: Synthetic oligonucleotide
uugugacccacguaguaac

SEQ ID NO: 2960912 - RNA, 19 nt, Artificial Sequence
  Description of Artificial Sequence: Synthetic oligonucleotide
caaguccuggacaagauaa

SEQ ID NO: 2960913 - RNA, 19 nt, Artificial Sequence
  Description of Artificial Sequence: Synthetic oligonucleotide
cuuuuauguacauaugccu

SEQ ID NO: 2960914 - RNA, 19 nt, Artificial Sequence
  Description of Artificial Sequence: Synthetic oligonucleotide
acuaaagacuaaacauuuc

SEQ ID NO: 2960915 - RNA, 19 nt, Artificial Sequence
  Description of Artificial Sequence: Synthetic oligonucleotide
guuguuggcauaucgaagu

SEQ ID NO: 2960916 - RNA, 19 nt, Artificial Sequence
  Description of Artificial Sequence: Synthetic oligonucleotide
cacacuuuuauguacauau

SEQ ID NO: 2960917 - RNA, 19 nt, Artificial Sequence
  Description of Artificial Sequence: Synthetic oligonucleotide
uuaauucuuccaucacacu

SEQ ID NO: 2960918 - RNA, 19 nt, Artificial Sequence
  Description of Artificial Sequence: Synthetic oligonucleotide
caggucggaauucaaacuc

SEQ ID NO: 2960919 - RNA, 19 nt, Artificial Sequence
  Description of Artificial Sequence: Synthetic oligonucleotide
aggaacucaugaccgaacu

SEQ ID NO: 2960920 - RNA, 19 nt, Artificial Sequence
  Description of Artificial Sequence: Synthetic oligonucleotide
aggucggaauucaaacucc

SEQ ID NO: 2960921 - RNA, 19 nt, Artificial Sequence
  Description of Artificial Sequence: Synthetic oligonucleotide
uccuuagacugguugacau

SEQ ID NO: 2960922 - RNA, 19 nt, Artificial Sequence
  Description of Artificial Sequence: Synthetic oligonucleotide
ucgaaguuuuccgucaggu

SEQ ID NO: 2960923 - RNA, 19 nt, Artificial Sequence
  Description of Artificial Sequence: Synthetic oligonucleotide
uuugugacccacguaguaa

SEQ ID NO: 2960924 - RNA, 19 nt, Artificial Sequence
  Description of Artificial Sequence: Synthetic oligonucleotide
cuugccuuugugacccacg

SEQ ID NO: 2960925 - RNA, 19 nt, Artificial Sequence
  Description of Artificial Sequence: Synthetic oligonucleotide
auaugccucuuuucugauc

SEQ ID NO: 2960926 - RNA, 19 nt, Artificial Sequence
  Description of Artificial Sequence: Synthetic oligonucleotide
aucaccaaugacgauuuca

SEQ ID NO: 2960927 - RNA, 19 nt, Artificial Sequence
  Description of Artificial Sequence: Synthetic oligonucleotide
agacuaaagacuaaacauu

SEQ ID NO: 2960928 - RNA, 19 nt, Artificial Sequence
  Description of Artificial Sequence: Synthetic oligonucleotide
uccaucacacuuuuaugua

SEQ ID NO: 2960929 - RNA, 19 nt, Artificial Sequence
  Description of Artificial Sequence: Synthetic oligonucleotide
auucaaacuccaggaacuc

SEQ ID NO: 2960930 - RNA, 19 nt, Artificial Sequence
  Description of Artificial Sequence: Synthetic oligonucleotide
ucuccauggcucacacggg

SEQ ID NO: 2960931 - RNA, 19 nt, Artificial Sequence
  Description of Artificial Sequence: Synthetic oligonucleotide
aaauaguguucaucaccaa

SEQ ID NO: 2960932 - RNA, 19 nt, Artificial Sequence
  Description of Artificial Sequence: Synthetic oligonucleotide
cucguaagccuucuggauc

SEQ ID NO: 2960933 - RNA, 19 nt, Artificial Sequence
  Description of Artificial Sequence: Synthetic oligonucleotide
guuguaaaagaaauagugu

SEQ ID NO: 2960934 - RNA, 19 nt, Artificial Sequence
  Description of Artificial Sequence: Synthetic oligonucleotide
guacauaugccucuuuucu

SEQ ID NO: 2960935 - RNA, 19 nt, Artificial Sequence
  Description of Artificial Sequence: Synthetic oligonucleotide
cauuucaaguccuggacaa

SEQ ID NO: 2960936 - RNA, 19 nt, Artificial Sequence
  Description of Artificial Sequence: Synthetic oligonucleotide
uugccuuugugacccacgu

SEQ ID NO: 2960937 - RNA, 19 nt, Artificial Sequence
  Description of Artificial Sequence: Synthetic oligonucleotide
accgaacuugccuuuguga

SEQ ID NO: 2960938 - RNA, 19 nt, Artificial Sequence
  Description of Artificial Sequence: Synthetic oligonucleotide
uuuccgucaggucggaauu

SEQ ID NO: 2960939 - RNA, 19 nt, Artificial Sequence
  Description of Artificial Sequence: Synthetic oligonucleotide
ucaucuucuuuggugauuu

SEQ ID NO: 2960940 - RNA, 19 nt, Artificial Sequence
  Description of Artificial Sequence: Synthetic oligonucleotide
caucacacuuuuauguaca

SEQ ID NO: 2960941 - RNA, 19 nt, Artificial Sequence
  Description of Artificial Sequence: Synthetic oligonucleotide
aaauacucguaagccuucu

SEQ ID NO: 2960942 - RNA, 19 nt, Artificial Sequence
  Description of Artificial Sequence: Synthetic oligonucleotide
ucaugaccgaacuugccuu

SEQ ID NO: 2960943 - RNA, 19 nt, Artificial Sequence
  Description of Artificial Sequence: Synthetic oligonucleotide
uucaaguccuggacaagau

SEQ ID NO: 2960944 - RNA, 19 nt, Artificial Sequence
  Description of Artificial Sequence: Synthetic oligonucleotide
ucaaguccuggacaagaua

SEQ ID NO: 2960945 - RNA, 19 nt, Artificial Sequence
  Description of Artificial Sequence: Synthetic oligonucleotide
auguacauaugccucuuuu

SEQ ID NO: 2960946 - RNA, 19 nt, Artificial Sequence
  Description of Artificial Sequence: Synthetic oligonucleotide
gauccuuagacugguugac

SEQ ID NO: 2960947 - RNA, 19 nt, Artificial Sequence
  Description of Artificial Sequence: Synthetic oligonucleotide
acuaaacauuucaaguccu

SEQ ID NO: 2960948 - RNA, 19 nt, Artificial Sequence
  Description of Artificial Sequence: Synthetic oligonucleotide
cuuuggugauuucacuguc

SEQ ID NO: 2960949 - RNA, 19 nt, Artificial Sequence
  Description of Artificial Sequence: Synthetic oligonucleotide
uucaaacuccaggaacuca

SEQ ID NO: 2960950 - RNA, 19 nt, Artificial Sequence
  Description of Artificial Sequence: Synthetic oligonucleotide
auugcuguuguuggcauau

SEQ ID NO: 2960951 - RNA, 19 nt, Artificial Sequence
  Description of Artificial Sequence: Synthetic oligonucleotide
cuggacaagauaauaaaau

SEQ ID NO: 2960952 - RNA, 19 nt, Artificial Sequence
  Description of Artificial Sequence: Synthetic oligonucleotide
ucuggauccuuagacuggu

SEQ ID NO: 2960953 - RNA, 19 nt, Artificial Sequence
  Description of Artificial Sequence: Synthetic oligonucleotide
uucugaucaugacaucauu

SEQ ID NO: 2960954 - RNA, 19 nt, Artificial Sequence
  Description of Artificial Sequence: Synthetic oligonucleotide
acucaugaccgaacuugcc

SEQ ID NO: 2960955 - RNA, 19 nt, Artificial Sequence
  Description of Artificial Sequence: Synthetic oligonucleotide
agauaauaaaauacucgua

SEQ ID NO: 2960956 - RNA, 19 nt, Artificial Sequence
  Description of Artificial Sequence: Synthetic oligonucleotide
gacccacguaguaacguag

SEQ ID NO: 2960957 - RNA, 19 nt, Artificial Sequence
  Description of Artificial Sequence: Synthetic oligonucleotide
acucguaagccuucuggau

SEQ ID NO: 2960958 - RNA, 19 nt, Artificial Sequence
  Description of Artificial Sequence: Synthetic oligonucleotide
aauugcuguuguuggcaua

SEQ ID NO: 2960959 - RNA, 19 nt, Artificial Sequence
  Description of Artificial Sequence: Synthetic oligonucleotide
cuguuguuggcauaucgaa

SEQ ID NO: 2960960 - RNA, 19 nt, Artificial Sequence
  Description of Artificial Sequence: Synthetic oligonucleotide
caccaaugacgauuucaag

SEQ ID NO: 2960961 - RNA, 19 nt, Artificial Sequence
  Description of Artificial Sequence: Synthetic oligonucleotide
gaccgaacuugccuuugug

SEQ ID NO: 2960962 - RNA, 19 nt, Artificial Sequence
  Description of Artificial Sequence: Synthetic oligonucleotide
uccaggaacucaugaccga

SEQ ID NO: 2960963 - RNA, 19 nt, Artificial Sequence
  Description of Artificial Sequence: Synthetic oligonucleotide
ccaauaagacuaaagacua

SEQ ID NO: 2960964 - RNA, 19 nt, Artificial Sequence
  Description of Artificial Sequence: Synthetic oligonucleotide
ggccuacucggucaggagg

SEQ ID NO: 2960965 - RNA, 19 nt, Artificial Sequence
  Description of Artificial Sequence: Synthetic oligonucleotide
gacuaaagacuaaacauuu

SEQ ID NO: 2960966 - RNA, 19 nt, Artificial Sequence
  Description of Artificial Sequence: Synthetic oligonucleotide
uccauggcucacacgggac

SEQ ID NO: 2960967 - RNA, 19 nt, Artificial Sequence
  Description of Artificial Sequence: Synthetic oligonucleotide
auuucaaguccuggacaag

SEQ ID NO: 2960968 - RNA, 19 nt, Artificial Sequence
  Description of Artificial Sequence: Synthetic oligonucleotide
agucacucuccauggcuca

SEQ ID NO: 2960969 - RNA, 19 nt, Artificial Sequence
  Description of Artificial Sequence: Synthetic oligonucleotide
aucacacuuuuauguacau

SEQ ID NO: 2960970 - RNA, 19 nt, Artificial Sequence
  Description of Artificial Sequence: Synthetic oligonucleotide
aacguagguaaaagucacu

SEQ ID NO: 2960971 - RNA, 19 nt, Artificial Sequence
  Description of Artificial Sequence: Synthetic oligonucleotide
ugacccacguaguaacgua

SEQ ID NO: 2960972 - RNA, 19 nt, Artificial Sequence
  Description of Artificial Sequence: Synthetic oligonucleotide
cuuuucugaucaugacauc

SEQ ID NO: 2960973 - RNA, 19 nt, Artificial Sequence
  Description of Artificial Sequence: Synthetic oligonucleotide
uauguacauaugccucuuu

SEQ ID NO: 2960974 - RNA, 19 nt, Artificial Sequence
  Description of Artificial Sequence: Synthetic oligonucleotide
ggauccuuagacugguuga

SEQ ID NO: 2960975 - RNA, 19 nt, Artificial Sequence
  Description of Artificial Sequence: Synthetic oligonucleotide
caggaacucaugaccgaac

SEQ ID NO: 2960976 - RNA, 19 nt, Artificial Sequence
  Description of Artificial Sequence: Synthetic oligonucleotide
gccuucuggauccuuagac

SEQ ID NO: 2960977 - RNA, 19 nt, Artificial Sequence
  Description of Artificial Sequence: Synthetic oligonucleotide
ccgaacuugccuuugugac

SEQ ID NO: 2960978 - RNA, 19 nt, Artificial Sequence
  Description of Artificial Sequence: Synthetic oligonucleotide
uuagacugguugacaucaa

SEQ ID NO: 2960979 - RNA, 19 nt, Artificial Sequence
  Description of Artificial Sequence: Synthetic oligonucleotide
uuucaagcuccugccggcc

SEQ ID NO: 2960980 - RNA, 19 nt, Artificial Sequence
  Description of Artificial Sequence: Synthetic oligonucleotide
ugaccgaacuugccuuugu

SEQ ID NO: 2960981 - RNA, 19 nt, Artificial Sequence
  Description of Artificial Sequence: Synthetic oligonucleotide
acacuuuuauguacauaug

SEQ ID NO: 2960982 - RNA, 19 nt, Artificial Sequence
  Description of Artificial Sequence: Synthetic oligonucleotide
uucaagcuccugccggccu

SEQ ID NO: 2960983 - RNA, 19 nt, Artificial Sequence
  Description of Artificial Sequence: Synthetic oligonucleotide
uuguuggcauaucgaaguu

SEQ ID NO: 2960984 - RNA, 19 nt, Artificial Sequence
  Description of Artificial Sequence: Synthetic oligonucleotide
gcuccugccggccuacucg

SEQ ID NO: 2960985 - RNA, 19 nt, Artificial Sequence
  Description of Artificial Sequence: Synthetic oligonucleotide
caaugacgauuucaagcuc

SEQ ID NO: 2960986 - RNA, 19 nt, Artificial Sequence
  Description of Artificial Sequence: Synthetic oligonucleotide
uuggcauaucgaaguuuuc

SEQ ID NO: 2960987 - RNA, 19 nt, Artificial Sequence
  Description of Artificial Sequence: Synthetic oligonucleotide
caucaauaauucucuuuaa

SEQ ID NO: 2960988 - RNA, 19 nt, Artificial Sequence
  Description of Artificial Sequence: Synthetic oligonucleotide
cuccugccggccuacucgg

SEQ ID NO: 2960989 - RNA, 19 nt, Artificial Sequence
  Description of Artificial Sequence: Synthetic oligonucleotide
uguuggcauaucgaaguuu

SEQ ID NO: 2960990 - RNA, 19 nt, Artificial Sequence
  Description of Artificial Sequence: Synthetic oligonucleotide
ccaucacacuuuuauguac

SEQ ID NO: 2960991 - RNA, 19 nt, Artificial Sequence
  Description of Artificial Sequence: Synthetic oligonucleotide
acuugccuuugugacccac

SEQ ID NO: 2960992 - RNA, 19 nt, Artificial Sequence
  Description of Artificial Sequence: Synthetic oligonucleotide
acccacguaguaacguagg

SEQ ID NO: 2960993 - RNA, 19 nt, Artificial Sequence
  Description of Artificial Sequence: Synthetic oligonucleotide
uccgucaggucggaauuca

SEQ ID NO: 2960994 - RNA, 19 nt, Artificial Sequence
  Description of Artificial Sequence: Synthetic oligonucleotide
acucuccauggcucacacg

SEQ ID NO: 2960995 - RNA, 19 nt, Artificial Sequence
  Description of Artificial Sequence: Synthetic oligonucleotide
ggaauucaaacuccaggaa

SEQ ID NO: 2960996 - RNA, 19 nt, Artificial Sequence
  Description of Artificial Sequence: Synthetic oligonucleotide
caauaagacuaaagacuaa

SEQ ID NO: 2960997 - RNA, 19 nt, Artificial Sequence
  Description of Artificial Sequence: Synthetic oligonucleotide
agacugguugacaucaaua

SEQ ID NO: 2960998 - RNA, 19 nt, Artificial Sequence
  Description of Artificial Sequence: Synthetic oligonucleotide
cugaucaugacaucauuuu

SEQ ID NO: 2960999 - RNA, 19 nt, Artificial Sequence
  Description of Artificial Sequence: Synthetic oligonucleotide
aguccuggacaagauaaua

SEQ ID NO: 2961000 - RNA, 19 nt, Artificial Sequence
  Description of Artificial Sequence: Synthetic oligonucleotide
uggugauuucacugucauc

SEQ ID NO: 2961001 - RNA, 19 nt, Artificial Sequence
  Description of Artificial Sequence: Synthetic oligonucleotide
ucacacuuuuauguacaua

SEQ ID NO: 2961002 - RNA, 19 nt, Artificial Sequence
  Description of Artificial Sequence: Synthetic oligonucleotide
cucaugaccgaacuugccu

SEQ ID NO: 2961003 - RNA, 19 nt, Artificial Sequence
  Description of Artificial Sequence: Synthetic oligonucleotide
gccuacucggucaggaggg

SEQ ID NO: 2961004 - RNA, 19 nt, Artificial Sequence
  Description of Artificial Sequence: Synthetic oligonucleotide
ccaaugacgauuucaagcu

SEQ ID NO: 2961005 - RNA, 19 nt, Artificial Sequence
  Description of Artificial Sequence: Synthetic oligonucleotide
agcuccugccggccuacuc

SEQ ID NO: 2961006 - RNA, 19 nt, Artificial Sequence
  Description of Artificial Sequence: Synthetic oligonucleotide
aaguccuggacaagauaau

SEQ ID NO: 2961007 - RNA, 19 nt, Artificial Sequence
  Description of Artificial Sequence: Synthetic oligonucleotide
guccuggacaagauaauaa

SEQ ID NO: 2961008 - RNA, 19 nt, Artificial Sequence
  Description of Artificial Sequence: Synthetic oligonucleotide
cggaauucaaacuccagga

SEQ ID NO: 2961009 - RNA, 19 nt, Artificial Sequence
  Description of Artificial Sequence: Synthetic oligonucleotide
ugacgauuucaagcuccug

SEQ ID NO: 2961010 - RNA, 19 nt, Artificial Sequence
  Description of Artificial Sequence: Synthetic oligonucleotide
auccuuagacugguugaca

SEQ ID NO: 2961011 - RNA, 19 nt, Artificial Sequence
  Description of Artificial Sequence: Synthetic oligonucleotide
cuuugugacccacguagua

SEQ ID NO: 2961012 - RNA, 19 nt, Artificial Sequence
  Description of Artificial Sequence: Synthetic oligonucleotide
augacgauuucaagcuccu

SEQ ID NO: 2961013 - RNA, 19 nt, Artificial Sequence
  Description of Artificial Sequence: Synthetic oligonucleotide
guuggcauaucgaaguuuu

SEQ ID NO: 2961014 - RNA, 19 nt, Artificial Sequence
  Description of Artificial Sequence: Synthetic oligonucleotide
gguugacaucaauaaggga

SEQ ID NO: 2961015 - RNA, 19 nt, Artificial Sequence
  Description of Artificial Sequence: Synthetic oligonucleotide
agccuucuggauccuuaga

SEQ ID NO: 2961016 - RNA, 19 nt, Artificial Sequence
  Description of Artificial Sequence: Synthetic oligonucleotide
ugccggccuacucggucag

SEQ ID NO: 2961017 - RNA, 19 nt, Artificial Sequence
  Description of Artificial Sequence: Synthetic oligonucleotide
cuccauggcucacacggga

SEQ ID NO: 2961018 - RNA, 19 nt, Artificial Sequence
  Description of Artificial Sequence: Synthetic oligonucleotide
gccacagagcaucaucuuc

SEQ ID NO: 2961019 - RNA, 19 nt, Artificial Sequence
  Description of Artificial Sequence: Synthetic oligonucleotide
gugauuucacugucaucaa

SEQ ID NO: 2961020 - RNA, 19 nt, Artificial Sequence
  Description of Artificial Sequence: Synthetic oligonucleotide
augaccgaacuugccuuug

SEQ ID NO: 2961021 - RNA, 19 nt, Artificial Sequence
  Description of Artificial Sequence: Synthetic oligonucleotide
cgaacuugccuuugugacc

SEQ ID NO: 2961022 - RNA, 19 nt, Artificial Sequence
  Description of Artificial Sequence: Synthetic oligonucleotide
ccuggacaagauaauaaaa

SEQ ID NO: 2961023 - RNA, 19 nt, Artificial Sequence
  Description of Artificial Sequence: Synthetic oligonucleotide
ugccuuugugacccacgua

SEQ ID NO: 2961024 - RNA, 19 nt, Artificial Sequence
  Description of Artificial Sequence: Synthetic oligonucleotide
aacuugccuuugugaccca

SEQ ID NO: 2961025 - RNA, 19 nt, Artificial Sequence
  Description of Artificial Sequence: Synthetic oligonucleotide
gcuguuguuggcauaucga

SEQ ID NO: 2961026 - RNA, 19 nt, Artificial Sequence
  Description of Artificial Sequence: Synthetic oligonucleotide
caucuucuuuggugauuuc

SEQ ID NO: 2961027 - RNA, 19 nt, Artificial Sequence
  Description of Artificial Sequence: Synthetic oligonucleotide
cgauuucaagcuccugccg

SEQ ID NO: 2961028 - RNA, 19 nt, Artificial Sequence
  Description of Artificial Sequence: Synthetic oligonucleotide
uuccgucaggucggaauuc

SEQ ID NO: 2961029 - RNA, 19 nt, Artificial Sequence
  Description of Artificial Sequence: Synthetic oligonucleotide
gcauaucgaaguuuuccgu

SEQ ID NO: 2961030 - RNA, 19 nt, Artificial Sequence
  Description of Artificial Sequence: Synthetic oligonucleotide
ggucggaauucaaacucca

SEQ ID NO: 2961031 - RNA, 19 nt, Artificial Sequence
  Description of Artificial Sequence: Synthetic oligonucleotide
cugccggccuacucgguca

SEQ ID NO: 2961032 - RNA, 19 nt, Artificial Sequence
  Description of Artificial Sequence: Synthetic oligonucleotide
gguaaaagucacucuccau

SEQ ID NO: 2961033 - RNA, 19 nt, Artificial Sequence
  Description of Artificial Sequence: Synthetic oligonucleotide
aguuuuccgucaggucgga

SEQ ID NO: 2961034 - RNA, 19 nt, Artificial Sequence
  Description of Artificial Sequence: Synthetic oligonucleotide
cauggcucacacgggacaa

SEQ ID NO: 2961035 - RNA, 19 nt, Artificial Sequence
  Description of Artificial Sequence: Synthetic oligonucleotide
caauaagggaaccgauuuu

SEQ ID NO: 2961036 - RNA, 19 nt, Artificial Sequence
  Description of Artificial Sequence: Synthetic oligonucleotide
gagcaucaucuucuuuggu

SEQ ID NO: 2961037 - RNA, 19 nt, Artificial Sequence
  Description of Artificial Sequence: Synthetic oligonucleotide
caucaccaaugacgauuuc

SEQ ID NO: 2961038 - RNA, 19 nt, Artificial Sequence
  Description of Artificial Sequence: Synthetic oligonucleotide
acguaguaacguagguaaa

SEQ ID NO: 2961039 - RNA, 19 nt, Artificial Sequence
  Description of Artificial Sequence: Synthetic oligonucleotide
cgaaguuuuccgucagguc

SEQ ID NO: 2961040 - RNA, 19 nt, Artificial Sequence
  Description of Artificial Sequence: Synthetic oligonucleotide
gucacucuccauggcucac

SEQ ID NO: 2961041 - RNA, 19 nt, Artificial Sequence
  Description of Artificial Sequence: Synthetic oligonucleotide
cauaugccucuuuucugau

SEQ ID NO: 2961042 - RNA, 19 nt, Artificial Sequence
  Description of Artificial Sequence: Synthetic oligonucleotide
uugcuguuguuggcauauc

SEQ ID NO: 2961043 - RNA, 19 nt, Artificial Sequence
  Description of Artificial Sequence: Synthetic oligonucleotide
gugacccacguaguaacgu

SEQ ID NO: 2961044 - RNA, 19 nt, Artificial Sequence
  Description of Artificial Sequence: Synthetic oligonucleotide
uccugccggccuacucggu

SEQ ID NO: 2961045 - RNA, 19 nt, Artificial Sequence
  Description of Artificial Sequence: Synthetic oligonucleotide
ccuucuggauccuuagacu

SEQ ID NO: 2961046 - RNA, 19 nt, Artificial Sequence
  Description of Artificial Sequence: Synthetic oligonucleotide
cguaguaacguagguaaaa

SEQ ID NO: 2961047 - RNA, 19 nt, Artificial Sequence
  Description of Artificial Sequence: Synthetic oligonucleotide
ccauggcucacacgggaca

SEQ ID NO: 2961048 - RNA, 19 nt, Artificial Sequence
  Description of Artificial Sequence: Synthetic oligonucleotide
ggaacucaugaccgaacuu

SEQ ID NO: 2961049 - RNA, 19 nt, Artificial Sequence
  Description of Artificial Sequence: Synthetic oligonucleotide
ccuacucggucaggagggg

SEQ ID NO: 2961050 - RNA, 19 nt, Artificial Sequence
  Description of Artificial Sequence: Synthetic oligonucleotide
ccugccggccuacucgguc

SEQ ID NO: 2961051 - RNA, 19 nt, Artificial Sequence
  Description of Artificial Sequence: Synthetic oligonucleotide
ccacguaguaacguaggua

SEQ ID NO: 2961052 - RNA, 19 nt, Artificial Sequence
  Description of Artificial Sequence: Synthetic oligonucleotide
cgucaggucggaauucaaa

SEQ ID NO: 2961053 - RNA, 19 nt, Artificial Sequence
  Description of Artificial Sequence: Synthetic oligonucleotide
ccaggaacucaugaccgaa

SEQ ID NO: 2961054 - RNA, 19 nt, Artificial Sequence
  Description of Artificial Sequence: Synthetic oligonucleotide
guuuuccgucaggucggaa

SEQ ID NO: 2961055 - RNA, 19 nt, Artificial Sequence
  Description of Artificial Sequence: Synthetic oligonucleotide
ccuuugugacccacguagu

SEQ ID NO: 2961056 - RNA, 19 nt, Artificial Sequence
  Description of Artificial Sequence: Synthetic oligonucleotide
cggccuacucggucaggag

SEQ ID NO: 2961057 - RNA, 19 nt, Artificial Sequence
  Description of Artificial Sequence: Synthetic oligonucleotide
cccacguaguaacguaggu

SEQ ID NO: 2961058 - RNA, 19 nt, Artificial Sequence
  Description of Artificial Sequence: Synthetic oligonucleotide
guaagccuucuggauccuu

SEQ ID NO: 2961059 - RNA, 19 nt, Artificial Sequence
  Description of Artificial Sequence: Synthetic oligonucleotide
ccggccuacucggucagga

SEQ ID NO: 2961060 - RNA, 19 nt, Artificial Sequence
  Description of Artificial Sequence: Synthetic oligonucleotide
cuggauccuuagacugguu

SEQ ID NO: 2961061 - RNA, 19 nt, Artificial Sequence
  Description of Artificial Sequence: Synthetic oligonucleotide
gccggccuacucggucagg

SEQ ID NO: 2961062 - RNA, 19 nt, Artificial Sequence
  Description of Artificial Sequence: Synthetic oligonucleotide
ccgucaggucggaauucaa

SEQ ID NO: 2961063 - RNA, 19 nt, Artificial Sequence
  Description of Artificial Sequence: Synthetic oligonucleotide
cguaagccuucuggauccu

SEQ ID NO: 2961064 - RNA, 19 nt, Artificial Sequence
  Description of Artificial Sequence: Synthetic oligonucleotide
uuauaaacaggaaacacag

SEQ ID NO: 2961065 - RNA, 19 nt, Artificial Sequence
  Description of Artificial Sequence: Synthetic oligonucleotide
uuuuaaaugcaacucuugg

SEQ ID NO: 2961066 - RNA, 19 nt, Artificial Sequence
  Description of Artificial Sequence: Synthetic oligonucleotide
aaugaucauaauuugucuc

SEQ ID NO: 2961067 - RNA, 19 nt, Artificial Sequence
  Description of Artificial Sequence: Synthetic oligonucleotide
gauaaaaccuggaagaggg

SEQ ID NO: 2961068 - RNA, 19 nt, Artificial Sequence
  Description of Artificial Sequence: Synthetic oligonucleotide
aggaaacacagauaaaacc

SEQ ID NO: 2961069 - RNA, 19 nt, Artificial Sequence
  Description of Artificial Sequence: Synthetic oligonucleotide
aucacugugguauagauug

SEQ ID NO: 2961070 - RNA, 19 nt, Artificial Sequence
  Description of Artificial Sequence: Synthetic oligonucleotide
cauaauuugucucaacucg

SEQ ID NO: 2961071 - RNA, 19 nt, Artificial Sequence
  Description of Artificial Sequence: Synthetic oligonucleotide
uuaaaugcaacucuuggac

SEQ ID NO: 2961072 - RNA, 19 nt, Artificial Sequence
  Description of Artificial Sequence: Synthetic oligonucleotide
aaacaggaaacacagauaa

SEQ ID NO: 2961073 - RNA, 19 nt, Artificial Sequence
  Description of Artificial Sequence: Synthetic oligonucleotide
guaaacaucagcaaugagg

SEQ ID NO: 2961074 - RNA, 19 nt, Artificial Sequence
  Description of Artificial Sequence: Synthetic oligonucleotide
aauguaguaaacaucagca

SEQ ID NO: 2961075 - RNA, 19 nt, Artificial Sequence
  Description of Artificial Sequence: Synthetic oligonucleotide
uuugucucaacucggaacc

SEQ ID NO: 2961076 - RNA, 19 nt, Artificial Sequence
  Description of Artificial Sequence: Synthetic oligonucleotide
acagauaaaaccuggaaga

SEQ ID NO: 2961077 - RNA, 19 nt, Artificial Sequence
  Description of Artificial Sequence: Synthetic oligonucleotide
auaaacaggaaacacagau

SEQ ID NO: 2961078 - RNA, 19 nt, Artificial Sequence
  Description of Artificial Sequence: Synthetic oligonucleotide
ugugcaguuguuauaaaca

SEQ ID NO: 2961079 - RNA, 19 nt, Artificial Sequence
  Description of Artificial Sequence: Synthetic oligonucleotide
auuugucucaacucggaac

SEQ ID NO: 2961080 - RNA, 19 nt, Artificial Sequence
  Description of Artificial Sequence: Synthetic oligonucleotide
guaaacagcggcuucaaag

SEQ ID NO: 2961081 - RNA, 19 nt, Artificial Sequence
  Description of Artificial Sequence: Synthetic oligonucleotide
guuguuauaaacaggaaac

SEQ ID NO: 2961082 - RNA, 19 nt, Artificial Sequence
  Description of Artificial Sequence: Synthetic oligonucleotide
gucuuagucuuuuaaaugc

SEQ ID NO: 2961083 - RNA, 19 nt, Artificial Sequence
  Description of Artificial Sequence: Synthetic oligonucleotide
uuuaaaugcaacucuugga

SEQ ID NO: 2961084 - RNA, 19 nt, Artificial Sequence
  Description of Artificial Sequence: Synthetic oligonucleotide
uguaguaaacaucagcaau

SEQ ID NO: 2961085 - RNA, 19 nt, Artificial Sequence
  Description of Artificial Sequence: Synthetic oligonucleotide
augacuaccccucacgggg

SEQ ID NO: 2961086 - RNA, 19 nt, Artificial Sequence
  Description of Artificial Sequence: Synthetic oligonucleotide
ugugguauagauugugcag

SEQ ID NO: 2961087 - RNA, 19 nt, Artificial Sequence
  Description of Artificial Sequence: Synthetic oligonucleotide
aaugagggagucuuggcca

SEQ ID NO: 2961088 - RNA, 19 nt, Artificial Sequence
  Description of Artificial Sequence: Synthetic oligonucleotide
cauucaacgggucaagagg

SEQ ID NO: 2961089 - RNA, 19 nt, Artificial Sequence
  Description of Artificial Sequence: Synthetic oligonucleotide
aucauaauuugucucaacu

SEQ ID NO: 2961090 - RNA, 19 nt, Artificial Sequence
  Description of Artificial Sequence: Synthetic oligonucleotide
uggacaaucaucaccuuca

SEQ ID NO: 2961091 - RNA, 19 nt, Artificial Sequence
  Description of Artificial Sequence: Synthetic oligonucleotide
aacucuuggacaaucauca

SEQ ID NO: 2961092 - RNA, 19 nt, Artificial Sequence
  Description of Artificial Sequence: Synthetic oligonucleotide
ugcccuguggcauuuaggg

SEQ ID NO: 2961093 - RNA, 19 nt, Artificial Sequence
  Description of Artificial Sequence: Synthetic oligonucleotide
aaucaucaccuucagcuug

SEQ ID NO: 2961094 - RNA, 19 nt, Artificial Sequence
  Description of Artificial Sequence: Synthetic oligonucleotide
ucaagaggccaaauguccg

SEQ ID NO: 2961095 - RNA, 19 nt, Artificial Sequence
  Description of Artificial Sequence: Synthetic oligonucleotide
aguuguuauaaacaggaaa

SEQ ID NO: 2961096 - RNA, 19 nt, Artificial Sequence
  Description of Artificial Sequence: Synthetic oligonucleotide
aaaugcaacucuuggacaa

SEQ ID NO: 2961097 - RNA, 19 nt, Artificial Sequence
  Description of Artificial Sequence: Synthetic oligonucleotide
cacagauaaaaccuggaag

SEQ ID NO: 2961098 - RNA, 19 nt, Artificial Sequence
  Description of Artificial Sequence: Synthetic oligonucleotide
agucauguacuugucaggc

SEQ ID NO: 2961099 - RNA, 19 nt, Artificial Sequence
  Description of Artificial Sequence: Synthetic oligonucleotide
ugcaguuguuauaaacagg

SEQ ID NO: 2961100 - RNA, 19 nt, Artificial Sequence
  Description of Artificial Sequence: Synthetic oligonucleotide
caauguaguaaacaucagc

SEQ ID NO: 2961101 - RNA, 19 nt, Artificial Sequence
  Description of Artificial Sequence: Synthetic oligonucleotide
ugaugacuaccccucacgg

SEQ ID NO: 2961102 - RNA, 19 nt, Artificial Sequence
  Description of Artificial Sequence: Synthetic oligonucleotide
aaacacagauaaaaccugg

SEQ ID NO: 2961103 - RNA, 19 nt, Artificial Sequence
  Description of Artificial Sequence: Synthetic oligonucleotide
uaaacagcggcuucaaagu

SEQ ID NO: 2961104 - RNA, 19 nt, Artificial Sequence
  Description of Artificial Sequence: Synthetic oligonucleotide
agucuuuuaaaugcaacuc

SEQ ID NO: 2961105 - RNA, 19 nt, Artificial Sequence
  Description of Artificial Sequence: Synthetic oligonucleotide
aaccacgcuccauucaacg

SEQ ID NO: 2961106 - RNA, 19 nt, Artificial Sequence
  Description of Artificial Sequence: Synthetic oligonucleotide
uagucuuuuaaaugcaacu

SEQ ID NO: 2961107 - RNA, 19 nt, Artificial Sequence
  Description of Artificial Sequence: Synthetic oligonucleotide
uuagucuuuuaaaugcaac

SEQ ID NO: 2961108 - RNA, 19 nt, Artificial Sequence
  Description of Artificial Sequence: Synthetic oligonucleotide
augaucauaauuugucuca

SEQ ID NO: 2961109 - RNA, 19 nt, Artificial Sequence
  Description of Artificial Sequence: Synthetic oligonucleotide
uuggccagaguguaaacag

SEQ ID NO: 2961110 - RNA, 19 nt, Artificial Sequence
  Description of Artificial Sequence: Synthetic oligonucleotide
auucaacgggucaagaggc

SEQ ID NO: 2961111 - RNA, 19 nt, Artificial Sequence
  Description of Artificial Sequence: Synthetic oligonucleotide
ucauaauuugucucaacuc

SEQ ID NO: 2961112 - RNA, 19 nt, Artificial Sequence
  Description of Artificial Sequence: Synthetic oligonucleotide
ucuuagucuuuuaaaugca

SEQ ID NO: 2961113 - RNA, 19 nt, Artificial Sequence
  Description of Artificial Sequence: Synthetic oligonucleotide
ucauguacuugucaggcuc

SEQ ID NO: 2961114 - RNA, 19 nt, Artificial Sequence
  Description of Artificial Sequence: Synthetic oligonucleotide
uccaaugaucauaauuugu

SEQ ID NO: 2961115 - RNA, 19 nt, Artificial Sequence
  Description of Artificial Sequence: Synthetic oligonucleotide
guaguaaacaucagcaaug

SEQ ID NO: 2961116 - RNA, 19 nt, Artificial Sequence
  Description of Artificial Sequence: Synthetic oligonucleotide
cuucaaaguuuucugaguc

SEQ ID NO: 2961117 - RNA, 19 nt, Artificial Sequence
  Description of Artificial Sequence: Synthetic oligonucleotide
cuuuuaaaugcaacucuug

SEQ ID NO: 2961118 - RNA, 19 nt, Artificial Sequence
  Description of Artificial Sequence: Synthetic oligonucleotide
agauaaaaccuggaagagg

SEQ ID NO: 2961119 - RNA, 19 nt, Artificial Sequence
  Description of Artificial Sequence: Synthetic oligonucleotide
acaggaaacacagauaaaa

SEQ ID NO: 2961120 - RNA, 19 nt, Artificial Sequence
  Description of Artificial Sequence: Synthetic oligonucleotide
aucccucuuggguacaggc

SEQ ID NO: 2961121 - RNA, 19 nt, Artificial Sequence
  Description of Artificial Sequence: Synthetic oligonucleotide
aucaccuucagcuuggguu

SEQ ID NO: 2961122 - RNA, 19 nt, Artificial Sequence
  Description of Artificial Sequence: Synthetic oligonucleotide
auaauuugucucaacucgg

SEQ ID NO: 2961123 - RNA, 19 nt, Artificial Sequence
  Description of Artificial Sequence: Synthetic oligonucleotide
uaaaugcaacucuuggaca

SEQ ID NO: 2961124 - RNA, 19 nt, Artificial Sequence
  Description of Artificial Sequence: Synthetic oligonucleotide
ucaaaguuuucugagucac

SEQ ID NO: 2961125 - RNA, 19 nt, Artificial Sequence
  Description of Artificial Sequence: Synthetic oligonucleotide
uaauuugucucaacucgga

SEQ ID NO: 2961126 - RNA, 19 nt, Artificial Sequence
  Description of Artificial Sequence: Synthetic oligonucleotide
ucuucggucaucccucuug

SEQ ID NO: 2961127 - RNA, 19 nt, Artificial Sequence
  Description of Artificial Sequence: Synthetic oligonucleotide
gaugacuaccccucacggg

SEQ ID NO: 2961128 - RNA, 19 nt, Artificial Sequence
  Description of Artificial Sequence: Synthetic oligonucleotide
uuccaaugaucauaauuug

SEQ ID NO: 2961129 - RNA, 19 nt, Artificial Sequence
  Description of Artificial Sequence: Synthetic oligonucleotide
cucuuggacaaucaucacc

SEQ ID NO: 2961130 - RNA, 19 nt, Artificial Sequence
  Description of Artificial Sequence: Synthetic oligonucleotide
uagucauguacuugucagg

SEQ ID NO: 2961131 - RNA, 19 nt, Artificial Sequence
  Description of Artificial Sequence: Synthetic oligonucleotide
uuuagggcuuugauggcug

SEQ ID NO: 2961132 - RNA, 19 nt, Artificial Sequence
  Description of Artificial Sequence: Synthetic oligonucleotide
uugugcaguuguuauaaac

SEQ ID NO: 2961133 - RNA, 19 nt, Artificial Sequence
  Description of Artificial Sequence: Synthetic oligonucleotide
uaaacaggaaacacagaua

SEQ ID NO: 2961134 - RNA, 19 nt, Artificial Sequence
  Description of Artificial Sequence: Synthetic oligonucleotide
uuguuauaaacaggaaaca

SEQ ID NO: 2961135 - RNA, 19 nt, Artificial Sequence
  Description of Artificial Sequence: Synthetic oligonucleotide
uucaaaguuuucugaguca

SEQ ID NO: 2961136 - RNA, 19 nt, Artificial Sequence
  Description of Artificial Sequence: Synthetic oligonucleotide
uguucuucggucaucccuc

SEQ ID NO: 2961137 - RNA, 19 nt, Artificial Sequence
  Description of Artificial Sequence: Synthetic oligonucleotide
ucagcuuggguuccgcacc

SEQ ID NO: 2961138 - RNA, 19 nt, Artificial Sequence
  Description of Artificial Sequence: Synthetic oligonucleotide
caaugagggagucuuggcc

SEQ ID NO: 2961139 - RNA, 19 nt, Artificial Sequence
  Description of Artificial Sequence: Synthetic oligonucleotide
ucaacucggaaccacgcuc

SEQ ID NO: 2961140 - RNA, 19 nt, Artificial Sequence
  Description of Artificial Sequence: Synthetic oligonucleotide
uauaaacaggaaacacaga

SEQ ID NO: 2961141 - RNA, 19 nt, Artificial Sequence
  Description of Artificial Sequence: Synthetic oligonucleotide
aauuugucucaacucggaa

SEQ ID NO: 2961142 - RNA, 19 nt, Artificial Sequence
  Description of Artificial Sequence: Synthetic oligonucleotide
uagauugugcaguuguuau

SEQ ID NO: 2961143 - RNA, 19 nt, Artificial Sequence
  Description of Artificial Sequence: Synthetic oligonucleotide
acugugguauagauugugc

SEQ ID NO: 2961144 - RNA, 19 nt, Artificial Sequence
  Description of Artificial Sequence: Synthetic oligonucleotide
gugaugacuaccccucacg

SEQ ID NO: 2961145 - RNA, 19 nt, Artificial Sequence
  Description of Artificial Sequence: Synthetic oligonucleotide
ugugugcuugcccuguggc

SEQ ID NO: 2961146 - RNA, 19 nt, Artificial Sequence
  Description of Artificial Sequence: Synthetic oligonucleotide
ugauggcugguguucuucg

SEQ ID NO: 2961147 - RNA, 19 nt, Artificial Sequence
  Description of Artificial Sequence: Synthetic oligonucleotide
cauguacuugucaggcucg

SEQ ID NO: 2961148 - RNA, 19 nt, Artificial Sequence
  Description of Artificial Sequence: Synthetic oligonucleotide
acuugucaggcucggcagc

SEQ ID NO: 2961149 - RNA, 19 nt, Artificial Sequence
  Description of Artificial Sequence: Synthetic oligonucleotide
gaggccaaauguccgcugg

SEQ ID NO: 2961150 - RNA, 19 nt, Artificial Sequence
  Description of Artificial Sequence: Synthetic oligonucleotide
uacuugucaggcucggcag

SEQ ID NO: 2961151 - RNA, 19 nt, Artificial Sequence
  Description of Artificial Sequence: Synthetic oligonucleotide
ucucaacucggaaccacgc

SEQ ID NO: 2961152 - RNA, 19 nt, Artificial Sequence
  Description of Artificial Sequence: Synthetic oligonucleotide
uuggacaaucaucaccuuc

SEQ ID NO: 2961153 - RNA, 19 nt, Artificial Sequence
  Description of Artificial Sequence: Synthetic oligonucleotide
uaguaaacaucagcaauga

SEQ ID NO: 2961154 - RNA, 19 nt, Artificial Sequence
  Description of Artificial Sequence: Synthetic oligonucleotide
gauugugcaguuguuauaa

SEQ ID NO: 2961155 - RNA, 19 nt, Artificial Sequence
  Description of Artificial Sequence: Synthetic oligonucleotide
agcaaugagggagucuugg

SEQ ID NO: 2961156 - RNA, 19 nt, Artificial Sequence
  Description of Artificial Sequence: Synthetic oligonucleotide
aguaaacaucagcaaugag

SEQ ID NO: 2961157 - RNA, 19 nt, Artificial Sequence
  Description of Artificial Sequence: Synthetic oligonucleotide
ucggucaucccucuugggu

SEQ ID NO: 2961158 - RNA, 19 nt, Artificial Sequence
  Description of Artificial Sequence: Synthetic oligonucleotide
gucaagaggccaaaugucc

SEQ ID NO: 2961159 - RNA, 19 nt, Artificial Sequence
  Description of Artificial Sequence: Synthetic oligonucleotide
ucaccuucagcuuggguuc

SEQ ID NO: 2961160 - RNA, 19 nt, Artificial Sequence
  Description of Artificial Sequence: Synthetic oligonucleotide
ucagcaaugagggagucuu

SEQ ID NO: 2961161 - RNA, 19 nt, Artificial Sequence
  Description of Artificial Sequence: Synthetic oligonucleotide
acccuagucauguacuugu

SEQ ID NO: 2961162 - RNA, 19 nt, Artificial Sequence
  Description of Artificial Sequence: Synthetic oligonucleotide
ccaaugaucauaauuuguc

SEQ ID NO: 2961163 - RNA, 19 nt, Artificial Sequence
  Description of Artificial Sequence: Synthetic oligonucleotide
caacucuuggacaaucauc

SEQ ID NO: 2961164 - RNA, 19 nt, Artificial Sequence
  Description of Artificial Sequence: Synthetic oligonucleotide
aaaaccuggaagagggccu

SEQ ID NO: 2961165 - RNA, 19 nt, Artificial Sequence
  Description of Artificial Sequence: Synthetic oligonucleotide
acacagauaaaaccuggaa

SEQ ID NO: 2961166 - RNA, 19 nt, Artificial Sequence
  Description of Artificial Sequence: Synthetic oligonucleotide
uuccgggugaugacuaccc

SEQ ID NO: 2961167 - RNA, 19 nt, Artificial Sequence
  Description of Artificial Sequence: Synthetic oligonucleotide
caacucggaaccacgcucc

SEQ ID NO: 2961168 - RNA, 19 nt, Artificial Sequence
  Description of Artificial Sequence: Synthetic oligonucleotide
aaaccuggaagagggccuc

SEQ ID NO: 2961169 - RNA, 19 nt, Artificial Sequence
  Description of Artificial Sequence: Synthetic oligonucleotide
ugcaacucuuggacaauca

SEQ ID NO: 2961170 - RNA, 19 nt, Artificial Sequence
  Description of Artificial Sequence: Synthetic oligonucleotide
gaucauaauuugucucaac

SEQ ID NO: 2961171 - RNA, 19 nt, Artificial Sequence
  Description of Artificial Sequence: Synthetic oligonucleotide
ggcauuuagggcuuugaug

SEQ ID NO: 2961172 - RNA, 19 nt, Artificial Sequence
  Description of Artificial Sequence: Synthetic oligonucleotide
gauggcugguguucuucgg

SEQ ID NO: 2961173 - RNA, 19 nt, Artificial Sequence
  Description of Artificial Sequence: Synthetic oligonucleotide
auguaguaaacaucagcaa

SEQ ID NO: 2961174 - RNA, 19 nt, Artificial Sequence
  Description of Artificial Sequence: Synthetic oligonucleotide
caagaggccaaauguccgc

SEQ ID NO: 2961175 - RNA, 19 nt, Artificial Sequence
  Description of Artificial Sequence: Synthetic oligonucleotide
accacgcuccauucaacgg

SEQ ID NO: 2961176 - RNA, 19 nt, Artificial Sequence
  Description of Artificial Sequence: Synthetic oligonucleotide
guauagauugugcaguugu

SEQ ID NO: 2961177 - RNA, 19 nt, Artificial Sequence
  Description of Artificial Sequence: Synthetic oligonucleotide
uucagcuuggguuccgcac

SEQ ID NO: 2961178 - RNA, 19 nt, Artificial Sequence
  Description of Artificial Sequence: Synthetic oligonucleotide
aacacagauaaaaccugga

SEQ ID NO: 2961179 - RNA, 19 nt, Artificial Sequence
  Description of Artificial Sequence: Synthetic oligonucleotide
cagauaaaaccuggaagag

SEQ ID NO: 2961180 - RNA, 19 nt, Artificial Sequence
  Description of Artificial Sequence: Synthetic oligonucleotide
ggcuucaaaguuuucugag

SEQ ID NO: 2961181 - RNA, 19 nt, Artificial Sequence
  Description of Artificial Sequence: Synthetic oligonucleotide
agggccuccaggcuaaugu

SEQ ID NO: 2961182 - RNA, 19 nt, Artificial Sequence
  Description of Artificial Sequence: Synthetic oligonucleotide
gacaaucaucaccuucagc

SEQ ID NO: 2961183 - RNA, 19 nt, Artificial Sequence
  Description of Artificial Sequence: Synthetic oligonucleotide
uauagauugugcaguuguu

SEQ ID NO: 2961184 - RNA, 19 nt, Artificial Sequence
  Description of Artificial Sequence: Synthetic oligonucleotide
cuucggucaucccucuugg

SEQ ID NO: 2961185 - RNA, 19 nt, Artificial Sequence
  Description of Artificial Sequence: Synthetic oligonucleotide
uugcccuguggcauuuagg

SEQ ID NO: 2961186 - RNA, 19 nt, Artificial Sequence
  Description of Artificial Sequence: Synthetic oligonucleotide
auaaaaccuggaagagggc

SEQ ID NO: 2961187 - RNA, 19 nt, Artificial Sequence
  Description of Artificial Sequence: Synthetic oligonucleotide
gcaguuguuauaaacagga

SEQ ID NO: 2961188 - RNA, 19 nt, Artificial Sequence
  Description of Artificial Sequence: Synthetic oligonucleotide
acucuuggacaaucaucac

SEQ ID NO: 2961189 - RNA, 19 nt, Artificial Sequence
  Description of Artificial Sequence: Synthetic oligonucleotide
uuagggcuuugauggcugg

SEQ ID NO: 2961190 - RNA, 19 nt, Artificial Sequence
  Description of Artificial Sequence: Synthetic oligonucleotide
guacuugucaggcucggca

SEQ ID NO: 2961191 - RNA, 19 nt, Artificial Sequence
  Description of Artificial Sequence: Synthetic oligonucleotide
cuggaagagggccuccagg

SEQ ID NO: 2961192 - RNA, 19 nt, Artificial Sequence
  Description of Artificial Sequence: Synthetic oligonucleotide
aguguaaacagcggcuuca

SEQ ID NO: 2961193 - RNA, 19 nt, Artificial Sequence
  Description of Artificial Sequence: Synthetic oligonucleotide
aaugugugcuugcccugug

SEQ ID NO: 2961194 - RNA, 19 nt, Artificial Sequence
  Description of Artificial Sequence: Synthetic oligonucleotide
aaacaucagcaaugaggga

SEQ ID NO: 2961195 - RNA, 19 nt, Artificial Sequence
  Description of Artificial Sequence: Synthetic oligonucleotide
uggguacaggcuuccaaug

SEQ ID NO: 2961196 - RNA, 19 nt, Artificial Sequence
  Description of Artificial Sequence: Synthetic oligonucleotide
uucaacgggucaagaggcc

SEQ ID NO: 2961197 - RNA, 19 nt, Artificial Sequence
  Description of Artificial Sequence: Synthetic oligonucleotide
uggccagaguguaaacagc

SEQ ID NO: 2961198 - RNA, 19 nt, Artificial Sequence
  Description of Artificial Sequence: Synthetic oligonucleotide
aaacagcggcuucaaaguu

SEQ ID NO: 2961199 - RNA, 19 nt, Artificial Sequence
  Description of Artificial Sequence: Synthetic oligonucleotide
ugaucauaauuugucucaa

SEQ ID NO: 2961200 - RNA, 19 nt, Artificial Sequence
  Description of Artificial Sequence: Synthetic oligonucleotide
gggagucuuggccagagug

SEQ ID NO: 2961201 - RNA, 19 nt, Artificial Sequence
  Description of Artificial Sequence: Synthetic oligonucleotide
auuuagggcuuugauggcu

SEQ ID NO: 2961202 - RNA, 19 nt, Artificial Sequence
  Description of Artificial Sequence: Synthetic oligonucleotide
cugugguauagauugugca

SEQ ID NO: 2961203 - RNA, 19 nt, Artificial Sequence
  Description of Artificial Sequence: Synthetic oligonucleotide
cuuggguuccgcacccuag

SEQ ID NO: 2961204 - RNA, 19 nt, Artificial Sequence
  Description of Artificial Sequence: Synthetic oligonucleotide
cuaaugugugcuugcccug

SEQ ID NO: 2961205 - RNA, 19 nt, Artificial Sequence
  Description of Artificial Sequence: Synthetic oligonucleotide
augugugcuugcccugugg

SEQ ID NO: 2961206 - RNA, 19 nt, Artificial Sequence
  Description of Artificial Sequence: Synthetic oligonucleotide
aggcuaaugugugcuugcc

SEQ ID NO: 2961207 - RNA, 19 nt, Artificial Sequence
  Description of Artificial Sequence: Synthetic oligonucleotide
ucuguuccgggugaugacu

SEQ ID NO: 2961208 - RNA, 19 nt, Artificial Sequence
  Description of Artificial Sequence: Synthetic oligonucleotide
augagggagucuuggccag

SEQ ID NO: 2961209 - RNA, 19 nt, Artificial Sequence
  Description of Artificial Sequence: Synthetic oligonucleotide
uggcauuuagggcuuugau

SEQ ID NO: 2961210 - RNA, 19 nt, Artificial Sequence
  Description of Artificial Sequence: Synthetic oligonucleotide
ucaacgggucaagaggcca

SEQ ID NO: 2961211 - RNA, 19 nt, Artificial Sequence
  Description of Artificial Sequence: Synthetic oligonucleotide
ugugcuugcccuguggcau

SEQ ID NO: 2961212 - RNA, 19 nt, Artificial Sequence
  Description of Artificial Sequence: Synthetic oligonucleotide
caggcuaaugugugcuugc

SEQ ID NO: 2961213 - RNA, 19 nt, Artificial Sequence
  Description of Artificial Sequence: Synthetic oligonucleotide
ugggccaccucuguuccgg

SEQ ID NO: 2961214 - RNA, 19 nt, Artificial Sequence
  Description of Artificial Sequence: Synthetic oligonucleotide
uuggguuccgcacccuagu

SEQ ID NO: 2961215 - RNA, 19 nt, Artificial Sequence
  Description of Artificial Sequence: Synthetic oligonucleotide
uguaaacagcggcuucaaa

SEQ ID NO: 2961216 - RNA, 19 nt, Artificial Sequence
  Description of Artificial Sequence: Synthetic oligonucleotide
ccagaguguaaacagcggc

SEQ ID NO: 2961217 - RNA, 19 nt, Artificial Sequence
  Description of Artificial Sequence: Synthetic oligonucleotide
auagauugugcaguuguua

SEQ ID NO: 2961218 - RNA, 19 nt, Artificial Sequence
  Description of Artificial Sequence: Synthetic oligonucleotide
ggccagaguguaaacagcg

SEQ ID NO: 2961219 - RNA, 19 nt, Artificial Sequence
  Description of Artificial Sequence: Synthetic oligonucleotide
gucucaacucggaaccacg

SEQ ID NO: 2961220 - RNA, 19 nt, Artificial Sequence
  Description of Artificial Sequence: Synthetic oligonucleotide
uguccgcugggccaccucu

SEQ ID NO: 2961221 - RNA, 19 nt, Artificial Sequence
  Description of Artificial Sequence: Synthetic oligonucleotide
aggccaaauguccgcuggg

SEQ ID NO: 2961222 - RNA, 19 nt, Artificial Sequence
  Description of Artificial Sequence: Synthetic oligonucleotide
uucggucaucccucuuggg

SEQ ID NO: 2961223 - RNA, 19 nt, Artificial Sequence
  Description of Artificial Sequence: Synthetic oligonucleotide
acaauguaguaaacaucag

SEQ ID NO: 2961224 - RNA, 19 nt, Artificial Sequence
  Description of Artificial Sequence: Synthetic oligonucleotide
augcaacucuuggacaauc

SEQ ID NO: 2961225 - RNA, 19 nt, Artificial Sequence
  Description of Artificial Sequence: Synthetic oligonucleotide
ugacuaccccucacggggc

SEQ ID NO: 2961226 - RNA, 19 nt, Artificial Sequence
  Description of Artificial Sequence: Synthetic oligonucleotide
caaugaucauaauuugucu

SEQ ID NO: 2961227 - RNA, 19 nt, Artificial Sequence
  Description of Artificial Sequence: Synthetic oligonucleotide
ugguauagauugugcaguu

SEQ ID NO: 2961228 - RNA, 19 nt, Artificial Sequence
  Description of Artificial Sequence: Synthetic oligonucleotide
ucccucuuggguacaggcu

SEQ ID NO: 2961229 - RNA, 19 nt, Artificial Sequence
  Description of Artificial Sequence: Synthetic oligonucleotide
uaaugugugcuugcccugu

SEQ ID NO: 2961230 - RNA, 19 nt, Artificial Sequence
  Description of Artificial Sequence: Synthetic oligonucleotide
auggcugguguucuucggu

SEQ ID NO: 2961231 - RNA, 19 nt, Artificial Sequence
  Description of Artificial Sequence: Synthetic oligonucleotide
gacuaccccucacggggcg

SEQ ID NO: 2961232 - RNA, 19 nt, Artificial Sequence
  Description of Artificial Sequence: Synthetic oligonucleotide
cuugcccuguggcauuuag

SEQ ID NO: 2961233 - RNA, 19 nt, Artificial Sequence
  Description of Artificial Sequence: Synthetic oligonucleotide
aaccuggaagagggccucc

SEQ ID NO: 2961234 - RNA, 19 nt, Artificial Sequence
  Description of Artificial Sequence: Synthetic oligonucleotide
agauugugcaguuguuaua

SEQ ID NO: 2961235 - RNA, 19 nt, Artificial Sequence
  Description of Artificial Sequence: Synthetic oligonucleotide
gaagagggccuccaggcua

SEQ ID NO: 2961236 - RNA, 19 nt, Artificial Sequence
  Description of Artificial Sequence: Synthetic oligonucleotide
ugucaggcucggcagcacu

SEQ ID NO: 2961237 - RNA, 19 nt, Artificial Sequence
  Description of Artificial Sequence: Synthetic oligonucleotide
uuccgcacccuagucaugu

SEQ ID NO: 2961238 - RNA, 19 nt, Artificial Sequence
  Description of Artificial Sequence: Synthetic oligonucleotide
aaugcaacucuuggacaau

SEQ ID NO: 2961239 - RNA, 19 nt, Artificial Sequence
  Description of Artificial Sequence: Synthetic oligonucleotide
aaauguccgcugggccacc

SEQ ID NO: 2961240 - RNA, 19 nt, Artificial Sequence
  Description of Artificial Sequence: Synthetic oligonucleotide
ugucucaacucggaaccac

SEQ ID NO: 2961241 - RNA, 19 nt, Artificial Sequence
  Description of Artificial Sequence: Synthetic oligonucleotide
ccauucaacgggucaagag

SEQ ID NO: 2961242 - RNA, 19 nt, Artificial Sequence
  Description of Artificial Sequence: Synthetic oligonucleotide
aacagcggcuucaaaguuu

SEQ ID NO: 2961243 - RNA, 19 nt, Artificial Sequence
  Description of Artificial Sequence: Synthetic oligonucleotide
uccgggugaugacuacccc

SEQ ID NO: 2961244 - RNA, 19 nt, Artificial Sequence
  Description of Artificial Sequence: Synthetic oligonucleotide
ucacugugguauagauugu

SEQ ID NO: 2961245 - RNA, 19 nt, Artificial Sequence
  Description of Artificial Sequence: Synthetic oligonucleotide
cacugugguauagauugug

SEQ ID NO: 2961246 - RNA, 19 nt, Artificial Sequence
  Description of Artificial Sequence: Synthetic oligonucleotide
ucuuggccagaguguaaac

SEQ ID NO: 2961247 - RNA, 19 nt, Artificial Sequence
  Description of Artificial Sequence: Synthetic oligonucleotide
aacucggaaccacgcucca

SEQ ID NO: 2961248 - RNA, 19 nt, Artificial Sequence
  Description of Artificial Sequence: Synthetic oligonucleotide
acaucagcaaugagggagu

SEQ ID NO: 2961249 - RNA, 19 nt, Artificial Sequence
  Description of Artificial Sequence: Synthetic oligonucleotide
uccauucaacgggucaaga

SEQ ID NO: 2961250 - RNA, 19 nt, Artificial Sequence
  Description of Artificial Sequence: Synthetic oligonucleotide
gcggcuucaaaguuuucug

SEQ ID NO: 2961251 - RNA, 19 nt, Artificial Sequence
  Description of Artificial Sequence: Synthetic oligonucleotide
ccacgcuccauucaacggg

SEQ ID NO: 2961252 - RNA, 19 nt, Artificial Sequence
  Description of Artificial Sequence: Synthetic oligonucleotide
agggcuuugauggcuggug

SEQ ID NO: 2961253 - RNA, 19 nt, Artificial Sequence
  Description of Artificial Sequence: Synthetic oligonucleotide
agaguguaaacagcggcuu

SEQ ID NO: 2961254 - RNA, 19 nt, Artificial Sequence
  Description of Artificial Sequence: Synthetic oligonucleotide
auguacuugucaggcucgg

SEQ ID NO: 2961255 - RNA, 19 nt, Artificial Sequence
  Description of Artificial Sequence: Synthetic oligonucleotide
agaggccaaauguccgcug

SEQ ID NO: 2961256 - RNA, 19 nt, Artificial Sequence
  Description of Artificial Sequence: Synthetic oligonucleotide
gcuaaugugugcuugcccu

SEQ ID NO: 2961257 - RNA, 19 nt, Artificial Sequence
  Description of Artificial Sequence: Synthetic oligonucleotide
gagggagucuuggccagag

SEQ ID NO: 2961258 - RNA, 19 nt, Artificial Sequence
  Description of Artificial Sequence: Synthetic oligonucleotide
uugauggcugguguucuuc

SEQ ID NO: 2961259 - RNA, 19 nt, Artificial Sequence
  Description of Artificial Sequence: Synthetic oligonucleotide
aacaggaaacacagauaaa

SEQ ID NO: 2961260 - RNA, 19 nt, Artificial Sequence
  Description of Artificial Sequence: Synthetic oligonucleotide
cuuggccagaguguaaaca

SEQ ID NO: 2961261 - RNA, 19 nt, Artificial Sequence
  Description of Artificial Sequence: Synthetic oligonucleotide
uguacuugucaggcucggc

SEQ ID NO: 2961262 - RNA, 19 nt, Artificial Sequence
  Description of Artificial Sequence: Synthetic oligonucleotide
uggcugguguucuucgguc

SEQ ID NO: 2961263 - RNA, 19 nt, Artificial Sequence
  Description of Artificial Sequence: Synthetic oligonucleotide
uguuccgggugaugacuac

SEQ ID NO: 2961264 - RNA, 19 nt, Artificial Sequence
  Description of Artificial Sequence: Synthetic oligonucleotide
auugugcaguuguuauaaa

SEQ ID NO: 2961265 - RNA, 19 nt, Artificial Sequence
  Description of Artificial Sequence: Synthetic oligonucleotide
ucggaaccacgcuccauuc

SEQ ID NO: 2961266 - RNA, 19 nt, Artificial Sequence
  Description of Artificial Sequence: Synthetic oligonucleotide
gggucaagaggccaaaugu

SEQ ID NO: 2961267 - RNA, 19 nt, Artificial Sequence
  Description of Artificial Sequence: Synthetic oligonucleotide
gugguauagauugugcagu

SEQ ID NO: 2961268 - RNA, 19 nt, Artificial Sequence
  Description of Artificial Sequence: Synthetic oligonucleotide
guguucuucggucaucccu

SEQ ID NO: 2961269 - RNA, 19 nt, Artificial Sequence
  Description of Artificial Sequence: Synthetic oligonucleotide
uguggcauuuagggcuuug

SEQ ID NO: 2961270 - RNA, 19 nt, Artificial Sequence
  Description of Artificial Sequence: Synthetic oligonucleotide
ucaucaccuucagcuuggg

SEQ ID NO: 2961271 - RNA, 19 nt, Artificial Sequence
  Description of Artificial Sequence: Synthetic oligonucleotide
ggacaaucaucaccuucag

SEQ ID NO: 2961272 - RNA, 19 nt, Artificial Sequence
  Description of Artificial Sequence: Synthetic oligonucleotide
ggcuaaugugugcuugccc

SEQ ID NO: 2961273 - RNA, 19 nt, Artificial Sequence
  Description of Artificial Sequence: Synthetic oligonucleotide
cucuguuccgggugaugac

SEQ ID NO: 2961274 - RNA, 19 nt, Artificial Sequence
  Description of Artificial Sequence: Synthetic oligonucleotide
cagaguguaaacagcggcu

SEQ ID NO: 2961275 - RNA, 19 nt, Artificial Sequence
  Description of Artificial Sequence: Synthetic oligonucleotide
gcaaugagggagucuuggc

SEQ ID NO: 2961276 - RNA, 19 nt, Artificial Sequence
  Description of Artificial Sequence: Synthetic oligonucleotide
ucaggcucggcagcacuca

SEQ ID NO: 2961277 - RNA, 19 nt, Artificial Sequence
  Description of Artificial Sequence: Synthetic oligonucleotide
gccaaauguccgcugggcc

SEQ ID NO: 2961278 - RNA, 19 nt, Artificial Sequence
  Description of Artificial Sequence: Synthetic oligonucleotide
uggguuccgcacccuaguc

SEQ ID NO: 2961279 - RNA, 19 nt, Artificial Sequence
  Description of Artificial Sequence: Synthetic oligonucleotide
acaggcuuccaaugaucau

SEQ ID NO: 2961280 - RNA, 19 nt, Artificial Sequence
  Description of Artificial Sequence: Synthetic oligonucleotide
ggaaccacgcuccauucaa

SEQ ID NO: 2961281 - RNA, 19 nt, Artificial Sequence
  Description of Artificial Sequence: Synthetic oligonucleotide
ggcucggcagcacucauca

SEQ ID NO: 2961282 - RNA, 19 nt, Artificial Sequence
  Description of Artificial Sequence: Synthetic oligonucleotide
guuccgggugaugacuacc

SEQ ID NO: 2961283 - RNA, 19 nt, Artificial Sequence
  Description of Artificial Sequence: Synthetic oligonucleotide
uuugauggcugguguucuu

SEQ ID NO: 2961284 - RNA, 19 nt, Artificial Sequence
  Description of Artificial Sequence: Synthetic oligonucleotide
ggucaagaggccaaauguc

SEQ ID NO: 2961285 - RNA, 19 nt, Artificial Sequence
  Description of Artificial Sequence: Synthetic oligonucleotide
uugucucaacucggaacca

SEQ ID NO: 2961286 - RNA, 19 nt, Artificial Sequence
  Description of Artificial Sequence: Synthetic oligonucleotide
guacaggcuuccaaugauc

SEQ ID NO: 2961287 - RNA, 19 nt, Artificial Sequence
  Description of Artificial Sequence: Synthetic oligonucleotide
cuccauucaacgggucaag

SEQ ID NO: 2961288 - RNA, 19 nt, Artificial Sequence
  Description of Artificial Sequence: Synthetic oligonucleotide
ccaacaauguaguaaacau

SEQ ID NO: 2961289 - RNA, 19 nt, Artificial Sequence
  Description of Artificial Sequence: Synthetic oligonucleotide
ggugaugacuaccccucac

SEQ ID NO: 2961290 - RNA, 19 nt, Artificial Sequence
  Description of Artificial Sequence: Synthetic oligonucleotide
gguauagauugugcaguug

SEQ ID NO: 2961291 - RNA, 19 nt, Artificial Sequence
  Description of Artificial Sequence: Synthetic oligonucleotide
cucggcagcacucaucacu

SEQ ID NO: 2961292 - RNA, 19 nt, Artificial Sequence
  Description of Artificial Sequence: Synthetic oligonucleotide
cagcuuggguuccgcaccc

SEQ ID NO: 2961293 - RNA, 19 nt, Artificial Sequence
  Description of Artificial Sequence: Synthetic oligonucleotide
aggcuuccaaugaucauaa

SEQ ID NO: 2961294 - RNA, 19 nt, Artificial Sequence
  Description of Artificial Sequence: Synthetic oligonucleotide
uccgcugggccaccucugu

SEQ ID NO: 2961295 - RNA, 19 nt, Artificial Sequence
  Description of Artificial Sequence: Synthetic oligonucleotide
aagagggccuccaggcuaa

SEQ ID NO: 2961296 - RNA, 19 nt, Artificial Sequence
  Description of Artificial Sequence: Synthetic oligonucleotide
gagucuuggccagagugua

SEQ ID NO: 2961297 - RNA, 19 nt, Artificial Sequence
  Description of Artificial Sequence: Synthetic oligonucleotide
caggcuuccaaugaucaua

SEQ ID NO: 2961298 - RNA, 19 nt, Artificial Sequence
  Description of Artificial Sequence: Synthetic oligonucleotide
gcuuccaaugaucauaauu

SEQ ID NO: 2961299 - RNA, 19 nt, Artificial Sequence
  Description of Artificial Sequence: Synthetic oligonucleotide
aucagcaaugagggagucu

SEQ ID NO: 2961300 - RNA, 19 nt, Artificial Sequence
  Description of Artificial Sequence: Synthetic oligonucleotide
gaaccacgcuccauucaac

SEQ ID NO: 2961301 - RNA, 19 nt, Artificial Sequence
  Description of Artificial Sequence: Synthetic oligonucleotide
cacccuagucauguacuug

SEQ ID NO: 2961302 - RNA, 19 nt, Artificial Sequence
  Description of Artificial Sequence: Synthetic oligonucleotide
caguuguuauaaacaggaa

SEQ ID NO: 2961303 - RNA, 19 nt, Artificial Sequence
  Description of Artificial Sequence: Synthetic oligonucleotide
cucuuggguacaggcuucc

SEQ ID NO: 2961304 - RNA, 19 nt, Artificial Sequence
  Description of Artificial Sequence: Synthetic oligonucleotide
acagcggcuucaaaguuuu

SEQ ID NO: 2961305 - RNA, 19 nt, Artificial Sequence
  Description of Artificial Sequence: Synthetic oligonucleotide
aacgggucaagaggccaaa

SEQ ID NO: 2961306 - RNA, 19 nt, Artificial Sequence
  Description of Artificial Sequence: Synthetic oligonucleotide
ggguacaggcuuccaauga

SEQ ID NO: 2961307 - RNA, 19 nt, Artificial Sequence
  Description of Artificial Sequence: Synthetic oligonucleotide
ccaaauguccgcugggcca

SEQ ID NO: 2961308 - RNA, 19 nt, Artificial Sequence
  Description of Artificial Sequence: Synthetic oligonucleotide
gccagaguguaaacagcgg

SEQ ID NO: 2961309 - RNA, 19 nt, Artificial Sequence
  Description of Artificial Sequence: Synthetic oligonucleotide
ucuuggguacaggcuucca

SEQ ID NO: 2961310 - RNA, 19 nt, Artificial Sequence
  Description of Artificial Sequence: Synthetic oligonucleotide
aauguccgcugggccaccu

SEQ ID NO: 2961311 - RNA, 19 nt, Artificial Sequence
  Description of Artificial Sequence: Synthetic oligonucleotide
cagcaaugagggagucuug

SEQ ID NO: 2961312 - RNA, 19 nt, Artificial Sequence
  Description of Artificial Sequence: Synthetic oligonucleotide
uccaggcuaaugugugcuu

SEQ ID NO: 2961313 - RNA, 19 nt, Artificial Sequence
  Description of Artificial Sequence: Synthetic oligonucleotide
cucaucacugugguauaga

SEQ ID NO: 2961314 - RNA, 19 nt, Artificial Sequence
  Description of Artificial Sequence: Synthetic oligonucleotide
caucccucuuggguacagg

SEQ ID NO: 2961315 - RNA, 19 nt, Artificial Sequence
  Description of Artificial Sequence: Synthetic oligonucleotide
cuugucaggcucggcagca

SEQ ID NO: 2961316 - RNA, 19 nt, Artificial Sequence
  Description of Artificial Sequence: Synthetic oligonucleotide
auguccgcugggccaccuc

SEQ ID NO: 2961317 - RNA, 19 nt, Artificial Sequence
  Description of Artificial Sequence: Synthetic oligonucleotide
gcugggccaccucuguucc

SEQ ID NO: 2961318 - RNA, 19 nt, Artificial Sequence
  Description of Artificial Sequence: Synthetic oligonucleotide
uagggcuuugauggcuggu

SEQ ID NO: 2961319 - RNA, 19 nt, Artificial Sequence
  Description of Artificial Sequence: Synthetic oligonucleotide
gcuuugauggcugguguuc

SEQ ID NO: 2961320 - RNA, 19 nt, Artificial Sequence
  Description of Artificial Sequence: Synthetic oligonucleotide
gccaccucuguuccgggug

SEQ ID NO: 2961321 - RNA, 19 nt, Artificial Sequence
  Description of Artificial Sequence: Synthetic oligonucleotide
gcuucaaaguuuucugagu

SEQ ID NO: 2961322 - RNA, 19 nt, Artificial Sequence
  Description of Artificial Sequence: Synthetic oligonucleotide
cuucagcuuggguuccgca

SEQ ID NO: 2961323 - RNA, 19 nt, Artificial Sequence
  Description of Artificial Sequence: Synthetic oligonucleotide
gcacucaucacugugguau

SEQ ID NO: 2961324 - RNA, 19 nt, Artificial Sequence
  Description of Artificial Sequence: Synthetic oligonucleotide
guggcauuuagggcuuuga

SEQ ID NO: 2961325 - RNA, 19 nt, Artificial Sequence
  Description of Artificial Sequence: Synthetic oligonucleotide
cccaacaauguaguaaaca

SEQ ID NO: 2961326 - RNA, 19 nt, Artificial Sequence
  Description of Artificial Sequence: Synthetic oligonucleotide
accuucagcuuggguuccg

SEQ ID NO: 2961327 - RNA, 19 nt, Artificial Sequence
  Description of Artificial Sequence: Synthetic oligonucleotide
cucacggggcgagguaccc

SEQ ID NO: 2961328 - RNA, 19 nt, Artificial Sequence
  Description of Artificial Sequence: Synthetic oligonucleotide
gguguucuucggucauccc

SEQ ID NO: 2961329 - RNA, 19 nt, Artificial Sequence
  Description of Artificial Sequence: Synthetic oligonucleotide
cugggccaccucuguuccg

SEQ ID NO: 2961330 - RNA, 19 nt, Artificial Sequence
  Description of Artificial Sequence: Synthetic oligonucleotide
caacgggucaagaggccaa

SEQ ID NO: 2961331 - RNA, 19 nt, Artificial Sequence
  Description of Artificial Sequence: Synthetic oligonucleotide
ucacggggcgagguacccc

SEQ ID NO: 2961332 - RNA, 19 nt, Artificial Sequence
  Description of Artificial Sequence: Synthetic oligonucleotide
gggccuccaggcuaaugug

SEQ ID NO: 2961333 - RNA, 19 nt, Artificial Sequence
  Description of Artificial Sequence: Synthetic oligonucleotide
ccuagucauguacuuguca

SEQ ID NO: 2961334 - RNA, 19 nt, Artificial Sequence
  Description of Artificial Sequence: Synthetic oligonucleotide
ggccaaauguccgcugggc

SEQ ID NO: 2961335 - RNA, 19 nt, Artificial Sequence
  Description of Artificial Sequence: Synthetic oligonucleotide
ugagggagucuuggccaga

SEQ ID NO: 2961336 - RNA, 19 nt, Artificial Sequence
  Description of Artificial Sequence: Synthetic oligonucleotide
cuaccccucacggggcgag

SEQ ID NO: 2961337 - RNA, 19 nt, Artificial Sequence
  Description of Artificial Sequence: Synthetic oligonucleotide
ggguuccgcacccuaguca

SEQ ID NO: 2961338 - RNA, 19 nt, Artificial Sequence
  Description of Artificial Sequence: Synthetic oligonucleotide
gguacaggcuuccaaugau

SEQ ID NO: 2961339 - RNA, 19 nt, Artificial Sequence
  Description of Artificial Sequence: Synthetic oligonucleotide
agggagucuuggccagagu

SEQ ID NO: 2961340 - RNA, 19 nt, Artificial Sequence
  Description of Artificial Sequence: Synthetic oligonucleotide
caucagcaaugagggaguc

SEQ ID NO: 2961341 - RNA, 19 nt, Artificial Sequence
  Description of Artificial Sequence: Synthetic oligonucleotide
aggcucggcagcacucauc

SEQ ID NO: 2961342 - RNA, 19 nt, Artificial Sequence
  Description of Artificial Sequence: Synthetic oligonucleotide
cuguuccgggugaugacua

SEQ ID NO: 2961343 - RNA, 19 nt, Artificial Sequence
  Description of Artificial Sequence: Synthetic oligonucleotide
uucuucggucaucccucuu

SEQ ID NO: 2961344 - RNA, 19 nt, Artificial Sequence
  Description of Artificial Sequence: Synthetic oligonucleotide
ccuccaggcuaaugugugc

SEQ ID NO: 2961345 - RNA, 19 nt, Artificial Sequence
  Description of Artificial Sequence: Synthetic oligonucleotide
gguuccgcacccuagucau

SEQ ID NO: 2961346 - RNA, 19 nt, Artificial Sequence
  Description of Artificial Sequence: Synthetic oligonucleotide
caccuucagcuuggguucc

SEQ ID NO: 2961347 - RNA, 19 nt, Artificial Sequence
  Description of Artificial Sequence: Synthetic oligonucleotide
ggcugguguucuucgguca

SEQ ID NO: 2961348 - RNA, 19 nt, Artificial Sequence
  Description of Artificial Sequence: Synthetic oligonucleotide
ccaggcuaaugugugcuug

SEQ ID NO: 2961349 - RNA, 19 nt, Artificial Sequence
  Description of Artificial Sequence: Synthetic oligonucleotide
accuggaagagggccucca

SEQ ID NO: 2961350 - RNA, 19 nt, Artificial Sequence
  Description of Artificial Sequence: Synthetic oligonucleotide
gccuccaggcuaaugugug

SEQ ID NO: 2961351 - RNA, 19 nt, Artificial Sequence
  Description of Artificial Sequence: Synthetic oligonucleotide
uugucaggcucggcagcac

SEQ ID NO: 2961352 - RNA, 19 nt, Artificial Sequence
  Description of Artificial Sequence: Synthetic oligonucleotide
guguaaacagcggcuucaa

SEQ ID NO: 2961353 - RNA, 19 nt, Artificial Sequence
  Description of Artificial Sequence: Synthetic oligonucleotide
cucaacucggaaccacgcu

SEQ ID NO: 2961354 - RNA, 19 nt, Artificial Sequence
  Description of Artificial Sequence: Synthetic oligonucleotide
cuuugauggcugguguucu

SEQ ID NO: 2961355 - RNA, 19 nt, Artificial Sequence
  Description of Artificial Sequence: Synthetic oligonucleotide
gucaggcucggcagcacuc

SEQ ID NO: 2961356 - RNA, 19 nt, Artificial Sequence
  Description of Artificial Sequence: Synthetic oligonucleotide
cacgcuccauucaacgggu

SEQ ID NO: 2961357 - RNA, 19 nt, Artificial Sequence
  Description of Artificial Sequence: Synthetic oligonucleotide
cugguguucuucggucauc

SEQ ID NO: 2961358 - RNA, 19 nt, Artificial Sequence
  Description of Artificial Sequence: Synthetic oligonucleotide
accucuguuccgggugaug

SEQ ID NO: 2961359 - RNA, 19 nt, Artificial Sequence
  Description of Artificial Sequence: Synthetic oligonucleotide
gagggccuccaggcuaaug

SEQ ID NO: 2961360 - RNA, 19 nt, Artificial Sequence
  Description of Artificial Sequence: Synthetic oligonucleotide
uaccccucacggggcgagg

SEQ ID NO: 2961361 - RNA, 19 nt, Artificial Sequence
  Description of Artificial Sequence: Synthetic oligonucleotide
caucacugugguauagauu

SEQ ID NO: 2961362 - RNA, 19 nt, Artificial Sequence
  Description of Artificial Sequence: Synthetic oligonucleotide
cgggugaugacuaccccuc

SEQ ID NO: 2961363 - RNA, 19 nt, Artificial Sequence
  Description of Artificial Sequence: Synthetic oligonucleotide
cucggaaccacgcuccauu

SEQ ID NO: 2961364 - RNA, 19 nt, Artificial Sequence
  Description of Artificial Sequence: Synthetic oligonucleotide
gcuccauucaacgggucaa

SEQ ID NO: 2961365 - RNA, 19 nt, Artificial Sequence
  Description of Artificial Sequence: Synthetic oligonucleotide
cgggucaagaggccaaaug

SEQ ID NO: 2961366 - RNA, 19 nt, Artificial Sequence
  Description of Artificial Sequence: Synthetic oligonucleotide
cagcacucaucacuguggu

SEQ ID NO: 2961367 - RNA, 19 nt, Artificial Sequence
  Description of Artificial Sequence: Synthetic oligonucleotide
cuccaggcuaaugugugcu

SEQ ID NO: 2961368 - RNA, 19 nt, Artificial Sequence
  Description of Artificial Sequence: Synthetic oligonucleotide
ccucuuggguacaggcuuc

SEQ ID NO: 2961369 - RNA, 19 nt, Artificial Sequence
  Description of Artificial Sequence: Synthetic oligonucleotide
agucuuggccagaguguaa

SEQ ID NO: 2961370 - RNA, 19 nt, Artificial Sequence
  Description of Artificial Sequence: Synthetic oligonucleotide
guucuucggucaucccucu

SEQ ID NO: 2961371 - RNA, 19 nt, Artificial Sequence
  Description of Artificial Sequence: Synthetic oligonucleotide
ggagucuuggccagagugu

SEQ ID NO: 2961372 - RNA, 19 nt, Artificial Sequence
  Description of Artificial Sequence: Synthetic oligonucleotide
acuaccccucacggggcga

SEQ ID NO: 2961373 - RNA, 19 nt, Artificial Sequence
  Description of Artificial Sequence: Synthetic oligonucleotide
ccgcacccuagucauguac

SEQ ID NO: 2961374 - RNA, 19 nt, Artificial Sequence
  Description of Artificial Sequence: Synthetic oligonucleotide
uccgcacccuagucaugua

SEQ ID NO: 2961375 - RNA, 19 nt, Artificial Sequence
  Description of Artificial Sequence: Synthetic oligonucleotide
acgcuccauucaacggguc

SEQ ID NO: 2961376 - RNA, 19 nt, Artificial Sequence
  Description of Artificial Sequence: Synthetic oligonucleotide
ccucuguuccgggugauga

SEQ ID NO: 2961377 - RNA, 19 nt, Artificial Sequence
  Description of Artificial Sequence: Synthetic oligonucleotide
ccucacggggcgagguacc

SEQ ID NO: 2961378 - RNA, 19 nt, Artificial Sequence
  Description of Artificial Sequence: Synthetic oligonucleotide
acucggaaccacgcuccau

SEQ ID NO: 2961379 - RNA, 19 nt, Artificial Sequence
  Description of Artificial Sequence: Synthetic oligonucleotide
guuccgcacccuagucaug

SEQ ID NO: 2961380 - RNA, 19 nt, Artificial Sequence
  Description of Artificial Sequence: Synthetic oligonucleotide
accccucacggggcgaggu

SEQ ID NO: 2961381 - RNA, 19 nt, Artificial Sequence
  Description of Artificial Sequence: Synthetic oligonucleotide
ccccaacaauguaguaaac

SEQ ID NO: 2961382 - RNA, 19 nt, Artificial Sequence
  Description of Artificial Sequence: Synthetic oligonucleotide
cccuagucauguacuuguc

SEQ ID NO: 2961383 - RNA, 19 nt, Artificial Sequence
  Description of Artificial Sequence: Synthetic oligonucleotide
gggugaugacuaccccuca

SEQ ID NO: 2961384 - RNA, 19 nt, Artificial Sequence
  Description of Artificial Sequence: Synthetic oligonucleotide
ugcuugcccuguggcauuu

SEQ ID NO: 2961385 - RNA, 19 nt, Artificial Sequence
  Description of Artificial Sequence: Synthetic oligonucleotide
ggaagagggccuccaggcu

SEQ ID NO: 2961386 - RNA, 19 nt, Artificial Sequence
  Description of Artificial Sequence: Synthetic oligonucleotide
acgggucaagaggccaaau

SEQ ID NO: 2961387 - RNA, 19 nt, Artificial Sequence
  Description of Artificial Sequence: Synthetic oligonucleotide
gggccaccucuguuccggg

SEQ ID NO: 2961388 - RNA, 19 nt, Artificial Sequence
  Description of Artificial Sequence: Synthetic oligonucleotide
gggcuuugauggcuggugu

SEQ ID NO: 2961389 - RNA, 19 nt, Artificial Sequence
  Description of Artificial Sequence: Synthetic oligonucleotide
ccuucagcuuggguuccgc

SEQ ID NO: 2961390 - RNA, 19 nt, Artificial Sequence
  Description of Artificial Sequence: Synthetic oligonucleotide
cgcugggccaccucuguuc

SEQ ID NO: 2961391 - RNA, 19 nt, Artificial Sequence
  Description of Artificial Sequence: Synthetic oligonucleotide
cggcuucaaaguuuucuga

SEQ ID NO: 2961392 - RNA, 19 nt, Artificial Sequence
  Description of Artificial Sequence: Synthetic oligonucleotide
cagcggcuucaaaguuuuc

SEQ ID NO: 2961393 - RNA, 19 nt, Artificial Sequence
  Description of Artificial Sequence: Synthetic oligonucleotide
agcuuggguuccgcacccu

SEQ ID NO: 2961394 - RNA, 19 nt, Artificial Sequence
  Description of Artificial Sequence: Synthetic oligonucleotide
cccucacggggcgagguac

SEQ ID NO: 2961395 - RNA, 19 nt, Artificial Sequence
  Description of Artificial Sequence: Synthetic oligonucleotide
cuuggacaaucaucaccuu

SEQ ID NO: 2961396 - RNA, 19 nt, Artificial Sequence
  Description of Artificial Sequence: Synthetic oligonucleotide
gcuuggguuccgcacccua

SEQ ID NO: 2961397 - RNA, 19 nt, Artificial Sequence
  Description of Artificial Sequence: Synthetic oligonucleotide
cggucaucccucuugggua

SEQ ID NO: 2961398 - RNA, 19 nt, Artificial Sequence
  Description of Artificial Sequence: Synthetic oligonucleotide
ggcuuugauggcugguguu

SEQ ID NO: 2961399 - RNA, 19 nt, Artificial Sequence
  Description of Artificial Sequence: Synthetic oligonucleotide
gcugguguucuucggucau

SEQ ID NO: 2961400 - RNA, 19 nt, Artificial Sequence
  Description of Artificial Sequence: Synthetic oligonucleotide
ccaccucuguuccggguga

SEQ ID NO: 2961401 - RNA, 19 nt, Artificial Sequence
  Description of Artificial Sequence: Synthetic oligonucleotide
cgcuccauucaacggguca

SEQ ID NO: 2961402 - RNA, 19 nt, Artificial Sequence
  Description of Artificial Sequence: Synthetic oligonucleotide
ccgggugaugacuaccccu

SEQ ID NO: 2961403 - RNA, 19 nt, Artificial Sequence
  Description of Artificial Sequence: Synthetic oligonucleotide
ggccuccaggcuaaugugu

SEQ ID NO: 2961404 - RNA, 19 nt, Artificial Sequence
  Description of Artificial Sequence: Synthetic oligonucleotide
cccucuuggguacaggcuu

SEQ ID NO: 2961405 - RNA, 19 nt, Artificial Sequence
  Description of Artificial Sequence: Synthetic oligonucleotide
gcacccuagucauguacuu

SEQ ID NO: 2961406 - RNA, 19 nt, Artificial Sequence
  Description of Artificial Sequence: Synthetic oligonucleotide
gcucggcagcacucaucac

SEQ ID NO: 2961407 - RNA, 19 nt, Artificial Sequence
  Description of Artificial Sequence: Synthetic oligonucleotide
cgcacccuagucauguacu

SEQ ID NO: 2961408 - RNA, 19 nt, Artificial Sequence
  Description of Artificial Sequence: Synthetic oligonucleotide
gugcuugcccuguggcauu

SEQ ID NO: 2961409 - RNA, 19 nt, Artificial Sequence
  Description of Artificial Sequence: Synthetic oligonucleotide
agagggccuccaggcuaau

SEQ ID NO: 2961410 - RNA, 19 nt, Artificial Sequence
  Description of Artificial Sequence: Synthetic oligonucleotide
cggaaccacgcuccauuca

SEQ ID NO: 2961411 - RNA, 19 nt, Artificial Sequence
  Description of Artificial Sequence: Synthetic oligonucleotide
ggccaccucuguuccgggu

SEQ ID NO: 2961412 - RNA, 19 nt, Artificial Sequence
  Description of Artificial Sequence: Synthetic oligonucleotide
ccuguggcauuuagggcuu

SEQ ID NO: 2961413 - RNA, 19 nt, Artificial Sequence
  Description of Artificial Sequence: Synthetic oligonucleotide
caggcucggcagcacucau

SEQ ID NO: 2961414 - RNA, 19 nt, Artificial Sequence
  Description of Artificial Sequence: Synthetic oligonucleotide
ggcuuccaaugaucauaau

SEQ ID NO: 2961415 - RNA, 19 nt, Artificial Sequence
  Description of Artificial Sequence: Synthetic oligonucleotide
caccucuguuccgggugau

SEQ ID NO: 2961416 - RNA, 19 nt, Artificial Sequence
  Description of Artificial Sequence: Synthetic oligonucleotide
gcuugcccuguggcauuua

SEQ ID NO: 2961417 - RNA, 19 nt, Artificial Sequence
  Description of Artificial Sequence: Synthetic oligonucleotide
ccccucacggggcgaggua

SEQ ID NO: 2961418 - RNA, 19 nt, Artificial Sequence
  Description of Artificial Sequence: Synthetic oligonucleotide
cuguggcauuuagggcuuu

SEQ ID NO: 2961419 - RNA, 19 nt, Artificial Sequence
  Description of Artificial Sequence: Synthetic oligonucleotide
cggcagcacucaucacugu

SEQ ID NO: 2961420 - RNA, 19 nt, Artificial Sequence
  Description of Artificial Sequence: Synthetic oligonucleotide
ccgcugggccaccucuguu

SEQ ID NO: 2961421 - RNA, 19 nt, Artificial Sequence
  Description of Artificial Sequence: Synthetic oligonucleotide
aauccuaagagacugucac

SEQ ID NO: 2961422 - RNA, 19 nt, Artificial Sequence
  Description of Artificial Sequence: Synthetic oligonucleotide
auuuucaccaggcggaucc

SEQ ID NO: 2961423 - RNA, 19 nt, Artificial Sequence
  Description of Artificial Sequence: Synthetic oligonucleotide
uuugagaauccuaagagac

SEQ ID NO: 2961424 - RNA, 19 nt, Artificial Sequence
  Description of Artificial Sequence: Synthetic oligonucleotide
gucaaaguagcucucaugg

SEQ ID NO: 2961425 - RNA, 19 nt, Artificial Sequence
  Description of Artificial Sequence: Synthetic oligonucleotide
caaaauuuucaccaggcgg

SEQ ID NO: 2961426 - RNA, 19 nt, Artificial Sequence
  Description of Artificial Sequence: Synthetic oligonucleotide
agaacugaaacacagccug

SEQ ID NO: 2961427 - RNA, 19 nt, Artificial Sequence
  Description of Artificial Sequence: Synthetic oligonucleotide
agcauuauggucucgcugg

SEQ ID NO: 2961428 - RNA, 19 nt, Artificial Sequence
  Description of Artificial Sequence: Synthetic oligonucleotide
uuggauuugucuuuuacug

SEQ ID NO: 2961429 - RNA, 19 nt, Artificial Sequence
  Description of Artificial Sequence: Synthetic oligonucleotide
uucugcaaaauuuucacca

SEQ ID NO: 2961430 - RNA, 19 nt, Artificial Sequence
  Description of Artificial Sequence: Synthetic oligonucleotide
aagagacugucacuggccc

SEQ ID NO: 2961431 - RNA, 19 nt, Artificial Sequence
  Description of Artificial Sequence: Synthetic oligonucleotide
aguagaucuucucagucac

SEQ ID NO: 2961432 - RNA, 19 nt, Artificial Sequence
  Description of Artificial Sequence: Synthetic oligonucleotide
ucagguguuauuucagugg

SEQ ID NO: 2961433 - RNA, 19 nt, Artificial Sequence
  Description of Artificial Sequence: Synthetic oligonucleotide
aaaauuuucaccaggcgga

SEQ ID NO: 2961434 - RNA, 19 nt, Artificial Sequence
  Description of Artificial Sequence: Synthetic oligonucleotide
ucagucaccguccuaaccc

SEQ ID NO: 2961435 - RNA, 19 nt, Artificial Sequence
  Description of Artificial Sequence: Synthetic oligonucleotide
ugcaaaauuuucaccaggc

SEQ ID NO: 2961436 - RNA, 19 nt, Artificial Sequence
  Description of Artificial Sequence: Synthetic oligonucleotide
gauagacagaccuuucugc

SEQ ID NO: 2961437 - RNA, 19 nt, Artificial Sequence
  Description of Artificial Sequence: Synthetic oligonucleotide
uauuaguugacgaugccau

SEQ ID NO: 2961438 - RNA, 19 nt, Artificial Sequence
  Description of Artificial Sequence: Synthetic oligonucleotide
cagugugugaacuggaucc

SEQ ID NO: 2961439 - RNA, 19 nt, Artificial Sequence
  Description of Artificial Sequence: Synthetic oligonucleotide
gguaguaucaguguguccg

SEQ ID NO: 2961440 - RNA, 19 nt, Artificial Sequence
  Description of Artificial Sequence: Synthetic oligonucleotide
ugagaauccuaagagacug

SEQ ID NO: 2961441 - RNA, 19 nt, Artificial Sequence
  Description of Artificial Sequence: Synthetic oligonucleotide
uuuugagaauccuaagaga

SEQ ID NO: 2961442 - RNA, 19 nt, Artificial Sequence
  Description of Artificial Sequence: Synthetic oligonucleotide
caaaguagcucucaugggc

SEQ ID NO: 2961443 - RNA, 19 nt, Artificial Sequence
  Description of Artificial Sequence: Synthetic oligonucleotide
ugugugaacuggauccucg

SEQ ID NO: 2961444 - RNA, 19 nt, Artificial Sequence
  Description of Artificial Sequence: Synthetic oligonucleotide
uagaucuucucagucaccg

SEQ ID NO: 2961445 - RNA, 19 nt, Artificial Sequence
  Description of Artificial Sequence: Synthetic oligonucleotide
ugauagacagaccuuucug

SEQ ID NO: 2961446 - RNA, 19 nt, Artificial Sequence
  Description of Artificial Sequence: Synthetic oligonucleotide
uuuuacugggguaguauca

SEQ ID NO: 2961447 - RNA, 19 nt, Artificial Sequence
  Description of Artificial Sequence: Synthetic oligonucleotide
uggauuugucuuuuacugg

SEQ ID NO: 2961448 - RNA, 19 nt, Artificial Sequence
  Description of Artificial Sequence: Synthetic oligonucleotide
ugugggucaaaguagcucu

SEQ ID NO: 2961449 - RNA, 19 nt, Artificial Sequence
  Description of Artificial Sequence: Synthetic oligonucleotide
uguuauuucaguggaggag

SEQ ID NO: 2961450 - RNA, 19 nt, Artificial Sequence
  Description of Artificial Sequence: Synthetic oligonucleotide
auuucaguggaggaguugg

SEQ ID NO: 2961451 - RNA, 19 nt, Artificial Sequence
  Description of Artificial Sequence: Synthetic oligonucleotide
ugacgaugccaucaguggg

SEQ ID NO: 2961452 - RNA, 19 nt, Artificial Sequence
  Description of Artificial Sequence: Synthetic oligonucleotide
uaucuugggcaccaggcag

SEQ ID NO: 2961453 - RNA, 19 nt, Artificial Sequence
  Description of Artificial Sequence: Synthetic oligonucleotide
ggauuugucuuuuacuggg

SEQ ID NO: 2961454 - RNA, 19 nt, Artificial Sequence
  Description of Artificial Sequence: Synthetic oligonucleotide
ucugcaaaauuuucaccag

SEQ ID NO: 2961455 - RNA, 19 nt, Artificial Sequence
  Description of Artificial Sequence: Synthetic oligonucleotide
uugucuuuuacugggguag

SEQ ID NO: 2961456 - RNA, 19 nt, Artificial Sequence
  Description of Artificial Sequence: Synthetic oligonucleotide
ucaaaguagcucucauggg

SEQ ID NO: 2961457 - RNA, 19 nt, Artificial Sequence
  Description of Artificial Sequence: Synthetic oligonucleotide
uaagagacugucacuggcc

SEQ ID NO: 2961458 - RNA, 19 nt, Artificial Sequence
  Description of Artificial Sequence: Synthetic oligonucleotide
uggccugggaggaugacgg

SEQ ID NO: 2961459 - RNA, 19 nt, Artificial Sequence
  Description of Artificial Sequence: Synthetic oligonucleotide
uccuaagagacugucacug

SEQ ID NO: 2961460 - RNA, 19 nt, Artificial Sequence
  Description of Artificial Sequence: Synthetic oligonucleotide
agguaguagaucuucucag

SEQ ID NO: 2961461 - RNA, 19 nt, Artificial Sequence
  Description of Artificial Sequence: Synthetic oligonucleotide
ucaugggcauauuaguuga

SEQ ID NO: 2961462 - RNA, 19 nt, Artificial Sequence
  Description of Artificial Sequence: Synthetic oligonucleotide
uguuggauuugucuuuuac

SEQ ID NO: 2961463 - RNA, 19 nt, Artificial Sequence
  Description of Artificial Sequence: Synthetic oligonucleotide
aaacacagccuguggaugu

SEQ ID NO: 2961464 - RNA, 19 nt, Artificial Sequence
  Description of Artificial Sequence: Synthetic oligonucleotide
uuaguugacgaugccauca

SEQ ID NO: 2961465 - RNA, 19 nt, Artificial Sequence
  Description of Artificial Sequence: Synthetic oligonucleotide
uucagguguuauuucagug

SEQ ID NO: 2961466 - RNA, 19 nt, Artificial Sequence
  Description of Artificial Sequence: Synthetic oligonucleotide
aguuggguaucuugggcac

SEQ ID NO: 2961467 - RNA, 19 nt, Artificial Sequence
  Description of Artificial Sequence: Synthetic oligonucleotide
ugugaacuggauccucggg

SEQ ID NO: 2961468 - RNA, 19 nt, Artificial Sequence
  Description of Artificial Sequence: Synthetic oligonucleotide
auuauggucucgcuggccu

SEQ ID NO: 2961469 - RNA, 19 nt, Artificial Sequence
  Description of Artificial Sequence: Synthetic oligonucleotide
acugaaacacagccugugg

SEQ ID NO: 2961470 - RNA, 19 nt, Artificial Sequence
  Description of Artificial Sequence: Synthetic oligonucleotide
uacugggguaguaucagug

SEQ ID NO: 2961471 - RNA, 19 nt, Artificial Sequence
  Description of Artificial Sequence: Synthetic oligonucleotide
gaggaguuggguaucuugg

SEQ ID NO: 2961472 - RNA, 19 nt, Artificial Sequence
  Description of Artificial Sequence: Synthetic oligonucleotide
uucucguggagccucaggu

SEQ ID NO: 2961473 - RNA, 19 nt, Artificial Sequence
  Description of Artificial Sequence: Synthetic oligonucleotide
cuaagagacugucacuggc

SEQ ID NO: 2961474 - RNA, 19 nt, Artificial Sequence
  Description of Artificial Sequence: Synthetic oligonucleotide
uuuacugggguaguaucag

SEQ ID NO: 2961475 - RNA, 19 nt, Artificial Sequence
  Description of Artificial Sequence: Synthetic oligonucleotide
cucaugggcauauuaguug

SEQ ID NO: 2961476 - RNA, 19 nt, Artificial Sequence
  Description of Artificial Sequence: Synthetic oligonucleotide
auagacagaccuuucugca

SEQ ID NO: 2961477 - RNA, 19 nt, Artificial Sequence
  Description of Artificial Sequence: Synthetic oligonucleotide
uugguggugauagacagac

SEQ ID NO: 2961478 - RNA, 19 nt, Artificial Sequence
  Description of Artificial Sequence: Synthetic oligonucleotide
cuguggauguuucucgugg

SEQ ID NO: 2961479 - RNA, 19 nt, Artificial Sequence
  Description of Artificial Sequence: Synthetic oligonucleotide
cuuucagguguuauuucag

SEQ ID NO: 2961480 - RNA, 19 nt, Artificial Sequence
  Description of Artificial Sequence: Synthetic oligonucleotide
uugagaauccuaagagacu

SEQ ID NO: 2961481 - RNA, 19 nt, Artificial Sequence
  Description of Artificial Sequence: Synthetic oligonucleotide
ugggcauauuaguugacga

SEQ ID NO: 2961482 - RNA, 19 nt, Artificial Sequence
  Description of Artificial Sequence: Synthetic oligonucleotide
agcagcauuauggucucgc

SEQ ID NO: 2961483 - RNA, 19 nt, Artificial Sequence
  Description of Artificial Sequence: Synthetic oligonucleotide
aaaguagcucucaugggca

SEQ ID NO: 2961484 - RNA, 19 nt, Artificial Sequence
  Description of Artificial Sequence: Synthetic oligonucleotide
gaucuucucagucaccguc

SEQ ID NO: 2961485 - RNA, 19 nt, Artificial Sequence
  Description of Artificial Sequence: Synthetic oligonucleotide
ucagcugccagcagcauua

SEQ ID NO: 2961486 - RNA, 19 nt, Artificial Sequence
  Description of Artificial Sequence: Synthetic oligonucleotide
cugcaaaauuuucaccagg

SEQ ID NO: 2961487 - RNA, 19 nt, Artificial Sequence
  Description of Artificial Sequence: Synthetic oligonucleotide
agaauccuaagagacuguc

SEQ ID NO: 2961488 - RNA, 19 nt, Artificial Sequence
  Description of Artificial Sequence: Synthetic oligonucleotide
ugaaacacagccuguggau

SEQ ID NO: 2961489 - RNA, 19 nt, Artificial Sequence
  Description of Artificial Sequence: Synthetic oligonucleotide
auuaguugacgaugccauc

SEQ ID NO: 2961490 - RNA, 19 nt, Artificial Sequence
  Description of Artificial Sequence: Synthetic oligonucleotide
uuucaguggaggaguuggg

SEQ ID NO: 2961491 - RNA, 19 nt, Artificial Sequence
  Description of Artificial Sequence: Synthetic oligonucleotide
gacgaugccaucagugggg

SEQ ID NO: 2961492 - RNA, 19 nt, Artificial Sequence
  Description of Artificial Sequence: Synthetic oligonucleotide
auauuaguugacgaugcca

SEQ ID NO: 2961493 - RNA, 19 nt, Artificial Sequence
  Description of Artificial Sequence: Synthetic oligonucleotide
auuugucuuuuacuggggu

SEQ ID NO: 2961494 - RNA, 19 nt, Artificial Sequence
  Description of Artificial Sequence: Synthetic oligonucleotide
cuuuuacugggguaguauc

SEQ ID NO: 2961495 - RNA, 19 nt, Artificial Sequence
  Description of Artificial Sequence: Synthetic oligonucleotide
uuucagguguuauuucagu

SEQ ID NO: 2961496 - RNA, 19 nt, Artificial Sequence
  Description of Artificial Sequence: Synthetic oligonucleotide
gauuugucuuuuacugggg

SEQ ID NO: 2961497 - RNA, 19 nt, Artificial Sequence
  Description of Artificial Sequence: Synthetic oligonucleotide
agccucagguaguagaucu

SEQ ID NO: 2961498 - RNA, 19 nt, Artificial Sequence
  Description of Artificial Sequence: Synthetic oligonucleotide
uaguugacgaugccaucag

SEQ ID NO: 2961499 - RNA, 19 nt, Artificial Sequence
  Description of Artificial Sequence: Synthetic oligonucleotide
aggaguuggguaucuuggg

SEQ ID NO: 2961500 - RNA, 19 nt, Artificial Sequence
  Description of Artificial Sequence: Synthetic oligonucleotide
ccagaacugaaacacagcc

SEQ ID NO: 2961501 - RNA, 19 nt, Artificial Sequence
  Description of Artificial Sequence: Synthetic oligonucleotide
guugacgaugccaucagug

SEQ ID NO: 2961502 - RNA, 19 nt, Artificial Sequence
  Description of Artificial Sequence: Synthetic oligonucleotide
ucucaugggcauauuaguu

SEQ ID NO: 2961503 - RNA, 19 nt, Artificial Sequence
  Description of Artificial Sequence: Synthetic oligonucleotide
agccuguggauguuucucg

SEQ ID NO: 2961504 - RNA, 19 nt, Artificial Sequence
  Description of Artificial Sequence: Synthetic oligonucleotide
uuucucguggagccucagg

SEQ ID NO: 2961505 - RNA, 19 nt, Artificial Sequence
  Description of Artificial Sequence: Synthetic oligonucleotide
gaguuggguaucuugggca

SEQ ID NO: 2961506 - RNA, 19 nt, Artificial Sequence
  Description of Artificial Sequence: Synthetic oligonucleotide
ugaacuggauccucggguc

SEQ ID NO: 2961507 - RNA, 19 nt, Artificial Sequence
  Description of Artificial Sequence: Synthetic oligonucleotide
guaguagaucuucucaguc

SEQ ID NO: 2961508 - RNA, 19 nt, Artificial Sequence
  Description of Artificial Sequence: Synthetic oligonucleotide
cauauuaguugacgaugcc

SEQ ID NO: 2961509 - RNA, 19 nt, Artificial Sequence
  Description of Artificial Sequence: Synthetic oligonucleotide
accaggcggauccagaacu

SEQ ID NO: 2961510 - RNA, 19 nt, Artificial Sequence
  Description of Artificial Sequence: Synthetic oligonucleotide
gcaaaauuuucaccaggcg

SEQ ID NO: 2961511 - RNA, 19 nt, Artificial Sequence
  Description of Artificial Sequence: Synthetic oligonucleotide
ggauguuucucguggagcc

SEQ ID NO: 2961512 - RNA, 19 nt, Artificial Sequence
  Description of Artificial Sequence: Synthetic oligonucleotide
uccgucuccugugagcugg

SEQ ID NO: 2961513 - RNA, 19 nt, Artificial Sequence
  Description of Artificial Sequence: Synthetic oligonucleotide
aucuucucagucaccgucc

SEQ ID NO: 2961514 - RNA, 19 nt, Artificial Sequence
  Description of Artificial Sequence: Synthetic oligonucleotide
cucguggagccucagguag

SEQ ID NO: 2961515 - RNA, 19 nt, Artificial Sequence
  Description of Artificial Sequence: Synthetic oligonucleotide
augggcauauuaguugacg

SEQ ID NO: 2961516 - RNA, 19 nt, Artificial Sequence
  Description of Artificial Sequence: Synthetic oligonucleotide
uucucagucaccguccuaa

SEQ ID NO: 2961517 - RNA, 19 nt, Artificial Sequence
  Description of Artificial Sequence: Synthetic oligonucleotide
ucuccugugagcugguguc

SEQ ID NO: 2961518 - RNA, 19 nt, Artificial Sequence
  Description of Artificial Sequence: Synthetic oligonucleotide
aguaucaguguguccgucu

SEQ ID NO: 2961519 - RNA, 19 nt, Artificial Sequence
  Description of Artificial Sequence: Synthetic oligonucleotide
ugggguaguaucagugugu

SEQ ID NO: 2961520 - RNA, 19 nt, Artificial Sequence
  Description of Artificial Sequence: Synthetic oligonucleotide
ggauccagaacugaaacac

SEQ ID NO: 2961521 - RNA, 19 nt, Artificial Sequence
  Description of Artificial Sequence: Synthetic oligonucleotide
gaaacacagccuguggaug

SEQ ID NO: 2961522 - RNA, 19 nt, Artificial Sequence
  Description of Artificial Sequence: Synthetic oligonucleotide
uuugucuuuuacuggggua

SEQ ID NO: 2961523 - RNA, 19 nt, Artificial Sequence
  Description of Artificial Sequence: Synthetic oligonucleotide
aauuuucaccaggcggauc

SEQ ID NO: 2961524 - RNA, 19 nt, Artificial Sequence
  Description of Artificial Sequence: Synthetic oligonucleotide
ucagguaguagaucuucuc

SEQ ID NO: 2961525 - RNA, 19 nt, Artificial Sequence
  Description of Artificial Sequence: Synthetic oligonucleotide
uggauguuucucguggagc

SEQ ID NO: 2961526 - RNA, 19 nt, Artificial Sequence
  Description of Artificial Sequence: Synthetic oligonucleotide
uuugguggugauagacaga

SEQ ID NO: 2961527 - RNA, 19 nt, Artificial Sequence
  Description of Artificial Sequence: Synthetic oligonucleotide
agagacugucacuggcccg

SEQ ID NO: 2961528 - RNA, 19 nt, Artificial Sequence
  Description of Artificial Sequence: Synthetic oligonucleotide
gauccucgggucuuuggug

SEQ ID NO: 2961529 - RNA, 19 nt, Artificial Sequence
  Description of Artificial Sequence: Synthetic oligonucleotide
agacagaccuuucugcaaa

SEQ ID NO: 2961530 - RNA, 19 nt, Artificial Sequence
  Description of Artificial Sequence: Synthetic oligonucleotide
aguguguccgucuccugug

SEQ ID NO: 2961531 - RNA, 19 nt, Artificial Sequence
  Description of Artificial Sequence: Synthetic oligonucleotide
acugggguaguaucagugu

SEQ ID NO: 2961532 - RNA, 19 nt, Artificial Sequence
  Description of Artificial Sequence: Synthetic oligonucleotide
uguggauguuucucgugga

SEQ ID NO: 2961533 - RNA, 19 nt, Artificial Sequence
  Description of Artificial Sequence: Synthetic oligonucleotide
ucuuguucccagaggcugu

SEQ ID NO: 2961534 - RNA, 19 nt, Artificial Sequence
  Description of Artificial Sequence: Synthetic oligonucleotide
ucuuuuacugggguaguau

SEQ ID NO: 2961535 - RNA, 19 nt, Artificial Sequence
  Description of Artificial Sequence: Synthetic oligonucleotide
gggucuuugguggugauag

SEQ ID NO: 2961536 - RNA, 19 nt, Artificial Sequence
  Description of Artificial Sequence: Synthetic oligonucleotide
uaucaguguguccgucucc

SEQ ID NO: 2961537 - RNA, 19 nt, Artificial Sequence
  Description of Artificial Sequence: Synthetic oligonucleotide
uauggucucgcuggccugg

SEQ ID NO: 2961538 - RNA, 19 nt, Artificial Sequence
  Description of Artificial Sequence: Synthetic oligonucleotide
gagacugucacuggcccgc

SEQ ID NO: 2961539 - RNA, 19 nt, Artificial Sequence
  Description of Artificial Sequence: Synthetic oligonucleotide
ucaguggaggaguugggua

SEQ ID NO: 2961540 - RNA, 19 nt, Artificial Sequence
  Description of Artificial Sequence: Synthetic oligonucleotide
ggcauauuaguugacgaug

SEQ ID NO: 2961541 - RNA, 19 nt, Artificial Sequence
  Description of Artificial Sequence: Synthetic oligonucleotide
gugugaacuggauccucgg

SEQ ID NO: 2961542 - RNA, 19 nt, Artificial Sequence
  Description of Artificial Sequence: Synthetic oligonucleotide
augacggcaggcugcuuuc

SEQ ID NO: 2961543 - RNA, 19 nt, Artificial Sequence
  Description of Artificial Sequence: Synthetic oligonucleotide
guuggauuugucuuuuacu

SEQ ID NO: 2961544 - RNA, 19 nt, Artificial Sequence
  Description of Artificial Sequence: Synthetic oligonucleotide
gguaucuugggcaccaggc

SEQ ID NO: 2961545 - RNA, 19 nt, Artificial Sequence
  Description of Artificial Sequence: Synthetic oligonucleotide
auguuucucguggagccuc

SEQ ID NO: 2961546 - RNA, 19 nt, Artificial Sequence
  Description of Artificial Sequence: Synthetic oligonucleotide
ucuucucagucaccguccu

SEQ ID NO: 2961547 - RNA, 19 nt, Artificial Sequence
  Description of Artificial Sequence: Synthetic oligonucleotide
uggauccucgggucuuugg

SEQ ID NO: 2961548 - RNA, 19 nt, Artificial Sequence
  Description of Artificial Sequence: Synthetic oligonucleotide
guuauuucaguggaggagu

SEQ ID NO: 2961549 - RNA, 19 nt, Artificial Sequence
  Description of Artificial Sequence: Synthetic oligonucleotide
cagucaccguccuaacccg

SEQ ID NO: 2961550 - RNA, 19 nt, Artificial Sequence
  Description of Artificial Sequence: Synthetic oligonucleotide
uagacagaccuuucugcaa

SEQ ID NO: 2961551 - RNA, 19 nt, Artificial Sequence
  Description of Artificial Sequence: Synthetic oligonucleotide
aaauuuucaccaggcggau

SEQ ID NO: 2961552 - RNA, 19 nt, Artificial Sequence
  Description of Artificial Sequence: Synthetic oligonucleotide
cugaaacacagccugugga

SEQ ID NO: 2961553 - RNA, 19 nt, Artificial Sequence
  Description of Artificial Sequence: Synthetic oligonucleotide
uauuucaguggaggaguug

SEQ ID NO: 2961554 - RNA, 19 nt, Artificial Sequence
  Description of Artificial Sequence: Synthetic oligonucleotide
acggcaggcugcuuucagg

SEQ ID NO: 2961555 - RNA, 19 nt, Artificial Sequence
  Description of Artificial Sequence: Synthetic oligonucleotide
gaggaugacggcaggcugc

SEQ ID NO: 2961556 - RNA, 19 nt, Artificial Sequence
  Description of Artificial Sequence: Synthetic oligonucleotide
gcauauuaguugacgaugc

SEQ ID NO: 2961557 - RNA, 19 nt, Artificial Sequence
  Description of Artificial Sequence: Synthetic oligonucleotide
accuuucugcaaaauuuuc

SEQ ID NO: 2961558 - RNA, 19 nt, Artificial Sequence
  Description of Artificial Sequence: Synthetic oligonucleotide
uuauuucaguggaggaguu

SEQ ID NO: 2961559 - RNA, 19 nt, Artificial Sequence
  Description of Artificial Sequence: Synthetic oligonucleotide
gucuuugguggugauagac

SEQ ID NO: 2961560 - RNA, 19 nt, Artificial Sequence
  Description of Artificial Sequence: Synthetic oligonucleotide
ucaccguccuaacccgaag

SEQ ID NO: 2961561 - RNA, 19 nt, Artificial Sequence
  Description of Artificial Sequence: Synthetic oligonucleotide
cagguaguagaucuucuca

SEQ ID NO: 2961562 - RNA, 19 nt, Artificial Sequence
  Description of Artificial Sequence: Synthetic oligonucleotide
caccguccuaacccgaagg

SEQ ID NO: 2961563 - RNA, 19 nt, Artificial Sequence
  Description of Artificial Sequence: Synthetic oligonucleotide
cagguguuauuucagugga

SEQ ID NO: 2961564 - RNA, 19 nt, Artificial Sequence
  Description of Artificial Sequence: Synthetic oligonucleotide
cucagucaccguccuaacc

SEQ ID NO: 2961565 - RNA, 19 nt, Artificial Sequence
  Description of Artificial Sequence: Synthetic oligonucleotide
aaguagcucucaugggcau

SEQ ID NO: 2961566 - RNA, 19 nt, Artificial Sequence
  Description of Artificial Sequence: Synthetic oligonucleotide
uuauggucucgcuggccug

SEQ ID NO: 2961567 - RNA, 19 nt, Artificial Sequence
  Description of Artificial Sequence: Synthetic oligonucleotide
uucaguggaggaguugggu

SEQ ID NO: 2961568 - RNA, 19 nt, Artificial Sequence
  Description of Artificial Sequence: Synthetic oligonucleotide
uuggguaucuugggcacca

SEQ ID NO: 2961569 - RNA, 19 nt, Artificial Sequence
  Description of Artificial Sequence: Synthetic oligonucleotide
ggaggaguuggguaucuug

SEQ ID NO: 2961570 - RNA, 19 nt, Artificial Sequence
  Description of Artificial Sequence: Synthetic oligonucleotide
cagcauuauggucucgcug

SEQ ID NO: 2961571 - RNA, 19 nt, Artificial Sequence
  Description of Artificial Sequence: Synthetic oligonucleotide
guccuaacccgaaggaugc

SEQ ID NO: 2961572 - RNA, 19 nt, Artificial Sequence
  Description of Artificial Sequence: Synthetic oligonucleotide
ggaguuggguaucuugggc

SEQ ID NO: 2961573 - RNA, 19 nt, Artificial Sequence
  Description of Artificial Sequence: Synthetic oligonucleotide
guaucuugggcaccaggca

SEQ ID NO: 2961574 - RNA, 19 nt, Artificial Sequence
  Description of Artificial Sequence: Synthetic oligonucleotide
auccuaagagacugucacu

SEQ ID NO: 2961575 - RNA, 19 nt, Artificial Sequence
  Description of Artificial Sequence: Synthetic oligonucleotide
uuacugggguaguaucagu

SEQ ID NO: 2961576 - RNA, 19 nt, Artificial Sequence
  Description of Artificial Sequence: Synthetic oligonucleotide
guaucaguguguccgucuc

SEQ ID NO: 2961577 - RNA, 19 nt, Artificial Sequence
  Description of Artificial Sequence: Synthetic oligonucleotide
gaauccuaagagacuguca

SEQ ID NO: 2961578 - RNA, 19 nt, Artificial Sequence
  Description of Artificial Sequence: Synthetic oligonucleotide
ggucaaaguagcucucaug

SEQ ID NO: 2961579 - RNA, 19 nt, Artificial Sequence
  Description of Artificial Sequence: Synthetic oligonucleotide
ugcuuucagguguuauuuc

SEQ ID NO: 2961580 - RNA, 19 nt, Artificial Sequence
  Description of Artificial Sequence: Synthetic oligonucleotide
ucaccaggcggauccagaa

SEQ ID NO: 2961581 - RNA, 19 nt, Artificial Sequence
  Description of Artificial Sequence: Synthetic oligonucleotide
gucucgcuggccugggagg

SEQ ID NO: 2961582 - RNA, 19 nt, Artificial Sequence
  Description of Artificial Sequence: Synthetic oligonucleotide
accguccuaacccgaagga

SEQ ID NO: 2961583 - RNA, 19 nt, Artificial Sequence
  Description of Artificial Sequence: Synthetic oligonucleotide
aucaguguguccgucuccu

SEQ ID NO: 2961584 - RNA, 19 nt, Artificial Sequence
  Description of Artificial Sequence: Synthetic oligonucleotide
cacuggcccgcucagcugc

SEQ ID NO: 2961585 - RNA, 19 nt, Artificial Sequence
  Description of Artificial Sequence: Synthetic oligonucleotide
gcuuucagguguuauuuca

SEQ ID NO: 2961586 - RNA, 19 nt, Artificial Sequence
  Description of Artificial Sequence: Synthetic oligonucleotide
aguggaggaguuggguauc

SEQ ID NO: 2961587 - RNA, 19 nt, Artificial Sequence
  Description of Artificial Sequence: Synthetic oligonucleotide
agcuguuggauuugucuuu

SEQ ID NO: 2961588 - RNA, 19 nt, Artificial Sequence
  Description of Artificial Sequence: Synthetic oligonucleotide
gcucucaugggcauauuag

SEQ ID NO: 2961589 - RNA, 19 nt, Artificial Sequence
  Description of Artificial Sequence: Synthetic oligonucleotide
aguugacgaugccaucagu

SEQ ID NO: 2961590 - RNA, 19 nt, Artificial Sequence
  Description of Artificial Sequence: Synthetic oligonucleotide
gacggcaggcugcuuucag

SEQ ID NO: 2961591 - RNA, 19 nt, Artificial Sequence
  Description of Artificial Sequence: Synthetic oligonucleotide
gauccagaacugaaacaca

SEQ ID NO: 2961592 - RNA, 19 nt, Artificial Sequence
  Description of Artificial Sequence: Synthetic oligonucleotide
agaucuucucagucaccgu

SEQ ID NO: 2961593 - RNA, 19 nt, Artificial Sequence
  Description of Artificial Sequence: Synthetic oligonucleotide
agaggcugugggucaaagu

SEQ ID NO: 2961594 - RNA, 19 nt, Artificial Sequence
  Description of Artificial Sequence: Synthetic oligonucleotide
ugggucaaaguagcucuca

SEQ ID NO: 2961595 - RNA, 19 nt, Artificial Sequence
  Description of Artificial Sequence: Synthetic oligonucleotide
agcucucaugggcauauua

SEQ ID NO: 2961596 - RNA, 19 nt, Artificial Sequence
  Description of Artificial Sequence: Synthetic oligonucleotide
gugaacuggauccucgggu

SEQ ID NO: 2961597 - RNA, 19 nt, Artificial Sequence
  Description of Artificial Sequence: Synthetic oligonucleotide
cauuauggucucgcuggcc

SEQ ID NO: 2961598 - RNA, 19 nt, Artificial Sequence
  Description of Artificial Sequence: Synthetic oligonucleotide
caugggcauauuaguugac

SEQ ID NO: 2961599 - RNA, 19 nt, Artificial Sequence
  Description of Artificial Sequence: Synthetic oligonucleotide
cugugggucaaaguagcuc

SEQ ID NO: 2961600 - RNA, 19 nt, Artificial Sequence
  Description of Artificial Sequence: Synthetic oligonucleotide
agugugugaacuggauccu

SEQ ID NO: 2961601 - RNA, 19 nt, Artificial Sequence
  Description of Artificial Sequence: Synthetic oligonucleotide
ugucuuuuacugggguagu

SEQ ID NO: 2961602 - RNA, 19 nt, Artificial Sequence
  Description of Artificial Sequence: Synthetic oligonucleotide
ugguggugauagacagacc

SEQ ID NO: 2961603 - RNA, 19 nt, Artificial Sequence
  Description of Artificial Sequence: Synthetic oligonucleotide
acagccuguggauguuucu

SEQ ID NO: 2961604 - RNA, 19 nt, Artificial Sequence
  Description of Artificial Sequence: Synthetic oligonucleotide
gcggauccagaacugaaac

SEQ ID NO: 2961605 - RNA, 19 nt, Artificial Sequence
  Description of Artificial Sequence: Synthetic oligonucleotide
ucucguggagccucaggua

SEQ ID NO: 2961606 - RNA, 19 nt, Artificial Sequence
  Description of Artificial Sequence: Synthetic oligonucleotide
gugauagacagaccuuucu

SEQ ID NO: 2961607 - RNA, 19 nt, Artificial Sequence
  Description of Artificial Sequence: Synthetic oligonucleotide
ucucagucaccguccuaac

SEQ ID NO: 2961608 - RNA, 19 nt, Artificial Sequence
  Description of Artificial Sequence: Synthetic oligonucleotide
ucuugggcaccaggcagug

SEQ ID NO: 2961609 - RNA, 19 nt, Artificial Sequence
  Description of Artificial Sequence: Synthetic oligonucleotide
ggaggaugacggcaggcug

SEQ ID NO: 2961610 - RNA, 19 nt, Artificial Sequence
  Description of Artificial Sequence: Synthetic oligonucleotide
uccuaacccgaaggaugcg

SEQ ID NO: 2961611 - RNA, 19 nt, Artificial Sequence
  Description of Artificial Sequence: Synthetic oligonucleotide
ucguggagccucagguagu

SEQ ID NO: 2961612 - RNA, 19 nt, Artificial Sequence
  Description of Artificial Sequence: Synthetic oligonucleotide
ggucucgcuggccugggag

SEQ ID NO: 2961613 - RNA, 19 nt, Artificial Sequence
  Description of Artificial Sequence: Synthetic oligonucleotide
ggguaucuugggcaccagg

SEQ ID NO: 2961614 - RNA, 19 nt, Artificial Sequence
  Description of Artificial Sequence: Synthetic oligonucleotide
ucccagaggcuguggguca

SEQ ID NO: 2961615 - RNA, 19 nt, Artificial Sequence
  Description of Artificial Sequence: Synthetic oligonucleotide
gaugacggcaggcugcuuu

SEQ ID NO: 2961616 - RNA, 19 nt, Artificial Sequence
  Description of Artificial Sequence: Synthetic oligonucleotide
cucucaugggcauauuagu

SEQ ID NO: 2961617 - RNA, 19 nt, Artificial Sequence
  Description of Artificial Sequence: Synthetic oligonucleotide
ugggaggaugacggcaggc

SEQ ID NO: 2961618 - RNA, 19 nt, Artificial Sequence
  Description of Artificial Sequence: Synthetic oligonucleotide
ucaguguguccgucuccug

SEQ ID NO: 2961619 - RNA, 19 nt, Artificial Sequence
  Description of Artificial Sequence: Synthetic oligonucleotide
ugccagcagcauuaugguc

SEQ ID NO: 2961620 - RNA, 19 nt, Artificial Sequence
  Description of Artificial Sequence: Synthetic oligonucleotide
ucacuggcccgcucagcug

SEQ ID NO: 2961621 - RNA, 19 nt, Artificial Sequence
  Description of Artificial Sequence: Synthetic oligonucleotide
guagaucuucucagucacc

SEQ ID NO: 2961622 - RNA, 19 nt, Artificial Sequence
  Description of Artificial Sequence: Synthetic oligonucleotide
cguccuaacccgaaggaug

SEQ ID NO: 2961623 - RNA, 19 nt, Artificial Sequence
  Description of Artificial Sequence: Synthetic oligonucleotide
cacagccuguggauguuuc

SEQ ID NO: 2961624 - RNA, 19 nt, Artificial Sequence
  Description of Artificial Sequence: Synthetic oligonucleotide
agguguuauuucaguggag

SEQ ID NO: 2961625 - RNA, 19 nt, Artificial Sequence
  Description of Artificial Sequence: Synthetic oligonucleotide
accaggcagugugugaacu

SEQ ID NO: 2961626 - RNA, 19 nt, Artificial Sequence
  Description of Artificial Sequence: Synthetic oligonucleotide
ucucgcuggccugggagga

SEQ ID NO: 2961627 - RNA, 19 nt, Artificial Sequence
  Description of Artificial Sequence: Synthetic oligonucleotide
uuuucaccaggcggaucca

SEQ ID NO: 2961628 - RNA, 19 nt, Artificial Sequence
  Description of Artificial Sequence: Synthetic oligonucleotide
aacuggauccucgggucuu

SEQ ID NO: 2961629 - RNA, 19 nt, Artificial Sequence
  Description of Artificial Sequence: Synthetic oligonucleotide
gacagaccuuucugcaaaa

SEQ ID NO: 2961630 - RNA, 19 nt, Artificial Sequence
  Description of Artificial Sequence: Synthetic oligonucleotide
ugggcaccaggcagugugu

SEQ ID NO: 2961631 - RNA, 19 nt, Artificial Sequence
  Description of Artificial Sequence: Synthetic oligonucleotide
cugggaggaugacggcagg

SEQ ID NO: 2961632 - RNA, 19 nt, Artificial Sequence
  Description of Artificial Sequence: Synthetic oligonucleotide
cuuguucccagaggcugug

SEQ ID NO: 2961633 - RNA, 19 nt, Artificial Sequence
  Description of Artificial Sequence: Synthetic oligonucleotide
guuggguaucuugggcacc

SEQ ID NO: 2961634 - RNA, 19 nt, Artificial Sequence
  Description of Artificial Sequence: Synthetic oligonucleotide
gcagugugugaacuggauc

SEQ ID NO: 2961635 - RNA, 19 nt, Artificial Sequence
  Description of Artificial Sequence: Synthetic oligonucleotide
gcagcuguuggauuugucu

SEQ ID NO: 2961636 - RNA, 19 nt, Artificial Sequence
  Description of Artificial Sequence: Synthetic oligonucleotide
gguaguagaucuucucagu

SEQ ID NO: 2961637 - RNA, 19 nt, Artificial Sequence
  Description of Artificial Sequence: Synthetic oligonucleotide
uggcccgcucagcugccag

SEQ ID NO: 2961638 - RNA, 19 nt, Artificial Sequence
  Description of Artificial Sequence: Synthetic oligonucleotide
aucuugggcaccaggcagu

SEQ ID NO: 2961639 - RNA, 19 nt, Artificial Sequence
  Description of Artificial Sequence: Synthetic oligonucleotide
uaguaucaguguguccguc

SEQ ID NO: 2961640 - RNA, 19 nt, Artificial Sequence
  Description of Artificial Sequence: Synthetic oligonucleotide
cagccuguggauguuucuc

SEQ ID NO: 2961641 - RNA, 19 nt, Artificial Sequence
  Description of Artificial Sequence: Synthetic oligonucleotide
gucacuggcccgcucagcu

SEQ ID NO: 2961642 - RNA, 19 nt, Artificial Sequence
  Description of Artificial Sequence: Synthetic oligonucleotide
aacacagccuguggauguu

SEQ ID NO: 2961643 - RNA, 19 nt, Artificial Sequence
  Description of Artificial Sequence: Synthetic oligonucleotide
gcauuauggucucgcuggc

SEQ ID NO: 2961644 - RNA, 19 nt, Artificial Sequence
  Description of Artificial Sequence: Synthetic oligonucleotide
aggaugacggcaggcugcu

SEQ ID NO: 2961645 - RNA, 19 nt, Artificial Sequence
  Description of Artificial Sequence: Synthetic oligonucleotide
uccucgggucuuugguggu

SEQ ID NO: 2961646 - RNA, 19 nt, Artificial Sequence
  Description of Artificial Sequence: Synthetic oligonucleotide
ugucacuggcccgcucagc

SEQ ID NO: 2961647 - RNA, 19 nt, Artificial Sequence
  Description of Artificial Sequence: Synthetic oligonucleotide
gccagcagcauuauggucu

SEQ ID NO: 2961648 - RNA, 19 nt, Artificial Sequence
  Description of Artificial Sequence: Synthetic oligonucleotide
gaacuggauccucgggucu

SEQ ID NO: 2961649 - RNA, 19 nt, Artificial Sequence
  Description of Artificial Sequence: Synthetic oligonucleotide
guaguaucaguguguccgu

SEQ ID NO: 2961650 - RNA, 19 nt, Artificial Sequence
  Description of Artificial Sequence: Synthetic oligonucleotide
cagaggcugugggucaaag

SEQ ID NO: 2961651 - RNA, 19 nt, Artificial Sequence
  Description of Artificial Sequence: Synthetic oligonucleotide
caccaggcggauccagaac

SEQ ID NO: 2961652 - RNA, 19 nt, Artificial Sequence
  Description of Artificial Sequence: Synthetic oligonucleotide
agcugccagcagcauuaug

SEQ ID NO: 2961653 - RNA, 19 nt, Artificial Sequence
  Description of Artificial Sequence: Synthetic oligonucleotide
gaccuuucugcaaaauuuu

SEQ ID NO: 2961654 - RNA, 19 nt, Artificial Sequence
  Description of Artificial Sequence: Synthetic oligonucleotide
ggguaguaucagugugucc

SEQ ID NO: 2961655 - RNA, 19 nt, Artificial Sequence
  Description of Artificial Sequence: Synthetic oligonucleotide
cucagguaguagaucuucu

SEQ ID NO: 2961656 - RNA, 19 nt, Artificial Sequence
  Description of Artificial Sequence: Synthetic oligonucleotide
caccaggcagugugugaac

SEQ ID NO: 2961657 - RNA, 19 nt, Artificial Sequence
  Description of Artificial Sequence: Synthetic oligonucleotide
ggugauagacagaccuuuc

SEQ ID NO: 2961658 - RNA, 19 nt, Artificial Sequence
  Description of Artificial Sequence: Synthetic oligonucleotide
gggguaguaucaguguguc

SEQ ID NO: 2961659 - RNA, 19 nt, Artificial Sequence
  Description of Artificial Sequence: Synthetic oligonucleotide
gagccucagguaguagauc

SEQ ID NO: 2961660 - RNA, 19 nt, Artificial Sequence
  Description of Artificial Sequence: Synthetic oligonucleotide
uggguaucuugggcaccag

SEQ ID NO: 2961661 - RNA, 19 nt, Artificial Sequence
  Description of Artificial Sequence: Synthetic oligonucleotide
gauguuucucguggagccu

SEQ ID NO: 2961662 - RNA, 19 nt, Artificial Sequence
  Description of Artificial Sequence: Synthetic oligonucleotide
ccuguggauguuucucgug

SEQ ID NO: 2961663 - RNA, 19 nt, Artificial Sequence
  Description of Artificial Sequence: Synthetic oligonucleotide
gaacugaaacacagccugu

SEQ ID NO: 2961664 - RNA, 19 nt, Artificial Sequence
  Description of Artificial Sequence: Synthetic oligonucleotide
guuucucguggagccucag

SEQ ID NO: 2961665 - RNA, 19 nt, Artificial Sequence
  Description of Artificial Sequence: Synthetic oligonucleotide
caguggaggaguuggguau

SEQ ID NO: 2961666 - RNA, 19 nt, Artificial Sequence
  Description of Artificial Sequence: Synthetic oligonucleotide
auggucucgcuggccuggg

SEQ ID NO: 2961667 - RNA, 19 nt, Artificial Sequence
  Description of Artificial Sequence: Synthetic oligonucleotide
guguguccgucuccuguga

SEQ ID NO: 2961668 - RNA, 19 nt, Artificial Sequence
  Description of Artificial Sequence: Synthetic oligonucleotide
ugacggcaggcugcuuuca

SEQ ID NO: 2961669 - RNA, 19 nt, Artificial Sequence
  Description of Artificial Sequence: Synthetic oligonucleotide
uccugugagcuggugucuu

SEQ ID NO: 2961670 - RNA, 19 nt, Artificial Sequence
  Description of Artificial Sequence: Synthetic oligonucleotide
gugugugaacuggauccuc

SEQ ID NO: 2961671 - RNA, 19 nt, Artificial Sequence
  Description of Artificial Sequence: Synthetic oligonucleotide
gcaggcugcuuucaggugu

SEQ ID NO: 2961672 - RNA, 19 nt, Artificial Sequence
  Description of Artificial Sequence: Synthetic oligonucleotide
ccucagguaguagaucuuc

SEQ ID NO: 2961673 - RNA, 19 nt, Artificial Sequence
  Description of Artificial Sequence: Synthetic oligonucleotide
cugccagcagcauuauggu

SEQ ID NO: 2961674 - RNA, 19 nt, Artificial Sequence
  Description of Artificial Sequence: Synthetic oligonucleotide
aguagcucucaugggcaua

SEQ ID NO: 2961675 - RNA, 19 nt, Artificial Sequence
  Description of Artificial Sequence: Synthetic oligonucleotide
uggucucgcuggccuggga

SEQ ID NO: 2961676 - RNA, 19 nt, Artificial Sequence
  Description of Artificial Sequence: Synthetic oligonucleotide
ccaggcagugugugaacug

SEQ ID NO: 2961677 - RNA, 19 nt, Artificial Sequence
  Description of Artificial Sequence: Synthetic oligonucleotide
gagaauccuaagagacugu

SEQ ID NO: 2961678 - RNA, 19 nt, Artificial Sequence
  Description of Artificial Sequence: Synthetic oligonucleotide
guagcucucaugggcauau

SEQ ID NO: 2961679 - RNA, 19 nt, Artificial Sequence
  Description of Artificial Sequence: Synthetic oligonucleotide
ggauccucgggucuuuggu

SEQ ID NO: 2961680 - RNA, 19 nt, Artificial Sequence
  Description of Artificial Sequence: Synthetic oligonucleotide
caguguguccgucuccugu

SEQ ID NO: 2961681 - RNA, 19 nt, Artificial Sequence
  Description of Artificial Sequence: Synthetic oligonucleotide
ggcaggcugcuuucaggug

SEQ ID NO: 2961682 - RNA, 19 nt, Artificial Sequence
  Description of Artificial Sequence: Synthetic oligonucleotide
ccagcagcauuauggucuc

SEQ ID NO: 2961683 - RNA, 19 nt, Artificial Sequence
  Description of Artificial Sequence: Synthetic oligonucleotide
aggcagugugugaacugga

SEQ ID NO: 2961684 - RNA, 19 nt, Artificial Sequence
  Description of Artificial Sequence: Synthetic oligonucleotide
aggcggauccagaacugaa

SEQ ID NO: 2961685 - RNA, 19 nt, Artificial Sequence
  Description of Artificial Sequence: Synthetic oligonucleotide
cugcuuucagguguuauuu

SEQ ID NO: 2961686 - RNA, 19 nt, Artificial Sequence
  Description of Artificial Sequence: Synthetic oligonucleotide
gggcauauuaguugacgau

SEQ ID NO: 2961687 - RNA, 19 nt, Artificial Sequence
  Description of Artificial Sequence: Synthetic oligonucleotide
ccgcucagcugccagcagc

SEQ ID NO: 2961688 - RNA, 19 nt, Artificial Sequence
  Description of Artificial Sequence: Synthetic oligonucleotide
gugggucaaaguagcucuc

SEQ ID NO: 2961689 - RNA, 19 nt, Artificial Sequence
  Description of Artificial Sequence: Synthetic oligonucleotide
ucgggucuuugguggugau

SEQ ID NO: 2961690 - RNA, 19 nt, Artificial Sequence
  Description of Artificial Sequence: Synthetic oligonucleotide
agucaccguccuaacccga

SEQ ID NO: 2961691 - RNA, 19 nt, Artificial Sequence
  Description of Artificial Sequence: Synthetic oligonucleotide
gacugucacuggcccgcuc

SEQ ID NO: 2961692 - RNA, 19 nt, Artificial Sequence
  Description of Artificial Sequence: Synthetic oligonucleotide
gucuuuuacugggguagua

SEQ ID NO: 2961693 - RNA, 19 nt, Artificial Sequence
  Description of Artificial Sequence: Synthetic oligonucleotide
guggagccucagguaguag

SEQ ID NO: 2961694 - RNA, 19 nt, Artificial Sequence
  Description of Artificial Sequence: Synthetic oligonucleotide
cucgggucuuuggugguga

SEQ ID NO: 2961695 - RNA, 19 nt, Artificial Sequence
  Description of Artificial Sequence: Synthetic oligonucleotide
guccgucuccugugagcug

SEQ ID NO: 2961696 - RNA, 19 nt, Artificial Sequence
  Description of Artificial Sequence: Synthetic oligonucleotide
ccaggcggauccagaacug

SEQ ID NO: 2961697 - RNA, 19 nt, Artificial Sequence
  Description of Artificial Sequence: Synthetic oligonucleotide
ggcaccaggcaguguguga

SEQ ID NO: 2961698 - RNA, 19 nt, Artificial Sequence
  Description of Artificial Sequence: Synthetic oligonucleotide
gucaccguccuaacccgaa

SEQ ID NO: 2961699 - RNA, 19 nt, Artificial Sequence
  Description of Artificial Sequence: Synthetic oligonucleotide
uggaggaguuggguaucuu

SEQ ID NO: 2961700 - RNA, 19 nt, Artificial Sequence
  Description of Artificial Sequence: Synthetic oligonucleotide
caggcggauccagaacuga

SEQ ID NO: 2961701 - RNA, 19 nt, Artificial Sequence
  Description of Artificial Sequence: Synthetic oligonucleotide
gcaccaggcagugugugaa

SEQ ID NO: 2961702 - RNA, 19 nt, Artificial Sequence
  Description of Artificial Sequence: Synthetic oligonucleotide
ggcggauccagaacugaaa

SEQ ID NO: 2961703 - RNA, 19 nt, Artificial Sequence
  Description of Artificial Sequence: Synthetic oligonucleotide
gcugcuuucagguguuauu

SEQ ID NO: 2961704 - RNA, 19 nt, Artificial Sequence
  Description of Artificial Sequence: Synthetic oligonucleotide
acuggauccucgggucuuu

SEQ ID NO: 2961705 - RNA, 19 nt, Artificial Sequence
  Description of Artificial Sequence: Synthetic oligonucleotide
cagcagcauuauggucucg

SEQ ID NO: 2961706 - RNA, 19 nt, Artificial Sequence
  Description of Artificial Sequence: Synthetic oligonucleotide
acacagccuguggauguuu

SEQ ID NO: 2961707 - RNA, 19 nt, Artificial Sequence
  Description of Artificial Sequence: Synthetic oligonucleotide
gggugucuugcagcuguug

SEQ ID NO: 2961708 - RNA, 19 nt, Artificial Sequence
  Description of Artificial Sequence: Synthetic oligonucleotide
agacugucacuggcccgcu

SEQ ID NO: 2961709 - RNA, 19 nt, Artificial Sequence
  Description of Artificial Sequence: Synthetic oligonucleotide
cuguuggauuugucuuuua

SEQ ID NO: 2961710 - RNA, 19 nt, Artificial Sequence
  Description of Artificial Sequence: Synthetic oligonucleotide
gcagcauuauggucucgcu

SEQ ID NO: 2961711 - RNA, 19 nt, Artificial Sequence
  Description of Artificial Sequence: Synthetic oligonucleotide
ggcccgcucagcugccagc

SEQ ID NO: 2961712 - RNA, 19 nt, Artificial Sequence
  Description of Artificial Sequence: Synthetic oligonucleotide
gccugggaggaugacggca

SEQ ID NO: 2961713 - RNA, 19 nt, Artificial Sequence
  Description of Artificial Sequence: Synthetic oligonucleotide
ggccugggaggaugacggc

SEQ ID NO: 2961714 - RNA, 19 nt, Artificial Sequence
  Description of Artificial Sequence: Synthetic oligonucleotide
ggagccucagguaguagau

SEQ ID NO: 2961715 - RNA, 19 nt, Artificial Sequence
  Description of Artificial Sequence: Synthetic oligonucleotide
gggucaaaguagcucucau

SEQ ID NO: 2961716 - RNA, 19 nt, Artificial Sequence
  Description of Artificial Sequence: Synthetic oligonucleotide
cuucucagucaccguccua

SEQ ID NO: 2961717 - RNA, 19 nt, Artificial Sequence
  Description of Artificial Sequence: Synthetic oligonucleotide
gggaggaugacggcaggcu

SEQ ID NO: 2961718 - RNA, 19 nt, Artificial Sequence
  Description of Artificial Sequence: Synthetic oligonucleotide
cucagcugccagcagcauu

SEQ ID NO: 2961719 - RNA, 19 nt, Artificial Sequence
  Description of Artificial Sequence: Synthetic oligonucleotide
gucuugcagcuguuggauu

SEQ ID NO: 2961720 - RNA, 19 nt, Artificial Sequence
  Description of Artificial Sequence: Synthetic oligonucleotide
guggaggaguuggguaucu

SEQ ID NO: 2961721 - RNA, 19 nt, Artificial Sequence
  Description of Artificial Sequence: Synthetic oligonucleotide
gccuguggauguuucucgu

SEQ ID NO: 2961722 - RNA, 19 nt, Artificial Sequence
  Description of Artificial Sequence: Synthetic oligonucleotide
uagcucucaugggcauauu

SEQ ID NO: 2961723 - RNA, 19 nt, Artificial Sequence
  Description of Artificial Sequence: Synthetic oligonucleotide
caggcugcuuucagguguu

SEQ ID NO: 2961724 - RNA, 19 nt, Artificial Sequence
  Description of Artificial Sequence: Synthetic oligonucleotide
gcuguuggauuugucuuuu

SEQ ID NO: 2961725 - RNA, 19 nt, Artificial Sequence
  Description of Artificial Sequence: Synthetic oligonucleotide
ggcagugugugaacuggau

SEQ ID NO: 2961726 - RNA, 19 nt, Artificial Sequence
  Description of Artificial Sequence: Synthetic oligonucleotide
gcccgcucagcugccagca

SEQ ID NO: 2961727 - RNA, 19 nt, Artificial Sequence
  Description of Artificial Sequence: Synthetic oligonucleotide
cuccugugagcuggugucu

SEQ ID NO: 2961728 - RNA, 19 nt, Artificial Sequence
  Description of Artificial Sequence: Synthetic oligonucleotide
cugugagcuggugucuuuu

SEQ ID NO: 2961729 - RNA, 19 nt, Artificial Sequence
  Description of Artificial Sequence: Synthetic oligonucleotide
ccucgggucuuugguggug

SEQ ID NO: 2961730 - RNA, 19 nt, Artificial Sequence
  Description of Artificial Sequence: Synthetic oligonucleotide
ggcugcuuucagguguuau

SEQ ID NO: 2961731 - RNA, 19 nt, Artificial Sequence
  Description of Artificial Sequence: Synthetic oligonucleotide
cccgcucagcugccagcag

SEQ ID NO: 2961732 - RNA, 19 nt, Artificial Sequence
  Description of Artificial Sequence: Synthetic oligonucleotide
aggcugcuuucagguguua

SEQ ID NO: 2961733 - RNA, 19 nt, Artificial Sequence
  Description of Artificial Sequence: Synthetic oligonucleotide
cuugggcaccaggcagugu

SEQ ID NO: 2961734 - RNA, 19 nt, Artificial Sequence
  Description of Artificial Sequence: Synthetic oligonucleotide
cguggagccucagguagua

SEQ ID NO: 2961735 - RNA, 19 nt, Artificial Sequence
  Description of Artificial Sequence: Synthetic oligonucleotide
ccguccuaacccgaaggau

SEQ ID NO: 2961736 - RNA, 19 nt, Artificial Sequence
  Description of Artificial Sequence: Synthetic oligonucleotide
cgcuggccugggaggauga

SEQ ID NO: 2961737 - RNA, 19 nt, Artificial Sequence
  Description of Artificial Sequence: Synthetic oligonucleotide
cgucuccugugagcuggug

SEQ ID NO: 2961738 - RNA, 19 nt, Artificial Sequence
  Description of Artificial Sequence: Synthetic oligonucleotide
cccagaggcugugggucaa

SEQ ID NO: 2961739 - RNA, 19 nt, Artificial Sequence
  Description of Artificial Sequence: Synthetic oligonucleotide
cucgcuggccugggaggau

SEQ ID NO: 2961740 - RNA, 19 nt, Artificial Sequence
  Description of Artificial Sequence: Synthetic oligonucleotide
ccagaggcugugggucaaa

SEQ ID NO: 2961741 - RNA, 19 nt, Artificial Sequence
  Description of Artificial Sequence: Synthetic oligonucleotide
cgggucuuugguggugaua

SEQ ID NO: 2961742 - RNA, 19 nt, Artificial Sequence
  Description of Artificial Sequence: Synthetic oligonucleotide
ggggugucuugcagcuguu

SEQ ID NO: 2961743 - RNA, 19 nt, Artificial Sequence
  Description of Artificial Sequence: Synthetic oligonucleotide
ccgucuccugugagcuggu

SEQ ID NO: 2961744 - RNA, 19 nt, Artificial Sequence
  Description of Artificial Sequence: Synthetic oligonucleotide
ggaugacggcaggcugcuu

SEQ ID NO: 2961745 - RNA, 19 nt, Artificial Sequence
  Description of Artificial Sequence: Synthetic oligonucleotide
aacucgaaaagccuccucc

SEQ ID NO: 2961746 - RNA, 19 nt, Artificial Sequence
  Description of Artificial Sequence: Synthetic oligonucleotide
uucaucaucagguagccag

SEQ ID NO: 2961747 - RNA, 19 nt, Artificial Sequence
  Description of Artificial Sequence: Synthetic oligonucleotide
aaaagccuccuccagccgc

SEQ ID NO: 2961748 - RNA, 19 nt, Artificial Sequence
  Description of Artificial Sequence: Synthetic oligonucleotide
uugacgaacucgaaaagcc

SEQ ID NO: 2961749 - RNA, 19 nt, Artificial Sequence
  Description of Artificial Sequence: Synthetic oligonucleotide
aagacgaacugcgaggugg

SEQ ID NO: 2961750 - RNA, 19 nt, Artificial Sequence
  Description of Artificial Sequence: Synthetic oligonucleotide
uucuucaucaucagguagc

SEQ ID NO: 2961751 - RNA, 19 nt, Artificial Sequence
  Description of Artificial Sequence: Synthetic oligonucleotide
augaagcugaaguugggcg

SEQ ID NO: 2961752 - RNA, 19 nt, Artificial Sequence
  Description of Artificial Sequence: Synthetic oligonucleotide
aaguugggcgagaugaugc

SEQ ID NO: 2961753 - RNA, 19 nt, Artificial Sequence
  Description of Artificial Sequence: Synthetic oligonucleotide
ucagagaccagcccuaaca

SEQ ID NO: 2961754 - RNA, 19 nt, Artificial Sequence
  Description of Artificial Sequence: Synthetic oligonucleotide
cagguagccaggcagaugg

SEQ ID NO: 2961755 - RNA, 19 nt, Artificial Sequence
  Description of Artificial Sequence: Synthetic oligonucleotide
aguacggcaggcuacuggg

SEQ ID NO: 2961756 - RNA, 19 nt, Artificial Sequence
  Description of Artificial Sequence: Synthetic oligonucleotide
uguggugagcaccugagac

SEQ ID NO: 2961757 - RNA, 19 nt, Artificial Sequence
  Description of Artificial Sequence: Synthetic oligonucleotide
ugagacucgaacugcagca

SEQ ID NO: 2961758 - RNA, 19 nt, Artificial Sequence
  Description of Artificial Sequence: Synthetic oligonucleotide
aaguacggcaggcuacugg

SEQ ID NO: 2961759 - RNA, 19 nt, Artificial Sequence
  Description of Artificial Sequence: Synthetic oligonucleotide
agggcuagcagccucggcg

SEQ ID NO: 2961760 - RNA, 19 nt, Artificial Sequence
  Description of Artificial Sequence: Synthetic oligonucleotide
ugcacacccacagacaccg

SEQ ID NO: 2961761 - RNA, 19 nt, Artificial Sequence
  Description of Artificial Sequence: Synthetic oligonucleotide
cugaagacgaacugcgagg

SEQ ID NO: 2961762 - RNA, 19 nt, Artificial Sequence
  Description of Artificial Sequence: Synthetic oligonucleotide
ugcuugacgaacucgaaaa

SEQ ID NO: 2961763 - RNA, 19 nt, Artificial Sequence
  Description of Artificial Sequence: Synthetic oligonucleotide
aagcugaagacgaacugcg

SEQ ID NO: 2961764 - RNA, 19 nt, Artificial Sequence
  Description of Artificial Sequence: Synthetic oligonucleotide
ucaucaucagguagccagg

SEQ ID NO: 2961765 - RNA, 19 nt, Artificial Sequence
  Description of Artificial Sequence: Synthetic oligonucleotide
cuggacuugguguucagag

SEQ ID NO: 2961766 - RNA, 19 nt, Artificial Sequence
  Description of Artificial Sequence: Synthetic oligonucleotide
gaagcugaagacgaacugc

SEQ ID NO: 2961767 - RNA, 19 nt, Artificial Sequence
  Description of Artificial Sequence: Synthetic oligonucleotide
agagaccagcccuaacagc

SEQ ID NO: 2961768 - RNA, 19 nt, Artificial Sequence
  Description of Artificial Sequence: Synthetic oligonucleotide
uugggcgagaugaugcucc

SEQ ID NO: 2961769 - RNA, 19 nt, Artificial Sequence
  Description of Artificial Sequence: Synthetic oligonucleotide
ugaagcugaaguugggcga

SEQ ID NO: 2961770 - RNA, 19 nt, Artificial Sequence
  Description of Artificial Sequence: Synthetic oligonucleotide
ucgaaaagccuccuccagc

SEQ ID NO: 2961771 - RNA, 19 nt, Artificial Sequence
  Description of Artificial Sequence: Synthetic oligonucleotide
agacucgaacugcagcagc

SEQ ID NO: 2961772 - RNA, 19 nt, Artificial Sequence
  Description of Artificial Sequence: Synthetic oligonucleotide
cuugacgaacucgaaaagc

SEQ ID NO: 2961773 - RNA, 19 nt, Artificial Sequence
  Description of Artificial Sequence: Synthetic oligonucleotide
acuugcugcucgcaugugg

SEQ ID NO: 2961774 - RNA, 19 nt, Artificial Sequence
  Description of Artificial Sequence: Synthetic oligonucleotide
agucccuacuugcugcucg

SEQ ID NO: 2961775 - RNA, 19 nt, Artificial Sequence
  Description of Artificial Sequence: Synthetic oligonucleotide
cuugcugcucgcauguggc

SEQ ID NO: 2961776 - RNA, 19 nt, Artificial Sequence
  Description of Artificial Sequence: Synthetic oligonucleotide
ugguguucagagaccagcc

SEQ ID NO: 2961777 - RNA, 19 nt, Artificial Sequence
  Description of Artificial Sequence: Synthetic oligonucleotide
uugguguucagagaccagc

SEQ ID NO: 2961778 - RNA, 19 nt, Artificial Sequence
  Description of Artificial Sequence: Synthetic oligonucleotide
gacaccgggaagcugaaga

SEQ ID NO: 2961779 - RNA, 19 nt, Artificial Sequence
  Description of Artificial Sequence: Synthetic oligonucleotide
agcaccugagacucgaacu

SEQ ID NO: 2961780 - RNA, 19 nt, Artificial Sequence
  Description of Artificial Sequence: Synthetic oligonucleotide
acaccgggaagcugaagac

SEQ ID NO: 2961781 - RNA, 19 nt, Artificial Sequence
  Description of Artificial Sequence: Synthetic oligonucleotide
ugacgaacucgaaaagccu

SEQ ID NO: 2961782 - RNA, 19 nt, Artificial Sequence
  Description of Artificial Sequence: Synthetic oligonucleotide
cugaaguugggcgagauga

SEQ ID NO: 2961783 - RNA, 19 nt, Artificial Sequence
  Description of Artificial Sequence: Synthetic oligonucleotide
ucuucaucaucagguagcc

SEQ ID NO: 2961784 - RNA, 19 nt, Artificial Sequence
  Description of Artificial Sequence: Synthetic oligonucleotide
gauguggugagcaccugag

SEQ ID NO: 2961785 - RNA, 19 nt, Artificial Sequence
  Description of Artificial Sequence: Synthetic oligonucleotide
acgaacucgaaaagccucc

SEQ ID NO: 2961786 - RNA, 19 nt, Artificial Sequence
  Description of Artificial Sequence: Synthetic oligonucleotide
ugcaaguacggcaggcuac

SEQ ID NO: 2961787 - RNA, 19 nt, Artificial Sequence
  Description of Artificial Sequence: Synthetic oligonucleotide
ugaagacgaacugcgaggu

SEQ ID NO: 2961788 - RNA, 19 nt, Artificial Sequence
  Description of Artificial Sequence: Synthetic oligonucleotide
guagccaggcagauggugg

SEQ ID NO: 2961789 - RNA, 19 nt, Artificial Sequence
  Description of Artificial Sequence: Synthetic oligonucleotide
cuggucagucccuacuugc

SEQ ID NO: 2961790 - RNA, 19 nt, Artificial Sequence
  Description of Artificial Sequence: Synthetic oligonucleotide
cugagacucgaacugcagc

SEQ ID NO: 2961791 - RNA, 19 nt, Artificial Sequence
  Description of Artificial Sequence: Synthetic oligonucleotide
gaugcuccugcgcugcuug

SEQ ID NO: 2961792 - RNA, 19 nt, Artificial Sequence
  Description of Artificial Sequence: Synthetic oligonucleotide
gaagcugaaguugggcgag

SEQ ID NO: 2961793 - RNA, 19 nt, Artificial Sequence
  Description of Artificial Sequence: Synthetic oligonucleotide
aagggcuagcagccucggc

SEQ ID NO: 2961794 - RNA, 19 nt, Artificial Sequence
  Description of Artificial Sequence: Synthetic oligonucleotide
caugaagcugaaguugggc

SEQ ID NO: 2961795 - RNA, 19 nt, Artificial Sequence
  Description of Artificial Sequence: Synthetic oligonucleotide
gcugaagacgaacugcgag

SEQ ID NO: 2961796 - RNA, 19 nt, Artificial Sequence
  Description of Artificial Sequence: Synthetic oligonucleotide
cagagaccagcccuaacag

SEQ ID NO: 2961797 - RNA, 19 nt, Artificial Sequence
  Description of Artificial Sequence: Synthetic oligonucleotide
gaccagcccuaacagcugg

SEQ ID NO: 2961798 - RNA, 19 nt, Artificial Sequence
  Description of Artificial Sequence: Synthetic oligonucleotide
acucgaaaagccuccucca

SEQ ID NO: 2961799 - RNA, 19 nt, Artificial Sequence
  Description of Artificial Sequence: Synthetic oligonucleotide
gaugaugcuccugcgcugc

SEQ ID NO: 2961800 - RNA, 19 nt, Artificial Sequence
  Description of Artificial Sequence: Synthetic oligonucleotide
uguucagagaccagcccua

SEQ ID NO: 2961801 - RNA, 19 nt, Artificial Sequence
  Description of Artificial Sequence: Synthetic oligonucleotide
gaaguugggcgagaugaug

SEQ ID NO: 2961802 - RNA, 19 nt, Artificial Sequence
  Description of Artificial Sequence: Synthetic oligonucleotide
uggacuugguguucagaga

SEQ ID NO: 2961803 - RNA, 19 nt, Artificial Sequence
  Description of Artificial Sequence: Synthetic oligonucleotide
acagacaccgggaagcuga

SEQ ID NO: 2961804 - RNA, 19 nt, Artificial Sequence
  Description of Artificial Sequence: Synthetic oligonucleotide
cuugcacaucccuggcugg

SEQ ID NO: 2961805 - RNA, 19 nt, Artificial Sequence
  Description of Artificial Sequence: Synthetic oligonucleotide
cucgaacugcagcagcugc

SEQ ID NO: 2961806 - RNA, 19 nt, Artificial Sequence
  Description of Artificial Sequence: Synthetic oligonucleotide
acuugguguucagagacca

SEQ ID NO: 2961807 - RNA, 19 nt, Artificial Sequence
  Description of Artificial Sequence: Synthetic oligonucleotide
gagaugaugcuccugcgcu

SEQ ID NO: 2961808 - RNA, 19 nt, Artificial Sequence
  Description of Artificial Sequence: Synthetic oligonucleotide
gacgaacucgaaaagccuc

SEQ ID NO: 2961809 - RNA, 19 nt, Artificial Sequence
  Description of Artificial Sequence: Synthetic oligonucleotide
ggcgagaugaugcuccugc

SEQ ID NO: 2961810 - RNA, 19 nt, Artificial Sequence
  Description of Artificial Sequence: Synthetic oligonucleotide
cucgaaaagccuccuccag

SEQ ID NO: 2961811 - RNA, 19 nt, Artificial Sequence
  Description of Artificial Sequence: Synthetic oligonucleotide
acuggucagucccuacuug

SEQ ID NO: 2961812 - RNA, 19 nt, Artificial Sequence
  Description of Artificial Sequence: Synthetic oligonucleotide
ucgcauguggcuugcacau

SEQ ID NO: 2961813 - RNA, 19 nt, Artificial Sequence
  Description of Artificial Sequence: Synthetic oligonucleotide
uggucagucccuacuugcu

SEQ ID NO: 2961814 - RNA, 19 nt, Artificial Sequence
  Description of Artificial Sequence: Synthetic oligonucleotide
cugaucuggagaugcccgc

SEQ ID NO: 2961815 - RNA, 19 nt, Artificial Sequence
  Description of Artificial Sequence: Synthetic oligonucleotide
agaugaugcuccugcgcug

SEQ ID NO: 2961816 - RNA, 19 nt, Artificial Sequence
  Description of Artificial Sequence: Synthetic oligonucleotide
ugugcaaguacggcaggcu

SEQ ID NO: 2961817 - RNA, 19 nt, Artificial Sequence
  Description of Artificial Sequence: Synthetic oligonucleotide
ugaaguugggcgagaugau

SEQ ID NO: 2961818 - RNA, 19 nt, Artificial Sequence
  Description of Artificial Sequence: Synthetic oligonucleotide
aguugggcgagaugaugcu

SEQ ID NO: 2961819 - RNA, 19 nt, Artificial Sequence
  Description of Artificial Sequence: Synthetic oligonucleotide
gcauguggcuugcacaucc

SEQ ID NO: 2961820 - RNA, 19 nt, Artificial Sequence
  Description of Artificial Sequence: Synthetic oligonucleotide
gagaccagcccuaacagcu

SEQ ID NO: 2961821 - RNA, 19 nt, Artificial Sequence
  Description of Artificial Sequence: Synthetic oligonucleotide
gagacucgaacugcagcag

SEQ ID NO: 2961822 - RNA, 19 nt, Artificial Sequence
  Description of Artificial Sequence: Synthetic oligonucleotide
ugaucuggagaugcccgcc

SEQ ID NO: 2961823 - RNA, 19 nt, Artificial Sequence
  Description of Artificial Sequence: Synthetic oligonucleotide
gagcaccugagacucgaac

SEQ ID NO: 2961824 - RNA, 19 nt, Artificial Sequence
  Description of Artificial Sequence: Synthetic oligonucleotide
cuugguguucagagaccag

SEQ ID NO: 2961825 - RNA, 19 nt, Artificial Sequence
  Description of Artificial Sequence: Synthetic oligonucleotide
gaagacgaacugcgaggug

SEQ ID NO: 2961826 - RNA, 19 nt, Artificial Sequence
  Description of Artificial Sequence: Synthetic oligonucleotide
gcugaucuggagaugcccg

SEQ ID NO: 2961827 - RNA, 19 nt, Artificial Sequence
  Description of Artificial Sequence: Synthetic oligonucleotide
aucaucagguagccaggca

SEQ ID NO: 2961828 - RNA, 19 nt, Artificial Sequence
  Description of Artificial Sequence: Synthetic oligonucleotide
cucgcauguggcuugcaca

SEQ ID NO: 2961829 - RNA, 19 nt, Artificial Sequence
  Description of Artificial Sequence: Synthetic oligonucleotide
cgaaaagccuccuccagcc

SEQ ID NO: 2961830 - RNA, 19 nt, Artificial Sequence
  Description of Artificial Sequence: Synthetic oligonucleotide
caucaucagguagccaggc

SEQ ID NO: 2961831 - RNA, 19 nt, Artificial Sequence
  Description of Artificial Sequence: Synthetic oligonucleotide
gcaccugagacucgaacug

SEQ ID NO: 2961832 - RNA, 19 nt, Artificial Sequence
  Description of Artificial Sequence: Synthetic oligonucleotide
uucagagaccagcccuaac

SEQ ID NO: 2961833 - RNA, 19 nt, Artificial Sequence
  Description of Artificial Sequence: Synthetic oligonucleotide
cauguggcuugcacauccc

SEQ ID NO: 2961834 - RNA, 19 nt, Artificial Sequence
  Description of Artificial Sequence: Synthetic oligonucleotide
gacuugguguucagagacc

SEQ ID NO: 2961835 - RNA, 19 nt, Artificial Sequence
  Description of Artificial Sequence: Synthetic oligonucleotide
gcuugacgaacucgaaaag

SEQ ID NO: 2961836 - RNA, 19 nt, Artificial Sequence
  Description of Artificial Sequence: Synthetic oligonucleotide
accgggaagcugaagacga

SEQ ID NO: 2961837 - RNA, 19 nt, Artificial Sequence
  Description of Artificial Sequence: Synthetic oligonucleotide
caccgggaagcugaagacg

SEQ ID NO: 2961838 - RNA, 19 nt, Artificial Sequence
  Description of Artificial Sequence: Synthetic oligonucleotide
agacgaacugcgagguggg

SEQ ID NO: 2961839 - RNA, 19 nt, Artificial Sequence
  Description of Artificial Sequence: Synthetic oligonucleotide
gguguucagagaccagccc

SEQ ID NO: 2961840 - RNA, 19 nt, Artificial Sequence
  Description of Artificial Sequence: Synthetic oligonucleotide
uggcuugcacaucccuggc

SEQ ID NO: 2961841 - RNA, 19 nt, Artificial Sequence
  Description of Artificial Sequence: Synthetic oligonucleotide
gaacucgaaaagccuccuc

SEQ ID NO: 2961842 - RNA, 19 nt, Artificial Sequence
  Description of Artificial Sequence: Synthetic oligonucleotide
aaagccuccuccagccgca

SEQ ID NO: 2961843 - RNA, 19 nt, Artificial Sequence
  Description of Artificial Sequence: Synthetic oligonucleotide
uggcugaucuggagaugcc

SEQ ID NO: 2961844 - RNA, 19 nt, Artificial Sequence
  Description of Artificial Sequence: Synthetic oligonucleotide
auguggcuugcacaucccu

SEQ ID NO: 2961845 - RNA, 19 nt, Artificial Sequence
  Description of Artificial Sequence: Synthetic oligonucleotide
acccacagacaccgggaag

SEQ ID NO: 2961846 - RNA, 19 nt, Artificial Sequence
  Description of Artificial Sequence: Synthetic oligonucleotide
guguucagagaccagcccu

SEQ ID NO: 2961847 - RNA, 19 nt, Artificial Sequence
  Description of Artificial Sequence: Synthetic oligonucleotide
caucagguagccaggcaga

SEQ ID NO: 2961848 - RNA, 19 nt, Artificial Sequence
  Description of Artificial Sequence: Synthetic oligonucleotide
uccuccagccgcacgcgcu

SEQ ID NO: 2961849 - RNA, 19 nt, Artificial Sequence
  Description of Artificial Sequence: Synthetic oligonucleotide
acgcgcuucuucaucauca

SEQ ID NO: 2961850 - RNA, 19 nt, Artificial Sequence
  Description of Artificial Sequence: Synthetic oligonucleotide
gaagggcuagcagccucgg

SEQ ID NO: 2961851 - RNA, 19 nt, Artificial Sequence
  Description of Artificial Sequence: Synthetic oligonucleotide
ucggcggcgcaggaugugg

SEQ ID NO: 2961852 - RNA, 19 nt, Artificial Sequence
  Description of Artificial Sequence: Synthetic oligonucleotide
ucagguagccaggcagaug

SEQ ID NO: 2961853 - RNA, 19 nt, Artificial Sequence
  Description of Artificial Sequence: Synthetic oligonucleotide
cugugcaaguacggcaggc

SEQ ID NO: 2961854 - RNA, 19 nt, Artificial Sequence
  Description of Artificial Sequence: Synthetic oligonucleotide
ggcugugcaaguacggcag

SEQ ID NO: 2961855 - RNA, 19 nt, Artificial Sequence
  Description of Artificial Sequence: Synthetic oligonucleotide
ugcgcugcuugacgaacuc

SEQ ID NO: 2961856 - RNA, 19 nt, Artificial Sequence
  Description of Artificial Sequence: Synthetic oligonucleotide
gccgagugcacacccacag

SEQ ID NO: 2961857 - RNA, 19 nt, Artificial Sequence
  Description of Artificial Sequence: Synthetic oligonucleotide
auguggugagcaccugaga

SEQ ID NO: 2961858 - RNA, 19 nt, Artificial Sequence
  Description of Artificial Sequence: Synthetic oligonucleotide
agccgcacgcgcuucuuca

SEQ ID NO: 2961859 - RNA, 19 nt, Artificial Sequence
  Description of Artificial Sequence: Synthetic oligonucleotide
gggcuagcagccucggcgg

SEQ ID NO: 2961860 - RNA, 19 nt, Artificial Sequence
  Description of Artificial Sequence: Synthetic oligonucleotide
caccugagacucgaacugc

SEQ ID NO: 2961861 - RNA, 19 nt, Artificial Sequence
  Description of Artificial Sequence: Synthetic oligonucleotide
ggucagucccuacuugcug

SEQ ID NO: 2961862 - RNA, 19 nt, Artificial Sequence
  Description of Artificial Sequence: Synthetic oligonucleotide
cccacagacaccgggaagc

SEQ ID NO: 2961863 - RNA, 19 nt, Artificial Sequence
  Description of Artificial Sequence: Synthetic oligonucleotide
ggaagggcuagcagccucg

SEQ ID NO: 2961864 - RNA, 19 nt, Artificial Sequence
  Description of Artificial Sequence: Synthetic oligonucleotide
ccuacuugcugcucgcaug

SEQ ID NO: 2961865 - RNA, 19 nt, Artificial Sequence
  Description of Artificial Sequence: Synthetic oligonucleotide
acucgaacugcagcagcug

SEQ ID NO: 2961866 - RNA, 19 nt, Artificial Sequence
  Description of Artificial Sequence: Synthetic oligonucleotide
gcccggaagggcuagcagc

SEQ ID NO: 2961867 - RNA, 19 nt, Artificial Sequence
  Description of Artificial Sequence: Synthetic oligonucleotide
gucccuacuugcugcucgc

SEQ ID NO: 2961868 - RNA, 19 nt, Artificial Sequence
  Description of Artificial Sequence: Synthetic oligonucleotide
gacgaacugcgaggugggg

SEQ ID NO: 2961869 - RNA, 19 nt, Artificial Sequence
  Description of Artificial Sequence: Synthetic oligonucleotide
cuagcagccucggcggcgc

SEQ ID NO: 2961870 - RNA, 19 nt, Artificial Sequence
  Description of Artificial Sequence: Synthetic oligonucleotide
uugcugcucgcauguggcu

SEQ ID NO: 2961871 - RNA, 19 nt, Artificial Sequence
  Description of Artificial Sequence: Synthetic oligonucleotide
cccggaagggcuagcagcc

SEQ ID NO: 2961872 - RNA, 19 nt, Artificial Sequence
  Description of Artificial Sequence: Synthetic oligonucleotide
gcuccugcgcugcuugacg

SEQ ID NO: 2961873 - RNA, 19 nt, Artificial Sequence
  Description of Artificial Sequence: Synthetic oligonucleotide
gcaggauguggugagcacc

SEQ ID NO: 2961874 - RNA, 19 nt, Artificial Sequence
  Description of Artificial Sequence: Synthetic oligonucleotide
cgagugcacacccacagac

SEQ ID NO: 2961875 - RNA, 19 nt, Artificial Sequence
  Description of Artificial Sequence: Synthetic oligonucleotide
gcgagaugaugcuccugcg

SEQ ID NO: 2961876 - RNA, 19 nt, Artificial Sequence
  Description of Artificial Sequence: Synthetic oligonucleotide
gagugcacacccacagaca

SEQ ID NO: 2961877 - RNA, 19 nt, Artificial Sequence
  Description of Artificial Sequence: Synthetic oligonucleotide
guggugagcaccugagacu

SEQ ID NO: 2961878 - RNA, 19 nt, Artificial Sequence
  Description of Artificial Sequence: Synthetic oligonucleotide
ugggcgagaugaugcuccu

SEQ ID NO: 2961879 - RNA, 19 nt, Artificial Sequence
  Description of Artificial Sequence: Synthetic oligonucleotide
cugcuugacgaacucgaaa

SEQ ID NO: 2961880 - RNA, 19 nt, Artificial Sequence
  Description of Artificial Sequence: Synthetic oligonucleotide
ugagcaccugagacucgaa

SEQ ID NO: 2961881 - RNA, 19 nt, Artificial Sequence
  Description of Artificial Sequence: Synthetic oligonucleotide
guacggcaggcuacugggg

SEQ ID NO: 2961882 - RNA, 19 nt, Artificial Sequence
  Description of Artificial Sequence: Synthetic oligonucleotide
gguagccaggcagauggug

SEQ ID NO: 2961883 - RNA, 19 nt, Artificial Sequence
  Description of Artificial Sequence: Synthetic oligonucleotide
accugagacucgaacugca

SEQ ID NO: 2961884 - RNA, 19 nt, Artificial Sequence
  Description of Artificial Sequence: Synthetic oligonucleotide
ggauguggugagcaccuga

SEQ ID NO: 2961885 - RNA, 19 nt, Artificial Sequence
  Description of Artificial Sequence: Synthetic oligonucleotide
cuacuugcugcucgcaugu

SEQ ID NO: 2961886 - RNA, 19 nt, Artificial Sequence
  Description of Artificial Sequence: Synthetic oligonucleotide
ggcugaucuggagaugccc

SEQ ID NO: 2961887 - RNA, 19 nt, Artificial Sequence
  Description of Artificial Sequence: Synthetic oligonucleotide
gcgcuucuucaucaucagg

SEQ ID NO: 2961888 - RNA, 19 nt, Artificial Sequence
  Description of Artificial Sequence: Synthetic oligonucleotide
gugagcaccugagacucga

SEQ ID NO: 2961889 - RNA, 19 nt, Artificial Sequence
  Description of Artificial Sequence: Synthetic oligonucleotide
gcugugcaaguacggcagg

SEQ ID NO: 2961890 - RNA, 19 nt, Artificial Sequence
  Description of Artificial Sequence: Synthetic oligonucleotide
gugcaaguacggcaggcua

SEQ ID NO: 2961891 - RNA, 19 nt, Artificial Sequence
  Description of Artificial Sequence: Synthetic oligonucleotide
gaucuggagaugcccgccu

SEQ ID NO: 2961892 - RNA, 19 nt, Artificial Sequence
  Description of Artificial Sequence: Synthetic oligonucleotide
gccuccuccagccgcacgc

SEQ ID NO: 2961893 - RNA, 19 nt, Artificial Sequence
  Description of Artificial Sequence: Synthetic oligonucleotide
gcugcucgcauguggcuug

SEQ ID NO: 2961894 - RNA, 19 nt, Artificial Sequence
  Description of Artificial Sequence: Synthetic oligonucleotide
gggcugugcaaguacggca

SEQ ID NO: 2961895 - RNA, 19 nt, Artificial Sequence
  Description of Artificial Sequence: Synthetic oligonucleotide
gacucgaacugcagcagcu

SEQ ID NO: 2961896 - RNA, 19 nt, Artificial Sequence
  Description of Artificial Sequence: Synthetic oligonucleotide
uccagccgcacgcgcuucu

SEQ ID NO: 2961897 - RNA, 19 nt, Artificial Sequence
  Description of Artificial Sequence: Synthetic oligonucleotide
ccugagacucgaacugcag

SEQ ID NO: 2961898 - RNA, 19 nt, Artificial Sequence
  Description of Artificial Sequence: Synthetic oligonucleotide
aucagguagccaggcagau

SEQ ID NO: 2961899 - RNA, 19 nt, Artificial Sequence
  Description of Artificial Sequence: Synthetic oligonucleotide
ugcugcucgcauguggcuu

SEQ ID NO: 2961900 - RNA, 19 nt, Artificial Sequence
  Description of Artificial Sequence: Synthetic oligonucleotide
uccugcgcugcuugacgaa

SEQ ID NO: 2961901 - RNA, 19 nt, Artificial Sequence
  Description of Artificial Sequence: Synthetic oligonucleotide
ugcuccugcgcugcuugac

SEQ ID NO: 2961902 - RNA, 19 nt, Artificial Sequence
  Description of Artificial Sequence: Synthetic oligonucleotide
caggauguggugagcaccu

SEQ ID NO: 2961903 - RNA, 19 nt, Artificial Sequence
  Description of Artificial Sequence: Synthetic oligonucleotide
cacgcgcuucuucaucauc

SEQ ID NO: 2961904 - RNA, 19 nt, Artificial Sequence
  Description of Artificial Sequence: Synthetic oligonucleotide
guugggcgagaugaugcuc

SEQ ID NO: 2961905 - RNA, 19 nt, Artificial Sequence
  Description of Artificial Sequence: Synthetic oligonucleotide
cuccugcgcugcuugacga

SEQ ID NO: 2961906 - RNA, 19 nt, Artificial Sequence
  Description of Artificial Sequence: Synthetic oligonucleotide
accagcccuaacagcuggg

SEQ ID NO: 2961907 - RNA, 19 nt, Artificial Sequence
  Description of Artificial Sequence: Synthetic oligonucleotide
cgagaugaugcuccugcgc

SEQ ID NO: 2961908 - RNA, 19 nt, Artificial Sequence
  Description of Artificial Sequence: Synthetic oligonucleotide
gcuucuucaucaucaggua

SEQ ID NO: 2961909 - RNA, 19 nt, Artificial Sequence
  Description of Artificial Sequence: Synthetic oligonucleotide
cccgcaggggcccggaagg

SEQ ID NO: 2961910 - RNA, 19 nt, Artificial Sequence
  Description of Artificial Sequence: Synthetic oligonucleotide
gccucggcggcgcaggaug

SEQ ID NO: 2961911 - RNA, 19 nt, Artificial Sequence
  Description of Artificial Sequence: Synthetic oligonucleotide
gugcacacccacagacacc

SEQ ID NO: 2961912 - RNA, 19 nt, Artificial Sequence
  Description of Artificial Sequence: Synthetic oligonucleotide
uacuugcugcucgcaugug

SEQ ID NO: 2961913 - RNA, 19 nt, Artificial Sequence
  Description of Artificial Sequence: Synthetic oligonucleotide
augaugcuccugcgcugcu

SEQ ID NO: 2961914 - RNA, 19 nt, Artificial Sequence
  Description of Artificial Sequence: Synthetic oligonucleotide
gcucgcauguggcuugcac

SEQ ID NO: 2961915 - RNA, 19 nt, Artificial Sequence
  Description of Artificial Sequence: Synthetic oligonucleotide
ggggcugugcaaguacggc

SEQ ID NO: 2961916 - RNA, 19 nt, Artificial Sequence
  Description of Artificial Sequence: Synthetic oligonucleotide
gcuagcagccucggcggcg

SEQ ID NO: 2961917 - RNA, 19 nt, Artificial Sequence
  Description of Artificial Sequence: Synthetic oligonucleotide
ucccuacuugcugcucgca

SEQ ID NO: 2961918 - RNA, 19 nt, Artificial Sequence
  Description of Artificial Sequence: Synthetic oligonucleotide
acccuggacuugguguuca

SEQ ID NO: 2961919 - RNA, 19 nt, Artificial Sequence
  Description of Artificial Sequence: Synthetic oligonucleotide
agacaccgggaagcugaag

SEQ ID NO: 2961920 - RNA, 19 nt, Artificial Sequence
  Description of Artificial Sequence: Synthetic oligonucleotide
caaguacggcaggcuacug

SEQ ID NO: 2961921 - RNA, 19 nt, Artificial Sequence
  Description of Artificial Sequence: Synthetic oligonucleotide
ccagcccuaacagcugggg

SEQ ID NO: 2961922 - RNA, 19 nt, Artificial Sequence
  Description of Artificial Sequence: Synthetic oligonucleotide
aggauguggugagcaccug

SEQ ID NO: 2961923 - RNA, 19 nt, Artificial Sequence
  Description of Artificial Sequence: Synthetic oligonucleotide
augcuccugcgcugcuuga

SEQ ID NO: 2961924 - RNA, 19 nt, Artificial Sequence
  Description of Artificial Sequence: Synthetic oligonucleotide
gggccgacccuggacuugg

SEQ ID NO: 2961925 - RNA, 19 nt, Artificial Sequence
  Description of Artificial Sequence: Synthetic oligonucleotide
gggccgagugcacacccac

SEQ ID NO: 2961926 - RNA, 19 nt, Artificial Sequence
  Description of Artificial Sequence: Synthetic oligonucleotide
gacccuggacuugguguuc

SEQ ID NO: 2961927 - RNA, 19 nt, Artificial Sequence
  Description of Artificial Sequence: Synthetic oligonucleotide
ggcccggaagggcuagcag

SEQ ID NO: 2961928 - RNA, 19 nt, Artificial Sequence
  Description of Artificial Sequence: Synthetic oligonucleotide
cacccacagacaccgggaa

SEQ ID NO: 2961929 - RNA, 19 nt, Artificial Sequence
  Description of Artificial Sequence: Synthetic oligonucleotide
cuucaucaucagguagcca

SEQ ID NO: 2961930 - RNA, 19 nt, Artificial Sequence
  Description of Artificial Sequence: Synthetic oligonucleotide
agccaggcagaugguggcu

SEQ ID NO: 2961931 - RNA, 19 nt, Artificial Sequence
  Description of Artificial Sequence: Synthetic oligonucleotide
agcagccucggcggcgcag

SEQ ID NO: 2961932 - RNA, 19 nt, Artificial Sequence
  Description of Artificial Sequence: Synthetic oligonucleotide
gcagccucggcggcgcagg

SEQ ID NO: 2961933 - RNA, 19 nt, Artificial Sequence
  Description of Artificial Sequence: Synthetic oligonucleotide
gcgcugcuugacgaacucg

SEQ ID NO: 2961934 - RNA, 19 nt, Artificial Sequence
  Description of Artificial Sequence: Synthetic oligonucleotide
ggcggcgcaggauguggug

SEQ ID NO: 2961935 - RNA, 19 nt, Artificial Sequence
  Description of Artificial Sequence: Synthetic oligonucleotide
ccccucuccccgcaggggc

SEQ ID NO: 2961936 - RNA, 19 nt, Artificial Sequence
  Description of Artificial Sequence: Synthetic oligonucleotide
ucuccccgcaggggcccgg

SEQ ID NO: 2961937 - RNA, 19 nt, Artificial Sequence
  Description of Artificial Sequence: Synthetic oligonucleotide
cugcucgcauguggcuugc

SEQ ID NO: 2961938 - RNA, 19 nt, Artificial Sequence
  Description of Artificial Sequence: Synthetic oligonucleotide
gccaggcagaugguggcug

SEQ ID NO: 2961939 - RNA, 19 nt, Artificial Sequence
  Description of Artificial Sequence: Synthetic oligonucleotide
cagccgcacgcgcuucuuc

SEQ ID NO: 2961940 - RNA, 19 nt, Artificial Sequence
  Description of Artificial Sequence: Synthetic oligonucleotide
aggggcccggaagggcuag

SEQ ID NO: 2961941 - RNA, 19 nt, Artificial Sequence
  Description of Artificial Sequence: Synthetic oligonucleotide
ggcuagcagccucggcggc

SEQ ID NO: 2961942 - RNA, 19 nt, Artificial Sequence
  Description of Artificial Sequence: Synthetic oligonucleotide
cgcgcuucuucaucaucag

SEQ ID NO: 2961943 - RNA, 19 nt, Artificial Sequence
  Description of Artificial Sequence: Synthetic oligonucleotide
cagacaccgggaagcugaa

SEQ ID NO: 2961944 - RNA, 19 nt, Artificial Sequence
  Description of Artificial Sequence: Synthetic oligonucleotide
ccugcgcugcuugacgaac

SEQ ID NO: 2961945 - RNA, 19 nt, Artificial Sequence
  Description of Artificial Sequence: Synthetic oligonucleotide
uagcagccucggcggcgca

SEQ ID NO: 2961946 - RNA, 19 nt, Artificial Sequence
  Description of Artificial Sequence: Synthetic oligonucleotide
ugcucgcauguggcuugca

SEQ ID NO: 2961947 - RNA, 19 nt, Artificial Sequence
  Description of Artificial Sequence: Synthetic oligonucleotide
cugcgcugcuugacgaacu

SEQ ID NO: 2961948 - RNA, 19 nt, Artificial Sequence
  Description of Artificial Sequence: Synthetic oligonucleotide
cagucccuacuugcugcuc

SEQ ID NO: 2961949 - RNA, 19 nt, Artificial Sequence
  Description of Artificial Sequence: Synthetic oligonucleotide
cacuggucagucccuacuu

SEQ ID NO: 2961950 - RNA, 19 nt, Artificial Sequence
  Description of Artificial Sequence: Synthetic oligonucleotide
gcaaguacggcaggcuacu

SEQ ID NO: 2961951 - RNA, 19 nt, Artificial Sequence
  Description of Artificial Sequence: Synthetic oligonucleotide
cucggcggcgcaggaugug

SEQ ID NO: 2961952 - RNA, 19 nt, Artificial Sequence
  Description of Artificial Sequence: Synthetic oligonucleotide
gcgcaggauguggugagca

SEQ ID NO: 2961953 - RNA, 19 nt, Artificial Sequence
  Description of Artificial Sequence: Synthetic oligonucleotide
cccacuggucagucccuac

SEQ ID NO: 2961954 - RNA, 19 nt, Artificial Sequence
  Description of Artificial Sequence: Synthetic oligonucleotide
ccgacccuggacuuggugu

SEQ ID NO: 2961955 - RNA, 19 nt, Artificial Sequence
  Description of Artificial Sequence: Synthetic oligonucleotide
cgcaggauguggugagcac

SEQ ID NO: 2961956 - RNA, 19 nt, Artificial Sequence
  Description of Artificial Sequence: Synthetic oligonucleotide
cgcacgcgcuucuucauca

SEQ ID NO: 2961957 - RNA, 19 nt, Artificial Sequence
  Description of Artificial Sequence: Synthetic oligonucleotide
cucuccccgcaggggcccg

SEQ ID NO: 2961958 - RNA, 19 nt, Artificial Sequence
  Description of Artificial Sequence: Synthetic oligonucleotide
uccccgcaggggcccggaa

SEQ ID NO: 2961959 - RNA, 19 nt, Artificial Sequence
  Description of Artificial Sequence: Synthetic oligonucleotide
ccccgcaggggcccggaag

SEQ ID NO: 2961960 - RNA, 19 nt, Artificial Sequence
  Description of Artificial Sequence: Synthetic oligonucleotide
ccaggcagaugguggcuga

SEQ ID NO: 2961961 - RNA, 19 nt, Artificial Sequence
  Description of Artificial Sequence: Synthetic oligonucleotide
cggcgcaggauguggugag

SEQ ID NO: 2961962 - RNA, 19 nt, Artificial Sequence
  Description of Artificial Sequence: Synthetic oligonucleotide
cccuggacuugguguucag

SEQ ID NO: 2961963 - RNA, 19 nt, Artificial Sequence
  Description of Artificial Sequence: Synthetic oligonucleotide
gcggcgcaggaugugguga

SEQ ID NO: 2961964 - RNA, 19 nt, Artificial Sequence
  Description of Artificial Sequence: Synthetic oligonucleotide
cuccagccgcacgcgcuuc

SEQ ID NO: 2961965 - RNA, 19 nt, Artificial Sequence
  Description of Artificial Sequence: Synthetic oligonucleotide
gggcgagaugaugcuccug

SEQ ID NO: 2961966 - RNA, 19 nt, Artificial Sequence
  Description of Artificial Sequence: Synthetic oligonucleotide
ccuggacuugguguucaga

SEQ ID NO: 2961967 - RNA, 19 nt, Artificial Sequence
  Description of Artificial Sequence: Synthetic oligonucleotide
ggggccgacccuggacuug

SEQ ID NO: 2961968 - RNA, 19 nt, Artificial Sequence
  Description of Artificial Sequence: Synthetic oligonucleotide
agccucggcggcgcaggau

SEQ ID NO: 2961969 - RNA, 19 nt, Artificial Sequence
  Description of Artificial Sequence: Synthetic oligonucleotide
ccgcacgcgcuucuucauc

SEQ ID NO: 2961970 - RNA, 19 nt, Artificial Sequence
  Description of Artificial Sequence: Synthetic oligonucleotide
gcacacccacagacaccgg

SEQ ID NO: 2961971 - RNA, 19 nt, Artificial Sequence
  Description of Artificial Sequence: Synthetic oligonucleotide
ccgagugcacacccacaga

SEQ ID NO: 2961972 - RNA, 19 nt, Artificial Sequence
  Description of Artificial Sequence: Synthetic oligonucleotide
ccacuggucagucccuacu

SEQ ID NO: 2961973 - RNA, 19 nt, Artificial Sequence
  Description of Artificial Sequence: Synthetic oligonucleotide
ggccgagugcacacccaca

SEQ ID NO: 2961974 - RNA, 19 nt, Artificial Sequence
  Description of Artificial Sequence: Synthetic oligonucleotide
caggggcccggaagggcua

SEQ ID NO: 2961975 - RNA, 19 nt, Artificial Sequence
  Description of Artificial Sequence: Synthetic oligonucleotide
gggcccggaagggcuagca

SEQ ID NO: 2961976 - RNA, 19 nt, Artificial Sequence
  Description of Artificial Sequence: Synthetic oligonucleotide
ccucuccccgcaggggccc

SEQ ID NO: 2961977 - RNA, 19 nt, Artificial Sequence
  Description of Artificial Sequence: Synthetic oligonucleotide
ccgcaggggcccggaaggg

SEQ ID NO: 2961978 - RNA, 19 nt, Artificial Sequence
  Description of Artificial Sequence: Synthetic oligonucleotide
ggggccgagugcacaccca

SEQ ID NO: 2961979 - RNA, 19 nt, Artificial Sequence
  Description of Artificial Sequence: Synthetic oligonucleotide
cagccucggcggcgcagga

SEQ ID NO: 2961980 - RNA, 19 nt, Artificial Sequence
  Description of Artificial Sequence: Synthetic oligonucleotide
ccgggaagcugaagacgaa

SEQ ID NO: 2961981 - RNA, 19 nt, Artificial Sequence
  Description of Artificial Sequence: Synthetic oligonucleotide
cccuacuugcugcucgcau

SEQ ID NO: 2961982 - RNA, 19 nt, Artificial Sequence
  Description of Artificial Sequence: Synthetic oligonucleotide
ggggcccggaagggcuagc

SEQ ID NO: 2961983 - RNA, 19 nt, Artificial Sequence
  Description of Artificial Sequence: Synthetic oligonucleotide
cgcauguggcuugcacauc

SEQ ID NO: 2961984 - RNA, 19 nt, Artificial Sequence
  Description of Artificial Sequence: Synthetic oligonucleotide
gcacgcgcuucuucaucau

SEQ ID NO: 2961985 - RNA, 19 nt, Artificial Sequence
  Description of Artificial Sequence: Synthetic oligonucleotide
gccgcacgcgcuucuucau

SEQ ID NO: 2961986 - RNA, 19 nt, Artificial Sequence
  Description of Artificial Sequence: Synthetic oligonucleotide
cgaacucgaaaagccuccu

SEQ ID NO: 2961987 - RNA, 19 nt, Artificial Sequence
  Description of Artificial Sequence: Synthetic oligonucleotide
ccucggcggcgcaggaugu

SEQ ID NO: 2961988 - RNA, 19 nt, Artificial Sequence
  Description of Artificial Sequence: Synthetic oligonucleotide
ccccacuggucagucccua

SEQ ID NO: 2961989 - RNA, 19 nt, Artificial Sequence
  Description of Artificial Sequence: Synthetic oligonucleotide
cggcggcgcaggauguggu

SEQ ID NO: 2961990 - RNA, 19 nt, Artificial Sequence
  Description of Artificial Sequence: Synthetic oligonucleotide
ggccgacccuggacuuggu

SEQ ID NO: 2961991 - RNA, 19 nt, Artificial Sequence
  Description of Artificial Sequence: Synthetic oligonucleotide
ccagccgcacgcgcuucuu

SEQ ID NO: 2961992 - RNA, 19 nt, Artificial Sequence
  Description of Artificial Sequence: Synthetic oligonucleotide
guuucauucaguuugauca

SEQ ID NO: 2961993 - RNA, 19 nt, Artificial Sequence
  Description of Artificial Sequence: Synthetic oligonucleotide
cuuguuggaacccacaucg

SEQ ID NO: 2961994 - RNA, 19 nt, Artificial Sequence
  Description of Artificial Sequence: Synthetic oligonucleotide
aguuugaucaaucuucuuc

SEQ ID NO: 2961995 - RNA, 19 nt, Artificial Sequence
  Description of Artificial Sequence: Synthetic oligonucleotide
ucuuguaucuucuucaucu

SEQ ID NO: 2961996 - RNA, 19 nt, Artificial Sequence
  Description of Artificial Sequence: Synthetic oligonucleotide
uuuacaguauauuuucucu

SEQ ID NO: 2961997 - RNA, 19 nt, Artificial Sequence
  Description of Artificial Sequence: Synthetic oligonucleotide
uauauuuucucugugugug

SEQ ID NO: 2961998 - RNA, 19 nt, Artificial Sequence
  Description of Artificial Sequence: Synthetic oligonucleotide
aguauauuuucucugugug

SEQ ID NO: 2961999 - RNA, 19 nt, Artificial Sequence
  Description of Artificial Sequence: Synthetic oligonucleotide
guguguuucauucaguuug

SEQ ID NO: 2962000 - RNA, 19 nt, Artificial Sequence
  Description of Artificial Sequence: Synthetic oligonucleotide
uccgaguacuugcagaagg

SEQ ID NO: 2962001 - RNA, 19 nt, Artificial Sequence
  Description of Artificial Sequence: Synthetic oligonucleotide
uuguuguccacagucaagg

SEQ ID NO: 2962002 - RNA, 19 nt, Artificial Sequence
  Description of Artificial Sequence: Synthetic oligonucleotide
uuacaguauauuuucucug

SEQ ID NO: 2962003 - RNA, 19 nt, Artificial Sequence
  Description of Artificial Sequence: Synthetic oligonucleotide
aacacgccguacuuguugg

SEQ ID NO: 2962004 - RNA, 19 nt, Artificial Sequence
  Description of Artificial Sequence: Synthetic oligonucleotide
aucuccuccgaguacuugc

SEQ ID NO: 2962005 - RNA, 19 nt, Artificial Sequence
  Description of Artificial Sequence: Synthetic oligonucleotide
uguaucuucuucaucuccu

SEQ ID NO: 2962006 - RNA, 19 nt, Artificial Sequence
  Description of Artificial Sequence: Synthetic oligonucleotide
uugaucaaucuucuucucc

SEQ ID NO: 2962007 - RNA, 19 nt, Artificial Sequence
  Description of Artificial Sequence: Synthetic oligonucleotide
cugacucgcauaaacacgc

SEQ ID NO: 2962008 - RNA, 19 nt, Artificial Sequence
  Description of Artificial Sequence: Synthetic oligonucleotide
uuguagggcacggugaugg

SEQ ID NO: 2962009 - RNA, 19 nt, Artificial Sequence
  Description of Artificial Sequence: Synthetic oligonucleotide
acuugcagaaggugugucc

SEQ ID NO: 2962010 - RNA, 19 nt, Artificial Sequence
  Description of Artificial Sequence: Synthetic oligonucleotide
uccacagucaaggaggugc

SEQ ID NO: 2962011 - RNA, 19 nt, Artificial Sequence
  Description of Artificial Sequence: Synthetic oligonucleotide
aaacacgccguacuuguug

SEQ ID NO: 2962012 - RNA, 19 nt, Artificial Sequence
  Description of Artificial Sequence: Synthetic oligonucleotide
gaagaagaagcgcuuguug

SEQ ID NO: 2962013 - RNA, 19 nt, Artificial Sequence
  Description of Artificial Sequence: Synthetic oligonucleotide
auaaacacgccguacuugu

SEQ ID NO: 2962014 - RNA, 19 nt, Artificial Sequence
  Description of Artificial Sequence: Synthetic oligonucleotide
uacaguauauuuucucugu

SEQ ID NO: 2962015 - RNA, 19 nt, Artificial Sequence
  Description of Artificial Sequence: Synthetic oligonucleotide
ucucuuuacaguauauuuu

SEQ ID NO: 2962016 - RNA, 19 nt, Artificial Sequence
  Description of Artificial Sequence: Synthetic oligonucleotide
ucaguuugaucaaucuucu

SEQ ID NO: 2962017 - RNA, 19 nt, Artificial Sequence
  Description of Artificial Sequence: Synthetic oligonucleotide
cuuuacaguauauuuucuc

SEQ ID NO: 2962018 - RNA, 19 nt, Artificial Sequence
  Description of Artificial Sequence: Synthetic oligonucleotide
uuggcccacaccuuguagg

SEQ ID NO: 2962019 - RNA, 19 nt, Artificial Sequence
  Description of Artificial Sequence: Synthetic oligonucleotide
ucacccugcaguagcaggg

SEQ ID NO: 2962020 - RNA, 19 nt, Artificial Sequence
  Description of Artificial Sequence: Synthetic oligonucleotide
uuguaucuucuucaucucc

SEQ ID NO: 2962021 - RNA, 19 nt, Artificial Sequence
  Description of Artificial Sequence: Synthetic oligonucleotide
auauuuucucugugugugg

SEQ ID NO: 2962022 - RNA, 19 nt, Artificial Sequence
  Description of Artificial Sequence: Synthetic oligonucleotide
uggaguugcgguagguggg

SEQ ID NO: 2962023 - RNA, 19 nt, Artificial Sequence
  Description of Artificial Sequence: Synthetic oligonucleotide
ucacugacucgcauaaaca

SEQ ID NO: 2962024 - RNA, 19 nt, Artificial Sequence
  Description of Artificial Sequence: Synthetic oligonucleotide
acuuguuggaacccacauc

SEQ ID NO: 2962025 - RNA, 19 nt, Artificial Sequence
  Description of Artificial Sequence: Synthetic oligonucleotide
uggagcugcucacaagcgg

SEQ ID NO: 2962026 - RNA, 19 nt, Artificial Sequence
  Description of Artificial Sequence: Synthetic oligonucleotide
guuguccacagucaaggag

SEQ ID NO: 2962027 - RNA, 19 nt, Artificial Sequence
  Description of Artificial Sequence: Synthetic oligonucleotide
cccacaucgaagaagaagc

SEQ ID NO: 2962028 - RNA, 19 nt, Artificial Sequence
  Description of Artificial Sequence: Synthetic oligonucleotide
ucuuuacaguauauuuucu

SEQ ID NO: 2962029 - RNA, 19 nt, Artificial Sequence
  Description of Artificial Sequence: Synthetic oligonucleotide
uguguuucauucaguuuga

SEQ ID NO: 2962030 - RNA, 19 nt, Artificial Sequence
  Description of Artificial Sequence: Synthetic oligonucleotide
cucacugacucgcauaaac

SEQ ID NO: 2962031 - RNA, 19 nt, Artificial Sequence
  Description of Artificial Sequence: Synthetic oligonucleotide
gacucgcauaaacacgccg

SEQ ID NO: 2962032 - RNA, 19 nt, Artificial Sequence
  Description of Artificial Sequence: Synthetic oligonucleotide
cuugcagaagguguguccg

SEQ ID NO: 2962033 - RNA, 19 nt, Artificial Sequence
  Description of Artificial Sequence: Synthetic oligonucleotide
uucuuccucacccugcagu

SEQ ID NO: 2962034 - RNA, 19 nt, Artificial Sequence
  Description of Artificial Sequence: Synthetic oligonucleotide
uauuuucucuguguguggc

SEQ ID NO: 2962035 - RNA, 19 nt, Artificial Sequence
  Description of Artificial Sequence: Synthetic oligonucleotide
guguguaugugugugugcg

SEQ ID NO: 2962036 - RNA, 19 nt, Artificial Sequence
  Description of Artificial Sequence: Synthetic oligonucleotide
cacugacucgcauaaacac

SEQ ID NO: 2962037 - RNA, 19 nt, Artificial Sequence
  Description of Artificial Sequence: Synthetic oligonucleotide
uguuggaacccacaucgaa

SEQ ID NO: 2962038 - RNA, 19 nt, Artificial Sequence
  Description of Artificial Sequence: Synthetic oligonucleotide
acaguauauuuucucugug

SEQ ID NO: 2962039 - RNA, 19 nt, Artificial Sequence
  Description of Artificial Sequence: Synthetic oligonucleotide
ucauucaguuugaucaauc

SEQ ID NO: 2962040 - RNA, 19 nt, Artificial Sequence
  Description of Artificial Sequence: Synthetic oligonucleotide
uguguguguguguaugugu

SEQ ID NO: 2962041 - RNA, 19 nt, Artificial Sequence
  Description of Artificial Sequence: Synthetic oligonucleotide
gaagguguguccgaacuug

SEQ ID NO: 2962042 - RNA, 19 nt, Artificial Sequence
  Description of Artificial Sequence: Synthetic oligonucleotide
acugacucgcauaaacacg

SEQ ID NO: 2962043 - RNA, 19 nt, Artificial Sequence
  Description of Artificial Sequence: Synthetic oligonucleotide
guuugaucaaucuucuucu

SEQ ID NO: 2962044 - RNA, 19 nt, Artificial Sequence
  Description of Artificial Sequence: Synthetic oligonucleotide
aaggaggugcccucgggca

SEQ ID NO: 2962045 - RNA, 19 nt, Artificial Sequence
  Description of Artificial Sequence: Synthetic oligonucleotide
acaucgaagaagaagcgcu

SEQ ID NO: 2962046 - RNA, 19 nt, Artificial Sequence
  Description of Artificial Sequence: Synthetic oligonucleotide
uuucauucaguuugaucaa

SEQ ID NO: 2962047 - RNA, 19 nt, Artificial Sequence
  Description of Artificial Sequence: Synthetic oligonucleotide
guguguccgaacuuggccc

SEQ ID NO: 2962048 - RNA, 19 nt, Artificial Sequence
  Description of Artificial Sequence: Synthetic oligonucleotide
acaagcggcccgcuucucc

SEQ ID NO: 2962049 - RNA, 19 nt, Artificial Sequence
  Description of Artificial Sequence: Synthetic oligonucleotide
ucaaggaggugcccucggg

SEQ ID NO: 2962050 - RNA, 19 nt, Artificial Sequence
  Description of Artificial Sequence: Synthetic oligonucleotide
gaacccacaucgaagaaga

SEQ ID NO: 2962051 - RNA, 19 nt, Artificial Sequence
  Description of Artificial Sequence: Synthetic oligonucleotide
cuuguuguccacagucaag

SEQ ID NO: 2962052 - RNA, 19 nt, Artificial Sequence
  Description of Artificial Sequence: Synthetic oligonucleotide
gaacuuggcccacaccuug

SEQ ID NO: 2962053 - RNA, 19 nt, Artificial Sequence
  Description of Artificial Sequence: Synthetic oligonucleotide
ugcaguagcagggucgcag

SEQ ID NO: 2962054 - RNA, 19 nt, Artificial Sequence
  Description of Artificial Sequence: Synthetic oligonucleotide
aguacuugcagaaggugug

SEQ ID NO: 2962055 - RNA, 19 nt, Artificial Sequence
  Description of Artificial Sequence: Synthetic oligonucleotide
ucgaagaagaagcgcuugu

SEQ ID NO: 2962056 - RNA, 19 nt, Artificial Sequence
  Description of Artificial Sequence: Synthetic oligonucleotide
uacuuguuggaacccacau

SEQ ID NO: 2962057 - RNA, 19 nt, Artificial Sequence
  Description of Artificial Sequence: Synthetic oligonucleotide
uggcccacaccuuguaggg

SEQ ID NO: 2962058 - RNA, 19 nt, Artificial Sequence
  Description of Artificial Sequence: Synthetic oligonucleotide
gguggagcugcucacaagc

SEQ ID NO: 2962059 - RNA, 19 nt, Artificial Sequence
  Description of Artificial Sequence: Synthetic oligonucleotide
uguguguaugugugugugc

SEQ ID NO: 2962060 - RNA, 19 nt, Artificial Sequence
  Description of Artificial Sequence: Synthetic oligonucleotide
uagggcacggugauggagu

SEQ ID NO: 2962061 - RNA, 19 nt, Artificial Sequence
  Description of Artificial Sequence: Synthetic oligonucleotide
ugugcguguguuucauuca

SEQ ID NO: 2962062 - RNA, 19 nt, Artificial Sequence
  Description of Artificial Sequence: Synthetic oligonucleotide
cucacccugcaguagcagg

SEQ ID NO: 2962063 - RNA, 19 nt, Artificial Sequence
  Description of Artificial Sequence: Synthetic oligonucleotide
uuugaucaaucuucuucuc

SEQ ID NO: 2962064 - RNA, 19 nt, Artificial Sequence
  Description of Artificial Sequence: Synthetic oligonucleotide
acccacaucgaagaagaag

SEQ ID NO: 2962065 - RNA, 19 nt, Artificial Sequence
  Description of Artificial Sequence: Synthetic oligonucleotide
aagaagcgcuuguugucca

SEQ ID NO: 2962066 - RNA, 19 nt, Artificial Sequence
  Description of Artificial Sequence: Synthetic oligonucleotide
uguguguguguguguaugu

SEQ ID NO: 2962067 - RNA, 19 nt, Artificial Sequence
  Description of Artificial Sequence: Synthetic oligonucleotide
acgccguacuuguuggaac

SEQ ID NO: 2962068 - RNA, 19 nt, Artificial Sequence
  Description of Artificial Sequence: Synthetic oligonucleotide
agcgguggucuccuccugc

SEQ ID NO: 2962069 - RNA, 19 nt, Artificial Sequence
  Description of Artificial Sequence: Synthetic oligonucleotide
cuucaccucacugacucgc

SEQ ID NO: 2962070 - RNA, 19 nt, Artificial Sequence
  Description of Artificial Sequence: Synthetic oligonucleotide
uguguguguaugugugugu

SEQ ID NO: 2962071 - RNA, 19 nt, Artificial Sequence
  Description of Artificial Sequence: Synthetic oligonucleotide
aagguguguccgaacuugg

SEQ ID NO: 2962072 - RNA, 19 nt, Artificial Sequence
  Description of Artificial Sequence: Synthetic oligonucleotide
cauaaacacgccguacuug

SEQ ID NO: 2962073 - RNA, 19 nt, Artificial Sequence
  Description of Artificial Sequence: Synthetic oligonucleotide
cacaucgaagaagaagcgc

SEQ ID NO: 2962074 - RNA, 19 nt, Artificial Sequence
  Description of Artificial Sequence: Synthetic oligonucleotide
cuuguaucuucuucaucuc

SEQ ID NO: 2962075 - RNA, 19 nt, Artificial Sequence
  Description of Artificial Sequence: Synthetic oligonucleotide
uccuccgaguacuugcaga

SEQ ID NO: 2962076 - RNA, 19 nt, Artificial Sequence
  Description of Artificial Sequence: Synthetic oligonucleotide
uguguccgaacuuggccca

SEQ ID NO: 2962077 - RNA, 19 nt, Artificial Sequence
  Description of Artificial Sequence: Synthetic oligonucleotide
gugugcguguguuucauuc

SEQ ID NO: 2962078 - RNA, 19 nt, Artificial Sequence
  Description of Artificial Sequence: Synthetic oligonucleotide
gugcguguguuucauucag

SEQ ID NO: 2962079 - RNA, 19 nt, Artificial Sequence
  Description of Artificial Sequence: Synthetic oligonucleotide
uguguguguguaugugugu

SEQ ID NO: 2962080 - RNA, 19 nt, Artificial Sequence
  Description of Artificial Sequence: Synthetic oligonucleotide
ucucccucugcuucucuug

SEQ ID NO: 2962081 - RNA, 19 nt, Artificial Sequence
  Description of Artificial Sequence: Synthetic oligonucleotide
agaagcgcuuguuguccac

SEQ ID NO: 2962082 - RNA, 19 nt, Artificial Sequence
  Description of Artificial Sequence: Synthetic oligonucleotide
ucuccuccgaguacuugca

SEQ ID NO: 2962083 - RNA, 19 nt, Artificial Sequence
  Description of Artificial Sequence: Synthetic oligonucleotide
gguguguccgaacuuggcc

SEQ ID NO: 2962084 - RNA, 19 nt, Artificial Sequence
  Description of Artificial Sequence: Synthetic oligonucleotide
aguagcagggucgcagcgg

SEQ ID NO: 2962085 - RNA, 19 nt, Artificial Sequence
  Description of Artificial Sequence: Synthetic oligonucleotide
auuuucucuguguguggcu

SEQ ID NO: 2962086 - RNA, 19 nt, Artificial Sequence
  Description of Artificial Sequence: Synthetic oligonucleotide
caaggaggugcccucgggc

SEQ ID NO: 2962087 - RNA, 19 nt, Artificial Sequence
  Description of Artificial Sequence: Synthetic oligonucleotide
uguuguccacagucaagga

SEQ ID NO: 2962088 - RNA, 19 nt, Artificial Sequence
  Description of Artificial Sequence: Synthetic oligonucleotide
agcagggucgcagcggugg

SEQ ID NO: 2962089 - RNA, 19 nt, Artificial Sequence
  Description of Artificial Sequence: Synthetic oligonucleotide
ugugugugcguguguuuca

SEQ ID NO: 2962090 - RNA, 19 nt, Artificial Sequence
  Description of Artificial Sequence: Synthetic oligonucleotide
ucuuccucacccugcagua

SEQ ID NO: 2962091 - RNA, 19 nt, Artificial Sequence
  Description of Artificial Sequence: Synthetic oligonucleotide
accucacugacucgcauaa

SEQ ID NO: 2962092 - RNA, 19 nt, Artificial Sequence
  Description of Artificial Sequence: Synthetic oligonucleotide
guguguguguguaugugug

SEQ ID NO: 2962093 - RNA, 19 nt, Artificial Sequence
  Description of Artificial Sequence: Synthetic oligonucleotide
cucacaagcggcccgcuuc

SEQ ID NO: 2962094 - RNA, 19 nt, Artificial Sequence
  Description of Artificial Sequence: Synthetic oligonucleotide
ugacucgcauaaacacgcc

SEQ ID NO: 2962095 - RNA, 19 nt, Artificial Sequence
  Description of Artificial Sequence: Synthetic oligonucleotide
ucacaagcggcccgcuucu

SEQ ID NO: 2962096 - RNA, 19 nt, Artificial Sequence
  Description of Artificial Sequence: Synthetic oligonucleotide
uaugugugugugcgugugu

SEQ ID NO: 2962097 - RNA, 19 nt, Artificial Sequence
  Description of Artificial Sequence: Synthetic oligonucleotide
caagcggcccgcuucuccc

SEQ ID NO: 2962098 - RNA, 19 nt, Artificial Sequence
  Description of Artificial Sequence: Synthetic oligonucleotide
acucgcauaaacacgccgu

SEQ ID NO: 2962099 - RNA, 19 nt, Artificial Sequence
  Description of Artificial Sequence: Synthetic oligonucleotide
guaggugggcuucaccuca

SEQ ID NO: 2962100 - RNA, 19 nt, Artificial Sequence
  Description of Artificial Sequence: Synthetic oligonucleotide
aucgaagaagaagcgcuug

SEQ ID NO: 2962101 - RNA, 19 nt, Artificial Sequence
  Description of Artificial Sequence: Synthetic oligonucleotide
guguguguguaugugugug

SEQ ID NO: 2962102 - RNA, 19 nt, Artificial Sequence
  Description of Artificial Sequence: Synthetic oligonucleotide
guauauuuucucugugugu

SEQ ID NO: 2962103 - RNA, 19 nt, Artificial Sequence
  Description of Artificial Sequence: Synthetic oligonucleotide
uucaccucacugacucgca

SEQ ID NO: 2962104 - RNA, 19 nt, Artificial Sequence
  Description of Artificial Sequence: Synthetic oligonucleotide
ggcuucaccucacugacuc

SEQ ID NO: 2962105 - RNA, 19 nt, Artificial Sequence
  Description of Artificial Sequence: Synthetic oligonucleotide
uuguuggaacccacaucga

SEQ ID NO: 2962106 - RNA, 19 nt, Artificial Sequence
  Description of Artificial Sequence: Synthetic oligonucleotide
guguguguaugugugugug

SEQ ID NO: 2962107 - RNA, 19 nt, Artificial Sequence
  Description of Artificial Sequence: Synthetic oligonucleotide
gugggcuucaccucacuga

SEQ ID NO: 2962108 - RNA, 19 nt, Artificial Sequence
  Description of Artificial Sequence: Synthetic oligonucleotide
caccuuguagggcacggug

SEQ ID NO: 2962109 - RNA, 19 nt, Artificial Sequence
  Description of Artificial Sequence: Synthetic oligonucleotide
guaucuucuucaucuccuc

SEQ ID NO: 2962110 - RNA, 19 nt, Artificial Sequence
  Description of Artificial Sequence: Synthetic oligonucleotide
acagucaaggaggugcccu

SEQ ID NO: 2962111 - RNA, 19 nt, Artificial Sequence
  Description of Artificial Sequence: Synthetic oligonucleotide
ggaacccacaucgaagaag

SEQ ID NO: 2962112 - RNA, 19 nt, Artificial Sequence
  Description of Artificial Sequence: Synthetic oligonucleotide
ugugugugugugugugugu

SEQ ID NO: 2962113 - RNA, 19 nt, Artificial Sequence
  Description of Artificial Sequence: Synthetic oligonucleotide
ugcguguguuucauucagu

SEQ ID NO: 2962114 - RNA, 19 nt, Artificial Sequence
  Description of Artificial Sequence: Synthetic oligonucleotide
ggugauggaguugcgguag

SEQ ID NO: 2962115 - RNA, 19 nt, Artificial Sequence
  Description of Artificial Sequence: Synthetic oligonucleotide
cuuggcccacaccuuguag

SEQ ID NO: 2962116 - RNA, 19 nt, Artificial Sequence
  Description of Artificial Sequence: Synthetic oligonucleotide
agucaaggaggugcccucg

SEQ ID NO: 2962117 - RNA, 19 nt, Artificial Sequence
  Description of Artificial Sequence: Synthetic oligonucleotide
gucaaggaggugcccucgg

SEQ ID NO: 2962118 - RNA, 19 nt, Artificial Sequence
  Description of Artificial Sequence: Synthetic oligonucleotide
guguguguguguguguaug

SEQ ID NO: 2962119 - RNA, 19 nt, Artificial Sequence
  Description of Artificial Sequence: Synthetic oligonucleotide
agguguguccgaacuuggc

SEQ ID NO: 2962120 - RNA, 19 nt, Artificial Sequence
  Description of Artificial Sequence: Synthetic oligonucleotide
cauucaguuugaucaaucu

SEQ ID NO: 2962121 - RNA, 19 nt, Artificial Sequence
  Description of Artificial Sequence: Synthetic oligonucleotide
cugugugugugugugugug

SEQ ID NO: 2962122 - RNA, 19 nt, Artificial Sequence
  Description of Artificial Sequence: Synthetic oligonucleotide
uccgaacuuggcccacacc

SEQ ID NO: 2962123 - RNA, 19 nt, Artificial Sequence
  Description of Artificial Sequence: Synthetic oligonucleotide
gugugugugugugugugug

SEQ ID NO: 2962124 - RNA, 19 nt, Artificial Sequence
  Description of Artificial Sequence: Synthetic oligonucleotide
uguguggcugugugugugu

SEQ ID NO: 2962125 - RNA, 19 nt, Artificial Sequence
  Description of Artificial Sequence: Synthetic oligonucleotide
agcugcucacaagcggccc

SEQ ID NO: 2962126 - RNA, 19 nt, Artificial Sequence
  Description of Artificial Sequence: Synthetic oligonucleotide
guggcugugugugugugug

SEQ ID NO: 2962127 - RNA, 19 nt, Artificial Sequence
  Description of Artificial Sequence: Synthetic oligonucleotide
gaguacuugcagaaggugu

SEQ ID NO: 2962128 - RNA, 19 nt, Artificial Sequence
  Description of Artificial Sequence: Synthetic oligonucleotide
cucuuguaucuucuucauc

SEQ ID NO: 2962129 - RNA, 19 nt, Artificial Sequence
  Description of Artificial Sequence: Synthetic oligonucleotide
uguguguggcugugugugu

SEQ ID NO: 2962130 - RNA, 19 nt, Artificial Sequence
  Description of Artificial Sequence: Synthetic oligonucleotide
agaagguguguccgaacuu

SEQ ID NO: 2962131 - RNA, 19 nt, Artificial Sequence
  Description of Artificial Sequence: Synthetic oligonucleotide
uggaacccacaucgaagaa

SEQ ID NO: 2962132 - RNA, 19 nt, Artificial Sequence
  Description of Artificial Sequence: Synthetic oligonucleotide
cacaccuuguagggcacgg

SEQ ID NO: 2962133 - RNA, 19 nt, Artificial Sequence
  Description of Artificial Sequence: Synthetic oligonucleotide
uugcagaagguguguccga

SEQ ID NO: 2962134 - RNA, 19 nt, Artificial Sequence
  Description of Artificial Sequence: Synthetic oligonucleotide
uguggcugugugugugugu

SEQ ID NO: 2962135 - RNA, 19 nt, Artificial Sequence
  Description of Artificial Sequence: Synthetic oligonucleotide
ucgcauaaacacgccguac

SEQ ID NO: 2962136 - RNA, 19 nt, Artificial Sequence
  Description of Artificial Sequence: Synthetic oligonucleotide
guggagcugcucacaagcg

SEQ ID NO: 2962137 - RNA, 19 nt, Artificial Sequence
  Description of Artificial Sequence: Synthetic oligonucleotide
uguguguguguguguguau

SEQ ID NO: 2962138 - RNA, 19 nt, Artificial Sequence
  Description of Artificial Sequence: Synthetic oligonucleotide
caguauauuuucucugugu

SEQ ID NO: 2962139 - RNA, 19 nt, Artificial Sequence
  Description of Artificial Sequence: Synthetic oligonucleotide
ggagcugcucacaagcggc

SEQ ID NO: 2962140 - RNA, 19 nt, Artificial Sequence
  Description of Artificial Sequence: Synthetic oligonucleotide
ccacaucgaagaagaagcg

SEQ ID NO: 2962141 - RNA, 19 nt, Artificial Sequence
  Description of Artificial Sequence: Synthetic oligonucleotide
guagggcacggugauggag

SEQ ID NO: 2962142 - RNA, 19 nt, Artificial Sequence
  Description of Artificial Sequence: Synthetic oligonucleotide
ugcagaagguguguccgaa

SEQ ID NO: 2962143 - RNA, 19 nt, Artificial Sequence
  Description of Artificial Sequence: Synthetic oligonucleotide
guguguguguguguaugug

SEQ ID NO: 2962144 - RNA, 19 nt, Artificial Sequence
  Description of Artificial Sequence: Synthetic oligonucleotide
ucaccucacugacucgcau

SEQ ID NO: 2962145 - RNA, 19 nt, Artificial Sequence
  Description of Artificial Sequence: Synthetic oligonucleotide
uguagggcacggugaugga

SEQ ID NO: 2962146 - RNA, 19 nt, Artificial Sequence
  Description of Artificial Sequence: Synthetic oligonucleotide
ugcugguggagcugcucac

SEQ ID NO: 2962147 - RNA, 19 nt, Artificial Sequence
  Description of Artificial Sequence: Synthetic oligonucleotide
uaaacacgccguacuuguu

SEQ ID NO: 2962148 - RNA, 19 nt, Artificial Sequence
  Description of Artificial Sequence: Synthetic oligonucleotide
ugauggaguugcgguaggu

SEQ ID NO: 2962149 - RNA, 19 nt, Artificial Sequence
  Description of Artificial Sequence: Synthetic oligonucleotide
uacuugcagaagguguguc

SEQ ID NO: 2962150 - RNA, 19 nt, Artificial Sequence
  Description of Artificial Sequence: Synthetic oligonucleotide
aacuuggcccacaccuugu

SEQ ID NO: 2962151 - RNA, 19 nt, Artificial Sequence
  Description of Artificial Sequence: Synthetic oligonucleotide
ugugugugugcguguguuu

SEQ ID NO: 2962152 - RNA, 19 nt, Artificial Sequence
  Description of Artificial Sequence: Synthetic oligonucleotide
gcgcuuguuguccacaguc

SEQ ID NO: 2962153 - RNA, 19 nt, Artificial Sequence
  Description of Artificial Sequence: Synthetic oligonucleotide
accuuguagggcacgguga

SEQ ID NO: 2962154 - RNA, 19 nt, Artificial Sequence
  Description of Artificial Sequence: Synthetic oligonucleotide
guguguggcugugugugug

SEQ ID NO: 2962155 - RNA, 19 nt, Artificial Sequence
  Description of Artificial Sequence: Synthetic oligonucleotide
cugcugcugcugcugcugg

SEQ ID NO: 2962156 - RNA, 19 nt, Artificial Sequence
  Description of Artificial Sequence: Synthetic oligonucleotide
uaggugggcuucaccucac

SEQ ID NO: 2962157 - RNA, 19 nt, Artificial Sequence
  Description of Artificial Sequence: Synthetic oligonucleotide
gagcugcucacaagcggcc

SEQ ID NO: 2962158 - RNA, 19 nt, Artificial Sequence
  Description of Artificial Sequence: Synthetic oligonucleotide
ggugggcuucaccucacug

SEQ ID NO: 2962159 - RNA, 19 nt, Artificial Sequence
  Description of Artificial Sequence: Synthetic oligonucleotide
cagaagguguguccgaacu

SEQ ID NO: 2962160 - RNA, 19 nt, Artificial Sequence
  Description of Artificial Sequence: Synthetic oligonucleotide
agggucgcagcgguggucu

SEQ ID NO: 2962161 - RNA, 19 nt, Artificial Sequence
  Description of Artificial Sequence: Synthetic oligonucleotide
cuuccucacccugcaguag

SEQ ID NO: 2962162 - RNA, 19 nt, Artificial Sequence
  Description of Artificial Sequence: Synthetic oligonucleotide
augugugugugcguguguu

SEQ ID NO: 2962163 - RNA, 19 nt, Artificial Sequence
  Description of Artificial Sequence: Synthetic oligonucleotide
aagcggcccgcuucucccu

SEQ ID NO: 2962164 - RNA, 19 nt, Artificial Sequence
  Description of Artificial Sequence: Synthetic oligonucleotide
guacuuguuggaacccaca

SEQ ID NO: 2962165 - RNA, 19 nt, Artificial Sequence
  Description of Artificial Sequence: Synthetic oligonucleotide
aguugcgguaggugggcuu

SEQ ID NO: 2962166 - RNA, 19 nt, Artificial Sequence
  Description of Artificial Sequence: Synthetic oligonucleotide
gguaggugggcuucaccuc

SEQ ID NO: 2962167 - RNA, 19 nt, Artificial Sequence
  Description of Artificial Sequence: Synthetic oligonucleotide
ggcugugugugugugugug

SEQ ID NO: 2962168 - RNA, 19 nt, Artificial Sequence
  Description of Artificial Sequence: Synthetic oligonucleotide
ccacagucaaggaggugcc

SEQ ID NO: 2962169 - RNA, 19 nt, Artificial Sequence
  Description of Artificial Sequence: Synthetic oligonucleotide
cuccuccgaguacuugcag

SEQ ID NO: 2962170 - RNA, 19 nt, Artificial Sequence
  Description of Artificial Sequence: Synthetic oligonucleotide
cugcugcugcugcugcugc

SEQ ID NO: 2962171 - RNA, 19 nt, Artificial Sequence
  Description of Artificial Sequence: Synthetic oligonucleotide
gcuuguuguccacagucaa

SEQ ID NO: 2962172 - RNA, 19 nt, Artificial Sequence
  Description of Artificial Sequence: Synthetic oligonucleotide
guagcagggucgcagcggu

SEQ ID NO: 2962173 - RNA, 19 nt, Artificial Sequence
  Description of Artificial Sequence: Synthetic oligonucleotide
uguccgaacuuggcccaca

SEQ ID NO: 2962174 - RNA, 19 nt, Artificial Sequence
  Description of Artificial Sequence: Synthetic oligonucleotide
gcuucaccucacugacucg

SEQ ID NO: 2962175 - RNA, 19 nt, Artificial Sequence
  Description of Artificial Sequence: Synthetic oligonucleotide
gaucaaucuucuucuccuu

SEQ ID NO: 2962176 - RNA, 19 nt, Artificial Sequence
  Description of Artificial Sequence: Synthetic oligonucleotide
cuccgaguacuugcagaag

SEQ ID NO: 2962177 - RNA, 19 nt, Artificial Sequence
  Description of Artificial Sequence: Synthetic oligonucleotide
agcggcccgcuucucccuc

SEQ ID NO: 2962178 - RNA, 19 nt, Artificial Sequence
  Description of Artificial Sequence: Synthetic oligonucleotide
gcccacaccuuguagggca

SEQ ID NO: 2962179 - RNA, 19 nt, Artificial Sequence
  Description of Artificial Sequence: Synthetic oligonucleotide
acuuggcccacaccuugua

SEQ ID NO: 2962180 - RNA, 19 nt, Artificial Sequence
  Description of Artificial Sequence: Synthetic oligonucleotide
guccgaacuuggcccacac

SEQ ID NO: 2962181 - RNA, 19 nt, Artificial Sequence
  Description of Artificial Sequence: Synthetic oligonucleotide
ugugugcguguguuucauu

SEQ ID NO: 2962182 - RNA, 19 nt, Artificial Sequence
  Description of Artificial Sequence: Synthetic oligonucleotide
cucgcauaaacacgccgua

SEQ ID NO: 2962183 - RNA, 19 nt, Artificial Sequence
  Description of Artificial Sequence: Synthetic oligonucleotide
ugcugcugcugcugcugcu

SEQ ID NO: 2962184 - RNA, 19 nt, Artificial Sequence
  Description of Artificial Sequence: Synthetic oligonucleotide
cugcucacaagcggcccgc

SEQ ID NO: 2962185 - RNA, 19 nt, Artificial Sequence
  Description of Artificial Sequence: Synthetic oligonucleotide
cacagucaaggaggugccc

SEQ ID NO: 2962186 - RNA, 19 nt, Artificial Sequence
  Description of Artificial Sequence: Synthetic oligonucleotide
uccugcugcugcugcugcu

SEQ ID NO: 2962187 - RNA, 19 nt, Artificial Sequence
  Description of Artificial Sequence: Synthetic oligonucleotide
cccucgggcagcucggccg

SEQ ID NO: 2962188 - RNA, 19 nt, Artificial Sequence
  Description of Artificial Sequence: Synthetic oligonucleotide
ucggccggcuccuccucca

SEQ ID NO: 2962189 - RNA, 19 nt, Artificial Sequence
  Description of Artificial Sequence: Synthetic oligonucleotide
uggcugugugugugugugu

SEQ ID NO: 2962190 - RNA, 19 nt, Artificial Sequence
  Description of Artificial Sequence: Synthetic oligonucleotide
ugcugcugcugcugcuggu

SEQ ID NO: 2962191 - RNA, 19 nt, Artificial Sequence
  Description of Artificial Sequence: Synthetic oligonucleotide
ggaguugcgguaggugggc

SEQ ID NO: 2962192 - RNA, 19 nt, Artificial Sequence
  Description of Artificial Sequence: Synthetic oligonucleotide
acacgccguacuuguugga

SEQ ID NO: 2962193 - RNA, 19 nt, Artificial Sequence
  Description of Artificial Sequence: Synthetic oligonucleotide
gugugugugugugugugua

SEQ ID NO: 2962194 - RNA, 19 nt, Artificial Sequence
  Description of Artificial Sequence: Synthetic oligonucleotide
cguacuuguuggaacccac

SEQ ID NO: 2962195 - RNA, 19 nt, Artificial Sequence
  Description of Artificial Sequence: Synthetic oligonucleotide
caucuccuccgaguacuug

SEQ ID NO: 2962196 - RNA, 19 nt, Artificial Sequence
  Description of Artificial Sequence: Synthetic oligonucleotide
uagcagggucgcagcggug

SEQ ID NO: 2962197 - RNA, 19 nt, Artificial Sequence
  Description of Artificial Sequence: Synthetic oligonucleotide
cgccguacuuguuggaacc

SEQ ID NO: 2962198 - RNA, 19 nt, Artificial Sequence
  Description of Artificial Sequence: Synthetic oligonucleotide
guguggcugugugugugug

SEQ ID NO: 2962199 - RNA, 19 nt, Artificial Sequence
  Description of Artificial Sequence: Synthetic oligonucleotide
cugguggagcugcucacaa

SEQ ID NO: 2962200 - RNA, 19 nt, Artificial Sequence
  Description of Artificial Sequence: Synthetic oligonucleotide
gcagaagguguguccgaac

SEQ ID NO: 2962201 - RNA, 19 nt, Artificial Sequence
  Description of Artificial Sequence: Synthetic oligonucleotide
agggcacggugauggaguu

SEQ ID NO: 2962202 - RNA, 19 nt, Artificial Sequence
  Description of Artificial Sequence: Synthetic oligonucleotide
ucccucugcuucucuugua

SEQ ID NO: 2962203 - RNA, 19 nt, Artificial Sequence
  Description of Artificial Sequence: Synthetic oligonucleotide
acaccuuguagggcacggu

SEQ ID NO: 2962204 - RNA, 19 nt, Artificial Sequence
  Description of Artificial Sequence: Synthetic oligonucleotide
aggugggcuucaccucacu

SEQ ID NO: 2962205 - RNA, 19 nt, Artificial Sequence
  Description of Artificial Sequence: Synthetic oligonucleotide
aacccacaucgaagaagaa

SEQ ID NO: 2962206 - RNA, 19 nt, Artificial Sequence
  Description of Artificial Sequence: Synthetic oligonucleotide
caccucacugacucgcaua

SEQ ID NO: 2962207 - RNA, 19 nt, Artificial Sequence
  Description of Artificial Sequence: Synthetic oligonucleotide
uggucuccuccugcugcug

SEQ ID NO: 2962208 - RNA, 19 nt, Artificial Sequence
  Description of Artificial Sequence: Synthetic oligonucleotide
ccuccgaguacuugcagaa

SEQ ID NO: 2962209 - RNA, 19 nt, Artificial Sequence
  Description of Artificial Sequence: Synthetic oligonucleotide
ugcgguaggugggcuucac

SEQ ID NO: 2962210 - RNA, 19 nt, Artificial Sequence
  Description of Artificial Sequence: Synthetic oligonucleotide
gugcccucgggcagcucgg

SEQ ID NO: 2962211 - RNA, 19 nt, Artificial Sequence
  Description of Artificial Sequence: Synthetic oligonucleotide
caucgaagaagaagcgcuu

SEQ ID NO: 2962212 - RNA, 19 nt, Artificial Sequence
  Description of Artificial Sequence: Synthetic oligonucleotide
gcugcugcugcugcugcug

SEQ ID NO: 2962213 - RNA, 19 nt, Artificial Sequence
  Description of Artificial Sequence: Synthetic oligonucleotide
guacuugcagaaggugugu

SEQ ID NO: 2962214 - RNA, 19 nt, Artificial Sequence
  Description of Artificial Sequence: Synthetic oligonucleotide
cacgccguacuuguuggaa

SEQ ID NO: 2962215 - RNA, 19 nt, Artificial Sequence
  Description of Artificial Sequence: Synthetic oligonucleotide
ccucugcuucucuuguauc

SEQ ID NO: 2962216 - RNA, 19 nt, Artificial Sequence
  Description of Artificial Sequence: Synthetic oligonucleotide
gccguacuuguuggaaccc

SEQ ID NO: 2962217 - RNA, 19 nt, Artificial Sequence
  Description of Artificial Sequence: Synthetic oligonucleotide
ugcucacaagcggcccgcu

SEQ ID NO: 2962218 - RNA, 19 nt, Artificial Sequence
  Description of Artificial Sequence: Synthetic oligonucleotide
gcgguaggugggcuucacc

SEQ ID NO: 2962219 - RNA, 19 nt, Artificial Sequence
  Description of Artificial Sequence: Synthetic oligonucleotide
cgaguacuugcagaaggug

SEQ ID NO: 2962220 - RNA, 19 nt, Artificial Sequence
  Description of Artificial Sequence: Synthetic oligonucleotide
gcguguguuucauucaguu

SEQ ID NO: 2962221 - RNA, 19 nt, Artificial Sequence
  Description of Artificial Sequence: Synthetic oligonucleotide
guccacagucaaggaggug

SEQ ID NO: 2962222 - RNA, 19 nt, Artificial Sequence
  Description of Artificial Sequence: Synthetic oligonucleotide
gcauaaacacgccguacuu

SEQ ID NO: 2962223 - RNA, 19 nt, Artificial Sequence
  Description of Artificial Sequence: Synthetic oligonucleotide
ggucgcagcgguggucucc

SEQ ID NO: 2962224 - RNA, 19 nt, Artificial Sequence
  Description of Artificial Sequence: Synthetic oligonucleotide
ccucgggcagcucggccgg

SEQ ID NO: 2962225 - RNA, 19 nt, Artificial Sequence
  Description of Artificial Sequence: Synthetic oligonucleotide
ucgggcagcucggccggcu

SEQ ID NO: 2962226 - RNA, 19 nt, Artificial Sequence
  Description of Artificial Sequence: Synthetic oligonucleotide
cagcgguggucuccuccug

SEQ ID NO: 2962227 - RNA, 19 nt, Artificial Sequence
  Description of Artificial Sequence: Synthetic oligonucleotide
cucccucugcuucucuugu

SEQ ID NO: 2962228 - RNA, 19 nt, Artificial Sequence
  Description of Artificial Sequence: Synthetic oligonucleotide
ugcccucgggcagcucggc

SEQ ID NO: 2962229 - RNA, 19 nt, Artificial Sequence
  Description of Artificial Sequence: Synthetic oligonucleotide
ccugcugcugcugcugcug

SEQ ID NO: 2962230 - RNA, 19 nt, Artificial Sequence
  Description of Artificial Sequence: Synthetic oligonucleotide
gggcagcucggccggcucc

SEQ ID NO: 2962231 - RNA, 19 nt, Artificial Sequence
  Description of Artificial Sequence: Synthetic oligonucleotide
guguccgaacuuggcccac

SEQ ID NO: 2962232 - RNA, 19 nt, Artificial Sequence
  Description of Artificial Sequence: Synthetic oligonucleotide
cgcauaaacacgccguacu

SEQ ID NO: 2962233 - RNA, 19 nt, Artificial Sequence
  Description of Artificial Sequence: Synthetic oligonucleotide
ggcccacaccuuguagggc

SEQ ID NO: 2962234 - RNA, 19 nt, Artificial Sequence
  Description of Artificial Sequence: Synthetic oligonucleotide
cgcuuguuguccacaguca

SEQ ID NO: 2962235 - RNA, 19 nt, Artificial Sequence
  Description of Artificial Sequence: Synthetic oligonucleotide
cagggucgcagcggugguc

SEQ ID NO: 2962236 - RNA, 19 nt, Artificial Sequence
  Description of Artificial Sequence: Synthetic oligonucleotide
gcagcgguggucuccuccu

SEQ ID NO: 2962237 - RNA, 19 nt, Artificial Sequence
  Description of Artificial Sequence: Synthetic oligonucleotide
ccacaccuuguagggcacg

SEQ ID NO: 2962238 - RNA, 19 nt, Artificial Sequence
  Description of Artificial Sequence: Synthetic oligonucleotide
ccgaguacuugcagaaggu

SEQ ID NO: 2962239 - RNA, 19 nt, Artificial Sequence
  Description of Artificial Sequence: Synthetic oligonucleotide
caguuugaucaaucuucuu

SEQ ID NO: 2962240 - RNA, 19 nt, Artificial Sequence
  Description of Artificial Sequence: Synthetic oligonucleotide
cgguaggugggcuucaccu

SEQ ID NO: 2962241 - RNA, 19 nt, Artificial Sequence
  Description of Artificial Sequence: Synthetic oligonucleotide
gucgcagcgguggucuccu

SEQ ID NO: 2962242 - RNA, 19 nt, Artificial Sequence
  Description of Artificial Sequence: Synthetic oligonucleotide
ccucacccugcaguagcag

SEQ ID NO: 2962243 - RNA, 19 nt, Artificial Sequence
  Description of Artificial Sequence: Synthetic oligonucleotide
gaguugcgguaggugggcu

SEQ ID NO: 2962244 - RNA, 19 nt, Artificial Sequence
  Description of Artificial Sequence: Synthetic oligonucleotide
gugugugcguguguuucau

SEQ ID NO: 2962245 - RNA, 19 nt, Artificial Sequence
  Description of Artificial Sequence: Synthetic oligonucleotide
gcugugugugugugugugu

SEQ ID NO: 2962246 - RNA, 19 nt, Artificial Sequence
  Description of Artificial Sequence: Synthetic oligonucleotide
guguuucauucaguuugau

SEQ ID NO: 2962247 - RNA, 19 nt, Artificial Sequence
  Description of Artificial Sequence: Synthetic oligonucleotide
cacaagcggcccgcuucuc

SEQ ID NO: 2962248 - RNA, 19 nt, Artificial Sequence
  Description of Artificial Sequence: Synthetic oligonucleotide
gcccucgggcagcucggcc

SEQ ID NO: 2962249 - RNA, 19 nt, Artificial Sequence
  Description of Artificial Sequence: Synthetic oligonucleotide
ccguacuuguuggaaccca

SEQ ID NO: 2962250 - RNA, 19 nt, Artificial Sequence
  Description of Artificial Sequence: Synthetic oligonucleotide
ggcccgcuucucccucugc

SEQ ID NO: 2962251 - RNA, 19 nt, Artificial Sequence
  Description of Artificial Sequence: Synthetic oligonucleotide
cucgggcagcucggccggc

SEQ ID NO: 2962252 - RNA, 19 nt, Artificial Sequence
  Description of Artificial Sequence: Synthetic oligonucleotide
ucgcagcgguggucuccuc

SEQ ID NO: 2962253 - RNA, 19 nt, Artificial Sequence
  Description of Artificial Sequence: Synthetic oligonucleotide
cacccugcaguagcagggu

SEQ ID NO: 2962254 - RNA, 19 nt, Artificial Sequence
  Description of Artificial Sequence: Synthetic oligonucleotide
cccucugcuucucuuguau

SEQ ID NO: 2962255 - RNA, 19 nt, Artificial Sequence
  Description of Artificial Sequence: Synthetic oligonucleotide
gcucggccggcuccuccuc

SEQ ID NO: 2962256 - RNA, 19 nt, Artificial Sequence
  Description of Artificial Sequence: Synthetic oligonucleotide
cgguggucuccuccugcug

SEQ ID NO: 2962257 - RNA, 19 nt, Artificial Sequence
  Description of Artificial Sequence: Synthetic oligonucleotide
gggucgcagcgguggucuc

SEQ ID NO: 2962258 - RNA, 19 nt, Artificial Sequence
  Description of Artificial Sequence: Synthetic oligonucleotide
cgaagaagaagcgcuuguu

SEQ ID NO: 2962259 - RNA, 19 nt, Artificial Sequence
  Description of Artificial Sequence: Synthetic oligonucleotide
gcucacaagcggcccgcuu

SEQ ID NO: 2962260 - RNA, 19 nt, Artificial Sequence
  Description of Artificial Sequence: Synthetic oligonucleotide
gggcuucaccucacugacu

SEQ ID NO: 2962261 - RNA, 19 nt, Artificial Sequence
  Description of Artificial Sequence: Synthetic oligonucleotide
ccucacugacucgcauaaa

SEQ ID NO: 2962262 - RNA, 19 nt, Artificial Sequence
  Description of Artificial Sequence: Synthetic oligonucleotide
gcagcucggccggcuccuc

SEQ ID NO: 2962263 - RNA, 19 nt, Artificial Sequence
  Description of Artificial Sequence: Synthetic oligonucleotide
cggcccgcuucucccucug

SEQ ID NO: 2962264 - RNA, 19 nt, Artificial Sequence
  Description of Artificial Sequence: Synthetic oligonucleotide
gcggcccgcuucucccucu

SEQ ID NO: 2962265 - RNA, 19 nt, Artificial Sequence
  Description of Artificial Sequence: Synthetic oligonucleotide
cggccggcuccuccuccac

SEQ ID NO: 2962266 - RNA, 19 nt, Artificial Sequence
  Description of Artificial Sequence: Synthetic oligonucleotide
  modified_base (8)..(8): a, c, u, g, unknown or other
uuaaaggnugaguagaugg

SEQ ID NO: 2962267 - RNA, 19 nt, Artificial Sequence
  Description of Artificial Sequence: Synthetic oligonucleotide
uauagcaccgcccuggagg

SEQ ID NO: 2962268 - RNA, 19 nt, Artificial Sequence
  Description of Artificial Sequence: Synthetic oligonucleotide
acuguuucuaccuugaugu

SEQ ID NO: 2962269 - RNA, 19 nt, Artificial Sequence
  Description of Artificial Sequence: Synthetic oligonucleotide
uguaauaaccguugguggg

SEQ ID NO: 2962270 - RNA, 19 nt, Artificial Sequence
  Description of Artificial Sequence: Synthetic oligonucleotide
  modified_base (6)..(6): a, c, u, g, unknown or other
aaaggnugaguagauggcc

SEQ ID NO: 2962271 - RNA, 19 nt, Artificial Sequence
  Description of Artificial Sequence: Synthetic oligonucleotide
aacgugucgggccaggggc

SEQ ID NO: 2962272 - RNA, 19 nt, Artificial Sequence
  Description of Artificial Sequence: Synthetic oligonucleotide
uaugcuggcgguaucaucc

SEQ ID NO: 2962273 - RNA, 19 nt, Artificial Sequence
  Description of Artificial Sequence: Synthetic oligonucleotide
ugucaauggugucacagcg

SEQ ID NO: 2962274 - RNA, 19 nt, Artificial Sequence
  Description of Artificial Sequence: Synthetic oligonucleotide
uuguaauaaccguuggugg

SEQ ID NO: 2962275 - RNA, 19 nt, Artificial Sequence
  Description of Artificial Sequence: Synthetic oligonucleotide
ucagaaugcauugugagug

SEQ ID NO: 2962276 - RNA, 19 nt, Artificial Sequence
  Description of Artificial Sequence: Synthetic oligonucleotide
guagucagcauauagcacc

SEQ ID NO: 2962277 - RNA, 19 nt, Artificial Sequence
  Description of Artificial Sequence: Synthetic oligonucleotide
  modified_base (7)..(7): a, c, u, g, unknown or other
uaaaggnugaguagauggc

SEQ ID NO: 2962278 - RNA, 19 nt, Artificial Sequence
  Description of Artificial Sequence: Synthetic oligonucleotide
auuguaauaaccguuggug

SEQ ID NO: 2962279 - RNA, 19 nt, Artificial Sequence
  Description of Artificial Sequence: Synthetic oligonucleotide
aaugcauugugaguggcuc

SEQ ID NO: 2962280 - RNA, 19 nt, Artificial Sequence
  Description of Artificial Sequence: Synthetic oligonucleotide
gaguagauggccuucauga

SEQ ID NO: 2962281 - RNA, 19 nt, Artificial Sequence
  Description of Artificial Sequence: Synthetic oligonucleotide
uagauggccuucaugaccc

SEQ ID NO: 2962282 - RNA, 19 nt, Artificial Sequence
  Description of Artificial Sequence: Synthetic oligonucleotide
auaaccguuggugggaucc

SEQ ID NO: 2962283 - RNA, 19 nt, Artificial Sequence
  Description of Artificial Sequence: Synthetic oligonucleotide
uauugagcugggcauagcc

SEQ ID NO: 2962284 - RNA, 19 nt, Artificial Sequence
  Description of Artificial Sequence: Synthetic oligonucleotide
ucaauggugucacagcgca

SEQ ID NO: 2962285 - RNA, 19 nt, Artificial Sequence
  Description of Artificial Sequence: Synthetic oligonucleotide
gauccuucaucucauacuc

SEQ ID NO: 2962286 - RNA, 19 nt, Artificial Sequence
  Description of Artificial Sequence: Synthetic oligonucleotide
uauguauugagcugggcau

SEQ ID NO: 2962287 - RNA, 19 nt, Artificial Sequence
  Description of Artificial Sequence: Synthetic oligonucleotide
uucgugggcacgcacauug

SEQ ID NO: 2962288 - RNA, 19 nt, Artificial Sequence
  Description of Artificial Sequence: Synthetic oligonucleotide
cacauuguaauaaccguug

SEQ ID NO: 2962289 - RNA, 19 nt, Artificial Sequence
  Description of Artificial Sequence: Synthetic oligonucleotide
uagucagcauauagcaccg

SEQ ID NO: 2962290 - RNA, 19 nt, Artificial Sequence
  Description of Artificial Sequence: Synthetic oligonucleotide
ucagcauauagcaccgccc

SEQ ID NO: 2962291 - RNA, 19 nt, Artificial Sequence
  Description of Artificial Sequence: Synthetic oligonucleotide
guugccguggauaugcugg

SEQ ID NO: 2962292 - RNA, 19 nt, Artificial Sequence
  Description of Artificial Sequence: Synthetic oligonucleotide
cauagucagaggcaggggc

SEQ ID NO: 2962293 - RNA, 19 nt, Artificial Sequence
  Description of Artificial Sequence: Synthetic oligonucleotide
uugugaguggcuccgauuc

SEQ ID NO: 2962294 - RNA, 19 nt, Artificial Sequence
  Description of Artificial Sequence: Synthetic oligonucleotide
  modified_base (11)..(11): a, c, u, g, unknown or other
uccuuaaaggnugaguaga

SEQ ID NO: 2962295 - RNA, 19 nt, Artificial Sequence
  Description of Artificial Sequence: Synthetic oligonucleotide
acauuguaauaaccguugg

SEQ ID NO: 2962296 - RNA, 19 nt, Artificial Sequence
  Description of Artificial Sequence: Synthetic oligonucleotide
caucaaaacgugucgggcc

SEQ ID NO: 2962297 - RNA, 19 nt, Artificial Sequence
  Description of Artificial Sequence: Synthetic oligonucleotide
aguagauggccuucaugac

SEQ ID NO: 2962298 - RNA, 19 nt, Artificial Sequence
  Description of Artificial Sequence: Synthetic oligonucleotide
caucucauacucuucccgg

SEQ ID NO: 2962299 - RNA, 19 nt, Artificial Sequence
  Description of Artificial Sequence: Synthetic oligonucleotide
uguuucuaccuugaugucc

SEQ ID NO: 2962300 - RNA, 19 nt, Artificial Sequence
  Description of Artificial Sequence: Synthetic oligonucleotide
ugugccauagucagaggca

SEQ ID NO: 2962301 - RNA, 19 nt, Artificial Sequence
  Description of Artificial Sequence: Synthetic oligonucleotide
uugagcugggcauagccgc

SEQ ID NO: 2962302 - RNA, 19 nt, Artificial Sequence
  Description of Artificial Sequence: Synthetic oligonucleotide
aaacgugucgggccagggg

SEQ ID NO: 2962303 - RNA, 19 nt, Artificial Sequence
  Description of Artificial Sequence: Synthetic oligonucleotide
guauguauugagcugggca

SEQ ID NO: 2962304 - RNA, 19 nt, Artificial Sequence
  Description of Artificial Sequence: Synthetic oligonucleotide
guagauggccuucaugacc

SEQ ID NO: 2962305 - RNA, 19 nt, Artificial Sequence
  Description of Artificial Sequence: Synthetic oligonucleotide
acgguagucagcauauagc

SEQ ID NO: 2962306 - RNA, 19 nt, Artificial Sequence
  Description of Artificial Sequence: Synthetic oligonucleotide
uucagauccacaucauccu

SEQ ID NO: 2962307 - RNA, 19 nt, Artificial Sequence
  Description of Artificial Sequence: Synthetic oligonucleotide
  modified_base (12)..(12): a, c, u, g, unknown or other
auccuuaaaggnugaguag

SEQ ID NO: 2962308 - RNA, 19 nt, Artificial Sequence
  Description of Artificial Sequence: Synthetic oligonucleotide
  modified_base (14)..(14): a, c, u, g, unknown or other
ucauccuuaaaggnugagu

SEQ ID NO: 2962309 - RNA, 19 nt, Artificial Sequence
  Description of Artificial Sequence: Synthetic oligonucleotide
uucacuguuucuaccuuga

SEQ ID NO: 2962310 - RNA, 19 nt, Artificial Sequence
  Description of Artificial Sequence: Synthetic oligonucleotide
acggacggccaucaaaacg

SEQ ID NO: 2962311 - RNA, 19 nt, Artificial Sequence
  Description of Artificial Sequence: Synthetic oligonucleotide
ugaguagauggccuucaug

SEQ ID NO: 2962312 - RNA, 19 nt, Artificial Sequence
  Description of Artificial Sequence: Synthetic oligonucleotide
ugacggacggccaucaaaa

SEQ ID NO: 2962313 - RNA, 19 nt, Artificial Sequence
  Description of Artificial Sequence: Synthetic oligonucleotide
uguaucggugccaccagga

SEQ ID NO: 2962314 - RNA, 19 nt, Artificial Sequence
  Description of Artificial Sequence: Synthetic oligonucleotide
uaucggugccaccaggagc

SEQ ID NO: 2962315 - RNA, 19 nt, Artificial Sequence
  Description of Artificial Sequence: Synthetic oligonucleotide
aucucauacucuucccggg

SEQ ID NO: 2962316 - RNA, 19 nt, Artificial Sequence
  Description of Artificial Sequence: Synthetic oligonucleotide
auagucagaggcaggggcc

SEQ ID NO: 2962317 - RNA, 19 nt, Artificial Sequence
  Description of Artificial Sequence: Synthetic oligonucleotide
uucaugacccgaguugccg

SEQ ID NO: 2962318 - RNA, 19 nt, Artificial Sequence
  Description of Artificial Sequence: Synthetic oligonucleotide
ugcauugugaguggcuccg

SEQ ID NO: 2962319 - RNA, 19 nt, Artificial Sequence
  Description of Artificial Sequence: Synthetic oligonucleotide
  modified_base (17)..(17): a, c, u, g, unknown or other
acaucauccuuaaaggnug

SEQ ID NO: 2962320 - RNA, 19 nt, Artificial Sequence
  Description of Artificial Sequence: Synthetic oligonucleotide
ggcgguaucauccucccgg

SEQ ID NO: 2962321 - RNA, 19 nt, Artificial Sequence
  Description of Artificial Sequence: Synthetic oligonucleotide
acgcacauuguaauaaccg

SEQ ID NO: 2962322 - RNA, 19 nt, Artificial Sequence
  Description of Artificial Sequence: Synthetic oligonucleotide
augcauugugaguggcucc

SEQ ID NO: 2962323 - RNA, 19 nt, Artificial Sequence
  Description of Artificial Sequence: Synthetic oligonucleotide
uuggugggauccuucaucu

SEQ ID NO: 2962324 - RNA, 19 nt, Artificial Sequence
  Description of Artificial Sequence: Synthetic oligonucleotide
auucacuguuucuaccuug

SEQ ID NO: 2962325 - RNA, 19 nt, Artificial Sequence
  Description of Artificial Sequence: Synthetic oligonucleotide
  modified_base (13)..(13): a, c, u, g, unknown or other
cauccuuaaaggnugagua

SEQ ID NO: 2962326 - RNA, 19 nt, Artificial Sequence
  Description of Artificial Sequence: Synthetic oligonucleotide
agaaugcauugugaguggc

SEQ ID NO: 2962327 - RNA, 19 nt, Artificial Sequence
  Description of Artificial Sequence: Synthetic oligonucleotide
aucaaaacgugucgggcca

SEQ ID NO: 2962328 - RNA, 19 nt, Artificial Sequence
  Description of Artificial Sequence: Synthetic oligonucleotide
aauaaccguuggugggauc

SEQ ID NO: 2962329 - RNA, 19 nt, Artificial Sequence
  Description of Artificial Sequence: Synthetic oligonucleotide
cucugugccauagucagag

SEQ ID NO: 2962330 - RNA, 19 nt, Artificial Sequence
  Description of Artificial Sequence: Synthetic oligonucleotide
gcuguauguauugagcugg

SEQ ID NO: 2962331 - RNA, 19 nt, Artificial Sequence
  Description of Artificial Sequence: Synthetic oligonucleotide
ggucagaaugcauugugag

SEQ ID NO: 2962332 - RNA, 19 nt, Artificial Sequence
  Description of Artificial Sequence: Synthetic oligonucleotide
cauccucccggucagaaug

SEQ ID NO: 2962333 - RNA, 19 nt, Artificial Sequence
  Description of Artificial Sequence: Synthetic oligonucleotide
uguauugagcugggcauag

SEQ ID NO: 2962334 - RNA, 19 nt, Artificial Sequence
  Description of Artificial Sequence: Synthetic oligonucleotide
uuguaucggugccaccagg

SEQ ID NO: 2962335 - RNA, 19 nt, Artificial Sequence
  Description of Artificial Sequence: Synthetic oligonucleotide
cacgguagucagcauauag

SEQ ID NO: 2962336 - RNA, 19 nt, Artificial Sequence
  Description of Artificial Sequence: Synthetic oligonucleotide
cacgcacauuguaauaacc

SEQ ID NO: 2962337 - RNA, 19 nt, Artificial Sequence
  Description of Artificial Sequence: Synthetic oligonucleotide
gucagcauauagcaccgcc

SEQ ID NO: 2962338 - RNA, 19 nt, Artificial Sequence
  Description of Artificial Sequence: Synthetic oligonucleotide
acagcgcaaguccugcuuc

SEQ ID NO: 2962339 - RNA, 19 nt, Artificial Sequence
  Description of Artificial Sequence: Synthetic oligonucleotide
  modified_base (5)..(5): a, c, u, g, unknown or other
aaggnugaguagauggccu

SEQ ID NO: 2962340 - RNA, 19 nt, Artificial Sequence
  Description of Artificial Sequence: Synthetic oligonucleotide
ggugucacagcgcaagucc

SEQ ID NO: 2962341 - RNA, 19 nt, Artificial Sequence
  Description of Artificial Sequence: Synthetic oligonucleotide
cagaaugcauugugagugg

SEQ ID NO: 2962342 - RNA, 19 nt, Artificial Sequence
  Description of Artificial Sequence: Synthetic oligonucleotide
ucauacucuucccgggugu

SEQ ID NO: 2962343 - RNA, 19 nt, Artificial Sequence
  Description of Artificial Sequence: Synthetic oligonucleotide
uccgauucacuguuucuac

SEQ ID NO: 2962344 - RNA, 19 nt, Artificial Sequence
  Description of Artificial Sequence: Synthetic oligonucleotide
auugagcugggcauagccg

SEQ ID NO: 2962345 - RNA, 19 nt, Artificial Sequence
  Description of Artificial Sequence: Synthetic oligonucleotide
ucucauacucuucccgggu

SEQ ID NO: 2962346 - RNA, 19 nt, Artificial Sequence
  Description of Artificial Sequence: Synthetic oligonucleotide
aaaacgugucgggccaggg

SEQ ID NO: 2962347 - RNA, 19 nt, Artificial Sequence
  Description of Artificial Sequence: Synthetic oligonucleotide
acggccaucaaaacguguc

SEQ ID NO: 2962348 - RNA, 19 nt, Artificial Sequence
  Description of Artificial Sequence: Synthetic oligonucleotide
guaucauccucccggucag

SEQ ID NO: 2962349 - RNA, 19 nt, Artificial Sequence
  Description of Artificial Sequence: Synthetic oligonucleotide
  modified_base (9)..(9): a, c, u, g, unknown or other
cuuaaaggnugaguagaug

SEQ ID NO: 2962350 - RNA, 19 nt, Artificial Sequence
  Description of Artificial Sequence: Synthetic oligonucleotide
guuggugggauccuucauc

SEQ ID NO: 2962351 - RNA, 19 nt, Artificial Sequence
  Description of Artificial Sequence: Synthetic oligonucleotide
guuucuaccuugaugucca

SEQ ID NO: 2962352 - RNA, 19 nt, Artificial Sequence
  Description of Artificial Sequence: Synthetic oligonucleotide
cuguauguauugagcuggg

SEQ ID NO: 2962353 - RNA, 19 nt, Artificial Sequence
  Description of Artificial Sequence: Synthetic oligonucleotide
ugucacagcgcaaguccug

SEQ ID NO: 2962354 - RNA, 19 nt, Artificial Sequence
  Description of Artificial Sequence: Synthetic oligonucleotide
ggacgggcgaucuucgugg

SEQ ID NO: 2962355 - RNA, 19 nt, Artificial Sequence
  Description of Artificial Sequence: Synthetic oligonucleotide
aguggcuccgauucacugu

SEQ ID NO: 2962356 - RNA, 19 nt, Artificial Sequence
  Description of Artificial Sequence: Synthetic oligonucleotide
ggugucaauggugucacag

SEQ ID NO: 2962357 - RNA, 19 nt, Artificial Sequence
  Description of Artificial Sequence: Synthetic oligonucleotide
ugggcauagccgcuggagu

SEQ ID NO: 2962358 - RNA, 19 nt, Artificial Sequence
  Description of Artificial Sequence: Synthetic oligonucleotide
ugccauagucagaggcagg

SEQ ID NO: 2962359 - RNA, 19 nt, Artificial Sequence
  Description of Artificial Sequence: Synthetic oligonucleotide
gguaucauccucccgguca

SEQ ID NO: 2962360 - RNA, 19 nt, Artificial Sequence
  Description of Artificial Sequence: Synthetic oligonucleotide
uggcugguuguaucggugc

SEQ ID NO: 2962361 - RNA, 19 nt, Artificial Sequence
  Description of Artificial Sequence: Synthetic oligonucleotide
uucccgggugucaauggug

SEQ ID NO: 2962362 - RNA, 19 nt, Artificial Sequence
  Description of Artificial Sequence: Synthetic oligonucleotide
aucggugccaccaggagca

SEQ ID NO: 2962363 - RNA, 19 nt, Artificial Sequence
  Description of Artificial Sequence: Synthetic oligonucleotide
ucccgggugucaauggugu

SEQ ID NO: 2962364 - RNA, 19 nt, Artificial Sequence
  Description of Artificial Sequence: Synthetic oligonucleotide
auagcaccgcccuggagga

SEQ ID NO: 2962365 - RNA, 19 nt, Artificial Sequence
  Description of Artificial Sequence: Synthetic oligonucleotide
guuguaucggugccaccag

SEQ ID NO: 2962366 - RNA, 19 nt, Artificial Sequence
  Description of Artificial Sequence: Synthetic oligonucleotide
agauccacaucauccuuaa

SEQ ID NO: 2962367 - RNA, 19 nt, Artificial Sequence
  Description of Artificial Sequence: Synthetic oligonucleotide
gaguggcuccgauucacug

SEQ ID NO: 2962368 - RNA, 19 nt, Artificial Sequence
  Description of Artificial Sequence: Synthetic oligonucleotide
gcauauagcaccgcccugg

SEQ ID NO: 2962369 - RNA, 19 nt, Artificial Sequence
  Description of Artificial Sequence: Synthetic oligonucleotide
ugugaguggcuccgauuca

SEQ ID NO: 2962370 - RNA, 19 nt, Artificial Sequence
  Description of Artificial Sequence: Synthetic oligonucleotide
uguauguauugagcugggc

SEQ ID NO: 2962371 - RNA, 19 nt, Artificial Sequence
  Description of Artificial Sequence: Synthetic oligonucleotide
ucuucgugggcacgcacau

SEQ ID NO: 2962372 - RNA, 19 nt, Artificial Sequence
  Description of Artificial Sequence: Synthetic oligonucleotide
ucccggucagaaugcauug

SEQ ID NO: 2962373 - RNA, 19 nt, Artificial Sequence
  Description of Artificial Sequence: Synthetic oligonucleotide
ucaugacccgaguugccgu

SEQ ID NO: 2962374 - RNA, 19 nt, Artificial Sequence
  Description of Artificial Sequence: Synthetic oligonucleotide
gaggcgggaugacggacgg

SEQ ID NO: 2962375 - RNA, 19 nt, Artificial Sequence
  Description of Artificial Sequence: Synthetic oligonucleotide
guaauaaccguugguggga

SEQ ID NO: 2962376 - RNA, 19 nt, Artificial Sequence
  Description of Artificial Sequence: Synthetic oligonucleotide
auagccgcuggagugggag

SEQ ID NO: 2962377 - RNA, 19 nt, Artificial Sequence
  Description of Artificial Sequence: Synthetic oligonucleotide
  modified_base (2)..(2): a, c, u, g, unknown or other
gnugaguagauggccuuca

SEQ ID NO: 2962378 - RNA, 19 nt, Artificial Sequence
  Description of Artificial Sequence: Synthetic oligonucleotide
caccaggagcagaagggcc

SEQ ID NO: 2962379 - RNA, 19 nt, Artificial Sequence
  Description of Artificial Sequence: Synthetic oligonucleotide
guaucggugccaccaggag

SEQ ID NO: 2962380 - RNA, 19 nt, Artificial Sequence
  Description of Artificial Sequence: Synthetic oligonucleotide
ucugugccauagucagagg

SEQ ID NO: 2962381 - RNA, 19 nt, Artificial Sequence
  Description of Artificial Sequence: Synthetic oligonucleotide
ggugggauccuucaucuca

SEQ ID NO: 2962382 - RNA, 19 nt, Artificial Sequence
  Description of Artificial Sequence: Synthetic oligonucleotide
cuucaugacccgaguugcc

SEQ ID NO: 2962383 - RNA, 19 nt, Artificial Sequence
  Description of Artificial Sequence: Synthetic oligonucleotide
ugggcacgcacauuguaau

SEQ ID NO: 2962384 - RNA, 19 nt, Artificial Sequence
  Description of Artificial Sequence: Synthetic oligonucleotide
gccaucaaaacgugucggg

SEQ ID NO: 2962385 - RNA, 19 nt, Artificial Sequence
  Description of Artificial Sequence: Synthetic oligonucleotide
augacggacggccaucaaa

SEQ ID NO: 2962386 - RNA, 19 nt, Artificial Sequence
  Description of Artificial Sequence: Synthetic oligonucleotide
aggacgggcgaucuucgug

SEQ ID NO: 2962387 - RNA, 19 nt, Artificial Sequence
  Description of Artificial Sequence: Synthetic oligonucleotide
ugggagaggcgggaugacg

SEQ ID NO: 2962388 - RNA, 19 nt, Artificial Sequence
  Description of Artificial Sequence: Synthetic oligonucleotide
aguugccguggauaugcug

SEQ ID NO: 2962389 - RNA, 19 nt, Artificial Sequence
  Description of Artificial Sequence: Synthetic oligonucleotide
cucauacucuucccgggug

SEQ ID NO: 2962390 - RNA, 19 nt, Artificial Sequence
  Description of Artificial Sequence: Synthetic oligonucleotide
agaggcaggggcccggcug

SEQ ID NO: 2962391 - RNA, 19 nt, Artificial Sequence
  Description of Artificial Sequence: Synthetic oligonucleotide
gcuggagugggagaggcgg

SEQ ID NO: 2962392 - RNA, 19 nt, Artificial Sequence
  Description of Artificial Sequence: Synthetic oligonucleotide
gugccauagucagaggcag

SEQ ID NO: 2962393 - RNA, 19 nt, Artificial Sequence
  Description of Artificial Sequence: Synthetic oligonucleotide
ugaguggcuccgauucacu

SEQ ID NO: 2962394 - RNA, 19 nt, Artificial Sequence
  Description of Artificial Sequence: Synthetic oligonucleotide
agcaccgcccuggaggacg

SEQ ID NO: 2962395 - RNA, 19 nt, Artificial Sequence
  Description of Artificial Sequence: Synthetic oligonucleotide
agugggagaggcgggauga

SEQ ID NO: 2962396 - RNA, 19 nt, Artificial Sequence
  Description of Artificial Sequence: Synthetic oligonucleotide
  modified_base (18)..(18): a, c, u, g, unknown or other
cacaucauccuuaaaggnu

SEQ ID NO: 2962397 - RNA, 19 nt, Artificial Sequence
  Description of Artificial Sequence: Synthetic oligonucleotide
auauagcaccgcccuggag

SEQ ID NO: 2962398 - RNA, 19 nt, Artificial Sequence
  Description of Artificial Sequence: Synthetic oligonucleotide
agcauauagcaccgcccug

SEQ ID NO: 2962399 - RNA, 19 nt, Artificial Sequence
  Description of Artificial Sequence: Synthetic oligonucleotide
uugccguggauaugcuggc

SEQ ID NO: 2962400 - RNA, 19 nt, Artificial Sequence
  Description of Artificial Sequence: Synthetic oligonucleotide
uagucagaggcaggggccc

SEQ ID NO: 2962401 - RNA, 19 nt, Artificial Sequence
  Description of Artificial Sequence: Synthetic oligonucleotide
agaggcgggaugacggacg

SEQ ID NO: 2962402 - RNA, 19 nt, Artificial Sequence
  Description of Artificial Sequence: Synthetic oligonucleotide
ggcuguauguauugagcug

SEQ ID NO: 2962403 - RNA, 19 nt, Artificial Sequence
  Description of Artificial Sequence: Synthetic oligonucleotide
auugugaguggcuccgauu

SEQ ID NO: 2962404 - RNA, 19 nt, Artificial Sequence
  Description of Artificial Sequence: Synthetic oligonucleotide
ugagcugggcauagccgcu

SEQ ID NO: 2962405 - RNA, 19 nt, Artificial Sequence
  Description of Artificial Sequence: Synthetic oligonucleotide
  modified_base (4)..(4): a, c, u, g, unknown or other
aggnugaguagauggccuu

SEQ ID NO: 2962406 - RNA, 19 nt, Artificial Sequence
  Description of Artificial Sequence: Synthetic oligonucleotide
cuggcugguuguaucggug

SEQ ID NO: 2962407 - RNA, 19 nt, Artificial Sequence
  Description of Artificial Sequence: Synthetic oligonucleotide
  modified_base (16)..(16): a, c, u, g, unknown or other
caucauccuuaaaggnuga

SEQ ID NO: 2962408 - RNA, 19 nt, Artificial Sequence
  Description of Artificial Sequence: Synthetic oligonucleotide
uggaggacgggcgaucuuc

SEQ ID NO: 2962409 - RNA, 19 nt, Artificial Sequence
  Description of Artificial Sequence: Synthetic oligonucleotide
cuggcgguaucauccuccc

SEQ ID NO: 2962410 - RNA, 19 nt, Artificial Sequence
  Description of Artificial Sequence: Synthetic oligonucleotide
gguuguaucggugccacca

SEQ ID NO: 2962411 - RNA, 19 nt, Artificial Sequence
  Description of Artificial Sequence: Synthetic oligonucleotide
gccuucaugacccgaguug

SEQ ID NO: 2962412 - RNA, 19 nt, Artificial Sequence
  Description of Artificial Sequence: Synthetic oligonucleotide
gggagaggcgggaugacgg

SEQ ID NO: 2962413 - RNA, 19 nt, Artificial Sequence
  Description of Artificial Sequence: Synthetic oligonucleotide
gucaauggugucacagcgc

SEQ ID NO: 2962414 - RNA, 19 nt, Artificial Sequence
  Description of Artificial Sequence: Synthetic oligonucleotide
ucaaaacgugucgggccag

SEQ ID NO: 2962415 - RNA, 19 nt, Artificial Sequence
  Description of Artificial Sequence: Synthetic oligonucleotide
aggggcacgguagucagca

SEQ ID NO: 2962416 - RNA, 19 nt, Artificial Sequence
  Description of Artificial Sequence: Synthetic oligonucleotide
gacgggcgaucuucguggg

SEQ ID NO: 2962417 - RNA, 19 nt, Artificial Sequence
  Description of Artificial Sequence: Synthetic oligonucleotide
cuggagugggagaggcggg

SEQ ID NO: 2962418 - RNA, 19 nt, Artificial Sequence
  Description of Artificial Sequence: Synthetic oligonucleotide
agucagcauauagcaccgc

SEQ ID NO: 2962419 - RNA, 19 nt, Artificial Sequence
  Description of Artificial Sequence: Synthetic oligonucleotide
gagugggagaggcgggaug

SEQ ID NO: 2962420 - RNA, 19 nt, Artificial Sequence
  Description of Artificial Sequence: Synthetic oligonucleotide
uuucuaccuugauguccag

SEQ ID NO: 2962421 - RNA, 19 nt, Artificial Sequence
  Description of Artificial Sequence: Synthetic oligonucleotide
caugacccgaguugccgug

SEQ ID NO: 2962422 - RNA, 19 nt, Artificial Sequence
  Description of Artificial Sequence: Synthetic oligonucleotide
ugcuucagauccacaucau

SEQ ID NO: 2962423 - RNA, 19 nt, Artificial Sequence
  Description of Artificial Sequence: Synthetic oligonucleotide
  modified_base (15)..(15): a, c, u, g, unknown or other
aucauccuuaaaggnugag

SEQ ID NO: 2962424 - RNA, 19 nt, Artificial Sequence
  Description of Artificial Sequence: Synthetic oligonucleotide
gaucuucgugggcacgcac

SEQ ID NO: 2962425 - RNA, 19 nt, Artificial Sequence
  Description of Artificial Sequence: Synthetic oligonucleotide
cugguuguaucggugccac

SEQ ID NO: 2962426 - RNA, 19 nt, Artificial Sequence
  Description of Artificial Sequence: Synthetic oligonucleotide
uaauaaccguuggugggau

SEQ ID NO: 2962427 - RNA, 19 nt, Artificial Sequence
  Description of Artificial Sequence: Synthetic oligonucleotide
gccguggauaugcuggcgg

SEQ ID NO: 2962428 - RNA, 19 nt, Artificial Sequence
  Description of Artificial Sequence: Synthetic oligonucleotide
agcugggcauagccgcugg

SEQ ID NO: 2962429 - RNA, 19 nt, Artificial Sequence
  Description of Artificial Sequence: Synthetic oligonucleotide
ugucgggccaggggcacgg

SEQ ID NO: 2962430 - RNA, 19 nt, Artificial Sequence
  Description of Artificial Sequence: Synthetic oligonucleotide
auggccuucaugacccgag

SEQ ID NO: 2962431 - RNA, 19 nt, Artificial Sequence
  Description of Artificial Sequence: Synthetic oligonucleotide
auccucccggucagaaugc

SEQ ID NO: 2962432 - RNA, 19 nt, Artificial Sequence
  Description of Artificial Sequence: Synthetic oligonucleotide
uggcgguaucauccucccg

SEQ ID NO: 2962433 - RNA, 19 nt, Artificial Sequence
  Description of Artificial Sequence: Synthetic oligonucleotide
gucagaaugcauugugagu

SEQ ID NO: 2962434 - RNA, 19 nt, Artificial Sequence
  Description of Artificial Sequence: Synthetic oligonucleotide
gucacagcgcaaguccugc

SEQ ID NO: 2962435 - RNA, 19 nt, Artificial Sequence
  Description of Artificial Sequence: Synthetic oligonucleotide
ggccaucaaaacgugucgg

SEQ ID NO: 2962436 - RNA, 19 nt, Artificial Sequence
  Description of Artificial Sequence: Synthetic oligonucleotide
cugggcauagccgcuggag

SEQ ID NO: 2962437 - RNA, 19 nt, Artificial Sequence
  Description of Artificial Sequence: Synthetic oligonucleotide
acgggcgaucuucgugggc

SEQ ID NO: 2962438 - RNA, 19 nt, Artificial Sequence
  Description of Artificial Sequence: Synthetic oligonucleotide
cauuguaauaaccguuggu

SEQ ID NO: 2962439 - RNA, 19 nt, Artificial Sequence
  Description of Artificial Sequence: Synthetic oligonucleotide
ccggcuguauguauugagc

SEQ ID NO: 2962440 - RNA, 19 nt, Artificial Sequence
  Description of Artificial Sequence: Synthetic oligonucleotide
uggauaugcuggcgguauc

SEQ ID NO: 2962441 - RNA, 19 nt, Artificial Sequence
  Description of Artificial Sequence: Synthetic oligonucleotide
caaaacgugucgggccagg

SEQ ID NO: 2962442 - RNA, 19 nt, Artificial Sequence
  Description of Artificial Sequence: Synthetic oligonucleotide
ccuucaugacccgaguugc

SEQ ID NO: 2962443 - RNA, 19 nt, Artificial Sequence
  Description of Artificial Sequence: Synthetic oligonucleotide
gggauccuucaucucauac

SEQ ID NO: 2962444 - RNA, 19 nt, Artificial Sequence
  Description of Artificial Sequence: Synthetic oligonucleotide
gggcauagccgcuggagug

SEQ ID NO: 2962445 - RNA, 19 nt, Artificial Sequence
  Description of Artificial Sequence: Synthetic oligonucleotide
gacggacggccaucaaaac

SEQ ID NO: 2962446 - RNA, 19 nt, Artificial Sequence
  Description of Artificial Sequence: Synthetic oligonucleotide
cuguuucuaccuugauguc

SEQ ID NO: 2962447 - RNA, 19 nt, Artificial Sequence
  Description of Artificial Sequence: Synthetic oligonucleotide
agauggccuucaugacccg

SEQ ID NO: 2962448 - RNA, 19 nt, Artificial Sequence
  Description of Artificial Sequence: Synthetic oligonucleotide
accgcccuggaggacgggc

SEQ ID NO: 2962449 - RNA, 19 nt, Artificial Sequence
  Description of Artificial Sequence: Synthetic oligonucleotide
uacucuucccgggugucaa

SEQ ID NO: 2962450 - RNA, 19 nt, Artificial Sequence
  Description of Artificial Sequence: Synthetic oligonucleotide
auggugucacagcgcaagu

SEQ ID NO: 2962451 - RNA, 19 nt, Artificial Sequence
  Description of Artificial Sequence: Synthetic oligonucleotide
ggcgggaugacggacggcc

SEQ ID NO: 2962452 - RNA, 19 nt, Artificial Sequence
  Description of Artificial Sequence: Synthetic oligonucleotide
uggccuucaugacccgagu

SEQ ID NO: 2962453 - RNA, 19 nt, Artificial Sequence
  Description of Artificial Sequence: Synthetic oligonucleotide
ugacccgaguugccgugga

SEQ ID NO: 2962454 - RNA, 19 nt, Artificial Sequence
  Description of Artificial Sequence: Synthetic oligonucleotide
ggcauagccgcuggagugg

SEQ ID NO: 2962455 - RNA, 19 nt, Artificial Sequence
  Description of Artificial Sequence: Synthetic oligonucleotide
ugccguggauaugcuggcg

SEQ ID NO: 2962456 - RNA, 19 nt, Artificial Sequence
  Description of Artificial Sequence: Synthetic oligonucleotide
ccaucaaaacgugucgggc

SEQ ID NO: 2962457 - RNA, 19 nt, Artificial Sequence
  Description of Artificial Sequence: Synthetic oligonucleotide
uggugucacagcgcaaguc

SEQ ID NO: 2962458 - RNA, 19 nt, Artificial Sequence
  Description of Artificial Sequence: Synthetic oligonucleotide
gugaguggcuccgauucac

SEQ ID NO: 2962459 - RNA, 19 nt, Artificial Sequence
  Description of Artificial Sequence: Synthetic oligonucleotide
ggauccuucaucucauacu

SEQ ID NO: 2962460 - RNA, 19 nt, Artificial Sequence
  Description of Artificial Sequence: Synthetic oligonucleotide
uggagugggagaggcggga

SEQ ID NO: 2962461 - RNA, 19 nt, Artificial Sequence
  Description of Artificial Sequence: Synthetic oligonucleotide
aucuucgugggcacgcaca

SEQ ID NO: 2962462 - RNA, 19 nt, Artificial Sequence
  Description of Artificial Sequence: Synthetic oligonucleotide
agcagaagggccagagggu

SEQ ID NO: 2962463 - RNA, 19 nt, Artificial Sequence
  Description of Artificial Sequence: Synthetic oligonucleotide
cagauccacaucauccuua

SEQ ID NO: 2962464 - RNA, 19 nt, Artificial Sequence
  Description of Artificial Sequence: Synthetic oligonucleotide
cgaguugccguggauaugc

SEQ ID NO: 2962465 - RNA, 19 nt, Artificial Sequence
  Description of Artificial Sequence: Synthetic oligonucleotide
augacccgaguugccgugg

SEQ ID NO: 2962466 - RNA, 19 nt, Artificial Sequence
  Description of Artificial Sequence: Synthetic oligonucleotide
accguuggugggauccuuc

SEQ ID NO: 2962467 - RNA, 19 nt, Artificial Sequence
  Description of Artificial Sequence: Synthetic oligonucleotide
ccgauucacuguuucuacc

SEQ ID NO: 2962468 - RNA, 19 nt, Artificial Sequence
  Description of Artificial Sequence: Synthetic oligonucleotide
ucacagcgcaaguccugcu

SEQ ID NO: 2962469 - RNA, 19 nt, Artificial Sequence
  Description of Artificial Sequence: Synthetic oligonucleotide
gcuucagauccacaucauc

SEQ ID NO: 2962470 - RNA, 19 nt, Artificial Sequence
  Description of Artificial Sequence: Synthetic oligonucleotide
augcuggcgguaucauccu

SEQ ID NO: 2962471 - RNA, 19 nt, Artificial Sequence
  Description of Artificial Sequence: Synthetic oligonucleotide
ggggcucugugccauaguc

SEQ ID NO: 2962472 - RNA, 19 nt, Artificial Sequence
  Description of Artificial Sequence: Synthetic oligonucleotide
ugguuguaucggugccacc

SEQ ID NO: 2962473 - RNA, 19 nt, Artificial Sequence
  Description of Artificial Sequence: Synthetic oligonucleotide
cauauagcaccgcccugga

SEQ ID NO: 2962474 - RNA, 19 nt, Artificial Sequence
  Description of Artificial Sequence: Synthetic oligonucleotide
auguauugagcugggcaua

SEQ ID NO: 2962475 - RNA, 19 nt, Artificial Sequence
  Description of Artificial Sequence: Synthetic oligonucleotide
ggcugguuguaucggugcc

SEQ ID NO: 2962476 - RNA, 19 nt, Artificial Sequence
  Description of Artificial Sequence: Synthetic oligonucleotide
agucagaggcaggggcccg

SEQ ID NO: 2962477 - RNA, 19 nt, Artificial Sequence
  Description of Artificial Sequence: Synthetic oligonucleotide
ucgugggcacgcacauugu

SEQ ID NO: 2962478 - RNA, 19 nt, Artificial Sequence
  Description of Artificial Sequence: Synthetic oligonucleotide
gagaggcgggaugacggac

SEQ ID NO: 2962479 - RNA, 19 nt, Artificial Sequence
  Description of Artificial Sequence: Synthetic oligonucleotide
  modified_base (19)..(19): a, c, u, g, unknown or other
ccacaucauccuuaaaggn

SEQ ID NO: 2962480 - RNA, 19 nt, Artificial Sequence
  Description of Artificial Sequence: Synthetic oligonucleotide
cauacucuucccggguguc

SEQ ID NO: 2962481 - RNA, 19 nt, Artificial Sequence
  Description of Artificial Sequence: Synthetic oligonucleotide
gaaugcauugugaguggcu

SEQ ID NO: 2962482 - RNA, 19 nt, Artificial Sequence
  Description of Artificial Sequence: Synthetic oligonucleotide
gcuggcgguaucauccucc

SEQ ID NO: 2962483 - RNA, 19 nt, Artificial Sequence
  Description of Artificial Sequence: Synthetic oligonucleotide
gcacgcacauuguaauaac

SEQ ID NO: 2962484 - RNA, 19 nt, Artificial Sequence
  Description of Artificial Sequence: Synthetic oligonucleotide
ggauaugcuggcgguauca

SEQ ID NO: 2962485 - RNA, 19 nt, Artificial Sequence
  Description of Artificial Sequence: Synthetic oligonucleotide
agcgcaaguccugcuucag

SEQ ID NO: 2962486 - RNA, 19 nt, Artificial Sequence
  Description of Artificial Sequence: Synthetic oligonucleotide
uaaccguuggugggauccu

SEQ ID NO: 2962487 - RNA, 19 nt, Artificial Sequence
  Description of Artificial Sequence: Synthetic oligonucleotide
gauggccuucaugacccga

SEQ ID NO: 2962488 - RNA, 19 nt, Artificial Sequence
  Description of Artificial Sequence: Synthetic oligonucleotide
guauugagcugggcauagc

SEQ ID NO: 2962489 - RNA, 19 nt, Artificial Sequence
  Description of Artificial Sequence: Synthetic oligonucleotide
auacucuucccggguguca

SEQ ID NO: 2962490 - RNA, 19 nt, Artificial Sequence
  Description of Artificial Sequence: Synthetic oligonucleotide
ccggucagaaugcauugug

SEQ ID NO: 2962491 - RNA, 19 nt, Artificial Sequence
  Description of Artificial Sequence: Synthetic oligonucleotide
ugcuggcgguaucauccuc

SEQ ID NO: 2962492 - RNA, 19 nt, Artificial Sequence
  Description of Artificial Sequence: Synthetic oligonucleotide
cuccgauucacuguuucua

SEQ ID NO: 2962493 - RNA, 19 nt, Artificial Sequence
  Description of Artificial Sequence: Synthetic oligonucleotide
ggcacgcacauuguaauaa

SEQ ID NO: 2962494 - RNA, 19 nt, Artificial Sequence
  Description of Artificial Sequence: Synthetic oligonucleotide
uagccgcuggagugggaga

SEQ ID NO: 2962495 - RNA, 19 nt, Artificial Sequence
  Description of Artificial Sequence: Synthetic oligonucleotide
cccggcuguauguauugag

SEQ ID NO: 2962496 - RNA, 19 nt, Artificial Sequence
  Description of Artificial Sequence: Synthetic oligonucleotide
ggaggacgggcgaucuucg

SEQ ID NO: 2962497 - RNA, 19 nt, Artificial Sequence
  Description of Artificial Sequence: Synthetic oligonucleotide
uggugggauccuucaucuc

SEQ ID NO: 2962498 - RNA, 19 nt, Artificial Sequence
  Description of Artificial Sequence: Synthetic oligonucleotide
gugggcacgcacauuguaa

SEQ ID NO: 2962499 - RNA, 19 nt, Artificial Sequence
  Description of Artificial Sequence: Synthetic oligonucleotide
ggcuccgauucacuguuuc

SEQ ID NO: 2962500 - RNA, 19 nt, Artificial Sequence
  Description of Artificial Sequence: Synthetic oligonucleotide
gagcugggcauagccgcug

SEQ ID NO: 2962501 - RNA, 19 nt, Artificial Sequence
  Description of Artificial Sequence: Synthetic oligonucleotide
gcaaguccugcuucagauc

SEQ ID NO: 2962502 - RNA, 19 nt, Artificial Sequence
  Description of Artificial Sequence: Synthetic oligonucleotide
  modified_base (3)..(3): a, c, u, g, unknown or other
ggnugaguagauggccuuc

SEQ ID NO: 2962503 - RNA, 19 nt, Artificial Sequence
  Description of Artificial Sequence: Synthetic oligonucleotide
gauccacaucauccuuaaa

SEQ ID NO: 2962504 - RNA, 19 nt, Artificial Sequence
  Description of Artificial Sequence: Synthetic oligonucleotide
ggcccggcuguauguauug

SEQ ID NO: 2962505 - RNA, 19 nt, Artificial Sequence
  Description of Artificial Sequence: Synthetic oligonucleotide
ggugccaccaggagcagaa

SEQ ID NO: 2962506 - RNA, 19 nt, Artificial Sequence
  Description of Artificial Sequence: Synthetic oligonucleotide
uccucccggucagaaugca

SEQ ID NO: 2962507 - RNA, 19 nt, Artificial Sequence
  Description of Artificial Sequence: Synthetic oligonucleotide
acccgaguugccguggaua

SEQ ID NO: 2962508 - RNA, 19 nt, Artificial Sequence
  Description of Artificial Sequence: Synthetic oligonucleotide
aaccguuggugggauccuu

SEQ ID NO: 2962509 - RNA, 19 nt, Artificial Sequence
  Description of Artificial Sequence: Synthetic oligonucleotide
cggccaucaaaacgugucg

SEQ ID NO: 2962510 - RNA, 19 nt, Artificial Sequence
  Description of Artificial Sequence: Synthetic oligonucleotide
caggggcacgguagucagc

SEQ ID NO: 2962511 - RNA, 19 nt, Artificial Sequence
  Description of Artificial Sequence: Synthetic oligonucleotide
gaugacggacggccaucaa

SEQ ID NO: 2962512 - RNA, 19 nt, Artificial Sequence
  Description of Artificial Sequence: Synthetic oligonucleotide
  modified_base (10)..(10): a, c, u, g, unknown or other
ccuuaaaggnugaguagau

SEQ ID NO: 2962513 - RNA, 19 nt, Artificial Sequence
  Description of Artificial Sequence: Synthetic oligonucleotide
gauaugcuggcgguaucau

SEQ ID NO: 2962514 - RNA, 19 nt, Artificial Sequence
  Description of Artificial Sequence: Synthetic oligonucleotide
cagcgcaaguccugcuuca

SEQ ID NO: 2962515 - RNA, 19 nt, Artificial Sequence
  Description of Artificial Sequence: Synthetic oligonucleotide
guggcuccgauucacuguu

SEQ ID NO: 2962516 - RNA, 19 nt, Artificial Sequence
  Description of Artificial Sequence: Synthetic oligonucleotide
gcauagccgcuggaguggg

SEQ ID NO: 2962517 - RNA, 19 nt, Artificial Sequence
  Description of Artificial Sequence: Synthetic oligonucleotide
gaggcaggggcccggcugu

SEQ ID NO: 2962518 - RNA, 19 nt, Artificial Sequence
  Description of Artificial Sequence: Synthetic oligonucleotide
cucccggucagaaugcauu

SEQ ID NO: 2962519 - RNA, 19 nt, Artificial Sequence
  Description of Artificial Sequence: Synthetic oligonucleotide
gcgaucuucgugggcacgc

SEQ ID NO: 2962520 - RNA, 19 nt, Artificial Sequence
  Description of Artificial Sequence: Synthetic oligonucleotide
guggauaugcuggcgguau

SEQ ID NO: 2962521 - RNA, 19 nt, Artificial Sequence
  Description of Artificial Sequence: Synthetic oligonucleotide
ggagaggcgggaugacgga

SEQ ID NO: 2962522 - RNA, 19 nt, Artificial Sequence
  Description of Artificial Sequence: Synthetic oligonucleotide
ggcgaucuucgugggcacg

SEQ ID NO: 2962523 - RNA, 19 nt, Artificial Sequence
  Description of Artificial Sequence: Synthetic oligonucleotide
caauggugucacagcgcaa

SEQ ID NO: 2962524 - RNA, 19 nt, Artificial Sequence
  Description of Artificial Sequence: Synthetic oligonucleotide
gcaggggcccggcuguaug

SEQ ID NO: 2962525 - RNA, 19 nt, Artificial Sequence
  Description of Artificial Sequence: Synthetic oligonucleotide
ggaugacggacggccauca

SEQ ID NO: 2962526 - RNA, 19 nt, Artificial Sequence
  Description of Artificial Sequence: Synthetic oligonucleotide
gggcacgguagucagcaua

SEQ ID NO: 2962527 - RNA, 19 nt, Artificial Sequence
  Description of Artificial Sequence: Synthetic oligonucleotide
gcugguuguaucggugcca

SEQ ID NO: 2962528 - RNA, 19 nt, Artificial Sequence
  Description of Artificial Sequence: Synthetic oligonucleotide
cuucccgggugucaauggu

SEQ ID NO: 2962529 - RNA, 19 nt, Artificial Sequence
  Description of Artificial Sequence: Synthetic oligonucleotide
ccgcccuggaggacgggcg

SEQ ID NO: 2962530 - RNA, 19 nt, Artificial Sequence
  Description of Artificial Sequence: Synthetic oligonucleotide
cggacggccaucaaaacgu

SEQ ID NO: 2962531 - RNA, 19 nt, Artificial Sequence
  Description of Artificial Sequence: Synthetic oligonucleotide
ucggugccaccaggagcag

SEQ ID NO: 2962532 - RNA, 19 nt, Artificial Sequence
  Description of Artificial Sequence: Synthetic oligonucleotide
gcacauuguaauaaccguu

SEQ ID NO: 2962533 - RNA, 19 nt, Artificial Sequence
  Description of Artificial Sequence: Synthetic oligonucleotide
cauugugaguggcuccgau

SEQ ID NO: 2962534 - RNA, 19 nt, Artificial Sequence
  Description of Artificial Sequence: Synthetic oligonucleotide
gacggccaucaaaacgugu

SEQ ID NO: 2962535 - RNA, 19 nt, Artificial Sequence
  Description of Artificial Sequence: Synthetic oligonucleotide
gugucgggccaggggcacg

SEQ ID NO: 2962536 - RNA, 19 nt, Artificial Sequence
  Description of Artificial Sequence: Synthetic oligonucleotide
gggcucugugccauaguca

SEQ ID NO: 2962537 - RNA, 19 nt, Artificial Sequence
  Description of Artificial Sequence: Synthetic oligonucleotide
acgugucgggccaggggca

SEQ ID NO: 2962538 - RNA, 19 nt, Artificial Sequence
  Description of Artificial Sequence: Synthetic oligonucleotide
uggcuccgauucacuguuu

SEQ ID NO: 2962539 - RNA, 19 nt, Artificial Sequence
  Description of Artificial Sequence: Synthetic oligonucleotide
ggacggccaucaaaacgug

SEQ ID NO: 2962540 - RNA, 19 nt, Artificial Sequence
  Description of Artificial Sequence: Synthetic oligonucleotide
cgauucacuguuucuaccu

SEQ ID NO: 2962541 - RNA, 19 nt, Artificial Sequence
  Description of Artificial Sequence: Synthetic oligonucleotide
gaggacgggcgaucuucgu

SEQ ID NO: 2962542 - RNA, 19 nt, Artificial Sequence
  Description of Artificial Sequence: Synthetic oligonucleotide
cgcacauuguaauaaccgu

SEQ ID NO: 2962543 - RNA, 19 nt, Artificial Sequence
  Description of Artificial Sequence: Synthetic oligonucleotide
gugggauccuucaucucau

SEQ ID NO: 2962544 - RNA, 19 nt, Artificial Sequence
  Description of Artificial Sequence: Synthetic oligonucleotide
cauagccgcuggaguggga

SEQ ID NO: 2962545 - RNA, 19 nt, Artificial Sequence
  Description of Artificial Sequence: Synthetic oligonucleotide
gccaggggcacgguaguca

SEQ ID NO: 2962546 - RNA, 19 nt, Artificial Sequence
  Description of Artificial Sequence: Synthetic oligonucleotide
ccgcuggagugggagaggc

SEQ ID NO: 2962547 - RNA, 19 nt, Artificial Sequence
  Description of Artificial Sequence: Synthetic oligonucleotide
ggcacgguagucagcauau

SEQ ID NO: 2962548 - RNA, 19 nt, Artificial Sequence
  Description of Artificial Sequence: Synthetic oligonucleotide
cggucagaaugcauuguga

SEQ ID NO: 2962549 - RNA, 19 nt, Artificial Sequence
  Description of Artificial Sequence: Synthetic oligonucleotide
gugggagaggcgggaugac

SEQ ID NO: 2962550 - RNA, 19 nt, Artificial Sequence
  Description of Artificial Sequence: Synthetic oligonucleotide
gcuccgauucacuguuucu

SEQ ID NO: 2962551 - RNA, 19 nt, Artificial Sequence
  Description of Artificial Sequence: Synthetic oligonucleotide
gcgcaaguccugcuucaga

SEQ ID NO: 2962552 - RNA, 19 nt, Artificial Sequence
  Description of Artificial Sequence: Synthetic oligonucleotide
gggcgaucuucgugggcac

SEQ ID NO: 2962553 - RNA, 19 nt, Artificial Sequence
  Description of Artificial Sequence: Synthetic oligonucleotide
gggaugacggacggccauc

SEQ ID NO: 2962554 - RNA, 19 nt, Artificial Sequence
  Description of Artificial Sequence: Synthetic oligonucleotide
ccgggugucaaugguguca

SEQ ID NO: 2962555 - RNA, 19 nt, Artificial Sequence
  Description of Artificial Sequence: Synthetic oligonucleotide
gcuggcugguuguaucggu

SEQ ID NO: 2962556 - RNA, 19 nt, Artificial Sequence
  Description of Artificial Sequence: Synthetic oligonucleotide
ccguuggugggauccuuca

SEQ ID NO: 2962557 - RNA, 19 nt, Artificial Sequence
  Description of Artificial Sequence: Synthetic oligonucleotide
cgggugucaauggugucac

SEQ ID NO: 2962558 - RNA, 19 nt, Artificial Sequence
  Description of Artificial Sequence: Synthetic oligonucleotide
gggcacgcacauuguaaua

SEQ ID NO: 2962559 - RNA, 19 nt, Artificial Sequence
  Description of Artificial Sequence: Synthetic oligonucleotide
cacagcgcaaguccugcuu

SEQ ID NO: 2962560 - RNA, 19 nt, Artificial Sequence
  Description of Artificial Sequence: Synthetic oligonucleotide
cggcuguauguauugagcu

SEQ ID NO: 2962561 - RNA, 19 nt, Artificial Sequence
  Description of Artificial Sequence: Synthetic oligonucleotide
uagcaccgcccuggaggac

SEQ ID NO: 2962562 - RNA, 19 nt, Artificial Sequence
  Description of Artificial Sequence: Synthetic oligonucleotide
gcaccgcccuggaggacgg

SEQ ID NO: 2962563 - RNA, 19 nt, Artificial Sequence
  Description of Artificial Sequence: Synthetic oligonucleotide
guccugcuucagauccaca

SEQ ID NO: 2962564 - RNA, 19 nt, Artificial Sequence
  Description of Artificial Sequence: Synthetic oligonucleotide
gaguugccguggauaugcu

SEQ ID NO: 2962565 - RNA, 19 nt, Artificial Sequence
  Description of Artificial Sequence: Synthetic oligonucleotide
caggggcccggcuguaugu

SEQ ID NO: 2962566 - RNA, 19 nt, Artificial Sequence
  Description of Artificial Sequence: Synthetic oligonucleotide
aggggcccggcuguaugua

SEQ ID NO: 2962567 - RNA, 19 nt, Artificial Sequence
  Description of Artificial Sequence: Synthetic oligonucleotide
cgcuggagugggagaggcg

SEQ ID NO: 2962568 - RNA, 19 nt, Artificial Sequence
  Description of Artificial Sequence: Synthetic oligonucleotide
gcgguaucauccucccggu

SEQ ID NO: 2962569 - RNA, 19 nt, Artificial Sequence
  Description of Artificial Sequence: Synthetic oligonucleotide
cgcaaguccugcuucagau

SEQ ID NO: 2962570 - RNA, 19 nt, Artificial Sequence
  Description of Artificial Sequence: Synthetic oligonucleotide
cgggcgaucuucgugggca

SEQ ID NO: 2962571 - RNA, 19 nt, Artificial Sequence
  Description of Artificial Sequence: Synthetic oligonucleotide
gacccgaguugccguggau

SEQ ID NO: 2962572 - RNA, 19 nt, Artificial Sequence
  Description of Artificial Sequence: Synthetic oligonucleotide
gcugggcauagccgcugga

SEQ ID NO: 2962573 - RNA, 19 nt, Artificial Sequence
  Description of Artificial Sequence: Synthetic oligonucleotide
gggugucaauggugucaca

SEQ ID NO: 2962574 - RNA, 19 nt, Artificial Sequence
  Description of Artificial Sequence: Synthetic oligonucleotide
cccgaguugccguggauau

SEQ ID NO: 2962575 - RNA, 19 nt, Artificial Sequence
  Description of Artificial Sequence: Synthetic oligonucleotide
gcauugugaguggcuccga

SEQ ID NO: 2962576 - RNA, 19 nt, Artificial Sequence
  Description of Artificial Sequence: Synthetic oligonucleotide
gcucugugccauagucaga

SEQ ID NO: 2962577 - RNA, 19 nt, Artificial Sequence
  Description of Artificial Sequence: Synthetic oligonucleotide
ggccuucaugacccgaguu

SEQ ID NO: 2962578 - RNA, 19 nt, Artificial Sequence
  Description of Artificial Sequence: Synthetic oligonucleotide
cccgggugucaaugguguc

SEQ ID NO: 2962579 - RNA, 19 nt, Artificial Sequence
  Description of Artificial Sequence: Synthetic oligonucleotide
ccgaguugccguggauaug

SEQ ID NO: 2962580 - RNA, 19 nt, Artificial Sequence
  Description of Artificial Sequence: Synthetic oligonucleotide
caccgcccuggaggacggg

SEQ ID NO: 2962581 - RNA, 19 nt, Artificial Sequence
  Description of Artificial Sequence: Synthetic oligonucleotide
ccguggauaugcuggcggu

SEQ ID NO: 2962582 - RNA, 19 nt, Artificial Sequence
  Description of Artificial Sequence: Synthetic oligonucleotide
gcgggaugacggacggcca

SEQ ID NO: 2962583 - RNA, 19 nt, Artificial Sequence
  Description of Artificial Sequence: Synthetic oligonucleotide
ggccaggggcacgguaguc

SEQ ID NO: 2962584 - RNA, 19 nt, Artificial Sequence
  Description of Artificial Sequence: Synthetic oligonucleotide
cccuggaggacgggcgauc

SEQ ID NO: 2962585 - RNA, 19 nt, Artificial Sequence
  Description of Artificial Sequence: Synthetic oligonucleotide
cgguaucauccucccgguc

SEQ ID NO: 2962586 - RNA, 19 nt, Artificial Sequence
  Description of Artificial Sequence: Synthetic oligonucleotide
cgugggcacgcacauugua

SEQ ID NO: 2962587 - RNA, 19 nt, Artificial Sequence
  Description of Artificial Sequence: Synthetic oligonucleotide
ggagugggagaggcgggau

SEQ ID NO: 2962588 - RNA, 19 nt, Artificial Sequence
  Description of Artificial Sequence: Synthetic oligonucleotide
cgugucgggccaggggcac

SEQ ID NO: 2962589 - RNA, 19 nt, Artificial Sequence
  Description of Artificial Sequence: Synthetic oligonucleotide
ggggcccggcuguauguau

SEQ ID NO: 2962590 - RNA, 19 nt, Artificial Sequence
  Description of Artificial Sequence: Synthetic oligonucleotide
cuggaggacgggcgaucuu

SEQ ID NO: 2962591 - RNA, 19 nt, Artificial Sequence
  Description of Artificial Sequence: Synthetic oligonucleotide
ccuggaggacgggcgaucu

SEQ ID NO: 2962592 - RNA, 19 nt, Artificial Sequence
  Description of Artificial Sequence: Synthetic oligonucleotide
aggcaggggcccggcugua

SEQ ID NO: 2962593 - RNA, 19 nt, Artificial Sequence
  Description of Artificial Sequence: Synthetic oligonucleotide
gcacgguagucagcauaua

SEQ ID NO: 2962594 - RNA, 19 nt, Artificial Sequence
  Description of Artificial Sequence: Synthetic oligonucleotide
cuucgugggcacgcacauu

SEQ ID NO: 2962595 - RNA, 19 nt, Artificial Sequence
  Description of Artificial Sequence: Synthetic oligonucleotide
cguggauaugcuggcggua

SEQ ID NO: 2962596 - RNA, 19 nt, Artificial Sequence
  Description of Artificial Sequence: Synthetic oligonucleotide
cgaucuucgugggcacgca

SEQ ID NO: 2962597 - RNA, 19 nt, Artificial Sequence
  Description of Artificial Sequence: Synthetic oligonucleotide
cccggucagaaugcauugu

SEQ ID NO: 2962598 - RNA, 19 nt, Artificial Sequence
  Description of Artificial Sequence: Synthetic oligonucleotide
ccucccggucagaaugcau

SEQ ID NO: 2962599 - RNA, 19 nt, Artificial Sequence
  Description of Artificial Sequence: Synthetic oligonucleotide
cgcccuggaggacgggcga

SEQ ID NO: 2962600 - RNA, 19 nt, Artificial Sequence
  Description of Artificial Sequence: Synthetic oligonucleotide
gggcccggcuguauguauu

SEQ ID NO: 2962601 - RNA, 19 nt, Artificial Sequence
  Description of Artificial Sequence: Synthetic oligonucleotide
ggggcacgguagucagcau

SEQ ID NO: 2962602 - RNA, 19 nt, Artificial Sequence
  Description of Artificial Sequence: Synthetic oligonucleotide
cgggaugacggacggccau

SEQ ID NO: 2962603 - RNA, 19 nt, Artificial Sequence
  Description of Artificial Sequence: Synthetic oligonucleotide
gucgggccaggggcacggu

SEQ ID NO: 2962604 - RNA, 19 nt, Artificial Sequence
  Description of Artificial Sequence: Synthetic oligonucleotide
ggcaggggcccggcuguau

SEQ ID NO: 2962605 - RNA, 19 nt, Artificial Sequence
  Description of Artificial Sequence: Synthetic oligonucleotide
gcccuggaggacgggcgau

SEQ ID NO: 2962606 - RNA, 19 nt, Artificial Sequence
  Description of Artificial Sequence: Synthetic oligonucleotide
  modified_base (1)..(1): a, c, u, g, unknown or other
nugaguagauggccuucau

SEQ ID NO: 2962607 - RNA, 19 nt, Artificial Sequence
  Description of Artificial Sequence: Synthetic oligonucleotide
acaaacaggguguaggagg

SEQ ID NO: 2962608 - RNA, 19 nt, Artificial Sequence
  Description of Artificial Sequence: Synthetic oligonucleotide
gagucuguggcgcugaugg

SEQ ID NO: 2962609 - RNA, 19 nt, Artificial Sequence
  Description of Artificial Sequence: Synthetic oligonucleotide
gacaccugcacuguuaugg

SEQ ID NO: 2962610 - RNA, 19 nt, Artificial Sequence
  Description of Artificial Sequence: Synthetic oligonucleotide
guugacaucggacaccugc

SEQ ID NO: 2962611 - RNA, 19 nt, Artificial Sequence
  Description of Artificial Sequence: Synthetic oligonucleotide
gagaugagcgaggagaggg

SEQ ID NO: 2962612 - RNA, 19 nt, Artificial Sequence
  Description of Artificial Sequence: Synthetic oligonucleotide
aggucggugacugugaugg

SEQ ID NO: 2962613 - RNA, 19 nt, Artificial Sequence
  Description of Artificial Sequence: Synthetic oligonucleotide
uggacaaacaggguguagg

SEQ ID NO: 2962614 - RNA, 19 nt, Artificial Sequence
  Description of Artificial Sequence: Synthetic oligonucleotide
acuguuauggugugcuggg

SEQ ID NO: 2962615 - RNA, 19 nt, Artificial Sequence
  Description of Artificial Sequence: Synthetic oligonucleotide
uugucguugacaucggaca

SEQ ID NO: 2962616 - RNA, 19 nt, Artificial Sequence
  Description of Artificial Sequence: Synthetic oligonucleotide
aaggagcauugucauuggc

SEQ ID NO: 2962617 - RNA, 19 nt, Artificial Sequence
  Description of Artificial Sequence: Synthetic oligonucleotide
uaggagguuugugugaagg

SEQ ID NO: 2962618 - RNA, 19 nt, Artificial Sequence
  Description of Artificial Sequence: Synthetic oligonucleotide
aggagguuugugugaaggc

SEQ ID NO: 2962619 - RNA, 19 nt, Artificial Sequence
  Description of Artificial Sequence: Synthetic oligonucleotide
uggagaugagcgaggagag

SEQ ID NO: 2962620 - RNA, 19 nt, Artificial Sequence
  Description of Artificial Sequence: Synthetic oligonucleotide
agcacgaaggagcauuguc

SEQ ID NO: 2962621 - RNA, 19 nt, Artificial Sequence
  Description of Artificial Sequence: Synthetic oligonucleotide
gauggugccuaugugcagg

SEQ ID NO: 2962622 - RNA, 19 nt, Artificial Sequence
  Description of Artificial Sequence: Synthetic oligonucleotide
cugagucugagucuguggc

SEQ ID NO: 2962623 - RNA, 19 nt, Artificial Sequence
  Description of Artificial Sequence: Synthetic oligonucleotide
ugagucugagucuguggcg

SEQ ID NO: 2962624 - RNA, 19 nt, Artificial Sequence
  Description of Artificial Sequence: Synthetic oligonucleotide
uggagccugagucugaguc

SEQ ID NO: 2962625 - RNA, 19 nt, Artificial Sequence
  Description of Artificial Sequence: Synthetic oligonucleotide
gagguuugugugaaggcgg

SEQ ID NO: 2962626 - RNA, 19 nt, Artificial Sequence
  Description of Artificial Sequence: Synthetic oligonucleotide
gugaugugggcauuggagc

SEQ ID NO: 2962627 - RNA, 19 nt, Artificial Sequence
  Description of Artificial Sequence: Synthetic oligonucleotide
acaucggacaccugcacug

SEQ ID NO: 2962628 - RNA, 19 nt, Artificial Sequence
  Description of Artificial Sequence: Synthetic oligonucleotide
ggcguugucguugacaucg

SEQ ID NO: 2962629 - RNA, 19 nt, Artificial Sequence
  Description of Artificial Sequence: Synthetic oligonucleotide
ucuguggcgcugauggugc

SEQ ID NO: 2962630 - RNA, 19 nt, Artificial Sequence
  Description of Artificial Sequence: Synthetic oligonucleotide
guuauggugugcuggguug

SEQ ID NO: 2962631 - RNA, 19 nt, Artificial Sequence
  Description of Artificial Sequence: Synthetic oligonucleotide
gaaggagcauugucauugg

SEQ ID NO: 2962632 - RNA, 19 nt, Artificial Sequence
  Description of Artificial Sequence: Synthetic oligonucleotide
uugacaucggacaccugca

SEQ ID NO: 2962633 - RNA, 19 nt, Artificial Sequence
  Description of Artificial Sequence: Synthetic oligonucleotide
ucggugacugugaugguga

SEQ ID NO: 2962634 - RNA, 19 nt, Artificial Sequence
  Description of Artificial Sequence: Synthetic oligonucleotide
ugcacuguuauggugugcu

SEQ ID NO: 2962635 - RNA, 19 nt, Artificial Sequence
  Description of Artificial Sequence: Synthetic oligonucleotide
ugucguugacaucggacac

SEQ ID NO: 2962636 - RNA, 19 nt, Artificial Sequence
  Description of Artificial Sequence: Synthetic oligonucleotide
ucgugggugggcagcagcg

SEQ ID NO: 2962637 - RNA, 19 nt, Artificial Sequence
  Description of Artificial Sequence: Synthetic oligonucleotide
ggugccuaugugcagggcg

SEQ ID NO: 2962638 - RNA, 19 nt, Artificial Sequence
  Description of Artificial Sequence: Synthetic oligonucleotide
uguuauggugugcuggguu

SEQ ID NO: 2962639 - RNA, 19 nt, Artificial Sequence
  Description of Artificial Sequence: Synthetic oligonucleotide
cacuguuauggugugcugg

SEQ ID NO: 2962640 - RNA, 19 nt, Artificial Sequence
  Description of Artificial Sequence: Synthetic oligonucleotide
gcugauggugccuaugugc

SEQ ID NO: 2962641 - RNA, 19 nt, Artificial Sequence
  Description of Artificial Sequence: Synthetic oligonucleotide
uggugugcuggguugugag

SEQ ID NO: 2962642 - RNA, 19 nt, Artificial Sequence
  Description of Artificial Sequence: Synthetic oligonucleotide
ggagguuugugugaaggcg

SEQ ID NO: 2962643 - RNA, 19 nt, Artificial Sequence
  Description of Artificial Sequence: Synthetic oligonucleotide
gguguaggagguuugugug

SEQ ID NO: 2962644 - RNA, 19 nt, Artificial Sequence
  Description of Artificial Sequence: Synthetic oligonucleotide
ggugaugugggcauuggag

SEQ ID NO: 2962645 - RNA, 19 nt, Artificial Sequence
  Description of Artificial Sequence: Synthetic oligonucleotide
gagucugagucuguggcgc

SEQ ID NO: 2962646 - RNA, 19 nt, Artificial Sequence
  Description of Artificial Sequence: Synthetic oligonucleotide
gacaaacaggguguaggag

SEQ ID NO: 2962647 - RNA, 19 nt, Artificial Sequence
  Description of Artificial Sequence: Synthetic oligonucleotide
uguaggagguuugugugaa

SEQ ID NO: 2962648 - RNA, 19 nt, Artificial Sequence
  Description of Artificial Sequence: Synthetic oligonucleotide
gaugagcgaggagagggcc

SEQ ID NO: 2962649 - RNA, 19 nt, Artificial Sequence
  Description of Artificial Sequence: Synthetic oligonucleotide
cugauggugccuaugugca

SEQ ID NO: 2962650 - RNA, 19 nt, Artificial Sequence
  Description of Artificial Sequence: Synthetic oligonucleotide
agaugagcgaggagagggc

SEQ ID NO: 2962651 - RNA, 19 nt, Artificial Sequence
  Description of Artificial Sequence: Synthetic oligonucleotide
gugacugugauggugaugu

SEQ ID NO: 2962652 - RNA, 19 nt, Artificial Sequence
  Description of Artificial Sequence: Synthetic oligonucleotide
agcgaguaggugauguggg

SEQ ID NO: 2962653 - RNA, 19 nt, Artificial Sequence
  Description of Artificial Sequence: Synthetic oligonucleotide
cagcgaguaggugaugugg

SEQ ID NO: 2962654 - RNA, 19 nt, Artificial Sequence
  Description of Artificial Sequence: Synthetic oligonucleotide
ggggcuguuguucuccugg

SEQ ID NO: 2962655 - RNA, 19 nt, Artificial Sequence
  Description of Artificial Sequence: Synthetic oligonucleotide
ucguugacaucggacaccu

SEQ ID NO: 2962656 - RNA, 19 nt, Artificial Sequence
  Description of Artificial Sequence: Synthetic oligonucleotide
gugugcuggguugugagcc

SEQ ID NO: 2962657 - RNA, 19 nt, Artificial Sequence
  Description of Artificial Sequence: Synthetic oligonucleotide
auggugccuaugugcaggg

SEQ ID NO: 2962658 - RNA, 19 nt, Artificial Sequence
  Description of Artificial Sequence: Synthetic oligonucleotide
ugauggugccuaugugcag

SEQ ID NO: 2962659 - RNA, 19 nt, Artificial Sequence
  Description of Artificial Sequence: Synthetic oligonucleotide
ugagcgaggagagggccag

SEQ ID NO: 2962660 - RNA, 19 nt, Artificial Sequence
  Description of Artificial Sequence: Synthetic oligonucleotide
uagagcacgaaggagcauu

SEQ ID NO: 2962661 - RNA, 19 nt, Artificial Sequence
  Description of Artificial Sequence: Synthetic oligonucleotide
ugacaucggacaccugcac

SEQ ID NO: 2962662 - RNA, 19 nt, Artificial Sequence
  Description of Artificial Sequence: Synthetic oligonucleotide
ggguagagcacgaaggagc

SEQ ID NO: 2962663 - RNA, 19 nt, Artificial Sequence
  Description of Artificial Sequence: Synthetic oligonucleotide
guuguucuccuggacaaac

SEQ ID NO: 2962664 - RNA, 19 nt, Artificial Sequence
  Description of Artificial Sequence: Synthetic oligonucleotide
gggcauuggagccugaguc

SEQ ID NO: 2962665 - RNA, 19 nt, Artificial Sequence
  Description of Artificial Sequence: Synthetic oligonucleotide
ugggcauuggagccugagu

SEQ ID NO: 2962666 - RNA, 19 nt, Artificial Sequence
  Description of Artificial Sequence: Synthetic oligonucleotide
gagccugagucugagucug

SEQ ID NO: 2962667 - RNA, 19 nt, Artificial Sequence
  Description of Artificial Sequence: Synthetic oligonucleotide
uaggugaugugggcauugg

SEQ ID NO: 2962668 - RNA, 19 nt, Artificial Sequence
  Description of Artificial Sequence: Synthetic oligonucleotide
ugcuggguugugagccugg

SEQ ID NO: 2962669 - RNA, 19 nt, Artificial Sequence
  Description of Artificial Sequence: Synthetic oligonucleotide
auuggagccugagucugag

SEQ ID NO: 2962670 - RNA, 19 nt, Artificial Sequence
  Description of Artificial Sequence: Synthetic oligonucleotide
ugggcagcagcgaguaggu

SEQ ID NO: 2962671 - RNA, 19 nt, Artificial Sequence
  Description of Artificial Sequence: Synthetic oligonucleotide
gugccuaugugcagggcgg

SEQ ID NO: 2962672 - RNA, 19 nt, Artificial Sequence
  Description of Artificial Sequence: Synthetic oligonucleotide
ccugggugugcccaggucg

SEQ ID NO: 2962673 - RNA, 19 nt, Artificial Sequence
  Description of Artificial Sequence: Synthetic oligonucleotide
agguuugugugaaggcggg

SEQ ID NO: 2962674 - RNA, 19 nt, Artificial Sequence
  Description of Artificial Sequence: Synthetic oligonucleotide
ggcagcagcgaguagguga

SEQ ID NO: 2962675 - RNA, 19 nt, Artificial Sequence
  Description of Artificial Sequence: Synthetic oligonucleotide
acaccugcacuguuauggu

SEQ ID NO: 2962676 - RNA, 19 nt, Artificial Sequence
  Description of Artificial Sequence: Synthetic oligonucleotide
gucuguggcgcugauggug

SEQ ID NO: 2962677 - RNA, 19 nt, Artificial Sequence
  Description of Artificial Sequence: Synthetic oligonucleotide
uuauggugugcuggguugu

SEQ ID NO: 2962678 - RNA, 19 nt, Artificial Sequence
  Description of Artificial Sequence: Synthetic oligonucleotide
gcuguuguucuccuggaca

SEQ ID NO: 2962679 - RNA, 19 nt, Artificial Sequence
  Description of Artificial Sequence: Synthetic oligonucleotide
ucggacaccugcacuguua

SEQ ID NO: 2962680 - RNA, 19 nt, Artificial Sequence
  Description of Artificial Sequence: Synthetic oligonucleotide
ugagccugggugugcccag

SEQ ID NO: 2962681 - RNA, 19 nt, Artificial Sequence
  Description of Artificial Sequence: Synthetic oligonucleotide
ucugagucuguggcgcuga

SEQ ID NO: 2962682 - RNA, 19 nt, Artificial Sequence
  Description of Artificial Sequence: Synthetic oligonucleotide
uugugagccugggugugcc

SEQ ID NO: 2962683 - RNA, 19 nt, Artificial Sequence
  Description of Artificial Sequence: Synthetic oligonucleotide
gucguugacaucggacacc

SEQ ID NO: 2962684 - RNA, 19 nt, Artificial Sequence
  Description of Artificial Sequence: Synthetic oligonucleotide
cgaaggagcauugucauug

SEQ ID NO: 2962685 - RNA, 19 nt, Artificial Sequence
  Description of Artificial Sequence: Synthetic oligonucleotide
gucggugacugugauggug

SEQ ID NO: 2962686 - RNA, 19 nt, Artificial Sequence
  Description of Artificial Sequence: Synthetic oligonucleotide
guguaggagguuuguguga

SEQ ID NO: 2962687 - RNA, 19 nt, Artificial Sequence
  Description of Artificial Sequence: Synthetic oligonucleotide
aggugaugugggcauugga

SEQ ID NO: 2962688 - RNA, 19 nt, Artificial Sequence
  Description of Artificial Sequence: Synthetic oligonucleotide
guaggagguuugugugaag

SEQ ID NO: 2962689 - RNA, 19 nt, Artificial Sequence
  Description of Artificial Sequence: Synthetic oligonucleotide
uauggugugcuggguugug

SEQ ID NO: 2962690 - RNA, 19 nt, Artificial Sequence
  Description of Artificial Sequence: Synthetic oligonucleotide
  modified_base (4)..(4): a, c, u, g, unknown or other
accngcgccuggcugcuga

SEQ ID NO: 2962691 - RNA, 19 nt, Artificial Sequence
  Description of Artificial Sequence: Synthetic oligonucleotide
caaacaggguguaggaggu

SEQ ID NO: 2962692 - RNA, 19 nt, Artificial Sequence
  Description of Artificial Sequence: Synthetic oligonucleotide
ugccuaugugcagggcggg

SEQ ID NO: 2962693 - RNA, 19 nt, Artificial Sequence
  Description of Artificial Sequence: Synthetic oligonucleotide
ccugagucugagucugugg

SEQ ID NO: 2962694 - RNA, 19 nt, Artificial Sequence
  Description of Artificial Sequence: Synthetic oligonucleotide
ggagagggccagcugcggg

SEQ ID NO: 2962695 - RNA, 19 nt, Artificial Sequence
  Description of Artificial Sequence: Synthetic oligonucleotide
agagcacgaaggagcauug

SEQ ID NO: 2962696 - RNA, 19 nt, Artificial Sequence
  Description of Artificial Sequence: Synthetic oligonucleotide
ugagucuguggcgcugaug

SEQ ID NO: 2962697 - RNA, 19 nt, Artificial Sequence
  Description of Artificial Sequence: Synthetic oligonucleotide
gucgugggugggcagcagc

SEQ ID NO: 2962698 - RNA, 19 nt, Artificial Sequence
  Description of Artificial Sequence: Synthetic oligonucleotide
gacaucggacaccugcacu

SEQ ID NO: 2962699 - RNA, 19 nt, Artificial Sequence
  Description of Artificial Sequence: Synthetic oligonucleotide
caccugcacuguuauggug

SEQ ID NO: 2962700 - RNA, 19 nt, Artificial Sequence
  Description of Artificial Sequence: Synthetic oligonucleotide
ugugagccugggugugccc

SEQ ID NO: 2962701 - RNA, 19 nt, Artificial Sequence
  Description of Artificial Sequence: Synthetic oligonucleotide
agggcggggcuguuguucu

SEQ ID NO: 2962702 - RNA, 19 nt, Artificial Sequence
  Description of Artificial Sequence: Synthetic oligonucleotide
gaguaggugaugugggcau

SEQ ID NO: 2962703 - RNA, 19 nt, Artificial Sequence
  Description of Artificial Sequence: Synthetic oligonucleotide
agucugagucuguggcgcu

SEQ ID NO: 2962704 - RNA, 19 nt, Artificial Sequence
  Description of Artificial Sequence: Synthetic oligonucleotide
uguuguucuccuggacaaa

SEQ ID NO: 2962705 - RNA, 19 nt, Artificial Sequence
  Description of Artificial Sequence: Synthetic oligonucleotide
gcacgaaggagcauuguca

SEQ ID NO: 2962706 - RNA, 19 nt, Artificial Sequence
  Description of Artificial Sequence: Synthetic oligonucleotide
gguagagcacgaaggagca

SEQ ID NO: 2962707 - RNA, 19 nt, Artificial Sequence
  Description of Artificial Sequence: Synthetic oligonucleotide
agagggccagcugcggguc

SEQ ID NO: 2962708 - RNA, 19 nt, Artificial Sequence
  Description of Artificial Sequence: Synthetic oligonucleotide
cuggacaaacaggguguag

SEQ ID NO: 2962709 - RNA, 19 nt, Artificial Sequence
  Description of Artificial Sequence: Synthetic oligonucleotide
ggugugcuggguugugagc

SEQ ID NO: 2962710 - RNA, 19 nt, Artificial Sequence
  Description of Artificial Sequence: Synthetic oligonucleotide
guugugagccugggugugc

SEQ ID NO: 2962711 - RNA, 19 nt, Artificial Sequence
  Description of Artificial Sequence: Synthetic oligonucleotide
agcgaggagagggccagcu

SEQ ID NO: 2962712 - RNA, 19 nt, Artificial Sequence
  Description of Artificial Sequence: Synthetic oligonucleotide
acaggguguaggagguuug

SEQ ID NO: 2962713 - RNA, 19 nt, Artificial Sequence
  Description of Artificial Sequence: Synthetic oligonucleotide
ggguguaggagguuugugu

SEQ ID NO: 2962714 - RNA, 19 nt, Artificial Sequence
  Description of Artificial Sequence: Synthetic oligonucleotide
agucuguggcgcugauggu

SEQ ID NO: 2962715 - RNA, 19 nt, Artificial Sequence
  Description of Artificial Sequence: Synthetic oligonucleotide
gcgaguaggugaugugggc

SEQ ID NO: 2962716 - RNA, 19 nt, Artificial Sequence
  Description of Artificial Sequence: Synthetic oligonucleotide
gugggcauuggagccugag

SEQ ID NO: 2962717 - RNA, 19 nt, Artificial Sequence
  Description of Artificial Sequence: Synthetic oligonucleotide
uuggagccugagucugagu

SEQ ID NO: 2962718 - RNA, 19 nt, Artificial Sequence
  Description of Artificial Sequence: Synthetic oligonucleotide
ugcgggucgugggugggca

SEQ ID NO: 2962719 - RNA, 19 nt, Artificial Sequence
  Description of Artificial Sequence: Synthetic oligonucleotide
cacgaaggagcauugucau

SEQ ID NO: 2962720 - RNA, 19 nt, Artificial Sequence
  Description of Artificial Sequence: Synthetic oligonucleotide
uguggcgcugauggugccu

SEQ ID NO: 2962721 - RNA, 19 nt, Artificial Sequence
  Description of Artificial Sequence: Synthetic oligonucleotide
gagagggccagcugcgggu

SEQ ID NO: 2962722 - RNA, 19 nt, Artificial Sequence
  Description of Artificial Sequence: Synthetic oligonucleotide
acgaaggagcauugucauu

SEQ ID NO: 2962723 - RNA, 19 nt, Artificial Sequence
  Description of Artificial Sequence: Synthetic oligonucleotide
gguuugugugaaggcgggg

SEQ ID NO: 2962724 - RNA, 19 nt, Artificial Sequence
  Description of Artificial Sequence: Synthetic oligonucleotide
auggugugcuggguuguga

SEQ ID NO: 2962725 - RNA, 19 nt, Artificial Sequence
  Description of Artificial Sequence: Synthetic oligonucleotide
ggugugcccaggucgguga

SEQ ID NO: 2962726 - RNA, 19 nt, Artificial Sequence
  Description of Artificial Sequence: Synthetic oligonucleotide
gcagcgaguaggugaugug

SEQ ID NO: 2962727 - RNA, 19 nt, Artificial Sequence
  Description of Artificial Sequence: Synthetic oligonucleotide
gccagcugcgggucguggg

SEQ ID NO: 2962728 - RNA, 19 nt, Artificial Sequence
  Description of Artificial Sequence: Synthetic oligonucleotide
augagcgaggagagggcca

SEQ ID NO: 2962729 - RNA, 19 nt, Artificial Sequence
  Description of Artificial Sequence: Synthetic oligonucleotide
ccuaugugcagggcggggc

SEQ ID NO: 2962730 - RNA, 19 nt, Artificial Sequence
  Description of Artificial Sequence: Synthetic oligonucleotide
  modified_base (7)..(7): a, c, u, g, unknown or other
cgcaccngcgccuggcugc

SEQ ID NO: 2962731 - RNA, 19 nt, Artificial Sequence
  Description of Artificial Sequence: Synthetic oligonucleotide
gagccugggugugcccagg

SEQ ID NO: 2962732 - RNA, 19 nt, Artificial Sequence
  Description of Artificial Sequence: Synthetic oligonucleotide
aaacaggguguaggagguu

SEQ ID NO: 2962733 - RNA, 19 nt, Artificial Sequence
  Description of Artificial Sequence: Synthetic oligonucleotide
ugugcccaggucggugacu

SEQ ID NO: 2962734 - RNA, 19 nt, Artificial Sequence
  Description of Artificial Sequence: Synthetic oligonucleotide
gucugagucuguggcgcug

SEQ ID NO: 2962735 - RNA, 19 nt, Artificial Sequence
  Description of Artificial Sequence: Synthetic oligonucleotide
ugugggcauuggagccuga

SEQ ID NO: 2962736 - RNA, 19 nt, Artificial Sequence
  Description of Artificial Sequence: Synthetic oligonucleotide
cuguggcgcugauggugcc

SEQ ID NO: 2962737 - RNA, 19 nt, Artificial Sequence
  Description of Artificial Sequence: Synthetic oligonucleotide
cugcacuguuauggugugc

SEQ ID NO: 2962738 - RNA, 19 nt, Artificial Sequence
  Description of Artificial Sequence: Synthetic oligonucleotide
ggcuguuguucuccuggac

SEQ ID NO: 2962739 - RNA, 19 nt, Artificial Sequence
  Description of Artificial Sequence: Synthetic oligonucleotide
aucggacaccugcacuguu

SEQ ID NO: 2962740 - RNA, 19 nt, Artificial Sequence
  Description of Artificial Sequence: Synthetic oligonucleotide
cagggcggggcuguuguuc

SEQ ID NO: 2962741 - RNA, 19 nt, Artificial Sequence
  Description of Artificial Sequence: Synthetic oligonucleotide
uggugccuaugugcagggc

SEQ ID NO: 2962742 - RNA, 19 nt, Artificial Sequence
  Description of Artificial Sequence: Synthetic oligonucleotide
agccugggugugcccaggu

SEQ ID NO: 2962743 - RNA, 19 nt, Artificial Sequence
  Description of Artificial Sequence: Synthetic oligonucleotide
ggggcguugucguugacau

SEQ ID NO: 2962744 - RNA, 19 nt, Artificial Sequence
  Description of Artificial Sequence: Synthetic oligonucleotide
gcacuguuauggugugcug

SEQ ID NO: 2962745 - RNA, 19 nt, Artificial Sequence
  Description of Artificial Sequence: Synthetic oligonucleotide
cuaugugcagggcggggcu

SEQ ID NO: 2962746 - RNA, 19 nt, Artificial Sequence
  Description of Artificial Sequence: Synthetic oligonucleotide
gugcuggguugugagccug

SEQ ID NO: 2962747 - RNA, 19 nt, Artificial Sequence
  Description of Artificial Sequence: Synthetic oligonucleotide
gcuggguugugagccuggg

SEQ ID NO: 2962748 - RNA, 19 nt, Artificial Sequence
  Description of Artificial Sequence: Synthetic oligonucleotide
gugugcccaggucggugac

SEQ ID NO: 2962749 - RNA, 19 nt, Artificial Sequence
  Description of Artificial Sequence: Synthetic oligonucleotide
ggagccugagucugagucu

SEQ ID NO: 2962750 - RNA, 19 nt, Artificial Sequence
  Description of Artificial Sequence: Synthetic oligonucleotide
ggcggggcuguuguucucc

SEQ ID NO: 2962751 - RNA, 19 nt, Artificial Sequence
  Description of Artificial Sequence: Synthetic oligonucleotide
gcccaggucggugacugug

SEQ ID NO: 2962752 - RNA, 19 nt, Artificial Sequence
  Description of Artificial Sequence: Synthetic oligonucleotide
gccugagucugagucugug

SEQ ID NO: 2962753 - RNA, 19 nt, Artificial Sequence
  Description of Artificial Sequence: Synthetic oligonucleotide
gccuaugugcagggcgggg

SEQ ID NO: 2962754 - RNA, 19 nt, Artificial Sequence
  Description of Artificial Sequence: Synthetic oligonucleotide
  modified_base (2)..(2): a, c, u, g, unknown or other
cngcgccuggcugcugagc

SEQ ID NO: 2962755 - RNA, 19 nt, Artificial Sequence
  Description of Artificial Sequence: Synthetic oligonucleotide
ugcccaggucggugacugu

SEQ ID NO: 2962756 - RNA, 19 nt, Artificial Sequence
  Description of Artificial Sequence: Synthetic oligonucleotide
gggcuguuguucuccugga

SEQ ID NO: 2962757 - RNA, 19 nt, Artificial Sequence
  Description of Artificial Sequence: Synthetic oligonucleotide
ugggugugcccaggucggu

SEQ ID NO: 2962758 - RNA, 19 nt, Artificial Sequence
  Description of Artificial Sequence: Synthetic oligonucleotide
gcgaggagagggccagcug

SEQ ID NO: 2962759 - RNA, 19 nt, Artificial Sequence
  Description of Artificial Sequence: Synthetic oligonucleotide
agggccagcugcgggucgu

SEQ ID NO: 2962760 - RNA, 19 nt, Artificial Sequence
  Description of Artificial Sequence: Synthetic oligonucleotide
ggugggcagcagcgaguag

SEQ ID NO: 2962761 - RNA, 19 nt, Artificial Sequence
  Description of Artificial Sequence: Synthetic oligonucleotide
ggcgcugauggugccuaug

SEQ ID NO: 2962762 - RNA, 19 nt, Artificial Sequence
  Description of Artificial Sequence: Synthetic oligonucleotide
cugcgggucgugggugggc

SEQ ID NO: 2962763 - RNA, 19 nt, Artificial Sequence
  Description of Artificial Sequence: Synthetic oligonucleotide
gcguugucguugacaucgg

SEQ ID NO: 2962764 - RNA, 19 nt, Artificial Sequence
  Description of Artificial Sequence: Synthetic oligonucleotide
gagcgaggagagggccagc

SEQ ID NO: 2962765 - RNA, 19 nt, Artificial Sequence
  Description of Artificial Sequence: Synthetic oligonucleotide
gggugugcccaggucggug

SEQ ID NO: 2962766 - RNA, 19 nt, Artificial Sequence
  Description of Artificial Sequence: Synthetic oligonucleotide
guggcgcugauggugccua

SEQ ID NO: 2962767 - RNA, 19 nt, Artificial Sequence
  Description of Artificial Sequence: Synthetic oligonucleotide
gcgcugauggugccuaugu

SEQ ID NO: 2962768 - RNA, 19 nt, Artificial Sequence
  Description of Artificial Sequence: Synthetic oligonucleotide
uggcgcugauggugccuau

SEQ ID NO: 2962769 - RNA, 19 nt, Artificial Sequence
  Description of Artificial Sequence: Synthetic oligonucleotide
gagcacgaaggagcauugu

SEQ ID NO: 2962770 - RNA, 19 nt, Artificial Sequence
  Description of Artificial Sequence: Synthetic oligonucleotide
cgaguaggugaugugggca

SEQ ID NO: 2962771 - RNA, 19 nt, Artificial Sequence
  Description of Artificial Sequence: Synthetic oligonucleotide
  modified_base (8)..(8): a, c, u, g, unknown or other
gcgcaccngcgccuggcug

SEQ ID NO: 2962772 - RNA, 19 nt, Artificial Sequence
  Description of Artificial Sequence: Synthetic oligonucleotide
gugcagggcggggcuguug

SEQ ID NO: 2962773 - RNA, 19 nt, Artificial Sequence
  Description of Artificial Sequence: Synthetic oligonucleotide
gcugcgggucguggguggg

SEQ ID NO: 2962774 - RNA, 19 nt, Artificial Sequence
  Description of Artificial Sequence: Synthetic oligonucleotide
cgcugauggugccuaugug

SEQ ID NO: 2962775 - RNA, 19 nt, Artificial Sequence
  Description of Artificial Sequence: Synthetic oligonucleotide
ggccagcugcgggucgugg

SEQ ID NO: 2962776 - RNA, 19 nt, Artificial Sequence
  Description of Artificial Sequence: Synthetic oligonucleotide
cccaggucggugacuguga

SEQ ID NO: 2962777 - RNA, 19 nt, Artificial Sequence
  Description of Artificial Sequence: Synthetic oligonucleotide
cuggguugugagccugggu

SEQ ID NO: 2962778 - RNA, 19 nt, Artificial Sequence
  Description of Artificial Sequence: Synthetic oligonucleotide
agccugagucugagucugu

SEQ ID NO: 2962779 - RNA, 19 nt, Artificial Sequence
  Description of Artificial Sequence: Synthetic oligonucleotide
  modified_base (3)..(3): a, c, u, g, unknown or other
ccngcgccuggcugcugag

SEQ ID NO: 2962780 - RNA, 19 nt, Artificial Sequence
  Description of Artificial Sequence: Synthetic oligonucleotide
caucggacaccugcacugu

SEQ ID NO: 2962781 - RNA, 19 nt, Artificial Sequence
  Description of Artificial Sequence: Synthetic oligonucleotide
gcagcagcgaguaggugau

SEQ ID NO: 2962782 - RNA, 19 nt, Artificial Sequence
  Description of Artificial Sequence: Synthetic oligonucleotide
cuguuauggugugcugggu

SEQ ID NO: 2962783 - RNA, 19 nt, Artificial Sequence
  Description of Artificial Sequence: Synthetic oligonucleotide
caggguguaggagguuugu

SEQ ID NO: 2962784 - RNA, 19 nt, Artificial Sequence
  Description of Artificial Sequence: Synthetic oligonucleotide
ggucgugggugggcagcag

SEQ ID NO: 2962785 - RNA, 19 nt, Artificial Sequence
  Description of Artificial Sequence: Synthetic oligonucleotide
gccugggugugcccagguc

SEQ ID NO: 2962786 - RNA, 19 nt, Artificial Sequence
  Description of Artificial Sequence: Synthetic oligonucleotide
gggugggcagcagcgagua

SEQ ID NO: 2962787 - RNA, 19 nt, Artificial Sequence
  Description of Artificial Sequence: Synthetic oligonucleotide
cagcagcgaguaggugaug

SEQ ID NO: 2962788 - RNA, 19 nt, Artificial Sequence
  Description of Artificial Sequence: Synthetic oligonucleotide
gggcguugucguugacauc

SEQ ID NO: 2962789 - RNA, 19 nt, Artificial Sequence
  Description of Artificial Sequence: Synthetic oligonucleotide
guagagcacgaaggagcau

SEQ ID NO: 2962790 - RNA, 19 nt, Artificial Sequence
  Description of Artificial Sequence: Synthetic oligonucleotide
gggucgugggugggcagca

SEQ ID NO: 2962791 - RNA, 19 nt, Artificial Sequence
  Description of Artificial Sequence: Synthetic oligonucleotide
gggcagcagcgaguaggug

SEQ ID NO: 2962792 - RNA, 19 nt, Artificial Sequence
  Description of Artificial Sequence: Synthetic oligonucleotide
cguugucguugacaucgga

SEQ ID NO: 2962793 - RNA, 19 nt, Artificial Sequence
  Description of Artificial Sequence: Synthetic oligonucleotide
ccuggacaaacagggugua

SEQ ID NO: 2962794 - RNA, 19 nt, Artificial Sequence
  Description of Artificial Sequence: Synthetic oligonucleotide
ccagcugcgggucgugggu

SEQ ID NO: 2962795 - RNA, 19 nt, Artificial Sequence
  Description of Artificial Sequence: Synthetic oligonucleotide
cugagucuguggcgcugau

SEQ ID NO: 2962796 - RNA, 19 nt, Artificial Sequence
  Description of Artificial Sequence: Synthetic oligonucleotide
ggucggugacugugauggu

SEQ ID NO: 2962797 - RNA, 19 nt, Artificial Sequence
  Description of Artificial Sequence: Synthetic oligonucleotide
  modified_base (5)..(5): a, c, u, g, unknown or other
caccngcgccuggcugcug

SEQ ID NO: 2962798 - RNA, 19 nt, Artificial Sequence
  Description of Artificial Sequence: Synthetic oligonucleotide
gggcggggcuguuguucuc

SEQ ID NO: 2962799 - RNA, 19 nt, Artificial Sequence
  Description of Artificial Sequence: Synthetic oligonucleotide
cguugacaucggacaccug

SEQ ID NO: 2962800 - RNA, 19 nt, Artificial Sequence
  Description of Artificial Sequence: Synthetic oligonucleotide
cggggcuguuguucuccug

SEQ ID NO: 2962801 - RNA, 19 nt, Artificial Sequence
  Description of Artificial Sequence: Synthetic oligonucleotide
gggccagcugcgggucgug

SEQ ID NO: 2962802 - RNA, 19 nt, Artificial Sequence
  Description of Artificial Sequence: Synthetic oligonucleotide
ccaggucggugacugugau

SEQ ID NO: 2962803 - RNA, 19 nt, Artificial Sequence
  Description of Artificial Sequence: Synthetic oligonucleotide
cgugggugggcagcagcga

SEQ ID NO: 2962804 - RNA, 19 nt, Artificial Sequence
  Description of Artificial Sequence: Synthetic oligonucleotide
  modified_base (6)..(6): a, c, u, g, unknown or other
gcaccngcgccuggcugcu

SEQ ID NO: 2962805 - RNA, 19 nt, Artificial Sequence
  Description of Artificial Sequence: Synthetic oligonucleotide
gcagggcggggcuguuguu

SEQ ID NO: 2962806 - RNA, 19 nt, Artificial Sequence
  Description of Artificial Sequence: Synthetic oligonucleotide
  modified_base (9)..(9): a, c, u, g, unknown or other
cgcgcaccngcgccuggcu

SEQ ID NO: 2962807 - RNA, 19 nt, Artificial Sequence
  Description of Artificial Sequence: Synthetic oligonucleotide
aaguacacggagcagagcc

SEQ ID NO: 2962808 - RNA, 19 nt, Artificial Sequence
  Description of Artificial Sequence: Synthetic oligonucleotide
aauuuguuuaccaagagcu

SEQ ID NO: 2962809 - RNA, 19 nt, Artificial Sequence
  Description of Artificial Sequence: Synthetic oligonucleotide
uuuaccaagagcuacugcc

SEQ ID NO: 2962810 - RNA, 19 nt, Artificial Sequence
  Description of Artificial Sequence: Synthetic oligonucleotide
aaagcacucgaccagacug

SEQ ID NO: 2962811 - RNA, 19 nt, Artificial Sequence
  Description of Artificial Sequence: Synthetic oligonucleotide
agcaccuucccauagcgcc

SEQ ID NO: 2962812 - RNA, 19 nt, Artificial Sequence
  Description of Artificial Sequence: Synthetic oligonucleotide
uguguagucccacaccugg

SEQ ID NO: 2962813 - RNA, 19 nt, Artificial Sequence
  Description of Artificial Sequence: Synthetic oligonucleotide
caguucauagccaacaccc

SEQ ID NO: 2962814 - RNA, 19 nt, Artificial Sequence
  Description of Artificial Sequence: Synthetic oligonucleotide
acagaauuuguuuaccaag

SEQ ID NO: 2962815 - RNA, 19 nt, Artificial Sequence
  Description of Artificial Sequence: Synthetic oligonucleotide
gaauuuguuuaccaagagc

SEQ ID NO: 2962816 - RNA, 19 nt, Artificial Sequence
  Description of Artificial Sequence: Synthetic oligonucleotide
acgaucuucgcauacagug

SEQ ID NO: 2962817 - RNA, 19 nt, Artificial Sequence
  Description of Artificial Sequence: Synthetic oligonucleotide
ugagcaccuucccauagcg

SEQ ID NO: 2962818 - RNA, 19 nt, Artificial Sequence
  Description of Artificial Sequence: Synthetic oligonucleotide
ucauagccaacacccaagg

SEQ ID NO: 2962819 - RNA, 19 nt, Artificial Sequence
  Description of Artificial Sequence: Synthetic oligonucleotide
ugcuccucggaucauggcg

SEQ ID NO: 2962820 - RNA, 19 nt, Artificial Sequence
  Description of Artificial Sequence: Synthetic oligonucleotide
uucauagccaacacccaag

SEQ ID NO: 2962821 - RNA, 19 nt, Artificial Sequence
  Description of Artificial Sequence: Synthetic oligonucleotide
uuugcugcuccucggauca

SEQ ID NO: 2962822 - RNA, 19 nt, Artificial Sequence
  Description of Artificial Sequence: Synthetic oligonucleotide
uuuguuuaccaagagcuac

SEQ ID NO: 2962823 - RNA, 19 nt, Artificial Sequence
  Description of Artificial Sequence: Synthetic oligonucleotide
aagagcuacugcccagccc

SEQ ID NO: 2962824 - RNA, 19 nt, Artificial Sequence
  Description of Artificial Sequence: Synthetic oligonucleotide
agaauuuguuuaccaagag

SEQ ID NO: 2962825 - RNA, 19 nt, Artificial Sequence
  Description of Artificial Sequence: Synthetic oligonucleotide
ucggaauaggcacagaauu

SEQ ID NO: 2962826 - RNA, 19 nt, Artificial Sequence
  Description of Artificial Sequence: Synthetic oligonucleotide
gaucuucgcauacagugcc

SEQ ID NO: 2962827 - RNA, 19 nt, Artificial Sequence
  Description of Artificial Sequence: Synthetic oligonucleotide
uagccaacacccaaggaug

SEQ ID NO: 2962828 - RNA, 19 nt, Artificial Sequence
  Description of Artificial Sequence: Synthetic oligonucleotide
agagcuacugcccagccca

SEQ ID NO: 2962829 - RNA, 19 nt, Artificial Sequence
  Description of Artificial Sequence: Synthetic oligonucleotide
gaccacaucagccugccgc

SEQ ID NO: 2962830 - RNA, 19 nt, Artificial Sequence
  Description of Artificial Sequence: Synthetic oligonucleotide
ucuugcucauggaugagcu

SEQ ID NO: 2962831 - RNA, 19 nt, Artificial Sequence
  Description of Artificial Sequence: Synthetic oligonucleotide
acaucagccugccgcagcc

SEQ ID NO: 2962832 - RNA, 19 nt, Artificial Sequence
  Description of Artificial Sequence: Synthetic oligonucleotide
uagucccacaccuggaucc

SEQ ID NO: 2962833 - RNA, 19 nt, Artificial Sequence
  Description of Artificial Sequence: Synthetic oligonucleotide
uugcucauggaugagcuug

SEQ ID NO: 2962834 - RNA, 19 nt, Artificial Sequence
  Description of Artificial Sequence: Synthetic oligonucleotide
agugccugguccucgcgcc

SEQ ID NO: 2962835 - RNA, 19 nt, Artificial Sequence
  Description of Artificial Sequence: Synthetic oligonucleotide
auuugcugcuccucggauc

SEQ ID NO: 2962836 - RNA, 19 nt, Artificial Sequence
  Description of Artificial Sequence: Synthetic oligonucleotide
uuguuuaccaagagcuacu

SEQ ID NO: 2962837 - RNA, 19 nt, Artificial Sequence
  Description of Artificial Sequence: Synthetic oligonucleotide
uccucgagccauuugcugc

SEQ ID NO: 2962838 - RNA, 19 nt, Artificial Sequence
  Description of Artificial Sequence: Synthetic oligonucleotide
cucugcagcagccacgugc

SEQ ID NO: 2962839 - RNA, 19 nt, Artificial Sequence
  Description of Artificial Sequence: Synthetic oligonucleotide
auaggcacagaauuuguuu

SEQ ID NO: 2962840 - RNA, 19 nt, Artificial Sequence
  Description of Artificial Sequence: Synthetic oligonucleotide
auggcugugucaccucggc

SEQ ID NO: 2962841 - RNA, 19 nt, Artificial Sequence
  Description of Artificial Sequence: Synthetic oligonucleotide
auggaugagcuugucgccc

SEQ ID NO: 2962842 - RNA, 19 nt, Artificial Sequence
  Description of Artificial Sequence: Synthetic oligonucleotide
cagaauuuguuuaccaaga

SEQ ID NO: 2962843 - RNA, 19 nt, Artificial Sequence
  Description of Artificial Sequence: Synthetic oligonucleotide
acacgaucuucgcauacag

SEQ ID NO: 2962844 - RNA, 19 nt, Artificial Sequence
  Description of Artificial Sequence: Synthetic oligonucleotide
agccauuugcugcuccucg

SEQ ID NO: 2962845 - RNA, 19 nt, Artificial Sequence
  Description of Artificial Sequence: Synthetic oligonucleotide
uuaguucccagcacccaca

SEQ ID NO: 2962846 - RNA, 19 nt, Artificial Sequence
  Description of Artificial Sequence: Synthetic oligonucleotide
cucauggaugagcuugucg

SEQ ID NO: 2962847 - RNA, 19 nt, Artificial Sequence
  Description of Artificial Sequence: Synthetic oligonucleotide
ucggccacgaccacaucag

SEQ ID NO: 2962848 - RNA, 19 nt, Artificial Sequence
  Description of Artificial Sequence: Synthetic oligonucleotide
cuguggucggaauaggcac

SEQ ID NO: 2962849 - RNA, 19 nt, Artificial Sequence
  Description of Artificial Sequence: Synthetic oligonucleotide
cacaccuggauccucgagc

SEQ ID NO: 2962850 - RNA, 19 nt, Artificial Sequence
  Description of Artificial Sequence: Synthetic oligonucleotide
cacauggcuguguaguccc

SEQ ID NO: 2962851 - RNA, 19 nt, Artificial Sequence
  Description of Artificial Sequence: Synthetic oligonucleotide
ugcagcagccacgugcucg

SEQ ID NO: 2962852 - RNA, 19 nt, Artificial Sequence
  Description of Artificial Sequence: Synthetic oligonucleotide
aggucuugcucauggauga

SEQ ID NO: 2962853 - RNA, 19 nt, Artificial Sequence
  Description of Artificial Sequence: Synthetic oligonucleotide
ucccacaccuggauccucg

SEQ ID NO: 2962854 - RNA, 19 nt, Artificial Sequence
  Description of Artificial Sequence: Synthetic oligonucleotide
cucgaccagacuguggucg

SEQ ID NO: 2962855 - RNA, 19 nt, Artificial Sequence
  Description of Artificial Sequence: Synthetic oligonucleotide
cauggaugagcuugucgcc

SEQ ID NO: 2962856 - RNA, 19 nt, Artificial Sequence
  Description of Artificial Sequence: Synthetic oligonucleotide
ggauccucgagccauuugc

SEQ ID NO: 2962857 - RNA, 19 nt, Artificial Sequence
  Description of Artificial Sequence: Synthetic oligonucleotide
uggcggaaagcacucgacc

SEQ ID NO: 2962858 - RNA, 19 nt, Artificial Sequence
  Description of Artificial Sequence: Synthetic oligonucleotide
uguggucggaauaggcaca

SEQ ID NO: 2962859 - RNA, 19 nt, Artificial Sequence
  Description of Artificial Sequence: Synthetic oligonucleotide
ugcccagcccaguucauag

SEQ ID NO: 2962860 - RNA, 19 nt, Artificial Sequence
  Description of Artificial Sequence: Synthetic oligonucleotide
uguuuaccaagagcuacug

SEQ ID NO: 2962861 - RNA, 19 nt, Artificial Sequence
  Description of Artificial Sequence: Synthetic oligonucleotide
cucccgcagaaguacacgg

SEQ ID NO: 2962862 - RNA, 19 nt, Artificial Sequence
  Description of Artificial Sequence: Synthetic oligonucleotide
uguagucccacaccuggau

SEQ ID NO: 2962863 - RNA, 19 nt, Artificial Sequence
  Description of Artificial Sequence: Synthetic oligonucleotide
ggagcagagccccugcucg

SEQ ID NO: 2962864 - RNA, 19 nt, Artificial Sequence
  Description of Artificial Sequence: Synthetic oligonucleotide
ggaauaggcacagaauuug

SEQ ID NO: 2962865 - RNA, 19 nt, Artificial Sequence
  Description of Artificial Sequence: Synthetic oligonucleotide
gaugcucccgcagaaguac

SEQ ID NO: 2962866 - RNA, 19 nt, Artificial Sequence
  Description of Artificial Sequence: Synthetic oligonucleotide
aacacccaaggauggcugu

SEQ ID NO: 2962867 - RNA, 19 nt, Artificial Sequence
  Description of Artificial Sequence: Synthetic oligonucleotide
aguacacggagcagagccc

SEQ ID NO: 2962868 - RNA, 19 nt, Artificial Sequence
  Description of Artificial Sequence: Synthetic oligonucleotide
cagacuguggucggaauag

SEQ ID NO: 2962869 - RNA, 19 nt, Artificial Sequence
  Description of Artificial Sequence: Synthetic oligonucleotide
cuucccauagcgccgcagc

SEQ ID NO: 2962870 - RNA, 19 nt, Artificial Sequence
  Description of Artificial Sequence: Synthetic oligonucleotide
ucggugagcaccuucccau

SEQ ID NO: 2962871 - RNA, 19 nt, Artificial Sequence
  Description of Artificial Sequence: Synthetic oligonucleotide
ucgaccagacuguggucgg

SEQ ID NO: 2962872 - RNA, 19 nt, Artificial Sequence
  Description of Artificial Sequence: Synthetic oligonucleotide
cuucgcauacagugccugg

SEQ ID NO: 2962873 - RNA, 19 nt, Artificial Sequence
  Description of Artificial Sequence: Synthetic oligonucleotide
uucccauagcgccgcagcc

SEQ ID NO: 2962874 - RNA, 19 nt, Artificial Sequence
  Description of Artificial Sequence: Synthetic oligonucleotide
agcagccucuucuccgcgc

SEQ ID NO: 2962875 - RNA, 19 nt, Artificial Sequence
  Description of Artificial Sequence: Synthetic oligonucleotide
uggaugagcuugucgcccc

SEQ ID NO: 2962876 - RNA, 19 nt, Artificial Sequence
  Description of Artificial Sequence: Synthetic oligonucleotide
aauaggcacagaauuuguu

SEQ ID NO: 2962877 - RNA, 19 nt, Artificial Sequence
  Description of Artificial Sequence: Synthetic oligonucleotide
ucuucgcauacagugccug

SEQ ID NO: 2962878 - RNA, 19 nt, Artificial Sequence
  Description of Artificial Sequence: Synthetic oligonucleotide
ucccauagcgccgcagccg

SEQ ID NO: 2962879 - RNA, 19 nt, Artificial Sequence
  Description of Artificial Sequence: Synthetic oligonucleotide
ugcucauggaugagcuugu

SEQ ID NO: 2962880 - RNA, 19 nt, Artificial Sequence
  Description of Artificial Sequence: Synthetic oligonucleotide
gacuguggucggaauaggc

SEQ ID NO: 2962881 - RNA, 19 nt, Artificial Sequence
  Description of Artificial Sequence: Synthetic oligonucleotide
guucauagccaacacccaa

SEQ ID NO: 2962882 - RNA, 19 nt, Artificial Sequence
  Description of Artificial Sequence: Synthetic oligonucleotide
acgaccacaucagccugcc

SEQ ID NO: 2962883 - RNA, 19 nt, Artificial Sequence
  Description of Artificial Sequence: Synthetic oligonucleotide
cacagaauuuguuuaccaa

SEQ ID NO: 2962884 - RNA, 19 nt, Artificial Sequence
  Description of Artificial Sequence: Synthetic oligonucleotide
acuguggucggaauaggca

SEQ ID NO: 2962885 - RNA, 19 nt, Artificial Sequence
  Description of Artificial Sequence: Synthetic oligonucleotide
aucagccugccgcagccag

SEQ ID NO: 2962886 - RNA, 19 nt, Artificial Sequence
  Description of Artificial Sequence: Synthetic oligonucleotide
gauggcugugucaccucgg

SEQ ID NO: 2962887 - RNA, 19 nt, Artificial Sequence
  Description of Artificial Sequence: Synthetic oligonucleotide
uucgcauacagugccuggu

SEQ ID NO: 2962888 - RNA, 19 nt, Artificial Sequence
  Description of Artificial Sequence: Synthetic oligonucleotide
ucagccugccgcagccagg

SEQ ID NO: 2962889 - RNA, 19 nt, Artificial Sequence
  Description of Artificial Sequence: Synthetic oligonucleotide
uggcuguguagucccacac

SEQ ID NO: 2962890 - RNA, 19 nt, Artificial Sequence
  Description of Artificial Sequence: Synthetic oligonucleotide
cucuucuccgcgcgggucc

SEQ ID NO: 2962891 - RNA, 19 nt, Artificial Sequence
  Description of Artificial Sequence: Synthetic oligonucleotide
acccacauggcuguguagu

SEQ ID NO: 2962892 - RNA, 19 nt, Artificial Sequence
  Description of Artificial Sequence: Synthetic oligonucleotide
ugugucaccucggccacga

SEQ ID NO: 2962893 - RNA, 19 nt, Artificial Sequence
  Description of Artificial Sequence: Synthetic oligonucleotide
cucggaucauggcggaaag

SEQ ID NO: 2962894 - RNA, 19 nt, Artificial Sequence
  Description of Artificial Sequence: Synthetic oligonucleotide
cagaaguacacggagcaga

SEQ ID NO: 2962895 - RNA, 19 nt, Artificial Sequence
  Description of Artificial Sequence: Synthetic oligonucleotide
ucccgcagaaguacacgga

SEQ ID NO: 2962896 - RNA, 19 nt, Artificial Sequence
  Description of Artificial Sequence: Synthetic oligonucleotide
ucggccgccgccgccaucg

SEQ ID NO: 2962897 - RNA, 19 nt, Artificial Sequence
  Description of Artificial Sequence: Synthetic oligonucleotide
guacacggagcagagcccc

SEQ ID NO: 2962898 - RNA, 19 nt, Artificial Sequence
  Description of Artificial Sequence: Synthetic oligonucleotide
ggccaggucuugcucaugg

SEQ ID NO: 2962899 - RNA, 19 nt, Artificial Sequence
  Description of Artificial Sequence: Synthetic oligonucleotide
gaucauggcggaaagcacu

SEQ ID NO: 2962900 - RNA, 19 nt, Artificial Sequence
  Description of Artificial Sequence: Synthetic oligonucleotide
ggauggcugugucaccucg

SEQ ID NO: 2962901 - RNA, 19 nt, Artificial Sequence
  Description of Artificial Sequence: Synthetic oligonucleotide
caagagcuacugcccagcc

SEQ ID NO: 2962902 - RNA, 19 nt, Artificial Sequence
  Description of Artificial Sequence: Synthetic oligonucleotide
agcgccgcagccgcgacac

SEQ ID NO: 2962903 - RNA, 19 nt, Artificial Sequence
  Description of Artificial Sequence: Synthetic oligonucleotide
uacagugccugguccucgc

SEQ ID NO: 2962904 - RNA, 19 nt, Artificial Sequence
  Description of Artificial Sequence: Synthetic oligonucleotide
gagcagagccccugcucgg

SEQ ID NO: 2962905 - RNA, 19 nt, Artificial Sequence
  Description of Artificial Sequence: Synthetic oligonucleotide
ucgagccauuugcugcucc

SEQ ID NO: 2962906 - RNA, 19 nt, Artificial Sequence
  Description of Artificial Sequence: Synthetic oligonucleotide
ucgcauacagugccugguc

SEQ ID NO: 2962907 - RNA, 19 nt, Artificial Sequence
  Description of Artificial Sequence: Synthetic oligonucleotide
aagcacucgaccagacugu

SEQ ID NO: 2962908 - RNA, 19 nt, Artificial Sequence
  Description of Artificial Sequence: Synthetic oligonucleotide
acccaaggauggcuguguc

SEQ ID NO: 2962909 - RNA, 19 nt, Artificial Sequence
  Description of Artificial Sequence: Synthetic oligonucleotide
ggcugugucaccucggcca

SEQ ID NO: 2962910 - RNA, 19 nt, Artificial Sequence
  Description of Artificial Sequence: Synthetic oligonucleotide
uggauccucgagccauuug

SEQ ID NO: 2962911 - RNA, 19 nt, Artificial Sequence
  Description of Artificial Sequence: Synthetic oligonucleotide
acucgaccagacugugguc

SEQ ID NO: 2962912 - RNA, 19 nt, Artificial Sequence
  Description of Artificial Sequence: Synthetic oligonucleotide
auacagugccugguccucg

SEQ ID NO: 2962913 - RNA, 19 nt, Artificial Sequence
  Description of Artificial Sequence: Synthetic oligonucleotide
gucaccucggccacgacca

SEQ ID NO: 2962914 - RNA, 19 nt, Artificial Sequence
  Description of Artificial Sequence: Synthetic oligonucleotide
gucuugcucauggaugagc

SEQ ID NO: 2962915 - RNA, 19 nt, Artificial Sequence
  Description of Artificial Sequence: Synthetic oligonucleotide
aggauggcugugucaccuc

SEQ ID NO: 2962916 - RNA, 19 nt, Artificial Sequence
  Description of Artificial Sequence: Synthetic oligonucleotide
uccgcgcggguccagcucu

SEQ ID NO: 2962917 - RNA, 19 nt, Artificial Sequence
  Description of Artificial Sequence: Synthetic oligonucleotide
uggcugugucaccucggcc

SEQ ID NO: 2962918 - RNA, 19 nt, Artificial Sequence
  Description of Artificial Sequence: Synthetic oligonucleotide
ugcucccgcagaaguacac

SEQ ID NO: 2962919 - RNA, 19 nt, Artificial Sequence
  Description of Artificial Sequence: Synthetic oligonucleotide
gaaguacacggagcagagc

SEQ ID NO: 2962920 - RNA, 19 nt, Artificial Sequence
  Description of Artificial Sequence: Synthetic oligonucleotide
agccaacacccaaggaugg

SEQ ID NO: 2962921 - RNA, 19 nt, Artificial Sequence
  Description of Artificial Sequence: Synthetic oligonucleotide
agacuguggucggaauagg

SEQ ID NO: 2962922 - RNA, 19 nt, Artificial Sequence
  Description of Artificial Sequence: Synthetic oligonucleotide
ccaguucauagccaacacc

SEQ ID NO: 2962923 - RNA, 19 nt, Artificial Sequence
  Description of Artificial Sequence: Synthetic oligonucleotide
agccgcgacacgaucuucg

SEQ ID NO: 2962924 - RNA, 19 nt, Artificial Sequence
  Description of Artificial Sequence: Synthetic oligonucleotide
auggcuguguagucccaca

SEQ ID NO: 2962925 - RNA, 19 nt, Artificial Sequence
  Description of Artificial Sequence: Synthetic oligonucleotide
gacacgaucuucgcauaca

SEQ ID NO: 2962926 - RNA, 19 nt, Artificial Sequence
  Description of Artificial Sequence: Synthetic oligonucleotide
cacgugcucggugagcacc

SEQ ID NO: 2962927 - RNA, 19 nt, Artificial Sequence
  Description of Artificial Sequence: Synthetic oligonucleotide
ggcggaaagcacucgacca

SEQ ID NO: 2962928 - RNA, 19 nt, Artificial Sequence
  Description of Artificial Sequence: Synthetic oligonucleotide
ggugagcaccuucccauag

SEQ ID NO: 2962929 - RNA, 19 nt, Artificial Sequence
  Description of Artificial Sequence: Synthetic oligonucleotide
caaggauggcugugucacc

SEQ ID NO: 2962930 - RNA, 19 nt, Artificial Sequence
  Description of Artificial Sequence: Synthetic oligonucleotide
ccaaggauggcugugucac

SEQ ID NO: 2962931 - RNA, 19 nt, Artificial Sequence
  Description of Artificial Sequence: Synthetic oligonucleotide
acagugccugguccucgcg

SEQ ID NO: 2962932 - RNA, 19 nt, Artificial Sequence
  Description of Artificial Sequence: Synthetic oligonucleotide
ggucggaauaggcacagaa

SEQ ID NO: 2962933 - RNA, 19 nt, Artificial Sequence
  Description of Artificial Sequence: Synthetic oligonucleotide
guagucccacaccuggauc

SEQ ID NO: 2962934 - RNA, 19 nt, Artificial Sequence
  Description of Artificial Sequence: Synthetic oligonucleotide
cuguguagucccacaccug

SEQ ID NO: 2962935 - RNA, 19 nt, Artificial Sequence
  Description of Artificial Sequence: Synthetic oligonucleotide
aguucauagccaacaccca

SEQ ID NO: 2962936 - RNA, 19 nt, Artificial Sequence
  Description of Artificial Sequence: Synthetic oligonucleotide
auuuguuuaccaagagcua

SEQ ID NO: 2962937 - RNA, 19 nt, Artificial Sequence
  Description of Artificial Sequence: Synthetic oligonucleotide
gccgccaucgucgugcgcg

SEQ ID NO: 2962938 - RNA, 19 nt, Artificial Sequence
  Description of Artificial Sequence: Synthetic oligonucleotide
gcacagaauuuguuuacca

SEQ ID NO: 2962939 - RNA, 19 nt, Artificial Sequence
  Description of Artificial Sequence: Synthetic oligonucleotide
gcuccucggaucauggcgg

SEQ ID NO: 2962940 - RNA, 19 nt, Artificial Sequence
  Description of Artificial Sequence: Synthetic oligonucleotide
gcggaaagcacucgaccag

SEQ ID NO: 2962941 - RNA, 19 nt, Artificial Sequence
  Description of Artificial Sequence: Synthetic oligonucleotide
auagcgccgcagccgcgac

SEQ ID NO: 2962942 - RNA, 19 nt, Artificial Sequence
  Description of Artificial Sequence: Synthetic oligonucleotide
cauggcggaaagcacucga

SEQ ID NO: 2962943 - RNA, 19 nt, Artificial Sequence
  Description of Artificial Sequence: Synthetic oligonucleotide
gccauuugcugcuccucgg

SEQ ID NO: 2962944 - RNA, 19 nt, Artificial Sequence
  Description of Artificial Sequence: Synthetic oligonucleotide
gaauaggcacagaauuugu

SEQ ID NO: 2962945 - RNA, 19 nt, Artificial Sequence
  Description of Artificial Sequence: Synthetic oligonucleotide
ggcacagaauuuguuuacc

SEQ ID NO: 2962946 - RNA, 19 nt, Artificial Sequence
  Description of Artificial Sequence: Synthetic oligonucleotide
agcucugcagcagccacgu

SEQ ID NO: 2962947 - RNA, 19 nt, Artificial Sequence
  Description of Artificial Sequence: Synthetic oligonucleotide
cagagccccugcucggccg

SEQ ID NO: 2962948 - RNA, 19 nt, Artificial Sequence
  Description of Artificial Sequence: Synthetic oligonucleotide
ugguccucgcgcccgccgc

SEQ ID NO: 2962949 - RNA, 19 nt, Artificial Sequence
  Description of Artificial Sequence: Synthetic oligonucleotide
cagugccugguccucgcgc

SEQ ID NO: 2962950 - RNA, 19 nt, Artificial Sequence
  Description of Artificial Sequence: Synthetic oligonucleotide
ucggaucauggcggaaagc

SEQ ID NO: 2962951 - RNA, 19 nt, Artificial Sequence
  Description of Artificial Sequence: Synthetic oligonucleotide
accuggauccucgagccau

SEQ ID NO: 2962952 - RNA, 19 nt, Artificial Sequence
  Description of Artificial Sequence: Synthetic oligonucleotide
gaaagcacucgaccagacu

SEQ ID NO: 2962953 - RNA, 19 nt, Artificial Sequence
  Description of Artificial Sequence: Synthetic oligonucleotide
agcagccacgugcucggug

SEQ ID NO: 2962954 - RNA, 19 nt, Artificial Sequence
  Description of Artificial Sequence: Synthetic oligonucleotide
cauacagugccugguccuc

SEQ ID NO: 2962955 - RNA, 19 nt, Artificial Sequence
  Description of Artificial Sequence: Synthetic oligonucleotide
cacucgaccagacuguggu

SEQ ID NO: 2962956 - RNA, 19 nt, Artificial Sequence
  Description of Artificial Sequence: Synthetic oligonucleotide
agccucuucuccgcgcggg

SEQ ID NO: 2962957 - RNA, 19 nt, Artificial Sequence
  Description of Artificial Sequence: Synthetic oligonucleotide
gcagccucuucuccgcgcg

SEQ ID NO: 2962958 - RNA, 19 nt, Artificial Sequence
  Description of Artificial Sequence: Synthetic oligonucleotide
ugcugcuccucggaucaug

SEQ ID NO: 2962959 - RNA, 19 nt, Artificial Sequence
  Description of Artificial Sequence: Synthetic oligonucleotide
cgaucuucgcauacagugc

SEQ ID NO: 2962960 - RNA, 19 nt, Artificial Sequence
  Description of Artificial Sequence: Synthetic oligonucleotide
cccgcagaaguacacggag

SEQ ID NO: 2962961 - RNA, 19 nt, Artificial Sequence
  Description of Artificial Sequence: Synthetic oligonucleotide
uacacggagcagagccccu

SEQ ID NO: 2962962 - RNA, 19 nt, Artificial Sequence
  Description of Artificial Sequence: Synthetic oligonucleotide
agccacgugcucggugagc

SEQ ID NO: 2962963 - RNA, 19 nt, Artificial Sequence
  Description of Artificial Sequence: Synthetic oligonucleotide
gcuguguagucccacaccu

SEQ ID NO: 2962964 - RNA, 19 nt, Artificial Sequence
  Description of Artificial Sequence: Synthetic oligonucleotide
agcacucgaccagacugug

SEQ ID NO: 2962965 - RNA, 19 nt, Artificial Sequence
  Description of Artificial Sequence: Synthetic oligonucleotide
cauggcuguguagucccac

SEQ ID NO: 2962966 - RNA, 19 nt, Artificial Sequence
  Description of Artificial Sequence: Synthetic oligonucleotide
cuacugcccagcccaguuc

SEQ ID NO: 2962967 - RNA, 19 nt, Artificial Sequence
  Description of Artificial Sequence: Synthetic oligonucleotide
gagcaccuucccauagcgc

SEQ ID NO: 2962968 - RNA, 19 nt, Artificial Sequence
  Description of Artificial Sequence: Synthetic oligonucleotide
agccaggccaggucuugcu

SEQ ID NO: 2962969 - RNA, 19 nt, Artificial Sequence
  Description of Artificial Sequence: Synthetic oligonucleotide
cacggagcagagccccugc

SEQ ID NO: 2962970 - RNA, 19 nt, Artificial Sequence
  Description of Artificial Sequence: Synthetic oligonucleotide
acacccaaggauggcugug

SEQ ID NO: 2962971 - RNA, 19 nt, Artificial Sequence
  Description of Artificial Sequence: Synthetic oligonucleotide
cugcuccucggaucauggc

SEQ ID NO: 2962972 - RNA, 19 nt, Artificial Sequence
  Description of Artificial Sequence: Synthetic oligonucleotide
cucggugagcaccuuccca

SEQ ID NO: 2962973 - RNA, 19 nt, Artificial Sequence
  Description of Artificial Sequence: Synthetic oligonucleotide
accagacuguggucggaau

SEQ ID NO: 2962974 - RNA, 19 nt, Artificial Sequence
  Description of Artificial Sequence: Synthetic oligonucleotide
ggccacgaccacaucagcc

SEQ ID NO: 2962975 - RNA, 19 nt, Artificial Sequence
  Description of Artificial Sequence: Synthetic oligonucleotide
cacccacauggcuguguag

SEQ ID NO: 2962976 - RNA, 19 nt, Artificial Sequence
  Description of Artificial Sequence: Synthetic oligonucleotide
cugguccucgcgcccgccg

SEQ ID NO: 2962977 - RNA, 19 nt, Artificial Sequence
  Description of Artificial Sequence: Synthetic oligonucleotide
gcagccacgugcucgguga

SEQ ID NO: 2962978 - RNA, 19 nt, Artificial Sequence
  Description of Artificial Sequence: Synthetic oligonucleotide
ggaucauggcggaaagcac

SEQ ID NO: 2962979 - RNA, 19 nt, Artificial Sequence
  Description of Artificial Sequence: Synthetic oligonucleotide
caccuucccauagcgccgc

SEQ ID NO: 2962980 - RNA, 19 nt, Artificial Sequence
  Description of Artificial Sequence: Synthetic oligonucleotide
ucuccgcgcggguccagcu

SEQ ID NO: 2962981 - RNA, 19 nt, Artificial Sequence
  Description of Artificial Sequence: Synthetic oligonucleotide
gagccauuugcugcuccuc

SEQ ID NO: 2962982 - RNA, 19 nt, Artificial Sequence
  Description of Artificial Sequence: Synthetic oligonucleotide
acggagcagagccccugcu

SEQ ID NO: 2962983 - RNA, 19 nt, Artificial Sequence
  Description of Artificial Sequence: Synthetic oligonucleotide
cccauagcgccgcagccgc

SEQ ID NO: 2962984 - RNA, 19 nt, Artificial Sequence
  Description of Artificial Sequence: Synthetic oligonucleotide
ucuucuccgcgcgggucca

SEQ ID NO: 2962985 - RNA, 19 nt, Artificial Sequence
  Description of Artificial Sequence: Synthetic oligonucleotide
gauccucgagccauuugcu

SEQ ID NO: 2962986 - RNA, 19 nt, Artificial Sequence
  Description of Artificial Sequence: Synthetic oligonucleotide
ccgcagaaguacacggagc

SEQ ID NO: 2962987 - RNA, 19 nt, Artificial Sequence
  Description of Artificial Sequence: Synthetic oligonucleotide
cagcagccucuucuccgcg

SEQ ID NO: 2962988 - RNA, 19 nt, Artificial Sequence
  Description of Artificial Sequence: Synthetic oligonucleotide
gcagaaguacacggagcag

SEQ ID NO: 2962989 - RNA, 19 nt, Artificial Sequence
  Description of Artificial Sequence: Synthetic oligonucleotide
acacggagcagagccccug

SEQ ID NO: 2962990 - RNA, 19 nt, Artificial Sequence
  Description of Artificial Sequence: Synthetic oligonucleotide
gcaccuucccauagcgccg

SEQ ID NO: 2962991 - RNA, 19 nt, Artificial Sequence
  Description of Artificial Sequence: Synthetic oligonucleotide
gcucccgcagaaguacacg

SEQ ID NO: 2962992 - RNA, 19 nt, Artificial Sequence
  Description of Artificial Sequence: Synthetic oligonucleotide
ccacauggcuguguagucc

SEQ ID NO: 2962993 - RNA, 19 nt, Artificial Sequence
  Description of Artificial Sequence: Synthetic oligonucleotide
agucccacaccuggauccu

SEQ ID NO: 2962994 - RNA, 19 nt, Artificial Sequence
  Description of Artificial Sequence: Synthetic oligonucleotide
cccaguucauagccaacac

SEQ ID NO: 2962995 - RNA, 19 nt, Artificial Sequence
  Description of Artificial Sequence: Synthetic oligonucleotide
aucuucgcauacagugccu

SEQ ID NO: 2962996 - RNA, 19 nt, Artificial Sequence
  Description of Artificial Sequence: Synthetic oligonucleotide
cgcauacagugccuggucc

SEQ ID NO: 2962997 - RNA, 19 nt, Artificial Sequence
  Description of Artificial Sequence: Synthetic oligonucleotide
uucuccgcgcggguccagc

SEQ ID NO: 2962998 - RNA, 19 nt, Artificial Sequence
  Description of Artificial Sequence: Synthetic oligonucleotide
agccugccgcagccaggcc

SEQ ID NO: 2962999 - RNA, 19 nt, Artificial Sequence
  Description of Artificial Sequence: Synthetic oligonucleotide
gaccagacuguggucggaa

SEQ ID NO: 2963000 - RNA, 19 nt, Artificial Sequence
  Description of Artificial Sequence: Synthetic oligonucleotide
gccacgaccacaucagccu

SEQ ID NO: 2963001 - RNA, 19 nt, Artificial Sequence
  Description of Artificial Sequence: Synthetic oligonucleotide
cgcagaaguacacggagca

SEQ ID NO: 2963002 - RNA, 19 nt, Artificial Sequence
  Description of Artificial Sequence: Synthetic oligonucleotide
ggaaagcacucgaccagac

SEQ ID NO: 2963003 - RNA, 19 nt, Artificial Sequence
  Description of Artificial Sequence: Synthetic oligonucleotide
accucggccacgaccacau

SEQ ID NO: 2963004 - RNA, 19 nt, Artificial Sequence
  Description of Artificial Sequence: Synthetic oligonucleotide
gagcuacugcccagcccag

SEQ ID NO: 2963005 - RNA, 19 nt, Artificial Sequence
  Description of Artificial Sequence: Synthetic oligonucleotide
ucgcgcccgccgcggaugc

SEQ ID NO: 2963006 - RNA, 19 nt, Artificial Sequence
  Description of Artificial Sequence: Synthetic oligonucleotide
uagcgccgcagccgcgaca

SEQ ID NO: 2963007 - RNA, 19 nt, Artificial Sequence
  Description of Artificial Sequence: Synthetic oligonucleotide
cagccucuucuccgcgcgg

SEQ ID NO: 2963008 - RNA, 19 nt, Artificial Sequence
  Description of Artificial Sequence: Synthetic oligonucleotide
gccgccgccaucgucgugc

SEQ ID NO: 2963009 - RNA, 19 nt, Artificial Sequence
  Description of Artificial Sequence: Synthetic oligonucleotide
gucggaauaggcacagaau

SEQ ID NO: 2963010 - RNA, 19 nt, Artificial Sequence
  Description of Artificial Sequence: Synthetic oligonucleotide
cauagcgccgcagccgcga

SEQ ID NO: 2963011 - RNA, 19 nt, Artificial Sequence
  Description of Artificial Sequence: Synthetic oligonucleotide
gugccugguccucgcgccc

SEQ ID NO: 2963012 - RNA, 19 nt, Artificial Sequence
  Description of Artificial Sequence: Synthetic oligonucleotide
guguagucccacaccugga

SEQ ID NO: 2963013 - RNA, 19 nt, Artificial Sequence
  Description of Artificial Sequence: Synthetic oligonucleotide
cggaucauggcggaaagca

SEQ ID NO: 2963014 - RNA, 19 nt, Artificial Sequence
  Description of Artificial Sequence: Synthetic oligonucleotide
acgugcucggugagcaccu

SEQ ID NO: 2963015 - RNA, 19 nt, Artificial Sequence
  Description of Artificial Sequence: Synthetic oligonucleotide
cagccacgugcucggugag

SEQ ID NO: 2963016 - RNA, 19 nt, Artificial Sequence
  Description of Artificial Sequence: Synthetic oligonucleotide
gcauacagugccugguccu

SEQ ID NO: 2963017 - RNA, 19 nt, Artificial Sequence
  Description of Artificial Sequence: Synthetic oligonucleotide
gguccucgcgcccgccgcg

SEQ ID NO: 2963018 - RNA, 19 nt, Artificial Sequence
  Description of Artificial Sequence: Synthetic oligonucleotide
gccgcgacacgaucuucgc

SEQ ID NO: 2963019 - RNA, 19 nt, Artificial Sequence
  Description of Artificial Sequence: Synthetic oligonucleotide
gcucggugagcaccuuccc

SEQ ID NO: 2963020 - RNA, 19 nt, Artificial Sequence
  Description of Artificial Sequence: Synthetic oligonucleotide
uggucggaauaggcacaga

SEQ ID NO: 2963021 - RNA, 19 nt, Artificial Sequence
  Description of Artificial Sequence: Synthetic oligonucleotide
cagccaggccaggucuugc

SEQ ID NO: 2963022 - RNA, 19 nt, Artificial Sequence
  Description of Artificial Sequence: Synthetic oligonucleotide
cacgaucuucgcauacagu

SEQ ID NO: 2963023 - RNA, 19 nt, Artificial Sequence
  Description of Artificial Sequence: Synthetic oligonucleotide
ggucuugcucauggaugag

SEQ ID NO: 2963024 - RNA, 19 nt, Artificial Sequence
  Description of Artificial Sequence: Synthetic oligonucleotide
cccacauggcuguguaguc

SEQ ID NO: 2963025 - RNA, 19 nt, Artificial Sequence
  Description of Artificial Sequence: Synthetic oligonucleotide
gccacgugcucggugagca

SEQ ID NO: 2963026 - RNA, 19 nt, Artificial Sequence
  Description of Artificial Sequence: Synthetic oligonucleotide
gcacucgaccagacugugg

SEQ ID NO: 2963027 - RNA, 19 nt, Artificial Sequence
  Description of Artificial Sequence: Synthetic oligonucleotide
cuccucggaucauggcgga

SEQ ID NO: 2963028 - RNA, 19 nt, Artificial Sequence
  Description of Artificial Sequence: Synthetic oligonucleotide
ggguccagcucugcagcag

SEQ ID NO: 2963029 - RNA, 19 nt, Artificial Sequence
  Description of Artificial Sequence: Synthetic oligonucleotide
augcucccgcagaaguaca

SEQ ID NO: 2963030 - RNA, 19 nt, Artificial Sequence
  Description of Artificial Sequence: Synthetic oligonucleotide
agcuacugcccagcccagu

SEQ ID NO: 2963031 - RNA, 19 nt, Artificial Sequence
  Description of Artificial Sequence: Synthetic oligonucleotide
ugccgcagccaggccaggu

SEQ ID NO: 2963032 - RNA, 19 nt, Artificial Sequence
  Description of Artificial Sequence: Synthetic oligonucleotide
cauuugcugcuccucggau

SEQ ID NO: 2963033 - RNA, 19 nt, Artificial Sequence
  Description of Artificial Sequence: Synthetic oligonucleotide
gccaacacccaaggauggc

SEQ ID NO: 2963034 - RNA, 19 nt, Artificial Sequence
  Description of Artificial Sequence: Synthetic oligonucleotide
gccgcggaugcucccgcag

SEQ ID NO: 2963035 - RNA, 19 nt, Artificial Sequence
  Description of Artificial Sequence: Synthetic oligonucleotide
gccugccgcagccaggcca

SEQ ID NO: 2963036 - RNA, 19 nt, Artificial Sequence
  Description of Artificial Sequence: Synthetic oligonucleotide
uccucggaucauggcggaa

SEQ ID NO: 2963037 - RNA, 19 nt, Artificial Sequence
  Description of Artificial Sequence: Synthetic oligonucleotide
uccucgcgcccgccgcgga

SEQ ID NO: 2963038 - RNA, 19 nt, Artificial Sequence
  Description of Artificial Sequence: Synthetic oligonucleotide
acauggcuguguaguccca

SEQ ID NO: 2963039 - RNA, 19 nt, Artificial Sequence
  Description of Artificial Sequence: Synthetic oligonucleotide
ccauuugcugcuccucgga

SEQ ID NO: 2963040 - RNA, 19 nt, Artificial Sequence
  Description of Artificial Sequence: Synthetic oligonucleotide
cgcggguccagcucugcag

SEQ ID NO: 2963041 - RNA, 19 nt, Artificial Sequence
  Description of Artificial Sequence: Synthetic oligonucleotide
cuccgcgcggguccagcuc

SEQ ID NO: 2963042 - RNA, 19 nt, Artificial Sequence
  Description of Artificial Sequence: Synthetic oligonucleotide
cucgcgcccgccgcggaug

SEQ ID NO: 2963043 - RNA, 19 nt, Artificial Sequence
  Description of Artificial Sequence: Synthetic oligonucleotide
guccucgcgcccgccgcgg

SEQ ID NO: 2963044 - RNA, 19 nt, Artificial Sequence
  Description of Artificial Sequence: Synthetic oligonucleotide
cucgagccauuugcugcuc

SEQ ID NO: 2963045 - RNA, 19 nt, Artificial Sequence
  Description of Artificial Sequence: Synthetic oligonucleotide
cgacacgaucuucgcauac

SEQ ID NO: 2963046 - RNA, 19 nt, Artificial Sequence
  Description of Artificial Sequence: Synthetic oligonucleotide
accuucccauagcgccgca

SEQ ID NO: 2963047 - RNA, 19 nt, Artificial Sequence
  Description of Artificial Sequence: Synthetic oligonucleotide
gcacccacauggcugugua

SEQ ID NO: 2963048 - RNA, 19 nt, Artificial Sequence
  Description of Artificial Sequence: Synthetic oligonucleotide
gcggaugcucccgcagaag

SEQ ID NO: 2963049 - RNA, 19 nt, Artificial Sequence
  Description of Artificial Sequence: Synthetic oligonucleotide
ccagacuguggucggaaua

SEQ ID NO: 2963050 - RNA, 19 nt, Artificial Sequence
  Description of Artificial Sequence: Synthetic oligonucleotide
cugcucggccgccgccgcc

SEQ ID NO: 2963051 - RNA, 19 nt, Artificial Sequence
  Description of Artificial Sequence: Synthetic oligonucleotide
cuugcucauggaugagcuu

SEQ ID NO: 2963052 - RNA, 19 nt, Artificial Sequence
  Description of Artificial Sequence: Synthetic oligonucleotide
aggccaggucuugcucaug

SEQ ID NO: 2963053 - RNA, 19 nt, Artificial Sequence
  Description of Artificial Sequence: Synthetic oligonucleotide
caccuggauccucgagcca

SEQ ID NO: 2963054 - RNA, 19 nt, Artificial Sequence
  Description of Artificial Sequence: Synthetic oligonucleotide
gcagccaggccaggucuug

SEQ ID NO: 2963055 - RNA, 19 nt, Artificial Sequence
  Description of Artificial Sequence: Synthetic oligonucleotide
ggaugcucccgcagaagua

SEQ ID NO: 2963056 - RNA, 19 nt, Artificial Sequence
  Description of Artificial Sequence: Synthetic oligonucleotide
ccauagcgccgcagccgcg

SEQ ID NO: 2963057 - RNA, 19 nt, Artificial Sequence
  Description of Artificial Sequence: Synthetic oligonucleotide
gcuacugcccagcccaguu

SEQ ID NO: 2963058 - RNA, 19 nt, Artificial Sequence
  Description of Artificial Sequence: Synthetic oligonucleotide
cacccaaggauggcugugu

SEQ ID NO: 2963059 - RNA, 19 nt, Artificial Sequence
  Description of Artificial Sequence: Synthetic oligonucleotide
caccucggccacgaccaca

SEQ ID NO: 2963060 - RNA, 19 nt, Artificial Sequence
  Description of Artificial Sequence: Synthetic oligonucleotide
gugucaccucggccacgac

SEQ ID NO: 2963061 - RNA, 19 nt, Artificial Sequence
  Description of Artificial Sequence: Synthetic oligonucleotide
cuucuccgcgcggguccag

SEQ ID NO: 2963062 - RNA, 19 nt, Artificial Sequence
  Description of Artificial Sequence: Synthetic oligonucleotide
ccagcacccacauggcugu

SEQ ID NO: 2963063 - RNA, 19 nt, Artificial Sequence
  Description of Artificial Sequence: Synthetic oligonucleotide
ccucggaucauggcggaaa

SEQ ID NO: 2963064 - RNA, 19 nt, Artificial Sequence
  Description of Artificial Sequence: Synthetic oligonucleotide
cagccgcgacacgaucuuc

SEQ ID NO: 2963065 - RNA, 19 nt, Artificial Sequence
  Description of Artificial Sequence: Synthetic oligonucleotide
cgcgacacgaucuucgcau

SEQ ID NO: 2963066 - RNA, 19 nt, Artificial Sequence
  Description of Artificial Sequence: Synthetic oligonucleotide
uugcugcuccucggaucau

SEQ ID NO: 2963067 - RNA, 19 nt, Artificial Sequence
  Description of Artificial Sequence: Synthetic oligonucleotide
gcgacacgaucuucgcaua

SEQ ID NO: 2963068 - RNA, 19 nt, Artificial Sequence
  Description of Artificial Sequence: Synthetic oligonucleotide
gcucauggaugagcuuguc

SEQ ID NO: 2963069 - RNA, 19 nt, Artificial Sequence
  Description of Artificial Sequence: Synthetic oligonucleotide
cggagcagagccccugcuc

SEQ ID NO: 2963070 - RNA, 19 nt, Artificial Sequence
  Description of Artificial Sequence: Synthetic oligonucleotide
ccacaucagccugccgcag

SEQ ID NO: 2963071 - RNA, 19 nt, Artificial Sequence
  Description of Artificial Sequence: Synthetic oligonucleotide
cugcccagcccaguucaua

SEQ ID NO: 2963072 - RNA, 19 nt, Artificial Sequence
  Description of Artificial Sequence: Synthetic oligonucleotide
ccacgugcucggugagcac

SEQ ID NO: 2963073 - RNA, 19 nt, Artificial Sequence
  Description of Artificial Sequence: Synthetic oligonucleotide
cccgccgcggaugcucccg

SEQ ID NO: 2963074 - RNA, 19 nt, Artificial Sequence
  Description of Artificial Sequence: Synthetic oligonucleotide
cggaauaggcacagaauuu

SEQ ID NO: 2963075 - RNA, 19 nt, Artificial Sequence
  Description of Artificial Sequence: Synthetic oligonucleotide
cggaaagcacucgaccaga

SEQ ID NO: 2963076 - RNA, 19 nt, Artificial Sequence
  Description of Artificial Sequence: Synthetic oligonucleotide
ccucuucuccgcgcggguc

SEQ ID NO: 2963077 - RNA, 19 nt, Artificial Sequence
  Description of Artificial Sequence: Synthetic oligonucleotide
cagcacccacauggcugug

SEQ ID NO: 2963078 - RNA, 19 nt, Artificial Sequence
  Description of Artificial Sequence: Synthetic oligonucleotide
gccugguccucgcgcccgc

SEQ ID NO: 2963079 - RNA, 19 nt, Artificial Sequence
  Description of Artificial Sequence: Synthetic oligonucleotide
ccgccgccaucgucgugcg

SEQ ID NO: 2963080 - RNA, 19 nt, Artificial Sequence
  Description of Artificial Sequence: Synthetic oligonucleotide
gcgcggguccagcucugca

SEQ ID NO: 2963081 - RNA, 19 nt, Artificial Sequence
  Description of Artificial Sequence: Synthetic oligonucleotide
cggccacgaccacaucagc

SEQ ID NO: 2963082 - RNA, 19 nt, Artificial Sequence
  Description of Artificial Sequence: Synthetic oligonucleotide
cggaugcucccgcagaagu

SEQ ID NO: 2963083 - RNA, 19 nt, Artificial Sequence
  Description of Artificial Sequence: Synthetic oligonucleotide
ccgcgacacgaucuucgca

SEQ ID NO: 2963084 - RNA, 19 nt, Artificial Sequence
  Description of Artificial Sequence: Synthetic oligonucleotide
cgaccacaucagccugccg

SEQ ID NO: 2963085 - RNA, 19 nt, Artificial Sequence
  Description of Artificial Sequence: Synthetic oligonucleotide
gcagccgcgacacgaucuu

SEQ ID NO: 2963086 - RNA, 19 nt, Artificial Sequence
  Description of Artificial Sequence: Synthetic oligonucleotide
ccgcggaugcucccgcaga

SEQ ID NO: 2963087 - RNA, 19 nt, Artificial Sequence
  Description of Artificial Sequence: Synthetic oligonucleotide
cucggccgccgccgccauc

SEQ ID NO: 2963088 - RNA, 19 nt, Artificial Sequence
  Description of Artificial Sequence: Synthetic oligonucleotide
ccgccgcggaugcucccgc

SEQ ID NO: 2963089 - RNA, 19 nt, Artificial Sequence
  Description of Artificial Sequence: Synthetic oligonucleotide
ccgcagccgcgacacgauc

SEQ ID NO: 2963090 - RNA, 19 nt, Artificial Sequence
  Description of Artificial Sequence: Synthetic oligonucleotide
cuggauccucgagccauuu

SEQ ID NO: 2963091 - RNA, 19 nt, Artificial Sequence
  Description of Artificial Sequence: Synthetic oligonucleotide
ccugguccucgcgcccgcc

SEQ ID NO: 2963092 - RNA, 19 nt, Artificial Sequence
  Description of Artificial Sequence: Synthetic oligonucleotide
cgagccauuugcugcuccu

SEQ ID NO: 2963093 - RNA, 19 nt, Artificial Sequence
  Description of Artificial Sequence: Synthetic oligonucleotide
gcgcccgccgcggaugcuc

SEQ ID NO: 2963094 - RNA, 19 nt, Artificial Sequence
  Description of Artificial Sequence: Synthetic oligonucleotide
cgcagccgcgacacgaucu

SEQ ID NO: 2963095 - RNA, 19 nt, Artificial Sequence
  Description of Artificial Sequence: Synthetic oligonucleotide
ccgcagccaggccaggucu

SEQ ID NO: 2963096 - RNA, 19 nt, Artificial Sequence
  Description of Artificial Sequence: Synthetic oligonucleotide
cgcccgccgcggaugcucc

SEQ ID NO: 2963097 - RNA, 19 nt, Artificial Sequence
  Description of Artificial Sequence: Synthetic oligonucleotide
gccucuucuccgcgcgggu

SEQ ID NO: 2963098 - RNA, 19 nt, Artificial Sequence
  Description of Artificial Sequence: Synthetic oligonucleotide
cgcggaugcucccgcagaa

SEQ ID NO: 2963099 - RNA, 19 nt, Artificial Sequence
  Description of Artificial Sequence: Synthetic oligonucleotide
gcgccgcagccgcgacacg

SEQ ID NO: 2963100 - RNA, 19 nt, Artificial Sequence
  Description of Artificial Sequence: Synthetic oligonucleotide
gcccgccgcggaugcuccc

SEQ ID NO: 2963101 - RNA, 19 nt, Artificial Sequence
  Description of Artificial Sequence: Synthetic oligonucleotide
cgccgcagccgcgacacga

SEQ ID NO: 2963102 - RNA, 19 nt, Artificial Sequence
  Description of Artificial Sequence: Synthetic oligonucleotide
ccgcgcggguccagcucug

SEQ ID NO: 2963103 - RNA, 19 nt, Artificial Sequence
  Description of Artificial Sequence: Synthetic oligonucleotide
ccucggccacgaccacauc

SEQ ID NO: 2963104 - RNA, 19 nt, Artificial Sequence
  Description of Artificial Sequence: Synthetic oligonucleotide
ccuggauccucgagccauu

SEQ ID NO: 2963105 - RNA, 19 nt, Artificial Sequence
  Description of Artificial Sequence: Synthetic oligonucleotide
cgcgcggguccagcucugc

SEQ ID NO: 2963106 - RNA, 19 nt, Artificial Sequence
  Description of Artificial Sequence: Synthetic oligonucleotide
cgaccagacuguggucgga

SEQ ID NO: 2963107 - RNA, 19 nt, Artificial Sequence
  Description of Artificial Sequence: Synthetic oligonucleotide
gccgcagccgcgacacgau

SEQ ID NO: 2963108 - RNA, 19 nt, Artificial Sequence
  Description of Artificial Sequence: Synthetic oligonucleotide
cagcagccacgugcucggu

SEQ ID NO: 2963109 - RNA, 19 nt, Artificial Sequence
  Description of Artificial Sequence: Synthetic oligonucleotide
cgccgccaucgucgugcgc

SEQ ID NO: 2963110 - RNA, 19 nt, Artificial Sequence
  Description of Artificial Sequence: Synthetic oligonucleotide
cgccgcggaugcucccgca

SEQ ID NO: 2963111 - RNA, 19 nt, Artificial Sequence
  Description of Artificial Sequence: Synthetic oligonucleotide
cgcagccaggccaggucuu

SEQ ID NO: 2963112 - RNA, 19 nt, Artificial Sequence
  Description of Artificial Sequence: Synthetic oligonucleotide
cgccgccgccaucgucgug

SEQ ID NO: 2963113 - RNA, 19 nt, Artificial Sequence
  Description of Artificial Sequence: Synthetic oligonucleotide
ccucgcgcccgccgcggau

SEQ ID NO: 2963114 - RNA, 19 nt, Artificial Sequence
  Description of Artificial Sequence: Synthetic oligonucleotide
cgugcucggugagcaccuu

SEQ ID NO: 2963115 - RNA, 19 nt, Artificial Sequence
  Description of Artificial Sequence: Synthetic oligonucleotide
cggccgccgccgccaucgu

SEQ ID NO: 2963116 - RNA, 19 nt, Artificial Sequence
  Description of Artificial Sequence: Synthetic oligonucleotide
cgcgcccgccgcggaugcu

SEQ ID NO: 2963117 - RNA, 19 nt, Artificial Sequence
  Description of Artificial Sequence: Synthetic oligonucleotide
aaucuuuucaauuuggcuu

SEQ ID NO: 2963118 - RNA, 19 nt, Artificial Sequence
  Description of Artificial Sequence: Synthetic oligonucleotide
ucaauuuggcuucauaucu

SEQ ID NO: 2963119 - RNA, 19 nt, Artificial Sequence
  Description of Artificial Sequence: Synthetic oligonucleotide
uuucaauuuggcuucauau

SEQ ID NO: 2963120 - RNA, 19 nt, Artificial Sequence
  Description of Artificial Sequence: Synthetic oligonucleotide
uaaucuuuucaauuuggcu

SEQ ID NO: 2963121 - RNA, 19 nt, Artificial Sequence
  Description of Artificial Sequence: Synthetic oligonucleotide
uucaauuuggcuucauauc

SEQ ID NO: 2963122 - RNA, 19 nt, Artificial Sequence
  Description of Artificial Sequence: Synthetic oligonucleotide
ucuuuucaauuuggcuuca

SEQ ID NO: 2963123 - RNA, 19 nt, Artificial Sequence
  Description of Artificial Sequence: Synthetic oligonucleotide
cuuuucaauuuggcuucau

SEQ ID NO: 2963124 - RNA, 19 nt, Artificial Sequence
  Description of Artificial Sequence: Synthetic oligonucleotide
aaauaaggaauccucuucc

SEQ ID NO: 2963125 - RNA, 19 nt, Artificial Sequence
  Description of Artificial Sequence: Synthetic oligonucleotide
aauaaaguaugggaaaugg

SEQ ID NO: 2963126 - RNA, 19 nt, Artificial Sequence
  Description of Artificial Sequence: Synthetic oligonucleotide
uuuaaucucgcucaggaca

SEQ ID NO: 2963127 - RNA, 19 nt, Artificial Sequence
  Description of Artificial Sequence: Synthetic oligonucleotide
uagaaaauaaaguauggga

SEQ ID NO: 2963128 - RNA, 19 nt, Artificial Sequence
  Description of Artificial Sequence: Synthetic oligonucleotide
aauaaggaauccucuuccc

SEQ ID NO: 2963129 - RNA, 19 nt, Artificial Sequence
  Description of Artificial Sequence: Synthetic oligonucleotide
uaaaacagcuggaucaugg

SEQ ID NO: 2963130 - RNA, 19 nt, Artificial Sequence
  Description of Artificial Sequence: Synthetic oligonucleotide
ucuaagaauguccagcuug

SEQ ID NO: 2963131 - RNA, 19 nt, Artificial Sequence
  Description of Artificial Sequence: Synthetic oligonucleotide
uguggaaagacauuggcug

SEQ ID NO: 2963132 - RNA, 19 nt, Artificial Sequence
  Description of Artificial Sequence: Synthetic oligonucleotide
  modified_base (10)..(10): a, c, u, g, unknown or other
aaugguuucngauugucuu

SEQ ID NO: 2963133 - RNA, 19 nt, Artificial Sequence
  Description of Artificial Sequence: Synthetic oligonucleotide
agugauucuccacaaaccg

SEQ ID NO: 2963134 - RNA, 19 nt, Artificial Sequence
  Description of Artificial Sequence: Synthetic oligonucleotide
uacauagaaaauaaaguau

SEQ ID NO: 2963135 - RNA, 19 nt, Artificial Sequence
  Description of Artificial Sequence: Synthetic oligonucleotide
aaguaugggaaaugguuuc

SEQ ID NO: 2963136 - RNA, 19 nt, Artificial Sequence
  Description of Artificial Sequence: Synthetic oligonucleotide
aaacagcuggaucauggac

SEQ ID NO: 2963137 - RNA, 19 nt, Artificial Sequence
  Description of Artificial Sequence: Synthetic oligonucleotide
aaagacauuggcuguacca

SEQ ID NO: 2963138 - RNA, 19 nt, Artificial Sequence
  Description of Artificial Sequence: Synthetic oligonucleotide
uaaaguaugggaaaugguu

SEQ ID NO: 2963139 - RNA, 19 nt, Artificial Sequence
  Description of Artificial Sequence: Synthetic oligonucleotide
aagaauguccagcuugguc

SEQ ID NO: 2963140 - RNA, 19 nt, Artificial Sequence
  Description of Artificial Sequence: Synthetic oligonucleotide
auagaaaauaaaguauggg

SEQ ID NO: 2963141 - RNA, 19 nt, Artificial Sequence
  Description of Artificial Sequence: Synthetic oligonucleotide
  modified_base (5)..(5): a, c, u, g, unknown or other
uuucngauugucuugugga

SEQ ID NO: 2963142 - RNA, 19 nt, Artificial Sequence
  Description of Artificial Sequence: Synthetic oligonucleotide
gaugccaacuuuaaucucg

SEQ ID NO: 2963143 - RNA, 19 nt, Artificial Sequence
  Description of Artificial Sequence: Synthetic oligonucleotide
aagugauucuccacaaacc

SEQ ID NO: 2963144 - RNA, 19 nt, Artificial Sequence
  Description of Artificial Sequence: Synthetic oligonucleotide
aagacauuggcuguaccac

SEQ ID NO: 2963145 - RNA, 19 nt, Artificial Sequence
  Description of Artificial Sequence: Synthetic oligonucleotide
cucaggacaucuaagaaug

SEQ ID NO: 2963146 - RNA, 19 nt, Artificial Sequence
  Description of Artificial Sequence: Synthetic oligonucleotide
ugauucuccacaaaccgca

SEQ ID NO: 2963147 - RNA, 19 nt, Artificial Sequence
  Description of Artificial Sequence: Synthetic oligonucleotide
uucccguugagcuuguagg

SEQ ID NO: 2963148 - RNA, 19 nt, Artificial Sequence
  Description of Artificial Sequence: Synthetic oligonucleotide
gaaaauaaaguaugggaaa

SEQ ID NO: 2963149 - RNA, 19 nt, Artificial Sequence
  Description of Artificial Sequence: Synthetic oligonucleotide
uuggcuguaccacugagga

SEQ ID NO: 2963150 - RNA, 19 nt, Artificial Sequence
  Description of Artificial Sequence: Synthetic oligonucleotide
auaaggaauccucuucccg

SEQ ID NO: 2963151 - RNA, 19 nt, Artificial Sequence
  Description of Artificial Sequence: Synthetic oligonucleotide
cuaagaauguccagcuugg

SEQ ID NO: 2963152 - RNA, 19 nt, Artificial Sequence
  Description of Artificial Sequence: Synthetic oligonucleotide
ugcaguaucuccugguuag

SEQ ID NO: 2963153 - RNA, 19 nt, Artificial Sequence
  Description of Artificial Sequence: Synthetic oligonucleotide
aaaauaaaguaugggaaau

SEQ ID NO: 2963154 - RNA, 19 nt, Artificial Sequence
  Description of Artificial Sequence: Synthetic oligonucleotide
acuuuaaucucgcucagga

SEQ ID NO: 2963155 - RNA, 19 nt, Artificial Sequence
  Description of Artificial Sequence: Synthetic oligonucleotide
aggacaucuaagaaugucc

SEQ ID NO: 2963156 - RNA, 19 nt, Artificial Sequence
  Description of Artificial Sequence: Synthetic oligonucleotide
uggaucauggacucucugg

SEQ ID NO: 2963157 - RNA, 19 nt, Artificial Sequence
  Description of Artificial Sequence: Synthetic oligonucleotide
gucuaaaacagcuggauca

SEQ ID NO: 2963158 - RNA, 19 nt, Artificial Sequence
  Description of Artificial Sequence: Synthetic oligonucleotide
uggcgucuaaaacagcugg

SEQ ID NO: 2963159 - RNA, 19 nt, Artificial Sequence
  Description of Artificial Sequence: Synthetic oligonucleotide
uguuucguacucuaccucc

SEQ ID NO: 2963160 - RNA, 19 nt, Artificial Sequence
  Description of Artificial Sequence: Synthetic oligonucleotide
guacauagaaaauaaagua

SEQ ID NO: 2963161 - RNA, 19 nt, Artificial Sequence
  Description of Artificial Sequence: Synthetic oligonucleotide
uuagcagggaaauaaggaa

SEQ ID NO: 2963162 - RNA, 19 nt, Artificial Sequence
  Description of Artificial Sequence: Synthetic oligonucleotide
ucuuguggaaagacauugg

SEQ ID NO: 2963163 - RNA, 19 nt, Artificial Sequence
  Description of Artificial Sequence: Synthetic oligonucleotide
agaaaauaaaguaugggaa

SEQ ID NO: 2963164 - RNA, 19 nt, Artificial Sequence
  Description of Artificial Sequence: Synthetic oligonucleotide
aaauaaaguaugggaaaug

SEQ ID NO: 2963165 - RNA, 19 nt, Artificial Sequence
  Description of Artificial Sequence: Synthetic oligonucleotide
acguacauagaaaauaaag

SEQ ID NO: 2963166 - RNA, 19 nt, Artificial Sequence
  Description of Artificial Sequence: Synthetic oligonucleotide
ugcuuggcgucuaaaacag

SEQ ID NO: 2963167 - RNA, 19 nt, Artificial Sequence
  Description of Artificial Sequence: Synthetic oligonucleotide
  modified_base (6)..(6): a, c, u, g, unknown or other
guuucngauugucuugugg

SEQ ID NO: 2963168 - RNA, 19 nt, Artificial Sequence
  Description of Artificial Sequence: Synthetic oligonucleotide
uugucuuguggaaagacau

SEQ ID NO: 2963169 - RNA, 19 nt, Artificial Sequence
  Description of Artificial Sequence: Synthetic oligonucleotide
cuuguggaaagacauuggc

SEQ ID NO: 2963170 - RNA, 19 nt, Artificial Sequence
  Description of Artificial Sequence: Synthetic oligonucleotide
acaaaccgcacauagcucu

SEQ ID NO: 2963171 - RNA, 19 nt, Artificial Sequence
  Description of Artificial Sequence: Synthetic oligonucleotide
caagugauucuccacaaac

SEQ ID NO: 2963172 - RNA, 19 nt, Artificial Sequence
  Description of Artificial Sequence: Synthetic oligonucleotide
aacgccaacccauuugacu

SEQ ID NO: 2963173 - RNA, 19 nt, Artificial Sequence
  Description of Artificial Sequence: Synthetic oligonucleotide
ucugcuuggcgucuaaaac

SEQ ID NO: 2963174 - RNA, 19 nt, Artificial Sequence
  Description of Artificial Sequence: Synthetic oligonucleotide
uugagcuuguaggagaugc

SEQ ID NO: 2963175 - RNA, 19 nt, Artificial Sequence
  Description of Artificial Sequence: Synthetic oligonucleotide
auagcucugggccugcggg

SEQ ID NO: 2963176 - RNA, 19 nt, Artificial Sequence
  Description of Artificial Sequence: Synthetic oligonucleotide
guaucuccugguuagcagg

SEQ ID NO: 2963177 - RNA, 19 nt, Artificial Sequence
  Description of Artificial Sequence: Synthetic oligonucleotide
uaaggaauccucuucccgu

SEQ ID NO: 2963178 - RNA, 19 nt, Artificial Sequence
  Description of Artificial Sequence: Synthetic oligonucleotide
aagacguacauagaaaaua

SEQ ID NO: 2963179 - RNA, 19 nt, Artificial Sequence
  Description of Artificial Sequence: Synthetic oligonucleotide
cugcuuuccauccaggcag

SEQ ID NO: 2963180 - RNA, 19 nt, Artificial Sequence
  Description of Artificial Sequence: Synthetic oligonucleotide
  modified_base (14)..(14): a, c, u, g, unknown or other
gggaaaugguuucngauug

SEQ ID NO: 2963181 - RNA, 19 nt, Artificial Sequence
  Description of Artificial Sequence: Synthetic oligonucleotide
aaaacagcuggaucaugga

SEQ ID NO: 2963182 - RNA, 19 nt, Artificial Sequence
  Description of Artificial Sequence: Synthetic oligonucleotide
aguguuucguacucuaccu

SEQ ID NO: 2963183 - RNA, 19 nt, Artificial Sequence
  Description of Artificial Sequence: Synthetic oligonucleotide
ucugcuuuccauccaggca

SEQ ID NO: 2963184 - RNA, 19 nt, Artificial Sequence
  Description of Artificial Sequence: Synthetic oligonucleotide
ggagaugccaacuuuaauc

SEQ ID NO: 2963185 - RNA, 19 nt, Artificial Sequence
  Description of Artificial Sequence: Synthetic oligonucleotide
  modified_base (2)..(2): a, c, u, g, unknown or other
cngauugucuuguggaaag

SEQ ID NO: 2963186 - RNA, 19 nt, Artificial Sequence
  Description of Artificial Sequence: Synthetic oligonucleotide
agggaaauaaggaauccuc

SEQ ID NO: 2963187 - RNA, 19 nt, Artificial Sequence
  Description of Artificial Sequence: Synthetic oligonucleotide
acagcuggaucauggacuc

SEQ ID NO: 2963188 - RNA, 19 nt, Artificial Sequence
  Description of Artificial Sequence: Synthetic oligonucleotide
aacagcuggaucauggacu

SEQ ID NO: 2963189 - RNA, 19 nt, Artificial Sequence
  Description of Artificial Sequence: Synthetic oligonucleotide
aauccucuucccguugagc

SEQ ID NO: 2963190 - RNA, 19 nt, Artificial Sequence
  Description of Artificial Sequence: Synthetic oligonucleotide
uuaaucucgcucaggacau

SEQ ID NO: 2963191 - RNA, 19 nt, Artificial Sequence
  Description of Artificial Sequence: Synthetic oligonucleotide
  modified_base (16)..(16): a, c, u, g, unknown or other
augggaaaugguuucngau

SEQ ID NO: 2963192 - RNA, 19 nt, Artificial Sequence
  Description of Artificial Sequence: Synthetic oligonucleotide
acgccaacccauuugacug

SEQ ID NO: 2963193 - RNA, 19 nt, Artificial Sequence
  Description of Artificial Sequence: Synthetic oligonucleotide
aguaucuccugguuagcag

SEQ ID NO: 2963194 - RNA, 19 nt, Artificial Sequence
  Description of Artificial Sequence: Synthetic oligonucleotide
acccauuugacugccacac

SEQ ID NO: 2963195 - RNA, 19 nt, Artificial Sequence
  Description of Artificial Sequence: Synthetic oligonucleotide
aaaguaugggaaaugguuu

SEQ ID NO: 2963196 - RNA, 19 nt, Artificial Sequence
  Description of Artificial Sequence: Synthetic oligonucleotide
uuuccauccaggcaguguu

SEQ ID NO: 2963197 - RNA, 19 nt, Artificial Sequence
  Description of Artificial Sequence: Synthetic oligonucleotide
ugguaucugcuuuccaucc

SEQ ID NO: 2963198 - RNA, 19 nt, Artificial Sequence
  Description of Artificial Sequence: Synthetic oligonucleotide
ugguuagcagggaaauaag

SEQ ID NO: 2963199 - RNA, 19 nt, Artificial Sequence
  Description of Artificial Sequence: Synthetic oligonucleotide
uagcagggaaauaaggaau

SEQ ID NO: 2963200 - RNA, 19 nt, Artificial Sequence
  Description of Artificial Sequence: Synthetic oligonucleotide
acucucuggacuucccaac

SEQ ID NO: 2963201 - RNA, 19 nt, Artificial Sequence
  Description of Artificial Sequence: Synthetic oligonucleotide
aacuuuaaucucgcucagg

SEQ ID NO: 2963202 - RNA, 19 nt, Artificial Sequence
  Description of Artificial Sequence: Synthetic oligonucleotide
caguguuucguacucuacc

SEQ ID NO: 2963203 - RNA, 19 nt, Artificial Sequence
  Description of Artificial Sequence: Synthetic oligonucleotide
uucuccacaaaccgcacau

SEQ ID NO: 2963204 - RNA, 19 nt, Artificial Sequence
  Description of Artificial Sequence: Synthetic oligonucleotide
  modified_base (17)..(17): a, c, u, g, unknown or other
uaugggaaaugguuucnga

SEQ ID NO: 2963205 - RNA, 19 nt, Artificial Sequence
  Description of Artificial Sequence: Synthetic oligonucleotide
ucguacucuaccuccaccu

SEQ ID NO: 2963206 - RNA, 19 nt, Artificial Sequence
  Description of Artificial Sequence: Synthetic oligonucleotide
uguaccacugaggaucuug

SEQ ID NO: 2963207 - RNA, 19 nt, Artificial Sequence
  Description of Artificial Sequence: Synthetic oligonucleotide
  modified_base (9)..(9): a, c, u, g, unknown or other
augguuucngauugucuug

SEQ ID NO: 2963208 - RNA, 19 nt, Artificial Sequence
  Description of Artificial Sequence: Synthetic oligonucleotide
cuccacaaaccgcacauag

SEQ ID NO: 2963209 - RNA, 19 nt, Artificial Sequence
  Description of Artificial Sequence: Synthetic oligonucleotide
uacucuaccuccaccuucu

SEQ ID NO: 2963210 - RNA, 19 nt, Artificial Sequence
  Description of Artificial Sequence: Synthetic oligonucleotide
accacugaggaucuuggcu

SEQ ID NO: 2963211 - RNA, 19 nt, Artificial Sequence
  Description of Artificial Sequence: Synthetic oligonucleotide
gucuuguggaaagacauug

SEQ ID NO: 2963212 - RNA, 19 nt, Artificial Sequence
  Description of Artificial Sequence: Synthetic oligonucleotide
aaccgcacauagcucuggg

SEQ ID NO: 2963213 - RNA, 19 nt, Artificial Sequence
  Description of Artificial Sequence: Synthetic oligonucleotide
auccucuucccguugagcu

SEQ ID NO: 2963214 - RNA, 19 nt, Artificial Sequence
  Description of Artificial Sequence: Synthetic oligonucleotide
gagaugccaacuuuaaucu

SEQ ID NO: 2963215 - RNA, 19 nt, Artificial Sequence
  Description of Artificial Sequence: Synthetic oligonucleotide
guaucugcuuuccauccag

SEQ ID NO: 2963216 - RNA, 19 nt, Artificial Sequence
  Description of Artificial Sequence: Synthetic oligonucleotide
uuugacugccacacccaag

SEQ ID NO: 2963217 - RNA, 19 nt, Artificial Sequence
  Description of Artificial Sequence: Synthetic oligonucleotide
uccacaaaccgcacauagc

SEQ ID NO: 2963218 - RNA, 19 nt, Artificial Sequence
  Description of Artificial Sequence: Synthetic oligonucleotide
guuagcagggaaauaagga

SEQ ID NO: 2963219 - RNA, 19 nt, Artificial Sequence
  Description of Artificial Sequence: Synthetic oligonucleotide
  modified_base (4)..(4): a, c, u, g, unknown or other
uucngauugucuuguggaa

SEQ ID NO: 2963220 - RNA, 19 nt, Artificial Sequence
  Description of Artificial Sequence: Synthetic oligonucleotide
  modified_base (11)..(11): a, c, u, g, unknown or other
aaaugguuucngauugucu

SEQ ID NO: 2963221 - RNA, 19 nt, Artificial Sequence
  Description of Artificial Sequence: Synthetic oligonucleotide
agcagggaaauaaggaauc

SEQ ID NO: 2963222 - RNA, 19 nt, Artificial Sequence
  Description of Artificial Sequence: Synthetic oligonucleotide
uguaggagaugccaacuuu

SEQ ID NO: 2963223 - RNA, 19 nt, Artificial Sequence
  Description of Artificial Sequence: Synthetic oligonucleotide
ucgcucaggacaucuaaga

SEQ ID NO: 2963224 - RNA, 19 nt, Artificial Sequence
  Description of Artificial Sequence: Synthetic oligonucleotide
ucuggacuucccaacgcca

SEQ ID NO: 2963225 - RNA, 19 nt, Artificial Sequence
  Description of Artificial Sequence: Synthetic oligonucleotide
ugagcuuguaggagaugcc

SEQ ID NO: 2963226 - RNA, 19 nt, Artificial Sequence
  Description of Artificial Sequence: Synthetic oligonucleotide
uucguacucuaccuccacc

SEQ ID NO: 2963227 - RNA, 19 nt, Artificial Sequence
  Description of Artificial Sequence: Synthetic oligonucleotide
agaugccaacuuuaaucuc

SEQ ID NO: 2963228 - RNA, 19 nt, Artificial Sequence
  Description of Artificial Sequence: Synthetic oligonucleotide
  modified_base (15)..(15): a, c, u, g, unknown or other
ugggaaaugguuucngauu

SEQ ID NO: 2963229 - RNA, 19 nt, Artificial Sequence
  Description of Artificial Sequence: Synthetic oligonucleotide
gauugucuuguggaaagac

SEQ ID NO: 2963230 - RNA, 19 nt, Artificial Sequence
  Description of Artificial Sequence: Synthetic oligonucleotide
accagugguaucugcuuuc

SEQ ID NO: 2963231 - RNA, 19 nt, Artificial Sequence
  Description of Artificial Sequence: Synthetic oligonucleotide
acccaagugauucuccaca

SEQ ID NO: 2963232 - RNA, 19 nt, Artificial Sequence
  Description of Artificial Sequence: Synthetic oligonucleotide
uuggcgucuaaaacagcug

SEQ ID NO: 2963233 - RNA, 19 nt, Artificial Sequence
  Description of Artificial Sequence: Synthetic oligonucleotide
caugguguggccugcuggc

SEQ ID NO: 2963234 - RNA, 19 nt, Artificial Sequence
  Description of Artificial Sequence: Synthetic oligonucleotide
aaagacguacauagaaaau

SEQ ID NO: 2963235 - RNA, 19 nt, Artificial Sequence
  Description of Artificial Sequence: Synthetic oligonucleotide
cuuuaaucucgcucaggac

SEQ ID NO: 2963236 - RNA, 19 nt, Artificial Sequence
  Description of Artificial Sequence: Synthetic oligonucleotide
gaaagacauuggcuguacc

SEQ ID NO: 2963237 - RNA, 19 nt, Artificial Sequence
  Description of Artificial Sequence: Synthetic oligonucleotide
ucucuggacuucccaacgc

SEQ ID NO: 2963238 - RNA, 19 nt, Artificial Sequence
  Description of Artificial Sequence: Synthetic oligonucleotide
aacccauuugacugccaca

SEQ ID NO: 2963239 - RNA, 19 nt, Artificial Sequence
  Description of Artificial Sequence: Synthetic oligonucleotide
agcuggaucauggacucuc

SEQ ID NO: 2963240 - RNA, 19 nt, Artificial Sequence
  Description of Artificial Sequence: Synthetic oligonucleotide
accgcacauagcucugggc

SEQ ID NO: 2963241 - RNA, 19 nt, Artificial Sequence
  Description of Artificial Sequence: Synthetic oligonucleotide
  modified_base (12)..(12): a, c, u, g, unknown or other
gaaaugguuucngauuguc

SEQ ID NO: 2963242 - RNA, 19 nt, Artificial Sequence
  Description of Artificial Sequence: Synthetic oligonucleotide
cucucuggacuucccaacg

SEQ ID NO: 2963243 - RNA, 19 nt, Artificial Sequence
  Description of Artificial Sequence: Synthetic oligonucleotide
  modified_base (3)..(3): a, c, u, g, unknown or other
ucngauugucuuguggaaa

SEQ ID NO: 2963244 - RNA, 19 nt, Artificial Sequence
  Description of Artificial Sequence: Synthetic oligonucleotide
uaggagaugccaacuuuaa

SEQ ID NO: 2963245 - RNA, 19 nt, Artificial Sequence
  Description of Artificial Sequence: Synthetic oligonucleotide
ucuaaaacagcuggaucau

SEQ ID NO: 2963246 - RNA, 19 nt, Artificial Sequence
  Description of Artificial Sequence: Synthetic oligonucleotide
acuuccuggcaccaguggu

SEQ ID NO: 2963247 - RNA, 19 nt, Artificial Sequence
  Description of Artificial Sequence: Synthetic oligonucleotide
aaucucgcucaggacaucu

SEQ ID NO: 2963248 - RNA, 19 nt, Artificial Sequence
  Description of Artificial Sequence: Synthetic oligonucleotide
uucugcuuggcgucuaaaa

SEQ ID NO: 2963249 - RNA, 19 nt, Artificial Sequence
  Description of Artificial Sequence: Synthetic oligonucleotide
ccaacuuuaaucucgcuca

SEQ ID NO: 2963250 - RNA, 19 nt, Artificial Sequence
  Description of Artificial Sequence: Synthetic oligonucleotide
auuggcuguaccacugagg

SEQ ID NO: 2963251 - RNA, 19 nt, Artificial Sequence
  Description of Artificial Sequence: Synthetic oligonucleotide
ucucgcucaggacaucuaa

SEQ ID NO: 2963252 - RNA, 19 nt, Artificial Sequence
  Description of Artificial Sequence: Synthetic oligonucleotide
ucuucccacuuccuggcac

SEQ ID NO: 2963253 - RNA, 19 nt, Artificial Sequence
  Description of Artificial Sequence: Synthetic oligonucleotide
auaaaguaugggaaauggu

SEQ ID NO: 2963254 - RNA, 19 nt, Artificial Sequence
  Description of Artificial Sequence: Synthetic oligonucleotide
cugcuuggcgucuaaaaca

SEQ ID NO: 2963255 - RNA, 19 nt, Artificial Sequence
  Description of Artificial Sequence: Synthetic oligonucleotide
aaaccgcacauagcucugg

SEQ ID NO: 2963256 - RNA, 19 nt, Artificial Sequence
  Description of Artificial Sequence: Synthetic oligonucleotide
agacguacauagaaaauaa

SEQ ID NO: 2963257 - RNA, 19 nt, Artificial Sequence
  Description of Artificial Sequence: Synthetic oligonucleotide
augccaacuuuaaucucgc

SEQ ID NO: 2963258 - RNA, 19 nt, Artificial Sequence
  Description of Artificial Sequence: Synthetic oligonucleotide
aaggaauccucuucccguu

SEQ ID NO: 2963259 - RNA, 19 nt, Artificial Sequence
  Description of Artificial Sequence: Synthetic oligonucleotide
agacauuggcuguaccacu

SEQ ID NO: 2963260 - RNA, 19 nt, Artificial Sequence
  Description of Artificial Sequence: Synthetic oligonucleotide
ccauuugacugccacaccc

SEQ ID NO: 2963261 - RNA, 19 nt, Artificial Sequence
  Description of Artificial Sequence: Synthetic oligonucleotide
ucccguugagcuuguagga

SEQ ID NO: 2963262 - RNA, 19 nt, Artificial Sequence
  Description of Artificial Sequence: Synthetic oligonucleotide
cucuggacuucccaacgcc

SEQ ID NO: 2963263 - RNA, 19 nt, Artificial Sequence
  Description of Artificial Sequence: Synthetic oligonucleotide
cuucccguugagcuuguag

SEQ ID NO: 2963264 - RNA, 19 nt, Artificial Sequence
  Description of Artificial Sequence: Synthetic oligonucleotide
auugucuuguggaaagaca

SEQ ID NO: 2963265 - RNA, 19 nt, Artificial Sequence
  Description of Artificial Sequence: Synthetic oligonucleotide
uucugcaguaucuccuggu

SEQ ID NO: 2963266 - RNA, 19 nt, Artificial Sequence
  Description of Artificial Sequence: Synthetic oligonucleotide
guaccacugaggaucuugg

SEQ ID NO: 2963267 - RNA, 19 nt, Artificial Sequence
  Description of Artificial Sequence: Synthetic oligonucleotide
gacugccacacccaaguga

SEQ ID NO: 2963268 - RNA, 19 nt, Artificial Sequence
  Description of Artificial Sequence: Synthetic oligonucleotide
ucugcaguaucuccugguu

SEQ ID NO: 2963269 - RNA, 19 nt, Artificial Sequence
  Description of Artificial Sequence: Synthetic oligonucleotide
auggacucucuggacuucc

SEQ ID NO: 2963270 - RNA, 19 nt, Artificial Sequence
  Description of Artificial Sequence: Synthetic oligonucleotide
uuucguacucuaccuccac

SEQ ID NO: 2963271 - RNA, 19 nt, Artificial Sequence
  Description of Artificial Sequence: Synthetic oligonucleotide
cuucccacuuccuggcacc

SEQ ID NO: 2963272 - RNA, 19 nt, Artificial Sequence
  Description of Artificial Sequence: Synthetic oligonucleotide
gaauccucuucccguugag

SEQ ID NO: 2963273 - RNA, 19 nt, Artificial Sequence
  Description of Artificial Sequence: Synthetic oligonucleotide
ucuccugguuagcagggaa

SEQ ID NO: 2963274 - RNA, 19 nt, Artificial Sequence
  Description of Artificial Sequence: Synthetic oligonucleotide
caacccauuugacugccac

SEQ ID NO: 2963275 - RNA, 19 nt, Artificial Sequence
  Description of Artificial Sequence: Synthetic oligonucleotide
  modified_base (8)..(8): a, c, u, g, unknown or other
ugguuucngauugucuugu

SEQ ID NO: 2963276 - RNA, 19 nt, Artificial Sequence
  Description of Artificial Sequence: Synthetic oligonucleotide
ugccacacccaagugauuc

SEQ ID NO: 2963277 - RNA, 19 nt, Artificial Sequence
  Description of Artificial Sequence: Synthetic oligonucleotide
cucgcucaggacaucuaag

SEQ ID NO: 2963278 - RNA, 19 nt, Artificial Sequence
  Description of Artificial Sequence: Synthetic oligonucleotide
uuguaggagaugccaacuu

SEQ ID NO: 2963279 - RNA, 19 nt, Artificial Sequence
  Description of Artificial Sequence: Synthetic oligonucleotide
  modified_base (18)..(18): a, c, u, g, unknown or other
guaugggaaaugguuucng

SEQ ID NO: 2963280 - RNA, 19 nt, Artificial Sequence
  Description of Artificial Sequence: Synthetic oligonucleotide
acacccaagugauucucca

SEQ ID NO: 2963281 - RNA, 19 nt, Artificial Sequence
  Description of Artificial Sequence: Synthetic oligonucleotide
cuuggcgucuaaaacagcu

SEQ ID NO: 2963282 - RNA, 19 nt, Artificial Sequence
  Description of Artificial Sequence: Synthetic oligonucleotide
  modified_base (19)..(19): a, c, u, g, unknown or other
aguaugggaaaugguuucn

SEQ ID NO: 2963283 - RNA, 19 nt, Artificial Sequence
  Description of Artificial Sequence: Synthetic oligonucleotide
caacuuuaaucucgcucag

SEQ ID NO: 2963284 - RNA, 19 nt, Artificial Sequence
  Description of Artificial Sequence: Synthetic oligonucleotide
gugguaucugcuuuccauc

SEQ ID NO: 2963285 - RNA, 19 nt, Artificial Sequence
  Description of Artificial Sequence: Synthetic oligonucleotide
ggaucuuggcugcagcugc

SEQ ID NO: 2963286 - RNA, 19 nt, Artificial Sequence
  Description of Artificial Sequence: Synthetic oligonucleotide
ggcuguaccacugaggauc

SEQ ID NO: 2963287 - RNA, 19 nt, Artificial Sequence
  Description of Artificial Sequence: Synthetic oligonucleotide
cuucugcaguaucuccugg

SEQ ID NO: 2963288 - RNA, 19 nt, Artificial Sequence
  Description of Artificial Sequence: Synthetic oligonucleotide
cugguuagcagggaaauaa

SEQ ID NO: 2963289 - RNA, 19 nt, Artificial Sequence
  Description of Artificial Sequence: Synthetic oligonucleotide
gugauucuccacaaaccgc

SEQ ID NO: 2963290 - RNA, 19 nt, Artificial Sequence
  Description of Artificial Sequence: Synthetic oligonucleotide
ucaggacaucuaagaaugu

SEQ ID NO: 2963291 - RNA, 19 nt, Artificial Sequence
  Description of Artificial Sequence: Synthetic oligonucleotide
auuugacugccacacccaa

SEQ ID NO: 2963292 - RNA, 19 nt, Artificial Sequence
  Description of Artificial Sequence: Synthetic oligonucleotide
ggaucauggacucucugga

SEQ ID NO: 2963293 - RNA, 19 nt, Artificial Sequence
  Description of Artificial Sequence: Synthetic oligonucleotide
caccuucugcaguaucucc

SEQ ID NO: 2963294 - RNA, 19 nt, Artificial Sequence
  Description of Artificial Sequence: Synthetic oligonucleotide
cacugaggaucuuggcugc

SEQ ID NO: 2963295 - RNA, 19 nt, Artificial Sequence
  Description of Artificial Sequence: Synthetic oligonucleotide
guggcagcgggccauggug

SEQ ID NO: 2963296 - RNA, 19 nt, Artificial Sequence
  Description of Artificial Sequence: Synthetic oligonucleotide
ugucuuguggaaagacauu

SEQ ID NO: 2963297 - RNA, 19 nt, Artificial Sequence
  Description of Artificial Sequence: Synthetic oligonucleotide
acugccacacccaagugau

SEQ ID NO: 2963298 - RNA, 19 nt, Artificial Sequence
  Description of Artificial Sequence: Synthetic oligonucleotide
gccaacuuuaaucucgcuc

SEQ ID NO: 2963299 - RNA, 19 nt, Artificial Sequence
  Description of Artificial Sequence: Synthetic oligonucleotide
guacucuaccuccaccuuc

SEQ ID NO: 2963300 - RNA, 19 nt, Artificial Sequence
  Description of Artificial Sequence: Synthetic oligonucleotide
cauagcucugggccugcgg

SEQ ID NO: 2963301 - RNA, 19 nt, Artificial Sequence
  Description of Artificial Sequence: Synthetic oligonucleotide
caucuaagaauguccagcu

SEQ ID NO: 2963302 - RNA, 19 nt, Artificial Sequence
  Description of Artificial Sequence: Synthetic oligonucleotide
uggacuucccaacgccaac

SEQ ID NO: 2963303 - RNA, 19 nt, Artificial Sequence
  Description of Artificial Sequence: Synthetic oligonucleotide
ucacucguggcagcgggcc

SEQ ID NO: 2963304 - RNA, 19 nt, Artificial Sequence
  Description of Artificial Sequence: Synthetic oligonucleotide
ugcuggcuucugcuuggcg

SEQ ID NO: 2963305 - RNA, 19 nt, Artificial Sequence
  Description of Artificial Sequence: Synthetic oligonucleotide
uaccacugaggaucuuggc

SEQ ID NO: 2963306 - RNA, 19 nt, Artificial Sequence
  Description of Artificial Sequence: Synthetic oligonucleotide
cuggcuucugcuuggcguc

SEQ ID NO: 2963307 - RNA, 19 nt, Artificial Sequence
  Description of Artificial Sequence: Synthetic oligonucleotide
uccaggcaguguuucguac

SEQ ID NO: 2963308 - RNA, 19 nt, Artificial Sequence
  Description of Artificial Sequence: Synthetic oligonucleotide
gacucucuggacuucccaa

SEQ ID NO: 2963309 - RNA, 19 nt, Artificial Sequence
  Description of Artificial Sequence: Synthetic oligonucleotide
cauuugacugccacaccca

SEQ ID NO: 2963310 - RNA, 19 nt, Artificial Sequence
  Description of Artificial Sequence: Synthetic oligonucleotide
ccgcacauagcucugggcc

SEQ ID NO: 2963311 - RNA, 19 nt, Artificial Sequence
  Description of Artificial Sequence: Synthetic oligonucleotide
cacaaaccgcacauagcuc

SEQ ID NO: 2963312 - RNA, 19 nt, Artificial Sequence
  Description of Artificial Sequence: Synthetic oligonucleotide
cacuuccuggcaccagugg

SEQ ID NO: 2963313 - RNA, 19 nt, Artificial Sequence
  Description of Artificial Sequence: Synthetic oligonucleotide
ugacugccacacccaagug

SEQ ID NO: 2963314 - RNA, 19 nt, Artificial Sequence
  Description of Artificial Sequence: Synthetic oligonucleotide
caaaccgcacauagcucug

SEQ ID NO: 2963315 - RNA, 19 nt, Artificial Sequence
  Description of Artificial Sequence: Synthetic oligonucleotide
uccugguuagcagggaaau

SEQ ID NO: 2963316 - RNA, 19 nt, Artificial Sequence
  Description of Artificial Sequence: Synthetic oligonucleotide
aggagaugccaacuuuaau

SEQ ID NO: 2963317 - RNA, 19 nt, Artificial Sequence
  Description of Artificial Sequence: Synthetic oligonucleotide
cuaaaacagcuggaucaug

SEQ ID NO: 2963318 - RNA, 19 nt, Artificial Sequence
  Description of Artificial Sequence: Synthetic oligonucleotide
cuaccuccaccuucugcag

SEQ ID NO: 2963319 - RNA, 19 nt, Artificial Sequence
  Description of Artificial Sequence: Synthetic oligonucleotide
aggaauccucuucccguug

SEQ ID NO: 2963320 - RNA, 19 nt, Artificial Sequence
  Description of Artificial Sequence: Synthetic oligonucleotide
uggaaagacauuggcugua

SEQ ID NO: 2963321 - RNA, 19 nt, Artificial Sequence
  Description of Artificial Sequence: Synthetic oligonucleotide
ugcuuuccauccaggcagu

SEQ ID NO: 2963322 - RNA, 19 nt, Artificial Sequence
  Description of Artificial Sequence: Synthetic oligonucleotide
caggcaguguuucguacuc

SEQ ID NO: 2963323 - RNA, 19 nt, Artificial Sequence
  Description of Artificial Sequence: Synthetic oligonucleotide
agcugcucacucguggcag

SEQ ID NO: 2963324 - RNA, 19 nt, Artificial Sequence
  Description of Artificial Sequence: Synthetic oligonucleotide
gacguacauagaaaauaaa

SEQ ID NO: 2963325 - RNA, 19 nt, Artificial Sequence
  Description of Artificial Sequence: Synthetic oligonucleotide
ggacaucuaagaaugucca

SEQ ID NO: 2963326 - RNA, 19 nt, Artificial Sequence
  Description of Artificial Sequence: Synthetic oligonucleotide
guguuucguacucuaccuc

SEQ ID NO: 2963327 - RNA, 19 nt, Artificial Sequence
  Description of Artificial Sequence: Synthetic oligonucleotide
cguacauagaaaauaaagu

SEQ ID NO: 2963328 - RNA, 19 nt, Artificial Sequence
  Description of Artificial Sequence: Synthetic oligonucleotide
gcuuguaggagaugccaac

SEQ ID NO: 2963329 - RNA, 19 nt, Artificial Sequence
  Description of Artificial Sequence: Synthetic oligonucleotide
cacccaagugauucuccac

SEQ ID NO: 2963330 - RNA, 19 nt, Artificial Sequence
  Description of Artificial Sequence: Synthetic oligonucleotide
uccauccaggcaguguuuc

SEQ ID NO: 2963331 - RNA, 19 nt, Artificial Sequence
  Description of Artificial Sequence: Synthetic oligonucleotide
aucuaagaauguccagcuu

SEQ ID NO: 2963332 - RNA, 19 nt, Artificial Sequence
  Description of Artificial Sequence: Synthetic oligonucleotide
gauucuccacaaaccgcac

SEQ ID NO: 2963333 - RNA, 19 nt, Artificial Sequence
  Description of Artificial Sequence: Synthetic oligonucleotide
  modified_base (7)..(7): a, c, u, g, unknown or other
gguuucngauugucuugug

SEQ ID NO: 2963334 - RNA, 19 nt, Artificial Sequence
  Description of Artificial Sequence: Synthetic oligonucleotide
guaggagaugccaacuuua

SEQ ID NO: 2963335 - RNA, 19 nt, Artificial Sequence
  Description of Artificial Sequence: Synthetic oligonucleotide
accuccaccuucugcagua

SEQ ID NO: 2963336 - RNA, 19 nt, Artificial Sequence
  Description of Artificial Sequence: Synthetic oligonucleotide
gcucacucguggcagcggg

SEQ ID NO: 2963337 - RNA, 19 nt, Artificial Sequence
  Description of Artificial Sequence: Synthetic oligonucleotide
cuggaucauggacucucug

SEQ ID NO: 2963338 - RNA, 19 nt, Artificial Sequence
  Description of Artificial Sequence: Synthetic oligonucleotide
gaggaucuuggcugcagcu

SEQ ID NO: 2963339 - RNA, 19 nt, Artificial Sequence
  Description of Artificial Sequence: Synthetic oligonucleotide
uggcaccagugguaucugc

SEQ ID NO: 2963340 - RNA, 19 nt, Artificial Sequence
  Description of Artificial Sequence: Synthetic oligonucleotide
ugcucacucguggcagcgg

SEQ ID NO: 2963341 - RNA, 19 nt, Artificial Sequence
  Description of Artificial Sequence: Synthetic oligonucleotide
guuucguacucuaccucca

SEQ ID NO: 2963342 - RNA, 19 nt, Artificial Sequence
  Description of Artificial Sequence: Synthetic oligonucleotide
cucacucguggcagcgggc

SEQ ID NO: 2963343 - RNA, 19 nt, Artificial Sequence
  Description of Artificial Sequence: Synthetic oligonucleotide
guggaaagacauuggcugu

SEQ ID NO: 2963344 - RNA, 19 nt, Artificial Sequence
  Description of Artificial Sequence: Synthetic oligonucleotide
ccaugguguggccugcugg

SEQ ID NO: 2963345 - RNA, 19 nt, Artificial Sequence
  Description of Artificial Sequence: Synthetic oligonucleotide
uucccaacgccaacccauu

SEQ ID NO: 2963346 - RNA, 19 nt, Artificial Sequence
  Description of Artificial Sequence: Synthetic oligonucleotide
ggcugcagcugcucacucg

SEQ ID NO: 2963347 - RNA, 19 nt, Artificial Sequence
  Description of Artificial Sequence: Synthetic oligonucleotide
caacgccaacccauuugac

SEQ ID NO: 2963348 - RNA, 19 nt, Artificial Sequence
  Description of Artificial Sequence: Synthetic oligonucleotide
uccucuucccguugagcuu

SEQ ID NO: 2963349 - RNA, 19 nt, Artificial Sequence
  Description of Artificial Sequence: Synthetic oligonucleotide
gcagggaaauaaggaaucc

SEQ ID NO: 2963350 - RNA, 19 nt, Artificial Sequence
  Description of Artificial Sequence: Synthetic oligonucleotide
uuccuggcaccagugguau

SEQ ID NO: 2963351 - RNA, 19 nt, Artificial Sequence
  Description of Artificial Sequence: Synthetic oligonucleotide
cuucccaacgccaacccau

SEQ ID NO: 2963352 - RNA, 19 nt, Artificial Sequence
  Description of Artificial Sequence: Synthetic oligonucleotide
ugccaacuuuaaucucgcu

SEQ ID NO: 2963353 - RNA, 19 nt, Artificial Sequence
  Description of Artificial Sequence: Synthetic oligonucleotide
ggacuucccaacgccaacc

SEQ ID NO: 2963354 - RNA, 19 nt, Artificial Sequence
  Description of Artificial Sequence: Synthetic oligonucleotide
cuuccuggcaccaguggua

SEQ ID NO: 2963355 - RNA, 19 nt, Artificial Sequence
  Description of Artificial Sequence: Synthetic oligonucleotide
cugcucacucguggcagcg

SEQ ID NO: 2963356 - RNA, 19 nt, Artificial Sequence
  Description of Artificial Sequence: Synthetic oligonucleotide
uuccauccaggcaguguuu

SEQ ID NO: 2963357 - RNA, 19 nt, Artificial Sequence
  Description of Artificial Sequence: Synthetic oligonucleotide
guggccugcuggcuucugc

SEQ ID NO: 2963358 - RNA, 19 nt, Artificial Sequence
  Description of Artificial Sequence: Synthetic oligonucleotide
ccacaaaccgcacauagcu

SEQ ID NO: 2963359 - RNA, 19 nt, Artificial Sequence
  Description of Artificial Sequence: Synthetic oligonucleotide
agcuuguaggagaugccaa

SEQ ID NO: 2963360 - RNA, 19 nt, Artificial Sequence
  Description of Artificial Sequence: Synthetic oligonucleotide
ggaaagacauuggcuguac

SEQ ID NO: 2963361 - RNA, 19 nt, Artificial Sequence
  Description of Artificial Sequence: Synthetic oligonucleotide
cuggacuucccaacgccaa

SEQ ID NO: 2963362 - RNA, 19 nt, Artificial Sequence
  Description of Artificial Sequence: Synthetic oligonucleotide
gguaucugcuuuccaucca

SEQ ID NO: 2963363 - RNA, 19 nt, Artificial Sequence
  Description of Artificial Sequence: Synthetic oligonucleotide
auccaggcaguguuucgua

SEQ ID NO: 2963364 - RNA, 19 nt, Artificial Sequence
  Description of Artificial Sequence: Synthetic oligonucleotide
ggaauccucuucccguuga

SEQ ID NO: 2963365 - RNA, 19 nt, Artificial Sequence
  Description of Artificial Sequence: Synthetic oligonucleotide
agcgggccaugguguggcc

SEQ ID NO: 2963366 - RNA, 19 nt, Artificial Sequence
  Description of Artificial Sequence: Synthetic oligonucleotide
caguaucuccugguuagca

SEQ ID NO: 2963367 - RNA, 19 nt, Artificial Sequence
  Description of Artificial Sequence: Synthetic oligonucleotide
guugagcuuguaggagaug

SEQ ID NO: 2963368 - RNA, 19 nt, Artificial Sequence
  Description of Artificial Sequence: Synthetic oligonucleotide
cuuguaggagaugccaacu

SEQ ID NO: 2963369 - RNA, 19 nt, Artificial Sequence
  Description of Artificial Sequence: Synthetic oligonucleotide
gcucaggacaucuaagaau

SEQ ID NO: 2963370 - RNA, 19 nt, Artificial Sequence
  Description of Artificial Sequence: Synthetic oligonucleotide
cagcgggccaugguguggc

SEQ ID NO: 2963371 - RNA, 19 nt, Artificial Sequence
  Description of Artificial Sequence: Synthetic oligonucleotide
gggaaauaaggaauccucu

SEQ ID NO: 2963372 - RNA, 19 nt, Artificial Sequence
  Description of Artificial Sequence: Synthetic oligonucleotide
uggcuguaccacugaggau

SEQ ID NO: 2963373 - RNA, 19 nt, Artificial Sequence
  Description of Artificial Sequence: Synthetic oligonucleotide
ccaacgccaacccauuuga

SEQ ID NO: 2963374 - RNA, 19 nt, Artificial Sequence
  Description of Artificial Sequence: Synthetic oligonucleotide
ccauccaggcaguguuucg

SEQ ID NO: 2963375 - RNA, 19 nt, Artificial Sequence
  Description of Artificial Sequence: Synthetic oligonucleotide
uucccacuuccuggcacca

SEQ ID NO: 2963376 - RNA, 19 nt, Artificial Sequence
  Description of Artificial Sequence: Synthetic oligonucleotide
cccaacgccaacccauuug

SEQ ID NO: 2963377 - RNA, 19 nt, Artificial Sequence
  Description of Artificial Sequence: Synthetic oligonucleotide
acucuaccuccaccuucug

SEQ ID NO: 2963378 - RNA, 19 nt, Artificial Sequence
  Description of Artificial Sequence: Synthetic oligonucleotide
cugcaguaucuccugguua

SEQ ID NO: 2963379 - RNA, 19 nt, Artificial Sequence
  Description of Artificial Sequence: Synthetic oligonucleotide
cuccaccuucugcaguauc

SEQ ID NO: 2963380 - RNA, 19 nt, Artificial Sequence
  Description of Artificial Sequence: Synthetic oligonucleotide
ucccaacgccaacccauuu

SEQ ID NO: 2963381 - RNA, 19 nt, Artificial Sequence
  Description of Artificial Sequence: Synthetic oligonucleotide
uggcugcagcugcucacuc

SEQ ID NO: 2963382 - RNA, 19 nt, Artificial Sequence
  Description of Artificial Sequence: Synthetic oligonucleotide
gccugcuggcuucugcuug

SEQ ID NO: 2963383 - RNA, 19 nt, Artificial Sequence
  Description of Artificial Sequence: Synthetic oligonucleotide
gggaaggucuucccacuuc

SEQ ID NO: 2963384 - RNA, 19 nt, Artificial Sequence
  Description of Artificial Sequence: Synthetic oligonucleotide
cgucuaaaacagcuggauc

SEQ ID NO: 2963385 - RNA, 19 nt, Artificial Sequence
  Description of Artificial Sequence: Synthetic oligonucleotide
ggcaguguuucguacucua

SEQ ID NO: 2963386 - RNA, 19 nt, Artificial Sequence
  Description of Artificial Sequence: Synthetic oligonucleotide
ucccacuuccuggcaccag

SEQ ID NO: 2963387 - RNA, 19 nt, Artificial Sequence
  Description of Artificial Sequence: Synthetic oligonucleotide
gguguggccugcuggcuuc

SEQ ID NO: 2963388 - RNA, 19 nt, Artificial Sequence
  Description of Artificial Sequence: Synthetic oligonucleotide
cagggaaauaaggaauccu

SEQ ID NO: 2963389 - RNA, 19 nt, Artificial Sequence
  Description of Artificial Sequence: Synthetic oligonucleotide
ccucuucccguugagcuug

SEQ ID NO: 2963390 - RNA, 19 nt, Artificial Sequence
  Description of Artificial Sequence: Synthetic oligonucleotide
ggacucucuggacuuccca

SEQ ID NO: 2963391 - RNA, 19 nt, Artificial Sequence
  Description of Artificial Sequence: Synthetic oligonucleotide
uaaucucgcucaggacauc

SEQ ID NO: 2963392 - RNA, 19 nt, Artificial Sequence
  Description of Artificial Sequence: Synthetic oligonucleotide
ucguggcagcgggccaugg

SEQ ID NO: 2963393 - RNA, 19 nt, Artificial Sequence
  Description of Artificial Sequence: Synthetic oligonucleotide
ccagugguaucugcuuucc

SEQ ID NO: 2963394 - RNA, 19 nt, Artificial Sequence
  Description of Artificial Sequence: Synthetic oligonucleotide
aggcaguguuucguacucu

SEQ ID NO: 2963395 - RNA, 19 nt, Artificial Sequence
  Description of Artificial Sequence: Synthetic oligonucleotide
cacauagcucugggccugc

SEQ ID NO: 2963396 - RNA, 19 nt, Artificial Sequence
  Description of Artificial Sequence: Synthetic oligonucleotide
aucuccugguuagcaggga

SEQ ID NO: 2963397 - RNA, 19 nt, Artificial Sequence
  Description of Artificial Sequence: Synthetic oligonucleotide
gcugcucacucguggcagc

SEQ ID NO: 2963398 - RNA, 19 nt, Artificial Sequence
  Description of Artificial Sequence: Synthetic oligonucleotide
augguguggccugcuggcu

SEQ ID NO: 2963399 - RNA, 19 nt, Artificial Sequence
  Description of Artificial Sequence: Synthetic oligonucleotide
ccguugagcuuguaggaga

SEQ ID NO: 2963400 - RNA, 19 nt, Artificial Sequence
  Description of Artificial Sequence: Synthetic oligonucleotide
gcacauagcucugggccug

SEQ ID NO: 2963401 - RNA, 19 nt, Artificial Sequence
  Description of Artificial Sequence: Synthetic oligonucleotide
cugcagcugcucacucgug

SEQ ID NO: 2963402 - RNA, 19 nt, Artificial Sequence
  Description of Artificial Sequence: Synthetic oligonucleotide
uggcuucugcuuggcgucu

SEQ ID NO: 2963403 - RNA, 19 nt, Artificial Sequence
  Description of Artificial Sequence: Synthetic oligonucleotide
acucguggcagcgggccau

SEQ ID NO: 2963404 - RNA, 19 nt, Artificial Sequence
  Description of Artificial Sequence: Synthetic oligonucleotide
cccguugagcuuguaggag

SEQ ID NO: 2963405 - RNA, 19 nt, Artificial Sequence
  Description of Artificial Sequence: Synthetic oligonucleotide
gcaguguuucguacucuac

SEQ ID NO: 2963406 - RNA, 19 nt, Artificial Sequence
  Description of Artificial Sequence: Synthetic oligonucleotide
cagcugcucacucguggca

SEQ ID NO: 2963407 - RNA, 19 nt, Artificial Sequence
  Description of Artificial Sequence: Synthetic oligonucleotide
cuggcaccagugguaucug

SEQ ID NO: 2963408 - RNA, 19 nt, Artificial Sequence
  Description of Artificial Sequence: Synthetic oligonucleotide
ggcgucuaaaacagcugga

SEQ ID NO: 2963409 - RNA, 19 nt, Artificial Sequence
  Description of Artificial Sequence: Synthetic oligonucleotide
cccauuugacugccacacc

SEQ ID NO: 2963410 - RNA, 19 nt, Artificial Sequence
  Description of Artificial Sequence: Synthetic oligonucleotide
gucuucccacuuccuggca

SEQ ID NO: 2963411 - RNA, 19 nt, Artificial Sequence
  Description of Artificial Sequence: Synthetic oligonucleotide
gccaacccauuugacugcc

SEQ ID NO: 2963412 - RNA, 19 nt, Artificial Sequence
  Description of Artificial Sequence: Synthetic oligonucleotide
cuuuccauccaggcagugu

SEQ ID NO: 2963413 - RNA, 19 nt, Artificial Sequence
  Description of Artificial Sequence: Synthetic oligonucleotide
ccacuuccuggcaccagug

SEQ ID NO: 2963414 - RNA, 19 nt, Artificial Sequence
  Description of Artificial Sequence: Synthetic oligonucleotide
gaaggucuucccacuuccu

SEQ ID NO: 2963415 - RNA, 19 nt, Artificial Sequence
  Description of Artificial Sequence: Synthetic oligonucleotide
cauccaggcaguguuucgu

SEQ ID NO: 2963416 - RNA, 19 nt, Artificial Sequence
  Description of Artificial Sequence: Synthetic oligonucleotide
ggcagcgggccauggugug

SEQ ID NO: 2963417 - RNA, 19 nt, Artificial Sequence
  Description of Artificial Sequence: Synthetic oligonucleotide
gcaguaucuccugguuagc

SEQ ID NO: 2963418 - RNA, 19 nt, Artificial Sequence
  Description of Artificial Sequence: Synthetic oligonucleotide
uguggccugcuggcuucug

SEQ ID NO: 2963419 - RNA, 19 nt, Artificial Sequence
  Description of Artificial Sequence: Synthetic oligonucleotide
uccuggcaccagugguauc

SEQ ID NO: 2963420 - RNA, 19 nt, Artificial Sequence
  Description of Artificial Sequence: Synthetic oligonucleotide
gaucuuggcugcagcugcu

SEQ ID NO: 2963421 - RNA, 19 nt, Artificial Sequence
  Description of Artificial Sequence: Synthetic oligonucleotide
cccaagugauucuccacaa

SEQ ID NO: 2963422 - RNA, 19 nt, Artificial Sequence
  Description of Artificial Sequence: Synthetic oligonucleotide
  modified_base (13)..(13): a, c, u, g, unknown or other
ggaaaugguuucngauugu

SEQ ID NO: 2963423 - RNA, 19 nt, Artificial Sequence
  Description of Artificial Sequence: Synthetic oligonucleotide
gccaugguguggccugcug

SEQ ID NO: 2963424 - RNA, 19 nt, Artificial Sequence
  Description of Artificial Sequence: Synthetic oligonucleotide
gcagcgggccauggugugg

SEQ ID NO: 2963425 - RNA, 19 nt, Artificial Sequence
  Description of Artificial Sequence: Synthetic oligonucleotide
cgccaacccauuugacugc

SEQ ID NO: 2963426 - RNA, 19 nt, Artificial Sequence
  Description of Artificial Sequence: Synthetic oligonucleotide
ggcaccagugguaucugcu

SEQ ID NO: 2963427 - RNA, 19 nt, Artificial Sequence
  Description of Artificial Sequence: Synthetic oligonucleotide
cuucugcuuggcgucuaaa

SEQ ID NO: 2963428 - RNA, 19 nt, Artificial Sequence
  Description of Artificial Sequence: Synthetic oligonucleotide
gcuuggcgucuaaaacagc

SEQ ID NO: 2963429 - RNA, 19 nt, Artificial Sequence
  Description of Artificial Sequence: Synthetic oligonucleotide
ccacacccaagugauucuc

SEQ ID NO: 2963430 - RNA, 19 nt, Artificial Sequence
  Description of Artificial Sequence: Synthetic oligonucleotide
cacucguggcagcgggcca

SEQ ID NO: 2963431 - RNA, 19 nt, Artificial Sequence
  Description of Artificial Sequence: Synthetic oligonucleotide
cucguggcagcgggccaug

SEQ ID NO: 2963432 - RNA, 19 nt, Artificial Sequence
  Description of Artificial Sequence: Synthetic oligonucleotide
gcgucuaaaacagcuggau

SEQ ID NO: 2963433 - RNA, 19 nt, Artificial Sequence
  Description of Artificial Sequence: Synthetic oligonucleotide
caccagugguaucugcuuu

SEQ ID NO: 2963434 - RNA, 19 nt, Artificial Sequence
  Description of Artificial Sequence: Synthetic oligonucleotide
ccaagugauucuccacaaa

SEQ ID NO: 2963435 - RNA, 19 nt, Artificial Sequence
  Description of Artificial Sequence: Synthetic oligonucleotide
ccuggcaccagugguaucu

SEQ ID NO: 2963436 - RNA, 19 nt, Artificial Sequence
  Description of Artificial Sequence: Synthetic oligonucleotide
gcuuuccauccaggcagug

SEQ ID NO: 2963437 - RNA, 19 nt, Artificial Sequence
  Description of Artificial Sequence: Synthetic oligonucleotide
ccaggcaguguuucguacu

SEQ ID NO: 2963438 - RNA, 19 nt, Artificial Sequence
  Description of Artificial Sequence: Synthetic oligonucleotide
ucuucccguugagcuugua

SEQ ID NO: 2963439 - RNA, 19 nt, Artificial Sequence
  Description of Artificial Sequence: Synthetic oligonucleotide
gccacacccaagugauucu

SEQ ID NO: 2963440 - RNA, 19 nt, Artificial Sequence
  Description of Artificial Sequence: Synthetic oligonucleotide
cgcucaggacaucuaagaa

SEQ ID NO: 2963441 - RNA, 19 nt, Artificial Sequence
  Description of Artificial Sequence: Synthetic oligonucleotide
gcuucugcuuggcgucuaa

SEQ ID NO: 2963442 - RNA, 19 nt, Artificial Sequence
  Description of Artificial Sequence: Synthetic oligonucleotide
gcuguaccacugaggaucu

SEQ ID NO: 2963443 - RNA, 19 nt, Artificial Sequence
  Description of Artificial Sequence: Synthetic oligonucleotide
cccacuuccuggcaccagu

SEQ ID NO: 2963444 - RNA, 19 nt, Artificial Sequence
  Description of Artificial Sequence: Synthetic oligonucleotide
ccaacccauuugacugcca

SEQ ID NO: 2963445 - RNA, 19 nt, Artificial Sequence
  Description of Artificial Sequence: Synthetic oligonucleotide
gcuggaucauggacucucu

SEQ ID NO: 2963446 - RNA, 19 nt, Artificial Sequence
  Description of Artificial Sequence: Synthetic oligonucleotide
ggggaaggucuucccacuu

SEQ ID NO: 2963447 - RNA, 19 nt, Artificial Sequence
  Description of Artificial Sequence: Synthetic oligonucleotide
cgcacauagcucugggccu

SEQ ID NO: 2963448 - RNA, 19 nt, Artificial Sequence
  Description of Artificial Sequence: Synthetic oligonucleotide
cguugagcuuguaggagau

SEQ ID NO: 2963449 - RNA, 19 nt, Artificial Sequence
  Description of Artificial Sequence: Synthetic oligonucleotide
cucuucccguugagcuugu

SEQ ID NO: 2963450 - RNA, 19 nt, Artificial Sequence
  Description of Artificial Sequence: Synthetic oligonucleotide
ccugguuagcagggaaaua

SEQ ID NO: 2963451 - RNA, 19 nt, Artificial Sequence
  Description of Artificial Sequence: Synthetic oligonucleotide
cugccacacccaagugauu

SEQ ID NO: 2963452 - RNA, 19 nt, Artificial Sequence
  Description of Artificial Sequence: Synthetic oligonucleotide
ggcuucugcuuggcgucua

SEQ ID NO: 2963453 - RNA, 19 nt, Artificial Sequence
  Description of Artificial Sequence: Synthetic oligonucleotide
ggccugcuggcuucugcuu

SEQ ID NO: 2963454 - RNA, 19 nt, Artificial Sequence
  Description of Artificial Sequence: Synthetic oligonucleotide
cagcuggaucauggacucu

SEQ ID NO: 2963455 - RNA, 19 nt, Artificial Sequence
  Description of Artificial Sequence: Synthetic oligonucleotide
gcgggccaugguguggccu

SEQ ID NO: 2963456 - RNA, 19 nt, Artificial Sequence
  Description of Artificial Sequence: Synthetic oligonucleotide
cguacucuaccuccaccuu

SEQ ID NO: 2963457 - RNA, 19 nt, Artificial Sequence
  Description of Artificial Sequence: Synthetic oligonucleotide
ggccaugguguggccugcu

SEQ ID NO: 2963458 - RNA, 19 nt, Artificial Sequence
  Description of Artificial Sequence: Synthetic oligonucleotide
cguggcagcgggccauggu

SEQ ID NO: 2963459 - RNA, 19 nt, Artificial Sequence
  Description of Artificial Sequence: Synthetic oligonucleotide
cuguaccacugaggaucuu

SEQ ID NO: 2963460 - RNA, 19 nt, Artificial Sequence
  Description of Artificial Sequence: Synthetic oligonucleotide
  modified_base (1)..(1): a, c, u, g, unknown or other
ngauugucuuguggaaaga

SEQ ID NO: 2963461 - RNA, 19 nt, Artificial Sequence
  Description of Artificial Sequence: Synthetic oligonucleotide
uucauuaaaaucuucaaag

SEQ ID NO: 2963462 - RNA, 19 nt, Artificial Sequence
  Description of Artificial Sequence: Synthetic oligonucleotide
uucaugauaaucuauugcg

SEQ ID NO: 2963463 - RNA, 19 nt, Artificial Sequence
  Description of Artificial Sequence: Synthetic oligonucleotide
caucaaauaguuuaaaugc

SEQ ID NO: 2963464 - RNA, 19 nt, Artificial Sequence
  Description of Artificial Sequence: Synthetic oligonucleotide
aucuuuaucaaauucuucg

SEQ ID NO: 2963465 - RNA, 19 nt, Artificial Sequence
  Description of Artificial Sequence: Synthetic oligonucleotide
aaauucuucgaucauagcu

SEQ ID NO: 2963466 - RNA, 19 nt, Artificial Sequence
  Description of Artificial Sequence: Synthetic oligonucleotide
ucugucauaaucuuuaaga

SEQ ID NO: 2963467 - RNA, 19 nt, Artificial Sequence
  Description of Artificial Sequence: Synthetic oligonucleotide
aaugaauuccucuugauuu

SEQ ID NO: 2963468 - RNA, 19 nt, Artificial Sequence
  Description of Artificial Sequence: Synthetic oligonucleotide
ucaucaaauaguuuaaaug

SEQ ID NO: 2963469 - RNA, 19 nt, Artificial Sequence
  Description of Artificial Sequence: Synthetic oligonucleotide
uuaaaaucuucaaagguga

SEQ ID NO: 2963470 - RNA, 19 nt, Artificial Sequence
  Description of Artificial Sequence: Synthetic oligonucleotide
auucaugauaaucuauugc

SEQ ID NO: 2963471 - RNA, 19 nt, Artificial Sequence
  Description of Artificial Sequence: Synthetic oligonucleotide
aucacucauauuuucaccc

SEQ ID NO: 2963472 - RNA, 19 nt, Artificial Sequence
  Description of Artificial Sequence: Synthetic oligonucleotide
uaaucuuuaagaaucuuca

SEQ ID NO: 2963473 - RNA, 19 nt, Artificial Sequence
  Description of Artificial Sequence: Synthetic oligonucleotide
ucauuaaaaucuucaaagg

SEQ ID NO: 2963474 - RNA, 19 nt, Artificial Sequence
  Description of Artificial Sequence: Synthetic oligonucleotide
uauuuuacccgaaucauca

SEQ ID NO: 2963475 - RNA, 19 nt, Artificial Sequence
  Description of Artificial Sequence: Synthetic oligonucleotide
ucaaauucuucgaucauag

SEQ ID NO: 2963476 - RNA, 19 nt, Artificial Sequence
  Description of Artificial Sequence: Synthetic oligonucleotide
guaucaaagagcucaaagg

SEQ ID NO: 2963477 - RNA, 19 nt, Artificial Sequence
  Description of Artificial Sequence: Synthetic oligonucleotide
uuuaagaaucuucaguaca

SEQ ID NO: 2963478 - RNA, 19 nt, Artificial Sequence
  Description of Artificial Sequence: Synthetic oligonucleotide
cauaauagcaaugaauucc

SEQ ID NO: 2963479 - RNA, 19 nt, Artificial Sequence
  Description of Artificial Sequence: Synthetic oligonucleotide
aaacccaaggcucucauug

SEQ ID NO: 2963480 - RNA, 19 nt, Artificial Sequence
  Description of Artificial Sequence: Synthetic oligonucleotide
aauucuucgaucauagcuc

SEQ ID NO: 2963481 - RNA, 19 nt, Artificial Sequence
  Description of Artificial Sequence: Synthetic oligonucleotide
uuaucaaauucuucgauca

SEQ ID NO: 2963482 - RNA, 19 nt, Artificial Sequence
  Description of Artificial Sequence: Synthetic oligonucleotide
ucaaaggugauuuugccug

SEQ ID NO: 2963483 - RNA, 19 nt, Artificial Sequence
  Description of Artificial Sequence: Synthetic oligonucleotide
uugauuuauuucuccaucg

SEQ ID NO: 2963484 - RNA, 19 nt, Artificial Sequence
  Description of Artificial Sequence: Synthetic oligonucleotide
aauucaugauaaucuauug

SEQ ID NO: 2963485 - RNA, 19 nt, Artificial Sequence
  Description of Artificial Sequence: Synthetic oligonucleotide
uauugcguggucuuugucg

SEQ ID NO: 2963486 - RNA, 19 nt, Artificial Sequence
  Description of Artificial Sequence: Synthetic oligonucleotide
ucuuuaagaaucuucagua

SEQ ID NO: 2963487 - RNA, 19 nt, Artificial Sequence
  Description of Artificial Sequence: Synthetic oligonucleotide
ucaguaucucuucaugugg

SEQ ID NO: 2963488 - RNA, 19 nt, Artificial Sequence
  Description of Artificial Sequence: Synthetic oligonucleotide
uuuaaaugcuuucaguauc

SEQ ID NO: 2963489 - RNA, 19 nt, Artificial Sequence
  Description of Artificial Sequence: Synthetic oligonucleotide
aauaguuuaaaugcuuuca

SEQ ID NO: 2963490 - RNA, 19 nt, Artificial Sequence
  Description of Artificial Sequence: Synthetic oligonucleotide
uuuaauuucuugcuucugu

SEQ ID NO: 2963491 - RNA, 19 nt, Artificial Sequence
  Description of Artificial Sequence: Synthetic oligonucleotide
aucaucaucaaauaguuua

SEQ ID NO: 2963492 - RNA, 19 nt, Artificial Sequence
  Description of Artificial Sequence: Synthetic oligonucleotide
aucuuuaauuucuugcuuc

SEQ ID NO: 2963493 - RNA, 19 nt, Artificial Sequence
  Description of Artificial Sequence: Synthetic oligonucleotide
uuuacccgaaucaucauca

SEQ ID NO: 2963494 - RNA, 19 nt, Artificial Sequence
  Description of Artificial Sequence: Synthetic oligonucleotide
auuaaaaucuucaaaggug

SEQ ID NO: 2963495 - RNA, 19 nt, Artificial Sequence
  Description of Artificial Sequence: Synthetic oligonucleotide
augauaaucuauugcgugg

SEQ ID NO: 2963496 - RNA, 19 nt, Artificial Sequence
  Description of Artificial Sequence: Synthetic oligonucleotide
aaucuuuaagaaucuucag

SEQ ID NO: 2963497 - RNA, 19 nt, Artificial Sequence
  Description of Artificial Sequence: Synthetic oligonucleotide
auaguuuaaaugcuuucag

SEQ ID NO: 2963498 - RNA, 19 nt, Artificial Sequence
  Description of Artificial Sequence: Synthetic oligonucleotide
aagaaucuucaguacauca

SEQ ID NO: 2963499 - RNA, 19 nt, Artificial Sequence
  Description of Artificial Sequence: Synthetic oligonucleotide
uccaucgccaucuuuauca

SEQ ID NO: 2963500 - RNA, 19 nt, Artificial Sequence
  Description of Artificial Sequence: Synthetic oligonucleotide
uuugucgguaucaaagagc

SEQ ID NO: 2963501 - RNA, 19 nt, Artificial Sequence
  Description of Artificial Sequence: Synthetic oligonucleotide
aaaucuucaaaggugauuu

SEQ ID NO: 2963502 - RNA, 19 nt, Artificial Sequence
  Description of Artificial Sequence: Synthetic oligonucleotide
gaaucuucaguacaucagc

SEQ ID NO: 2963503 - RNA, 19 nt, Artificial Sequence
  Description of Artificial Sequence: Synthetic oligonucleotide
gauuuauuucuccaucgcc

SEQ ID NO: 2963504 - RNA, 19 nt, Artificial Sequence
  Description of Artificial Sequence: Synthetic oligonucleotide
uugucgguaucaaagagcu

SEQ ID NO: 2963505 - RNA, 19 nt, Artificial Sequence
  Description of Artificial Sequence: Synthetic oligonucleotide
auaaucuuuaagaaucuuc

SEQ ID NO: 2963506 - RNA, 19 nt, Artificial Sequence
  Description of Artificial Sequence: Synthetic oligonucleotide
gucauaaucuuuaagaauc

SEQ ID NO: 2963507 - RNA, 19 nt, Artificial Sequence
  Description of Artificial Sequence: Synthetic oligonucleotide
uuaaaugcuuucaguaucu

SEQ ID NO: 2963508 - RNA, 19 nt, Artificial Sequence
  Description of Artificial Sequence: Synthetic oligonucleotide
uuuucacccaauucucugg

SEQ ID NO: 2963509 - RNA, 19 nt, Artificial Sequence
  Description of Artificial Sequence: Synthetic oligonucleotide
aguuuaaaugcuuucagua

SEQ ID NO: 2963510 - RNA, 19 nt, Artificial Sequence
  Description of Artificial Sequence: Synthetic oligonucleotide
uaugucgccagucauaaua

SEQ ID NO: 2963511 - RNA, 19 nt, Artificial Sequence
  Description of Artificial Sequence: Synthetic oligonucleotide
cuuuccaauauccagucug

SEQ ID NO: 2963512 - RNA, 19 nt, Artificial Sequence
  Description of Artificial Sequence: Synthetic oligonucleotide
uuaagaaucuucaguacau

SEQ ID NO: 2963513 - RNA, 19 nt, Artificial Sequence
  Description of Artificial Sequence: Synthetic oligonucleotide
aucuuuaagaaucuucagu

SEQ ID NO: 2963514 - RNA, 19 nt, Artificial Sequence
  Description of Artificial Sequence: Synthetic oligonucleotide
uauccagucugucacaacu

SEQ ID NO: 2963515 - RNA, 19 nt, Artificial Sequence
  Description of Artificial Sequence: Synthetic oligonucleotide
uuuaauucaugauaaucua

SEQ ID NO: 2963516 - RNA, 19 nt, Artificial Sequence
  Description of Artificial Sequence: Synthetic oligonucleotide
uuccucuugauuuauuucu

SEQ ID NO: 2963517 - RNA, 19 nt, Artificial Sequence
  Description of Artificial Sequence: Synthetic oligonucleotide
caugauaaucuauugcgug

SEQ ID NO: 2963518 - RNA, 19 nt, Artificial Sequence
  Description of Artificial Sequence: Synthetic oligonucleotide
ucuuuaucaaauucuucga

SEQ ID NO: 2963519 - RNA, 19 nt, Artificial Sequence
  Description of Artificial Sequence: Synthetic oligonucleotide
ugauuuauuucuccaucgc

SEQ ID NO: 2963520 - RNA, 19 nt, Artificial Sequence
  Description of Artificial Sequence: Synthetic oligonucleotide
auucuucgaucauagcucg

SEQ ID NO: 2963521 - RNA, 19 nt, Artificial Sequence
  Description of Artificial Sequence: Synthetic oligonucleotide
auugcguggucuuugucgg

SEQ ID NO: 2963522 - RNA, 19 nt, Artificial Sequence
  Description of Artificial Sequence: Synthetic oligonucleotide
uucaguaucucuucaugug

SEQ ID NO: 2963523 - RNA, 19 nt, Artificial Sequence
  Description of Artificial Sequence: Synthetic oligonucleotide
cuuuaauucaugauaaucu

SEQ ID NO: 2963524 - RNA, 19 nt, Artificial Sequence
  Description of Artificial Sequence: Synthetic oligonucleotide
ucaagcuuauuuuacccga

SEQ ID NO: 2963525 - RNA, 19 nt, Artificial Sequence
  Description of Artificial Sequence: Synthetic oligonucleotide
ucauauuuucacccaauuc

SEQ ID NO: 2963526 - RNA, 19 nt, Artificial Sequence
  Description of Artificial Sequence: Synthetic oligonucleotide
uuaauucaugauaaucuau

SEQ ID NO: 2963527 - RNA, 19 nt, Artificial Sequence
  Description of Artificial Sequence: Synthetic oligonucleotide
aauuccucuugauuuauuu

SEQ ID NO: 2963528 - RNA, 19 nt, Artificial Sequence
  Description of Artificial Sequence: Synthetic oligonucleotide
aacccaaggcucucauugc

SEQ ID NO: 2963529 - RNA, 19 nt, Artificial Sequence
  Description of Artificial Sequence: Synthetic oligonucleotide
ugucacaacuucauuaaaa

SEQ ID NO: 2963530 - RNA, 19 nt, Artificial Sequence
  Description of Artificial Sequence: Synthetic oligonucleotide
acaucaaaacccaaggcuc

SEQ ID NO: 2963531 - RNA, 19 nt, Artificial Sequence
  Description of Artificial Sequence: Synthetic oligonucleotide
agcuuauuuuacccgaauc

SEQ ID NO: 2963532 - RNA, 19 nt, Artificial Sequence
  Description of Artificial Sequence: Synthetic oligonucleotide
cacaacuucauuaaaaucu

SEQ ID NO: 2963533 - RNA, 19 nt, Artificial Sequence
  Description of Artificial Sequence: Synthetic oligonucleotide
ucaaauaguuuaaaugcuu

SEQ ID NO: 2963534 - RNA, 19 nt, Artificial Sequence
  Description of Artificial Sequence: Synthetic oligonucleotide
uucucugucauaaucuuua

SEQ ID NO: 2963535 - RNA, 19 nt, Artificial Sequence
  Description of Artificial Sequence: Synthetic oligonucleotide
ucaugauaaucuauugcgu

SEQ ID NO: 2963536 - RNA, 19 nt, Artificial Sequence
  Description of Artificial Sequence: Synthetic oligonucleotide
aggugauuuugccuguggc

SEQ ID NO: 2963537 - RNA, 19 nt, Artificial Sequence
  Description of Artificial Sequence: Synthetic oligonucleotide
auuccucuugauuuauuuc

SEQ ID NO: 2963538 - RNA, 19 nt, Artificial Sequence
  Description of Artificial Sequence: Synthetic oligonucleotide
cucaagcuuauuuuacccg

SEQ ID NO: 2963539 - RNA, 19 nt, Artificial Sequence
  Description of Artificial Sequence: Synthetic oligonucleotide
cauauuuucacccaauucu

SEQ ID NO: 2963540 - RNA, 19 nt, Artificial Sequence
  Description of Artificial Sequence: Synthetic oligonucleotide
uuauuuuacccgaaucauc

SEQ ID NO: 2963541 - RNA, 19 nt, Artificial Sequence
  Description of Artificial Sequence: Synthetic oligonucleotide
ucauaaucuuuaagaaucu

SEQ ID NO: 2963542 - RNA, 19 nt, Artificial Sequence
  Description of Artificial Sequence: Synthetic oligonucleotide
ucugucacaacuucauuaa

SEQ ID NO: 2963543 - RNA, 19 nt, Artificial Sequence
  Description of Artificial Sequence: Synthetic oligonucleotide
ugucauaaucuuuaagaau

SEQ ID NO: 2963544 - RNA, 19 nt, Artificial Sequence
  Description of Artificial Sequence: Synthetic oligonucleotide
gguaucaaagagcucaaag

SEQ ID NO: 2963545 - RNA, 19 nt, Artificial Sequence
  Description of Artificial Sequence: Synthetic oligonucleotide
uuuauaugucgccagucau

SEQ ID NO: 2963546 - RNA, 19 nt, Artificial Sequence
  Description of Artificial Sequence: Synthetic oligonucleotide
ucuuuaauuucuugcuucu

SEQ ID NO: 2963547 - RNA, 19 nt, Artificial Sequence
  Description of Artificial Sequence: Synthetic oligonucleotide
ucuucaguacaucagcuuu

SEQ ID NO: 2963548 - RNA, 19 nt, Artificial Sequence
  Description of Artificial Sequence: Synthetic oligonucleotide
aaggugauuuugccugugg

SEQ ID NO: 2963549 - RNA, 19 nt, Artificial Sequence
  Description of Artificial Sequence: Synthetic oligonucleotide
uccaauauccagucuguca

SEQ ID NO: 2963550 - RNA, 19 nt, Artificial Sequence
  Description of Artificial Sequence: Synthetic oligonucleotide
auuuucacccaauucucug

SEQ ID NO: 2963551 - RNA, 19 nt, Artificial Sequence
  Description of Artificial Sequence: Synthetic oligonucleotide
ucaucacucauauuuucac

SEQ ID NO: 2963552 - RNA, 19 nt, Artificial Sequence
  Description of Artificial Sequence: Synthetic oligonucleotide
auauuuucacccaauucuc

SEQ ID NO: 2963553 - RNA, 19 nt, Artificial Sequence
  Description of Artificial Sequence: Synthetic oligonucleotide
cuuuaagaaucuucaguac

SEQ ID NO: 2963554 - RNA, 19 nt, Artificial Sequence
  Description of Artificial Sequence: Synthetic oligonucleotide
uaucucuucaugugggucu

SEQ ID NO: 2963555 - RNA, 19 nt, Artificial Sequence
  Description of Artificial Sequence: Synthetic oligonucleotide
uucaaaggugauuuugccu

SEQ ID NO: 2963556 - RNA, 19 nt, Artificial Sequence
  Description of Artificial Sequence: Synthetic oligonucleotide
gucuuugucgguaucaaag

SEQ ID NO: 2963557 - RNA, 19 nt, Artificial Sequence
  Description of Artificial Sequence: Synthetic oligonucleotide
ucuuugucgguaucaaaga

SEQ ID NO: 2963558 - RNA, 19 nt, Artificial Sequence
  Description of Artificial Sequence: Synthetic oligonucleotide
cuugauuuauuucuccauc

SEQ ID NO: 2963559 - RNA, 19 nt, Artificial Sequence
  Description of Artificial Sequence: Synthetic oligonucleotide
cuucaaaggugauuuugcc

SEQ ID NO: 2963560 - RNA, 19 nt, Artificial Sequence
  Description of Artificial Sequence: Synthetic oligonucleotide
uuuuacccgaaucaucauc

SEQ ID NO: 2963561 - RNA, 19 nt, Artificial Sequence
  Description of Artificial Sequence: Synthetic oligonucleotide
uauuucuccaucgccaucu

SEQ ID NO: 2963562 - RNA, 19 nt, Artificial Sequence
  Description of Artificial Sequence: Synthetic oligonucleotide
uaguuuaaaugcuuucagu

SEQ ID NO: 2963563 - RNA, 19 nt, Artificial Sequence
  Description of Artificial Sequence: Synthetic oligonucleotide
auuuauuucuccaucgcca

SEQ ID NO: 2963564 - RNA, 19 nt, Artificial Sequence
  Description of Artificial Sequence: Synthetic oligonucleotide
auagcaaugaauuccucuu

SEQ ID NO: 2963565 - RNA, 19 nt, Artificial Sequence
  Description of Artificial Sequence: Synthetic oligonucleotide
aucaucaaauaguuuaaau

SEQ ID NO: 2963566 - RNA, 19 nt, Artificial Sequence
  Description of Artificial Sequence: Synthetic oligonucleotide
aauucucuggcaacgcguc

SEQ ID NO: 2963567 - RNA, 19 nt, Artificial Sequence
  Description of Artificial Sequence: Synthetic oligonucleotide
uuuccaauauccagucugu

SEQ ID NO: 2963568 - RNA, 19 nt, Artificial Sequence
  Description of Artificial Sequence: Synthetic oligonucleotide
uuucacccaauucucuggc

SEQ ID NO: 2963569 - RNA, 19 nt, Artificial Sequence
  Description of Artificial Sequence: Synthetic oligonucleotide
uucgaucauagcucgaagu

SEQ ID NO: 2963570 - RNA, 19 nt, Artificial Sequence
  Description of Artificial Sequence: Synthetic oligonucleotide
uucuccaucgccaucuuua

SEQ ID NO: 2963571 - RNA, 19 nt, Artificial Sequence
  Description of Artificial Sequence: Synthetic oligonucleotide
caguaucucuucauguggg

SEQ ID NO: 2963572 - RNA, 19 nt, Artificial Sequence
  Description of Artificial Sequence: Synthetic oligonucleotide
uccucaagcuuauuuuacc

SEQ ID NO: 2963573 - RNA, 19 nt, Artificial Sequence
  Description of Artificial Sequence: Synthetic oligonucleotide
gucgguaucaaagagcuca

SEQ ID NO: 2963574 - RNA, 19 nt, Artificial Sequence
  Description of Artificial Sequence: Synthetic oligonucleotide
cuuugucgguaucaaagag

SEQ ID NO: 2963575 - RNA, 19 nt, Artificial Sequence
  Description of Artificial Sequence: Synthetic oligonucleotide
uauaugucgccagucauaa

SEQ ID NO: 2963576 - RNA, 19 nt, Artificial Sequence
  Description of Artificial Sequence: Synthetic oligonucleotide
aaagagcucaaaggcaucu

SEQ ID NO: 2963577 - RNA, 19 nt, Artificial Sequence
  Description of Artificial Sequence: Synthetic oligonucleotide
caucacucauauuuucacc

SEQ ID NO: 2963578 - RNA, 19 nt, Artificial Sequence
  Description of Artificial Sequence: Synthetic oligonucleotide
uuuauuucuccaucgccau

SEQ ID NO: 2963579 - RNA, 19 nt, Artificial Sequence
  Description of Artificial Sequence: Synthetic oligonucleotide
agaaucuucaguacaucag

SEQ ID NO: 2963580 - RNA, 19 nt, Artificial Sequence
  Description of Artificial Sequence: Synthetic oligonucleotide
uuaauuucuugcuucuguu

SEQ ID NO: 2963581 - RNA, 19 nt, Artificial Sequence
  Description of Artificial Sequence: Synthetic oligonucleotide
acccaaggcucucauugcc

SEQ ID NO: 2963582 - RNA, 19 nt, Artificial Sequence
  Description of Artificial Sequence: Synthetic oligonucleotide
acccgaaucaucaucauca

SEQ ID NO: 2963583 - RNA, 19 nt, Artificial Sequence
  Description of Artificial Sequence: Synthetic oligonucleotide
uuauaugucgccagucaua

SEQ ID NO: 2963584 - RNA, 19 nt, Artificial Sequence
  Description of Artificial Sequence: Synthetic oligonucleotide
uucaugugggucucuuucc

SEQ ID NO: 2963585 - RNA, 19 nt, Artificial Sequence
  Description of Artificial Sequence: Synthetic oligonucleotide
ucgaucauagcucgaaguu

SEQ ID NO: 2963586 - RNA, 19 nt, Artificial Sequence
  Description of Artificial Sequence: Synthetic oligonucleotide
aaaaucuucaaaggugauu

SEQ ID NO: 2963587 - RNA, 19 nt, Artificial Sequence
  Description of Artificial Sequence: Synthetic oligonucleotide
agucauaauagcaaugaau

SEQ ID NO: 2963588 - RNA, 19 nt, Artificial Sequence
  Description of Artificial Sequence: Synthetic oligonucleotide
ugauaaucuauugcguggu

SEQ ID NO: 2963589 - RNA, 19 nt, Artificial Sequence
  Description of Artificial Sequence: Synthetic oligonucleotide
aaucuucaguacaucagcu

SEQ ID NO: 2963590 - RNA, 19 nt, Artificial Sequence
  Description of Artificial Sequence: Synthetic oligonucleotide
uuccucaagcuuauuuuac

SEQ ID NO: 2963591 - RNA, 19 nt, Artificial Sequence
  Description of Artificial Sequence: Synthetic oligonucleotide
uguggcuucucugucauaa

SEQ ID NO: 2963592 - RNA, 19 nt, Artificial Sequence
  Description of Artificial Sequence: Synthetic oligonucleotide
augcuuucaguaucucuuc

SEQ ID NO: 2963593 - RNA, 19 nt, Artificial Sequence
  Description of Artificial Sequence: Synthetic oligonucleotide
ucuucaucacucauauuuu

SEQ ID NO: 2963594 - RNA, 19 nt, Artificial Sequence
  Description of Artificial Sequence: Synthetic oligonucleotide
cuucaugugggucucuuuc

SEQ ID NO: 2963595 - RNA, 19 nt, Artificial Sequence
  Description of Artificial Sequence: Synthetic oligonucleotide
gcuuauuuuacccgaauca

SEQ ID NO: 2963596 - RNA, 19 nt, Artificial Sequence
  Description of Artificial Sequence: Synthetic oligonucleotide
uuugccuguggcuucucug

SEQ ID NO: 2963597 - RNA, 19 nt, Artificial Sequence
  Description of Artificial Sequence: Synthetic oligonucleotide
ucauugccaccuuuaauuc

SEQ ID NO: 2963598 - RNA, 19 nt, Artificial Sequence
  Description of Artificial Sequence: Synthetic oligonucleotide
auaaucuauugcguggucu

SEQ ID NO: 2963599 - RNA, 19 nt, Artificial Sequence
  Description of Artificial Sequence: Synthetic oligonucleotide
ucgccagucauaauagcaa

SEQ ID NO: 2963600 - RNA, 19 nt, Artificial Sequence
  Description of Artificial Sequence: Synthetic oligonucleotide
cauagcucgaaguucuuca

SEQ ID NO: 2963601 - RNA, 19 nt, Artificial Sequence
  Description of Artificial Sequence: Synthetic oligonucleotide
ucacccaauucucuggcaa

SEQ ID NO: 2963602 - RNA, 19 nt, Artificial Sequence
  Description of Artificial Sequence: Synthetic oligonucleotide
uaaucuauugcguggucuu

SEQ ID NO: 2963603 - RNA, 19 nt, Artificial Sequence
  Description of Artificial Sequence: Synthetic oligonucleotide
aauauccagucugucacaa

SEQ ID NO: 2963604 - RNA, 19 nt, Artificial Sequence
  Description of Artificial Sequence: Synthetic oligonucleotide
ucacucauauuuucaccca

SEQ ID NO: 2963605 - RNA, 19 nt, Artificial Sequence
  Description of Artificial Sequence: Synthetic oligonucleotide
gaaucaucaucaucaaaua

SEQ ID NO: 2963606 - RNA, 19 nt, Artificial Sequence
  Description of Artificial Sequence: Synthetic oligonucleotide
cuucaucacucauauuuuc

SEQ ID NO: 2963607 - RNA, 19 nt, Artificial Sequence
  Description of Artificial Sequence: Synthetic oligonucleotide
cuuuauaugucgccaguca

SEQ ID NO: 2963608 - RNA, 19 nt, Artificial Sequence
  Description of Artificial Sequence: Synthetic oligonucleotide
uaaaaucuucaaaggugau

SEQ ID NO: 2963609 - RNA, 19 nt, Artificial Sequence
  Description of Artificial Sequence: Synthetic oligonucleotide
cugucauaaucuuuaagaa

SEQ ID NO: 2963610 - RNA, 19 nt, Artificial Sequence
  Description of Artificial Sequence: Synthetic oligonucleotide
caucuuuaucaaauucuuc

SEQ ID NO: 2963611 - RNA, 19 nt, Artificial Sequence
  Description of Artificial Sequence: Synthetic oligonucleotide
ccaauauccagucugucac

SEQ ID NO: 2963612 - RNA, 19 nt, Artificial Sequence
  Description of Artificial Sequence: Synthetic oligonucleotide
cucuuuccaauauccaguc

SEQ ID NO: 2963613 - RNA, 19 nt, Artificial Sequence
  Description of Artificial Sequence: Synthetic oligonucleotide
auuccucaagcuuauuuua

SEQ ID NO: 2963614 - RNA, 19 nt, Artificial Sequence
  Description of Artificial Sequence: Synthetic oligonucleotide
aagcuuauuuuacccgaau

SEQ ID NO: 2963615 - RNA, 19 nt, Artificial Sequence
  Description of Artificial Sequence: Synthetic oligonucleotide
uaucaaauucuucgaucau

SEQ ID NO: 2963616 - RNA, 19 nt, Artificial Sequence
  Description of Artificial Sequence: Synthetic oligonucleotide
ucuauugcguggucuuugu

SEQ ID NO: 2963617 - RNA, 19 nt, Artificial Sequence
  Description of Artificial Sequence: Synthetic oligonucleotide
aucaaagagcucaaaggca

SEQ ID NO: 2963618 - RNA, 19 nt, Artificial Sequence
  Description of Artificial Sequence: Synthetic oligonucleotide
uccagucugucacaacuuc

SEQ ID NO: 2963619 - RNA, 19 nt, Artificial Sequence
  Description of Artificial Sequence: Synthetic oligonucleotide
ucgcaaauuccucaagcuu

SEQ ID NO: 2963620 - RNA, 19 nt, Artificial Sequence
  Description of Artificial Sequence: Synthetic oligonucleotide
uggcuucucugucauaauc

SEQ ID NO: 2963621 - RNA, 19 nt, Artificial Sequence
  Description of Artificial Sequence: Synthetic oligonucleotide
ucuucgaucauagcucgaa

SEQ ID NO: 2963622 - RNA, 19 nt, Artificial Sequence
  Description of Artificial Sequence: Synthetic oligonucleotide
ucucauugccaccuuuaau

SEQ ID NO: 2963623 - RNA, 19 nt, Artificial Sequence
  Description of Artificial Sequence: Synthetic oligonucleotide
cacaucaaaacccaaggcu

SEQ ID NO: 2963624 - RNA, 19 nt, Artificial Sequence
  Description of Artificial Sequence: Synthetic oligonucleotide
aguaucucuucaugugggu

SEQ ID NO: 2963625 - RNA, 19 nt, Artificial Sequence
  Description of Artificial Sequence: Synthetic oligonucleotide
agcucaaaggcaucuuuaa

SEQ ID NO: 2963626 - RNA, 19 nt, Artificial Sequence
  Description of Artificial Sequence: Synthetic oligonucleotide
auucucuggcaacgcgucg

SEQ ID NO: 2963627 - RNA, 19 nt, Artificial Sequence
  Description of Artificial Sequence: Synthetic oligonucleotide
gucugucacaacuucauua

SEQ ID NO: 2963628 - RNA, 19 nt, Artificial Sequence
  Description of Artificial Sequence: Synthetic oligonucleotide
uugccuguggcuucucugu

SEQ ID NO: 2963629 - RNA, 19 nt, Artificial Sequence
  Description of Artificial Sequence: Synthetic oligonucleotide
aucgccaucuuuaucaaau

SEQ ID NO: 2963630 - RNA, 19 nt, Artificial Sequence
  Description of Artificial Sequence: Synthetic oligonucleotide
aacgcgucgcaaauuccuc

SEQ ID NO: 2963631 - RNA, 19 nt, Artificial Sequence
  Description of Artificial Sequence: Synthetic oligonucleotide
guuuaaaugcuuucaguau

SEQ ID NO: 2963632 - RNA, 19 nt, Artificial Sequence
  Description of Artificial Sequence: Synthetic oligonucleotide
ugccaccuuuaauucauga

SEQ ID NO: 2963633 - RNA, 19 nt, Artificial Sequence
  Description of Artificial Sequence: Synthetic oligonucleotide
cucuugauuuauuucucca

SEQ ID NO: 2963634 - RNA, 19 nt, Artificial Sequence
  Description of Artificial Sequence: Synthetic oligonucleotide
acccaauucucuggcaacg

SEQ ID NO: 2963635 - RNA, 19 nt, Artificial Sequence
  Description of Artificial Sequence: Synthetic oligonucleotide
gaucauagcucgaaguucu

SEQ ID NO: 2963636 - RNA, 19 nt, Artificial Sequence
  Description of Artificial Sequence: Synthetic oligonucleotide
uucucuggcaacgcgucgc

SEQ ID NO: 2963637 - RNA, 19 nt, Artificial Sequence
  Description of Artificial Sequence: Synthetic oligonucleotide
gauaaucuauugcgugguc

SEQ ID NO: 2963638 - RNA, 19 nt, Artificial Sequence
  Description of Artificial Sequence: Synthetic oligonucleotide
aaucuucaaaggugauuuu

SEQ ID NO: 2963639 - RNA, 19 nt, Artificial Sequence
  Description of Artificial Sequence: Synthetic oligonucleotide
ucuggcaacgcgucgcaaa

SEQ ID NO: 2963640 - RNA, 19 nt, Artificial Sequence
  Description of Artificial Sequence: Synthetic oligonucleotide
cuucgaucauagcucgaag

SEQ ID NO: 2963641 - RNA, 19 nt, Artificial Sequence
  Description of Artificial Sequence: Synthetic oligonucleotide
ucuuuccaauauccagucu

SEQ ID NO: 2963642 - RNA, 19 nt, Artificial Sequence
  Description of Artificial Sequence: Synthetic oligonucleotide
uaagaaucuucaguacauc

SEQ ID NO: 2963643 - RNA, 19 nt, Artificial Sequence
  Description of Artificial Sequence: Synthetic oligonucleotide
uaauagcaaugaauuccuc

SEQ ID NO: 2963644 - RNA, 19 nt, Artificial Sequence
  Description of Artificial Sequence: Synthetic oligonucleotide
aaaggugauuuugccugug

SEQ ID NO: 2963645 - RNA, 19 nt, Artificial Sequence
  Description of Artificial Sequence: Synthetic oligonucleotide
ccucaagcuuauuuuaccc

SEQ ID NO: 2963646 - RNA, 19 nt, Artificial Sequence
  Description of Artificial Sequence: Synthetic oligonucleotide
ugauuuugccuguggcuuc

SEQ ID NO: 2963647 - RNA, 19 nt, Artificial Sequence
  Description of Artificial Sequence: Synthetic oligonucleotide
caaaggcaucuuuaauuuc

SEQ ID NO: 2963648 - RNA, 19 nt, Artificial Sequence
  Description of Artificial Sequence: Synthetic oligonucleotide
gucacaacuucauuaaaau

SEQ ID NO: 2963649 - RNA, 19 nt, Artificial Sequence
  Description of Artificial Sequence: Synthetic oligonucleotide
auugccaccuuuaauucau

SEQ ID NO: 2963650 - RNA, 19 nt, Artificial Sequence
  Description of Artificial Sequence: Synthetic oligonucleotide
uuauuucuccaucgccauc

SEQ ID NO: 2963651 - RNA, 19 nt, Artificial Sequence
  Description of Artificial Sequence: Synthetic oligonucleotide
uacccgaaucaucaucauc

SEQ ID NO: 2963652 - RNA, 19 nt, Artificial Sequence
  Description of Artificial Sequence: Synthetic oligonucleotide
aaaacccaaggcucucauu

SEQ ID NO: 2963653 - RNA, 19 nt, Artificial Sequence
  Description of Artificial Sequence: Synthetic oligonucleotide
ugucgccagucauaauagc

SEQ ID NO: 2963654 - RNA, 19 nt, Artificial Sequence
  Description of Artificial Sequence: Synthetic oligonucleotide
agagcucaaaggcaucuuu

SEQ ID NO: 2963655 - RNA, 19 nt, Artificial Sequence
  Description of Artificial Sequence: Synthetic oligonucleotide
uuuugccuguggcuucucu

SEQ ID NO: 2963656 - RNA, 19 nt, Artificial Sequence
  Description of Artificial Sequence: Synthetic oligonucleotide
augucgccagucauaauag

SEQ ID NO: 2963657 - RNA, 19 nt, Artificial Sequence
  Description of Artificial Sequence: Synthetic oligonucleotide
ccuuuaauucaugauaauc

SEQ ID NO: 2963658 - RNA, 19 nt, Artificial Sequence
  Description of Artificial Sequence: Synthetic oligonucleotide
cucaaaggcaucuuuaauu

SEQ ID NO: 2963659 - RNA, 19 nt, Artificial Sequence
  Description of Artificial Sequence: Synthetic oligonucleotide
aucuauugcguggucuuug

SEQ ID NO: 2963660 - RNA, 19 nt, Artificial Sequence
  Description of Artificial Sequence: Synthetic oligonucleotide
acaacuucauuaaaaucuu

SEQ ID NO: 2963661 - RNA, 19 nt, Artificial Sequence
  Description of Artificial Sequence: Synthetic oligonucleotide
aucuucaguacaucagcuu

SEQ ID NO: 2963662 - RNA, 19 nt, Artificial Sequence
  Description of Artificial Sequence: Synthetic oligonucleotide
ugugggucucuuuccaaua

SEQ ID NO: 2963663 - RNA, 19 nt, Artificial Sequence
  Description of Artificial Sequence: Synthetic oligonucleotide
ugggucucuuuccaauauc

SEQ ID NO: 2963664 - RNA, 19 nt, Artificial Sequence
  Description of Artificial Sequence: Synthetic oligonucleotide
ugaauuccucuugauuuau

SEQ ID NO: 2963665 - RNA, 19 nt, Artificial Sequence
  Description of Artificial Sequence: Synthetic oligonucleotide
uagcucgaaguucuucauc

SEQ ID NO: 2963666 - RNA, 19 nt, Artificial Sequence
  Description of Artificial Sequence: Synthetic oligonucleotide
ucucugucauaaucuuuaa

SEQ ID NO: 2963667 - RNA, 19 nt, Artificial Sequence
  Description of Artificial Sequence: Synthetic oligonucleotide
ucgguaucaaagagcucaa

SEQ ID NO: 2963668 - RNA, 19 nt, Artificial Sequence
  Description of Artificial Sequence: Synthetic oligonucleotide
uucacccaauucucuggca

SEQ ID NO: 2963669 - RNA, 19 nt, Artificial Sequence
  Description of Artificial Sequence: Synthetic oligonucleotide
auuuuacccgaaucaucau

SEQ ID NO: 2963670 - RNA, 19 nt, Artificial Sequence
  Description of Artificial Sequence: Synthetic oligonucleotide
gggucucuuuccaauaucc

SEQ ID NO: 2963671 - RNA, 19 nt, Artificial Sequence
  Description of Artificial Sequence: Synthetic oligonucleotide
augugggucucuuuccaau

SEQ ID NO: 2963672 - RNA, 19 nt, Artificial Sequence
  Description of Artificial Sequence: Synthetic oligonucleotide
gucgccagucauaauagca

SEQ ID NO: 2963673 - RNA, 19 nt, Artificial Sequence
  Description of Artificial Sequence: Synthetic oligonucleotide
aucucuucaugugggucuc

SEQ ID NO: 2963674 - RNA, 19 nt, Artificial Sequence
  Description of Artificial Sequence: Synthetic oligonucleotide
ucauagcucgaaguucuuc

SEQ ID NO: 2963675 - RNA, 19 nt, Artificial Sequence
  Description of Artificial Sequence: Synthetic oligonucleotide
ucucuggcaacgcgucgca

SEQ ID NO: 2963676 - RNA, 19 nt, Artificial Sequence
  Description of Artificial Sequence: Synthetic oligonucleotide
accuuuaauucaugauaau

SEQ ID NO: 2963677 - RNA, 19 nt, Artificial Sequence
  Description of Artificial Sequence: Synthetic oligonucleotide
caaagagcucaaaggcauc

SEQ ID NO: 2963678 - RNA, 19 nt, Artificial Sequence
  Description of Artificial Sequence: Synthetic oligonucleotide
ucuccaucgccaucuuuau

SEQ ID NO: 2963679 - RNA, 19 nt, Artificial Sequence
  Description of Artificial Sequence: Synthetic oligonucleotide
cauugccaccuuuaauuca

SEQ ID NO: 2963680 - RNA, 19 nt, Artificial Sequence
  Description of Artificial Sequence: Synthetic oligonucleotide
caaggcucucauugccacc

SEQ ID NO: 2963681 - RNA, 19 nt, Artificial Sequence
  Description of Artificial Sequence: Synthetic oligonucleotide
uucuucgaucauagcucga

SEQ ID NO: 2963682 - RNA, 19 nt, Artificial Sequence
  Description of Artificial Sequence: Synthetic oligonucleotide
gucgcaaauuccucaagcu

SEQ ID NO: 2963683 - RNA, 19 nt, Artificial Sequence
  Description of Artificial Sequence: Synthetic oligonucleotide
guaucucuucauguggguc

SEQ ID NO: 2963684 - RNA, 19 nt, Artificial Sequence
  Description of Artificial Sequence: Synthetic oligonucleotide
aaucuauugcguggucuuu

SEQ ID NO: 2963685 - RNA, 19 nt, Artificial Sequence
  Description of Artificial Sequence: Synthetic oligonucleotide
cuuauuuuacccgaaucau

SEQ ID NO: 2963686 - RNA, 19 nt, Artificial Sequence
  Description of Artificial Sequence: Synthetic oligonucleotide
uugccaccuuuaauucaug

SEQ ID NO: 2963687 - RNA, 19 nt, Artificial Sequence
  Description of Artificial Sequence: Synthetic oligonucleotide
ccaauucucuggcaacgcg

SEQ ID NO: 2963688 - RNA, 19 nt, Artificial Sequence
  Description of Artificial Sequence: Synthetic oligonucleotide
ggcaacgcgucgcaaauuc

SEQ ID NO: 2963689 - RNA, 19 nt, Artificial Sequence
  Description of Artificial Sequence: Synthetic oligonucleotide
acgcgucgcaaauuccuca

SEQ ID NO: 2963690 - RNA, 19 nt, Artificial Sequence
  Description of Artificial Sequence: Synthetic oligonucleotide
uuacccgaaucaucaucau

SEQ ID NO: 2963691 - RNA, 19 nt, Artificial Sequence
  Description of Artificial Sequence: Synthetic oligonucleotide
caauauccagucugucaca

SEQ ID NO: 2963692 - RNA, 19 nt, Artificial Sequence
  Description of Artificial Sequence: Synthetic oligonucleotide
gaaguucuucaucacucau

SEQ ID NO: 2963693 - RNA, 19 nt, Artificial Sequence
  Description of Artificial Sequence: Synthetic oligonucleotide
agucugucacaacuucauu

SEQ ID NO: 2963694 - RNA, 19 nt, Artificial Sequence
  Description of Artificial Sequence: Synthetic oligonucleotide
caauucucuggcaacgcgu

SEQ ID NO: 2963695 - RNA, 19 nt, Artificial Sequence
  Description of Artificial Sequence: Synthetic oligonucleotide
uuccaauauccagucuguc

SEQ ID NO: 2963696 - RNA, 19 nt, Artificial Sequence
  Description of Artificial Sequence: Synthetic oligonucleotide
cgaaucaucaucaucaaau

SEQ ID NO: 2963697 - RNA, 19 nt, Artificial Sequence
  Description of Artificial Sequence: Synthetic oligonucleotide
caagcuuauuuuacccgaa

SEQ ID NO: 2963698 - RNA, 19 nt, Artificial Sequence
  Description of Artificial Sequence: Synthetic oligonucleotide
uuucuccaucgccaucuuu

SEQ ID NO: 2963699 - RNA, 19 nt, Artificial Sequence
  Description of Artificial Sequence: Synthetic oligonucleotide
ggugauuuugccuguggcu

SEQ ID NO: 2963700 - RNA, 19 nt, Artificial Sequence
  Description of Artificial Sequence: Synthetic oligonucleotide
ccagucauaauagcaauga

SEQ ID NO: 2963701 - RNA, 19 nt, Artificial Sequence
  Description of Artificial Sequence: Synthetic oligonucleotide
ucgccaucuuuaucaaauu

SEQ ID NO: 2963702 - RNA, 19 nt, Artificial Sequence
  Description of Artificial Sequence: Synthetic oligonucleotide
ugucgguaucaaagagcuc

SEQ ID NO: 2963703 - RNA, 19 nt, Artificial Sequence
  Description of Artificial Sequence: Synthetic oligonucleotide
guggucuuugucgguauca

SEQ ID NO: 2963704 - RNA, 19 nt, Artificial Sequence
  Description of Artificial Sequence: Synthetic oligonucleotide
cacucauauuuucacccaa

SEQ ID NO: 2963705 - RNA, 19 nt, Artificial Sequence
  Description of Artificial Sequence: Synthetic oligonucleotide
cuauugcguggucuuuguc

SEQ ID NO: 2963706 - RNA, 19 nt, Artificial Sequence
  Description of Artificial Sequence: Synthetic oligonucleotide
cgucgcaaauuccucaagc

SEQ ID NO: 2963707 - RNA, 19 nt, Artificial Sequence
  Description of Artificial Sequence: Synthetic oligonucleotide
caaugaauuccucuugauu

SEQ ID NO: 2963708 - RNA, 19 nt, Artificial Sequence
  Description of Artificial Sequence: Synthetic oligonucleotide
cagucauaauagcaaugaa

SEQ ID NO: 2963709 - RNA, 19 nt, Artificial Sequence
  Description of Artificial Sequence: Synthetic oligonucleotide
ugcguggucuuugucggua

SEQ ID NO: 2963710 - RNA, 19 nt, Artificial Sequence
  Description of Artificial Sequence: Synthetic oligonucleotide
cucgaaguucuucaucacu

SEQ ID NO: 2963711 - RNA, 19 nt, Artificial Sequence
  Description of Artificial Sequence: Synthetic oligonucleotide
caucaucaaauaguuuaaa

SEQ ID NO: 2963712 - RNA, 19 nt, Artificial Sequence
  Description of Artificial Sequence: Synthetic oligonucleotide
ccaaggcucucauugccac

SEQ ID NO: 2963713 - RNA, 19 nt, Artificial Sequence
  Description of Artificial Sequence: Synthetic oligonucleotide
caacgcgucgcaaauuccu

SEQ ID NO: 2963714 - RNA, 19 nt, Artificial Sequence
  Description of Artificial Sequence: Synthetic oligonucleotide
cucucauugccaccuuuaa

SEQ ID NO: 2963715 - RNA, 19 nt, Artificial Sequence
  Description of Artificial Sequence: Synthetic oligonucleotide
gugauuuugccuguggcuu

SEQ ID NO: 2963716 - RNA, 19 nt, Artificial Sequence
  Description of Artificial Sequence: Synthetic oligonucleotide
gccagucauaauagcaaug

SEQ ID NO: 2963717 - RNA, 19 nt, Artificial Sequence
  Description of Artificial Sequence: Synthetic oligonucleotide
gauuuugccuguggcuucu

SEQ ID NO: 2963718 - RNA, 19 nt, Artificial Sequence
  Description of Artificial Sequence: Synthetic oligonucleotide
cagucugucacaacuucau

SEQ ID NO: 2963719 - RNA, 19 nt, Artificial Sequence
  Description of Artificial Sequence: Synthetic oligonucleotide
cuccaucgccaucuuuauc

SEQ ID NO: 2963720 - RNA, 19 nt, Artificial Sequence
  Description of Artificial Sequence: Synthetic oligonucleotide
auaugucgccagucauaau

SEQ ID NO: 2963721 - RNA, 19 nt, Artificial Sequence
  Description of Artificial Sequence: Synthetic oligonucleotide
auuucuccaucgccaucuu

SEQ ID NO: 2963722 - RNA, 19 nt, Artificial Sequence
  Description of Artificial Sequence: Synthetic oligonucleotide
cugucacaacuucauuaaa

SEQ ID NO: 2963723 - RNA, 19 nt, Artificial Sequence
  Description of Artificial Sequence: Synthetic oligonucleotide
uugcguggucuuugucggu

SEQ ID NO: 2963724 - RNA, 19 nt, Artificial Sequence
  Description of Artificial Sequence: Synthetic oligonucleotide
cgcaaauuccucaagcuua

SEQ ID NO: 2963725 - RNA, 19 nt, Artificial Sequence
  Description of Artificial Sequence: Synthetic oligonucleotide
cuucaguacaucagcuuuu

SEQ ID NO: 2963726 - RNA, 19 nt, Artificial Sequence
  Description of Artificial Sequence: Synthetic oligonucleotide
ggcuucucugucauaaucu

SEQ ID NO: 2963727 - RNA, 19 nt, Artificial Sequence
  Description of Artificial Sequence: Synthetic oligonucleotide
caaaggugauuuugccugu

SEQ ID NO: 2963728 - RNA, 19 nt, Artificial Sequence
  Description of Artificial Sequence: Synthetic oligonucleotide
gcucgaaguucuucaucac

SEQ ID NO: 2963729 - RNA, 19 nt, Artificial Sequence
  Description of Artificial Sequence: Synthetic oligonucleotide
ggucuuugucgguaucaaa

SEQ ID NO: 2963730 - RNA, 19 nt, Artificial Sequence
  Description of Artificial Sequence: Synthetic oligonucleotide
ccagucugucacaacuuca

SEQ ID NO: 2963731 - RNA, 19 nt, Artificial Sequence
  Description of Artificial Sequence: Synthetic oligonucleotide
cuucucugucauaaucuuu

SEQ ID NO: 2963732 - RNA, 19 nt, Artificial Sequence
  Description of Artificial Sequence: Synthetic oligonucleotide
gugggucucuuuccaauau

SEQ ID NO: 2963733 - RNA, 19 nt, Artificial Sequence
  Description of Artificial Sequence: Synthetic oligonucleotide
cgccaucuuuaucaaauuc

SEQ ID NO: 2963734 - RNA, 19 nt, Artificial Sequence
  Description of Artificial Sequence: Synthetic oligonucleotide
caucgccaucuuuaucaaa

SEQ ID NO: 2963735 - RNA, 19 nt, Artificial Sequence
  Description of Artificial Sequence: Synthetic oligonucleotide
gcgucgcaaauuccucaag

SEQ ID NO: 2963736 - RNA, 19 nt, Artificial Sequence
  Description of Artificial Sequence: Synthetic oligonucleotide
cgaucauagcucgaaguuc

SEQ ID NO: 2963737 - RNA, 19 nt, Artificial Sequence
  Description of Artificial Sequence: Synthetic oligonucleotide
cccaauucucuggcaacgc

SEQ ID NO: 2963738 - RNA, 19 nt, Artificial Sequence
  Description of Artificial Sequence: Synthetic oligonucleotide
cauaaucuuuaagaaucuu

SEQ ID NO: 2963739 - RNA, 19 nt, Artificial Sequence
  Description of Artificial Sequence: Synthetic oligonucleotide
gcaacgcgucgcaaauucc

SEQ ID NO: 2963740 - RNA, 19 nt, Artificial Sequence
  Description of Artificial Sequence: Synthetic oligonucleotide
caaaacccaaggcucucau

SEQ ID NO: 2963741 - RNA, 19 nt, Artificial Sequence
  Description of Artificial Sequence: Synthetic oligonucleotide
gccaccuuuaauucaugau

SEQ ID NO: 2963742 - RNA, 19 nt, Artificial Sequence
  Description of Artificial Sequence: Synthetic oligonucleotide
gcaaugaauuccucuugau

SEQ ID NO: 2963743 - RNA, 19 nt, Artificial Sequence
  Description of Artificial Sequence: Synthetic oligonucleotide
gcucaaaggcaucuuuaau

SEQ ID NO: 2963744 - RNA, 19 nt, Artificial Sequence
  Description of Artificial Sequence: Synthetic oligonucleotide
cuggcaacgcgucgcaaau

SEQ ID NO: 2963745 - RNA, 19 nt, Artificial Sequence
  Description of Artificial Sequence: Synthetic oligonucleotide
gaauuccucuugauuuauu

SEQ ID NO: 2963746 - RNA, 19 nt, Artificial Sequence
  Description of Artificial Sequence: Synthetic oligonucleotide
uggcaacgcgucgcaaauu

SEQ ID NO: 2963747 - RNA, 19 nt, Artificial Sequence
  Description of Artificial Sequence: Synthetic oligonucleotide
aucauagcucgaaguucuu

SEQ ID NO: 2963748 - RNA, 19 nt, Artificial Sequence
  Description of Artificial Sequence: Synthetic oligonucleotide
cccaaggcucucauugcca

SEQ ID NO: 2963749 - RNA, 19 nt, Artificial Sequence
  Description of Artificial Sequence: Synthetic oligonucleotide
gcaaauuccucaagcuuau

SEQ ID NO: 2963750 - RNA, 19 nt, Artificial Sequence
  Description of Artificial Sequence: Synthetic oligonucleotide
gcucucauugccaccuuua

SEQ ID NO: 2963751 - RNA, 19 nt, Artificial Sequence
  Description of Artificial Sequence: Synthetic oligonucleotide
aggcucucauugccaccuu

SEQ ID NO: 2963752 - RNA, 19 nt, Artificial Sequence
  Description of Artificial Sequence: Synthetic oligonucleotide
ccgaaucaucaucaucaaa

SEQ ID NO: 2963753 - RNA, 19 nt, Artificial Sequence
  Description of Artificial Sequence: Synthetic oligonucleotide
guggcuucucugucauaau

SEQ ID NO: 2963754 - RNA, 19 nt, Artificial Sequence
  Description of Artificial Sequence: Synthetic oligonucleotide
cccgaaucaucaucaucaa

SEQ ID NO: 2963755 - RNA, 19 nt, Artificial Sequence
  Description of Artificial Sequence: Synthetic oligonucleotide
ccaucgccaucuuuaucaa

SEQ ID NO: 2963756 - RNA, 19 nt, Artificial Sequence
  Description of Artificial Sequence: Synthetic oligonucleotide
cguggucuuugucgguauc

SEQ ID NO: 2963757 - RNA, 19 nt, Artificial Sequence
  Description of Artificial Sequence: Synthetic oligonucleotide
cuguggcuucucugucaua

SEQ ID NO: 2963758 - RNA, 19 nt, Artificial Sequence
  Description of Artificial Sequence: Synthetic oligonucleotide
cucuggcaacgcgucgcaa

SEQ ID NO: 2963759 - RNA, 19 nt, Artificial Sequence
  Description of Artificial Sequence: Synthetic oligonucleotide
cgcgucgcaaauuccucaa

SEQ ID NO: 2963760 - RNA, 19 nt, Artificial Sequence
  Description of Artificial Sequence: Synthetic oligonucleotide
ccuguggcuucucugucau

SEQ ID NO: 2963761 - RNA, 19 nt, Artificial Sequence
  Description of Artificial Sequence: Synthetic oligonucleotide
ggcucucauugccaccuuu

SEQ ID NO: 2963762 - RNA, 19 nt, Artificial Sequence
  Description of Artificial Sequence: Synthetic oligonucleotide
cgccagucauaauagcaau

SEQ ID NO: 2963763 - RNA, 19 nt, Artificial Sequence
  Description of Artificial Sequence: Synthetic oligonucleotide
gcguggucuuugucgguau

SEQ ID NO: 2963764 - RNA, 19 nt, Artificial Sequence
  Description of Artificial Sequence: Synthetic oligonucleotide
cgguaucaaagagcucaaa

SEQ ID NO: 2963765 - RNA, 19 nt, Artificial Sequence
  Description of Artificial Sequence: Synthetic oligonucleotide
aaaguuuuacagcacauuc

SEQ ID NO: 2963766 - RNA, 19 nt, Artificial Sequence
  Description of Artificial Sequence: Synthetic oligonucleotide
aguugaaggauaaagaagc

SEQ ID NO: 2963767 - RNA, 19 nt, Artificial Sequence
  Description of Artificial Sequence: Synthetic oligonucleotide
cucaucaugaaguugaagg

SEQ ID NO: 2963768 - RNA, 19 nt, Artificial Sequence
  Description of Artificial Sequence: Synthetic oligonucleotide
uucacuuuuagcuucacag

SEQ ID NO: 2963769 - RNA, 19 nt, Artificial Sequence
  Description of Artificial Sequence: Synthetic oligonucleotide
  modified_base (5)..(5): a, c, u, g, unknown or other
uuuangauaggauuguugu

SEQ ID NO: 2963770 - RNA, 19 nt, Artificial Sequence
  Description of Artificial Sequence: Synthetic oligonucleotide
uucacagaaaguuuuacag

SEQ ID NO: 2963771 - RNA, 19 nt, Artificial Sequence
  Description of Artificial Sequence: Synthetic oligonucleotide
aauggaaggucucuaauug

SEQ ID NO: 2963772 - RNA, 19 nt, Artificial Sequence
  Description of Artificial Sequence: Synthetic oligonucleotide
uucauauaaaagcucauca

SEQ ID NO: 2963773 - RNA, 19 nt, Artificial Sequence
  Description of Artificial Sequence: Synthetic oligonucleotide
uaaaagcucaucaugaagu

SEQ ID NO: 2963774 - RNA, 19 nt, Artificial Sequence
  Description of Artificial Sequence: Synthetic oligonucleotide
  modified_base (17)..(17): a, c, u, g, unknown or other
uucagcaugagcuuuanga

SEQ ID NO: 2963775 - RNA, 19 nt, Artificial Sequence
  Description of Artificial Sequence: Synthetic oligonucleotide
ugaccaugggauuugaagg

SEQ ID NO: 2963776 - RNA, 19 nt, Artificial Sequence
  Description of Artificial Sequence: Synthetic oligonucleotide
ugaaguugaaggauaaaga

SEQ ID NO: 2963777 - RNA, 19 nt, Artificial Sequence
  Description of Artificial Sequence: Synthetic oligonucleotide
ugccacuucauauaaaagc

SEQ ID NO: 2963778 - RNA, 19 nt, Artificial Sequence
  Description of Artificial Sequence: Synthetic oligonucleotide
  modified_base (10)..(10): a, c, u, g, unknown or other
ugagcuuuangauaggauu

SEQ ID NO: 2963779 - RNA, 19 nt, Artificial Sequence
  Description of Artificial Sequence: Synthetic oligonucleotide
ugaaggauaaagaagccuc

SEQ ID NO: 2963780 - RNA, 19 nt, Artificial Sequence
  Description of Artificial Sequence: Synthetic oligonucleotide
ugaauguuaacuguggcug

SEQ ID NO: 2963781 - RNA, 19 nt, Artificial Sequence
  Description of Artificial Sequence: Synthetic oligonucleotide
aaucugagcuaccugaaca

SEQ ID NO: 2963782 - RNA, 19 nt, Artificial Sequence
  Description of Artificial Sequence: Synthetic oligonucleotide
cauauaaaagcucaucaug

SEQ ID NO: 2963783 - RNA, 19 nt, Artificial Sequence
  Description of Artificial Sequence: Synthetic oligonucleotide
  modified_base (3)..(3): a, c, u, g, unknown or other
uangauaggauuguugucu

SEQ ID NO: 2963784 - RNA, 19 nt, Artificial Sequence
  Description of Artificial Sequence: Synthetic oligonucleotide
uuugaaggcugaauggaag

SEQ ID NO: 2963785 - RNA, 19 nt, Artificial Sequence
  Description of Artificial Sequence: Synthetic oligonucleotide
uuuuacuauaucagcagcu

SEQ ID NO: 2963786 - RNA, 19 nt, Artificial Sequence
  Description of Artificial Sequence: Synthetic oligonucleotide
auaaaagcucaucaugaag

SEQ ID NO: 2963787 - RNA, 19 nt, Artificial Sequence
  Description of Artificial Sequence: Synthetic oligonucleotide
cuuuuagcuucacagaaag

SEQ ID NO: 2963788 - RNA, 19 nt, Artificial Sequence
  Description of Artificial Sequence: Synthetic oligonucleotide
aguuuuacagcacauucca

SEQ ID NO: 2963789 - RNA, 19 nt, Artificial Sequence
  Description of Artificial Sequence: Synthetic oligonucleotide
uccuucuugacaaucugag

SEQ ID NO: 2963790 - RNA, 19 nt, Artificial Sequence
  Description of Artificial Sequence: Synthetic oligonucleotide
uguguugauggccugacgu

SEQ ID NO: 2963791 - RNA, 19 nt, Artificial Sequence
  Description of Artificial Sequence: Synthetic oligonucleotide
agcuaccugaacaacaucc

SEQ ID NO: 2963792 - RNA, 19 nt, Artificial Sequence
  Description of Artificial Sequence: Synthetic oligonucleotide
aaaguccuccagcuguccc

SEQ ID NO: 2963793 - RNA, 19 nt, Artificial Sequence
  Description of Artificial Sequence: Synthetic oligonucleotide
gacaaaacaucccuuucag

SEQ ID NO: 2963794 - RNA, 19 nt, Artificial Sequence
  Description of Artificial Sequence: Synthetic oligonucleotide
uucuuuggcaacaauccug

SEQ ID NO: 2963795 - RNA, 19 nt, Artificial Sequence
  Description of Artificial Sequence: Synthetic oligonucleotide
gaaguugaaggauaaagaa

SEQ ID NO: 2963796 - RNA, 19 nt, Artificial Sequence
  Description of Artificial Sequence: Synthetic oligonucleotide
augaaguugaaggauaaag

SEQ ID NO: 2963797 - RNA, 19 nt, Artificial Sequence
  Description of Artificial Sequence: Synthetic oligonucleotide
augaccaugggauuugaag

SEQ ID NO: 2963798 - RNA, 19 nt, Artificial Sequence
  Description of Artificial Sequence: Synthetic oligonucleotide
aaguugaaggauaaagaag

SEQ ID NO: 2963799 - RNA, 19 nt, Artificial Sequence
  Description of Artificial Sequence: Synthetic oligonucleotide
ugcaccaucacacaucaaa

SEQ ID NO: 2963800 - RNA, 19 nt, Artificial Sequence
  Description of Artificial Sequence: Synthetic oligonucleotide
uugaaggcugaauggaagg

SEQ ID NO: 2963801 - RNA, 19 nt, Artificial Sequence
  Description of Artificial Sequence: Synthetic oligonucleotide
aaguccuccagcugucccc

SEQ ID NO: 2963802 - RNA, 19 nt, Artificial Sequence
  Description of Artificial Sequence: Synthetic oligonucleotide
ucuaauugcuucugaaugu

SEQ ID NO: 2963803 - RNA, 19 nt, Artificial Sequence
  Description of Artificial Sequence: Synthetic oligonucleotide
cucuaauugcuucugaaug

SEQ ID NO: 2963804 - RNA, 19 nt, Artificial Sequence
  Description of Artificial Sequence: Synthetic oligonucleotide
  modified_base (14)..(14): a, c, u, g, unknown or other
agcaugagcuuuangauag

SEQ ID NO: 2963805 - RNA, 19 nt, Artificial Sequence
  Description of Artificial Sequence: Synthetic oligonucleotide
uacagcacauuccauuucc

SEQ ID NO: 2963806 - RNA, 19 nt, Artificial Sequence
  Description of Artificial Sequence: Synthetic oligonucleotide
  modified_base (6)..(6): a, c, u, g, unknown or other
cuuuangauaggauuguug

SEQ ID NO: 2963807 - RNA, 19 nt, Artificial Sequence
  Description of Artificial Sequence: Synthetic oligonucleotide
uguuuggccaugcuggagc

SEQ ID NO: 2963808 - RNA, 19 nt, Artificial Sequence
  Description of Artificial Sequence: Synthetic oligonucleotide
  modified_base (16)..(16): a, c, u, g, unknown or other
ucagcaugagcuuuangau

SEQ ID NO: 2963809 - RNA, 19 nt, Artificial Sequence
  Description of Artificial Sequence: Synthetic oligonucleotide
ucacagaaaguuuuacagc

SEQ ID NO: 2963810 - RNA, 19 nt, Artificial Sequence
  Description of Artificial Sequence: Synthetic oligonucleotide
auggaaggucucuaauugc

SEQ ID NO: 2963811 - RNA, 19 nt, Artificial Sequence
  Description of Artificial Sequence: Synthetic oligonucleotide
ucugaauguuaacuguggc

SEQ ID NO: 2963812 - RNA, 19 nt, Artificial Sequence
  Description of Artificial Sequence: Synthetic oligonucleotide
auauaaaagcucaucauga

SEQ ID NO: 2963813 - RNA, 19 nt, Artificial Sequence
  Description of Artificial Sequence: Synthetic oligonucleotide
cucacuuucacuuuuagcu

SEQ ID NO: 2963814 - RNA, 19 nt, Artificial Sequence
  Description of Artificial Sequence: Synthetic oligonucleotide
uuuacuauaucagcagcug

SEQ ID NO: 2963815 - RNA, 19 nt, Artificial Sequence
  Description of Artificial Sequence: Synthetic oligonucleotide
ucugccacuucauauaaaa

SEQ ID NO: 2963816 - RNA, 19 nt, Artificial Sequence
  Description of Artificial Sequence: Synthetic oligonucleotide
ucauauaaaagcucaucau

SEQ ID NO: 2963817 - RNA, 19 nt, Artificial Sequence
  Description of Artificial Sequence: Synthetic oligonucleotide
gacaaucugagcuaccuga

SEQ ID NO: 2963818 - RNA, 19 nt, Artificial Sequence
  Description of Artificial Sequence: Synthetic oligonucleotide
auugcuucugaauguuaac

SEQ ID NO: 2963819 - RNA, 19 nt, Artificial Sequence
  Description of Artificial Sequence: Synthetic oligonucleotide
ucacacaucaaaguccucc

SEQ ID NO: 2963820 - RNA, 19 nt, Artificial Sequence
  Description of Artificial Sequence: Synthetic oligonucleotide
cuauaucagcagcugaucc

SEQ ID NO: 2963821 - RNA, 19 nt, Artificial Sequence
  Description of Artificial Sequence: Synthetic oligonucleotide
aaaacaucccuuucaguuu

SEQ ID NO: 2963822 - RNA, 19 nt, Artificial Sequence
  Description of Artificial Sequence: Synthetic oligonucleotide
uucccgaugaccaugggau

SEQ ID NO: 2963823 - RNA, 19 nt, Artificial Sequence
  Description of Artificial Sequence: Synthetic oligonucleotide
gauaggauuguugucuuug

SEQ ID NO: 2963824 - RNA, 19 nt, Artificial Sequence
  Description of Artificial Sequence: Synthetic oligonucleotide
uuccauuuccuucuugaca

SEQ ID NO: 2963825 - RNA, 19 nt, Artificial Sequence
  Description of Artificial Sequence: Synthetic oligonucleotide
ugcuucugaauguuaacug

SEQ ID NO: 2963826 - RNA, 19 nt, Artificial Sequence
  Description of Artificial Sequence: Synthetic oligonucleotide
cacagaaaguuuuacagca

SEQ ID NO: 2963827 - RNA, 19 nt, Artificial Sequence
  Description of Artificial Sequence: Synthetic oligonucleotide
ugaacaacauccucuucug

SEQ ID NO: 2963828 - RNA, 19 nt, Artificial Sequence
  Description of Artificial Sequence: Synthetic oligonucleotide
aagcucaucaugaaguuga

SEQ ID NO: 2963829 - RNA, 19 nt, Artificial Sequence
  Description of Artificial Sequence: Synthetic oligonucleotide
uauaucagcagcugauccu

SEQ ID NO: 2963830 - RNA, 19 nt, Artificial Sequence
  Description of Artificial Sequence: Synthetic oligonucleotide
auuccauuuccuucuugac

SEQ ID NO: 2963831 - RNA, 19 nt, Artificial Sequence
  Description of Artificial Sequence: Synthetic oligonucleotide
uauaaaagcucaucaugaa

SEQ ID NO: 2963832 - RNA, 19 nt, Artificial Sequence
  Description of Artificial Sequence: Synthetic oligonucleotide
uggaaggucucuaauugcu

SEQ ID NO: 2963833 - RNA, 19 nt, Artificial Sequence
  Description of Artificial Sequence: Synthetic oligonucleotide
aagaagccuccucucauug

SEQ ID NO: 2963834 - RNA, 19 nt, Artificial Sequence
  Description of Artificial Sequence: Synthetic oligonucleotide
uuacuauaucagcagcuga

SEQ ID NO: 2963835 - RNA, 19 nt, Artificial Sequence
  Description of Artificial Sequence: Synthetic oligonucleotide
uacuauaucagcagcugau

SEQ ID NO: 2963836 - RNA, 19 nt, Artificial Sequence
  Description of Artificial Sequence: Synthetic oligonucleotide
guuaccugcaccaucacac

SEQ ID NO: 2963837 - RNA, 19 nt, Artificial Sequence
  Description of Artificial Sequence: Synthetic oligonucleotide
caugcuuucccgaugacca

SEQ ID NO: 2963838 - RNA, 19 nt, Artificial Sequence
  Description of Artificial Sequence: Synthetic oligonucleotide
ggauuugaaggcugaaugg

SEQ ID NO: 2963839 - RNA, 19 nt, Artificial Sequence
  Description of Artificial Sequence: Synthetic oligonucleotide
uuuacagcacauuccauuu

SEQ ID NO: 2963840 - RNA, 19 nt, Artificial Sequence
  Description of Artificial Sequence: Synthetic oligonucleotide
gauaaagaagccuccucuc

SEQ ID NO: 2963841 - RNA, 19 nt, Artificial Sequence
  Description of Artificial Sequence: Synthetic oligonucleotide
gaccaugggauuugaaggc

SEQ ID NO: 2963842 - RNA, 19 nt, Artificial Sequence
  Description of Artificial Sequence: Synthetic oligonucleotide
aaaagcucaucaugaaguu

SEQ ID NO: 2963843 - RNA, 19 nt, Artificial Sequence
  Description of Artificial Sequence: Synthetic oligonucleotide
aggauaaagaagccuccuc

SEQ ID NO: 2963844 - RNA, 19 nt, Artificial Sequence
  Description of Artificial Sequence: Synthetic oligonucleotide
uccagcuguccccagcugg

SEQ ID NO: 2963845 - RNA, 19 nt, Artificial Sequence
  Description of Artificial Sequence: Synthetic oligonucleotide
  modified_base (4)..(4): a, c, u, g, unknown or other
uuangauaggauuguuguc

SEQ ID NO: 2963846 - RNA, 19 nt, Artificial Sequence
  Description of Artificial Sequence: Synthetic oligonucleotide
ucacuuuuagcuucacaga

SEQ ID NO: 2963847 - RNA, 19 nt, Artificial Sequence
  Description of Artificial Sequence: Synthetic oligonucleotide
auaaagaagccuccucuca

SEQ ID NO: 2963848 - RNA, 19 nt, Artificial Sequence
  Description of Artificial Sequence: Synthetic oligonucleotide
  modified_base (9)..(9): a, c, u, g, unknown or other
gagcuuuangauaggauug

SEQ ID NO: 2963849 - RNA, 19 nt, Artificial Sequence
  Description of Artificial Sequence: Synthetic oligonucleotide
uuucuuuggcaacaauccu

SEQ ID NO: 2963850 - RNA, 19 nt, Artificial Sequence
  Description of Artificial Sequence: Synthetic oligonucleotide
aaggucucuaauugcuucu

SEQ ID NO: 2963851 - RNA, 19 nt, Artificial Sequence
  Description of Artificial Sequence: Synthetic oligonucleotide
ucucacuuucacuuuuagc

SEQ ID NO: 2963852 - RNA, 19 nt, Artificial Sequence
  Description of Artificial Sequence: Synthetic oligonucleotide
aaacaucccuuucaguuuu

SEQ ID NO: 2963853 - RNA, 19 nt, Artificial Sequence
  Description of Artificial Sequence: Synthetic oligonucleotide
ucaugaaguugaaggauaa

SEQ ID NO: 2963854 - RNA, 19 nt, Artificial Sequence
  Description of Artificial Sequence: Synthetic oligonucleotide
aauugcuucugaauguuaa

SEQ ID NO: 2963855 - RNA, 19 nt, Artificial Sequence
  Description of Artificial Sequence: Synthetic oligonucleotide
gauggccugacguucagca

SEQ ID NO: 2963856 - RNA, 19 nt, Artificial Sequence
  Description of Artificial Sequence: Synthetic oligonucleotide
gaaggucucuaauugcuuc

SEQ ID NO: 2963857 - RNA, 19 nt, Artificial Sequence
  Description of Artificial Sequence: Synthetic oligonucleotide
gggauuugaaggcugaaug

SEQ ID NO: 2963858 - RNA, 19 nt, Artificial Sequence
  Description of Artificial Sequence: Synthetic oligonucleotide
uaaagaagccuccucucau

SEQ ID NO: 2963859 - RNA, 19 nt, Artificial Sequence
  Description of Artificial Sequence: Synthetic oligonucleotide
uggccugacguucagcaug

SEQ ID NO: 2963860 - RNA, 19 nt, Artificial Sequence
  Description of Artificial Sequence: Synthetic oligonucleotide
gaaggauaaagaagccucc

SEQ ID NO: 2963861 - RNA, 19 nt, Artificial Sequence
  Description of Artificial Sequence: Synthetic oligonucleotide
uucucacuuucacuuuuag

SEQ ID NO: 2963862 - RNA, 19 nt, Artificial Sequence
  Description of Artificial Sequence: Synthetic oligonucleotide
cuucuugacaaucugagcu

SEQ ID NO: 2963863 - RNA, 19 nt, Artificial Sequence
  Description of Artificial Sequence: Synthetic oligonucleotide
ucucuaauugcuucugaau

SEQ ID NO: 2963864 - RNA, 19 nt, Artificial Sequence
  Description of Artificial Sequence: Synthetic oligonucleotide
uugaaggauaaagaagccu

SEQ ID NO: 2963865 - RNA, 19 nt, Artificial Sequence
  Description of Artificial Sequence: Synthetic oligonucleotide
aaagcucaucaugaaguug

SEQ ID NO: 2963866 - RNA, 19 nt, Artificial Sequence
  Description of Artificial Sequence: Synthetic oligonucleotide
acaacauccucuucugcca

SEQ ID NO: 2963867 - RNA, 19 nt, Artificial Sequence
  Description of Artificial Sequence: Synthetic oligonucleotide
ugaauggaaggucucuaau

SEQ ID NO: 2963868 - RNA, 19 nt, Artificial Sequence
  Description of Artificial Sequence: Synthetic oligonucleotide
cugacguucagcaugagcu

SEQ ID NO: 2963869 - RNA, 19 nt, Artificial Sequence
  Description of Artificial Sequence: Synthetic oligonucleotide
acuauaucagcagcugauc

SEQ ID NO: 2963870 - RNA, 19 nt, Artificial Sequence
  Description of Artificial Sequence: Synthetic oligonucleotide
ucuucugccacuucauaua

SEQ ID NO: 2963871 - RNA, 19 nt, Artificial Sequence
  Description of Artificial Sequence: Synthetic oligonucleotide
ugauccuuggacuguugug

SEQ ID NO: 2963872 - RNA, 19 nt, Artificial Sequence
  Description of Artificial Sequence: Synthetic oligonucleotide
uugacaaucugagcuaccu

SEQ ID NO: 2963873 - RNA, 19 nt, Artificial Sequence
  Description of Artificial Sequence: Synthetic oligonucleotide
uugcuucugaauguuaacu

SEQ ID NO: 2963874 - RNA, 19 nt, Artificial Sequence
  Description of Artificial Sequence: Synthetic oligonucleotide
gcaacaauccuguuuggcc

SEQ ID NO: 2963875 - RNA, 19 nt, Artificial Sequence
  Description of Artificial Sequence: Synthetic oligonucleotide
  modified_base (2)..(2): a, c, u, g, unknown or other
angauaggauuguugucuu

SEQ ID NO: 2963876 - RNA, 19 nt, Artificial Sequence
  Description of Artificial Sequence: Synthetic oligonucleotide
aaggcugaauggaaggucu

SEQ ID NO: 2963877 - RNA, 19 nt, Artificial Sequence
  Description of Artificial Sequence: Synthetic oligonucleotide
cuucauauaaaagcucauc

SEQ ID NO: 2963878 - RNA, 19 nt, Artificial Sequence
  Description of Artificial Sequence: Synthetic oligonucleotide
ugacaaucugagcuaccug

SEQ ID NO: 2963879 - RNA, 19 nt, Artificial Sequence
  Description of Artificial Sequence: Synthetic oligonucleotide
cauuccauuuccuucuuga

SEQ ID NO: 2963880 - RNA, 19 nt, Artificial Sequence
  Description of Artificial Sequence: Synthetic oligonucleotide
aaggauaaagaagccuccu

SEQ ID NO: 2963881 - RNA, 19 nt, Artificial Sequence
  Description of Artificial Sequence: Synthetic oligonucleotide
uuggacaaaacaucccuuu

SEQ ID NO: 2963882 - RNA, 19 nt, Artificial Sequence
  Description of Artificial Sequence: Synthetic oligonucleotide
uuuuagcuucacagaaagu

SEQ ID NO: 2963883 - RNA, 19 nt, Artificial Sequence
  Description of Artificial Sequence: Synthetic oligonucleotide
aaagaagccuccucucauu

SEQ ID NO: 2963884 - RNA, 19 nt, Artificial Sequence
  Description of Artificial Sequence: Synthetic oligonucleotide
gacuguuguguugauggcc

SEQ ID NO: 2963885 - RNA, 19 nt, Artificial Sequence
  Description of Artificial Sequence: Synthetic oligonucleotide
uggacaaaacaucccuuuc

SEQ ID NO: 2963886 - RNA, 19 nt, Artificial Sequence
  Description of Artificial Sequence: Synthetic oligonucleotide
agcagcugauccuuggacu

SEQ ID NO: 2963887 - RNA, 19 nt, Artificial Sequence
  Description of Artificial Sequence: Synthetic oligonucleotide
cacuuucacuuuuagcuuc

SEQ ID NO: 2963888 - RNA, 19 nt, Artificial Sequence
  Description of Artificial Sequence: Synthetic oligonucleotide
agaagccuccucucauugg

SEQ ID NO: 2963889 - RNA, 19 nt, Artificial Sequence
  Description of Artificial Sequence: Synthetic oligonucleotide
uucuugacaaucugagcua

SEQ ID NO: 2963890 - RNA, 19 nt, Artificial Sequence
  Description of Artificial Sequence: Synthetic oligonucleotide
uuguguugauggccugacg

SEQ ID NO: 2963891 - RNA, 19 nt, Artificial Sequence
  Description of Artificial Sequence: Synthetic oligonucleotide
acagaaaguuuuacagcac

SEQ ID NO: 2963892 - RNA, 19 nt, Artificial Sequence
  Description of Artificial Sequence: Synthetic oligonucleotide
caacaauccuguuuggcca

SEQ ID NO: 2963893 - RNA, 19 nt, Artificial Sequence
  Description of Artificial Sequence: Synthetic oligonucleotide
caaaacaucccuuucaguu

SEQ ID NO: 2963894 - RNA, 19 nt, Artificial Sequence
  Description of Artificial Sequence: Synthetic oligonucleotide
auccuguuuggccaugcug

SEQ ID NO: 2963895 - RNA, 19 nt, Artificial Sequence
  Description of Artificial Sequence: Synthetic oligonucleotide
acaaaacaucccuuucagu

SEQ ID NO: 2963896 - RNA, 19 nt, Artificial Sequence
  Description of Artificial Sequence: Synthetic oligonucleotide
ucuugacaaucugagcuac

SEQ ID NO: 2963897 - RNA, 19 nt, Artificial Sequence
  Description of Artificial Sequence: Synthetic oligonucleotide
guugaaggauaaagaagcc

SEQ ID NO: 2963898 - RNA, 19 nt, Artificial Sequence
  Description of Artificial Sequence: Synthetic oligonucleotide
ucacuuucacuuuuagcuu

SEQ ID NO: 2963899 - RNA, 19 nt, Artificial Sequence
  Description of Artificial Sequence: Synthetic oligonucleotide
cagaaaguuuuacagcaca

SEQ ID NO: 2963900 - RNA, 19 nt, Artificial Sequence
  Description of Artificial Sequence: Synthetic oligonucleotide
ucagcagcugauccuugga

SEQ ID NO: 2963901 - RNA, 19 nt, Artificial Sequence
  Description of Artificial Sequence: Synthetic oligonucleotide
auuuccuucuugacaaucu

SEQ ID NO: 2963902 - RNA, 19 nt, Artificial Sequence
  Description of Artificial Sequence: Synthetic oligonucleotide
aucugagcuaccugaacaa

SEQ ID NO: 2963903 - RNA, 19 nt, Artificial Sequence
  Description of Artificial Sequence: Synthetic oligonucleotide
cacuuuuagcuucacagaa

SEQ ID NO: 2963904 - RNA, 19 nt, Artificial Sequence
  Description of Artificial Sequence: Synthetic oligonucleotide
ucaaaguccuccagcuguc

SEQ ID NO: 2963905 - RNA, 19 nt, Artificial Sequence
  Description of Artificial Sequence: Synthetic oligonucleotide
cugccacuucauauaaaag

SEQ ID NO: 2963906 - RNA, 19 nt, Artificial Sequence
  Description of Artificial Sequence: Synthetic oligonucleotide
cugguuaccugcaccauca

SEQ ID NO: 2963907 - RNA, 19 nt, Artificial Sequence
  Description of Artificial Sequence: Synthetic oligonucleotide
aauccuguuuggccaugcu

SEQ ID NO: 2963908 - RNA, 19 nt, Artificial Sequence
  Description of Artificial Sequence: Synthetic oligonucleotide
uguuaacuguggcuguuuu

SEQ ID NO: 2963909 - RNA, 19 nt, Artificial Sequence
  Description of Artificial Sequence: Synthetic oligonucleotide
ugaaggcugaauggaaggu

SEQ ID NO: 2963910 - RNA, 19 nt, Artificial Sequence
  Description of Artificial Sequence: Synthetic oligonucleotide
uguugauggccugacguuc

SEQ ID NO: 2963911 - RNA, 19 nt, Artificial Sequence
  Description of Artificial Sequence: Synthetic oligonucleotide
uuacagcacauuccauuuc

SEQ ID NO: 2963912 - RNA, 19 nt, Artificial Sequence
  Description of Artificial Sequence: Synthetic oligonucleotide
  modified_base (8)..(8): a, c, u, g, unknown or other
agcuuuangauaggauugu

SEQ ID NO: 2963913 - RNA, 19 nt, Artificial Sequence
  Description of Artificial Sequence: Synthetic oligonucleotide
gaccugguuaccugcacca

SEQ ID NO: 2963914 - RNA, 19 nt, Artificial Sequence
  Description of Artificial Sequence: Synthetic oligonucleotide
uuggccaugcuggagcaug

SEQ ID NO: 2963915 - RNA, 19 nt, Artificial Sequence
  Description of Artificial Sequence: Synthetic oligonucleotide
aacauccucuucugccacu

SEQ ID NO: 2963916 - RNA, 19 nt, Artificial Sequence
  Description of Artificial Sequence: Synthetic oligonucleotide
uaauugcuucugaauguua

SEQ ID NO: 2963917 - RNA, 19 nt, Artificial Sequence
  Description of Artificial Sequence: Synthetic oligonucleotide
cugagcuaccugaacaaca

SEQ ID NO: 2963918 - RNA, 19 nt, Artificial Sequence
  Description of Artificial Sequence: Synthetic oligonucleotide
aauguuaacuguggcuguu

SEQ ID NO: 2963919 - RNA, 19 nt, Artificial Sequence
  Description of Artificial Sequence: Synthetic oligonucleotide
gagcaugcuuucccgauga

SEQ ID NO: 2963920 - RNA, 19 nt, Artificial Sequence
  Description of Artificial Sequence: Synthetic oligonucleotide
ggacaaaacaucccuuuca

SEQ ID NO: 2963921 - RNA, 19 nt, Artificial Sequence
  Description of Artificial Sequence: Synthetic oligonucleotide
gaaggcugaauggaagguc

SEQ ID NO: 2963922 - RNA, 19 nt, Artificial Sequence
  Description of Artificial Sequence: Synthetic oligonucleotide
cuaccugaacaacauccuc

SEQ ID NO: 2963923 - RNA, 19 nt, Artificial Sequence
  Description of Artificial Sequence: Synthetic oligonucleotide
uguuguguugauggccuga

SEQ ID NO: 2963924 - RNA, 19 nt, Artificial Sequence
  Description of Artificial Sequence: Synthetic oligonucleotide
gauccuuggacuguugugu

SEQ ID NO: 2963925 - RNA, 19 nt, Artificial Sequence
  Description of Artificial Sequence: Synthetic oligonucleotide
cauuggacaaaacaucccu

SEQ ID NO: 2963926 - RNA, 19 nt, Artificial Sequence
  Description of Artificial Sequence: Synthetic oligonucleotide
uugauggccugacguucag

SEQ ID NO: 2963927 - RNA, 19 nt, Artificial Sequence
  Description of Artificial Sequence: Synthetic oligonucleotide
uggggaccugguuaccugc

SEQ ID NO: 2963928 - RNA, 19 nt, Artificial Sequence
  Description of Artificial Sequence: Synthetic oligonucleotide
caugcuggagcaugcuuuc

SEQ ID NO: 2963929 - RNA, 19 nt, Artificial Sequence
  Description of Artificial Sequence: Synthetic oligonucleotide
agcuguccccagcuggcac

SEQ ID NO: 2963930 - RNA, 19 nt, Artificial Sequence
  Description of Artificial Sequence: Synthetic oligonucleotide
caaucugagcuaccugaac

SEQ ID NO: 2963931 - RNA, 19 nt, Artificial Sequence
  Description of Artificial Sequence: Synthetic oligonucleotide
uaucagcagcugauccuug

SEQ ID NO: 2963932 - RNA, 19 nt, Artificial Sequence
  Description of Artificial Sequence: Synthetic oligonucleotide
acccauucucacuuucacu

SEQ ID NO: 2963933 - RNA, 19 nt, Artificial Sequence
  Description of Artificial Sequence: Synthetic oligonucleotide
uccuuggacuguuguguug

SEQ ID NO: 2963934 - RNA, 19 nt, Artificial Sequence
  Description of Artificial Sequence: Synthetic oligonucleotide
gaauggaaggucucuaauu

SEQ ID NO: 2963935 - RNA, 19 nt, Artificial Sequence
  Description of Artificial Sequence: Synthetic oligonucleotide
accugaacaacauccucuu

SEQ ID NO: 2963936 - RNA, 19 nt, Artificial Sequence
  Description of Artificial Sequence: Synthetic oligonucleotide
ucugagcuaccugaacaac

SEQ ID NO: 2963937 - RNA, 19 nt, Artificial Sequence
  Description of Artificial Sequence: Synthetic oligonucleotide
agaaaguuuuacagcacau

SEQ ID NO: 2963938 - RNA, 19 nt, Artificial Sequence
  Description of Artificial Sequence: Synthetic oligonucleotide
  modified_base (11)..(11): a, c, u, g, unknown or other
augagcuuuangauaggau

SEQ ID NO: 2963939 - RNA, 19 nt, Artificial Sequence
  Description of Artificial Sequence: Synthetic oligonucleotide
ggauaaagaagccuccucu

SEQ ID NO: 2963940 - RNA, 19 nt, Artificial Sequence
  Description of Artificial Sequence: Synthetic oligonucleotide
aagccuccucucauuggac

SEQ ID NO: 2963941 - RNA, 19 nt, Artificial Sequence
  Description of Artificial Sequence: Synthetic oligonucleotide
acauuccauuuccuucuug

SEQ ID NO: 2963942 - RNA, 19 nt, Artificial Sequence
  Description of Artificial Sequence: Synthetic oligonucleotide
aucaugaaguugaaggaua

SEQ ID NO: 2963943 - RNA, 19 nt, Artificial Sequence
  Description of Artificial Sequence: Synthetic oligonucleotide
cacccauucucacuuucac

SEQ ID NO: 2963944 - RNA, 19 nt, Artificial Sequence
  Description of Artificial Sequence: Synthetic oligonucleotide
cugaauguuaacuguggcu

SEQ ID NO: 2963945 - RNA, 19 nt, Artificial Sequence
  Description of Artificial Sequence: Synthetic oligonucleotide
gucucuaauugcuucugaa

SEQ ID NO: 2963946 - RNA, 19 nt, Artificial Sequence
  Description of Artificial Sequence: Synthetic oligonucleotide
ugcuuucccgaugaccaug

SEQ ID NO: 2963947 - RNA, 19 nt, Artificial Sequence
  Description of Artificial Sequence: Synthetic oligonucleotide
cauuuccuucuugacaauc

SEQ ID NO: 2963948 - RNA, 19 nt, Artificial Sequence
  Description of Artificial Sequence: Synthetic oligonucleotide
gcuggagcaugcuuucccg

SEQ ID NO: 2963949 - RNA, 19 nt, Artificial Sequence
  Description of Artificial Sequence: Synthetic oligonucleotide
auaucagcagcugauccuu

SEQ ID NO: 2963950 - RNA, 19 nt, Artificial Sequence
  Description of Artificial Sequence: Synthetic oligonucleotide
uggagcaugcuuucccgau

SEQ ID NO: 2963951 - RNA, 19 nt, Artificial Sequence
  Description of Artificial Sequence: Synthetic oligonucleotide
agcuggcacccauucucac

SEQ ID NO: 2963952 - RNA, 19 nt, Artificial Sequence
  Description of Artificial Sequence: Synthetic oligonucleotide
ugggauuugaaggcugaau

SEQ ID NO: 2963953 - RNA, 19 nt, Artificial Sequence
  Description of Artificial Sequence: Synthetic oligonucleotide
accugcaccaucacacauc

SEQ ID NO: 2963954 - RNA, 19 nt, Artificial Sequence
  Description of Artificial Sequence: Synthetic oligonucleotide
uaccugcaccaucacacau

SEQ ID NO: 2963955 - RNA, 19 nt, Artificial Sequence
  Description of Artificial Sequence: Synthetic oligonucleotide
gcagcugauccuuggacug

SEQ ID NO: 2963956 - RNA, 19 nt, Artificial Sequence
  Description of Artificial Sequence: Synthetic oligonucleotide
gaauguuaacuguggcugu

SEQ ID NO: 2963957 - RNA, 19 nt, Artificial Sequence
  Description of Artificial Sequence: Synthetic oligonucleotide
agccuccucucauuggaca

SEQ ID NO: 2963958 - RNA, 19 nt, Artificial Sequence
  Description of Artificial Sequence: Synthetic oligonucleotide
agcaugcuuucccgaugac

SEQ ID NO: 2963959 - RNA, 19 nt, Artificial Sequence
  Description of Artificial Sequence: Synthetic oligonucleotide
uuggacuguuguguugaug

SEQ ID NO: 2963960 - RNA, 19 nt, Artificial Sequence
  Description of Artificial Sequence: Synthetic oligonucleotide
caugggauuugaaggcuga

SEQ ID NO: 2963961 - RNA, 19 nt, Artificial Sequence
  Description of Artificial Sequence: Synthetic oligonucleotide
uggccaugcuggagcaugc

SEQ ID NO: 2963962 - RNA, 19 nt, Artificial Sequence
  Description of Artificial Sequence: Synthetic oligonucleotide
ucuggggaccugguuaccu

SEQ ID NO: 2963963 - RNA, 19 nt, Artificial Sequence
  Description of Artificial Sequence: Synthetic oligonucleotide
gcaccaucacacaucaaag

SEQ ID NO: 2963964 - RNA, 19 nt, Artificial Sequence
  Description of Artificial Sequence: Synthetic oligonucleotide
caacauccucuucugccac

SEQ ID NO: 2963965 - RNA, 19 nt, Artificial Sequence
  Description of Artificial Sequence: Synthetic oligonucleotide
  modified_base (18)..(18): a, c, u, g, unknown or other
guucagcaugagcuuuang

SEQ ID NO: 2963966 - RNA, 19 nt, Artificial Sequence
  Description of Artificial Sequence: Synthetic oligonucleotide
cagcagcugauccuuggac

SEQ ID NO: 2963967 - RNA, 19 nt, Artificial Sequence
  Description of Artificial Sequence: Synthetic oligonucleotide
ugacguucagcaugagcuu

SEQ ID NO: 2963968 - RNA, 19 nt, Artificial Sequence
  Description of Artificial Sequence: Synthetic oligonucleotide
acuuuuagcuucacagaaa

SEQ ID NO: 2963969 - RNA, 19 nt, Artificial Sequence
  Description of Artificial Sequence: Synthetic oligonucleotide
  modified_base (12)..(12): a, c, u, g, unknown or other
caugagcuuuangauagga

SEQ ID NO: 2963970 - RNA, 19 nt, Artificial Sequence
  Description of Artificial Sequence: Synthetic oligonucleotide
guuguguugauggccugac

SEQ ID NO: 2963971 - RNA, 19 nt, Artificial Sequence
  Description of Artificial Sequence: Synthetic oligonucleotide
uucugccacuucauauaaa

SEQ ID NO: 2963972 - RNA, 19 nt, Artificial Sequence
  Description of Artificial Sequence: Synthetic oligonucleotide
cugaauggaaggucucuaa

SEQ ID NO: 2963973 - RNA, 19 nt, Artificial Sequence
  Description of Artificial Sequence: Synthetic oligonucleotide
accaugggauuugaaggcu

SEQ ID NO: 2963974 - RNA, 19 nt, Artificial Sequence
  Description of Artificial Sequence: Synthetic oligonucleotide
ccucucauuggacaaaaca

SEQ ID NO: 2963975 - RNA, 19 nt, Artificial Sequence
  Description of Artificial Sequence: Synthetic oligonucleotide
acuuucacuuuuagcuuca

SEQ ID NO: 2963976 - RNA, 19 nt, Artificial Sequence
  Description of Artificial Sequence: Synthetic oligonucleotide
ccuucuugacaaucugagc

SEQ ID NO: 2963977 - RNA, 19 nt, Artificial Sequence
  Description of Artificial Sequence: Synthetic oligonucleotide
auuggacaaaacaucccuu

SEQ ID NO: 2963978 - RNA, 19 nt, Artificial Sequence
  Description of Artificial Sequence: Synthetic oligonucleotide
guuuggccaugcuggagca

SEQ ID NO: 2963979 - RNA, 19 nt, Artificial Sequence
  Description of Artificial Sequence: Synthetic oligonucleotide
aggucucuaauugcuucug

SEQ ID NO: 2963980 - RNA, 19 nt, Artificial Sequence
  Description of Artificial Sequence: Synthetic oligonucleotide
gaaaguuuuacagcacauu

SEQ ID NO: 2963981 - RNA, 19 nt, Artificial Sequence
  Description of Artificial Sequence: Synthetic oligonucleotide
caauccuguuuggccaugc

SEQ ID NO: 2963982 - RNA, 19 nt, Artificial Sequence
  Description of Artificial Sequence: Synthetic oligonucleotide
ggcaacaauccuguuuggc

SEQ ID NO: 2963983 - RNA, 19 nt, Artificial Sequence
  Description of Artificial Sequence: Synthetic oligonucleotide
ggaccugguuaccugcacc

SEQ ID NO: 2963984 - RNA, 19 nt, Artificial Sequence
  Description of Artificial Sequence: Synthetic oligonucleotide
  modified_base (15)..(15): a, c, u, g, unknown or other
cagcaugagcuuuangaua

SEQ ID NO: 2963985 - RNA, 19 nt, Artificial Sequence
  Description of Artificial Sequence: Synthetic oligonucleotide
gcuuucccgaugaccaugg

SEQ ID NO: 2963986 - RNA, 19 nt, Artificial Sequence
  Description of Artificial Sequence: Synthetic oligonucleotide
caaaguccuccagcugucc

SEQ ID NO: 2963987 - RNA, 19 nt, Artificial Sequence
  Description of Artificial Sequence: Synthetic oligonucleotide
ccagcuggcacccauucuc

SEQ ID NO: 2963988 - RNA, 19 nt, Artificial Sequence
  Description of Artificial Sequence: Synthetic oligonucleotide
gagcuaccugaacaacauc

SEQ ID NO: 2963989 - RNA, 19 nt, Artificial Sequence
  Description of Artificial Sequence: Synthetic oligonucleotide
guugauggccugacguuca

SEQ ID NO: 2963990 - RNA, 19 nt, Artificial Sequence
  Description of Artificial Sequence: Synthetic oligonucleotide
acaaucugagcuaccugaa

SEQ ID NO: 2963991 - RNA, 19 nt, Artificial Sequence
  Description of Artificial Sequence: Synthetic oligonucleotide
ccacuucauauaaaagcuc

SEQ ID NO: 2963992 - RNA, 19 nt, Artificial Sequence
  Description of Artificial Sequence: Synthetic oligonucleotide
gcuucugaauguuaacugu

SEQ ID NO: 2963993 - RNA, 19 nt, Artificial Sequence
  Description of Artificial Sequence: Synthetic oligonucleotide
auccuuggacuguuguguu

SEQ ID NO: 2963994 - RNA, 19 nt, Artificial Sequence
  Description of Artificial Sequence: Synthetic oligonucleotide
cuuucccgaugaccauggg

SEQ ID NO: 2963995 - RNA, 19 nt, Artificial Sequence
  Description of Artificial Sequence: Synthetic oligonucleotide
ugauggccugacguucagc

SEQ ID NO: 2963996 - RNA, 19 nt, Artificial Sequence
  Description of Artificial Sequence: Synthetic oligonucleotide
gccacuucauauaaaagcu

SEQ ID NO: 2963997 - RNA, 19 nt, Artificial Sequence
  Description of Artificial Sequence: Synthetic oligonucleotide
ugguuaccugcaccaucac

SEQ ID NO: 2963998 - RNA, 19 nt, Artificial Sequence
  Description of Artificial Sequence: Synthetic oligonucleotide
ggacuguuguguugauggc

SEQ ID NO: 2963999 - RNA, 19 nt, Artificial Sequence
  Description of Artificial Sequence: Synthetic oligonucleotide
ccugacguucagcaugagc

SEQ ID NO: 2964000 - RNA, 19 nt, Artificial Sequence
  Description of Artificial Sequence: Synthetic oligonucleotide
gcaugcuuucccgaugacc

SEQ ID NO: 2964001 - RNA, 19 nt, Artificial Sequence
  Description of Artificial Sequence: Synthetic oligonucleotide
gguuaccugcaccaucaca

SEQ ID NO: 2964002 - RNA, 19 nt, Artificial Sequence
  Description of Artificial Sequence: Synthetic oligonucleotide
gcuucacagaaaguuuuac

SEQ ID NO: 2964003 - RNA, 19 nt, Artificial Sequence
  Description of Artificial Sequence: Synthetic oligonucleotide
cuguuuggccaugcuggag

SEQ ID NO: 2964004 - RNA, 19 nt, Artificial Sequence
  Description of Artificial Sequence: Synthetic oligonucleotide
gcacauuccauuuccuucu

SEQ ID NO: 2964005 - RNA, 19 nt, Artificial Sequence
  Description of Artificial Sequence: Synthetic oligonucleotide
aggcugaauggaaggucuc

SEQ ID NO: 2964006 - RNA, 19 nt, Artificial Sequence
  Description of Artificial Sequence: Synthetic oligonucleotide
caccaucacacaucaaagu

SEQ ID NO: 2964007 - RNA, 19 nt, Artificial Sequence
  Description of Artificial Sequence: Synthetic oligonucleotide
aguccuccagcugucccca

SEQ ID NO: 2964008 - RNA, 19 nt, Artificial Sequence
  Description of Artificial Sequence: Synthetic oligonucleotide
acagcacauuccauuuccu

SEQ ID NO: 2964009 - RNA, 19 nt, Artificial Sequence
  Description of Artificial Sequence: Synthetic oligonucleotide
cuuucacuuuuagcuucac

SEQ ID NO: 2964010 - RNA, 19 nt, Artificial Sequence
  Description of Artificial Sequence: Synthetic oligonucleotide
caucaugaaguugaaggau

SEQ ID NO: 2964011 - RNA, 19 nt, Artificial Sequence
  Description of Artificial Sequence: Synthetic oligonucleotide
auggccugacguucagcau

SEQ ID NO: 2964012 - RNA, 19 nt, Artificial Sequence
  Description of Artificial Sequence: Synthetic oligonucleotide
ccaugggauuugaaggcug

SEQ ID NO: 2964013 - RNA, 19 nt, Artificial Sequence
  Description of Artificial Sequence: Synthetic oligonucleotide
gcuguccccagcuggcacc

SEQ ID NO: 2964014 - RNA, 19 nt, Artificial Sequence
  Description of Artificial Sequence: Synthetic oligonucleotide
cuggagcaugcuuucccga

SEQ ID NO: 2964015 - RNA, 19 nt, Artificial Sequence
  Description of Artificial Sequence: Synthetic oligonucleotide
ccugcaccaucacacauca

SEQ ID NO: 2964016 - RNA, 19 nt, Artificial Sequence
  Description of Artificial Sequence: Synthetic oligonucleotide
augcuuucccgaugaccau

SEQ ID NO: 2964017 - RNA, 19 nt, Artificial Sequence
  Description of Artificial Sequence: Synthetic oligonucleotide
ccagcuguccccagcuggc

SEQ ID NO: 2964018 - RNA, 19 nt, Artificial Sequence
  Description of Artificial Sequence: Synthetic oligonucleotide
aucacacaucaaaguccuc

SEQ ID NO: 2964019 - RNA, 19 nt, Artificial Sequence
  Description of Artificial Sequence: Synthetic oligonucleotide
auguuaacuguggcuguuu

SEQ ID NO: 2964020 - RNA, 19 nt, Artificial Sequence
  Description of Artificial Sequence: Synthetic oligonucleotide
gcucaucaugaaguugaag

SEQ ID NO: 2964021 - RNA, 19 nt, Artificial Sequence
  Description of Artificial Sequence: Synthetic oligonucleotide
ucccgaugaccaugggauu

SEQ ID NO: 2964022 - RNA, 19 nt, Artificial Sequence
  Description of Artificial Sequence: Synthetic oligonucleotide
auucucacuuucacuuuua

SEQ ID NO: 2964023 - RNA, 19 nt, Artificial Sequence
  Description of Artificial Sequence: Synthetic oligonucleotide
cagcuggcacccauucuca

SEQ ID NO: 2964024 - RNA, 19 nt, Artificial Sequence
  Description of Artificial Sequence: Synthetic oligonucleotide
cuguccccagcuggcaccc

SEQ ID NO: 2964025 - RNA, 19 nt, Artificial Sequence
  Description of Artificial Sequence: Synthetic oligonucleotide
caugaaguugaaggauaaa

SEQ ID NO: 2964026 - RNA, 19 nt, Artificial Sequence
  Description of Artificial Sequence: Synthetic oligonucleotide
agcuucacagaaaguuuua

SEQ ID NO: 2964027 - RNA, 19 nt, Artificial Sequence
  Description of Artificial Sequence: Synthetic oligonucleotide
cuaauugcuucugaauguu

SEQ ID NO: 2964028 - RNA, 19 nt, Artificial Sequence
  Description of Artificial Sequence: Synthetic oligonucleotide
cugauccuuggacuguugu

SEQ ID NO: 2964029 - RNA, 19 nt, Artificial Sequence
  Description of Artificial Sequence: Synthetic oligonucleotide
  modified_base (13)..(13): a, c, u, g, unknown or other
gcaugagcuuuangauagg

SEQ ID NO: 2964030 - RNA, 19 nt, Artificial Sequence
  Description of Artificial Sequence: Synthetic oligonucleotide
ccugguuaccugcaccauc

SEQ ID NO: 2964031 - RNA, 19 nt, Artificial Sequence
  Description of Artificial Sequence: Synthetic oligonucleotide
cauucucacuuucacuuuu

SEQ ID NO: 2964032 - RNA, 19 nt, Artificial Sequence
  Description of Artificial Sequence: Synthetic oligonucleotide
augggauuugaaggcugaa

SEQ ID NO: 2964033 - RNA, 19 nt, Artificial Sequence
  Description of Artificial Sequence: Synthetic oligonucleotide
ggcacccauucucacuuuc

SEQ ID NO: 2964034 - RNA, 19 nt, Artificial Sequence
  Description of Artificial Sequence: Synthetic oligonucleotide
cccauucucacuuucacuu

SEQ ID NO: 2964035 - RNA, 19 nt, Artificial Sequence
  Description of Artificial Sequence: Synthetic oligonucleotide
cuggcacccauucucacuu

SEQ ID NO: 2964036 - RNA, 19 nt, Artificial Sequence
  Description of Artificial Sequence: Synthetic oligonucleotide
cauccucuucugccacuuc

SEQ ID NO: 2964037 - RNA, 19 nt, Artificial Sequence
  Description of Artificial Sequence: Synthetic oligonucleotide
agcugauccuuggacuguu

SEQ ID NO: 2964038 - RNA, 19 nt, Artificial Sequence
  Description of Artificial Sequence: Synthetic oligonucleotide
guguugauggccugacguu

SEQ ID NO: 2964039 - RNA, 19 nt, Artificial Sequence
  Description of Artificial Sequence: Synthetic oligonucleotide
cuccucucauuggacaaaa

SEQ ID NO: 2964040 - RNA, 19 nt, Artificial Sequence
  Description of Artificial Sequence: Synthetic oligonucleotide
gacguucagcaugagcuuu

SEQ ID NO: 2964041 - RNA, 19 nt, Artificial Sequence
  Description of Artificial Sequence: Synthetic oligonucleotide
agcucaucaugaaguugaa

SEQ ID NO: 2964042 - RNA, 19 nt, Artificial Sequence
  Description of Artificial Sequence: Synthetic oligonucleotide
uccccagcuggcacccauu

SEQ ID NO: 2964043 - RNA, 19 nt, Artificial Sequence
  Description of Artificial Sequence: Synthetic oligonucleotide
acguucagcaugagcuuua

SEQ ID NO: 2964044 - RNA, 19 nt, Artificial Sequence
  Description of Artificial Sequence: Synthetic oligonucleotide
gggaccugguuaccugcac

SEQ ID NO: 2964045 - RNA, 19 nt, Artificial Sequence
  Description of Artificial Sequence: Synthetic oligonucleotide
gccuccucucauuggacaa

SEQ ID NO: 2964046 - RNA, 19 nt, Artificial Sequence
  Description of Artificial Sequence: Synthetic oligonucleotide
gcugaauggaaggucucua

SEQ ID NO: 2964047 - RNA, 19 nt, Artificial Sequence
  Description of Artificial Sequence: Synthetic oligonucleotide
ccugaacaacauccucuuc

SEQ ID NO: 2964048 - RNA, 19 nt, Artificial Sequence
  Description of Artificial Sequence: Synthetic oligonucleotide
accugguuaccugcaccau

SEQ ID NO: 2964049 - RNA, 19 nt, Artificial Sequence
  Description of Artificial Sequence: Synthetic oligonucleotide
gcuaccugaacaacauccu

SEQ ID NO: 2964050 - RNA, 19 nt, Artificial Sequence
  Description of Artificial Sequence: Synthetic oligonucleotide
ggccugacguucagcauga

SEQ ID NO: 2964051 - RNA, 19 nt, Artificial Sequence
  Description of Artificial Sequence: Synthetic oligonucleotide
uggcacccauucucacuuu

SEQ ID NO: 2964052 - RNA, 19 nt, Artificial Sequence
  Description of Artificial Sequence: Synthetic oligonucleotide
cagcacauuccauuuccuu

SEQ ID NO: 2964053 - RNA, 19 nt, Artificial Sequence
  Description of Artificial Sequence: Synthetic oligonucleotide
gcacccauucucacuuuca

SEQ ID NO: 2964054 - RNA, 19 nt, Artificial Sequence
  Description of Artificial Sequence: Synthetic oligonucleotide
ccuguuuggccaugcugga

SEQ ID NO: 2964055 - RNA, 19 nt, Artificial Sequence
  Description of Artificial Sequence: Synthetic oligonucleotide
gcuggcacccauucucacu

SEQ ID NO: 2964056 - RNA, 19 nt, Artificial Sequence
  Description of Artificial Sequence: Synthetic oligonucleotide
ggcugaauggaaggucucu

SEQ ID NO: 2964057 - RNA, 19 nt, Artificial Sequence
  Description of Artificial Sequence: Synthetic oligonucleotide
ccaugcuggagcaugcuuu

SEQ ID NO: 2964058 - RNA, 19 nt, Artificial Sequence
  Description of Artificial Sequence: Synthetic oligonucleotide
  modified_base (7)..(7): a, c, u, g, unknown or other
gcuuuangauaggauuguu

SEQ ID NO: 2964059 - RNA, 19 nt, Artificial Sequence
  Description of Artificial Sequence: Synthetic oligonucleotide
cuuggacuguuguguugau

SEQ ID NO: 2964060 - RNA, 19 nt, Artificial Sequence
  Description of Artificial Sequence: Synthetic oligonucleotide
ccccagcuggcacccauuc

SEQ ID NO: 2964061 - RNA, 19 nt, Artificial Sequence
  Description of Artificial Sequence: Synthetic oligonucleotide
uguccccagcuggcaccca

SEQ ID NO: 2964062 - RNA, 19 nt, Artificial Sequence
  Description of Artificial Sequence: Synthetic oligonucleotide
ggggaccugguuaccugca

SEQ ID NO: 2964063 - RNA, 19 nt, Artificial Sequence
  Description of Artificial Sequence: Synthetic oligonucleotide
ggaaggucucuaauugcuu

SEQ ID NO: 2964064 - RNA, 19 nt, Artificial Sequence
  Description of Artificial Sequence: Synthetic oligonucleotide
cagcuguccccagcuggca

SEQ ID NO: 2964065 - RNA, 19 nt, Artificial Sequence
  Description of Artificial Sequence: Synthetic oligonucleotide
cacauuccauuuccuucuu

SEQ ID NO: 2964066 - RNA, 19 nt, Artificial Sequence
  Description of Artificial Sequence: Synthetic oligonucleotide
cuuuggcaacaauccuguu

SEQ ID NO: 2964067 - RNA, 19 nt, Artificial Sequence
  Description of Artificial Sequence: Synthetic oligonucleotide
guccccagcuggcacccau

SEQ ID NO: 2964068 - RNA, 19 nt, Artificial Sequence
  Description of Artificial Sequence: Synthetic oligonucleotide
cugcaccaucacacaucaa

SEQ ID NO: 2964069 - RNA, 19 nt, Artificial Sequence
  Description of Artificial Sequence: Synthetic oligonucleotide
ccauucucacuuucacuuu

SEQ ID NO: 2964070 - RNA, 19 nt, Artificial Sequence
  Description of Artificial Sequence: Synthetic oligonucleotide
ccuccucucauuggacaaa

SEQ ID NO: 2964071 - RNA, 19 nt, Artificial Sequence
  Description of Artificial Sequence: Synthetic oligonucleotide
gccugacguucagcaugag

SEQ ID NO: 2964072 - RNA, 19 nt, Artificial Sequence
  Description of Artificial Sequence: Synthetic oligonucleotide
cccgaugaccaugggauuu

SEQ ID NO: 2964073 - RNA, 19 nt, Artificial Sequence
  Description of Artificial Sequence: Synthetic oligonucleotide
cgaugaccaugggauuuga

SEQ ID NO: 2964074 - RNA, 19 nt, Artificial Sequence
  Description of Artificial Sequence: Synthetic oligonucleotide
ggccaugcuggagcaugcu

SEQ ID NO: 2964075 - RNA, 19 nt, Artificial Sequence
  Description of Artificial Sequence: Synthetic oligonucleotide
cccagcuggcacccauucu

SEQ ID NO: 2964076 - RNA, 19 nt, Artificial Sequence
  Description of Artificial Sequence: Synthetic oligonucleotide
  modified_base (1)..(1): a, c, u, g, unknown or other
ngauaggauuguugucuuu

SEQ ID NO: 2964077 - RNA, 19 nt, Artificial Sequence
  Description of Artificial Sequence: Synthetic oligonucleotide
aacaggaggagugacaugg

SEQ ID NO: 2964078 - RNA, 19 nt, Artificial Sequence
  Description of Artificial Sequence: Synthetic oligonucleotide
gauggcauagaucagugcc

SEQ ID NO: 2964079 - RNA, 19 nt, Artificial Sequence
  Description of Artificial Sequence: Synthetic oligonucleotide
gagcaggagagacagaccg

SEQ ID NO: 2964080 - RNA, 19 nt, Artificial Sequence
  Description of Artificial Sequence: Synthetic oligonucleotide
uccaugugcagucauacca

SEQ ID NO: 2964081 - RNA, 19 nt, Artificial Sequence
  Description of Artificial Sequence: Synthetic oligonucleotide
ugacauggcugccagaugc

SEQ ID NO: 2964082 - RNA, 19 nt, Artificial Sequence
  Description of Artificial Sequence: Synthetic oligonucleotide
ugugcagucauaccacagg

SEQ ID NO: 2964083 - RNA, 19 nt, Artificial Sequence
  Description of Artificial Sequence: Synthetic oligonucleotide
ucauaccacagguuuaggg

SEQ ID NO: 2964084 - RNA, 19 nt, Artificial Sequence
  Description of Artificial Sequence: Synthetic oligonucleotide
aaaagcaagaugaggauga

SEQ ID NO: 2964085 - RNA, 19 nt, Artificial Sequence
  Description of Artificial Sequence: Synthetic oligonucleotide
aagggcagagaccacuaac

SEQ ID NO: 2964086 - RNA, 19 nt, Artificial Sequence
  Description of Artificial Sequence: Synthetic oligonucleotide
auaccacagguuuagggac

SEQ ID NO: 2964087 - RNA, 19 nt, Artificial Sequence
  Description of Artificial Sequence: Synthetic oligonucleotide
uuuagggacuccuucucgg

SEQ ID NO: 2964088 - RNA, 19 nt, Artificial Sequence
  Description of Artificial Sequence: Synthetic oligonucleotide
gaagaagucagaguuggag

SEQ ID NO: 2964089 - RNA, 19 nt, Artificial Sequence
  Description of Artificial Sequence: Synthetic oligonucleotide
ugaaggacaggcagcagag

SEQ ID NO: 2964090 - RNA, 19 nt, Artificial Sequence
  Description of Artificial Sequence: Synthetic oligonucleotide
ucacugacguuacugcagg

SEQ ID NO: 2964091 - RNA, 19 nt, Artificial Sequence
  Description of Artificial Sequence: Synthetic oligonucleotide
caggacuuguccaaagugg

SEQ ID NO: 2964092 - RNA, 19 nt, Artificial Sequence
  Description of Artificial Sequence: Synthetic oligonucleotide
acuggugcaaagcuggcag

SEQ ID NO: 2964093 - RNA, 19 nt, Artificial Sequence
  Description of Artificial Sequence: Synthetic oligonucleotide
aggagagacagaccgagag

SEQ ID NO: 2964094 - RNA, 19 nt, Artificial Sequence
  Description of Artificial Sequence: Synthetic oligonucleotide
aucagugcccacgagacac

SEQ ID NO: 2964095 - RNA, 19 nt, Artificial Sequence
  Description of Artificial Sequence: Synthetic oligonucleotide
cugaagaagucagaguugg

SEQ ID NO: 2964096 - RNA, 19 nt, Artificial Sequence
  Description of Artificial Sequence: Synthetic oligonucleotide
agaugccuggcucagagca

SEQ ID NO: 2964097 - RNA, 19 nt, Artificial Sequence
  Description of Artificial Sequence: Synthetic oligonucleotide
uagaucagugcccacgaga

SEQ ID NO: 2964098 - RNA, 19 nt, Artificial Sequence
  Description of Artificial Sequence: Synthetic oligonucleotide
agagaccacuaacaggagg

SEQ ID NO: 2964099 - RNA, 19 nt, Artificial Sequence
  Description of Artificial Sequence: Synthetic oligonucleotide
gaugagagagagcaccaug

SEQ ID NO: 2964100 - RNA, 19 nt, Artificial Sequence
  Description of Artificial Sequence: Synthetic oligonucleotide
aagaugaggaugaggaugu

SEQ ID NO: 2964101 - RNA, 19 nt, Artificial Sequence
  Description of Artificial Sequence: Synthetic oligonucleotide
gaggaugagagagagcacc

SEQ ID NO: 2964102 - RNA, 19 nt, Artificial Sequence
  Description of Artificial Sequence: Synthetic oligonucleotide
ucagaguuggagucugucc

SEQ ID NO: 2964103 - RNA, 19 nt, Artificial Sequence
  Description of Artificial Sequence: Synthetic oligonucleotide
agaucagugcccacgagac

SEQ ID NO: 2964104 - RNA, 19 nt, Artificial Sequence
  Description of Artificial Sequence: Synthetic oligonucleotide
aguccaccaggacuugucc

SEQ ID NO: 2964105 - RNA, 19 nt, Artificial Sequence
  Description of Artificial Sequence: Synthetic oligonucleotide
agaagagcccuccucuccg

SEQ ID NO: 2964106 - RNA, 19 nt, Artificial Sequence
  Description of Artificial Sequence: Synthetic oligonucleotide
accaugagcaccugcacug

SEQ ID NO: 2964107 - RNA, 19 nt, Artificial Sequence
  Description of Artificial Sequence: Synthetic oligonucleotide
ugagagagagcaccaugag

SEQ ID NO: 2964108 - RNA, 19 nt, Artificial Sequence
  Description of Artificial Sequence: Synthetic oligonucleotide
acugccuucagccagccau

SEQ ID NO: 2964109 - RNA, 19 nt, Artificial Sequence
  Description of Artificial Sequence: Synthetic oligonucleotide
augguguagagcuggaaca

SEQ ID NO: 2964110 - RNA, 19 nt, Artificial Sequence
  Description of Artificial Sequence: Synthetic oligonucleotide
aggacuuguccaaaguggc

SEQ ID NO: 2964111 - RNA, 19 nt, Artificial Sequence
  Description of Artificial Sequence: Synthetic oligonucleotide
uuagggacuccuucucggg

SEQ ID NO: 2964112 - RNA, 19 nt, Artificial Sequence
  Description of Artificial Sequence: Synthetic oligonucleotide
gacacggcugcacuggugc

SEQ ID NO: 2964113 - RNA, 19 nt, Artificial Sequence
  Description of Artificial Sequence: Synthetic oligonucleotide
caugguguagagcuggaac

SEQ ID NO: 2964114 - RNA, 19 nt, Artificial Sequence
  Description of Artificial Sequence: Synthetic oligonucleotide
gagagagagcaccaugagc

SEQ ID NO: 2964115 - RNA, 19 nt, Artificial Sequence
  Description of Artificial Sequence: Synthetic oligonucleotide
cauaccacagguuuaggga

SEQ ID NO: 2964116 - RNA, 19 nt, Artificial Sequence
  Description of Artificial Sequence: Synthetic oligonucleotide
augaaggacaggcagcaga

SEQ ID NO: 2964117 - RNA, 19 nt, Artificial Sequence
  Description of Artificial Sequence: Synthetic oligonucleotide
guuuagggacuccuucucg

SEQ ID NO: 2964118 - RNA, 19 nt, Artificial Sequence
  Description of Artificial Sequence: Synthetic oligonucleotide
ucggggagaguccaccagg

SEQ ID NO: 2964119 - RNA, 19 nt, Artificial Sequence
  Description of Artificial Sequence: Synthetic oligonucleotide
uggauggcauagaucagug

SEQ ID NO: 2964120 - RNA, 19 nt, Artificial Sequence
  Description of Artificial Sequence: Synthetic oligonucleotide
cucagagcaggagagacag

SEQ ID NO: 2964121 - RNA, 19 nt, Artificial Sequence
  Description of Artificial Sequence: Synthetic oligonucleotide
agcuggaacaugaagagga

SEQ ID NO: 2964122 - RNA, 19 nt, Artificial Sequence
  Description of Artificial Sequence: Synthetic oligonucleotide
cugacguuacugcaggccc

SEQ ID NO: 2964123 - RNA, 19 nt, Artificial Sequence
  Description of Artificial Sequence: Synthetic oligonucleotide
auggcauagaucagugccc

SEQ ID NO: 2964124 - RNA, 19 nt, Artificial Sequence
  Description of Artificial Sequence: Synthetic oligonucleotide
uagaagagcccuccucucc

SEQ ID NO: 2964125 - RNA, 19 nt, Artificial Sequence
  Description of Artificial Sequence: Synthetic oligonucleotide
augugaagggcagagacca

SEQ ID NO: 2964126 - RNA, 19 nt, Artificial Sequence
  Description of Artificial Sequence: Synthetic oligonucleotide
cucacugacguuacugcag

SEQ ID NO: 2964127 - RNA, 19 nt, Artificial Sequence
  Description of Artificial Sequence: Synthetic oligonucleotide
agucauaccacagguuuag

SEQ ID NO: 2964128 - RNA, 19 nt, Artificial Sequence
  Description of Artificial Sequence: Synthetic oligonucleotide
accacuaacaggaggagug

SEQ ID NO: 2964129 - RNA, 19 nt, Artificial Sequence
  Description of Artificial Sequence: Synthetic oligonucleotide
uagggacuccuucucgggg

SEQ ID NO: 2964130 - RNA, 19 nt, Artificial Sequence
  Description of Artificial Sequence: Synthetic oligonucleotide
gugcaaagcuggcagaggc

SEQ ID NO: 2964131 - RNA, 19 nt, Artificial Sequence
  Description of Artificial Sequence: Synthetic oligonucleotide
gagaccacuaacaggagga

SEQ ID NO: 2964132 - RNA, 19 nt, Artificial Sequence
  Description of Artificial Sequence: Synthetic oligonucleotide
agagagcaccaugagcacc

SEQ ID NO: 2964133 - RNA, 19 nt, Artificial Sequence
  Description of Artificial Sequence: Synthetic oligonucleotide
gaggaugugaagggcagag

SEQ ID NO: 2964134 - RNA, 19 nt, Artificial Sequence
  Description of Artificial Sequence: Synthetic oligonucleotide
uuggcagugguguuccaug

SEQ ID NO: 2964135 - RNA, 19 nt, Artificial Sequence
  Description of Artificial Sequence: Synthetic oligonucleotide
ucucacugacguuacugca

SEQ ID NO: 2964136 - RNA, 19 nt, Artificial Sequence
  Description of Artificial Sequence: Synthetic oligonucleotide
gaugugaagggcagagacc

SEQ ID NO: 2964137 - RNA, 19 nt, Artificial Sequence
  Description of Artificial Sequence: Synthetic oligonucleotide
ggaugugaagggcagagac

SEQ ID NO: 2964138 - RNA, 19 nt, Artificial Sequence
  Description of Artificial Sequence: Synthetic oligonucleotide
cuggcucagagcaggagag

SEQ ID NO: 2964139 - RNA, 19 nt, Artificial Sequence
  Description of Artificial Sequence: Synthetic oligonucleotide
gucgcugaagaagucagag

SEQ ID NO: 2964140 - RNA, 19 nt, Artificial Sequence
  Description of Artificial Sequence: Synthetic oligonucleotide
cagagcaggagagacagac

SEQ ID NO: 2964141 - RNA, 19 nt, Artificial Sequence
  Description of Artificial Sequence: Synthetic oligonucleotide
agugguguuccaugugcag

SEQ ID NO: 2964142 - RNA, 19 nt, Artificial Sequence
  Description of Artificial Sequence: Synthetic oligonucleotide
gaugaggaugugaagggca

SEQ ID NO: 2964143 - RNA, 19 nt, Artificial Sequence
  Description of Artificial Sequence: Synthetic oligonucleotide
aaagcaagaugaggaugag

SEQ ID NO: 2964144 - RNA, 19 nt, Artificial Sequence
  Description of Artificial Sequence: Synthetic oligonucleotide
gcagagaccacuaacagga

SEQ ID NO: 2964145 - RNA, 19 nt, Artificial Sequence
  Description of Artificial Sequence: Synthetic oligonucleotide
agguuuagggacuccuucu

SEQ ID NO: 2964146 - RNA, 19 nt, Artificial Sequence
  Description of Artificial Sequence: Synthetic oligonucleotide
cagccagccauucucacug

SEQ ID NO: 2964147 - RNA, 19 nt, Artificial Sequence
  Description of Artificial Sequence: Synthetic oligonucleotide
aggccgguggcguagaaga

SEQ ID NO: 2964148 - RNA, 19 nt, Artificial Sequence
  Description of Artificial Sequence: Synthetic oligonucleotide
gcagcagaggaugagagag

SEQ ID NO: 2964149 - RNA, 19 nt, Artificial Sequence
  Description of Artificial Sequence: Synthetic oligonucleotide
gagucgcugaagaagucag

SEQ ID NO: 2964150 - RNA, 19 nt, Artificial Sequence
  Description of Artificial Sequence: Synthetic oligonucleotide
gacuuguccaaaguggcca

SEQ ID NO: 2964151 - RNA, 19 nt, Artificial Sequence
  Description of Artificial Sequence: Synthetic oligonucleotide
ugguguuccaugugcaguc

SEQ ID NO: 2964152 - RNA, 19 nt, Artificial Sequence
  Description of Artificial Sequence: Synthetic oligonucleotide
agugacauggcugccagau

SEQ ID NO: 2964153 - RNA, 19 nt, Artificial Sequence
  Description of Artificial Sequence: Synthetic oligonucleotide
ggcagagaccacuaacagg

SEQ ID NO: 2964154 - RNA, 19 nt, Artificial Sequence
  Description of Artificial Sequence: Synthetic oligonucleotide
gagacagaccgagagucgc

SEQ ID NO: 2964155 - RNA, 19 nt, Artificial Sequence
  Description of Artificial Sequence: Synthetic oligonucleotide
augagagagagcaccauga

SEQ ID NO: 2964156 - RNA, 19 nt, Artificial Sequence
  Description of Artificial Sequence: Synthetic oligonucleotide
ucagugcccacgagacacg

SEQ ID NO: 2964157 - RNA, 19 nt, Artificial Sequence
  Description of Artificial Sequence: Synthetic oligonucleotide
gaguuggagucuguccucg

SEQ ID NO: 2964158 - RNA, 19 nt, Artificial Sequence
  Description of Artificial Sequence: Synthetic oligonucleotide
uggugcaaagcuggcagag

SEQ ID NO: 2964159 - RNA, 19 nt, Artificial Sequence
  Description of Artificial Sequence: Synthetic oligonucleotide
guuuuggcagugguguucc

SEQ ID NO: 2964160 - RNA, 19 nt, Artificial Sequence
  Description of Artificial Sequence: Synthetic oligonucleotide
ugacguuacugcaggccca

SEQ ID NO: 2964161 - RNA, 19 nt, Artificial Sequence
  Description of Artificial Sequence: Synthetic oligonucleotide
uccaccaggacuuguccaa

SEQ ID NO: 2964162 - RNA, 19 nt, Artificial Sequence
  Description of Artificial Sequence: Synthetic oligonucleotide
ugaagaagucagaguugga

SEQ ID NO: 2964163 - RNA, 19 nt, Artificial Sequence
  Description of Artificial Sequence: Synthetic oligonucleotide
augaggaugaggaugugaa

SEQ ID NO: 2964164 - RNA, 19 nt, Artificial Sequence
  Description of Artificial Sequence: Synthetic oligonucleotide
guuccaugugcagucauac

SEQ ID NO: 2964165 - RNA, 19 nt, Artificial Sequence
  Description of Artificial Sequence: Synthetic oligonucleotide
uuccaugugcagucauacc

SEQ ID NO: 2964166 - RNA, 19 nt, Artificial Sequence
  Description of Artificial Sequence: Synthetic oligonucleotide
agagcaggagagacagacc

SEQ ID NO: 2964167 - RNA, 19 nt, Artificial Sequence
  Description of Artificial Sequence: Synthetic oligonucleotide
ugcacugccuucagccagc

SEQ ID NO: 2964168 - RNA, 19 nt, Artificial Sequence
  Description of Artificial Sequence: Synthetic oligonucleotide
ugcaggcccacguuuuggc

SEQ ID NO: 2964169 - RNA, 19 nt, Artificial Sequence
  Description of Artificial Sequence: Synthetic oligonucleotide
uaccacagguuuagggacu

SEQ ID NO: 2964170 - RNA, 19 nt, Artificial Sequence
  Description of Artificial Sequence: Synthetic oligonucleotide
auagaucagugcccacgag

SEQ ID NO: 2964171 - RNA, 19 nt, Artificial Sequence
  Description of Artificial Sequence: Synthetic oligonucleotide
gagcuggaacaugaagagg

SEQ ID NO: 2964172 - RNA, 19 nt, Artificial Sequence
  Description of Artificial Sequence: Synthetic oligonucleotide
gaugaggaugaggauguga

SEQ ID NO: 2964173 - RNA, 19 nt, Artificial Sequence
  Description of Artificial Sequence: Synthetic oligonucleotide
uguuccaugugcagucaua

SEQ ID NO: 2964174 - RNA, 19 nt, Artificial Sequence
  Description of Artificial Sequence: Synthetic oligonucleotide
gcauagaucagugcccacg

SEQ ID NO: 2964175 - RNA, 19 nt, Artificial Sequence
  Description of Artificial Sequence: Synthetic oligonucleotide
cagguuuagggacuccuuc

SEQ ID NO: 2964176 - RNA, 19 nt, Artificial Sequence
  Description of Artificial Sequence: Synthetic oligonucleotide
gacuccuucucggggagag

SEQ ID NO: 2964177 - RNA, 19 nt, Artificial Sequence
  Description of Artificial Sequence: Synthetic oligonucleotide
uggcauagaucagugccca

SEQ ID NO: 2964178 - RNA, 19 nt, Artificial Sequence
  Description of Artificial Sequence: Synthetic oligonucleotide
caggcccacguuuuggcag

SEQ ID NO: 2964179 - RNA, 19 nt, Artificial Sequence
  Description of Artificial Sequence: Synthetic oligonucleotide
cauagaucagugcccacga

SEQ ID NO: 2964180 - RNA, 19 nt, Artificial Sequence
  Description of Artificial Sequence: Synthetic oligonucleotide
guccaaaguggccacaaaa

SEQ ID NO: 2964181 - RNA, 19 nt, Artificial Sequence
  Description of Artificial Sequence: Synthetic oligonucleotide
agagucgcugaagaaguca

SEQ ID NO: 2964182 - RNA, 19 nt, Artificial Sequence
  Description of Artificial Sequence: Synthetic oligonucleotide
uuacugcaggcccacguuu

SEQ ID NO: 2964183 - RNA, 19 nt, Artificial Sequence
  Description of Artificial Sequence: Synthetic oligonucleotide
accaggacuuguccaaagu

SEQ ID NO: 2964184 - RNA, 19 nt, Artificial Sequence
  Description of Artificial Sequence: Synthetic oligonucleotide
ucgcugaagaagucagagu

SEQ ID NO: 2964185 - RNA, 19 nt, Artificial Sequence
  Description of Artificial Sequence: Synthetic oligonucleotide
gaccgagagucgcugaaga

SEQ ID NO: 2964186 - RNA, 19 nt, Artificial Sequence
  Description of Artificial Sequence: Synthetic oligonucleotide
agggcagagaccacuaaca

SEQ ID NO: 2964187 - RNA, 19 nt, Artificial Sequence
  Description of Artificial Sequence: Synthetic oligonucleotide
uccuucucggggagagucc

SEQ ID NO: 2964188 - RNA, 19 nt, Artificial Sequence
  Description of Artificial Sequence: Synthetic oligonucleotide
aggaggagugacauggcug

SEQ ID NO: 2964189 - RNA, 19 nt, Artificial Sequence
  Description of Artificial Sequence: Synthetic oligonucleotide
agagacagaccgagagucg

SEQ ID NO: 2964190 - RNA, 19 nt, Artificial Sequence
  Description of Artificial Sequence: Synthetic oligonucleotide
gaaggacaggcagcagagg

SEQ ID NO: 2964191 - RNA, 19 nt, Artificial Sequence
  Description of Artificial Sequence: Synthetic oligonucleotide
cugcacugccuucagccag

SEQ ID NO: 2964192 - RNA, 19 nt, Artificial Sequence
  Description of Artificial Sequence: Synthetic oligonucleotide
acuaacaggaggagugaca

SEQ ID NO: 2964193 - RNA, 19 nt, Artificial Sequence
  Description of Artificial Sequence: Synthetic oligonucleotide
gagagagcaccaugagcac

SEQ ID NO: 2964194 - RNA, 19 nt, Artificial Sequence
  Description of Artificial Sequence: Synthetic oligonucleotide
uaacaggaggagugacaug

SEQ ID NO: 2964195 - RNA, 19 nt, Artificial Sequence
  Description of Artificial Sequence: Synthetic oligonucleotide
agggacuccuucucgggga

SEQ ID NO: 2964196 - RNA, 19 nt, Artificial Sequence
  Description of Artificial Sequence: Synthetic oligonucleotide
uucucggggagaguccacc

SEQ ID NO: 2964197 - RNA, 19 nt, Artificial Sequence
  Description of Artificial Sequence: Synthetic oligonucleotide
cuccgcaugguguagagcu

SEQ ID NO: 2964198 - RNA, 19 nt, Artificial Sequence
  Description of Artificial Sequence: Synthetic oligonucleotide
ggagugacauggcugccag

SEQ ID NO: 2964199 - RNA, 19 nt, Artificial Sequence
  Description of Artificial Sequence: Synthetic oligonucleotide
gacagaccgagagucgcug

SEQ ID NO: 2964200 - RNA, 19 nt, Artificial Sequence
  Description of Artificial Sequence: Synthetic oligonucleotide
ugcagucauaccacagguu

SEQ ID NO: 2964201 - RNA, 19 nt, Artificial Sequence
  Description of Artificial Sequence: Synthetic oligonucleotide
caugagcaccugcacugcc

SEQ ID NO: 2964202 - RNA, 19 nt, Artificial Sequence
  Description of Artificial Sequence: Synthetic oligonucleotide
aagagcccuccucuccgca

SEQ ID NO: 2964203 - RNA, 19 nt, Artificial Sequence
  Description of Artificial Sequence: Synthetic oligonucleotide
gaagagcccuccucuccgc

SEQ ID NO: 2964204 - RNA, 19 nt, Artificial Sequence
  Description of Artificial Sequence: Synthetic oligonucleotide
uccgcaugguguagagcug

SEQ ID NO: 2964205 - RNA, 19 nt, Artificial Sequence
  Description of Artificial Sequence: Synthetic oligonucleotide
uggcagugguguuccaugu

SEQ ID NO: 2964206 - RNA, 19 nt, Artificial Sequence
  Description of Artificial Sequence: Synthetic oligonucleotide
agaggaugagagagagcac

SEQ ID NO: 2964207 - RNA, 19 nt, Artificial Sequence
  Description of Artificial Sequence: Synthetic oligonucleotide
agcuggcagaggccggugg

SEQ ID NO: 2964208 - RNA, 19 nt, Artificial Sequence
  Description of Artificial Sequence: Synthetic oligonucleotide
acgagacacggcugcacug

SEQ ID NO: 2964209 - RNA, 19 nt, Artificial Sequence
  Description of Artificial Sequence: Synthetic oligonucleotide
guagaagagcccuccucuc

SEQ ID NO: 2964210 - RNA, 19 nt, Artificial Sequence
  Description of Artificial Sequence: Synthetic oligonucleotide
ugagcaccugcacugccuu

SEQ ID NO: 2964211 - RNA, 19 nt, Artificial Sequence
  Description of Artificial Sequence: Synthetic oligonucleotide
acaggaggagugacauggc

SEQ ID NO: 2964212 - RNA, 19 nt, Artificial Sequence
  Description of Artificial Sequence: Synthetic oligonucleotide
ucucggggagaguccacca

SEQ ID NO: 2964213 - RNA, 19 nt, Artificial Sequence
  Description of Artificial Sequence: Synthetic oligonucleotide
cugcacuggugcaaagcug

SEQ ID NO: 2964214 - RNA, 19 nt, Artificial Sequence
  Description of Artificial Sequence: Synthetic oligonucleotide
ugguguagagcuggaacau

SEQ ID NO: 2964215 - RNA, 19 nt, Artificial Sequence
  Description of Artificial Sequence: Synthetic oligonucleotide
accacagguuuagggacuc

SEQ ID NO: 2964216 - RNA, 19 nt, Artificial Sequence
  Description of Artificial Sequence: Synthetic oligonucleotide
gaugaaggacaggcagcag

SEQ ID NO: 2964217 - RNA, 19 nt, Artificial Sequence
  Description of Artificial Sequence: Synthetic oligonucleotide
uggcguagaagagcccucc

SEQ ID NO: 2964218 - RNA, 19 nt, Artificial Sequence
  Description of Artificial Sequence: Synthetic oligonucleotide
gggcagagaccacuaacag

SEQ ID NO: 2964219 - RNA, 19 nt, Artificial Sequence
  Description of Artificial Sequence: Synthetic oligonucleotide
uguccaaaguggccacaaa

SEQ ID NO: 2964220 - RNA, 19 nt, Artificial Sequence
  Description of Artificial Sequence: Synthetic oligonucleotide
uuuggcagugguguuccau

SEQ ID NO: 2964221 - RNA, 19 nt, Artificial Sequence
  Description of Artificial Sequence: Synthetic oligonucleotide
aggcagcagaggaugagag

SEQ ID NO: 2964222 - RNA, 19 nt, Artificial Sequence
  Description of Artificial Sequence: Synthetic oligonucleotide
acugcaggcccacguuuug

SEQ ID NO: 2964223 - RNA, 19 nt, Artificial Sequence
  Description of Artificial Sequence: Synthetic oligonucleotide
agaccacuaacaggaggag

SEQ ID NO: 2964224 - RNA, 19 nt, Artificial Sequence
  Description of Artificial Sequence: Synthetic oligonucleotide
gaugccuggcucagagcag

SEQ ID NO: 2964225 - RNA, 19 nt, Artificial Sequence
  Description of Artificial Sequence: Synthetic oligonucleotide
gcaggagagacagaccgag

SEQ ID NO: 2964226 - RNA, 19 nt, Artificial Sequence
  Description of Artificial Sequence: Synthetic oligonucleotide
ugugaagggcagagaccac

SEQ ID NO: 2964227 - RNA, 19 nt, Artificial Sequence
  Description of Artificial Sequence: Synthetic oligonucleotide
uacugcaggcccacguuuu

SEQ ID NO: 2964228 - RNA, 19 nt, Artificial Sequence
  Description of Artificial Sequence: Synthetic oligonucleotide
caccaggacuuguccaaag

SEQ ID NO: 2964229 - RNA, 19 nt, Artificial Sequence
  Description of Artificial Sequence: Synthetic oligonucleotide
caugugcagucauaccaca

SEQ ID NO: 2964230 - RNA, 19 nt, Artificial Sequence
  Description of Artificial Sequence: Synthetic oligonucleotide
augugcagucauaccacag

SEQ ID NO: 2964231 - RNA, 19 nt, Artificial Sequence
  Description of Artificial Sequence: Synthetic oligonucleotide
cuucagccagccauucuca

SEQ ID NO: 2964232 - RNA, 19 nt, Artificial Sequence
  Description of Artificial Sequence: Synthetic oligonucleotide
acaggcagcagaggaugag

SEQ ID NO: 2964233 - RNA, 19 nt, Artificial Sequence
  Description of Artificial Sequence: Synthetic oligonucleotide
agcaccugcacugccuuca

SEQ ID NO: 2964234 - RNA, 19 nt, Artificial Sequence
  Description of Artificial Sequence: Synthetic oligonucleotide
ugaggaugugaagggcaga

SEQ ID NO: 2964235 - RNA, 19 nt, Artificial Sequence
  Description of Artificial Sequence: Synthetic oligonucleotide
cuccuucucggggagaguc

SEQ ID NO: 2964236 - RNA, 19 nt, Artificial Sequence
  Description of Artificial Sequence: Synthetic oligonucleotide
ccaggacuuguccaaagug

SEQ ID NO: 2964237 - RNA, 19 nt, Artificial Sequence
  Description of Artificial Sequence: Synthetic oligonucleotide
gguuuagggacuccuucuc

SEQ ID NO: 2964238 - RNA, 19 nt, Artificial Sequence
  Description of Artificial Sequence: Synthetic oligonucleotide
ccagaugccuggcucagag

SEQ ID NO: 2964239 - RNA, 19 nt, Artificial Sequence
  Description of Artificial Sequence: Synthetic oligonucleotide
ccuucagccagccauucuc

SEQ ID NO: 2964240 - RNA, 19 nt, Artificial Sequence
  Description of Artificial Sequence: Synthetic oligonucleotide
gagcccuccucuccgcaug

SEQ ID NO: 2964241 - RNA, 19 nt, Artificial Sequence
  Description of Artificial Sequence: Synthetic oligonucleotide
gagcaccaugagcaccugc

SEQ ID NO: 2964242 - RNA, 19 nt, Artificial Sequence
  Description of Artificial Sequence: Synthetic oligonucleotide
cucggggagaguccaccag

SEQ ID NO: 2964243 - RNA, 19 nt, Artificial Sequence
  Description of Artificial Sequence: Synthetic oligonucleotide
ccaugugcagucauaccac

SEQ ID NO: 2964244 - RNA, 19 nt, Artificial Sequence
  Description of Artificial Sequence: Synthetic oligonucleotide
cacuaacaggaggagugac

SEQ ID NO: 2964245 - RNA, 19 nt, Artificial Sequence
  Description of Artificial Sequence: Synthetic oligonucleotide
agaccgagagucgcugaag

SEQ ID NO: 2964246 - RNA, 19 nt, Artificial Sequence
  Description of Artificial Sequence: Synthetic oligonucleotide
cagagaccacuaacaggag

SEQ ID NO: 2964247 - RNA, 19 nt, Artificial Sequence
  Description of Artificial Sequence: Synthetic oligonucleotide
gaucagugcccacgagaca

SEQ ID NO: 2964248 - RNA, 19 nt, Artificial Sequence
  Description of Artificial Sequence: Synthetic oligonucleotide
gucauaccacagguuuagg

SEQ ID NO: 2964249 - RNA, 19 nt, Artificial Sequence
  Description of Artificial Sequence: Synthetic oligonucleotide
agcccuccucuccgcaugg

SEQ ID NO: 2964250 - RNA, 19 nt, Artificial Sequence
  Description of Artificial Sequence: Synthetic oligonucleotide
ggaugaaggacaggcagca

SEQ ID NO: 2964251 - RNA, 19 nt, Artificial Sequence
  Description of Artificial Sequence: Synthetic oligonucleotide
ccgguggcguagaagagcc

SEQ ID NO: 2964252 - RNA, 19 nt, Artificial Sequence
  Description of Artificial Sequence: Synthetic oligonucleotide
ucagagcaggagagacaga

SEQ ID NO: 2964253 - RNA, 19 nt, Artificial Sequence
  Description of Artificial Sequence: Synthetic oligonucleotide
aggaugagagagagcacca

SEQ ID NO: 2964254 - RNA, 19 nt, Artificial Sequence
  Description of Artificial Sequence: Synthetic oligonucleotide
ugcccacgagacacggcug

SEQ ID NO: 2964255 - RNA, 19 nt, Artificial Sequence
  Description of Artificial Sequence: Synthetic oligonucleotide
cacguuuuggcaguggugu

SEQ ID NO: 2964256 - RNA, 19 nt, Artificial Sequence
  Description of Artificial Sequence: Synthetic oligonucleotide
cagccauucucacugacgu

SEQ ID NO: 2964257 - RNA, 19 nt, Artificial Sequence
  Description of Artificial Sequence: Synthetic oligonucleotide
acagaccgagagucgcuga

SEQ ID NO: 2964258 - RNA, 19 nt, Artificial Sequence
  Description of Artificial Sequence: Synthetic oligonucleotide
gacguuacugcaggcccac

SEQ ID NO: 2964259 - RNA, 19 nt, Artificial Sequence
  Description of Artificial Sequence: Synthetic oligonucleotide
ggauggcauagaucagugc

SEQ ID NO: 2964260 - RNA, 19 nt, Artificial Sequence
  Description of Artificial Sequence: Synthetic oligonucleotide
gagagcaccaugagcaccu

SEQ ID NO: 2964261 - RNA, 19 nt, Artificial Sequence
  Description of Artificial Sequence: Synthetic oligonucleotide
aggagugacauggcugcca

SEQ ID NO: 2964262 - RNA, 19 nt, Artificial Sequence
  Description of Artificial Sequence: Synthetic oligonucleotide
accgagagucgcugaagaa

SEQ ID NO: 2964263 - RNA, 19 nt, Artificial Sequence
  Description of Artificial Sequence: Synthetic oligonucleotide
gcugaagaagucagaguug

SEQ ID NO: 2964264 - RNA, 19 nt, Artificial Sequence
  Description of Artificial Sequence: Synthetic oligonucleotide
cagaugccuggcucagagc

SEQ ID NO: 2964265 - RNA, 19 nt, Artificial Sequence
  Description of Artificial Sequence: Synthetic oligonucleotide
cacugacguuacugcaggc

SEQ ID NO: 2964266 - RNA, 19 nt, Artificial Sequence
  Description of Artificial Sequence: Synthetic oligonucleotide
gaguccaccaggacuuguc

SEQ ID NO: 2964267 - RNA, 19 nt, Artificial Sequence
  Description of Artificial Sequence: Synthetic oligonucleotide
gugcagucauaccacaggu

SEQ ID NO: 2964268 - RNA, 19 nt, Artificial Sequence
  Description of Artificial Sequence: Synthetic oligonucleotide
ugccagaugccuggcucag

SEQ ID NO: 2964269 - RNA, 19 nt, Artificial Sequence
  Description of Artificial Sequence: Synthetic oligonucleotide
cuaacaggaggagugacau

SEQ ID NO: 2964270 - RNA, 19 nt, Artificial Sequence
  Description of Artificial Sequence: Synthetic oligonucleotide
gugacauggcugccagaug

SEQ ID NO: 2964271 - RNA, 19 nt, Artificial Sequence
  Description of Artificial Sequence: Synthetic oligonucleotide
ggaugaggaugugaagggc

SEQ ID NO: 2964272 - RNA, 19 nt, Artificial Sequence
  Description of Artificial Sequence: Synthetic oligonucleotide
cuggcagaggccgguggcg

SEQ ID NO: 2964273 - RNA, 19 nt, Artificial Sequence
  Description of Artificial Sequence: Synthetic oligonucleotide
ccgagagucgcugaagaag

SEQ ID NO: 2964274 - RNA, 19 nt, Artificial Sequence
  Description of Artificial Sequence: Synthetic oligonucleotide
agugcccacgagacacggc

SEQ ID NO: 2964275 - RNA, 19 nt, Artificial Sequence
  Description of Artificial Sequence: Synthetic oligonucleotide
aggcccacguuuuggcagu

SEQ ID NO: 2964276 - RNA, 19 nt, Artificial Sequence
  Description of Artificial Sequence: Synthetic oligonucleotide
ucuccgcaugguguagagc

SEQ ID NO: 2964277 - RNA, 19 nt, Artificial Sequence
  Description of Artificial Sequence: Synthetic oligonucleotide
gucagaguuggagucuguc

SEQ ID NO: 2964278 - RNA, 19 nt, Artificial Sequence
  Description of Artificial Sequence: Synthetic oligonucleotide
gaagucagaguuggagucu

SEQ ID NO: 2964279 - RNA, 19 nt, Artificial Sequence
  Description of Artificial Sequence: Synthetic oligonucleotide
cugcaggcccacguuuugg

SEQ ID NO: 2964280 - RNA, 19 nt, Artificial Sequence
  Description of Artificial Sequence: Synthetic oligonucleotide
cagugguguuccaugugca

SEQ ID NO: 2964281 - RNA, 19 nt, Artificial Sequence
  Description of Artificial Sequence: Synthetic oligonucleotide
gaggccgguggcguagaag

SEQ ID NO: 2964282 - RNA, 19 nt, Artificial Sequence
  Description of Artificial Sequence: Synthetic oligonucleotide
gaagggcagagaccacuaa

SEQ ID NO: 2964283 - RNA, 19 nt, Artificial Sequence
  Description of Artificial Sequence: Synthetic oligonucleotide
gugcccacgagacacggcu

SEQ ID NO: 2964284 - RNA, 19 nt, Artificial Sequence
  Description of Artificial Sequence: Synthetic oligonucleotide
uuuuggcagugguguucca

SEQ ID NO: 2964285 - RNA, 19 nt, Artificial Sequence
  Description of Artificial Sequence: Synthetic oligonucleotide
ggcucagagcaggagagac

SEQ ID NO: 2964286 - RNA, 19 nt, Artificial Sequence
  Description of Artificial Sequence: Synthetic oligonucleotide
augagcaccugcacugccu

SEQ ID NO: 2964287 - RNA, 19 nt, Artificial Sequence
  Description of Artificial Sequence: Synthetic oligonucleotide
cagugcccacgagacacgg

SEQ ID NO: 2964288 - RNA, 19 nt, Artificial Sequence
  Description of Artificial Sequence: Synthetic oligonucleotide
gcagucauaccacagguuu

SEQ ID NO: 2964289 - RNA, 19 nt, Artificial Sequence
  Description of Artificial Sequence: Synthetic oligonucleotide
gggagaguccaccaggacu

SEQ ID NO: 2964290 - RNA, 19 nt, Artificial Sequence
  Description of Artificial Sequence: Synthetic oligonucleotide
gcugccagaugccuggcuc

SEQ ID NO: 2964291 - RNA, 19 nt, Artificial Sequence
  Description of Artificial Sequence: Synthetic oligonucleotide
uccucuccgcaugguguag

SEQ ID NO: 2964292 - RNA, 19 nt, Artificial Sequence
  Description of Artificial Sequence: Synthetic oligonucleotide
ggacuuguccaaaguggcc

SEQ ID NO: 2964293 - RNA, 19 nt, Artificial Sequence
  Description of Artificial Sequence: Synthetic oligonucleotide
cugccagaugccuggcuca

SEQ ID NO: 2964294 - RNA, 19 nt, Artificial Sequence
  Description of Artificial Sequence: Synthetic oligonucleotide
aggaugugaagggcagaga

SEQ ID NO: 2964295 - RNA, 19 nt, Artificial Sequence
  Description of Artificial Sequence: Synthetic oligonucleotide
agagcccuccucuccgcau

SEQ ID NO: 2964296 - RNA, 19 nt, Artificial Sequence
  Description of Artificial Sequence: Synthetic oligonucleotide
gagagucgcugaagaaguc

SEQ ID NO: 2964297 - RNA, 19 nt, Artificial Sequence
  Description of Artificial Sequence: Synthetic oligonucleotide
gccauucucacugacguua

SEQ ID NO: 2964298 - RNA, 19 nt, Artificial Sequence
  Description of Artificial Sequence: Synthetic oligonucleotide
cuggugcaaagcuggcaga

SEQ ID NO: 2964299 - RNA, 19 nt, Artificial Sequence
  Description of Artificial Sequence: Synthetic oligonucleotide
ggcagugguguuccaugug

SEQ ID NO: 2964300 - RNA, 19 nt, Artificial Sequence
  Description of Artificial Sequence: Synthetic oligonucleotide
cuucucggggagaguccac

SEQ ID NO: 2964301 - RNA, 19 nt, Artificial Sequence
  Description of Artificial Sequence: Synthetic oligonucleotide
gacaggcagcagaggauga

SEQ ID NO: 2964302 - RNA, 19 nt, Artificial Sequence
  Description of Artificial Sequence: Synthetic oligonucleotide
aggacaggcagcagaggau

SEQ ID NO: 2964303 - RNA, 19 nt, Artificial Sequence
  Description of Artificial Sequence: Synthetic oligonucleotide
aagcuggcagaggccggug

SEQ ID NO: 2964304 - RNA, 19 nt, Artificial Sequence
  Description of Artificial Sequence: Synthetic oligonucleotide
ccauucucacugacguuac

SEQ ID NO: 2964305 - RNA, 19 nt, Artificial Sequence
  Description of Artificial Sequence: Synthetic oligonucleotide
agacagaccgagagucgcu

SEQ ID NO: 2964306 - RNA, 19 nt, Artificial Sequence
  Description of Artificial Sequence: Synthetic oligonucleotide
cagcagaggaugagagaga

SEQ ID NO: 2964307 - RNA, 19 nt, Artificial Sequence
  Description of Artificial Sequence: Synthetic oligonucleotide
acacggcugcacuggugca

SEQ ID NO: 2964308 - RNA, 19 nt, Artificial Sequence
  Description of Artificial Sequence: Synthetic oligonucleotide
acguuuuggcagugguguu

SEQ ID NO: 2964309 - RNA, 19 nt, Artificial Sequence
  Description of Artificial Sequence: Synthetic oligonucleotide
gggacuccuucucggggag

SEQ ID NO: 2964310 - RNA, 19 nt, Artificial Sequence
  Description of Artificial Sequence: Synthetic oligonucleotide
uggcucagagcaggagaga

SEQ ID NO: 2964311 - RNA, 19 nt, Artificial Sequence
  Description of Artificial Sequence: Synthetic oligonucleotide
agaguccaccaggacuugu

SEQ ID NO: 2964312 - RNA, 19 nt, Artificial Sequence
  Description of Artificial Sequence: Synthetic oligonucleotide
gcugcacuggugcaaagcu

SEQ ID NO: 2964313 - RNA, 19 nt, Artificial Sequence
  Description of Artificial Sequence: Synthetic oligonucleotide
agcaggagagacagaccga

SEQ ID NO: 2964314 - RNA, 19 nt, Artificial Sequence
  Description of Artificial Sequence: Synthetic oligonucleotide
gagaguccaccaggacuug

SEQ ID NO: 2964315 - RNA, 19 nt, Artificial Sequence
  Description of Artificial Sequence: Synthetic oligonucleotide
agucgcugaagaagucaga

SEQ ID NO: 2964316 - RNA, 19 nt, Artificial Sequence
  Description of Artificial Sequence: Synthetic oligonucleotide
gugaagggcagagaccacu

SEQ ID NO: 2964317 - RNA, 19 nt, Artificial Sequence
  Description of Artificial Sequence: Synthetic oligonucleotide
ggcugcacuggugcaaagc

SEQ ID NO: 2964318 - RNA, 19 nt, Artificial Sequence
  Description of Artificial Sequence: Synthetic oligonucleotide
guuacugcaggcccacguu

SEQ ID NO: 2964319 - RNA, 19 nt, Artificial Sequence
  Description of Artificial Sequence: Synthetic oligonucleotide
gcccacgagacacggcugc

SEQ ID NO: 2964320 - RNA, 19 nt, Artificial Sequence
  Description of Artificial Sequence: Synthetic oligonucleotide
acagguuuagggacuccuu

SEQ ID NO: 2964321 - RNA, 19 nt, Artificial Sequence
  Description of Artificial Sequence: Synthetic oligonucleotide
agccauucucacugacguu

SEQ ID NO: 2964322 - RNA, 19 nt, Artificial Sequence
  Description of Artificial Sequence: Synthetic oligonucleotide
gaccacuaacaggaggagu

SEQ ID NO: 2964323 - RNA, 19 nt, Artificial Sequence
  Description of Artificial Sequence: Synthetic oligonucleotide
ccacguuuuggcaguggug

SEQ ID NO: 2964324 - RNA, 19 nt, Artificial Sequence
  Description of Artificial Sequence: Synthetic oligonucleotide
ccgcaugguguagagcugg

SEQ ID NO: 2964325 - RNA, 19 nt, Artificial Sequence
  Description of Artificial Sequence: Synthetic oligonucleotide
gcguagaagagcccuccuc

SEQ ID NO: 2964326 - RNA, 19 nt, Artificial Sequence
  Description of Artificial Sequence: Synthetic oligonucleotide
ugccuucagccagccauuc

SEQ ID NO: 2964327 - RNA, 19 nt, Artificial Sequence
  Description of Artificial Sequence: Synthetic oligonucleotide
gugguguuccaugugcagu

SEQ ID NO: 2964328 - RNA, 19 nt, Artificial Sequence
  Description of Artificial Sequence: Synthetic oligonucleotide
caggagagacagaccgaga

SEQ ID NO: 2964329 - RNA, 19 nt, Artificial Sequence
  Description of Artificial Sequence: Synthetic oligonucleotide
ccuggcucagagcaggaga

SEQ ID NO: 2964330 - RNA, 19 nt, Artificial Sequence
  Description of Artificial Sequence: Synthetic oligonucleotide
cagaccgagagucgcugaa

SEQ ID NO: 2964331 - RNA, 19 nt, Artificial Sequence
  Description of Artificial Sequence: Synthetic oligonucleotide
ggagagacagaccgagagu

SEQ ID NO: 2964332 - RNA, 19 nt, Artificial Sequence
  Description of Artificial Sequence: Synthetic oligonucleotide
caccaugagcaccugcacu

SEQ ID NO: 2964333 - RNA, 19 nt, Artificial Sequence
  Description of Artificial Sequence: Synthetic oligonucleotide
agacacggcugcacuggug

SEQ ID NO: 2964334 - RNA, 19 nt, Artificial Sequence
  Description of Artificial Sequence: Synthetic oligonucleotide
gagcaccugcacugccuuc

SEQ ID NO: 2964335 - RNA, 19 nt, Artificial Sequence
  Description of Artificial Sequence: Synthetic oligonucleotide
acguuacugcaggcccacg

SEQ ID NO: 2964336 - RNA, 19 nt, Artificial Sequence
  Description of Artificial Sequence: Synthetic oligonucleotide
gccgguggcguagaagagc

SEQ ID NO: 2964337 - RNA, 19 nt, Artificial Sequence
  Description of Artificial Sequence: Synthetic oligonucleotide
cgagacacggcugcacugg

SEQ ID NO: 2964338 - RNA, 19 nt, Artificial Sequence
  Description of Artificial Sequence: Synthetic oligonucleotide
ggagaguccaccaggacuu

SEQ ID NO: 2964339 - RNA, 19 nt, Artificial Sequence
  Description of Artificial Sequence: Synthetic oligonucleotide
gguggcguagaagagcccu

SEQ ID NO: 2964340 - RNA, 19 nt, Artificial Sequence
  Description of Artificial Sequence: Synthetic oligonucleotide
caggaggagugacauggcu

SEQ ID NO: 2964341 - RNA, 19 nt, Artificial Sequence
  Description of Artificial Sequence: Synthetic oligonucleotide
cacagguuuagggacuccu

SEQ ID NO: 2964342 - RNA, 19 nt, Artificial Sequence
  Description of Artificial Sequence: Synthetic oligonucleotide
acggcugcacuggugcaaa

SEQ ID NO: 2964343 - RNA, 19 nt, Artificial Sequence
  Description of Artificial Sequence: Synthetic oligonucleotide
agagcaccaugagcaccug

SEQ ID NO: 2964344 - RNA, 19 nt, Artificial Sequence
  Description of Artificial Sequence: Synthetic oligonucleotide
cuccucuccgcauggugua

SEQ ID NO: 2964345 - RNA, 19 nt, Artificial Sequence
  Description of Artificial Sequence: Synthetic oligonucleotide
cacgagacacggcugcacu

SEQ ID NO: 2964346 - RNA, 19 nt, Artificial Sequence
  Description of Artificial Sequence: Synthetic oligonucleotide
gagacacggcugcacuggu

SEQ ID NO: 2964347 - RNA, 19 nt, Artificial Sequence
  Description of Artificial Sequence: Synthetic oligonucleotide
guggcguagaagagcccuc

SEQ ID NO: 2964348 - RNA, 19 nt, Artificial Sequence
  Description of Artificial Sequence: Synthetic oligonucleotide
agucagaguuggagucugu

SEQ ID NO: 2964349 - RNA, 19 nt, Artificial Sequence
  Description of Artificial Sequence: Synthetic oligonucleotide
ggcauagaucagugcccac

SEQ ID NO: 2964350 - RNA, 19 nt, Artificial Sequence
  Description of Artificial Sequence: Synthetic oligonucleotide
gcagaggccgguggcguag

SEQ ID NO: 2964351 - RNA, 19 nt, Artificial Sequence
  Description of Artificial Sequence: Synthetic oligonucleotide
ggggagaguccaccaggac

SEQ ID NO: 2964352 - RNA, 19 nt, Artificial Sequence
  Description of Artificial Sequence: Synthetic oligonucleotide
gccagccauucucacugac

SEQ ID NO: 2964353 - RNA, 19 nt, Artificial Sequence
  Description of Artificial Sequence: Synthetic oligonucleotide
gcaccugcacugccuucag

SEQ ID NO: 2964354 - RNA, 19 nt, Artificial Sequence
  Description of Artificial Sequence: Synthetic oligonucleotide
cgcugaagaagucagaguu

SEQ ID NO: 2964355 - RNA, 19 nt, Artificial Sequence
  Description of Artificial Sequence: Synthetic oligonucleotide
ccaugagcaccugcacugc

SEQ ID NO: 2964356 - RNA, 19 nt, Artificial Sequence
  Description of Artificial Sequence: Synthetic oligonucleotide
gguguuccaugugcaguca

SEQ ID NO: 2964357 - RNA, 19 nt, Artificial Sequence
  Description of Artificial Sequence: Synthetic oligonucleotide
uggcugccagaugccuggc

SEQ ID NO: 2964358 - RNA, 19 nt, Artificial Sequence
  Description of Artificial Sequence: Synthetic oligonucleotide
gcaggcccacguuuuggca

SEQ ID NO: 2964359 - RNA, 19 nt, Artificial Sequence
  Description of Artificial Sequence: Synthetic oligonucleotide
cgagagucgcugaagaagu

SEQ ID NO: 2964360 - RNA, 19 nt, Artificial Sequence
  Description of Artificial Sequence: Synthetic oligonucleotide
acuccuucucggggagagu

SEQ ID NO: 2964361 - RNA, 19 nt, Artificial Sequence
  Description of Artificial Sequence: Synthetic oligonucleotide
agaggccgguggcguagaa

SEQ ID NO: 2964362 - RNA, 19 nt, Artificial Sequence
  Description of Artificial Sequence: Synthetic oligonucleotide
cguuuuggcagugguguuc

SEQ ID NO: 2964363 - RNA, 19 nt, Artificial Sequence
  Description of Artificial Sequence: Synthetic oligonucleotide
gcaagaugaggaugaggau

SEQ ID NO: 2964364 - RNA, 19 nt, Artificial Sequence
  Description of Artificial Sequence: Synthetic oligonucleotide
guguuccaugugcagucau

SEQ ID NO: 2964365 - RNA, 19 nt, Artificial Sequence
  Description of Artificial Sequence: Synthetic oligonucleotide
cccuccucuccgcauggug

SEQ ID NO: 2964366 - RNA, 19 nt, Artificial Sequence
  Description of Artificial Sequence: Synthetic oligonucleotide
cauucucacugacguuacu

SEQ ID NO: 2964367 - RNA, 19 nt, Artificial Sequence
  Description of Artificial Sequence: Synthetic oligonucleotide
cacggcugcacuggugcaa

SEQ ID NO: 2964368 - RNA, 19 nt, Artificial Sequence
  Description of Artificial Sequence: Synthetic oligonucleotide
ggccgguggcguagaagag

SEQ ID NO: 2964369 - RNA, 19 nt, Artificial Sequence
  Description of Artificial Sequence: Synthetic oligonucleotide
ccuucucggggagagucca

SEQ ID NO: 2964370 - RNA, 19 nt, Artificial Sequence
  Description of Artificial Sequence: Synthetic oligonucleotide
ccuccucuccgcauggugu

SEQ ID NO: 2964371 - RNA, 19 nt, Artificial Sequence
  Description of Artificial Sequence: Synthetic oligonucleotide
gcccacguuuuggcagugg

SEQ ID NO: 2964372 - RNA, 19 nt, Artificial Sequence
  Description of Artificial Sequence: Synthetic oligonucleotide
ccacgagacacggcugcac

SEQ ID NO: 2964373 - RNA, 19 nt, Artificial Sequence
  Description of Artificial Sequence: Synthetic oligonucleotide
ccacuaacaggaggaguga

SEQ ID NO: 2964374 - RNA, 19 nt, Artificial Sequence
  Description of Artificial Sequence: Synthetic oligonucleotide
cugccuucagccagccauu

SEQ ID NO: 2964375 - RNA, 19 nt, Artificial Sequence
  Description of Artificial Sequence: Synthetic oligonucleotide
gcaugguguagagcuggaa

SEQ ID NO: 2964376 - RNA, 19 nt, Artificial Sequence
  Description of Artificial Sequence: Synthetic oligonucleotide
ggcguagaagagcccuccu

SEQ ID NO: 2964377 - RNA, 19 nt, Artificial Sequence
  Description of Artificial Sequence: Synthetic oligonucleotide
cccacguuuuggcaguggu

SEQ ID NO: 2964378 - RNA, 19 nt, Artificial Sequence
  Description of Artificial Sequence: Synthetic oligonucleotide
ccacagguuuagggacucc

SEQ ID NO: 2964379 - RNA, 19 nt, Artificial Sequence
  Description of Artificial Sequence: Synthetic oligonucleotide
ggaugagagagagcaccau

SEQ ID NO: 2964380 - RNA, 19 nt, Artificial Sequence
  Description of Artificial Sequence: Synthetic oligonucleotide
cacugccuucagccagcca

SEQ ID NO: 2964381 - RNA, 19 nt, Artificial Sequence
  Description of Artificial Sequence: Synthetic oligonucleotide
cggggagaguccaccagga

SEQ ID NO: 2964382 - RNA, 19 nt, Artificial Sequence
  Description of Artificial Sequence: Synthetic oligonucleotide
gcuggaacaugaagaggau

SEQ ID NO: 2964383 - RNA, 19 nt, Artificial Sequence
  Description of Artificial Sequence: Synthetic oligonucleotide
cguuacugcaggcccacgu

SEQ ID NO: 2964384 - RNA, 19 nt, Artificial Sequence
  Description of Artificial Sequence: Synthetic oligonucleotide
ggcccacguuuuggcagug

SEQ ID NO: 2964385 - RNA, 19 nt, Artificial Sequence
  Description of Artificial Sequence: Synthetic oligonucleotide
ggacuccuucucggggaga

SEQ ID NO: 2964386 - RNA, 19 nt, Artificial Sequence
  Description of Artificial Sequence: Synthetic oligonucleotide
gccuucagccagccauucu

SEQ ID NO: 2964387 - RNA, 19 nt, Artificial Sequence
  Description of Artificial Sequence: Synthetic oligonucleotide
cgguggcguagaagagccc

SEQ ID NO: 2964388 - RNA, 19 nt, Artificial Sequence
  Description of Artificial Sequence: Synthetic oligonucleotide
ccucuccgcaugguguaga

SEQ ID NO: 2964389 - RNA, 19 nt, Artificial Sequence
  Description of Artificial Sequence: Synthetic oligonucleotide
ggcugccagaugccuggcu

SEQ ID NO: 2964390 - RNA, 19 nt, Artificial Sequence
  Description of Artificial Sequence: Synthetic oligonucleotide
gccagaugccuggcucaga

SEQ ID NO: 2964391 - RNA, 19 nt, Artificial Sequence
  Description of Artificial Sequence: Synthetic oligonucleotide
ccaccaggacuuguccaaa

SEQ ID NO: 2964392 - RNA, 19 nt, Artificial Sequence
  Description of Artificial Sequence: Synthetic oligonucleotide
cccacgagacacggcugca

SEQ ID NO: 2964393 - RNA, 19 nt, Artificial Sequence
  Description of Artificial Sequence: Synthetic oligonucleotide
gcccuccucuccgcauggu

SEQ ID NO: 2964394 - RNA, 19 nt, Artificial Sequence
  Description of Artificial Sequence: Synthetic oligonucleotide
ucgugcaagacuuuaaucg

SEQ ID NO: 2964395 - RNA, 19 nt, Artificial Sequence
  Description of Artificial Sequence: Synthetic oligonucleotide
uucauacucuuuaacaugg

SEQ ID NO: 2964396 - RNA, 19 nt, Artificial Sequence
  Description of Artificial Sequence: Synthetic oligonucleotide
agaaaucggaucuugcugc

SEQ ID NO: 2964397 - RNA, 19 nt, Artificial Sequence
  Description of Artificial Sequence: Synthetic oligonucleotide
uuaaucggcacaccgauag

SEQ ID NO: 2964398 - RNA, 19 nt, Artificial Sequence
  Description of Artificial Sequence: Synthetic oligonucleotide
aggacuacaguucucuucc

SEQ ID NO: 2964399 - RNA, 19 nt, Artificial Sequence
  Description of Artificial Sequence: Synthetic oligonucleotide
aagacuuuaaucggcacac

SEQ ID NO: 2964400 - RNA, 19 nt, Artificial Sequence
  Description of Artificial Sequence: Synthetic oligonucleotide
aaugagcuucccucgauac

SEQ ID NO: 2964401 - RNA, 19 nt, Artificial Sequence
  Description of Artificial Sequence: Synthetic oligonucleotide
uuaucuucgcuuuuggaag

SEQ ID NO: 2964402 - RNA, 19 nt, Artificial Sequence
  Description of Artificial Sequence: Synthetic oligonucleotide
acguauguauaccuguucc

SEQ ID NO: 2964403 - RNA, 19 nt, Artificial Sequence
  Description of Artificial Sequence: Synthetic oligonucleotide
agaaauuuauuuaucuucg

SEQ ID NO: 2964404 - RNA, 19 nt, Artificial Sequence
  Description of Artificial Sequence: Synthetic oligonucleotide
uacucuuuaacaugggugc

SEQ ID NO: 2964405 - RNA, 19 nt, Artificial Sequence
  Description of Artificial Sequence: Synthetic oligonucleotide
uuuaucuucgcuuuuggaa

SEQ ID NO: 2964406 - RNA, 19 nt, Artificial Sequence
  Description of Artificial Sequence: Synthetic oligonucleotide
acaaguuacgauguggccc

SEQ ID NO: 2964407 - RNA, 19 nt, Artificial Sequence
  Description of Artificial Sequence: Synthetic oligonucleotide
uacgauguggcccucagcc

SEQ ID NO: 2964408 - RNA, 19 nt, Artificial Sequence
  Description of Artificial Sequence: Synthetic oligonucleotide
uuuggaagauguuuccacg

SEQ ID NO: 2964409 - RNA, 19 nt, Artificial Sequence
  Description of Artificial Sequence: Synthetic oligonucleotide
aaucggaucuugcugccac

SEQ ID NO: 2964410 - RNA, 19 nt, Artificial Sequence
  Description of Artificial Sequence: Synthetic oligonucleotide
aaggacuacaguucucuuc

SEQ ID NO: 2964411 - RNA, 19 nt, Artificial Sequence
  Description of Artificial Sequence: Synthetic oligonucleotide
uauuuaucuucgcuuuugg

SEQ ID NO: 2964412 - RNA, 19 nt, Artificial Sequence
  Description of Artificial Sequence: Synthetic oligonucleotide
gacuuuaaucggcacaccg

SEQ ID NO: 2964413 - RNA, 19 nt, Artificial Sequence
  Description of Artificial Sequence: Synthetic oligonucleotide
uuucauacucuuuaacaug

SEQ ID NO: 2964414 - RNA, 19 nt, Artificial Sequence
  Description of Artificial Sequence: Synthetic oligonucleotide
ucacaaguuacgauguggc

SEQ ID NO: 2964415 - RNA, 19 nt, Artificial Sequence
  Description of Artificial Sequence: Synthetic oligonucleotide
aaucggcacaccgauagac

SEQ ID NO: 2964416 - RNA, 19 nt, Artificial Sequence
  Description of Artificial Sequence: Synthetic oligonucleotide
uccucuggcagccacuugg

SEQ ID NO: 2964417 - RNA, 19 nt, Artificial Sequence
  Description of Artificial Sequence: Synthetic oligonucleotide
aaaaggacuacaguucucu

SEQ ID NO: 2964418 - RNA, 19 nt, Artificial Sequence
  Description of Artificial Sequence: Synthetic oligonucleotide
gauguuggacaucuggcag

SEQ ID NO: 2964419 - RNA, 19 nt, Artificial Sequence
  Description of Artificial Sequence: Synthetic oligonucleotide
uaggugacugugauguugg

SEQ ID NO: 2964420 - RNA, 19 nt, Artificial Sequence
  Description of Artificial Sequence: Synthetic oligonucleotide
uuuuggaagauguuuccac

SEQ ID NO: 2964421 - RNA, 19 nt, Artificial Sequence
  Description of Artificial Sequence: Synthetic oligonucleotide
uuuucagcaugucaggcaa

SEQ ID NO: 2964422 - RNA, 19 nt, Artificial Sequence
  Description of Artificial Sequence: Synthetic oligonucleotide
gaaauuuauuuaucuucgc

SEQ ID NO: 2964423 - RNA, 19 nt, Artificial Sequence
  Description of Artificial Sequence: Synthetic oligonucleotide
caggcaaaaucagaaaucg

SEQ ID NO: 2964424 - RNA, 19 nt, Artificial Sequence
  Description of Artificial Sequence: Synthetic oligonucleotide
uuggacaucuggcaguuca

SEQ ID NO: 2964425 - RNA, 19 nt, Artificial Sequence
  Description of Artificial Sequence: Synthetic oligonucleotide
ucaggcaaaaucagaaauc

SEQ ID NO: 2964426 - RNA, 19 nt, Artificial Sequence
  Description of Artificial Sequence: Synthetic oligonucleotide
gauagcagcuuuuccucgg

SEQ ID NO: 2964427 - RNA, 19 nt, Artificial Sequence
  Description of Artificial Sequence: Synthetic oligonucleotide
ucugcuucaaugagcuucc

SEQ ID NO: 2964428 - RNA, 19 nt, Artificial Sequence
  Description of Artificial Sequence: Synthetic oligonucleotide
aggauagcagcuuuuccuc

SEQ ID NO: 2964429 - RNA, 19 nt, Artificial Sequence
  Description of Artificial Sequence: Synthetic oligonucleotide
ucagaaaucggaucuugcu

SEQ ID NO: 2964430 - RNA, 19 nt, Artificial Sequence
  Description of Artificial Sequence: Synthetic oligonucleotide
uauguauaccuguuccagc

SEQ ID NO: 2964431 - RNA, 19 nt, Artificial Sequence
  Description of Artificial Sequence: Synthetic oligonucleotide
ugauguuggacaucuggca

SEQ ID NO: 2964432 - RNA, 19 nt, Artificial Sequence
  Description of Artificial Sequence: Synthetic oligonucleotide
uuauuuaucuucgcuuuug

SEQ ID NO: 2964433 - RNA, 19 nt, Artificial Sequence
  Description of Artificial Sequence: Synthetic oligonucleotide
cuucaaugagcuucccucg

SEQ ID NO: 2964434 - RNA, 19 nt, Artificial Sequence
  Description of Artificial Sequence: Synthetic oligonucleotide
auguauaccuguuccagcu

SEQ ID NO: 2964435 - RNA, 19 nt, Artificial Sequence
  Description of Artificial Sequence: Synthetic oligonucleotide
caaaaucagaaaucggauc

SEQ ID NO: 2964436 - RNA, 19 nt, Artificial Sequence
  Description of Artificial Sequence: Synthetic oligonucleotide
uguuggucucacaaguuac

SEQ ID NO: 2964437 - RNA, 19 nt, Artificial Sequence
  Description of Artificial Sequence: Synthetic oligonucleotide
ucuggcagccacuugggcc

SEQ ID NO: 2964438 - RNA, 19 nt, Artificial Sequence
  Description of Artificial Sequence: Synthetic oligonucleotide
uuggaagauguuuccacgc

SEQ ID NO: 2964439 - RNA, 19 nt, Artificial Sequence
  Description of Artificial Sequence: Synthetic oligonucleotide
ugcaagacuuuaaucggca

SEQ ID NO: 2964440 - RNA, 19 nt, Artificial Sequence
  Description of Artificial Sequence: Synthetic oligonucleotide
cuacaguucucuuccacag

SEQ ID NO: 2964441 - RNA, 19 nt, Artificial Sequence
  Description of Artificial Sequence: Synthetic oligonucleotide
ugggccuucaggauagcag

SEQ ID NO: 2964442 - RNA, 19 nt, Artificial Sequence
  Description of Artificial Sequence: Synthetic oligonucleotide
ucauacucuuuaacauggg

SEQ ID NO: 2964443 - RNA, 19 nt, Artificial Sequence
  Description of Artificial Sequence: Synthetic oligonucleotide
auacucuuuaacaugggug

SEQ ID NO: 2964444 - RNA, 19 nt, Artificial Sequence
  Description of Artificial Sequence: Synthetic oligonucleotide
aaucagaaaucggaucuug

SEQ ID NO: 2964445 - RNA, 19 nt, Artificial Sequence
  Description of Artificial Sequence: Synthetic oligonucleotide
aguucauguuguccucugc

SEQ ID NO: 2964446 - RNA, 19 nt, Artificial Sequence
  Description of Artificial Sequence: Synthetic oligonucleotide
uggaagauguuuccacgcc

SEQ ID NO: 2964447 - RNA, 19 nt, Artificial Sequence
  Description of Artificial Sequence: Synthetic oligonucleotide
ucaggauagcagcuuuucc

SEQ ID NO: 2964448 - RNA, 19 nt, Artificial Sequence
  Description of Artificial Sequence: Synthetic oligonucleotide
agccccggagccuugauuc

SEQ ID NO: 2964449 - RNA, 19 nt, Artificial Sequence
  Description of Artificial Sequence: Synthetic oligonucleotide
acuacaguucucuuccaca

SEQ ID NO: 2964450 - RNA, 19 nt, Artificial Sequence
  Description of Artificial Sequence: Synthetic oligonucleotide
acagaaauuuauuuaucuu

SEQ ID NO: 2964451 - RNA, 19 nt, Artificial Sequence
  Description of Artificial Sequence: Synthetic oligonucleotide
uuguccucugcuucaauga

SEQ ID NO: 2964452 - RNA, 19 nt, Artificial Sequence
  Description of Artificial Sequence: Synthetic oligonucleotide
uuccacagaaauuuauuua

SEQ ID NO: 2964453 - RNA, 19 nt, Artificial Sequence
  Description of Artificial Sequence: Synthetic oligonucleotide
cucacaaguuacgaugugg

SEQ ID NO: 2964454 - RNA, 19 nt, Artificial Sequence
  Description of Artificial Sequence: Synthetic oligonucleotide
ucagccucgugcaagacuu

SEQ ID NO: 2964455 - RNA, 19 nt, Artificial Sequence
  Description of Artificial Sequence: Synthetic oligonucleotide
ggucucacaaguuacgaug

SEQ ID NO: 2964456 - RNA, 19 nt, Artificial Sequence
  Description of Artificial Sequence: Synthetic oligonucleotide
uacaccucgccaguguugg

SEQ ID NO: 2964457 - RNA, 19 nt, Artificial Sequence
  Description of Artificial Sequence: Synthetic oligonucleotide
cagaaaucggaucuugcug

SEQ ID NO: 2964458 - RNA, 19 nt, Artificial Sequence
  Description of Artificial Sequence: Synthetic oligonucleotide
acaccgauagacaucuugg

SEQ ID NO: 2964459 - RNA, 19 nt, Artificial Sequence
  Description of Artificial Sequence: Synthetic oligonucleotide
aucuuggcaggaguguucc

SEQ ID NO: 2964460 - RNA, 19 nt, Artificial Sequence
  Description of Artificial Sequence: Synthetic oligonucleotide
uuuaacaugggugcguuuu

SEQ ID NO: 2964461 - RNA, 19 nt, Artificial Sequence
  Description of Artificial Sequence: Synthetic oligonucleotide
ucuuccacagaaauuuauu

SEQ ID NO: 2964462 - RNA, 19 nt, Artificial Sequence
  Description of Artificial Sequence: Synthetic oligonucleotide
gaagauguuuccacgcccc

SEQ ID NO: 2964463 - RNA, 19 nt, Artificial Sequence
  Description of Artificial Sequence: Synthetic oligonucleotide
agcaugucaggcaaaauca

SEQ ID NO: 2964464 - RNA, 19 nt, Artificial Sequence
  Description of Artificial Sequence: Synthetic oligonucleotide
aucagaaaucggaucuugc

SEQ ID NO: 2964465 - RNA, 19 nt, Artificial Sequence
  Description of Artificial Sequence: Synthetic oligonucleotide
acaguucucuuccacagaa

SEQ ID NO: 2964466 - RNA, 19 nt, Artificial Sequence
  Description of Artificial Sequence: Synthetic oligonucleotide
cagcaugucaggcaaaauc

SEQ ID NO: 2964467 - RNA, 19 nt, Artificial Sequence
  Description of Artificial Sequence: Synthetic oligonucleotide
auuuaucuucgcuuuugga

SEQ ID NO: 2964468 - RNA, 19 nt, Artificial Sequence
  Description of Artificial Sequence: Synthetic oligonucleotide
guuguccucugcuucaaug

SEQ ID NO: 2964469 - RNA, 19 nt, Artificial Sequence
  Description of Artificial Sequence: Synthetic oligonucleotide
uuuauuuaucuucgcuuuu

SEQ ID NO: 2964470 - RNA, 19 nt, Artificial Sequence
  Description of Artificial Sequence: Synthetic oligonucleotide
accgauagacaucuuggca

SEQ ID NO: 2964471 - RNA, 19 nt, Artificial Sequence
  Description of Artificial Sequence: Synthetic oligonucleotide
gaaaucggaucuugcugcc

SEQ ID NO: 2964472 - RNA, 19 nt, Artificial Sequence
  Description of Artificial Sequence: Synthetic oligonucleotide
cucugcuucaaugagcuuc

SEQ ID NO: 2964473 - RNA, 19 nt, Artificial Sequence
  Description of Artificial Sequence: Synthetic oligonucleotide
uucaaugagcuucccucga

SEQ ID NO: 2964474 - RNA, 19 nt, Artificial Sequence
  Description of Artificial Sequence: Synthetic oligonucleotide
uguauaccuguuccagcug

SEQ ID NO: 2964475 - RNA, 19 nt, Artificial Sequence
  Description of Artificial Sequence: Synthetic oligonucleotide
caucuggcaguucauguug

SEQ ID NO: 2964476 - RNA, 19 nt, Artificial Sequence
  Description of Artificial Sequence: Synthetic oligonucleotide
ggcaaaaucagaaaucgga

SEQ ID NO: 2964477 - RNA, 19 nt, Artificial Sequence
  Description of Artificial Sequence: Synthetic oligonucleotide
ccgauagacaucuuggcag

SEQ ID NO: 2964478 - RNA, 19 nt, Artificial Sequence
  Description of Artificial Sequence: Synthetic oligonucleotide
uaccuguuccagcugugcc

SEQ ID NO: 2964479 - RNA, 19 nt, Artificial Sequence
  Description of Artificial Sequence: Synthetic oligonucleotide
guuggucucacaaguuacg

SEQ ID NO: 2964480 - RNA, 19 nt, Artificial Sequence
  Description of Artificial Sequence: Synthetic oligonucleotide
cacaccgauagacaucuug

SEQ ID NO: 2964481 - RNA, 19 nt, Artificial Sequence
  Description of Artificial Sequence: Synthetic oligonucleotide
cacaaguuacgauguggcc

SEQ ID NO: 2964482 - RNA, 19 nt, Artificial Sequence
  Description of Artificial Sequence: Synthetic oligonucleotide
uuccacgccccauuccacg

SEQ ID NO: 2964483 - RNA, 19 nt, Artificial Sequence
  Description of Artificial Sequence: Synthetic oligonucleotide
gcuucaaugagcuucccuc

SEQ ID NO: 2964484 - RNA, 19 nt, Artificial Sequence
  Description of Artificial Sequence: Synthetic oligonucleotide
uauaccuguuccagcugug

SEQ ID NO: 2964485 - RNA, 19 nt, Artificial Sequence
  Description of Artificial Sequence: Synthetic oligonucleotide
auaccuguuccagcugugc

SEQ ID NO: 2964486 - RNA, 19 nt, Artificial Sequence
  Description of Artificial Sequence: Synthetic oligonucleotide
agcugugccacucugccau

SEQ ID NO: 2964487 - RNA, 19 nt, Artificial Sequence
  Description of Artificial Sequence: Synthetic oligonucleotide
agcuuuuccucggccagcc

SEQ ID NO: 2964488 - RNA, 19 nt, Artificial Sequence
  Description of Artificial Sequence: Synthetic oligonucleotide
gugauguuggacaucuggc

SEQ ID NO: 2964489 - RNA, 19 nt, Artificial Sequence
  Description of Artificial Sequence: Synthetic oligonucleotide
aucucuguaggugacugug

SEQ ID NO: 2964490 - RNA, 19 nt, Artificial Sequence
  Description of Artificial Sequence: Synthetic oligonucleotide
ucuguaggugacugugaug

SEQ ID NO: 2964491 - RNA, 19 nt, Artificial Sequence
  Description of Artificial Sequence: Synthetic oligonucleotide
ugucaggcaaaaucagaaa

SEQ ID NO: 2964492 - RNA, 19 nt, Artificial Sequence
  Description of Artificial Sequence: Synthetic oligonucleotide
uguuuccacgccccauucc

SEQ ID NO: 2964493 - RNA, 19 nt, Artificial Sequence
  Description of Artificial Sequence: Synthetic oligonucleotide
acucugccaucucuguagg

SEQ ID NO: 2964494 - RNA, 19 nt, Artificial Sequence
  Description of Artificial Sequence: Synthetic oligonucleotide
ucucacaaguuacgaugug

SEQ ID NO: 2964495 - RNA, 19 nt, Artificial Sequence
  Description of Artificial Sequence: Synthetic oligonucleotide
cacagaaauuuauuuaucu

SEQ ID NO: 2964496 - RNA, 19 nt, Artificial Sequence
  Description of Artificial Sequence: Synthetic oligonucleotide
gacuacaguucucuuccac

SEQ ID NO: 2964497 - RNA, 19 nt, Artificial Sequence
  Description of Artificial Sequence: Synthetic oligonucleotide
aagauguuuccacgcccca

SEQ ID NO: 2964498 - RNA, 19 nt, Artificial Sequence
  Description of Artificial Sequence: Synthetic oligonucleotide
auguuggacaucuggcagu

SEQ ID NO: 2964499 - RNA, 19 nt, Artificial Sequence
  Description of Artificial Sequence: Synthetic oligonucleotide
auguuuccacgccccauuc

SEQ ID NO: 2964500 - RNA, 19 nt, Artificial Sequence
  Description of Artificial Sequence: Synthetic oligonucleotide
ugcuucaaugagcuucccu

SEQ ID NO: 2964501 - RNA, 19 nt, Artificial Sequence
  Description of Artificial Sequence: Synthetic oligonucleotide
caccgauagacaucuuggc

SEQ ID NO: 2964502 - RNA, 19 nt, Artificial Sequence
  Description of Artificial Sequence: Synthetic oligonucleotide
acucuuuaacaugggugcg

SEQ ID NO: 2964503 - RNA, 19 nt, Artificial Sequence
  Description of Artificial Sequence: Synthetic oligonucleotide
caagacuuuaaucggcaca

SEQ ID NO: 2964504 - RNA, 19 nt, Artificial Sequence
  Description of Artificial Sequence: Synthetic oligonucleotide
guuacgauguggcccucag

SEQ ID NO: 2964505 - RNA, 19 nt, Artificial Sequence
  Description of Artificial Sequence: Synthetic oligonucleotide
guuuccacgccccauucca

SEQ ID NO: 2964506 - RNA, 19 nt, Artificial Sequence
  Description of Artificial Sequence: Synthetic oligonucleotide
ucucuguaggugacuguga

SEQ ID NO: 2964507 - RNA, 19 nt, Artificial Sequence
  Description of Artificial Sequence: Synthetic oligonucleotide
ugccacguauguauaccug

SEQ ID NO: 2964508 - RNA, 19 nt, Artificial Sequence
  Description of Artificial Sequence: Synthetic oligonucleotide
uuccacguccucuuccucu

SEQ ID NO: 2964509 - RNA, 19 nt, Artificial Sequence
  Description of Artificial Sequence: Synthetic oligonucleotide
cucgugcaagacuuuaauc

SEQ ID NO: 2964510 - RNA, 19 nt, Artificial Sequence
  Description of Artificial Sequence: Synthetic oligonucleotide
uuggucucacaaguuacga

SEQ ID NO: 2964511 - RNA, 19 nt, Artificial Sequence
  Description of Artificial Sequence: Synthetic oligonucleotide
auagacaucuuggcaggag

SEQ ID NO: 2964512 - RNA, 19 nt, Artificial Sequence
  Description of Artificial Sequence: Synthetic oligonucleotide
ggaagauguuuccacgccc

SEQ ID NO: 2964513 - RNA, 19 nt, Artificial Sequence
  Description of Artificial Sequence: Synthetic oligonucleotide
gaucuugcugccacguaug

SEQ ID NO: 2964514 - RNA, 19 nt, Artificial Sequence
  Description of Artificial Sequence: Synthetic oligonucleotide
agcagcuuuuccucggcca

SEQ ID NO: 2964515 - RNA, 19 nt, Artificial Sequence
  Description of Artificial Sequence: Synthetic oligonucleotide
augucaggcaaaaucagaa

SEQ ID NO: 2964516 - RNA, 19 nt, Artificial Sequence
  Description of Artificial Sequence: Synthetic oligonucleotide
ucaaugagcuucccucgau

SEQ ID NO: 2964517 - RNA, 19 nt, Artificial Sequence
  Description of Artificial Sequence: Synthetic oligonucleotide
agacuuuaaucggcacacc

SEQ ID NO: 2964518 - RNA, 19 nt, Artificial Sequence
  Description of Artificial Sequence: Synthetic oligonucleotide
accuguuccagcugugcca

SEQ ID NO: 2964519 - RNA, 19 nt, Artificial Sequence
  Description of Artificial Sequence: Synthetic oligonucleotide
aaaggacuacaguucucuu

SEQ ID NO: 2964520 - RNA, 19 nt, Artificial Sequence
  Description of Artificial Sequence: Synthetic oligonucleotide
ucggcacaccgauagacau

SEQ ID NO: 2964521 - RNA, 19 nt, Artificial Sequence
  Description of Artificial Sequence: Synthetic oligonucleotide
acuuuaaucggcacaccga

SEQ ID NO: 2964522 - RNA, 19 nt, Artificial Sequence
  Description of Artificial Sequence: Synthetic oligonucleotide
aaaucagaaaucggaucuu

SEQ ID NO: 2964523 - RNA, 19 nt, Artificial Sequence
  Description of Artificial Sequence: Synthetic oligonucleotide
caugucaggcaaaaucaga

SEQ ID NO: 2964524 - RNA, 19 nt, Artificial Sequence
  Description of Artificial Sequence: Synthetic oligonucleotide
uucaggauagcagcuuuuc

SEQ ID NO: 2964525 - RNA, 19 nt, Artificial Sequence
  Description of Artificial Sequence: Synthetic oligonucleotide
uccucuuccucuggcagcc

SEQ ID NO: 2964526 - RNA, 19 nt, Artificial Sequence
  Description of Artificial Sequence: Synthetic oligonucleotide
uuuaaucggcacaccgaua

SEQ ID NO: 2964527 - RNA, 19 nt, Artificial Sequence
  Description of Artificial Sequence: Synthetic oligonucleotide
ggauagcagcuuuuccucg

SEQ ID NO: 2964528 - RNA, 19 nt, Artificial Sequence
  Description of Artificial Sequence: Synthetic oligonucleotide
gcuuuuggaagauguuucc

SEQ ID NO: 2964529 - RNA, 19 nt, Artificial Sequence
  Description of Artificial Sequence: Synthetic oligonucleotide
uccagcugugccacucugc

SEQ ID NO: 2964530 - RNA, 19 nt, Artificial Sequence
  Description of Artificial Sequence: Synthetic oligonucleotide
cuugcugccacguauguau

SEQ ID NO: 2964531 - RNA, 19 nt, Artificial Sequence
  Description of Artificial Sequence: Synthetic oligonucleotide
uccucggccagccccggag

SEQ ID NO: 2964532 - RNA, 19 nt, Artificial Sequence
  Description of Artificial Sequence: Synthetic oligonucleotide
uuacgauguggcccucagc

SEQ ID NO: 2964533 - RNA, 19 nt, Artificial Sequence
  Description of Artificial Sequence: Synthetic oligonucleotide
uucagcaugucaggcaaaa

SEQ ID NO: 2964534 - RNA, 19 nt, Artificial Sequence
  Description of Artificial Sequence: Synthetic oligonucleotide
acuugggccuucaggauag

SEQ ID NO: 2964535 - RNA, 19 nt, Artificial Sequence
  Description of Artificial Sequence: Synthetic oligonucleotide
gauguggcccucagccucg

SEQ ID NO: 2964536 - RNA, 19 nt, Artificial Sequence
  Description of Artificial Sequence: Synthetic oligonucleotide
ugacugugauguuggacau

SEQ ID NO: 2964537 - RNA, 19 nt, Artificial Sequence
  Description of Artificial Sequence: Synthetic oligonucleotide
aucggaucuugcugccacg

SEQ ID NO: 2964538 - RNA, 19 nt, Artificial Sequence
  Description of Artificial Sequence: Synthetic oligonucleotide
acaucuggcaguucauguu

SEQ ID NO: 2964539 - RNA, 19 nt, Artificial Sequence
  Description of Artificial Sequence: Synthetic oligonucleotide
cuguaggugacugugaugu

SEQ ID NO: 2964540 - RNA, 19 nt, Artificial Sequence
  Description of Artificial Sequence: Synthetic oligonucleotide
aggcaaaaucagaaaucgg

SEQ ID NO: 2964541 - RNA, 19 nt, Artificial Sequence
  Description of Artificial Sequence: Synthetic oligonucleotide
cgugcaagacuuuaaucgg

SEQ ID NO: 2964542 - RNA, 19 nt, Artificial Sequence
  Description of Artificial Sequence: Synthetic oligonucleotide
gucaggcaaaaucagaaau

SEQ ID NO: 2964543 - RNA, 19 nt, Artificial Sequence
  Description of Artificial Sequence: Synthetic oligonucleotide
gacaucuggcaguucaugu

SEQ ID NO: 2964544 - RNA, 19 nt, Artificial Sequence
  Description of Artificial Sequence: Synthetic oligonucleotide
ucuuuaacaugggugcguu

SEQ ID NO: 2964545 - RNA, 19 nt, Artificial Sequence
  Description of Artificial Sequence: Synthetic oligonucleotide
uaaucggcacaccgauaga

SEQ ID NO: 2964546 - RNA, 19 nt, Artificial Sequence
  Description of Artificial Sequence: Synthetic oligonucleotide
cacguauguauaccuguuc

SEQ ID NO: 2964547 - RNA, 19 nt, Artificial Sequence
  Description of Artificial Sequence: Synthetic oligonucleotide
uggucucacaaguuacgau

SEQ ID NO: 2964548 - RNA, 19 nt, Artificial Sequence
  Description of Artificial Sequence: Synthetic oligonucleotide
gugcaagacuuuaaucggc

SEQ ID NO: 2964549 - RNA, 19 nt, Artificial Sequence
  Description of Artificial Sequence: Synthetic oligonucleotide
uucgcuuuuggaagauguu

SEQ ID NO: 2964550 - RNA, 19 nt, Artificial Sequence
  Description of Artificial Sequence: Synthetic oligonucleotide
ucccucgauacaccucgcc

SEQ ID NO: 2964551 - RNA, 19 nt, Artificial Sequence
  Description of Artificial Sequence: Synthetic oligonucleotide
uagcagcuuuuccucggcc

SEQ ID NO: 2964552 - RNA, 19 nt, Artificial Sequence
  Description of Artificial Sequence: Synthetic oligonucleotide
caggauagcagcuuuuccu

SEQ ID NO: 2964553 - RNA, 19 nt, Artificial Sequence
  Description of Artificial Sequence: Synthetic oligonucleotide
auuccacguccucuuccuc

SEQ ID NO: 2964554 - RNA, 19 nt, Artificial Sequence
  Description of Artificial Sequence: Synthetic oligonucleotide
augagcuucccucgauaca

SEQ ID NO: 2964555 - RNA, 19 nt, Artificial Sequence
  Description of Artificial Sequence: Synthetic oligonucleotide
uuuccacgccccauuccac

SEQ ID NO: 2964556 - RNA, 19 nt, Artificial Sequence
  Description of Artificial Sequence: Synthetic oligonucleotide
uuccagcugugccacucug

SEQ ID NO: 2964557 - RNA, 19 nt, Artificial Sequence
  Description of Artificial Sequence: Synthetic oligonucleotide
cuucgcuuuuggaagaugu

SEQ ID NO: 2964558 - RNA, 19 nt, Artificial Sequence
  Description of Artificial Sequence: Synthetic oligonucleotide
caucuuggcaggaguguuc

SEQ ID NO: 2964559 - RNA, 19 nt, Artificial Sequence
  Description of Artificial Sequence: Synthetic oligonucleotide
aaaucggaucuugcugcca

SEQ ID NO: 2964560 - RNA, 19 nt, Artificial Sequence
  Description of Artificial Sequence: Synthetic oligonucleotide
ggagccuugauucuuauuu

SEQ ID NO: 2964561 - RNA, 19 nt, Artificial Sequence
  Description of Artificial Sequence: Synthetic oligonucleotide
ugcugccacguauguauac

SEQ ID NO: 2964562 - RNA, 19 nt, Artificial Sequence
  Description of Artificial Sequence: Synthetic oligonucleotide
caaguuacgauguggcccu

SEQ ID NO: 2964563 - RNA, 19 nt, Artificial Sequence
  Description of Artificial Sequence: Synthetic oligonucleotide
agcuucccucgauacaccu

SEQ ID NO: 2964564 - RNA, 19 nt, Artificial Sequence
  Description of Artificial Sequence: Synthetic oligonucleotide
cuuuuggaagauguuucca

SEQ ID NO: 2964565 - RNA, 19 nt, Artificial Sequence
  Description of Artificial Sequence: Synthetic oligonucleotide
ccucgauacaccucgccag

SEQ ID NO: 2964566 - RNA, 19 nt, Artificial Sequence
  Description of Artificial Sequence: Synthetic oligonucleotide
cuuuaaucggcacaccgau

SEQ ID NO: 2964567 - RNA, 19 nt, Artificial Sequence
  Description of Artificial Sequence: Synthetic oligonucleotide
aucuugcugccacguaugu

SEQ ID NO: 2964568 - RNA, 19 nt, Artificial Sequence
  Description of Artificial Sequence: Synthetic oligonucleotide
accucgccaguguuggucu

SEQ ID NO: 2964569 - RNA, 19 nt, Artificial Sequence
  Description of Artificial Sequence: Synthetic oligonucleotide
guauaccuguuccagcugu

SEQ ID NO: 2964570 - RNA, 19 nt, Artificial Sequence
  Description of Artificial Sequence: Synthetic oligonucleotide
ugccaucucuguaggugac

SEQ ID NO: 2964571 - RNA, 19 nt, Artificial Sequence
  Description of Artificial Sequence: Synthetic oligonucleotide
uggacaucuggcaguucau

SEQ ID NO: 2964572 - RNA, 19 nt, Artificial Sequence
  Description of Artificial Sequence: Synthetic oligonucleotide
uuucagcaugucaggcaaa

SEQ ID NO: 2964573 - RNA, 19 nt, Artificial Sequence
  Description of Artificial Sequence: Synthetic oligonucleotide
ucuucgcuuuuggaagaug

SEQ ID NO: 2964574 - RNA, 19 nt, Artificial Sequence
  Description of Artificial Sequence: Synthetic oligonucleotide
cuuccacagaaauuuauuu

SEQ ID NO: 2964575 - RNA, 19 nt, Artificial Sequence
  Description of Artificial Sequence: Synthetic oligonucleotide
guguuggucucacaaguua

SEQ ID NO: 2964576 - RNA, 19 nt, Artificial Sequence
  Description of Artificial Sequence: Synthetic oligonucleotide
uguuggacaucuggcaguu

SEQ ID NO: 2964577 - RNA, 19 nt, Artificial Sequence
  Description of Artificial Sequence: Synthetic oligonucleotide
cacgccccauuccacgucc

SEQ ID NO: 2964578 - RNA, 19 nt, Artificial Sequence
  Description of Artificial Sequence: Synthetic oligonucleotide
ucuggcaguucauguuguc

SEQ ID NO: 2964579 - RNA, 19 nt, Artificial Sequence
  Description of Artificial Sequence: Synthetic oligonucleotide
cgauagacaucuuggcagg

SEQ ID NO: 2964580 - RNA, 19 nt, Artificial Sequence
  Description of Artificial Sequence: Synthetic oligonucleotide
cauacucuuuaacaugggu

SEQ ID NO: 2964581 - RNA, 19 nt, Artificial Sequence
  Description of Artificial Sequence: Synthetic oligonucleotide
gcagcuuuuccucggccag

SEQ ID NO: 2964582 - RNA, 19 nt, Artificial Sequence
  Description of Artificial Sequence: Synthetic oligonucleotide
ucggaucuugcugccacgu

SEQ ID NO: 2964583 - RNA, 19 nt, Artificial Sequence
  Description of Artificial Sequence: Synthetic oligonucleotide
ucgauacaccucgccagug

SEQ ID NO: 2964584 - RNA, 19 nt, Artificial Sequence
  Description of Artificial Sequence: Synthetic oligonucleotide
uccacgccccauuccacgu

SEQ ID NO: 2964585 - RNA, 19 nt, Artificial Sequence
  Description of Artificial Sequence: Synthetic oligonucleotide
acgauguggcccucagccu

SEQ ID NO: 2964586 - RNA, 19 nt, Artificial Sequence
  Description of Artificial Sequence: Synthetic oligonucleotide
ccaguguuggucucacaag

SEQ ID NO: 2964587 - RNA, 19 nt, Artificial Sequence
  Description of Artificial Sequence: Synthetic oligonucleotide
ugugccacucugccaucuc

SEQ ID NO: 2964588 - RNA, 19 nt, Artificial Sequence
  Description of Artificial Sequence: Synthetic oligonucleotide
uugggccuucaggauagca

SEQ ID NO: 2964589 - RNA, 19 nt, Artificial Sequence
  Description of Artificial Sequence: Synthetic oligonucleotide
cucuuccucuggcagccac

SEQ ID NO: 2964590 - RNA, 19 nt, Artificial Sequence
  Description of Artificial Sequence: Synthetic oligonucleotide
uguuguccucugcuucaau

SEQ ID NO: 2964591 - RNA, 19 nt, Artificial Sequence
  Description of Artificial Sequence: Synthetic oligonucleotide
gccaguguuggucucacaa

SEQ ID NO: 2964592 - RNA, 19 nt, Artificial Sequence
  Description of Artificial Sequence: Synthetic oligonucleotide
auacaccucgccaguguug

SEQ ID NO: 2964593 - RNA, 19 nt, Artificial Sequence
  Description of Artificial Sequence: Synthetic oligonucleotide
uucccucgauacaccucgc

SEQ ID NO: 2964594 - RNA, 19 nt, Artificial Sequence
  Description of Artificial Sequence: Synthetic oligonucleotide
acaucuuggcaggaguguu

SEQ ID NO: 2964595 - RNA, 19 nt, Artificial Sequence
  Description of Artificial Sequence: Synthetic oligonucleotide
aucggcacaccgauagaca

SEQ ID NO: 2964596 - RNA, 19 nt, Artificial Sequence
  Description of Artificial Sequence: Synthetic oligonucleotide
gcugccacguauguauacc

SEQ ID NO: 2964597 - RNA, 19 nt, Artificial Sequence
  Description of Artificial Sequence: Synthetic oligonucleotide
ggugacugugauguuggac

SEQ ID NO: 2964598 - RNA, 19 nt, Artificial Sequence
  Description of Artificial Sequence: Synthetic oligonucleotide
gcaagacuuuaaucggcac

SEQ ID NO: 2964599 - RNA, 19 nt, Artificial Sequence
  Description of Artificial Sequence: Synthetic oligonucleotide
gauacaccucgccaguguu

SEQ ID NO: 2964600 - RNA, 19 nt, Artificial Sequence
  Description of Artificial Sequence: Synthetic oligonucleotide
uuccucuggcagccacuug

SEQ ID NO: 2964601 - RNA, 19 nt, Artificial Sequence
  Description of Artificial Sequence: Synthetic oligonucleotide
cuggcagccacuugggccu

SEQ ID NO: 2964602 - RNA, 19 nt, Artificial Sequence
  Description of Artificial Sequence: Synthetic oligonucleotide
ucuugcugccacguaugua

SEQ ID NO: 2964603 - RNA, 19 nt, Artificial Sequence
  Description of Artificial Sequence: Synthetic oligonucleotide
agauguuuccacgccccau

SEQ ID NO: 2964604 - RNA, 19 nt, Artificial Sequence
  Description of Artificial Sequence: Synthetic oligonucleotide
uugcugccacguauguaua

SEQ ID NO: 2964605 - RNA, 19 nt, Artificial Sequence
  Description of Artificial Sequence: Synthetic oligonucleotide
uguaggugacugugauguu

SEQ ID NO: 2964606 - RNA, 19 nt, Artificial Sequence
  Description of Artificial Sequence: Synthetic oligonucleotide
ucagcaugucaggcaaaau

SEQ ID NO: 2964607 - RNA, 19 nt, Artificial Sequence
  Description of Artificial Sequence: Synthetic oligonucleotide
gacaucuuggcaggagugu

SEQ ID NO: 2964608 - RNA, 19 nt, Artificial Sequence
  Description of Artificial Sequence: Synthetic oligonucleotide
aguguuggucucacaaguu

SEQ ID NO: 2964609 - RNA, 19 nt, Artificial Sequence
  Description of Artificial Sequence: Synthetic oligonucleotide
cucggccagccccggagcc

SEQ ID NO: 2964610 - RNA, 19 nt, Artificial Sequence
  Description of Artificial Sequence: Synthetic oligonucleotide
gagcuucccucgauacacc

SEQ ID NO: 2964611 - RNA, 19 nt, Artificial Sequence
  Description of Artificial Sequence: Synthetic oligonucleotide
gucucacaaguuacgaugu

SEQ ID NO: 2964612 - RNA, 19 nt, Artificial Sequence
  Description of Artificial Sequence: Synthetic oligonucleotide
ccauuccacguccucuucc

SEQ ID NO: 2964613 - RNA, 19 nt, Artificial Sequence
  Description of Artificial Sequence: Synthetic oligonucleotide
aucuggcaguucauguugu

SEQ ID NO: 2964614 - RNA, 19 nt, Artificial Sequence
  Description of Artificial Sequence: Synthetic oligonucleotide
uuuccucggccagccccgg

SEQ ID NO: 2964615 - RNA, 19 nt, Artificial Sequence
  Description of Artificial Sequence: Synthetic oligonucleotide
caccucgccaguguugguc

SEQ ID NO: 2964616 - RNA, 19 nt, Artificial Sequence
  Description of Artificial Sequence: Synthetic oligonucleotide
cauuccacguccucuuccu

SEQ ID NO: 2964617 - RNA, 19 nt, Artificial Sequence
  Description of Artificial Sequence: Synthetic oligonucleotide
caaugagcuucccucgaua

SEQ ID NO: 2964618 - RNA, 19 nt, Artificial Sequence
  Description of Artificial Sequence: Synthetic oligonucleotide
gagccuugauucuuauuuu

SEQ ID NO: 2964619 - RNA, 19 nt, Artificial Sequence
  Description of Artificial Sequence: Synthetic oligonucleotide
cucuuccacagaaauuuau

SEQ ID NO: 2964620 - RNA, 19 nt, Artificial Sequence
  Description of Artificial Sequence: Synthetic oligonucleotide
gacugugauguuggacauc

SEQ ID NO: 2964621 - RNA, 19 nt, Artificial Sequence
  Description of Artificial Sequence: Synthetic oligonucleotide
aggugacugugauguugga

SEQ ID NO: 2964622 - RNA, 19 nt, Artificial Sequence
  Description of Artificial Sequence: Synthetic oligonucleotide
gcaaaaucagaaaucggau

SEQ ID NO: 2964623 - RNA, 19 nt, Artificial Sequence
  Description of Artificial Sequence: Synthetic oligonucleotide
ggcacaccgauagacaucu

SEQ ID NO: 2964624 - RNA, 19 nt, Artificial Sequence
  Description of Artificial Sequence: Synthetic oligonucleotide
cagcuuuuccucggccagc

SEQ ID NO: 2964625 - RNA, 19 nt, Artificial Sequence
  Description of Artificial Sequence: Synthetic oligonucleotide
cugugauguuggacaucug

SEQ ID NO: 2964626 - RNA, 19 nt, Artificial Sequence
  Description of Artificial Sequence: Synthetic oligonucleotide
cacuugggccuucaggaua

SEQ ID NO: 2964627 - RNA, 19 nt, Artificial Sequence
  Description of Artificial Sequence: Synthetic oligonucleotide
ggaucuugcugccacguau

SEQ ID NO: 2964628 - RNA, 19 nt, Artificial Sequence
  Description of Artificial Sequence: Synthetic oligonucleotide
ggcaguucauguuguccuc

SEQ ID NO: 2964629 - RNA, 19 nt, Artificial Sequence
  Description of Artificial Sequence: Synthetic oligonucleotide
cugccacguauguauaccu

SEQ ID NO: 2964630 - RNA, 19 nt, Artificial Sequence
  Description of Artificial Sequence: Synthetic oligonucleotide
aucuucgcuuuuggaagau

SEQ ID NO: 2964631 - RNA, 19 nt, Artificial Sequence
  Description of Artificial Sequence: Synthetic oligonucleotide
gccacguauguauaccugu

SEQ ID NO: 2964632 - RNA, 19 nt, Artificial Sequence
  Description of Artificial Sequence: Synthetic oligonucleotide
cucuguaggugacugugau

SEQ ID NO: 2964633 - RNA, 19 nt, Artificial Sequence
  Description of Artificial Sequence: Synthetic oligonucleotide
cguauguauaccuguucca

SEQ ID NO: 2964634 - RNA, 19 nt, Artificial Sequence
  Description of Artificial Sequence: Synthetic oligonucleotide
cucuuuaacaugggugcgu

SEQ ID NO: 2964635 - RNA, 19 nt, Artificial Sequence
  Description of Artificial Sequence: Synthetic oligonucleotide
cucgauacaccucgccagu

SEQ ID NO: 2964636 - RNA, 19 nt, Artificial Sequence
  Description of Artificial Sequence: Synthetic oligonucleotide
cguccucuuccucuggcag

SEQ ID NO: 2964637 - RNA, 19 nt, Artificial Sequence
  Description of Artificial Sequence: Synthetic oligonucleotide
cucagccucgugcaagacu

SEQ ID NO: 2964638 - RNA, 19 nt, Artificial Sequence
  Description of Artificial Sequence: Synthetic oligonucleotide
agccucgugcaagacuuua

SEQ ID NO: 2964639 - RNA, 19 nt, Artificial Sequence
  Description of Artificial Sequence: Synthetic oligonucleotide
uuccucggccagccccgga

SEQ ID NO: 2964640 - RNA, 19 nt, Artificial Sequence
  Description of Artificial Sequence: Synthetic oligonucleotide
gugccacucugccaucucu

SEQ ID NO: 2964641 - RNA, 19 nt, Artificial Sequence
  Description of Artificial Sequence: Synthetic oligonucleotide
cugcuucaaugagcuuccc

SEQ ID NO: 2964642 - RNA, 19 nt, Artificial Sequence
  Description of Artificial Sequence: Synthetic oligonucleotide
cccucgauacaccucgcca

SEQ ID NO: 2964643 - RNA, 19 nt, Artificial Sequence
  Description of Artificial Sequence: Synthetic oligonucleotide
ucggccagccccggagccu

SEQ ID NO: 2964644 - RNA, 19 nt, Artificial Sequence
  Description of Artificial Sequence: Synthetic oligonucleotide
acaccucgccaguguuggu

SEQ ID NO: 2964645 - RNA, 19 nt, Artificial Sequence
  Description of Artificial Sequence: Synthetic oligonucleotide
cagcugugccacucugcca

SEQ ID NO: 2964646 - RNA, 19 nt, Artificial Sequence
  Description of Artificial Sequence: Synthetic oligonucleotide
ggacuacaguucucuucca

SEQ ID NO: 2964647 - RNA, 19 nt, Artificial Sequence
  Description of Artificial Sequence: Synthetic oligonucleotide
cuucaggauagcagcuuuu

SEQ ID NO: 2964648 - RNA, 19 nt, Artificial Sequence
  Description of Artificial Sequence: Synthetic oligonucleotide
cuugggccuucaggauagc

SEQ ID NO: 2964649 - RNA, 19 nt, Artificial Sequence
  Description of Artificial Sequence: Synthetic oligonucleotide
caucucuguaggugacugu

SEQ ID NO: 2964650 - RNA, 19 nt, Artificial Sequence
  Description of Artificial Sequence: Synthetic oligonucleotide
cagccacuugggccuucag

SEQ ID NO: 2964651 - RNA, 19 nt, Artificial Sequence
  Description of Artificial Sequence: Synthetic oligonucleotide
gcccucagccucgugcaag

SEQ ID NO: 2964652 - RNA, 19 nt, Artificial Sequence
  Description of Artificial Sequence: Synthetic oligonucleotide
guuggacaucuggcaguuc

SEQ ID NO: 2964653 - RNA, 19 nt, Artificial Sequence
  Description of Artificial Sequence: Synthetic oligonucleotide
cuuuaacaugggugcguuu

SEQ ID NO: 2964654 - RNA, 19 nt, Artificial Sequence
  Description of Artificial Sequence: Synthetic oligonucleotide
gcuucccucgauacaccuc

SEQ ID NO: 2964655 - RNA, 19 nt, Artificial Sequence
  Description of Artificial Sequence: Synthetic oligonucleotide
gcaguucauguuguccucu

SEQ ID NO: 2964656 - RNA, 19 nt, Artificial Sequence
  Description of Artificial Sequence: Synthetic oligonucleotide
cucugccaucucuguaggu

SEQ ID NO: 2964657 - RNA, 19 nt, Artificial Sequence
  Description of Artificial Sequence: Synthetic oligonucleotide
cccauuccacguccucuuc

SEQ ID NO: 2964658 - RNA, 19 nt, Artificial Sequence
  Description of Artificial Sequence: Synthetic oligonucleotide
cccucagccucgugcaaga

SEQ ID NO: 2964659 - RNA, 19 nt, Artificial Sequence
  Description of Artificial Sequence: Synthetic oligonucleotide
gccacucugccaucucugu

SEQ ID NO: 2964660 - RNA, 19 nt, Artificial Sequence
  Description of Artificial Sequence: Synthetic oligonucleotide
cuuccucuggcagccacuu

SEQ ID NO: 2964661 - RNA, 19 nt, Artificial Sequence
  Description of Artificial Sequence: Synthetic oligonucleotide
ccucgugcaagacuuuaau

SEQ ID NO: 2964662 - RNA, 19 nt, Artificial Sequence
  Description of Artificial Sequence: Synthetic oligonucleotide
gcugugccacucugccauc

SEQ ID NO: 2964663 - RNA, 19 nt, Artificial Sequence
  Description of Artificial Sequence: Synthetic oligonucleotide
auguggcccucagccucgu

SEQ ID NO: 2964664 - RNA, 19 nt, Artificial Sequence
  Description of Artificial Sequence: Synthetic oligonucleotide
cggcacaccgauagacauc

SEQ ID NO: 2964665 - RNA, 19 nt, Artificial Sequence
  Description of Artificial Sequence: Synthetic oligonucleotide
gccucgugcaagacuuuaa

SEQ ID NO: 2964666 - RNA, 19 nt, Artificial Sequence
  Description of Artificial Sequence: Synthetic oligonucleotide
cugugccacucugccaucu

SEQ ID NO: 2964667 - RNA, 19 nt, Artificial Sequence
  Description of Artificial Sequence: Synthetic oligonucleotide
acgccccauuccacguccu

SEQ ID NO: 2964668 - RNA, 19 nt, Artificial Sequence
  Description of Artificial Sequence: Synthetic oligonucleotide
ggccuucaggauagcagcu

SEQ ID NO: 2964669 - RNA, 19 nt, Artificial Sequence
  Description of Artificial Sequence: Synthetic oligonucleotide
ccacgccccauuccacguc

SEQ ID NO: 2964670 - RNA, 19 nt, Artificial Sequence
  Description of Artificial Sequence: Synthetic oligonucleotide
ccacguauguauaccuguu

SEQ ID NO: 2964671 - RNA, 19 nt, Artificial Sequence
  Description of Artificial Sequence: Synthetic oligonucleotide
gccccauuccacguccucu

SEQ ID NO: 2964672 - RNA, 19 nt, Artificial Sequence
  Description of Artificial Sequence: Synthetic oligonucleotide
ccacucugccaucucugua

SEQ ID NO: 2964673 - RNA, 19 nt, Artificial Sequence
  Description of Artificial Sequence: Synthetic oligonucleotide
uggcagccacuugggccuu

SEQ ID NO: 2964674 - RNA, 19 nt, Artificial Sequence
  Description of Artificial Sequence: Synthetic oligonucleotide
cccggagccuugauucuua

SEQ ID NO: 2964675 - RNA, 19 nt, Artificial Sequence
  Description of Artificial Sequence: Synthetic oligonucleotide
ccucagccucgugcaagac

SEQ ID NO: 2964676 - RNA, 19 nt, Artificial Sequence
  Description of Artificial Sequence: Synthetic oligonucleotide
gccaucucuguaggugacu

SEQ ID NO: 2964677 - RNA, 19 nt, Artificial Sequence
  Description of Artificial Sequence: Synthetic oligonucleotide
cgauacaccucgccagugu

SEQ ID NO: 2964678 - RNA, 19 nt, Artificial Sequence
  Description of Artificial Sequence: Synthetic oligonucleotide
ggcccucagccucgugcaa

SEQ ID NO: 2964679 - RNA, 19 nt, Artificial Sequence
  Description of Artificial Sequence: Synthetic oligonucleotide
gccuucaggauagcagcuu

SEQ ID NO: 2964680 - RNA, 19 nt, Artificial Sequence
  Description of Artificial Sequence: Synthetic oligonucleotide
ccacuugggccuucaggau

SEQ ID NO: 2964681 - RNA, 19 nt, Artificial Sequence
  Description of Artificial Sequence: Synthetic oligonucleotide
cagccccggagccuugauu

SEQ ID NO: 2964682 - RNA, 19 nt, Artificial Sequence
  Description of Artificial Sequence: Synthetic oligonucleotide
gccccggagccuugauucu

SEQ ID NO: 2964683 - RNA, 19 nt, Artificial Sequence
  Description of Artificial Sequence: Synthetic oligonucleotide
ccccauuccacguccucuu

SEQ ID NO: 2964684 - RNA, 19 nt, Artificial Sequence
  Description of Artificial Sequence: Synthetic oligonucleotide
cgccccauuccacguccuc

SEQ ID NO: 2964685 - RNA, 19 nt, Artificial Sequence
  Description of Artificial Sequence: Synthetic oligonucleotide
cagccucgugcaagacuuu

SEQ ID NO: 2964686 - RNA, 19 nt, Artificial Sequence
  Description of Artificial Sequence: Synthetic oligonucleotide
cggaucuugcugccacgua

SEQ ID NO: 2964687 - RNA, 19 nt, Artificial Sequence
  Description of Artificial Sequence: Synthetic oligonucleotide
ggccagccccggagccuug

SEQ ID NO: 2964688 - RNA, 19 nt, Artificial Sequence
  Description of Artificial Sequence: Synthetic oligonucleotide
ccggagccuugauucuuau

SEQ ID NO: 2964689 - RNA, 19 nt, Artificial Sequence
  Description of Artificial Sequence: Synthetic oligonucleotide
ccucuuccucuggcagcca

SEQ ID NO: 2964690 - RNA, 19 nt, Artificial Sequence
  Description of Artificial Sequence: Synthetic oligonucleotide
cggagccuugauucuuauu

SEQ ID NO: 2964691 - RNA, 19 nt, Artificial Sequence
  Description of Artificial Sequence: Synthetic oligonucleotide
ccccggagccuugauucuu

SEQ ID NO: 2964692 - RNA, 19 nt, Artificial Sequence
  Description of Artificial Sequence: Synthetic oligonucleotide
gcacaccgauagacaucuu

SEQ ID NO: 2964693 - RNA, 19 nt, Artificial Sequence
  Description of Artificial Sequence: Synthetic oligonucleotide
cggccagccccggagccuu

SEQ ID NO: 2964694 - RNA, 19 nt, Artificial Sequence
  Description of Artificial Sequence: Synthetic oligonucleotide
aaaaucacauaguagagcc

SEQ ID NO: 2964695 - RNA, 19 nt, Artificial Sequence
  Description of Artificial Sequence: Synthetic oligonucleotide
aacaagagagaccugaccc

SEQ ID NO: 2964696 - RNA, 19 nt, Artificial Sequence
  Description of Artificial Sequence: Synthetic oligonucleotide
ugcaaaaucacauaguaga

SEQ ID NO: 2964697 - RNA, 19 nt, Artificial Sequence
  Description of Artificial Sequence: Synthetic oligonucleotide
uuuaacacaggccugagcu

SEQ ID NO: 2964698 - RNA, 19 nt, Artificial Sequence
  Description of Artificial Sequence: Synthetic oligonucleotide
aauagguccacagucaggg

SEQ ID NO: 2964699 - RNA, 19 nt, Artificial Sequence
  Description of Artificial Sequence: Synthetic oligonucleotide
acuaaguuggucuccaugg

SEQ ID NO: 2964700 - RNA, 19 nt, Artificial Sequence
  Description of Artificial Sequence: Synthetic oligonucleotide
uaucagaugacuccaggag

SEQ ID NO: 2964701 - RNA, 19 nt, Artificial Sequence
  Description of Artificial Sequence: Synthetic oligonucleotide
uucaguugcagaacaagag

SEQ ID NO: 2964702 - RNA, 19 nt, Artificial Sequence
  Description of Artificial Sequence: Synthetic oligonucleotide
aagagcacaaagcugguga

SEQ ID NO: 2964703 - RNA, 19 nt, Artificial Sequence
  Description of Artificial Sequence: Synthetic oligonucleotide
aucagaugacuccaggagc

SEQ ID NO: 2964704 - RNA, 19 nt, Artificial Sequence
  Description of Artificial Sequence: Synthetic oligonucleotide
uuuguaugccuccugagcu

SEQ ID NO: 2964705 - RNA, 19 nt, Artificial Sequence
  Description of Artificial Sequence: Synthetic oligonucleotide
agggguaucagaugacucc

SEQ ID NO: 2964706 - RNA, 19 nt, Artificial Sequence
  Description of Artificial Sequence: Synthetic oligonucleotide
agggaauagguccacaguc

SEQ ID NO: 2964707 - RNA, 19 nt, Artificial Sequence
  Description of Artificial Sequence: Synthetic oligonucleotide
guugucguaccucagaccc

SEQ ID NO: 2964708 - RNA, 19 nt, Artificial Sequence
  Description of Artificial Sequence: Synthetic oligonucleotide
uucaguugcaaaaucacau

SEQ ID NO: 2964709 - RNA, 19 nt, Artificial Sequence
  Description of Artificial Sequence: Synthetic oligonucleotide
ugcagaacaagagagaccu

SEQ ID NO: 2964710 - RNA, 19 nt, Artificial Sequence
  Description of Artificial Sequence: Synthetic oligonucleotide
ucagaugacuccaggagcc

SEQ ID NO: 2964711 - RNA, 19 nt, Artificial Sequence
  Description of Artificial Sequence: Synthetic oligonucleotide
acaagagagaccugacccc

SEQ ID NO: 2964712 - RNA, 19 nt, Artificial Sequence
  Description of Artificial Sequence: Synthetic oligonucleotide
uucaccaccaacucguuug

SEQ ID NO: 2964713 - RNA, 19 nt, Artificial Sequence
  Description of Artificial Sequence: Synthetic oligonucleotide
aaguuggucuccauggagc

SEQ ID NO: 2964714 - RNA, 19 nt, Artificial Sequence
  Description of Artificial Sequence: Synthetic oligonucleotide
aaucacauaguagagccca

SEQ ID NO: 2964715 - RNA, 19 nt, Artificial Sequence
  Description of Artificial Sequence: Synthetic oligonucleotide
ggugauagcagucugggag

SEQ ID NO: 2964716 - RNA, 19 nt, Artificial Sequence
  Description of Artificial Sequence: Synthetic oligonucleotide
ucaguugcagaacaagaga

SEQ ID NO: 2964717 - RNA, 19 nt, Artificial Sequence
  Description of Artificial Sequence: Synthetic oligonucleotide
uugcaaaaucacauaguag

SEQ ID NO: 2964718 - RNA, 19 nt, Artificial Sequence
  Description of Artificial Sequence: Synthetic oligonucleotide
guuuugagaucccagcucc

SEQ ID NO: 2964719 - RNA, 19 nt, Artificial Sequence
  Description of Artificial Sequence: Synthetic oligonucleotide
uaaguuggucuccauggag

SEQ ID NO: 2964720 - RNA, 19 nt, Artificial Sequence
  Description of Artificial Sequence: Synthetic oligonucleotide
ucuccauggagcaagggaa

SEQ ID NO: 2964721 - RNA, 19 nt, Artificial Sequence
  Description of Artificial Sequence: Synthetic oligonucleotide
caguugcagaacaagagag

SEQ ID NO: 2964722 - RNA, 19 nt, Artificial Sequence
  Description of Artificial Sequence: Synthetic oligonucleotide
cauaguagagcccacuuuc

SEQ ID NO: 2964723 - RNA, 19 nt, Artificial Sequence
  Description of Artificial Sequence: Synthetic oligonucleotide
gaucccagcuccuucuugg

SEQ ID NO: 2964724 - RNA, 19 nt, Artificial Sequence
  Description of Artificial Sequence: Synthetic oligonucleotide
agagaccugaccccgcacc

SEQ ID NO: 2964725 - RNA, 19 nt, Artificial Sequence
  Description of Artificial Sequence: Synthetic oligonucleotide
ggagcaagggaauaggucc

SEQ ID NO: 2964726 - RNA, 19 nt, Artificial Sequence
  Description of Artificial Sequence: Synthetic oligonucleotide
aaaucacauaguagagccc

SEQ ID NO: 2964727 - RNA, 19 nt, Artificial Sequence
  Description of Artificial Sequence: Synthetic oligonucleotide
uucguucaccaccaacucg

SEQ ID NO: 2964728 - RNA, 19 nt, Artificial Sequence
  Description of Artificial Sequence: Synthetic oligonucleotide
aggccugagcuucaguugc

SEQ ID NO: 2964729 - RNA, 19 nt, Artificial Sequence
  Description of Artificial Sequence: Synthetic oligonucleotide
cuccauacagauaggcucg

SEQ ID NO: 2964730 - RNA, 19 nt, Artificial Sequence
  Description of Artificial Sequence: Synthetic oligonucleotide
ucguucaccaccaacucgu

SEQ ID NO: 2964731 - RNA, 19 nt, Artificial Sequence
  Description of Artificial Sequence: Synthetic oligonucleotide
ucguuugugacguugucgu

SEQ ID NO: 2964732 - RNA, 19 nt, Artificial Sequence
  Description of Artificial Sequence: Synthetic oligonucleotide
gauucaguugcagaacaag

SEQ ID NO: 2964733 - RNA, 19 nt, Artificial Sequence
  Description of Artificial Sequence: Synthetic oligonucleotide
cuuuguaugccuccugagc

SEQ ID NO: 2964734 - RNA, 19 nt, Artificial Sequence
  Description of Artificial Sequence: Synthetic oligonucleotide
ugucaguuggcacaaggaa

SEQ ID NO: 2964735 - RNA, 19 nt, Artificial Sequence
  Description of Artificial Sequence: Synthetic oligonucleotide
acugaggcggucgucagcc

SEQ ID NO: 2964736 - RNA, 19 nt, Artificial Sequence
  Description of Artificial Sequence: Synthetic oligonucleotide
caguugcaaaaucacauag

SEQ ID NO: 2964737 - RNA, 19 nt, Artificial Sequence
  Description of Artificial Sequence: Synthetic oligonucleotide
uccuucuuggcuaugccac

SEQ ID NO: 2964738 - RNA, 19 nt, Artificial Sequence
  Description of Artificial Sequence: Synthetic oligonucleotide
cagauucacacugaggcgg

SEQ ID NO: 2964739 - RNA, 19 nt, Artificial Sequence
  Description of Artificial Sequence: Synthetic oligonucleotide
aaagcuggugauagcaguc

SEQ ID NO: 2964740 - RNA, 19 nt, Artificial Sequence
  Description of Artificial Sequence: Synthetic oligonucleotide
caaaaucacauaguagagc

SEQ ID NO: 2964741 - RNA, 19 nt, Artificial Sequence
  Description of Artificial Sequence: Synthetic oligonucleotide
agcacaaagcuggugauag

SEQ ID NO: 2964742 - RNA, 19 nt, Artificial Sequence
  Description of Artificial Sequence: Synthetic oligonucleotide
guuggcacaaggaagagca

SEQ ID NO: 2964743 - RNA, 19 nt, Artificial Sequence
  Description of Artificial Sequence: Synthetic oligonucleotide
acguugucguaccucagac

SEQ ID NO: 2964744 - RNA, 19 nt, Artificial Sequence
  Description of Artificial Sequence: Synthetic oligonucleotide
guugcaaaaucacauagua

SEQ ID NO: 2964745 - RNA, 19 nt, Artificial Sequence
  Description of Artificial Sequence: Synthetic oligonucleotide
uaccucagacccuggagcg

SEQ ID NO: 2964746 - RNA, 19 nt, Artificial Sequence
  Description of Artificial Sequence: Synthetic oligonucleotide
gaacaagagagaccugacc

SEQ ID NO: 2964747 - RNA, 19 nt, Artificial Sequence
  Description of Artificial Sequence: Synthetic oligonucleotide
uuugugacguugucguacc

SEQ ID NO: 2964748 - RNA, 19 nt, Artificial Sequence
  Description of Artificial Sequence: Synthetic oligonucleotide
uugucagggcgcucuaucg

SEQ ID NO: 2964749 - RNA, 19 nt, Artificial Sequence
  Description of Artificial Sequence: Synthetic oligonucleotide
ugucagggcgcucuaucgg

SEQ ID NO: 2964750 - RNA, 19 nt, Artificial Sequence
  Description of Artificial Sequence: Synthetic oligonucleotide
uuuuaacacaggccugagc

SEQ ID NO: 2964751 - RNA, 19 nt, Artificial Sequence
  Description of Artificial Sequence: Synthetic oligonucleotide
aagggaauagguccacagu

SEQ ID NO: 2964752 - RNA, 19 nt, Artificial Sequence
  Description of Artificial Sequence: Synthetic oligonucleotide
cauacagauaggcucgcag

SEQ ID NO: 2964753 - RNA, 19 nt, Artificial Sequence
  Description of Artificial Sequence: Synthetic oligonucleotide
agcagucugggagagcucc

SEQ ID NO: 2964754 - RNA, 19 nt, Artificial Sequence
  Description of Artificial Sequence: Synthetic oligonucleotide
ucuuuguaugccuccugag

SEQ ID NO: 2964755 - RNA, 19 nt, Artificial Sequence
  Description of Artificial Sequence: Synthetic oligonucleotide
auacagauaggcucgcaga

SEQ ID NO: 2964756 - RNA, 19 nt, Artificial Sequence
  Description of Artificial Sequence: Synthetic oligonucleotide
caagggaauagguccacag

SEQ ID NO: 2964757 - RNA, 19 nt, Artificial Sequence
  Description of Artificial Sequence: Synthetic oligonucleotide
guugcagaacaagagagac

SEQ ID NO: 2964758 - RNA, 19 nt, Artificial Sequence
  Description of Artificial Sequence: Synthetic oligonucleotide
uacagauaggcucgcagau

SEQ ID NO: 2964759 - RNA, 19 nt, Artificial Sequence
  Description of Artificial Sequence: Synthetic oligonucleotide
guaccucagacccuggagc

SEQ ID NO: 2964760 - RNA, 19 nt, Artificial Sequence
  Description of Artificial Sequence: Synthetic oligonucleotide
uugcagaacaagagagacc

SEQ ID NO: 2964761 - RNA, 19 nt, Artificial Sequence
  Description of Artificial Sequence: Synthetic oligonucleotide
auagcagucugggagagcu

SEQ ID NO: 2964762 - RNA, 19 nt, Artificial Sequence
  Description of Artificial Sequence: Synthetic oligonucleotide
gucagggccaaguugucag

SEQ ID NO: 2964763 - RNA, 19 nt, Artificial Sequence
  Description of Artificial Sequence: Synthetic oligonucleotide
uaggcucgcagauucacac

SEQ ID NO: 2964764 - RNA, 19 nt, Artificial Sequence
  Description of Artificial Sequence: Synthetic oligonucleotide
gucaguuggcacaaggaag

SEQ ID NO: 2964765 - RNA, 19 nt, Artificial Sequence
  Description of Artificial Sequence: Synthetic oligonucleotide
cagauaggcucgcagauuc

SEQ ID NO: 2964766 - RNA, 19 nt, Artificial Sequence
  Description of Artificial Sequence: Synthetic oligonucleotide
uggagcaagggaauagguc

SEQ ID NO: 2964767 - RNA, 19 nt, Artificial Sequence
  Description of Artificial Sequence: Synthetic oligonucleotide
uggagcgguuuugagaucc

SEQ ID NO: 2964768 - RNA, 19 nt, Artificial Sequence
  Description of Artificial Sequence: Synthetic oligonucleotide
aguuggcacaaggaagagc

SEQ ID NO: 2964769 - RNA, 19 nt, Artificial Sequence
  Description of Artificial Sequence: Synthetic oligonucleotide
ucugggagagcucccaguc

SEQ ID NO: 2964770 - RNA, 19 nt, Artificial Sequence
  Description of Artificial Sequence: Synthetic oligonucleotide
ucgcagauucacacugagg

SEQ ID NO: 2964771 - RNA, 19 nt, Artificial Sequence
  Description of Artificial Sequence: Synthetic oligonucleotide
cgcagauucacacugaggc

SEQ ID NO: 2964772 - RNA, 19 nt, Artificial Sequence
  Description of Artificial Sequence: Synthetic oligonucleotide
ucaguugcaaaaucacaua

SEQ ID NO: 2964773 - RNA, 19 nt, Artificial Sequence
  Description of Artificial Sequence: Synthetic oligonucleotide
ugagaucccagcuccuucu

SEQ ID NO: 2964774 - RNA, 19 nt, Artificial Sequence
  Description of Artificial Sequence: Synthetic oligonucleotide
accaccaacucguuuguga

SEQ ID NO: 2964775 - RNA, 19 nt, Artificial Sequence
  Description of Artificial Sequence: Synthetic oligonucleotide
guagagcccacuuucguuc

SEQ ID NO: 2964776 - RNA, 19 nt, Artificial Sequence
  Description of Artificial Sequence: Synthetic oligonucleotide
agaacaagagagaccugac

SEQ ID NO: 2964777 - RNA, 19 nt, Artificial Sequence
  Description of Artificial Sequence: Synthetic oligonucleotide
cauggagcaagggaauagg

SEQ ID NO: 2964778 - RNA, 19 nt, Artificial Sequence
  Description of Artificial Sequence: Synthetic oligonucleotide
gguaucagaugacuccagg

SEQ ID NO: 2964779 - RNA, 19 nt, Artificial Sequence
  Description of Artificial Sequence: Synthetic oligonucleotide
cucguuugugacguugucg

SEQ ID NO: 2964780 - RNA, 19 nt, Artificial Sequence
  Description of Artificial Sequence: Synthetic oligonucleotide
cuggugauagcagucuggg

SEQ ID NO: 2964781 - RNA, 19 nt, Artificial Sequence
  Description of Artificial Sequence: Synthetic oligonucleotide
caagagagaccugaccccg

SEQ ID NO: 2964782 - RNA, 19 nt, Artificial Sequence
  Description of Artificial Sequence: Synthetic oligonucleotide
cuucagggguaucagauga

SEQ ID NO: 2964783 - RNA, 19 nt, Artificial Sequence
  Description of Artificial Sequence: Synthetic oligonucleotide
acagucagggccaaguugu

SEQ ID NO: 2964784 - RNA, 19 nt, Artificial Sequence
  Description of Artificial Sequence: Synthetic oligonucleotide
ucagccuucagggguauca

SEQ ID NO: 2964785 - RNA, 19 nt, Artificial Sequence
  Description of Artificial Sequence: Synthetic oligonucleotide
ugagcuccauacagauagg

SEQ ID NO: 2964786 - RNA, 19 nt, Artificial Sequence
  Description of Artificial Sequence: Synthetic oligonucleotide
guaucagaugacuccagga

SEQ ID NO: 2964787 - RNA, 19 nt, Artificial Sequence
  Description of Artificial Sequence: Synthetic oligonucleotide
gaauagguccacagucagg

SEQ ID NO: 2964788 - RNA, 19 nt, Artificial Sequence
  Description of Artificial Sequence: Synthetic oligonucleotide
aguuggucuccauggagca

SEQ ID NO: 2964789 - RNA, 19 nt, Artificial Sequence
  Description of Artificial Sequence: Synthetic oligonucleotide
gacuccaggagccuuccac

SEQ ID NO: 2964790 - RNA, 19 nt, Artificial Sequence
  Description of Artificial Sequence: Synthetic oligonucleotide
ggugucaguuggcacaagg

SEQ ID NO: 2964791 - RNA, 19 nt, Artificial Sequence
  Description of Artificial Sequence: Synthetic oligonucleotide
agggccaaguugucagggc

SEQ ID NO: 2964792 - RNA, 19 nt, Artificial Sequence
  Description of Artificial Sequence: Synthetic oligonucleotide
auaguagagcccacuuucg

SEQ ID NO: 2964793 - RNA, 19 nt, Artificial Sequence
  Description of Artificial Sequence: Synthetic oligonucleotide
uguaugccuccugagcucc

SEQ ID NO: 2964794 - RNA, 19 nt, Artificial Sequence
  Description of Artificial Sequence: Synthetic oligonucleotide
auucacacugaggcggucg

SEQ ID NO: 2964795 - RNA, 19 nt, Artificial Sequence
  Description of Artificial Sequence: Synthetic oligonucleotide
gucagggcgcucuaucggg

SEQ ID NO: 2964796 - RNA, 19 nt, Artificial Sequence
  Description of Artificial Sequence: Synthetic oligonucleotide
auucaguugcagaacaaga

SEQ ID NO: 2964797 - RNA, 19 nt, Artificial Sequence
  Description of Artificial Sequence: Synthetic oligonucleotide
uaguagagcccacuuucgu

SEQ ID NO: 2964798 - RNA, 19 nt, Artificial Sequence
  Description of Artificial Sequence: Synthetic oligonucleotide
ucagggcgcucuaucgggg

SEQ ID NO: 2964799 - RNA, 19 nt, Artificial Sequence
  Description of Artificial Sequence: Synthetic oligonucleotide
ggaauagguccacagucag

SEQ ID NO: 2964800 - RNA, 19 nt, Artificial Sequence
  Description of Artificial Sequence: Synthetic oligonucleotide
agcuccuucuuggcuaugc

SEQ ID NO: 2964801 - RNA, 19 nt, Artificial Sequence
  Description of Artificial Sequence: Synthetic oligonucleotide
ugagcuucaguugcaaaau

SEQ ID NO: 2964802 - RNA, 19 nt, Artificial Sequence
  Description of Artificial Sequence: Synthetic oligonucleotide
accaacucguuugugacgu

SEQ ID NO: 2964803 - RNA, 19 nt, Artificial Sequence
  Description of Artificial Sequence: Synthetic oligonucleotide
ugucguaccucagacccug

SEQ ID NO: 2964804 - RNA, 19 nt, Artificial Sequence
  Description of Artificial Sequence: Synthetic oligonucleotide
cuucaguugcaaaaucaca

SEQ ID NO: 2964805 - RNA, 19 nt, Artificial Sequence
  Description of Artificial Sequence: Synthetic oligonucleotide
uccugagcuccauacagau

SEQ ID NO: 2964806 - RNA, 19 nt, Artificial Sequence
  Description of Artificial Sequence: Synthetic oligonucleotide
gcuccauacagauaggcuc

SEQ ID NO: 2964807 - RNA, 19 nt, Artificial Sequence
  Description of Artificial Sequence: Synthetic oligonucleotide
uaacacaggccugagcuuc

SEQ ID NO: 2964808 - RNA, 19 nt, Artificial Sequence
  Description of Artificial Sequence: Synthetic oligonucleotide
caaggaagagcacaaagcu

SEQ ID NO: 2964809 - RNA, 19 nt, Artificial Sequence
  Description of Artificial Sequence: Synthetic oligonucleotide
ucagggccaaguugucagg

SEQ ID NO: 2964810 - RNA, 19 nt, Artificial Sequence
  Description of Artificial Sequence: Synthetic oligonucleotide
uggcacaaggaagagcaca

SEQ ID NO: 2964811 - RNA, 19 nt, Artificial Sequence
  Description of Artificial Sequence: Synthetic oligonucleotide
aagagagaccugaccccgc

SEQ ID NO: 2964812 - RNA, 19 nt, Artificial Sequence
  Description of Artificial Sequence: Synthetic oligonucleotide
cccacuuucguucaccacc

SEQ ID NO: 2964813 - RNA, 19 nt, Artificial Sequence
  Description of Artificial Sequence: Synthetic oligonucleotide
uugagaucccagcuccuuc

SEQ ID NO: 2964814 - RNA, 19 nt, Artificial Sequence
  Description of Artificial Sequence: Synthetic oligonucleotide
ugauagcagucugggagag

SEQ ID NO: 2964815 - RNA, 19 nt, Artificial Sequence
  Description of Artificial Sequence: Synthetic oligonucleotide
acucguuugugacguuguc

SEQ ID NO: 2964816 - RNA, 19 nt, Artificial Sequence
  Description of Artificial Sequence: Synthetic oligonucleotide
gauaggcucgcagauucac

SEQ ID NO: 2964817 - RNA, 19 nt, Artificial Sequence
  Description of Artificial Sequence: Synthetic oligonucleotide
aguugcaaaaucacauagu

SEQ ID NO: 2964818 - RNA, 19 nt, Artificial Sequence
  Description of Artificial Sequence: Synthetic oligonucleotide
cugagcuucaguugcaaaa

SEQ ID NO: 2964819 - RNA, 19 nt, Artificial Sequence
  Description of Artificial Sequence: Synthetic oligonucleotide
ucagggguaucagaugacu

SEQ ID NO: 2964820 - RNA, 19 nt, Artificial Sequence
  Description of Artificial Sequence: Synthetic oligonucleotide
uuuugagaucccagcuccu

SEQ ID NO: 2964821 - RNA, 19 nt, Artificial Sequence
  Description of Artificial Sequence: Synthetic oligonucleotide
agcuucaguugcaaaauca

SEQ ID NO: 2964822 - RNA, 19 nt, Artificial Sequence
  Description of Artificial Sequence: Synthetic oligonucleotide
gugacguugucguaccuca

SEQ ID NO: 2964823 - RNA, 19 nt, Artificial Sequence
  Description of Artificial Sequence: Synthetic oligonucleotide
aguagagcccacuuucguu

SEQ ID NO: 2964824 - RNA, 19 nt, Artificial Sequence
  Description of Artificial Sequence: Synthetic oligonucleotide
cuuccacuaaguuggucuc

SEQ ID NO: 2964825 - RNA, 19 nt, Artificial Sequence
  Description of Artificial Sequence: Synthetic oligonucleotide
gcaaaaucacauaguagag

SEQ ID NO: 2964826 - RNA, 19 nt, Artificial Sequence
  Description of Artificial Sequence: Synthetic oligonucleotide
gcagauucacacugaggcg

SEQ ID NO: 2964827 - RNA, 19 nt, Artificial Sequence
  Description of Artificial Sequence: Synthetic oligonucleotide
gucuccauggagcaaggga

SEQ ID NO: 2964828 - RNA, 19 nt, Artificial Sequence
  Description of Artificial Sequence: Synthetic oligonucleotide
cacagucagggccaaguug

SEQ ID NO: 2964829 - RNA, 19 nt, Artificial Sequence
  Description of Artificial Sequence: Synthetic oligonucleotide
cucgcagauucacacugag

SEQ ID NO: 2964830 - RNA, 19 nt, Artificial Sequence
  Description of Artificial Sequence: Synthetic oligonucleotide
acuccaggagccuuccacu

SEQ ID NO: 2964831 - RNA, 19 nt, Artificial Sequence
  Description of Artificial Sequence: Synthetic oligonucleotide
uccacagucagggccaagu

SEQ ID NO: 2964832 - RNA, 19 nt, Artificial Sequence
  Description of Artificial Sequence: Synthetic oligonucleotide
uucacacugaggcggucgu

SEQ ID NO: 2964833 - RNA, 19 nt, Artificial Sequence
  Description of Artificial Sequence: Synthetic oligonucleotide
cagaacaagagagaccuga

SEQ ID NO: 2964834 - RNA, 19 nt, Artificial Sequence
  Description of Artificial Sequence: Synthetic oligonucleotide
gagcuccauacagauaggc

SEQ ID NO: 2964835 - RNA, 19 nt, Artificial Sequence
  Description of Artificial Sequence: Synthetic oligonucleotide
ugggagagcucccagucuu

SEQ ID NO: 2964836 - RNA, 19 nt, Artificial Sequence
  Description of Artificial Sequence: Synthetic oligonucleotide
caccaacucguuugugacg

SEQ ID NO: 2964837 - RNA, 19 nt, Artificial Sequence
  Description of Artificial Sequence: Synthetic oligonucleotide
cacaaagcuggugauagca

SEQ ID NO: 2964838 - RNA, 19 nt, Artificial Sequence
  Description of Artificial Sequence: Synthetic oligonucleotide
acauaguagagcccacuuu

SEQ ID NO: 2964839 - RNA, 19 nt, Artificial Sequence
  Description of Artificial Sequence: Synthetic oligonucleotide
aagcuggugauagcagucu

SEQ ID NO: 2964840 - RNA, 19 nt, Artificial Sequence
  Description of Artificial Sequence: Synthetic oligonucleotide
gucuuuguaugccuccuga

SEQ ID NO: 2964841 - RNA, 19 nt, Artificial Sequence
  Description of Artificial Sequence: Synthetic oligonucleotide
uucagggguaucagaugac

SEQ ID NO: 2964842 - RNA, 19 nt, Artificial Sequence
  Description of Artificial Sequence: Synthetic oligonucleotide
gugauagcagucugggaga

SEQ ID NO: 2964843 - RNA, 19 nt, Artificial Sequence
  Description of Artificial Sequence: Synthetic oligonucleotide
agucuuuguaugccuccug

SEQ ID NO: 2964844 - RNA, 19 nt, Artificial Sequence
  Description of Artificial Sequence: Synthetic oligonucleotide
uguggggugucaguuggca

SEQ ID NO: 2964845 - RNA, 19 nt, Artificial Sequence
  Description of Artificial Sequence: Synthetic oligonucleotide
ugccuccugagcuccauac

SEQ ID NO: 2964846 - RNA, 19 nt, Artificial Sequence
  Description of Artificial Sequence: Synthetic oligonucleotide
uggucuccauggagcaagg

SEQ ID NO: 2964847 - RNA, 19 nt, Artificial Sequence
  Description of Artificial Sequence: Synthetic oligonucleotide
aacucguuugugacguugu

SEQ ID NO: 2964848 - RNA, 19 nt, Artificial Sequence
  Description of Artificial Sequence: Synthetic oligonucleotide
acaaagcuggugauagcag

SEQ ID NO: 2964849 - RNA, 19 nt, Artificial Sequence
  Description of Artificial Sequence: Synthetic oligonucleotide
ucaccaccaacucguuugu

SEQ ID NO: 2964850 - RNA, 19 nt, Artificial Sequence
  Description of Artificial Sequence: Synthetic oligonucleotide
gacguugucguaccucaga

SEQ ID NO: 2964851 - RNA, 19 nt, Artificial Sequence
  Description of Artificial Sequence: Synthetic oligonucleotide
ugaccccgcaccuugcggu

SEQ ID NO: 2964852 - RNA, 19 nt, Artificial Sequence
  Description of Artificial Sequence: Synthetic oligonucleotide
augacuccaggagccuucc

SEQ ID NO: 2964853 - RNA, 19 nt, Artificial Sequence
  Description of Artificial Sequence: Synthetic oligonucleotide
uuguaugccuccugagcuc

SEQ ID NO: 2964854 - RNA, 19 nt, Artificial Sequence
  Description of Artificial Sequence: Synthetic oligonucleotide
agagcacaaagcuggugau

SEQ ID NO: 2964855 - RNA, 19 nt, Artificial Sequence
  Description of Artificial Sequence: Synthetic oligonucleotide
gggccaaguugucagggcg

SEQ ID NO: 2964856 - RNA, 19 nt, Artificial Sequence
  Description of Artificial Sequence: Synthetic oligonucleotide
agagcucccagucuuugua

SEQ ID NO: 2964857 - RNA, 19 nt, Artificial Sequence
  Description of Artificial Sequence: Synthetic oligonucleotide
agcucccagucuuuguaug

SEQ ID NO: 2964858 - RNA, 19 nt, Artificial Sequence
  Description of Artificial Sequence: Synthetic oligonucleotide
ugacguugucguaccucag

SEQ ID NO: 2964859 - RNA, 19 nt, Artificial Sequence
  Description of Artificial Sequence: Synthetic oligonucleotide
gaccugaccccgcaccuug

SEQ ID NO: 2964860 - RNA, 19 nt, Artificial Sequence
  Description of Artificial Sequence: Synthetic oligonucleotide
uuaacacaggccugagcuu

SEQ ID NO: 2964861 - RNA, 19 nt, Artificial Sequence
  Description of Artificial Sequence: Synthetic oligonucleotide
ucacauaguagagcccacu

SEQ ID NO: 2964862 - RNA, 19 nt, Artificial Sequence
  Description of Artificial Sequence: Synthetic oligonucleotide
aguugcagaacaagagaga

SEQ ID NO: 2964863 - RNA, 19 nt, Artificial Sequence
  Description of Artificial Sequence: Synthetic oligonucleotide
ugugacguugucguaccuc

SEQ ID NO: 2964864 - RNA, 19 nt, Artificial Sequence
  Description of Artificial Sequence: Synthetic oligonucleotide
gguuuugagaucccagcuc

SEQ ID NO: 2964865 - RNA, 19 nt, Artificial Sequence
  Description of Artificial Sequence: Synthetic oligonucleotide
guugucagggcgcucuauc

SEQ ID NO: 2964866 - RNA, 19 nt, Artificial Sequence
  Description of Artificial Sequence: Synthetic oligonucleotide
ggcucgcagauucacacug

SEQ ID NO: 2964867 - RNA, 19 nt, Artificial Sequence
  Description of Artificial Sequence: Synthetic oligonucleotide
agcuggugauagcagucug

SEQ ID NO: 2964868 - RNA, 19 nt, Artificial Sequence
  Description of Artificial Sequence: Synthetic oligonucleotide
agagagaccugaccccgca

SEQ ID NO: 2964869 - RNA, 19 nt, Artificial Sequence
  Description of Artificial Sequence: Synthetic oligonucleotide
agcaagggaauagguccac

SEQ ID NO: 2964870 - RNA, 19 nt, Artificial Sequence
  Description of Artificial Sequence: Synthetic oligonucleotide
uagagcccacuuucguuca

SEQ ID NO: 2964871 - RNA, 19 nt, Artificial Sequence
  Description of Artificial Sequence: Synthetic oligonucleotide
cagggguaucagaugacuc

SEQ ID NO: 2964872 - RNA, 19 nt, Artificial Sequence
  Description of Artificial Sequence: Synthetic oligonucleotide
agaucccagcuccuucuug

SEQ ID NO: 2964873 - RNA, 19 nt, Artificial Sequence
  Description of Artificial Sequence: Synthetic oligonucleotide
uccuguggggugucaguug

SEQ ID NO: 2964874 - RNA, 19 nt, Artificial Sequence
  Description of Artificial Sequence: Synthetic oligonucleotide
caggccugagcuucaguug

SEQ ID NO: 2964875 - RNA, 19 nt, Artificial Sequence
  Description of Artificial Sequence: Synthetic oligonucleotide
ucccagucuuuguaugccu

SEQ ID NO: 2964876 - RNA, 19 nt, Artificial Sequence
  Description of Artificial Sequence: Synthetic oligonucleotide
agucugggagagcucccag

SEQ ID NO: 2964877 - RNA, 19 nt, Artificial Sequence
  Description of Artificial Sequence: Synthetic oligonucleotide
gaugacuccaggagccuuc

SEQ ID NO: 2964878 - RNA, 19 nt, Artificial Sequence
  Description of Artificial Sequence: Synthetic oligonucleotide
agcgguuuugagaucccag

SEQ ID NO: 2964879 - RNA, 19 nt, Artificial Sequence
  Description of Artificial Sequence: Synthetic oligonucleotide
gcggucgucagccuucagg

SEQ ID NO: 2964880 - RNA, 19 nt, Artificial Sequence
  Description of Artificial Sequence: Synthetic oligonucleotide
gcgguuuugagaucccagc

SEQ ID NO: 2964881 - RNA, 19 nt, Artificial Sequence
  Description of Artificial Sequence: Synthetic oligonucleotide
aucacauaguagagcccac

SEQ ID NO: 2964882 - RNA, 19 nt, Artificial Sequence
  Description of Artificial Sequence: Synthetic oligonucleotide
agagcccacuuucguucac

SEQ ID NO: 2964883 - RNA, 19 nt, Artificial Sequence
  Description of Artificial Sequence: Synthetic oligonucleotide
cucccagucuuuguaugcc

SEQ ID NO: 2964884 - RNA, 19 nt, Artificial Sequence
  Description of Artificial Sequence: Synthetic oligonucleotide
cuaaguuggucuccaugga

SEQ ID NO: 2964885 - RNA, 19 nt, Artificial Sequence
  Description of Artificial Sequence: Synthetic oligonucleotide
uccaggagccuuccacuaa

SEQ ID NO: 2964886 - RNA, 19 nt, Artificial Sequence
  Description of Artificial Sequence: Synthetic oligonucleotide
caacucguuugugacguug

SEQ ID NO: 2964887 - RNA, 19 nt, Artificial Sequence
  Description of Artificial Sequence: Synthetic oligonucleotide
gggauucaguugcagaaca

SEQ ID NO: 2964888 - RNA, 19 nt, Artificial Sequence
  Description of Artificial Sequence: Synthetic oligonucleotide
ccuccugagcuccauacag

SEQ ID NO: 2964889 - RNA, 19 nt, Artificial Sequence
  Description of Artificial Sequence: Synthetic oligonucleotide
uggugauagcagucuggga

SEQ ID NO: 2964890 - RNA, 19 nt, Artificial Sequence
  Description of Artificial Sequence: Synthetic oligonucleotide
uugucguaccucagacccu

SEQ ID NO: 2964891 - RNA, 19 nt, Artificial Sequence
  Description of Artificial Sequence: Synthetic oligonucleotide
uuugagaucccagcuccuu

SEQ ID NO: 2964892 - RNA, 19 nt, Artificial Sequence
  Description of Artificial Sequence: Synthetic oligonucleotide
gcuucaguugcaaaaucac

SEQ ID NO: 2964893 - RNA, 19 nt, Artificial Sequence
  Description of Artificial Sequence: Synthetic oligonucleotide
agcuccauacagauaggcu

SEQ ID NO: 2964894 - RNA, 19 nt, Artificial Sequence
  Description of Artificial Sequence: Synthetic oligonucleotide
ccuguggggugucaguugg

SEQ ID NO: 2964895 - RNA, 19 nt, Artificial Sequence
  Description of Artificial Sequence: Synthetic oligonucleotide
ucccagcuccuucuuggcu

SEQ ID NO: 2964896 - RNA, 19 nt, Artificial Sequence
  Description of Artificial Sequence: Synthetic oligonucleotide
cagggccaaguugucaggg

SEQ ID NO: 2964897 - RNA, 19 nt, Artificial Sequence
  Description of Artificial Sequence: Synthetic oligonucleotide
acacugaggcggucgucag

SEQ ID NO: 2964898 - RNA, 19 nt, Artificial Sequence
  Description of Artificial Sequence: Synthetic oligonucleotide
agcccacuuucguucacca

SEQ ID NO: 2964899 - RNA, 19 nt, Artificial Sequence
  Description of Artificial Sequence: Synthetic oligonucleotide
uuggcacaaggaagagcac

SEQ ID NO: 2964900 - RNA, 19 nt, Artificial Sequence
  Description of Artificial Sequence: Synthetic oligonucleotide
uccauacagauaggcucgc

SEQ ID NO: 2964901 - RNA, 19 nt, Artificial Sequence
  Description of Artificial Sequence: Synthetic oligonucleotide
cuccuucuuggcuaugcca

SEQ ID NO: 2964902 - RNA, 19 nt, Artificial Sequence
  Description of Artificial Sequence: Synthetic oligonucleotide
cugaccccgcaccuugcgg

SEQ ID NO: 2964903 - RNA, 19 nt, Artificial Sequence
  Description of Artificial Sequence: Synthetic oligonucleotide
cggucgucagccuucaggg

SEQ ID NO: 2964904 - RNA, 19 nt, Artificial Sequence
  Description of Artificial Sequence: Synthetic oligonucleotide
caaagcuggugauagcagu

SEQ ID NO: 2964905 - RNA, 19 nt, Artificial Sequence
  Description of Artificial Sequence: Synthetic oligonucleotide
ucgucagccuucaggggua

SEQ ID NO: 2964906 - RNA, 19 nt, Artificial Sequence
  Description of Artificial Sequence: Synthetic oligonucleotide
gagcaagggaauaggucca

SEQ ID NO: 2964907 - RNA, 19 nt, Artificial Sequence
  Description of Artificial Sequence: Synthetic oligonucleotide
gcuggugauagcagucugg

SEQ ID NO: 2964908 - RNA, 19 nt, Artificial Sequence
  Description of Artificial Sequence: Synthetic oligonucleotide
auggagcaagggaauaggu

SEQ ID NO: 2964909 - RNA, 19 nt, Artificial Sequence
  Description of Artificial Sequence: Synthetic oligonucleotide
gauagcagucugggagagc

SEQ ID NO: 2964910 - RNA, 19 nt, Artificial Sequence
  Description of Artificial Sequence: Synthetic oligonucleotide
gucgucagccuucaggggu

SEQ ID NO: 2964911 - RNA, 19 nt, Artificial Sequence
  Description of Artificial Sequence: Synthetic oligonucleotide
gugucaguuggcacaagga

SEQ ID NO: 2964912 - RNA, 19 nt, Artificial Sequence
  Description of Artificial Sequence: Synthetic oligonucleotide
ugaggcggucgucagccuu

SEQ ID NO: 2964913 - RNA, 19 nt, Artificial Sequence
  Description of Artificial Sequence: Synthetic oligonucleotide
ccaccaacucguuugugac

SEQ ID NO: 2964914 - RNA, 19 nt, Artificial Sequence
  Description of Artificial Sequence: Synthetic oligonucleotide
agccuucagggguaucaga

SEQ ID NO: 2964915 - RNA, 19 nt, Artificial Sequence
  Description of Artificial Sequence: Synthetic oligonucleotide
gcucccagucuuuguaugc

SEQ ID NO: 2964916 - RNA, 19 nt, Artificial Sequence
  Description of Artificial Sequence: Synthetic oligonucleotide
gagcccacuuucguucacc

SEQ ID NO: 2964917 - RNA, 19 nt, Artificial Sequence
  Description of Artificial Sequence: Synthetic oligonucleotide
uugugacguugucguaccu

SEQ ID NO: 2964918 - RNA, 19 nt, Artificial Sequence
  Description of Artificial Sequence: Synthetic oligonucleotide
aggagccuuccacuaaguu

SEQ ID NO: 2964919 - RNA, 19 nt, Artificial Sequence
  Description of Artificial Sequence: Synthetic oligonucleotide
aacacaggccugagcuuca

SEQ ID NO: 2964920 - RNA, 19 nt, Artificial Sequence
  Description of Artificial Sequence: Synthetic oligonucleotide
uccauggagcaagggaaua

SEQ ID NO: 2964921 - RNA, 19 nt, Artificial Sequence
  Description of Artificial Sequence: Synthetic oligonucleotide
agucagggccaaguuguca

SEQ ID NO: 2964922 - RNA, 19 nt, Artificial Sequence
  Description of Artificial Sequence: Synthetic oligonucleotide
acccuggagcgguuuugag

SEQ ID NO: 2964923 - RNA, 19 nt, Artificial Sequence
  Description of Artificial Sequence: Synthetic oligonucleotide
cacacugaggcggucguca

SEQ ID NO: 2964924 - RNA, 19 nt, Artificial Sequence
  Description of Artificial Sequence: Synthetic oligonucleotide
gagagaccugaccccgcac

SEQ ID NO: 2964925 - RNA, 19 nt, Artificial Sequence
  Description of Artificial Sequence: Synthetic oligonucleotide
aggcucgcagauucacacu

SEQ ID NO: 2964926 - RNA, 19 nt, Artificial Sequence
  Description of Artificial Sequence: Synthetic oligonucleotide
ggucgucagccuucagggg

SEQ ID NO: 2964927 - RNA, 19 nt, Artificial Sequence
  Description of Artificial Sequence: Synthetic oligonucleotide
accucagacccuggagcgg

SEQ ID NO: 2964928 - RNA, 19 nt, Artificial Sequence
  Description of Artificial Sequence: Synthetic oligonucleotide
auaggcucgcagauucaca

SEQ ID NO: 2964929 - RNA, 19 nt, Artificial Sequence
  Description of Artificial Sequence: Synthetic oligonucleotide
aaguugucagggcgcucua

SEQ ID NO: 2964930 - RNA, 19 nt, Artificial Sequence
  Description of Artificial Sequence: Synthetic oligonucleotide
agauucacacugaggcggu

SEQ ID NO: 2964931 - RNA, 19 nt, Artificial Sequence
  Description of Artificial Sequence: Synthetic oligonucleotide
gggaauagguccacaguca

SEQ ID NO: 2964932 - RNA, 19 nt, Artificial Sequence
  Description of Artificial Sequence: Synthetic oligonucleotide
guggggugucaguuggcac

SEQ ID NO: 2964933 - RNA, 19 nt, Artificial Sequence
  Description of Artificial Sequence: Synthetic oligonucleotide
ccaggagccuuccacuaag

SEQ ID NO: 2964934 - RNA, 19 nt, Artificial Sequence
  Description of Artificial Sequence: Synthetic oligonucleotide
cacugaggcggucgucagc

SEQ ID NO: 2964935 - RNA, 19 nt, Artificial Sequence
  Description of Artificial Sequence: Synthetic oligonucleotide
cuguggggugucaguuggc

SEQ ID NO: 2964936 - RNA, 19 nt, Artificial Sequence
  Description of Artificial Sequence: Synthetic oligonucleotide
caguuggcacaaggaagag

SEQ ID NO: 2964937 - RNA, 19 nt, Artificial Sequence
  Description of Artificial Sequence: Synthetic oligonucleotide
acagauaggcucgcagauu

SEQ ID NO: 2964938 - RNA, 19 nt, Artificial Sequence
  Description of Artificial Sequence: Synthetic oligonucleotide
ugacuccaggagccuucca

SEQ ID NO: 2964939 - RNA, 19 nt, Artificial Sequence
  Description of Artificial Sequence: Synthetic oligonucleotide
agacccuggagcgguuuug

SEQ ID NO: 2964940 - RNA, 19 nt, Artificial Sequence
  Description of Artificial Sequence: Synthetic oligonucleotide
cagccuucagggguaucag

SEQ ID NO: 2964941 - RNA, 19 nt, Artificial Sequence
  Description of Artificial Sequence: Synthetic oligonucleotide
ccuucagggguaucagaug

SEQ ID NO: 2964942 - RNA, 19 nt, Artificial Sequence
  Description of Artificial Sequence: Synthetic oligonucleotide
ccauggagcaagggaauag

SEQ ID NO: 2964943 - RNA, 19 nt, Artificial Sequence
  Description of Artificial Sequence: Synthetic oligonucleotide
gagaccugaccccgcaccu

SEQ ID NO: 2964944 - RNA, 19 nt, Artificial Sequence
  Description of Artificial Sequence: Synthetic oligonucleotide
gggguaucagaugacucca

SEQ ID NO: 2964945 - RNA, 19 nt, Artificial Sequence
  Description of Artificial Sequence: Synthetic oligonucleotide
caaguugucagggcgcucu

SEQ ID NO: 2964946 - RNA, 19 nt, Artificial Sequence
  Description of Artificial Sequence: Synthetic oligonucleotide
gaggcggucgucagccuuc

SEQ ID NO: 2964947 - RNA, 19 nt, Artificial Sequence
  Description of Artificial Sequence: Synthetic oligonucleotide
uaugccuccugagcuccau

SEQ ID NO: 2964948 - RNA, 19 nt, Artificial Sequence
  Description of Artificial Sequence: Synthetic oligonucleotide
gacccuggagcgguuuuga

SEQ ID NO: 2964949 - RNA, 19 nt, Artificial Sequence
  Description of Artificial Sequence: Synthetic oligonucleotide
ggcacaaggaagagcacaa

SEQ ID NO: 2964950 - RNA, 19 nt, Artificial Sequence
  Description of Artificial Sequence: Synthetic oligonucleotide
uagcagucugggagagcuc

SEQ ID NO: 2964951 - RNA, 19 nt, Artificial Sequence
  Description of Artificial Sequence: Synthetic oligonucleotide
cguaccucagacccuggag

SEQ ID NO: 2964952 - RNA, 19 nt, Artificial Sequence
  Description of Artificial Sequence: Synthetic oligonucleotide
ggggauucaguugcagaac

SEQ ID NO: 2964953 - RNA, 19 nt, Artificial Sequence
  Description of Artificial Sequence: Synthetic oligonucleotide
accugaccccgcaccuugc

SEQ ID NO: 2964954 - RNA, 19 nt, Artificial Sequence
  Description of Artificial Sequence: Synthetic oligonucleotide
gagcgguuuugagauccca

SEQ ID NO: 2964955 - RNA, 19 nt, Artificial Sequence
  Description of Artificial Sequence: Synthetic oligonucleotide
agauaggcucgcagauuca

SEQ ID NO: 2964956 - RNA, 19 nt, Artificial Sequence
  Description of Artificial Sequence: Synthetic oligonucleotide
gcacaaagcuggugauagc

SEQ ID NO: 2964957 - RNA, 19 nt, Artificial Sequence
  Description of Artificial Sequence: Synthetic oligonucleotide
gauucacacugaggcgguc

SEQ ID NO: 2964958 - RNA, 19 nt, Artificial Sequence
  Description of Artificial Sequence: Synthetic oligonucleotide
cagucagggccaaguuguc

SEQ ID NO: 2964959 - RNA, 19 nt, Artificial Sequence
  Description of Artificial Sequence: Synthetic oligonucleotide
ccuggagcgguuuugagau

SEQ ID NO: 2964960 - RNA, 19 nt, Artificial Sequence
  Description of Artificial Sequence: Synthetic oligonucleotide
cguugucguaccucagacc

SEQ ID NO: 2964961 - RNA, 19 nt, Artificial Sequence
  Description of Artificial Sequence: Synthetic oligonucleotide
ggccaaguugucagggcgc

SEQ ID NO: 2964962 - RNA, 19 nt, Artificial Sequence
  Description of Artificial Sequence: Synthetic oligonucleotide
gaccccgcaccuugcgguc

SEQ ID NO: 2964963 - RNA, 19 nt, Artificial Sequence
  Description of Artificial Sequence: Synthetic oligonucleotide
ggagagcucccagucuuug

SEQ ID NO: 2964964 - RNA, 19 nt, Artificial Sequence
  Description of Artificial Sequence: Synthetic oligonucleotide
ccacuuucguucaccacca

SEQ ID NO: 2964965 - RNA, 19 nt, Artificial Sequence
  Description of Artificial Sequence: Synthetic oligonucleotide
gagcacaaagcuggugaua

SEQ ID NO: 2964966 - RNA, 19 nt, Artificial Sequence
  Description of Artificial Sequence: Synthetic oligonucleotide
ggguaucagaugacuccag

SEQ ID NO: 2964967 - RNA, 19 nt, Artificial Sequence
  Description of Artificial Sequence: Synthetic oligonucleotide
acacaggccugagcuucag

SEQ ID NO: 2964968 - RNA, 19 nt, Artificial Sequence
  Description of Artificial Sequence: Synthetic oligonucleotide
cccagucuuuguaugccuc

SEQ ID NO: 2964969 - RNA, 19 nt, Artificial Sequence
  Description of Artificial Sequence: Synthetic oligonucleotide
aguugucagggcgcucuau

SEQ ID NO: 2964970 - RNA, 19 nt, Artificial Sequence
  Description of Artificial Sequence: Synthetic oligonucleotide
cacauaguagagcccacuu

SEQ ID NO: 2964971 - RNA, 19 nt, Artificial Sequence
  Description of Artificial Sequence: Synthetic oligonucleotide
gagcucccagucuuuguau

SEQ ID NO: 2964972 - RNA, 19 nt, Artificial Sequence
  Description of Artificial Sequence: Synthetic oligonucleotide
ggucuccauggagcaaggg

SEQ ID NO: 2964973 - RNA, 19 nt, Artificial Sequence
  Description of Artificial Sequence: Synthetic oligonucleotide
cuccaggagccuuccacua

SEQ ID NO: 2964974 - RNA, 19 nt, Artificial Sequence
  Description of Artificial Sequence: Synthetic oligonucleotide
ucacacugaggcggucguc

SEQ ID NO: 2964975 - RNA, 19 nt, Artificial Sequence
  Description of Artificial Sequence: Synthetic oligonucleotide
ucagacccuggagcgguuu

SEQ ID NO: 2964976 - RNA, 19 nt, Artificial Sequence
  Description of Artificial Sequence: Synthetic oligonucleotide
cuggagcgguuuugagauc

SEQ ID NO: 2964977 - RNA, 19 nt, Artificial Sequence
  Description of Artificial Sequence: Synthetic oligonucleotide
gucguaccucagacccugg

SEQ ID NO: 2964978 - RNA, 19 nt, Artificial Sequence
  Description of Artificial Sequence: Synthetic oligonucleotide
gucugggagagcucccagu

SEQ ID NO: 2964979 - RNA, 19 nt, Artificial Sequence
  Description of Artificial Sequence: Synthetic oligonucleotide
ccugaccccgcaccuugcg

SEQ ID NO: 2964980 - RNA, 19 nt, Artificial Sequence
  Description of Artificial Sequence: Synthetic oligonucleotide
cccuggagcgguuuugaga

SEQ ID NO: 2964981 - RNA, 19 nt, Artificial Sequence
  Description of Artificial Sequence: Synthetic oligonucleotide
ggauucaguugcagaacaa

SEQ ID NO: 2964982 - RNA, 19 nt, Artificial Sequence
  Description of Artificial Sequence: Synthetic oligonucleotide
guuggucuccauggagcaa

SEQ ID NO: 2964983 - RNA, 19 nt, Artificial Sequence
  Description of Artificial Sequence: Synthetic oligonucleotide
augccuccugagcuccaua

SEQ ID NO: 2964984 - RNA, 19 nt, Artificial Sequence
  Description of Artificial Sequence: Synthetic oligonucleotide
caccaccaacucguuugug

SEQ ID NO: 2964985 - RNA, 19 nt, Artificial Sequence
  Description of Artificial Sequence: Synthetic oligonucleotide
ggagcgguuuugagauccc

SEQ ID NO: 2964986 - RNA, 19 nt, Artificial Sequence
  Description of Artificial Sequence: Synthetic oligonucleotide
accuugcggucuguguuuu

SEQ ID NO: 2964987 - RNA, 19 nt, Artificial Sequence
  Description of Artificial Sequence: Synthetic oligonucleotide
guucaccaccaacucguuu

SEQ ID NO: 2964988 - RNA, 19 nt, Artificial Sequence
  Description of Artificial Sequence: Synthetic oligonucleotide
gccuccugagcuccauaca

SEQ ID NO: 2964989 - RNA, 19 nt, Artificial Sequence
  Description of Artificial Sequence: Synthetic oligonucleotide
cccagcuccuucuuggcua

SEQ ID NO: 2964990 - RNA, 19 nt, Artificial Sequence
  Description of Artificial Sequence: Synthetic oligonucleotide
agaccugaccccgcaccuu

SEQ ID NO: 2964991 - RNA, 19 nt, Artificial Sequence
  Description of Artificial Sequence: Synthetic oligonucleotide
gcccacuuucguucaccac

SEQ ID NO: 2964992 - RNA, 19 nt, Artificial Sequence
  Description of Artificial Sequence: Synthetic oligonucleotide
gagaucccagcuccuucuu

SEQ ID NO: 2964993 - RNA, 19 nt, Artificial Sequence
  Description of Artificial Sequence: Synthetic oligonucleotide
cugggagagcucccagucu

SEQ ID NO: 2964994 - RNA, 19 nt, Artificial Sequence
  Description of Artificial Sequence: Synthetic oligonucleotide
gcagaacaagagagaccug

SEQ ID NO: 2964995 - RNA, 19 nt, Artificial Sequence
  Description of Artificial Sequence: Synthetic oligonucleotide
gccuucagggguaucagau

SEQ ID NO: 2964996 - RNA, 19 nt, Artificial Sequence
  Description of Artificial Sequence: Synthetic oligonucleotide
gcaagggaauagguccaca

SEQ ID NO: 2964997 - RNA, 19 nt, Artificial Sequence
  Description of Artificial Sequence: Synthetic oligonucleotide
gcagucugggagagcuccc

SEQ ID NO: 2964998 - RNA, 19 nt, Artificial Sequence
  Description of Artificial Sequence: Synthetic oligonucleotide
gcaccuugcggucuguguu

SEQ ID NO: 2964999 - RNA, 19 nt, Artificial Sequence
  Description of Artificial Sequence: Synthetic oligonucleotide
aggcggucgucagccuuca

SEQ ID NO: 2965000 - RNA, 19 nt, Artificial Sequence
  Description of Artificial Sequence: Synthetic oligonucleotide
caggagccuuccacuaagu

SEQ ID NO: 2965001 - RNA, 19 nt, Artificial Sequence
  Description of Artificial Sequence: Synthetic oligonucleotide
guccacagucagggccaag

SEQ ID NO: 2965002 - RNA, 19 nt, Artificial Sequence
  Description of Artificial Sequence: Synthetic oligonucleotide
ggggugucaguuggcacaa

SEQ ID NO: 2965003 - RNA, 19 nt, Artificial Sequence
  Description of Artificial Sequence: Synthetic oligonucleotide
accccgcaccuugcggucu

SEQ ID NO: 2965004 - RNA, 19 nt, Artificial Sequence
  Description of Artificial Sequence: Synthetic oligonucleotide
guaugccuccugagcucca

SEQ ID NO: 2965005 - RNA, 19 nt, Artificial Sequence
  Description of Artificial Sequence: Synthetic oligonucleotide
caccuugcggucuguguuu

SEQ ID NO: 2965006 - RNA, 19 nt, Artificial Sequence
  Description of Artificial Sequence: Synthetic oligonucleotide
ccugagcuucaguugcaaa

SEQ ID NO: 2965007 - RNA, 19 nt, Artificial Sequence
  Description of Artificial Sequence: Synthetic oligonucleotide
cuucuuggcuaugccacuu

SEQ ID NO: 2965008 - RNA, 19 nt, Artificial Sequence
  Description of Artificial Sequence: Synthetic oligonucleotide
gcucgcagauucacacuga

SEQ ID NO: 2965009 - RNA, 19 nt, Artificial Sequence
  Description of Artificial Sequence: Synthetic oligonucleotide
cacuuucguucaccaccaa

SEQ ID NO: 2965010 - RNA, 19 nt, Artificial Sequence
  Description of Artificial Sequence: Synthetic oligonucleotide
gcacaaggaagagcacaaa

SEQ ID NO: 2965011 - RNA, 19 nt, Artificial Sequence
  Description of Artificial Sequence: Synthetic oligonucleotide
cagaugacuccaggagccu

SEQ ID NO: 2965012 - RNA, 19 nt, Artificial Sequence
  Description of Artificial Sequence: Synthetic oligonucleotide
gucagccuucagggguauc

SEQ ID NO: 2965013 - RNA, 19 nt, Artificial Sequence
  Description of Artificial Sequence: Synthetic oligonucleotide
ccugagcuccauacagaua

SEQ ID NO: 2965014 - RNA, 19 nt, Artificial Sequence
  Description of Artificial Sequence: Synthetic oligonucleotide
cgguuuugagaucccagcu

SEQ ID NO: 2965015 - RNA, 19 nt, Artificial Sequence
  Description of Artificial Sequence: Synthetic oligonucleotide
gccaaguugucagggcgcu

SEQ ID NO: 2965016 - RNA, 19 nt, Artificial Sequence
  Description of Artificial Sequence: Synthetic oligonucleotide
ggccugagcuucaguugca

SEQ ID NO: 2965017 - RNA, 19 nt, Artificial Sequence
  Description of Artificial Sequence: Synthetic oligonucleotide
gccuuccacuaaguugguc

SEQ ID NO: 2965018 - RNA, 19 nt, Artificial Sequence
  Description of Artificial Sequence: Synthetic oligonucleotide
ccuucuuggcuaugccacu

SEQ ID NO: 2965019 - RNA, 19 nt, Artificial Sequence
  Description of Artificial Sequence: Synthetic oligonucleotide
cacaggccugagcuucagu

SEQ ID NO: 2965020 - RNA, 19 nt, Artificial Sequence
  Description of Artificial Sequence: Synthetic oligonucleotide
gggugucaguuggcacaag

SEQ ID NO: 2965021 - RNA, 19 nt, Artificial Sequence
  Description of Artificial Sequence: Synthetic oligonucleotide
ggcggucgucagccuucag

SEQ ID NO: 2965022 - RNA, 19 nt, Artificial Sequence
  Description of Artificial Sequence: Synthetic oligonucleotide
gccugagcuucaguugcaa

SEQ ID NO: 2965023 - RNA, 19 nt, Artificial Sequence
  Description of Artificial Sequence: Synthetic oligonucleotide
ccauacagauaggcucgca

SEQ ID NO: 2965024 - RNA, 19 nt, Artificial Sequence
  Description of Artificial Sequence: Synthetic oligonucleotide
ccaaguugucagggcgcuc

SEQ ID NO: 2965025 - RNA, 19 nt, Artificial Sequence
  Description of Artificial Sequence: Synthetic oligonucleotide
cagacccuggagcgguuuu

SEQ ID NO: 2965026 - RNA, 19 nt, Artificial Sequence
  Description of Artificial Sequence: Synthetic oligonucleotide
cugaggcggucgucagccu

SEQ ID NO: 2965027 - RNA, 19 nt, Artificial Sequence
  Description of Artificial Sequence: Synthetic oligonucleotide
ccccgcaccuugcggucug

SEQ ID NO: 2965028 - RNA, 19 nt, Artificial Sequence
  Description of Artificial Sequence: Synthetic oligonucleotide
ccucagacccuggagcggu

SEQ ID NO: 2965029 - RNA, 19 nt, Artificial Sequence
  Description of Artificial Sequence: Synthetic oligonucleotide
cguuugugacguugucgua

SEQ ID NO: 2965030 - RNA, 19 nt, Artificial Sequence
  Description of Artificial Sequence: Synthetic oligonucleotide
ccagcuccuucuuggcuau

SEQ ID NO: 2965031 - RNA, 19 nt, Artificial Sequence
  Description of Artificial Sequence: Synthetic oligonucleotide
cucagacccuggagcgguu

SEQ ID NO: 2965032 - RNA, 19 nt, Artificial Sequence
  Description of Artificial Sequence: Synthetic oligonucleotide
ccgcaccuugcggucugug

SEQ ID NO: 2965033 - RNA, 19 nt, Artificial Sequence
  Description of Artificial Sequence: Synthetic oligonucleotide
cgcaccuugcggucugugu

SEQ ID NO: 2965034 - RNA, 19 nt, Artificial Sequence
  Description of Artificial Sequence: Synthetic oligonucleotide
ccacagucagggccaaguu

SEQ ID NO: 2965035 - RNA, 19 nt, Artificial Sequence
  Description of Artificial Sequence: Synthetic oligonucleotide
gggagagcucccagucuuu

SEQ ID NO: 2965036 - RNA, 19 nt, Artificial Sequence
  Description of Artificial Sequence: Synthetic oligonucleotide
ccacuaaguuggucuccau

SEQ ID NO: 2965037 - RNA, 19 nt, Artificial Sequence
  Description of Artificial Sequence: Synthetic oligonucleotide
ccaacucguuugugacguu

SEQ ID NO: 2965038 - RNA, 19 nt, Artificial Sequence
  Description of Artificial Sequence: Synthetic oligonucleotide
cgucagccuucagggguau

SEQ ID NO: 2965039 - RNA, 19 nt, Artificial Sequence
  Description of Artificial Sequence: Synthetic oligonucleotide
cccgcaccuugcggucugu

SEQ ID NO: 2965040 - RNA, 19 nt, Artificial Sequence
  Description of Artificial Sequence: Synthetic oligonucleotide
uuuuccuugauuuauuugg

SEQ ID NO: 2965041 - RNA, 19 nt, Artificial Sequence
  Description of Artificial Sequence: Synthetic oligonucleotide
aacacaguguguuaguggc

SEQ ID NO: 2965042 - RNA, 19 nt, Artificial Sequence
  Description of Artificial Sequence: Synthetic oligonucleotide
uuauguauuacuauaugcc

SEQ ID NO: 2965043 - RNA, 19 nt, Artificial Sequence
  Description of Artificial Sequence: Synthetic oligonucleotide
acauacauuacuuuguuug

SEQ ID NO: 2965044 - RNA, 19 nt, Artificial Sequence
  Description of Artificial Sequence: Synthetic oligonucleotide
acauuacuuuguuugaucc

SEQ ID NO: 2965045 - RNA, 19 nt, Artificial Sequence
  Description of Artificial Sequence: Synthetic oligonucleotide
uguacuugcucuaagguca

SEQ ID NO: 2965046 - RNA, 19 nt, Artificial Sequence
  Description of Artificial Sequence: Synthetic oligonucleotide
aagaugaagaaauggaggu

SEQ ID NO: 2965047 - RNA, 19 nt, Artificial Sequence
  Description of Artificial Sequence: Synthetic oligonucleotide
ggagaaagcaguuuuaugg

SEQ ID NO: 2965048 - RNA, 19 nt, Artificial Sequence
  Description of Artificial Sequence: Synthetic oligonucleotide
  modified_base (11)..(11): a, c, u, g, unknown or other
aagccuuuaangcaucagg

SEQ ID NO: 2965049 - RNA, 19 nt, Artificial Sequence
  Description of Artificial Sequence: Synthetic oligonucleotide
uuacuauaugcccauuucg

SEQ ID NO: 2965050 - RNA, 19 nt, Artificial Sequence
  Description of Artificial Sequence: Synthetic oligonucleotide
ucauuuaucguuuauuuuc

SEQ ID NO: 2965051 - RNA, 19 nt, Artificial Sequence
  Description of Artificial Sequence: Synthetic oligonucleotide
aucguuuauuuucacauac

SEQ ID NO: 2965052 - RNA, 19 nt, Artificial Sequence
  Description of Artificial Sequence: Synthetic oligonucleotide
uauguauuacuauaugccc

SEQ ID NO: 2965053 - RNA, 19 nt, Artificial Sequence
  Description of Artificial Sequence: Synthetic oligonucleotide
auuuauuuggccaugauca

SEQ ID NO: 2965054 - RNA, 19 nt, Artificial Sequence
  Description of Artificial Sequence: Synthetic oligonucleotide
aagcuacugaauuaggaag

SEQ ID NO: 2965055 - RNA, 19 nt, Artificial Sequence
  Description of Artificial Sequence: Synthetic oligonucleotide
gaugaagaaauggaggugg

SEQ ID NO: 2965056 - RNA, 19 nt, Artificial Sequence
  Description of Artificial Sequence: Synthetic oligonucleotide
aaaauaaaggcaguguuga

SEQ ID NO: 2965057 - RNA, 19 nt, Artificial Sequence
  Description of Artificial Sequence: Synthetic oligonucleotide
guuauguauuacuauaugc

SEQ ID NO: 2965058 - RNA, 19 nt, Artificial Sequence
  Description of Artificial Sequence: Synthetic oligonucleotide
  modified_base (17)..(17): a, c, u, g, unknown or other
gagagaaagccuuuaangc

SEQ ID NO: 2965059 - RNA, 19 nt, Artificial Sequence
  Description of Artificial Sequence: Synthetic oligonucleotide
uguguuaguggcuucacag

SEQ ID NO: 2965060 - RNA, 19 nt, Artificial Sequence
  Description of Artificial Sequence: Synthetic oligonucleotide
aagacagccacggagacuc

SEQ ID NO: 2965061 - RNA, 19 nt, Artificial Sequence
  Description of Artificial Sequence: Synthetic oligonucleotide
uauuuggccaugaucacag

SEQ ID NO: 2965062 - RNA, 19 nt, Artificial Sequence
  Description of Artificial Sequence: Synthetic oligonucleotide
uacugaauuaggaagcacc

SEQ ID NO: 2965063 - RNA, 19 nt, Artificial Sequence
  Description of Artificial Sequence: Synthetic oligonucleotide
  modified_base (16)..(16): a, c, u, g, unknown or other
agagaaagccuuuaangca

SEQ ID NO: 2965064 - RNA, 19 nt, Artificial Sequence
  Description of Artificial Sequence: Synthetic oligonucleotide
ugaagaaccuuccagagua

SEQ ID NO: 2965065 - RNA, 19 nt, Artificial Sequence
  Description of Artificial Sequence: Synthetic oligonucleotide
uuucacauacauuacuuug

SEQ ID NO: 2965066 - RNA, 19 nt, Artificial Sequence
  Description of Artificial Sequence: Synthetic oligonucleotide
auuacuauaugcccauuuc

SEQ ID NO: 2965067 - RNA, 19 nt, Artificial Sequence
  Description of Artificial Sequence: Synthetic oligonucleotide
uuaucguuuauuuucacau

SEQ ID NO: 2965068 - RNA, 19 nt, Artificial Sequence
  Description of Artificial Sequence: Synthetic oligonucleotide
aguccugugagguagguag

SEQ ID NO: 2965069 - RNA, 19 nt, Artificial Sequence
  Description of Artificial Sequence: Synthetic oligonucleotide
uguuugauccucacaacag

SEQ ID NO: 2965070 - RNA, 19 nt, Artificial Sequence
  Description of Artificial Sequence: Synthetic oligonucleotide
ugcucuaaggucaagcuac

SEQ ID NO: 2965071 - RNA, 19 nt, Artificial Sequence
  Description of Artificial Sequence: Synthetic oligonucleotide
aguggcucaagacagccac

SEQ ID NO: 2965072 - RNA, 19 nt, Artificial Sequence
  Description of Artificial Sequence: Synthetic oligonucleotide
aaagcaguuuuauggagga

SEQ ID NO: 2965073 - RNA, 19 nt, Artificial Sequence
  Description of Artificial Sequence: Synthetic oligonucleotide
ugaauuaggaagcaccaaa

SEQ ID NO: 2965074 - RNA, 19 nt, Artificial Sequence
  Description of Artificial Sequence: Synthetic oligonucleotide
uauaugcccauuucgaaga

SEQ ID NO: 2965075 - RNA, 19 nt, Artificial Sequence
  Description of Artificial Sequence: Synthetic oligonucleotide
auuacuuuguuugauccuc

SEQ ID NO: 2965076 - RNA, 19 nt, Artificial Sequence
  Description of Artificial Sequence: Synthetic oligonucleotide
ucucugaagaaccuuccag

SEQ ID NO: 2965077 - RNA, 19 nt, Artificial Sequence
  Description of Artificial Sequence: Synthetic oligonucleotide
uacuauaugcccauuucga

SEQ ID NO: 2965078 - RNA, 19 nt, Artificial Sequence
  Description of Artificial Sequence: Synthetic oligonucleotide
  modified_base (18)..(18): a, c, u, g, unknown or other
ggagagaaagccuuuaang

SEQ ID NO: 2965079 - RNA, 19 nt, Artificial Sequence
  Description of Artificial Sequence: Synthetic oligonucleotide
uucacauacauuacuuugu

SEQ ID NO: 2965080 - RNA, 19 nt, Artificial Sequence
  Description of Artificial Sequence: Synthetic oligonucleotide
uuguuugauccucacaaca

SEQ ID NO: 2965081 - RNA, 19 nt, Artificial Sequence
  Description of Artificial Sequence: Synthetic oligonucleotide
uuuaucguuuauuuucaca

SEQ ID NO: 2965082 - RNA, 19 nt, Artificial Sequence
  Description of Artificial Sequence: Synthetic oligonucleotide
gaaagcaguuuuauggagg

SEQ ID NO: 2965083 - RNA, 19 nt, Artificial Sequence
  Description of Artificial Sequence: Synthetic oligonucleotide
ucaagcuacugaauuagga

SEQ ID NO: 2965084 - RNA, 19 nt, Artificial Sequence
  Description of Artificial Sequence: Synthetic oligonucleotide
gauuuauuuggccaugauc

SEQ ID NO: 2965085 - RNA, 19 nt, Artificial Sequence
  Description of Artificial Sequence: Synthetic oligonucleotide
uucuguacuugcucuaagg

SEQ ID NO: 2965086 - RNA, 19 nt, Artificial Sequence
  Description of Artificial Sequence: Synthetic oligonucleotide
uaacacaguguguuagugg

SEQ ID NO: 2965087 - RNA, 19 nt, Artificial Sequence
  Description of Artificial Sequence: Synthetic oligonucleotide
uccagaguaccacuggugc

SEQ ID NO: 2965088 - RNA, 19 nt, Artificial Sequence
  Description of Artificial Sequence: Synthetic oligonucleotide
uguuaguggcuucacaggu

SEQ ID NO: 2965089 - RNA, 19 nt, Artificial Sequence
  Description of Artificial Sequence: Synthetic oligonucleotide
auaaaggcaguguugauuu

SEQ ID NO: 2965090 - RNA, 19 nt, Artificial Sequence
  Description of Artificial Sequence: Synthetic oligonucleotide
cuauaugcccauuucgaag

SEQ ID NO: 2965091 - RNA, 19 nt, Artificial Sequence
  Description of Artificial Sequence: Synthetic oligonucleotide
agugaggcgagugacuugc

SEQ ID NO: 2965092 - RNA, 19 nt, Artificial Sequence
  Description of Artificial Sequence: Synthetic oligonucleotide
uuuccuugauuuauuuggc

SEQ ID NO: 2965093 - RNA, 19 nt, Artificial Sequence
  Description of Artificial Sequence: Synthetic oligonucleotide
aagaaccuuccagaguacc

SEQ ID NO: 2965094 - RNA, 19 nt, Artificial Sequence
  Description of Artificial Sequence: Synthetic oligonucleotide
aagaaauggagguggcuca

SEQ ID NO: 2965095 - RNA, 19 nt, Artificial Sequence
  Description of Artificial Sequence: Synthetic oligonucleotide
auuucgaagaugaagaaau

SEQ ID NO: 2965096 - RNA, 19 nt, Artificial Sequence
  Description of Artificial Sequence: Synthetic oligonucleotide
ucuguacuugcucuaaggu

SEQ ID NO: 2965097 - RNA, 19 nt, Artificial Sequence
  Description of Artificial Sequence: Synthetic oligonucleotide
aaauggagguggcucagug

SEQ ID NO: 2965098 - RNA, 19 nt, Artificial Sequence
  Description of Artificial Sequence: Synthetic oligonucleotide
uccuugauuuauuuggcca

SEQ ID NO: 2965099 - RNA, 19 nt, Artificial Sequence
  Description of Artificial Sequence: Synthetic oligonucleotide
uuauuuucacauacauuac

SEQ ID NO: 2965100 - RNA, 19 nt, Artificial Sequence
  Description of Artificial Sequence: Synthetic oligonucleotide
agcuacugaauuaggaagc

SEQ ID NO: 2965101 - RNA, 19 nt, Artificial Sequence
  Description of Artificial Sequence: Synthetic oligonucleotide
uugguugguucucugaaga

SEQ ID NO: 2965102 - RNA, 19 nt, Artificial Sequence
  Description of Artificial Sequence: Synthetic oligonucleotide
ugucauuuaucguuuauuu

SEQ ID NO: 2965103 - RNA, 19 nt, Artificial Sequence
  Description of Artificial Sequence: Synthetic oligonucleotide
agaaagcaguuuuauggag

SEQ ID NO: 2965104 - RNA, 19 nt, Artificial Sequence
  Description of Artificial Sequence: Synthetic oligonucleotide
cuuuguuugauccucacaa

SEQ ID NO: 2965105 - RNA, 19 nt, Artificial Sequence
  Description of Artificial Sequence: Synthetic oligonucleotide
uuugauccucacaacaguc

SEQ ID NO: 2965106 - RNA, 19 nt, Artificial Sequence
  Description of Artificial Sequence: Synthetic oligonucleotide
uugauccucacaacagucc

SEQ ID NO: 2965107 - RNA, 19 nt, Artificial Sequence
  Description of Artificial Sequence: Synthetic oligonucleotide
acuugcucuaaggucaagc

SEQ ID NO: 2965108 - RNA, 19 nt, Artificial Sequence
  Description of Artificial Sequence: Synthetic oligonucleotide
augaucacagcuucuguug

SEQ ID NO: 2965109 - RNA, 19 nt, Artificial Sequence
  Description of Artificial Sequence: Synthetic oligonucleotide
aauaaaggcaguguugauu

SEQ ID NO: 2965110 - RNA, 19 nt, Artificial Sequence
  Description of Artificial Sequence: Synthetic oligonucleotide
auuuaucguuuauuuucac

SEQ ID NO: 2965111 - RNA, 19 nt, Artificial Sequence
  Description of Artificial Sequence: Synthetic oligonucleotide
uguauuacuauaugcccau

SEQ ID NO: 2965112 - RNA, 19 nt, Artificial Sequence
  Description of Artificial Sequence: Synthetic oligonucleotide
  modified_base (12)..(12): a, c, u, g, unknown or other
aaagccuuuaangcaucag

SEQ ID NO: 2965113 - RNA, 19 nt, Artificial Sequence
  Description of Artificial Sequence: Synthetic oligonucleotide
acagguucuguacuugcuc

SEQ ID NO: 2965114 - RNA, 19 nt, Artificial Sequence
  Description of Artificial Sequence: Synthetic oligonucleotide
uuuggccaugaucacagcu

SEQ ID NO: 2965115 - RNA, 19 nt, Artificial Sequence
  Description of Artificial Sequence: Synthetic oligonucleotide
cuucuguugucuugguugg

SEQ ID NO: 2965116 - RNA, 19 nt, Artificial Sequence
  Description of Artificial Sequence: Synthetic oligonucleotide
uauuacuauaugcccauuu

SEQ ID NO: 2965117 - RNA, 19 nt, Artificial Sequence
  Description of Artificial Sequence: Synthetic oligonucleotide
gagaaagcaguuuuaugga

SEQ ID NO: 2965118 - RNA, 19 nt, Artificial Sequence
  Description of Artificial Sequence: Synthetic oligonucleotide
aaaagacggagaaagcagu

SEQ ID NO: 2965119 - RNA, 19 nt, Artificial Sequence
  Description of Artificial Sequence: Synthetic oligonucleotide
uuucgaagaugaagaaaug

SEQ ID NO: 2965120 - RNA, 19 nt, Artificial Sequence
  Description of Artificial Sequence: Synthetic oligonucleotide
guugguucucugaagaacc

SEQ ID NO: 2965121 - RNA, 19 nt, Artificial Sequence
  Description of Artificial Sequence: Synthetic oligonucleotide
gacuugcacaguaacacag

SEQ ID NO: 2965122 - RNA, 19 nt, Artificial Sequence
  Description of Artificial Sequence: Synthetic oligonucleotide
gaagaaauggagguggcuc

SEQ ID NO: 2965123 - RNA, 19 nt, Artificial Sequence
  Description of Artificial Sequence: Synthetic oligonucleotide
uguugauuucuguagguuu

SEQ ID NO: 2965124 - RNA, 19 nt, Artificial Sequence
  Description of Artificial Sequence: Synthetic oligonucleotide
aaaggcaguguugauuucu

SEQ ID NO: 2965125 - RNA, 19 nt, Artificial Sequence
  Description of Artificial Sequence: Synthetic oligonucleotide
uacauuacuuuguuugauc

SEQ ID NO: 2965126 - RNA, 19 nt, Artificial Sequence
  Description of Artificial Sequence: Synthetic oligonucleotide
ucuugguugguucucugaa

SEQ ID NO: 2965127 - RNA, 19 nt, Artificial Sequence
  Description of Artificial Sequence: Synthetic oligonucleotide
uuuauuuggccaugaucac

SEQ ID NO: 2965128 - RNA, 19 nt, Artificial Sequence
  Description of Artificial Sequence: Synthetic oligonucleotide
uuuguuugauccucacaac

SEQ ID NO: 2965129 - RNA, 19 nt, Artificial Sequence
  Description of Artificial Sequence: Synthetic oligonucleotide
ucguuuauuuucacauaca

SEQ ID NO: 2965130 - RNA, 19 nt, Artificial Sequence
  Description of Artificial Sequence: Synthetic oligonucleotide
uuccuugauuuauuuggcc

SEQ ID NO: 2965131 - RNA, 19 nt, Artificial Sequence
  Description of Artificial Sequence: Synthetic oligonucleotide
aauggagguggcucaguga

SEQ ID NO: 2965132 - RNA, 19 nt, Artificial Sequence
  Description of Artificial Sequence: Synthetic oligonucleotide
gcuucuguugucuugguug

SEQ ID NO: 2965133 - RNA, 19 nt, Artificial Sequence
  Description of Artificial Sequence: Synthetic oligonucleotide
guguuaguggcuucacagg

SEQ ID NO: 2965134 - RNA, 19 nt, Artificial Sequence
  Description of Artificial Sequence: Synthetic oligonucleotide
acagcuucuguugucuugg

SEQ ID NO: 2965135 - RNA, 19 nt, Artificial Sequence
  Description of Artificial Sequence: Synthetic oligonucleotide
gugacuugcacaguaacac

SEQ ID NO: 2965136 - RNA, 19 nt, Artificial Sequence
  Description of Artificial Sequence: Synthetic oligonucleotide
aggguuauguauuacuaua

SEQ ID NO: 2965137 - RNA, 19 nt, Artificial Sequence
  Description of Artificial Sequence: Synthetic oligonucleotide
cauuuaucguuuauuuuca

SEQ ID NO: 2965138 - RNA, 19 nt, Artificial Sequence
  Description of Artificial Sequence: Synthetic oligonucleotide
caguguugauuucuguagg

SEQ ID NO: 2965139 - RNA, 19 nt, Artificial Sequence
  Description of Artificial Sequence: Synthetic oligonucleotide
aggcgagugacuugcacag

SEQ ID NO: 2965140 - RNA, 19 nt, Artificial Sequence
  Description of Artificial Sequence: Synthetic oligonucleotide
aguguugauuucuguaggu

SEQ ID NO: 2965141 - RNA, 19 nt, Artificial Sequence
  Description of Artificial Sequence: Synthetic oligonucleotide
cuugcacaguaacacagug

SEQ ID NO: 2965142 - RNA, 19 nt, Artificial Sequence
  Description of Artificial Sequence: Synthetic oligonucleotide
uuacuuuguuugauccuca

SEQ ID NO: 2965143 - RNA, 19 nt, Artificial Sequence
  Description of Artificial Sequence: Synthetic oligonucleotide
ugaucacagcuucuguugu

SEQ ID NO: 2965144 - RNA, 19 nt, Artificial Sequence
  Description of Artificial Sequence: Synthetic oligonucleotide
ugugagguagguaggguua

SEQ ID NO: 2965145 - RNA, 19 nt, Artificial Sequence
  Description of Artificial Sequence: Synthetic oligonucleotide
uuauuuggccaugaucaca

SEQ ID NO: 2965146 - RNA, 19 nt, Artificial Sequence
  Description of Artificial Sequence: Synthetic oligonucleotide
acuauaugcccauuucgaa

SEQ ID NO: 2965147 - RNA, 19 nt, Artificial Sequence
  Description of Artificial Sequence: Synthetic oligonucleotide
aaauaaaggcaguguugau

SEQ ID NO: 2965148 - RNA, 19 nt, Artificial Sequence
  Description of Artificial Sequence: Synthetic oligonucleotide
uuccagaguaccacuggug

SEQ ID NO: 2965149 - RNA, 19 nt, Artificial Sequence
  Description of Artificial Sequence: Synthetic oligonucleotide
gcaguguugauuucuguag

SEQ ID NO: 2965150 - RNA, 19 nt, Artificial Sequence
  Description of Artificial Sequence: Synthetic oligonucleotide
cuguacuugcucuaagguc

SEQ ID NO: 2965151 - RNA, 19 nt, Artificial Sequence
  Description of Artificial Sequence: Synthetic oligonucleotide
  modified_base (10)..(10): a, c, u, g, unknown or other
agccuuuaangcaucagga

SEQ ID NO: 2965152 - RNA, 19 nt, Artificial Sequence
  Description of Artificial Sequence: Synthetic oligonucleotide
aguaccacuggugcagugg

SEQ ID NO: 2965153 - RNA, 19 nt, Artificial Sequence
  Description of Artificial Sequence: Synthetic oligonucleotide
aguaacacaguguguuagu

SEQ ID NO: 2965154 - RNA, 19 nt, Artificial Sequence
  Description of Artificial Sequence: Synthetic oligonucleotide
uggcucaagacagccacgg

SEQ ID NO: 2965155 - RNA, 19 nt, Artificial Sequence
  Description of Artificial Sequence: Synthetic oligonucleotide
gguuauguauuacuauaug

SEQ ID NO: 2965156 - RNA, 19 nt, Artificial Sequence
  Description of Artificial Sequence: Synthetic oligonucleotide
uucucugaagaaccuucca

SEQ ID NO: 2965157 - RNA, 19 nt, Artificial Sequence
  Description of Artificial Sequence: Synthetic oligonucleotide
ucacagguucuguacuugc

SEQ ID NO: 2965158 - RNA, 19 nt, Artificial Sequence
  Description of Artificial Sequence: Synthetic oligonucleotide
cuugguugguucucugaag

SEQ ID NO: 2965159 - RNA, 19 nt, Artificial Sequence
  Description of Artificial Sequence: Synthetic oligonucleotide
cauacauuacuuuguuuga

SEQ ID NO: 2965160 - RNA, 19 nt, Artificial Sequence
  Description of Artificial Sequence: Synthetic oligonucleotide
uugcacaguaacacagugu

SEQ ID NO: 2965161 - RNA, 19 nt, Artificial Sequence
  Description of Artificial Sequence: Synthetic oligonucleotide
ugacuugcacaguaacaca

SEQ ID NO: 2965162 - RNA, 19 nt, Artificial Sequence
  Description of Artificial Sequence: Synthetic oligonucleotide
auguauuacuauaugccca

SEQ ID NO: 2965163 - RNA, 19 nt, Artificial Sequence
  Description of Artificial Sequence: Synthetic oligonucleotide
uaggguuauguauuacuau

SEQ ID NO: 2965164 - RNA, 19 nt, Artificial Sequence
  Description of Artificial Sequence: Synthetic oligonucleotide
ucaagacagccacggagac

SEQ ID NO: 2965165 - RNA, 19 nt, Artificial Sequence
  Description of Artificial Sequence: Synthetic oligonucleotide
agcaguuuuauggaggaaa

SEQ ID NO: 2965166 - RNA, 19 nt, Artificial Sequence
  Description of Artificial Sequence: Synthetic oligonucleotide
acugaauuaggaagcacca

SEQ ID NO: 2965167 - RNA, 19 nt, Artificial Sequence
  Description of Artificial Sequence: Synthetic oligonucleotide
caagcuacugaauuaggaa

SEQ ID NO: 2965168 - RNA, 19 nt, Artificial Sequence
  Description of Artificial Sequence: Synthetic oligonucleotide
cucugaagaaccuuccaga

SEQ ID NO: 2965169 - RNA, 19 nt, Artificial Sequence
  Description of Artificial Sequence: Synthetic oligonucleotide
uuggccaugaucacagcuu

SEQ ID NO: 2965170 - RNA, 19 nt, Artificial Sequence
  Description of Artificial Sequence: Synthetic oligonucleotide
augaagaaauggagguggc

SEQ ID NO: 2965171 - RNA, 19 nt, Artificial Sequence
  Description of Artificial Sequence: Synthetic oligonucleotide
auuuucacauacauuacuu

SEQ ID NO: 2965172 - RNA, 19 nt, Artificial Sequence
  Description of Artificial Sequence: Synthetic oligonucleotide
gacuccugggucccgcugg

SEQ ID NO: 2965173 - RNA, 19 nt, Artificial Sequence
  Description of Artificial Sequence: Synthetic oligonucleotide
gagugacuugcacaguaac

SEQ ID NO: 2965174 - RNA, 19 nt, Artificial Sequence
  Description of Artificial Sequence: Synthetic oligonucleotide
acuuuguuugauccucaca

SEQ ID NO: 2965175 - RNA, 19 nt, Artificial Sequence
  Description of Artificial Sequence: Synthetic oligonucleotide
aaccuuccagaguaccacu

SEQ ID NO: 2965176 - RNA, 19 nt, Artificial Sequence
  Description of Artificial Sequence: Synthetic oligonucleotide
caacaguccugugagguag

SEQ ID NO: 2965177 - RNA, 19 nt, Artificial Sequence
  Description of Artificial Sequence: Synthetic oligonucleotide
uugauuuauuuggccauga

SEQ ID NO: 2965178 - RNA, 19 nt, Artificial Sequence
  Description of Artificial Sequence: Synthetic oligonucleotide
gaauuaggaagcaccaaaa

SEQ ID NO: 2965179 - RNA, 19 nt, Artificial Sequence
  Description of Artificial Sequence: Synthetic oligonucleotide
gcucaagacagccacggag

SEQ ID NO: 2965180 - RNA, 19 nt, Artificial Sequence
  Description of Artificial Sequence: Synthetic oligonucleotide
  modified_base (14)..(14): a, c, u, g, unknown or other
agaaagccuuuaangcauc

SEQ ID NO: 2965181 - RNA, 19 nt, Artificial Sequence
  Description of Artificial Sequence: Synthetic oligonucleotide
gaaccuuccagaguaccac

SEQ ID NO: 2965182 - RNA, 19 nt, Artificial Sequence
  Description of Artificial Sequence: Synthetic oligonucleotide
cucaagacagccacggaga

SEQ ID NO: 2965183 - RNA, 19 nt, Artificial Sequence
  Description of Artificial Sequence: Synthetic oligonucleotide
ugauuuauuuggccaugau

SEQ ID NO: 2965184 - RNA, 19 nt, Artificial Sequence
  Description of Artificial Sequence: Synthetic oligonucleotide
auuuggccaugaucacagc

SEQ ID NO: 2965185 - RNA, 19 nt, Artificial Sequence
  Description of Artificial Sequence: Synthetic oligonucleotide
caguaacacaguguguuag

SEQ ID NO: 2965186 - RNA, 19 nt, Artificial Sequence
  Description of Artificial Sequence: Synthetic oligonucleotide
uaucguuuauuuucacaua

SEQ ID NO: 2965187 - RNA, 19 nt, Artificial Sequence
  Description of Artificial Sequence: Synthetic oligonucleotide
agacggagaaagcaguuuu

SEQ ID NO: 2965188 - RNA, 19 nt, Artificial Sequence
  Description of Artificial Sequence: Synthetic oligonucleotide
gaggcgagugacuugcaca

SEQ ID NO: 2965189 - RNA, 19 nt, Artificial Sequence
  Description of Artificial Sequence: Synthetic oligonucleotide
guaacacaguguguuagug

SEQ ID NO: 2965190 - RNA, 19 nt, Artificial Sequence
  Description of Artificial Sequence: Synthetic oligonucleotide
cagaguaccacuggugcag

SEQ ID NO: 2965191 - RNA, 19 nt, Artificial Sequence
  Description of Artificial Sequence: Synthetic oligonucleotide
uugguucucugaagaaccu

SEQ ID NO: 2965192 - RNA, 19 nt, Artificial Sequence
  Description of Artificial Sequence: Synthetic oligonucleotide
augcccauuucgaagauga

SEQ ID NO: 2965193 - RNA, 19 nt, Artificial Sequence
  Description of Artificial Sequence: Synthetic oligonucleotide
ggugcaguggcucaagaca

SEQ ID NO: 2965194 - RNA, 19 nt, Artificial Sequence
  Description of Artificial Sequence: Synthetic oligonucleotide
ggucaagcuacugaauuag

SEQ ID NO: 2965195 - RNA, 19 nt, Artificial Sequence
  Description of Artificial Sequence: Synthetic oligonucleotide
uggccaugaucacagcuuc

SEQ ID NO: 2965196 - RNA, 19 nt, Artificial Sequence
  Description of Artificial Sequence: Synthetic oligonucleotide
uugcucuaaggucaagcua

SEQ ID NO: 2965197 - RNA, 19 nt, Artificial Sequence
  Description of Artificial Sequence: Synthetic oligonucleotide
uugucauuuaucguuuauu

SEQ ID NO: 2965198 - RNA, 19 nt, Artificial Sequence
  Description of Artificial Sequence: Synthetic oligonucleotide
guaccacuggugcaguggc

SEQ ID NO: 2965199 - RNA, 19 nt, Artificial Sequence
  Description of Artificial Sequence: Synthetic oligonucleotide
cacggagacuccugggucc

SEQ ID NO: 2965200 - RNA, 19 nt, Artificial Sequence
  Description of Artificial Sequence: Synthetic oligonucleotide
ugaagaaauggagguggcu

SEQ ID NO: 2965201 - RNA, 19 nt, Artificial Sequence
  Description of Artificial Sequence: Synthetic oligonucleotide
uggugggagagaaagccuu

SEQ ID NO: 2965202 - RNA, 19 nt, Artificial Sequence
  Description of Artificial Sequence: Synthetic oligonucleotide
uucacagguucuguacuug

SEQ ID NO: 2965203 - RNA, 19 nt, Artificial Sequence
  Description of Artificial Sequence: Synthetic oligonucleotide
accacuggugcaguggcuc

SEQ ID NO: 2965204 - RNA, 19 nt, Artificial Sequence
  Description of Artificial Sequence: Synthetic oligonucleotide
cuugauuuauuuggccaug

SEQ ID NO: 2965205 - RNA, 19 nt, Artificial Sequence
  Description of Artificial Sequence: Synthetic oligonucleotide
cccauuucgaagaugaaga

SEQ ID NO: 2965206 - RNA, 19 nt, Artificial Sequence
  Description of Artificial Sequence: Synthetic oligonucleotide
gugcaguggcucaagacag

SEQ ID NO: 2965207 - RNA, 19 nt, Artificial Sequence
  Description of Artificial Sequence: Synthetic oligonucleotide
aguguguuaguggcuucac

SEQ ID NO: 2965208 - RNA, 19 nt, Artificial Sequence
  Description of Artificial Sequence: Synthetic oligonucleotide
uacuuuguuugauccucac

SEQ ID NO: 2965209 - RNA, 19 nt, Artificial Sequence
  Description of Artificial Sequence: Synthetic oligonucleotide
ugaggcgagugacuugcac

SEQ ID NO: 2965210 - RNA, 19 nt, Artificial Sequence
  Description of Artificial Sequence: Synthetic oligonucleotide
aaggcaguguugauuucug

SEQ ID NO: 2965211 - RNA, 19 nt, Artificial Sequence
  Description of Artificial Sequence: Synthetic oligonucleotide
ugggagagaaagccuuuaa

SEQ ID NO: 2965212 - RNA, 19 nt, Artificial Sequence
  Description of Artificial Sequence: Synthetic oligonucleotide
acaguguguuaguggcuuc

SEQ ID NO: 2965213 - RNA, 19 nt, Artificial Sequence
  Description of Artificial Sequence: Synthetic oligonucleotide
uggugcaguggcucaagac

SEQ ID NO: 2965214 - RNA, 19 nt, Artificial Sequence
  Description of Artificial Sequence: Synthetic oligonucleotide
gucaagcuacugaauuagg

SEQ ID NO: 2965215 - RNA, 19 nt, Artificial Sequence
  Description of Artificial Sequence: Synthetic oligonucleotide
aggucaagcuacugaauua

SEQ ID NO: 2965216 - RNA, 19 nt, Artificial Sequence
  Description of Artificial Sequence: Synthetic oligonucleotide
aucacagcuucuguugucu

SEQ ID NO: 2965217 - RNA, 19 nt, Artificial Sequence
  Description of Artificial Sequence: Synthetic oligonucleotide
auacauuacuuuguuugau

SEQ ID NO: 2965218 - RNA, 19 nt, Artificial Sequence
  Description of Artificial Sequence: Synthetic oligonucleotide
ugcaguggcucaagacagc

SEQ ID NO: 2965219 - RNA, 19 nt, Artificial Sequence
  Description of Artificial Sequence: Synthetic oligonucleotide
agaaauggagguggcucag

SEQ ID NO: 2965220 - RNA, 19 nt, Artificial Sequence
  Description of Artificial Sequence: Synthetic oligonucleotide
aacaguccugugagguagg

SEQ ID NO: 2965221 - RNA, 19 nt, Artificial Sequence
  Description of Artificial Sequence: Synthetic oligonucleotide
guucucugaagaaccuucc

SEQ ID NO: 2965222 - RNA, 19 nt, Artificial Sequence
  Description of Artificial Sequence: Synthetic oligonucleotide
ugucuugguugguucucug

SEQ ID NO: 2965223 - RNA, 19 nt, Artificial Sequence
  Description of Artificial Sequence: Synthetic oligonucleotide
cuguugucuugguugguuc

SEQ ID NO: 2965224 - RNA, 19 nt, Artificial Sequence
  Description of Artificial Sequence: Synthetic oligonucleotide
aaagacggagaaagcaguu

SEQ ID NO: 2965225 - RNA, 19 nt, Artificial Sequence
  Description of Artificial Sequence: Synthetic oligonucleotide
gaucacagcuucuguuguc

SEQ ID NO: 2965226 - RNA, 19 nt, Artificial Sequence
  Description of Artificial Sequence: Synthetic oligonucleotide
ucagugaggcgagugacuu

SEQ ID NO: 2965227 - RNA, 19 nt, Artificial Sequence
  Description of Artificial Sequence: Synthetic oligonucleotide
aagacggagaaagcaguuu

SEQ ID NO: 2965228 - RNA, 19 nt, Artificial Sequence
  Description of Artificial Sequence: Synthetic oligonucleotide
uagguaggguuauguauua

SEQ ID NO: 2965229 - RNA, 19 nt, Artificial Sequence
  Description of Artificial Sequence: Synthetic oligonucleotide
uaugcccauuucgaagaug

SEQ ID NO: 2965230 - RNA, 19 nt, Artificial Sequence
  Description of Artificial Sequence: Synthetic oligonucleotide
  modified_base (13)..(13): a, c, u, g, unknown or other
gaaagccuuuaangcauca

SEQ ID NO: 2965231 - RNA, 19 nt, Artificial Sequence
  Description of Artificial Sequence: Synthetic oligonucleotide
acaguaacacaguguguua

SEQ ID NO: 2965232 - RNA, 19 nt, Artificial Sequence
  Description of Artificial Sequence: Synthetic oligonucleotide
ugguugguucucugaagaa

SEQ ID NO: 2965233 - RNA, 19 nt, Artificial Sequence
  Description of Artificial Sequence: Synthetic oligonucleotide
agguaggguuauguauuac

SEQ ID NO: 2965234 - RNA, 19 nt, Artificial Sequence
  Description of Artificial Sequence: Synthetic oligonucleotide
guaggguuauguauuacua

SEQ ID NO: 2965235 - RNA, 19 nt, Artificial Sequence
  Description of Artificial Sequence: Synthetic oligonucleotide
ucuguugucuugguugguu

SEQ ID NO: 2965236 - RNA, 19 nt, Artificial Sequence
  Description of Artificial Sequence: Synthetic oligonucleotide
cuugcucuaaggucaagcu

SEQ ID NO: 2965237 - RNA, 19 nt, Artificial Sequence
  Description of Artificial Sequence: Synthetic oligonucleotide
acggagacuccuggguccc

SEQ ID NO: 2965238 - RNA, 19 nt, Artificial Sequence
  Description of Artificial Sequence: Synthetic oligonucleotide
cuacugaauuaggaagcac

SEQ ID NO: 2965239 - RNA, 19 nt, Artificial Sequence
  Description of Artificial Sequence: Synthetic oligonucleotide
agccacggagacuccuggg

SEQ ID NO: 2965240 - RNA, 19 nt, Artificial Sequence
  Description of Artificial Sequence: Synthetic oligonucleotide
gguugguucucugaagaac

SEQ ID NO: 2965241 - RNA, 19 nt, Artificial Sequence
  Description of Artificial Sequence: Synthetic oligonucleotide
uugucuugguugguucucu

SEQ ID NO: 2965242 - RNA, 19 nt, Artificial Sequence
  Description of Artificial Sequence: Synthetic oligonucleotide
  modified_base (15)..(15): a, c, u, g, unknown or other
gagaaagccuuuaangcau

SEQ ID NO: 2965243 - RNA, 19 nt, Artificial Sequence
  Description of Artificial Sequence: Synthetic oligonucleotide
gcccauuucgaagaugaag

SEQ ID NO: 2965244 - RNA, 19 nt, Artificial Sequence
  Description of Artificial Sequence: Synthetic oligonucleotide
cauuucgaagaugaagaaa

SEQ ID NO: 2965245 - RNA, 19 nt, Artificial Sequence
  Description of Artificial Sequence: Synthetic oligonucleotide
uaaaggcaguguugauuuc

SEQ ID NO: 2965246 - RNA, 19 nt, Artificial Sequence
  Description of Artificial Sequence: Synthetic oligonucleotide
acaacaguccugugaggua

SEQ ID NO: 2965247 - RNA, 19 nt, Artificial Sequence
  Description of Artificial Sequence: Synthetic oligonucleotide
acggagaaagcaguuuuau

SEQ ID NO: 2965248 - RNA, 19 nt, Artificial Sequence
  Description of Artificial Sequence: Synthetic oligonucleotide
gguaggguuauguauuacu

SEQ ID NO: 2965249 - RNA, 19 nt, Artificial Sequence
  Description of Artificial Sequence: Synthetic oligonucleotide
gguucucugaagaaccuuc

SEQ ID NO: 2965250 - RNA, 19 nt, Artificial Sequence
  Description of Artificial Sequence: Synthetic oligonucleotide
ggcuucacagguucuguac

SEQ ID NO: 2965251 - RNA, 19 nt, Artificial Sequence
  Description of Artificial Sequence: Synthetic oligonucleotide
gagguggcucagugaggcg

SEQ ID NO: 2965252 - RNA, 19 nt, Artificial Sequence
  Description of Artificial Sequence: Synthetic oligonucleotide
agguggcucagugaggcga

SEQ ID NO: 2965253 - RNA, 19 nt, Artificial Sequence
  Description of Artificial Sequence: Synthetic oligonucleotide
cagccacggagacuccugg

SEQ ID NO: 2965254 - RNA, 19 nt, Artificial Sequence
  Description of Artificial Sequence: Synthetic oligonucleotide
acuugcacaguaacacagu

SEQ ID NO: 2965255 - RNA, 19 nt, Artificial Sequence
  Description of Artificial Sequence: Synthetic oligonucleotide
auaugcccauuucgaagau

SEQ ID NO: 2965256 - RNA, 19 nt, Artificial Sequence
  Description of Artificial Sequence: Synthetic oligonucleotide
gaguaccacuggugcagug

SEQ ID NO: 2965257 - RNA, 19 nt, Artificial Sequence
  Description of Artificial Sequence: Synthetic oligonucleotide
cauuacuuuguuugauccu

SEQ ID NO: 2965258 - RNA, 19 nt, Artificial Sequence
  Description of Artificial Sequence: Synthetic oligonucleotide
gucauuuaucguuuauuuu

SEQ ID NO: 2965259 - RNA, 19 nt, Artificial Sequence
  Description of Artificial Sequence: Synthetic oligonucleotide
  modified_base (19)..(19): a, c, u, g, unknown or other
gggagagaaagccuuuaan

SEQ ID NO: 2965260 - RNA, 19 nt, Artificial Sequence
  Description of Artificial Sequence: Synthetic oligonucleotide
ugagguagguaggguuaug

SEQ ID NO: 2965261 - RNA, 19 nt, Artificial Sequence
  Description of Artificial Sequence: Synthetic oligonucleotide
ccuuccagaguaccacugg

SEQ ID NO: 2965262 - RNA, 19 nt, Artificial Sequence
  Description of Artificial Sequence: Synthetic oligonucleotide
guguguuaguggcuucaca

SEQ ID NO: 2965263 - RNA, 19 nt, Artificial Sequence
  Description of Artificial Sequence: Synthetic oligonucleotide
guccugugagguagguagg

SEQ ID NO: 2965264 - RNA, 19 nt, Artificial Sequence
  Description of Artificial Sequence: Synthetic oligonucleotide
uggcucagugaggcgagug

SEQ ID NO: 2965265 - RNA, 19 nt, Artificial Sequence
  Description of Artificial Sequence: Synthetic oligonucleotide
guugucuugguugguucuc

SEQ ID NO: 2965266 - RNA, 19 nt, Artificial Sequence
  Description of Artificial Sequence: Synthetic oligonucleotide
guagguaggguuauguauu

SEQ ID NO: 2965267 - RNA, 19 nt, Artificial Sequence
  Description of Artificial Sequence: Synthetic oligonucleotide
uaccacuggugcaguggcu

SEQ ID NO: 2965268 - RNA, 19 nt, Artificial Sequence
  Description of Artificial Sequence: Synthetic oligonucleotide
uggcuucacagguucugua

SEQ ID NO: 2965269 - RNA, 19 nt, Artificial Sequence
  Description of Artificial Sequence: Synthetic oligonucleotide
accuuccagaguaccacug

SEQ ID NO: 2965270 - RNA, 19 nt, Artificial Sequence
  Description of Artificial Sequence: Synthetic oligonucleotide
gccaugaucacagcuucug

SEQ ID NO: 2965271 - RNA, 19 nt, Artificial Sequence
  Description of Artificial Sequence: Synthetic oligonucleotide
acuggugcaguggcucaag

SEQ ID NO: 2965272 - RNA, 19 nt, Artificial Sequence
  Description of Artificial Sequence: Synthetic oligonucleotide
agacuccugggucccgcug

SEQ ID NO: 2965273 - RNA, 19 nt, Artificial Sequence
  Description of Artificial Sequence: Synthetic oligonucleotide
ugcccauuucgaagaugaa

SEQ ID NO: 2965274 - RNA, 19 nt, Artificial Sequence
  Description of Artificial Sequence: Synthetic oligonucleotide
agguucuguacuugcucua

SEQ ID NO: 2965275 - RNA, 19 nt, Artificial Sequence
  Description of Artificial Sequence: Synthetic oligonucleotide
caugaucacagcuucuguu

SEQ ID NO: 2965276 - RNA, 19 nt, Artificial Sequence
  Description of Artificial Sequence: Synthetic oligonucleotide
guggcucaagacagccacg

SEQ ID NO: 2965277 - RNA, 19 nt, Artificial Sequence
  Description of Artificial Sequence: Synthetic oligonucleotide
cacaacaguccugugaggu

SEQ ID NO: 2965278 - RNA, 19 nt, Artificial Sequence
  Description of Artificial Sequence: Synthetic oligonucleotide
agcuucuguugucuugguu

SEQ ID NO: 2965279 - RNA, 19 nt, Artificial Sequence
  Description of Artificial Sequence: Synthetic oligonucleotide
aagcaguuuuauggaggaa

SEQ ID NO: 2965280 - RNA, 19 nt, Artificial Sequence
  Description of Artificial Sequence: Synthetic oligonucleotide
guugauuucuguagguuuu

SEQ ID NO: 2965281 - RNA, 19 nt, Artificial Sequence
  Description of Artificial Sequence: Synthetic oligonucleotide
cagguucuguacuugcucu

SEQ ID NO: 2965282 - RNA, 19 nt, Artificial Sequence
  Description of Artificial Sequence: Synthetic oligonucleotide
gcaguggcucaagacagcc

SEQ ID NO: 2965283 - RNA, 19 nt, Artificial Sequence
  Description of Artificial Sequence: Synthetic oligonucleotide
ugguucucugaagaaccuu

SEQ ID NO: 2965284 - RNA, 19 nt, Artificial Sequence
  Description of Artificial Sequence: Synthetic oligonucleotide
gacggagaaagcaguuuua

SEQ ID NO: 2965285 - RNA, 19 nt, Artificial Sequence
  Description of Artificial Sequence: Synthetic oligonucleotide
cagugaggcgagugacuug

SEQ ID NO: 2965286 - RNA, 19 nt, Artificial Sequence
  Description of Artificial Sequence: Synthetic oligonucleotide
uacuugcucuaaggucaag

SEQ ID NO: 2965287 - RNA, 19 nt, Artificial Sequence
  Description of Artificial Sequence: Synthetic oligonucleotide
gcuacugaauuaggaagca

SEQ ID NO: 2965288 - RNA, 19 nt, Artificial Sequence
  Description of Artificial Sequence: Synthetic oligonucleotide
acagccacggagacuccug

SEQ ID NO: 2965289 - RNA, 19 nt, Artificial Sequence
  Description of Artificial Sequence: Synthetic oligonucleotide
agaguaccacuggugcagu

SEQ ID NO: 2965290 - RNA, 19 nt, Artificial Sequence
  Description of Artificial Sequence: Synthetic oligonucleotide
cugaauuaggaagcaccaa

SEQ ID NO: 2965291 - RNA, 19 nt, Artificial Sequence
  Description of Artificial Sequence: Synthetic oligonucleotide
cuuccagaguaccacuggu

SEQ ID NO: 2965292 - RNA, 19 nt, Artificial Sequence
  Description of Artificial Sequence: Synthetic oligonucleotide
uucuguugucuugguuggu

SEQ ID NO: 2965293 - RNA, 19 nt, Artificial Sequence
  Description of Artificial Sequence: Synthetic oligonucleotide
gcaguuuuauggaggaaaa

SEQ ID NO: 2965294 - RNA, 19 nt, Artificial Sequence
  Description of Artificial Sequence: Synthetic oligonucleotide
ucccgcuggugggagagaa

SEQ ID NO: 2965295 - RNA, 19 nt, Artificial Sequence
  Description of Artificial Sequence: Synthetic oligonucleotide
caguguguuaguggcuuca

SEQ ID NO: 2965296 - RNA, 19 nt, Artificial Sequence
  Description of Artificial Sequence: Synthetic oligonucleotide
acacaguguguuaguggcu

SEQ ID NO: 2965297 - RNA, 19 nt, Artificial Sequence
  Description of Artificial Sequence: Synthetic oligonucleotide
ccgcuggugggagagaaag

SEQ ID NO: 2965298 - RNA, 19 nt, Artificial Sequence
  Description of Artificial Sequence: Synthetic oligonucleotide
acaguccugugagguaggu

SEQ ID NO: 2965299 - RNA, 19 nt, Artificial Sequence
  Description of Artificial Sequence: Synthetic oligonucleotide
ugggucccgcuggugggag

SEQ ID NO: 2965300 - RNA, 19 nt, Artificial Sequence
  Description of Artificial Sequence: Synthetic oligonucleotide
ggcucagugaggcgaguga

SEQ ID NO: 2965301 - RNA, 19 nt, Artificial Sequence
  Description of Artificial Sequence: Synthetic oligonucleotide
ccugggucccgcugguggg

SEQ ID NO: 2965302 - RNA, 19 nt, Artificial Sequence
  Description of Artificial Sequence: Synthetic oligonucleotide
gcgagugacuugcacagua

SEQ ID NO: 2965303 - RNA, 19 nt, Artificial Sequence
  Description of Artificial Sequence: Synthetic oligonucleotide
cggagaaagcaguuuuaug

SEQ ID NO: 2965304 - RNA, 19 nt, Artificial Sequence
  Description of Artificial Sequence: Synthetic oligonucleotide
cacagguucuguacuugcu

SEQ ID NO: 2965305 - RNA, 19 nt, Artificial Sequence
  Description of Artificial Sequence: Synthetic oligonucleotide
agacagccacggagacucc

SEQ ID NO: 2965306 - RNA, 19 nt, Artificial Sequence
  Description of Artificial Sequence: Synthetic oligonucleotide
cugugagguagguaggguu

SEQ ID NO: 2965307 - RNA, 19 nt, Artificial Sequence
  Description of Artificial Sequence: Synthetic oligonucleotide
caguggcucaagacagcca

SEQ ID NO: 2965308 - RNA, 19 nt, Artificial Sequence
  Description of Artificial Sequence: Synthetic oligonucleotide
gcuucacagguucuguacu

SEQ ID NO: 2965309 - RNA, 19 nt, Artificial Sequence
  Description of Artificial Sequence: Synthetic oligonucleotide
cucagugaggcgagugacu

SEQ ID NO: 2965310 - RNA, 19 nt, Artificial Sequence
  Description of Artificial Sequence: Synthetic oligonucleotide
cuucacagguucuguacuu

SEQ ID NO: 2965311 - RNA, 19 nt, Artificial Sequence
  Description of Artificial Sequence: Synthetic oligonucleotide
gaaauggagguggcucagu

SEQ ID NO: 2965312 - RNA, 19 nt, Artificial Sequence
  Description of Artificial Sequence: Synthetic oligonucleotide
ccauuucgaagaugaagaa

SEQ ID NO: 2965313 - RNA, 19 nt, Artificial Sequence
  Description of Artificial Sequence: Synthetic oligonucleotide
ggguuauguauuacuauau

SEQ ID NO: 2965314 - RNA, 19 nt, Artificial Sequence
  Description of Artificial Sequence: Synthetic oligonucleotide
cacauacauuacuuuguuu

SEQ ID NO: 2965315 - RNA, 19 nt, Artificial Sequence
  Description of Artificial Sequence: Synthetic oligonucleotide
cuggugcaguggcucaaga

SEQ ID NO: 2965316 - RNA, 19 nt, Artificial Sequence
  Description of Artificial Sequence: Synthetic oligonucleotide
cguuuauuuucacauacau

SEQ ID NO: 2965317 - RNA, 19 nt, Artificial Sequence
  Description of Artificial Sequence: Synthetic oligonucleotide
ccagaguaccacuggugca

SEQ ID NO: 2965318 - RNA, 19 nt, Artificial Sequence
  Description of Artificial Sequence: Synthetic oligonucleotide
ggagacuccugggucccgc

SEQ ID NO: 2965319 - RNA, 19 nt, Artificial Sequence
  Description of Artificial Sequence: Synthetic oligonucleotide
guacuugcucuaaggucaa

SEQ ID NO: 2965320 - RNA, 19 nt, Artificial Sequence
  Description of Artificial Sequence: Synthetic oligonucleotide
ccacggagacuccuggguc

SEQ ID NO: 2965321 - RNA, 19 nt, Artificial Sequence
  Description of Artificial Sequence: Synthetic oligonucleotide
guguugauuucuguagguu

SEQ ID NO: 2965322 - RNA, 19 nt, Artificial Sequence
  Description of Artificial Sequence: Synthetic oligonucleotide
gugggagagaaagccuuua

SEQ ID NO: 2965323 - RNA, 19 nt, Artificial Sequence
  Description of Artificial Sequence: Synthetic oligonucleotide
cacaguguguuaguggcuu

SEQ ID NO: 2965324 - RNA, 19 nt, Artificial Sequence
  Description of Artificial Sequence: Synthetic oligonucleotide
guuaguggcuucacagguu

SEQ ID NO: 2965325 - RNA, 19 nt, Artificial Sequence
  Description of Artificial Sequence: Synthetic oligonucleotide
gacagccacggagacuccu

SEQ ID NO: 2965326 - RNA, 19 nt, Artificial Sequence
  Description of Artificial Sequence: Synthetic oligonucleotide
gagacuccugggucccgcu

SEQ ID NO: 2965327 - RNA, 19 nt, Artificial Sequence
  Description of Artificial Sequence: Synthetic oligonucleotide
guggcuucacagguucugu

SEQ ID NO: 2965328 - RNA, 19 nt, Artificial Sequence
  Description of Artificial Sequence: Synthetic oligonucleotide
ggcucaagacagccacgga

SEQ ID NO: 2965329 - RNA, 19 nt, Artificial Sequence
  Description of Artificial Sequence: Synthetic oligonucleotide
gccacggagacuccugggu

SEQ ID NO: 2965330 - RNA, 19 nt, Artificial Sequence
  Description of Artificial Sequence: Synthetic oligonucleotide
gugagguagguaggguuau

SEQ ID NO: 2965331 - RNA, 19 nt, Artificial Sequence
  Description of Artificial Sequence: Synthetic oligonucleotide
cgcuggugggagagaaagc

SEQ ID NO: 2965332 - RNA, 19 nt, Artificial Sequence
  Description of Artificial Sequence: Synthetic oligonucleotide
caagacagccacggagacu

SEQ ID NO: 2965333 - RNA, 19 nt, Artificial Sequence
  Description of Artificial Sequence: Synthetic oligonucleotide
guauuacuauaugcccauu

SEQ ID NO: 2965334 - RNA, 19 nt, Artificial Sequence
  Description of Artificial Sequence: Synthetic oligonucleotide
cacuggugcaguggcucaa

SEQ ID NO: 2965335 - RNA, 19 nt, Artificial Sequence
  Description of Artificial Sequence: Synthetic oligonucleotide
cugggucccgcugguggga

SEQ ID NO: 2965336 - RNA, 19 nt, Artificial Sequence
  Description of Artificial Sequence: Synthetic oligonucleotide
cuccugggucccgcuggug

SEQ ID NO: 2965337 - RNA, 19 nt, Artificial Sequence
  Description of Artificial Sequence: Synthetic oligonucleotide
gugaggcgagugacuugca

SEQ ID NO: 2965338 - RNA, 19 nt, Artificial Sequence
  Description of Artificial Sequence: Synthetic oligonucleotide
ccacuggugcaguggcuca

SEQ ID NO: 2965339 - RNA, 19 nt, Artificial Sequence
  Description of Artificial Sequence: Synthetic oligonucleotide
caguccugugagguaggua

SEQ ID NO: 2965340 - RNA, 19 nt, Artificial Sequence
  Description of Artificial Sequence: Synthetic oligonucleotide
ccaugaucacagcuucugu

SEQ ID NO: 2965341 - RNA, 19 nt, Artificial Sequence
  Description of Artificial Sequence: Synthetic oligonucleotide
cagcuucuguugucuuggu

SEQ ID NO: 2965342 - RNA, 19 nt, Artificial Sequence
  Description of Artificial Sequence: Synthetic oligonucleotide
gcucuaaggucaagcuacu

SEQ ID NO: 2965343 - RNA, 19 nt, Artificial Sequence
  Description of Artificial Sequence: Synthetic oligonucleotide
ggugggagagaaagccuuu

SEQ ID NO: 2965344 - RNA, 19 nt, Artificial Sequence
  Description of Artificial Sequence: Synthetic oligonucleotide
ggccaugaucacagcuucu

SEQ ID NO: 2965345 - RNA, 19 nt, Artificial Sequence
  Description of Artificial Sequence: Synthetic oligonucleotide
gucccgcuggugggagaga

SEQ ID NO: 2965346 - RNA, 19 nt, Artificial Sequence
  Description of Artificial Sequence: Synthetic oligonucleotide
gggucccgcuggugggaga

SEQ ID NO: 2965347 - RNA, 19 nt, Artificial Sequence
  Description of Artificial Sequence: Synthetic oligonucleotide
guggcucagugaggcgagu

SEQ ID NO: 2965348 - RNA, 19 nt, Artificial Sequence
  Description of Artificial Sequence: Synthetic oligonucleotide
ggcgagugacuugcacagu

SEQ ID NO: 2965349 - RNA, 19 nt, Artificial Sequence
  Description of Artificial Sequence: Synthetic oligonucleotide
cccgcuggugggagagaaa

SEQ ID NO: 2965350 - RNA, 19 nt, Artificial Sequence
  Description of Artificial Sequence: Synthetic oligonucleotide
cggagacuccugggucccg

SEQ ID NO: 2965351 - RNA, 19 nt, Artificial Sequence
  Description of Artificial Sequence: Synthetic oligonucleotide
auaguaauaaaccagcagu

SEQ ID NO: 2965352 - RNA, 19 nt, Artificial Sequence
  Description of Artificial Sequence: Synthetic oligonucleotide
agagccacgacguucaggc

SEQ ID NO: 2965353 - RNA, 19 nt, Artificial Sequence
  Description of Artificial Sequence: Synthetic oligonucleotide
acgaguagagcacaggugc

SEQ ID NO: 2965354 - RNA, 19 nt, Artificial Sequence
  Description of Artificial Sequence: Synthetic oligonucleotide
gauguagagagccacgacg

SEQ ID NO: 2965355 - RNA, 19 nt, Artificial Sequence
  Description of Artificial Sequence: Synthetic oligonucleotide
acgacguucaggcacaacc

SEQ ID NO: 2965356 - RNA, 19 nt, Artificial Sequence
  Description of Artificial Sequence: Synthetic oligonucleotide
ugaaacauguacguggugg

SEQ ID NO: 2965357 - RNA, 19 nt, Artificial Sequence
  Description of Artificial Sequence: Synthetic oligonucleotide
cacaggaagauguagagag

SEQ ID NO: 2965358 - RNA, 19 nt, Artificial Sequence
  Description of Artificial Sequence: Synthetic oligonucleotide
aggugaaacauguacgugg

SEQ ID NO: 2965359 - RNA, 19 nt, Artificial Sequence
  Description of Artificial Sequence: Synthetic oligonucleotide
aaucgcaccaguuugcaga

SEQ ID NO: 2965360 - RNA, 19 nt, Artificial Sequence
  Description of Artificial Sequence: Synthetic oligonucleotide
uaguaauaaaccagcagug

SEQ ID NO: 2965361 - RNA, 19 nt, Artificial Sequence
  Description of Artificial Sequence: Synthetic oligonucleotide
uagaaaaggaaucgcacca

SEQ ID NO: 2965362 - RNA, 19 nt, Artificial Sequence
  Description of Artificial Sequence: Synthetic oligonucleotide
uaauaaaccagcaguggca

SEQ ID NO: 2965363 - RNA, 19 nt, Artificial Sequence
  Description of Artificial Sequence: Synthetic oligonucleotide
uguagaaaaggaaucgcac

SEQ ID NO: 2965364 - RNA, 19 nt, Artificial Sequence
  Description of Artificial Sequence: Synthetic oligonucleotide
aaggaaucgcaccaguuug

SEQ ID NO: 2965365 - RNA, 19 nt, Artificial Sequence
  Description of Artificial Sequence: Synthetic oligonucleotide
acauguacgugguggaggc

SEQ ID NO: 2965366 - RNA, 19 nt, Artificial Sequence
  Description of Artificial Sequence: Synthetic oligonucleotide
aauaaaccagcaguggcag

SEQ ID NO: 2965367 - RNA, 19 nt, Artificial Sequence
  Description of Artificial Sequence: Synthetic oligonucleotide
guaauaaaccagcaguggc

SEQ ID NO: 2965368 - RNA, 19 nt, Artificial Sequence
  Description of Artificial Sequence: Synthetic oligonucleotide
aacccgagcacacacacca

SEQ ID NO: 2965369 - RNA, 19 nt, Artificial Sequence
  Description of Artificial Sequence: Synthetic oligonucleotide
uaaaccagcaguggcaggg

SEQ ID NO: 2965370 - RNA, 19 nt, Artificial Sequence
  Description of Artificial Sequence: Synthetic oligonucleotide
cauaguaauaaaccagcag

SEQ ID NO: 2965371 - RNA, 19 nt, Artificial Sequence
  Description of Artificial Sequence: Synthetic oligonucleotide
guagaaaaggaaucgcacc

SEQ ID NO: 2965372 - RNA, 19 nt, Artificial Sequence
  Description of Artificial Sequence: Synthetic oligonucleotide
aguaauaaaccagcagugg

SEQ ID NO: 2965373 - RNA, 19 nt, Artificial Sequence
  Description of Artificial Sequence: Synthetic oligonucleotide
aacauguacgugguggagg

SEQ ID NO: 2965374 - RNA, 19 nt, Artificial Sequence
  Description of Artificial Sequence: Synthetic oligonucleotide
uagagagagucagaaaccg

SEQ ID NO: 2965375 - RNA, 19 nt, Artificial Sequence
  Description of Artificial Sequence: Synthetic oligonucleotide
agcaccaggacccacacca

SEQ ID NO: 2965376 - RNA, 19 nt, Artificial Sequence
  Description of Artificial Sequence: Synthetic oligonucleotide
ugguguagaaaaggaaucg

SEQ ID NO: 2965377 - RNA, 19 nt, Artificial Sequence
  Description of Artificial Sequence: Synthetic oligonucleotide
aaaggaaucgcaccaguuu

SEQ ID NO: 2965378 - RNA, 19 nt, Artificial Sequence
  Description of Artificial Sequence: Synthetic oligonucleotide
gaugcugcaguagagguug

SEQ ID NO: 2965379 - RNA, 19 nt, Artificial Sequence
  Description of Artificial Sequence: Synthetic oligonucleotide
acaacccgagcacacacac

SEQ ID NO: 2965380 - RNA, 19 nt, Artificial Sequence
  Description of Artificial Sequence: Synthetic oligonucleotide
gagagagucagaaaccgcc

SEQ ID NO: 2965381 - RNA, 19 nt, Artificial Sequence
  Description of Artificial Sequence: Synthetic oligonucleotide
uugguguagaaaaggaauc

SEQ ID NO: 2965382 - RNA, 19 nt, Artificial Sequence
  Description of Artificial Sequence: Synthetic oligonucleotide
cuugaggcggcacaggaag

SEQ ID NO: 2965383 - RNA, 19 nt, Artificial Sequence
  Description of Artificial Sequence: Synthetic oligonucleotide
ugacgaguagagcacaggu

SEQ ID NO: 2965384 - RNA, 19 nt, Artificial Sequence
  Description of Artificial Sequence: Synthetic oligonucleotide
gagguugguguagaaaagg

SEQ ID NO: 2965385 - RNA, 19 nt, Artificial Sequence
  Description of Artificial Sequence: Synthetic oligonucleotide
agccacgacguucaggcac

SEQ ID NO: 2965386 - RNA, 19 nt, Artificial Sequence
  Description of Artificial Sequence: Synthetic oligonucleotide
ugcacgcugaugcagguga

SEQ ID NO: 2965387 - RNA, 19 nt, Artificial Sequence
  Description of Artificial Sequence: Synthetic oligonucleotide
ucagaaaccgccaggugaa

SEQ ID NO: 2965388 - RNA, 19 nt, Artificial Sequence
  Description of Artificial Sequence: Synthetic oligonucleotide
uucaggcacaacccgagca

SEQ ID NO: 2965389 - RNA, 19 nt, Artificial Sequence
  Description of Artificial Sequence: Synthetic oligonucleotide
agagucagaaaccgccagg

SEQ ID NO: 2965390 - RNA, 19 nt, Artificial Sequence
  Description of Artificial Sequence: Synthetic oligonucleotide
ugucaugacagguggaguc

SEQ ID NO: 2965391 - RNA, 19 nt, Artificial Sequence
  Description of Artificial Sequence: Synthetic oligonucleotide
uagagagccacgacguuca

SEQ ID NO: 2965392 - RNA, 19 nt, Artificial Sequence
  Description of Artificial Sequence: Synthetic oligonucleotide
aagacucccaggcaccugu

SEQ ID NO: 2965393 - RNA, 19 nt, Artificial Sequence
  Description of Artificial Sequence: Synthetic oligonucleotide
gacguucaggcacaacccg

SEQ ID NO: 2965394 - RNA, 19 nt, Artificial Sequence
  Description of Artificial Sequence: Synthetic oligonucleotide
acgcaagacucccaggcac

SEQ ID NO: 2965395 - RNA, 19 nt, Artificial Sequence
  Description of Artificial Sequence: Synthetic oligonucleotide
caggaagauguagagagcc

SEQ ID NO: 2965396 - RNA, 19 nt, Artificial Sequence
  Description of Artificial Sequence: Synthetic oligonucleotide
ugcagaggacgcaagacuc

SEQ ID NO: 2965397 - RNA, 19 nt, Artificial Sequence
  Description of Artificial Sequence: Synthetic oligonucleotide
caggccagcaccaggaccc

SEQ ID NO: 2965398 - RNA, 19 nt, Artificial Sequence
  Description of Artificial Sequence: Synthetic oligonucleotide
gaagauguagagagccacg

SEQ ID NO: 2965399 - RNA, 19 nt, Artificial Sequence
  Description of Artificial Sequence: Synthetic oligonucleotide
agauguagagagccacgac

SEQ ID NO: 2965400 - RNA, 19 nt, Artificial Sequence
  Description of Artificial Sequence: Synthetic oligonucleotide
aagauguagagagccacga

SEQ ID NO: 2965401 - RNA, 19 nt, Artificial Sequence
  Description of Artificial Sequence: Synthetic oligonucleotide
gaaacauguacguggugga

SEQ ID NO: 2965402 - RNA, 19 nt, Artificial Sequence
  Description of Artificial Sequence: Synthetic oligonucleotide
gucagaaaccgccagguga

SEQ ID NO: 2965403 - RNA, 19 nt, Artificial Sequence
  Description of Artificial Sequence: Synthetic oligonucleotide
cauuccaggucuugaggcg

SEQ ID NO: 2965404 - RNA, 19 nt, Artificial Sequence
  Description of Artificial Sequence: Synthetic oligonucleotide
aguuugcagagcacggugc

SEQ ID NO: 2965405 - RNA, 19 nt, Artificial Sequence
  Description of Artificial Sequence: Synthetic oligonucleotide
agugcagaggacgcaagac

SEQ ID NO: 2965406 - RNA, 19 nt, Artificial Sequence
  Description of Artificial Sequence: Synthetic oligonucleotide
gaaaccgccaggugaaaca

SEQ ID NO: 2965407 - RNA, 19 nt, Artificial Sequence
  Description of Artificial Sequence: Synthetic oligonucleotide
ugacagguggagucgcggg

SEQ ID NO: 2965408 - RNA, 19 nt, Artificial Sequence
  Description of Artificial Sequence: Synthetic oligonucleotide
cagagcacggugcugaaug

SEQ ID NO: 2965409 - RNA, 19 nt, Artificial Sequence
  Description of Artificial Sequence: Synthetic oligonucleotide
ucaggcacaacccgagcac

SEQ ID NO: 2965410 - RNA, 19 nt, Artificial Sequence
  Description of Artificial Sequence: Synthetic oligonucleotide
auggccaguggucaccccg

SEQ ID NO: 2965411 - RNA, 19 nt, Artificial Sequence
  Description of Artificial Sequence: Synthetic oligonucleotide
gagagucagaaaccgccag

SEQ ID NO: 2965412 - RNA, 19 nt, Artificial Sequence
  Description of Artificial Sequence: Synthetic oligonucleotide
gaggacgcaagacucccag

SEQ ID NO: 2965413 - RNA, 19 nt, Artificial Sequence
  Description of Artificial Sequence: Synthetic oligonucleotide
guagagagagucagaaacc

SEQ ID NO: 2965414 - RNA, 19 nt, Artificial Sequence
  Description of Artificial Sequence: Synthetic oligonucleotide
aaacauguacgugguggag

SEQ ID NO: 2965415 - RNA, 19 nt, Artificial Sequence
  Description of Artificial Sequence: Synthetic oligonucleotide
cguagagagagucagaaac

SEQ ID NO: 2965416 - RNA, 19 nt, Artificial Sequence
  Description of Artificial Sequence: Synthetic oligonucleotide
ggcauaguaauaaaccagc

SEQ ID NO: 2965417 - RNA, 19 nt, Artificial Sequence
  Description of Artificial Sequence: Synthetic oligonucleotide
cugguggugacgaguagag

SEQ ID NO: 2965418 - RNA, 19 nt, Artificial Sequence
  Description of Artificial Sequence: Synthetic oligonucleotide
agagagagucagaaaccgc

SEQ ID NO: 2965419 - RNA, 19 nt, Artificial Sequence
  Description of Artificial Sequence: Synthetic oligonucleotide
acggcagccacucggcgcg

SEQ ID NO: 2965420 - RNA, 19 nt, Artificial Sequence
  Description of Artificial Sequence: Synthetic oligonucleotide
agcacggugcugaauggcc

SEQ ID NO: 2965421 - RNA, 19 nt, Artificial Sequence
  Description of Artificial Sequence: Synthetic oligonucleotide
ugcugaauggccagugguc

SEQ ID NO: 2965422 - RNA, 19 nt, Artificial Sequence
  Description of Artificial Sequence: Synthetic oligonucleotide
gugguggaggcauuccagg

SEQ ID NO: 2965423 - RNA, 19 nt, Artificial Sequence
  Description of Artificial Sequence: Synthetic oligonucleotide
ugcguagagagagucagaa

SEQ ID NO: 2965424 - RNA, 19 nt, Artificial Sequence
  Description of Artificial Sequence: Synthetic oligonucleotide
agcacaggugccuggcagg

SEQ ID NO: 2965425 - RNA, 19 nt, Artificial Sequence
  Description of Artificial Sequence: Synthetic oligonucleotide
agagcacggugcugaaugg

SEQ ID NO: 2965426 - RNA, 19 nt, Artificial Sequence
  Description of Artificial Sequence: Synthetic oligonucleotide
auuccaggucuugaggcgg

SEQ ID NO: 2965427 - RNA, 19 nt, Artificial Sequence
  Description of Artificial Sequence: Synthetic oligonucleotide
auaaaccagcaguggcagg

SEQ ID NO: 2965428 - RNA, 19 nt, Artificial Sequence
  Description of Artificial Sequence: Synthetic oligonucleotide
agaaaccgccaggugaaac

SEQ ID NO: 2965429 - RNA, 19 nt, Artificial Sequence
  Description of Artificial Sequence: Synthetic oligonucleotide
aucgcaccaguuugcagag

SEQ ID NO: 2965430 - RNA, 19 nt, Artificial Sequence
  Description of Artificial Sequence: Synthetic oligonucleotide
aggaaucgcaccaguuugc

SEQ ID NO: 2965431 - RNA, 19 nt, Artificial Sequence
  Description of Artificial Sequence: Synthetic oligonucleotide
acaggaagauguagagagc

SEQ ID NO: 2965432 - RNA, 19 nt, Artificial Sequence
  Description of Artificial Sequence: Synthetic oligonucleotide
gagcacaggugccuggcag

SEQ ID NO: 2965433 - RNA, 19 nt, Artificial Sequence
  Description of Artificial Sequence: Synthetic oligonucleotide
aaccagcaguggcagggag

SEQ ID NO: 2965434 - RNA, 19 nt, Artificial Sequence
  Description of Artificial Sequence: Synthetic oligonucleotide
ggcacaggaagauguagag

SEQ ID NO: 2965435 - RNA, 19 nt, Artificial Sequence
  Description of Artificial Sequence: Synthetic oligonucleotide
gucaugacagguggagucg

SEQ ID NO: 2965436 - RNA, 19 nt, Artificial Sequence
  Description of Artificial Sequence: Synthetic oligonucleotide
gaaucgcaccaguuugcag

SEQ ID NO: 2965437 - RNA, 19 nt, Artificial Sequence
  Description of Artificial Sequence: Synthetic oligonucleotide
ccgggcauaguaauaaacc

SEQ ID NO: 2965438 - RNA, 19 nt, Artificial Sequence
  Description of Artificial Sequence: Synthetic oligonucleotide
ugcaguagagguuggugua

SEQ ID NO: 2965439 - RNA, 19 nt, Artificial Sequence
  Description of Artificial Sequence: Synthetic oligonucleotide
ugaauggccaguggucacc

SEQ ID NO: 2965440 - RNA, 19 nt, Artificial Sequence
  Description of Artificial Sequence: Synthetic oligonucleotide
acucggcgcgcauagcggg

SEQ ID NO: 2965441 - RNA, 19 nt, Artificial Sequence
  Description of Artificial Sequence: Synthetic oligonucleotide
gcauuccaggucuugaggc

SEQ ID NO: 2965442 - RNA, 19 nt, Artificial Sequence
  Description of Artificial Sequence: Synthetic oligonucleotide
gacgaguagagcacaggug

SEQ ID NO: 2965443 - RNA, 19 nt, Artificial Sequence
  Description of Artificial Sequence: Synthetic oligonucleotide
aaaaggaaucgcaccaguu

SEQ ID NO: 2965444 - RNA, 19 nt, Artificial Sequence
  Description of Artificial Sequence: Synthetic oligonucleotide
ggacgcaagacucccaggc

SEQ ID NO: 2965445 - RNA, 19 nt, Artificial Sequence
  Description of Artificial Sequence: Synthetic oligonucleotide
uugcagagcacggugcuga

SEQ ID NO: 2965446 - RNA, 19 nt, Artificial Sequence
  Description of Artificial Sequence: Synthetic oligonucleotide
gcugaugcaggugaggaag

SEQ ID NO: 2965447 - RNA, 19 nt, Artificial Sequence
  Description of Artificial Sequence: Synthetic oligonucleotide
uggccaguggucaccccgg

SEQ ID NO: 2965448 - RNA, 19 nt, Artificial Sequence
  Description of Artificial Sequence: Synthetic oligonucleotide
uggcaggccagcaccagga

SEQ ID NO: 2965449 - RNA, 19 nt, Artificial Sequence
  Description of Artificial Sequence: Synthetic oligonucleotide
auguagagagccacgacgu

SEQ ID NO: 2965450 - RNA, 19 nt, Artificial Sequence
  Description of Artificial Sequence: Synthetic oligonucleotide
caguuugcagagcacggug

SEQ ID NO: 2965451 - RNA, 19 nt, Artificial Sequence
  Description of Artificial Sequence: Synthetic oligonucleotide
guguagaaaaggaaucgca

SEQ ID NO: 2965452 - RNA, 19 nt, Artificial Sequence
  Description of Artificial Sequence: Synthetic oligonucleotide
ggcauuccaggucuugagg

SEQ ID NO: 2965453 - RNA, 19 nt, Artificial Sequence
  Description of Artificial Sequence: Synthetic oligonucleotide
ggaggcugcguagagagag

SEQ ID NO: 2965454 - RNA, 19 nt, Artificial Sequence
  Description of Artificial Sequence: Synthetic oligonucleotide
guagagcacaggugccugg

SEQ ID NO: 2965455 - RNA, 19 nt, Artificial Sequence
  Description of Artificial Sequence: Synthetic oligonucleotide
gggcauaguaauaaaccag

SEQ ID NO: 2965456 - RNA, 19 nt, Artificial Sequence
  Description of Artificial Sequence: Synthetic oligonucleotide
gccaggugaaacauguacg

SEQ ID NO: 2965457 - RNA, 19 nt, Artificial Sequence
  Description of Artificial Sequence: Synthetic oligonucleotide
accaguuugcagagcacgg

SEQ ID NO: 2965458 - RNA, 19 nt, Artificial Sequence
  Description of Artificial Sequence: Synthetic oligonucleotide
agcaguggcagggaggcug

SEQ ID NO: 2965459 - RNA, 19 nt, Artificial Sequence
  Description of Artificial Sequence: Synthetic oligonucleotide
agagguugguguagaaaag

SEQ ID NO: 2965460 - RNA, 19 nt, Artificial Sequence
  Description of Artificial Sequence: Synthetic oligonucleotide
gguguagaaaaggaaucgc

SEQ ID NO: 2965461 - RNA, 19 nt, Artificial Sequence
  Description of Artificial Sequence: Synthetic oligonucleotide
ugaugcaggugaggaagag

SEQ ID NO: 2965462 - RNA, 19 nt, Artificial Sequence
  Description of Artificial Sequence: Synthetic oligonucleotide
caugacagguggagucgcg

SEQ ID NO: 2965463 - RNA, 19 nt, Artificial Sequence
  Description of Artificial Sequence: Synthetic oligonucleotide
acucccaggcaccugugca

SEQ ID NO: 2965464 - RNA, 19 nt, Artificial Sequence
  Description of Artificial Sequence: Synthetic oligonucleotide
ucuugaggcggcacaggaa

SEQ ID NO: 2965465 - RNA, 19 nt, Artificial Sequence
  Description of Artificial Sequence: Synthetic oligonucleotide
ucaugacagguggagucgc

SEQ ID NO: 2965466 - RNA, 19 nt, Artificial Sequence
  Description of Artificial Sequence: Synthetic oligonucleotide
guugguguagaaaaggaau

SEQ ID NO: 2965467 - RNA, 19 nt, Artificial Sequence
  Description of Artificial Sequence: Synthetic oligonucleotide
caccacggcagccacucgg

SEQ ID NO: 2965468 - RNA, 19 nt, Artificial Sequence
  Description of Artificial Sequence: Synthetic oligonucleotide
ugguggaggcauuccaggu

SEQ ID NO: 2965469 - RNA, 19 nt, Artificial Sequence
  Description of Artificial Sequence: Synthetic oligonucleotide
augacagguggagucgcgg

SEQ ID NO: 2965470 - RNA, 19 nt, Artificial Sequence
  Description of Artificial Sequence: Synthetic oligonucleotide
ggugucaugacagguggag

SEQ ID NO: 2965471 - RNA, 19 nt, Artificial Sequence
  Description of Artificial Sequence: Synthetic oligonucleotide
cagggagugcagaggacgc

SEQ ID NO: 2965472 - RNA, 19 nt, Artificial Sequence
  Description of Artificial Sequence: Synthetic oligonucleotide
aaaccgccaggugaaacau

SEQ ID NO: 2965473 - RNA, 19 nt, Artificial Sequence
  Description of Artificial Sequence: Synthetic oligonucleotide
agucagaaaccgccaggug

SEQ ID NO: 2965474 - RNA, 19 nt, Artificial Sequence
  Description of Artificial Sequence: Synthetic oligonucleotide
gguccccgcacacuggugg

SEQ ID NO: 2965475 - RNA, 19 nt, Artificial Sequence
  Description of Artificial Sequence: Synthetic oligonucleotide
ggaagauguagagagccac

SEQ ID NO: 2965476 - RNA, 19 nt, Artificial Sequence
  Description of Artificial Sequence: Synthetic oligonucleotide
acugguggugacgaguaga

SEQ ID NO: 2965477 - RNA, 19 nt, Artificial Sequence
  Description of Artificial Sequence: Synthetic oligonucleotide
aggacgcaagacucccagg

SEQ ID NO: 2965478 - RNA, 19 nt, Artificial Sequence
  Description of Artificial Sequence: Synthetic oligonucleotide
ucccaggcaccugugcacg

SEQ ID NO: 2965479 - RNA, 19 nt, Artificial Sequence
  Description of Artificial Sequence: Synthetic oligonucleotide
gcugcguagagagagucag

SEQ ID NO: 2965480 - RNA, 19 nt, Artificial Sequence
  Description of Artificial Sequence: Synthetic oligonucleotide
guagagagccacgacguuc

SEQ ID NO: 2965481 - RNA, 19 nt, Artificial Sequence
  Description of Artificial Sequence: Synthetic oligonucleotide
aguagagcacaggugccug

SEQ ID NO: 2965482 - RNA, 19 nt, Artificial Sequence
  Description of Artificial Sequence: Synthetic oligonucleotide
acagguggagucgcggguc

SEQ ID NO: 2965483 - RNA, 19 nt, Artificial Sequence
  Description of Artificial Sequence: Synthetic oligonucleotide
caccaggacccacaccacg

SEQ ID NO: 2965484 - RNA, 19 nt, Artificial Sequence
  Description of Artificial Sequence: Synthetic oligonucleotide
gaauggccaguggucaccc

SEQ ID NO: 2965485 - RNA, 19 nt, Artificial Sequence
  Description of Artificial Sequence: Synthetic oligonucleotide
cacucggcgcgcauagcgg

SEQ ID NO: 2965486 - RNA, 19 nt, Artificial Sequence
  Description of Artificial Sequence: Synthetic oligonucleotide
agguugguguagaaaagga

SEQ ID NO: 2965487 - RNA, 19 nt, Artificial Sequence
  Description of Artificial Sequence: Synthetic oligonucleotide
uagagcacaggugccuggc

SEQ ID NO: 2965488 - RNA, 19 nt, Artificial Sequence
  Description of Artificial Sequence: Synthetic oligonucleotide
agccacucggcgcgcauag

SEQ ID NO: 2965489 - RNA, 19 nt, Artificial Sequence
  Description of Artificial Sequence: Synthetic oligonucleotide
uugaggcggcacaggaaga

SEQ ID NO: 2965490 - RNA, 19 nt, Artificial Sequence
  Description of Artificial Sequence: Synthetic oligonucleotide
gagagccacgacguucagg

SEQ ID NO: 2965491 - RNA, 19 nt, Artificial Sequence
  Description of Artificial Sequence: Synthetic oligonucleotide
accgccaggugaaacaugu

SEQ ID NO: 2965492 - RNA, 19 nt, Artificial Sequence
  Description of Artificial Sequence: Synthetic oligonucleotide
uuugcagagcacggugcug

SEQ ID NO: 2965493 - RNA, 19 nt, Artificial Sequence
  Description of Artificial Sequence: Synthetic oligonucleotide
gugacgaguagagcacagg

SEQ ID NO: 2965494 - RNA, 19 nt, Artificial Sequence
  Description of Artificial Sequence: Synthetic oligonucleotide
gcagggagugcagaggacg

SEQ ID NO: 2965495 - RNA, 19 nt, Artificial Sequence
  Description of Artificial Sequence: Synthetic oligonucleotide
cugaauggccaguggucac

SEQ ID NO: 2965496 - RNA, 19 nt, Artificial Sequence
  Description of Artificial Sequence: Synthetic oligonucleotide
aggcugcguagagagaguc

SEQ ID NO: 2965497 - RNA, 19 nt, Artificial Sequence
  Description of Artificial Sequence: Synthetic oligonucleotide
gacgcaagacucccaggca

SEQ ID NO: 2965498 - RNA, 19 nt, Artificial Sequence
  Description of Artificial Sequence: Synthetic oligonucleotide
aguagagguugguguagaa

SEQ ID NO: 2965499 - RNA, 19 nt, Artificial Sequence
  Description of Artificial Sequence: Synthetic oligonucleotide
ugugcacgcugaugcaggu

SEQ ID NO: 2965500 - RNA, 19 nt, Artificial Sequence
  Description of Artificial Sequence: Synthetic oligonucleotide
cacggugcugaauggccag

SEQ ID NO: 2965501 - RNA, 19 nt, Artificial Sequence
  Description of Artificial Sequence: Synthetic oligonucleotide
accacggcagccacucggc

SEQ ID NO: 2965502 - RNA, 19 nt, Artificial Sequence
  Description of Artificial Sequence: Synthetic oligonucleotide
gagugcagaggacgcaaga

SEQ ID NO: 2965503 - RNA, 19 nt, Artificial Sequence
  Description of Artificial Sequence: Synthetic oligonucleotide
gucuugaggcggcacagga

SEQ ID NO: 2965504 - RNA, 19 nt, Artificial Sequence
  Description of Artificial Sequence: Synthetic oligonucleotide
cacggcagccacucggcgc

SEQ ID NO: 2965505 - RNA, 19 nt, Artificial Sequence
  Description of Artificial Sequence: Synthetic oligonucleotide
uguagagagccacgacguu

SEQ ID NO: 2965506 - RNA, 19 nt, Artificial Sequence
  Description of Artificial Sequence: Synthetic oligonucleotide
agcgcagggagugcagagg

SEQ ID NO: 2965507 - RNA, 19 nt, Artificial Sequence
  Description of Artificial Sequence: Synthetic oligonucleotide
auguacgugguggaggcau

SEQ ID NO: 2965508 - RNA, 19 nt, Artificial Sequence
  Description of Artificial Sequence: Synthetic oligonucleotide
gacucccaggcaccugugc

SEQ ID NO: 2965509 - RNA, 19 nt, Artificial Sequence
  Description of Artificial Sequence: Synthetic oligonucleotide
agagagucagaaaccgcca

SEQ ID NO: 2965510 - RNA, 19 nt, Artificial Sequence
  Description of Artificial Sequence: Synthetic oligonucleotide
ucaccccgggcauaguaau

SEQ ID NO: 2965511 - RNA, 19 nt, Artificial Sequence
  Description of Artificial Sequence: Synthetic oligonucleotide
cuggcaggccagcaccagg

SEQ ID NO: 2965512 - RNA, 19 nt, Artificial Sequence
  Description of Artificial Sequence: Synthetic oligonucleotide
aaaccagcaguggcaggga

SEQ ID NO: 2965513 - RNA, 19 nt, Artificial Sequence
  Description of Artificial Sequence: Synthetic oligonucleotide
cucccaggcaccugugcac

SEQ ID NO: 2965514 - RNA, 19 nt, Artificial Sequence
  Description of Artificial Sequence: Synthetic oligonucleotide
gugaaacauguacguggug

SEQ ID NO: 2965515 - RNA, 19 nt, Artificial Sequence
  Description of Artificial Sequence: Synthetic oligonucleotide
aggacccacaccacggcag

SEQ ID NO: 2965516 - RNA, 19 nt, Artificial Sequence
  Description of Artificial Sequence: Synthetic oligonucleotide
acgcugaugcaggugagga

SEQ ID NO: 2965517 - RNA, 19 nt, Artificial Sequence
  Description of Artificial Sequence: Synthetic oligonucleotide
caggugaaacauguacgug

SEQ ID NO: 2965518 - RNA, 19 nt, Artificial Sequence
  Description of Artificial Sequence: Synthetic oligonucleotide
guucaggcacaacccgagc

SEQ ID NO: 2965519 - RNA, 19 nt, Artificial Sequence
  Description of Artificial Sequence: Synthetic oligonucleotide
uacgugguggaggcauucc

SEQ ID NO: 2965520 - RNA, 19 nt, Artificial Sequence
  Description of Artificial Sequence: Synthetic oligonucleotide
uggugacgaguagagcaca

SEQ ID NO: 2965521 - RNA, 19 nt, Artificial Sequence
  Description of Artificial Sequence: Synthetic oligonucleotide
caacccgagcacacacacc

SEQ ID NO: 2965522 - RNA, 19 nt, Artificial Sequence
  Description of Artificial Sequence: Synthetic oligonucleotide
uggcagggaggcugcguag

SEQ ID NO: 2965523 - RNA, 19 nt, Artificial Sequence
  Description of Artificial Sequence: Synthetic oligonucleotide
ugaggcggcacaggaagau

SEQ ID NO: 2965524 - RNA, 19 nt, Artificial Sequence
  Description of Artificial Sequence: Synthetic oligonucleotide
cacaccacggcagccacuc

SEQ ID NO: 2965525 - RNA, 19 nt, Artificial Sequence
  Description of Artificial Sequence: Synthetic oligonucleotide
guggaggcauuccaggucu

SEQ ID NO: 2965526 - RNA, 19 nt, Artificial Sequence
  Description of Artificial Sequence: Synthetic oligonucleotide
gagucagaaaccgccaggu

SEQ ID NO: 2965527 - RNA, 19 nt, Artificial Sequence
  Description of Artificial Sequence: Synthetic oligonucleotide
gagcacggugcugaauggc

SEQ ID NO: 2965528 - RNA, 19 nt, Artificial Sequence
  Description of Artificial Sequence: Synthetic oligonucleotide
aggcacaacccgagcacac

SEQ ID NO: 2965529 - RNA, 19 nt, Artificial Sequence
  Description of Artificial Sequence: Synthetic oligonucleotide
guagagguugguguagaaa

SEQ ID NO: 2965530 - RNA, 19 nt, Artificial Sequence
  Description of Artificial Sequence: Synthetic oligonucleotide
cugcaguagagguuggugu

SEQ ID NO: 2965531 - RNA, 19 nt, Artificial Sequence
  Description of Artificial Sequence: Synthetic oligonucleotide
uguacgugguggaggcauu

SEQ ID NO: 2965532 - RNA, 19 nt, Artificial Sequence
  Description of Artificial Sequence: Synthetic oligonucleotide
ccacucggcgcgcauagcg

SEQ ID NO: 2965533 - RNA, 19 nt, Artificial Sequence
  Description of Artificial Sequence: Synthetic oligonucleotide
cacgcugaugcaggugagg

SEQ ID NO: 2965534 - RNA, 19 nt, Artificial Sequence
  Description of Artificial Sequence: Synthetic oligonucleotide
agcgggcccggccccagcg

SEQ ID NO: 2965535 - RNA, 19 nt, Artificial Sequence
  Description of Artificial Sequence: Synthetic oligonucleotide
aggaagauguagagagcca

SEQ ID NO: 2965536 - RNA, 19 nt, Artificial Sequence
  Description of Artificial Sequence: Synthetic oligonucleotide
agagcacaggugccuggca

SEQ ID NO: 2965537 - RNA, 19 nt, Artificial Sequence
  Description of Artificial Sequence: Synthetic oligonucleotide
cagcgcagggagugcagag

SEQ ID NO: 2965538 - RNA, 19 nt, Artificial Sequence
  Description of Artificial Sequence: Synthetic oligonucleotide
aggcggcacaggaagaugu

SEQ ID NO: 2965539 - RNA, 19 nt, Artificial Sequence
  Description of Artificial Sequence: Synthetic oligonucleotide
gguggaggcauuccagguc

SEQ ID NO: 2965540 - RNA, 19 nt, Artificial Sequence
  Description of Artificial Sequence: Synthetic oligonucleotide
ugguggugacgaguagagc

SEQ ID NO: 2965541 - RNA, 19 nt, Artificial Sequence
  Description of Artificial Sequence: Synthetic oligonucleotide
gugcagaggacgcaagacu

SEQ ID NO: 2965542 - RNA, 19 nt, Artificial Sequence
  Description of Artificial Sequence: Synthetic oligonucleotide
cagguggagucgcgggucc

SEQ ID NO: 2965543 - RNA, 19 nt, Artificial Sequence
  Description of Artificial Sequence: Synthetic oligonucleotide
guuugcagagcacggugcu

SEQ ID NO: 2965544 - RNA, 19 nt, Artificial Sequence
  Description of Artificial Sequence: Synthetic oligonucleotide
ccagcaguggcagggaggc

SEQ ID NO: 2965545 - RNA, 19 nt, Artificial Sequence
  Description of Artificial Sequence: Synthetic oligonucleotide
accccgggcauaguaauaa

SEQ ID NO: 2965546 - RNA, 19 nt, Artificial Sequence
  Description of Artificial Sequence: Synthetic oligonucleotide
guggucaccccgggcauag

SEQ ID NO: 2965547 - RNA, 19 nt, Artificial Sequence
  Description of Artificial Sequence: Synthetic oligonucleotide
ccgagcacacacaccacgc

SEQ ID NO: 2965548 - RNA, 19 nt, Artificial Sequence
  Description of Artificial Sequence: Synthetic oligonucleotide
gcugcaguagagguuggug

SEQ ID NO: 2965549 - RNA, 19 nt, Artificial Sequence
  Description of Artificial Sequence: Synthetic oligonucleotide
cccgagcacacacaccacg

SEQ ID NO: 2965550 - RNA, 19 nt, Artificial Sequence
  Description of Artificial Sequence: Synthetic oligonucleotide
gcauaguaauaaaccagca

SEQ ID NO: 2965551 - RNA, 19 nt, Artificial Sequence
  Description of Artificial Sequence: Synthetic oligonucleotide
agagagccacgacguucag

SEQ ID NO: 2965552 - RNA, 19 nt, Artificial Sequence
  Description of Artificial Sequence: Synthetic oligonucleotide
gcugaauggccagugguca

SEQ ID NO: 2965553 - RNA, 19 nt, Artificial Sequence
  Description of Artificial Sequence: Synthetic oligonucleotide
gugcugaauggccaguggu

SEQ ID NO: 2965554 - RNA, 19 nt, Artificial Sequence
  Description of Artificial Sequence: Synthetic oligonucleotide
cgacguucaggcacaaccc

SEQ ID NO: 2965555 - RNA, 19 nt, Artificial Sequence
  Description of Artificial Sequence: Synthetic oligonucleotide
acguucaggcacaacccga

SEQ ID NO: 2965556 - RNA, 19 nt, Artificial Sequence
  Description of Artificial Sequence: Synthetic oligonucleotide
gcacaacccgagcacacac

SEQ ID NO: 2965557 - RNA, 19 nt, Artificial Sequence
  Description of Artificial Sequence: Synthetic oligonucleotide
gguugguguagaaaaggaa

SEQ ID NO: 2965558 - RNA, 19 nt, Artificial Sequence
  Description of Artificial Sequence: Synthetic oligonucleotide
gcaguagagguugguguag

SEQ ID NO: 2965559 - RNA, 19 nt, Artificial Sequence
  Description of Artificial Sequence: Synthetic oligonucleotide
agguggagucgcggguccc

SEQ ID NO: 2965560 - RNA, 19 nt, Artificial Sequence
  Description of Artificial Sequence: Synthetic oligonucleotide
aaccgccaggugaaacaug

SEQ ID NO: 2965561 - RNA, 19 nt, Artificial Sequence
  Description of Artificial Sequence: Synthetic oligonucleotide
cucggcgcgcauagcgggc

SEQ ID NO: 2965562 - RNA, 19 nt, Artificial Sequence
  Description of Artificial Sequence: Synthetic oligonucleotide
ggugacgaguagagcacag

SEQ ID NO: 2965563 - RNA, 19 nt, Artificial Sequence
  Description of Artificial Sequence: Synthetic oligonucleotide
cacaacccgagcacacaca

SEQ ID NO: 2965564 - RNA, 19 nt, Artificial Sequence
  Description of Artificial Sequence: Synthetic oligonucleotide
caggucuugaggcggcaca

SEQ ID NO: 2965565 - RNA, 19 nt, Artificial Sequence
  Description of Artificial Sequence: Synthetic oligonucleotide
gacagguggagucgcgggu

SEQ ID NO: 2965566 - RNA, 19 nt, Artificial Sequence
  Description of Artificial Sequence: Synthetic oligonucleotide
cacugguggugacgaguag

SEQ ID NO: 2965567 - RNA, 19 nt, Artificial Sequence
  Description of Artificial Sequence: Synthetic oligonucleotide
cgccaggugaaacauguac

SEQ ID NO: 2965568 - RNA, 19 nt, Artificial Sequence
  Description of Artificial Sequence: Synthetic oligonucleotide
acaccacggcagccacucg

SEQ ID NO: 2965569 - RNA, 19 nt, Artificial Sequence
  Description of Artificial Sequence: Synthetic oligonucleotide
ugcugcaguagagguuggu

SEQ ID NO: 2965570 - RNA, 19 nt, Artificial Sequence
  Description of Artificial Sequence: Synthetic oligonucleotide
acacugguggugacgagua

SEQ ID NO: 2965571 - RNA, 19 nt, Artificial Sequence
  Description of Artificial Sequence: Synthetic oligonucleotide
cguucaggcacaacccgag

SEQ ID NO: 2965572 - RNA, 19 nt, Artificial Sequence
  Description of Artificial Sequence: Synthetic oligonucleotide
gaguagagcacaggugccu

SEQ ID NO: 2965573 - RNA, 19 nt, Artificial Sequence
  Description of Artificial Sequence: Synthetic oligonucleotide
caggcaccugugcacgcug

SEQ ID NO: 2965574 - RNA, 19 nt, Artificial Sequence
  Description of Artificial Sequence: Synthetic oligonucleotide
ugcagagcacggugcugaa

SEQ ID NO: 2965575 - RNA, 19 nt, Artificial Sequence
  Description of Artificial Sequence: Synthetic oligonucleotide
ucggcgcgcauagcgggcc

SEQ ID NO: 2965576 - RNA, 19 nt, Artificial Sequence
  Description of Artificial Sequence: Synthetic oligonucleotide
uggagucgcggguccccgc

SEQ ID NO: 2965577 - RNA, 19 nt, Artificial Sequence
  Description of Artificial Sequence: Synthetic oligonucleotide
ggacccacaccacggcagc

SEQ ID NO: 2965578 - RNA, 19 nt, Artificial Sequence
  Description of Artificial Sequence: Synthetic oligonucleotide
cgggcauaguaauaaacca

SEQ ID NO: 2965579 - RNA, 19 nt, Artificial Sequence
  Description of Artificial Sequence: Synthetic oligonucleotide
guggcagggaggcugcgua

SEQ ID NO: 2965580 - RNA, 19 nt, Artificial Sequence
  Description of Artificial Sequence: Synthetic oligonucleotide
cgugguggaggcauuccag

SEQ ID NO: 2965581 - RNA, 19 nt, Artificial Sequence
  Description of Artificial Sequence: Synthetic oligonucleotide
ggugaaacauguacguggu

SEQ ID NO: 2965582 - RNA, 19 nt, Artificial Sequence
  Description of Artificial Sequence: Synthetic oligonucleotide
ggaaucgcaccaguuugca

SEQ ID NO: 2965583 - RNA, 19 nt, Artificial Sequence
  Description of Artificial Sequence: Synthetic oligonucleotide
cgaguagagcacaggugcc

SEQ ID NO: 2965584 - RNA, 19 nt, Artificial Sequence
  Description of Artificial Sequence: Synthetic oligonucleotide
gacccacaccacggcagcc

SEQ ID NO: 2965585 - RNA, 19 nt, Artificial Sequence
  Description of Artificial Sequence: Synthetic oligonucleotide
gcagggaggcugcguagag

SEQ ID NO: 2965586 - RNA, 19 nt, Artificial Sequence
  Description of Artificial Sequence: Synthetic oligonucleotide
aguggcagggaggcugcgu

SEQ ID NO: 2965587 - RNA, 19 nt, Artificial Sequence
  Description of Artificial Sequence: Synthetic oligonucleotide
agggagugcagaggacgca

SEQ ID NO: 2965588 - RNA, 19 nt, Artificial Sequence
  Description of Artificial Sequence: Synthetic oligonucleotide
guacgugguggaggcauuc

SEQ ID NO: 2965589 - RNA, 19 nt, Artificial Sequence
  Description of Artificial Sequence: Synthetic oligonucleotide
caguagagguugguguaga

SEQ ID NO: 2965590 - RNA, 19 nt, Artificial Sequence
  Description of Artificial Sequence: Synthetic oligonucleotide
ccaggugaaacauguacgu

SEQ ID NO: 2965591 - RNA, 19 nt, Artificial Sequence
  Description of Artificial Sequence: Synthetic oligonucleotide
uccaggucuugaggcggca

SEQ ID NO: 2965592 - RNA, 19 nt, Artificial Sequence
  Description of Artificial Sequence: Synthetic oligonucleotide
gcggcacaggaagauguag

SEQ ID NO: 2965593 - RNA, 19 nt, Artificial Sequence
  Description of Artificial Sequence: Synthetic oligonucleotide
ggagugcagaggacgcaag

SEQ ID NO: 2965594 - RNA, 19 nt, Artificial Sequence
  Description of Artificial Sequence: Synthetic oligonucleotide
acccgagcacacacaccac

SEQ ID NO: 2965595 - RNA, 19 nt, Artificial Sequence
  Description of Artificial Sequence: Synthetic oligonucleotide
ccugugcacgcugaugcag

SEQ ID NO: 2965596 - RNA, 19 nt, Artificial Sequence
  Description of Artificial Sequence: Synthetic oligonucleotide
cagcaccaggacccacacc

SEQ ID NO: 2965597 - RNA, 19 nt, Artificial Sequence
  Description of Artificial Sequence: Synthetic oligonucleotide
caggacccacaccacggca

SEQ ID NO: 2965598 - RNA, 19 nt, Artificial Sequence
  Description of Artificial Sequence: Synthetic oligonucleotide
cugcguagagagagucaga

SEQ ID NO: 2965599 - RNA, 19 nt, Artificial Sequence
  Description of Artificial Sequence: Synthetic oligonucleotide
gcgcagggagugcagagga

SEQ ID NO: 2965600 - RNA, 19 nt, Artificial Sequence
  Description of Artificial Sequence: Synthetic oligonucleotide
uccccgcacacugguggug

SEQ ID NO: 2965601 - RNA, 19 nt, Artificial Sequence
  Description of Artificial Sequence: Synthetic oligonucleotide
cgcaagacucccaggcacc

SEQ ID NO: 2965602 - RNA, 19 nt, Artificial Sequence
  Description of Artificial Sequence: Synthetic oligonucleotide
gucaccccgggcauaguaa

SEQ ID NO: 2965603 - RNA, 19 nt, Artificial Sequence
  Description of Artificial Sequence: Synthetic oligonucleotide
agaggacgcaagacuccca

SEQ ID NO: 2965604 - RNA, 19 nt, Artificial Sequence
  Description of Artificial Sequence: Synthetic oligonucleotide
ggaggcauuccaggucuug

SEQ ID NO: 2965605 - RNA, 19 nt, Artificial Sequence
  Description of Artificial Sequence: Synthetic oligonucleotide
uggaggcauuccaggucuu

SEQ ID NO: 2965606 - RNA, 19 nt, Artificial Sequence
  Description of Artificial Sequence: Synthetic oligonucleotide
gagccacgacguucaggca

SEQ ID NO: 2965607 - RNA, 19 nt, Artificial Sequence
  Description of Artificial Sequence: Synthetic oligonucleotide
caggcacaacccgagcaca

SEQ ID NO: 2965608 - RNA, 19 nt, Artificial Sequence
  Description of Artificial Sequence: Synthetic oligonucleotide
gcacaggaagauguagaga

SEQ ID NO: 2965609 - RNA, 19 nt, Artificial Sequence
  Description of Artificial Sequence: Synthetic oligonucleotide
augcugcaguagagguugg

SEQ ID NO: 2965610 - RNA, 19 nt, Artificial Sequence
  Description of Artificial Sequence: Synthetic oligonucleotide
gucgcggguccccgcacac

SEQ ID NO: 2965611 - RNA, 19 nt, Artificial Sequence
  Description of Artificial Sequence: Synthetic oligonucleotide
cacacugguggugacgagu

SEQ ID NO: 2965612 - RNA, 19 nt, Artificial Sequence
  Description of Artificial Sequence: Synthetic oligonucleotide
gugcacgcugaugcaggug

SEQ ID NO: 2965613 - RNA, 19 nt, Artificial Sequence
  Description of Artificial Sequence: Synthetic oligonucleotide
ucgcaccaguuugcagagc

SEQ ID NO: 2965614 - RNA, 19 nt, Artificial Sequence
  Description of Artificial Sequence: Synthetic oligonucleotide
cgcaccaguuugcagagca

SEQ ID NO: 2965615 - RNA, 19 nt, Artificial Sequence
  Description of Artificial Sequence: Synthetic oligonucleotide
gguggagucgcgggucccc

SEQ ID NO: 2965616 - RNA, 19 nt, Artificial Sequence
  Description of Artificial Sequence: Synthetic oligonucleotide
acggugcugaauggccagu

SEQ ID NO: 2965617 - RNA, 19 nt, Artificial Sequence
  Description of Artificial Sequence: Synthetic oligonucleotide
cgcauagcgggcccggccc

SEQ ID NO: 2965618 - RNA, 19 nt, Artificial Sequence
  Description of Artificial Sequence: Synthetic oligonucleotide
ccagcaccaggacccacac

SEQ ID NO: 2965619 - RNA, 19 nt, Artificial Sequence
  Description of Artificial Sequence: Synthetic oligonucleotide
ggccccagcgcagggagug

SEQ ID NO: 2965620 - RNA, 19 nt, Artificial Sequence
  Description of Artificial Sequence: Synthetic oligonucleotide
auagcgggcccggccccag

SEQ ID NO: 2965621 - RNA, 19 nt, Artificial Sequence
  Description of Artificial Sequence: Synthetic oligonucleotide
gugucaugacagguggagu

SEQ ID NO: 2965622 - RNA, 19 nt, Artificial Sequence
  Description of Artificial Sequence: Synthetic oligonucleotide
ggagucgcggguccccgca

SEQ ID NO: 2965623 - RNA, 19 nt, Artificial Sequence
  Description of Artificial Sequence: Synthetic oligonucleotide
gcgcauagcgggcccggcc

SEQ ID NO: 2965624 - RNA, 19 nt, Artificial Sequence
  Description of Artificial Sequence: Synthetic oligonucleotide
ggucaccccgggcauagua

SEQ ID NO: 2965625 - RNA, 19 nt, Artificial Sequence
  Description of Artificial Sequence: Synthetic oligonucleotide
agacucccaggcaccugug

SEQ ID NO: 2965626 - RNA, 19 nt, Artificial Sequence
  Description of Artificial Sequence: Synthetic oligonucleotide
gcaguggcagggaggcugc

SEQ ID NO: 2965627 - RNA, 19 nt, Artificial Sequence
  Description of Artificial Sequence: Synthetic oligonucleotide
uagcgggcccggccccagc

SEQ ID NO: 2965628 - RNA, 19 nt, Artificial Sequence
  Description of Artificial Sequence: Synthetic oligonucleotide
gggagugcagaggacgcaa

SEQ ID NO: 2965629 - RNA, 19 nt, Artificial Sequence
  Description of Artificial Sequence: Synthetic oligonucleotide
gcauagcgggcccggcccc

SEQ ID NO: 2965630 - RNA, 19 nt, Artificial Sequence
  Description of Artificial Sequence: Synthetic oligonucleotide
gcaccugugcacgcugaug

SEQ ID NO: 2965631 - RNA, 19 nt, Artificial Sequence
  Description of Artificial Sequence: Synthetic oligonucleotide
gcguagagagagucagaaa

SEQ ID NO: 2965632 - RNA, 19 nt, Artificial Sequence
  Description of Artificial Sequence: Synthetic oligonucleotide
cacgacguucaggcacaac

SEQ ID NO: 2965633 - RNA, 19 nt, Artificial Sequence
  Description of Artificial Sequence: Synthetic oligonucleotide
ggcacaacccgagcacaca

SEQ ID NO: 2965634 - RNA, 19 nt, Artificial Sequence
  Description of Artificial Sequence: Synthetic oligonucleotide
gcacacugguggugacgag

SEQ ID NO: 2965635 - RNA, 19 nt, Artificial Sequence
  Description of Artificial Sequence: Synthetic oligonucleotide
aguggucaccccgggcaua

SEQ ID NO: 2965636 - RNA, 19 nt, Artificial Sequence
  Description of Artificial Sequence: Synthetic oligonucleotide
cauguacgugguggaggca

SEQ ID NO: 2965637 - RNA, 19 nt, Artificial Sequence
  Description of Artificial Sequence: Synthetic oligonucleotide
gccacgacguucaggcaca

SEQ ID NO: 2965638 - RNA, 19 nt, Artificial Sequence
  Description of Artificial Sequence: Synthetic oligonucleotide
aggcaccugugcacgcuga

SEQ ID NO: 2965639 - RNA, 19 nt, Artificial Sequence
  Description of Artificial Sequence: Synthetic oligonucleotide
cggcacaggaagauguaga

SEQ ID NO: 2965640 - RNA, 19 nt, Artificial Sequence
  Description of Artificial Sequence: Synthetic oligonucleotide
ccacggcagccacucggcg

SEQ ID NO: 2965641 - RNA, 19 nt, Artificial Sequence
  Description of Artificial Sequence: Synthetic oligonucleotide
caguggcagggaggcugcg

SEQ ID NO: 2965642 - RNA, 19 nt, Artificial Sequence
  Description of Artificial Sequence: Synthetic oligonucleotide
gcacggugcugaauggcca

SEQ ID NO: 2965643 - RNA, 19 nt, Artificial Sequence
  Description of Artificial Sequence: Synthetic oligonucleotide
ggcagggaggcugcguaga

SEQ ID NO: 2965644 - RNA, 19 nt, Artificial Sequence
  Description of Artificial Sequence: Synthetic oligonucleotide
ucgcggguccccgcacacu

SEQ ID NO: 2965645 - RNA, 19 nt, Artificial Sequence
  Description of Artificial Sequence: Synthetic oligonucleotide
ccggccccagcgcagggag

SEQ ID NO: 2965646 - RNA, 19 nt, Artificial Sequence
  Description of Artificial Sequence: Synthetic oligonucleotide
ggcugcguagagagaguca

SEQ ID NO: 2965647 - RNA, 19 nt, Artificial Sequence
  Description of Artificial Sequence: Synthetic oligonucleotide
gaggcugcguagagagagu

SEQ ID NO: 2965648 - RNA, 19 nt, Artificial Sequence
  Description of Artificial Sequence: Synthetic oligonucleotide
gcacgcugaugcaggugag

SEQ ID NO: 2965649 - RNA, 19 nt, Artificial Sequence
  Description of Artificial Sequence: Synthetic oligonucleotide
ggcgcgcauagcgggcccg

SEQ ID NO: 2965650 - RNA, 19 nt, Artificial Sequence
  Description of Artificial Sequence: Synthetic oligonucleotide
gcaccaguuugcagagcac

SEQ ID NO: 2965651 - RNA, 19 nt, Artificial Sequence
  Description of Artificial Sequence: Synthetic oligonucleotide
caccccgggcauaguaaua

SEQ ID NO: 2965652 - RNA, 19 nt, Artificial Sequence
  Description of Artificial Sequence: Synthetic oligonucleotide
cccagcgcagggagugcag

SEQ ID NO: 2965653 - RNA, 19 nt, Artificial Sequence
  Description of Artificial Sequence: Synthetic oligonucleotide
cgcggguccccgcacacug

SEQ ID NO: 2965654 - RNA, 19 nt, Artificial Sequence
  Description of Artificial Sequence: Synthetic oligonucleotide
ccgcacacugguggugacg

SEQ ID NO: 2965655 - RNA, 19 nt, Artificial Sequence
  Description of Artificial Sequence: Synthetic oligonucleotide
cccaggcaccugugcacgc

SEQ ID NO: 2965656 - RNA, 19 nt, Artificial Sequence
  Description of Artificial Sequence: Synthetic oligonucleotide
guccccgcacacugguggu

SEQ ID NO: 2965657 - RNA, 19 nt, Artificial Sequence
  Description of Artificial Sequence: Synthetic oligonucleotide
cauagcgggcccggcccca

SEQ ID NO: 2965658 - RNA, 19 nt, Artificial Sequence
  Description of Artificial Sequence: Synthetic oligonucleotide
uggucaccccgggcauagu

SEQ ID NO: 2965659 - RNA, 19 nt, Artificial Sequence
  Description of Artificial Sequence: Synthetic oligonucleotide
cgcacacugguggugacga

SEQ ID NO: 2965660 - RNA, 19 nt, Artificial Sequence
  Description of Artificial Sequence: Synthetic oligonucleotide
cagaaaccgccaggugaaa

SEQ ID NO: 2965661 - RNA, 19 nt, Artificial Sequence
  Description of Artificial Sequence: Synthetic oligonucleotide
ccuggcaggccagcaccag

SEQ ID NO: 2965662 - RNA, 19 nt, Artificial Sequence
  Description of Artificial Sequence: Synthetic oligonucleotide
ggcccggccccagcgcagg

SEQ ID NO: 2965663 - RNA, 19 nt, Artificial Sequence
  Description of Artificial Sequence: Synthetic oligonucleotide
gcggguccccgcacacugg

SEQ ID NO: 2965664 - RNA, 19 nt, Artificial Sequence
  Description of Artificial Sequence: Synthetic oligonucleotide
gcgcgcauagcgggcccgg

SEQ ID NO: 2965665 - RNA, 19 nt, Artificial Sequence
  Description of Artificial Sequence: Synthetic oligonucleotide
gcaagacucccaggcaccu

SEQ ID NO: 2965666 - RNA, 19 nt, Artificial Sequence
  Description of Artificial Sequence: Synthetic oligonucleotide
cgcagggagugcagaggac

SEQ ID NO: 2965667 - RNA, 19 nt, Artificial Sequence
  Description of Artificial Sequence: Synthetic oligonucleotide
ggguccccgcacacuggug

SEQ ID NO: 2965668 - RNA, 19 nt, Artificial Sequence
  Description of Artificial Sequence: Synthetic oligonucleotide
ggcggcacaggaagaugua

SEQ ID NO: 2965669 - RNA, 19 nt, Artificial Sequence
  Description of Artificial Sequence: Synthetic oligonucleotide
ccaguuugcagagcacggu

SEQ ID NO: 2965670 - RNA, 19 nt, Artificial Sequence
  Description of Artificial Sequence: Synthetic oligonucleotide
gggaggcugcguagagaga

SEQ ID NO: 2965671 - RNA, 19 nt, Artificial Sequence
  Description of Artificial Sequence: Synthetic oligonucleotide
gcgggcccggccccagcgc

SEQ ID NO: 2965672 - RNA, 19 nt, Artificial Sequence
  Description of Artificial Sequence: Synthetic oligonucleotide
gccacucggcgcgcauagc

SEQ ID NO: 2965673 - RNA, 19 nt, Artificial Sequence
  Description of Artificial Sequence: Synthetic oligonucleotide
ccagcgcagggagugcaga

SEQ ID NO: 2965674 - RNA, 19 nt, Artificial Sequence
  Description of Artificial Sequence: Synthetic oligonucleotide
ggcaccugugcacgcugau

SEQ ID NO: 2965675 - RNA, 19 nt, Artificial Sequence
  Description of Artificial Sequence: Synthetic oligonucleotide
gcccggccccagcgcaggg

SEQ ID NO: 2965676 - RNA, 19 nt, Artificial Sequence
  Description of Artificial Sequence: Synthetic oligonucleotide
cagccacucggcgcgcaua

SEQ ID NO: 2965677 - RNA, 19 nt, Artificial Sequence
  Description of Artificial Sequence: Synthetic oligonucleotide
ccccgggcauaguaauaaa

SEQ ID NO: 2965678 - RNA, 19 nt, Artificial Sequence
  Description of Artificial Sequence: Synthetic oligonucleotide
ccccgcacacuggugguga

SEQ ID NO: 2965679 - RNA, 19 nt, Artificial Sequence
  Description of Artificial Sequence: Synthetic oligonucleotide
gggcccggccccagcgcag

SEQ ID NO: 2965680 - RNA, 19 nt, Artificial Sequence
  Description of Artificial Sequence: Synthetic oligonucleotide
gccccagcgcagggagugc

SEQ ID NO: 2965681 - RNA, 19 nt, Artificial Sequence
  Description of Artificial Sequence: Synthetic oligonucleotide
ggcagccacucggcgcgca

SEQ ID NO: 2965682 - RNA, 19 nt, Artificial Sequence
  Description of Artificial Sequence: Synthetic oligonucleotide
ccccagcgcagggagugca

SEQ ID NO: 2965683 - RNA, 19 nt, Artificial Sequence
  Description of Artificial Sequence: Synthetic oligonucleotide
gcagagcacggugcugaau

SEQ ID NO: 2965684 - RNA, 19 nt, Artificial Sequence
  Description of Artificial Sequence: Synthetic oligonucleotide
cggcgcgcauagcgggccc

SEQ ID NO: 2965685 - RNA, 19 nt, Artificial Sequence
  Description of Artificial Sequence: Synthetic oligonucleotide
cgcgcauagcgggcccggc

SEQ ID NO: 2965686 - RNA, 19 nt, Artificial Sequence
  Description of Artificial Sequence: Synthetic oligonucleotide
ccgccaggugaaacaugua

SEQ ID NO: 2965687 - RNA, 19 nt, Artificial Sequence
  Description of Artificial Sequence: Synthetic oligonucleotide
gcagccacucggcgcgcau

SEQ ID NO: 2965688 - RNA, 19 nt, Artificial Sequence
  Description of Artificial Sequence: Synthetic oligonucleotide
ccaggcaccugugcacgcu

SEQ ID NO: 2965689 - RNA, 19 nt, Artificial Sequence
  Description of Artificial Sequence: Synthetic oligonucleotide
cagcaguggcagggaggcu

SEQ ID NO: 2965690 - RNA, 19 nt, Artificial Sequence
  Description of Artificial Sequence: Synthetic oligonucleotide
ccacaccacggcagccacu

SEQ ID NO: 2965691 - RNA, 19 nt, Artificial Sequence
  Description of Artificial Sequence: Synthetic oligonucleotide
cgggcccggccccagcgca

SEQ ID NO: 2965692 - RNA, 19 nt, Artificial Sequence
  Description of Artificial Sequence: Synthetic oligonucleotide
cggguccccgcacacuggu

SEQ ID NO: 2965693 - RNA, 19 nt, Artificial Sequence
  Description of Artificial Sequence: Synthetic oligonucleotide
cccggccccagcgcaggga

SEQ ID NO: 2965694 - RNA, 19 nt, Artificial Sequence
  Description of Artificial Sequence: Synthetic oligonucleotide
ccacgacguucaggcacaa

SEQ ID NO: 2965695 - RNA, 19 nt, Artificial Sequence
  Description of Artificial Sequence: Synthetic oligonucleotide
cggcagccacucggcgcgc

SEQ ID NO: 2965696 - RNA, 19 nt, Artificial Sequence
  Description of Artificial Sequence: Synthetic oligonucleotide
cggccccagcgcagggagu

SEQ ID NO: 2965697 - RNA, 19 nt, Artificial Sequence
  Description of Artificial Sequence: Synthetic oligonucleotide
gaaggcaccaacuugaaag

SEQ ID NO: 2965698 - RNA, 19 nt, Artificial Sequence
  Description of Artificial Sequence: Synthetic oligonucleotide
aaagaagguggacaggcac

SEQ ID NO: 2965699 - RNA, 19 nt, Artificial Sequence
  Description of Artificial Sequence: Synthetic oligonucleotide
uuuguuaagcaacuuacug

SEQ ID NO: 2965700 - RNA, 19 nt, Artificial Sequence
  Description of Artificial Sequence: Synthetic oligonucleotide
aagacugagaauguacugc

SEQ ID NO: 2965701 - RNA, 19 nt, Artificial Sequence
  Description of Artificial Sequence: Synthetic oligonucleotide
aaguggucggcacagacgg

SEQ ID NO: 2965702 - RNA, 19 nt, Artificial Sequence
  Description of Artificial Sequence: Synthetic oligonucleotide
aaaggcaaaugccagcuag

SEQ ID NO: 2965703 - RNA, 19 nt, Artificial Sequence
  Description of Artificial Sequence: Synthetic oligonucleotide
aacuuacuguucuguaucc

SEQ ID NO: 2965704 - RNA, 19 nt, Artificial Sequence
  Description of Artificial Sequence: Synthetic oligonucleotide
aaaacaguggagcuggcca

SEQ ID NO: 2965705 - RNA, 19 nt, Artificial Sequence
  Description of Artificial Sequence: Synthetic oligonucleotide
auagaaagaagguggacag

SEQ ID NO: 2965706 - RNA, 19 nt, Artificial Sequence
  Description of Artificial Sequence: Synthetic oligonucleotide
uuaagcaacuuacuguucu

SEQ ID NO: 2965707 - RNA, 19 nt, Artificial Sequence
  Description of Artificial Sequence: Synthetic oligonucleotide
ucacaugaccaucacagcc

SEQ ID NO: 2965708 - RNA, 19 nt, Artificial Sequence
  Description of Artificial Sequence: Synthetic oligonucleotide
gagaauguacugcaggucc

SEQ ID NO: 2965709 - RNA, 19 nt, Artificial Sequence
  Description of Artificial Sequence: Synthetic oligonucleotide
ucuguauccccacggaagg

SEQ ID NO: 2965710 - RNA, 19 nt, Artificial Sequence
  Description of Artificial Sequence: Synthetic oligonucleotide
ugcguccauagaaagaagg

SEQ ID NO: 2965711 - RNA, 19 nt, Artificial Sequence
  Description of Artificial Sequence: Synthetic oligonucleotide
ugaaagacugagaauguac

SEQ ID NO: 2965712 - RNA, 19 nt, Artificial Sequence
  Description of Artificial Sequence: Synthetic oligonucleotide
acugagaauguacugcagg

SEQ ID NO: 2965713 - RNA, 19 nt, Artificial Sequence
  Description of Artificial Sequence: Synthetic oligonucleotide
aaagacugagaauguacug

SEQ ID NO: 2965714 - RNA, 19 nt, Artificial Sequence
  Description of Artificial Sequence: Synthetic oligonucleotide
aaaggucugaggaaaacag

SEQ ID NO: 2965715 - RNA, 19 nt, Artificial Sequence
  Description of Artificial Sequence: Synthetic oligonucleotide
aggcuguuaucucugaugg

SEQ ID NO: 2965716 - RNA, 19 nt, Artificial Sequence
  Description of Artificial Sequence: Synthetic oligonucleotide
uuguuaagcaacuuacugu

SEQ ID NO: 2965717 - RNA, 19 nt, Artificial Sequence
  Description of Artificial Sequence: Synthetic oligonucleotide
ucguacgucacguucacag

SEQ ID NO: 2965718 - RNA, 19 nt, Artificial Sequence
  Description of Artificial Sequence: Synthetic oligonucleotide
uucuguauccccacggaag

SEQ ID NO: 2965719 - RNA, 19 nt, Artificial Sequence
  Description of Artificial Sequence: Synthetic oligonucleotide
guccauagaaagaaggugg

SEQ ID NO: 2965720 - RNA, 19 nt, Artificial Sequence
  Description of Artificial Sequence: Synthetic oligonucleotide
uguuaagcaacuuacuguu

SEQ ID NO: 2965721 - RNA, 19 nt, Artificial Sequence
  Description of Artificial Sequence: Synthetic oligonucleotide
acagggaacacuucuuggg

SEQ ID NO: 2965722 - RNA, 19 nt, Artificial Sequence
  Description of Artificial Sequence: Synthetic oligonucleotide
uucacaguugcguccauag

SEQ ID NO: 2965723 - RNA, 19 nt, Artificial Sequence
  Description of Artificial Sequence: Synthetic oligonucleotide
uuuucguacgucacguuca

SEQ ID NO: 2965724 - RNA, 19 nt, Artificial Sequence
  Description of Artificial Sequence: Synthetic oligonucleotide
cuuacuguucuguaucccc

SEQ ID NO: 2965725 - RNA, 19 nt, Artificial Sequence
  Description of Artificial Sequence: Synthetic oligonucleotide
ucugaggaaaacaguggag

SEQ ID NO: 2965726 - RNA, 19 nt, Artificial Sequence
  Description of Artificial Sequence: Synthetic oligonucleotide
uuuuguuaagcaacuuacu

SEQ ID NO: 2965727 - RNA, 19 nt, Artificial Sequence
  Description of Artificial Sequence: Synthetic oligonucleotide
guuuuguuaagcaacuuac

SEQ ID NO: 2965728 - RNA, 19 nt, Artificial Sequence
  Description of Artificial Sequence: Synthetic oligonucleotide
gcuagcaugaaaguggucg

SEQ ID NO: 2965729 - RNA, 19 nt, Artificial Sequence
  Description of Artificial Sequence: Synthetic oligonucleotide
aaaaggucugaggaaaaca

SEQ ID NO: 2965730 - RNA, 19 nt, Artificial Sequence
  Description of Artificial Sequence: Synthetic oligonucleotide
uaccguggaggacagaccc

SEQ ID NO: 2965731 - RNA, 19 nt, Artificial Sequence
  Description of Artificial Sequence: Synthetic oligonucleotide
uucuugggcagccaguuac

SEQ ID NO: 2965732 - RNA, 19 nt, Artificial Sequence
  Description of Artificial Sequence: Synthetic oligonucleotide
gcaaaugccagcuagcaug

SEQ ID NO: 2965733 - RNA, 19 nt, Artificial Sequence
  Description of Artificial Sequence: Synthetic oligonucleotide
aucacaugaccaucacagc

SEQ ID NO: 2965734 - RNA, 19 nt, Artificial Sequence
  Description of Artificial Sequence: Synthetic oligonucleotide
cugaggaaaacaguggagc

SEQ ID NO: 2965735 - RNA, 19 nt, Artificial Sequence
  Description of Artificial Sequence: Synthetic oligonucleotide
cuagcaugaaaguggucgg

SEQ ID NO: 2965736 - RNA, 19 nt, Artificial Sequence
  Description of Artificial Sequence: Synthetic oligonucleotide
aaggcaccaacuugaaaga

SEQ ID NO: 2965737 - RNA, 19 nt, Artificial Sequence
  Description of Artificial Sequence: Synthetic oligonucleotide
uccauagaaagaaggugga

SEQ ID NO: 2965738 - RNA, 19 nt, Artificial Sequence
  Description of Artificial Sequence: Synthetic oligonucleotide
aaaguggucggcacagacg

SEQ ID NO: 2965739 - RNA, 19 nt, Artificial Sequence
  Description of Artificial Sequence: Synthetic oligonucleotide
aucucugauggccaggucu

SEQ ID NO: 2965740 - RNA, 19 nt, Artificial Sequence
  Description of Artificial Sequence: Synthetic oligonucleotide
ugaggaaaacaguggagcu

SEQ ID NO: 2965741 - RNA, 19 nt, Artificial Sequence
  Description of Artificial Sequence: Synthetic oligonucleotide
aaggcaaaugccagcuagc

SEQ ID NO: 2965742 - RNA, 19 nt, Artificial Sequence
  Description of Artificial Sequence: Synthetic oligonucleotide
gaccccaggaugcaggucc

SEQ ID NO: 2965743 - RNA, 19 nt, Artificial Sequence
  Description of Artificial Sequence: Synthetic oligonucleotide
acagaaggaccccaggaug

SEQ ID NO: 2965744 - RNA, 19 nt, Artificial Sequence
  Description of Artificial Sequence: Synthetic oligonucleotide
uguacugcagguccuucug

SEQ ID NO: 2965745 - RNA, 19 nt, Artificial Sequence
  Description of Artificial Sequence: Synthetic oligonucleotide
aaugccagcuagcaugaaa

SEQ ID NO: 2965746 - RNA, 19 nt, Artificial Sequence
  Description of Artificial Sequence: Synthetic oligonucleotide
uuacuguucuguaucccca

SEQ ID NO: 2965747 - RNA, 19 nt, Artificial Sequence
  Description of Artificial Sequence: Synthetic oligonucleotide
ccagcuagcaugaaagugg

SEQ ID NO: 2965748 - RNA, 19 nt, Artificial Sequence
  Description of Artificial Sequence: Synthetic oligonucleotide
uacugcagguccuucuggg

SEQ ID NO: 2965749 - RNA, 19 nt, Artificial Sequence
  Description of Artificial Sequence: Synthetic oligonucleotide
ugggcagccaguuaccgug

SEQ ID NO: 2965750 - RNA, 19 nt, Artificial Sequence
  Description of Artificial Sequence: Synthetic oligonucleotide
uucuggguugcgaaggcug

SEQ ID NO: 2965751 - RNA, 19 nt, Artificial Sequence
  Description of Artificial Sequence: Synthetic oligonucleotide
agacugagaauguacugca

SEQ ID NO: 2965752 - RNA, 19 nt, Artificial Sequence
  Description of Artificial Sequence: Synthetic oligonucleotide
ugcuggcagauccuggucc

SEQ ID NO: 2965753 - RNA, 19 nt, Artificial Sequence
  Description of Artificial Sequence: Synthetic oligonucleotide
uguuaucucugauggccag

SEQ ID NO: 2965754 - RNA, 19 nt, Artificial Sequence
  Description of Artificial Sequence: Synthetic oligonucleotide
gaaaguggucggcacagac

SEQ ID NO: 2965755 - RNA, 19 nt, Artificial Sequence
  Description of Artificial Sequence: Synthetic oligonucleotide
cagaaggaccccaggaugc

SEQ ID NO: 2965756 - RNA, 19 nt, Artificial Sequence
  Description of Artificial Sequence: Synthetic oligonucleotide
uguucuguauccccacgga

SEQ ID NO: 2965757 - RNA, 19 nt, Artificial Sequence
  Description of Artificial Sequence: Synthetic oligonucleotide
gaguccuggaugcuggcag

SEQ ID NO: 2965758 - RNA, 19 nt, Artificial Sequence
  Description of Artificial Sequence: Synthetic oligonucleotide
cauagaaagaagguggaca

SEQ ID NO: 2965759 - RNA, 19 nt, Artificial Sequence
  Description of Artificial Sequence: Synthetic oligonucleotide
caacuugaaagacugagaa

SEQ ID NO: 2965760 - RNA, 19 nt, Artificial Sequence
  Description of Artificial Sequence: Synthetic oligonucleotide
cuuuucguacgucacguuc

SEQ ID NO: 2965761 - RNA, 19 nt, Artificial Sequence
  Description of Artificial Sequence: Synthetic oligonucleotide
ugcaggucccuccauucag

SEQ ID NO: 2965762 - RNA, 19 nt, Artificial Sequence
  Description of Artificial Sequence: Synthetic oligonucleotide
auccugguccaucacauga

SEQ ID NO: 2965763 - RNA, 19 nt, Artificial Sequence
  Description of Artificial Sequence: Synthetic oligonucleotide
uaagcaacuuacuguucug

SEQ ID NO: 2965764 - RNA, 19 nt, Artificial Sequence
  Description of Artificial Sequence: Synthetic oligonucleotide
acuuacuguucuguauccc

SEQ ID NO: 2965765 - RNA, 19 nt, Artificial Sequence
  Description of Artificial Sequence: Synthetic oligonucleotide
ggucccuccauucaggcag

SEQ ID NO: 2965766 - RNA, 19 nt, Artificial Sequence
  Description of Artificial Sequence: Synthetic oligonucleotide
acccacagugcucuuuucg

SEQ ID NO: 2965767 - RNA, 19 nt, Artificial Sequence
  Description of Artificial Sequence: Synthetic oligonucleotide
augaccaucacagccaggu

SEQ ID NO: 2965768 - RNA, 19 nt, Artificial Sequence
  Description of Artificial Sequence: Synthetic oligonucleotide
acagugcucuuuucguacg

SEQ ID NO: 2965769 - RNA, 19 nt, Artificial Sequence
  Description of Artificial Sequence: Synthetic oligonucleotide
acgucacguucacaguugc

SEQ ID NO: 2965770 - RNA, 19 nt, Artificial Sequence
  Description of Artificial Sequence: Synthetic oligonucleotide
aggacagacccacagugcu

SEQ ID NO: 2965771 - RNA, 19 nt, Artificial Sequence
  Description of Artificial Sequence: Synthetic oligonucleotide
uacgucacguucacaguug

SEQ ID NO: 2965772 - RNA, 19 nt, Artificial Sequence
  Description of Artificial Sequence: Synthetic oligonucleotide
ugccaacaccugcacaggg

SEQ ID NO: 2965773 - RNA, 19 nt, Artificial Sequence
  Description of Artificial Sequence: Synthetic oligonucleotide
uccuucuggguugcgaagg

SEQ ID NO: 2965774 - RNA, 19 nt, Artificial Sequence
  Description of Artificial Sequence: Synthetic oligonucleotide
aaacaguggagcuggccau

SEQ ID NO: 2965775 - RNA, 19 nt, Artificial Sequence
  Description of Artificial Sequence: Synthetic oligonucleotide
augccagcuagcaugaaag

SEQ ID NO: 2965776 - RNA, 19 nt, Artificial Sequence
  Description of Artificial Sequence: Synthetic oligonucleotide
aggucugaggaaaacagug

SEQ ID NO: 2965777 - RNA, 19 nt, Artificial Sequence
  Description of Artificial Sequence: Synthetic oligonucleotide
cuguucuguauccccacgg

SEQ ID NO: 2965778 - RNA, 19 nt, Artificial Sequence
  Description of Artificial Sequence: Synthetic oligonucleotide
guuaccguggaggacagac

SEQ ID NO: 2965779 - RNA, 19 nt, Artificial Sequence
  Description of Artificial Sequence: Synthetic oligonucleotide
ugcgaaggcuguuaucucu

SEQ ID NO: 2965780 - RNA, 19 nt, Artificial Sequence
  Description of Artificial Sequence: Synthetic oligonucleotide
acuguucuguauccccacg

SEQ ID NO: 2965781 - RNA, 19 nt, Artificial Sequence
  Description of Artificial Sequence: Synthetic oligonucleotide
gcuguuaucucugauggcc

SEQ ID NO: 2965782 - RNA, 19 nt, Artificial Sequence
  Description of Artificial Sequence: Synthetic oligonucleotide
augaaaguggucggcacag

SEQ ID NO: 2965783 - RNA, 19 nt, Artificial Sequence
  Description of Artificial Sequence: Synthetic oligonucleotide
uggacaggcacagaaggac

SEQ ID NO: 2965784 - RNA, 19 nt, Artificial Sequence
  Description of Artificial Sequence: Synthetic oligonucleotide
ucucugauggccaggucuc

SEQ ID NO: 2965785 - RNA, 19 nt, Artificial Sequence
  Description of Artificial Sequence: Synthetic oligonucleotide
uagaaagaagguggacagg

SEQ ID NO: 2965786 - RNA, 19 nt, Artificial Sequence
  Description of Artificial Sequence: Synthetic oligonucleotide
cacagugcucuuuucguac

SEQ ID NO: 2965787 - RNA, 19 nt, Artificial Sequence
  Description of Artificial Sequence: Synthetic oligonucleotide
cuggaguccuggaugcugg

SEQ ID NO: 2965788 - RNA, 19 nt, Artificial Sequence
  Description of Artificial Sequence: Synthetic oligonucleotide
gaggaaaacaguggagcug

SEQ ID NO: 2965789 - RNA, 19 nt, Artificial Sequence
  Description of Artificial Sequence: Synthetic oligonucleotide
ugcucuuuucguacgucac

SEQ ID NO: 2965790 - RNA, 19 nt, Artificial Sequence
  Description of Artificial Sequence: Synthetic oligonucleotide
cagggaacacuucuugggc

SEQ ID NO: 2965791 - RNA, 19 nt, Artificial Sequence
  Description of Artificial Sequence: Synthetic oligonucleotide
guugcguccauagaaagaa

SEQ ID NO: 2965792 - RNA, 19 nt, Artificial Sequence
  Description of Artificial Sequence: Synthetic oligonucleotide
gaccaucacagccagguaa

SEQ ID NO: 2965793 - RNA, 19 nt, Artificial Sequence
  Description of Artificial Sequence: Synthetic oligonucleotide
gucugaggaaaacagugga

SEQ ID NO: 2965794 - RNA, 19 nt, Artificial Sequence
  Description of Artificial Sequence: Synthetic oligonucleotide
gaaaacaguggagcuggcc

SEQ ID NO: 2965795 - RNA, 19 nt, Artificial Sequence
  Description of Artificial Sequence: Synthetic oligonucleotide
gaugcaggucccuccauuc

SEQ ID NO: 2965796 - RNA, 19 nt, Artificial Sequence
  Description of Artificial Sequence: Synthetic oligonucleotide
aguggagcuggccaugcca

SEQ ID NO: 2965797 - RNA, 19 nt, Artificial Sequence
  Description of Artificial Sequence: Synthetic oligonucleotide
uuaccguggaggacagacc

SEQ ID NO: 2965798 - RNA, 19 nt, Artificial Sequence
  Description of Artificial Sequence: Synthetic oligonucleotide
uuaucucugauggccaggu

SEQ ID NO: 2965799 - RNA, 19 nt, Artificial Sequence
  Description of Artificial Sequence: Synthetic oligonucleotide
cagccaguuaccguggagg

SEQ ID NO: 2965800 - RNA, 19 nt, Artificial Sequence
  Description of Artificial Sequence: Synthetic oligonucleotide
guggaggacagacccacag

SEQ ID NO: 2965801 - RNA, 19 nt, Artificial Sequence
  Description of Artificial Sequence: Synthetic oligonucleotide
aagcaacuuacuguucugu

SEQ ID NO: 2965802 - RNA, 19 nt, Artificial Sequence
  Description of Artificial Sequence: Synthetic oligonucleotide
cacguucacaguugcgucc

SEQ ID NO: 2965803 - RNA, 19 nt, Artificial Sequence
  Description of Artificial Sequence: Synthetic oligonucleotide
ucuugggcagccaguuacc

SEQ ID NO: 2965804 - RNA, 19 nt, Artificial Sequence
  Description of Artificial Sequence: Synthetic oligonucleotide
agaagguggacaggcacag

SEQ ID NO: 2965805 - RNA, 19 nt, Artificial Sequence
  Description of Artificial Sequence: Synthetic oligonucleotide
uuucguacgucacguucac

SEQ ID NO: 2965806 - RNA, 19 nt, Artificial Sequence
  Description of Artificial Sequence: Synthetic oligonucleotide
agcagguuuuguuaagcaa

SEQ ID NO: 2965807 - RNA, 19 nt, Artificial Sequence
  Description of Artificial Sequence: Synthetic oligonucleotide
gaaagacugagaauguacu

SEQ ID NO: 2965808 - RNA, 19 nt, Artificial Sequence
  Description of Artificial Sequence: Synthetic oligonucleotide
cacaguugcguccauagaa

SEQ ID NO: 2965809 - RNA, 19 nt, Artificial Sequence
  Description of Artificial Sequence: Synthetic oligonucleotide
acacuucuugggcagccag

SEQ ID NO: 2965810 - RNA, 19 nt, Artificial Sequence
  Description of Artificial Sequence: Synthetic oligonucleotide
caguugcguccauagaaag

SEQ ID NO: 2965811 - RNA, 19 nt, Artificial Sequence
  Description of Artificial Sequence: Synthetic oligonucleotide
ccuccauucaggcagcagg

SEQ ID NO: 2965812 - RNA, 19 nt, Artificial Sequence
  Description of Artificial Sequence: Synthetic oligonucleotide
agggaacacuucuugggca

SEQ ID NO: 2965813 - RNA, 19 nt, Artificial Sequence
  Description of Artificial Sequence: Synthetic oligonucleotide
cacaugaccaucacagcca

SEQ ID NO: 2965814 - RNA, 19 nt, Artificial Sequence
  Description of Artificial Sequence: Synthetic oligonucleotide
ugguccaucacaugaccau

SEQ ID NO: 2965815 - RNA, 19 nt, Artificial Sequence
  Description of Artificial Sequence: Synthetic oligonucleotide
gacaggcacagaaggaccc

SEQ ID NO: 2965816 - RNA, 19 nt, Artificial Sequence
  Description of Artificial Sequence: Synthetic oligonucleotide
ucuggguugcgaaggcugu

SEQ ID NO: 2965817 - RNA, 19 nt, Artificial Sequence
  Description of Artificial Sequence: Synthetic oligonucleotide
uggccaugccaacaccugc

SEQ ID NO: 2965818 - RNA, 19 nt, Artificial Sequence
  Description of Artificial Sequence: Synthetic oligonucleotide
ugagaauguacugcagguc

SEQ ID NO: 2965819 - RNA, 19 nt, Artificial Sequence
  Description of Artificial Sequence: Synthetic oligonucleotide
uccugguccaucacaugac

SEQ ID NO: 2965820 - RNA, 19 nt, Artificial Sequence
  Description of Artificial Sequence: Synthetic oligonucleotide
ucacguucacaguugcguc

SEQ ID NO: 2965821 - RNA, 19 nt, Artificial Sequence
  Description of Artificial Sequence: Synthetic oligonucleotide
aaggucugaggaaaacagu

SEQ ID NO: 2965822 - RNA, 19 nt, Artificial Sequence
  Description of Artificial Sequence: Synthetic oligonucleotide
uugcguccauagaaagaag

SEQ ID NO: 2965823 - RNA, 19 nt, Artificial Sequence
  Description of Artificial Sequence: Synthetic oligonucleotide
guacugcagguccuucugg

SEQ ID NO: 2965824 - RNA, 19 nt, Artificial Sequence
  Description of Artificial Sequence: Synthetic oligonucleotide
guugcgaaggcuguuaucu

SEQ ID NO: 2965825 - RNA, 19 nt, Artificial Sequence
  Description of Artificial Sequence: Synthetic oligonucleotide
guuaucucugauggccagg

SEQ ID NO: 2965826 - RNA, 19 nt, Artificial Sequence
  Description of Artificial Sequence: Synthetic oligonucleotide
uccaucacaugaccaucac

SEQ ID NO: 2965827 - RNA, 19 nt, Artificial Sequence
  Description of Artificial Sequence: Synthetic oligonucleotide
ucacaguugcguccauaga

SEQ ID NO: 2965828 - RNA, 19 nt, Artificial Sequence
  Description of Artificial Sequence: Synthetic oligonucleotide
agcuggccaugccaacacc

SEQ ID NO: 2965829 - RNA, 19 nt, Artificial Sequence
  Description of Artificial Sequence: Synthetic oligonucleotide
uggaggacagacccacagu

SEQ ID NO: 2965830 - RNA, 19 nt, Artificial Sequence
  Description of Artificial Sequence: Synthetic oligonucleotide
acaggcacagaaggacccc

SEQ ID NO: 2965831 - RNA, 19 nt, Artificial Sequence
  Description of Artificial Sequence: Synthetic oligonucleotide
uacuguucuguauccccac

SEQ ID NO: 2965832 - RNA, 19 nt, Artificial Sequence
  Description of Artificial Sequence: Synthetic oligonucleotide
acaguggagcuggccaugc

SEQ ID NO: 2965833 - RNA, 19 nt, Artificial Sequence
  Description of Artificial Sequence: Synthetic oligonucleotide
cacggaaggcaccaacuug

SEQ ID NO: 2965834 - RNA, 19 nt, Artificial Sequence
  Description of Artificial Sequence: Synthetic oligonucleotide
gcagguuuuguuaagcaac

SEQ ID NO: 2965835 - RNA, 19 nt, Artificial Sequence
  Description of Artificial Sequence: Synthetic oligonucleotide
ccuggaugcuggcagaucc

SEQ ID NO: 2965836 - RNA, 19 nt, Artificial Sequence
  Description of Artificial Sequence: Synthetic oligonucleotide
auguacugcagguccuucu

SEQ ID NO: 2965837 - RNA, 19 nt, Artificial Sequence
  Description of Artificial Sequence: Synthetic oligonucleotide
acggaaggcaccaacuuga

SEQ ID NO: 2965838 - RNA, 19 nt, Artificial Sequence
  Description of Artificial Sequence: Synthetic oligonucleotide
ggucugaggaaaacagugg

SEQ ID NO: 2965839 - RNA, 19 nt, Artificial Sequence
  Description of Artificial Sequence: Synthetic oligonucleotide
guccuggaguccuggaugc

SEQ ID NO: 2965840 - RNA, 19 nt, Artificial Sequence
  Description of Artificial Sequence: Synthetic oligonucleotide
uugaaagacugagaaugua

SEQ ID NO: 2965841 - RNA, 19 nt, Artificial Sequence
  Description of Artificial Sequence: Synthetic oligonucleotide
gguuuuguuaagcaacuua

SEQ ID NO: 2965842 - RNA, 19 nt, Artificial Sequence
  Description of Artificial Sequence: Synthetic oligonucleotide
caaaugccagcuagcauga

SEQ ID NO: 2965843 - RNA, 19 nt, Artificial Sequence
  Description of Artificial Sequence: Synthetic oligonucleotide
uuguccuggaguccuggau

SEQ ID NO: 2965844 - RNA, 19 nt, Artificial Sequence
  Description of Artificial Sequence: Synthetic oligonucleotide
gcucuuuucguacgucacg

SEQ ID NO: 2965845 - RNA, 19 nt, Artificial Sequence
  Description of Artificial Sequence: Synthetic oligonucleotide
agcaacuuacuguucugua

SEQ ID NO: 2965846 - RNA, 19 nt, Artificial Sequence
  Description of Artificial Sequence: Synthetic oligonucleotide
agugcucuuuucguacguc

SEQ ID NO: 2965847 - RNA, 19 nt, Artificial Sequence
  Description of Artificial Sequence: Synthetic oligonucleotide
ucggcacagacggagcuug

SEQ ID NO: 2965848 - RNA, 19 nt, Artificial Sequence
  Description of Artificial Sequence: Synthetic oligonucleotide
gggaacacuucuugggcag

SEQ ID NO: 2965849 - RNA, 19 nt, Artificial Sequence
  Description of Artificial Sequence: Synthetic oligonucleotide
agccaguuaccguggagga

SEQ ID NO: 2965850 - RNA, 19 nt, Artificial Sequence
  Description of Artificial Sequence: Synthetic oligonucleotide
aacaguggagcuggccaug

SEQ ID NO: 2965851 - RNA, 19 nt, Artificial Sequence
  Description of Artificial Sequence: Synthetic oligonucleotide
cuugggcagccaguuaccg

SEQ ID NO: 2965852 - RNA, 19 nt, Artificial Sequence
  Description of Artificial Sequence: Synthetic oligonucleotide
gcaccaacuugaaagacug

SEQ ID NO: 2965853 - RNA, 19 nt, Artificial Sequence
  Description of Artificial Sequence: Synthetic oligonucleotide
aggcaccaacuugaaagac

SEQ ID NO: 2965854 - RNA, 19 nt, Artificial Sequence
  Description of Artificial Sequence: Synthetic oligonucleotide
uagcaugaaaguggucggc

SEQ ID NO: 2965855 - RNA, 19 nt, Artificial Sequence
  Description of Artificial Sequence: Synthetic oligonucleotide
gauccugguccaucacaug

SEQ ID NO: 2965856 - RNA, 19 nt, Artificial Sequence
  Description of Artificial Sequence: Synthetic oligonucleotide
caugaaaguggucggcaca

SEQ ID NO: 2965857 - RNA, 19 nt, Artificial Sequence
  Description of Artificial Sequence: Synthetic oligonucleotide
uauccccacggaaggcacc

SEQ ID NO: 2965858 - RNA, 19 nt, Artificial Sequence
  Description of Artificial Sequence: Synthetic oligonucleotide
gaugcuggcagauccuggu

SEQ ID NO: 2965859 - RNA, 19 nt, Artificial Sequence
  Description of Artificial Sequence: Synthetic oligonucleotide
uggaugcuggcagauccug

SEQ ID NO: 2965860 - RNA, 19 nt, Artificial Sequence
  Description of Artificial Sequence: Synthetic oligonucleotide
caggucccuccauucaggc

SEQ ID NO: 2965861 - RNA, 19 nt, Artificial Sequence
  Description of Artificial Sequence: Synthetic oligonucleotide
cuguuaucucugauggcca

SEQ ID NO: 2965862 - RNA, 19 nt, Artificial Sequence
  Description of Artificial Sequence: Synthetic oligonucleotide
cugagaauguacugcaggu

SEQ ID NO: 2965863 - RNA, 19 nt, Artificial Sequence
  Description of Artificial Sequence: Synthetic oligonucleotide
aggcaaaugccagcuagca

SEQ ID NO: 2965864 - RNA, 19 nt, Artificial Sequence
  Description of Artificial Sequence: Synthetic oligonucleotide
acugcagguccuucugggu

SEQ ID NO: 2965865 - RNA, 19 nt, Artificial Sequence
  Description of Artificial Sequence: Synthetic oligonucleotide
gacggagcuuguccuggag

SEQ ID NO: 2965866 - RNA, 19 nt, Artificial Sequence
  Description of Artificial Sequence: Synthetic oligonucleotide
ugccagcuagcaugaaagu

SEQ ID NO: 2965867 - RNA, 19 nt, Artificial Sequence
  Description of Artificial Sequence: Synthetic oligonucleotide
gagcuggccaugccaacac

SEQ ID NO: 2965868 - RNA, 19 nt, Artificial Sequence
  Description of Artificial Sequence: Synthetic oligonucleotide
gugcucuuuucguacguca

SEQ ID NO: 2965869 - RNA, 19 nt, Artificial Sequence
  Description of Artificial Sequence: Synthetic oligonucleotide
aguugcguccauagaaaga

SEQ ID NO: 2965870 - RNA, 19 nt, Artificial Sequence
  Description of Artificial Sequence: Synthetic oligonucleotide
agauccugguccaucacau

SEQ ID NO: 2965871 - RNA, 19 nt, Artificial Sequence
  Description of Artificial Sequence: Synthetic oligonucleotide
cuggccaugccaacaccug

SEQ ID NO: 2965872 - RNA, 19 nt, Artificial Sequence
  Description of Artificial Sequence: Synthetic oligonucleotide
agaauguacugcagguccu

SEQ ID NO: 2965873 - RNA, 19 nt, Artificial Sequence
  Description of Artificial Sequence: Synthetic oligonucleotide
aacacuucuugggcagcca

SEQ ID NO: 2965874 - RNA, 19 nt, Artificial Sequence
  Description of Artificial Sequence: Synthetic oligonucleotide
gcacagacggagcuugucc

SEQ ID NO: 2965875 - RNA, 19 nt, Artificial Sequence
  Description of Artificial Sequence: Synthetic oligonucleotide
acaguugcguccauagaaa

SEQ ID NO: 2965876 - RNA, 19 nt, Artificial Sequence
  Description of Artificial Sequence: Synthetic oligonucleotide
uugggcagccaguuaccgu

SEQ ID NO: 2965877 - RNA, 19 nt, Artificial Sequence
  Description of Artificial Sequence: Synthetic oligonucleotide
agacccacagugcucuuuu

SEQ ID NO: 2965878 - RNA, 19 nt, Artificial Sequence
  Description of Artificial Sequence: Synthetic oligonucleotide
gaaggaccccaggaugcag

SEQ ID NO: 2965879 - RNA, 19 nt, Artificial Sequence
  Description of Artificial Sequence: Synthetic oligonucleotide
aguccuggaugcuggcaga

SEQ ID NO: 2965880 - RNA, 19 nt, Artificial Sequence
  Description of Artificial Sequence: Synthetic oligonucleotide
augccaacaccugcacagg

SEQ ID NO: 2965881 - RNA, 19 nt, Artificial Sequence
  Description of Artificial Sequence: Synthetic oligonucleotide
guucuguauccccacggaa

SEQ ID NO: 2965882 - RNA, 19 nt, Artificial Sequence
  Description of Artificial Sequence: Synthetic oligonucleotide
aggcagcagguuuuguuaa

SEQ ID NO: 2965883 - RNA, 19 nt, Artificial Sequence
  Description of Artificial Sequence: Synthetic oligonucleotide
guccuucuggguugcgaag

SEQ ID NO: 2965884 - RNA, 19 nt, Artificial Sequence
  Description of Artificial Sequence: Synthetic oligonucleotide
augcaggucccuccauuca

SEQ ID NO: 2965885 - RNA, 19 nt, Artificial Sequence
  Description of Artificial Sequence: Synthetic oligonucleotide
ggcacagaaggaccccagg

SEQ ID NO: 2965886 - RNA, 19 nt, Artificial Sequence
  Description of Artificial Sequence: Synthetic oligonucleotide
caugaccaucacagccagg

SEQ ID NO: 2965887 - RNA, 19 nt, Artificial Sequence
  Description of Artificial Sequence: Synthetic oligonucleotide
acaccugcacagggaacac

SEQ ID NO: 2965888 - RNA, 19 nt, Artificial Sequence
  Description of Artificial Sequence: Synthetic oligonucleotide
uugcgaaggcuguuaucuc

SEQ ID NO: 2965889 - RNA, 19 nt, Artificial Sequence
  Description of Artificial Sequence: Synthetic oligonucleotide
cugguccaucacaugacca

SEQ ID NO: 2965890 - RNA, 19 nt, Artificial Sequence
  Description of Artificial Sequence: Synthetic oligonucleotide
gucacguucacaguugcgu

SEQ ID NO: 2965891 - RNA, 19 nt, Artificial Sequence
  Description of Artificial Sequence: Synthetic oligonucleotide
acuucuugggcagccaguu

SEQ ID NO: 2965892 - RNA, 19 nt, Artificial Sequence
  Description of Artificial Sequence: Synthetic oligonucleotide
cagcagguuuuguuaagca

SEQ ID NO: 2965893 - RNA, 19 nt, Artificial Sequence
  Description of Artificial Sequence: Synthetic oligonucleotide
guuaagcaacuuacuguuc

SEQ ID NO: 2965894 - RNA, 19 nt, Artificial Sequence
  Description of Artificial Sequence: Synthetic oligonucleotide
caguuaccguggaggacag

SEQ ID NO: 2965895 - RNA, 19 nt, Artificial Sequence
  Description of Artificial Sequence: Synthetic oligonucleotide
ucuuuucguacgucacguu

SEQ ID NO: 2965896 - RNA, 19 nt, Artificial Sequence
  Description of Artificial Sequence: Synthetic oligonucleotide
caacaccugcacagggaac

SEQ ID NO: 2965897 - RNA, 19 nt, Artificial Sequence
  Description of Artificial Sequence: Synthetic oligonucleotide
gacagacccacagugcucu

SEQ ID NO: 2965898 - RNA, 19 nt, Artificial Sequence
  Description of Artificial Sequence: Synthetic oligonucleotide
cagauccugguccaucaca

SEQ ID NO: 2965899 - RNA, 19 nt, Artificial Sequence
  Description of Artificial Sequence: Synthetic oligonucleotide
acguucacaguugcgucca

SEQ ID NO: 2965900 - RNA, 19 nt, Artificial Sequence
  Description of Artificial Sequence: Synthetic oligonucleotide
uggaguccuggaugcuggc

SEQ ID NO: 2965901 - RNA, 19 nt, Artificial Sequence
  Description of Artificial Sequence: Synthetic oligonucleotide
cagguuuuguuaagcaacu

SEQ ID NO: 2965902 - RNA, 19 nt, Artificial Sequence
  Description of Artificial Sequence: Synthetic oligonucleotide
agguggacaggcacagaag

SEQ ID NO: 2965903 - RNA, 19 nt, Artificial Sequence
  Description of Artificial Sequence: Synthetic oligonucleotide
uaucucugauggccagguc

SEQ ID NO: 2965904 - RNA, 19 nt, Artificial Sequence
  Description of Artificial Sequence: Synthetic oligonucleotide
gccagcuagcaugaaagug

SEQ ID NO: 2965905 - RNA, 19 nt, Artificial Sequence
  Description of Artificial Sequence: Synthetic oligonucleotide
accaucacagccagguaaa

SEQ ID NO: 2965906 - RNA, 19 nt, Artificial Sequence
  Description of Artificial Sequence: Synthetic oligonucleotide
ucugauggccaggucucuc

SEQ ID NO: 2965907 - RNA, 19 nt, Artificial Sequence
  Description of Artificial Sequence: Synthetic oligonucleotide
ugaccaucacagccaggua

SEQ ID NO: 2965908 - RNA, 19 nt, Artificial Sequence
  Description of Artificial Sequence: Synthetic oligonucleotide
gcaugaaaguggucggcac

SEQ ID NO: 2965909 - RNA, 19 nt, Artificial Sequence
  Description of Artificial Sequence: Synthetic oligonucleotide
ccugguccaucacaugacc

SEQ ID NO: 2965910 - RNA, 19 nt, Artificial Sequence
  Description of Artificial Sequence: Synthetic oligonucleotide
gcagcagguuuuguuaagc

SEQ ID NO: 2965911 - RNA, 19 nt, Artificial Sequence
  Description of Artificial Sequence: Synthetic oligonucleotide
ggacaggcacagaaggacc

SEQ ID NO: 2965912 - RNA, 19 nt, Artificial Sequence
  Description of Artificial Sequence: Synthetic oligonucleotide
agaaggaccccaggaugca

SEQ ID NO: 2965913 - RNA, 19 nt, Artificial Sequence
  Description of Artificial Sequence: Synthetic oligonucleotide
cuguauccccacggaaggc

SEQ ID NO: 2965914 - RNA, 19 nt, Artificial Sequence
  Description of Artificial Sequence: Synthetic oligonucleotide
ccaacuugaaagacugaga

SEQ ID NO: 2965915 - RNA, 19 nt, Artificial Sequence
  Description of Artificial Sequence: Synthetic oligonucleotide
aggucccuccauucaggca

SEQ ID NO: 2965916 - RNA, 19 nt, Artificial Sequence
  Description of Artificial Sequence: Synthetic oligonucleotide
accugcacagggaacacuu

SEQ ID NO: 2965917 - RNA, 19 nt, Artificial Sequence
  Description of Artificial Sequence: Synthetic oligonucleotide
ccaggaugcaggucccucc

SEQ ID NO: 2965918 - RNA, 19 nt, Artificial Sequence
  Description of Artificial Sequence: Synthetic oligonucleotide
uggguugcgaaggcuguua

SEQ ID NO: 2965919 - RNA, 19 nt, Artificial Sequence
  Description of Artificial Sequence: Synthetic oligonucleotide
guacgucacguucacaguu

SEQ ID NO: 2965920 - RNA, 19 nt, Artificial Sequence
  Description of Artificial Sequence: Synthetic oligonucleotide
ggaugcuggcagauccugg

SEQ ID NO: 2965921 - RNA, 19 nt, Artificial Sequence
  Description of Artificial Sequence: Synthetic oligonucleotide
guauccccacggaaggcac

SEQ ID NO: 2965922 - RNA, 19 nt, Artificial Sequence
  Description of Artificial Sequence: Synthetic oligonucleotide
agacggagcuuguccugga

SEQ ID NO: 2965923 - RNA, 19 nt, Artificial Sequence
  Description of Artificial Sequence: Synthetic oligonucleotide
ccaguuaccguggaggaca

SEQ ID NO: 2965924 - RNA, 19 nt, Artificial Sequence
  Description of Artificial Sequence: Synthetic oligonucleotide
ggcuguuaucucugauggc

SEQ ID NO: 2965925 - RNA, 19 nt, Artificial Sequence
  Description of Artificial Sequence: Synthetic oligonucleotide
accccaggaugcagguccc

SEQ ID NO: 2965926 - RNA, 19 nt, Artificial Sequence
  Description of Artificial Sequence: Synthetic oligonucleotide
cucuuuucguacgucacgu

SEQ ID NO: 2965927 - RNA, 19 nt, Artificial Sequence
  Description of Artificial Sequence: Synthetic oligonucleotide
cguccauagaaagaaggug

SEQ ID NO: 2965928 - RNA, 19 nt, Artificial Sequence
  Description of Artificial Sequence: Synthetic oligonucleotide
cacagacggagcuuguccu

SEQ ID NO: 2965929 - RNA, 19 nt, Artificial Sequence
  Description of Artificial Sequence: Synthetic oligonucleotide
guggacaggcacagaagga

SEQ ID NO: 2965930 - RNA, 19 nt, Artificial Sequence
  Description of Artificial Sequence: Synthetic oligonucleotide
gguccuucuggguugcgaa

SEQ ID NO: 2965931 - RNA, 19 nt, Artificial Sequence
  Description of Artificial Sequence: Synthetic oligonucleotide
cuccauucaggcagcaggu

SEQ ID NO: 2965932 - RNA, 19 nt, Artificial Sequence
  Description of Artificial Sequence: Synthetic oligonucleotide
uucguacgucacguucaca

SEQ ID NO: 2965933 - RNA, 19 nt, Artificial Sequence
  Description of Artificial Sequence: Synthetic oligonucleotide
caggaugcaggucccucca

SEQ ID NO: 2965934 - RNA, 19 nt, Artificial Sequence
  Description of Artificial Sequence: Synthetic oligonucleotide
cauucaggcagcagguuuu

SEQ ID NO: 2965935 - RNA, 19 nt, Artificial Sequence
  Description of Artificial Sequence: Synthetic oligonucleotide
uggcagauccugguccauc

SEQ ID NO: 2965936 - RNA, 19 nt, Artificial Sequence
  Description of Artificial Sequence: Synthetic oligonucleotide
agguccuucuggguugcga

SEQ ID NO: 2965937 - RNA, 19 nt, Artificial Sequence
  Description of Artificial Sequence: Synthetic oligonucleotide
cugcacagggaacacuucu

SEQ ID NO: 2965938 - RNA, 19 nt, Artificial Sequence
  Description of Artificial Sequence: Synthetic oligonucleotide
agcuagcaugaaagugguc

SEQ ID NO: 2965939 - RNA, 19 nt, Artificial Sequence
  Description of Artificial Sequence: Synthetic oligonucleotide
aggcacagaaggaccccag

SEQ ID NO: 2965940 - RNA, 19 nt, Artificial Sequence
  Description of Artificial Sequence: Synthetic oligonucleotide
cacagaaggaccccaggau

SEQ ID NO: 2965941 - RNA, 19 nt, Artificial Sequence
  Description of Artificial Sequence: Synthetic oligonucleotide
uucaggcagcagguuuugu

SEQ ID NO: 2965942 - RNA, 19 nt, Artificial Sequence
  Description of Artificial Sequence: Synthetic oligonucleotide
gcaacuuacuguucuguau

SEQ ID NO: 2965943 - RNA, 19 nt, Artificial Sequence
  Description of Artificial Sequence: Synthetic oligonucleotide
gacccacagugcucuuuuc

SEQ ID NO: 2965944 - RNA, 19 nt, Artificial Sequence
  Description of Artificial Sequence: Synthetic oligonucleotide
caguggagcuggccaugcc

SEQ ID NO: 2965945 - RNA, 19 nt, Artificial Sequence
  Description of Artificial Sequence: Synthetic oligonucleotide
ggagcuuguccuggagucc

SEQ ID NO: 2965946 - RNA, 19 nt, Artificial Sequence
  Description of Artificial Sequence: Synthetic oligonucleotide
cagcuagcaugaaaguggu

SEQ ID NO: 2965947 - RNA, 19 nt, Artificial Sequence
  Description of Artificial Sequence: Synthetic oligonucleotide
agguuuuguuaagcaacuu

SEQ ID NO: 2965948 - RNA, 19 nt, Artificial Sequence
  Description of Artificial Sequence: Synthetic oligonucleotide
uccauucaggcagcagguu

SEQ ID NO: 2965949 - RNA, 19 nt, Artificial Sequence
  Description of Artificial Sequence: Synthetic oligonucleotide
gcuuguccuggaguccugg

SEQ ID NO: 2965950 - RNA, 19 nt, Artificial Sequence
  Description of Artificial Sequence: Synthetic oligonucleotide
ccuucuggguugcgaaggc

SEQ ID NO: 2965951 - RNA, 19 nt, Artificial Sequence
  Description of Artificial Sequence: Synthetic oligonucleotide
gcagccaguuaccguggag

SEQ ID NO: 2965952 - RNA, 19 nt, Artificial Sequence
  Description of Artificial Sequence: Synthetic oligonucleotide
gagcuuguccuggaguccu

SEQ ID NO: 2965953 - RNA, 19 nt, Artificial Sequence
  Description of Artificial Sequence: Synthetic oligonucleotide
aaaugccagcuagcaugaa

SEQ ID NO: 2965954 - RNA, 19 nt, Artificial Sequence
  Description of Artificial Sequence: Synthetic oligonucleotide
gguugcgaaggcuguuauc

SEQ ID NO: 2965955 - RNA, 19 nt, Artificial Sequence
  Description of Artificial Sequence: Synthetic oligonucleotide
gcgaaggcuguuaucucug

SEQ ID NO: 2965956 - RNA, 19 nt, Artificial Sequence
  Description of Artificial Sequence: Synthetic oligonucleotide
ggaacacuucuugggcagc

SEQ ID NO: 2965957 - RNA, 19 nt, Artificial Sequence
  Description of Artificial Sequence: Synthetic oligonucleotide
gcuggcagauccuggucca

SEQ ID NO: 2965958 - RNA, 19 nt, Artificial Sequence
  Description of Artificial Sequence: Synthetic oligonucleotide
uccuggaugcuggcagauc

SEQ ID NO: 2965959 - RNA, 19 nt, Artificial Sequence
  Description of Artificial Sequence: Synthetic oligonucleotide
caccaacuugaaagacuga

SEQ ID NO: 2965960 - RNA, 19 nt, Artificial Sequence
  Description of Artificial Sequence: Synthetic oligonucleotide
cggagcuuguccuggaguc

SEQ ID NO: 2965961 - RNA, 19 nt, Artificial Sequence
  Description of Artificial Sequence: Synthetic oligonucleotide
ccaacaccugcacagggaa

SEQ ID NO: 2965962 - RNA, 19 nt, Artificial Sequence
  Description of Artificial Sequence: Synthetic oligonucleotide
ggaaggcaccaacuugaaa

SEQ ID NO: 2965963 - RNA, 19 nt, Artificial Sequence
  Description of Artificial Sequence: Synthetic oligonucleotide
ggcaccaacuugaaagacu

SEQ ID NO: 2965964 - RNA, 19 nt, Artificial Sequence
  Description of Artificial Sequence: Synthetic oligonucleotide
gccaugccaacaccugcac

SEQ ID NO: 2965965 - RNA, 19 nt, Artificial Sequence
  Description of Artificial Sequence: Synthetic oligonucleotide
ggccaugccaacaccugca

SEQ ID NO: 2965966 - RNA, 19 nt, Artificial Sequence
  Description of Artificial Sequence: Synthetic oligonucleotide
gucccuccauucaggcagc

SEQ ID NO: 2965967 - RNA, 19 nt, Artificial Sequence
  Description of Artificial Sequence: Synthetic oligonucleotide
gcagauccugguccaucac

SEQ ID NO: 2965968 - RNA, 19 nt, Artificial Sequence
  Description of Artificial Sequence: Synthetic oligonucleotide
ggaaaacaguggagcuggc

SEQ ID NO: 2965969 - RNA, 19 nt, Artificial Sequence
  Description of Artificial Sequence: Synthetic oligonucleotide
ccaucacaugaccaucaca

SEQ ID NO: 2965970 - RNA, 19 nt, Artificial Sequence
  Description of Artificial Sequence: Synthetic oligonucleotide
cgucacguucacaguugcg

SEQ ID NO: 2965971 - RNA, 19 nt, Artificial Sequence
  Description of Artificial Sequence: Synthetic oligonucleotide
accguggaggacagaccca

SEQ ID NO: 2965972 - RNA, 19 nt, Artificial Sequence
  Description of Artificial Sequence: Synthetic oligonucleotide
ccguggaggacagacccac

SEQ ID NO: 2965973 - RNA, 19 nt, Artificial Sequence
  Description of Artificial Sequence: Synthetic oligonucleotide
cacuucuugggcagccagu

SEQ ID NO: 2965974 - RNA, 19 nt, Artificial Sequence
  Description of Artificial Sequence: Synthetic oligonucleotide
guucacaguugcguccaua

SEQ ID NO: 2965975 - RNA, 19 nt, Artificial Sequence
  Description of Artificial Sequence: Synthetic oligonucleotide
cuggaugcuggcagauccu

SEQ ID NO: 2965976 - RNA, 19 nt, Artificial Sequence
  Description of Artificial Sequence: Synthetic oligonucleotide
gggcagccaguuaccgugg

SEQ ID NO: 2965977 - RNA, 19 nt, Artificial Sequence
  Description of Artificial Sequence: Synthetic oligonucleotide
cuucuugggcagccaguua

SEQ ID NO: 2965978 - RNA, 19 nt, Artificial Sequence
  Description of Artificial Sequence: Synthetic oligonucleotide
ccugcacagggaacacuuc

SEQ ID NO: 2965979 - RNA, 19 nt, Artificial Sequence
  Description of Artificial Sequence: Synthetic oligonucleotide
gccaacaccugcacaggga

SEQ ID NO: 2965980 - RNA, 19 nt, Artificial Sequence
  Description of Artificial Sequence: Synthetic oligonucleotide
agcuuguccuggaguccug

SEQ ID NO: 2965981 - RNA, 19 nt, Artificial Sequence
  Description of Artificial Sequence: Synthetic oligonucleotide
gcguccauagaaagaaggu

SEQ ID NO: 2965982 - RNA, 19 nt, Artificial Sequence
  Description of Artificial Sequence: Synthetic oligonucleotide
ggacagacccacagugcuc

SEQ ID NO: 2965983 - RNA, 19 nt, Artificial Sequence
  Description of Artificial Sequence: Synthetic oligonucleotide
cugcagguccuucuggguu

SEQ ID NO: 2965984 - RNA, 19 nt, Artificial Sequence
  Description of Artificial Sequence: Synthetic oligonucleotide
ggcaaaugccagcuagcau

SEQ ID NO: 2965985 - RNA, 19 nt, Artificial Sequence
  Description of Artificial Sequence: Synthetic oligonucleotide
aguuaccguggaggacaga

SEQ ID NO: 2965986 - RNA, 19 nt, Artificial Sequence
  Description of Artificial Sequence: Synthetic oligonucleotide
acagacccacagugcucuu

SEQ ID NO: 2965987 - RNA, 19 nt, Artificial Sequence
  Description of Artificial Sequence: Synthetic oligonucleotide
ggucggcacagacggagcu

SEQ ID NO: 2965988 - RNA, 19 nt, Artificial Sequence
  Description of Artificial Sequence: Synthetic oligonucleotide
ggcacagacggagcuuguc

SEQ ID NO: 2965989 - RNA, 19 nt, Artificial Sequence
  Description of Artificial Sequence: Synthetic oligonucleotide
gccaguuaccguggaggac

SEQ ID NO: 2965990 - RNA, 19 nt, Artificial Sequence
  Description of Artificial Sequence: Synthetic oligonucleotide
cagugcucuuuucguacgu

SEQ ID NO: 2965991 - RNA, 19 nt, Artificial Sequence
  Description of Artificial Sequence: Synthetic oligonucleotide
ccccacggaaggcaccaac

SEQ ID NO: 2965992 - RNA, 19 nt, Artificial Sequence
  Description of Artificial Sequence: Synthetic oligonucleotide
gcagguccuucuggguugc

SEQ ID NO: 2965993 - RNA, 19 nt, Artificial Sequence
  Description of Artificial Sequence: Synthetic oligonucleotide
cccacagugcucuuuucgu

SEQ ID NO: 2965994 - RNA, 19 nt, Artificial Sequence
  Description of Artificial Sequence: Synthetic oligonucleotide
gcuggccaugccaacaccu

SEQ ID NO: 2965995 - RNA, 19 nt, Artificial Sequence
  Description of Artificial Sequence: Synthetic oligonucleotide
cagguccuucuggguugcg

SEQ ID NO: 2965996 - RNA, 19 nt, Artificial Sequence
  Description of Artificial Sequence: Synthetic oligonucleotide
cuucuggguugcgaaggcu

SEQ ID NO: 2965997 - RNA, 19 nt, Artificial Sequence
  Description of Artificial Sequence: Synthetic oligonucleotide
ccacagugcucuuuucgua

SEQ ID NO: 2965998 - RNA, 19 nt, Artificial Sequence
  Description of Artificial Sequence: Synthetic oligonucleotide
ggcagccaguuaccgugga

SEQ ID NO: 2965999 - RNA, 19 nt, Artificial Sequence
  Description of Artificial Sequence: Synthetic oligonucleotide
ggaugcaggucccuccauu

SEQ ID NO: 2966000 - RNA, 19 nt, Artificial Sequence
  Description of Artificial Sequence: Synthetic oligonucleotide
cccacggaaggcaccaacu

SEQ ID NO: 2966001 - RNA, 19 nt, Artificial Sequence
  Description of Artificial Sequence: Synthetic oligonucleotide
uccccacggaaggcaccaa

SEQ ID NO: 2966002 - RNA, 19 nt, Artificial Sequence
  Description of Artificial Sequence: Synthetic oligonucleotide
cccaggaugcaggucccuc

SEQ ID NO: 2966003 - RNA, 19 nt, Artificial Sequence
  Description of Artificial Sequence: Synthetic oligonucleotide
ccauucaggcagcagguuu

SEQ ID NO: 2966004 - RNA, 19 nt, Artificial Sequence
  Description of Artificial Sequence: Synthetic oligonucleotide
cccuccauucaggcagcag

SEQ ID NO: 2966005 - RNA, 19 nt, Artificial Sequence
  Description of Artificial Sequence: Synthetic oligonucleotide
ggguugcgaaggcuguuau

SEQ ID NO: 2966006 - RNA, 19 nt, Artificial Sequence
  Description of Artificial Sequence: Synthetic oligonucleotide
guccuggaugcuggcagau

SEQ ID NO: 2966007 - RNA, 19 nt, Artificial Sequence
  Description of Artificial Sequence: Synthetic oligonucleotide
cucugauggccaggucucu

SEQ ID NO: 2966008 - RNA, 19 nt, Artificial Sequence
  Description of Artificial Sequence: Synthetic oligonucleotide
ggaccccaggaugcagguc

SEQ ID NO: 2966009 - RNA, 19 nt, Artificial Sequence
  Description of Artificial Sequence: Synthetic oligonucleotide
caccugcacagggaacacu

SEQ ID NO: 2966010 - RNA, 19 nt, Artificial Sequence
  Description of Artificial Sequence: Synthetic oligonucleotide
gucggcacagacggagcuu

SEQ ID NO: 2966011 - RNA, 19 nt, Artificial Sequence
  Description of Artificial Sequence: Synthetic oligonucleotide
cguacgucacguucacagu

SEQ ID NO: 2966012 - RNA, 19 nt, Artificial Sequence
  Description of Artificial Sequence: Synthetic oligonucleotide
cagacccacagugcucuuu

SEQ ID NO: 2966013 - RNA, 19 nt, Artificial Sequence
  Description of Artificial Sequence: Synthetic oligonucleotide
ccacggaaggcaccaacuu

SEQ ID NO: 2966014 - RNA, 19 nt, Artificial Sequence
  Description of Artificial Sequence: Synthetic oligonucleotide
cggaaggcaccaacuugaa

SEQ ID NO: 2966015 - RNA, 19 nt, Artificial Sequence
  Description of Artificial Sequence: Synthetic oligonucleotide
cguggaggacagacccaca

SEQ ID NO: 2966016 - RNA, 19 nt, Artificial Sequence
  Description of Artificial Sequence: Synthetic oligonucleotide
cuggguugcgaaggcuguu

SEQ ID NO: 2966017 - RNA, 19 nt, Artificial Sequence
  Description of Artificial Sequence: Synthetic oligonucleotide
cuggcagauccugguccau

SEQ ID NO: 2966018 - RNA, 19 nt, Artificial Sequence
  Description of Artificial Sequence: Synthetic oligonucleotide
cggcacagacggagcuugu

SEQ ID NO: 2966019 - RNA, 19 nt, Artificial Sequence
  Description of Artificial Sequence: Synthetic oligonucleotide
cguucacaguugcguccau

SEQ ID NO: 2966020 - RNA, 19 nt, Artificial Sequence
  Description of Artificial Sequence: Synthetic oligonucleotide
ccccaggaugcaggucccu

SEQ ID NO: 2966021 - RNA, 19 nt, Artificial Sequence
  Description of Artificial Sequence: Synthetic oligonucleotide
aauacuuccacccauuucc

SEQ ID NO: 2966022 - RNA, 19 nt, Artificial Sequence
  Description of Artificial Sequence: Synthetic oligonucleotide
uacaauagcaaccuuaaag

SEQ ID NO: 2966023 - RNA, 19 nt, Artificial Sequence
  Description of Artificial Sequence: Synthetic oligonucleotide
uuuacugaagacaucacag

SEQ ID NO: 2966024 - RNA, 19 nt, Artificial Sequence
  Description of Artificial Sequence: Synthetic oligonucleotide
ucugcuucuaucuuggagg

SEQ ID NO: 2966025 - RNA, 19 nt, Artificial Sequence
  Description of Artificial Sequence: Synthetic oligonucleotide
uuugaaaucuucuagaguu

SEQ ID NO: 2966026 - RNA, 19 nt, Artificial Sequence
  Description of Artificial Sequence: Synthetic oligonucleotide
cugaauaccuccaacaccg

SEQ ID NO: 2966027 - RNA, 19 nt, Artificial Sequence
  Description of Artificial Sequence: Synthetic oligonucleotide
aaauccacgauagugcacg

SEQ ID NO: 2966028 - RNA, 19 nt, Artificial Sequence
  Description of Artificial Sequence: Synthetic oligonucleotide
acaauagcaaccuuaaagu

SEQ ID NO: 2966029 - RNA, 19 nt, Artificial Sequence
  Description of Artificial Sequence: Synthetic oligonucleotide
acagcauuacaauagcaac

SEQ ID NO: 2966030 - RNA, 19 nt, Artificial Sequence
  Description of Artificial Sequence: Synthetic oligonucleotide
acacgcuuuaaauacuucc

SEQ ID NO: 2966031 - RNA, 19 nt, Artificial Sequence
  Description of Artificial Sequence: Synthetic oligonucleotide
ugauauaccagaacuguug

SEQ ID NO: 2966032 - RNA, 19 nt, Artificial Sequence
  Description of Artificial Sequence: Synthetic oligonucleotide
uuuguugucuucaucacac

SEQ ID NO: 2966033 - RNA, 19 nt, Artificial Sequence
  Description of Artificial Sequence: Synthetic oligonucleotide
uauccaaacagcauuacaa

SEQ ID NO: 2966034 - RNA, 19 nt, Artificial Sequence
  Description of Artificial Sequence: Synthetic oligonucleotide
gauauaccagaacuguugg

SEQ ID NO: 2966035 - RNA, 19 nt, Artificial Sequence
  Description of Artificial Sequence: Synthetic oligonucleotide
uccacgauagugcacgucg

SEQ ID NO: 2966036 - RNA, 19 nt, Artificial Sequence
  Description of Artificial Sequence: Synthetic oligonucleotide
auuuccugcguuccgaggc

SEQ ID NO: 2966037 - RNA, 19 nt, Artificial Sequence
  Description of Artificial Sequence: Synthetic oligonucleotide
aaccuuaaaguccucucgg

SEQ ID NO: 2966038 - RNA, 19 nt, Artificial Sequence
  Description of Artificial Sequence: Synthetic oligonucleotide
aaagcugugaagaggugcc

SEQ ID NO: 2966039 - RNA, 19 nt, Artificial Sequence
  Description of Artificial Sequence: Synthetic oligonucleotide
aaccccucaagugauauac

SEQ ID NO: 2966040 - RNA, 19 nt, Artificial Sequence
  Description of Artificial Sequence: Synthetic oligonucleotide
aaauacuuccacccauuuc

SEQ ID NO: 2966041 - RNA, 19 nt, Artificial Sequence
  Description of Artificial Sequence: Synthetic oligonucleotide
acuuccacccauuuccugc

SEQ ID NO: 2966042 - RNA, 19 nt, Artificial Sequence
  Description of Artificial Sequence: Synthetic oligonucleotide
uuuguauccaaacagcauu

SEQ ID NO: 2966043 - RNA, 19 nt, Artificial Sequence
  Description of Artificial Sequence: Synthetic oligonucleotide
  modified_base (5)..(5): a, c, u, g, unknown or other
ucugnuucccugaauaccu

SEQ ID NO: 2966044 - RNA, 19 nt, Artificial Sequence
  Description of Artificial Sequence: Synthetic oligonucleotide
aucucauuccgauagagcu

SEQ ID NO: 2966045 - RNA, 19 nt, Artificial Sequence
  Description of Artificial Sequence: Synthetic oligonucleotide
cuuuugaaaucuucuagag

SEQ ID NO: 2966046 - RNA, 19 nt, Artificial Sequence
  Description of Artificial Sequence: Synthetic oligonucleotide
gaagacaucacagaaucug

SEQ ID NO: 2966047 - RNA, 19 nt, Artificial Sequence
  Description of Artificial Sequence: Synthetic oligonucleotide
aagacaucacagaaucugc

SEQ ID NO: 2966048 - RNA, 19 nt, Artificial Sequence
  Description of Artificial Sequence: Synthetic oligonucleotide
uuuaaauacuuccacccau

SEQ ID NO: 2966049 - RNA, 19 nt, Artificial Sequence
  Description of Artificial Sequence: Synthetic oligonucleotide
caucacacgcuuuaaauac

SEQ ID NO: 2966050 - RNA, 19 nt, Artificial Sequence
  Description of Artificial Sequence: Synthetic oligonucleotide
gaacuguugggauuuacug

SEQ ID NO: 2966051 - RNA, 19 nt, Artificial Sequence
  Description of Artificial Sequence: Synthetic oligonucleotide
acaucacagaaucugcuuc

SEQ ID NO: 2966052 - RNA, 19 nt, Artificial Sequence
  Description of Artificial Sequence: Synthetic oligonucleotide
aaaucuucuagaguuaaaa

SEQ ID NO: 2966053 - RNA, 19 nt, Artificial Sequence
  Description of Artificial Sequence: Synthetic oligonucleotide
uauaccagaacuguuggga

SEQ ID NO: 2966054 - RNA, 19 nt, Artificial Sequence
  Description of Artificial Sequence: Synthetic oligonucleotide
uuuugaaaucuucuagagu

SEQ ID NO: 2966055 - RNA, 19 nt, Artificial Sequence
  Description of Artificial Sequence: Synthetic oligonucleotide
uguugucuucaucacacgc

SEQ ID NO: 2966056 - RNA, 19 nt, Artificial Sequence
  Description of Artificial Sequence: Synthetic oligonucleotide
aacuguugggauuuacuga

SEQ ID NO: 2966057 - RNA, 19 nt, Artificial Sequence
  Description of Artificial Sequence: Synthetic oligonucleotide
ugggauuuacugaagacau

SEQ ID NO: 2966058 - RNA, 19 nt, Artificial Sequence
  Description of Artificial Sequence: Synthetic oligonucleotide
cugaagacaucacagaauc

SEQ ID NO: 2966059 - RNA, 19 nt, Artificial Sequence
  Description of Artificial Sequence: Synthetic oligonucleotide
auuuacugaagacaucaca

SEQ ID NO: 2966060 - RNA, 19 nt, Artificial Sequence
  Description of Artificial Sequence: Synthetic oligonucleotide
aacugacgggaacaucgcc

SEQ ID NO: 2966061 - RNA, 19 nt, Artificial Sequence
  Description of Artificial Sequence: Synthetic oligonucleotide
agcugugcauccuucuucc

SEQ ID NO: 2966062 - RNA, 19 nt, Artificial Sequence
  Description of Artificial Sequence: Synthetic oligonucleotide
ucuuggaggguuuguaucc

SEQ ID NO: 2966063 - RNA, 19 nt, Artificial Sequence
  Description of Artificial Sequence: Synthetic oligonucleotide
acagaaucugcuucuaucu

SEQ ID NO: 2966064 - RNA, 19 nt, Artificial Sequence
  Description of Artificial Sequence: Synthetic oligonucleotide
uuaaaguccucucggcuca

SEQ ID NO: 2966065 - RNA, 19 nt, Artificial Sequence
  Description of Artificial Sequence: Synthetic oligonucleotide
  modified_base (6)..(6): a, c, u, g, unknown or other
aucugnuucccugaauacc

SEQ ID NO: 2966066 - RNA, 19 nt, Artificial Sequence
  Description of Artificial Sequence: Synthetic oligonucleotide
  modified_base (8)..(8): a, c, u, g, unknown or other
ugaucugnuucccugaaua

SEQ ID NO: 2966067 - RNA, 19 nt, Artificial Sequence
  Description of Artificial Sequence: Synthetic oligonucleotide
agaaucugcuucuaucuug

SEQ ID NO: 2966068 - RNA, 19 nt, Artificial Sequence
  Description of Artificial Sequence: Synthetic oligonucleotide
cagcauuacaauagcaacc

SEQ ID NO: 2966069 - RNA, 19 nt, Artificial Sequence
  Description of Artificial Sequence: Synthetic oligonucleotide
gcuuuaaauacuuccaccc

SEQ ID NO: 2966070 - RNA, 19 nt, Artificial Sequence
  Description of Artificial Sequence: Synthetic oligonucleotide
acgcuuuaaauacuuccac

SEQ ID NO: 2966071 - RNA, 19 nt, Artificial Sequence
  Description of Artificial Sequence: Synthetic oligonucleotide
gaaucugcuucuaucuugg

SEQ ID NO: 2966072 - RNA, 19 nt, Artificial Sequence
  Description of Artificial Sequence: Synthetic oligonucleotide
uguugggauuuacugaaga

SEQ ID NO: 2966073 - RNA, 19 nt, Artificial Sequence
  Description of Artificial Sequence: Synthetic oligonucleotide
uccaacaccguucucucug

SEQ ID NO: 2966074 - RNA, 19 nt, Artificial Sequence
  Description of Artificial Sequence: Synthetic oligonucleotide
accuuaaaguccucucggc

SEQ ID NO: 2966075 - RNA, 19 nt, Artificial Sequence
  Description of Artificial Sequence: Synthetic oligonucleotide
ucaagugauauaccagaac

SEQ ID NO: 2966076 - RNA, 19 nt, Artificial Sequence
  Description of Artificial Sequence: Synthetic oligonucleotide
uucaucacacgcuuuaaau

SEQ ID NO: 2966077 - RNA, 19 nt, Artificial Sequence
  Description of Artificial Sequence: Synthetic oligonucleotide
cucucuggcagcuugggag

SEQ ID NO: 2966078 - RNA, 19 nt, Artificial Sequence
  Description of Artificial Sequence: Synthetic oligonucleotide
gaagaggugccuuaucuca

SEQ ID NO: 2966079 - RNA, 19 nt, Artificial Sequence
  Description of Artificial Sequence: Synthetic oligonucleotide
aucuuggaggguuuguauc

SEQ ID NO: 2966080 - RNA, 19 nt, Artificial Sequence
  Description of Artificial Sequence: Synthetic oligonucleotide
uugggauuuacugaagaca

SEQ ID NO: 2966081 - RNA, 19 nt, Artificial Sequence
  Description of Artificial Sequence: Synthetic oligonucleotide
uaucucauuccgauagagc

SEQ ID NO: 2966082 - RNA, 19 nt, Artificial Sequence
  Description of Artificial Sequence: Synthetic oligonucleotide
gauagugcacgucgaaagc

SEQ ID NO: 2966083 - RNA, 19 nt, Artificial Sequence
  Description of Artificial Sequence: Synthetic oligonucleotide
  modified_base (7)..(7): a, c, u, g, unknown or other
gaucugnuucccugaauac

SEQ ID NO: 2966084 - RNA, 19 nt, Artificial Sequence
  Description of Artificial Sequence: Synthetic oligonucleotide
uuaucucauuccgauagag

SEQ ID NO: 2966085 - RNA, 19 nt, Artificial Sequence
  Description of Artificial Sequence: Synthetic oligonucleotide
uccuucuuccucuuuacga

SEQ ID NO: 2966086 - RNA, 19 nt, Artificial Sequence
  Description of Artificial Sequence: Synthetic oligonucleotide
agugauauaccagaacugu

SEQ ID NO: 2966087 - RNA, 19 nt, Artificial Sequence
  Description of Artificial Sequence: Synthetic oligonucleotide
caaccuuaaaguccucucg

SEQ ID NO: 2966088 - RNA, 19 nt, Artificial Sequence
  Description of Artificial Sequence: Synthetic oligonucleotide
aacagcauuacaauagcaa

SEQ ID NO: 2966089 - RNA, 19 nt, Artificial Sequence
  Description of Artificial Sequence: Synthetic oligonucleotide
cuuaaaguccucucggcuc

SEQ ID NO: 2966090 - RNA, 19 nt, Artificial Sequence
  Description of Artificial Sequence: Synthetic oligonucleotide
gaaagcugugaagaggugc

SEQ ID NO: 2966091 - RNA, 19 nt, Artificial Sequence
  Description of Artificial Sequence: Synthetic oligonucleotide
uuacugaagacaucacaga

SEQ ID NO: 2966092 - RNA, 19 nt, Artificial Sequence
  Description of Artificial Sequence: Synthetic oligonucleotide
ugugcauccuucuuccucu

SEQ ID NO: 2966093 - RNA, 19 nt, Artificial Sequence
  Description of Artificial Sequence: Synthetic oligonucleotide
ccaaacagcauuacaauag

SEQ ID NO: 2966094 - RNA, 19 nt, Artificial Sequence
  Description of Artificial Sequence: Synthetic oligonucleotide
ccaacugacgggaacaucg

SEQ ID NO: 2966095 - RNA, 19 nt, Artificial Sequence
  Description of Artificial Sequence: Synthetic oligonucleotide
auuccgauagagcugugca

SEQ ID NO: 2966096 - RNA, 19 nt, Artificial Sequence
  Description of Artificial Sequence: Synthetic oligonucleotide
ucucauuccgauagagcug

SEQ ID NO: 2966097 - RNA, 19 nt, Artificial Sequence
  Description of Artificial Sequence: Synthetic oligonucleotide
aagugauauaccagaacug

SEQ ID NO: 2966098 - RNA, 19 nt, Artificial Sequence
  Description of Artificial Sequence: Synthetic oligonucleotide
agcauuacaauagcaaccu

SEQ ID NO: 2966099 - RNA, 19 nt, Artificial Sequence
  Description of Artificial Sequence: Synthetic oligonucleotide
aucugcuucuaucuuggag

SEQ ID NO: 2966100 - RNA, 19 nt, Artificial Sequence
  Description of Artificial Sequence: Synthetic oligonucleotide
acaccguucucucuggcag

SEQ ID NO: 2966101 - RNA, 19 nt, Artificial Sequence
  Description of Artificial Sequence: Synthetic oligonucleotide
uuaaauacuuccacccauu

SEQ ID NO: 2966102 - RNA, 19 nt, Artificial Sequence
  Description of Artificial Sequence: Synthetic oligonucleotide
ucaucacacgcuuuaaaua

SEQ ID NO: 2966103 - RNA, 19 nt, Artificial Sequence
  Description of Artificial Sequence: Synthetic oligonucleotide
agccacucgacugaaugcc

SEQ ID NO: 2966104 - RNA, 19 nt, Artificial Sequence
  Description of Artificial Sequence: Synthetic oligonucleotide
aaaauccacgauagugcac

SEQ ID NO: 2966105 - RNA, 19 nt, Artificial Sequence
  Description of Artificial Sequence: Synthetic oligonucleotide
ggugccuuaucucauuccg

SEQ ID NO: 2966106 - RNA, 19 nt, Artificial Sequence
  Description of Artificial Sequence: Synthetic oligonucleotide
auagcaaccuuaaaguccu

SEQ ID NO: 2966107 - RNA, 19 nt, Artificial Sequence
  Description of Artificial Sequence: Synthetic oligonucleotide
ucccugaauaccuccaaca

SEQ ID NO: 2966108 - RNA, 19 nt, Artificial Sequence
  Description of Artificial Sequence: Synthetic oligonucleotide
  modified_base (3)..(3): a, c, u, g, unknown or other
ugnuucccugaauaccucc

SEQ ID NO: 2966109 - RNA, 19 nt, Artificial Sequence
  Description of Artificial Sequence: Synthetic oligonucleotide
  modified_base (11)..(11): a, c, u, g, unknown or other
ucuugaucugnuucccuga

SEQ ID NO: 2966110 - RNA, 19 nt, Artificial Sequence
  Description of Artificial Sequence: Synthetic oligonucleotide
ugcccuuuugaaaucuucu

SEQ ID NO: 2966111 - RNA, 19 nt, Artificial Sequence
  Description of Artificial Sequence: Synthetic oligonucleotide
uuuccugcguuccgaggcg

SEQ ID NO: 2966112 - RNA, 19 nt, Artificial Sequence
  Description of Artificial Sequence: Synthetic oligonucleotide
guuccugccaacugacggg

SEQ ID NO: 2966113 - RNA, 19 nt, Artificial Sequence
  Description of Artificial Sequence: Synthetic oligonucleotide
ccuuaucucauuccgauag

SEQ ID NO: 2966114 - RNA, 19 nt, Artificial Sequence
  Description of Artificial Sequence: Synthetic oligonucleotide
guccucucggcucaagugg

SEQ ID NO: 2966115 - RNA, 19 nt, Artificial Sequence
  Description of Artificial Sequence: Synthetic oligonucleotide
caagugauauaccagaacu

SEQ ID NO: 2966116 - RNA, 19 nt, Artificial Sequence
  Description of Artificial Sequence: Synthetic oligonucleotide
auuacaauagcaaccuuaa

SEQ ID NO: 2966117 - RNA, 19 nt, Artificial Sequence
  Description of Artificial Sequence: Synthetic oligonucleotide
cucuuuacgacauccaaaa

SEQ ID NO: 2966118 - RNA, 19 nt, Artificial Sequence
  Description of Artificial Sequence: Synthetic oligonucleotide
uccaaacagcauuacaaua

SEQ ID NO: 2966119 - RNA, 19 nt, Artificial Sequence
  Description of Artificial Sequence: Synthetic oligonucleotide
cacagaaucugcuucuauc

SEQ ID NO: 2966120 - RNA, 19 nt, Artificial Sequence
  Description of Artificial Sequence: Synthetic oligonucleotide
uuguauccaaacagcauua

SEQ ID NO: 2966121 - RNA, 19 nt, Artificial Sequence
  Description of Artificial Sequence: Synthetic oligonucleotide
gguuccugccaacugacgg

SEQ ID NO: 2966122 - RNA, 19 nt, Artificial Sequence
  Description of Artificial Sequence: Synthetic oligonucleotide
cauuacaauagcaaccuua

SEQ ID NO: 2966123 - RNA, 19 nt, Artificial Sequence
  Description of Artificial Sequence: Synthetic oligonucleotide
acugaaugcccuuuugaaa

SEQ ID NO: 2966124 - RNA, 19 nt, Artificial Sequence
  Description of Artificial Sequence: Synthetic oligonucleotide
aggugccuuaucucauucc

SEQ ID NO: 2966125 - RNA, 19 nt, Artificial Sequence
  Description of Artificial Sequence: Synthetic oligonucleotide
cugcuucuaucuuggaggg

SEQ ID NO: 2966126 - RNA, 19 nt, Artificial Sequence
  Description of Artificial Sequence: Synthetic oligonucleotide
guugggauuuacugaagac

SEQ ID NO: 2966127 - RNA, 19 nt, Artificial Sequence
  Description of Artificial Sequence: Synthetic oligonucleotide
cuugggagccacucgacug

SEQ ID NO: 2966128 - RNA, 19 nt, Artificial Sequence
  Description of Artificial Sequence: Synthetic oligonucleotide
ugaaaucuucuagaguuaa

SEQ ID NO: 2966129 - RNA, 19 nt, Artificial Sequence
  Description of Artificial Sequence: Synthetic oligonucleotide
aacaccguucucucuggca

SEQ ID NO: 2966130 - RNA, 19 nt, Artificial Sequence
  Description of Artificial Sequence: Synthetic oligonucleotide
uagugcacgucgaaagcug

SEQ ID NO: 2966131 - RNA, 19 nt, Artificial Sequence
  Description of Artificial Sequence: Synthetic oligonucleotide
gucgaaagcugugaagagg

SEQ ID NO: 2966132 - RNA, 19 nt, Artificial Sequence
  Description of Artificial Sequence: Synthetic oligonucleotide
uccucuuuacgacauccaa

SEQ ID NO: 2966133 - RNA, 19 nt, Artificial Sequence
  Description of Artificial Sequence: Synthetic oligonucleotide
cuuccucuuuacgacaucc

SEQ ID NO: 2966134 - RNA, 19 nt, Artificial Sequence
  Description of Artificial Sequence: Synthetic oligonucleotide
uuguugucuucaucacacg

SEQ ID NO: 2966135 - RNA, 19 nt, Artificial Sequence
  Description of Artificial Sequence: Synthetic oligonucleotide
auccaaacagcauuacaau

SEQ ID NO: 2966136 - RNA, 19 nt, Artificial Sequence
  Description of Artificial Sequence: Synthetic oligonucleotide
uaaauacuuccacccauuu

SEQ ID NO: 2966137 - RNA, 19 nt, Artificial Sequence
  Description of Artificial Sequence: Synthetic oligonucleotide
ugaagaggugccuuaucuc

SEQ ID NO: 2966138 - RNA, 19 nt, Artificial Sequence
  Description of Artificial Sequence: Synthetic oligonucleotide
ugaagacaucacagaaucu

SEQ ID NO: 2966139 - RNA, 19 nt, Artificial Sequence
  Description of Artificial Sequence: Synthetic oligonucleotide
cuuccacccauuuccugcg

SEQ ID NO: 2966140 - RNA, 19 nt, Artificial Sequence
  Description of Artificial Sequence: Synthetic oligonucleotide
acgucgaaagcugugaaga

SEQ ID NO: 2966141 - RNA, 19 nt, Artificial Sequence
  Description of Artificial Sequence: Synthetic oligonucleotide
ggauuuacugaagacauca

SEQ ID NO: 2966142 - RNA, 19 nt, Artificial Sequence
  Description of Artificial Sequence: Synthetic oligonucleotide
aaacagcauuacaauagca

SEQ ID NO: 2966143 - RNA, 19 nt, Artificial Sequence
  Description of Artificial Sequence: Synthetic oligonucleotide
gacugaaugcccuuuugaa

SEQ ID NO: 2966144 - RNA, 19 nt, Artificial Sequence
  Description of Artificial Sequence: Synthetic oligonucleotide
aaaaccccucaagugauau

SEQ ID NO: 2966145 - RNA, 19 nt, Artificial Sequence
  Description of Artificial Sequence: Synthetic oligonucleotide
ugccuuaucucauuccgau

SEQ ID NO: 2966146 - RNA, 19 nt, Artificial Sequence
  Description of Artificial Sequence: Synthetic oligonucleotide
uugaaaucuucuagaguua

SEQ ID NO: 2966147 - RNA, 19 nt, Artificial Sequence
  Description of Artificial Sequence: Synthetic oligonucleotide
cuuuaaauacuuccaccca

SEQ ID NO: 2966148 - RNA, 19 nt, Artificial Sequence
  Description of Artificial Sequence: Synthetic oligonucleotide
aguccucucggcucaagug

SEQ ID NO: 2966149 - RNA, 19 nt, Artificial Sequence
  Description of Artificial Sequence: Synthetic oligonucleotide
ucucuggcagcuugggagc

SEQ ID NO: 2966150 - RNA, 19 nt, Artificial Sequence
  Description of Artificial Sequence: Synthetic oligonucleotide
uaucuuggaggguuuguau

SEQ ID NO: 2966151 - RNA, 19 nt, Artificial Sequence
  Description of Artificial Sequence: Synthetic oligonucleotide
auaccuccaacaccguucu

SEQ ID NO: 2966152 - RNA, 19 nt, Artificial Sequence
  Description of Artificial Sequence: Synthetic oligonucleotide
uccgauagagcugugcauc

SEQ ID NO: 2966153 - RNA, 19 nt, Artificial Sequence
  Description of Artificial Sequence: Synthetic oligonucleotide
uugggagccacucgacuga

SEQ ID NO: 2966154 - RNA, 19 nt, Artificial Sequence
  Description of Artificial Sequence: Synthetic oligonucleotide
cacgcuuuaaauacuucca

SEQ ID NO: 2966155 - RNA, 19 nt, Artificial Sequence
  Description of Artificial Sequence: Synthetic oligonucleotide
aaguccucucggcucaagu

SEQ ID NO: 2966156 - RNA, 19 nt, Artificial Sequence
  Description of Artificial Sequence: Synthetic oligonucleotide
gcucaaguggccuuuguug

SEQ ID NO: 2966157 - RNA, 19 nt, Artificial Sequence
  Description of Artificial Sequence: Synthetic oligonucleotide
gagccacucgacugaaugc

SEQ ID NO: 2966158 - RNA, 19 nt, Artificial Sequence
  Description of Artificial Sequence: Synthetic oligonucleotide
ucacacgcuuuaaauacuu

SEQ ID NO: 2966159 - RNA, 19 nt, Artificial Sequence
  Description of Artificial Sequence: Synthetic oligonucleotide
uccucucggcucaaguggc

SEQ ID NO: 2966160 - RNA, 19 nt, Artificial Sequence
  Description of Artificial Sequence: Synthetic oligonucleotide
uuacaauagcaaccuuaaa

SEQ ID NO: 2966161 - RNA, 19 nt, Artificial Sequence
  Description of Artificial Sequence: Synthetic oligonucleotide
uucuuccucuuuacgacau

SEQ ID NO: 2966162 - RNA, 19 nt, Artificial Sequence
  Description of Artificial Sequence: Synthetic oligonucleotide
guauccaaacagcauuaca

SEQ ID NO: 2966163 - RNA, 19 nt, Artificial Sequence
  Description of Artificial Sequence: Synthetic oligonucleotide
auagugcacgucgaaagcu

SEQ ID NO: 2966164 - RNA, 19 nt, Artificial Sequence
  Description of Artificial Sequence: Synthetic oligonucleotide
gaggcgcuggcuucgcagg

SEQ ID NO: 2966165 - RNA, 19 nt, Artificial Sequence
  Description of Artificial Sequence: Synthetic oligonucleotide
uucccugaauaccuccaac

SEQ ID NO: 2966166 - RNA, 19 nt, Artificial Sequence
  Description of Artificial Sequence: Synthetic oligonucleotide
auaccagaacuguugggau

SEQ ID NO: 2966167 - RNA, 19 nt, Artificial Sequence
  Description of Artificial Sequence: Synthetic oligonucleotide
ggagccacucgacugaaug

SEQ ID NO: 2966168 - RNA, 19 nt, Artificial Sequence
  Description of Artificial Sequence: Synthetic oligonucleotide
cugacgggaacaucgccac

SEQ ID NO: 2966169 - RNA, 19 nt, Artificial Sequence
  Description of Artificial Sequence: Synthetic oligonucleotide
gccuuuguugucuucauca

SEQ ID NO: 2966170 - RNA, 19 nt, Artificial Sequence
  Description of Artificial Sequence: Synthetic oligonucleotide
accuccaacaccguucucu

SEQ ID NO: 2966171 - RNA, 19 nt, Artificial Sequence
  Description of Artificial Sequence: Synthetic oligonucleotide
ugaaugcccuuuugaaauc

SEQ ID NO: 2966172 - RNA, 19 nt, Artificial Sequence
  Description of Artificial Sequence: Synthetic oligonucleotide
agaacuguugggauuuacu

SEQ ID NO: 2966173 - RNA, 19 nt, Artificial Sequence
  Description of Artificial Sequence: Synthetic oligonucleotide
uguauccaaacagcauuac

SEQ ID NO: 2966174 - RNA, 19 nt, Artificial Sequence
  Description of Artificial Sequence: Synthetic oligonucleotide
cauuuccugcguuccgagg

SEQ ID NO: 2966175 - RNA, 19 nt, Artificial Sequence
  Description of Artificial Sequence: Synthetic oligonucleotide
cacgucgaaagcugugaag

SEQ ID NO: 2966176 - RNA, 19 nt, Artificial Sequence
  Description of Artificial Sequence: Synthetic oligonucleotide
ugguuccugccaacugacg

SEQ ID NO: 2966177 - RNA, 19 nt, Artificial Sequence
  Description of Artificial Sequence: Synthetic oligonucleotide
ugugaagaggugccuuauc

SEQ ID NO: 2966178 - RNA, 19 nt, Artificial Sequence
  Description of Artificial Sequence: Synthetic oligonucleotide
aggcccgcggccugguucc

SEQ ID NO: 2966179 - RNA, 19 nt, Artificial Sequence
  Description of Artificial Sequence: Synthetic oligonucleotide
ugcacgucgaaagcuguga

SEQ ID NO: 2966180 - RNA, 19 nt, Artificial Sequence
  Description of Artificial Sequence: Synthetic oligonucleotide
caacugacgggaacaucgc

SEQ ID NO: 2966181 - RNA, 19 nt, Artificial Sequence
  Description of Artificial Sequence: Synthetic oligonucleotide
gagcugugcauccuucuuc

SEQ ID NO: 2966182 - RNA, 19 nt, Artificial Sequence
  Description of Artificial Sequence: Synthetic oligonucleotide
cccuuuugaaaucuucuag

SEQ ID NO: 2966183 - RNA, 19 nt, Artificial Sequence
  Description of Artificial Sequence: Synthetic oligonucleotide
ccugaauaccuccaacacc

SEQ ID NO: 2966184 - RNA, 19 nt, Artificial Sequence
  Description of Artificial Sequence: Synthetic oligonucleotide
uucucucuggcagcuuggg

SEQ ID NO: 2966185 - RNA, 19 nt, Artificial Sequence
  Description of Artificial Sequence: Synthetic oligonucleotide
auagagcugugcauccuuc

SEQ ID NO: 2966186 - RNA, 19 nt, Artificial Sequence
  Description of Artificial Sequence: Synthetic oligonucleotide
aauccacgauagugcacgu

SEQ ID NO: 2966187 - RNA, 19 nt, Artificial Sequence
  Description of Artificial Sequence: Synthetic oligonucleotide
ucuaucuuggaggguuugu

SEQ ID NO: 2966188 - RNA, 19 nt, Artificial Sequence
  Description of Artificial Sequence: Synthetic oligonucleotide
acugacgggaacaucgcca

SEQ ID NO: 2966189 - RNA, 19 nt, Artificial Sequence
  Description of Artificial Sequence: Synthetic oligonucleotide
aaucugcuucuaucuugga

SEQ ID NO: 2966190 - RNA, 19 nt, Artificial Sequence
  Description of Artificial Sequence: Synthetic oligonucleotide
  modified_base (9)..(9): a, c, u, g, unknown or other
uugaucugnuucccugaau

SEQ ID NO: 2966191 - RNA, 19 nt, Artificial Sequence
  Description of Artificial Sequence: Synthetic oligonucleotide
cauuccgauagagcugugc

SEQ ID NO: 2966192 - RNA, 19 nt, Artificial Sequence
  Description of Artificial Sequence: Synthetic oligonucleotide
uagagcugugcauccuucu

SEQ ID NO: 2966193 - RNA, 19 nt, Artificial Sequence
  Description of Artificial Sequence: Synthetic oligonucleotide
gugaagaggugccuuaucu

SEQ ID NO: 2966194 - RNA, 19 nt, Artificial Sequence
  Description of Artificial Sequence: Synthetic oligonucleotide
acugaagacaucacagaau

SEQ ID NO: 2966195 - RNA, 19 nt, Artificial Sequence
  Description of Artificial Sequence: Synthetic oligonucleotide
cugguuccugccaacugac

SEQ ID NO: 2966196 - RNA, 19 nt, Artificial Sequence
  Description of Artificial Sequence: Synthetic oligonucleotide
gacgggaacaucgccacca

SEQ ID NO: 2966197 - RNA, 19 nt, Artificial Sequence
  Description of Artificial Sequence: Synthetic oligonucleotide
ucaaguggccuuuguuguc

SEQ ID NO: 2966198 - RNA, 19 nt, Artificial Sequence
  Description of Artificial Sequence: Synthetic oligonucleotide
uggaggguuuguauccaaa

SEQ ID NO: 2966199 - RNA, 19 nt, Artificial Sequence
  Description of Artificial Sequence: Synthetic oligonucleotide
  modified_base (2)..(2): a, c, u, g, unknown or other
gnuucccugaauaccucca

SEQ ID NO: 2966200 - RNA, 19 nt, Artificial Sequence
  Description of Artificial Sequence: Synthetic oligonucleotide
uacuuccacccauuuccug

SEQ ID NO: 2966201 - RNA, 19 nt, Artificial Sequence
  Description of Artificial Sequence: Synthetic oligonucleotide
ccuucuuccucuuuacgac

SEQ ID NO: 2966202 - RNA, 19 nt, Artificial Sequence
  Description of Artificial Sequence: Synthetic oligonucleotide
ucucucuggcagcuuggga

SEQ ID NO: 2966203 - RNA, 19 nt, Artificial Sequence
  Description of Artificial Sequence: Synthetic oligonucleotide
ccuuuugaaaucuucuaga

SEQ ID NO: 2966204 - RNA, 19 nt, Artificial Sequence
  Description of Artificial Sequence: Synthetic oligonucleotide
  modified_base (10)..(10): a, c, u, g, unknown or other
cuugaucugnuucccugaa

SEQ ID NO: 2966205 - RNA, 19 nt, Artificial Sequence
  Description of Artificial Sequence: Synthetic oligonucleotide
cugugcauccuucuuccuc

SEQ ID NO: 2966206 - RNA, 19 nt, Artificial Sequence
  Description of Artificial Sequence: Synthetic oligonucleotide
acccauuuccugcguuccg

SEQ ID NO: 2966207 - RNA, 19 nt, Artificial Sequence
  Description of Artificial Sequence: Synthetic oligonucleotide
uuccgauagagcugugcau

SEQ ID NO: 2966208 - RNA, 19 nt, Artificial Sequence
  Description of Artificial Sequence: Synthetic oligonucleotide
gguuuguauccaaacagca

SEQ ID NO: 2966209 - RNA, 19 nt, Artificial Sequence
  Description of Artificial Sequence: Synthetic oligonucleotide
augcccuuuugaaaucuuc

SEQ ID NO: 2966210 - RNA, 19 nt, Artificial Sequence
  Description of Artificial Sequence: Synthetic oligonucleotide
ugaauaccuccaacaccgu

SEQ ID NO: 2966211 - RNA, 19 nt, Artificial Sequence
  Description of Artificial Sequence: Synthetic oligonucleotide
uucuaucuuggaggguuug

SEQ ID NO: 2966212 - RNA, 19 nt, Artificial Sequence
  Description of Artificial Sequence: Synthetic oligonucleotide
agacaucacagaaucugcu

SEQ ID NO: 2966213 - RNA, 19 nt, Artificial Sequence
  Description of Artificial Sequence: Synthetic oligonucleotide
ggguuuguauccaaacagc

SEQ ID NO: 2966214 - RNA, 19 nt, Artificial Sequence
  Description of Artificial Sequence: Synthetic oligonucleotide
agcaaccuuaaaguccucu

SEQ ID NO: 2966215 - RNA, 19 nt, Artificial Sequence
  Description of Artificial Sequence: Synthetic oligonucleotide
cucaagugauauaccagaa

SEQ ID NO: 2966216 - RNA, 19 nt, Artificial Sequence
  Description of Artificial Sequence: Synthetic oligonucleotide
cgauagugcacgucgaaag

SEQ ID NO: 2966217 - RNA, 19 nt, Artificial Sequence
  Description of Artificial Sequence: Synthetic oligonucleotide
aguggccuuuguugucuuc

SEQ ID NO: 2966218 - RNA, 19 nt, Artificial Sequence
  Description of Artificial Sequence: Synthetic oligonucleotide
  modified_base (4)..(4): a, c, u, g, unknown or other
cugnuucccugaauaccuc

SEQ ID NO: 2966219 - RNA, 19 nt, Artificial Sequence
  Description of Artificial Sequence: Synthetic oligonucleotide
cuguugggauuuacugaag

SEQ ID NO: 2966220 - RNA, 19 nt, Artificial Sequence
  Description of Artificial Sequence: Synthetic oligonucleotide
aggcgcuggcuucgcaggc

SEQ ID NO: 2966221 - RNA, 19 nt, Artificial Sequence
  Description of Artificial Sequence: Synthetic oligonucleotide
uuccugccaacugacggga

SEQ ID NO: 2966222 - RNA, 19 nt, Artificial Sequence
  Description of Artificial Sequence: Synthetic oligonucleotide
gucuucaucacacgcuuua

SEQ ID NO: 2966223 - RNA, 19 nt, Artificial Sequence
  Description of Artificial Sequence: Synthetic oligonucleotide
gggaacaucgccaccaaca

SEQ ID NO: 2966224 - RNA, 19 nt, Artificial Sequence
  Description of Artificial Sequence: Synthetic oligonucleotide
aaaccccucaagugauaua

SEQ ID NO: 2966225 - RNA, 19 nt, Artificial Sequence
  Description of Artificial Sequence: Synthetic oligonucleotide
uaccagaacuguugggauu

SEQ ID NO: 2966226 - RNA, 19 nt, Artificial Sequence
  Description of Artificial Sequence: Synthetic oligonucleotide
cacacgcuuuaaauacuuc

SEQ ID NO: 2966227 - RNA, 19 nt, Artificial Sequence
  Description of Artificial Sequence: Synthetic oligonucleotide
cucaaguggccuuuguugu

SEQ ID NO: 2966228 - RNA, 19 nt, Artificial Sequence
  Description of Artificial Sequence: Synthetic oligonucleotide
aagaggugccuuaucucau

SEQ ID NO: 2966229 - RNA, 19 nt, Artificial Sequence
  Description of Artificial Sequence: Synthetic oligonucleotide
guucucucuggcagcuugg

SEQ ID NO: 2966230 - RNA, 19 nt, Artificial Sequence
  Description of Artificial Sequence: Synthetic oligonucleotide
cuuaucucauuccgauaga

SEQ ID NO: 2966231 - RNA, 19 nt, Artificial Sequence
  Description of Artificial Sequence: Synthetic oligonucleotide
agagcugugcauccuucuu

SEQ ID NO: 2966232 - RNA, 19 nt, Artificial Sequence
  Description of Artificial Sequence: Synthetic oligonucleotide
accccucaagugauauacc

SEQ ID NO: 2966233 - RNA, 19 nt, Artificial Sequence
  Description of Artificial Sequence: Synthetic oligonucleotide
gcaaccuuaaaguccucuc

SEQ ID NO: 2966234 - RNA, 19 nt, Artificial Sequence
  Description of Artificial Sequence: Synthetic oligonucleotide
ugacgggaacaucgccacc

SEQ ID NO: 2966235 - RNA, 19 nt, Artificial Sequence
  Description of Artificial Sequence: Synthetic oligonucleotide
aucacacgcuuuaaauacu

SEQ ID NO: 2966236 - RNA, 19 nt, Artificial Sequence
  Description of Artificial Sequence: Synthetic oligonucleotide
cacccauuuccugcguucc

SEQ ID NO: 2966237 - RNA, 19 nt, Artificial Sequence
  Description of Artificial Sequence: Synthetic oligonucleotide
cuucaucacacgcuuuaaa

SEQ ID NO: 2966238 - RNA, 19 nt, Artificial Sequence
  Description of Artificial Sequence: Synthetic oligonucleotide
uuccgaggcgcuggcuucg

SEQ ID NO: 2966239 - RNA, 19 nt, Artificial Sequence
  Description of Artificial Sequence: Synthetic oligonucleotide
gacaucacagaaucugcuu

SEQ ID NO: 2966240 - RNA, 19 nt, Artificial Sequence
  Description of Artificial Sequence: Synthetic oligonucleotide
uggcuucgcaggcccgcgg

SEQ ID NO: 2966241 - RNA, 19 nt, Artificial Sequence
  Description of Artificial Sequence: Synthetic oligonucleotide
gcagcuugggagccacucg

SEQ ID NO: 2966242 - RNA, 19 nt, Artificial Sequence
  Description of Artificial Sequence: Synthetic oligonucleotide
caccguucucucuggcagc

SEQ ID NO: 2966243 - RNA, 19 nt, Artificial Sequence
  Description of Artificial Sequence: Synthetic oligonucleotide
caucacagaaucugcuucu

SEQ ID NO: 2966244 - RNA, 19 nt, Artificial Sequence
  Description of Artificial Sequence: Synthetic oligonucleotide
acgauagugcacgucgaaa

SEQ ID NO: 2966245 - RNA, 19 nt, Artificial Sequence
  Description of Artificial Sequence: Synthetic oligonucleotide
agaggugccuuaucucauu

SEQ ID NO: 2966246 - RNA, 19 nt, Artificial Sequence
  Description of Artificial Sequence: Synthetic oligonucleotide
aagcugugaagaggugccu

SEQ ID NO: 2966247 - RNA, 19 nt, Artificial Sequence
  Description of Artificial Sequence: Synthetic oligonucleotide
auccacgauagugcacguc

SEQ ID NO: 2966248 - RNA, 19 nt, Artificial Sequence
  Description of Artificial Sequence: Synthetic oligonucleotide
ugcguuccgaggcgcuggc

SEQ ID NO: 2966249 - RNA, 19 nt, Artificial Sequence
  Description of Artificial Sequence: Synthetic oligonucleotide
cccugaauaccuccaacac

SEQ ID NO: 2966250 - RNA, 19 nt, Artificial Sequence
  Description of Artificial Sequence: Synthetic oligonucleotide
ccuuuguugucuucaucac

SEQ ID NO: 2966251 - RNA, 19 nt, Artificial Sequence
  Description of Artificial Sequence: Synthetic oligonucleotide
guggccuuuguugucuuca

SEQ ID NO: 2966252 - RNA, 19 nt, Artificial Sequence
  Description of Artificial Sequence: Synthetic oligonucleotide
aaugcccuuuugaaaucuu

SEQ ID NO: 2966253 - RNA, 19 nt, Artificial Sequence
  Description of Artificial Sequence: Synthetic oligonucleotide
agcuugggagccacucgac

SEQ ID NO: 2966254 - RNA, 19 nt, Artificial Sequence
  Description of Artificial Sequence: Synthetic oligonucleotide
gaaugcccuuuugaaaucu

SEQ ID NO: 2966255 - RNA, 19 nt, Artificial Sequence
  Description of Artificial Sequence: Synthetic oligonucleotide
cucauuccgauagagcugu

SEQ ID NO: 2966256 - RNA, 19 nt, Artificial Sequence
  Description of Artificial Sequence: Synthetic oligonucleotide
uucgcaggcccgcggccug

SEQ ID NO: 2966257 - RNA, 19 nt, Artificial Sequence
  Description of Artificial Sequence: Synthetic oligonucleotide
agugcacgucgaaagcugu

SEQ ID NO: 2966258 - RNA, 19 nt, Artificial Sequence
  Description of Artificial Sequence: Synthetic oligonucleotide
caacaccguucucucuggc

SEQ ID NO: 2966259 - RNA, 19 nt, Artificial Sequence
  Description of Artificial Sequence: Synthetic oligonucleotide
cagaacuguugggauuuac

SEQ ID NO: 2966260 - RNA, 19 nt, Artificial Sequence
  Description of Artificial Sequence: Synthetic oligonucleotide
uccacccauuuccugcguu

SEQ ID NO: 2966261 - RNA, 19 nt, Artificial Sequence
  Description of Artificial Sequence: Synthetic oligonucleotide
ccgauagagcugugcaucc

SEQ ID NO: 2966262 - RNA, 19 nt, Artificial Sequence
  Description of Artificial Sequence: Synthetic oligonucleotide
cagcuugggagccacucga

SEQ ID NO: 2966263 - RNA, 19 nt, Artificial Sequence
  Description of Artificial Sequence: Synthetic oligonucleotide
guuccgaggcgcuggcuuc

SEQ ID NO: 2966264 - RNA, 19 nt, Artificial Sequence
  Description of Artificial Sequence: Synthetic oligonucleotide
aaguggccuuuguugucuu

SEQ ID NO: 2966265 - RNA, 19 nt, Artificial Sequence
  Description of Artificial Sequence: Synthetic oligonucleotide
uggccuuuguugucuucau

SEQ ID NO: 2966266 - RNA, 19 nt, Artificial Sequence
  Description of Artificial Sequence: Synthetic oligonucleotide
ucauuccgauagagcugug

SEQ ID NO: 2966267 - RNA, 19 nt, Artificial Sequence
  Description of Artificial Sequence: Synthetic oligonucleotide
cugcguuccgaggcgcugg

SEQ ID NO: 2966268 - RNA, 19 nt, Artificial Sequence
  Description of Artificial Sequence: Synthetic oligonucleotide
guuuguauccaaacagcau

SEQ ID NO: 2966269 - RNA, 19 nt, Artificial Sequence
  Description of Artificial Sequence: Synthetic oligonucleotide
ccaacaccguucucucugg

SEQ ID NO: 2966270 - RNA, 19 nt, Artificial Sequence
  Description of Artificial Sequence: Synthetic oligonucleotide
uccugcguuccgaggcgcu

SEQ ID NO: 2966271 - RNA, 19 nt, Artificial Sequence
  Description of Artificial Sequence: Synthetic oligonucleotide
cuaucuuggaggguuugua

SEQ ID NO: 2966272 - RNA, 19 nt, Artificial Sequence
  Description of Artificial Sequence: Synthetic oligonucleotide
uuccacccauuuccugcgu

SEQ ID NO: 2966273 - RNA, 19 nt, Artificial Sequence
  Description of Artificial Sequence: Synthetic oligonucleotide
accguucucucuggcagcu

SEQ ID NO: 2966274 - RNA, 19 nt, Artificial Sequence
  Description of Artificial Sequence: Synthetic oligonucleotide
gaauaccuccaacaccguu

SEQ ID NO: 2966275 - RNA, 19 nt, Artificial Sequence
  Description of Artificial Sequence: Synthetic oligonucleotide
cuuggaggguuuguaucca

SEQ ID NO: 2966276 - RNA, 19 nt, Artificial Sequence
  Description of Artificial Sequence: Synthetic oligonucleotide
ugcauccuucuuccucuuu

SEQ ID NO: 2966277 - RNA, 19 nt, Artificial Sequence
  Description of Artificial Sequence: Synthetic oligonucleotide
uuccugcguuccgaggcgc

SEQ ID NO: 2966278 - RNA, 19 nt, Artificial Sequence
  Description of Artificial Sequence: Synthetic oligonucleotide
ucuggcagcuugggagcca

SEQ ID NO: 2966279 - RNA, 19 nt, Artificial Sequence
  Description of Artificial Sequence: Synthetic oligonucleotide
ucucggcucaaguggccuu

SEQ ID NO: 2966280 - RNA, 19 nt, Artificial Sequence
  Description of Artificial Sequence: Synthetic oligonucleotide
ugcuucuaucuuggagggu

SEQ ID NO: 2966281 - RNA, 19 nt, Artificial Sequence
  Description of Artificial Sequence: Synthetic oligonucleotide
ugccaacugacgggaacau

SEQ ID NO: 2966282 - RNA, 19 nt, Artificial Sequence
  Description of Artificial Sequence: Synthetic oligonucleotide
ccccucaagugauauacca

SEQ ID NO: 2966283 - RNA, 19 nt, Artificial Sequence
  Description of Artificial Sequence: Synthetic oligonucleotide
aucacagaaucugcuucua

SEQ ID NO: 2966284 - RNA, 19 nt, Artificial Sequence
  Description of Artificial Sequence: Synthetic oligonucleotide
agcugugaagaggugccuu

SEQ ID NO: 2966285 - RNA, 19 nt, Artificial Sequence
  Description of Artificial Sequence: Synthetic oligonucleotide
ccucuuuacgacauccaaa

SEQ ID NO: 2966286 - RNA, 19 nt, Artificial Sequence
  Description of Artificial Sequence: Synthetic oligonucleotide
cuggcagcuugggagccac

SEQ ID NO: 2966287 - RNA, 19 nt, Artificial Sequence
  Description of Artificial Sequence: Synthetic oligonucleotide
cacgauagugcacgucgaa

SEQ ID NO: 2966288 - RNA, 19 nt, Artificial Sequence
  Description of Artificial Sequence: Synthetic oligonucleotide
gugccuuaucucauuccga

SEQ ID NO: 2966289 - RNA, 19 nt, Artificial Sequence
  Description of Artificial Sequence: Synthetic oligonucleotide
cuggcuucgcaggcccgcg

SEQ ID NO: 2966290 - RNA, 19 nt, Artificial Sequence
  Description of Artificial Sequence: Synthetic oligonucleotide
gugcacgucgaaagcugug

SEQ ID NO: 2966291 - RNA, 19 nt, Artificial Sequence
  Description of Artificial Sequence: Synthetic oligonucleotide
ccugguuccugccaacuga

SEQ ID NO: 2966292 - RNA, 19 nt, Artificial Sequence
  Description of Artificial Sequence: Synthetic oligonucleotide
acgggaacaucgccaccaa

SEQ ID NO: 2966293 - RNA, 19 nt, Artificial Sequence
  Description of Artificial Sequence: Synthetic oligonucleotide
ccugccaacugacgggaac

SEQ ID NO: 2966294 - RNA, 19 nt, Artificial Sequence
  Description of Artificial Sequence: Synthetic oligonucleotide
ccuccaacaccguucucuc

SEQ ID NO: 2966295 - RNA, 19 nt, Artificial Sequence
  Description of Artificial Sequence: Synthetic oligonucleotide
caggcccgcggccugguuc

SEQ ID NO: 2966296 - RNA, 19 nt, Artificial Sequence
  Description of Artificial Sequence: Synthetic oligonucleotide
cgucgaaagcugugaagag

SEQ ID NO: 2966297 - RNA, 19 nt, Artificial Sequence
  Description of Artificial Sequence: Synthetic oligonucleotide
uccugccaacugacgggaa

SEQ ID NO: 2966298 - RNA, 19 nt, Artificial Sequence
  Description of Artificial Sequence: Synthetic oligonucleotide
ucggcucaaguggccuuug

SEQ ID NO: 2966299 - RNA, 19 nt, Artificial Sequence
  Description of Artificial Sequence: Synthetic oligonucleotide
cguucucucuggcagcuug

SEQ ID NO: 2966300 - RNA, 19 nt, Artificial Sequence
  Description of Artificial Sequence: Synthetic oligonucleotide
uaaaguccucucggcucaa

SEQ ID NO: 2966301 - RNA, 19 nt, Artificial Sequence
  Description of Artificial Sequence: Synthetic oligonucleotide
gcccuuuugaaaucuucua

SEQ ID NO: 2966302 - RNA, 19 nt, Artificial Sequence
  Description of Artificial Sequence: Synthetic oligonucleotide
ggcuucgcaggcccgcggc

SEQ ID NO: 2966303 - RNA, 19 nt, Artificial Sequence
  Description of Artificial Sequence: Synthetic oligonucleotide
uagcaaccuuaaaguccuc

SEQ ID NO: 2966304 - RNA, 19 nt, Artificial Sequence
  Description of Artificial Sequence: Synthetic oligonucleotide
caaguggccuuuguugucu

SEQ ID NO: 2966305 - RNA, 19 nt, Artificial Sequence
  Description of Artificial Sequence: Synthetic oligonucleotide
gcugugaagaggugccuua

SEQ ID NO: 2966306 - RNA, 19 nt, Artificial Sequence
  Description of Artificial Sequence: Synthetic oligonucleotide
ccacccauuuccugcguuc

SEQ ID NO: 2966307 - RNA, 19 nt, Artificial Sequence
  Description of Artificial Sequence: Synthetic oligonucleotide
ugggagccacucgacugaa

SEQ ID NO: 2966308 - RNA, 19 nt, Artificial Sequence
  Description of Artificial Sequence: Synthetic oligonucleotide
gccugguuccugccaacug

SEQ ID NO: 2966309 - RNA, 19 nt, Artificial Sequence
  Description of Artificial Sequence: Synthetic oligonucleotide
gcuucuaucuuggaggguu

SEQ ID NO: 2966310 - RNA, 19 nt, Artificial Sequence
  Description of Artificial Sequence: Synthetic oligonucleotide
gugauauaccagaacuguu

SEQ ID NO: 2966311 - RNA, 19 nt, Artificial Sequence
  Description of Artificial Sequence: Synthetic oligonucleotide
gggauuuacugaagacauc

SEQ ID NO: 2966312 - RNA, 19 nt, Artificial Sequence
  Description of Artificial Sequence: Synthetic oligonucleotide
ggccuuuguugucuucauc

SEQ ID NO: 2966313 - RNA, 19 nt, Artificial Sequence
  Description of Artificial Sequence: Synthetic oligonucleotide
ggcagcuugggagccacuc

SEQ ID NO: 2966314 - RNA, 19 nt, Artificial Sequence
  Description of Artificial Sequence: Synthetic oligonucleotide
ucgcaggcccgcggccugg

SEQ ID NO: 2966315 - RNA, 19 nt, Artificial Sequence
  Description of Artificial Sequence: Synthetic oligonucleotide
ccuuaaaguccucucggcu

SEQ ID NO: 2966316 - RNA, 19 nt, Artificial Sequence
  Description of Artificial Sequence: Synthetic oligonucleotide
gccacucgacugaaugccc

SEQ ID NO: 2966317 - RNA, 19 nt, Artificial Sequence
  Description of Artificial Sequence: Synthetic oligonucleotide
cgaggcgcuggcuucgcag

SEQ ID NO: 2966318 - RNA, 19 nt, Artificial Sequence
  Description of Artificial Sequence: Synthetic oligonucleotide
cagaaucugcuucuaucuu

SEQ ID NO: 2966319 - RNA, 19 nt, Artificial Sequence
  Description of Artificial Sequence: Synthetic oligonucleotide
uggcagcuugggagccacu

SEQ ID NO: 2966320 - RNA, 19 nt, Artificial Sequence
  Description of Artificial Sequence: Synthetic oligonucleotide
uccgaggcgcuggcuucgc

SEQ ID NO: 2966321 - RNA, 19 nt, Artificial Sequence
  Description of Artificial Sequence: Synthetic oligonucleotide
ccucucggcucaaguggcc

SEQ ID NO: 2966322 - RNA, 19 nt, Artificial Sequence
  Description of Artificial Sequence: Synthetic oligonucleotide
gcgcuggcuucgcaggccc

SEQ ID NO: 2966323 - RNA, 19 nt, Artificial Sequence
  Description of Artificial Sequence: Synthetic oligonucleotide
gcuucgcaggcccgcggcc

SEQ ID NO: 2966324 - RNA, 19 nt, Artificial Sequence
  Description of Artificial Sequence: Synthetic oligonucleotide
gcacgucgaaagcugugaa

SEQ ID NO: 2966325 - RNA, 19 nt, Artificial Sequence
  Description of Artificial Sequence: Synthetic oligonucleotide
cgacugaaugcccuuuuga

SEQ ID NO: 2966326 - RNA, 19 nt, Artificial Sequence
  Description of Artificial Sequence: Synthetic oligonucleotide
gcuggcuucgcaggcccgc

SEQ ID NO: 2966327 - RNA, 19 nt, Artificial Sequence
  Description of Artificial Sequence: Synthetic oligonucleotide
cgaaagcugugaagaggug

SEQ ID NO: 2966328 - RNA, 19 nt, Artificial Sequence
  Description of Artificial Sequence: Synthetic oligonucleotide
cccgcggccugguuccugc

SEQ ID NO: 2966329 - RNA, 19 nt, Artificial Sequence
  Description of Artificial Sequence: Synthetic oligonucleotide
gccuuaucucauuccgaua

SEQ ID NO: 2966330 - RNA, 19 nt, Artificial Sequence
  Description of Artificial Sequence: Synthetic oligonucleotide
gcuugggagccacucgacu

SEQ ID NO: 2966331 - RNA, 19 nt, Artificial Sequence
  Description of Artificial Sequence: Synthetic oligonucleotide
ggcgcuggcuucgcaggcc

SEQ ID NO: 2966332 - RNA, 19 nt, Artificial Sequence
  Description of Artificial Sequence: Synthetic oligonucleotide
ccacgauagugcacgucga

SEQ ID NO: 2966333 - RNA, 19 nt, Artificial Sequence
  Description of Artificial Sequence: Synthetic oligonucleotide
cuccaacaccguucucucu

SEQ ID NO: 2966334 - RNA, 19 nt, Artificial Sequence
  Description of Artificial Sequence: Synthetic oligonucleotide
ggcucaaguggccuuuguu

SEQ ID NO: 2966335 - RNA, 19 nt, Artificial Sequence
  Description of Artificial Sequence: Synthetic oligonucleotide
cucucggcucaaguggccu

SEQ ID NO: 2966336 - RNA, 19 nt, Artificial Sequence
  Description of Artificial Sequence: Synthetic oligonucleotide
gccaacugacgggaacauc

SEQ ID NO: 2966337 - RNA, 19 nt, Artificial Sequence
  Description of Artificial Sequence: Synthetic oligonucleotide
gcggccugguuccugccaa

SEQ ID NO: 2966338 - RNA, 19 nt, Artificial Sequence
  Description of Artificial Sequence: Synthetic oligonucleotide
cugugaagaggugccuuau

SEQ ID NO: 2966339 - RNA, 19 nt, Artificial Sequence
  Description of Artificial Sequence: Synthetic oligonucleotide
cacucgacugaaugcccuu

SEQ ID NO: 2966340 - RNA, 19 nt, Artificial Sequence
  Description of Artificial Sequence: Synthetic oligonucleotide
ccugcguuccgaggcgcug

SEQ ID NO: 2966341 - RNA, 19 nt, Artificial Sequence
  Description of Artificial Sequence: Synthetic oligonucleotide
cuucgcaggcccgcggccu

SEQ ID NO: 2966342 - RNA, 19 nt, Artificial Sequence
  Description of Artificial Sequence: Synthetic oligonucleotide
ccacucgacugaaugcccu

SEQ ID NO: 2966343 - RNA, 19 nt, Artificial Sequence
  Description of Artificial Sequence: Synthetic oligonucleotide
gcauuacaauagcaaccuu

SEQ ID NO: 2966344 - RNA, 19 nt, Artificial Sequence
  Description of Artificial Sequence: Synthetic oligonucleotide
cgggaacaucgccaccaac

SEQ ID NO: 2966345 - RNA, 19 nt, Artificial Sequence
  Description of Artificial Sequence: Synthetic oligonucleotide
gcugugcauccuucuuccu

SEQ ID NO: 2966346 - RNA, 19 nt, Artificial Sequence
  Description of Artificial Sequence: Synthetic oligonucleotide
gugcauccuucuuccucuu

SEQ ID NO: 2966347 - RNA, 19 nt, Artificial Sequence
  Description of Artificial Sequence: Synthetic oligonucleotide
cgcuggcuucgcaggcccg

SEQ ID NO: 2966348 - RNA, 19 nt, Artificial Sequence
  Description of Artificial Sequence: Synthetic oligonucleotide
ggccugguuccugccaacu

SEQ ID NO: 2966349 - RNA, 19 nt, Artificial Sequence
  Description of Artificial Sequence: Synthetic oligonucleotide
ccgcggccugguuccugcc

SEQ ID NO: 2966350 - RNA, 19 nt, Artificial Sequence
  Description of Artificial Sequence: Synthetic oligonucleotide
cggccugguuccugccaac

SEQ ID NO: 2966351 - RNA, 19 nt, Artificial Sequence
  Description of Artificial Sequence: Synthetic oligonucleotide
cguuccgaggcgcuggcuu

SEQ ID NO: 2966352 - RNA, 19 nt, Artificial Sequence
  Description of Artificial Sequence: Synthetic oligonucleotide
ccagaacuguugggauuua

SEQ ID NO: 2966353 - RNA, 19 nt, Artificial Sequence
  Description of Artificial Sequence: Synthetic oligonucleotide
cgcggccugguuccugcca

SEQ ID NO: 2966354 - RNA, 19 nt, Artificial Sequence
  Description of Artificial Sequence: Synthetic oligonucleotide
cgauagagcugugcauccu

SEQ ID NO: 2966355 - RNA, 19 nt, Artificial Sequence
  Description of Artificial Sequence: Synthetic oligonucleotide
ccgaggcgcuggcuucgca

SEQ ID NO: 2966356 - RNA, 19 nt, Artificial Sequence
  Description of Artificial Sequence: Synthetic oligonucleotide
gggagccacucgacugaau

SEQ ID NO: 2966357 - RNA, 19 nt, Artificial Sequence
  Description of Artificial Sequence: Synthetic oligonucleotide
gcguuccgaggcgcuggcu

SEQ ID NO: 2966358 - RNA, 19 nt, Artificial Sequence
  Description of Artificial Sequence: Synthetic oligonucleotide
cggcucaaguggccuuugu

SEQ ID NO: 2966359 - RNA, 19 nt, Artificial Sequence
  Description of Artificial Sequence: Synthetic oligonucleotide
gcaggcccgcggccugguu

SEQ ID NO: 2966360 - RNA, 19 nt, Artificial Sequence
  Description of Artificial Sequence: Synthetic oligonucleotide
ccguucucucuggcagcuu

SEQ ID NO: 2966361 - RNA, 19 nt, Artificial Sequence
  Description of Artificial Sequence: Synthetic oligonucleotide
  modified_base (1)..(1): a, c, u, g, unknown or other
nuucccugaauaccuccaa

SEQ ID NO: 2966362 - RNA, 19 nt, Artificial Sequence
  Description of Artificial Sequence: Synthetic oligonucleotide
uucauuguagaucaaagcc

SEQ ID NO: 2966363 - RNA, 19 nt, Artificial Sequence
  Description of Artificial Sequence: Synthetic oligonucleotide
uuauuugagagcuucauug

SEQ ID NO: 2966364 - RNA, 19 nt, Artificial Sequence
  Description of Artificial Sequence: Synthetic oligonucleotide
auuuauuguacaauuaccc

SEQ ID NO: 2966365 - RNA, 19 nt, Artificial Sequence
  Description of Artificial Sequence: Synthetic oligonucleotide
aaaacaaaguauuuauugu

SEQ ID NO: 2966366 - RNA, 19 nt, Artificial Sequence
  Description of Artificial Sequence: Synthetic oligonucleotide
uuuaccagaguacuugugg

SEQ ID NO: 2966367 - RNA, 19 nt, Artificial Sequence
  Description of Artificial Sequence: Synthetic oligonucleotide
uguacaauuacccaccacu

SEQ ID NO: 2966368 - RNA, 19 nt, Artificial Sequence
  Description of Artificial Sequence: Synthetic oligonucleotide
caaaacaaaguauuuauug

SEQ ID NO: 2966369 - RNA, 19 nt, Artificial Sequence
  Description of Artificial Sequence: Synthetic oligonucleotide
uauuuauuguacaauuacc

SEQ ID NO: 2966370 - RNA, 19 nt, Artificial Sequence
  Description of Artificial Sequence: Synthetic oligonucleotide
aaggccgauggccugaucc

SEQ ID NO: 2966371 - RNA, 19 nt, Artificial Sequence
  Description of Artificial Sequence: Synthetic oligonucleotide
uagaucaaagccaaggccc

SEQ ID NO: 2966372 - RNA, 19 nt, Artificial Sequence
  Description of Artificial Sequence: Synthetic oligonucleotide
aacaaaguauuuauuguac

SEQ ID NO: 2966373 - RNA, 19 nt, Artificial Sequence
  Description of Artificial Sequence: Synthetic oligonucleotide
cauccugcaguuuagagcc

SEQ ID NO: 2966374 - RNA, 19 nt, Artificial Sequence
  Description of Artificial Sequence: Synthetic oligonucleotide
uauuguacaauuacccacc

SEQ ID NO: 2966375 - RNA, 19 nt, Artificial Sequence
  Description of Artificial Sequence: Synthetic oligonucleotide
gaaguuuacuuccuggucc

SEQ ID NO: 2966376 - RNA, 19 nt, Artificial Sequence
  Description of Artificial Sequence: Synthetic oligonucleotide
gaagauggccacaagaagg

SEQ ID NO: 2966377 - RNA, 19 nt, Artificial Sequence
  Description of Artificial Sequence: Synthetic oligonucleotide
ugagauaggccuccaaagg

SEQ ID NO: 2966378 - RNA, 19 nt, Artificial Sequence
  Description of Artificial Sequence: Synthetic oligonucleotide
uuugagagcuucauuguag

SEQ ID NO: 2966379 - RNA, 19 nt, Artificial Sequence
  Description of Artificial Sequence: Synthetic oligonucleotide
uuauuguacaauuacccac

SEQ ID NO: 2966380 - RNA, 19 nt, Artificial Sequence
  Description of Artificial Sequence: Synthetic oligonucleotide
aauggugagcuccuucugg

SEQ ID NO: 2966381 - RNA, 19 nt, Artificial Sequence
  Description of Artificial Sequence: Synthetic oligonucleotide
ucauuguagaucaaagcca

SEQ ID NO: 2966382 - RNA, 19 nt, Artificial Sequence
  Description of Artificial Sequence: Synthetic oligonucleotide
cuuguugcgguccaggucg

SEQ ID NO: 2966383 - RNA, 19 nt, Artificial Sequence
  Description of Artificial Sequence: Synthetic oligonucleotide
ugcaguuuagagccaaugg

SEQ ID NO: 2966384 - RNA, 19 nt, Artificial Sequence
  Description of Artificial Sequence: Synthetic oligonucleotide
uuuauuguacaauuaccca

SEQ ID NO: 2966385 - RNA, 19 nt, Artificial Sequence
  Description of Artificial Sequence: Synthetic oligonucleotide
uucccauuuuauuugagag

SEQ ID NO: 2966386 - RNA, 19 nt, Artificial Sequence
  Description of Artificial Sequence: Synthetic oligonucleotide
uguagaucaaagccaaggc

SEQ ID NO: 2966387 - RNA, 19 nt, Artificial Sequence
  Description of Artificial Sequence: Synthetic oligonucleotide
agagcuucauuguagauca

SEQ ID NO: 2966388 - RNA, 19 nt, Artificial Sequence
  Description of Artificial Sequence: Synthetic oligonucleotide
aaacaaaguauuuauugua

SEQ ID NO: 2966389 - RNA, 19 nt, Artificial Sequence
  Description of Artificial Sequence: Synthetic oligonucleotide
aaucucagcauccugcagu

SEQ ID NO: 2966390 - RNA, 19 nt, Artificial Sequence
  Description of Artificial Sequence: Synthetic oligonucleotide
aaguauuuauuguacaauu

SEQ ID NO: 2966391 - RNA, 19 nt, Artificial Sequence
  Description of Artificial Sequence: Synthetic oligonucleotide
aagauggccacaagaaggc

SEQ ID NO: 2966392 - RNA, 19 nt, Artificial Sequence
  Description of Artificial Sequence: Synthetic oligonucleotide
acuuccugguccuuguugc

SEQ ID NO: 2966393 - RNA, 19 nt, Artificial Sequence
  Description of Artificial Sequence: Synthetic oligonucleotide
agguagacagcgaagagcc

SEQ ID NO: 2966394 - RNA, 19 nt, Artificial Sequence
  Description of Artificial Sequence: Synthetic oligonucleotide
gagauaggccuccaaaggg

SEQ ID NO: 2966395 - RNA, 19 nt, Artificial Sequence
  Description of Artificial Sequence: Synthetic oligonucleotide
gaguacuuguggaagaugg

SEQ ID NO: 2966396 - RNA, 19 nt, Artificial Sequence
  Description of Artificial Sequence: Synthetic oligonucleotide
cuagaagaagcguaggcag

SEQ ID NO: 2966397 - RNA, 19 nt, Artificial Sequence
  Description of Artificial Sequence: Synthetic oligonucleotide
uacaauuacccaccacugg

SEQ ID NO: 2966398 - RNA, 19 nt, Artificial Sequence
  Description of Artificial Sequence: Synthetic oligonucleotide
ugcaaucucagcauccugc

SEQ ID NO: 2966399 - RNA, 19 nt, Artificial Sequence
  Description of Artificial Sequence: Synthetic oligonucleotide
gaaggcgacauacuccugg

SEQ ID NO: 2966400 - RNA, 19 nt, Artificial Sequence
  Description of Artificial Sequence: Synthetic oligonucleotide
agagccaauggugagcucc

SEQ ID NO: 2966401 - RNA, 19 nt, Artificial Sequence
  Description of Artificial Sequence: Synthetic oligonucleotide
agcguaggcagguagacag

SEQ ID NO: 2966402 - RNA, 19 nt, Artificial Sequence
  Description of Artificial Sequence: Synthetic oligonucleotide
cuucauuguagaucaaagc

SEQ ID NO: 2966403 - RNA, 19 nt, Artificial Sequence
  Description of Artificial Sequence: Synthetic oligonucleotide
aagaagcguaggcagguag

SEQ ID NO: 2966404 - RNA, 19 nt, Artificial Sequence
  Description of Artificial Sequence: Synthetic oligonucleotide
aaaguauuuauuguacaau

SEQ ID NO: 2966405 - RNA, 19 nt, Artificial Sequence
  Description of Artificial Sequence: Synthetic oligonucleotide
guagaucaaagccaaggcc

SEQ ID NO: 2966406 - RNA, 19 nt, Artificial Sequence
  Description of Artificial Sequence: Synthetic oligonucleotide
acaauuacccaccacugga

SEQ ID NO: 2966407 - RNA, 19 nt, Artificial Sequence
  Description of Artificial Sequence: Synthetic oligonucleotide
aaaggaguggucgagggga

SEQ ID NO: 2966408 - RNA, 19 nt, Artificial Sequence
  Description of Artificial Sequence: Synthetic oligonucleotide
uaauugaccacugggcuag

SEQ ID NO: 2966409 - RNA, 19 nt, Artificial Sequence
  Description of Artificial Sequence: Synthetic oligonucleotide
uagaagaagcguaggcagg

SEQ ID NO: 2966410 - RNA, 19 nt, Artificial Sequence
  Description of Artificial Sequence: Synthetic oligonucleotide
uggaagauggccacaagaa

SEQ ID NO: 2966411 - RNA, 19 nt, Artificial Sequence
  Description of Artificial Sequence: Synthetic oligonucleotide
auuuggcugagauaggccu

SEQ ID NO: 2966412 - RNA, 19 nt, Artificial Sequence
  Description of Artificial Sequence: Synthetic oligonucleotide
ugaccacugggcuagaaga

SEQ ID NO: 2966413 - RNA, 19 nt, Artificial Sequence
  Description of Artificial Sequence: Synthetic oligonucleotide
uccuucuugcucaaggugu

SEQ ID NO: 2966414 - RNA, 19 nt, Artificial Sequence
  Description of Artificial Sequence: Synthetic oligonucleotide
agagccaaaggaguggucg

SEQ ID NO: 2966415 - RNA, 19 nt, Artificial Sequence
  Description of Artificial Sequence: Synthetic oligonucleotide
acaaaguauuuauuguaca

SEQ ID NO: 2966416 - RNA, 19 nt, Artificial Sequence
  Description of Artificial Sequence: Synthetic oligonucleotide
caguuuagagccaauggug

SEQ ID NO: 2966417 - RNA, 19 nt, Artificial Sequence
  Description of Artificial Sequence: Synthetic oligonucleotide
aagggcaucucuaccuucc

SEQ ID NO: 2966418 - RNA, 19 nt, Artificial Sequence
  Description of Artificial Sequence: Synthetic oligonucleotide
acuuguggaagauggccac

SEQ ID NO: 2966419 - RNA, 19 nt, Artificial Sequence
  Description of Artificial Sequence: Synthetic oligonucleotide
uccaggucguccaucagcc

SEQ ID NO: 2966420 - RNA, 19 nt, Artificial Sequence
  Description of Artificial Sequence: Synthetic oligonucleotide
uauuugagagcuucauugu

SEQ ID NO: 2966421 - RNA, 19 nt, Artificial Sequence
  Description of Artificial Sequence: Synthetic oligonucleotide
aaguuuacuuccugguccu

SEQ ID NO: 2966422 - RNA, 19 nt, Artificial Sequence
  Description of Artificial Sequence: Synthetic oligonucleotide
uacuuguggaagauggcca

SEQ ID NO: 2966423 - RNA, 19 nt, Artificial Sequence
  Description of Artificial Sequence: Synthetic oligonucleotide
ugggcuagaagaagcguag

SEQ ID NO: 2966424 - RNA, 19 nt, Artificial Sequence
  Description of Artificial Sequence: Synthetic oligonucleotide
aaagggcaucucuaccuuc

SEQ ID NO: 2966425 - RNA, 19 nt, Artificial Sequence
  Description of Artificial Sequence: Synthetic oligonucleotide
gaggggauggacugugucg

SEQ ID NO: 2966426 - RNA, 19 nt, Artificial Sequence
  Description of Artificial Sequence: Synthetic oligonucleotide
cugagauaggccuccaaag

SEQ ID NO: 2966427 - RNA, 19 nt, Artificial Sequence
  Description of Artificial Sequence: Synthetic oligonucleotide
ucccauuuuauuugagagc

SEQ ID NO: 2966428 - RNA, 19 nt, Artificial Sequence
  Description of Artificial Sequence: Synthetic oligonucleotide
gauggccacaagaaggccg

SEQ ID NO: 2966429 - RNA, 19 nt, Artificial Sequence
  Description of Artificial Sequence: Synthetic oligonucleotide
agauaggccuccaaagggc

SEQ ID NO: 2966430 - RNA, 19 nt, Artificial Sequence
  Description of Artificial Sequence: Synthetic oligonucleotide
agcuccuucuugcucaagg

SEQ ID NO: 2966431 - RNA, 19 nt, Artificial Sequence
  Description of Artificial Sequence: Synthetic oligonucleotide
uuaccagaguacuugugga

SEQ ID NO: 2966432 - RNA, 19 nt, Artificial Sequence
  Description of Artificial Sequence: Synthetic oligonucleotide
uuuauuugagagcuucauu

SEQ ID NO: 2966433 - RNA, 19 nt, Artificial Sequence
  Description of Artificial Sequence: Synthetic oligonucleotide
uuuagagccaauggugagc

SEQ ID NO: 2966434 - RNA, 19 nt, Artificial Sequence
  Description of Artificial Sequence: Synthetic oligonucleotide
uugaccacugggcuagaag

SEQ ID NO: 2966435 - RNA, 19 nt, Artificial Sequence
  Description of Artificial Sequence: Synthetic oligonucleotide
ucguccaucagccuugcaa

SEQ ID NO: 2966436 - RNA, 19 nt, Artificial Sequence
  Description of Artificial Sequence: Synthetic oligonucleotide
uggaaguuuacuuccuggu

SEQ ID NO: 2966437 - RNA, 19 nt, Artificial Sequence
  Description of Artificial Sequence: Synthetic oligonucleotide
gccauaauugaccacuggg

SEQ ID NO: 2966438 - RNA, 19 nt, Artificial Sequence
  Description of Artificial Sequence: Synthetic oligonucleotide
uaccuucccauuuuauuug

SEQ ID NO: 2966439 - RNA, 19 nt, Artificial Sequence
  Description of Artificial Sequence: Synthetic oligonucleotide
cacaagaaggccgauggcc

SEQ ID NO: 2966440 - RNA, 19 nt, Artificial Sequence
  Description of Artificial Sequence: Synthetic oligonucleotide
uugagagcuucauuguaga

SEQ ID NO: 2966441 - RNA, 19 nt, Artificial Sequence
  Description of Artificial Sequence: Synthetic oligonucleotide
agaucaaagccaaggcccc

SEQ ID NO: 2966442 - RNA, 19 nt, Artificial Sequence
  Description of Artificial Sequence: Synthetic oligonucleotide
gacagcgaagagccaaagg

SEQ ID NO: 2966443 - RNA, 19 nt, Artificial Sequence
  Description of Artificial Sequence: Synthetic oligonucleotide
uuuuauuugagagcuucau

SEQ ID NO: 2966444 - RNA, 19 nt, Artificial Sequence
  Description of Artificial Sequence: Synthetic oligonucleotide
uuuacuuccugguccuugu

SEQ ID NO: 2966445 - RNA, 19 nt, Artificial Sequence
  Description of Artificial Sequence: Synthetic oligonucleotide
uuagagccaauggugagcu

SEQ ID NO: 2966446 - RNA, 19 nt, Artificial Sequence
  Description of Artificial Sequence: Synthetic oligonucleotide
ugccauaauugaccacugg

SEQ ID NO: 2966447 - RNA, 19 nt, Artificial Sequence
  Description of Artificial Sequence: Synthetic oligonucleotide
ucagcauccugcaguuuag

SEQ ID NO: 2966448 - RNA, 19 nt, Artificial Sequence
  Description of Artificial Sequence: Synthetic oligonucleotide
guuuagagccaauggugag

SEQ ID NO: 2966449 - RNA, 19 nt, Artificial Sequence
  Description of Artificial Sequence: Synthetic oligonucleotide
caaggugugcuugucaccc

SEQ ID NO: 2966450 - RNA, 19 nt, Artificial Sequence
  Description of Artificial Sequence: Synthetic oligonucleotide
caaaguauuuauuguacaa

SEQ ID NO: 2966451 - RNA, 19 nt, Artificial Sequence
  Description of Artificial Sequence: Synthetic oligonucleotide
ucuaccuucccauuuuauu

SEQ ID NO: 2966452 - RNA, 19 nt, Artificial Sequence
  Description of Artificial Sequence: Synthetic oligonucleotide
cucuuuaccagaguacuug

SEQ ID NO: 2966453 - RNA, 19 nt, Artificial Sequence
  Description of Artificial Sequence: Synthetic oligonucleotide
ucuuuaccagaguacuugu

SEQ ID NO: 2966454 - RNA, 19 nt, Artificial Sequence
  Description of Artificial Sequence: Synthetic oligonucleotide
guacuuguggaagauggcc

SEQ ID NO: 2966455 - RNA, 19 nt, Artificial Sequence
  Description of Artificial Sequence: Synthetic oligonucleotide
caggaaggcgacauacucc

SEQ ID NO: 2966456 - RNA, 19 nt, Artificial Sequence
  Description of Artificial Sequence: Synthetic oligonucleotide
ccauaauugaccacugggc

SEQ ID NO: 2966457 - RNA, 19 nt, Artificial Sequence
  Description of Artificial Sequence: Synthetic oligonucleotide
aguacuuguggaagauggc

SEQ ID NO: 2966458 - RNA, 19 nt, Artificial Sequence
  Description of Artificial Sequence: Synthetic oligonucleotide
uaggcagguagacagcgaa

SEQ ID NO: 2966459 - RNA, 19 nt, Artificial Sequence
  Description of Artificial Sequence: Synthetic oligonucleotide
agcauccugcaguuuagag

SEQ ID NO: 2966460 - RNA, 19 nt, Artificial Sequence
  Description of Artificial Sequence: Synthetic oligonucleotide
aauuacccaccacuggauu

SEQ ID NO: 2966461 - RNA, 19 nt, Artificial Sequence
  Description of Artificial Sequence: Synthetic oligonucleotide
gagagcuucauuguagauc

SEQ ID NO: 2966462 - RNA, 19 nt, Artificial Sequence
  Description of Artificial Sequence: Synthetic oligonucleotide
cauuguagaucaaagccaa

SEQ ID NO: 2966463 - RNA, 19 nt, Artificial Sequence
  Description of Artificial Sequence: Synthetic oligonucleotide
aguuuagagccaaugguga

SEQ ID NO: 2966464 - RNA, 19 nt, Artificial Sequence
  Description of Artificial Sequence: Synthetic oligonucleotide
auaauugaccacugggcua

SEQ ID NO: 2966465 - RNA, 19 nt, Artificial Sequence
  Description of Artificial Sequence: Synthetic oligonucleotide
accagaguacuuguggaag

SEQ ID NO: 2966466 - RNA, 19 nt, Artificial Sequence
  Description of Artificial Sequence: Synthetic oligonucleotide
uggucgaggggauggacug

SEQ ID NO: 2966467 - RNA, 19 nt, Artificial Sequence
  Description of Artificial Sequence: Synthetic oligonucleotide
uggauuuggcugagauagg

SEQ ID NO: 2966468 - RNA, 19 nt, Artificial Sequence
  Description of Artificial Sequence: Synthetic oligonucleotide
gauuuggcugagauaggcc

SEQ ID NO: 2966469 - RNA, 19 nt, Artificial Sequence
  Description of Artificial Sequence: Synthetic oligonucleotide
ucagccuugcaaucucagc

SEQ ID NO: 2966470 - RNA, 19 nt, Artificial Sequence
  Description of Artificial Sequence: Synthetic oligonucleotide
ucaaggugugcuugucacc

SEQ ID NO: 2966471 - RNA, 19 nt, Artificial Sequence
  Description of Artificial Sequence: Synthetic oligonucleotide
guacaauuacccaccacug

SEQ ID NO: 2966472 - RNA, 19 nt, Artificial Sequence
  Description of Artificial Sequence: Synthetic oligonucleotide
aaggcgacauacuccugga

SEQ ID NO: 2966473 - RNA, 19 nt, Artificial Sequence
  Description of Artificial Sequence: Synthetic oligonucleotide
uugucacccucuuuaccag

SEQ ID NO: 2966474 - RNA, 19 nt, Artificial Sequence
  Description of Artificial Sequence: Synthetic oligonucleotide
cagguagacagcgaagagc

SEQ ID NO: 2966475 - RNA, 19 nt, Artificial Sequence
  Description of Artificial Sequence: Synthetic oligonucleotide
ggaagauggccacaagaag

SEQ ID NO: 2966476 - RNA, 19 nt, Artificial Sequence
  Description of Artificial Sequence: Synthetic oligonucleotide
uuacccaccacuggauuug

SEQ ID NO: 2966477 - RNA, 19 nt, Artificial Sequence
  Description of Artificial Sequence: Synthetic oligonucleotide
ggcgacauacuccuggaag

SEQ ID NO: 2966478 - RNA, 19 nt, Artificial Sequence
  Description of Artificial Sequence: Synthetic oligonucleotide
cacugggcuagaagaagcg

SEQ ID NO: 2966479 - RNA, 19 nt, Artificial Sequence
  Description of Artificial Sequence: Synthetic oligonucleotide
auuugagagcuucauugua

SEQ ID NO: 2966480 - RNA, 19 nt, Artificial Sequence
  Description of Artificial Sequence: Synthetic oligonucleotide
guggaagauggccacaaga

SEQ ID NO: 2966481 - RNA, 19 nt, Artificial Sequence
  Description of Artificial Sequence: Synthetic oligonucleotide
cuuuaccagaguacuugug

SEQ ID NO: 2966482 - RNA, 19 nt, Artificial Sequence
  Description of Artificial Sequence: Synthetic oligonucleotide
caaaggaguggucgagggg

SEQ ID NO: 2966483 - RNA, 19 nt, Artificial Sequence
  Description of Artificial Sequence: Synthetic oligonucleotide
cuucccauuuuauuugaga

SEQ ID NO: 2966484 - RNA, 19 nt, Artificial Sequence
  Description of Artificial Sequence: Synthetic oligonucleotide
aguauuuauuguacaauua

SEQ ID NO: 2966485 - RNA, 19 nt, Artificial Sequence
  Description of Artificial Sequence: Synthetic oligonucleotide
gcauccugcaguuuagagc

SEQ ID NO: 2966486 - RNA, 19 nt, Artificial Sequence
  Description of Artificial Sequence: Synthetic oligonucleotide
gcuucauuguagaucaaag

SEQ ID NO: 2966487 - RNA, 19 nt, Artificial Sequence
  Description of Artificial Sequence: Synthetic oligonucleotide
cauaauugaccacugggcu

SEQ ID NO: 2966488 - RNA, 19 nt, Artificial Sequence
  Description of Artificial Sequence: Synthetic oligonucleotide
auuacccaccacuggauuu

SEQ ID NO: 2966489 - RNA, 19 nt, Artificial Sequence
  Description of Artificial Sequence: Synthetic oligonucleotide
uuguacaauuacccaccac

SEQ ID NO: 2966490 - RNA, 19 nt, Artificial Sequence
  Description of Artificial Sequence: Synthetic oligonucleotide
auggugagcuccuucugga

SEQ ID NO: 2966491 - RNA, 19 nt, Artificial Sequence
  Description of Artificial Sequence: Synthetic oligonucleotide
aggugugcuugucacccuc

SEQ ID NO: 2966492 - RNA, 19 nt, Artificial Sequence
  Description of Artificial Sequence: Synthetic oligonucleotide
agaagaagcguaggcaggu

SEQ ID NO: 2966493 - RNA, 19 nt, Artificial Sequence
  Description of Artificial Sequence: Synthetic oligonucleotide
uuccugguccuuguugcgg

SEQ ID NO: 2966494 - RNA, 19 nt, Artificial Sequence
  Description of Artificial Sequence: Synthetic oligonucleotide
cuugcucaaggugugcuug

SEQ ID NO: 2966495 - RNA, 19 nt, Artificial Sequence
  Description of Artificial Sequence: Synthetic oligonucleotide
uccaucagccuugcaaucu

SEQ ID NO: 2966496 - RNA, 19 nt, Artificial Sequence
  Description of Artificial Sequence: Synthetic oligonucleotide
cuccaaagggcaucucuac

SEQ ID NO: 2966497 - RNA, 19 nt, Artificial Sequence
  Description of Artificial Sequence: Synthetic oligonucleotide
uaccagaguacuuguggaa

SEQ ID NO: 2966498 - RNA, 19 nt, Artificial Sequence
  Description of Artificial Sequence: Synthetic oligonucleotide
gaagcguaggcagguagac

SEQ ID NO: 2966499 - RNA, 19 nt, Artificial Sequence
  Description of Artificial Sequence: Synthetic oligonucleotide
acaagaaggccgauggccu

SEQ ID NO: 2966500 - RNA, 19 nt, Artificial Sequence
  Description of Artificial Sequence: Synthetic oligonucleotide
ggcuagaagaagcguaggc

SEQ ID NO: 2966501 - RNA, 19 nt, Artificial Sequence
  Description of Artificial Sequence: Synthetic oligonucleotide
cuuccugguccuuguugcg

SEQ ID NO: 2966502 - RNA, 19 nt, Artificial Sequence
  Description of Artificial Sequence: Synthetic oligonucleotide
cuccuucuugcucaaggug

SEQ ID NO: 2966503 - RNA, 19 nt, Artificial Sequence
  Description of Artificial Sequence: Synthetic oligonucleotide
auuuuauuugagagcuuca

SEQ ID NO: 2966504 - RNA, 19 nt, Artificial Sequence
  Description of Artificial Sequence: Synthetic oligonucleotide
guuuacuuccugguccuug

SEQ ID NO: 2966505 - RNA, 19 nt, Artificial Sequence
  Description of Artificial Sequence: Synthetic oligonucleotide
uagacagcgaagagccaaa

SEQ ID NO: 2966506 - RNA, 19 nt, Artificial Sequence
  Description of Artificial Sequence: Synthetic oligonucleotide
acccucuuuaccagaguac

SEQ ID NO: 2966507 - RNA, 19 nt, Artificial Sequence
  Description of Artificial Sequence: Synthetic oligonucleotide
ggauuuggcugagauaggc

SEQ ID NO: 2966508 - RNA, 19 nt, Artificial Sequence
  Description of Artificial Sequence: Synthetic oligonucleotide
agcgaagagccaaaggagu

SEQ ID NO: 2966509 - RNA, 19 nt, Artificial Sequence
  Description of Artificial Sequence: Synthetic oligonucleotide
uucuugcucaaggugugcu

SEQ ID NO: 2966510 - RNA, 19 nt, Artificial Sequence
  Description of Artificial Sequence: Synthetic oligonucleotide
acaaaacaaaguauuuauu

SEQ ID NO: 2966511 - RNA, 19 nt, Artificial Sequence
  Description of Artificial Sequence: Synthetic oligonucleotide
cauacuccuggaaguuuac

SEQ ID NO: 2966512 - RNA, 19 nt, Artificial Sequence
  Description of Artificial Sequence: Synthetic oligonucleotide
ugcuugucacccucuuuac

SEQ ID NO: 2966513 - RNA, 19 nt, Artificial Sequence
  Description of Artificial Sequence: Synthetic oligonucleotide
caugccauaauugaccacu

SEQ ID NO: 2966514 - RNA, 19 nt, Artificial Sequence
  Description of Artificial Sequence: Synthetic oligonucleotide
ccaaaggaguggucgaggg

SEQ ID NO: 2966515 - RNA, 19 nt, Artificial Sequence
  Description of Artificial Sequence: Synthetic oligonucleotide
uccuuguugcgguccaggu

SEQ ID NO: 2966516 - RNA, 19 nt, Artificial Sequence
  Description of Artificial Sequence: Synthetic oligonucleotide
gauaggccuccaaagggca

SEQ ID NO: 2966517 - RNA, 19 nt, Artificial Sequence
  Description of Artificial Sequence: Synthetic oligonucleotide
accacugggcuagaagaag

SEQ ID NO: 2966518 - RNA, 19 nt, Artificial Sequence
  Description of Artificial Sequence: Synthetic oligonucleotide
accuucccauuuuauuuga

SEQ ID NO: 2966519 - RNA, 19 nt, Artificial Sequence
  Description of Artificial Sequence: Synthetic oligonucleotide
ggaaguuuacuuccugguc

SEQ ID NO: 2966520 - RNA, 19 nt, Artificial Sequence
  Description of Artificial Sequence: Synthetic oligonucleotide
ugucacccucuuuaccaga

SEQ ID NO: 2966521 - RNA, 19 nt, Artificial Sequence
  Description of Artificial Sequence: Synthetic oligonucleotide
aucucuaccuucccauuuu

SEQ ID NO: 2966522 - RNA, 19 nt, Artificial Sequence
  Description of Artificial Sequence: Synthetic oligonucleotide
agaguacuuguggaagaug

SEQ ID NO: 2966523 - RNA, 19 nt, Artificial Sequence
  Description of Artificial Sequence: Synthetic oligonucleotide
agccuugcaaucucagcau

SEQ ID NO: 2966524 - RNA, 19 nt, Artificial Sequence
  Description of Artificial Sequence: Synthetic oligonucleotide
aguggucgaggggauggac

SEQ ID NO: 2966525 - RNA, 19 nt, Artificial Sequence
  Description of Artificial Sequence: Synthetic oligonucleotide
guagacagcgaagagccaa

SEQ ID NO: 2966526 - RNA, 19 nt, Artificial Sequence
  Description of Artificial Sequence: Synthetic oligonucleotide
acuggauuuggcugagaua

SEQ ID NO: 2966527 - RNA, 19 nt, Artificial Sequence
  Description of Artificial Sequence: Synthetic oligonucleotide
aagaaggccgauggccuga

SEQ ID NO: 2966528 - RNA, 19 nt, Artificial Sequence
  Description of Artificial Sequence: Synthetic oligonucleotide
ucucuaccuucccauuuua

SEQ ID NO: 2966529 - RNA, 19 nt, Artificial Sequence
  Description of Artificial Sequence: Synthetic oligonucleotide
ggaguggucgaggggaugg

SEQ ID NO: 2966530 - RNA, 19 nt, Artificial Sequence
  Description of Artificial Sequence: Synthetic oligonucleotide
aagagccaaaggagugguc

SEQ ID NO: 2966531 - RNA, 19 nt, Artificial Sequence
  Description of Artificial Sequence: Synthetic oligonucleotide
aaggugugcuugucacccu

SEQ ID NO: 2966532 - RNA, 19 nt, Artificial Sequence
  Description of Artificial Sequence: Synthetic oligonucleotide
agcuucauuguagaucaaa

SEQ ID NO: 2966533 - RNA, 19 nt, Artificial Sequence
  Description of Artificial Sequence: Synthetic oligonucleotide
aucucagcauccugcaguu

SEQ ID NO: 2966534 - RNA, 19 nt, Artificial Sequence
  Description of Artificial Sequence: Synthetic oligonucleotide
caagaaggccgauggccug

SEQ ID NO: 2966535 - RNA, 19 nt, Artificial Sequence
  Description of Artificial Sequence: Synthetic oligonucleotide
gcuagaagaagcguaggca

SEQ ID NO: 2966536 - RNA, 19 nt, Artificial Sequence
  Description of Artificial Sequence: Synthetic oligonucleotide
gggcaugccauaauugacc

SEQ ID NO: 2966537 - RNA, 19 nt, Artificial Sequence
  Description of Artificial Sequence: Synthetic oligonucleotide
guugcgguccaggucgucc

SEQ ID NO: 2966538 - RNA, 19 nt, Artificial Sequence
  Description of Artificial Sequence: Synthetic oligonucleotide
cuaccuucccauuuuauuu

SEQ ID NO: 2966539 - RNA, 19 nt, Artificial Sequence
  Description of Artificial Sequence: Synthetic oligonucleotide
caauggugagcuccuucug

SEQ ID NO: 2966540 - RNA, 19 nt, Artificial Sequence
  Description of Artificial Sequence: Synthetic oligonucleotide
cucagcauccugcaguuua

SEQ ID NO: 2966541 - RNA, 19 nt, Artificial Sequence
  Description of Artificial Sequence: Synthetic oligonucleotide
ugugcuugucacccucuuu

SEQ ID NO: 2966542 - RNA, 19 nt, Artificial Sequence
  Description of Artificial Sequence: Synthetic oligonucleotide
uugcucaaggugugcuugu

SEQ ID NO: 2966543 - RNA, 19 nt, Artificial Sequence
  Description of Artificial Sequence: Synthetic oligonucleotide
gagccaaaggaguggucga

SEQ ID NO: 2966544 - RNA, 19 nt, Artificial Sequence
  Description of Artificial Sequence: Synthetic oligonucleotide
aagcguaggcagguagaca

SEQ ID NO: 2966545 - RNA, 19 nt, Artificial Sequence
  Description of Artificial Sequence: Synthetic oligonucleotide
agaagcguaggcagguaga

SEQ ID NO: 2966546 - RNA, 19 nt, Artificial Sequence
  Description of Artificial Sequence: Synthetic oligonucleotide
ggcaugccauaauugacca

SEQ ID NO: 2966547 - RNA, 19 nt, Artificial Sequence
  Description of Artificial Sequence: Synthetic oligonucleotide
gcaguuuagagccaauggu

SEQ ID NO: 2966548 - RNA, 19 nt, Artificial Sequence
  Description of Artificial Sequence: Synthetic oligonucleotide
cugggcuagaagaagcgua

SEQ ID NO: 2966549 - RNA, 19 nt, Artificial Sequence
  Description of Artificial Sequence: Synthetic oligonucleotide
agccaaaggaguggucgag

SEQ ID NO: 2966550 - RNA, 19 nt, Artificial Sequence
  Description of Artificial Sequence: Synthetic oligonucleotide
ccacugggcuagaagaagc

SEQ ID NO: 2966551 - RNA, 19 nt, Artificial Sequence
  Description of Artificial Sequence: Synthetic oligonucleotide
aggccgauggccugaucca

SEQ ID NO: 2966552 - RNA, 19 nt, Artificial Sequence
  Description of Artificial Sequence: Synthetic oligonucleotide
uacccaccacuggauuugg

SEQ ID NO: 2966553 - RNA, 19 nt, Artificial Sequence
  Description of Artificial Sequence: Synthetic oligonucleotide
acugggcuagaagaagcgu

SEQ ID NO: 2966554 - RNA, 19 nt, Artificial Sequence
  Description of Artificial Sequence: Synthetic oligonucleotide
caccacuggauuuggcuga

SEQ ID NO: 2966555 - RNA, 19 nt, Artificial Sequence
  Description of Artificial Sequence: Synthetic oligonucleotide
auggccacaagaaggccga

SEQ ID NO: 2966556 - RNA, 19 nt, Artificial Sequence
  Description of Artificial Sequence: Synthetic oligonucleotide
agacagcgaagagccaaag

SEQ ID NO: 2966557 - RNA, 19 nt, Artificial Sequence
  Description of Artificial Sequence: Synthetic oligonucleotide
gcugagauaggccuccaaa

SEQ ID NO: 2966558 - RNA, 19 nt, Artificial Sequence
  Description of Artificial Sequence: Synthetic oligonucleotide
cuucuugcucaaggugugc

SEQ ID NO: 2966559 - RNA, 19 nt, Artificial Sequence
  Description of Artificial Sequence: Synthetic oligonucleotide
gcuugucacccucuuuacc

SEQ ID NO: 2966560 - RNA, 19 nt, Artificial Sequence
  Description of Artificial Sequence: Synthetic oligonucleotide
uccugcaguuuagagccaa

SEQ ID NO: 2966561 - RNA, 19 nt, Artificial Sequence
  Description of Artificial Sequence: Synthetic oligonucleotide
ccaggaaggcgacauacuc

SEQ ID NO: 2966562 - RNA, 19 nt, Artificial Sequence
  Description of Artificial Sequence: Synthetic oligonucleotide
ccaccacuggauuuggcug

SEQ ID NO: 2966563 - RNA, 19 nt, Artificial Sequence
  Description of Artificial Sequence: Synthetic oligonucleotide
uaggccuccaaagggcauc

SEQ ID NO: 2966564 - RNA, 19 nt, Artificial Sequence
  Description of Artificial Sequence: Synthetic oligonucleotide
gaagagccaaaggaguggu

SEQ ID NO: 2966565 - RNA, 19 nt, Artificial Sequence
  Description of Artificial Sequence: Synthetic oligonucleotide
cugguccuuguugcggucc

SEQ ID NO: 2966566 - RNA, 19 nt, Artificial Sequence
  Description of Artificial Sequence: Synthetic oligonucleotide
gucgaggggauggacugug

SEQ ID NO: 2966567 - RNA, 19 nt, Artificial Sequence
  Description of Artificial Sequence: Synthetic oligonucleotide
aggucguccaucagccuug

SEQ ID NO: 2966568 - RNA, 19 nt, Artificial Sequence
  Description of Artificial Sequence: Synthetic oligonucleotide
augccauaauugaccacug

SEQ ID NO: 2966569 - RNA, 19 nt, Artificial Sequence
  Description of Artificial Sequence: Synthetic oligonucleotide
cccauuuuauuugagagcu

SEQ ID NO: 2966570 - RNA, 19 nt, Artificial Sequence
  Description of Artificial Sequence: Synthetic oligonucleotide
guccaucagccuugcaauc

SEQ ID NO: 2966571 - RNA, 19 nt, Artificial Sequence
  Description of Artificial Sequence: Synthetic oligonucleotide
ccuucuugcucaaggugug

SEQ ID NO: 2966572 - RNA, 19 nt, Artificial Sequence
  Description of Artificial Sequence: Synthetic oligonucleotide
ucgaggggauggacugugu

SEQ ID NO: 2966573 - RNA, 19 nt, Artificial Sequence
  Description of Artificial Sequence: Synthetic oligonucleotide
accacuggauuuggcugag

SEQ ID NO: 2966574 - RNA, 19 nt, Artificial Sequence
  Description of Artificial Sequence: Synthetic oligonucleotide
gcgaagagccaaaggagug

SEQ ID NO: 2966575 - RNA, 19 nt, Artificial Sequence
  Description of Artificial Sequence: Synthetic oligonucleotide
gccaaaggaguggucgagg

SEQ ID NO: 2966576 - RNA, 19 nt, Artificial Sequence
  Description of Artificial Sequence: Synthetic oligonucleotide
ccgauggccugauccaggg

SEQ ID NO: 2966577 - RNA, 19 nt, Artificial Sequence
  Description of Artificial Sequence: Synthetic oligonucleotide
caucagccuugcaaucuca

SEQ ID NO: 2966578 - RNA, 19 nt, Artificial Sequence
  Description of Artificial Sequence: Synthetic oligonucleotide
gaccacugggcuagaagaa

SEQ ID NO: 2966579 - RNA, 19 nt, Artificial Sequence
  Description of Artificial Sequence: Synthetic oligonucleotide
uuguugcgguccaggucgu

SEQ ID NO: 2966580 - RNA, 19 nt, Artificial Sequence
  Description of Artificial Sequence: Synthetic oligonucleotide
aggcagguagacagcgaag

SEQ ID NO: 2966581 - RNA, 19 nt, Artificial Sequence
  Description of Artificial Sequence: Synthetic oligonucleotide
ugcucaaggugugcuuguc

SEQ ID NO: 2966582 - RNA, 19 nt, Artificial Sequence
  Description of Artificial Sequence: Synthetic oligonucleotide
aaggaguggucgaggggau

SEQ ID NO: 2966583 - RNA, 19 nt, Artificial Sequence
  Description of Artificial Sequence: Synthetic oligonucleotide
cgaagagccaaaggagugg

SEQ ID NO: 2966584 - RNA, 19 nt, Artificial Sequence
  Description of Artificial Sequence: Synthetic oligonucleotide
ggggcaugccauaauugac

SEQ ID NO: 2966585 - RNA, 19 nt, Artificial Sequence
  Description of Artificial Sequence: Synthetic oligonucleotide
gcgacauacuccuggaagu

SEQ ID NO: 2966586 - RNA, 19 nt, Artificial Sequence
  Description of Artificial Sequence: Synthetic oligonucleotide
ccuucccauuuuauuugag

SEQ ID NO: 2966587 - RNA, 19 nt, Artificial Sequence
  Description of Artificial Sequence: Synthetic oligonucleotide
aauugaccacugggcuaga

SEQ ID NO: 2966588 - RNA, 19 nt, Artificial Sequence
  Description of Artificial Sequence: Synthetic oligonucleotide
caauuacccaccacuggau

SEQ ID NO: 2966589 - RNA, 19 nt, Artificial Sequence
  Description of Artificial Sequence: Synthetic oligonucleotide
cuugcaaucucagcauccu

SEQ ID NO: 2966590 - RNA, 19 nt, Artificial Sequence
  Description of Artificial Sequence: Synthetic oligonucleotide
gggcuagaagaagcguagg

SEQ ID NO: 2966591 - RNA, 19 nt, Artificial Sequence
  Description of Artificial Sequence: Synthetic oligonucleotide
cacuggauuuggcugagau

SEQ ID NO: 2966592 - RNA, 19 nt, Artificial Sequence
  Description of Artificial Sequence: Synthetic oligonucleotide
acccaccacuggauuuggc

SEQ ID NO: 2966593 - RNA, 19 nt, Artificial Sequence
  Description of Artificial Sequence: Synthetic oligonucleotide
ccagaguacuuguggaaga

SEQ ID NO: 2966594 - RNA, 19 nt, Artificial Sequence
  Description of Artificial Sequence: Synthetic oligonucleotide
aggcgacauacuccuggaa

SEQ ID NO: 2966595 - RNA, 19 nt, Artificial Sequence
  Description of Artificial Sequence: Synthetic oligonucleotide
ccaaagggcaucucuaccu

SEQ ID NO: 2966596 - RNA, 19 nt, Artificial Sequence
  Description of Artificial Sequence: Synthetic oligonucleotide
gcucaaggugugcuuguca

SEQ ID NO: 2966597 - RNA, 19 nt, Artificial Sequence
  Description of Artificial Sequence: Synthetic oligonucleotide
gccaauggugagcuccuuc

SEQ ID NO: 2966598 - RNA, 19 nt, Artificial Sequence
  Description of Artificial Sequence: Synthetic oligonucleotide
ggcaucucuaccuucccau

SEQ ID NO: 2966599 - RNA, 19 nt, Artificial Sequence
  Description of Artificial Sequence: Synthetic oligonucleotide
aggccuccaaagggcaucu

SEQ ID NO: 2966600 - RNA, 19 nt, Artificial Sequence
  Description of Artificial Sequence: Synthetic oligonucleotide
auugaccacugggcuagaa

SEQ ID NO: 2966601 - RNA, 19 nt, Artificial Sequence
  Description of Artificial Sequence: Synthetic oligonucleotide
gaagaagcguaggcaggua

SEQ ID NO: 2966602 - RNA, 19 nt, Artificial Sequence
  Description of Artificial Sequence: Synthetic oligonucleotide
aggaguggucgaggggaug

SEQ ID NO: 2966603 - RNA, 19 nt, Artificial Sequence
  Description of Artificial Sequence: Synthetic oligonucleotide
ccacaagaaggccgauggc

SEQ ID NO: 2966604 - RNA, 19 nt, Artificial Sequence
  Description of Artificial Sequence: Synthetic oligonucleotide
uagagccaauggugagcuc

SEQ ID NO: 2966605 - RNA, 19 nt, Artificial Sequence
  Description of Artificial Sequence: Synthetic oligonucleotide
guaggcagguagacagcga

SEQ ID NO: 2966606 - RNA, 19 nt, Artificial Sequence
  Description of Artificial Sequence: Synthetic oligonucleotide
gccuugcaaucucagcauc

SEQ ID NO: 2966607 - RNA, 19 nt, Artificial Sequence
  Description of Artificial Sequence: Synthetic oligonucleotide
gccgauggccugauccagg

SEQ ID NO: 2966608 - RNA, 19 nt, Artificial Sequence
  Description of Artificial Sequence: Synthetic oligonucleotide
ccaauggugagcuccuucu

SEQ ID NO: 2966609 - RNA, 19 nt, Artificial Sequence
  Description of Artificial Sequence: Synthetic oligonucleotide
ccccaggaaggcgacauac

SEQ ID NO: 2966610 - RNA, 19 nt, Artificial Sequence
  Description of Artificial Sequence: Synthetic oligonucleotide
gcaugccauaauugaccac

SEQ ID NO: 2966611 - RNA, 19 nt, Artificial Sequence
  Description of Artificial Sequence: Synthetic oligonucleotide
gacauacuccuggaaguuu

SEQ ID NO: 2966612 - RNA, 19 nt, Artificial Sequence
  Description of Artificial Sequence: Synthetic oligonucleotide
auaggccuccaaagggcau

SEQ ID NO: 2966613 - RNA, 19 nt, Artificial Sequence
  Description of Artificial Sequence: Synthetic oligonucleotide
caucucuaccuucccauuu

SEQ ID NO: 2966614 - RNA, 19 nt, Artificial Sequence
  Description of Artificial Sequence: Synthetic oligonucleotide
ggccacaagaaggccgaug

SEQ ID NO: 2966615 - RNA, 19 nt, Artificial Sequence
  Description of Artificial Sequence: Synthetic oligonucleotide
gggcaucucuaccuuccca

SEQ ID NO: 2966616 - RNA, 19 nt, Artificial Sequence
  Description of Artificial Sequence: Synthetic oligonucleotide
gaguggucgaggggaugga

SEQ ID NO: 2966617 - RNA, 19 nt, Artificial Sequence
  Description of Artificial Sequence: Synthetic oligonucleotide
guggucgaggggauggacu

SEQ ID NO: 2966618 - RNA, 19 nt, Artificial Sequence
  Description of Artificial Sequence: Synthetic oligonucleotide
gagccaauggugagcuccu

SEQ ID NO: 2966619 - RNA, 19 nt, Artificial Sequence
  Description of Artificial Sequence: Synthetic oligonucleotide
ggccgauggccugauccag

SEQ ID NO: 2966620 - RNA, 19 nt, Artificial Sequence
  Description of Artificial Sequence: Synthetic oligonucleotide
caaagggcaucucuaccuu

SEQ ID NO: 2966621 - RNA, 19 nt, Artificial Sequence
  Description of Artificial Sequence: Synthetic oligonucleotide
gaaggccgauggccugauc

SEQ ID NO: 2966622 - RNA, 19 nt, Artificial Sequence
  Description of Artificial Sequence: Synthetic oligonucleotide
ccuccaaagggcaucucua

SEQ ID NO: 2966623 - RNA, 19 nt, Artificial Sequence
  Description of Artificial Sequence: Synthetic oligonucleotide
cucuaccuucccauuuuau

SEQ ID NO: 2966624 - RNA, 19 nt, Artificial Sequence
  Description of Artificial Sequence: Synthetic oligonucleotide
gccuccaaagggcaucucu

SEQ ID NO: 2966625 - RNA, 19 nt, Artificial Sequence
  Description of Artificial Sequence: Synthetic oligonucleotide
uggcugagauaggccucca

SEQ ID NO: 2966626 - RNA, 19 nt, Artificial Sequence
  Description of Artificial Sequence: Synthetic oligonucleotide
aguuuacuuccugguccuu

SEQ ID NO: 2966627 - RNA, 19 nt, Artificial Sequence
  Description of Artificial Sequence: Synthetic oligonucleotide
agaaggccgauggccugau

SEQ ID NO: 2966628 - RNA, 19 nt, Artificial Sequence
  Description of Artificial Sequence: Synthetic oligonucleotide
caggucguccaucagccuu

SEQ ID NO: 2966629 - RNA, 19 nt, Artificial Sequence
  Description of Artificial Sequence: Synthetic oligonucleotide
ucucagcauccugcaguuu

SEQ ID NO: 2966630 - RNA, 19 nt, Artificial Sequence
  Description of Artificial Sequence: Synthetic oligonucleotide
uguugcgguccaggucguc

SEQ ID NO: 2966631 - RNA, 19 nt, Artificial Sequence
  Description of Artificial Sequence: Synthetic oligonucleotide
cagaguacuuguggaagau

SEQ ID NO: 2966632 - RNA, 19 nt, Artificial Sequence
  Description of Artificial Sequence: Synthetic oligonucleotide
cccaccacuggauuuggcu

SEQ ID NO: 2966633 - RNA, 19 nt, Artificial Sequence
  Description of Artificial Sequence: Synthetic oligonucleotide
cagcauccugcaguuuaga

SEQ ID NO: 2966634 - RNA, 19 nt, Artificial Sequence
  Description of Artificial Sequence: Synthetic oligonucleotide
cgaggggauggacuguguc

SEQ ID NO: 2966635 - RNA, 19 nt, Artificial Sequence
  Description of Artificial Sequence: Synthetic oligonucleotide
gcguaggcagguagacagc

SEQ ID NO: 2966636 - RNA, 19 nt, Artificial Sequence
  Description of Artificial Sequence: Synthetic oligonucleotide
gguagacagcgaagagcca

SEQ ID NO: 2966637 - RNA, 19 nt, Artificial Sequence
  Description of Artificial Sequence: Synthetic oligonucleotide
auccugcaguuuagagcca

SEQ ID NO: 2966638 - RNA, 19 nt, Artificial Sequence
  Description of Artificial Sequence: Synthetic oligonucleotide
ggaaggcgacauacuccug

SEQ ID NO: 2966639 - RNA, 19 nt, Artificial Sequence
  Description of Artificial Sequence: Synthetic oligonucleotide
ggucguccaucagccuugc

SEQ ID NO: 2966640 - RNA, 19 nt, Artificial Sequence
  Description of Artificial Sequence: Synthetic oligonucleotide
ggcugagauaggccuccaa

SEQ ID NO: 2966641 - RNA, 19 nt, Artificial Sequence
  Description of Artificial Sequence: Synthetic oligonucleotide
gagcuucauuguagaucaa

SEQ ID NO: 2966642 - RNA, 19 nt, Artificial Sequence
  Description of Artificial Sequence: Synthetic oligonucleotide
cgauggccugauccagggg

SEQ ID NO: 2966643 - RNA, 19 nt, Artificial Sequence
  Description of Artificial Sequence: Synthetic oligonucleotide
gucguccaucagccuugca

SEQ ID NO: 2966644 - RNA, 19 nt, Artificial Sequence
  Description of Artificial Sequence: Synthetic oligonucleotide
ccugguccuuguugcgguc

SEQ ID NO: 2966645 - RNA, 19 nt, Artificial Sequence
  Description of Artificial Sequence: Synthetic oligonucleotide
uggccacaagaaggccgau

SEQ ID NO: 2966646 - RNA, 19 nt, Artificial Sequence
  Description of Artificial Sequence: Synthetic oligonucleotide
gugugcuugucacccucuu

SEQ ID NO: 2966647 - RNA, 19 nt, Artificial Sequence
  Description of Artificial Sequence: Synthetic oligonucleotide
cguccaucagccuugcaau

SEQ ID NO: 2966648 - RNA, 19 nt, Artificial Sequence
  Description of Artificial Sequence: Synthetic oligonucleotide
agccaauggugagcuccuu

SEQ ID NO: 2966649 - RNA, 19 nt, Artificial Sequence
  Description of Artificial Sequence: Synthetic oligonucleotide
ggugugcuugucacccucu

SEQ ID NO: 2966650 - RNA, 19 nt, Artificial Sequence
  Description of Artificial Sequence: Synthetic oligonucleotide
cccaggaaggcgacauacu

SEQ ID NO: 2966651 - RNA, 19 nt, Artificial Sequence
  Description of Artificial Sequence: Synthetic oligonucleotide
ccucuuuaccagaguacuu

SEQ ID NO: 2966652 - RNA, 19 nt, Artificial Sequence
  Description of Artificial Sequence: Synthetic oligonucleotide
ggucgaggggauggacugu

SEQ ID NO: 2966653 - RNA, 19 nt, Artificial Sequence
  Description of Artificial Sequence: Synthetic oligonucleotide
ccugcaguuuagagccaau

SEQ ID NO: 2966654 - RNA, 19 nt, Artificial Sequence
  Description of Artificial Sequence: Synthetic oligonucleotide
ggccuccaaagggcaucuc

SEQ ID NO: 2966655 - RNA, 19 nt, Artificial Sequence
  Description of Artificial Sequence: Synthetic oligonucleotide
ccaggucguccaucagccu

SEQ ID NO: 2966656 - RNA, 19 nt, Artificial Sequence
  Description of Artificial Sequence: Synthetic oligonucleotide
cgacauacuccuggaaguu

SEQ ID NO: 2966657 - RNA, 19 nt, Artificial Sequence
  Description of Artificial Sequence: Synthetic oligonucleotide
ccacuggauuuggcugaga

SEQ ID NO: 2966658 - RNA, 19 nt, Artificial Sequence
  Description of Artificial Sequence: Synthetic oligonucleotide
aacauagugaggaacaugg

SEQ ID NO: 2966659 - RNA, 19 nt, Artificial Sequence
  Description of Artificial Sequence: Synthetic oligonucleotide
ucaaugaagaccaucccgg

SEQ ID NO: 2966660 - RNA, 19 nt, Artificial Sequence
  Description of Artificial Sequence: Synthetic oligonucleotide
caugaaugaacccugaggc

SEQ ID NO: 2966661 - RNA, 19 nt, Artificial Sequence
  Description of Artificial Sequence: Synthetic oligonucleotide
ucaugaaugaacccugagg

SEQ ID NO: 2966662 - RNA, 19 nt, Artificial Sequence
  Description of Artificial Sequence: Synthetic oligonucleotide
uugucaaugaagaccaucc

SEQ ID NO: 2966663 - RNA, 19 nt, Artificial Sequence
  Description of Artificial Sequence: Synthetic oligonucleotide
aaugaagaccaucccgggc

SEQ ID NO: 2966664 - RNA, 19 nt, Artificial Sequence
  Description of Artificial Sequence: Synthetic oligonucleotide
gaaucggucacccauggug

SEQ ID NO: 2966665 - RNA, 19 nt, Artificial Sequence
  Description of Artificial Sequence: Synthetic oligonucleotide
agccuagucgucuuugucc

SEQ ID NO: 2966666 - RNA, 19 nt, Artificial Sequence
  Description of Artificial Sequence: Synthetic oligonucleotide
aacuccacguaguugaagu

SEQ ID NO: 2966667 - RNA, 19 nt, Artificial Sequence
  Description of Artificial Sequence: Synthetic oligonucleotide
gucaaugaagaccaucccg

SEQ ID NO: 2966668 - RNA, 19 nt, Artificial Sequence
  Description of Artificial Sequence: Synthetic oligonucleotide
aaaggcauugcggauuacg

SEQ ID NO: 2966669 - RNA, 19 nt, Artificial Sequence
  Description of Artificial Sequence: Synthetic oligonucleotide
uuuccccaaacauagugag

SEQ ID NO: 2966670 - RNA, 19 nt, Artificial Sequence
  Description of Artificial Sequence: Synthetic oligonucleotide
augaaugaacccugaggcc

SEQ ID NO: 2966671 - RNA, 19 nt, Artificial Sequence
  Description of Artificial Sequence: Synthetic oligonucleotide
ugggcagccaagaacagcc

SEQ ID NO: 2966672 - RNA, 19 nt, Artificial Sequence
  Description of Artificial Sequence: Synthetic oligonucleotide
caacaugucguggagaucc

SEQ ID NO: 2966673 - RNA, 19 nt, Artificial Sequence
  Description of Artificial Sequence: Synthetic oligonucleotide
ucgucuuuguccuuggcgc

SEQ ID NO: 2966674 - RNA, 19 nt, Artificial Sequence
  Description of Artificial Sequence: Synthetic oligonucleotide
uuuuccccaaacauaguga

SEQ ID NO: 2966675 - RNA, 19 nt, Artificial Sequence
  Description of Artificial Sequence: Synthetic oligonucleotide
ugguccucaugaaugaacc

SEQ ID NO: 2966676 - RNA, 19 nt, Artificial Sequence
  Description of Artificial Sequence: Synthetic oligonucleotide
aaucggucacccauggugg

SEQ ID NO: 2966677 - RNA, 19 nt, Artificial Sequence
  Description of Artificial Sequence: Synthetic oligonucleotide
cauagugaggaacauggug

SEQ ID NO: 2966678 - RNA, 19 nt, Artificial Sequence
  Description of Artificial Sequence: Synthetic oligonucleotide
ugaaugaacccugaggccu

SEQ ID NO: 2966679 - RNA, 19 nt, Artificial Sequence
  Description of Artificial Sequence: Synthetic oligonucleotide
guacaucucauccaccucc

SEQ ID NO: 2966680 - RNA, 19 nt, Artificial Sequence
  Description of Artificial Sequence: Synthetic oligonucleotide
cuuuuccccaaacauagug

SEQ ID NO: 2966681 - RNA, 19 nt, Artificial Sequence
  Description of Artificial Sequence: Synthetic oligonucleotide
uccccaaacauagugagga

SEQ ID NO: 2966682 - RNA, 19 nt, Artificial Sequence
  Description of Artificial Sequence: Synthetic oligonucleotide
augaagaccaucccgggca

SEQ ID NO: 2966683 - RNA, 19 nt, Artificial Sequence
  Description of Artificial Sequence: Synthetic oligonucleotide
uccacguaguugaaguugc

SEQ ID NO: 2966684 - RNA, 19 nt, Artificial Sequence
  Description of Artificial Sequence: Synthetic oligonucleotide
aaagcaggcaaaggcauug

SEQ ID NO: 2966685 - RNA, 19 nt, Artificial Sequence
  Description of Artificial Sequence: Synthetic oligonucleotide
ugugccauucagcuuuucc

SEQ ID NO: 2966686 - RNA, 19 nt, Artificial Sequence
  Description of Artificial Sequence: Synthetic oligonucleotide
auagugaggaacaugguga

SEQ ID NO: 2966687 - RNA, 19 nt, Artificial Sequence
  Description of Artificial Sequence: Synthetic oligonucleotide
uguuugaggaugcggguga

SEQ ID NO: 2966688 - RNA, 19 nt, Artificial Sequence
  Description of Artificial Sequence: Synthetic oligonucleotide
gugaacuccacguaguuga

SEQ ID NO: 2966689 - RNA, 19 nt, Artificial Sequence
  Description of Artificial Sequence: Synthetic oligonucleotide
gccaagaacagccuagucg

SEQ ID NO: 2966690 - RNA, 19 nt, Artificial Sequence
  Description of Artificial Sequence: Synthetic oligonucleotide
agcuuuuccccaaacauag

SEQ ID NO: 2966691 - RNA, 19 nt, Artificial Sequence
  Description of Artificial Sequence: Synthetic oligonucleotide
ugccauucagcuuuucccc

SEQ ID NO: 2966692 - RNA, 19 nt, Artificial Sequence
  Description of Artificial Sequence: Synthetic oligonucleotide
uccucaugaaugaacccug

SEQ ID NO: 2966693 - RNA, 19 nt, Artificial Sequence
  Description of Artificial Sequence: Synthetic oligonucleotide
aaguugaugggccccggug

SEQ ID NO: 2966694 - RNA, 19 nt, Artificial Sequence
  Description of Artificial Sequence: Synthetic oligonucleotide
cauugggcagccaagaaca

SEQ ID NO: 2966695 - RNA, 19 nt, Artificial Sequence
  Description of Artificial Sequence: Synthetic oligonucleotide
ugugaaucggucacccaug

SEQ ID NO: 2966696 - RNA, 19 nt, Artificial Sequence
  Description of Artificial Sequence: Synthetic oligonucleotide
gucgucuuuguccuuggcg

SEQ ID NO: 2966697 - RNA, 19 nt, Artificial Sequence
  Description of Artificial Sequence: Synthetic oligonucleotide
aaacauagugaggaacaug

SEQ ID NO: 2966698 - RNA, 19 nt, Artificial Sequence
  Description of Artificial Sequence: Synthetic oligonucleotide
acguaguugaaguugcccu

SEQ ID NO: 2966699 - RNA, 19 nt, Artificial Sequence
  Description of Artificial Sequence: Synthetic oligonucleotide
ggcauugcggauuacgucc

SEQ ID NO: 2966700 - RNA, 19 nt, Artificial Sequence
  Description of Artificial Sequence: Synthetic oligonucleotide
uugcccuucuugucaaugg

SEQ ID NO: 2966701 - RNA, 19 nt, Artificial Sequence
  Description of Artificial Sequence: Synthetic oligonucleotide
gugccauucagcuuuuccc

SEQ ID NO: 2966702 - RNA, 19 nt, Artificial Sequence
  Description of Artificial Sequence: Synthetic oligonucleotide
caugucguggagauccucc

SEQ ID NO: 2966703 - RNA, 19 nt, Artificial Sequence
  Description of Artificial Sequence: Synthetic oligonucleotide
caucaugcccuccagguac

SEQ ID NO: 2966704 - RNA, 19 nt, Artificial Sequence
  Description of Artificial Sequence: Synthetic oligonucleotide
ugcccuucuugucaauggg

SEQ ID NO: 2966705 - RNA, 19 nt, Artificial Sequence
  Description of Artificial Sequence: Synthetic oligonucleotide
ucauccgugggguucuucc

SEQ ID NO: 2966706 - RNA, 19 nt, Artificial Sequence
  Description of Artificial Sequence: Synthetic oligonucleotide
uccagguacucauccgugg

SEQ ID NO: 2966707 - RNA, 19 nt, Artificial Sequence
  Description of Artificial Sequence: Synthetic oligonucleotide
ucgucugugaaucggucac

SEQ ID NO: 2966708 - RNA, 19 nt, Artificial Sequence
  Description of Artificial Sequence: Synthetic oligonucleotide
ucacccaugguggugagca

SEQ ID NO: 2966709 - RNA, 19 nt, Artificial Sequence
  Description of Artificial Sequence: Synthetic oligonucleotide
gaacccugaggccuccucg

SEQ ID NO: 2966710 - RNA, 19 nt, Artificial Sequence
  Description of Artificial Sequence: Synthetic oligonucleotide
uccucgucaaagcaggcaa

SEQ ID NO: 2966711 - RNA, 19 nt, Artificial Sequence
  Description of Artificial Sequence: Synthetic oligonucleotide
gaugcgggugaacuccacg

SEQ ID NO: 2966712 - RNA, 19 nt, Artificial Sequence
  Description of Artificial Sequence: Synthetic oligonucleotide
caggugguccucaugaaug

SEQ ID NO: 2966713 - RNA, 19 nt, Artificial Sequence
  Description of Artificial Sequence: Synthetic oligonucleotide
aaugggcgccucccgguac

SEQ ID NO: 2966714 - RNA, 19 nt, Artificial Sequence
  Description of Artificial Sequence: Synthetic oligonucleotide
auccgugggguucuucccc

SEQ ID NO: 2966715 - RNA, 19 nt, Artificial Sequence
  Description of Artificial Sequence: Synthetic oligonucleotide
aagaacagccuagucgucu

SEQ ID NO: 2966716 - RNA, 19 nt, Artificial Sequence
  Description of Artificial Sequence: Synthetic oligonucleotide
gcggauuacguccucaggg

SEQ ID NO: 2966717 - RNA, 19 nt, Artificial Sequence
  Description of Artificial Sequence: Synthetic oligonucleotide
cuuggcgccguguuugagg

SEQ ID NO: 2966718 - RNA, 19 nt, Artificial Sequence
  Description of Artificial Sequence: Synthetic oligonucleotide
caaugaagaccaucccggg

SEQ ID NO: 2966719 - RNA, 19 nt, Artificial Sequence
  Description of Artificial Sequence: Synthetic oligonucleotide
uggagauccuccuugucaa

SEQ ID NO: 2966720 - RNA, 19 nt, Artificial Sequence
  Description of Artificial Sequence: Synthetic oligonucleotide
ugcggauuacguccucagg

SEQ ID NO: 2966721 - RNA, 19 nt, Artificial Sequence
  Description of Artificial Sequence: Synthetic oligonucleotide
gguucuuccccagagaggc

SEQ ID NO: 2966722 - RNA, 19 nt, Artificial Sequence
  Description of Artificial Sequence: Synthetic oligonucleotide
aaugaacccugaggccucc

SEQ ID NO: 2966723 - RNA, 19 nt, Artificial Sequence
  Description of Artificial Sequence: Synthetic oligonucleotide
uugaggaugcgggugaacu

SEQ ID NO: 2966724 - RNA, 19 nt, Artificial Sequence
  Description of Artificial Sequence: Synthetic oligonucleotide
aggcauugcggauuacguc

SEQ ID NO: 2966725 - RNA, 19 nt, Artificial Sequence
  Description of Artificial Sequence: Synthetic oligonucleotide
aagaccaucccgggcagag

SEQ ID NO: 2966726 - RNA, 19 nt, Artificial Sequence
  Description of Artificial Sequence: Synthetic oligonucleotide
cucccgguacaucucaucc

SEQ ID NO: 2966727 - RNA, 19 nt, Artificial Sequence
  Description of Artificial Sequence: Synthetic oligonucleotide
agcaggcaaaggcauugcg

SEQ ID NO: 2966728 - RNA, 19 nt, Artificial Sequence
  Description of Artificial Sequence: Synthetic oligonucleotide
aagcaggcaaaggcauugc

SEQ ID NO: 2966729 - RNA, 19 nt, Artificial Sequence
  Description of Artificial Sequence: Synthetic oligonucleotide
aaggcauugcggauuacgu

SEQ ID NO: 2966730 - RNA, 19 nt, Artificial Sequence
  Description of Artificial Sequence: Synthetic oligonucleotide
ugaagaccaucccgggcag

SEQ ID NO: 2966731 - RNA, 19 nt, Artificial Sequence
  Description of Artificial Sequence: Synthetic oligonucleotide
gugaaucggucacccaugg

SEQ ID NO: 2966732 - RNA, 19 nt, Artificial Sequence
  Description of Artificial Sequence: Synthetic oligonucleotide
accuccucgucugugaauc

SEQ ID NO: 2966733 - RNA, 19 nt, Artificial Sequence
  Description of Artificial Sequence: Synthetic oligonucleotide
agauccuccuugucaauga

SEQ ID NO: 2966734 - RNA, 19 nt, Artificial Sequence
  Description of Artificial Sequence: Synthetic oligonucleotide
acguccucagggucugugc

SEQ ID NO: 2966735 - RNA, 19 nt, Artificial Sequence
  Description of Artificial Sequence: Synthetic oligonucleotide
ugaaguugcccuucuuguc

SEQ ID NO: 2966736 - RNA, 19 nt, Artificial Sequence
  Description of Artificial Sequence: Synthetic oligonucleotide
agagaggccaacaugucgu

SEQ ID NO: 2966737 - RNA, 19 nt, Artificial Sequence
  Description of Artificial Sequence: Synthetic oligonucleotide
ugggcauugggcagccaag

SEQ ID NO: 2966738 - RNA, 19 nt, Artificial Sequence
  Description of Artificial Sequence: Synthetic oligonucleotide
caggcaaaggcauugcgga

SEQ ID NO: 2966739 - RNA, 19 nt, Artificial Sequence
  Description of Artificial Sequence: Synthetic oligonucleotide
gucguggagauccuccuug

SEQ ID NO: 2966740 - RNA, 19 nt, Artificial Sequence
  Description of Artificial Sequence: Synthetic oligonucleotide
uugcggauuacguccucag

SEQ ID NO: 2966741 - RNA, 19 nt, Artificial Sequence
  Description of Artificial Sequence: Synthetic oligonucleotide
uuggcgccguguuugagga

SEQ ID NO: 2966742 - RNA, 19 nt, Artificial Sequence
  Description of Artificial Sequence: Synthetic oligonucleotide
guggagauccuccuuguca

SEQ ID NO: 2966743 - RNA, 19 nt, Artificial Sequence
  Description of Artificial Sequence: Synthetic oligonucleotide
gaggccaacaugucgugga

SEQ ID NO: 2966744 - RNA, 19 nt, Artificial Sequence
  Description of Artificial Sequence: Synthetic oligonucleotide
aacagccuagucgucuuug

SEQ ID NO: 2966745 - RNA, 19 nt, Artificial Sequence
  Description of Artificial Sequence: Synthetic oligonucleotide
cucaugaaugaacccugag

SEQ ID NO: 2966746 - RNA, 19 nt, Artificial Sequence
  Description of Artificial Sequence: Synthetic oligonucleotide
gucaaugggcgccucccgg

SEQ ID NO: 2966747 - RNA, 19 nt, Artificial Sequence
  Description of Artificial Sequence: Synthetic oligonucleotide
uagugaggaacauggugaa

SEQ ID NO: 2966748 - RNA, 19 nt, Artificial Sequence
  Description of Artificial Sequence: Synthetic oligonucleotide
cuugucaaugaagaccauc

SEQ ID NO: 2966749 - RNA, 19 nt, Artificial Sequence
  Description of Artificial Sequence: Synthetic oligonucleotide
aacccugaggccuccucgu

SEQ ID NO: 2966750 - RNA, 19 nt, Artificial Sequence
  Description of Artificial Sequence: Synthetic oligonucleotide
agucgucuuuguccuuggc

SEQ ID NO: 2966751 - RNA, 19 nt, Artificial Sequence
  Description of Artificial Sequence: Synthetic oligonucleotide
augcgggugaacuccacgu

SEQ ID NO: 2966752 - RNA, 19 nt, Artificial Sequence
  Description of Artificial Sequence: Synthetic oligonucleotide
gggguucuuccccagagag

SEQ ID NO: 2966753 - RNA, 19 nt, Artificial Sequence
  Description of Artificial Sequence: Synthetic oligonucleotide
gagauccuccuugucaaug

SEQ ID NO: 2966754 - RNA, 19 nt, Artificial Sequence
  Description of Artificial Sequence: Synthetic oligonucleotide
gaggccuccucgucaaagc

SEQ ID NO: 2966755 - RNA, 19 nt, Artificial Sequence
  Description of Artificial Sequence: Synthetic oligonucleotide
aaguugcccuucuugucaa

SEQ ID NO: 2966756 - RNA, 19 nt, Artificial Sequence
  Description of Artificial Sequence: Synthetic oligonucleotide
gaccaucccgggcagagca

SEQ ID NO: 2966757 - RNA, 19 nt, Artificial Sequence
  Description of Artificial Sequence: Synthetic oligonucleotide
uagucgucuuuguccuugg

SEQ ID NO: 2966758 - RNA, 19 nt, Artificial Sequence
  Description of Artificial Sequence: Synthetic oligonucleotide
ccguguuugaggaugcggg

SEQ ID NO: 2966759 - RNA, 19 nt, Artificial Sequence
  Description of Artificial Sequence: Synthetic oligonucleotide
ugaggccuccucgucaaag

SEQ ID NO: 2966760 - RNA, 19 nt, Artificial Sequence
  Description of Artificial Sequence: Synthetic oligonucleotide
cacguaguugaaguugccc

SEQ ID NO: 2966761 - RNA, 19 nt, Artificial Sequence
  Description of Artificial Sequence: Synthetic oligonucleotide
cagguacucauccgugggg

SEQ ID NO: 2966762 - RNA, 19 nt, Artificial Sequence
  Description of Artificial Sequence: Synthetic oligonucleotide
agccaagaacagccuaguc

SEQ ID NO: 2966763 - RNA, 19 nt, Artificial Sequence
  Description of Artificial Sequence: Synthetic oligonucleotide
guugaugggccccggugcc

SEQ ID NO: 2966764 - RNA, 19 nt, Artificial Sequence
  Description of Artificial Sequence: Synthetic oligonucleotide
ucccgggcagagcagaaaa

SEQ ID NO: 2966765 - RNA, 19 nt, Artificial Sequence
  Description of Artificial Sequence: Synthetic oligonucleotide
uccucgucugugaaucggu

SEQ ID NO: 2966766 - RNA, 19 nt, Artificial Sequence
  Description of Artificial Sequence: Synthetic oligonucleotide
ucaaugggcgccucccggu

SEQ ID NO: 2966767 - RNA, 19 nt, Artificial Sequence
  Description of Artificial Sequence: Synthetic oligonucleotide
cuagucgucuuuguccuug

SEQ ID NO: 2966768 - RNA, 19 nt, Artificial Sequence
  Description of Artificial Sequence: Synthetic oligonucleotide
cuccacguaguugaaguug

SEQ ID NO: 2966769 - RNA, 19 nt, Artificial Sequence
  Description of Artificial Sequence: Synthetic oligonucleotide
agggucugugccauucagc

SEQ ID NO: 2966770 - RNA, 19 nt, Artificial Sequence
  Description of Artificial Sequence: Synthetic oligonucleotide
uaguugaaguugcccuucu

SEQ ID NO: 2966771 - RNA, 19 nt, Artificial Sequence
  Description of Artificial Sequence: Synthetic oligonucleotide
ugaggaugcgggugaacuc

SEQ ID NO: 2966772 - RNA, 19 nt, Artificial Sequence
  Description of Artificial Sequence: Synthetic oligonucleotide
ucaucaugcccuccaggua

SEQ ID NO: 2966773 - RNA, 19 nt, Artificial Sequence
  Description of Artificial Sequence: Synthetic oligonucleotide
gugaaguugaugggccccg

SEQ ID NO: 2966774 - RNA, 19 nt, Artificial Sequence
  Description of Artificial Sequence: Synthetic oligonucleotide
aggugguccucaugaauga

SEQ ID NO: 2966775 - RNA, 19 nt, Artificial Sequence
  Description of Artificial Sequence: Synthetic oligonucleotide
ucugugaaucggucaccca

SEQ ID NO: 2966776 - RNA, 19 nt, Artificial Sequence
  Description of Artificial Sequence: Synthetic oligonucleotide
ggugccucgcucaucaugc

SEQ ID NO: 2966777 - RNA, 19 nt, Artificial Sequence
  Description of Artificial Sequence: Synthetic oligonucleotide
ucccgguacaucucaucca

SEQ ID NO: 2966778 - RNA, 19 nt, Artificial Sequence
  Description of Artificial Sequence: Synthetic oligonucleotide
gcaggcaaaggcauugcgg

SEQ ID NO: 2966779 - RNA, 19 nt, Artificial Sequence
  Description of Artificial Sequence: Synthetic oligonucleotide
gagaggccaacaugucgug

SEQ ID NO: 2966780 - RNA, 19 nt, Artificial Sequence
  Description of Artificial Sequence: Synthetic oligonucleotide
augucguggagauccuccu

SEQ ID NO: 2966781 - RNA, 19 nt, Artificial Sequence
  Description of Artificial Sequence: Synthetic oligonucleotide
cauccgugggguucuuccc

SEQ ID NO: 2966782 - RNA, 19 nt, Artificial Sequence
  Description of Artificial Sequence: Synthetic oligonucleotide
uugggcagccaagaacagc

SEQ ID NO: 2966783 - RNA, 19 nt, Artificial Sequence
  Description of Artificial Sequence: Synthetic oligonucleotide
ugaacuccacguaguugaa

SEQ ID NO: 2966784 - RNA, 19 nt, Artificial Sequence
  Description of Artificial Sequence: Synthetic oligonucleotide
ugaaucggucacccauggu

SEQ ID NO: 2966785 - RNA, 19 nt, Artificial Sequence
  Description of Artificial Sequence: Synthetic oligonucleotide
gucuuuguccuuggcgccg

SEQ ID NO: 2966786 - RNA, 19 nt, Artificial Sequence
  Description of Artificial Sequence: Synthetic oligonucleotide
aggccaacaugucguggag

SEQ ID NO: 2966787 - RNA, 19 nt, Artificial Sequence
  Description of Artificial Sequence: Synthetic oligonucleotide
guguuugaggaugcgggug

SEQ ID NO: 2966788 - RNA, 19 nt, Artificial Sequence
  Description of Artificial Sequence: Synthetic oligonucleotide
agaggccaacaugucgugg

SEQ ID NO: 2966789 - RNA, 19 nt, Artificial Sequence
  Description of Artificial Sequence: Synthetic oligonucleotide
acagccuagucgucuuugu

SEQ ID NO: 2966790 - RNA, 19 nt, Artificial Sequence
  Description of Artificial Sequence: Synthetic oligonucleotide
agaacagccuagucgucuu

SEQ ID NO: 2966791 - RNA, 19 nt, Artificial Sequence
  Description of Artificial Sequence: Synthetic oligonucleotide
gcauugggcagccaagaac

SEQ ID NO: 2966792 - RNA, 19 nt, Artificial Sequence
  Description of Artificial Sequence: Synthetic oligonucleotide
agguacucauccguggggu

SEQ ID NO: 2966793 - RNA, 19 nt, Artificial Sequence
  Description of Artificial Sequence: Synthetic oligonucleotide
ugaacccugaggccuccuc

SEQ ID NO: 2966794 - RNA, 19 nt, Artificial Sequence
  Description of Artificial Sequence: Synthetic oligonucleotide
ucguggagauccuccuugu

SEQ ID NO: 2966795 - RNA, 19 nt, Artificial Sequence
  Description of Artificial Sequence: Synthetic oligonucleotide
cuccucgucugugaaucgg

SEQ ID NO: 2966796 - RNA, 19 nt, Artificial Sequence
  Description of Artificial Sequence: Synthetic oligonucleotide
uuguccuuggcgccguguu

SEQ ID NO: 2966797 - RNA, 19 nt, Artificial Sequence
  Description of Artificial Sequence: Synthetic oligonucleotide
auugcggauuacguccuca

SEQ ID NO: 2966798 - RNA, 19 nt, Artificial Sequence
  Description of Artificial Sequence: Synthetic oligonucleotide
cagggucugugccauucag

SEQ ID NO: 2966799 - RNA, 19 nt, Artificial Sequence
  Description of Artificial Sequence: Synthetic oligonucleotide
uccgugggguucuucccca

SEQ ID NO: 2966800 - RNA, 19 nt, Artificial Sequence
  Description of Artificial Sequence: Synthetic oligonucleotide
gugguccucaugaaugaac

SEQ ID NO: 2966801 - RNA, 19 nt, Artificial Sequence
  Description of Artificial Sequence: Synthetic oligonucleotide
cucgucugugaaucgguca

SEQ ID NO: 2966802 - RNA, 19 nt, Artificial Sequence
  Description of Artificial Sequence: Synthetic oligonucleotide
uacucauccgugggguucu

SEQ ID NO: 2966803 - RNA, 19 nt, Artificial Sequence
  Description of Artificial Sequence: Synthetic oligonucleotide
aggccuccucgucaaagca

SEQ ID NO: 2966804 - RNA, 19 nt, Artificial Sequence
  Description of Artificial Sequence: Synthetic oligonucleotide
gaaugaacccugaggccuc

SEQ ID NO: 2966805 - RNA, 19 nt, Artificial Sequence
  Description of Artificial Sequence: Synthetic oligonucleotide
guccuuggcgccguguuug

SEQ ID NO: 2966806 - RNA, 19 nt, Artificial Sequence
  Description of Artificial Sequence: Synthetic oligonucleotide
gguccucaugaaugaaccc

SEQ ID NO: 2966807 - RNA, 19 nt, Artificial Sequence
  Description of Artificial Sequence: Synthetic oligonucleotide
uucuugucaaugggcgccu

SEQ ID NO: 2966808 - RNA, 19 nt, Artificial Sequence
  Description of Artificial Sequence: Synthetic oligonucleotide
gcagccaagaacagccuag

SEQ ID NO: 2966809 - RNA, 19 nt, Artificial Sequence
  Description of Artificial Sequence: Synthetic oligonucleotide
acaugucguggagauccuc

SEQ ID NO: 2966810 - RNA, 19 nt, Artificial Sequence
  Description of Artificial Sequence: Synthetic oligonucleotide
ccagguacucauccguggg

SEQ ID NO: 2966811 - RNA, 19 nt, Artificial Sequence
  Description of Artificial Sequence: Synthetic oligonucleotide
gcucaucaugcccuccagg

SEQ ID NO: 2966812 - RNA, 19 nt, Artificial Sequence
  Description of Artificial Sequence: Synthetic oligonucleotide
gauccuccuugucaaugaa

SEQ ID NO: 2966813 - RNA, 19 nt, Artificial Sequence
  Description of Artificial Sequence: Synthetic oligonucleotide
ccaagaacagccuagucgu

SEQ ID NO: 2966814 - RNA, 19 nt, Artificial Sequence
  Description of Artificial Sequence: Synthetic oligonucleotide
agaccaucccgggcagagc

SEQ ID NO: 2966815 - RNA, 19 nt, Artificial Sequence
  Description of Artificial Sequence: Synthetic oligonucleotide
uuugaggaugcgggugaac

SEQ ID NO: 2966816 - RNA, 19 nt, Artificial Sequence
  Description of Artificial Sequence: Synthetic oligonucleotide
cagcuuuuccccaaacaua

SEQ ID NO: 2966817 - RNA, 19 nt, Artificial Sequence
  Description of Artificial Sequence: Synthetic oligonucleotide
cucagggucugugccauuc

SEQ ID NO: 2966818 - RNA, 19 nt, Artificial Sequence
  Description of Artificial Sequence: Synthetic oligonucleotide
gccuccucgucaaagcagg

SEQ ID NO: 2966819 - RNA, 19 nt, Artificial Sequence
  Description of Artificial Sequence: Synthetic oligonucleotide
ugguggugagcagcucccg

SEQ ID NO: 2966820 - RNA, 19 nt, Artificial Sequence
  Description of Artificial Sequence: Synthetic oligonucleotide
caagaacagccuagucguc

SEQ ID NO: 2966821 - RNA, 19 nt, Artificial Sequence
  Description of Artificial Sequence: Synthetic oligonucleotide
uuccccagagaggccaaca

SEQ ID NO: 2966822 - RNA, 19 nt, Artificial Sequence
  Description of Artificial Sequence: Synthetic oligonucleotide
guccucaugaaugaacccu

SEQ ID NO: 2966823 - RNA, 19 nt, Artificial Sequence
  Description of Artificial Sequence: Synthetic oligonucleotide
ugucguggagauccuccuu

SEQ ID NO: 2966824 - RNA, 19 nt, Artificial Sequence
  Description of Artificial Sequence: Synthetic oligonucleotide
acuccacguaguugaaguu

SEQ ID NO: 2966825 - RNA, 19 nt, Artificial Sequence
  Description of Artificial Sequence: Synthetic oligonucleotide
guacucauccgugggguuc

SEQ ID NO: 2966826 - RNA, 19 nt, Artificial Sequence
  Description of Artificial Sequence: Synthetic oligonucleotide
acccugaggccuccucguc

SEQ ID NO: 2966827 - RNA, 19 nt, Artificial Sequence
  Description of Artificial Sequence: Synthetic oligonucleotide
gaugggccccggugccucg

SEQ ID NO: 2966828 - RNA, 19 nt, Artificial Sequence
  Description of Artificial Sequence: Synthetic oligonucleotide
aucggucacccaugguggu

SEQ ID NO: 2966829 - RNA, 19 nt, Artificial Sequence
  Description of Artificial Sequence: Synthetic oligonucleotide
auugggcagccaagaacag

SEQ ID NO: 2966830 - RNA, 19 nt, Artificial Sequence
  Description of Artificial Sequence: Synthetic oligonucleotide
aacaugucguggagauccu

SEQ ID NO: 2966831 - RNA, 19 nt, Artificial Sequence
  Description of Artificial Sequence: Synthetic oligonucleotide
ggauuacguccucaggguc

SEQ ID NO: 2966832 - RNA, 19 nt, Artificial Sequence
  Description of Artificial Sequence: Synthetic oligonucleotide
ucuuuguccuuggcgccgu

SEQ ID NO: 2966833 - RNA, 19 nt, Artificial Sequence
  Description of Artificial Sequence: Synthetic oligonucleotide
gggucugugccauucagcu

SEQ ID NO: 2966834 - RNA, 19 nt, Artificial Sequence
  Description of Artificial Sequence: Synthetic oligonucleotide
uguccuuggcgccguguuu

SEQ ID NO: 2966835 - RNA, 19 nt, Artificial Sequence
  Description of Artificial Sequence: Synthetic oligonucleotide
acauagugaggaacauggu

SEQ ID NO: 2966836 - RNA, 19 nt, Artificial Sequence
  Description of Artificial Sequence: Synthetic oligonucleotide
aggcaaaggcauugcggau

SEQ ID NO: 2966837 - RNA, 19 nt, Artificial Sequence
  Description of Artificial Sequence: Synthetic oligonucleotide
cugugaaucggucacccau

SEQ ID NO: 2966838 - RNA, 19 nt, Artificial Sequence
  Description of Artificial Sequence: Synthetic oligonucleotide
cagccuagucgucuuuguc

SEQ ID NO: 2966839 - RNA, 19 nt, Artificial Sequence
  Description of Artificial Sequence: Synthetic oligonucleotide
cccgguacaucucauccac

SEQ ID NO: 2966840 - RNA, 19 nt, Artificial Sequence
  Description of Artificial Sequence: Synthetic oligonucleotide
gguacaucucauccaccuc

SEQ ID NO: 2966841 - RNA, 19 nt, Artificial Sequence
  Description of Artificial Sequence: Synthetic oligonucleotide
gggucugggcauugggcag

SEQ ID NO: 2966842 - RNA, 19 nt, Artificial Sequence
  Description of Artificial Sequence: Synthetic oligonucleotide
ggcgccguguuugaggaug

SEQ ID NO: 2966843 - RNA, 19 nt, Artificial Sequence
  Description of Artificial Sequence: Synthetic oligonucleotide
cugggcauugggcagccaa

SEQ ID NO: 2966844 - RNA, 19 nt, Artificial Sequence
  Description of Artificial Sequence: Synthetic oligonucleotide
uccuuggcgccguguuuga

SEQ ID NO: 2966845 - RNA, 19 nt, Artificial Sequence
  Description of Artificial Sequence: Synthetic oligonucleotide
gccguguuugaggaugcgg

SEQ ID NO: 2966846 - RNA, 19 nt, Artificial Sequence
  Description of Artificial Sequence: Synthetic oligonucleotide
ggguucuuccccagagagg

SEQ ID NO: 2966847 - RNA, 19 nt, Artificial Sequence
  Description of Artificial Sequence: Synthetic oligonucleotide
augggcgccucccgguaca

SEQ ID NO: 2966848 - RNA, 19 nt, Artificial Sequence
  Description of Artificial Sequence: Synthetic oligonucleotide
gaaguugaugggccccggu

SEQ ID NO: 2966849 - RNA, 19 nt, Artificial Sequence
  Description of Artificial Sequence: Synthetic oligonucleotide
cccagagaggccaacaugu

SEQ ID NO: 2966850 - RNA, 19 nt, Artificial Sequence
  Description of Artificial Sequence: Synthetic oligonucleotide
ugaugggccccggugccuc

SEQ ID NO: 2966851 - RNA, 19 nt, Artificial Sequence
  Description of Artificial Sequence: Synthetic oligonucleotide
cacccaugguggugagcag

SEQ ID NO: 2966852 - RNA, 19 nt, Artificial Sequence
  Description of Artificial Sequence: Synthetic oligonucleotide
uugaugggccccggugccu

SEQ ID NO: 2966853 - RNA, 19 nt, Artificial Sequence
  Description of Artificial Sequence: Synthetic oligonucleotide
cccuccagguacucauccg

SEQ ID NO: 2966854 - RNA, 19 nt, Artificial Sequence
  Description of Artificial Sequence: Synthetic oligonucleotide
cauugcggauuacguccuc

SEQ ID NO: 2966855 - RNA, 19 nt, Artificial Sequence
  Description of Artificial Sequence: Synthetic oligonucleotide
gccauucagcuuuucccca

SEQ ID NO: 2966856 - RNA, 19 nt, Artificial Sequence
  Description of Artificial Sequence: Synthetic oligonucleotide
ggccuccucgucaaagcag

SEQ ID NO: 2966857 - RNA, 19 nt, Artificial Sequence
  Description of Artificial Sequence: Synthetic oligonucleotide
gugccucgcucaucaugcc

SEQ ID NO: 2966858 - RNA, 19 nt, Artificial Sequence
  Description of Artificial Sequence: Synthetic oligonucleotide
gcccuucuugucaaugggc

SEQ ID NO: 2966859 - RNA, 19 nt, Artificial Sequence
  Description of Artificial Sequence: Synthetic oligonucleotide
gcaaaggcauugcggauua

SEQ ID NO: 2966860 - RNA, 19 nt, Artificial Sequence
  Description of Artificial Sequence: Synthetic oligonucleotide
agcucccgcaggugguccu

SEQ ID NO: 2966861 - RNA, 19 nt, Artificial Sequence
  Description of Artificial Sequence: Synthetic oligonucleotide
aguugcccuucuugucaau

SEQ ID NO: 2966862 - RNA, 19 nt, Artificial Sequence
  Description of Artificial Sequence: Synthetic oligonucleotide
aucaugcccuccagguacu

SEQ ID NO: 2966863 - RNA, 19 nt, Artificial Sequence
  Description of Artificial Sequence: Synthetic oligonucleotide
cucgcucaucaugcccucc

SEQ ID NO: 2966864 - RNA, 19 nt, Artificial Sequence
  Description of Artificial Sequence: Synthetic oligonucleotide
gccaacaugucguggagau

SEQ ID NO: 2966865 - RNA, 19 nt, Artificial Sequence
  Description of Artificial Sequence: Synthetic oligonucleotide
ggucugggcauugggcagc

SEQ ID NO: 2966866 - RNA, 19 nt, Artificial Sequence
  Description of Artificial Sequence: Synthetic oligonucleotide
ucuugucaaugggcgccuc

SEQ ID NO: 2966867 - RNA, 19 nt, Artificial Sequence
  Description of Artificial Sequence: Synthetic oligonucleotide
augggccccggugccucgc

SEQ ID NO: 2966868 - RNA, 19 nt, Artificial Sequence
  Description of Artificial Sequence: Synthetic oligonucleotide
gccuagucgucuuuguccu

SEQ ID NO: 2966869 - RNA, 19 nt, Artificial Sequence
  Description of Artificial Sequence: Synthetic oligonucleotide
cguccucagggucugugcc

SEQ ID NO: 2966870 - RNA, 19 nt, Artificial Sequence
  Description of Artificial Sequence: Synthetic oligonucleotide
cgucuuuguccuuggcgcc

SEQ ID NO: 2966871 - RNA, 19 nt, Artificial Sequence
  Description of Artificial Sequence: Synthetic oligonucleotide
ccacguaguugaaguugcc

SEQ ID NO: 2966872 - RNA, 19 nt, Artificial Sequence
  Description of Artificial Sequence: Synthetic oligonucleotide
aggaugcgggugaacucca

SEQ ID NO: 2966873 - RNA, 19 nt, Artificial Sequence
  Description of Artificial Sequence: Synthetic oligonucleotide
agcagcucccgcagguggu

SEQ ID NO: 2966874 - RNA, 19 nt, Artificial Sequence
  Description of Artificial Sequence: Synthetic oligonucleotide
gucugggcauugggcagcc

SEQ ID NO: 2966875 - RNA, 19 nt, Artificial Sequence
  Description of Artificial Sequence: Synthetic oligonucleotide
caaacauagugaggaacau

SEQ ID NO: 2966876 - RNA, 19 nt, Artificial Sequence
  Description of Artificial Sequence: Synthetic oligonucleotide
ggcgccucccgguacaucu

SEQ ID NO: 2966877 - RNA, 19 nt, Artificial Sequence
  Description of Artificial Sequence: Synthetic oligonucleotide
ccagagaggccaacauguc

SEQ ID NO: 2966878 - RNA, 19 nt, Artificial Sequence
  Description of Artificial Sequence: Synthetic oligonucleotide
ccccagagaggccaacaug

SEQ ID NO: 2966879 - RNA, 19 nt, Artificial Sequence
  Description of Artificial Sequence: Synthetic oligonucleotide
ccuccucgucugugaaucg

SEQ ID NO: 2966880 - RNA, 19 nt, Artificial Sequence
  Description of Artificial Sequence: Synthetic oligonucleotide
gaagaccaucccgggcaga

SEQ ID NO: 2966881 - RNA, 19 nt, Artificial Sequence
  Description of Artificial Sequence: Synthetic oligonucleotide
accaucccgggcagagcag

SEQ ID NO: 2966882 - RNA, 19 nt, Artificial Sequence
  Description of Artificial Sequence: Synthetic oligonucleotide
ggcauugggcagccaagaa

SEQ ID NO: 2966883 - RNA, 19 nt, Artificial Sequence
  Description of Artificial Sequence: Synthetic oligonucleotide
ccgcaggugguccucauga

SEQ ID NO: 2966884 - RNA, 19 nt, Artificial Sequence
  Description of Artificial Sequence: Synthetic oligonucleotide
gucacccaugguggugagc

SEQ ID NO: 2966885 - RNA, 19 nt, Artificial Sequence
  Description of Artificial Sequence: Synthetic oligonucleotide
ccucgucugugaaucgguc

SEQ ID NO: 2966886 - RNA, 19 nt, Artificial Sequence
  Description of Artificial Sequence: Synthetic oligonucleotide
cccgggcagagcagaaaag

SEQ ID NO: 2966887 - RNA, 19 nt, Artificial Sequence
  Description of Artificial Sequence: Synthetic oligonucleotide
caaaggcauugcggauuac

SEQ ID NO: 2966888 - RNA, 19 nt, Artificial Sequence
  Description of Artificial Sequence: Synthetic oligonucleotide
ccgguacaucucauccacc

SEQ ID NO: 2966889 - RNA, 19 nt, Artificial Sequence
  Description of Artificial Sequence: Synthetic oligonucleotide
ucaugcccuccagguacuc

SEQ ID NO: 2966890 - RNA, 19 nt, Artificial Sequence
  Description of Artificial Sequence: Synthetic oligonucleotide
ggucacccaugguggugag

SEQ ID NO: 2966891 - RNA, 19 nt, Artificial Sequence
  Description of Artificial Sequence: Synthetic oligonucleotide
ggcagccaagaacagccua

SEQ ID NO: 2966892 - RNA, 19 nt, Artificial Sequence
  Description of Artificial Sequence: Synthetic oligonucleotide
caugcccuccagguacuca

SEQ ID NO: 2966893 - RNA, 19 nt, Artificial Sequence
  Description of Artificial Sequence: Synthetic oligonucleotide
caaagcaggcaaaggcauu

SEQ ID NO: 2966894 - RNA, 19 nt, Artificial Sequence
  Description of Artificial Sequence: Synthetic oligonucleotide
ccucaugaaugaacccuga

SEQ ID NO: 2966895 - RNA, 19 nt, Artificial Sequence
  Description of Artificial Sequence: Synthetic oligonucleotide
ugggccccggugccucgcu

SEQ ID NO: 2966896 - RNA, 19 nt, Artificial Sequence
  Description of Artificial Sequence: Synthetic oligonucleotide
ccuccucgucaaagcaggc

SEQ ID NO: 2966897 - RNA, 19 nt, Artificial Sequence
  Description of Artificial Sequence: Synthetic oligonucleotide
gggcauugggcagccaaga

SEQ ID NO: 2966898 - RNA, 19 nt, Artificial Sequence
  Description of Artificial Sequence: Synthetic oligonucleotide
cucauccgugggguucuuc

SEQ ID NO: 2966899 - RNA, 19 nt, Artificial Sequence
  Description of Artificial Sequence: Synthetic oligonucleotide
cccggugccucgcucauca

SEQ ID NO: 2966900 - RNA, 19 nt, Artificial Sequence
  Description of Artificial Sequence: Synthetic oligonucleotide
aucccgggcagagcagaaa

SEQ ID NO: 2966901 - RNA, 19 nt, Artificial Sequence
  Description of Artificial Sequence: Synthetic oligonucleotide
caucccgggcagagcagaa

SEQ ID NO: 2966902 - RNA, 19 nt, Artificial Sequence
  Description of Artificial Sequence: Synthetic oligonucleotide
ccucccgguacaucucauc

SEQ ID NO: 2966903 - RNA, 19 nt, Artificial Sequence
  Description of Artificial Sequence: Synthetic oligonucleotide
gaacagccuagucgucuuu

SEQ ID NO: 2966904 - RNA, 19 nt, Artificial Sequence
  Description of Artificial Sequence: Synthetic oligonucleotide
caaugggcgccucccggua

SEQ ID NO: 2966905 - RNA, 19 nt, Artificial Sequence
  Description of Artificial Sequence: Synthetic oligonucleotide
ucccgcaggugguccucau

SEQ ID NO: 2966906 - RNA, 19 nt, Artificial Sequence
  Description of Artificial Sequence: Synthetic oligonucleotide
augaacccugaggccuccu

SEQ ID NO: 2966907 - RNA, 19 nt, Artificial Sequence
  Description of Artificial Sequence: Synthetic oligonucleotide
ucugggcauugggcagcca

SEQ ID NO: 2966908 - RNA, 19 nt, Artificial Sequence
  Description of Artificial Sequence: Synthetic oligonucleotide
ccauucagcuuuuccccaa

SEQ ID NO: 2966909 - RNA, 19 nt, Artificial Sequence
  Description of Artificial Sequence: Synthetic oligonucleotide
ggccaacaugucguggaga

SEQ ID NO: 2966910 - RNA, 19 nt, Artificial Sequence
  Description of Artificial Sequence: Synthetic oligonucleotide
gcaggugguccucaugaau

SEQ ID NO: 2966911 - RNA, 19 nt, Artificial Sequence
  Description of Artificial Sequence: Synthetic oligonucleotide
ggugguccucaugaaugaa

SEQ ID NO: 2966912 - RNA, 19 nt, Artificial Sequence
  Description of Artificial Sequence: Synthetic oligonucleotide
ggcaaaggcauugcggauu

SEQ ID NO: 2966913 - RNA, 19 nt, Artificial Sequence
  Description of Artificial Sequence: Synthetic oligonucleotide
ccugaggccuccucgucaa

SEQ ID NO: 2966914 - RNA, 19 nt, Artificial Sequence
  Description of Artificial Sequence: Synthetic oligonucleotide
cagccaagaacagccuagu

SEQ ID NO: 2966915 - RNA, 19 nt, Artificial Sequence
  Description of Artificial Sequence: Synthetic oligonucleotide
uggcgccguguuugaggau

SEQ ID NO: 2966916 - RNA, 19 nt, Artificial Sequence
  Description of Artificial Sequence: Synthetic oligonucleotide
ggccccggugccucgcuca

SEQ ID NO: 2966917 - RNA, 19 nt, Artificial Sequence
  Description of Artificial Sequence: Synthetic oligonucleotide
cggugccucgcucaucaug

SEQ ID NO: 2966918 - RNA, 19 nt, Artificial Sequence
  Description of Artificial Sequence: Synthetic oligonucleotide
cgucugugaaucggucacc

SEQ ID NO: 2966919 - RNA, 19 nt, Artificial Sequence
  Description of Artificial Sequence: Synthetic oligonucleotide
gccucgcucaucaugcccu

SEQ ID NO: 2966920 - RNA, 19 nt, Artificial Sequence
  Description of Artificial Sequence: Synthetic oligonucleotide
ccaacaugucguggagauc

SEQ ID NO: 2966921 - RNA, 19 nt, Artificial Sequence
  Description of Artificial Sequence: Synthetic oligonucleotide
gcgccguguuugaggaugc

SEQ ID NO: 2966922 - RNA, 19 nt, Artificial Sequence
  Description of Artificial Sequence: Synthetic oligonucleotide
cccugaggccuccucguca

SEQ ID NO: 2966923 - RNA, 19 nt, Artificial Sequence
  Description of Artificial Sequence: Synthetic oligonucleotide
ccucgcucaucaugcccuc

SEQ ID NO: 2966924 - RNA, 19 nt, Artificial Sequence
  Description of Artificial Sequence: Synthetic oligonucleotide
ggaugcgggugaacuccac

SEQ ID NO: 2966925 - RNA, 19 nt, Artificial Sequence
  Description of Artificial Sequence: Synthetic oligonucleotide
gggugaacuccacguaguu

SEQ ID NO: 2966926 - RNA, 19 nt, Artificial Sequence
  Description of Artificial Sequence: Synthetic oligonucleotide
cguggagauccuccuuguc

SEQ ID NO: 2966927 - RNA, 19 nt, Artificial Sequence
  Description of Artificial Sequence: Synthetic oligonucleotide
ugggcgccucccgguacau

SEQ ID NO: 2966928 - RNA, 19 nt, Artificial Sequence
  Description of Artificial Sequence: Synthetic oligonucleotide
cggauuacguccucagggu

SEQ ID NO: 2966929 - RNA, 19 nt, Artificial Sequence
  Description of Artificial Sequence: Synthetic oligonucleotide
gguacucauccgugggguu

SEQ ID NO: 2966930 - RNA, 19 nt, Artificial Sequence
  Description of Artificial Sequence: Synthetic oligonucleotide
gcauugcggauuacguccu

SEQ ID NO: 2966931 - RNA, 19 nt, Artificial Sequence
  Description of Artificial Sequence: Synthetic oligonucleotide
ccgugggguucuuccccag

SEQ ID NO: 2966932 - RNA, 19 nt, Artificial Sequence
  Description of Artificial Sequence: Synthetic oligonucleotide
cccgcaggugguccucaug

SEQ ID NO: 2966933 - RNA, 19 nt, Artificial Sequence
  Description of Artificial Sequence: Synthetic oligonucleotide
ggagauccuccuugucaau

SEQ ID NO: 2966934 - RNA, 19 nt, Artificial Sequence
  Description of Artificial Sequence: Synthetic oligonucleotide
ccgggcagagcagaaaagu

SEQ ID NO: 2966935 - RNA, 19 nt, Artificial Sequence
  Description of Artificial Sequence: Synthetic oligonucleotide
ggucugugccauucagcuu

SEQ ID NO: 2966936 - RNA, 19 nt, Artificial Sequence
  Description of Artificial Sequence: Synthetic oligonucleotide
cucccgcaggugguccuca

SEQ ID NO: 2966937 - RNA, 19 nt, Artificial Sequence
  Description of Artificial Sequence: Synthetic oligonucleotide
cguguuugaggaugcgggu

SEQ ID NO: 2966938 - RNA, 19 nt, Artificial Sequence
  Description of Artificial Sequence: Synthetic oligonucleotide
ccaucccgggcagagcaga

SEQ ID NO: 2966939 - RNA, 19 nt, Artificial Sequence
  Description of Artificial Sequence: Synthetic oligonucleotide
caccuccucgucugugaau

SEQ ID NO: 2966940 - RNA, 19 nt, Artificial Sequence
  Description of Artificial Sequence: Synthetic oligonucleotide
cugaggccuccucgucaaa

SEQ ID NO: 2966941 - RNA, 19 nt, Artificial Sequence
  Description of Artificial Sequence: Synthetic oligonucleotide
gcuuuuccccaaacauagu

SEQ ID NO: 2966942 - RNA, 19 nt, Artificial Sequence
  Description of Artificial Sequence: Synthetic oligonucleotide
ccaccuccucgucugugaa

SEQ ID NO: 2966943 - RNA, 19 nt, Artificial Sequence
  Description of Artificial Sequence: Synthetic oligonucleotide
acucauccgugggguucuu

SEQ ID NO: 2966944 - RNA, 19 nt, Artificial Sequence
  Description of Artificial Sequence: Synthetic oligonucleotide
cggucacccauggugguga

SEQ ID NO: 2966945 - RNA, 19 nt, Artificial Sequence
  Description of Artificial Sequence: Synthetic oligonucleotide
cgccguguuugaggaugcg

SEQ ID NO: 2966946 - RNA, 19 nt, Artificial Sequence
  Description of Artificial Sequence: Synthetic oligonucleotide
cgcaggugguccucaugaa

SEQ ID NO: 2966947 - RNA, 19 nt, Artificial Sequence
  Description of Artificial Sequence: Synthetic oligonucleotide
gggccccggugccucgcuc

SEQ ID NO: 2966948 - RNA, 19 nt, Artificial Sequence
  Description of Artificial Sequence: Synthetic oligonucleotide
gggcagccaagaacagccu

SEQ ID NO: 2966949 - RNA, 19 nt, Artificial Sequence
  Description of Artificial Sequence: Synthetic oligonucleotide
gcgccucccgguacaucuc

SEQ ID NO: 2966950 - RNA, 19 nt, Artificial Sequence
  Description of Artificial Sequence: Synthetic oligonucleotide
gggcgccucccgguacauc

SEQ ID NO: 2966951 - RNA, 19 nt, Artificial Sequence
  Description of Artificial Sequence: Synthetic oligonucleotide
ccuagucgucuuuguccuu

SEQ ID NO: 2966952 - RNA, 19 nt, Artificial Sequence
  Description of Artificial Sequence: Synthetic oligonucleotide
gccccggugccucgcucau

SEQ ID NO: 2966953 - RNA, 19 nt, Artificial Sequence
  Description of Artificial Sequence: Synthetic oligonucleotide
ccccggugccucgcucauc

SEQ ID NO: 2966954 - RNA, 19 nt, Artificial Sequence
  Description of Artificial Sequence: Synthetic oligonucleotide
ccucagggucugugccauu

SEQ ID NO: 2966955 - RNA, 19 nt, Artificial Sequence
  Description of Artificial Sequence: Synthetic oligonucleotide
ccggugccucgcucaucau

SEQ ID NO: 2966956 - RNA, 19 nt, Artificial Sequence
  Description of Artificial Sequence: Synthetic oligonucleotide
uuuaguuuauccuuaaugg

SEQ ID NO: 2966957 - RNA, 19 nt, Artificial Sequence
  Description of Artificial Sequence: Synthetic oligonucleotide
uuuuauaccggucauaucc

SEQ ID NO: 2966958 - RNA, 19 nt, Artificial Sequence
  Description of Artificial Sequence: Synthetic oligonucleotide
aaugguuucugacagaugu

SEQ ID NO: 2966959 - RNA, 19 nt, Artificial Sequence
  Description of Artificial Sequence: Synthetic oligonucleotide
aauauagguguucucgggc

SEQ ID NO: 2966960 - RNA, 19 nt, Artificial Sequence
  Description of Artificial Sequence: Synthetic oligonucleotide
auggaugcagucuuuaacc

SEQ ID NO: 2966961 - RNA, 19 nt, Artificial Sequence
  Description of Artificial Sequence: Synthetic oligonucleotide
agucuuuaaccacagaggg

SEQ ID NO: 2966962 - RNA, 19 nt, Artificial Sequence
  Description of Artificial Sequence: Synthetic oligonucleotide
aauauucagcacuugccag

SEQ ID NO: 2966963 - RNA, 19 nt, Artificial Sequence
  Description of Artificial Sequence: Synthetic oligonucleotide
caaacuaccaaaugaagac

SEQ ID NO: 2966964 - RNA, 19 nt, Artificial Sequence
  Description of Artificial Sequence: Synthetic oligonucleotide
aaucacuacuugcaccacc

SEQ ID NO: 2966965 - RNA, 19 nt, Artificial Sequence
  Description of Artificial Sequence: Synthetic oligonucleotide
caugaauacuccuucaccc

SEQ ID NO: 2966966 - RNA, 19 nt, Artificial Sequence
  Description of Artificial Sequence: Synthetic oligonucleotide
ugugagaugaggcauuuca

SEQ ID NO: 2966967 - RNA, 19 nt, Artificial Sequence
  Description of Artificial Sequence: Synthetic oligonucleotide
aaaccuuugcuggaaaacg

SEQ ID NO: 2966968 - RNA, 19 nt, Artificial Sequence
  Description of Artificial Sequence: Synthetic oligonucleotide
uuuuguaccaaacuaccaa

SEQ ID NO: 2966969 - RNA, 19 nt, Artificial Sequence
  Description of Artificial Sequence: Synthetic oligonucleotide
agaauauucagcacuugcc

SEQ ID NO: 2966970 - RNA, 19 nt, Artificial Sequence
  Description of Artificial Sequence: Synthetic oligonucleotide
agaauauagguguucucgg

SEQ ID NO: 2966971 - RNA, 19 nt, Artificial Sequence
  Description of Artificial Sequence: Synthetic oligonucleotide
ugcaccaccauuuuauacc

SEQ ID NO: 2966972 - RNA, 19 nt, Artificial Sequence
  Description of Artificial Sequence: Synthetic oligonucleotide
augaauacuccuucacccc

SEQ ID NO: 2966973 - RNA, 19 nt, Artificial Sequence
  Description of Artificial Sequence: Synthetic oligonucleotide
gauguuuugugagaugagg

SEQ ID NO: 2966974 - RNA, 19 nt, Artificial Sequence
  Description of Artificial Sequence: Synthetic oligonucleotide
ucuuuaaccacagaggguc

SEQ ID NO: 2966975 - RNA, 19 nt, Artificial Sequence
  Description of Artificial Sequence: Synthetic oligonucleotide
ucuccaaucacuacuugca

SEQ ID NO: 2966976 - RNA, 19 nt, Artificial Sequence
  Description of Artificial Sequence: Synthetic oligonucleotide
gagaauauucagcacuugc

SEQ ID NO: 2966977 - RNA, 19 nt, Artificial Sequence
  Description of Artificial Sequence: Synthetic oligonucleotide
gaauauagguguucucggg

SEQ ID NO: 2966978 - RNA, 19 nt, Artificial Sequence
  Description of Artificial Sequence: Synthetic oligonucleotide
uguaccaaacuaccaaaug

SEQ ID NO: 2966979 - RNA, 19 nt, Artificial Sequence
  Description of Artificial Sequence: Synthetic oligonucleotide
uuaguuuauccuuaauggu

SEQ ID NO: 2966980 - RNA, 19 nt, Artificial Sequence
  Description of Artificial Sequence: Synthetic oligonucleotide
cagaauauagguguucucg

SEQ ID NO: 2966981 - RNA, 19 nt, Artificial Sequence
  Description of Artificial Sequence: Synthetic oligonucleotide
ucaucuggagaauauucag

SEQ ID NO: 2966982 - RNA, 19 nt, Artificial Sequence
  Description of Artificial Sequence: Synthetic oligonucleotide
acagccauaaucccgcauc

SEQ ID NO: 2966983 - RNA, 19 nt, Artificial Sequence
  Description of Artificial Sequence: Synthetic oligonucleotide
uuuauaccggucauauccc

SEQ ID NO: 2966984 - RNA, 19 nt, Artificial Sequence
  Description of Artificial Sequence: Synthetic oligonucleotide
gacaucaugaguguaguug

SEQ ID NO: 2966985 - RNA, 19 nt, Artificial Sequence
  Description of Artificial Sequence: Synthetic oligonucleotide
cagucuuuaaccacagagg

SEQ ID NO: 2966986 - RNA, 19 nt, Artificial Sequence
  Description of Artificial Sequence: Synthetic oligonucleotide
auccuuaaugguuucugac

SEQ ID NO: 2966987 - RNA, 19 nt, Artificial Sequence
  Description of Artificial Sequence: Synthetic oligonucleotide
uucaucuggagaauauuca

SEQ ID NO: 2966988 - RNA, 19 nt, Artificial Sequence
  Description of Artificial Sequence: Synthetic oligonucleotide
aucuggagaauauucagca

SEQ ID NO: 2966989 - RNA, 19 nt, Artificial Sequence
  Description of Artificial Sequence: Synthetic oligonucleotide
uggaaaacgggccucagaa

SEQ ID NO: 2966990 - RNA, 19 nt, Artificial Sequence
  Description of Artificial Sequence: Synthetic oligonucleotide
gaauauucagcacuugcca

SEQ ID NO: 2966991 - RNA, 19 nt, Artificial Sequence
  Description of Artificial Sequence: Synthetic oligonucleotide
uguuuugugagaugaggca

SEQ ID NO: 2966992 - RNA, 19 nt, Artificial Sequence
  Description of Artificial Sequence: Synthetic oligonucleotide
uucuccgacucguacaagg

SEQ ID NO: 2966993 - RNA, 19 nt, Artificial Sequence
  Description of Artificial Sequence: Synthetic oligonucleotide
auguuuugugagaugaggc

SEQ ID NO: 2966994 - RNA, 19 nt, Artificial Sequence
  Description of Artificial Sequence: Synthetic oligonucleotide
aaccacagagggucuaaac

SEQ ID NO: 2966995 - RNA, 19 nt, Artificial Sequence
  Description of Artificial Sequence: Synthetic oligonucleotide
ucguacaaggcaucggagg

SEQ ID NO: 2966996 - RNA, 19 nt, Artificial Sequence
  Description of Artificial Sequence: Synthetic oligonucleotide
agcacuugccaguucuucc

SEQ ID NO: 2966997 - RNA, 19 nt, Artificial Sequence
  Description of Artificial Sequence: Synthetic oligonucleotide
uaguuuauccuuaaugguu

SEQ ID NO: 2966998 - RNA, 19 nt, Artificial Sequence
  Description of Artificial Sequence: Synthetic oligonucleotide
uaccaaacuaccaaaugaa

SEQ ID NO: 2966999 - RNA, 19 nt, Artificial Sequence
  Description of Artificial Sequence: Synthetic oligonucleotide
gaagacaucaugaguguag

SEQ ID NO: 2967000 - RNA, 19 nt, Artificial Sequence
  Description of Artificial Sequence: Synthetic oligonucleotide
uaaucccgcaucuggaucc

SEQ ID NO: 2967001 - RNA, 19 nt, Artificial Sequence
  Description of Artificial Sequence: Synthetic oligonucleotide
ucaugaguguaguugucag

SEQ ID NO: 2967002 - RNA, 19 nt, Artificial Sequence
  Description of Artificial Sequence: Synthetic oligonucleotide
agagggucuaaaccuuugc

SEQ ID NO: 2967003 - RNA, 19 nt, Artificial Sequence
  Description of Artificial Sequence: Synthetic oligonucleotide
uuuguaccaaacuaccaaa

SEQ ID NO: 2967004 - RNA, 19 nt, Artificial Sequence
  Description of Artificial Sequence: Synthetic oligonucleotide
uccuuaaugguuucugaca

SEQ ID NO: 2967005 - RNA, 19 nt, Artificial Sequence
  Description of Artificial Sequence: Synthetic oligonucleotide
cugacagauguuuugugag

SEQ ID NO: 2967006 - RNA, 19 nt, Artificial Sequence
  Description of Artificial Sequence: Synthetic oligonucleotide
uuugcuggaaaacgggccu

SEQ ID NO: 2967007 - RNA, 19 nt, Artificial Sequence
  Description of Artificial Sequence: Synthetic oligonucleotide
uaagcggguggacacagcc

SEQ ID NO: 2967008 - RNA, 19 nt, Artificial Sequence
  Description of Artificial Sequence: Synthetic oligonucleotide
guaccaaacuaccaaauga

SEQ ID NO: 2967009 - RNA, 19 nt, Artificial Sequence
  Description of Artificial Sequence: Synthetic oligonucleotide
uucuccaaucacuacuugc

SEQ ID NO: 2967010 - RNA, 19 nt, Artificial Sequence
  Description of Artificial Sequence: Synthetic oligonucleotide
gcagucuuuaaccacagag

SEQ ID NO: 2967011 - RNA, 19 nt, Artificial Sequence
  Description of Artificial Sequence: Synthetic oligonucleotide
acaucaugaguguaguugu

SEQ ID NO: 2967012 - RNA, 19 nt, Artificial Sequence
  Description of Artificial Sequence: Synthetic oligonucleotide
uucagcacuugccaguucu

SEQ ID NO: 2967013 - RNA, 19 nt, Artificial Sequence
  Description of Artificial Sequence: Synthetic oligonucleotide
cuuugcuggaaaacgggcc

SEQ ID NO: 2967014 - RNA, 19 nt, Artificial Sequence
  Description of Artificial Sequence: Synthetic oligonucleotide
gugccaauggauaagcggg

SEQ ID NO: 2967015 - RNA, 19 nt, Artificial Sequence
  Description of Artificial Sequence: Synthetic oligonucleotide
gggucuaaaccuuugcugg

SEQ ID NO: 2967016 - RNA, 19 nt, Artificial Sequence
  Description of Artificial Sequence: Synthetic oligonucleotide
uccaaucacuacuugcacc

SEQ ID NO: 2967017 - RNA, 19 nt, Artificial Sequence
  Description of Artificial Sequence: Synthetic oligonucleotide
agggucuaaaccuuugcug

SEQ ID NO: 2967018 - RNA, 19 nt, Artificial Sequence
  Description of Artificial Sequence: Synthetic oligonucleotide
auaaucccgcaucuggauc

SEQ ID NO: 2967019 - RNA, 19 nt, Artificial Sequence
  Description of Artificial Sequence: Synthetic oligonucleotide
caucuggagaauauucagc

SEQ ID NO: 2967020 - RNA, 19 nt, Artificial Sequence
  Description of Artificial Sequence: Synthetic oligonucleotide
guggacacagccauaaucc

SEQ ID NO: 2967021 - RNA, 19 nt, Artificial Sequence
  Description of Artificial Sequence: Synthetic oligonucleotide
aggcauuucaucuggagaa

SEQ ID NO: 2967022 - RNA, 19 nt, Artificial Sequence
  Description of Artificial Sequence: Synthetic oligonucleotide
uuaaugguuucugacagau

SEQ ID NO: 2967023 - RNA, 19 nt, Artificial Sequence
  Description of Artificial Sequence: Synthetic oligonucleotide
ugagaugaggcauuucauc

SEQ ID NO: 2967024 - RNA, 19 nt, Artificial Sequence
  Description of Artificial Sequence: Synthetic oligonucleotide
aaccuuugcuggaaaacgg

SEQ ID NO: 2967025 - RNA, 19 nt, Artificial Sequence
  Description of Artificial Sequence: Synthetic oligonucleotide
augaguguaguugucagug

SEQ ID NO: 2967026 - RNA, 19 nt, Artificial Sequence
  Description of Artificial Sequence: Synthetic oligonucleotide
ugaauacuccuucaccccu

SEQ ID NO: 2967027 - RNA, 19 nt, Artificial Sequence
  Description of Artificial Sequence: Synthetic oligonucleotide
caucccagaagcaucgagc

SEQ ID NO: 2967028 - RNA, 19 nt, Artificial Sequence
  Description of Artificial Sequence: Synthetic oligonucleotide
guugucagugucugcaucc

SEQ ID NO: 2967029 - RNA, 19 nt, Artificial Sequence
  Description of Artificial Sequence: Synthetic oligonucleotide
uuauccuuaaugguuucug

SEQ ID NO: 2967030 - RNA, 19 nt, Artificial Sequence
  Description of Artificial Sequence: Synthetic oligonucleotide
ucuuccuugagcacggcau

SEQ ID NO: 2967031 - RNA, 19 nt, Artificial Sequence
  Description of Artificial Sequence: Synthetic oligonucleotide
guuucugacagauguuuug

SEQ ID NO: 2967032 - RNA, 19 nt, Artificial Sequence
  Description of Artificial Sequence: Synthetic oligonucleotide
aaacuaccaaaugaagaca

SEQ ID NO: 2967033 - RNA, 19 nt, Artificial Sequence
  Description of Artificial Sequence: Synthetic oligonucleotide
agaagcaucgagcagccau

SEQ ID NO: 2967034 - RNA, 19 nt, Artificial Sequence
  Description of Artificial Sequence: Synthetic oligonucleotide
gaaaacgggccucagaaua

SEQ ID NO: 2967035 - RNA, 19 nt, Artificial Sequence
  Description of Artificial Sequence: Synthetic oligonucleotide
ucccaauucuuuuaguuua

SEQ ID NO: 2967036 - RNA, 19 nt, Artificial Sequence
  Description of Artificial Sequence: Synthetic oligonucleotide
aauggauaagcggguggac

SEQ ID NO: 2967037 - RNA, 19 nt, Artificial Sequence
  Description of Artificial Sequence: Synthetic oligonucleotide
ugaggcauuucaucuggag

SEQ ID NO: 2967038 - RNA, 19 nt, Artificial Sequence
  Description of Artificial Sequence: Synthetic oligonucleotide
uccuucaccccucuguucu

SEQ ID NO: 2967039 - RNA, 19 nt, Artificial Sequence
  Description of Artificial Sequence: Synthetic oligonucleotide
uaucccaauucuuuuaguu

SEQ ID NO: 2967040 - RNA, 19 nt, Artificial Sequence
  Description of Artificial Sequence: Synthetic oligonucleotide
ggugccaauggauaagcgg

SEQ ID NO: 2967041 - RNA, 19 nt, Artificial Sequence
  Description of Artificial Sequence: Synthetic oligonucleotide
uucuuuuaguuuauccuua

SEQ ID NO: 2967042 - RNA, 19 nt, Artificial Sequence
  Description of Artificial Sequence: Synthetic oligonucleotide
auauagguguucucgggcu

SEQ ID NO: 2967043 - RNA, 19 nt, Artificial Sequence
  Description of Artificial Sequence: Synthetic oligonucleotide
uauccuuaaugguuucuga

SEQ ID NO: 2967044 - RNA, 19 nt, Artificial Sequence
  Description of Artificial Sequence: Synthetic oligonucleotide
gacacagccauaaucccgc

SEQ ID NO: 2967045 - RNA, 19 nt, Artificial Sequence
  Description of Artificial Sequence: Synthetic oligonucleotide
uaaaccuuugcuggaaaac

SEQ ID NO: 2967046 - RNA, 19 nt, Artificial Sequence
  Description of Artificial Sequence: Synthetic oligonucleotide
cauggaugcagucuuuaac

SEQ ID NO: 2967047 - RNA, 19 nt, Artificial Sequence
  Description of Artificial Sequence: Synthetic oligonucleotide
uccccuguguucuucuccg

SEQ ID NO: 2967048 - RNA, 19 nt, Artificial Sequence
  Description of Artificial Sequence: Synthetic oligonucleotide
ucugcaucccagaagcauc

SEQ ID NO: 2967049 - RNA, 19 nt, Artificial Sequence
  Description of Artificial Sequence: Synthetic oligonucleotide
aacuaccaaaugaagacau

SEQ ID NO: 2967050 - RNA, 19 nt, Artificial Sequence
  Description of Artificial Sequence: Synthetic oligonucleotide
aguugucagugucugcauc

SEQ ID NO: 2967051 - RNA, 19 nt, Artificial Sequence
  Description of Artificial Sequence: Synthetic oligonucleotide
ucuucuccgacucguacaa

SEQ ID NO: 2967052 - RNA, 19 nt, Artificial Sequence
  Description of Artificial Sequence: Synthetic oligonucleotide
accaccauuuuauaccggu

SEQ ID NO: 2967053 - RNA, 19 nt, Artificial Sequence
  Description of Artificial Sequence: Synthetic oligonucleotide
gaugcagucuuuaaccaca

SEQ ID NO: 2967054 - RNA, 19 nt, Artificial Sequence
  Description of Artificial Sequence: Synthetic oligonucleotide
agaugaggcauuucaucug

SEQ ID NO: 2967055 - RNA, 19 nt, Artificial Sequence
  Description of Artificial Sequence: Synthetic oligonucleotide
uggaugcagucuuuaacca

SEQ ID NO: 2967056 - RNA, 19 nt, Artificial Sequence
  Description of Artificial Sequence: Synthetic oligonucleotide
uguucuccaaucacuacuu

SEQ ID NO: 2967057 - RNA, 19 nt, Artificial Sequence
  Description of Artificial Sequence: Synthetic oligonucleotide
aauacuccuucaccccucu

SEQ ID NO: 2967058 - RNA, 19 nt, Artificial Sequence
  Description of Artificial Sequence: Synthetic oligonucleotide
ugacagauguuuugugaga

SEQ ID NO: 2967059 - RNA, 19 nt, Artificial Sequence
  Description of Artificial Sequence: Synthetic oligonucleotide
uucuucuccgacucguaca

SEQ ID NO: 2967060 - RNA, 19 nt, Artificial Sequence
  Description of Artificial Sequence: Synthetic oligonucleotide
gagaugaggcauuucaucu

SEQ ID NO: 2967061 - RNA, 19 nt, Artificial Sequence
  Description of Artificial Sequence: Synthetic oligonucleotide
auagguguucucgggcucc

SEQ ID NO: 2967062 - RNA, 19 nt, Artificial Sequence
  Description of Artificial Sequence: Synthetic oligonucleotide
augaagacaucaugagugu

SEQ ID NO: 2967063 - RNA, 19 nt, Artificial Sequence
  Description of Artificial Sequence: Synthetic oligonucleotide
ucuccgacucguacaaggc

SEQ ID NO: 2967064 - RNA, 19 nt, Artificial Sequence
  Description of Artificial Sequence: Synthetic oligonucleotide
gaggcauuucaucuggaga

SEQ ID NO: 2967065 - RNA, 19 nt, Artificial Sequence
  Description of Artificial Sequence: Synthetic oligonucleotide
ucuuuuaguuuauccuuaa

SEQ ID NO: 2967066 - RNA, 19 nt, Artificial Sequence
  Description of Artificial Sequence: Synthetic oligonucleotide
uacaaggcaucggaggugc

SEQ ID NO: 2967067 - RNA, 19 nt, Artificial Sequence
  Description of Artificial Sequence: Synthetic oligonucleotide
uggagaauauucagcacuu

SEQ ID NO: 2967068 - RNA, 19 nt, Artificial Sequence
  Description of Artificial Sequence: Synthetic oligonucleotide
uuguaccaaacuaccaaau

SEQ ID NO: 2967069 - RNA, 19 nt, Artificial Sequence
  Description of Artificial Sequence: Synthetic oligonucleotide
gccauaaucccgcaucugg

SEQ ID NO: 2967070 - RNA, 19 nt, Artificial Sequence
  Description of Artificial Sequence: Synthetic oligonucleotide
accggucauaucccaauuc

SEQ ID NO: 2967071 - RNA, 19 nt, Artificial Sequence
  Description of Artificial Sequence: Synthetic oligonucleotide
cugcaucccagaagcaucg

SEQ ID NO: 2967072 - RNA, 19 nt, Artificial Sequence
  Description of Artificial Sequence: Synthetic oligonucleotide
ucauaucccaauucuuuua

SEQ ID NO: 2967073 - RNA, 19 nt, Artificial Sequence
  Description of Artificial Sequence: Synthetic oligonucleotide
cuugagcacggcauggaug

SEQ ID NO: 2967074 - RNA, 19 nt, Artificial Sequence
  Description of Artificial Sequence: Synthetic oligonucleotide
gaguguaguugucaguguc

SEQ ID NO: 2967075 - RNA, 19 nt, Artificial Sequence
  Description of Artificial Sequence: Synthetic oligonucleotide
gauaagcggguggacacag

SEQ ID NO: 2967076 - RNA, 19 nt, Artificial Sequence
  Description of Artificial Sequence: Synthetic oligonucleotide
uuuugugagaugaggcauu

SEQ ID NO: 2967077 - RNA, 19 nt, Artificial Sequence
  Description of Artificial Sequence: Synthetic oligonucleotide
ccuuaaugguuucugacag

SEQ ID NO: 2967078 - RNA, 19 nt, Artificial Sequence
  Description of Artificial Sequence: Synthetic oligonucleotide
uccgacucguacaaggcau

SEQ ID NO: 2967079 - RNA, 19 nt, Artificial Sequence
  Description of Artificial Sequence: Synthetic oligonucleotide
acuacuugcaccaccauuu

SEQ ID NO: 2967080 - RNA, 19 nt, Artificial Sequence
  Description of Artificial Sequence: Synthetic oligonucleotide
ucuaaaccuuugcuggaaa

SEQ ID NO: 2967081 - RNA, 19 nt, Artificial Sequence
  Description of Artificial Sequence: Synthetic oligonucleotide
uggacacagccauaauccc

SEQ ID NO: 2967082 - RNA, 19 nt, Artificial Sequence
  Description of Artificial Sequence: Synthetic oligonucleotide
ccaaaugaagacaucauga

SEQ ID NO: 2967083 - RNA, 19 nt, Artificial Sequence
  Description of Artificial Sequence: Synthetic oligonucleotide
uuauaccggucauauccca

SEQ ID NO: 2967084 - RNA, 19 nt, Artificial Sequence
  Description of Artificial Sequence: Synthetic oligonucleotide
aucgagcagccaugaauac

SEQ ID NO: 2967085 - RNA, 19 nt, Artificial Sequence
  Description of Artificial Sequence: Synthetic oligonucleotide
guaguugucagugucugca

SEQ ID NO: 2967086 - RNA, 19 nt, Artificial Sequence
  Description of Artificial Sequence: Synthetic oligonucleotide
gauccugccgaucucuaga

SEQ ID NO: 2967087 - RNA, 19 nt, Artificial Sequence
  Description of Artificial Sequence: Synthetic oligonucleotide
uaaugguuucugacagaug

SEQ ID NO: 2967088 - RNA, 19 nt, Artificial Sequence
  Description of Artificial Sequence: Synthetic oligonucleotide
uugcaccaccauuuuauac

SEQ ID NO: 2967089 - RNA, 19 nt, Artificial Sequence
  Description of Artificial Sequence: Synthetic oligonucleotide
aguucuuccuugagcacgg

SEQ ID NO: 2967090 - RNA, 19 nt, Artificial Sequence
  Description of Artificial Sequence: Synthetic oligonucleotide
uauaccggucauaucccaa

SEQ ID NO: 2967091 - RNA, 19 nt, Artificial Sequence
  Description of Artificial Sequence: Synthetic oligonucleotide
uuuauccuuaaugguuucu

SEQ ID NO: 2967092 - RNA, 19 nt, Artificial Sequence
  Description of Artificial Sequence: Synthetic oligonucleotide
uguaguugucagugucugc

SEQ ID NO: 2967093 - RNA, 19 nt, Artificial Sequence
  Description of Artificial Sequence: Synthetic oligonucleotide
aucccaauucuuuuaguuu

SEQ ID NO: 2967094 - RNA, 19 nt, Artificial Sequence
  Description of Artificial Sequence: Synthetic oligonucleotide
ucagaauauagguguucuc

SEQ ID NO: 2967095 - RNA, 19 nt, Artificial Sequence
  Description of Artificial Sequence: Synthetic oligonucleotide
acuugcaccaccauuuuau

SEQ ID NO: 2967096 - RNA, 19 nt, Artificial Sequence
  Description of Artificial Sequence: Synthetic oligonucleotide
accaaacuaccaaaugaag

SEQ ID NO: 2967097 - RNA, 19 nt, Artificial Sequence
  Description of Artificial Sequence: Synthetic oligonucleotide
cagauguuuugugagauga

SEQ ID NO: 2967098 - RNA, 19 nt, Artificial Sequence
  Description of Artificial Sequence: Synthetic oligonucleotide
ucuguucuccaaucacuac

SEQ ID NO: 2967099 - RNA, 19 nt, Artificial Sequence
  Description of Artificial Sequence: Synthetic oligonucleotide
acagauguuuugugagaug

SEQ ID NO: 2967100 - RNA, 19 nt, Artificial Sequence
  Description of Artificial Sequence: Synthetic oligonucleotide
gaagcaucgagcagccaug

SEQ ID NO: 2967101 - RNA, 19 nt, Artificial Sequence
  Description of Artificial Sequence: Synthetic oligonucleotide
gcaccaccauuuuauaccg

SEQ ID NO: 2967102 - RNA, 19 nt, Artificial Sequence
  Description of Artificial Sequence: Synthetic oligonucleotide
aguuuauccuuaaugguuu

SEQ ID NO: 2967103 - RNA, 19 nt, Artificial Sequence
  Description of Artificial Sequence: Synthetic oligonucleotide
caccauuuuauaccgguca

SEQ ID NO: 2967104 - RNA, 19 nt, Artificial Sequence
  Description of Artificial Sequence: Synthetic oligonucleotide
uucuuccuugagcacggca

SEQ ID NO: 2967105 - RNA, 19 nt, Artificial Sequence
  Description of Artificial Sequence: Synthetic oligonucleotide
uauagguguucucgggcuc

SEQ ID NO: 2967106 - RNA, 19 nt, Artificial Sequence
  Description of Artificial Sequence: Synthetic oligonucleotide
uuccuugagcacggcaugg

SEQ ID NO: 2967107 - RNA, 19 nt, Artificial Sequence
  Description of Artificial Sequence: Synthetic oligonucleotide
accauuuuauaccggucau

SEQ ID NO: 2967108 - RNA, 19 nt, Artificial Sequence
  Description of Artificial Sequence: Synthetic oligonucleotide
cucguacaaggcaucggag

SEQ ID NO: 2967109 - RNA, 19 nt, Artificial Sequence
  Description of Artificial Sequence: Synthetic oligonucleotide
accuuugcuggaaaacggg

SEQ ID NO: 2967110 - RNA, 19 nt, Artificial Sequence
  Description of Artificial Sequence: Synthetic oligonucleotide
aucaugaguguaguuguca

SEQ ID NO: 2967111 - RNA, 19 nt, Artificial Sequence
  Description of Artificial Sequence: Synthetic oligonucleotide
auaucccaauucuuuuagu

SEQ ID NO: 2967112 - RNA, 19 nt, Artificial Sequence
  Description of Artificial Sequence: Synthetic oligonucleotide
ucggaggugccaauggaua

SEQ ID NO: 2967113 - RNA, 19 nt, Artificial Sequence
  Description of Artificial Sequence: Synthetic oligonucleotide
ugaguguaguugucagugu

SEQ ID NO: 2967114 - RNA, 19 nt, Artificial Sequence
  Description of Artificial Sequence: Synthetic oligonucleotide
gaggugccaauggauaagc

SEQ ID NO: 2967115 - RNA, 19 nt, Artificial Sequence
  Description of Artificial Sequence: Synthetic oligonucleotide
ucagugucugcaucccaga

SEQ ID NO: 2967116 - RNA, 19 nt, Artificial Sequence
  Description of Artificial Sequence: Synthetic oligonucleotide
gguggacacagccauaauc

SEQ ID NO: 2967117 - RNA, 19 nt, Artificial Sequence
  Description of Artificial Sequence: Synthetic oligonucleotide
ugccaauggauaagcgggu

SEQ ID NO: 2967118 - RNA, 19 nt, Artificial Sequence
  Description of Artificial Sequence: Synthetic oligonucleotide
caucgagcagccaugaaua

SEQ ID NO: 2967119 - RNA, 19 nt, Artificial Sequence
  Description of Artificial Sequence: Synthetic oligonucleotide
aaaacgggccucagaauau

SEQ ID NO: 2967120 - RNA, 19 nt, Artificial Sequence
  Description of Artificial Sequence: Synthetic oligonucleotide
gucagugucugcaucccag

SEQ ID NO: 2967121 - RNA, 19 nt, Artificial Sequence
  Description of Artificial Sequence: Synthetic oligonucleotide
ccaaacuaccaaaugaaga

SEQ ID NO: 2967122 - RNA, 19 nt, Artificial Sequence
  Description of Artificial Sequence: Synthetic oligonucleotide
cuguguucuucuccgacuc

SEQ ID NO: 2967123 - RNA, 19 nt, Artificial Sequence
  Description of Artificial Sequence: Synthetic oligonucleotide
acuaccaaaugaagacauc

SEQ ID NO: 2967124 - RNA, 19 nt, Artificial Sequence
  Description of Artificial Sequence: Synthetic oligonucleotide
cuggagaauauucagcacu

SEQ ID NO: 2967125 - RNA, 19 nt, Artificial Sequence
  Description of Artificial Sequence: Synthetic oligonucleotide
ucccgcaucuggauccugc

SEQ ID NO: 2967126 - RNA, 19 nt, Artificial Sequence
  Description of Artificial Sequence: Synthetic oligonucleotide
auaccggucauaucccaau

SEQ ID NO: 2967127 - RNA, 19 nt, Artificial Sequence
  Description of Artificial Sequence: Synthetic oligonucleotide
ccaugaauacuccuucacc

SEQ ID NO: 2967128 - RNA, 19 nt, Artificial Sequence
  Description of Artificial Sequence: Synthetic oligonucleotide
accccucuguucuccaauc

SEQ ID NO: 2967129 - RNA, 19 nt, Artificial Sequence
  Description of Artificial Sequence: Synthetic oligonucleotide
gacucguacaaggcaucgg

SEQ ID NO: 2967130 - RNA, 19 nt, Artificial Sequence
  Description of Artificial Sequence: Synthetic oligonucleotide
agcggguggacacagccau

SEQ ID NO: 2967131 - RNA, 19 nt, Artificial Sequence
  Description of Artificial Sequence: Synthetic oligonucleotide
acuugccaguucuuccuug

SEQ ID NO: 2967132 - RNA, 19 nt, Artificial Sequence
  Description of Artificial Sequence: Synthetic oligonucleotide
cuccaaucacuacuugcac

SEQ ID NO: 2967133 - RNA, 19 nt, Artificial Sequence
  Description of Artificial Sequence: Synthetic oligonucleotide
ugucagugucugcauccca

SEQ ID NO: 2967134 - RNA, 19 nt, Artificial Sequence
  Description of Artificial Sequence: Synthetic oligonucleotide
cuuccuugagcacggcaug

SEQ ID NO: 2967135 - RNA, 19 nt, Artificial Sequence
  Description of Artificial Sequence: Synthetic oligonucleotide
aacgggccucagaauauag

SEQ ID NO: 2967136 - RNA, 19 nt, Artificial Sequence
  Description of Artificial Sequence: Synthetic oligonucleotide
guucuucuccgacucguac

SEQ ID NO: 2967137 - RNA, 19 nt, Artificial Sequence
  Description of Artificial Sequence: Synthetic oligonucleotide
uguucucgggcuccccugu

SEQ ID NO: 2967138 - RNA, 19 nt, Artificial Sequence
  Description of Artificial Sequence: Synthetic oligonucleotide
ggacacagccauaaucccg

SEQ ID NO: 2967139 - RNA, 19 nt, Artificial Sequence
  Description of Artificial Sequence: Synthetic oligonucleotide
agccaugaauacuccuuca

SEQ ID NO: 2967140 - RNA, 19 nt, Artificial Sequence
  Description of Artificial Sequence: Synthetic oligonucleotide
guuuauccuuaaugguuuc

SEQ ID NO: 2967141 - RNA, 19 nt, Artificial Sequence
  Description of Artificial Sequence: Synthetic oligonucleotide
cagccaugaauacuccuuc

SEQ ID NO: 2967142 - RNA, 19 nt, Artificial Sequence
  Description of Artificial Sequence: Synthetic oligonucleotide
uugucagugucugcauccc

SEQ ID NO: 2967143 - RNA, 19 nt, Artificial Sequence
  Description of Artificial Sequence: Synthetic oligonucleotide
uuaaccacagagggucuaa

SEQ ID NO: 2967144 - RNA, 19 nt, Artificial Sequence
  Description of Artificial Sequence: Synthetic oligonucleotide
agauguuuugugagaugag

SEQ ID NO: 2967145 - RNA, 19 nt, Artificial Sequence
  Description of Artificial Sequence: Synthetic oligonucleotide
ucgagcagccaugaauacu

SEQ ID NO: 2967146 - RNA, 19 nt, Artificial Sequence
  Description of Artificial Sequence: Synthetic oligonucleotide
acggcauggaugcagucuu

SEQ ID NO: 2967147 - RNA, 19 nt, Artificial Sequence
  Description of Artificial Sequence: Synthetic oligonucleotide
auuucaucuggagaauauu

SEQ ID NO: 2967148 - RNA, 19 nt, Artificial Sequence
  Description of Artificial Sequence: Synthetic oligonucleotide
cuuaaugguuucugacaga

SEQ ID NO: 2967149 - RNA, 19 nt, Artificial Sequence
  Description of Artificial Sequence: Synthetic oligonucleotide
agcagccaugaauacuccu

SEQ ID NO: 2967150 - RNA, 19 nt, Artificial Sequence
  Description of Artificial Sequence: Synthetic oligonucleotide
cuaaaccuuugcuggaaaa

SEQ ID NO: 2967151 - RNA, 19 nt, Artificial Sequence
  Description of Artificial Sequence: Synthetic oligonucleotide
aaggcaucggaggugccaa

SEQ ID NO: 2967152 - RNA, 19 nt, Artificial Sequence
  Description of Artificial Sequence: Synthetic oligonucleotide
uauucagcacuugccaguu

SEQ ID NO: 2967153 - RNA, 19 nt, Artificial Sequence
  Description of Artificial Sequence: Synthetic oligonucleotide
gagggucuaaaccuuugcu

SEQ ID NO: 2967154 - RNA, 19 nt, Artificial Sequence
  Description of Artificial Sequence: Synthetic oligonucleotide
cagagggucuaaaccuuug

SEQ ID NO: 2967155 - RNA, 19 nt, Artificial Sequence
  Description of Artificial Sequence: Synthetic oligonucleotide
auucagcacuugccaguuc

SEQ ID NO: 2967156 - RNA, 19 nt, Artificial Sequence
  Description of Artificial Sequence: Synthetic oligonucleotide
ugaagacaucaugagugua

SEQ ID NO: 2967157 - RNA, 19 nt, Artificial Sequence
  Description of Artificial Sequence: Synthetic oligonucleotide
ccuuugcuggaaaacgggc

SEQ ID NO: 2967158 - RNA, 19 nt, Artificial Sequence
  Description of Artificial Sequence: Synthetic oligonucleotide
uuugugagaugaggcauuu

SEQ ID NO: 2967159 - RNA, 19 nt, Artificial Sequence
  Description of Artificial Sequence: Synthetic oligonucleotide
gagcacggcauggaugcag

SEQ ID NO: 2967160 - RNA, 19 nt, Artificial Sequence
  Description of Artificial Sequence: Synthetic oligonucleotide
caucaugaguguaguuguc

SEQ ID NO: 2967161 - RNA, 19 nt, Artificial Sequence
  Description of Artificial Sequence: Synthetic oligonucleotide
cauuuuauaccggucauau

SEQ ID NO: 2967162 - RNA, 19 nt, Artificial Sequence
  Description of Artificial Sequence: Synthetic oligonucleotide
ccaauggauaagcgggugg

SEQ ID NO: 2967163 - RNA, 19 nt, Artificial Sequence
  Description of Artificial Sequence: Synthetic oligonucleotide
uacuugcaccaccauuuua

SEQ ID NO: 2967164 - RNA, 19 nt, Artificial Sequence
  Description of Artificial Sequence: Synthetic oligonucleotide
gcaucggaggugccaaugg

SEQ ID NO: 2967165 - RNA, 19 nt, Artificial Sequence
  Description of Artificial Sequence: Synthetic oligonucleotide
ugcagucuuuaaccacaga

SEQ ID NO: 2967166 - RNA, 19 nt, Artificial Sequence
  Description of Artificial Sequence: Synthetic oligonucleotide
guucuccaaucacuacuug

SEQ ID NO: 2967167 - RNA, 19 nt, Artificial Sequence
  Description of Artificial Sequence: Synthetic oligonucleotide
uuuaaccacagagggucua

SEQ ID NO: 2967168 - RNA, 19 nt, Artificial Sequence
  Description of Artificial Sequence: Synthetic oligonucleotide
ugucugcaucccagaagca

SEQ ID NO: 2967169 - RNA, 19 nt, Artificial Sequence
  Description of Artificial Sequence: Synthetic oligonucleotide
uguucuucuccgacucgua

SEQ ID NO: 2967170 - RNA, 19 nt, Artificial Sequence
  Description of Artificial Sequence: Synthetic oligonucleotide
ggaugcagucuuuaaccac

SEQ ID NO: 2967171 - RNA, 19 nt, Artificial Sequence
  Description of Artificial Sequence: Synthetic oligonucleotide
aagcaucgagcagccauga

SEQ ID NO: 2967172 - RNA, 19 nt, Artificial Sequence
  Description of Artificial Sequence: Synthetic oligonucleotide
cuugccaguucuuccuuga

SEQ ID NO: 2967173 - RNA, 19 nt, Artificial Sequence
  Description of Artificial Sequence: Synthetic oligonucleotide
caauggauaagcgggugga

SEQ ID NO: 2967174 - RNA, 19 nt, Artificial Sequence
  Description of Artificial Sequence: Synthetic oligonucleotide
cuguucuccaaucacuacu

SEQ ID NO: 2967175 - RNA, 19 nt, Artificial Sequence
  Description of Artificial Sequence: Synthetic oligonucleotide
cgagcagccaugaauacuc

SEQ ID NO: 2967176 - RNA, 19 nt, Artificial Sequence
  Description of Artificial Sequence: Synthetic oligonucleotide
cucuguucuccaaucacua

SEQ ID NO: 2967177 - RNA, 19 nt, Artificial Sequence
  Description of Artificial Sequence: Synthetic oligonucleotide
acgggccucagaauauagg

SEQ ID NO: 2967178 - RNA, 19 nt, Artificial Sequence
  Description of Artificial Sequence: Synthetic oligonucleotide
uaguugucagugucugcau

SEQ ID NO: 2967179 - RNA, 19 nt, Artificial Sequence
  Description of Artificial Sequence: Synthetic oligonucleotide
gaauacuccuucaccccuc

SEQ ID NO: 2967180 - RNA, 19 nt, Artificial Sequence
  Description of Artificial Sequence: Synthetic oligonucleotide
ggccucagaauauaggugu

SEQ ID NO: 2967181 - RNA, 19 nt, Artificial Sequence
  Description of Artificial Sequence: Synthetic oligonucleotide
auaagcggguggacacagc

SEQ ID NO: 2967182 - RNA, 19 nt, Artificial Sequence
  Description of Artificial Sequence: Synthetic oligonucleotide
ugcuggaaaacgggccuca

SEQ ID NO: 2967183 - RNA, 19 nt, Artificial Sequence
  Description of Artificial Sequence: Synthetic oligonucleotide
caccaccauuuuauaccgg

SEQ ID NO: 2967184 - RNA, 19 nt, Artificial Sequence
  Description of Artificial Sequence: Synthetic oligonucleotide
gacagauguuuugugagau

SEQ ID NO: 2967185 - RNA, 19 nt, Artificial Sequence
  Description of Artificial Sequence: Synthetic oligonucleotide
gccaugaauacuccuucac

SEQ ID NO: 2967186 - RNA, 19 nt, Artificial Sequence
  Description of Artificial Sequence: Synthetic oligonucleotide
ucgggcuccccuguguucu

SEQ ID NO: 2967187 - RNA, 19 nt, Artificial Sequence
  Description of Artificial Sequence: Synthetic oligonucleotide
cuucaccccucuguucucc

SEQ ID NO: 2967188 - RNA, 19 nt, Artificial Sequence
  Description of Artificial Sequence: Synthetic oligonucleotide
uccuugagcacggcaugga

SEQ ID NO: 2967189 - RNA, 19 nt, Artificial Sequence
  Description of Artificial Sequence: Synthetic oligonucleotide
uaccggucauaucccaauu

SEQ ID NO: 2967190 - RNA, 19 nt, Artificial Sequence
  Description of Artificial Sequence: Synthetic oligonucleotide
guuuugugagaugaggcau

SEQ ID NO: 2967191 - RNA, 19 nt, Artificial Sequence
  Description of Artificial Sequence: Synthetic oligonucleotide
uucaccccucuguucucca

SEQ ID NO: 2967192 - RNA, 19 nt, Artificial Sequence
  Description of Artificial Sequence: Synthetic oligonucleotide
aaacgggccucagaauaua

SEQ ID NO: 2967193 - RNA, 19 nt, Artificial Sequence
  Description of Artificial Sequence: Synthetic oligonucleotide
aggugccaauggauaagcg

SEQ ID NO: 2967194 - RNA, 19 nt, Artificial Sequence
  Description of Artificial Sequence: Synthetic oligonucleotide
cucagaauauagguguucu

SEQ ID NO: 2967195 - RNA, 19 nt, Artificial Sequence
  Description of Artificial Sequence: Synthetic oligonucleotide
augcagucuuuaaccacag

SEQ ID NO: 2967196 - RNA, 19 nt, Artificial Sequence
  Description of Artificial Sequence: Synthetic oligonucleotide
ccagaagcaucgagcagcc

SEQ ID NO: 2967197 - RNA, 19 nt, Artificial Sequence
  Description of Artificial Sequence: Synthetic oligonucleotide
cauuucaucuggagaauau

SEQ ID NO: 2967198 - RNA, 19 nt, Artificial Sequence
  Description of Artificial Sequence: Synthetic oligonucleotide
guguucucgggcuccccug

SEQ ID NO: 2967199 - RNA, 19 nt, Artificial Sequence
  Description of Artificial Sequence: Synthetic oligonucleotide
aaucccgcaucuggauccu

SEQ ID NO: 2967200 - RNA, 19 nt, Artificial Sequence
  Description of Artificial Sequence: Synthetic oligonucleotide
ucacuacuugcaccaccau

SEQ ID NO: 2967201 - RNA, 19 nt, Artificial Sequence
  Description of Artificial Sequence: Synthetic oligonucleotide
gucauaucccaauucuuuu

SEQ ID NO: 2967202 - RNA, 19 nt, Artificial Sequence
  Description of Artificial Sequence: Synthetic oligonucleotide
agacaucaugaguguaguu

SEQ ID NO: 2967203 - RNA, 19 nt, Artificial Sequence
  Description of Artificial Sequence: Synthetic oligonucleotide
ggauccugccgaucucuag

SEQ ID NO: 2967204 - RNA, 19 nt, Artificial Sequence
  Description of Artificial Sequence: Synthetic oligonucleotide
ucucgggcuccccuguguu

SEQ ID NO: 2967205 - RNA, 19 nt, Artificial Sequence
  Description of Artificial Sequence: Synthetic oligonucleotide
uaaccacagagggucuaaa

SEQ ID NO: 2967206 - RNA, 19 nt, Artificial Sequence
  Description of Artificial Sequence: Synthetic oligonucleotide
ggucuaaaccuuugcugga

SEQ ID NO: 2967207 - RNA, 19 nt, Artificial Sequence
  Description of Artificial Sequence: Synthetic oligonucleotide
aagcggguggacacagcca

SEQ ID NO: 2967208 - RNA, 19 nt, Artificial Sequence
  Description of Artificial Sequence: Synthetic oligonucleotide
aucggaggugccaauggau

SEQ ID NO: 2967209 - RNA, 19 nt, Artificial Sequence
  Description of Artificial Sequence: Synthetic oligonucleotide
caucggaggugccaaugga

SEQ ID NO: 2967210 - RNA, 19 nt, Artificial Sequence
  Description of Artificial Sequence: Synthetic oligonucleotide
cuccgacucguacaaggca

SEQ ID NO: 2967211 - RNA, 19 nt, Artificial Sequence
  Description of Artificial Sequence: Synthetic oligonucleotide
uggauccugccgaucucua

SEQ ID NO: 2967212 - RNA, 19 nt, Artificial Sequence
  Description of Artificial Sequence: Synthetic oligonucleotide
gagcagccaugaauacucc

SEQ ID NO: 2967213 - RNA, 19 nt, Artificial Sequence
  Description of Artificial Sequence: Synthetic oligonucleotide
ggagaauauucagcacuug

SEQ ID NO: 2967214 - RNA, 19 nt, Artificial Sequence
  Description of Artificial Sequence: Synthetic oligonucleotide
cuugcaccaccauuuuaua

SEQ ID NO: 2967215 - RNA, 19 nt, Artificial Sequence
  Description of Artificial Sequence: Synthetic oligonucleotide
gucuaaaccuuugcuggaa

SEQ ID NO: 2967216 - RNA, 19 nt, Artificial Sequence
  Description of Artificial Sequence: Synthetic oligonucleotide
cuccuucaccccucuguuc

SEQ ID NO: 2967217 - RNA, 19 nt, Artificial Sequence
  Description of Artificial Sequence: Synthetic oligonucleotide
cauaaucccgcaucuggau

SEQ ID NO: 2967218 - RNA, 19 nt, Artificial Sequence
  Description of Artificial Sequence: Synthetic oligonucleotide
auacuccuucaccccucug

SEQ ID NO: 2967219 - RNA, 19 nt, Artificial Sequence
  Description of Artificial Sequence: Synthetic oligonucleotide
agccauaaucccgcaucug

SEQ ID NO: 2967220 - RNA, 19 nt, Artificial Sequence
  Description of Artificial Sequence: Synthetic oligonucleotide
uagguguucucgggcuccc

SEQ ID NO: 2967221 - RNA, 19 nt, Artificial Sequence
  Description of Artificial Sequence: Synthetic oligonucleotide
uugcuggaaaacgggccuc

SEQ ID NO: 2967222 - RNA, 19 nt, Artificial Sequence
  Description of Artificial Sequence: Synthetic oligonucleotide
acaaggcaucggaggugcc

SEQ ID NO: 2967223 - RNA, 19 nt, Artificial Sequence
  Description of Artificial Sequence: Synthetic oligonucleotide
caaucacuacuugcaccac

SEQ ID NO: 2967224 - RNA, 19 nt, Artificial Sequence
  Description of Artificial Sequence: Synthetic oligonucleotide
caugaguguaguugucagu

SEQ ID NO: 2967225 - RNA, 19 nt, Artificial Sequence
  Description of Artificial Sequence: Synthetic oligonucleotide
agguguucucgggcucccc

SEQ ID NO: 2967226 - RNA, 19 nt, Artificial Sequence
  Description of Artificial Sequence: Synthetic oligonucleotide
gggccucagaauauaggug

SEQ ID NO: 2967227 - RNA, 19 nt, Artificial Sequence
  Description of Artificial Sequence: Synthetic oligonucleotide
acacagccauaaucccgca

SEQ ID NO: 2967228 - RNA, 19 nt, Artificial Sequence
  Description of Artificial Sequence: Synthetic oligonucleotide
ccauaaucccgcaucugga

SEQ ID NO: 2967229 - RNA, 19 nt, Artificial Sequence
  Description of Artificial Sequence: Synthetic oligonucleotide
gcaucgagcagccaugaau

SEQ ID NO: 2967230 - RNA, 19 nt, Artificial Sequence
  Description of Artificial Sequence: Synthetic oligonucleotide
uugugagaugaggcauuuc

SEQ ID NO: 2967231 - RNA, 19 nt, Artificial Sequence
  Description of Artificial Sequence: Synthetic oligonucleotide
cccucuguucuccaaucac

SEQ ID NO: 2967232 - RNA, 19 nt, Artificial Sequence
  Description of Artificial Sequence: Synthetic oligonucleotide
ccacagagggucuaaaccu

SEQ ID NO: 2967233 - RNA, 19 nt, Artificial Sequence
  Description of Artificial Sequence: Synthetic oligonucleotide
cuuuaaccacagagggucu

SEQ ID NO: 2967234 - RNA, 19 nt, Artificial Sequence
  Description of Artificial Sequence: Synthetic oligonucleotide
guucucgggcuccccugug

SEQ ID NO: 2967235 - RNA, 19 nt, Artificial Sequence
  Description of Artificial Sequence: Synthetic oligonucleotide
ugcaucccagaagcaucga

SEQ ID NO: 2967236 - RNA, 19 nt, Artificial Sequence
  Description of Artificial Sequence: Synthetic oligonucleotide
gucuuuaaccacagagggu

SEQ ID NO: 2967237 - RNA, 19 nt, Artificial Sequence
  Description of Artificial Sequence: Synthetic oligonucleotide
acagagggucuaaaccuuu

SEQ ID NO: 2967238 - RNA, 19 nt, Artificial Sequence
  Description of Artificial Sequence: Synthetic oligonucleotide
agcaucgagcagccaugaa

SEQ ID NO: 2967239 - RNA, 19 nt, Artificial Sequence
  Description of Artificial Sequence: Synthetic oligonucleotide
ccaccauuuuauaccgguc

SEQ ID NO: 2967240 - RNA, 19 nt, Artificial Sequence
  Description of Artificial Sequence: Synthetic oligonucleotide
cuucuccgacucguacaag

SEQ ID NO: 2967241 - RNA, 19 nt, Artificial Sequence
  Description of Artificial Sequence: Synthetic oligonucleotide
augguuucugacagauguu

SEQ ID NO: 2967242 - RNA, 19 nt, Artificial Sequence
  Description of Artificial Sequence: Synthetic oligonucleotide
ggcaucggaggugccaaug

SEQ ID NO: 2967243 - RNA, 19 nt, Artificial Sequence
  Description of Artificial Sequence: Synthetic oligonucleotide
gccaauggauaagcgggug

SEQ ID NO: 2967244 - RNA, 19 nt, Artificial Sequence
  Description of Artificial Sequence: Synthetic oligonucleotide
augaggcauuucaucugga

SEQ ID NO: 2967245 - RNA, 19 nt, Artificial Sequence
  Description of Artificial Sequence: Synthetic oligonucleotide
cagugucugcaucccagaa

SEQ ID NO: 2967246 - RNA, 19 nt, Artificial Sequence
  Description of Artificial Sequence: Synthetic oligonucleotide
ugagcacggcauggaugca

SEQ ID NO: 2967247 - RNA, 19 nt, Artificial Sequence
  Description of Artificial Sequence: Synthetic oligonucleotide
ccaguucuuccuugagcac

SEQ ID NO: 2967248 - RNA, 19 nt, Artificial Sequence
  Description of Artificial Sequence: Synthetic oligonucleotide
cccgcaucuggauccugcc

SEQ ID NO: 2967249 - RNA, 19 nt, Artificial Sequence
  Description of Artificial Sequence: Synthetic oligonucleotide
cccuguguucuucuccgac

SEQ ID NO: 2967250 - RNA, 19 nt, Artificial Sequence
  Description of Artificial Sequence: Synthetic oligonucleotide
gucugcaucccagaagcau

SEQ ID NO: 2967251 - RNA, 19 nt, Artificial Sequence
  Description of Artificial Sequence: Synthetic oligonucleotide
gcauggaugcagucuuuaa

SEQ ID NO: 2967252 - RNA, 19 nt, Artificial Sequence
  Description of Artificial Sequence: Synthetic oligonucleotide
cagccauaaucccgcaucu

SEQ ID NO: 2967253 - RNA, 19 nt, Artificial Sequence
  Description of Artificial Sequence: Synthetic oligonucleotide
ccucagaauauagguguuc

SEQ ID NO: 2967254 - RNA, 19 nt, Artificial Sequence
  Description of Artificial Sequence: Synthetic oligonucleotide
gugagaugaggcauuucau

SEQ ID NO: 2967255 - RNA, 19 nt, Artificial Sequence
  Description of Artificial Sequence: Synthetic oligonucleotide
ccaauucuuuuaguuuauc

SEQ ID NO: 2967256 - RNA, 19 nt, Artificial Sequence
  Description of Artificial Sequence: Synthetic oligonucleotide
ccgcaucuggauccugccg

SEQ ID NO: 2967257 - RNA, 19 nt, Artificial Sequence
  Description of Artificial Sequence: Synthetic oligonucleotide
gcacuugccaguucuuccu

SEQ ID NO: 2967258 - RNA, 19 nt, Artificial Sequence
  Description of Artificial Sequence: Synthetic oligonucleotide
cacagagggucuaaaccuu

SEQ ID NO: 2967259 - RNA, 19 nt, Artificial Sequence
  Description of Artificial Sequence: Synthetic oligonucleotide
cacuacuugcaccaccauu

SEQ ID NO: 2967260 - RNA, 19 nt, Artificial Sequence
  Description of Artificial Sequence: Synthetic oligonucleotide
caucuggauccugccgauc

SEQ ID NO: 2967261 - RNA, 19 nt, Artificial Sequence
  Description of Artificial Sequence: Synthetic oligonucleotide
guucuuccuugagcacggc

SEQ ID NO: 2967262 - RNA, 19 nt, Artificial Sequence
  Description of Artificial Sequence: Synthetic oligonucleotide
ggauaagcggguggacaca

SEQ ID NO: 2967263 - RNA, 19 nt, Artificial Sequence
  Description of Artificial Sequence: Synthetic oligonucleotide
cacggcauggaugcagucu

SEQ ID NO: 2967264 - RNA, 19 nt, Artificial Sequence
  Description of Artificial Sequence: Synthetic oligonucleotide
gcuggaaaacgggccucag

SEQ ID NO: 2967265 - RNA, 19 nt, Artificial Sequence
  Description of Artificial Sequence: Synthetic oligonucleotide
ccucuguucuccaaucacu

SEQ ID NO: 2967266 - RNA, 19 nt, Artificial Sequence
  Description of Artificial Sequence: Synthetic oligonucleotide
cgcaucuggauccugccga

SEQ ID NO: 2967267 - RNA, 19 nt, Artificial Sequence
  Description of Artificial Sequence: Synthetic oligonucleotide
gcauuucaucuggagaaua

SEQ ID NO: 2967268 - RNA, 19 nt, Artificial Sequence
  Description of Artificial Sequence: Synthetic oligonucleotide
cgacucguacaaggcaucg

SEQ ID NO: 2967269 - RNA, 19 nt, Artificial Sequence
  Description of Artificial Sequence: Synthetic oligonucleotide
aggcaucggaggugccaau

SEQ ID NO: 2967270 - RNA, 19 nt, Artificial Sequence
  Description of Artificial Sequence: Synthetic oligonucleotide
ccggucauaucccaauucu

SEQ ID NO: 2967271 - RNA, 19 nt, Artificial Sequence
  Description of Artificial Sequence: Synthetic oligonucleotide
ccgacucguacaaggcauc

SEQ ID NO: 2967272 - RNA, 19 nt, Artificial Sequence
  Description of Artificial Sequence: Synthetic oligonucleotide
ggaaaacgggccucagaau

SEQ ID NO: 2967273 - RNA, 19 nt, Artificial Sequence
  Description of Artificial Sequence: Synthetic oligonucleotide
gguguucucgggcuccccu

SEQ ID NO: 2967274 - RNA, 19 nt, Artificial Sequence
  Description of Artificial Sequence: Synthetic oligonucleotide
cuggauccugccgaucucu

SEQ ID NO: 2967275 - RNA, 19 nt, Artificial Sequence
  Description of Artificial Sequence: Synthetic oligonucleotide
cguacaaggcaucggaggu

SEQ ID NO: 2967276 - RNA, 19 nt, Artificial Sequence
  Description of Artificial Sequence: Synthetic oligonucleotide
ggcauggaugcagucuuua

SEQ ID NO: 2967277 - RNA, 19 nt, Artificial Sequence
  Description of Artificial Sequence: Synthetic oligonucleotide
cuacuugcaccaccauuuu

SEQ ID NO: 2967278 - RNA, 19 nt, Artificial Sequence
  Description of Artificial Sequence: Synthetic oligonucleotide
gcagccaugaauacuccuu

SEQ ID NO: 2967279 - RNA, 19 nt, Artificial Sequence
  Description of Artificial Sequence: Synthetic oligonucleotide
cgggccucagaauauaggu

SEQ ID NO: 2967280 - RNA, 19 nt, Artificial Sequence
  Description of Artificial Sequence: Synthetic oligonucleotide
aucccgcaucuggauccug

SEQ ID NO: 2967281 - RNA, 19 nt, Artificial Sequence
  Description of Artificial Sequence: Synthetic oligonucleotide
gguuucugacagauguuuu

SEQ ID NO: 2967282 - RNA, 19 nt, Artificial Sequence
  Description of Artificial Sequence: Synthetic oligonucleotide
ccuucaccccucuguucuc

SEQ ID NO: 2967283 - RNA, 19 nt, Artificial Sequence
  Description of Artificial Sequence: Synthetic oligonucleotide
ccauuuuauaccggucaua

SEQ ID NO: 2967284 - RNA, 19 nt, Artificial Sequence
  Description of Artificial Sequence: Synthetic oligonucleotide
cacagccauaaucccgcau

SEQ ID NO: 2967285 - RNA, 19 nt, Artificial Sequence
  Description of Artificial Sequence: Synthetic oligonucleotide
gcacggcauggaugcaguc

SEQ ID NO: 2967286 - RNA, 19 nt, Artificial Sequence
  Description of Artificial Sequence: Synthetic oligonucleotide
ggcauuucaucuggagaau

SEQ ID NO: 2967287 - RNA, 19 nt, Artificial Sequence
  Description of Artificial Sequence: Synthetic oligonucleotide
caccccucuguucuccaau

SEQ ID NO: 2967288 - RNA, 19 nt, Artificial Sequence
  Description of Artificial Sequence: Synthetic oligonucleotide
cggaggugccaauggauaa

SEQ ID NO: 2967289 - RNA, 19 nt, Artificial Sequence
  Description of Artificial Sequence: Synthetic oligonucleotide
ccccucuguucuccaauca

SEQ ID NO: 2967290 - RNA, 19 nt, Artificial Sequence
  Description of Artificial Sequence: Synthetic oligonucleotide
cagaagcaucgagcagcca

SEQ ID NO: 2967291 - RNA, 19 nt, Artificial Sequence
  Description of Artificial Sequence: Synthetic oligonucleotide
cacuugccaguucuuccuu

SEQ ID NO: 2967292 - RNA, 19 nt, Artificial Sequence
  Description of Artificial Sequence: Synthetic oligonucleotide
gcaucuggauccugccgau

SEQ ID NO: 2967293 - RNA, 19 nt, Artificial Sequence
  Description of Artificial Sequence: Synthetic oligonucleotide
ggcuccccuguguucuucu

SEQ ID NO: 2967294 - RNA, 19 nt, Artificial Sequence
  Description of Artificial Sequence: Synthetic oligonucleotide
ccuugagcacggcauggau

SEQ ID NO: 2967295 - RNA, 19 nt, Artificial Sequence
  Description of Artificial Sequence: Synthetic oligonucleotide
cggguggacacagccauaa

SEQ ID NO: 2967296 - RNA, 19 nt, Artificial Sequence
  Description of Artificial Sequence: Synthetic oligonucleotide
gggcuccccuguguucuuc

SEQ ID NO: 2967297 - RNA, 19 nt, Artificial Sequence
  Description of Artificial Sequence: Synthetic oligonucleotide
ccccuguguucuucuccga

SEQ ID NO: 2967298 - RNA, 19 nt, Artificial Sequence
  Description of Artificial Sequence: Synthetic oligonucleotide
gccucagaauauagguguu

SEQ ID NO: 2967299 - RNA, 19 nt, Artificial Sequence
  Description of Artificial Sequence: Synthetic oligonucleotide
cggucauaucccaauucuu

SEQ ID NO: 2967300 - RNA, 19 nt, Artificial Sequence
  Description of Artificial Sequence: Synthetic oligonucleotide
gcggguggacacagccaua

SEQ ID NO: 2967301 - RNA, 19 nt, Artificial Sequence
  Description of Artificial Sequence: Synthetic oligonucleotide
cggcauggaugcagucuuu

SEQ ID NO: 2967302 - RNA, 19 nt, Artificial Sequence
  Description of Artificial Sequence: Synthetic oligonucleotide
cgggcuccccuguguucuu

SEQ ID NO: 2967303 - RNA, 19 nt, Artificial Sequence
  Description of Artificial Sequence: Synthetic oligonucleotide
uuuucgaugcuccagaagc

SEQ ID NO: 2967304 - RNA, 19 nt, Artificial Sequence
  Description of Artificial Sequence: Synthetic oligonucleotide
aaagauuggcuaaacaggc

SEQ ID NO: 2967305 - RNA, 19 nt, Artificial Sequence
  Description of Artificial Sequence: Synthetic oligonucleotide
uuugaaacgacugaagcgg

SEQ ID NO: 2967306 - RNA, 19 nt, Artificial Sequence
  Description of Artificial Sequence: Synthetic oligonucleotide
acaaagauuggcuaaacag

SEQ ID NO: 2967307 - RNA, 19 nt, Artificial Sequence
  Description of Artificial Sequence: Synthetic oligonucleotide
ucaugaaaaccucugaaag

SEQ ID NO: 2967308 - RNA, 19 nt, Artificial Sequence
  Description of Artificial Sequence: Synthetic oligonucleotide
uuuugaaacgacugaagcg

SEQ ID NO: 2967309 - RNA, 19 nt, Artificial Sequence
  Description of Artificial Sequence: Synthetic oligonucleotide
aucgucaagaaucugcugc

SEQ ID NO: 2967310 - RNA, 19 nt, Artificial Sequence
  Description of Artificial Sequence: Synthetic oligonucleotide
cuggauaucgucaagaauc

SEQ ID NO: 2967311 - RNA, 19 nt, Artificial Sequence
  Description of Artificial Sequence: Synthetic oligonucleotide
aagcaugugaacuucggag

SEQ ID NO: 2967312 - RNA, 19 nt, Artificial Sequence
  Description of Artificial Sequence: Synthetic oligonucleotide
aacucuuuaggaaagauga

SEQ ID NO: 2967313 - RNA, 19 nt, Artificial Sequence
  Description of Artificial Sequence: Synthetic oligonucleotide
ucuuuaggaaagaugagcu

SEQ ID NO: 2967314 - RNA, 19 nt, Artificial Sequence
  Description of Artificial Sequence: Synthetic oligonucleotide
ugaaaguuccugcucaucc

SEQ ID NO: 2967315 - RNA, 19 nt, Artificial Sequence
  Description of Artificial Sequence: Synthetic oligonucleotide
uaguuuaggguuuucauga

SEQ ID NO: 2967316 - RNA, 19 nt, Artificial Sequence
  Description of Artificial Sequence: Synthetic oligonucleotide
gaaagaugagcugagacgc

SEQ ID NO: 2967317 - RNA, 19 nt, Artificial Sequence
  Description of Artificial Sequence: Synthetic oligonucleotide
uucaaaacgcccuuccagg

SEQ ID NO: 2967318 - RNA, 19 nt, Artificial Sequence
  Description of Artificial Sequence: Synthetic oligonucleotide
ugaacuucggaguuuagga

SEQ ID NO: 2967319 - RNA, 19 nt, Artificial Sequence
  Description of Artificial Sequence: Synthetic oligonucleotide
aaccucugaaaguuccugc

SEQ ID NO: 2967320 - RNA, 19 nt, Artificial Sequence
  Description of Artificial Sequence: Synthetic oligonucleotide
aggaaagaugagcugagac

SEQ ID NO: 2967321 - RNA, 19 nt, Artificial Sequence
  Description of Artificial Sequence: Synthetic oligonucleotide
uuccucaucuucaaaacgc

SEQ ID NO: 2967322 - RNA, 19 nt, Artificial Sequence
  Description of Artificial Sequence: Synthetic oligonucleotide
uuuaggguuuucaugaaaa

SEQ ID NO: 2967323 - RNA, 19 nt, Artificial Sequence
  Description of Artificial Sequence: Synthetic oligonucleotide
gauaucgucaagaaucugc

SEQ ID NO: 2967324 - RNA, 19 nt, Artificial Sequence
  Description of Artificial Sequence: Synthetic oligonucleotide
aaaguuccugcucauccuc

SEQ ID NO: 2967325 - RNA, 19 nt, Artificial Sequence
  Description of Artificial Sequence: Synthetic oligonucleotide
aaacaggccaacucaaacu

SEQ ID NO: 2967326 - RNA, 19 nt, Artificial Sequence
  Description of Artificial Sequence: Synthetic oligonucleotide
uucaaacucuuuaggaaag

SEQ ID NO: 2967327 - RNA, 19 nt, Artificial Sequence
  Description of Artificial Sequence: Synthetic oligonucleotide
uuucaaacucuuuaggaaa

SEQ ID NO: 2967328 - RNA, 19 nt, Artificial Sequence
  Description of Artificial Sequence: Synthetic oligonucleotide
aguuccucaucuucaaaac

SEQ ID NO: 2967329 - RNA, 19 nt, Artificial Sequence
  Description of Artificial Sequence: Synthetic oligonucleotide
aacucaaacuuauguagcu

SEQ ID NO: 2967330 - RNA, 19 nt, Artificial Sequence
  Description of Artificial Sequence: Synthetic oligonucleotide
auaguuuaggguuuucaug

SEQ ID NO: 2967331 - RNA, 19 nt, Artificial Sequence
  Description of Artificial Sequence: Synthetic oligonucleotide
uucuggagaagcaagcuac

SEQ ID NO: 2967332 - RNA, 19 nt, Artificial Sequence
  Description of Artificial Sequence: Synthetic oligonucleotide
aucuucaaaacgcccuucc

SEQ ID NO: 2967333 - RNA, 19 nt, Artificial Sequence
  Description of Artificial Sequence: Synthetic oligonucleotide
aacuucggaguuuaggaga

SEQ ID NO: 2967334 - RNA, 19 nt, Artificial Sequence
  Description of Artificial Sequence: Synthetic oligonucleotide
uuucaugaaaaccucugaa

SEQ ID NO: 2967335 - RNA, 19 nt, Artificial Sequence
  Description of Artificial Sequence: Synthetic oligonucleotide
uuuucaugaaaaccucuga

SEQ ID NO: 2967336 - RNA, 19 nt, Artificial Sequence
  Description of Artificial Sequence: Synthetic oligonucleotide
ugcacucucauucugcugu

SEQ ID NO: 2967337 - RNA, 19 nt, Artificial Sequence
  Description of Artificial Sequence: Synthetic oligonucleotide
uaaacaggccaacucaaac

SEQ ID NO: 2967338 - RNA, 19 nt, Artificial Sequence
  Description of Artificial Sequence: Synthetic oligonucleotide
uuaggaaagaugagcugag

SEQ ID NO: 2967339 - RNA, 19 nt, Artificial Sequence
  Description of Artificial Sequence: Synthetic oligonucleotide
uuuaggagagucucggcug

SEQ ID NO: 2967340 - RNA, 19 nt, Artificial Sequence
  Description of Artificial Sequence: Synthetic oligonucleotide
ggaaagaugagcugagacg

SEQ ID NO: 2967341 - RNA, 19 nt, Artificial Sequence
  Description of Artificial Sequence: Synthetic oligonucleotide
ucuucuucuacgucgccag

SEQ ID NO: 2967342 - RNA, 19 nt, Artificial Sequence
  Description of Artificial Sequence: Synthetic oligonucleotide
ucucauucugcuguuuucg

SEQ ID NO: 2967343 - RNA, 19 nt, Artificial Sequence
  Description of Artificial Sequence: Synthetic oligonucleotide
agaagcaagcuacgaacac

SEQ ID NO: 2967344 - RNA, 19 nt, Artificial Sequence
  Description of Artificial Sequence: Synthetic oligonucleotide
uucaugaaaaccucugaaa

SEQ ID NO: 2967345 - RNA, 19 nt, Artificial Sequence
  Description of Artificial Sequence: Synthetic oligonucleotide
uauaguuuaggguuuucau

SEQ ID NO: 2967346 - RNA, 19 nt, Artificial Sequence
  Description of Artificial Sequence: Synthetic oligonucleotide
gaaaaccucugaaaguucc

SEQ ID NO: 2967347 - RNA, 19 nt, Artificial Sequence
  Description of Artificial Sequence: Synthetic oligonucleotide
agauuggcuaaacaggcca

SEQ ID NO: 2967348 - RNA, 19 nt, Artificial Sequence
  Description of Artificial Sequence: Synthetic oligonucleotide
acugaagcgggcuguauag

SEQ ID NO: 2967349 - RNA, 19 nt, Artificial Sequence
  Description of Artificial Sequence: Synthetic oligonucleotide
aagauuggcuaaacaggcc

SEQ ID NO: 2967350 - RNA, 19 nt, Artificial Sequence
  Description of Artificial Sequence: Synthetic oligonucleotide
cuucaaaacgcccuuccag

SEQ ID NO: 2967351 - RNA, 19 nt, Artificial Sequence
  Description of Artificial Sequence: Synthetic oligonucleotide
cucuuuaggaaagaugagc

SEQ ID NO: 2967352 - RNA, 19 nt, Artificial Sequence
  Description of Artificial Sequence: Synthetic oligonucleotide
caacucaaacuuauguagc

SEQ ID NO: 2967353 - RNA, 19 nt, Artificial Sequence
  Description of Artificial Sequence: Synthetic oligonucleotide
uaggguuuucaugaaaacc

SEQ ID NO: 2967354 - RNA, 19 nt, Artificial Sequence
  Description of Artificial Sequence: Synthetic oligonucleotide
uucuggacaaagauuggcu

SEQ ID NO: 2967355 - RNA, 19 nt, Artificial Sequence
  Description of Artificial Sequence: Synthetic oligonucleotide
aaacucuuuaggaaagaug

SEQ ID NO: 2967356 - RNA, 19 nt, Artificial Sequence
  Description of Artificial Sequence: Synthetic oligonucleotide
gaacuucggaguuuaggag

SEQ ID NO: 2967357 - RNA, 19 nt, Artificial Sequence
  Description of Artificial Sequence: Synthetic oligonucleotide
aacaggccaacucaaacuu

SEQ ID NO: 2967358 - RNA, 19 nt, Artificial Sequence
  Description of Artificial Sequence: Synthetic oligonucleotide
uugaaacgacugaagcggg

SEQ ID NO: 2967359 - RNA, 19 nt, Artificial Sequence
  Description of Artificial Sequence: Synthetic oligonucleotide
agucucggcuguuucaaac

SEQ ID NO: 2967360 - RNA, 19 nt, Artificial Sequence
  Description of Artificial Sequence: Synthetic oligonucleotide
agagcuuuggacuccucag

SEQ ID NO: 2967361 - RNA, 19 nt, Artificial Sequence
  Description of Artificial Sequence: Synthetic oligonucleotide
ucuggagaagcaagcuacg

SEQ ID NO: 2967362 - RNA, 19 nt, Artificial Sequence
  Description of Artificial Sequence: Synthetic oligonucleotide
guuccucaucuucaaaacg

SEQ ID NO: 2967363 - RNA, 19 nt, Artificial Sequence
  Description of Artificial Sequence: Synthetic oligonucleotide
aaucagagcuuuggacucc

SEQ ID NO: 2967364 - RNA, 19 nt, Artificial Sequence
  Description of Artificial Sequence: Synthetic oligonucleotide
gaguuuaggagagucucgg

SEQ ID NO: 2967365 - RNA, 19 nt, Artificial Sequence
  Description of Artificial Sequence: Synthetic oligonucleotide
aggguuuucaugaaaaccu

SEQ ID NO: 2967366 - RNA, 19 nt, Artificial Sequence
  Description of Artificial Sequence: Synthetic oligonucleotide
aguuuaggagagucucggc

SEQ ID NO: 2967367 - RNA, 19 nt, Artificial Sequence
  Description of Artificial Sequence: Synthetic oligonucleotide
uggauaucgucaagaaucu

SEQ ID NO: 2967368 - RNA, 19 nt, Artificial Sequence
  Description of Artificial Sequence: Synthetic oligonucleotide
uggaaucagagcuuuggac

SEQ ID NO: 2967369 - RNA, 19 nt, Artificial Sequence
  Description of Artificial Sequence: Synthetic oligonucleotide
cauucugcuguuuucgaug

SEQ ID NO: 2967370 - RNA, 19 nt, Artificial Sequence
  Description of Artificial Sequence: Synthetic oligonucleotide
uccucaucuucaaaacgcc

SEQ ID NO: 2967371 - RNA, 19 nt, Artificial Sequence
  Description of Artificial Sequence: Synthetic oligonucleotide
ccaacucaaacuuauguag

SEQ ID NO: 2967372 - RNA, 19 nt, Artificial Sequence
  Description of Artificial Sequence: Synthetic oligonucleotide
aagcaagcuacgaacacug

SEQ ID NO: 2967373 - RNA, 19 nt, Artificial Sequence
  Description of Artificial Sequence: Synthetic oligonucleotide
uuucuggacaaagauuggc

SEQ ID NO: 2967374 - RNA, 19 nt, Artificial Sequence
  Description of Artificial Sequence: Synthetic oligonucleotide
gaaucagagcuuuggacuc

SEQ ID NO: 2967375 - RNA, 19 nt, Artificial Sequence
  Description of Artificial Sequence: Synthetic oligonucleotide
ugcuccagaagcaugugaa

SEQ ID NO: 2967376 - RNA, 19 nt, Artificial Sequence
  Description of Artificial Sequence: Synthetic oligonucleotide
ucaagaaucugcugcaguu

SEQ ID NO: 2967377 - RNA, 19 nt, Artificial Sequence
  Description of Artificial Sequence: Synthetic oligonucleotide
agcaugugaacuucggagu

SEQ ID NO: 2967378 - RNA, 19 nt, Artificial Sequence
  Description of Artificial Sequence: Synthetic oligonucleotide
ucaaaacgcccuuccaggc

SEQ ID NO: 2967379 - RNA, 19 nt, Artificial Sequence
  Description of Artificial Sequence: Synthetic oligonucleotide
uuaggguuuucaugaaaac

SEQ ID NO: 2967380 - RNA, 19 nt, Artificial Sequence
  Description of Artificial Sequence: Synthetic oligonucleotide
uuggaaucagagcuuugga

SEQ ID NO: 2967381 - RNA, 19 nt, Artificial Sequence
  Description of Artificial Sequence: Synthetic oligonucleotide
ucuucuacgucgccagccc

SEQ ID NO: 2967382 - RNA, 19 nt, Artificial Sequence
  Description of Artificial Sequence: Synthetic oligonucleotide
uucuacgucgccagcccgg

SEQ ID NO: 2967383 - RNA, 19 nt, Artificial Sequence
  Description of Artificial Sequence: Synthetic oligonucleotide
uuucgaugcuccagaagca

SEQ ID NO: 2967384 - RNA, 19 nt, Artificial Sequence
  Description of Artificial Sequence: Synthetic oligonucleotide
cuuuaggaaagaugagcug

SEQ ID NO: 2967385 - RNA, 19 nt, Artificial Sequence
  Description of Artificial Sequence: Synthetic oligonucleotide
ucuucaaaacgcccuucca

SEQ ID NO: 2967386 - RNA, 19 nt, Artificial Sequence
  Description of Artificial Sequence: Synthetic oligonucleotide
ggagaagcaagcuacgaac

SEQ ID NO: 2967387 - RNA, 19 nt, Artificial Sequence
  Description of Artificial Sequence: Synthetic oligonucleotide
aaaccucugaaaguuccug

SEQ ID NO: 2967388 - RNA, 19 nt, Artificial Sequence
  Description of Artificial Sequence: Synthetic oligonucleotide
agacgcgucuucuucuacg

SEQ ID NO: 2967389 - RNA, 19 nt, Artificial Sequence
  Description of Artificial Sequence: Synthetic oligonucleotide
caagcuacgaacacuggca

SEQ ID NO: 2967390 - RNA, 19 nt, Artificial Sequence
  Description of Artificial Sequence: Synthetic oligonucleotide
uggagaagcaagcuacgaa

SEQ ID NO: 2967391 - RNA, 19 nt, Artificial Sequence
  Description of Artificial Sequence: Synthetic oligonucleotide
aaaacgcccuuccaggcuu

SEQ ID NO: 2967392 - RNA, 19 nt, Artificial Sequence
  Description of Artificial Sequence: Synthetic oligonucleotide
ucuggauaucgucaagaau

SEQ ID NO: 2967393 - RNA, 19 nt, Artificial Sequence
  Description of Artificial Sequence: Synthetic oligonucleotide
ucuggacaaagauuggcua

SEQ ID NO: 2967394 - RNA, 19 nt, Artificial Sequence
  Description of Artificial Sequence: Synthetic oligonucleotide
gacaaagauuggcuaaaca

SEQ ID NO: 2967395 - RNA, 19 nt, Artificial Sequence
  Description of Artificial Sequence: Synthetic oligonucleotide
aaacgacugaagcgggcug

SEQ ID NO: 2967396 - RNA, 19 nt, Artificial Sequence
  Description of Artificial Sequence: Synthetic oligonucleotide
uuucuggagaagcaagcua

SEQ ID NO: 2967397 - RNA, 19 nt, Artificial Sequence
  Description of Artificial Sequence: Synthetic oligonucleotide
ugaaacgacugaagcgggc

SEQ ID NO: 2967398 - RNA, 19 nt, Artificial Sequence
  Description of Artificial Sequence: Synthetic oligonucleotide
gugaacuucggaguuuagg

SEQ ID NO: 2967399 - RNA, 19 nt, Artificial Sequence
  Description of Artificial Sequence: Synthetic oligonucleotide
ucgucaagaaucugcugca

SEQ ID NO: 2967400 - RNA, 19 nt, Artificial Sequence
  Description of Artificial Sequence: Synthetic oligonucleotide
aaagaugagcugagacgcg

SEQ ID NO: 2967401 - RNA, 19 nt, Artificial Sequence
  Description of Artificial Sequence: Synthetic oligonucleotide
ugaaaaccucugaaaguuc

SEQ ID NO: 2967402 - RNA, 19 nt, Artificial Sequence
  Description of Artificial Sequence: Synthetic oligonucleotide
uuaggagagucucggcugu

SEQ ID NO: 2967403 - RNA, 19 nt, Artificial Sequence
  Description of Artificial Sequence: Synthetic oligonucleotide
acgaacacuggcaaugguc

SEQ ID NO: 2967404 - RNA, 19 nt, Artificial Sequence
  Description of Artificial Sequence: Synthetic oligonucleotide
ucugcacucucauucugcu

SEQ ID NO: 2967405 - RNA, 19 nt, Artificial Sequence
  Description of Artificial Sequence: Synthetic oligonucleotide
acuggcaauggucucucug

SEQ ID NO: 2967406 - RNA, 19 nt, Artificial Sequence
  Description of Artificial Sequence: Synthetic oligonucleotide
agcuuuggacuccucagca

SEQ ID NO: 2967407 - RNA, 19 nt, Artificial Sequence
  Description of Artificial Sequence: Synthetic oligonucleotide
cuuggucuggauaucguca

SEQ ID NO: 2967408 - RNA, 19 nt, Artificial Sequence
  Description of Artificial Sequence: Synthetic oligonucleotide
ucaaacuuauguagcuuuu

SEQ ID NO: 2967409 - RNA, 19 nt, Artificial Sequence
  Description of Artificial Sequence: Synthetic oligonucleotide
aagcuacgaacacuggcaa

SEQ ID NO: 2967410 - RNA, 19 nt, Artificial Sequence
  Description of Artificial Sequence: Synthetic oligonucleotide
auuggcuaaacaggccaac

SEQ ID NO: 2967411 - RNA, 19 nt, Artificial Sequence
  Description of Artificial Sequence: Synthetic oligonucleotide
uggaagcugcgcuuggucu

SEQ ID NO: 2967412 - RNA, 19 nt, Artificial Sequence
  Description of Artificial Sequence: Synthetic oligonucleotide
guuuucgaugcuccagaag

SEQ ID NO: 2967413 - RNA, 19 nt, Artificial Sequence
  Description of Artificial Sequence: Synthetic oligonucleotide
auaucgucaagaaucugcu

SEQ ID NO: 2967414 - RNA, 19 nt, Artificial Sequence
  Description of Artificial Sequence: Synthetic oligonucleotide
cagaagcaugugaacuucg

SEQ ID NO: 2967415 - RNA, 19 nt, Artificial Sequence
  Description of Artificial Sequence: Synthetic oligonucleotide
gaagcaugugaacuucgga

SEQ ID NO: 2967416 - RNA, 19 nt, Artificial Sequence
  Description of Artificial Sequence: Synthetic oligonucleotide
uggcuaaacaggccaacuc

SEQ ID NO: 2967417 - RNA, 19 nt, Artificial Sequence
  Description of Artificial Sequence: Synthetic oligonucleotide
gagcuuuggacuccucagc

SEQ ID NO: 2967418 - RNA, 19 nt, Artificial Sequence
  Description of Artificial Sequence: Synthetic oligonucleotide
accucugaaaguuccugcu

SEQ ID NO: 2967419 - RNA, 19 nt, Artificial Sequence
  Description of Artificial Sequence: Synthetic oligonucleotide
agaagcaugugaacuucgg

SEQ ID NO: 2967420 - RNA, 19 nt, Artificial Sequence
  Description of Artificial Sequence: Synthetic oligonucleotide
caggcuuggaaucagagcu

SEQ ID NO: 2967421 - RNA, 19 nt, Artificial Sequence
  Description of Artificial Sequence: Synthetic oligonucleotide
ucgaugcuccagaagcaug

SEQ ID NO: 2967422 - RNA, 19 nt, Artificial Sequence
  Description of Artificial Sequence: Synthetic oligonucleotide
cucugcacucucauucugc

SEQ ID NO: 2967423 - RNA, 19 nt, Artificial Sequence
  Description of Artificial Sequence: Synthetic oligonucleotide
ucaucuucaaaacgcccuu

SEQ ID NO: 2967424 - RNA, 19 nt, Artificial Sequence
  Description of Artificial Sequence: Synthetic oligonucleotide
uccagaagcaugugaacuu

SEQ ID NO: 2967425 - RNA, 19 nt, Artificial Sequence
  Description of Artificial Sequence: Synthetic oligonucleotide
uacgucgccagcccgggga

SEQ ID NO: 2967426 - RNA, 19 nt, Artificial Sequence
  Description of Artificial Sequence: Synthetic oligonucleotide
ucucggcuguuucaaacuc

SEQ ID NO: 2967427 - RNA, 19 nt, Artificial Sequence
  Description of Artificial Sequence: Synthetic oligonucleotide
ugagcugagacgcgucuuc

SEQ ID NO: 2967428 - RNA, 19 nt, Artificial Sequence
  Description of Artificial Sequence: Synthetic oligonucleotide
ucggaguuuaggagagucu

SEQ ID NO: 2967429 - RNA, 19 nt, Artificial Sequence
  Description of Artificial Sequence: Synthetic oligonucleotide
uuggucuggauaucgucaa

SEQ ID NO: 2967430 - RNA, 19 nt, Artificial Sequence
  Description of Artificial Sequence: Synthetic oligonucleotide
uucggaguuuaggagaguc

SEQ ID NO: 2967431 - RNA, 19 nt, Artificial Sequence
  Description of Artificial Sequence: Synthetic oligonucleotide
uaucgucaagaaucugcug

SEQ ID NO: 2967432 - RNA, 19 nt, Artificial Sequence
  Description of Artificial Sequence: Synthetic oligonucleotide
ucaaacucuuuaggaaaga

SEQ ID NO: 2967433 - RNA, 19 nt, Artificial Sequence
  Description of Artificial Sequence: Synthetic oligonucleotide
aaaaccucugaaaguuccu

SEQ ID NO: 2967434 - RNA, 19 nt, Artificial Sequence
  Description of Artificial Sequence: Synthetic oligonucleotide
acuccucagcaguuucugg

SEQ ID NO: 2967435 - RNA, 19 nt, Artificial Sequence
  Description of Artificial Sequence: Synthetic oligonucleotide
cucugaaaguuccugcuca

SEQ ID NO: 2967436 - RNA, 19 nt, Artificial Sequence
  Description of Artificial Sequence: Synthetic oligonucleotide
ucauucugcuguuuucgau

SEQ ID NO: 2967437 - RNA, 19 nt, Artificial Sequence
  Description of Artificial Sequence: Synthetic oligonucleotide
aagcgggcuguauaguuua

SEQ ID NO: 2967438 - RNA, 19 nt, Artificial Sequence
  Description of Artificial Sequence: Synthetic oligonucleotide
uacuggaagcugcgcuugg

SEQ ID NO: 2967439 - RNA, 19 nt, Artificial Sequence
  Description of Artificial Sequence: Synthetic oligonucleotide
uccucagcaguuucuggac

SEQ ID NO: 2967440 - RNA, 19 nt, Artificial Sequence
  Description of Artificial Sequence: Synthetic oligonucleotide
ugaagcgggcuguauaguu

SEQ ID NO: 2967441 - RNA, 19 nt, Artificial Sequence
  Description of Artificial Sequence: Synthetic oligonucleotide
ggaaucagagcuuuggacu

SEQ ID NO: 2967442 - RNA, 19 nt, Artificial Sequence
  Description of Artificial Sequence: Synthetic oligonucleotide
gagaagcaagcuacgaaca

SEQ ID NO: 2967443 - RNA, 19 nt, Artificial Sequence
  Description of Artificial Sequence: Synthetic oligonucleotide
uguuuucgaugcuccagaa

SEQ ID NO: 2967444 - RNA, 19 nt, Artificial Sequence
  Description of Artificial Sequence: Synthetic oligonucleotide
guauaguuuaggguuuuca

SEQ ID NO: 2967445 - RNA, 19 nt, Artificial Sequence
  Description of Artificial Sequence: Synthetic oligonucleotide
cuacgaacacuggcaaugg

SEQ ID NO: 2967446 - RNA, 19 nt, Artificial Sequence
  Description of Artificial Sequence: Synthetic oligonucleotide
guuucuggacaaagauugg

SEQ ID NO: 2967447 - RNA, 19 nt, Artificial Sequence
  Description of Artificial Sequence: Synthetic oligonucleotide
guuuaggagagucucggcu

SEQ ID NO: 2967448 - RNA, 19 nt, Artificial Sequence
  Description of Artificial Sequence: Synthetic oligonucleotide
ugugaacuucggaguuuag

SEQ ID NO: 2967449 - RNA, 19 nt, Artificial Sequence
  Description of Artificial Sequence: Synthetic oligonucleotide
uggacaaagauuggcuaaa

SEQ ID NO: 2967450 - RNA, 19 nt, Artificial Sequence
  Description of Artificial Sequence: Synthetic oligonucleotide
aacgacugaagcgggcugu

SEQ ID NO: 2967451 - RNA, 19 nt, Artificial Sequence
  Description of Artificial Sequence: Synthetic oligonucleotide
gcaagcuacgaacacuggc

SEQ ID NO: 2967452 - RNA, 19 nt, Artificial Sequence
  Description of Artificial Sequence: Synthetic oligonucleotide
gaagcugcgcuuggucugg

SEQ ID NO: 2967453 - RNA, 19 nt, Artificial Sequence
  Description of Artificial Sequence: Synthetic oligonucleotide
gcuacgaacacuggcaaug

SEQ ID NO: 2967454 - RNA, 19 nt, Artificial Sequence
  Description of Artificial Sequence: Synthetic oligonucleotide
ucugaaaguuccugcucau

SEQ ID NO: 2967455 - RNA, 19 nt, Artificial Sequence
  Description of Artificial Sequence: Synthetic oligonucleotide
ugcaguuccucaucuucaa

SEQ ID NO: 2967456 - RNA, 19 nt, Artificial Sequence
  Description of Artificial Sequence: Synthetic oligonucleotide
caguuccucaucuucaaaa

SEQ ID NO: 2967457 - RNA, 19 nt, Artificial Sequence
  Description of Artificial Sequence: Synthetic oligonucleotide
ucggcuguuucaaacucuu

SEQ ID NO: 2967458 - RNA, 19 nt, Artificial Sequence
  Description of Artificial Sequence: Synthetic oligonucleotide
uggucuggauaucgucaag

SEQ ID NO: 2967459 - RNA, 19 nt, Artificial Sequence
  Description of Artificial Sequence: Synthetic oligonucleotide
uuggcuaaacaggccaacu

SEQ ID NO: 2967460 - RNA, 19 nt, Artificial Sequence
  Description of Artificial Sequence: Synthetic oligonucleotide
uuuggacuccucagcaguu

SEQ ID NO: 2967461 - RNA, 19 nt, Artificial Sequence
  Description of Artificial Sequence: Synthetic oligonucleotide
ucuacgucgccagcccggg

SEQ ID NO: 2967462 - RNA, 19 nt, Artificial Sequence
  Description of Artificial Sequence: Synthetic oligonucleotide
cucucauucugcuguuuuc

SEQ ID NO: 2967463 - RNA, 19 nt, Artificial Sequence
  Description of Artificial Sequence: Synthetic oligonucleotide
uccucugcacucucauucu

SEQ ID NO: 2967464 - RNA, 19 nt, Artificial Sequence
  Description of Artificial Sequence: Synthetic oligonucleotide
cuucuacgucgccagcccg

SEQ ID NO: 2967465 - RNA, 19 nt, Artificial Sequence
  Description of Artificial Sequence: Synthetic oligonucleotide
aguuuaggguuuucaugaa

SEQ ID NO: 2967466 - RNA, 19 nt, Artificial Sequence
  Description of Artificial Sequence: Synthetic oligonucleotide
gaaaguuccugcucauccu

SEQ ID NO: 2967467 - RNA, 19 nt, Artificial Sequence
  Description of Artificial Sequence: Synthetic oligonucleotide
uggacuccucagcaguuuc

SEQ ID NO: 2967468 - RNA, 19 nt, Artificial Sequence
  Description of Artificial Sequence: Synthetic oligonucleotide
acucuuuaggaaagaugag

SEQ ID NO: 2967469 - RNA, 19 nt, Artificial Sequence
  Description of Artificial Sequence: Synthetic oligonucleotide
uacgaacacuggcaauggu

SEQ ID NO: 2967470 - RNA, 19 nt, Artificial Sequence
  Description of Artificial Sequence: Synthetic oligonucleotide
gacuccucagcaguuucug

SEQ ID NO: 2967471 - RNA, 19 nt, Artificial Sequence
  Description of Artificial Sequence: Synthetic oligonucleotide
cuguuuucgaugcuccaga

SEQ ID NO: 2967472 - RNA, 19 nt, Artificial Sequence
  Description of Artificial Sequence: Synthetic oligonucleotide
guuuaggguuuucaugaaa

SEQ ID NO: 2967473 - RNA, 19 nt, Artificial Sequence
  Description of Artificial Sequence: Synthetic oligonucleotide
cuccucagcaguuucugga

SEQ ID NO: 2967474 - RNA, 19 nt, Artificial Sequence
  Description of Artificial Sequence: Synthetic oligonucleotide
gagagucucggcuguuuca

SEQ ID NO: 2967475 - RNA, 19 nt, Artificial Sequence
  Description of Artificial Sequence: Synthetic oligonucleotide
cuggacaaagauuggcuaa

SEQ ID NO: 2967476 - RNA, 19 nt, Artificial Sequence
  Description of Artificial Sequence: Synthetic oligonucleotide
augcuccagaagcauguga

SEQ ID NO: 2967477 - RNA, 19 nt, Artificial Sequence
  Description of Artificial Sequence: Synthetic oligonucleotide
ggaguuuaggagagucucg

SEQ ID NO: 2967478 - RNA, 19 nt, Artificial Sequence
  Description of Artificial Sequence: Synthetic oligonucleotide
cugcucauccucugcacuc

SEQ ID NO: 2967479 - RNA, 19 nt, Artificial Sequence
  Description of Artificial Sequence: Synthetic oligonucleotide
ggcuguauaguuuaggguu

SEQ ID NO: 2967480 - RNA, 19 nt, Artificial Sequence
  Description of Artificial Sequence: Synthetic oligonucleotide
uucgaugcuccagaagcau

SEQ ID NO: 2967481 - RNA, 19 nt, Artificial Sequence
  Description of Artificial Sequence: Synthetic oligonucleotide
guuccugcucauccucugc

SEQ ID NO: 2967482 - RNA, 19 nt, Artificial Sequence
  Description of Artificial Sequence: Synthetic oligonucleotide
uaggaaagaugagcugaga

SEQ ID NO: 2967483 - RNA, 19 nt, Artificial Sequence
  Description of Artificial Sequence: Synthetic oligonucleotide
gucuggauaucgucaagaa

SEQ ID NO: 2967484 - RNA, 19 nt, Artificial Sequence
  Description of Artificial Sequence: Synthetic oligonucleotide
cgcgucuucuucuacgucg

SEQ ID NO: 2967485 - RNA, 19 nt, Artificial Sequence
  Description of Artificial Sequence: Synthetic oligonucleotide
gaagcaagcuacgaacacu

SEQ ID NO: 2967486 - RNA, 19 nt, Artificial Sequence
  Description of Artificial Sequence: Synthetic oligonucleotide
acacuggcaauggucucuc

SEQ ID NO: 2967487 - RNA, 19 nt, Artificial Sequence
  Description of Artificial Sequence: Synthetic oligonucleotide
uuccaggcuuggaaucaga

SEQ ID NO: 2967488 - RNA, 19 nt, Artificial Sequence
  Description of Artificial Sequence: Synthetic oligonucleotide
ggcuguuucaaacucuuua

SEQ ID NO: 2967489 - RNA, 19 nt, Artificial Sequence
  Description of Artificial Sequence: Synthetic oligonucleotide
uguauaguuuaggguuuuc

SEQ ID NO: 2967490 - RNA, 19 nt, Artificial Sequence
  Description of Artificial Sequence: Synthetic oligonucleotide
gaacacuggcaauggucuc

SEQ ID NO: 2967491 - RNA, 19 nt, Artificial Sequence
  Description of Artificial Sequence: Synthetic oligonucleotide
cuaaacaggccaacucaaa

SEQ ID NO: 2967492 - RNA, 19 nt, Artificial Sequence
  Description of Artificial Sequence: Synthetic oligonucleotide
gacugaagcgggcuguaua

SEQ ID NO: 2967493 - RNA, 19 nt, Artificial Sequence
  Description of Artificial Sequence: Synthetic oligonucleotide
cagcaguuucuggacaaag

SEQ ID NO: 2967494 - RNA, 19 nt, Artificial Sequence
  Description of Artificial Sequence: Synthetic oligonucleotide
ugagacgcgucuucuucua

SEQ ID NO: 2967495 - RNA, 19 nt, Artificial Sequence
  Description of Artificial Sequence: Synthetic oligonucleotide
agaugagcugagacgcguc

SEQ ID NO: 2967496 - RNA, 19 nt, Artificial Sequence
  Description of Artificial Sequence: Synthetic oligonucleotide
cucaaacuuauguagcuuu

SEQ ID NO: 2967497 - RNA, 19 nt, Artificial Sequence
  Description of Artificial Sequence: Synthetic oligonucleotide
cgggcuguauaguuuaggg

SEQ ID NO: 2967498 - RNA, 19 nt, Artificial Sequence
  Description of Artificial Sequence: Synthetic oligonucleotide
gaaacgacugaagcgggcu

SEQ ID NO: 2967499 - RNA, 19 nt, Artificial Sequence
  Description of Artificial Sequence: Synthetic oligonucleotide
cuggaagcugcgcuugguc

SEQ ID NO: 2967500 - RNA, 19 nt, Artificial Sequence
  Description of Artificial Sequence: Synthetic oligonucleotide
agagucucggcuguuucaa

SEQ ID NO: 2967501 - RNA, 19 nt, Artificial Sequence
  Description of Artificial Sequence: Synthetic oligonucleotide
gucgccagcccggggaucg

SEQ ID NO: 2967502 - RNA, 19 nt, Artificial Sequence
  Description of Artificial Sequence: Synthetic oligonucleotide
gaugagcugagacgcgucu

SEQ ID NO: 2967503 - RNA, 19 nt, Artificial Sequence
  Description of Artificial Sequence: Synthetic oligonucleotide
cuuuggacuccucagcagu

SEQ ID NO: 2967504 - RNA, 19 nt, Artificial Sequence
  Description of Artificial Sequence: Synthetic oligonucleotide
uggcaauggucucucuguu

SEQ ID NO: 2967505 - RNA, 19 nt, Artificial Sequence
  Description of Artificial Sequence: Synthetic oligonucleotide
acucaaacuuauguagcuu

SEQ ID NO: 2967506 - RNA, 19 nt, Artificial Sequence
  Description of Artificial Sequence: Synthetic oligonucleotide
cucauucugcuguuuucga

SEQ ID NO: 2967507 - RNA, 19 nt, Artificial Sequence
  Description of Artificial Sequence: Synthetic oligonucleotide
cuucuucuacgucgccagc

SEQ ID NO: 2967508 - RNA, 19 nt, Artificial Sequence
  Description of Artificial Sequence: Synthetic oligonucleotide
ccgccaauuagcuucagga

SEQ ID NO: 2967509 - RNA, 19 nt, Artificial Sequence
  Description of Artificial Sequence: Synthetic oligonucleotide
acgcgucuucuucuacguc

SEQ ID NO: 2967510 - RNA, 19 nt, Artificial Sequence
  Description of Artificial Sequence: Synthetic oligonucleotide
gauuggcuaaacaggccaa

SEQ ID NO: 2967511 - RNA, 19 nt, Artificial Sequence
  Description of Artificial Sequence: Synthetic oligonucleotide
gcuuuggacuccucagcag

SEQ ID NO: 2967512 - RNA, 19 nt, Artificial Sequence
  Description of Artificial Sequence: Synthetic oligonucleotide
ccggccgccaauuagcuuc

SEQ ID NO: 2967513 - RNA, 19 nt, Artificial Sequence
  Description of Artificial Sequence: Synthetic oligonucleotide
gccaacucaaacuuaugua

SEQ ID NO: 2967514 - RNA, 19 nt, Artificial Sequence
  Description of Artificial Sequence: Synthetic oligonucleotide
augugaacuucggaguuua

SEQ ID NO: 2967515 - RNA, 19 nt, Artificial Sequence
  Description of Artificial Sequence: Synthetic oligonucleotide
agcaagcuacgaacacugg

SEQ ID NO: 2967516 - RNA, 19 nt, Artificial Sequence
  Description of Artificial Sequence: Synthetic oligonucleotide
gucuucuucuacgucgcca

SEQ ID NO: 2967517 - RNA, 19 nt, Artificial Sequence
  Description of Artificial Sequence: Synthetic oligonucleotide
gagacgcgucuucuucuac

SEQ ID NO: 2967518 - RNA, 19 nt, Artificial Sequence
  Description of Artificial Sequence: Synthetic oligonucleotide
agcuacgaacacuggcaau

SEQ ID NO: 2967519 - RNA, 19 nt, Artificial Sequence
  Description of Artificial Sequence: Synthetic oligonucleotide
cuuccaggcuuggaaucag

SEQ ID NO: 2967520 - RNA, 19 nt, Artificial Sequence
  Description of Artificial Sequence: Synthetic oligonucleotide
cuggcaauggucucucugu

SEQ ID NO: 2967521 - RNA, 19 nt, Artificial Sequence
  Description of Artificial Sequence: Synthetic oligonucleotide
gacgcgucuucuucuacgu

SEQ ID NO: 2967522 - RNA, 19 nt, Artificial Sequence
  Description of Artificial Sequence: Synthetic oligonucleotide
gucaagaaucugcugcagu

SEQ ID NO: 2967523 - RNA, 19 nt, Artificial Sequence
  Description of Artificial Sequence: Synthetic oligonucleotide
gcugagacgcgucuucuuc

SEQ ID NO: 2967524 - RNA, 19 nt, Artificial Sequence
  Description of Artificial Sequence: Synthetic oligonucleotide
aacgcccuuccaggcuugg

SEQ ID NO: 2967525 - RNA, 19 nt, Artificial Sequence
  Description of Artificial Sequence: Synthetic oligonucleotide
cugcacucucauucugcug

SEQ ID NO: 2967526 - RNA, 19 nt, Artificial Sequence
  Description of Artificial Sequence: Synthetic oligonucleotide
caucuucaaaacgcccuuc

SEQ ID NO: 2967527 - RNA, 19 nt, Artificial Sequence
  Description of Artificial Sequence: Synthetic oligonucleotide
ggccaacucaaacuuaugu

SEQ ID NO: 2967528 - RNA, 19 nt, Artificial Sequence
  Description of Artificial Sequence: Synthetic oligonucleotide
ggucuggauaucgucaaga

SEQ ID NO: 2967529 - RNA, 19 nt, Artificial Sequence
  Description of Artificial Sequence: Synthetic oligonucleotide
cugaaaguuccugcucauc

SEQ ID NO: 2967530 - RNA, 19 nt, Artificial Sequence
  Description of Artificial Sequence: Synthetic oligonucleotide
gcuuggucuggauaucguc

SEQ ID NO: 2967531 - RNA, 19 nt, Artificial Sequence
  Description of Artificial Sequence: Synthetic oligonucleotide
aucagagcuuuggacuccu

SEQ ID NO: 2967532 - RNA, 19 nt, Artificial Sequence
  Description of Artificial Sequence: Synthetic oligonucleotide
gaucgcugccgccggccgc

SEQ ID NO: 2967533 - RNA, 19 nt, Artificial Sequence
  Description of Artificial Sequence: Synthetic oligonucleotide
gccgccaauuagcuucagg

SEQ ID NO: 2967534 - RNA, 19 nt, Artificial Sequence
  Description of Artificial Sequence: Synthetic oligonucleotide
cuccagaagcaugugaacu

SEQ ID NO: 2967535 - RNA, 19 nt, Artificial Sequence
  Description of Artificial Sequence: Synthetic oligonucleotide
gucucggcuguuucaaacu

SEQ ID NO: 2967536 - RNA, 19 nt, Artificial Sequence
  Description of Artificial Sequence: Synthetic oligonucleotide
ggagagucucggcuguuuc

SEQ ID NO: 2967537 - RNA, 19 nt, Artificial Sequence
  Description of Artificial Sequence: Synthetic oligonucleotide
acuggaagcugcgcuuggu

SEQ ID NO: 2967538 - RNA, 19 nt, Artificial Sequence
  Description of Artificial Sequence: Synthetic oligonucleotide
gcuccagaagcaugugaac

SEQ ID NO: 2967539 - RNA, 19 nt, Artificial Sequence
  Description of Artificial Sequence: Synthetic oligonucleotide
ggguuuucaugaaaaccuc

SEQ ID NO: 2967540 - RNA, 19 nt, Artificial Sequence
  Description of Artificial Sequence: Synthetic oligonucleotide
caggccaacucaaacuuau

SEQ ID NO: 2967541 - RNA, 19 nt, Artificial Sequence
  Description of Artificial Sequence: Synthetic oligonucleotide
cuggagaagcaagcuacga

SEQ ID NO: 2967542 - RNA, 19 nt, Artificial Sequence
  Description of Artificial Sequence: Synthetic oligonucleotide
aaacgcccuuccaggcuug

SEQ ID NO: 2967543 - RNA, 19 nt, Artificial Sequence
  Description of Artificial Sequence: Synthetic oligonucleotide
uuggacuccucagcaguuu

SEQ ID NO: 2967544 - RNA, 19 nt, Artificial Sequence
  Description of Artificial Sequence: Synthetic oligonucleotide
ggacaaagauuggcuaaac

SEQ ID NO: 2967545 - RNA, 19 nt, Artificial Sequence
  Description of Artificial Sequence: Synthetic oligonucleotide
agcugagacgcgucuucuu

SEQ ID NO: 2967546 - RNA, 19 nt, Artificial Sequence
  Description of Artificial Sequence: Synthetic oligonucleotide
agcccggggaucgcugccg

SEQ ID NO: 2967547 - RNA, 19 nt, Artificial Sequence
  Description of Artificial Sequence: Synthetic oligonucleotide
ggaucgcugccgccggccg

SEQ ID NO: 2967548 - RNA, 19 nt, Artificial Sequence
  Description of Artificial Sequence: Synthetic oligonucleotide
gcgcuuggucuggauaucg

SEQ ID NO: 2967549 - RNA, 19 nt, Artificial Sequence
  Description of Artificial Sequence: Synthetic oligonucleotide
gcaauggucucucuguuuu

SEQ ID NO: 2967550 - RNA, 19 nt, Artificial Sequence
  Description of Artificial Sequence: Synthetic oligonucleotide
caaacucuuuaggaaagau

SEQ ID NO: 2967551 - RNA, 19 nt, Artificial Sequence
  Description of Artificial Sequence: Synthetic oligonucleotide
caaaacgcccuuccaggcu

SEQ ID NO: 2967552 - RNA, 19 nt, Artificial Sequence
  Description of Artificial Sequence: Synthetic oligonucleotide
cugcgcuuggucuggauau

SEQ ID NO: 2967553 - RNA, 19 nt, Artificial Sequence
  Description of Artificial Sequence: Synthetic oligonucleotide
gcgggcuguauaguuuagg

SEQ ID NO: 2967554 - RNA, 19 nt, Artificial Sequence
  Description of Artificial Sequence: Synthetic oligonucleotide
ggauaucgucaagaaucug

SEQ ID NO: 2967555 - RNA, 19 nt, Artificial Sequence
  Description of Artificial Sequence: Synthetic oligonucleotide
ccagaagcaugugaacuuc

SEQ ID NO: 2967556 - RNA, 19 nt, Artificial Sequence
  Description of Artificial Sequence: Synthetic oligonucleotide
gagucucggcuguuucaaa

SEQ ID NO: 2967557 - RNA, 19 nt, Artificial Sequence
  Description of Artificial Sequence: Synthetic oligonucleotide
cugagacgcgucuucuucu

SEQ ID NO: 2967558 - RNA, 19 nt, Artificial Sequence
  Description of Artificial Sequence: Synthetic oligonucleotide
ugcgcuuggucuggauauc

SEQ ID NO: 2967559 - RNA, 19 nt, Artificial Sequence
  Description of Artificial Sequence: Synthetic oligonucleotide
gguuuucaugaaaaccucu

SEQ ID NO: 2967560 - RNA, 19 nt, Artificial Sequence
  Description of Artificial Sequence: Synthetic oligonucleotide
ccucugaaaguuccugcuc

SEQ ID NO: 2967561 - RNA, 19 nt, Artificial Sequence
  Description of Artificial Sequence: Synthetic oligonucleotide
aggccaacucaaacuuaug

SEQ ID NO: 2967562 - RNA, 19 nt, Artificial Sequence
  Description of Artificial Sequence: Synthetic oligonucleotide
cuacgucgccagcccgggg

SEQ ID NO: 2967563 - RNA, 19 nt, Artificial Sequence
  Description of Artificial Sequence: Synthetic oligonucleotide
cucggcuguuucaaacucu

SEQ ID NO: 2967564 - RNA, 19 nt, Artificial Sequence
  Description of Artificial Sequence: Synthetic oligonucleotide
cggaguuuaggagagucuc

SEQ ID NO: 2967565 - RNA, 19 nt, Artificial Sequence
  Description of Artificial Sequence: Synthetic oligonucleotide
gggcuguauaguuuagggu

SEQ ID NO: 2967566 - RNA, 19 nt, Artificial Sequence
  Description of Artificial Sequence: Synthetic oligonucleotide
gcgucuucuucuacgucgc

SEQ ID NO: 2967567 - RNA, 19 nt, Artificial Sequence
  Description of Artificial Sequence: Synthetic oligonucleotide
augagcugagacgcgucuu

SEQ ID NO: 2967568 - RNA, 19 nt, Artificial Sequence
  Description of Artificial Sequence: Synthetic oligonucleotide
gaagcgggcuguauaguuu

SEQ ID NO: 2967569 - RNA, 19 nt, Artificial Sequence
  Description of Artificial Sequence: Synthetic oligonucleotide
agcgggcuguauaguuuag

SEQ ID NO: 2967570 - RNA, 19 nt, Artificial Sequence
  Description of Artificial Sequence: Synthetic oligonucleotide
ccgccggccgccaauuagc

SEQ ID NO: 2967571 - RNA, 19 nt, Artificial Sequence
  Description of Artificial Sequence: Synthetic oligonucleotide
acaggccaacucaaacuua

SEQ ID NO: 2967572 - RNA, 19 nt, Artificial Sequence
  Description of Artificial Sequence: Synthetic oligonucleotide
gccgccggccgccaauuag

SEQ ID NO: 2967573 - RNA, 19 nt, Artificial Sequence
  Description of Artificial Sequence: Synthetic oligonucleotide
cccuuccaggcuuggaauc

SEQ ID NO: 2967574 - RNA, 19 nt, Artificial Sequence
  Description of Artificial Sequence: Synthetic oligonucleotide
aggagagucucggcuguuu

SEQ ID NO: 2967575 - RNA, 19 nt, Artificial Sequence
  Description of Artificial Sequence: Synthetic oligonucleotide
cgaacacuggcaauggucu

SEQ ID NO: 2967576 - RNA, 19 nt, Artificial Sequence
  Description of Artificial Sequence: Synthetic oligonucleotide
cagcccggggaucgcugcc

SEQ ID NO: 2967577 - RNA, 19 nt, Artificial Sequence
  Description of Artificial Sequence: Synthetic oligonucleotide
acgucgccagcccggggau

SEQ ID NO: 2967578 - RNA, 19 nt, Artificial Sequence
  Description of Artificial Sequence: Synthetic oligonucleotide
aggcuuggaaucagagcuu

SEQ ID NO: 2967579 - RNA, 19 nt, Artificial Sequence
  Description of Artificial Sequence: Synthetic oligonucleotide
ccucugcacucucauucug

SEQ ID NO: 2967580 - RNA, 19 nt, Artificial Sequence
  Description of Artificial Sequence: Synthetic oligonucleotide
ccggggaucgcugccgccg

SEQ ID NO: 2967581 - RNA, 19 nt, Artificial Sequence
  Description of Artificial Sequence: Synthetic oligonucleotide
gagcugagacgcgucuucu

SEQ ID NO: 2967582 - RNA, 19 nt, Artificial Sequence
  Description of Artificial Sequence: Synthetic oligonucleotide
gcuuggaaucagagcuuug

SEQ ID NO: 2967583 - RNA, 19 nt, Artificial Sequence
  Description of Artificial Sequence: Synthetic oligonucleotide
gcaugugaacuucggaguu

SEQ ID NO: 2967584 - RNA, 19 nt, Artificial Sequence
  Description of Artificial Sequence: Synthetic oligonucleotide
aagcugcgcuuggucugga

SEQ ID NO: 2967585 - RNA, 19 nt, Artificial Sequence
  Description of Artificial Sequence: Synthetic oligonucleotide
gcaguuccucaucuucaaa

SEQ ID NO: 2967586 - RNA, 19 nt, Artificial Sequence
  Description of Artificial Sequence: Synthetic oligonucleotide
ccagcccggggaucgcugc

SEQ ID NO: 2967587 - RNA, 19 nt, Artificial Sequence
  Description of Artificial Sequence: Synthetic oligonucleotide
acgacugaagcgggcugua

SEQ ID NO: 2967588 - RNA, 19 nt, Artificial Sequence
  Description of Artificial Sequence: Synthetic oligonucleotide
uaggagagucucggcuguu

SEQ ID NO: 2967589 - RNA, 19 nt, Artificial Sequence
  Description of Artificial Sequence: Synthetic oligonucleotide
gggaucgcugccgccggcc

SEQ ID NO: 2967590 - RNA, 19 nt, Artificial Sequence
  Description of Artificial Sequence: Synthetic oligonucleotide
ccucagcaguuucuggaca

SEQ ID NO: 2967591 - RNA, 19 nt, Artificial Sequence
  Description of Artificial Sequence: Synthetic oligonucleotide
ccuuccaggcuuggaauca

SEQ ID NO: 2967592 - RNA, 19 nt, Artificial Sequence
  Description of Artificial Sequence: Synthetic oligonucleotide
cgucaagaaucugcugcag

SEQ ID NO: 2967593 - RNA, 19 nt, Artificial Sequence
  Description of Artificial Sequence: Synthetic oligonucleotide
gcuguauaguuuaggguuu

SEQ ID NO: 2967594 - RNA, 19 nt, Artificial Sequence
  Description of Artificial Sequence: Synthetic oligonucleotide
caugugaacuucggaguuu

SEQ ID NO: 2967595 - RNA, 19 nt, Artificial Sequence
  Description of Artificial Sequence: Synthetic oligonucleotide
ugccgccggccgccaauua

SEQ ID NO: 2967596 - RNA, 19 nt, Artificial Sequence
  Description of Artificial Sequence: Synthetic oligonucleotide
ggcaauggucucucuguuu

SEQ ID NO: 2967597 - RNA, 19 nt, Artificial Sequence
  Description of Artificial Sequence: Synthetic oligonucleotide
cuguauaguuuaggguuuu

SEQ ID NO: 2967598 - RNA, 19 nt, Artificial Sequence
  Description of Artificial Sequence: Synthetic oligonucleotide
cugaagcgggcuguauagu

SEQ ID NO: 2967599 - RNA, 19 nt, Artificial Sequence
  Description of Artificial Sequence: Synthetic oligonucleotide
acgcccuuccaggcuugga

SEQ ID NO: 2967600 - RNA, 19 nt, Artificial Sequence
  Description of Artificial Sequence: Synthetic oligonucleotide
ucgccagcccggggaucgc

SEQ ID NO: 2967601 - RNA, 19 nt, Artificial Sequence
  Description of Artificial Sequence: Synthetic oligonucleotide
cauccucugcacucucauu

SEQ ID NO: 2967602 - RNA, 19 nt, Artificial Sequence
  Description of Artificial Sequence: Synthetic oligonucleotide
ggggaucgcugccgccggc

SEQ ID NO: 2967603 - RNA, 19 nt, Artificial Sequence
  Description of Artificial Sequence: Synthetic oligonucleotide
ggcuuggaaucagagcuuu

SEQ ID NO: 2967604 - RNA, 19 nt, Artificial Sequence
  Description of Artificial Sequence: Synthetic oligonucleotide
gcccuuccaggcuuggaau

SEQ ID NO: 2967605 - RNA, 19 nt, Artificial Sequence
  Description of Artificial Sequence: Synthetic oligonucleotide
gcccggggaucgcugccgc

SEQ ID NO: 2967606 - RNA, 19 nt, Artificial Sequence
  Description of Artificial Sequence: Synthetic oligonucleotide
ccugcucauccucugcacu

SEQ ID NO: 2967607 - RNA, 19 nt, Artificial Sequence
  Description of Artificial Sequence: Synthetic oligonucleotide
ggacuccucagcaguuucu

SEQ ID NO: 2967608 - RNA, 19 nt, Artificial Sequence
  Description of Artificial Sequence: Synthetic oligonucleotide
cggggaucgcugccgccgg

SEQ ID NO: 2967609 - RNA, 19 nt, Artificial Sequence
  Description of Artificial Sequence: Synthetic oligonucleotide
gccagcccggggaucgcug

SEQ ID NO: 2967610 - RNA, 19 nt, Artificial Sequence
  Description of Artificial Sequence: Synthetic oligonucleotide
cuucggaguuuaggagagu

SEQ ID NO: 2967611 - RNA, 19 nt, Artificial Sequence
  Description of Artificial Sequence: Synthetic oligonucleotide
cgcccuuccaggcuuggaa

SEQ ID NO: 2967612 - RNA, 19 nt, Artificial Sequence
  Description of Artificial Sequence: Synthetic oligonucleotide
cccggggaucgcugccgcc

SEQ ID NO: 2967613 - RNA, 19 nt, Artificial Sequence
  Description of Artificial Sequence: Synthetic oligonucleotide
cacuggcaauggucucucu

SEQ ID NO: 2967614 - RNA, 19 nt, Artificial Sequence
  Description of Artificial Sequence: Synthetic oligonucleotide
gcacucucauucugcuguu

SEQ ID NO: 2967615 - RNA, 19 nt, Artificial Sequence
  Description of Artificial Sequence: Synthetic oligonucleotide
gcugccgccggccgccaau

SEQ ID NO: 2967616 - RNA, 19 nt, Artificial Sequence
  Description of Artificial Sequence: Synthetic oligonucleotide
gccggccgccaauuagcuu

SEQ ID NO: 2967617 - RNA, 19 nt, Artificial Sequence
  Description of Artificial Sequence: Synthetic oligonucleotide
cugccgccggccgccaauu

SEQ ID NO: 2967618 - RNA, 19 nt, Artificial Sequence
  Description of Artificial Sequence: Synthetic oligonucleotide
cgccggccgccaauuagcu

SEQ ID NO: 2967619 - RNA, 19 nt, Artificial Sequence
  Description of Artificial Sequence: Synthetic oligonucleotide
cgucgccagcccggggauc

SEQ ID NO: 2967620 - RNA, 19 nt, Artificial Sequence
  Description of Artificial Sequence: Synthetic oligonucleotide
cggcuguuucaaacucuuu

SEQ ID NO: 2967621 - RNA, 19 nt, Artificial Sequence
  Description of Artificial Sequence: Synthetic oligonucleotide
cgacugaagcgggcuguau

SEQ ID NO: 2967622 - RNA, 19 nt, Artificial Sequence
  Description of Artificial Sequence: Synthetic oligonucleotide
cgccagcccggggaucgcu

SEQ ID NO: 2967623 - RNA, 19 nt, Artificial Sequence
  Description of Artificial Sequence: Synthetic oligonucleotide
cgcugccgccggccgccaa

SEQ ID NO: 2967624 - RNA, 19 nt, Artificial Sequence
  Description of Artificial Sequence: Synthetic oligonucleotide
ugaagagaaggccauagag

SEQ ID NO: 2967625 - RNA, 19 nt, Artificial Sequence
  Description of Artificial Sequence: Synthetic oligonucleotide
aagagaaggccauagaggu

SEQ ID NO: 2967626 - RNA, 19 nt, Artificial Sequence
  Description of Artificial Sequence: Synthetic oligonucleotide
aagacaauguuguccacgg

SEQ ID NO: 2967627 - RNA, 19 nt, Artificial Sequence
  Description of Artificial Sequence: Synthetic oligonucleotide
cuuuccuucagucaagugg

SEQ ID NO: 2967628 - RNA, 19 nt, Artificial Sequence
  Description of Artificial Sequence: Synthetic oligonucleotide
aagugguauguccauuucc

SEQ ID NO: 2967629 - RNA, 19 nt, Artificial Sequence
  Description of Artificial Sequence: Synthetic oligonucleotide
gaugaaguaccacaggccc

SEQ ID NO: 2967630 - RNA, 19 nt, Artificial Sequence
  Description of Artificial Sequence: Synthetic oligonucleotide
gacaauguuguccacggag

SEQ ID NO: 2967631 - RNA, 19 nt, Artificial Sequence
  Description of Artificial Sequence: Synthetic oligonucleotide
aagaggucuguuuucaugu

SEQ ID NO: 2967632 - RNA, 19 nt, Artificial Sequence
  Description of Artificial Sequence: Synthetic oligonucleotide
aguacagcugcccagaccu

SEQ ID NO: 2967633 - RNA, 19 nt, Artificial Sequence
  Description of Artificial Sequence: Synthetic oligonucleotide
gaagagaaggccauagagg

SEQ ID NO: 2967634 - RNA, 19 nt, Artificial Sequence
  Description of Artificial Sequence: Synthetic oligonucleotide
ucuguuuucaugucagggc

SEQ ID NO: 2967635 - RNA, 19 nt, Artificial Sequence
  Description of Artificial Sequence: Synthetic oligonucleotide
auagagguagaguacagcu

SEQ ID NO: 2967636 - RNA, 19 nt, Artificial Sequence
  Description of Artificial Sequence: Synthetic oligonucleotide
cauguugaagacaauguug

SEQ ID NO: 2967637 - RNA, 19 nt, Artificial Sequence
  Description of Artificial Sequence: Synthetic oligonucleotide
uaguugaccgugcucaggg

SEQ ID NO: 2967638 - RNA, 19 nt, Artificial Sequence
  Description of Artificial Sequence: Synthetic oligonucleotide
ugguucauggaguugaaga

SEQ ID NO: 2967639 - RNA, 19 nt, Artificial Sequence
  Description of Artificial Sequence: Synthetic oligonucleotide
cauggaguugaagagaagg

SEQ ID NO: 2967640 - RNA, 19 nt, Artificial Sequence
  Description of Artificial Sequence: Synthetic oligonucleotide
ugguauguccauuuccggg

SEQ ID NO: 2967641 - RNA, 19 nt, Artificial Sequence
  Description of Artificial Sequence: Synthetic oligonucleotide
gagaaggccauagagguag

SEQ ID NO: 2967642 - RNA, 19 nt, Artificial Sequence
  Description of Artificial Sequence: Synthetic oligonucleotide
aaaguagccagcucuuccu

SEQ ID NO: 2967643 - RNA, 19 nt, Artificial Sequence
  Description of Artificial Sequence: Synthetic oligonucleotide
guugaagacaauguugucc

SEQ ID NO: 2967644 - RNA, 19 nt, Artificial Sequence
  Description of Artificial Sequence: Synthetic oligonucleotide
ucagucaagugguaugucc

SEQ ID NO: 2967645 - RNA, 19 nt, Artificial Sequence
  Description of Artificial Sequence: Synthetic oligonucleotide
aacaucucgggcaggagac

SEQ ID NO: 2967646 - RNA, 19 nt, Artificial Sequence
  Description of Artificial Sequence: Synthetic oligonucleotide
gaaaguagccagcucuucc

SEQ ID NO: 2967647 - RNA, 19 nt, Artificial Sequence
  Description of Artificial Sequence: Synthetic oligonucleotide
gaagacaauguuguccacg

SEQ ID NO: 2967648 - RNA, 19 nt, Artificial Sequence
  Description of Artificial Sequence: Synthetic oligonucleotide
uucauggaguugaagagaa

SEQ ID NO: 2967649 - RNA, 19 nt, Artificial Sequence
  Description of Artificial Sequence: Synthetic oligonucleotide
agugguauguccauuuccg

SEQ ID NO: 2967650 - RNA, 19 nt, Artificial Sequence
  Description of Artificial Sequence: Synthetic oligonucleotide
uuguccacggagucgaaag

SEQ ID NO: 2967651 - RNA, 19 nt, Artificial Sequence
  Description of Artificial Sequence: Synthetic oligonucleotide
uuccggggcacgcagaucc

SEQ ID NO: 2967652 - RNA, 19 nt, Artificial Sequence
  Description of Artificial Sequence: Synthetic oligonucleotide
uguuuucaugucagggcgg

SEQ ID NO: 2967653 - RNA, 19 nt, Artificial Sequence
  Description of Artificial Sequence: Synthetic oligonucleotide
gaagaggucuguuuucaug

SEQ ID NO: 2967654 - RNA, 19 nt, Artificial Sequence
  Description of Artificial Sequence: Synthetic oligonucleotide
gguauguccauuuccgggg

SEQ ID NO: 2967655 - RNA, 19 nt, Artificial Sequence
  Description of Artificial Sequence: Synthetic oligonucleotide
agcaugauccuccugggca

SEQ ID NO: 2967656 - RNA, 19 nt, Artificial Sequence
  Description of Artificial Sequence: Synthetic oligonucleotide
auggaguugaagagaaggc

SEQ ID NO: 2967657 - RNA, 19 nt, Artificial Sequence
  Description of Artificial Sequence: Synthetic oligonucleotide
uggaguugaagagaaggcc

SEQ ID NO: 2967658 - RNA, 19 nt, Artificial Sequence
  Description of Artificial Sequence: Synthetic oligonucleotide
ugugcuuccuuuccuucag

SEQ ID NO: 2967659 - RNA, 19 nt, Artificial Sequence
  Description of Artificial Sequence: Synthetic oligonucleotide
aggucugugcuuccuuucc

SEQ ID NO: 2967660 - RNA, 19 nt, Artificial Sequence
  Description of Artificial Sequence: Synthetic oligonucleotide
ugcgaugaaguaccacagg

SEQ ID NO: 2967661 - RNA, 19 nt, Artificial Sequence
  Description of Artificial Sequence: Synthetic oligonucleotide
uggugcaacaucucgggca

SEQ ID NO: 2967662 - RNA, 19 nt, Artificial Sequence
  Description of Artificial Sequence: Synthetic oligonucleotide
uagagguagaguacagcug

SEQ ID NO: 2967663 - RNA, 19 nt, Artificial Sequence
  Description of Artificial Sequence: Synthetic oligonucleotide
uccacggagucgaaaguag

SEQ ID NO: 2967664 - RNA, 19 nt, Artificial Sequence
  Description of Artificial Sequence: Synthetic oligonucleotide
auguugaagacaauguugu

SEQ ID NO: 2967665 - RNA, 19 nt, Artificial Sequence
  Description of Artificial Sequence: Synthetic oligonucleotide
gucuguuuucaugucaggg

SEQ ID NO: 2967666 - RNA, 19 nt, Artificial Sequence
  Description of Artificial Sequence: Synthetic oligonucleotide
gguucauggaguugaagag

SEQ ID NO: 2967667 - RNA, 19 nt, Artificial Sequence
  Description of Artificial Sequence: Synthetic oligonucleotide
guugaagagaaggccauag

SEQ ID NO: 2967668 - RNA, 19 nt, Artificial Sequence
  Description of Artificial Sequence: Synthetic oligonucleotide
agcaccaagcuggagcugc

SEQ ID NO: 2967669 - RNA, 19 nt, Artificial Sequence
  Description of Artificial Sequence: Synthetic oligonucleotide
gaccuggugcaacaucucg

SEQ ID NO: 2967670 - RNA, 19 nt, Artificial Sequence
  Description of Artificial Sequence: Synthetic oligonucleotide
uggagaagaggucuguuuu

SEQ ID NO: 2967671 - RNA, 19 nt, Artificial Sequence
  Description of Artificial Sequence: Synthetic oligonucleotide
cucuuucucgcccaccucc

SEQ ID NO: 2967672 - RNA, 19 nt, Artificial Sequence
  Description of Artificial Sequence: Synthetic oligonucleotide
guagccagcucuuccuugg

SEQ ID NO: 2967673 - RNA, 19 nt, Artificial Sequence
  Description of Artificial Sequence: Synthetic oligonucleotide
ucagggcacugguucaugg

SEQ ID NO: 2967674 - RNA, 19 nt, Artificial Sequence
  Description of Artificial Sequence: Synthetic oligonucleotide
uuuucgugcggauggcagc

SEQ ID NO: 2967675 - RNA, 19 nt, Artificial Sequence
  Description of Artificial Sequence: Synthetic oligonucleotide
cacggagucgaaaguagcc

SEQ ID NO: 2967676 - RNA, 19 nt, Artificial Sequence
  Description of Artificial Sequence: Synthetic oligonucleotide
aggccauagagguagagua

SEQ ID NO: 2967677 - RNA, 19 nt, Artificial Sequence
  Description of Artificial Sequence: Synthetic oligonucleotide
ucuggggacucuuucucgc

SEQ ID NO: 2967678 - RNA, 19 nt, Artificial Sequence
  Description of Artificial Sequence: Synthetic oligonucleotide
ucaagugguauguccauuu

SEQ ID NO: 2967679 - RNA, 19 nt, Artificial Sequence
  Description of Artificial Sequence: Synthetic oligonucleotide
agggcacugguucauggag

SEQ ID NO: 2967680 - RNA, 19 nt, Artificial Sequence
  Description of Artificial Sequence: Synthetic oligonucleotide
uuaguugaccgugcucagg

SEQ ID NO: 2967681 - RNA, 19 nt, Artificial Sequence
  Description of Artificial Sequence: Synthetic oligonucleotide
uuucaugucagggcggccu

SEQ ID NO: 2967682 - RNA, 19 nt, Artificial Sequence
  Description of Artificial Sequence: Synthetic oligonucleotide
aguugaccgugcucagggc

SEQ ID NO: 2967683 - RNA, 19 nt, Artificial Sequence
  Description of Artificial Sequence: Synthetic oligonucleotide
agguagaguacagcugccc

SEQ ID NO: 2967684 - RNA, 19 nt, Artificial Sequence
  Description of Artificial Sequence: Synthetic oligonucleotide
cugcgaugaaguaccacag

SEQ ID NO: 2967685 - RNA, 19 nt, Artificial Sequence
  Description of Artificial Sequence: Synthetic oligonucleotide
agccauguugaagacaaug

SEQ ID NO: 2967686 - RNA, 19 nt, Artificial Sequence
  Description of Artificial Sequence: Synthetic oligonucleotide
aaggccauagagguagagu

SEQ ID NO: 2967687 - RNA, 19 nt, Artificial Sequence
  Description of Artificial Sequence: Synthetic oligonucleotide
guagccauguugaagacaa

SEQ ID NO: 2967688 - RNA, 19 nt, Artificial Sequence
  Description of Artificial Sequence: Synthetic oligonucleotide
agaggucuguuuucauguc

SEQ ID NO: 2967689 - RNA, 19 nt, Artificial Sequence
  Description of Artificial Sequence: Synthetic oligonucleotide
uacagcugcccagaccugg

SEQ ID NO: 2967690 - RNA, 19 nt, Artificial Sequence
  Description of Artificial Sequence: Synthetic oligonucleotide
gugguauguccauuuccgg

SEQ ID NO: 2967691 - RNA, 19 nt, Artificial Sequence
  Description of Artificial Sequence: Synthetic oligonucleotide
uuucucgcccaccuccagc

SEQ ID NO: 2967692 - RNA, 19 nt, Artificial Sequence
  Description of Artificial Sequence: Synthetic oligonucleotide
cauagagguagaguacagc

SEQ ID NO: 2967693 - RNA, 19 nt, Artificial Sequence
  Description of Artificial Sequence: Synthetic oligonucleotide
ucaguccugaggucugugc

SEQ ID NO: 2967694 - RNA, 19 nt, Artificial Sequence
  Description of Artificial Sequence: Synthetic oligonucleotide
gcgaugaaguaccacaggc

SEQ ID NO: 2967695 - RNA, 19 nt, Artificial Sequence
  Description of Artificial Sequence: Synthetic oligonucleotide
uaccacaggcccagguggg

SEQ ID NO: 2967696 - RNA, 19 nt, Artificial Sequence
  Description of Artificial Sequence: Synthetic oligonucleotide
gucgaaaguagccagcucu

SEQ ID NO: 2967697 - RNA, 19 nt, Artificial Sequence
  Description of Artificial Sequence: Synthetic oligonucleotide
agaguacagcugcccagac

SEQ ID NO: 2967698 - RNA, 19 nt, Artificial Sequence
  Description of Artificial Sequence: Synthetic oligonucleotide
ucauggaguugaagagaag

SEQ ID NO: 2967699 - RNA, 19 nt, Artificial Sequence
  Description of Artificial Sequence: Synthetic oligonucleotide
cuuccuuuccuucagucaa

SEQ ID NO: 2967700 - RNA, 19 nt, Artificial Sequence
  Description of Artificial Sequence: Synthetic oligonucleotide
caugaacuggagaagaggu

SEQ ID NO: 2967701 - RNA, 19 nt, Artificial Sequence
  Description of Artificial Sequence: Synthetic oligonucleotide
agucgaaaguagccagcuc

SEQ ID NO: 2967702 - RNA, 19 nt, Artificial Sequence
  Description of Artificial Sequence: Synthetic oligonucleotide
ucuuucucgcccaccucca

SEQ ID NO: 2967703 - RNA, 19 nt, Artificial Sequence
  Description of Artificial Sequence: Synthetic oligonucleotide
uugaccgugcucagggcac

SEQ ID NO: 2967704 - RNA, 19 nt, Artificial Sequence
  Description of Artificial Sequence: Synthetic oligonucleotide
cucuggggacucuuucucg

SEQ ID NO: 2967705 - RNA, 19 nt, Artificial Sequence
  Description of Artificial Sequence: Synthetic oligonucleotide
ggugcaacaucucgggcag

SEQ ID NO: 2967706 - RNA, 19 nt, Artificial Sequence
  Description of Artificial Sequence: Synthetic oligonucleotide
gucagggcggccuucaguc

SEQ ID NO: 2967707 - RNA, 19 nt, Artificial Sequence
  Description of Artificial Sequence: Synthetic oligonucleotide
uagaguacagcugcccaga

SEQ ID NO: 2967708 - RNA, 19 nt, Artificial Sequence
  Description of Artificial Sequence: Synthetic oligonucleotide
uggggacucuuucucgccc

SEQ ID NO: 2967709 - RNA, 19 nt, Artificial Sequence
  Description of Artificial Sequence: Synthetic oligonucleotide
guuaguugaccgugcucag

SEQ ID NO: 2967710 - RNA, 19 nt, Artificial Sequence
  Description of Artificial Sequence: Synthetic oligonucleotide
uccuccugggcaugaacug

SEQ ID NO: 2967711 - RNA, 19 nt, Artificial Sequence
  Description of Artificial Sequence: Synthetic oligonucleotide
uguugaagacaauguuguc

SEQ ID NO: 2967712 - RNA, 19 nt, Artificial Sequence
  Description of Artificial Sequence: Synthetic oligonucleotide
ucgcccaccuccagcgucg

SEQ ID NO: 2967713 - RNA, 19 nt, Artificial Sequence
  Description of Artificial Sequence: Synthetic oligonucleotide
aggucuguuuucaugucag

SEQ ID NO: 2967714 - RNA, 19 nt, Artificial Sequence
  Description of Artificial Sequence: Synthetic oligonucleotide
ugccuuggggccgagccgg

SEQ ID NO: 2967715 - RNA, 19 nt, Artificial Sequence
  Description of Artificial Sequence: Synthetic oligonucleotide
acaauguuguccacggagu

SEQ ID NO: 2967716 - RNA, 19 nt, Artificial Sequence
  Description of Artificial Sequence: Synthetic oligonucleotide
augaacuggagaagagguc

SEQ ID NO: 2967717 - RNA, 19 nt, Artificial Sequence
  Description of Artificial Sequence: Synthetic oligonucleotide
guuuucaugucagggcggc

SEQ ID NO: 2967718 - RNA, 19 nt, Artificial Sequence
  Description of Artificial Sequence: Synthetic oligonucleotide
uuucgugcggauggcagca

SEQ ID NO: 2967719 - RNA, 19 nt, Artificial Sequence
  Description of Artificial Sequence: Synthetic oligonucleotide
gagaagaggucuguuuuca

SEQ ID NO: 2967720 - RNA, 19 nt, Artificial Sequence
  Description of Artificial Sequence: Synthetic oligonucleotide
uccagcgucguuaguugac

SEQ ID NO: 2967721 - RNA, 19 nt, Artificial Sequence
  Description of Artificial Sequence: Synthetic oligonucleotide
ugcggauggcagcaccaag

SEQ ID NO: 2967722 - RNA, 19 nt, Artificial Sequence
  Description of Artificial Sequence: Synthetic oligonucleotide
ugcaacaucucgggcagga

SEQ ID NO: 2967723 - RNA, 19 nt, Artificial Sequence
  Description of Artificial Sequence: Synthetic oligonucleotide
uguccacggagucgaaagu

SEQ ID NO: 2967724 - RNA, 19 nt, Artificial Sequence
  Description of Artificial Sequence: Synthetic oligonucleotide
auguccauuuccggggcac

SEQ ID NO: 2967725 - RNA, 19 nt, Artificial Sequence
  Description of Artificial Sequence: Synthetic oligonucleotide
cagucaagugguaugucca

SEQ ID NO: 2967726 - RNA, 19 nt, Artificial Sequence
  Description of Artificial Sequence: Synthetic oligonucleotide
ucugugcuuccuuuccuuc

SEQ ID NO: 2967727 - RNA, 19 nt, Artificial Sequence
  Description of Artificial Sequence: Synthetic oligonucleotide
guauguccauuuccggggc

SEQ ID NO: 2967728 - RNA, 19 nt, Artificial Sequence
  Description of Artificial Sequence: Synthetic oligonucleotide
ucgaaaguagccagcucuu

SEQ ID NO: 2967729 - RNA, 19 nt, Artificial Sequence
  Description of Artificial Sequence: Synthetic oligonucleotide
accuggugcaacaucucgg

SEQ ID NO: 2967730 - RNA, 19 nt, Artificial Sequence
  Description of Artificial Sequence: Synthetic oligonucleotide
guugaccgugcucagggca

SEQ ID NO: 2967731 - RNA, 19 nt, Artificial Sequence
  Description of Artificial Sequence: Synthetic oligonucleotide
uauguccauuuccggggca

SEQ ID NO: 2967732 - RNA, 19 nt, Artificial Sequence
  Description of Artificial Sequence: Synthetic oligonucleotide
gcaugaacuggagaagagg

SEQ ID NO: 2967733 - RNA, 19 nt, Artificial Sequence
  Description of Artificial Sequence: Synthetic oligonucleotide
caagcuggagcugccuugg

SEQ ID NO: 2967734 - RNA, 19 nt, Artificial Sequence
  Description of Artificial Sequence: Synthetic oligonucleotide
gcuggagcugccuuggggc

SEQ ID NO: 2967735 - RNA, 19 nt, Artificial Sequence
  Description of Artificial Sequence: Synthetic oligonucleotide
ucucgggcaggagacagcu

SEQ ID NO: 2967736 - RNA, 19 nt, Artificial Sequence
  Description of Artificial Sequence: Synthetic oligonucleotide
ugucagggcggccuucagu

SEQ ID NO: 2967737 - RNA, 19 nt, Artificial Sequence
  Description of Artificial Sequence: Synthetic oligonucleotide
aacuggagaagaggucugu

SEQ ID NO: 2967738 - RNA, 19 nt, Artificial Sequence
  Description of Artificial Sequence: Synthetic oligonucleotide
uguccauuuccggggcacg

SEQ ID NO: 2967739 - RNA, 19 nt, Artificial Sequence
  Description of Artificial Sequence: Synthetic oligonucleotide
agucaagugguauguccau

SEQ ID NO: 2967740 - RNA, 19 nt, Artificial Sequence
  Description of Artificial Sequence: Synthetic oligonucleotide
ccuggugcaacaucucggg

SEQ ID NO: 2967741 - RNA, 19 nt, Artificial Sequence
  Description of Artificial Sequence: Synthetic oligonucleotide
acucuuucucgcccaccuc

SEQ ID NO: 2967742 - RNA, 19 nt, Artificial Sequence
  Description of Artificial Sequence: Synthetic oligonucleotide
aggagacagcuggugcucc

SEQ ID NO: 2967743 - RNA, 19 nt, Artificial Sequence
  Description of Artificial Sequence: Synthetic oligonucleotide
cuuggggccgagccgguag

SEQ ID NO: 2967744 - RNA, 19 nt, Artificial Sequence
  Description of Artificial Sequence: Synthetic oligonucleotide
auuuccggggcacgcagau

SEQ ID NO: 2967745 - RNA, 19 nt, Artificial Sequence
  Description of Artificial Sequence: Synthetic oligonucleotide
ugaagacaauguuguccac

SEQ ID NO: 2967746 - RNA, 19 nt, Artificial Sequence
  Description of Artificial Sequence: Synthetic oligonucleotide
cagcgucguuaguugaccg

SEQ ID NO: 2967747 - RNA, 19 nt, Artificial Sequence
  Description of Artificial Sequence: Synthetic oligonucleotide
ucguuaguugaccgugcuc

SEQ ID NO: 2967748 - RNA, 19 nt, Artificial Sequence
  Description of Artificial Sequence: Synthetic oligonucleotide
gauccuccugggcaugaac

SEQ ID NO: 2967749 - RNA, 19 nt, Artificial Sequence
  Description of Artificial Sequence: Synthetic oligonucleotide
ugcucagggcacugguuca

SEQ ID NO: 2967750 - RNA, 19 nt, Artificial Sequence
  Description of Artificial Sequence: Synthetic oligonucleotide
gaaggccauagagguagag

SEQ ID NO: 2967751 - RNA, 19 nt, Artificial Sequence
  Description of Artificial Sequence: Synthetic oligonucleotide
aagcuggagcugccuuggg

SEQ ID NO: 2967752 - RNA, 19 nt, Artificial Sequence
  Description of Artificial Sequence: Synthetic oligonucleotide
ggaguugaagagaaggcca

SEQ ID NO: 2967753 - RNA, 19 nt, Artificial Sequence
  Description of Artificial Sequence: Synthetic oligonucleotide
gaacuggagaagaggucug

SEQ ID NO: 2967754 - RNA, 19 nt, Artificial Sequence
  Description of Artificial Sequence: Synthetic oligonucleotide
ugaggucugugcuuccuuu

SEQ ID NO: 2967755 - RNA, 19 nt, Artificial Sequence
  Description of Artificial Sequence: Synthetic oligonucleotide
ucgugcggauggcagcacc

SEQ ID NO: 2967756 - RNA, 19 nt, Artificial Sequence
  Description of Artificial Sequence: Synthetic oligonucleotide
acggagucgaaaguagcca

SEQ ID NO: 2967757 - RNA, 19 nt, Artificial Sequence
  Description of Artificial Sequence: Synthetic oligonucleotide
gagccgguagccauguuga

SEQ ID NO: 2967758 - RNA, 19 nt, Artificial Sequence
  Description of Artificial Sequence: Synthetic oligonucleotide
agcgucguuaguugaccgu

SEQ ID NO: 2967759 - RNA, 19 nt, Artificial Sequence
  Description of Artificial Sequence: Synthetic oligonucleotide
caagugguauguccauuuc

SEQ ID NO: 2967760 - RNA, 19 nt, Artificial Sequence
  Description of Artificial Sequence: Synthetic oligonucleotide
gcuccugcgaugaaguacc

SEQ ID NO: 2967761 - RNA, 19 nt, Artificial Sequence
  Description of Artificial Sequence: Synthetic oligonucleotide
cacugguucauggaguuga

SEQ ID NO: 2967762 - RNA, 19 nt, Artificial Sequence
  Description of Artificial Sequence: Synthetic oligonucleotide
caacaucucgggcaggaga

SEQ ID NO: 2967763 - RNA, 19 nt, Artificial Sequence
  Description of Artificial Sequence: Synthetic oligonucleotide
gguagaguacagcugccca

SEQ ID NO: 2967764 - RNA, 19 nt, Artificial Sequence
  Description of Artificial Sequence: Synthetic oligonucleotide
cuggagcugccuuggggcc

SEQ ID NO: 2967765 - RNA, 19 nt, Artificial Sequence
  Description of Artificial Sequence: Synthetic oligonucleotide
caucucgggcaggagacag

SEQ ID NO: 2967766 - RNA, 19 nt, Artificial Sequence
  Description of Artificial Sequence: Synthetic oligonucleotide
ccuucagucaagugguaug

SEQ ID NO: 2967767 - RNA, 19 nt, Artificial Sequence
  Description of Artificial Sequence: Synthetic oligonucleotide
ccugcgaugaaguaccaca

SEQ ID NO: 2967768 - RNA, 19 nt, Artificial Sequence
  Description of Artificial Sequence: Synthetic oligonucleotide
gaggucugugcuuccuuuc

SEQ ID NO: 2967769 - RNA, 19 nt, Artificial Sequence
  Description of Artificial Sequence: Synthetic oligonucleotide
gacucuuucucgcccaccu

SEQ ID NO: 2967770 - RNA, 19 nt, Artificial Sequence
  Description of Artificial Sequence: Synthetic oligonucleotide
cuggggacucuuucucgcc

SEQ ID NO: 2967771 - RNA, 19 nt, Artificial Sequence
  Description of Artificial Sequence: Synthetic oligonucleotide
ggucuguuuucaugucagg

SEQ ID NO: 2967772 - RNA, 19 nt, Artificial Sequence
  Description of Artificial Sequence: Synthetic oligonucleotide
gcugccuuggggccgagcc

SEQ ID NO: 2967773 - RNA, 19 nt, Artificial Sequence
  Description of Artificial Sequence: Synthetic oligonucleotide
gcggccuucaguccugagg

SEQ ID NO: 2967774 - RNA, 19 nt, Artificial Sequence
  Description of Artificial Sequence: Synthetic oligonucleotide
uccuucagucaagugguau

SEQ ID NO: 2967775 - RNA, 19 nt, Artificial Sequence
  Description of Artificial Sequence: Synthetic oligonucleotide
uccuuuccuucagucaagu

SEQ ID NO: 2967776 - RNA, 19 nt, Artificial Sequence
  Description of Artificial Sequence: Synthetic oligonucleotide
ggcaggagacagcuggugc

SEQ ID NO: 2967777 - RNA, 19 nt, Artificial Sequence
  Description of Artificial Sequence: Synthetic oligonucleotide
auccuccugggcaugaacu

SEQ ID NO: 2967778 - RNA, 19 nt, Artificial Sequence
  Description of Artificial Sequence: Synthetic oligonucleotide
uuuucaugucagggcggcc

SEQ ID NO: 2967779 - RNA, 19 nt, Artificial Sequence
  Description of Artificial Sequence: Synthetic oligonucleotide
cgaugaaguaccacaggcc

SEQ ID NO: 2967780 - RNA, 19 nt, Artificial Sequence
  Description of Artificial Sequence: Synthetic oligonucleotide
cuggugcaacaucucgggc

SEQ ID NO: 2967781 - RNA, 19 nt, Artificial Sequence
  Description of Artificial Sequence: Synthetic oligonucleotide
ggagaagaggucuguuuuc

SEQ ID NO: 2967782 - RNA, 19 nt, Artificial Sequence
  Description of Artificial Sequence: Synthetic oligonucleotide
ucagggcggccuucagucc

SEQ ID NO: 2967783 - RNA, 19 nt, Artificial Sequence
  Description of Artificial Sequence: Synthetic oligonucleotide
uuggggccgagccgguagc

SEQ ID NO: 2967784 - RNA, 19 nt, Artificial Sequence
  Description of Artificial Sequence: Synthetic oligonucleotide
agacaauguuguccacgga

SEQ ID NO: 2967785 - RNA, 19 nt, Artificial Sequence
  Description of Artificial Sequence: Synthetic oligonucleotide
aguccugaggucugugcuu

SEQ ID NO: 2967786 - RNA, 19 nt, Artificial Sequence
  Description of Artificial Sequence: Synthetic oligonucleotide
uccauuuccggggcacgca

SEQ ID NO: 2967787 - RNA, 19 nt, Artificial Sequence
  Description of Artificial Sequence: Synthetic oligonucleotide
cagcaugauccuccugggc

SEQ ID NO: 2967788 - RNA, 19 nt, Artificial Sequence
  Description of Artificial Sequence: Synthetic oligonucleotide
uucaugucagggcggccuu

SEQ ID NO: 2967789 - RNA, 19 nt, Artificial Sequence
  Description of Artificial Sequence: Synthetic oligonucleotide
augaaguaccacaggccca

SEQ ID NO: 2967790 - RNA, 19 nt, Artificial Sequence
  Description of Artificial Sequence: Synthetic oligonucleotide
ccgguagccauguugaaga

SEQ ID NO: 2967791 - RNA, 19 nt, Artificial Sequence
  Description of Artificial Sequence: Synthetic oligonucleotide
uucaguccugaggucugug

SEQ ID NO: 2967792 - RNA, 19 nt, Artificial Sequence
  Description of Artificial Sequence: Synthetic oligonucleotide
uucagucaagugguauguc

SEQ ID NO: 2967793 - RNA, 19 nt, Artificial Sequence
  Description of Artificial Sequence: Synthetic oligonucleotide
aucucgggcaggagacagc

SEQ ID NO: 2967794 - RNA, 19 nt, Artificial Sequence
  Description of Artificial Sequence: Synthetic oligonucleotide
cugugcuuccuuuccuuca

SEQ ID NO: 2967795 - RNA, 19 nt, Artificial Sequence
  Description of Artificial Sequence: Synthetic oligonucleotide
agacagcuggugcuccgca

SEQ ID NO: 2967796 - RNA, 19 nt, Artificial Sequence
  Description of Artificial Sequence: Synthetic oligonucleotide
gagacagcuggugcuccgc

SEQ ID NO: 2967797 - RNA, 19 nt, Artificial Sequence
  Description of Artificial Sequence: Synthetic oligonucleotide
cugguucauggaguugaag

SEQ ID NO: 2967798 - RNA, 19 nt, Artificial Sequence
  Description of Artificial Sequence: Synthetic oligonucleotide
cugccuuggggccgagccg

SEQ ID NO: 2967799 - RNA, 19 nt, Artificial Sequence
  Description of Artificial Sequence: Synthetic oligonucleotide
cuuucucgcccaccuccag

SEQ ID NO: 2967800 - RNA, 19 nt, Artificial Sequence
  Description of Artificial Sequence: Synthetic oligonucleotide
ccauagagguagaguacag

SEQ ID NO: 2967801 - RNA, 19 nt, Artificial Sequence
  Description of Artificial Sequence: Synthetic oligonucleotide
gcuuccuuuccuucaguca

SEQ ID NO: 2967802 - RNA, 19 nt, Artificial Sequence
  Description of Artificial Sequence: Synthetic oligonucleotide
ggcaugaacuggagaagag

SEQ ID NO: 2967803 - RNA, 19 nt, Artificial Sequence
  Description of Artificial Sequence: Synthetic oligonucleotide
gagucgaaaguagccagcu

SEQ ID NO: 2967804 - RNA, 19 nt, Artificial Sequence
  Description of Artificial Sequence: Synthetic oligonucleotide
accaagcuggagcugccuu

SEQ ID NO: 2967805 - RNA, 19 nt, Artificial Sequence
  Description of Artificial Sequence: Synthetic oligonucleotide
cuccugggcaugaacugga

SEQ ID NO: 2967806 - RNA, 19 nt, Artificial Sequence
  Description of Artificial Sequence: Synthetic oligonucleotide
ggagucgaaaguagccagc

SEQ ID NO: 2967807 - RNA, 19 nt, Artificial Sequence
  Description of Artificial Sequence: Synthetic oligonucleotide
gccauagagguagaguaca

SEQ ID NO: 2967808 - RNA, 19 nt, Artificial Sequence
  Description of Artificial Sequence: Synthetic oligonucleotide
uccugaggucugugcuucc

SEQ ID NO: 2967809 - RNA, 19 nt, Artificial Sequence
  Description of Artificial Sequence: Synthetic oligonucleotide
gcggauggcagcaccaagc

SEQ ID NO: 2967810 - RNA, 19 nt, Artificial Sequence
  Description of Artificial Sequence: Synthetic oligonucleotide
cuucagucaagugguaugu

SEQ ID NO: 2967811 - RNA, 19 nt, Artificial Sequence
  Description of Artificial Sequence: Synthetic oligonucleotide
uccugcgaugaaguaccac

SEQ ID NO: 2967812 - RNA, 19 nt, Artificial Sequence
  Description of Artificial Sequence: Synthetic oligonucleotide
ccacggagucgaaaguagc

SEQ ID NO: 2967813 - RNA, 19 nt, Artificial Sequence
  Description of Artificial Sequence: Synthetic oligonucleotide
guccauuuccggggcacgc

SEQ ID NO: 2967814 - RNA, 19 nt, Artificial Sequence
  Description of Artificial Sequence: Synthetic oligonucleotide
cguuaguugaccgugcuca

SEQ ID NO: 2967815 - RNA, 19 nt, Artificial Sequence
  Description of Artificial Sequence: Synthetic oligonucleotide
uuccuucagucaaguggua

SEQ ID NO: 2967816 - RNA, 19 nt, Artificial Sequence
  Description of Artificial Sequence: Synthetic oligonucleotide
guccugaggucugugcuuc

SEQ ID NO: 2967817 - RNA, 19 nt, Artificial Sequence
  Description of Artificial Sequence: Synthetic oligonucleotide
uccggggcacgcagauccc

SEQ ID NO: 2967818 - RNA, 19 nt, Artificial Sequence
  Description of Artificial Sequence: Synthetic oligonucleotide
augucagggcggccuucag

SEQ ID NO: 2967819 - RNA, 19 nt, Artificial Sequence
  Description of Artificial Sequence: Synthetic oligonucleotide
cucgcccaccuccagcguc

SEQ ID NO: 2967820 - RNA, 19 nt, Artificial Sequence
  Description of Artificial Sequence: Synthetic oligonucleotide
ccaagcuggagcugccuug

SEQ ID NO: 2967821 - RNA, 19 nt, Artificial Sequence
  Description of Artificial Sequence: Synthetic oligonucleotide
cagguggggcucuggggac

SEQ ID NO: 2967822 - RNA, 19 nt, Artificial Sequence
  Description of Artificial Sequence: Synthetic oligonucleotide
caggagacagcuggugcuc

SEQ ID NO: 2967823 - RNA, 19 nt, Artificial Sequence
  Description of Artificial Sequence: Synthetic oligonucleotide
uguuguccacggagucgaa

SEQ ID NO: 2967824 - RNA, 19 nt, Artificial Sequence
  Description of Artificial Sequence: Synthetic oligonucleotide
gcgucguuaguugaccgug

SEQ ID NO: 2967825 - RNA, 19 nt, Artificial Sequence
  Description of Artificial Sequence: Synthetic oligonucleotide
aguugaagagaaggccaua

SEQ ID NO: 2967826 - RNA, 19 nt, Artificial Sequence
  Description of Artificial Sequence: Synthetic oligonucleotide
accgugcucagggcacugg

SEQ ID NO: 2967827 - RNA, 19 nt, Artificial Sequence
  Description of Artificial Sequence: Synthetic oligonucleotide
cggagucgaaaguagccag

SEQ ID NO: 2967828 - RNA, 19 nt, Artificial Sequence
  Description of Artificial Sequence: Synthetic oligonucleotide
caugauccuccugggcaug

SEQ ID NO: 2967829 - RNA, 19 nt, Artificial Sequence
  Description of Artificial Sequence: Synthetic oligonucleotide
gccgguagccauguugaag

SEQ ID NO: 2967830 - RNA, 19 nt, Artificial Sequence
  Description of Artificial Sequence: Synthetic oligonucleotide
gcucuggggacucuuucuc

SEQ ID NO: 2967831 - RNA, 19 nt, Artificial Sequence
  Description of Artificial Sequence: Synthetic oligonucleotide
ugcccagaccuggugcaac

SEQ ID NO: 2967832 - RNA, 19 nt, Artificial Sequence
  Description of Artificial Sequence: Synthetic oligonucleotide
ccuccagcgucguuaguug

SEQ ID NO: 2967833 - RNA, 19 nt, Artificial Sequence
  Description of Artificial Sequence: Synthetic oligonucleotide
gggcaugaacuggagaaga

SEQ ID NO: 2967834 - RNA, 19 nt, Artificial Sequence
  Description of Artificial Sequence: Synthetic oligonucleotide
cagggcacugguucaugga

SEQ ID NO: 2967835 - RNA, 19 nt, Artificial Sequence
  Description of Artificial Sequence: Synthetic oligonucleotide
gucguuaguugaccgugcu

SEQ ID NO: 2967836 - RNA, 19 nt, Artificial Sequence
  Description of Artificial Sequence: Synthetic oligonucleotide
ggccauagagguagaguac

SEQ ID NO: 2967837 - RNA, 19 nt, Artificial Sequence
  Description of Artificial Sequence: Synthetic oligonucleotide
ucucgcccaccuccagcgu

SEQ ID NO: 2967838 - RNA, 19 nt, Artificial Sequence
  Description of Artificial Sequence: Synthetic oligonucleotide
gguagccauguugaagaca

SEQ ID NO: 2967839 - RNA, 19 nt, Artificial Sequence
  Description of Artificial Sequence: Synthetic oligonucleotide
cauuuccggggcacgcaga

SEQ ID NO: 2967840 - RNA, 19 nt, Artificial Sequence
  Description of Artificial Sequence: Synthetic oligonucleotide
ccauuuccggggcacgcag

SEQ ID NO: 2967841 - RNA, 19 nt, Artificial Sequence
  Description of Artificial Sequence: Synthetic oligonucleotide
uagccauguugaagacaau

SEQ ID NO: 2967842 - RNA, 19 nt, Artificial Sequence
  Description of Artificial Sequence: Synthetic oligonucleotide
cuccagcgucguuaguuga

SEQ ID NO: 2967843 - RNA, 19 nt, Artificial Sequence
  Description of Artificial Sequence: Synthetic oligonucleotide
ccuucaguccugaggucug

SEQ ID NO: 2967844 - RNA, 19 nt, Artificial Sequence
  Description of Artificial Sequence: Synthetic oligonucleotide
ugaccgugcucagggcacu

SEQ ID NO: 2967845 - RNA, 19 nt, Artificial Sequence
  Description of Artificial Sequence: Synthetic oligonucleotide
gcagcaccaagcuggagcu

SEQ ID NO: 2967846 - RNA, 19 nt, Artificial Sequence
  Description of Artificial Sequence: Synthetic oligonucleotide
guccacggagucgaaagua

SEQ ID NO: 2967847 - RNA, 19 nt, Artificial Sequence
  Description of Artificial Sequence: Synthetic oligonucleotide
cgagccgguagccauguug

SEQ ID NO: 2967848 - RNA, 19 nt, Artificial Sequence
  Description of Artificial Sequence: Synthetic oligonucleotide
gccauguugaagacaaugu

SEQ ID NO: 2967849 - RNA, 19 nt, Artificial Sequence
  Description of Artificial Sequence: Synthetic oligonucleotide
caguccugaggucugugcu

SEQ ID NO: 2967850 - RNA, 19 nt, Artificial Sequence
  Description of Artificial Sequence: Synthetic oligonucleotide
agagaaggccauagaggua

SEQ ID NO: 2967851 - RNA, 19 nt, Artificial Sequence
  Description of Artificial Sequence: Synthetic oligonucleotide
cucagggcacugguucaug

SEQ ID NO: 2967852 - RNA, 19 nt, Artificial Sequence
  Description of Artificial Sequence: Synthetic oligonucleotide
ucaugucagggcggccuuc

SEQ ID NO: 2967853 - RNA, 19 nt, Artificial Sequence
  Description of Artificial Sequence: Synthetic oligonucleotide
ccagcgucguuaguugacc

SEQ ID NO: 2967854 - RNA, 19 nt, Artificial Sequence
  Description of Artificial Sequence: Synthetic oligonucleotide
cuggagaagaggucuguuu

SEQ ID NO: 2967855 - RNA, 19 nt, Artificial Sequence
  Description of Artificial Sequence: Synthetic oligonucleotide
ugauccuccugggcaugaa

SEQ ID NO: 2967856 - RNA, 19 nt, Artificial Sequence
  Description of Artificial Sequence: Synthetic oligonucleotide
ccagguggggcucugggga

SEQ ID NO: 2967857 - RNA, 19 nt, Artificial Sequence
  Description of Artificial Sequence: Synthetic oligonucleotide
acaucucgggcaggagaca

SEQ ID NO: 2967858 - RNA, 19 nt, Artificial Sequence
  Description of Artificial Sequence: Synthetic oligonucleotide
caugucagggcggccuuca

SEQ ID NO: 2967859 - RNA, 19 nt, Artificial Sequence
  Description of Artificial Sequence: Synthetic oligonucleotide
gcccagguggggcucuggg

SEQ ID NO: 2967860 - RNA, 19 nt, Artificial Sequence
  Description of Artificial Sequence: Synthetic oligonucleotide
guuguccacggagucgaaa

SEQ ID NO: 2967861 - RNA, 19 nt, Artificial Sequence
  Description of Artificial Sequence: Synthetic oligonucleotide
gcaggagacagcuggugcu

SEQ ID NO: 2967862 - RNA, 19 nt, Artificial Sequence
  Description of Artificial Sequence: Synthetic oligonucleotide
ccuuuccuucagucaagug

SEQ ID NO: 2967863 - RNA, 19 nt, Artificial Sequence
  Description of Artificial Sequence: Synthetic oligonucleotide
acagcugcccagaccuggu

SEQ ID NO: 2967864 - RNA, 19 nt, Artificial Sequence
  Description of Artificial Sequence: Synthetic oligonucleotide
agcugccuuggggccgagc

SEQ ID NO: 2967865 - RNA, 19 nt, Artificial Sequence
  Description of Artificial Sequence: Synthetic oligonucleotide
uggggccgagccgguagcc

SEQ ID NO: 2967866 - RNA, 19 nt, Artificial Sequence
  Description of Artificial Sequence: Synthetic oligonucleotide
ccaccuccagcgucguuag

SEQ ID NO: 2967867 - RNA, 19 nt, Artificial Sequence
  Description of Artificial Sequence: Synthetic oligonucleotide
acugguucauggaguugaa

SEQ ID NO: 2967868 - RNA, 19 nt, Artificial Sequence
  Description of Artificial Sequence: Synthetic oligonucleotide
uuuccggggcacgcagauc

SEQ ID NO: 2967869 - RNA, 19 nt, Artificial Sequence
  Description of Artificial Sequence: Synthetic oligonucleotide
cagcugcccagaccuggug

SEQ ID NO: 2967870 - RNA, 19 nt, Artificial Sequence
  Description of Artificial Sequence: Synthetic oligonucleotide
cucgggcaggagacagcug

SEQ ID NO: 2967871 - RNA, 19 nt, Artificial Sequence
  Description of Artificial Sequence: Synthetic oligonucleotide
ggggacucuuucucgccca

SEQ ID NO: 2967872 - RNA, 19 nt, Artificial Sequence
  Description of Artificial Sequence: Synthetic oligonucleotide
uucgugcggauggcagcac

SEQ ID NO: 2967873 - RNA, 19 nt, Artificial Sequence
  Description of Artificial Sequence: Synthetic oligonucleotide
agccgguagccauguugaa

SEQ ID NO: 2967874 - RNA, 19 nt, Artificial Sequence
  Description of Artificial Sequence: Synthetic oligonucleotide
cgucguuaguugaccgugc

SEQ ID NO: 2967875 - RNA, 19 nt, Artificial Sequence
  Description of Artificial Sequence: Synthetic oligonucleotide
gaccgugcucagggcacug

SEQ ID NO: 2967876 - RNA, 19 nt, Artificial Sequence
  Description of Artificial Sequence: Synthetic oligonucleotide
gugcaacaucucgggcagg

SEQ ID NO: 2967877 - RNA, 19 nt, Artificial Sequence
  Description of Artificial Sequence: Synthetic oligonucleotide
agaaggccauagagguaga

SEQ ID NO: 2967878 - RNA, 19 nt, Artificial Sequence
  Description of Artificial Sequence: Synthetic oligonucleotide
guacagcugcccagaccug

SEQ ID NO: 2967879 - RNA, 19 nt, Artificial Sequence
  Description of Artificial Sequence: Synthetic oligonucleotide
uggcagcaccaagcuggag

SEQ ID NO: 2967880 - RNA, 19 nt, Artificial Sequence
  Description of Artificial Sequence: Synthetic oligonucleotide
ccagaccuggugcaacauc

SEQ ID NO: 2967881 - RNA, 19 nt, Artificial Sequence
  Description of Artificial Sequence: Synthetic oligonucleotide
gcaacaucucgggcaggag

SEQ ID NO: 2967882 - RNA, 19 nt, Artificial Sequence
  Description of Artificial Sequence: Synthetic oligonucleotide
ggccgcuccugcgaugaag

SEQ ID NO: 2967883 - RNA, 19 nt, Artificial Sequence
  Description of Artificial Sequence: Synthetic oligonucleotide
gggacucuuucucgcccac

SEQ ID NO: 2967884 - RNA, 19 nt, Artificial Sequence
  Description of Artificial Sequence: Synthetic oligonucleotide
ggacucuuucucgcccacc

SEQ ID NO: 2967885 - RNA, 19 nt, Artificial Sequence
  Description of Artificial Sequence: Synthetic oligonucleotide
agguggggcucuggggacu

SEQ ID NO: 2967886 - RNA, 19 nt, Artificial Sequence
  Description of Artificial Sequence: Synthetic oligonucleotide
gggcucuggggacucuuuc

SEQ ID NO: 2967887 - RNA, 19 nt, Artificial Sequence
  Description of Artificial Sequence: Synthetic oligonucleotide
gggcaggagacagcuggug

SEQ ID NO: 2967888 - RNA, 19 nt, Artificial Sequence
  Description of Artificial Sequence: Synthetic oligonucleotide
ggcucuggggacucuuucu

SEQ ID NO: 2967889 - RNA, 19 nt, Artificial Sequence
  Description of Artificial Sequence: Synthetic oligonucleotide
ggcacugguucauggaguu

SEQ ID NO: 2967890 - RNA, 19 nt, Artificial Sequence
  Description of Artificial Sequence: Synthetic oligonucleotide
ggucugugcuuccuuuccu

SEQ ID NO: 2967891 - RNA, 19 nt, Artificial Sequence
  Description of Artificial Sequence: Synthetic oligonucleotide
cgcuccugcgaugaaguac

SEQ ID NO: 2967892 - RNA, 19 nt, Artificial Sequence
  Description of Artificial Sequence: Synthetic oligonucleotide
cuccugcgaugaaguacca

SEQ ID NO: 2967893 - RNA, 19 nt, Artificial Sequence
  Description of Artificial Sequence: Synthetic oligonucleotide
ccauguugaagacaauguu

SEQ ID NO: 2967894 - RNA, 19 nt, Artificial Sequence
  Description of Artificial Sequence: Synthetic oligonucleotide
gcaugauccuccugggcau

SEQ ID NO: 2967895 - RNA, 19 nt, Artificial Sequence
  Description of Artificial Sequence: Synthetic oligonucleotide
gcccagaccuggugcaaca

SEQ ID NO: 2967896 - RNA, 19 nt, Artificial Sequence
  Description of Artificial Sequence: Synthetic oligonucleotide
cagggcggccuucaguccu

SEQ ID NO: 2967897 - RNA, 19 nt, Artificial Sequence
  Description of Artificial Sequence: Synthetic oligonucleotide
gccuucaguccugaggucu

SEQ ID NO: 2967898 - RNA, 19 nt, Artificial Sequence
  Description of Artificial Sequence: Synthetic oligonucleotide
agggcggccuucaguccug

SEQ ID NO: 2967899 - RNA, 19 nt, Artificial Sequence
  Description of Artificial Sequence: Synthetic oligonucleotide
ccugggcaugaacuggaga

SEQ ID NO: 2967900 - RNA, 19 nt, Artificial Sequence
  Description of Artificial Sequence: Synthetic oligonucleotide
gucaagugguauguccauu

SEQ ID NO: 2967901 - RNA, 19 nt, Artificial Sequence
  Description of Artificial Sequence: Synthetic oligonucleotide
gcacugguucauggaguug

SEQ ID NO: 2967902 - RNA, 19 nt, Artificial Sequence
  Description of Artificial Sequence: Synthetic oligonucleotide
cagcaccaagcuggagcug

SEQ ID NO: 2967903 - RNA, 19 nt, Artificial Sequence
  Description of Artificial Sequence: Synthetic oligonucleotide
gugcggauggcagcaccaa

SEQ ID NO: 2967904 - RNA, 19 nt, Artificial Sequence
  Description of Artificial Sequence: Synthetic oligonucleotide
cacaggcccagguggggcu

SEQ ID NO: 2967905 - RNA, 19 nt, Artificial Sequence
  Description of Artificial Sequence: Synthetic oligonucleotide
gugcuuccuuuccuucagu

SEQ ID NO: 2967906 - RNA, 19 nt, Artificial Sequence
  Description of Artificial Sequence: Synthetic oligonucleotide
ggggccgcuccugcgauga

SEQ ID NO: 2967907 - RNA, 19 nt, Artificial Sequence
  Description of Artificial Sequence: Synthetic oligonucleotide
gcaccaagcuggagcugcc

SEQ ID NO: 2967908 - RNA, 19 nt, Artificial Sequence
  Description of Artificial Sequence: Synthetic oligonucleotide
cgaaaguagccagcucuuc

SEQ ID NO: 2967909 - RNA, 19 nt, Artificial Sequence
  Description of Artificial Sequence: Synthetic oligonucleotide
ggcggccuucaguccugag

SEQ ID NO: 2967910 - RNA, 19 nt, Artificial Sequence
  Description of Artificial Sequence: Synthetic oligonucleotide
cgguagccauguugaagac

SEQ ID NO: 2967911 - RNA, 19 nt, Artificial Sequence
  Description of Artificial Sequence: Synthetic oligonucleotide
cgugcggauggcagcacca

SEQ ID NO: 2967912 - RNA, 19 nt, Artificial Sequence
  Description of Artificial Sequence: Synthetic oligonucleotide
cccaccuccagcgucguua

SEQ ID NO: 2967913 - RNA, 19 nt, Artificial Sequence
  Description of Artificial Sequence: Synthetic oligonucleotide
cugaggucugugcuuccuu

SEQ ID NO: 2967914 - RNA, 19 nt, Artificial Sequence
  Description of Artificial Sequence: Synthetic oligonucleotide
gggcacugguucauggagu

SEQ ID NO: 2967915 - RNA, 19 nt, Artificial Sequence
  Description of Artificial Sequence: Synthetic oligonucleotide
cuucaguccugaggucugu

SEQ ID NO: 2967916 - RNA, 19 nt, Artificial Sequence
  Description of Artificial Sequence: Synthetic oligonucleotide
gccgcuccugcgaugaagu

SEQ ID NO: 2967917 - RNA, 19 nt, Artificial Sequence
  Description of Artificial Sequence: Synthetic oligonucleotide
ggccgagccgguagccaug

SEQ ID NO: 2967918 - RNA, 19 nt, Artificial Sequence
  Description of Artificial Sequence: Synthetic oligonucleotide
gggcacgcagaucccauuu

SEQ ID NO: 2967919 - RNA, 19 nt, Artificial Sequence
  Description of Artificial Sequence: Synthetic oligonucleotide
ggcacgcagaucccauuuu

SEQ ID NO: 2967920 - RNA, 19 nt, Artificial Sequence
  Description of Artificial Sequence: Synthetic oligonucleotide
cugcccagaccuggugcaa

SEQ ID NO: 2967921 - RNA, 19 nt, Artificial Sequence
  Description of Artificial Sequence: Synthetic oligonucleotide
ggggccgagccgguagcca

SEQ ID NO: 2967922 - RNA, 19 nt, Artificial Sequence
  Description of Artificial Sequence: Synthetic oligonucleotide
gggccgagccgguagccau

SEQ ID NO: 2967923 - RNA, 19 nt, Artificial Sequence
  Description of Artificial Sequence: Synthetic oligonucleotide
caccaagcuggagcugccu

SEQ ID NO: 2967924 - RNA, 19 nt, Artificial Sequence
  Description of Artificial Sequence: Synthetic oligonucleotide
cggauggcagcaccaagcu

SEQ ID NO: 2967925 - RNA, 19 nt, Artificial Sequence
  Description of Artificial Sequence: Synthetic oligonucleotide
ggggcacgcagaucccauu

SEQ ID NO: 2967926 - RNA, 19 nt, Artificial Sequence
  Description of Artificial Sequence: Synthetic oligonucleotide
ccugaggucugugcuuccu

SEQ ID NO: 2967927 - RNA, 19 nt, Artificial Sequence
  Description of Artificial Sequence: Synthetic oligonucleotide
ccgugcucagggcacuggu

SEQ ID NO: 2967928 - RNA, 19 nt, Artificial Sequence
  Description of Artificial Sequence: Synthetic oligonucleotide
gcucagggcacugguucau

SEQ ID NO: 2967929 - RNA, 19 nt, Artificial Sequence
  Description of Artificial Sequence: Synthetic oligonucleotide
gccgagccgguagccaugu

SEQ ID NO: 2967930 - RNA, 19 nt, Artificial Sequence
  Description of Artificial Sequence: Synthetic oligonucleotide
ccggggcacgcagauccca

SEQ ID NO: 2967931 - RNA, 19 nt, Artificial Sequence
  Description of Artificial Sequence: Synthetic oligonucleotide
caccuccagcgucguuagu

SEQ ID NO: 2967932 - RNA, 19 nt, Artificial Sequence
  Description of Artificial Sequence: Synthetic oligonucleotide
gggcggccuucaguccuga

SEQ ID NO: 2967933 - RNA, 19 nt, Artificial Sequence
  Description of Artificial Sequence: Synthetic oligonucleotide
caggcccagguggggcucu

SEQ ID NO: 2967934 - RNA, 19 nt, Artificial Sequence
  Description of Artificial Sequence: Synthetic oligonucleotide
ccgcuccugcgaugaagua

SEQ ID NO: 2967935 - RNA, 19 nt, Artificial Sequence
  Description of Artificial Sequence: Synthetic oligonucleotide
cgugcucagggcacugguu

SEQ ID NO: 2967936 - RNA, 19 nt, Artificial Sequence
  Description of Artificial Sequence: Synthetic oligonucleotide
ggggcucuggggacucuuu

SEQ ID NO: 2967937 - RNA, 19 nt, Artificial Sequence
  Description of Artificial Sequence: Synthetic oligonucleotide
gggccgcuccugcgaugaa

SEQ ID NO: 2967938 - RNA, 19 nt, Artificial Sequence
  Description of Artificial Sequence: Synthetic oligonucleotide
cccagaccuggugcaacau

SEQ ID NO: 2967939 - RNA, 19 nt, Artificial Sequence
  Description of Artificial Sequence: Synthetic oligonucleotide
cggggcacgcagaucccau

SEQ ID NO: 2967940 - RNA, 19 nt, Artificial Sequence
  Description of Artificial Sequence: Synthetic oligonucleotide
ccuuggggccgagccggua

SEQ ID NO: 2967941 - RNA, 19 nt, Artificial Sequence
  Description of Artificial Sequence: Synthetic oligonucleotide
gccuuggggccgagccggu

SEQ ID NO: 2967942 - RNA, 19 nt, Artificial Sequence
  Description of Artificial Sequence: Synthetic oligonucleotide
gcccaccuccagcgucguu

SEQ ID NO: 2967943 - RNA, 19 nt, Artificial Sequence
  Description of Artificial Sequence: Synthetic oligonucleotide
ccgagccgguagccauguu

SEQ ID NO: 2967944 - RNA, 19 nt, Artificial Sequence
  Description of Artificial Sequence: Synthetic oligonucleotide
cgcccaccuccagcgucgu

SEQ ID NO: 2967945 - RNA, 19 nt, Artificial Sequence
  Description of Artificial Sequence: Synthetic oligonucleotide
uuaaauaugacucaggcau

SEQ ID NO: 2967946 - RNA, 19 nt, Artificial Sequence
  Description of Artificial Sequence: Synthetic oligonucleotide
uauuaaauaugacucaggc

SEQ ID NO: 2967947 - RNA, 19 nt, Artificial Sequence
  Description of Artificial Sequence: Synthetic oligonucleotide
aauagugacuucaaccucc

SEQ ID NO: 2967948 - RNA, 19 nt, Artificial Sequence
  Description of Artificial Sequence: Synthetic oligonucleotide
aauucggugaaucgccacc

SEQ ID NO: 2967949 - RNA, 19 nt, Artificial Sequence
  Description of Artificial Sequence: Synthetic oligonucleotide
cuuguagugauucucagag

SEQ ID NO: 2967950 - RNA, 19 nt, Artificial Sequence
  Description of Artificial Sequence: Synthetic oligonucleotide
agauucuuuuccuuggcgc

SEQ ID NO: 2967951 - RNA, 19 nt, Artificial Sequence
  Description of Artificial Sequence: Synthetic oligonucleotide
ugcaauagugacuucaacc

SEQ ID NO: 2967952 - RNA, 19 nt, Artificial Sequence
  Description of Artificial Sequence: Synthetic oligonucleotide
uuauuaaauaugacucagg

SEQ ID NO: 2967953 - RNA, 19 nt, Artificial Sequence
  Description of Artificial Sequence: Synthetic oligonucleotide
agugacuucaaccuccacg

SEQ ID NO: 2967954 - RNA, 19 nt, Artificial Sequence
  Description of Artificial Sequence: Synthetic oligonucleotide
auucucagagucuuggugg

SEQ ID NO: 2967955 - RNA, 19 nt, Artificial Sequence
  Description of Artificial Sequence: Synthetic oligonucleotide
uguagugauucucagaguc

SEQ ID NO: 2967956 - RNA, 19 nt, Artificial Sequence
  Description of Artificial Sequence: Synthetic oligonucleotide
agcgacuucacguugcggc

SEQ ID NO: 2967957 - RNA, 19 nt, Artificial Sequence
  Description of Artificial Sequence: Synthetic oligonucleotide
ucaggcaucugcaauagug

SEQ ID NO: 2967958 - RNA, 19 nt, Artificial Sequence
  Description of Artificial Sequence: Synthetic oligonucleotide
aaagccauggcugcggcgc

SEQ ID NO: 2967959 - RNA, 19 nt, Artificial Sequence
  Description of Artificial Sequence: Synthetic oligonucleotide
uuuggaaacgaucccaugu

SEQ ID NO: 2967960 - RNA, 19 nt, Artificial Sequence
  Description of Artificial Sequence: Synthetic oligonucleotide
uccuuaaaagccauggcug

SEQ ID NO: 2967961 - RNA, 19 nt, Artificial Sequence
  Description of Artificial Sequence: Synthetic oligonucleotide
agugauucgaauucgguga

SEQ ID NO: 2967962 - RNA, 19 nt, Artificial Sequence
  Description of Artificial Sequence: Synthetic oligonucleotide
ugcuuaacaaucucggaag

SEQ ID NO: 2967963 - RNA, 19 nt, Artificial Sequence
  Description of Artificial Sequence: Synthetic oligonucleotide
auaugacucaggcaucugc

SEQ ID NO: 2967964 - RNA, 19 nt, Artificial Sequence
  Description of Artificial Sequence: Synthetic oligonucleotide
gugcaaaucaaucagucgc

SEQ ID NO: 2967965 - RNA, 19 nt, Artificial Sequence
  Description of Artificial Sequence: Synthetic oligonucleotide
uccgguguccuuaaaagcc

SEQ ID NO: 2967966 - RNA, 19 nt, Artificial Sequence
  Description of Artificial Sequence: Synthetic oligonucleotide
ugugcaaaucaaucagucg

SEQ ID NO: 2967967 - RNA, 19 nt, Artificial Sequence
  Description of Artificial Sequence: Synthetic oligonucleotide
gaucccaugucuuggaacc

SEQ ID NO: 2967968 - RNA, 19 nt, Artificial Sequence
  Description of Artificial Sequence: Synthetic oligonucleotide
uuuccgguguccuuaaaag

SEQ ID NO: 2967969 - RNA, 19 nt, Artificial Sequence
  Description of Artificial Sequence: Synthetic oligonucleotide
gacugugcaaaucaaucag

SEQ ID NO: 2967970 - RNA, 19 nt, Artificial Sequence
  Description of Artificial Sequence: Synthetic oligonucleotide
auuaaauaugacucaggca

SEQ ID NO: 2967971 - RNA, 19 nt, Artificial Sequence
  Description of Artificial Sequence: Synthetic oligonucleotide
gugacuucaaccuccacgc

SEQ ID NO: 2967972 - RNA, 19 nt, Artificial Sequence
  Description of Artificial Sequence: Synthetic oligonucleotide
gauucuuuuccuuggcgcc

SEQ ID NO: 2967973 - RNA, 19 nt, Artificial Sequence
  Description of Artificial Sequence: Synthetic oligonucleotide
ucgaauucggugaaucgcc

SEQ ID NO: 2967974 - RNA, 19 nt, Artificial Sequence
  Description of Artificial Sequence: Synthetic oligonucleotide
uuaacaaucucggaaggac

SEQ ID NO: 2967975 - RNA, 19 nt, Artificial Sequence
  Description of Artificial Sequence: Synthetic oligonucleotide
uggaaccuucaccacaagg

SEQ ID NO: 2967976 - RNA, 19 nt, Artificial Sequence
  Description of Artificial Sequence: Synthetic oligonucleotide
gauucucagagucuuggug

SEQ ID NO: 2967977 - RNA, 19 nt, Artificial Sequence
  Description of Artificial Sequence: Synthetic oligonucleotide
uuccugaccgacuuguucc

SEQ ID NO: 2967978 - RNA, 19 nt, Artificial Sequence
  Description of Artificial Sequence: Synthetic oligonucleotide
auucgaauucggugaaucg

SEQ ID NO: 2967979 - RNA, 19 nt, Artificial Sequence
  Description of Artificial Sequence: Synthetic oligonucleotide
uaugacucaggcaucugca

SEQ ID NO: 2967980 - RNA, 19 nt, Artificial Sequence
  Description of Artificial Sequence: Synthetic oligonucleotide
gaagugaucugcuuaacaa

SEQ ID NO: 2967981 - RNA, 19 nt, Artificial Sequence
  Description of Artificial Sequence: Synthetic oligonucleotide
gagugauucgaauucggug

SEQ ID NO: 2967982 - RNA, 19 nt, Artificial Sequence
  Description of Artificial Sequence: Synthetic oligonucleotide
uuaaaagccauggcugcgg

SEQ ID NO: 2967983 - RNA, 19 nt, Artificial Sequence
  Description of Artificial Sequence: Synthetic oligonucleotide
gaucugcuuaacaaucucg

SEQ ID NO: 2967984 - RNA, 19 nt, Artificial Sequence
  Description of Artificial Sequence: Synthetic oligonucleotide
gaaacgaucccaugucuug

SEQ ID NO: 2967985 - RNA, 19 nt, Artificial Sequence
  Description of Artificial Sequence: Synthetic oligonucleotide
agugaucugcuuaacaauc

SEQ ID NO: 2967986 - RNA, 19 nt, Artificial Sequence
  Description of Artificial Sequence: Synthetic oligonucleotide
ucuuggaaccuucaccaca

SEQ ID NO: 2967987 - RNA, 19 nt, Artificial Sequence
  Description of Artificial Sequence: Synthetic oligonucleotide
aaauaugacucaggcaucu

SEQ ID NO: 2967988 - RNA, 19 nt, Artificial Sequence
  Description of Artificial Sequence: Synthetic oligonucleotide
aagugaucugcuuaacaau

SEQ ID NO: 2967989 - RNA, 19 nt, Artificial Sequence
  Description of Artificial Sequence: Synthetic oligonucleotide
uucuccagcgacuucacgu

SEQ ID NO: 2967990 - RNA, 19 nt, Artificial Sequence
  Description of Artificial Sequence: Synthetic oligonucleotide
ugagagugauucgaauucg

SEQ ID NO: 2967991 - RNA, 19 nt, Artificial Sequence
  Description of Artificial Sequence: Synthetic oligonucleotide
ugcaaaucaaucagucgcu

SEQ ID NO: 2967992 - RNA, 19 nt, Artificial Sequence
  Description of Artificial Sequence: Synthetic oligonucleotide
uucgaauucggugaaucgc

SEQ ID NO: 2967993 - RNA, 19 nt, Artificial Sequence
  Description of Artificial Sequence: Synthetic oligonucleotide
gaaccuucaccacaaggug

SEQ ID NO: 2967994 - RNA, 19 nt, Artificial Sequence
  Description of Artificial Sequence: Synthetic oligonucleotide
uccuuggcgccucugauca

SEQ ID NO: 2967995 - RNA, 19 nt, Artificial Sequence
  Description of Artificial Sequence: Synthetic oligonucleotide
ucaaucagucgcuugugga

SEQ ID NO: 2967996 - RNA, 19 nt, Artificial Sequence
  Description of Artificial Sequence: Synthetic oligonucleotide
uggauccucauuuggaaac

SEQ ID NO: 2967997 - RNA, 19 nt, Artificial Sequence
  Description of Artificial Sequence: Synthetic oligonucleotide
aucaagucggcgcacaccu

SEQ ID NO: 2967998 - RNA, 19 nt, Artificial Sequence
  Description of Artificial Sequence: Synthetic oligonucleotide
cuuguggauccucauuugg

SEQ ID NO: 2967999 - RNA, 19 nt, Artificial Sequence
  Description of Artificial Sequence: Synthetic oligonucleotide
ucggugaaucgccaccucg

SEQ ID NO: 2968000 - RNA, 19 nt, Artificial Sequence
  Description of Artificial Sequence: Synthetic oligonucleotide
uucucagagucuugguggg

SEQ ID NO: 2968001 - RNA, 19 nt, Artificial Sequence
  Description of Artificial Sequence: Synthetic oligonucleotide
aacaaucucggaaggacug

SEQ ID NO: 2968002 - RNA, 19 nt, Artificial Sequence
  Description of Artificial Sequence: Synthetic oligonucleotide
aucaaucagucgcuugugg

SEQ ID NO: 2968003 - RNA, 19 nt, Artificial Sequence
  Description of Artificial Sequence: Synthetic oligonucleotide
ucauuuggaaacgauccca

SEQ ID NO: 2968004 - RNA, 19 nt, Artificial Sequence
  Description of Artificial Sequence: Synthetic oligonucleotide
uaacaaucucggaaggacu

SEQ ID NO: 2968005 - RNA, 19 nt, Artificial Sequence
  Description of Artificial Sequence: Synthetic oligonucleotide
uguccuuaaaagccauggc

SEQ ID NO: 2968006 - RNA, 19 nt, Artificial Sequence
  Description of Artificial Sequence: Synthetic oligonucleotide
aaaagccauggcugcggcg

SEQ ID NO: 2968007 - RNA, 19 nt, Artificial Sequence
  Description of Artificial Sequence: Synthetic oligonucleotide
aggcaucugcaauagugac

SEQ ID NO: 2968008 - RNA, 19 nt, Artificial Sequence
  Description of Artificial Sequence: Synthetic oligonucleotide
aucugcuuaacaaucucgg

SEQ ID NO: 2968009 - RNA, 19 nt, Artificial Sequence
  Description of Artificial Sequence: Synthetic oligonucleotide
agucuuggugggcaugcgc

SEQ ID NO: 2968010 - RNA, 19 nt, Artificial Sequence
  Description of Artificial Sequence: Synthetic oligonucleotide
aaucucggaaggacugugc

SEQ ID NO: 2968011 - RNA, 19 nt, Artificial Sequence
  Description of Artificial Sequence: Synthetic oligonucleotide
ccucauuuggaaacgaucc

SEQ ID NO: 2968012 - RNA, 19 nt, Artificial Sequence
  Description of Artificial Sequence: Synthetic oligonucleotide
uuuucuuguagugauucuc

SEQ ID NO: 2968013 - RNA, 19 nt, Artificial Sequence
  Description of Artificial Sequence: Synthetic oligonucleotide
guguccuuaaaagccaugg

SEQ ID NO: 2968014 - RNA, 19 nt, Artificial Sequence
  Description of Artificial Sequence: Synthetic oligonucleotide
aggacugugcaaaucaauc

SEQ ID NO: 2968015 - RNA, 19 nt, Artificial Sequence
  Description of Artificial Sequence: Synthetic oligonucleotide
cacuuucagauucuuuucc

SEQ ID NO: 2968016 - RNA, 19 nt, Artificial Sequence
  Description of Artificial Sequence: Synthetic oligonucleotide
uccucauuuggaaacgauc

SEQ ID NO: 2968017 - RNA, 19 nt, Artificial Sequence
  Description of Artificial Sequence: Synthetic oligonucleotide
uuguggauccucauuugga

SEQ ID NO: 2968018 - RNA, 19 nt, Artificial Sequence
  Description of Artificial Sequence: Synthetic oligonucleotide
accgacuuguuccucggcg

SEQ ID NO: 2968019 - RNA, 19 nt, Artificial Sequence
  Description of Artificial Sequence: Synthetic oligonucleotide
uuggaaacgaucccauguc

SEQ ID NO: 2968020 - RNA, 19 nt, Artificial Sequence
  Description of Artificial Sequence: Synthetic oligonucleotide
ucuuguagugauucucaga

SEQ ID NO: 2968021 - RNA, 19 nt, Artificial Sequence
  Description of Artificial Sequence: Synthetic oligonucleotide
uaaauaugacucaggcauc

SEQ ID NO: 2968022 - RNA, 19 nt, Artificial Sequence
  Description of Artificial Sequence: Synthetic oligonucleotide
agagucuuggugggcaugc

SEQ ID NO: 2968023 - RNA, 19 nt, Artificial Sequence
  Description of Artificial Sequence: Synthetic oligonucleotide
aaugcugauggaagugauc

SEQ ID NO: 2968024 - RNA, 19 nt, Artificial Sequence
  Description of Artificial Sequence: Synthetic oligonucleotide
ucccuucacuuucagauuc

SEQ ID NO: 2968025 - RNA, 19 nt, Artificial Sequence
  Description of Artificial Sequence: Synthetic oligonucleotide
gugagagugauucgaauuc

SEQ ID NO: 2968026 - RNA, 19 nt, Artificial Sequence
  Description of Artificial Sequence: Synthetic oligonucleotide
uuuuccuuggcgccucuga

SEQ ID NO: 2968027 - RNA, 19 nt, Artificial Sequence
  Description of Artificial Sequence: Synthetic oligonucleotide
gugauucucagagucuugg

SEQ ID NO: 2968028 - RNA, 19 nt, Artificial Sequence
  Description of Artificial Sequence: Synthetic oligonucleotide
ucaaccuccacgccuggcu

SEQ ID NO: 2968029 - RNA, 19 nt, Artificial Sequence
  Description of Artificial Sequence: Synthetic oligonucleotide
cugugcaaaucaaucaguc

SEQ ID NO: 2968030 - RNA, 19 nt, Artificial Sequence
  Description of Artificial Sequence: Synthetic oligonucleotide
cucauuuggaaacgauccc

SEQ ID NO: 2968031 - RNA, 19 nt, Artificial Sequence
  Description of Artificial Sequence: Synthetic oligonucleotide
ugaaucgccaccucggguu

SEQ ID NO: 2968032 - RNA, 19 nt, Artificial Sequence
  Description of Artificial Sequence: Synthetic oligonucleotide
uuccgguguccuuaaaagc

SEQ ID NO: 2968033 - RNA, 19 nt, Artificial Sequence
  Description of Artificial Sequence: Synthetic oligonucleotide
uuggugggcaugcgcaccg

SEQ ID NO: 2968034 - RNA, 19 nt, Artificial Sequence
  Description of Artificial Sequence: Synthetic oligonucleotide
gauggaagugaucugcuua

SEQ ID NO: 2968035 - RNA, 19 nt, Artificial Sequence
  Description of Artificial Sequence: Synthetic oligonucleotide
uccacgggcgucuuuccgg

SEQ ID NO: 2968036 - RNA, 19 nt, Artificial Sequence
  Description of Artificial Sequence: Synthetic oligonucleotide
ugaucugcuuaacaaucuc

SEQ ID NO: 2968037 - RNA, 19 nt, Artificial Sequence
  Description of Artificial Sequence: Synthetic oligonucleotide
gauucgaauucggugaauc

SEQ ID NO: 2968038 - RNA, 19 nt, Artificial Sequence
  Description of Artificial Sequence: Synthetic oligonucleotide
cuuaaaagccauggcugcg

SEQ ID NO: 2968039 - RNA, 19 nt, Artificial Sequence
  Description of Artificial Sequence: Synthetic oligonucleotide
uggaaacgaucccaugucu

SEQ ID NO: 2968040 - RNA, 19 nt, Artificial Sequence
  Description of Artificial Sequence: Synthetic oligonucleotide
aaucaaucagucgcuugug

SEQ ID NO: 2968041 - RNA, 19 nt, Artificial Sequence
  Description of Artificial Sequence: Synthetic oligonucleotide
uaaaagccauggcugcggc

SEQ ID NO: 2968042 - RNA, 19 nt, Artificial Sequence
  Description of Artificial Sequence: Synthetic oligonucleotide
ucacuuucagauucuuuuc

SEQ ID NO: 2968043 - RNA, 19 nt, Artificial Sequence
  Description of Artificial Sequence: Synthetic oligonucleotide
gagagugauucgaauucgg

SEQ ID NO: 2968044 - RNA, 19 nt, Artificial Sequence
  Description of Artificial Sequence: Synthetic oligonucleotide
ugggcaugcgcaccggucc

SEQ ID NO: 2968045 - RNA, 19 nt, Artificial Sequence
  Description of Artificial Sequence: Synthetic oligonucleotide
aacgaucccaugucuugga

SEQ ID NO: 2968046 - RNA, 19 nt, Artificial Sequence
  Description of Artificial Sequence: Synthetic oligonucleotide
cugaccgacuuguuccucg

SEQ ID NO: 2968047 - RNA, 19 nt, Artificial Sequence
  Description of Artificial Sequence: Synthetic oligonucleotide
guugcggcuggugagagug

SEQ ID NO: 2968048 - RNA, 19 nt, Artificial Sequence
  Description of Artificial Sequence: Synthetic oligonucleotide
auggaagugaucugcuuaa

SEQ ID NO: 2968049 - RNA, 19 nt, Artificial Sequence
  Description of Artificial Sequence: Synthetic oligonucleotide
auuuggaaacgaucccaug

SEQ ID NO: 2968050 - RNA, 19 nt, Artificial Sequence
  Description of Artificial Sequence: Synthetic oligonucleotide
gacuucacguugcggcugg

SEQ ID NO: 2968051 - RNA, 19 nt, Artificial Sequence
  Description of Artificial Sequence: Synthetic oligonucleotide
aucugcaauagugacuuca

SEQ ID NO: 2968052 - RNA, 19 nt, Artificial Sequence
  Description of Artificial Sequence: Synthetic oligonucleotide
uccagcgacuucacguugc

SEQ ID NO: 2968053 - RNA, 19 nt, Artificial Sequence
  Description of Artificial Sequence: Synthetic oligonucleotide
ggaaggacugugcaaauca

SEQ ID NO: 2968054 - RNA, 19 nt, Artificial Sequence
  Description of Artificial Sequence: Synthetic oligonucleotide
ucacguugcggcuggugag

SEQ ID NO: 2968055 - RNA, 19 nt, Artificial Sequence
  Description of Artificial Sequence: Synthetic oligonucleotide
ugaccgacuuguuccucgg

SEQ ID NO: 2968056 - RNA, 19 nt, Artificial Sequence
  Description of Artificial Sequence: Synthetic oligonucleotide
gcuuaacaaucucggaagg

SEQ ID NO: 2968057 - RNA, 19 nt, Artificial Sequence
  Description of Artificial Sequence: Synthetic oligonucleotide
aucucggaaggacugugca

SEQ ID NO: 2968058 - RNA, 19 nt, Artificial Sequence
  Description of Artificial Sequence: Synthetic oligonucleotide
guccuuaaaagccauggcu

SEQ ID NO: 2968059 - RNA, 19 nt, Artificial Sequence
  Description of Artificial Sequence: Synthetic oligonucleotide
aaccuucaccacaaggugu

SEQ ID NO: 2968060 - RNA, 19 nt, Artificial Sequence
  Description of Artificial Sequence: Synthetic oligonucleotide
ugacucaggcaucugcaau

SEQ ID NO: 2968061 - RNA, 19 nt, Artificial Sequence
  Description of Artificial Sequence: Synthetic oligonucleotide
aauaugacucaggcaucug

SEQ ID NO: 2968062 - RNA, 19 nt, Artificial Sequence
  Description of Artificial Sequence: Synthetic oligonucleotide
gaauucggugaaucgccac

SEQ ID NO: 2968063 - RNA, 19 nt, Artificial Sequence
  Description of Artificial Sequence: Synthetic oligonucleotide
ggcgccucugaucaagucg

SEQ ID NO: 2968064 - RNA, 19 nt, Artificial Sequence
  Description of Artificial Sequence: Synthetic oligonucleotide
uuguuccucggcgggagcg

SEQ ID NO: 2968065 - RNA, 19 nt, Artificial Sequence
  Description of Artificial Sequence: Synthetic oligonucleotide
cugcuuaacaaucucggaa

SEQ ID NO: 2968066 - RNA, 19 nt, Artificial Sequence
  Description of Artificial Sequence: Synthetic oligonucleotide
uuccacgggcgucuuuccg

SEQ ID NO: 2968067 - RNA, 19 nt, Artificial Sequence
  Description of Artificial Sequence: Synthetic oligonucleotide
caauagugacuucaaccuc

SEQ ID NO: 2968068 - RNA, 19 nt, Artificial Sequence
  Description of Artificial Sequence: Synthetic oligonucleotide
caugucuuggaaccuucac

SEQ ID NO: 2968069 - RNA, 19 nt, Artificial Sequence
  Description of Artificial Sequence: Synthetic oligonucleotide
gcaauagugacuucaaccu

SEQ ID NO: 2968070 - RNA, 19 nt, Artificial Sequence
  Description of Artificial Sequence: Synthetic oligonucleotide
cuuggaaccuucaccacaa

SEQ ID NO: 2968071 - RNA, 19 nt, Artificial Sequence
  Description of Artificial Sequence: Synthetic oligonucleotide
ugaucaagucggcgcacac

SEQ ID NO: 2968072 - RNA, 19 nt, Artificial Sequence
  Description of Artificial Sequence: Synthetic oligonucleotide
uuuccuuggcgccucugau

SEQ ID NO: 2968073 - RNA, 19 nt, Artificial Sequence
  Description of Artificial Sequence: Synthetic oligonucleotide
aaucgccaccucggguucc

SEQ ID NO: 2968074 - RNA, 19 nt, Artificial Sequence
  Description of Artificial Sequence: Synthetic oligonucleotide
uuguagugauucucagagu

SEQ ID NO: 2968075 - RNA, 19 nt, Artificial Sequence
  Description of Artificial Sequence: Synthetic oligonucleotide
gaucaagucggcgcacacc

SEQ ID NO: 2968076 - RNA, 19 nt, Artificial Sequence
  Description of Artificial Sequence: Synthetic oligonucleotide
aagccauggcugcggcgcg

SEQ ID NO: 2968077 - RNA, 19 nt, Artificial Sequence
  Description of Artificial Sequence: Synthetic oligonucleotide
uccacgccuggcucaaugc

SEQ ID NO: 2968078 - RNA, 19 nt, Artificial Sequence
  Description of Artificial Sequence: Synthetic oligonucleotide
uagugauucucagagucuu

SEQ ID NO: 2968079 - RNA, 19 nt, Artificial Sequence
  Description of Artificial Sequence: Synthetic oligonucleotide
gagcgaacagcggugaguc

SEQ ID NO: 2968080 - RNA, 19 nt, Artificial Sequence
  Description of Artificial Sequence: Synthetic oligonucleotide
gacucaggcaucugcaaua

SEQ ID NO: 2968081 - RNA, 19 nt, Artificial Sequence
  Description of Artificial Sequence: Synthetic oligonucleotide
caagucggcgcacaccuuc

SEQ ID NO: 2968082 - RNA, 19 nt, Artificial Sequence
  Description of Artificial Sequence: Synthetic oligonucleotide
auggcugcggcgcggcuuc

SEQ ID NO: 2968083 - RNA, 19 nt, Artificial Sequence
  Description of Artificial Sequence: Synthetic oligonucleotide
ccucugaucaagucggcgc

SEQ ID NO: 2968084 - RNA, 19 nt, Artificial Sequence
  Description of Artificial Sequence: Synthetic oligonucleotide
ucggcgcacaccuucucca

SEQ ID NO: 2968085 - RNA, 19 nt, Artificial Sequence
  Description of Artificial Sequence: Synthetic oligonucleotide
acucaggcaucugcaauag

SEQ ID NO: 2968086 - RNA, 19 nt, Artificial Sequence
  Description of Artificial Sequence: Synthetic oligonucleotide
ggacugugcaaaucaauca

SEQ ID NO: 2968087 - RNA, 19 nt, Artificial Sequence
  Description of Artificial Sequence: Synthetic oligonucleotide
aaggacugugcaaaucaau

SEQ ID NO: 2968088 - RNA, 19 nt, Artificial Sequence
  Description of Artificial Sequence: Synthetic oligonucleotide
caggcaucugcaauaguga

SEQ ID NO: 2968089 - RNA, 19 nt, Artificial Sequence
  Description of Artificial Sequence: Synthetic oligonucleotide
acugugcaaaucaaucagu

SEQ ID NO: 2968090 - RNA, 19 nt, Artificial Sequence
  Description of Artificial Sequence: Synthetic oligonucleotide
ucuccagcgacuucacguu

SEQ ID NO: 2968091 - RNA, 19 nt, Artificial Sequence
  Description of Artificial Sequence: Synthetic oligonucleotide
ggcucaaugcugauggaag

SEQ ID NO: 2968092 - RNA, 19 nt, Artificial Sequence
  Description of Artificial Sequence: Synthetic oligonucleotide
ggugaaucgccaccucggg

SEQ ID NO: 2968093 - RNA, 19 nt, Artificial Sequence
  Description of Artificial Sequence: Synthetic oligonucleotide
ucucggaaggacugugcaa

SEQ ID NO: 2968094 - RNA, 19 nt, Artificial Sequence
  Description of Artificial Sequence: Synthetic oligonucleotide
gacuucaaccuccacgccu

SEQ ID NO: 2968095 - RNA, 19 nt, Artificial Sequence
  Description of Artificial Sequence: Synthetic oligonucleotide
ucuuggugggcaugcgcac

SEQ ID NO: 2968096 - RNA, 19 nt, Artificial Sequence
  Description of Artificial Sequence: Synthetic oligonucleotide
cuuggcgccucugaucaag

SEQ ID NO: 2968097 - RNA, 19 nt, Artificial Sequence
  Description of Artificial Sequence: Synthetic oligonucleotide
agagugauucgaauucggu

SEQ ID NO: 2968098 - RNA, 19 nt, Artificial Sequence
  Description of Artificial Sequence: Synthetic oligonucleotide
cuuaacaaucucggaagga

SEQ ID NO: 2968099 - RNA, 19 nt, Artificial Sequence
  Description of Artificial Sequence: Synthetic oligonucleotide
ggucccuucacuuucagau

SEQ ID NO: 2968100 - RNA, 19 nt, Artificial Sequence
  Description of Artificial Sequence: Synthetic oligonucleotide
ggaagugaucugcuuaaca

SEQ ID NO: 2968101 - RNA, 19 nt, Artificial Sequence
  Description of Artificial Sequence: Synthetic oligonucleotide
acuuguuccucggcgggag

SEQ ID NO: 2968102 - RNA, 19 nt, Artificial Sequence
  Description of Artificial Sequence: Synthetic oligonucleotide
uggugagagugauucgaau

SEQ ID NO: 2968103 - RNA, 19 nt, Artificial Sequence
  Description of Artificial Sequence: Synthetic oligonucleotide
auucggugaaucgccaccu

SEQ ID NO: 2968104 - RNA, 19 nt, Artificial Sequence
  Description of Artificial Sequence: Synthetic oligonucleotide
gccaccucggguuccacgg

SEQ ID NO: 2968105 - RNA, 19 nt, Artificial Sequence
  Description of Artificial Sequence: Synthetic oligonucleotide
uuggaaccuucaccacaag

SEQ ID NO: 2968106 - RNA, 19 nt, Artificial Sequence
  Description of Artificial Sequence: Synthetic oligonucleotide
cacgccuggcucaaugcug

SEQ ID NO: 2968107 - RNA, 19 nt, Artificial Sequence
  Description of Artificial Sequence: Synthetic oligonucleotide
cuuuccgguguccuuaaaa

SEQ ID NO: 2968108 - RNA, 19 nt, Artificial Sequence
  Description of Artificial Sequence: Synthetic oligonucleotide
uggcucaaugcugauggaa

SEQ ID NO: 2968109 - RNA, 19 nt, Artificial Sequence
  Description of Artificial Sequence: Synthetic oligonucleotide
ugauggaagugaucugcuu

SEQ ID NO: 2968110 - RNA, 19 nt, Artificial Sequence
  Description of Artificial Sequence: Synthetic oligonucleotide
ggauccucauuuggaaacg

SEQ ID NO: 2968111 - RNA, 19 nt, Artificial Sequence
  Description of Artificial Sequence: Synthetic oligonucleotide
auucuuuuccuuggcgccu

SEQ ID NO: 2968112 - RNA, 19 nt, Artificial Sequence
  Description of Artificial Sequence: Synthetic oligonucleotide
uuccuuggcgccucugauc

SEQ ID NO: 2968113 - RNA, 19 nt, Artificial Sequence
  Description of Artificial Sequence: Synthetic oligonucleotide
augacucaggcaucugcaa

SEQ ID NO: 2968114 - RNA, 19 nt, Artificial Sequence
  Description of Artificial Sequence: Synthetic oligonucleotide
cucugaucaagucggcgca

SEQ ID NO: 2968115 - RNA, 19 nt, Artificial Sequence
  Description of Artificial Sequence: Synthetic oligonucleotide
cuucuccagcgacuucacg

SEQ ID NO: 2968116 - RNA, 19 nt, Artificial Sequence
  Description of Artificial Sequence: Synthetic oligonucleotide
uccugaccgacuuguuccu

SEQ ID NO: 2968117 - RNA, 19 nt, Artificial Sequence
  Description of Artificial Sequence: Synthetic oligonucleotide
caaucucggaaggacugug

SEQ ID NO: 2968118 - RNA, 19 nt, Artificial Sequence
  Description of Artificial Sequence: Synthetic oligonucleotide
ggaaccuucaccacaaggu

SEQ ID NO: 2968119 - RNA, 19 nt, Artificial Sequence
  Description of Artificial Sequence: Synthetic oligonucleotide
cuuggugggcaugcgcacc

SEQ ID NO: 2968120 - RNA, 19 nt, Artificial Sequence
  Description of Artificial Sequence: Synthetic oligonucleotide
gucggcgcacaccuucucc

SEQ ID NO: 2968121 - RNA, 19 nt, Artificial Sequence
  Description of Artificial Sequence: Synthetic oligonucleotide
acgggcgucuuuccggugu

SEQ ID NO: 2968122 - RNA, 19 nt, Artificial Sequence
  Description of Artificial Sequence: Synthetic oligonucleotide
gcgaacagcggugagucag

SEQ ID NO: 2968123 - RNA, 19 nt, Artificial Sequence
  Description of Artificial Sequence: Synthetic oligonucleotide
gaaucgccaccucggguuc

SEQ ID NO: 2968124 - RNA, 19 nt, Artificial Sequence
  Description of Artificial Sequence: Synthetic oligonucleotide
cucggaaggacugugcaaa

SEQ ID NO: 2968125 - RNA, 19 nt, Artificial Sequence
  Description of Artificial Sequence: Synthetic oligonucleotide
gcgccucugaucaagucgg

SEQ ID NO: 2968126 - RNA, 19 nt, Artificial Sequence
  Description of Artificial Sequence: Synthetic oligonucleotide
gauccucauuuggaaacga

SEQ ID NO: 2968127 - RNA, 19 nt, Artificial Sequence
  Description of Artificial Sequence: Synthetic oligonucleotide
uccucggcgggagcgaaca

SEQ ID NO: 2968128 - RNA, 19 nt, Artificial Sequence
  Description of Artificial Sequence: Synthetic oligonucleotide
acaaucucggaaggacugu

SEQ ID NO: 2968129 - RNA, 19 nt, Artificial Sequence
  Description of Artificial Sequence: Synthetic oligonucleotide
ucugaucaagucggcgcac

SEQ ID NO: 2968130 - RNA, 19 nt, Artificial Sequence
  Description of Artificial Sequence: Synthetic oligonucleotide
uuggcgccucugaucaagu

SEQ ID NO: 2968131 - RNA, 19 nt, Artificial Sequence
  Description of Artificial Sequence: Synthetic oligonucleotide
ucagagucuuggugggcau

SEQ ID NO: 2968132 - RNA, 19 nt, Artificial Sequence
  Description of Artificial Sequence: Synthetic oligonucleotide
auagugacuucaaccucca

SEQ ID NO: 2968133 - RNA, 19 nt, Artificial Sequence
  Description of Artificial Sequence: Synthetic oligonucleotide
gaaggacugugcaaaucaa

SEQ ID NO: 2968134 - RNA, 19 nt, Artificial Sequence
  Description of Artificial Sequence: Synthetic oligonucleotide
agugauucucagagucuug

SEQ ID NO: 2968135 - RNA, 19 nt, Artificial Sequence
  Description of Artificial Sequence: Synthetic oligonucleotide
agucggcgcacaccuucuc

SEQ ID NO: 2968136 - RNA, 19 nt, Artificial Sequence
  Description of Artificial Sequence: Synthetic oligonucleotide
gugauucgaauucggugaa

SEQ ID NO: 2968137 - RNA, 19 nt, Artificial Sequence
  Description of Artificial Sequence: Synthetic oligonucleotide
ucucagagucuuggugggc

SEQ ID NO: 2968138 - RNA, 19 nt, Artificial Sequence
  Description of Artificial Sequence: Synthetic oligonucleotide
uggaagugaucugcuuaac

SEQ ID NO: 2968139 - RNA, 19 nt, Artificial Sequence
  Description of Artificial Sequence: Synthetic oligonucleotide
gagucuuggugggcaugcg

SEQ ID NO: 2968140 - RNA, 19 nt, Artificial Sequence
  Description of Artificial Sequence: Synthetic oligonucleotide
cucagagucuuggugggca

SEQ ID NO: 2968141 - RNA, 19 nt, Artificial Sequence
  Description of Artificial Sequence: Synthetic oligonucleotide
augcgcaccggucccuuca

SEQ ID NO: 2968142 - RNA, 19 nt, Artificial Sequence
  Description of Artificial Sequence: Synthetic oligonucleotide
uucggugaaucgccaccuc

SEQ ID NO: 2968143 - RNA, 19 nt, Artificial Sequence
  Description of Artificial Sequence: Synthetic oligonucleotide
ccgacuuguuccucggcgg

SEQ ID NO: 2968144 - RNA, 19 nt, Artificial Sequence
  Description of Artificial Sequence: Synthetic oligonucleotide
cuucaaccuccacgccugg

SEQ ID NO: 2968145 - RNA, 19 nt, Artificial Sequence
  Description of Artificial Sequence: Synthetic oligonucleotide
gcuuguggauccucauuug

SEQ ID NO: 2968146 - RNA, 19 nt, Artificial Sequence
  Description of Artificial Sequence: Synthetic oligonucleotide
ucggaaggacugugcaaau

SEQ ID NO: 2968147 - RNA, 19 nt, Artificial Sequence
  Description of Artificial Sequence: Synthetic oligonucleotide
caccucggguuccacgggc

SEQ ID NO: 2968148 - RNA, 19 nt, Artificial Sequence
  Description of Artificial Sequence: Synthetic oligonucleotide
uucaaccuccacgccuggc

SEQ ID NO: 2968149 - RNA, 19 nt, Artificial Sequence
  Description of Artificial Sequence: Synthetic oligonucleotide
uucuuuuccuuggcgccuc

SEQ ID NO: 2968150 - RNA, 19 nt, Artificial Sequence
  Description of Artificial Sequence: Synthetic oligonucleotide
gaccgacuuguuccucggc

SEQ ID NO: 2968151 - RNA, 19 nt, Artificial Sequence
  Description of Artificial Sequence: Synthetic oligonucleotide
ucuuuuccuuggcgccucu

SEQ ID NO: 2968152 - RNA, 19 nt, Artificial Sequence
  Description of Artificial Sequence: Synthetic oligonucleotide
cuuguuccucggcgggagc

SEQ ID NO: 2968153 - RNA, 19 nt, Artificial Sequence
  Description of Artificial Sequence: Synthetic oligonucleotide
guuccacgggcgucuuucc

SEQ ID NO: 2968154 - RNA, 19 nt, Artificial Sequence
  Description of Artificial Sequence: Synthetic oligonucleotide
ugcggcgcggcuuccugac

SEQ ID NO: 2968155 - RNA, 19 nt, Artificial Sequence
  Description of Artificial Sequence: Synthetic oligonucleotide
caaccuccacgccuggcuc

SEQ ID NO: 2968156 - RNA, 19 nt, Artificial Sequence
  Description of Artificial Sequence: Synthetic oligonucleotide
uagugacuucaaccuccac

SEQ ID NO: 2968157 - RNA, 19 nt, Artificial Sequence
  Description of Artificial Sequence: Synthetic oligonucleotide
cauuuggaaacgaucccau

SEQ ID NO: 2968158 - RNA, 19 nt, Artificial Sequence
  Description of Artificial Sequence: Synthetic oligonucleotide
aagucggcgcacaccuucu

SEQ ID NO: 2968159 - RNA, 19 nt, Artificial Sequence
  Description of Artificial Sequence: Synthetic oligonucleotide
caaucagucgcuuguggau

SEQ ID NO: 2968160 - RNA, 19 nt, Artificial Sequence
  Description of Artificial Sequence: Synthetic oligonucleotide
gcuggugagagugauucga

SEQ ID NO: 2968161 - RNA, 19 nt, Artificial Sequence
  Description of Artificial Sequence: Synthetic oligonucleotide
caccggucccuucacuuuc

SEQ ID NO: 2968162 - RNA, 19 nt, Artificial Sequence
  Description of Artificial Sequence: Synthetic oligonucleotide
accuucaccacaagguguu

SEQ ID NO: 2968163 - RNA, 19 nt, Artificial Sequence
  Description of Artificial Sequence: Synthetic oligonucleotide
acgaucccaugucuuggaa

SEQ ID NO: 2968164 - RNA, 19 nt, Artificial Sequence
  Description of Artificial Sequence: Synthetic oligonucleotide
uguuccucggcgggagcga

SEQ ID NO: 2968165 - RNA, 19 nt, Artificial Sequence
  Description of Artificial Sequence: Synthetic oligonucleotide
cuggugagagugauucgaa

SEQ ID NO: 2968166 - RNA, 19 nt, Artificial Sequence
  Description of Artificial Sequence: Synthetic oligonucleotide
cuccagcgacuucacguug

SEQ ID NO: 2968167 - RNA, 19 nt, Artificial Sequence
  Description of Artificial Sequence: Synthetic oligonucleotide
ggugagagugauucgaauu

SEQ ID NO: 2968168 - RNA, 19 nt, Artificial Sequence
  Description of Artificial Sequence: Synthetic oligonucleotide
ugauucgaauucggugaau

SEQ ID NO: 2968169 - RNA, 19 nt, Artificial Sequence
  Description of Artificial Sequence: Synthetic oligonucleotide
agucgcuuguggauccuca

SEQ ID NO: 2968170 - RNA, 19 nt, Artificial Sequence
  Description of Artificial Sequence: Synthetic oligonucleotide
ggcuggugagagugauucg

SEQ ID NO: 2968171 - RNA, 19 nt, Artificial Sequence
  Description of Artificial Sequence: Synthetic oligonucleotide
ucuuuccgguguccuuaaa

SEQ ID NO: 2968172 - RNA, 19 nt, Artificial Sequence
  Description of Artificial Sequence: Synthetic oligonucleotide
ugcgcaccggucccuucac

SEQ ID NO: 2968173 - RNA, 19 nt, Artificial Sequence
  Description of Artificial Sequence: Synthetic oligonucleotide
cuuucagauucuuuuccuu

SEQ ID NO: 2968174 - RNA, 19 nt, Artificial Sequence
  Description of Artificial Sequence: Synthetic oligonucleotide
cggugaaucgccaccucgg

SEQ ID NO: 2968175 - RNA, 19 nt, Artificial Sequence
  Description of Artificial Sequence: Synthetic oligonucleotide
guagugauucucagagucu

SEQ ID NO: 2968176 - RNA, 19 nt, Artificial Sequence
  Description of Artificial Sequence: Synthetic oligonucleotide
accucggguuccacgggcg

SEQ ID NO: 2968177 - RNA, 19 nt, Artificial Sequence
  Description of Artificial Sequence: Synthetic oligonucleotide
gguuccacgggcgucuuuc

SEQ ID NO: 2968178 - RNA, 19 nt, Artificial Sequence
  Description of Artificial Sequence: Synthetic oligonucleotide
cugauggaagugaucugcu

SEQ ID NO: 2968179 - RNA, 19 nt, Artificial Sequence
  Description of Artificial Sequence: Synthetic oligonucleotide
acgccuggcucaaugcuga

SEQ ID NO: 2968180 - RNA, 19 nt, Artificial Sequence
  Description of Artificial Sequence: Synthetic oligonucleotide
auccucauuuggaaacgau

SEQ ID NO: 2968181 - RNA, 19 nt, Artificial Sequence
  Description of Artificial Sequence: Synthetic oligonucleotide
uugcggcuggugagaguga

SEQ ID NO: 2968182 - RNA, 19 nt, Artificial Sequence
  Description of Artificial Sequence: Synthetic oligonucleotide
gccucugaucaagucggcg

SEQ ID NO: 2968183 - RNA, 19 nt, Artificial Sequence
  Description of Artificial Sequence: Synthetic oligonucleotide
gaacagcggugagucagga

SEQ ID NO: 2968184 - RNA, 19 nt, Artificial Sequence
  Description of Artificial Sequence: Synthetic oligonucleotide
gacuuguuccucggcggga

SEQ ID NO: 2968185 - RNA, 19 nt, Artificial Sequence
  Description of Artificial Sequence: Synthetic oligonucleotide
agcgaacagcggugaguca

SEQ ID NO: 2968186 - RNA, 19 nt, Artificial Sequence
  Description of Artificial Sequence: Synthetic oligonucleotide
acguugcggcuggugagag

SEQ ID NO: 2968187 - RNA, 19 nt, Artificial Sequence
  Description of Artificial Sequence: Synthetic oligonucleotide
ucaagucggcgcacaccuu

SEQ ID NO: 2968188 - RNA, 19 nt, Artificial Sequence
  Description of Artificial Sequence: Synthetic oligonucleotide
gcaucugcaauagugacuu

SEQ ID NO: 2968189 - RNA, 19 nt, Artificial Sequence
  Description of Artificial Sequence: Synthetic oligonucleotide
uggcgccucugaucaaguc

SEQ ID NO: 2968190 - RNA, 19 nt, Artificial Sequence
  Description of Artificial Sequence: Synthetic oligonucleotide
aucccaugucuuggaaccu

SEQ ID NO: 2968191 - RNA, 19 nt, Artificial Sequence
  Description of Artificial Sequence: Synthetic oligonucleotide
uggugggcaugcgcaccgg

SEQ ID NO: 2968192 - RNA, 19 nt, Artificial Sequence
  Description of Artificial Sequence: Synthetic oligonucleotide
uuccucggcgggagcgaac

SEQ ID NO: 2968193 - RNA, 19 nt, Artificial Sequence
  Description of Artificial Sequence: Synthetic oligonucleotide
ccagcgacuucacguugcg

SEQ ID NO: 2968194 - RNA, 19 nt, Artificial Sequence
  Description of Artificial Sequence: Synthetic oligonucleotide
cuuuuccuuggcgccucug

SEQ ID NO: 2968195 - RNA, 19 nt, Artificial Sequence
  Description of Artificial Sequence: Synthetic oligonucleotide
cugaucaagucggcgcaca

SEQ ID NO: 2968196 - RNA, 19 nt, Artificial Sequence
  Description of Artificial Sequence: Synthetic oligonucleotide
cagcgacuucacguugcgg

SEQ ID NO: 2968197 - RNA, 19 nt, Artificial Sequence
  Description of Artificial Sequence: Synthetic oligonucleotide
gguguccuuaaaagccaug

SEQ ID NO: 2968198 - RNA, 19 nt, Artificial Sequence
  Description of Artificial Sequence: Synthetic oligonucleotide
ucagucgcuuguggauccu

SEQ ID NO: 2968199 - RNA, 19 nt, Artificial Sequence
  Description of Artificial Sequence: Synthetic oligonucleotide
cgaacagcggugagucagg

SEQ ID NO: 2968200 - RNA, 19 nt, Artificial Sequence
  Description of Artificial Sequence: Synthetic oligonucleotide
gugaaucgccaccucgggu

SEQ ID NO: 2968201 - RNA, 19 nt, Artificial Sequence
  Description of Artificial Sequence: Synthetic oligonucleotide
ggcgcacaccuucuccagc

SEQ ID NO: 2968202 - RNA, 19 nt, Artificial Sequence
  Description of Artificial Sequence: Synthetic oligonucleotide
gcacaccuucuccagcgac

SEQ ID NO: 2968203 - RNA, 19 nt, Artificial Sequence
  Description of Artificial Sequence: Synthetic oligonucleotide
cgaucccaugucuuggaac

SEQ ID NO: 2968204 - RNA, 19 nt, Artificial Sequence
  Description of Artificial Sequence: Synthetic oligonucleotide
caucugcaauagugacuuc

SEQ ID NO: 2968205 - RNA, 19 nt, Artificial Sequence
  Description of Artificial Sequence: Synthetic oligonucleotide
gcucaaugcugauggaagu

SEQ ID NO: 2968206 - RNA, 19 nt, Artificial Sequence
  Description of Artificial Sequence: Synthetic oligonucleotide
gucuuuccgguguccuuaa

SEQ ID NO: 2968207 - RNA, 19 nt, Artificial Sequence
  Description of Artificial Sequence: Synthetic oligonucleotide
cccaugucuuggaaccuuc

SEQ ID NO: 2968208 - RNA, 19 nt, Artificial Sequence
  Description of Artificial Sequence: Synthetic oligonucleotide
cgacuuguuccucggcggg

SEQ ID NO: 2968209 - RNA, 19 nt, Artificial Sequence
  Description of Artificial Sequence: Synthetic oligonucleotide
gugggcaugcgcaccgguc

SEQ ID NO: 2968210 - RNA, 19 nt, Artificial Sequence
  Description of Artificial Sequence: Synthetic oligonucleotide
gggagcgaacagcggugag

SEQ ID NO: 2968211 - RNA, 19 nt, Artificial Sequence
  Description of Artificial Sequence: Synthetic oligonucleotide
caugcgcaccggucccuuc

SEQ ID NO: 2968212 - RNA, 19 nt, Artificial Sequence
  Description of Artificial Sequence: Synthetic oligonucleotide
cuggcucaaugcugaugga

SEQ ID NO: 2968213 - RNA, 19 nt, Artificial Sequence
  Description of Artificial Sequence: Synthetic oligonucleotide
cacguugcggcuggugaga

SEQ ID NO: 2968214 - RNA, 19 nt, Artificial Sequence
  Description of Artificial Sequence: Synthetic oligonucleotide
ccgguguccuuaaaagcca

SEQ ID NO: 2968215 - RNA, 19 nt, Artificial Sequence
  Description of Artificial Sequence: Synthetic oligonucleotide
cggcuggugagagugauuc

SEQ ID NO: 2968216 - RNA, 19 nt, Artificial Sequence
  Description of Artificial Sequence: Synthetic oligonucleotide
aucgccaccucggguucca

SEQ ID NO: 2968217 - RNA, 19 nt, Artificial Sequence
  Description of Artificial Sequence: Synthetic oligonucleotide
ggcaucugcaauagugacu

SEQ ID NO: 2968218 - RNA, 19 nt, Artificial Sequence
  Description of Artificial Sequence: Synthetic oligonucleotide
accggucccuucacuuuca

SEQ ID NO: 2968219 - RNA, 19 nt, Artificial Sequence
  Description of Artificial Sequence: Synthetic oligonucleotide
cagucgcuuguggauccuc

SEQ ID NO: 2968220 - RNA, 19 nt, Artificial Sequence
  Description of Artificial Sequence: Synthetic oligonucleotide
gucccuucacuuucagauu

SEQ ID NO: 2968221 - RNA, 19 nt, Artificial Sequence
  Description of Artificial Sequence: Synthetic oligonucleotide
gucgcuuguggauccucau

SEQ ID NO: 2968222 - RNA, 19 nt, Artificial Sequence
  Description of Artificial Sequence: Synthetic oligonucleotide
cacgggcgucuuuccggug

SEQ ID NO: 2968223 - RNA, 19 nt, Artificial Sequence
  Description of Artificial Sequence: Synthetic oligonucleotide
ccaugucuuggaaccuuca

SEQ ID NO: 2968224 - RNA, 19 nt, Artificial Sequence
  Description of Artificial Sequence: Synthetic oligonucleotide
cggcgcggcuuccugaccg

SEQ ID NO: 2968225 - RNA, 19 nt, Artificial Sequence
  Description of Artificial Sequence: Synthetic oligonucleotide
ggaaacgaucccaugucuu

SEQ ID NO: 2968226 - RNA, 19 nt, Artificial Sequence
  Description of Artificial Sequence: Synthetic oligonucleotide
gcugcggcgcggcuuccug

SEQ ID NO: 2968227 - RNA, 19 nt, Artificial Sequence
  Description of Artificial Sequence: Synthetic oligonucleotide
ggagcgaacagcggugagu

SEQ ID NO: 2968228 - RNA, 19 nt, Artificial Sequence
  Description of Artificial Sequence: Synthetic oligonucleotide
ggcuuccugaccgacuugu

SEQ ID NO: 2968229 - RNA, 19 nt, Artificial Sequence
  Description of Artificial Sequence: Synthetic oligonucleotide
ccaccucggguuccacggg

SEQ ID NO: 2968230 - RNA, 19 nt, Artificial Sequence
  Description of Artificial Sequence: Synthetic oligonucleotide
accuccacgccuggcucaa

SEQ ID NO: 2968231 - RNA, 19 nt, Artificial Sequence
  Description of Artificial Sequence: Synthetic oligonucleotide
gccuggcucaaugcugaug

SEQ ID NO: 2968232 - RNA, 19 nt, Artificial Sequence
  Description of Artificial Sequence: Synthetic oligonucleotide
cgaauucggugaaucgcca

SEQ ID NO: 2968233 - RNA, 19 nt, Artificial Sequence
  Description of Artificial Sequence: Synthetic oligonucleotide
gcgacuucacguugcggcu

SEQ ID NO: 2968234 - RNA, 19 nt, Artificial Sequence
  Description of Artificial Sequence: Synthetic oligonucleotide
cuucaccacaagguguuuu

SEQ ID NO: 2968235 - RNA, 19 nt, Artificial Sequence
  Description of Artificial Sequence: Synthetic oligonucleotide
cugcggcgcggcuuccuga

SEQ ID NO: 2968236 - RNA, 19 nt, Artificial Sequence
  Description of Artificial Sequence: Synthetic oligonucleotide
guuccucggcgggagcgaa

SEQ ID NO: 2968237 - RNA, 19 nt, Artificial Sequence
  Description of Artificial Sequence: Synthetic oligonucleotide
cgccaccucggguuccacg

SEQ ID NO: 2968238 - RNA, 19 nt, Artificial Sequence
  Description of Artificial Sequence: Synthetic oligonucleotide
cucaggcaucugcaauagu

SEQ ID NO: 2968239 - RNA, 19 nt, Artificial Sequence
  Description of Artificial Sequence: Synthetic oligonucleotide
ccggucccuucacuuucag

SEQ ID NO: 2968240 - RNA, 19 nt, Artificial Sequence
  Description of Artificial Sequence: Synthetic oligonucleotide
gccauggcugcggcgcggc

SEQ ID NO: 2968241 - RNA, 19 nt, Artificial Sequence
  Description of Artificial Sequence: Synthetic oligonucleotide
gcaaaucaaucagucgcuu

SEQ ID NO: 2968242 - RNA, 19 nt, Artificial Sequence
  Description of Artificial Sequence: Synthetic oligonucleotide
cggaaggacugugcaaauc

SEQ ID NO: 2968243 - RNA, 19 nt, Artificial Sequence
  Description of Artificial Sequence: Synthetic oligonucleotide
gcggcuuccugaccgacuu

SEQ ID NO: 2968244 - RNA, 19 nt, Artificial Sequence
  Description of Artificial Sequence: Synthetic oligonucleotide
cggcgcacaccuucuccag

SEQ ID NO: 2968245 - RNA, 19 nt, Artificial Sequence
  Description of Artificial Sequence: Synthetic oligonucleotide
gggcgucuuuccggugucc

SEQ ID NO: 2968246 - RNA, 19 nt, Artificial Sequence
  Description of Artificial Sequence: Synthetic oligonucleotide
ucgccaccucggguuccac

SEQ ID NO: 2968247 - RNA, 19 nt, Artificial Sequence
  Description of Artificial Sequence: Synthetic oligonucleotide
cgacuucacguugcggcug

SEQ ID NO: 2968248 - RNA, 19 nt, Artificial Sequence
  Description of Artificial Sequence: Synthetic oligonucleotide
ggcgcggcuuccugaccga

SEQ ID NO: 2968249 - RNA, 19 nt, Artificial Sequence
  Description of Artificial Sequence: Synthetic oligonucleotide
ggugggcaugcgcaccggu

SEQ ID NO: 2968250 - RNA, 19 nt, Artificial Sequence
  Description of Artificial Sequence: Synthetic oligonucleotide
ggcgucuuuccgguguccu

SEQ ID NO: 2968251 - RNA, 19 nt, Artificial Sequence
  Description of Artificial Sequence: Synthetic oligonucleotide
cgcuuguggauccucauuu

SEQ ID NO: 2968252 - RNA, 19 nt, Artificial Sequence
  Description of Artificial Sequence: Synthetic oligonucleotide
cgccucugaucaagucggc

SEQ ID NO: 2968253 - RNA, 19 nt, Artificial Sequence
  Description of Artificial Sequence: Synthetic oligonucleotide
ccugaccgacuuguuccuc

SEQ ID NO: 2968254 - RNA, 19 nt, Artificial Sequence
  Description of Artificial Sequence: Synthetic oligonucleotide
uggcugcggcgcggcuucc

SEQ ID NO: 2968255 - RNA, 19 nt, Artificial Sequence
  Description of Artificial Sequence: Synthetic oligonucleotide
ccucggcgggagcgaacag

SEQ ID NO: 2968256 - RNA, 19 nt, Artificial Sequence
  Description of Artificial Sequence: Synthetic oligonucleotide
gcggcgcggcuuccugacc

SEQ ID NO: 2968257 - RNA, 19 nt, Artificial Sequence
  Description of Artificial Sequence: Synthetic oligonucleotide
cgucuuuccgguguccuua

SEQ ID NO: 2968258 - RNA, 19 nt, Artificial Sequence
  Description of Artificial Sequence: Synthetic oligonucleotide
cccuucacuuucagauucu

SEQ ID NO: 2968259 - RNA, 19 nt, Artificial Sequence
  Description of Artificial Sequence: Synthetic oligonucleotide
cauggcugcggcgcggcuu

SEQ ID NO: 2968260 - RNA, 19 nt, Artificial Sequence
  Description of Artificial Sequence: Synthetic oligonucleotide
gcaccggucccuucacuuu

SEQ ID NO: 2968261 - RNA, 19 nt, Artificial Sequence
  Description of Artificial Sequence: Synthetic oligonucleotide
ccacgccuggcucaaugcu

SEQ ID NO: 2968262 - RNA, 19 nt, Artificial Sequence
  Description of Artificial Sequence: Synthetic oligonucleotide
ccacgggcgucuuuccggu

SEQ ID NO: 2968263 - RNA, 19 nt, Artificial Sequence
  Description of Artificial Sequence: Synthetic oligonucleotide
cggucccuucacuuucaga

SEQ ID NO: 2968264 - RNA, 19 nt, Artificial Sequence
  Description of Artificial Sequence: Synthetic oligonucleotide
cgggcgucuuuccgguguc

SEQ ID NO: 2968265 - RNA, 19 nt, Artificial Sequence
  Description of Artificial Sequence: Synthetic oligonucleotide
gcgcggcuuccugaccgac

SEQ ID NO: 2968266 - RNA, 19 nt, Artificial Sequence
  Description of Artificial Sequence: Synthetic oligonucleotide
gcgucuuuccgguguccuu

SEQ ID NO: 2968267 - RNA, 19 nt, Artificial Sequence
  Description of Artificial Sequence: Synthetic oligonucleotide
cggcuuccugaccgacuug

SEQ ID NO: 2968268 - RNA, 19 nt, Artificial Sequence
  Description of Artificial Sequence: Synthetic oligonucleotide
cgcacaccuucuccagcga

SEQ ID NO: 2968269 - RNA, 19 nt, Artificial Sequence
  Description of Artificial Sequence: Synthetic oligonucleotide
cgcaccggucccuucacuu

SEQ ID NO: 2968270 - RNA, 19 nt, Artificial Sequence
  Description of Artificial Sequence: Synthetic oligonucleotide
ccuuggcgccucugaucaa

SEQ ID NO: 2968271 - RNA, 19 nt, Artificial Sequence
  Description of Artificial Sequence: Synthetic oligonucleotide
cgguguccuuaaaagccau

SEQ ID NO: 2968272 - RNA, 19 nt, Artificial Sequence
  Description of Artificial Sequence: Synthetic oligonucleotide
ccucggguuccacgggcgu

SEQ ID NO: 2968273 - RNA, 19 nt, Artificial Sequence
  Description of Artificial Sequence: Synthetic oligonucleotide
gcgcaccggucccuucacu

SEQ ID NO: 2968274 - RNA, 19 nt, Artificial Sequence
  Description of Artificial Sequence: Synthetic oligonucleotide
cgcggcuuccugaccgacu

SEQ ID NO: 2968275 - RNA, 19 nt, Artificial Sequence
  Description of Artificial Sequence: Synthetic oligonucleotide
gcaugcgcaccggucccuu

SEQ ID NO: 2968276 - RNA, 19 nt, Artificial Sequence
  Description of Artificial Sequence: Synthetic oligonucleotide
ggguuccacgggcgucuuu

SEQ ID NO: 2968277 - RNA, 19 nt, Artificial Sequence
  Description of Artificial Sequence: Synthetic oligonucleotide
ggcugcggcgcggcuuccu

SEQ ID NO: 2968278 - RNA, 19 nt, Artificial Sequence
  Description of Artificial Sequence: Synthetic oligonucleotide
cguugcggcuggugagagu

SEQ ID NO: 2968279 - RNA, 19 nt, Artificial Sequence
  Description of Artificial Sequence: Synthetic oligonucleotide
gcggcuggugagagugauu

SEQ ID NO: 2968280 - RNA, 19 nt, Artificial Sequence
  Description of Artificial Sequence: Synthetic oligonucleotide
ccuucaccacaagguguuu

SEQ ID NO: 2968281 - RNA, 19 nt, Artificial Sequence
  Description of Artificial Sequence: Synthetic oligonucleotide
ccauggcugcggcgcggcu

SEQ ID NO: 2968282 - RNA, 19 nt, Artificial Sequence
  Description of Artificial Sequence: Synthetic oligonucleotide
ccuccacgccuggcucaau

SEQ ID NO: 2968283 - RNA, 19 nt, Artificial Sequence
  Description of Artificial Sequence: Synthetic oligonucleotide
cggguuccacgggcgucuu

SEQ ID NO: 2968284 - RNA, 19 nt, Artificial Sequence
  Description of Artificial Sequence: Synthetic oligonucleotide
aaucaugucuacuuucucg

SEQ ID NO: 2968285 - RNA, 19 nt, Artificial Sequence
  Description of Artificial Sequence: Synthetic oligonucleotide
uucucgaaguccaagaggg

SEQ ID NO: 2968286 - RNA, 19 nt, Artificial Sequence
  Description of Artificial Sequence: Synthetic oligonucleotide
gaugaggacauuaaguggg

SEQ ID NO: 2968287 - RNA, 19 nt, Artificial Sequence
  Description of Artificial Sequence: Synthetic oligonucleotide
acauuggccauacuguucc

SEQ ID NO: 2968288 - RNA, 19 nt, Artificial Sequence
  Description of Artificial Sequence: Synthetic oligonucleotide
acugcugccucauucaagc

SEQ ID NO: 2968289 - RNA, 19 nt, Artificial Sequence
  Description of Artificial Sequence: Synthetic oligonucleotide
auguguucggcacaguugc

SEQ ID NO: 2968290 - RNA, 19 nt, Artificial Sequence
  Description of Artificial Sequence: Synthetic oligonucleotide
ucuacuuucucgaagucca

SEQ ID NO: 2968291 - RNA, 19 nt, Artificial Sequence
  Description of Artificial Sequence: Synthetic oligonucleotide
uugugggugaacuuggcgg

SEQ ID NO: 2968292 - RNA, 19 nt, Artificial Sequence
  Description of Artificial Sequence: Synthetic oligonucleotide
uuucucgaaguccaagagg

SEQ ID NO: 2968293 - RNA, 19 nt, Artificial Sequence
  Description of Artificial Sequence: Synthetic oligonucleotide
aaugcucaucuuaaggugg

SEQ ID NO: 2968294 - RNA, 19 nt, Artificial Sequence
  Description of Artificial Sequence: Synthetic oligonucleotide
agcaaugcucaucuuaagg

SEQ ID NO: 2968295 - RNA, 19 nt, Artificial Sequence
  Description of Artificial Sequence: Synthetic oligonucleotide
uaagguggugacaaucccg

SEQ ID NO: 2968296 - RNA, 19 nt, Artificial Sequence
  Description of Artificial Sequence: Synthetic oligonucleotide
uccucaaaggcuucaaaag

SEQ ID NO: 2968297 - RNA, 19 nt, Artificial Sequence
  Description of Artificial Sequence: Synthetic oligonucleotide
cuuaagguggugacaaucc

SEQ ID NO: 2968298 - RNA, 19 nt, Artificial Sequence
  Description of Artificial Sequence: Synthetic oligonucleotide
agaugaggacauuaagugg

SEQ ID NO: 2968299 - RNA, 19 nt, Artificial Sequence
  Description of Artificial Sequence: Synthetic oligonucleotide
cagaugaggacauuaagug

SEQ ID NO: 2968300 - RNA, 19 nt, Artificial Sequence
  Description of Artificial Sequence: Synthetic oligonucleotide
cucaaaggcuucaaaaggc

SEQ ID NO: 2968301 - RNA, 19 nt, Artificial Sequence
  Description of Artificial Sequence: Synthetic oligonucleotide
gaaggcacuccucaaaggc

SEQ ID NO: 2968302 - RNA, 19 nt, Artificial Sequence
  Description of Artificial Sequence: Synthetic oligonucleotide
ucaaucaugucuacuuucu

SEQ ID NO: 2968303 - RNA, 19 nt, Artificial Sequence
  Description of Artificial Sequence: Synthetic oligonucleotide
uccagcagagcucaggcgc

SEQ ID NO: 2968304 - RNA, 19 nt, Artificial Sequence
  Description of Artificial Sequence: Synthetic oligonucleotide
agcaguaacuuccagggcu

SEQ ID NO: 2968305 - RNA, 19 nt, Artificial Sequence
  Description of Artificial Sequence: Synthetic oligonucleotide
aaaggcucagcgcaggccu

SEQ ID NO: 2968306 - RNA, 19 nt, Artificial Sequence
  Description of Artificial Sequence: Synthetic oligonucleotide
ugcaguaccgagcaguaac

SEQ ID NO: 2968307 - RNA, 19 nt, Artificial Sequence
  Description of Artificial Sequence: Synthetic oligonucleotide
cacacugcaggaaacggcg

SEQ ID NO: 2968308 - RNA, 19 nt, Artificial Sequence
  Description of Artificial Sequence: Synthetic oligonucleotide
ucacucuuccagaugagga

SEQ ID NO: 2968309 - RNA, 19 nt, Artificial Sequence
  Description of Artificial Sequence: Synthetic oligonucleotide
ugugcagcgagcaaugcuc

SEQ ID NO: 2968310 - RNA, 19 nt, Artificial Sequence
  Description of Artificial Sequence: Synthetic oligonucleotide
uccagaugaggacauuaag

SEQ ID NO: 2968311 - RNA, 19 nt, Artificial Sequence
  Description of Artificial Sequence: Synthetic oligonucleotide
uuaagguggugacaauccc

SEQ ID NO: 2968312 - RNA, 19 nt, Artificial Sequence
  Description of Artificial Sequence: Synthetic oligonucleotide
aguaccgagcaguaacuuc

SEQ ID NO: 2968313 - RNA, 19 nt, Artificial Sequence
  Description of Artificial Sequence: Synthetic oligonucleotide
gaaacggcgcauguguucg

SEQ ID NO: 2968314 - RNA, 19 nt, Artificial Sequence
  Description of Artificial Sequence: Synthetic oligonucleotide
aucaugucuacuuucucga

SEQ ID NO: 2968315 - RNA, 19 nt, Artificial Sequence
  Description of Artificial Sequence: Synthetic oligonucleotide
cuucaaaaggcucagcgca

SEQ ID NO: 2968316 - RNA, 19 nt, Artificial Sequence
  Description of Artificial Sequence: Synthetic oligonucleotide
ugaacuuggcggcugcacc

SEQ ID NO: 2968317 - RNA, 19 nt, Artificial Sequence
  Description of Artificial Sequence: Synthetic oligonucleotide
augucuacuuucucgaagu

SEQ ID NO: 2968318 - RNA, 19 nt, Artificial Sequence
  Description of Artificial Sequence: Synthetic oligonucleotide
cauacuguuccaacucccg

SEQ ID NO: 2968319 - RNA, 19 nt, Artificial Sequence
  Description of Artificial Sequence: Synthetic oligonucleotide
uucaaaaggcucagcgcag

SEQ ID NO: 2968320 - RNA, 19 nt, Artificial Sequence
  Description of Artificial Sequence: Synthetic oligonucleotide
uuggccgccacacauuggc

SEQ ID NO: 2968321 - RNA, 19 nt, Artificial Sequence
  Description of Artificial Sequence: Synthetic oligonucleotide
ucuccagcagagcucaggc

SEQ ID NO: 2968322 - RNA, 19 nt, Artificial Sequence
  Description of Artificial Sequence: Synthetic oligonucleotide
uguuccaacucccggcugc

SEQ ID NO: 2968323 - RNA, 19 nt, Artificial Sequence
  Description of Artificial Sequence: Synthetic oligonucleotide
uagucaaucaugucuacuu

SEQ ID NO: 2968324 - RNA, 19 nt, Artificial Sequence
  Description of Artificial Sequence: Synthetic oligonucleotide
caggacucaggcuuggccg

SEQ ID NO: 2968325 - RNA, 19 nt, Artificial Sequence
  Description of Artificial Sequence: Synthetic oligonucleotide
ggcuucaaaaggcucagcg

SEQ ID NO: 2968326 - RNA, 19 nt, Artificial Sequence
  Description of Artificial Sequence: Synthetic oligonucleotide
auacuguuccaacucccgg

SEQ ID NO: 2968327 - RNA, 19 nt, Artificial Sequence
  Description of Artificial Sequence: Synthetic oligonucleotide
uacuguuccaacucccggc

SEQ ID NO: 2968328 - RNA, 19 nt, Artificial Sequence
  Description of Artificial Sequence: Synthetic oligonucleotide
ugugggugaacuuggcggc

SEQ ID NO: 2968329 - RNA, 19 nt, Artificial Sequence
  Description of Artificial Sequence: Synthetic oligonucleotide
acuuucucgaaguccaaga

SEQ ID NO: 2968330 - RNA, 19 nt, Artificial Sequence
  Description of Artificial Sequence: Synthetic oligonucleotide
ucgaaguccaagagggucu

SEQ ID NO: 2968331 - RNA, 19 nt, Artificial Sequence
  Description of Artificial Sequence: Synthetic oligonucleotide
cuuucucgaaguccaagag

SEQ ID NO: 2968332 - RNA, 19 nt, Artificial Sequence
  Description of Artificial Sequence: Synthetic oligonucleotide
cauuaagugggcuagucaa

SEQ ID NO: 2968333 - RNA, 19 nt, Artificial Sequence
  Description of Artificial Sequence: Synthetic oligonucleotide
cucauucaagcgaaggcac

SEQ ID NO: 2968334 - RNA, 19 nt, Artificial Sequence
  Description of Artificial Sequence: Synthetic oligonucleotide
aacucccggcugcaguacc

SEQ ID NO: 2968335 - RNA, 19 nt, Artificial Sequence
  Description of Artificial Sequence: Synthetic oligonucleotide
caugucuacuuucucgaag

SEQ ID NO: 2968336 - RNA, 19 nt, Artificial Sequence
  Description of Artificial Sequence: Synthetic oligonucleotide
cugcucagcacacugcagg

SEQ ID NO: 2968337 - RNA, 19 nt, Artificial Sequence
  Description of Artificial Sequence: Synthetic oligonucleotide
aaucccgaugccaggacuc

SEQ ID NO: 2968338 - RNA, 19 nt, Artificial Sequence
  Description of Artificial Sequence: Synthetic oligonucleotide
aggacucaggcuuggccgc

SEQ ID NO: 2968339 - RNA, 19 nt, Artificial Sequence
  Description of Artificial Sequence: Synthetic oligonucleotide
guugugggugaacuuggcg

SEQ ID NO: 2968340 - RNA, 19 nt, Artificial Sequence
  Description of Artificial Sequence: Synthetic oligonucleotide
aggacauuaagugggcuag

SEQ ID NO: 2968341 - RNA, 19 nt, Artificial Sequence
  Description of Artificial Sequence: Synthetic oligonucleotide
guaccgagcaguaacuucc

SEQ ID NO: 2968342 - RNA, 19 nt, Artificial Sequence
  Description of Artificial Sequence: Synthetic oligonucleotide
acauuaagugggcuaguca

SEQ ID NO: 2968343 - RNA, 19 nt, Artificial Sequence
  Description of Artificial Sequence: Synthetic oligonucleotide
cucaucuuaagguggugac

SEQ ID NO: 2968344 - RNA, 19 nt, Artificial Sequence
  Description of Artificial Sequence: Synthetic oligonucleotide
cauguguucggcacaguug

SEQ ID NO: 2968345 - RNA, 19 nt, Artificial Sequence
  Description of Artificial Sequence: Synthetic oligonucleotide
ucuuaagguggugacaauc

SEQ ID NO: 2968346 - RNA, 19 nt, Artificial Sequence
  Description of Artificial Sequence: Synthetic oligonucleotide
ugcugccucauucaagcga

SEQ ID NO: 2968347 - RNA, 19 nt, Artificial Sequence
  Description of Artificial Sequence: Synthetic oligonucleotide
ucaaaaggcucagcgcagg

SEQ ID NO: 2968348 - RNA, 19 nt, Artificial Sequence
  Description of Artificial Sequence: Synthetic oligonucleotide
uucaggaggcaggaagugg

SEQ ID NO: 2968349 - RNA, 19 nt, Artificial Sequence
  Description of Artificial Sequence: Synthetic oligonucleotide
gugacaaucccgaugccag

SEQ ID NO: 2968350 - RNA, 19 nt, Artificial Sequence
  Description of Artificial Sequence: Synthetic oligonucleotide
ugugccucuccaguugugg

SEQ ID NO: 2968351 - RNA, 19 nt, Artificial Sequence
  Description of Artificial Sequence: Synthetic oligonucleotide
aaggcuucaaaaggcucag

SEQ ID NO: 2968352 - RNA, 19 nt, Artificial Sequence
  Description of Artificial Sequence: Synthetic oligonucleotide
ugggaggaugugcagcgag

SEQ ID NO: 2968353 - RNA, 19 nt, Artificial Sequence
  Description of Artificial Sequence: Synthetic oligonucleotide
aagugggcuagucaaucau

SEQ ID NO: 2968354 - RNA, 19 nt, Artificial Sequence
  Description of Artificial Sequence: Synthetic oligonucleotide
aaguccaagagggucuuca

SEQ ID NO: 2968355 - RNA, 19 nt, Artificial Sequence
  Description of Artificial Sequence: Synthetic oligonucleotide
uaagugggcuagucaauca

SEQ ID NO: 2968356 - RNA, 19 nt, Artificial Sequence
  Description of Artificial Sequence: Synthetic oligonucleotide
uuaagugggcuagucaauc

SEQ ID NO: 2968357 - RNA, 19 nt, Artificial Sequence
  Description of Artificial Sequence: Synthetic oligonucleotide
ccucaaaggcuucaaaagg

SEQ ID NO: 2968358 - RNA, 19 nt, Artificial Sequence
  Description of Artificial Sequence: Synthetic oligonucleotide
caguugugggugaacuugg

SEQ ID NO: 2968359 - RNA, 19 nt, Artificial Sequence
  Description of Artificial Sequence: Synthetic oligonucleotide
aagguggugacaaucccga

SEQ ID NO: 2968360 - RNA, 19 nt, Artificial Sequence
  Description of Artificial Sequence: Synthetic oligonucleotide
ucauucaagcgaaggcacu

SEQ ID NO: 2968361 - RNA, 19 nt, Artificial Sequence
  Description of Artificial Sequence: Synthetic oligonucleotide
ugccucauucaagcgaagg

SEQ ID NO: 2968362 - RNA, 19 nt, Artificial Sequence
  Description of Artificial Sequence: Synthetic oligonucleotide
cgagcaguaacuuccaggg

SEQ ID NO: 2968363 - RNA, 19 nt, Artificial Sequence
  Description of Artificial Sequence: Synthetic oligonucleotide
gucaaucaugucuacuuuc

SEQ ID NO: 2968364 - RNA, 19 nt, Artificial Sequence
  Description of Artificial Sequence: Synthetic oligonucleotide
aacggcgcauguguucggc

SEQ ID NO: 2968365 - RNA, 19 nt, Artificial Sequence
  Description of Artificial Sequence: Synthetic oligonucleotide
gaugccaggacucaggcuu

SEQ ID NO: 2968366 - RNA, 19 nt, Artificial Sequence
  Description of Artificial Sequence: Synthetic oligonucleotide
ugacaaucccgaugccagg

SEQ ID NO: 2968367 - RNA, 19 nt, Artificial Sequence
  Description of Artificial Sequence: Synthetic oligonucleotide
uuccagaugaggacauuaa

SEQ ID NO: 2968368 - RNA, 19 nt, Artificial Sequence
  Description of Artificial Sequence: Synthetic oligonucleotide
acaaucccgaugccaggac

SEQ ID NO: 2968369 - RNA, 19 nt, Artificial Sequence
  Description of Artificial Sequence: Synthetic oligonucleotide
cucagcgcaggccuggcgg

SEQ ID NO: 2968370 - RNA, 19 nt, Artificial Sequence
  Description of Artificial Sequence: Synthetic oligonucleotide
ggugggaggaugugcagcg

SEQ ID NO: 2968371 - RNA, 19 nt, Artificial Sequence
  Description of Artificial Sequence: Synthetic oligonucleotide
cacucuuccagaugaggac

SEQ ID NO: 2968372 - RNA, 19 nt, Artificial Sequence
  Description of Artificial Sequence: Synthetic oligonucleotide
uuggccauacuguuccaac

SEQ ID NO: 2968373 - RNA, 19 nt, Artificial Sequence
  Description of Artificial Sequence: Synthetic oligonucleotide
acuguuccaacucccggcu

SEQ ID NO: 2968374 - RNA, 19 nt, Artificial Sequence
  Description of Artificial Sequence: Synthetic oligonucleotide
uacuuucucgaaguccaag

SEQ ID NO: 2968375 - RNA, 19 nt, Artificial Sequence
  Description of Artificial Sequence: Synthetic oligonucleotide
ucaucuuaagguggugaca

SEQ ID NO: 2968376 - RNA, 19 nt, Artificial Sequence
  Description of Artificial Sequence: Synthetic oligonucleotide
gucuacuuucucgaagucc

SEQ ID NO: 2968377 - RNA, 19 nt, Artificial Sequence
  Description of Artificial Sequence: Synthetic oligonucleotide
agcacacugcaggaaacgg

SEQ ID NO: 2968378 - RNA, 19 nt, Artificial Sequence
  Description of Artificial Sequence: Synthetic oligonucleotide
aguccaagagggucuucag

SEQ ID NO: 2968379 - RNA, 19 nt, Artificial Sequence
  Description of Artificial Sequence: Synthetic oligonucleotide
gagcaaugcucaucuuaag

SEQ ID NO: 2968380 - RNA, 19 nt, Artificial Sequence
  Description of Artificial Sequence: Synthetic oligonucleotide
caggaaguggcuguggcug

SEQ ID NO: 2968381 - RNA, 19 nt, Artificial Sequence
  Description of Artificial Sequence: Synthetic oligonucleotide
aaacggcgcauguguucgg

SEQ ID NO: 2968382 - RNA, 19 nt, Artificial Sequence
  Description of Artificial Sequence: Synthetic oligonucleotide
uggccauacuguuccaacu

SEQ ID NO: 2968383 - RNA, 19 nt, Artificial Sequence
  Description of Artificial Sequence: Synthetic oligonucleotide
agucaaucaugucuacuuu

SEQ ID NO: 2968384 - RNA, 19 nt, Artificial Sequence
  Description of Artificial Sequence: Synthetic oligonucleotide
uguggcugugccucuccag

SEQ ID NO: 2968385 - RNA, 19 nt, Artificial Sequence
  Description of Artificial Sequence: Synthetic oligonucleotide
gcuucaaaaggcucagcgc

SEQ ID NO: 2968386 - RNA, 19 nt, Artificial Sequence
  Description of Artificial Sequence: Synthetic oligonucleotide
aaggcacuccucaaaggcu

SEQ ID NO: 2968387 - RNA, 19 nt, Artificial Sequence
  Description of Artificial Sequence: Synthetic oligonucleotide
uccaacucccggcugcagu

SEQ ID NO: 2968388 - RNA, 19 nt, Artificial Sequence
  Description of Artificial Sequence: Synthetic oligonucleotide
caagcgaaggcacuccuca

SEQ ID NO: 2968389 - RNA, 19 nt, Artificial Sequence
  Description of Artificial Sequence: Synthetic oligonucleotide
cucgaaguccaagaggguc

SEQ ID NO: 2968390 - RNA, 19 nt, Artificial Sequence
  Description of Artificial Sequence: Synthetic oligonucleotide
uccagggcugccugcaucu

SEQ ID NO: 2968391 - RNA, 19 nt, Artificial Sequence
  Description of Artificial Sequence: Synthetic oligonucleotide
ugcaggaaacggcgcaugu

SEQ ID NO: 2968392 - RNA, 19 nt, Artificial Sequence
  Description of Artificial Sequence: Synthetic oligonucleotide
gguggugacaaucccgaug

SEQ ID NO: 2968393 - RNA, 19 nt, Artificial Sequence
  Description of Artificial Sequence: Synthetic oligonucleotide
gacauuaagugggcuaguc

SEQ ID NO: 2968394 - RNA, 19 nt, Artificial Sequence
  Description of Artificial Sequence: Synthetic oligonucleotide
aacugcugccucauucaag

SEQ ID NO: 2968395 - RNA, 19 nt, Artificial Sequence
  Description of Artificial Sequence: Synthetic oligonucleotide
augugcagcgagcaaugcu

SEQ ID NO: 2968396 - RNA, 19 nt, Artificial Sequence
  Description of Artificial Sequence: Synthetic oligonucleotide
uucggcacaguugccaacu

SEQ ID NO: 2968397 - RNA, 19 nt, Artificial Sequence
  Description of Artificial Sequence: Synthetic oligonucleotide
gaggacauuaagugggcua

SEQ ID NO: 2968398 - RNA, 19 nt, Artificial Sequence
  Description of Artificial Sequence: Synthetic oligonucleotide
uguucggcacaguugccaa

SEQ ID NO: 2968399 - RNA, 19 nt, Artificial Sequence
  Description of Artificial Sequence: Synthetic oligonucleotide
ugauggggugggaggaugu

SEQ ID NO: 2968400 - RNA, 19 nt, Artificial Sequence
  Description of Artificial Sequence: Synthetic oligonucleotide
ugucuacuuucucgaaguc

SEQ ID NO: 2968401 - RNA, 19 nt, Artificial Sequence
  Description of Artificial Sequence: Synthetic oligonucleotide
cuccucaaaggcuucaaaa

SEQ ID NO: 2968402 - RNA, 19 nt, Artificial Sequence
  Description of Artificial Sequence: Synthetic oligonucleotide
caucuuaagguggugacaa

SEQ ID NO: 2968403 - RNA, 19 nt, Artificial Sequence
  Description of Artificial Sequence: Synthetic oligonucleotide
acucuuccagaugaggaca

SEQ ID NO: 2968404 - RNA, 19 nt, Artificial Sequence
  Description of Artificial Sequence: Synthetic oligonucleotide
aguugugggugaacuuggc

SEQ ID NO: 2968405 - RNA, 19 nt, Artificial Sequence
  Description of Artificial Sequence: Synthetic oligonucleotide
ucaggcuuggccgccacac

SEQ ID NO: 2968406 - RNA, 19 nt, Artificial Sequence
  Description of Artificial Sequence: Synthetic oligonucleotide
cacauuggccauacuguuc

SEQ ID NO: 2968407 - RNA, 19 nt, Artificial Sequence
  Description of Artificial Sequence: Synthetic oligonucleotide
acuuggcggcugcaccugc

SEQ ID NO: 2968408 - RNA, 19 nt, Artificial Sequence
  Description of Artificial Sequence: Synthetic oligonucleotide
uggcggaucuggcggauga

SEQ ID NO: 2968409 - RNA, 19 nt, Artificial Sequence
  Description of Artificial Sequence: Synthetic oligonucleotide
ccacacauuggccauacug

SEQ ID NO: 2968410 - RNA, 19 nt, Artificial Sequence
  Description of Artificial Sequence: Synthetic oligonucleotide
aucuccagcagagcucagg

SEQ ID NO: 2968411 - RNA, 19 nt, Artificial Sequence
  Description of Artificial Sequence: Synthetic oligonucleotide
cacacauuggccauacugu

SEQ ID NO: 2968412 - RNA, 19 nt, Artificial Sequence
  Description of Artificial Sequence: Synthetic oligonucleotide
cauucaagcgaaggcacuc

SEQ ID NO: 2968413 - RNA, 19 nt, Artificial Sequence
  Description of Artificial Sequence: Synthetic oligonucleotide
gugccucuccaguuguggg

SEQ ID NO: 2968414 - RNA, 19 nt, Artificial Sequence
  Description of Artificial Sequence: Synthetic oligonucleotide
aguugccaacugcugccuc

SEQ ID NO: 2968415 - RNA, 19 nt, Artificial Sequence
  Description of Artificial Sequence: Synthetic oligonucleotide
uguguucggcacaguugcc

SEQ ID NO: 2968416 - RNA, 19 nt, Artificial Sequence
  Description of Artificial Sequence: Synthetic oligonucleotide
ucaugucuacuuucucgaa

SEQ ID NO: 2968417 - RNA, 19 nt, Artificial Sequence
  Description of Artificial Sequence: Synthetic oligonucleotide
gagcaguaacuuccagggc

SEQ ID NO: 2968418 - RNA, 19 nt, Artificial Sequence
  Description of Artificial Sequence: Synthetic oligonucleotide
gccucauucaagcgaaggc

SEQ ID NO: 2968419 - RNA, 19 nt, Artificial Sequence
  Description of Artificial Sequence: Synthetic oligonucleotide
caaucaugucuacuuucuc

SEQ ID NO: 2968420 - RNA, 19 nt, Artificial Sequence
  Description of Artificial Sequence: Synthetic oligonucleotide
aggaugugcagcgagcaau

SEQ ID NO: 2968421 - RNA, 19 nt, Artificial Sequence
  Description of Artificial Sequence: Synthetic oligonucleotide
ucuggcggaugauggggug

SEQ ID NO: 2968422 - RNA, 19 nt, Artificial Sequence
  Description of Artificial Sequence: Synthetic oligonucleotide
aggccuggcggaucuggcg

SEQ ID NO: 2968423 - RNA, 19 nt, Artificial Sequence
  Description of Artificial Sequence: Synthetic oligonucleotide
ucucgaaguccaagagggu

SEQ ID NO: 2968424 - RNA, 19 nt, Artificial Sequence
  Description of Artificial Sequence: Synthetic oligonucleotide
cuccagcagagcucaggcg

SEQ ID NO: 2968425 - RNA, 19 nt, Artificial Sequence
  Description of Artificial Sequence: Synthetic oligonucleotide
ugccucuccaguugugggu

SEQ ID NO: 2968426 - RNA, 19 nt, Artificial Sequence
  Description of Artificial Sequence: Synthetic oligonucleotide
uggcggaugaugggguggg

SEQ ID NO: 2968427 - RNA, 19 nt, Artificial Sequence
  Description of Artificial Sequence: Synthetic oligonucleotide
gcaaugcucaucuuaaggu

SEQ ID NO: 2968428 - RNA, 19 nt, Artificial Sequence
  Description of Artificial Sequence: Synthetic oligonucleotide
gacaaucccgaugccagga

SEQ ID NO: 2968429 - RNA, 19 nt, Artificial Sequence
  Description of Artificial Sequence: Synthetic oligonucleotide
agugggcuagucaaucaug

SEQ ID NO: 2968430 - RNA, 19 nt, Artificial Sequence
  Description of Artificial Sequence: Synthetic oligonucleotide
gcgaaggcacuccucaaag

SEQ ID NO: 2968431 - RNA, 19 nt, Artificial Sequence
  Description of Artificial Sequence: Synthetic oligonucleotide
agcgaaggcacuccucaaa

SEQ ID NO: 2968432 - RNA, 19 nt, Artificial Sequence
  Description of Artificial Sequence: Synthetic oligonucleotide
ugaggacauuaagugggcu

SEQ ID NO: 2968433 - RNA, 19 nt, Artificial Sequence
  Description of Artificial Sequence: Synthetic oligonucleotide
cagcacacugcaggaaacg

SEQ ID NO: 2968434 - RNA, 19 nt, Artificial Sequence
  Description of Artificial Sequence: Synthetic oligonucleotide
gaugugcagcgagcaaugc

SEQ ID NO: 2968435 - RNA, 19 nt, Artificial Sequence
  Description of Artificial Sequence: Synthetic oligonucleotide
gccauacuguuccaacucc

SEQ ID NO: 2968436 - RNA, 19 nt, Artificial Sequence
  Description of Artificial Sequence: Synthetic oligonucleotide
ccauacuguuccaacuccc

SEQ ID NO: 2968437 - RNA, 19 nt, Artificial Sequence
  Description of Artificial Sequence: Synthetic oligonucleotide
aagcgaaggcacuccucaa

SEQ ID NO: 2968438 - RNA, 19 nt, Artificial Sequence
  Description of Artificial Sequence: Synthetic oligonucleotide
acacugcaggaaacggcgc

SEQ ID NO: 2968439 - RNA, 19 nt, Artificial Sequence
  Description of Artificial Sequence: Synthetic oligonucleotide
aacuuggcggcugcaccug

SEQ ID NO: 2968440 - RNA, 19 nt, Artificial Sequence
  Description of Artificial Sequence: Synthetic oligonucleotide
auuaagugggcuagucaau

SEQ ID NO: 2968441 - RNA, 19 nt, Artificial Sequence
  Description of Artificial Sequence: Synthetic oligonucleotide
gagggucuucaggaggcag

SEQ ID NO: 2968442 - RNA, 19 nt, Artificial Sequence
  Description of Artificial Sequence: Synthetic oligonucleotide
ugggcuagucaaucauguc

SEQ ID NO: 2968443 - RNA, 19 nt, Artificial Sequence
  Description of Artificial Sequence: Synthetic oligonucleotide
cucagcacacugcaggaaa

SEQ ID NO: 2968444 - RNA, 19 nt, Artificial Sequence
  Description of Artificial Sequence: Synthetic oligonucleotide
caccugcucagcacacugc

SEQ ID NO: 2968445 - RNA, 19 nt, Artificial Sequence
  Description of Artificial Sequence: Synthetic oligonucleotide
gaacuuggcggcugcaccu

SEQ ID NO: 2968446 - RNA, 19 nt, Artificial Sequence
  Description of Artificial Sequence: Synthetic oligonucleotide
aggcuuggccgccacacau

SEQ ID NO: 2968447 - RNA, 19 nt, Artificial Sequence
  Description of Artificial Sequence: Synthetic oligonucleotide
ucagcgcaggccuggcgga

SEQ ID NO: 2968448 - RNA, 19 nt, Artificial Sequence
  Description of Artificial Sequence: Synthetic oligonucleotide
cuuggccgccacacauugg

SEQ ID NO: 2968449 - RNA, 19 nt, Artificial Sequence
  Description of Artificial Sequence: Synthetic oligonucleotide
cugcugccucauucaagcg

SEQ ID NO: 2968450 - RNA, 19 nt, Artificial Sequence
  Description of Artificial Sequence: Synthetic oligonucleotide
gggcuagucaaucaugucu

SEQ ID NO: 2968451 - RNA, 19 nt, Artificial Sequence
  Description of Artificial Sequence: Synthetic oligonucleotide
ggccuggcggaucuggcgg

SEQ ID NO: 2968452 - RNA, 19 nt, Artificial Sequence
  Description of Artificial Sequence: Synthetic oligonucleotide
uccaguugugggugaacuu

SEQ ID NO: 2968453 - RNA, 19 nt, Artificial Sequence
  Description of Artificial Sequence: Synthetic oligonucleotide
ucggcacaguugccaacug

SEQ ID NO: 2968454 - RNA, 19 nt, Artificial Sequence
  Description of Artificial Sequence: Synthetic oligonucleotide
gaaguggcuguggcugugc

SEQ ID NO: 2968455 - RNA, 19 nt, Artificial Sequence
  Description of Artificial Sequence: Synthetic oligonucleotide
augauggggugggaggaug

SEQ ID NO: 2968456 - RNA, 19 nt, Artificial Sequence
  Description of Artificial Sequence: Synthetic oligonucleotide
ggcaggaaguggcuguggc

SEQ ID NO: 2968457 - RNA, 19 nt, Artificial Sequence
  Description of Artificial Sequence: Synthetic oligonucleotide
uggugacaaucccgaugcc

SEQ ID NO: 2968458 - RNA, 19 nt, Artificial Sequence
  Description of Artificial Sequence: Synthetic oligonucleotide
cuggcggaugauggggugg

SEQ ID NO: 2968459 - RNA, 19 nt, Artificial Sequence
  Description of Artificial Sequence: Synthetic oligonucleotide
ggccauacuguuccaacuc

SEQ ID NO: 2968460 - RNA, 19 nt, Artificial Sequence
  Description of Artificial Sequence: Synthetic oligonucleotide
aggcuucaaaaggcucagc

SEQ ID NO: 2968461 - RNA, 19 nt, Artificial Sequence
  Description of Artificial Sequence: Synthetic oligonucleotide
ccaguugugggugaacuug

SEQ ID NO: 2968462 - RNA, 19 nt, Artificial Sequence
  Description of Artificial Sequence: Synthetic oligonucleotide
ggaaacggcgcauguguuc

SEQ ID NO: 2968463 - RNA, 19 nt, Artificial Sequence
  Description of Artificial Sequence: Synthetic oligonucleotide
caggaaacggcgcaugugu

SEQ ID NO: 2968464 - RNA, 19 nt, Artificial Sequence
  Description of Artificial Sequence: Synthetic oligonucleotide
gauggggugggaggaugug

SEQ ID NO: 2968465 - RNA, 19 nt, Artificial Sequence
  Description of Artificial Sequence: Synthetic oligonucleotide
uggccgccacacauuggcc

SEQ ID NO: 2968466 - RNA, 19 nt, Artificial Sequence
  Description of Artificial Sequence: Synthetic oligonucleotide
ugggugaacuuggcggcug

SEQ ID NO: 2968467 - RNA, 19 nt, Artificial Sequence
  Description of Artificial Sequence: Synthetic oligonucleotide
gccaacugcugccucauuc

SEQ ID NO: 2968468 - RNA, 19 nt, Artificial Sequence
  Description of Artificial Sequence: Synthetic oligonucleotide
cggaucuggcggaugaugg

SEQ ID NO: 2968469 - RNA, 19 nt, Artificial Sequence
  Description of Artificial Sequence: Synthetic oligonucleotide
ugcucaucuuaagguggug

SEQ ID NO: 2968470 - RNA, 19 nt, Artificial Sequence
  Description of Artificial Sequence: Synthetic oligonucleotide
ggugacaaucccgaugcca

SEQ ID NO: 2968471 - RNA, 19 nt, Artificial Sequence
  Description of Artificial Sequence: Synthetic oligonucleotide
gcuuggccgccacacauug

SEQ ID NO: 2968472 - RNA, 19 nt, Artificial Sequence
  Description of Artificial Sequence: Synthetic oligonucleotide
gaggcaggaaguggcugug

SEQ ID NO: 2968473 - RNA, 19 nt, Artificial Sequence
  Description of Artificial Sequence: Synthetic oligonucleotide
aucuuaagguggugacaau

SEQ ID NO: 2968474 - RNA, 19 nt, Artificial Sequence
  Description of Artificial Sequence: Synthetic oligonucleotide
auuggccauacuguuccaa

SEQ ID NO: 2968475 - RNA, 19 nt, Artificial Sequence
  Description of Artificial Sequence: Synthetic oligonucleotide
ccaagagggucuucaggag

SEQ ID NO: 2968476 - RNA, 19 nt, Artificial Sequence
  Description of Artificial Sequence: Synthetic oligonucleotide
uuggcggcugcaccugcuc

SEQ ID NO: 2968477 - RNA, 19 nt, Artificial Sequence
  Description of Artificial Sequence: Synthetic oligonucleotide
ccagaugaggacauuaagu

SEQ ID NO: 2968478 - RNA, 19 nt, Artificial Sequence
  Description of Artificial Sequence: Synthetic oligonucleotide
guguucggcacaguugcca

SEQ ID NO: 2968479 - RNA, 19 nt, Artificial Sequence
  Description of Artificial Sequence: Synthetic oligonucleotide
cacugcaggaaacggcgca

SEQ ID NO: 2968480 - RNA, 19 nt, Artificial Sequence
  Description of Artificial Sequence: Synthetic oligonucleotide
cuuccagaugaggacauua

SEQ ID NO: 2968481 - RNA, 19 nt, Artificial Sequence
  Description of Artificial Sequence: Synthetic oligonucleotide
augcucaucuuaagguggu

SEQ ID NO: 2968482 - RNA, 19 nt, Artificial Sequence
  Description of Artificial Sequence: Synthetic oligonucleotide
ggaugugcagcgagcaaug

SEQ ID NO: 2968483 - RNA, 19 nt, Artificial Sequence
  Description of Artificial Sequence: Synthetic oligonucleotide
ccaggacucaggcuuggcc

SEQ ID NO: 2968484 - RNA, 19 nt, Artificial Sequence
  Description of Artificial Sequence: Synthetic oligonucleotide
acucccggcugcaguaccg

SEQ ID NO: 2968485 - RNA, 19 nt, Artificial Sequence
  Description of Artificial Sequence: Synthetic oligonucleotide
aggaggcaggaaguggcug

SEQ ID NO: 2968486 - RNA, 19 nt, Artificial Sequence
  Description of Artificial Sequence: Synthetic oligonucleotide
gugaacuuggcggcugcac

SEQ ID NO: 2968487 - RNA, 19 nt, Artificial Sequence
  Description of Artificial Sequence: Synthetic oligonucleotide
gcaccugcucagcacacug

SEQ ID NO: 2968488 - RNA, 19 nt, Artificial Sequence
  Description of Artificial Sequence: Synthetic oligonucleotide
ucccggcugcaguaccgag

SEQ ID NO: 2968489 - RNA, 19 nt, Artificial Sequence
  Description of Artificial Sequence: Synthetic oligonucleotide
gcaguaacuuccagggcug

SEQ ID NO: 2968490 - RNA, 19 nt, Artificial Sequence
  Description of Artificial Sequence: Synthetic oligonucleotide
guucggcacaguugccaac

SEQ ID NO: 2968491 - RNA, 19 nt, Artificial Sequence
  Description of Artificial Sequence: Synthetic oligonucleotide
caggccuggcggaucuggc

SEQ ID NO: 2968492 - RNA, 19 nt, Artificial Sequence
  Description of Artificial Sequence: Synthetic oligonucleotide
ccucauucaagcgaaggca

SEQ ID NO: 2968493 - RNA, 19 nt, Artificial Sequence
  Description of Artificial Sequence: Synthetic oligonucleotide
gcugcaccugcucagcaca

SEQ ID NO: 2968494 - RNA, 19 nt, Artificial Sequence
  Description of Artificial Sequence: Synthetic oligonucleotide
acugcaggaaacggcgcau

SEQ ID NO: 2968495 - RNA, 19 nt, Artificial Sequence
  Description of Artificial Sequence: Synthetic oligonucleotide
gaggaugugcagcgagcaa

SEQ ID NO: 2968496 - RNA, 19 nt, Artificial Sequence
  Description of Artificial Sequence: Synthetic oligonucleotide
gcuagucaaucaugucuac

SEQ ID NO: 2968497 - RNA, 19 nt, Artificial Sequence
  Description of Artificial Sequence: Synthetic oligonucleotide
ucccgaugccaggacucag

SEQ ID NO: 2968498 - RNA, 19 nt, Artificial Sequence
  Description of Artificial Sequence: Synthetic oligonucleotide
cccgaugccaggacucagg

SEQ ID NO: 2968499 - RNA, 19 nt, Artificial Sequence
  Description of Artificial Sequence: Synthetic oligonucleotide
gcacacugcaggaaacggc

SEQ ID NO: 2968500 - RNA, 19 nt, Artificial Sequence
  Description of Artificial Sequence: Synthetic oligonucleotide
aggcaggaaguggcugugg

SEQ ID NO: 2968501 - RNA, 19 nt, Artificial Sequence
  Description of Artificial Sequence: Synthetic oligonucleotide
ggcuagucaaucaugucua

SEQ ID NO: 2968502 - RNA, 19 nt, Artificial Sequence
  Description of Artificial Sequence: Synthetic oligonucleotide
cugcaucuccagcagagcu

SEQ ID NO: 2968503 - RNA, 19 nt, Artificial Sequence
  Description of Artificial Sequence: Synthetic oligonucleotide
cugcaccugcucagcacac

SEQ ID NO: 2968504 - RNA, 19 nt, Artificial Sequence
  Description of Artificial Sequence: Synthetic oligonucleotide
aaggcucagcgcaggccug

SEQ ID NO: 2968505 - RNA, 19 nt, Artificial Sequence
  Description of Artificial Sequence: Synthetic oligonucleotide
gugggcuagucaaucaugu

SEQ ID NO: 2968506 - RNA, 19 nt, Artificial Sequence
  Description of Artificial Sequence: Synthetic oligonucleotide
cagcgagcaaugcucaucu

SEQ ID NO: 2968507 - RNA, 19 nt, Artificial Sequence
  Description of Artificial Sequence: Synthetic oligonucleotide
ggaggaugugcagcgagca

SEQ ID NO: 2968508 - RNA, 19 nt, Artificial Sequence
  Description of Artificial Sequence: Synthetic oligonucleotide
gcucaucuuaaggugguga

SEQ ID NO: 2968509 - RNA, 19 nt, Artificial Sequence
  Description of Artificial Sequence: Synthetic oligonucleotide
cgaaggcacuccucaaagg

SEQ ID NO: 2968510 - RNA, 19 nt, Artificial Sequence
  Description of Artificial Sequence: Synthetic oligonucleotide
ugcagcgagcaaugcucau

SEQ ID NO: 2968511 - RNA, 19 nt, Artificial Sequence
  Description of Artificial Sequence: Synthetic oligonucleotide
aggcacuccucaaaggcuu

SEQ ID NO: 2968512 - RNA, 19 nt, Artificial Sequence
  Description of Artificial Sequence: Synthetic oligonucleotide
aggcucagcgcaggccugg

SEQ ID NO: 2968513 - RNA, 19 nt, Artificial Sequence
  Description of Artificial Sequence: Synthetic oligonucleotide
ggcggcugcaccugcucag

SEQ ID NO: 2968514 - RNA, 19 nt, Artificial Sequence
  Description of Artificial Sequence: Synthetic oligonucleotide
agggcugccugcaucucca

SEQ ID NO: 2968515 - RNA, 19 nt, Artificial Sequence
  Description of Artificial Sequence: Synthetic oligonucleotide
ccagcagagcucaggcgcc

SEQ ID NO: 2968516 - RNA, 19 nt, Artificial Sequence
  Description of Artificial Sequence: Synthetic oligonucleotide
ugcaccugcucagcacacu

SEQ ID NO: 2968517 - RNA, 19 nt, Artificial Sequence
  Description of Artificial Sequence: Synthetic oligonucleotide
ccaacugcugccucauuca

SEQ ID NO: 2968518 - RNA, 19 nt, Artificial Sequence
  Description of Artificial Sequence: Synthetic oligonucleotide
gcaucuccagcagagcuca

SEQ ID NO: 2968519 - RNA, 19 nt, Artificial Sequence
  Description of Artificial Sequence: Synthetic oligonucleotide
gcgagcaaugcucaucuua

SEQ ID NO: 2968520 - RNA, 19 nt, Artificial Sequence
  Description of Artificial Sequence: Synthetic oligonucleotide
acggcgcauguguucggca

SEQ ID NO: 2968521 - RNA, 19 nt, Artificial Sequence
  Description of Artificial Sequence: Synthetic oligonucleotide
ggaugauggggugggagga

SEQ ID NO: 2968522 - RNA, 19 nt, Artificial Sequence
  Description of Artificial Sequence: Synthetic oligonucleotide
cugccucauucaagcgaag

SEQ ID NO: 2968523 - RNA, 19 nt, Artificial Sequence
  Description of Artificial Sequence: Synthetic oligonucleotide
uuccaacucccggcugcag

SEQ ID NO: 2968524 - RNA, 19 nt, Artificial Sequence
  Description of Artificial Sequence: Synthetic oligonucleotide
ccgaugccaggacucaggc

SEQ ID NO: 2968525 - RNA, 19 nt, Artificial Sequence
  Description of Artificial Sequence: Synthetic oligonucleotide
cugcaggaaacggcgcaug

SEQ ID NO: 2968526 - RNA, 19 nt, Artificial Sequence
  Description of Artificial Sequence: Synthetic oligonucleotide
cuagucaaucaugucuacu

SEQ ID NO: 2968527 - RNA, 19 nt, Artificial Sequence
  Description of Artificial Sequence: Synthetic oligonucleotide
aucccgaugccaggacuca

SEQ ID NO: 2968528 - RNA, 19 nt, Artificial Sequence
  Description of Artificial Sequence: Synthetic oligonucleotide
gcugccucauucaagcgaa

SEQ ID NO: 2968529 - RNA, 19 nt, Artificial Sequence
  Description of Artificial Sequence: Synthetic oligonucleotide
caacugcugccucauucaa

SEQ ID NO: 2968530 - RNA, 19 nt, Artificial Sequence
  Description of Artificial Sequence: Synthetic oligonucleotide
cagcagagcucaggcgccg

SEQ ID NO: 2968531 - RNA, 19 nt, Artificial Sequence
  Description of Artificial Sequence: Synthetic oligonucleotide
ggccgccacacauuggcca

SEQ ID NO: 2968532 - RNA, 19 nt, Artificial Sequence
  Description of Artificial Sequence: Synthetic oligonucleotide
ggcacaguugccaacugcu

SEQ ID NO: 2968533 - RNA, 19 nt, Artificial Sequence
  Description of Artificial Sequence: Synthetic oligonucleotide
cgagcaaugcucaucuuaa

SEQ ID NO: 2968534 - RNA, 19 nt, Artificial Sequence
  Description of Artificial Sequence: Synthetic oligonucleotide
gggaggaugugcagcgagc

SEQ ID NO: 2968535 - RNA, 19 nt, Artificial Sequence
  Description of Artificial Sequence: Synthetic oligonucleotide
gcaggaaacggcgcaugug

SEQ ID NO: 2968536 - RNA, 19 nt, Artificial Sequence
  Description of Artificial Sequence: Synthetic oligonucleotide
agcgcaggccuggcggauc

SEQ ID NO: 2968537 - RNA, 19 nt, Artificial Sequence
  Description of Artificial Sequence: Synthetic oligonucleotide
cuacuuucucgaaguccaa

SEQ ID NO: 2968538 - RNA, 19 nt, Artificial Sequence
  Description of Artificial Sequence: Synthetic oligonucleotide
agguggugacaaucccgau

SEQ ID NO: 2968539 - RNA, 19 nt, Artificial Sequence
  Description of Artificial Sequence: Synthetic oligonucleotide
ucuuccagaugaggacauu

SEQ ID NO: 2968540 - RNA, 19 nt, Artificial Sequence
  Description of Artificial Sequence: Synthetic oligonucleotide
gggugaacuuggcggcugc

SEQ ID NO: 2968541 - RNA, 19 nt, Artificial Sequence
  Description of Artificial Sequence: Synthetic oligonucleotide
gcaggccuggcggaucugg

SEQ ID NO: 2968542 - RNA, 19 nt, Artificial Sequence
  Description of Artificial Sequence: Synthetic oligonucleotide
augccaggacucaggcuug

SEQ ID NO: 2968543 - RNA, 19 nt, Artificial Sequence
  Description of Artificial Sequence: Synthetic oligonucleotide
cccggcugcaguaccgagc

SEQ ID NO: 2968544 - RNA, 19 nt, Artificial Sequence
  Description of Artificial Sequence: Synthetic oligonucleotide
ccugcucagcacacugcag

SEQ ID NO: 2968545 - RNA, 19 nt, Artificial Sequence
  Description of Artificial Sequence: Synthetic oligonucleotide
ggaggcaggaaguggcugu

SEQ ID NO: 2968546 - RNA, 19 nt, Artificial Sequence
  Description of Artificial Sequence: Synthetic oligonucleotide
caacucccggcugcaguac

SEQ ID NO: 2968547 - RNA, 19 nt, Artificial Sequence
  Description of Artificial Sequence: Synthetic oligonucleotide
ggggugggaggaugugcag

SEQ ID NO: 2968548 - RNA, 19 nt, Artificial Sequence
  Description of Artificial Sequence: Synthetic oligonucleotide
gaaguccaagagggucuuc

SEQ ID NO: 2968549 - RNA, 19 nt, Artificial Sequence
  Description of Artificial Sequence: Synthetic oligonucleotide
cagagcucaggcgccgauc

SEQ ID NO: 2968550 - RNA, 19 nt, Artificial Sequence
  Description of Artificial Sequence: Synthetic oligonucleotide
caucuccagcagagcucag

SEQ ID NO: 2968551 - RNA, 19 nt, Artificial Sequence
  Description of Artificial Sequence: Synthetic oligonucleotide
guuccaacucccggcugca

SEQ ID NO: 2968552 - RNA, 19 nt, Artificial Sequence
  Description of Artificial Sequence: Synthetic oligonucleotide
caaucccgaugccaggacu

SEQ ID NO: 2968553 - RNA, 19 nt, Artificial Sequence
  Description of Artificial Sequence: Synthetic oligonucleotide
gcacaguugccaacugcug

SEQ ID NO: 2968554 - RNA, 19 nt, Artificial Sequence
  Description of Artificial Sequence: Synthetic oligonucleotide
cuccaguugugggugaacu

SEQ ID NO: 2968555 - RNA, 19 nt, Artificial Sequence
  Description of Artificial Sequence: Synthetic oligonucleotide
ggcugccugcaucuccagc

SEQ ID NO: 2968556 - RNA, 19 nt, Artificial Sequence
  Description of Artificial Sequence: Synthetic oligonucleotide
aggaaacggcgcauguguu

SEQ ID NO: 2968557 - RNA, 19 nt, Artificial Sequence
  Description of Artificial Sequence: Synthetic oligonucleotide
gcggaucuggcggaugaug

SEQ ID NO: 2968558 - RNA, 19 nt, Artificial Sequence
  Description of Artificial Sequence: Synthetic oligonucleotide
ggcgcauguguucggcaca

SEQ ID NO: 2968559 - RNA, 19 nt, Artificial Sequence
  Description of Artificial Sequence: Synthetic oligonucleotide
uggcuguggcugugccucu

SEQ ID NO: 2968560 - RNA, 19 nt, Artificial Sequence
  Description of Artificial Sequence: Synthetic oligonucleotide
gcagcgagcaaugcucauc

SEQ ID NO: 2968561 - RNA, 19 nt, Artificial Sequence
  Description of Artificial Sequence: Synthetic oligonucleotide
gcgcauguguucggcacag

SEQ ID NO: 2968562 - RNA, 19 nt, Artificial Sequence
  Description of Artificial Sequence: Synthetic oligonucleotide
gcucagcgcaggccuggcg

SEQ ID NO: 2968563 - RNA, 19 nt, Artificial Sequence
  Description of Artificial Sequence: Synthetic oligonucleotide
ccggcugcaguaccgagca

SEQ ID NO: 2968564 - RNA, 19 nt, Artificial Sequence
  Description of Artificial Sequence: Synthetic oligonucleotide
gggucuucaggaggcagga

SEQ ID NO: 2968565 - RNA, 19 nt, Artificial Sequence
  Description of Artificial Sequence: Synthetic oligonucleotide
agcgagcaaugcucaucuu

SEQ ID NO: 2968566 - RNA, 19 nt, Artificial Sequence
  Description of Artificial Sequence: Synthetic oligonucleotide
cuguggcugugccucucca

SEQ ID NO: 2968567 - RNA, 19 nt, Artificial Sequence
  Description of Artificial Sequence: Synthetic oligonucleotide
ggcugcaguaccgagcagu

SEQ ID NO: 2968568 - RNA, 19 nt, Artificial Sequence
  Description of Artificial Sequence: Synthetic oligonucleotide
ccugcaucuccagcagagc

SEQ ID NO: 2968569 - RNA, 19 nt, Artificial Sequence
  Description of Artificial Sequence: Synthetic oligonucleotide
gaugauggggugggaggau

SEQ ID NO: 2968570 - RNA, 19 nt, Artificial Sequence
  Description of Artificial Sequence: Synthetic oligonucleotide
gacucaggcuuggccgcca

SEQ ID NO: 2968571 - RNA, 19 nt, Artificial Sequence
  Description of Artificial Sequence: Synthetic oligonucleotide
agcagagcucaggcgccga

SEQ ID NO: 2968572 - RNA, 19 nt, Artificial Sequence
  Description of Artificial Sequence: Synthetic oligonucleotide
ugccaacugcugccucauu

SEQ ID NO: 2968573 - RNA, 19 nt, Artificial Sequence
  Description of Artificial Sequence: Synthetic oligonucleotide
gcauguguucggcacaguu

SEQ ID NO: 2968574 - RNA, 19 nt, Artificial Sequence
  Description of Artificial Sequence: Synthetic oligonucleotide
caggcuuggccgccacaca

SEQ ID NO: 2968575 - RNA, 19 nt, Artificial Sequence
  Description of Artificial Sequence: Synthetic oligonucleotide
cuggcggaucuggcggaug

SEQ ID NO: 2968576 - RNA, 19 nt, Artificial Sequence
  Description of Artificial Sequence: Synthetic oligonucleotide
gcaggaaguggcuguggcu

SEQ ID NO: 2968577 - RNA, 19 nt, Artificial Sequence
  Description of Artificial Sequence: Synthetic oligonucleotide
caggaggcaggaaguggcu

SEQ ID NO: 2968578 - RNA, 19 nt, Artificial Sequence
  Description of Artificial Sequence: Synthetic oligonucleotide
cggcacaguugccaacugc

SEQ ID NO: 2968579 - RNA, 19 nt, Artificial Sequence
  Description of Artificial Sequence: Synthetic oligonucleotide
cacuccucaaaggcuucaa

SEQ ID NO: 2968580 - RNA, 19 nt, Artificial Sequence
  Description of Artificial Sequence: Synthetic oligonucleotide
cucaggcuuggccgccaca

SEQ ID NO: 2968581 - RNA, 19 nt, Artificial Sequence
  Description of Artificial Sequence: Synthetic oligonucleotide
gcaguaccgagcaguaacu

SEQ ID NO: 2968582 - RNA, 19 nt, Artificial Sequence
  Description of Artificial Sequence: Synthetic oligonucleotide
ccaacucccggcugcagua

SEQ ID NO: 2968583 - RNA, 19 nt, Artificial Sequence
  Description of Artificial Sequence: Synthetic oligonucleotide
gcugugccucuccaguugu

SEQ ID NO: 2968584 - RNA, 19 nt, Artificial Sequence
  Description of Artificial Sequence: Synthetic oligonucleotide
cuuggcggcugcaccugcu

SEQ ID NO: 2968585 - RNA, 19 nt, Artificial Sequence
  Description of Artificial Sequence: Synthetic oligonucleotide
gcugcaguaccgagcagua

SEQ ID NO: 2968586 - RNA, 19 nt, Artificial Sequence
  Description of Artificial Sequence: Synthetic oligonucleotide
gugggaggaugugcagcga

SEQ ID NO: 2968587 - RNA, 19 nt, Artificial Sequence
  Description of Artificial Sequence: Synthetic oligonucleotide
cggcgcauguguucggcac

SEQ ID NO: 2968588 - RNA, 19 nt, Artificial Sequence
  Description of Artificial Sequence: Synthetic oligonucleotide
ggugaacuuggcggcugca

SEQ ID NO: 2968589 - RNA, 19 nt, Artificial Sequence
  Description of Artificial Sequence: Synthetic oligonucleotide
ggcacuccucaaaggcuuc

SEQ ID NO: 2968590 - RNA, 19 nt, Artificial Sequence
  Description of Artificial Sequence: Synthetic oligonucleotide
cucccggcugcaguaccga

SEQ ID NO: 2968591 - RNA, 19 nt, Artificial Sequence
  Description of Artificial Sequence: Synthetic oligonucleotide
cugcaguaccgagcaguaa

SEQ ID NO: 2968592 - RNA, 19 nt, Artificial Sequence
  Description of Artificial Sequence: Synthetic oligonucleotide
gcggcugcaccugcucagc

SEQ ID NO: 2968593 - RNA, 19 nt, Artificial Sequence
  Description of Artificial Sequence: Synthetic oligonucleotide
gcacuccucaaaggcuuca

SEQ ID NO: 2968594 - RNA, 19 nt, Artificial Sequence
  Description of Artificial Sequence: Synthetic oligonucleotide
gugggugaacuuggcggcu

SEQ ID NO: 2968595 - RNA, 19 nt, Artificial Sequence
  Description of Artificial Sequence: Synthetic oligonucleotide
caguugccaacugcugccu

SEQ ID NO: 2968596 - RNA, 19 nt, Artificial Sequence
  Description of Artificial Sequence: Synthetic oligonucleotide
gccuggcggaucuggcgga

SEQ ID NO: 2968597 - RNA, 19 nt, Artificial Sequence
  Description of Artificial Sequence: Synthetic oligonucleotide
gccaggacucaggcuuggc

SEQ ID NO: 2968598 - RNA, 19 nt, Artificial Sequence
  Description of Artificial Sequence: Synthetic oligonucleotide
ggacauuaagugggcuagu

SEQ ID NO: 2968599 - RNA, 19 nt, Artificial Sequence
  Description of Artificial Sequence: Synthetic oligonucleotide
ggcucagcgcaggccuggc

SEQ ID NO: 2968600 - RNA, 19 nt, Artificial Sequence
  Description of Artificial Sequence: Synthetic oligonucleotide
caguaccgagcaguaacuu

SEQ ID NO: 2968601 - RNA, 19 nt, Artificial Sequence
  Description of Artificial Sequence: Synthetic oligonucleotide
cgccacacauuggccauac

SEQ ID NO: 2968602 - RNA, 19 nt, Artificial Sequence
  Description of Artificial Sequence: Synthetic oligonucleotide
gccgccacacauuggccau

SEQ ID NO: 2968603 - RNA, 19 nt, Artificial Sequence
  Description of Artificial Sequence: Synthetic oligonucleotide
ggucuucaggaggcaggaa

SEQ ID NO: 2968604 - RNA, 19 nt, Artificial Sequence
  Description of Artificial Sequence: Synthetic oligonucleotide
ccucuccaguuguggguga

SEQ ID NO: 2968605 - RNA, 19 nt, Artificial Sequence
  Description of Artificial Sequence: Synthetic oligonucleotide
cuuccagggcugccugcau

SEQ ID NO: 2968606 - RNA, 19 nt, Artificial Sequence
  Description of Artificial Sequence: Synthetic oligonucleotide
gcgcaggccuggcggaucu

SEQ ID NO: 2968607 - RNA, 19 nt, Artificial Sequence
  Description of Artificial Sequence: Synthetic oligonucleotide
gcagagcucaggcgccgau

SEQ ID NO: 2968608 - RNA, 19 nt, Artificial Sequence
  Description of Artificial Sequence: Synthetic oligonucleotide
ccagggcugccugcaucuc

SEQ ID NO: 2968609 - RNA, 19 nt, Artificial Sequence
  Description of Artificial Sequence: Synthetic oligonucleotide
gccacacauuggccauacu

SEQ ID NO: 2968610 - RNA, 19 nt, Artificial Sequence
  Description of Artificial Sequence: Synthetic oligonucleotide
ggcuuggccgccacacauu

SEQ ID NO: 2968611 - RNA, 19 nt, Artificial Sequence
  Description of Artificial Sequence: Synthetic oligonucleotide
cgaugccaggacucaggcu

SEQ ID NO: 2968612 - RNA, 19 nt, Artificial Sequence
  Description of Artificial Sequence: Synthetic oligonucleotide
cggcugcaccugcucagca

SEQ ID NO: 2968613 - RNA, 19 nt, Artificial Sequence
  Description of Artificial Sequence: Synthetic oligonucleotide
cggcugcaguaccgagcag

SEQ ID NO: 2968614 - RNA, 19 nt, Artificial Sequence
  Description of Artificial Sequence: Synthetic oligonucleotide
ggcggaucuggcggaugau

SEQ ID NO: 2968615 - RNA, 19 nt, Artificial Sequence
  Description of Artificial Sequence: Synthetic oligonucleotide
cagcgcaggccuggcggau

SEQ ID NO: 2968616 - RNA, 19 nt, Artificial Sequence
  Description of Artificial Sequence: Synthetic oligonucleotide
cgaaguccaagagggucuu

SEQ ID NO: 2968617 - RNA, 19 nt, Artificial Sequence
  Description of Artificial Sequence: Synthetic oligonucleotide
ccgccacacauuggccaua

SEQ ID NO: 2968618 - RNA, 19 nt, Artificial Sequence
  Description of Artificial Sequence: Synthetic oligonucleotide
ccuggcggaucuggcggau

SEQ ID NO: 2968619 - RNA, 19 nt, Artificial Sequence
  Description of Artificial Sequence: Synthetic oligonucleotide
cgcauguguucggcacagu

SEQ ID NO: 2968620 - RNA, 19 nt, Artificial Sequence
  Description of Artificial Sequence: Synthetic oligonucleotide
aauaacaggaacccaaguc

SEQ ID NO: 2968621 - RNA, 19 nt, Artificial Sequence
  Description of Artificial Sequence: Synthetic oligonucleotide
auaacaggaacccaagucc

SEQ ID NO: 2968622 - RNA, 19 nt, Artificial Sequence
  Description of Artificial Sequence: Synthetic oligonucleotide
ugaagaaggaauaacagga

SEQ ID NO: 2968623 - RNA, 19 nt, Artificial Sequence
  Description of Artificial Sequence: Synthetic oligonucleotide
accacaaagagccauaugg

SEQ ID NO: 2968624 - RNA, 19 nt, Artificial Sequence
  Description of Artificial Sequence: Synthetic oligonucleotide
aauuaugugaggcagggca

SEQ ID NO: 2968625 - RNA, 19 nt, Artificial Sequence
  Description of Artificial Sequence: Synthetic oligonucleotide
aagaaggaauaacaggaac

SEQ ID NO: 2968626 - RNA, 19 nt, Artificial Sequence
  Description of Artificial Sequence: Synthetic oligonucleotide
ugcuccuucgcacaaaggg

SEQ ID NO: 2968627 - RNA, 19 nt, Artificial Sequence
  Description of Artificial Sequence: Synthetic oligonucleotide
agaaggaauaacaggaacc

SEQ ID NO: 2968628 - RNA, 19 nt, Artificial Sequence
  Description of Artificial Sequence: Synthetic oligonucleotide
uguaauuaugugaggcagg

SEQ ID NO: 2968629 - RNA, 19 nt, Artificial Sequence
  Description of Artificial Sequence: Synthetic oligonucleotide
cugaagaaggaauaacagg

SEQ ID NO: 2968630 - RNA, 19 nt, Artificial Sequence
  Description of Artificial Sequence: Synthetic oligonucleotide
ugauccagcuguauguagg

SEQ ID NO: 2968631 - RNA, 19 nt, Artificial Sequence
  Description of Artificial Sequence: Synthetic oligonucleotide
uuuugauccagcuguaugu

SEQ ID NO: 2968632 - RNA, 19 nt, Artificial Sequence
  Description of Artificial Sequence: Synthetic oligonucleotide
uauguaggcaggcaccagg

SEQ ID NO: 2968633 - RNA, 19 nt, Artificial Sequence
  Description of Artificial Sequence: Synthetic oligonucleotide
gaaggaauaacaggaaccc

SEQ ID NO: 2968634 - RNA, 19 nt, Artificial Sequence
  Description of Artificial Sequence: Synthetic oligonucleotide
uuagaugcacagcaguagc

SEQ ID NO: 2968635 - RNA, 19 nt, Artificial Sequence
  Description of Artificial Sequence: Synthetic oligonucleotide
ugugaggcagggcagaaug

SEQ ID NO: 2968636 - RNA, 19 nt, Artificial Sequence
  Description of Artificial Sequence: Synthetic oligonucleotide
ucugcucugacacauggcu

SEQ ID NO: 2968637 - RNA, 19 nt, Artificial Sequence
  Description of Artificial Sequence: Synthetic oligonucleotide
agauguuguaagcugcggg

SEQ ID NO: 2968638 - RNA, 19 nt, Artificial Sequence
  Description of Artificial Sequence: Synthetic oligonucleotide
ugacacauggcucaccaca

SEQ ID NO: 2968639 - RNA, 19 nt, Artificial Sequence
  Description of Artificial Sequence: Synthetic oligonucleotide
gagguagucagccaugcgc

SEQ ID NO: 2968640 - RNA, 19 nt, Artificial Sequence
  Description of Artificial Sequence: Synthetic oligonucleotide
caaagagccauaugggacc

SEQ ID NO: 2968641 - RNA, 19 nt, Artificial Sequence
  Description of Artificial Sequence: Synthetic oligonucleotide
uuuagaugcacagcaguag

SEQ ID NO: 2968642 - RNA, 19 nt, Artificial Sequence
  Description of Artificial Sequence: Synthetic oligonucleotide
uccagcuucguccugaguc

SEQ ID NO: 2968643 - RNA, 19 nt, Artificial Sequence
  Description of Artificial Sequence: Synthetic oligonucleotide
acaaagagccauaugggac

SEQ ID NO: 2968644 - RNA, 19 nt, Artificial Sequence
  Description of Artificial Sequence: Synthetic oligonucleotide
guaauuaugugaggcaggg

SEQ ID NO: 2968645 - RNA, 19 nt, Artificial Sequence
  Description of Artificial Sequence: Synthetic oligonucleotide
uccacaucggcuaccaggc

SEQ ID NO: 2968646 - RNA, 19 nt, Artificial Sequence
  Description of Artificial Sequence: Synthetic oligonucleotide
uccagcuguauguaggcag

SEQ ID NO: 2968647 - RNA, 19 nt, Artificial Sequence
  Description of Artificial Sequence: Synthetic oligonucleotide
ucugacacauggcucacca

SEQ ID NO: 2968648 - RNA, 19 nt, Artificial Sequence
  Description of Artificial Sequence: Synthetic oligonucleotide
aguuggaagggguacuguc

SEQ ID NO: 2968649 - RNA, 19 nt, Artificial Sequence
  Description of Artificial Sequence: Synthetic oligonucleotide
accaggaugacugaagaag

SEQ ID NO: 2968650 - RNA, 19 nt, Artificial Sequence
  Description of Artificial Sequence: Synthetic oligonucleotide
uaggcaggcaccaggauga

SEQ ID NO: 2968651 - RNA, 19 nt, Artificial Sequence
  Description of Artificial Sequence: Synthetic oligonucleotide
uaacaggaacccaagucca

SEQ ID NO: 2968652 - RNA, 19 nt, Artificial Sequence
  Description of Artificial Sequence: Synthetic oligonucleotide
acugaagaaggaauaacag

SEQ ID NO: 2968653 - RNA, 19 nt, Artificial Sequence
  Description of Artificial Sequence: Synthetic oligonucleotide
guccacaucggcuaccagg

SEQ ID NO: 2968654 - RNA, 19 nt, Artificial Sequence
  Description of Artificial Sequence: Synthetic oligonucleotide
cauggcucaccacaaagag

SEQ ID NO: 2968655 - RNA, 19 nt, Artificial Sequence
  Description of Artificial Sequence: Synthetic oligonucleotide
cacagauguuguaagcugc

SEQ ID NO: 2968656 - RNA, 19 nt, Artificial Sequence
  Description of Artificial Sequence: Synthetic oligonucleotide
gacugaagaaggaauaaca

SEQ ID NO: 2968657 - RNA, 19 nt, Artificial Sequence
  Description of Artificial Sequence: Synthetic oligonucleotide
ugcucugacacauggcuca

SEQ ID NO: 2968658 - RNA, 19 nt, Artificial Sequence
  Description of Artificial Sequence: Synthetic oligonucleotide
aagcugcgggcacugcucc

SEQ ID NO: 2968659 - RNA, 19 nt, Artificial Sequence
  Description of Artificial Sequence: Synthetic oligonucleotide
ugugacaaccccucgucca

SEQ ID NO: 2968660 - RNA, 19 nt, Artificial Sequence
  Description of Artificial Sequence: Synthetic oligonucleotide
guguaauuaugugaggcag

SEQ ID NO: 2968661 - RNA, 19 nt, Artificial Sequence
  Description of Artificial Sequence: Synthetic oligonucleotide
uagaugcacagcaguagcc

SEQ ID NO: 2968662 - RNA, 19 nt, Artificial Sequence
  Description of Artificial Sequence: Synthetic oligonucleotide
agguagucagccaugcgcc

SEQ ID NO: 2968663 - RNA, 19 nt, Artificial Sequence
  Description of Artificial Sequence: Synthetic oligonucleotide
aguagccauggggagaggc

SEQ ID NO: 2968664 - RNA, 19 nt, Artificial Sequence
  Description of Artificial Sequence: Synthetic oligonucleotide
ugggaguugugugacaacc

SEQ ID NO: 2968665 - RNA, 19 nt, Artificial Sequence
  Description of Artificial Sequence: Synthetic oligonucleotide
ugugugacaaccccucguc

SEQ ID NO: 2968666 - RNA, 19 nt, Artificial Sequence
  Description of Artificial Sequence: Synthetic oligonucleotide
gauccagcuguauguaggc

SEQ ID NO: 2968667 - RNA, 19 nt, Artificial Sequence
  Description of Artificial Sequence: Synthetic oligonucleotide
gaagggguacugucggagg

SEQ ID NO: 2968668 - RNA, 19 nt, Artificial Sequence
  Description of Artificial Sequence: Synthetic oligonucleotide
cuguauguaggcaggcacc

SEQ ID NO: 2968669 - RNA, 19 nt, Artificial Sequence
  Description of Artificial Sequence: Synthetic oligonucleotide
uugaccugggaguugugug

SEQ ID NO: 2968670 - RNA, 19 nt, Artificial Sequence
  Description of Artificial Sequence: Synthetic oligonucleotide
gcugcaccgguuuagaugc

SEQ ID NO: 2968671 - RNA, 19 nt, Artificial Sequence
  Description of Artificial Sequence: Synthetic oligonucleotide
uacugucggagguagucag

SEQ ID NO: 2968672 - RNA, 19 nt, Artificial Sequence
  Description of Artificial Sequence: Synthetic oligonucleotide
guuggaagggguacugucg

SEQ ID NO: 2968673 - RNA, 19 nt, Artificial Sequence
  Description of Artificial Sequence: Synthetic oligonucleotide
acaggaacccaaguccagc

SEQ ID NO: 2968674 - RNA, 19 nt, Artificial Sequence
  Description of Artificial Sequence: Synthetic oligonucleotide
uaggcaguccacaucggcu

SEQ ID NO: 2968675 - RNA, 19 nt, Artificial Sequence
  Description of Artificial Sequence: Synthetic oligonucleotide
uugauccagcuguauguag

SEQ ID NO: 2968676 - RNA, 19 nt, Artificial Sequence
  Description of Artificial Sequence: Synthetic oligonucleotide
agccauaugggaccuggag

SEQ ID NO: 2968677 - RNA, 19 nt, Artificial Sequence
  Description of Artificial Sequence: Synthetic oligonucleotide
ggaggcauugaccugggag

SEQ ID NO: 2968678 - RNA, 19 nt, Artificial Sequence
  Description of Artificial Sequence: Synthetic oligonucleotide
cacaucggcuaccaggcgg

SEQ ID NO: 2968679 - RNA, 19 nt, Artificial Sequence
  Description of Artificial Sequence: Synthetic oligonucleotide
aagggguacugucggaggu

SEQ ID NO: 2968680 - RNA, 19 nt, Artificial Sequence
  Description of Artificial Sequence: Synthetic oligonucleotide
guaggcaggcaccaggaug

SEQ ID NO: 2968681 - RNA, 19 nt, Artificial Sequence
  Description of Artificial Sequence: Synthetic oligonucleotide
aguugugugacaaccccuc

SEQ ID NO: 2968682 - RNA, 19 nt, Artificial Sequence
  Description of Artificial Sequence: Synthetic oligonucleotide
uguauguaggcaggcacca

SEQ ID NO: 2968683 - RNA, 19 nt, Artificial Sequence
  Description of Artificial Sequence: Synthetic oligonucleotide
acugcuccuucgcacaaag

SEQ ID NO: 2968684 - RNA, 19 nt, Artificial Sequence
  Description of Artificial Sequence: Synthetic oligonucleotide
uccaggguguaauuaugug

SEQ ID NO: 2968685 - RNA, 19 nt, Artificial Sequence
  Description of Artificial Sequence: Synthetic oligonucleotide
agagccauaugggaccugg

SEQ ID NO: 2968686 - RNA, 19 nt, Artificial Sequence
  Description of Artificial Sequence: Synthetic oligonucleotide
augacuaggcggcacagau

SEQ ID NO: 2968687 - RNA, 19 nt, Artificial Sequence
  Description of Artificial Sequence: Synthetic oligonucleotide
gacuaggcggcacagaugu

SEQ ID NO: 2968688 - RNA, 19 nt, Artificial Sequence
  Description of Artificial Sequence: Synthetic oligonucleotide
uguuguaagcugcgggcac

SEQ ID NO: 2968689 - RNA, 19 nt, Artificial Sequence
  Description of Artificial Sequence: Synthetic oligonucleotide
cacauggcucaccacaaag

SEQ ID NO: 2968690 - RNA, 19 nt, Artificial Sequence
  Description of Artificial Sequence: Synthetic oligonucleotide
ccauaugggaccuggaggc

SEQ ID NO: 2968691 - RNA, 19 nt, Artificial Sequence
  Description of Artificial Sequence: Synthetic oligonucleotide
ucggcuaccaggcgguuga

SEQ ID NO: 2968692 - RNA, 19 nt, Artificial Sequence
  Description of Artificial Sequence: Synthetic oligonucleotide
ucgcacaaagggcugcacc

SEQ ID NO: 2968693 - RNA, 19 nt, Artificial Sequence
  Description of Artificial Sequence: Synthetic oligonucleotide
ugacugaagaaggaauaac

SEQ ID NO: 2968694 - RNA, 19 nt, Artificial Sequence
  Description of Artificial Sequence: Synthetic oligonucleotide
uccaccugcuuuguucucg

SEQ ID NO: 2968695 - RNA, 19 nt, Artificial Sequence
  Description of Artificial Sequence: Synthetic oligonucleotide
ugaccugggaguuguguga

SEQ ID NO: 2968696 - RNA, 19 nt, Artificial Sequence
  Description of Artificial Sequence: Synthetic oligonucleotide
uugugugacaaccccucgu

SEQ ID NO: 2968697 - RNA, 19 nt, Artificial Sequence
  Description of Artificial Sequence: Synthetic oligonucleotide
gaaugcccgucccagucag

SEQ ID NO: 2968698 - RNA, 19 nt, Artificial Sequence
  Description of Artificial Sequence: Synthetic oligonucleotide
agggcagaaugcccguccc

SEQ ID NO: 2968699 - RNA, 19 nt, Artificial Sequence
  Description of Artificial Sequence: Synthetic oligonucleotide
gcgguugaugacuaggcgg

SEQ ID NO: 2968700 - RNA, 19 nt, Artificial Sequence
  Description of Artificial Sequence: Synthetic oligonucleotide
uagucagccaugcgccggg

SEQ ID NO: 2968701 - RNA, 19 nt, Artificial Sequence
  Description of Artificial Sequence: Synthetic oligonucleotide
ugaggcagggcagaaugcc

SEQ ID NO: 2968702 - RNA, 19 nt, Artificial Sequence
  Description of Artificial Sequence: Synthetic oligonucleotide
gccauaugggaccuggagg

SEQ ID NO: 2968703 - RNA, 19 nt, Artificial Sequence
  Description of Artificial Sequence: Synthetic oligonucleotide
accgguuuagaugcacagc

SEQ ID NO: 2968704 - RNA, 19 nt, Artificial Sequence
  Description of Artificial Sequence: Synthetic oligonucleotide
cacaaagagccauauggga

SEQ ID NO: 2968705 - RNA, 19 nt, Artificial Sequence
  Description of Artificial Sequence: Synthetic oligonucleotide
aggaauaacaggaacccaa

SEQ ID NO: 2968706 - RNA, 19 nt, Artificial Sequence
  Description of Artificial Sequence: Synthetic oligonucleotide
ccaggaugacugaagaagg

SEQ ID NO: 2968707 - RNA, 19 nt, Artificial Sequence
  Description of Artificial Sequence: Synthetic oligonucleotide
ucagaguuggaagggguac

SEQ ID NO: 2968708 - RNA, 19 nt, Artificial Sequence
  Description of Artificial Sequence: Synthetic oligonucleotide
auggcucaccacaaagagc

SEQ ID NO: 2968709 - RNA, 19 nt, Artificial Sequence
  Description of Artificial Sequence: Synthetic oligonucleotide
auuaugugaggcagggcag

SEQ ID NO: 2968710 - RNA, 19 nt, Artificial Sequence
  Description of Artificial Sequence: Synthetic oligonucleotide
acagauguuguaagcugcg

SEQ ID NO: 2968711 - RNA, 19 nt, Artificial Sequence
  Description of Artificial Sequence: Synthetic oligonucleotide
uucguccugaguccccucc

SEQ ID NO: 2968712 - RNA, 19 nt, Artificial Sequence
  Description of Artificial Sequence: Synthetic oligonucleotide
aggguguaauuaugugagg

SEQ ID NO: 2968713 - RNA, 19 nt, Artificial Sequence
  Description of Artificial Sequence: Synthetic oligonucleotide
aaggaauaacaggaaccca

SEQ ID NO: 2968714 - RNA, 19 nt, Artificial Sequence
  Description of Artificial Sequence: Synthetic oligonucleotide
gaacccaaguccagcuucg

SEQ ID NO: 2968715 - RNA, 19 nt, Artificial Sequence
  Description of Artificial Sequence: Synthetic oligonucleotide
guugugugacaaccccucg

SEQ ID NO: 2968716 - RNA, 19 nt, Artificial Sequence
  Description of Artificial Sequence: Synthetic oligonucleotide
cccaaguccagcuucgucc

SEQ ID NO: 2968717 - RNA, 19 nt, Artificial Sequence
  Description of Artificial Sequence: Synthetic oligonucleotide
ccugcuuuguucucgcugg

SEQ ID NO: 2968718 - RNA, 19 nt, Artificial Sequence
  Description of Artificial Sequence: Synthetic oligonucleotide
accugcuuuguucucgcug

SEQ ID NO: 2968719 - RNA, 19 nt, Artificial Sequence
  Description of Artificial Sequence: Synthetic oligonucleotide
ggaguugugugacaacccc

SEQ ID NO: 2968720 - RNA, 19 nt, Artificial Sequence
  Description of Artificial Sequence: Synthetic oligonucleotide
ucguccaccugcuuuguuc

SEQ ID NO: 2968721 - RNA, 19 nt, Artificial Sequence
  Description of Artificial Sequence: Synthetic oligonucleotide
aggcgguugaugacuaggc

SEQ ID NO: 2968722 - RNA, 19 nt, Artificial Sequence
  Description of Artificial Sequence: Synthetic oligonucleotide
gaggcauugaccugggagu

SEQ ID NO: 2968723 - RNA, 19 nt, Artificial Sequence
  Description of Artificial Sequence: Synthetic oligonucleotide
ccacaaagagccauauggg

SEQ ID NO: 2968724 - RNA, 19 nt, Artificial Sequence
  Description of Artificial Sequence: Synthetic oligonucleotide
cuaggcggcacagauguug

SEQ ID NO: 2968725 - RNA, 19 nt, Artificial Sequence
  Description of Artificial Sequence: Synthetic oligonucleotide
aaagagccauaugggaccu

SEQ ID NO: 2968726 - RNA, 19 nt, Artificial Sequence
  Description of Artificial Sequence: Synthetic oligonucleotide
guaggcaguccacaucggc

SEQ ID NO: 2968727 - RNA, 19 nt, Artificial Sequence
  Description of Artificial Sequence: Synthetic oligonucleotide
gguguaauuaugugaggca

SEQ ID NO: 2968728 - RNA, 19 nt, Artificial Sequence
  Description of Artificial Sequence: Synthetic oligonucleotide
ggguguaauuaugugaggc

SEQ ID NO: 2968729 - RNA, 19 nt, Artificial Sequence
  Description of Artificial Sequence: Synthetic oligonucleotide
ugacuaggcggcacagaug

SEQ ID NO: 2968730 - RNA, 19 nt, Artificial Sequence
  Description of Artificial Sequence: Synthetic oligonucleotide
aacaggaacccaaguccag

SEQ ID NO: 2968731 - RNA, 19 nt, Artificial Sequence
  Description of Artificial Sequence: Synthetic oligonucleotide
caccgguuuagaugcacag

SEQ ID NO: 2968732 - RNA, 19 nt, Artificial Sequence
  Description of Artificial Sequence: Synthetic oligonucleotide
uuaugugaggcagggcaga

SEQ ID NO: 2968733 - RNA, 19 nt, Artificial Sequence
  Description of Artificial Sequence: Synthetic oligonucleotide
guagccauggggagaggcg

SEQ ID NO: 2968734 - RNA, 19 nt, Artificial Sequence
  Description of Artificial Sequence: Synthetic oligonucleotide
agaugcacagcaguagcca

SEQ ID NO: 2968735 - RNA, 19 nt, Artificial Sequence
  Description of Artificial Sequence: Synthetic oligonucleotide
cugucggagguagucagcc

SEQ ID NO: 2968736 - RNA, 19 nt, Artificial Sequence
  Description of Artificial Sequence: Synthetic oligonucleotide
aagggcugcaccgguuuag

SEQ ID NO: 2968737 - RNA, 19 nt, Artificial Sequence
  Description of Artificial Sequence: Synthetic oligonucleotide
uuugauccagcuguaugua

SEQ ID NO: 2968738 - RNA, 19 nt, Artificial Sequence
  Description of Artificial Sequence: Synthetic oligonucleotide
ggaauaacaggaacccaag

SEQ ID NO: 2968739 - RNA, 19 nt, Artificial Sequence
  Description of Artificial Sequence: Synthetic oligonucleotide
uaauuaugugaggcagggc

SEQ ID NO: 2968740 - RNA, 19 nt, Artificial Sequence
  Description of Artificial Sequence: Synthetic oligonucleotide
uaggcggcacagauguugu

SEQ ID NO: 2968741 - RNA, 19 nt, Artificial Sequence
  Description of Artificial Sequence: Synthetic oligonucleotide
ucggagguagucagccaug

SEQ ID NO: 2968742 - RNA, 19 nt, Artificial Sequence
  Description of Artificial Sequence: Synthetic oligonucleotide
gaggcgagggcugagucac

SEQ ID NO: 2968743 - RNA, 19 nt, Artificial Sequence
  Description of Artificial Sequence: Synthetic oligonucleotide
aaguccagcuucguccuga

SEQ ID NO: 2968744 - RNA, 19 nt, Artificial Sequence
  Description of Artificial Sequence: Synthetic oligonucleotide
cccagucagaguuggaagg

SEQ ID NO: 2968745 - RNA, 19 nt, Artificial Sequence
  Description of Artificial Sequence: Synthetic oligonucleotide
acccaaguccagcuucguc

SEQ ID NO: 2968746 - RNA, 19 nt, Artificial Sequence
  Description of Artificial Sequence: Synthetic oligonucleotide
cugaguccccuccagggug

SEQ ID NO: 2968747 - RNA, 19 nt, Artificial Sequence
  Description of Artificial Sequence: Synthetic oligonucleotide
gcuguauguaggcaggcac

SEQ ID NO: 2968748 - RNA, 19 nt, Artificial Sequence
  Description of Artificial Sequence: Synthetic oligonucleotide
gcuaccaggcgguugauga

SEQ ID NO: 2968749 - RNA, 19 nt, Artificial Sequence
  Description of Artificial Sequence: Synthetic oligonucleotide
augacugaagaaggaauaa

SEQ ID NO: 2968750 - RNA, 19 nt, Artificial Sequence
  Description of Artificial Sequence: Synthetic oligonucleotide
cagaaugcccgucccaguc

SEQ ID NO: 2968751 - RNA, 19 nt, Artificial Sequence
  Description of Artificial Sequence: Synthetic oligonucleotide
agaguuggaagggguacug

SEQ ID NO: 2968752 - RNA, 19 nt, Artificial Sequence
  Description of Artificial Sequence: Synthetic oligonucleotide
uccuucgcacaaagggcug

SEQ ID NO: 2968753 - RNA, 19 nt, Artificial Sequence
  Description of Artificial Sequence: Synthetic oligonucleotide
guagucagccaugcgccgg

SEQ ID NO: 2968754 - RNA, 19 nt, Artificial Sequence
  Description of Artificial Sequence: Synthetic oligonucleotide
gcacagauguuguaagcug

SEQ ID NO: 2968755 - RNA, 19 nt, Artificial Sequence
  Description of Artificial Sequence: Synthetic oligonucleotide
gaauaacaggaacccaagu

SEQ ID NO: 2968756 - RNA, 19 nt, Artificial Sequence
  Description of Artificial Sequence: Synthetic oligonucleotide
auugaccugggaguugugu

SEQ ID NO: 2968757 - RNA, 19 nt, Artificial Sequence
  Description of Artificial Sequence: Synthetic oligonucleotide
uuuguucucgcuggcacuu

SEQ ID NO: 2968758 - RNA, 19 nt, Artificial Sequence
  Description of Artificial Sequence: Synthetic oligonucleotide
caggcgguugaugacuagg

SEQ ID NO: 2968759 - RNA, 19 nt, Artificial Sequence
  Description of Artificial Sequence: Synthetic oligonucleotide
cagauguuguaagcugcgg

SEQ ID NO: 2968760 - RNA, 19 nt, Artificial Sequence
  Description of Artificial Sequence: Synthetic oligonucleotide
uagccauggggagaggcga

SEQ ID NO: 2968761 - RNA, 19 nt, Artificial Sequence
  Description of Artificial Sequence: Synthetic oligonucleotide
aggcagggcagaaugcccg

SEQ ID NO: 2968762 - RNA, 19 nt, Artificial Sequence
  Description of Artificial Sequence: Synthetic oligonucleotide
ggcugcaccgguuuagaug

SEQ ID NO: 2968763 - RNA, 19 nt, Artificial Sequence
  Description of Artificial Sequence: Synthetic oligonucleotide
ugaguccccuccagggugu

SEQ ID NO: 2968764 - RNA, 19 nt, Artificial Sequence
  Description of Artificial Sequence: Synthetic oligonucleotide
acugucggagguagucagc

SEQ ID NO: 2968765 - RNA, 19 nt, Artificial Sequence
  Description of Artificial Sequence: Synthetic oligonucleotide
cagggcagaaugcccgucc

SEQ ID NO: 2968766 - RNA, 19 nt, Artificial Sequence
  Description of Artificial Sequence: Synthetic oligonucleotide
ggcgguugaugacuaggcg

SEQ ID NO: 2968767 - RNA, 19 nt, Artificial Sequence
  Description of Artificial Sequence: Synthetic oligonucleotide
auguuguaagcugcgggca

SEQ ID NO: 2968768 - RNA, 19 nt, Artificial Sequence
  Description of Artificial Sequence: Synthetic oligonucleotide
cucugcucugacacauggc

SEQ ID NO: 2968769 - RNA, 19 nt, Artificial Sequence
  Description of Artificial Sequence: Synthetic oligonucleotide
cagucagaguuggaagggg

SEQ ID NO: 2968770 - RNA, 19 nt, Artificial Sequence
  Description of Artificial Sequence: Synthetic oligonucleotide
gugugacaaccccucgucc

SEQ ID NO: 2968771 - RNA, 19 nt, Artificial Sequence
  Description of Artificial Sequence: Synthetic oligonucleotide
uggggagaggcgagggcug

SEQ ID NO: 2968772 - RNA, 19 nt, Artificial Sequence
  Description of Artificial Sequence: Synthetic oligonucleotide
guuuagaugcacagcagua

SEQ ID NO: 2968773 - RNA, 19 nt, Artificial Sequence
  Description of Artificial Sequence: Synthetic oligonucleotide
ggaacccaaguccagcuuc

SEQ ID NO: 2968774 - RNA, 19 nt, Artificial Sequence
  Description of Artificial Sequence: Synthetic oligonucleotide
gcuuuguucucgcuggcac

SEQ ID NO: 2968775 - RNA, 19 nt, Artificial Sequence
  Description of Artificial Sequence: Synthetic oligonucleotide
ccagcuguauguaggcagg

SEQ ID NO: 2968776 - RNA, 19 nt, Artificial Sequence
  Description of Artificial Sequence: Synthetic oligonucleotide
augcccgucccagucagag

SEQ ID NO: 2968777 - RNA, 19 nt, Artificial Sequence
  Description of Artificial Sequence: Synthetic oligonucleotide
guccugaguccccuccagg

SEQ ID NO: 2968778 - RNA, 19 nt, Artificial Sequence
  Description of Artificial Sequence: Synthetic oligonucleotide
gugacaaccccucguccac

SEQ ID NO: 2968779 - RNA, 19 nt, Artificial Sequence
  Description of Artificial Sequence: Synthetic oligonucleotide
gguagucagccaugcgccg

SEQ ID NO: 2968780 - RNA, 19 nt, Artificial Sequence
  Description of Artificial Sequence: Synthetic oligonucleotide
uuguaagcugcgggcacug

SEQ ID NO: 2968781 - RNA, 19 nt, Artificial Sequence
  Description of Artificial Sequence: Synthetic oligonucleotide
uguaggcaggcaccaggau

SEQ ID NO: 2968782 - RNA, 19 nt, Artificial Sequence
  Description of Artificial Sequence: Synthetic oligonucleotide
cgcacaaagggcugcaccg

SEQ ID NO: 2968783 - RNA, 19 nt, Artificial Sequence
  Description of Artificial Sequence: Synthetic oligonucleotide
cagcaguagccauggggag

SEQ ID NO: 2968784 - RNA, 19 nt, Artificial Sequence
  Description of Artificial Sequence: Synthetic oligonucleotide
aaagggcugcaccgguuua

SEQ ID NO: 2968785 - RNA, 19 nt, Artificial Sequence
  Description of Artificial Sequence: Synthetic oligonucleotide
aggcaguccacaucggcua

SEQ ID NO: 2968786 - RNA, 19 nt, Artificial Sequence
  Description of Artificial Sequence: Synthetic oligonucleotide
cgguaggcaguccacaucg

SEQ ID NO: 2968787 - RNA, 19 nt, Artificial Sequence
  Description of Artificial Sequence: Synthetic oligonucleotide
gagaggcgagggcugaguc

SEQ ID NO: 2968788 - RNA, 19 nt, Artificial Sequence
  Description of Artificial Sequence: Synthetic oligonucleotide
cugcucugacacauggcuc

SEQ ID NO: 2968789 - RNA, 19 nt, Artificial Sequence
  Description of Artificial Sequence: Synthetic oligonucleotide
caggaugacugaagaagga

SEQ ID NO: 2968790 - RNA, 19 nt, Artificial Sequence
  Description of Artificial Sequence: Synthetic oligonucleotide
cuaccaggcgguugaugac

SEQ ID NO: 2968791 - RNA, 19 nt, Artificial Sequence
  Description of Artificial Sequence: Synthetic oligonucleotide
agucagaguuggaaggggu

SEQ ID NO: 2968792 - RNA, 19 nt, Artificial Sequence
  Description of Artificial Sequence: Synthetic oligonucleotide
ucaccacaaagagccauau

SEQ ID NO: 2968793 - RNA, 19 nt, Artificial Sequence
  Description of Artificial Sequence: Synthetic oligonucleotide
ugucggagguagucagcca

SEQ ID NO: 2968794 - RNA, 19 nt, Artificial Sequence
  Description of Artificial Sequence: Synthetic oligonucleotide
ucguccugaguccccucca

SEQ ID NO: 2968795 - RNA, 19 nt, Artificial Sequence
  Description of Artificial Sequence: Synthetic oligonucleotide
ugcuuuguucucgcuggca

SEQ ID NO: 2968796 - RNA, 19 nt, Artificial Sequence
  Description of Artificial Sequence: Synthetic oligonucleotide
uguucucgcuggcacuuuu

SEQ ID NO: 2968797 - RNA, 19 nt, Artificial Sequence
  Description of Artificial Sequence: Synthetic oligonucleotide
gguuuagaugcacagcagu

SEQ ID NO: 2968798 - RNA, 19 nt, Artificial Sequence
  Description of Artificial Sequence: Synthetic oligonucleotide
uaugggaccuggaggcauu

SEQ ID NO: 2968799 - RNA, 19 nt, Artificial Sequence
  Description of Artificial Sequence: Synthetic oligonucleotide
ccagcuucguccugagucc

SEQ ID NO: 2968800 - RNA, 19 nt, Artificial Sequence
  Description of Artificial Sequence: Synthetic oligonucleotide
gcaguagccauggggagag

SEQ ID NO: 2968801 - RNA, 19 nt, Artificial Sequence
  Description of Artificial Sequence: Synthetic oligonucleotide
agcgguaggcaguccacau

SEQ ID NO: 2968802 - RNA, 19 nt, Artificial Sequence
  Description of Artificial Sequence: Synthetic oligonucleotide
gguacugucggagguaguc

SEQ ID NO: 2968803 - RNA, 19 nt, Artificial Sequence
  Description of Artificial Sequence: Synthetic oligonucleotide
ccgguuuagaugcacagca

SEQ ID NO: 2968804 - RNA, 19 nt, Artificial Sequence
  Description of Artificial Sequence: Synthetic oligonucleotide
gacacauggcucaccacaa

SEQ ID NO: 2968805 - RNA, 19 nt, Artificial Sequence
  Description of Artificial Sequence: Synthetic oligonucleotide
agcaguagccauggggaga

SEQ ID NO: 2968806 - RNA, 19 nt, Artificial Sequence
  Description of Artificial Sequence: Synthetic oligonucleotide
ggcagaaugcccgucccag

SEQ ID NO: 2968807 - RNA, 19 nt, Artificial Sequence
  Description of Artificial Sequence: Synthetic oligonucleotide
ugcgggcacugcuccuucg

SEQ ID NO: 2968808 - RNA, 19 nt, Artificial Sequence
  Description of Artificial Sequence: Synthetic oligonucleotide
uaugugaggcagggcagaa

SEQ ID NO: 2968809 - RNA, 19 nt, Artificial Sequence
  Description of Artificial Sequence: Synthetic oligonucleotide
ccaggguguaauuauguga

SEQ ID NO: 2968810 - RNA, 19 nt, Artificial Sequence
  Description of Artificial Sequence: Synthetic oligonucleotide
cgguugaugacuaggcggc

SEQ ID NO: 2968811 - RNA, 19 nt, Artificial Sequence
  Description of Artificial Sequence: Synthetic oligonucleotide
gcggcacagauguuguaag

SEQ ID NO: 2968812 - RNA, 19 nt, Artificial Sequence
  Description of Artificial Sequence: Synthetic oligonucleotide
ugcaccgguuuagaugcac

SEQ ID NO: 2968813 - RNA, 19 nt, Artificial Sequence
  Description of Artificial Sequence: Synthetic oligonucleotide
auguaggcaggcaccagga

SEQ ID NO: 2968814 - RNA, 19 nt, Artificial Sequence
  Description of Artificial Sequence: Synthetic oligonucleotide
gcuccuucgcacaaagggc

SEQ ID NO: 2968815 - RNA, 19 nt, Artificial Sequence
  Description of Artificial Sequence: Synthetic oligonucleotide
ugacaaccccucguccacc

SEQ ID NO: 2968816 - RNA, 19 nt, Artificial Sequence
  Description of Artificial Sequence: Synthetic oligonucleotide
gaccugggaguugugugac

SEQ ID NO: 2968817 - RNA, 19 nt, Artificial Sequence
  Description of Artificial Sequence: Synthetic oligonucleotide
auaugggaccuggaggcau

SEQ ID NO: 2968818 - RNA, 19 nt, Artificial Sequence
  Description of Artificial Sequence: Synthetic oligonucleotide
cuccuucgcacaaagggcu

SEQ ID NO: 2968819 - RNA, 19 nt, Artificial Sequence
  Description of Artificial Sequence: Synthetic oligonucleotide
cugacacauggcucaccac

SEQ ID NO: 2968820 - RNA, 19 nt, Artificial Sequence
  Description of Artificial Sequence: Synthetic oligonucleotide
agcuguauguaggcaggca

SEQ ID NO: 2968821 - RNA, 19 nt, Artificial Sequence
  Description of Artificial Sequence: Synthetic oligonucleotide
gaugacuaggcggcacaga

SEQ ID NO: 2968822 - RNA, 19 nt, Artificial Sequence
  Description of Artificial Sequence: Synthetic oligonucleotide
caccacaaagagccauaug

SEQ ID NO: 2968823 - RNA, 19 nt, Artificial Sequence
  Description of Artificial Sequence: Synthetic oligonucleotide
gggaccuggaggcauugac

SEQ ID NO: 2968824 - RNA, 19 nt, Artificial Sequence
  Description of Artificial Sequence: Synthetic oligonucleotide
ugcgccggggcagcgguag

SEQ ID NO: 2968825 - RNA, 19 nt, Artificial Sequence
  Description of Artificial Sequence: Synthetic oligonucleotide
cugggaguugugugacaac

SEQ ID NO: 2968826 - RNA, 19 nt, Artificial Sequence
  Description of Artificial Sequence: Synthetic oligonucleotide
ggaccuggaggcauugacc

SEQ ID NO: 2968827 - RNA, 19 nt, Artificial Sequence
  Description of Artificial Sequence: Synthetic oligonucleotide
ccagucagaguuggaaggg

SEQ ID NO: 2968828 - RNA, 19 nt, Artificial Sequence
  Description of Artificial Sequence: Synthetic oligonucleotide
gaugcacagcaguagccau

SEQ ID NO: 2968829 - RNA, 19 nt, Artificial Sequence
  Description of Artificial Sequence: Synthetic oligonucleotide
acaucggcuaccaggcggu

SEQ ID NO: 2968830 - RNA, 19 nt, Artificial Sequence
  Description of Artificial Sequence: Synthetic oligonucleotide
uguaagcugcgggcacugc

SEQ ID NO: 2968831 - RNA, 19 nt, Artificial Sequence
  Description of Artificial Sequence: Synthetic oligonucleotide
agcuucguccugagucccc

SEQ ID NO: 2968832 - RNA, 19 nt, Artificial Sequence
  Description of Artificial Sequence: Synthetic oligonucleotide
ggcaccaggaugacugaag

SEQ ID NO: 2968833 - RNA, 19 nt, Artificial Sequence
  Description of Artificial Sequence: Synthetic oligonucleotide
cugcuuuguucucgcuggc

SEQ ID NO: 2968834 - RNA, 19 nt, Artificial Sequence
  Description of Artificial Sequence: Synthetic oligonucleotide
guacugucggagguaguca

SEQ ID NO: 2968835 - RNA, 19 nt, Artificial Sequence
  Description of Artificial Sequence: Synthetic oligonucleotide
acacauggcucaccacaaa

SEQ ID NO: 2968836 - RNA, 19 nt, Artificial Sequence
  Description of Artificial Sequence: Synthetic oligonucleotide
guaagcugcgggcacugcu

SEQ ID NO: 2968837 - RNA, 19 nt, Artificial Sequence
  Description of Artificial Sequence: Synthetic oligonucleotide
gcaccaggaugacugaaga

SEQ ID NO: 2968838 - RNA, 19 nt, Artificial Sequence
  Description of Artificial Sequence: Synthetic oligonucleotide
gucccagucagaguuggaa

SEQ ID NO: 2968839 - RNA, 19 nt, Artificial Sequence
  Description of Artificial Sequence: Synthetic oligonucleotide
cucaccacaaagagccaua

SEQ ID NO: 2968840 - RNA, 19 nt, Artificial Sequence
  Description of Artificial Sequence: Synthetic oligonucleotide
gggaguugugugacaaccc

SEQ ID NO: 2968841 - RNA, 19 nt, Artificial Sequence
  Description of Artificial Sequence: Synthetic oligonucleotide
aacccaaguccagcuucgu

SEQ ID NO: 2968842 - RNA, 19 nt, Artificial Sequence
  Description of Artificial Sequence: Synthetic oligonucleotide
gggguacugucggagguag

SEQ ID NO: 2968843 - RNA, 19 nt, Artificial Sequence
  Description of Artificial Sequence: Synthetic oligonucleotide
cuccaggguguaauuaugu

SEQ ID NO: 2968844 - RNA, 19 nt, Artificial Sequence
  Description of Artificial Sequence: Synthetic oligonucleotide
gcacaaagggcugcaccgg

SEQ ID NO: 2968845 - RNA, 19 nt, Artificial Sequence
  Description of Artificial Sequence: Synthetic oligonucleotide
uucgcacaaagggcugcac

SEQ ID NO: 2968846 - RNA, 19 nt, Artificial Sequence
  Description of Artificial Sequence: Synthetic oligonucleotide
aagagccauaugggaccug

SEQ ID NO: 2968847 - RNA, 19 nt, Artificial Sequence
  Description of Artificial Sequence: Synthetic oligonucleotide
agccaugcgccggggcagc

SEQ ID NO: 2968848 - RNA, 19 nt, Artificial Sequence
  Description of Artificial Sequence: Synthetic oligonucleotide
ggcacugcuccuucgcaca

SEQ ID NO: 2968849 - RNA, 19 nt, Artificial Sequence
  Description of Artificial Sequence: Synthetic oligonucleotide
aaccccucguccaccugcu

SEQ ID NO: 2968850 - RNA, 19 nt, Artificial Sequence
  Description of Artificial Sequence: Synthetic oligonucleotide
gucggagguagucagccau

SEQ ID NO: 2968851 - RNA, 19 nt, Artificial Sequence
  Description of Artificial Sequence: Synthetic oligonucleotide
cuuuguucucgcuggcacu

SEQ ID NO: 2968852 - RNA, 19 nt, Artificial Sequence
  Description of Artificial Sequence: Synthetic oligonucleotide
gaguugugugacaaccccu

SEQ ID NO: 2968853 - RNA, 19 nt, Artificial Sequence
  Description of Artificial Sequence: Synthetic oligonucleotide
auccagcuguauguaggca

SEQ ID NO: 2968854 - RNA, 19 nt, Artificial Sequence
  Description of Artificial Sequence: Synthetic oligonucleotide
uggaggcauugaccuggga

SEQ ID NO: 2968855 - RNA, 19 nt, Artificial Sequence
  Description of Artificial Sequence: Synthetic oligonucleotide
aucggcuaccaggcgguug

SEQ ID NO: 2968856 - RNA, 19 nt, Artificial Sequence
  Description of Artificial Sequence: Synthetic oligonucleotide
cucugacacauggcucacc

SEQ ID NO: 2968857 - RNA, 19 nt, Artificial Sequence
  Description of Artificial Sequence: Synthetic oligonucleotide
ccuccaggguguaauuaug

SEQ ID NO: 2968858 - RNA, 19 nt, Artificial Sequence
  Description of Artificial Sequence: Synthetic oligonucleotide
cauugaccugggaguugug

SEQ ID NO: 2968859 - RNA, 19 nt, Artificial Sequence
  Description of Artificial Sequence: Synthetic oligonucleotide
acaaccccucguccaccug

SEQ ID NO: 2968860 - RNA, 19 nt, Artificial Sequence
  Description of Artificial Sequence: Synthetic oligonucleotide
cagcuucguccugaguccc

SEQ ID NO: 2968861 - RNA, 19 nt, Artificial Sequence
  Description of Artificial Sequence: Synthetic oligonucleotide
gucagccaugcgccggggc

SEQ ID NO: 2968862 - RNA, 19 nt, Artificial Sequence
  Description of Artificial Sequence: Synthetic oligonucleotide
gacaaccccucguccaccu

SEQ ID NO: 2968863 - RNA, 19 nt, Artificial Sequence
  Description of Artificial Sequence: Synthetic oligonucleotide
ggcagcgguaggcagucca

SEQ ID NO: 2968864 - RNA, 19 nt, Artificial Sequence
  Description of Artificial Sequence: Synthetic oligonucleotide
caccaggaugacugaagaa

SEQ ID NO: 2968865 - RNA, 19 nt, Artificial Sequence
  Description of Artificial Sequence: Synthetic oligonucleotide
aggcauugaccugggaguu

SEQ ID NO: 2968866 - RNA, 19 nt, Artificial Sequence
  Description of Artificial Sequence: Synthetic oligonucleotide
ggcacagauguuguaagcu

SEQ ID NO: 2968867 - RNA, 19 nt, Artificial Sequence
  Description of Artificial Sequence: Synthetic oligonucleotide
accugggaguugugugaca

SEQ ID NO: 2968868 - RNA, 19 nt, Artificial Sequence
  Description of Artificial Sequence: Synthetic oligonucleotide
caggaacccaaguccagcu

SEQ ID NO: 2968869 - RNA, 19 nt, Artificial Sequence
  Description of Artificial Sequence: Synthetic oligonucleotide
ugcccgucccagucagagu

SEQ ID NO: 2968870 - RNA, 19 nt, Artificial Sequence
  Description of Artificial Sequence: Synthetic oligonucleotide
gucagaguuggaaggggua

SEQ ID NO: 2968871 - RNA, 19 nt, Artificial Sequence
  Description of Artificial Sequence: Synthetic oligonucleotide
gguaggcaguccacaucgg

SEQ ID NO: 2968872 - RNA, 19 nt, Artificial Sequence
  Description of Artificial Sequence: Synthetic oligonucleotide
gggcacugcuccuucgcac

SEQ ID NO: 2968873 - RNA, 19 nt, Artificial Sequence
  Description of Artificial Sequence: Synthetic oligonucleotide
caaguccagcuucguccug

SEQ ID NO: 2968874 - RNA, 19 nt, Artificial Sequence
  Description of Artificial Sequence: Synthetic oligonucleotide
agggcugcaccgguuuaga

SEQ ID NO: 2968875 - RNA, 19 nt, Artificial Sequence
  Description of Artificial Sequence: Synthetic oligonucleotide
augggaccuggaggcauug

SEQ ID NO: 2968876 - RNA, 19 nt, Artificial Sequence
  Description of Artificial Sequence: Synthetic oligonucleotide
cagccaugcgccggggcag

SEQ ID NO: 2968877 - RNA, 19 nt, Artificial Sequence
  Description of Artificial Sequence: Synthetic oligonucleotide
agucagccaugcgccgggg

SEQ ID NO: 2968878 - RNA, 19 nt, Artificial Sequence
  Description of Artificial Sequence: Synthetic oligonucleotide
cauaugggaccuggaggca

SEQ ID NO: 2968879 - RNA, 19 nt, Artificial Sequence
  Description of Artificial Sequence: Synthetic oligonucleotide
ccaccugcuuuguucucgc

SEQ ID NO: 2968880 - RNA, 19 nt, Artificial Sequence
  Description of Artificial Sequence: Synthetic oligonucleotide
guuguaagcugcgggcacu

SEQ ID NO: 2968881 - RNA, 19 nt, Artificial Sequence
  Description of Artificial Sequence: Synthetic oligonucleotide
cuucgcacaaagggcugca

SEQ ID NO: 2968882 - RNA, 19 nt, Artificial Sequence
  Description of Artificial Sequence: Synthetic oligonucleotide
aaugcccgucccagucaga

SEQ ID NO: 2968883 - RNA, 19 nt, Artificial Sequence
  Description of Artificial Sequence: Synthetic oligonucleotide
cuucguccugaguccccuc

SEQ ID NO: 2968884 - RNA, 19 nt, Artificial Sequence
  Description of Artificial Sequence: Synthetic oligonucleotide
ugggaccuggaggcauuga

SEQ ID NO: 2968885 - RNA, 19 nt, Artificial Sequence
  Description of Artificial Sequence: Synthetic oligonucleotide
cgguuuagaugcacagcag

SEQ ID NO: 2968886 - RNA, 19 nt, Artificial Sequence
  Description of Artificial Sequence: Synthetic oligonucleotide
ggcaguccacaucggcuac

SEQ ID NO: 2968887 - RNA, 19 nt, Artificial Sequence
  Description of Artificial Sequence: Synthetic oligonucleotide
uccccuccaggguguaauu

SEQ ID NO: 2968888 - RNA, 19 nt, Artificial Sequence
  Description of Artificial Sequence: Synthetic oligonucleotide
caguccacaucggcuacca

SEQ ID NO: 2968889 - RNA, 19 nt, Artificial Sequence
  Description of Artificial Sequence: Synthetic oligonucleotide
ggcggcacagauguuguaa

SEQ ID NO: 2968890 - RNA, 19 nt, Artificial Sequence
  Description of Artificial Sequence: Synthetic oligonucleotide
agcugcgggcacugcuccu

SEQ ID NO: 2968891 - RNA, 19 nt, Artificial Sequence
  Description of Artificial Sequence: Synthetic oligonucleotide
ccauggggagaggcgaggg

SEQ ID NO: 2968892 - RNA, 19 nt, Artificial Sequence
  Description of Artificial Sequence: Synthetic oligonucleotide
acaaagggcugcaccgguu

SEQ ID NO: 2968893 - RNA, 19 nt, Artificial Sequence
  Description of Artificial Sequence: Synthetic oligonucleotide
augugaggcagggcagaau

SEQ ID NO: 2968894 - RNA, 19 nt, Artificial Sequence
  Description of Artificial Sequence: Synthetic oligonucleotide
gagccauaugggaccugga

SEQ ID NO: 2968895 - RNA, 19 nt, Artificial Sequence
  Description of Artificial Sequence: Synthetic oligonucleotide
gaguuggaagggguacugu

SEQ ID NO: 2968896 - RNA, 19 nt, Artificial Sequence
  Description of Artificial Sequence: Synthetic oligonucleotide
ggcauugaccugggaguug

SEQ ID NO: 2968897 - RNA, 19 nt, Artificial Sequence
  Description of Artificial Sequence: Synthetic oligonucleotide
agggguacugucggaggua

SEQ ID NO: 2968898 - RNA, 19 nt, Artificial Sequence
  Description of Artificial Sequence: Synthetic oligonucleotide
ccuucgcacaaagggcugc

SEQ ID NO: 2968899 - RNA, 19 nt, Artificial Sequence
  Description of Artificial Sequence: Synthetic oligonucleotide
cggcacagauguuguaagc

SEQ ID NO: 2968900 - RNA, 19 nt, Artificial Sequence
  Description of Artificial Sequence: Synthetic oligonucleotide
cacaaagggcugcaccggu

SEQ ID NO: 2968901 - RNA, 19 nt, Artificial Sequence
  Description of Artificial Sequence: Synthetic oligonucleotide
caggcaccaggaugacuga

SEQ ID NO: 2968902 - RNA, 19 nt, Artificial Sequence
  Description of Artificial Sequence: Synthetic oligonucleotide
gcgggcacugcuccuucgc

SEQ ID NO: 2968903 - RNA, 19 nt, Artificial Sequence
  Description of Artificial Sequence: Synthetic oligonucleotide
aggcaccaggaugacugaa

SEQ ID NO: 2968904 - RNA, 19 nt, Artificial Sequence
  Description of Artificial Sequence: Synthetic oligonucleotide
caaagggcugcaccgguuu

SEQ ID NO: 2968905 - RNA, 19 nt, Artificial Sequence
  Description of Artificial Sequence: Synthetic oligonucleotide
guccaccugcuuuguucuc

SEQ ID NO: 2968906 - RNA, 19 nt, Artificial Sequence
  Description of Artificial Sequence: Synthetic oligonucleotide
ccgucccagucagaguugg

SEQ ID NO: 2968907 - RNA, 19 nt, Artificial Sequence
  Description of Artificial Sequence: Synthetic oligonucleotide
gcgguaggcaguccacauc

SEQ ID NO: 2968908 - RNA, 19 nt, Artificial Sequence
  Description of Artificial Sequence: Synthetic oligonucleotide
uuguucucgcuggcacuuu

SEQ ID NO: 2968909 - RNA, 19 nt, Artificial Sequence
  Description of Artificial Sequence: Synthetic oligonucleotide
cugcgggcacugcuccuuc

SEQ ID NO: 2968910 - RNA, 19 nt, Artificial Sequence
  Description of Artificial Sequence: Synthetic oligonucleotide
accaggcgguugaugacua

SEQ ID NO: 2968911 - RNA, 19 nt, Artificial Sequence
  Description of Artificial Sequence: Synthetic oligonucleotide
gcauugaccugggaguugu

SEQ ID NO: 2968912 - RNA, 19 nt, Artificial Sequence
  Description of Artificial Sequence: Synthetic oligonucleotide
ccacaucggcuaccaggcg

SEQ ID NO: 2968913 - RNA, 19 nt, Artificial Sequence
  Description of Artificial Sequence: Synthetic oligonucleotide
cagcgguaggcaguccaca

SEQ ID NO: 2968914 - RNA, 19 nt, Artificial Sequence
  Description of Artificial Sequence: Synthetic oligonucleotide
gguugaugacuaggcggca

SEQ ID NO: 2968915 - RNA, 19 nt, Artificial Sequence
  Description of Artificial Sequence: Synthetic oligonucleotide
ggcuaccaggcgguugaug

SEQ ID NO: 2968916 - RNA, 19 nt, Artificial Sequence
  Description of Artificial Sequence: Synthetic oligonucleotide
ccugggaguugugugacaa

SEQ ID NO: 2968917 - RNA, 19 nt, Artificial Sequence
  Description of Artificial Sequence: Synthetic oligonucleotide
gggcagaaugcccguccca

SEQ ID NO: 2968918 - RNA, 19 nt, Artificial Sequence
  Description of Artificial Sequence: Synthetic oligonucleotide
cggagguagucagccaugc

SEQ ID NO: 2968919 - RNA, 19 nt, Artificial Sequence
  Description of Artificial Sequence: Synthetic oligonucleotide
caguagccauggggagagg

SEQ ID NO: 2968920 - RNA, 19 nt, Artificial Sequence
  Description of Artificial Sequence: Synthetic oligonucleotide
aggcggcacagauguugua

SEQ ID NO: 2968921 - RNA, 19 nt, Artificial Sequence
  Description of Artificial Sequence: Synthetic oligonucleotide
gcagcgguaggcaguccac

SEQ ID NO: 2968922 - RNA, 19 nt, Artificial Sequence
  Description of Artificial Sequence: Synthetic oligonucleotide
gcaccgguuuagaugcaca

SEQ ID NO: 2968923 - RNA, 19 nt, Artificial Sequence
  Description of Artificial Sequence: Synthetic oligonucleotide
gcccgucccagucagaguu

SEQ ID NO: 2968924 - RNA, 19 nt, Artificial Sequence
  Description of Artificial Sequence: Synthetic oligonucleotide
caugcgccggggcagcggu

SEQ ID NO: 2968925 - RNA, 19 nt, Artificial Sequence
  Description of Artificial Sequence: Synthetic oligonucleotide
ccaggcgguugaugacuag

SEQ ID NO: 2968926 - RNA, 19 nt, Artificial Sequence
  Description of Artificial Sequence: Synthetic oligonucleotide
ccaaguccagcuucguccu

SEQ ID NO: 2968927 - RNA, 19 nt, Artificial Sequence
  Description of Artificial Sequence: Synthetic oligonucleotide
ggggcagcgguaggcaguc

SEQ ID NO: 2968928 - RNA, 19 nt, Artificial Sequence
  Description of Artificial Sequence: Synthetic oligonucleotide
cguccugaguccccuccag

SEQ ID NO: 2968929 - RNA, 19 nt, Artificial Sequence
  Description of Artificial Sequence: Synthetic oligonucleotide
gcucugacacauggcucac

SEQ ID NO: 2968930 - RNA, 19 nt, Artificial Sequence
  Description of Artificial Sequence: Synthetic oligonucleotide
guccccuccaggguguaau

SEQ ID NO: 2968931 - RNA, 19 nt, Artificial Sequence
  Description of Artificial Sequence: Synthetic oligonucleotide
ccggggcagcgguaggcag

SEQ ID NO: 2968932 - RNA, 19 nt, Artificial Sequence
  Description of Artificial Sequence: Synthetic oligonucleotide
cccgucccagucagaguug

SEQ ID NO: 2968933 - RNA, 19 nt, Artificial Sequence
  Description of Artificial Sequence: Synthetic oligonucleotide
gggagaggcgagggcugag

SEQ ID NO: 2968934 - RNA, 19 nt, Artificial Sequence
  Description of Artificial Sequence: Synthetic oligonucleotide
cugcaccgguuuagaugca

SEQ ID NO: 2968935 - RNA, 19 nt, Artificial Sequence
  Description of Artificial Sequence: Synthetic oligonucleotide
gcagaaugcccgucccagu

SEQ ID NO: 2968936 - RNA, 19 nt, Artificial Sequence
  Description of Artificial Sequence: Synthetic oligonucleotide
gcacugcuccuucgcacaa

SEQ ID NO: 2968937 - RNA, 19 nt, Artificial Sequence
  Description of Artificial Sequence: Synthetic oligonucleotide
aguccccuccaggguguaa

SEQ ID NO: 2968938 - RNA, 19 nt, Artificial Sequence
  Description of Artificial Sequence: Synthetic oligonucleotide
gcucaccacaaagagccau

SEQ ID NO: 2968939 - RNA, 19 nt, Artificial Sequence
  Description of Artificial Sequence: Synthetic oligonucleotide
cacugcuccuucgcacaaa

SEQ ID NO: 2968940 - RNA, 19 nt, Artificial Sequence
  Description of Artificial Sequence: Synthetic oligonucleotide
acuaggcggcacagauguu

SEQ ID NO: 2968941 - RNA, 19 nt, Artificial Sequence
  Description of Artificial Sequence: Synthetic oligonucleotide
ggcagggcagaaugcccgu

SEQ ID NO: 2968942 - RNA, 19 nt, Artificial Sequence
  Description of Artificial Sequence: Synthetic oligonucleotide
cccuccaggguguaauuau

SEQ ID NO: 2968943 - RNA, 19 nt, Artificial Sequence
  Description of Artificial Sequence: Synthetic oligonucleotide
ccaugcgccggggcagcgg

SEQ ID NO: 2968944 - RNA, 19 nt, Artificial Sequence
  Description of Artificial Sequence: Synthetic oligonucleotide
gcagggcagaaugcccguc

SEQ ID NO: 2968945 - RNA, 19 nt, Artificial Sequence
  Description of Artificial Sequence: Synthetic oligonucleotide
ggagaggcgagggcugagu

SEQ ID NO: 2968946 - RNA, 19 nt, Artificial Sequence
  Description of Artificial Sequence: Synthetic oligonucleotide
gcuucguccugaguccccu

SEQ ID NO: 2968947 - RNA, 19 nt, Artificial Sequence
  Description of Artificial Sequence: Synthetic oligonucleotide
ggcucaccacaaagagcca

SEQ ID NO: 2968948 - RNA, 19 nt, Artificial Sequence
  Description of Artificial Sequence: Synthetic oligonucleotide
ccugaguccccuccagggu

SEQ ID NO: 2968949 - RNA, 19 nt, Artificial Sequence
  Description of Artificial Sequence: Synthetic oligonucleotide
gccaugcgccggggcagcg

SEQ ID NO: 2968950 - RNA, 19 nt, Artificial Sequence
  Description of Artificial Sequence: Synthetic oligonucleotide
caccugcuuuguucucgcu

SEQ ID NO: 2968951 - RNA, 19 nt, Artificial Sequence
  Description of Artificial Sequence: Synthetic oligonucleotide
gcgccggggcagcgguagg

SEQ ID NO: 2968952 - RNA, 19 nt, Artificial Sequence
  Description of Artificial Sequence: Synthetic oligonucleotide
gccggggcagcgguaggca

SEQ ID NO: 2968953 - RNA, 19 nt, Artificial Sequence
  Description of Artificial Sequence: Synthetic oligonucleotide
gaguccccuccagggugua

SEQ ID NO: 2968954 - RNA, 19 nt, Artificial Sequence
  Description of Artificial Sequence: Synthetic oligonucleotide
gggcugcaccgguuuagau

SEQ ID NO: 2968955 - RNA, 19 nt, Artificial Sequence
  Description of Artificial Sequence: Synthetic oligonucleotide
cucguccaccugcuuuguu

SEQ ID NO: 2968956 - RNA, 19 nt, Artificial Sequence
  Description of Artificial Sequence: Synthetic oligonucleotide
ggcaggcaccaggaugacu

SEQ ID NO: 2968957 - RNA, 19 nt, Artificial Sequence
  Description of Artificial Sequence: Synthetic oligonucleotide
cgggcacugcuccuucgca

SEQ ID NO: 2968958 - RNA, 19 nt, Artificial Sequence
  Description of Artificial Sequence: Synthetic oligonucleotide
cgccggggcagcgguaggc

SEQ ID NO: 2968959 - RNA, 19 nt, Artificial Sequence
  Description of Artificial Sequence: Synthetic oligonucleotide
gggcagcgguaggcagucc

SEQ ID NO: 2968960 - RNA, 19 nt, Artificial Sequence
  Description of Artificial Sequence: Synthetic oligonucleotide
ccccuccaggguguaauua

SEQ ID NO: 2968961 - RNA, 19 nt, Artificial Sequence
  Description of Artificial Sequence: Synthetic oligonucleotide
gcugcgggcacugcuccuu

SEQ ID NO: 2968962 - RNA, 19 nt, Artificial Sequence
  Description of Artificial Sequence: Synthetic oligonucleotide
cgucccagucagaguugga

SEQ ID NO: 2968963 - RNA, 19 nt, Artificial Sequence
  Description of Artificial Sequence: Synthetic oligonucleotide
ccccucguccaccugcuuu

SEQ ID NO: 2968964 - RNA, 19 nt, Artificial Sequence
  Description of Artificial Sequence: Synthetic oligonucleotide
ggguacugucggagguagu

SEQ ID NO: 2968965 - RNA, 19 nt, Artificial Sequence
  Description of Artificial Sequence: Synthetic oligonucleotide
augcgccggggcagcggua

SEQ ID NO: 2968966 - RNA, 19 nt, Artificial Sequence
  Description of Artificial Sequence: Synthetic oligonucleotide
cggggcagcgguaggcagu

SEQ ID NO: 2968967 - RNA, 19 nt, Artificial Sequence
  Description of Artificial Sequence: Synthetic oligonucleotide
caucggcuaccaggcgguu

SEQ ID NO: 2968968 - RNA, 19 nt, Artificial Sequence
  Description of Artificial Sequence: Synthetic oligonucleotide
ccucguccaccugcuuugu

SEQ ID NO: 2968969 - RNA, 19 nt, Artificial Sequence
  Description of Artificial Sequence: Synthetic oligonucleotide
cggcuaccaggcgguugau

SEQ ID NO: 2968970 - RNA, 19 nt, Artificial Sequence
  Description of Artificial Sequence: Synthetic oligonucleotide
aaaguuaaucuuuggaggg

SEQ ID NO: 2968971 - RNA, 19 nt, Artificial Sequence
  Description of Artificial Sequence: Synthetic oligonucleotide
ucauaaacaagguagacug

SEQ ID NO: 2968972 - RNA, 19 nt, Artificial Sequence
  Description of Artificial Sequence: Synthetic oligonucleotide
gaaaguuaaucuuuggagg

SEQ ID NO: 2968973 - RNA, 19 nt, Artificial Sequence
  Description of Artificial Sequence: Synthetic oligonucleotide
aaacaagguagacugcucc

SEQ ID NO: 2968974 - RNA, 19 nt, Artificial Sequence
  Description of Artificial Sequence: Synthetic oligonucleotide
ugaacugguacauugcugg

SEQ ID NO: 2968975 - RNA, 19 nt, Artificial Sequence
  Description of Artificial Sequence: Synthetic oligonucleotide
ucauuagcgaccauacucg

SEQ ID NO: 2968976 - RNA, 19 nt, Artificial Sequence
  Description of Artificial Sequence: Synthetic oligonucleotide
cuggucauaaacaagguag

SEQ ID NO: 2968977 - RNA, 19 nt, Artificial Sequence
  Description of Artificial Sequence: Synthetic oligonucleotide
ucugcuggcauacauacug

SEQ ID NO: 2968978 - RNA, 19 nt, Artificial Sequence
  Description of Artificial Sequence: Synthetic oligonucleotide
ugcucuuucacauaauccc

SEQ ID NO: 2968979 - RNA, 19 nt, Artificial Sequence
  Description of Artificial Sequence: Synthetic oligonucleotide
aacaagguagacugcuccc

SEQ ID NO: 2968980 - RNA, 19 nt, Artificial Sequence
  Description of Artificial Sequence: Synthetic oligonucleotide
uguggcaucuccaaacccg

SEQ ID NO: 2968981 - RNA, 19 nt, Artificial Sequence
  Description of Artificial Sequence: Synthetic oligonucleotide
uuagcgaccauacucgagc

SEQ ID NO: 2968982 - RNA, 19 nt, Artificial Sequence
  Description of Artificial Sequence: Synthetic oligonucleotide
ggaaaguuaaucuuuggag

SEQ ID NO: 2968983 - RNA, 19 nt, Artificial Sequence
  Description of Artificial Sequence: Synthetic oligonucleotide
aaguucggaaaguuaaucu

SEQ ID NO: 2968984 - RNA, 19 nt, Artificial Sequence
  Description of Artificial Sequence: Synthetic oligonucleotide
aaggacacgcgacucgccc

SEQ ID NO: 2968985 - RNA, 19 nt, Artificial Sequence
  Description of Artificial Sequence: Synthetic oligonucleotide
acugguacauugcuggugg

SEQ ID NO: 2968986 - RNA, 19 nt, Artificial Sequence
  Description of Artificial Sequence: Synthetic oligonucleotide
auaaggaaccucauuagcg

SEQ ID NO: 2968987 - RNA, 19 nt, Artificial Sequence
  Description of Artificial Sequence: Synthetic oligonucleotide
ugaguuccaggauucacgg

SEQ ID NO: 2968988 - RNA, 19 nt, Artificial Sequence
  Description of Artificial Sequence: Synthetic oligonucleotide
cuucccuugauaaggaacc

SEQ ID NO: 2968989 - RNA, 19 nt, Artificial Sequence
  Description of Artificial Sequence: Synthetic oligonucleotide
gauaaggaaccucauuagc

SEQ ID NO: 2968990 - RNA, 19 nt, Artificial Sequence
  Description of Artificial Sequence: Synthetic oligonucleotide
aaggaaccucauuagcgac

SEQ ID NO: 2968991 - RNA, 19 nt, Artificial Sequence
  Description of Artificial Sequence: Synthetic oligonucleotide
gacaaagcugccaugacag

SEQ ID NO: 2968992 - RNA, 19 nt, Artificial Sequence
  Description of Artificial Sequence: Synthetic oligonucleotide
ugauaaggaaccucauuag

SEQ ID NO: 2968993 - RNA, 19 nt, Artificial Sequence
  Description of Artificial Sequence: Synthetic oligonucleotide
cuuucuuagagcagccucg

SEQ ID NO: 2968994 - RNA, 19 nt, Artificial Sequence
  Description of Artificial Sequence: Synthetic oligonucleotide
uucacggaaguucggaaag

SEQ ID NO: 2968995 - RNA, 19 nt, Artificial Sequence
  Description of Artificial Sequence: Synthetic oligonucleotide
cucauuagcgaccauacuc

SEQ ID NO: 2968996 - RNA, 19 nt, Artificial Sequence
  Description of Artificial Sequence: Synthetic oligonucleotide
aguuaaucuuuggaggggc

SEQ ID NO: 2968997 - RNA, 19 nt, Artificial Sequence
  Description of Artificial Sequence: Synthetic oligonucleotide
uaaggaaccucauuagcga

SEQ ID NO: 2968998 - RNA, 19 nt, Artificial Sequence
  Description of Artificial Sequence: Synthetic oligonucleotide
gagaugaugccugaguucc

SEQ ID NO: 2968999 - RNA, 19 nt, Artificial Sequence
  Description of Artificial Sequence: Synthetic oligonucleotide
ucacauaauccccagcccu

SEQ ID NO: 2969000 - RNA, 19 nt, Artificial Sequence
  Description of Artificial Sequence: Synthetic oligonucleotide
agcuguggcaucuccaaac

SEQ ID NO: 2969001 - RNA, 19 nt, Artificial Sequence
  Description of Artificial Sequence: Synthetic oligonucleotide
auacuggcugaacugguac

SEQ ID NO: 2969002 - RNA, 19 nt, Artificial Sequence
  Description of Artificial Sequence: Synthetic oligonucleotide
cugaguuccaggauucacg

SEQ ID NO: 2969003 - RNA, 19 nt, Artificial Sequence
  Description of Artificial Sequence: Synthetic oligonucleotide
uucggaaaguuaaucuuug

SEQ ID NO: 2969004 - RNA, 19 nt, Artificial Sequence
  Description of Artificial Sequence: Synthetic oligonucleotide
uacauacuggcugaacugg

SEQ ID NO: 2969005 - RNA, 19 nt, Artificial Sequence
  Description of Artificial Sequence: Synthetic oligonucleotide
aaguuaaucuuuggagggg

SEQ ID NO: 2969006 - RNA, 19 nt, Artificial Sequence
  Description of Artificial Sequence: Synthetic oligonucleotide
acugggucccagcagcucc

SEQ ID NO: 2969007 - RNA, 19 nt, Artificial Sequence
  Description of Artificial Sequence: Synthetic oligonucleotide
accauagucgaucccucgc

SEQ ID NO: 2969008 - RNA, 19 nt, Artificial Sequence
  Description of Artificial Sequence: Synthetic oligonucleotide
agagaugaugccugaguuc

SEQ ID NO: 2969009 - RNA, 19 nt, Artificial Sequence
  Description of Artificial Sequence: Synthetic oligonucleotide
ucuuagagcagccucgcuc

SEQ ID NO: 2969010 - RNA, 19 nt, Artificial Sequence
  Description of Artificial Sequence: Synthetic oligonucleotide
cacacuucccuugauaagg

SEQ ID NO: 2969011 - RNA, 19 nt, Artificial Sequence
  Description of Artificial Sequence: Synthetic oligonucleotide
auacauacuggcugaacug

SEQ ID NO: 2969012 - RNA, 19 nt, Artificial Sequence
  Description of Artificial Sequence: Synthetic oligonucleotide
caggauucacggaaguucg

SEQ ID NO: 2969013 - RNA, 19 nt, Artificial Sequence
  Description of Artificial Sequence: Synthetic oligonucleotide
ugugcucuuucacauaauc

SEQ ID NO: 2969014 - RNA, 19 nt, Artificial Sequence
  Description of Artificial Sequence: Synthetic oligonucleotide
aguuccaggauucacggaa

SEQ ID NO: 2969015 - RNA, 19 nt, Artificial Sequence
  Description of Artificial Sequence: Synthetic oligonucleotide
uaaucuuuggaggggcugg

SEQ ID NO: 2969016 - RNA, 19 nt, Artificial Sequence
  Description of Artificial Sequence: Synthetic oligonucleotide
ucuuuggaggggcugggag

SEQ ID NO: 2969017 - RNA, 19 nt, Artificial Sequence
  Description of Artificial Sequence: Synthetic oligonucleotide
uucacauaauccccagccc

SEQ ID NO: 2969018 - RNA, 19 nt, Artificial Sequence
  Description of Artificial Sequence: Synthetic oligonucleotide
uacucucgggccuugcugg

SEQ ID NO: 2969019 - RNA, 19 nt, Artificial Sequence
  Description of Artificial Sequence: Synthetic oligonucleotide
auaaacaagguagacugcu

SEQ ID NO: 2969020 - RNA, 19 nt, Artificial Sequence
  Description of Artificial Sequence: Synthetic oligonucleotide
uggucauaaacaagguaga

SEQ ID NO: 2969021 - RNA, 19 nt, Artificial Sequence
  Description of Artificial Sequence: Synthetic oligonucleotide
cuggcauacauacuggcug

SEQ ID NO: 2969022 - RNA, 19 nt, Artificial Sequence
  Description of Artificial Sequence: Synthetic oligonucleotide
cuuggaguacucucgggcc

SEQ ID NO: 2969023 - RNA, 19 nt, Artificial Sequence
  Description of Artificial Sequence: Synthetic oligonucleotide
cauacucgagccaccauag

SEQ ID NO: 2969024 - RNA, 19 nt, Artificial Sequence
  Description of Artificial Sequence: Synthetic oligonucleotide
uccucggccuuucuuagag

SEQ ID NO: 2969025 - RNA, 19 nt, Artificial Sequence
  Description of Artificial Sequence: Synthetic oligonucleotide
ucuuucacauaauccccag

SEQ ID NO: 2969026 - RNA, 19 nt, Artificial Sequence
  Description of Artificial Sequence: Synthetic oligonucleotide
acaagguagacugcucccc

SEQ ID NO: 2969027 - RNA, 19 nt, Artificial Sequence
  Description of Artificial Sequence: Synthetic oligonucleotide
ucggaaaguuaaucuuugg

SEQ ID NO: 2969028 - RNA, 19 nt, Artificial Sequence
  Description of Artificial Sequence: Synthetic oligonucleotide
acuugcugugcucuuucac

SEQ ID NO: 2969029 - RNA, 19 nt, Artificial Sequence
  Description of Artificial Sequence: Synthetic oligonucleotide
uacucgagccaccauaguc

SEQ ID NO: 2969030 - RNA, 19 nt, Artificial Sequence
  Description of Artificial Sequence: Synthetic oligonucleotide
acucgagccaccauagucg

SEQ ID NO: 2969031 - RNA, 19 nt, Artificial Sequence
  Description of Artificial Sequence: Synthetic oligonucleotide
acuucccuugauaaggaac

SEQ ID NO: 2969032 - RNA, 19 nt, Artificial Sequence
  Description of Artificial Sequence: Synthetic oligonucleotide
gguggcauccauuacuugc

SEQ ID NO: 2969033 - RNA, 19 nt, Artificial Sequence
  Description of Artificial Sequence: Synthetic oligonucleotide
cauaaacaagguagacugc

SEQ ID NO: 2969034 - RNA, 19 nt, Artificial Sequence
  Description of Artificial Sequence: Synthetic oligonucleotide
aguucggaaaguuaaucuu

SEQ ID NO: 2969035 - RNA, 19 nt, Artificial Sequence
  Description of Artificial Sequence: Synthetic oligonucleotide
auagucgaucccucgcuuc

SEQ ID NO: 2969036 - RNA, 19 nt, Artificial Sequence
  Description of Artificial Sequence: Synthetic oligonucleotide
ugaugccugaguuccagga

SEQ ID NO: 2969037 - RNA, 19 nt, Artificial Sequence
  Description of Artificial Sequence: Synthetic oligonucleotide
acagagaugaugccugagu

SEQ ID NO: 2969038 - RNA, 19 nt, Artificial Sequence
  Description of Artificial Sequence: Synthetic oligonucleotide
accucauuagcgaccauac

SEQ ID NO: 2969039 - RNA, 19 nt, Artificial Sequence
  Description of Artificial Sequence: Synthetic oligonucleotide
gcugccaugacagagauga

SEQ ID NO: 2969040 - RNA, 19 nt, Artificial Sequence
  Description of Artificial Sequence: Synthetic oligonucleotide
uuaaucuuuggaggggcug

SEQ ID NO: 2969041 - RNA, 19 nt, Artificial Sequence
  Description of Artificial Sequence: Synthetic oligonucleotide
caaagcugccaugacagag

SEQ ID NO: 2969042 - RNA, 19 nt, Artificial Sequence
  Description of Artificial Sequence: Synthetic oligonucleotide
uaaacaagguagacugcuc

SEQ ID NO: 2969043 - RNA, 19 nt, Artificial Sequence
  Description of Artificial Sequence: Synthetic oligonucleotide
acauaauccccagcccucc

SEQ ID NO: 2969044 - RNA, 19 nt, Artificial Sequence
  Description of Artificial Sequence: Synthetic oligonucleotide
cuuuggaggggcugggagc

SEQ ID NO: 2969045 - RNA, 19 nt, Artificial Sequence
  Description of Artificial Sequence: Synthetic oligonucleotide
ugccaugacagagaugaug

SEQ ID NO: 2969046 - RNA, 19 nt, Artificial Sequence
  Description of Artificial Sequence: Synthetic oligonucleotide
gaaguucggaaaguuaauc

SEQ ID NO: 2969047 - RNA, 19 nt, Artificial Sequence
  Description of Artificial Sequence: Synthetic oligonucleotide
gaucccucgcuucacuccc

SEQ ID NO: 2969048 - RNA, 19 nt, Artificial Sequence
  Description of Artificial Sequence: Synthetic oligonucleotide
uaauccccagcccuccuug

SEQ ID NO: 2969049 - RNA, 19 nt, Artificial Sequence
  Description of Artificial Sequence: Synthetic oligonucleotide
aaucuuuggaggggcuggg

SEQ ID NO: 2969050 - RNA, 19 nt, Artificial Sequence
  Description of Artificial Sequence: Synthetic oligonucleotide
aaagcugccaugacagaga

SEQ ID NO: 2969051 - RNA, 19 nt, Artificial Sequence
  Description of Artificial Sequence: Synthetic oligonucleotide
gaugaugccugaguuccag

SEQ ID NO: 2969052 - RNA, 19 nt, Artificial Sequence
  Description of Artificial Sequence: Synthetic oligonucleotide
aauccccagcccuccuugg

SEQ ID NO: 2969053 - RNA, 19 nt, Artificial Sequence
  Description of Artificial Sequence: Synthetic oligonucleotide
uugucacugggucccagca

SEQ ID NO: 2969054 - RNA, 19 nt, Artificial Sequence
  Description of Artificial Sequence: Synthetic oligonucleotide
aggaaccucauuagcgacc

SEQ ID NO: 2969055 - RNA, 19 nt, Artificial Sequence
  Description of Artificial Sequence: Synthetic oligonucleotide
uggcauacauacuggcuga

SEQ ID NO: 2969056 - RNA, 19 nt, Artificial Sequence
  Description of Artificial Sequence: Synthetic oligonucleotide
aacccgucugcuggcauac

SEQ ID NO: 2969057 - RNA, 19 nt, Artificial Sequence
  Description of Artificial Sequence: Synthetic oligonucleotide
augacagagaugaugccug

SEQ ID NO: 2969058 - RNA, 19 nt, Artificial Sequence
  Description of Artificial Sequence: Synthetic oligonucleotide
uagucgaucccucgcuuca

SEQ ID NO: 2969059 - RNA, 19 nt, Artificial Sequence
  Description of Artificial Sequence: Synthetic oligonucleotide
auucacggaaguucggaaa

SEQ ID NO: 2969060 - RNA, 19 nt, Artificial Sequence
  Description of Artificial Sequence: Synthetic oligonucleotide
auccauuacuugcugugcu

SEQ ID NO: 2969061 - RNA, 19 nt, Artificial Sequence
  Description of Artificial Sequence: Synthetic oligonucleotide
ugcuggcauacauacuggc

SEQ ID NO: 2969062 - RNA, 19 nt, Artificial Sequence
  Description of Artificial Sequence: Synthetic oligonucleotide
cuuucacauaauccccagc

SEQ ID NO: 2969063 - RNA, 19 nt, Artificial Sequence
  Description of Artificial Sequence: Synthetic oligonucleotide
uuucuuagagcagccucgc

SEQ ID NO: 2969064 - RNA, 19 nt, Artificial Sequence
  Description of Artificial Sequence: Synthetic oligonucleotide
uuuggaggggcugggagcu

SEQ ID NO: 2969065 - RNA, 19 nt, Artificial Sequence
  Description of Artificial Sequence: Synthetic oligonucleotide
gguggcaccaccuccucgg

SEQ ID NO: 2969066 - RNA, 19 nt, Artificial Sequence
  Description of Artificial Sequence: Synthetic oligonucleotide
uuggaguacucucgggccu

SEQ ID NO: 2969067 - RNA, 19 nt, Artificial Sequence
  Description of Artificial Sequence: Synthetic oligonucleotide
gccaugacagagaugaugc

SEQ ID NO: 2969068 - RNA, 19 nt, Artificial Sequence
  Description of Artificial Sequence: Synthetic oligonucleotide
gugcucuuucacauaaucc

SEQ ID NO: 2969069 - RNA, 19 nt, Artificial Sequence
  Description of Artificial Sequence: Synthetic oligonucleotide
ugcugguggcaccaccucc

SEQ ID NO: 2969070 - RNA, 19 nt, Artificial Sequence
  Description of Artificial Sequence: Synthetic oligonucleotide
uccuggucauaaacaaggu

SEQ ID NO: 2969071 - RNA, 19 nt, Artificial Sequence
  Description of Artificial Sequence: Synthetic oligonucleotide
uccuuggaguacucucggg

SEQ ID NO: 2969072 - RNA, 19 nt, Artificial Sequence
  Description of Artificial Sequence: Synthetic oligonucleotide
cauacauacuggcugaacu

SEQ ID NO: 2969073 - RNA, 19 nt, Artificial Sequence
  Description of Artificial Sequence: Synthetic oligonucleotide
agcagccucgcucuuguca

SEQ ID NO: 2969074 - RNA, 19 nt, Artificial Sequence
  Description of Artificial Sequence: Synthetic oligonucleotide
uugcugugcucuuucacau

SEQ ID NO: 2969075 - RNA, 19 nt, Artificial Sequence
  Description of Artificial Sequence: Synthetic oligonucleotide
aaccucauuagcgaccaua

SEQ ID NO: 2969076 - RNA, 19 nt, Artificial Sequence
  Description of Artificial Sequence: Synthetic oligonucleotide
ucgcucuugucacuggguc

SEQ ID NO: 2969077 - RNA, 19 nt, Artificial Sequence
  Description of Artificial Sequence: Synthetic oligonucleotide
gauucacggaaguucggaa

SEQ ID NO: 2969078 - RNA, 19 nt, Artificial Sequence
  Description of Artificial Sequence: Synthetic oligonucleotide
augaugccugaguuccagg

SEQ ID NO: 2969079 - RNA, 19 nt, Artificial Sequence
  Description of Artificial Sequence: Synthetic oligonucleotide
uacauugcugguggcacca

SEQ ID NO: 2969080 - RNA, 19 nt, Artificial Sequence
  Description of Artificial Sequence: Synthetic oligonucleotide
cugcuggcauacauacugg

SEQ ID NO: 2969081 - RNA, 19 nt, Artificial Sequence
  Description of Artificial Sequence: Synthetic oligonucleotide
uccauuacuugcugugcuc

SEQ ID NO: 2969082 - RNA, 19 nt, Artificial Sequence
  Description of Artificial Sequence: Synthetic oligonucleotide
aggacacgcgacucgcccg

SEQ ID NO: 2969083 - RNA, 19 nt, Artificial Sequence
  Description of Artificial Sequence: Synthetic oligonucleotide
cacauaauccccagcccuc

SEQ ID NO: 2969084 - RNA, 19 nt, Artificial Sequence
  Description of Artificial Sequence: Synthetic oligonucleotide
cuccuuggaguacucucgg

SEQ ID NO: 2969085 - RNA, 19 nt, Artificial Sequence
  Description of Artificial Sequence: Synthetic oligonucleotide
cauccauuacuugcugugc

SEQ ID NO: 2969086 - RNA, 19 nt, Artificial Sequence
  Description of Artificial Sequence: Synthetic oligonucleotide
uagcgaccauacucgagcc

SEQ ID NO: 2969087 - RNA, 19 nt, Artificial Sequence
  Description of Artificial Sequence: Synthetic oligonucleotide
ucggccuuucuuagagcag

SEQ ID NO: 2969088 - RNA, 19 nt, Artificial Sequence
  Description of Artificial Sequence: Synthetic oligonucleotide
uuccaggauucacggaagu

SEQ ID NO: 2969089 - RNA, 19 nt, Artificial Sequence
  Description of Artificial Sequence: Synthetic oligonucleotide
cucggccuuucuuagagca

SEQ ID NO: 2969090 - RNA, 19 nt, Artificial Sequence
  Description of Artificial Sequence: Synthetic oligonucleotide
guacucucgggccuugcug

SEQ ID NO: 2969091 - RNA, 19 nt, Artificial Sequence
  Description of Artificial Sequence: Synthetic oligonucleotide
caccauagucgaucccucg

SEQ ID NO: 2969092 - RNA, 19 nt, Artificial Sequence
  Description of Artificial Sequence: Synthetic oligonucleotide
cucuuucacauaaucccca

SEQ ID NO: 2969093 - RNA, 19 nt, Artificial Sequence
  Description of Artificial Sequence: Synthetic oligonucleotide
gagccaccauagucgaucc

SEQ ID NO: 2969094 - RNA, 19 nt, Artificial Sequence
  Description of Artificial Sequence: Synthetic oligonucleotide
agagcagccucgcucuugu

SEQ ID NO: 2969095 - RNA, 19 nt, Artificial Sequence
  Description of Artificial Sequence: Synthetic oligonucleotide
cuucacuccccgcgcaagg

SEQ ID NO: 2969096 - RNA, 19 nt, Artificial Sequence
  Description of Artificial Sequence: Synthetic oligonucleotide
ugccugaguuccaggauuc

SEQ ID NO: 2969097 - RNA, 19 nt, Artificial Sequence
  Description of Artificial Sequence: Synthetic oligonucleotide
acggacaaagcugccauga

SEQ ID NO: 2969098 - RNA, 19 nt, Artificial Sequence
  Description of Artificial Sequence: Synthetic oligonucleotide
uccaaacccgucugcuggc

SEQ ID NO: 2969099 - RNA, 19 nt, Artificial Sequence
  Description of Artificial Sequence: Synthetic oligonucleotide
ugguacauugcugguggca

SEQ ID NO: 2969100 - RNA, 19 nt, Artificial Sequence
  Description of Artificial Sequence: Synthetic oligonucleotide
ugacagagaugaugccuga

SEQ ID NO: 2969101 - RNA, 19 nt, Artificial Sequence
  Description of Artificial Sequence: Synthetic oligonucleotide
uggcauccauuacuugcug

SEQ ID NO: 2969102 - RNA, 19 nt, Artificial Sequence
  Description of Artificial Sequence: Synthetic oligonucleotide
ucccucgcuucacuccccg

SEQ ID NO: 2969103 - RNA, 19 nt, Artificial Sequence
  Description of Artificial Sequence: Synthetic oligonucleotide
aguacucucgggccuugcu

SEQ ID NO: 2969104 - RNA, 19 nt, Artificial Sequence
  Description of Artificial Sequence: Synthetic oligonucleotide
ugggagcuguggcaucucc

SEQ ID NO: 2969105 - RNA, 19 nt, Artificial Sequence
  Description of Artificial Sequence: Synthetic oligonucleotide
guacauugcugguggcacc

SEQ ID NO: 2969106 - RNA, 19 nt, Artificial Sequence
  Description of Artificial Sequence: Synthetic oligonucleotide
auuagcgaccauacucgag

SEQ ID NO: 2969107 - RNA, 19 nt, Artificial Sequence
  Description of Artificial Sequence: Synthetic oligonucleotide
aaacccgucugcuggcaua

SEQ ID NO: 2969108 - RNA, 19 nt, Artificial Sequence
  Description of Artificial Sequence: Synthetic oligonucleotide
ccuuggaguacucucgggc

SEQ ID NO: 2969109 - RNA, 19 nt, Artificial Sequence
  Description of Artificial Sequence: Synthetic oligonucleotide
gucauaaacaagguagacu

SEQ ID NO: 2969110 - RNA, 19 nt, Artificial Sequence
  Description of Artificial Sequence: Synthetic oligonucleotide
augccugaguuccaggauu

SEQ ID NO: 2969111 - RNA, 19 nt, Artificial Sequence
  Description of Artificial Sequence: Synthetic oligonucleotide
cauugcugguggcaccacc

SEQ ID NO: 2969112 - RNA, 19 nt, Artificial Sequence
  Description of Artificial Sequence: Synthetic oligonucleotide
cuuagagcagccucgcucu

SEQ ID NO: 2969113 - RNA, 19 nt, Artificial Sequence
  Description of Artificial Sequence: Synthetic oligonucleotide
cuguggcaucuccaaaccc

SEQ ID NO: 2969114 - RNA, 19 nt, Artificial Sequence
  Description of Artificial Sequence: Synthetic oligonucleotide
ccuccuuggaguacucucg

SEQ ID NO: 2969115 - RNA, 19 nt, Artificial Sequence
  Description of Artificial Sequence: Synthetic oligonucleotide
agccaccauagucgauccc

SEQ ID NO: 2969116 - RNA, 19 nt, Artificial Sequence
  Description of Artificial Sequence: Synthetic oligonucleotide
auugcugguggcaccaccu

SEQ ID NO: 2969117 - RNA, 19 nt, Artificial Sequence
  Description of Artificial Sequence: Synthetic oligonucleotide
caucuccaaacccgucugc

SEQ ID NO: 2969118 - RNA, 19 nt, Artificial Sequence
  Description of Artificial Sequence: Synthetic oligonucleotide
guuccaggauucacggaag

SEQ ID NO: 2969119 - RNA, 19 nt, Artificial Sequence
  Description of Artificial Sequence: Synthetic oligonucleotide
gguacauugcugguggcac

SEQ ID NO: 2969120 - RNA, 19 nt, Artificial Sequence
  Description of Artificial Sequence: Synthetic oligonucleotide
uucuuagagcagccucgcu

SEQ ID NO: 2969121 - RNA, 19 nt, Artificial Sequence
  Description of Artificial Sequence: Synthetic oligonucleotide
ggacaaagcugccaugaca

SEQ ID NO: 2969122 - RNA, 19 nt, Artificial Sequence
  Description of Artificial Sequence: Synthetic oligonucleotide
cucgcuucacuccccgcgc

SEQ ID NO: 2969123 - RNA, 19 nt, Artificial Sequence
  Description of Artificial Sequence: Synthetic oligonucleotide
ucacuccccgcgcaaggac

SEQ ID NO: 2969124 - RNA, 19 nt, Artificial Sequence
  Description of Artificial Sequence: Synthetic oligonucleotide
acaaagcugccaugacaga

SEQ ID NO: 2969125 - RNA, 19 nt, Artificial Sequence
  Description of Artificial Sequence: Synthetic oligonucleotide
aucuccaaacccgucugcu

SEQ ID NO: 2969126 - RNA, 19 nt, Artificial Sequence
  Description of Artificial Sequence: Synthetic oligonucleotide
gcagcuccuggucauaaac

SEQ ID NO: 2969127 - RNA, 19 nt, Artificial Sequence
  Description of Artificial Sequence: Synthetic oligonucleotide
acucucgggccuugcuggg

SEQ ID NO: 2969128 - RNA, 19 nt, Artificial Sequence
  Description of Artificial Sequence: Synthetic oligonucleotide
ucgaucccucgcuucacuc

SEQ ID NO: 2969129 - RNA, 19 nt, Artificial Sequence
  Description of Artificial Sequence: Synthetic oligonucleotide
ccuuucuuagagcagccuc

SEQ ID NO: 2969130 - RNA, 19 nt, Artificial Sequence
  Description of Artificial Sequence: Synthetic oligonucleotide
ucacugggucccagcagcu

SEQ ID NO: 2969131 - RNA, 19 nt, Artificial Sequence
  Description of Artificial Sequence: Synthetic oligonucleotide
caaggacacgcgacucgcc

SEQ ID NO: 2969132 - RNA, 19 nt, Artificial Sequence
  Description of Artificial Sequence: Synthetic oligonucleotide
ucacggaaguucggaaagu

SEQ ID NO: 2969133 - RNA, 19 nt, Artificial Sequence
  Description of Artificial Sequence: Synthetic oligonucleotide
ggucauaaacaagguagac

SEQ ID NO: 2969134 - RNA, 19 nt, Artificial Sequence
  Description of Artificial Sequence: Synthetic oligonucleotide
uucccuugauaaggaaccu

SEQ ID NO: 2969135 - RNA, 19 nt, Artificial Sequence
  Description of Artificial Sequence: Synthetic oligonucleotide
agucgaucccucgcuucac

SEQ ID NO: 2969136 - RNA, 19 nt, Artificial Sequence
  Description of Artificial Sequence: Synthetic oligonucleotide
ccaggauucacggaaguuc

SEQ ID NO: 2969137 - RNA, 19 nt, Artificial Sequence
  Description of Artificial Sequence: Synthetic oligonucleotide
ucccuugauaaggaaccuc

SEQ ID NO: 2969138 - RNA, 19 nt, Artificial Sequence
  Description of Artificial Sequence: Synthetic oligonucleotide
auuacuugcugugcucuuu

SEQ ID NO: 2969139 - RNA, 19 nt, Artificial Sequence
  Description of Artificial Sequence: Synthetic oligonucleotide
uucacuccccgcgcaagga

SEQ ID NO: 2969140 - RNA, 19 nt, Artificial Sequence
  Description of Artificial Sequence: Synthetic oligonucleotide
auaauccccagcccuccuu

SEQ ID NO: 2969141 - RNA, 19 nt, Artificial Sequence
  Description of Artificial Sequence: Synthetic oligonucleotide
gcucuugucacuggguccc

SEQ ID NO: 2969142 - RNA, 19 nt, Artificial Sequence
  Description of Artificial Sequence: Synthetic oligonucleotide
cagcuccuggucauaaaca

SEQ ID NO: 2969143 - RNA, 19 nt, Artificial Sequence
  Description of Artificial Sequence: Synthetic oligonucleotide
cccuugauaaggaaccuca

SEQ ID NO: 2969144 - RNA, 19 nt, Artificial Sequence
  Description of Artificial Sequence: Synthetic oligonucleotide
ucuugucacugggucccag

SEQ ID NO: 2969145 - RNA, 19 nt, Artificial Sequence
  Description of Artificial Sequence: Synthetic oligonucleotide
caugacagagaugaugccu

SEQ ID NO: 2969146 - RNA, 19 nt, Artificial Sequence
  Description of Artificial Sequence: Synthetic oligonucleotide
cauuagcgaccauacucga

SEQ ID NO: 2969147 - RNA, 19 nt, Artificial Sequence
  Description of Artificial Sequence: Synthetic oligonucleotide
uagagcagccucgcucuug

SEQ ID NO: 2969148 - RNA, 19 nt, Artificial Sequence
  Description of Artificial Sequence: Synthetic oligonucleotide
aggauucacggaaguucgg

SEQ ID NO: 2969149 - RNA, 19 nt, Artificial Sequence
  Description of Artificial Sequence: Synthetic oligonucleotide
auacucgagccaccauagu

SEQ ID NO: 2969150 - RNA, 19 nt, Artificial Sequence
  Description of Artificial Sequence: Synthetic oligonucleotide
gccacacuucccuugauaa

SEQ ID NO: 2969151 - RNA, 19 nt, Artificial Sequence
  Description of Artificial Sequence: Synthetic oligonucleotide
gcaucuccaaacccgucug

SEQ ID NO: 2969152 - RNA, 19 nt, Artificial Sequence
  Description of Artificial Sequence: Synthetic oligonucleotide
cugguacauugcugguggc

SEQ ID NO: 2969153 - RNA, 19 nt, Artificial Sequence
  Description of Artificial Sequence: Synthetic oligonucleotide
gcugugcucuuucacauaa

SEQ ID NO: 2969154 - RNA, 19 nt, Artificial Sequence
  Description of Artificial Sequence: Synthetic oligonucleotide
agcgaccauacucgagcca

SEQ ID NO: 2969155 - RNA, 19 nt, Artificial Sequence
  Description of Artificial Sequence: Synthetic oligonucleotide
acauacuggcugaacuggu

SEQ ID NO: 2969156 - RNA, 19 nt, Artificial Sequence
  Description of Artificial Sequence: Synthetic oligonucleotide
ccucgcuucacuccccgcg

SEQ ID NO: 2969157 - RNA, 19 nt, Artificial Sequence
  Description of Artificial Sequence: Synthetic oligonucleotide
agccacacuucccuugaua

SEQ ID NO: 2969158 - RNA, 19 nt, Artificial Sequence
  Description of Artificial Sequence: Synthetic oligonucleotide
gaccauacucgagccacca

SEQ ID NO: 2969159 - RNA, 19 nt, Artificial Sequence
  Description of Artificial Sequence: Synthetic oligonucleotide
acuccccgcgcaaggacac

SEQ ID NO: 2969160 - RNA, 19 nt, Artificial Sequence
  Description of Artificial Sequence: Synthetic oligonucleotide
cucgagccaccauagucga

SEQ ID NO: 2969161 - RNA, 19 nt, Artificial Sequence
  Description of Artificial Sequence: Synthetic oligonucleotide
gcagccucgcucuugucac

SEQ ID NO: 2969162 - RNA, 19 nt, Artificial Sequence
  Description of Artificial Sequence: Synthetic oligonucleotide
cgucugcuggcauacauac

SEQ ID NO: 2969163 - RNA, 19 nt, Artificial Sequence
  Description of Artificial Sequence: Synthetic oligonucleotide
acacuucccuugauaagga

SEQ ID NO: 2969164 - RNA, 19 nt, Artificial Sequence
  Description of Artificial Sequence: Synthetic oligonucleotide
ggaaccucauuagcgacca

SEQ ID NO: 2969165 - RNA, 19 nt, Artificial Sequence
  Description of Artificial Sequence: Synthetic oligonucleotide
acacgcgacucgcccgccg

SEQ ID NO: 2969166 - RNA, 19 nt, Artificial Sequence
  Description of Artificial Sequence: Synthetic oligonucleotide
ggggccacggacaaagcug

SEQ ID NO: 2969167 - RNA, 19 nt, Artificial Sequence
  Description of Artificial Sequence: Synthetic oligonucleotide
uccaggauucacggaaguu

SEQ ID NO: 2969168 - RNA, 19 nt, Artificial Sequence
  Description of Artificial Sequence: Synthetic oligonucleotide
cacggacaaagcugccaug

SEQ ID NO: 2969169 - RNA, 19 nt, Artificial Sequence
  Description of Artificial Sequence: Synthetic oligonucleotide
gaguuccaggauucacgga

SEQ ID NO: 2969170 - RNA, 19 nt, Artificial Sequence
  Description of Artificial Sequence: Synthetic oligonucleotide
cauacuggcugaacuggua

SEQ ID NO: 2969171 - RNA, 19 nt, Artificial Sequence
  Description of Artificial Sequence: Synthetic oligonucleotide
gaugccugaguuccaggau

SEQ ID NO: 2969172 - RNA, 19 nt, Artificial Sequence
  Description of Artificial Sequence: Synthetic oligonucleotide
uccccgcgcaaggacacgc

SEQ ID NO: 2969173 - RNA, 19 nt, Artificial Sequence
  Description of Artificial Sequence: Synthetic oligonucleotide
gcgaccauacucgagccac

SEQ ID NO: 2969174 - RNA, 19 nt, Artificial Sequence
  Description of Artificial Sequence: Synthetic oligonucleotide
acauugcugguggcaccac

SEQ ID NO: 2969175 - RNA, 19 nt, Artificial Sequence
  Description of Artificial Sequence: Synthetic oligonucleotide
ugcugugcucuuucacaua

SEQ ID NO: 2969176 - RNA, 19 nt, Artificial Sequence
  Description of Artificial Sequence: Synthetic oligonucleotide
gaggggcugggagcugugg

SEQ ID NO: 2969177 - RNA, 19 nt, Artificial Sequence
  Description of Artificial Sequence: Synthetic oligonucleotide
ggauucacggaaguucgga

SEQ ID NO: 2969178 - RNA, 19 nt, Artificial Sequence
  Description of Artificial Sequence: Synthetic oligonucleotide
ggagcuguggcaucuccaa

SEQ ID NO: 2969179 - RNA, 19 nt, Artificial Sequence
  Description of Artificial Sequence: Synthetic oligonucleotide
ggcugaacugguacauugc

SEQ ID NO: 2969180 - RNA, 19 nt, Artificial Sequence
  Description of Artificial Sequence: Synthetic oligonucleotide
guucggaaaguuaaucuuu

SEQ ID NO: 2969181 - RNA, 19 nt, Artificial Sequence
  Description of Artificial Sequence: Synthetic oligonucleotide
gcaaggacacgcgacucgc

SEQ ID NO: 2969182 - RNA, 19 nt, Artificial Sequence
  Description of Artificial Sequence: Synthetic oligonucleotide
auccccagcccuccuugga

SEQ ID NO: 2969183 - RNA, 19 nt, Artificial Sequence
  Description of Artificial Sequence: Synthetic oligonucleotide
cacgcgacucgcccgccgc

SEQ ID NO: 2969184 - RNA, 19 nt, Artificial Sequence
  Description of Artificial Sequence: Synthetic oligonucleotide
uggaggggcugggagcugu

SEQ ID NO: 2969185 - RNA, 19 nt, Artificial Sequence
  Description of Artificial Sequence: Synthetic oligonucleotide
ccaugacagagaugaugcc

SEQ ID NO: 2969186 - RNA, 19 nt, Artificial Sequence
  Description of Artificial Sequence: Synthetic oligonucleotide
agccucgcucuugucacug

SEQ ID NO: 2969187 - RNA, 19 nt, Artificial Sequence
  Description of Artificial Sequence: Synthetic oligonucleotide
ccacacuucccuugauaag

SEQ ID NO: 2969188 - RNA, 19 nt, Artificial Sequence
  Description of Artificial Sequence: Synthetic oligonucleotide
accaccuccucggccuuuc

SEQ ID NO: 2969189 - RNA, 19 nt, Artificial Sequence
  Description of Artificial Sequence: Synthetic oligonucleotide
uuagagcagccucgcucuu

SEQ ID NO: 2969190 - RNA, 19 nt, Artificial Sequence
  Description of Artificial Sequence: Synthetic oligonucleotide
gcagguggcauccauuacu

SEQ ID NO: 2969191 - RNA, 19 nt, Artificial Sequence
  Description of Artificial Sequence: Synthetic oligonucleotide
accauacucgagccaccau

SEQ ID NO: 2969192 - RNA, 19 nt, Artificial Sequence
  Description of Artificial Sequence: Synthetic oligonucleotide
gggccacggacaaagcugc

SEQ ID NO: 2969193 - RNA, 19 nt, Artificial Sequence
  Description of Artificial Sequence: Synthetic oligonucleotide
cagagaugaugccugaguu

SEQ ID NO: 2969194 - RNA, 19 nt, Artificial Sequence
  Description of Artificial Sequence: Synthetic oligonucleotide
ggacacgcgacucgcccgc

SEQ ID NO: 2969195 - RNA, 19 nt, Artificial Sequence
  Description of Artificial Sequence: Synthetic oligonucleotide
cggaaaguuaaucuuugga

SEQ ID NO: 2969196 - RNA, 19 nt, Artificial Sequence
  Description of Artificial Sequence: Synthetic oligonucleotide
cggaaguucggaaaguuaa

SEQ ID NO: 2969197 - RNA, 19 nt, Artificial Sequence
  Description of Artificial Sequence: Synthetic oligonucleotide
guggcauccauuacuugcu

SEQ ID NO: 2969198 - RNA, 19 nt, Artificial Sequence
  Description of Artificial Sequence: Synthetic oligonucleotide
cacuccccgcgcaaggaca

SEQ ID NO: 2969199 - RNA, 19 nt, Artificial Sequence
  Description of Artificial Sequence: Synthetic oligonucleotide
aucccucgcuucacucccc

SEQ ID NO: 2969200 - RNA, 19 nt, Artificial Sequence
  Description of Artificial Sequence: Synthetic oligonucleotide
agcagcuccuggucauaaa

SEQ ID NO: 2969201 - RNA, 19 nt, Artificial Sequence
  Description of Artificial Sequence: Synthetic oligonucleotide
acggaaguucggaaaguua

SEQ ID NO: 2969202 - RNA, 19 nt, Artificial Sequence
  Description of Artificial Sequence: Synthetic oligonucleotide
gagcuguggcaucuccaaa

SEQ ID NO: 2969203 - RNA, 19 nt, Artificial Sequence
  Description of Artificial Sequence: Synthetic oligonucleotide
ggcaucuccaaacccgucu

SEQ ID NO: 2969204 - RNA, 19 nt, Artificial Sequence
  Description of Artificial Sequence: Synthetic oligonucleotide
ccucgcucuugucacuggg

SEQ ID NO: 2969205 - RNA, 19 nt, Artificial Sequence
  Description of Artificial Sequence: Synthetic oligonucleotide
uggaguacucucgggccuu

SEQ ID NO: 2969206 - RNA, 19 nt, Artificial Sequence
  Description of Artificial Sequence: Synthetic oligonucleotide
cccuccuuggaguacucuc

SEQ ID NO: 2969207 - RNA, 19 nt, Artificial Sequence
  Description of Artificial Sequence: Synthetic oligonucleotide
gacucgcccgccgcucccg

SEQ ID NO: 2969208 - RNA, 19 nt, Artificial Sequence
  Description of Artificial Sequence: Synthetic oligonucleotide
cucucgggccuugcugggg

SEQ ID NO: 2969209 - RNA, 19 nt, Artificial Sequence
  Description of Artificial Sequence: Synthetic oligonucleotide
gaguacucucgggccuugc

SEQ ID NO: 2969210 - RNA, 19 nt, Artificial Sequence
  Description of Artificial Sequence: Synthetic oligonucleotide
ccuccucggccuuucuuag

SEQ ID NO: 2969211 - RNA, 19 nt, Artificial Sequence
  Description of Artificial Sequence: Synthetic oligonucleotide
ucgagccaccauagucgau

SEQ ID NO: 2969212 - RNA, 19 nt, Artificial Sequence
  Description of Artificial Sequence: Synthetic oligonucleotide
cgaucccucgcuucacucc

SEQ ID NO: 2969213 - RNA, 19 nt, Artificial Sequence
  Description of Artificial Sequence: Synthetic oligonucleotide
agaugaugccugaguucca

SEQ ID NO: 2969214 - RNA, 19 nt, Artificial Sequence
  Description of Artificial Sequence: Synthetic oligonucleotide
gcauacauacuggcugaac

SEQ ID NO: 2969215 - RNA, 19 nt, Artificial Sequence
  Description of Artificial Sequence: Synthetic oligonucleotide
cacuucccuugauaaggaa

SEQ ID NO: 2969216 - RNA, 19 nt, Artificial Sequence
  Description of Artificial Sequence: Synthetic oligonucleotide
cgcaaggacacgcgacucg

SEQ ID NO: 2969217 - RNA, 19 nt, Artificial Sequence
  Description of Artificial Sequence: Synthetic oligonucleotide
ccauacucgagccaccaua

SEQ ID NO: 2969218 - RNA, 19 nt, Artificial Sequence
  Description of Artificial Sequence: Synthetic oligonucleotide
cgcucuugucacugggucc

SEQ ID NO: 2969219 - RNA, 19 nt, Artificial Sequence
  Description of Artificial Sequence: Synthetic oligonucleotide
gggcagguggcauccauua

SEQ ID NO: 2969220 - RNA, 19 nt, Artificial Sequence
  Description of Artificial Sequence: Synthetic oligonucleotide
ggcagguggcauccauuac

SEQ ID NO: 2969221 - RNA, 19 nt, Artificial Sequence
  Description of Artificial Sequence: Synthetic oligonucleotide
cgagccaccauagucgauc

SEQ ID NO: 2969222 - RNA, 19 nt, Artificial Sequence
  Description of Artificial Sequence: Synthetic oligonucleotide
cccagccacacuucccuug

SEQ ID NO: 2969223 - RNA, 19 nt, Artificial Sequence
  Description of Artificial Sequence: Synthetic oligonucleotide
cagguggcauccauuacuu

SEQ ID NO: 2969224 - RNA, 19 nt, Artificial Sequence
  Description of Artificial Sequence: Synthetic oligonucleotide
cugguggcaccaccuccuc

SEQ ID NO: 2969225 - RNA, 19 nt, Artificial Sequence
  Description of Artificial Sequence: Synthetic oligonucleotide
ccaccauagucgaucccuc

SEQ ID NO: 2969226 - RNA, 19 nt, Artificial Sequence
  Description of Artificial Sequence: Synthetic oligonucleotide
gcuucacuccccgcgcaag

SEQ ID NO: 2969227 - RNA, 19 nt, Artificial Sequence
  Description of Artificial Sequence: Synthetic oligonucleotide
cggccuuucuuagagcagc

SEQ ID NO: 2969228 - RNA, 19 nt, Artificial Sequence
  Description of Artificial Sequence: Synthetic oligonucleotide
gccaccauagucgaucccu

SEQ ID NO: 2969229 - RNA, 19 nt, Artificial Sequence
  Description of Artificial Sequence: Synthetic oligonucleotide
ccuggucauaaacaaggua

SEQ ID NO: 2969230 - RNA, 19 nt, Artificial Sequence
  Description of Artificial Sequence: Synthetic oligonucleotide
ggcauccauuacuugcugu

SEQ ID NO: 2969231 - RNA, 19 nt, Artificial Sequence
  Description of Artificial Sequence: Synthetic oligonucleotide
cucgcucuugucacugggu

SEQ ID NO: 2969232 - RNA, 19 nt, Artificial Sequence
  Description of Artificial Sequence: Synthetic oligonucleotide
ugggucccagcagcuccug

SEQ ID NO: 2969233 - RNA, 19 nt, Artificial Sequence
  Description of Artificial Sequence: Synthetic oligonucleotide
gacacgcgacucgcccgcc

SEQ ID NO: 2969234 - RNA, 19 nt, Artificial Sequence
  Description of Artificial Sequence: Synthetic oligonucleotide
uuggaggggcugggagcug

SEQ ID NO: 2969235 - RNA, 19 nt, Artificial Sequence
  Description of Artificial Sequence: Synthetic oligonucleotide
gucgaucccucgcuucacu

SEQ ID NO: 2969236 - RNA, 19 nt, Artificial Sequence
  Description of Artificial Sequence: Synthetic oligonucleotide
acgcgacucgcccgccgcu

SEQ ID NO: 2969237 - RNA, 19 nt, Artificial Sequence
  Description of Artificial Sequence: Synthetic oligonucleotide
cuccucggccuuucuuaga

SEQ ID NO: 2969238 - RNA, 19 nt, Artificial Sequence
  Description of Artificial Sequence: Synthetic oligonucleotide
ccucggccuuucuuagagc

SEQ ID NO: 2969239 - RNA, 19 nt, Artificial Sequence
  Description of Artificial Sequence: Synthetic oligonucleotide
cacugggucccagcagcuc

SEQ ID NO: 2969240 - RNA, 19 nt, Artificial Sequence
  Description of Artificial Sequence: Synthetic oligonucleotide
cauagucgaucccucgcuu

SEQ ID NO: 2969241 - RNA, 19 nt, Artificial Sequence
  Description of Artificial Sequence: Synthetic oligonucleotide
agcccuccuuggaguacuc

SEQ ID NO: 2969242 - RNA, 19 nt, Artificial Sequence
  Description of Artificial Sequence: Synthetic oligonucleotide
ccgcgcaaggacacgcgac

SEQ ID NO: 2969243 - RNA, 19 nt, Artificial Sequence
  Description of Artificial Sequence: Synthetic oligonucleotide
cauaauccccagcccuccu

SEQ ID NO: 2969244 - RNA, 19 nt, Artificial Sequence
  Description of Artificial Sequence: Synthetic oligonucleotide
gcuggcauacauacuggcu

SEQ ID NO: 2969245 - RNA, 19 nt, Artificial Sequence
  Description of Artificial Sequence: Synthetic oligonucleotide
gccacggacaaagcugcca

SEQ ID NO: 2969246 - RNA, 19 nt, Artificial Sequence
  Description of Artificial Sequence: Synthetic oligonucleotide
cauuacuugcugugcucuu

SEQ ID NO: 2969247 - RNA, 19 nt, Artificial Sequence
  Description of Artificial Sequence: Synthetic oligonucleotide
cuccccgcgcaaggacacg

SEQ ID NO: 2969248 - RNA, 19 nt, Artificial Sequence
  Description of Artificial Sequence: Synthetic oligonucleotide
gagcagccucgcucuuguc

SEQ ID NO: 2969249 - RNA, 19 nt, Artificial Sequence
  Description of Artificial Sequence: Synthetic oligonucleotide
ggaaguucggaaaguuaau

SEQ ID NO: 2969250 - RNA, 19 nt, Artificial Sequence
  Description of Artificial Sequence: Synthetic oligonucleotide
gggagcuguggcaucucca

SEQ ID NO: 2969251 - RNA, 19 nt, Artificial Sequence
  Description of Artificial Sequence: Synthetic oligonucleotide
cgaccauacucgagccacc

SEQ ID NO: 2969252 - RNA, 19 nt, Artificial Sequence
  Description of Artificial Sequence: Synthetic oligonucleotide
ggaguacucucgggccuug

SEQ ID NO: 2969253 - RNA, 19 nt, Artificial Sequence
  Description of Artificial Sequence: Synthetic oligonucleotide
gcgacucgcccgccgcucc

SEQ ID NO: 2969254 - RNA, 19 nt, Artificial Sequence
  Description of Artificial Sequence: Synthetic oligonucleotide
cacggaaguucggaaaguu

SEQ ID NO: 2969255 - RNA, 19 nt, Artificial Sequence
  Description of Artificial Sequence: Synthetic oligonucleotide
ccccgcgcaaggacacgcg

SEQ ID NO: 2969256 - RNA, 19 nt, Artificial Sequence
  Description of Artificial Sequence: Synthetic oligonucleotide
ccauagucgaucccucgcu

SEQ ID NO: 2969257 - RNA, 19 nt, Artificial Sequence
  Description of Artificial Sequence: Synthetic oligonucleotide
cggacaaagcugccaugac

SEQ ID NO: 2969258 - RNA, 19 nt, Artificial Sequence
  Description of Artificial Sequence: Synthetic oligonucleotide
cagcagcuccuggucauaa

SEQ ID NO: 2969259 - RNA, 19 nt, Artificial Sequence
  Description of Artificial Sequence: Synthetic oligonucleotide
ggcauacauacuggcugaa

SEQ ID NO: 2969260 - RNA, 19 nt, Artificial Sequence
  Description of Artificial Sequence: Synthetic oligonucleotide
ccauuacuugcugugcucu

SEQ ID NO: 2969261 - RNA, 19 nt, Artificial Sequence
  Description of Artificial Sequence: Synthetic oligonucleotide
gcugguggcaccaccuccu

SEQ ID NO: 2969262 - RNA, 19 nt, Artificial Sequence
  Description of Artificial Sequence: Synthetic oligonucleotide
ggcugggagcuguggcauc

SEQ ID NO: 2969263 - RNA, 19 nt, Artificial Sequence
  Description of Artificial Sequence: Synthetic oligonucleotide
cugugcucuuucacauaau

SEQ ID NO: 2969264 - RNA, 19 nt, Artificial Sequence
  Description of Artificial Sequence: Synthetic oligonucleotide
caaacccgucugcuggcau

SEQ ID NO: 2969265 - RNA, 19 nt, Artificial Sequence
  Description of Artificial Sequence: Synthetic oligonucleotide
cucuugucacuggguccca

SEQ ID NO: 2969266 - RNA, 19 nt, Artificial Sequence
  Description of Artificial Sequence: Synthetic oligonucleotide
gcgcaaggacacgcgacuc

SEQ ID NO: 2969267 - RNA, 19 nt, Artificial Sequence
  Description of Artificial Sequence: Synthetic oligonucleotide
ccgucugcuggcauacaua

SEQ ID NO: 2969268 - RNA, 19 nt, Artificial Sequence
  Description of Artificial Sequence: Synthetic oligonucleotide
gaaccucauuagcgaccau

SEQ ID NO: 2969269 - RNA, 19 nt, Artificial Sequence
  Description of Artificial Sequence: Synthetic oligonucleotide
cccucgcuucacuccccgc

SEQ ID NO: 2969270 - RNA, 19 nt, Artificial Sequence
  Description of Artificial Sequence: Synthetic oligonucleotide
cagcccuccuuggaguacu

SEQ ID NO: 2969271 - RNA, 19 nt, Artificial Sequence
  Description of Artificial Sequence: Synthetic oligonucleotide
ccacggacaaagcugccau

SEQ ID NO: 2969272 - RNA, 19 nt, Artificial Sequence
  Description of Artificial Sequence: Synthetic oligonucleotide
ggccacggacaaagcugcc

SEQ ID NO: 2969273 - RNA, 19 nt, Artificial Sequence
  Description of Artificial Sequence: Synthetic oligonucleotide
acccgucugcuggcauaca

SEQ ID NO: 2969274 - RNA, 19 nt, Artificial Sequence
  Description of Artificial Sequence: Synthetic oligonucleotide
gccugaguuccaggauuca

SEQ ID NO: 2969275 - RNA, 19 nt, Artificial Sequence
  Description of Artificial Sequence: Synthetic oligonucleotide
ccagcccuccuuggaguac

SEQ ID NO: 2969276 - RNA, 19 nt, Artificial Sequence
  Description of Artificial Sequence: Synthetic oligonucleotide
ccucauuagcgaccauacu

SEQ ID NO: 2969277 - RNA, 19 nt, Artificial Sequence
  Description of Artificial Sequence: Synthetic oligonucleotide
cccgcgcaaggacacgcga

SEQ ID NO: 2969278 - RNA, 19 nt, Artificial Sequence
  Description of Artificial Sequence: Synthetic oligonucleotide
ccaaacccgucugcuggca

SEQ ID NO: 2969279 - RNA, 19 nt, Artificial Sequence
  Description of Artificial Sequence: Synthetic oligonucleotide
cagccucgcucuugucacu

SEQ ID NO: 2969280 - RNA, 19 nt, Artificial Sequence
  Description of Artificial Sequence: Synthetic oligonucleotide
cugccaugacagagaugau

SEQ ID NO: 2969281 - RNA, 19 nt, Artificial Sequence
  Description of Artificial Sequence: Synthetic oligonucleotide
cccagcccuccuuggagua

SEQ ID NO: 2969282 - RNA, 19 nt, Artificial Sequence
  Description of Artificial Sequence: Synthetic oligonucleotide
cgcgcaaggacacgcgacu

SEQ ID NO: 2969283 - RNA, 19 nt, Artificial Sequence
  Description of Artificial Sequence: Synthetic oligonucleotide
cccgucugcuggcauacau

SEQ ID NO: 2969284 - RNA, 19 nt, Artificial Sequence
  Description of Artificial Sequence: Synthetic oligonucleotide
cgacucgcccgccgcuccc

SEQ ID NO: 2969285 - RNA, 19 nt, Artificial Sequence
  Description of Artificial Sequence: Synthetic oligonucleotide
ccccagcccuccuuggagu

SEQ ID NO: 2969286 - RNA, 19 nt, Artificial Sequence
  Description of Artificial Sequence: Synthetic oligonucleotide
cagccacacuucccuugau

SEQ ID NO: 2969287 - RNA, 19 nt, Artificial Sequence
  Description of Artificial Sequence: Synthetic oligonucleotide
ggggcagguggcauccauu

SEQ ID NO: 2969288 - RNA, 19 nt, Artificial Sequence
  Description of Artificial Sequence: Synthetic oligonucleotide
gcccuccuuggaguacucu

SEQ ID NO: 2969289 - RNA, 19 nt, Artificial Sequence
  Description of Artificial Sequence: Synthetic oligonucleotide
cgcuucacuccccgcgcaa

SEQ ID NO: 2969290 - RNA, 19 nt, Artificial Sequence
  Description of Artificial Sequence: Synthetic oligonucleotide
cgcgacucgcccgccgcuc

SEQ ID NO: 2969291 - RNA, 19 nt, Artificial Sequence
  Description of Artificial Sequence: Synthetic oligonucleotide
ccagcagcuccuggucaua

SEQ ID NO: 2969292 - RNA, 19 nt, Artificial Sequence
  Description of Artificial Sequence: Synthetic oligonucleotide
ccaccuccucggccuuucu

SEQ ID NO: 2969293 - RNA, 19 nt, Artificial Sequence
  Description of Artificial Sequence: Synthetic oligonucleotide
ccccagccacacuucccuu

SEQ ID NO: 2969294 - RNA, 19 nt, Artificial Sequence
  Description of Artificial Sequence: Synthetic oligonucleotide
cagaaaaugaaucagacgg

SEQ ID NO: 2969295 - RNA, 19 nt, Artificial Sequence
  Description of Artificial Sequence: Synthetic oligonucleotide
aauagaaacgaugugaugu

SEQ ID NO: 2969296 - RNA, 19 nt, Artificial Sequence
  Description of Artificial Sequence: Synthetic oligonucleotide
cuuaaacuuccuaagagcg

SEQ ID NO: 2969297 - RNA, 19 nt, Artificial Sequence
  Description of Artificial Sequence: Synthetic oligonucleotide
ucucguagcagcauggucg

SEQ ID NO: 2969298 - RNA, 19 nt, Artificial Sequence
  Description of Artificial Sequence: Synthetic oligonucleotide
uuggacuucaauagaaacg

SEQ ID NO: 2969299 - RNA, 19 nt, Artificial Sequence
  Description of Artificial Sequence: Synthetic oligonucleotide
aaaugaaucagacggcuug

SEQ ID NO: 2969300 - RNA, 19 nt, Artificial Sequence
  Description of Artificial Sequence: Synthetic oligonucleotide
gacauuacagucgcgaucg

SEQ ID NO: 2969301 - RNA, 19 nt, Artificial Sequence
  Description of Artificial Sequence: Synthetic oligonucleotide
uucaauagaaacgauguga

SEQ ID NO: 2969302 - RNA, 19 nt, Artificial Sequence
  Description of Artificial Sequence: Synthetic oligonucleotide
aggaugacauuacagucgc

SEQ ID NO: 2969303 - RNA, 19 nt, Artificial Sequence
  Description of Artificial Sequence: Synthetic oligonucleotide
gaaucagacggcuugagga

SEQ ID NO: 2969304 - RNA, 19 nt, Artificial Sequence
  Description of Artificial Sequence: Synthetic oligonucleotide
ucaauagaaacgaugugau

SEQ ID NO: 2969305 - RNA, 19 nt, Artificial Sequence
  Description of Artificial Sequence: Synthetic oligonucleotide
uggacuucaauagaaacga

SEQ ID NO: 2969306 - RNA, 19 nt, Artificial Sequence
  Description of Artificial Sequence: Synthetic oligonucleotide
auagaaacgaugugauguc

SEQ ID NO: 2969307 - RNA, 19 nt, Artificial Sequence
  Description of Artificial Sequence: Synthetic oligonucleotide
acugcaacagccguucucc

SEQ ID NO: 2969308 - RNA, 19 nt, Artificial Sequence
  Description of Artificial Sequence: Synthetic oligonucleotide
ucccuuuggacuucaauag

SEQ ID NO: 2969309 - RNA, 19 nt, Artificial Sequence
  Description of Artificial Sequence: Synthetic oligonucleotide
caggaugacauuacagucg

SEQ ID NO: 2969310 - RNA, 19 nt, Artificial Sequence
  Description of Artificial Sequence: Synthetic oligonucleotide
aacgccucuagcugcugcc

SEQ ID NO: 2969311 - RNA, 19 nt, Artificial Sequence
  Description of Artificial Sequence: Synthetic oligonucleotide
gaugugauguccugguacc

SEQ ID NO: 2969312 - RNA, 19 nt, Artificial Sequence
  Description of Artificial Sequence: Synthetic oligonucleotide
ugaaucagacggcuugagg

SEQ ID NO: 2969313 - RNA, 19 nt, Artificial Sequence
  Description of Artificial Sequence: Synthetic oligonucleotide
cuaagagcguuuugggucg

SEQ ID NO: 2969314 - RNA, 19 nt, Artificial Sequence
  Description of Artificial Sequence: Synthetic oligonucleotide
acuucaauagaaacgaugu

SEQ ID NO: 2969315 - RNA, 19 nt, Artificial Sequence
  Description of Artificial Sequence: Synthetic oligonucleotide
cuuccuaagagcguuuugg

SEQ ID NO: 2969316 - RNA, 19 nt, Artificial Sequence
  Description of Artificial Sequence: Synthetic oligonucleotide
uguccugguaccauggcca

SEQ ID NO: 2969317 - RNA, 19 nt, Artificial Sequence
  Description of Artificial Sequence: Synthetic oligonucleotide
ugagcaacgccucuagcug

SEQ ID NO: 2969318 - RNA, 19 nt, Artificial Sequence
  Description of Artificial Sequence: Synthetic oligonucleotide
gaagcagccgacuaguguc

SEQ ID NO: 2969319 - RNA, 19 nt, Artificial Sequence
  Description of Artificial Sequence: Synthetic oligonucleotide
ugauguccugguaccaugg

SEQ ID NO: 2969320 - RNA, 19 nt, Artificial Sequence
  Description of Artificial Sequence: Synthetic oligonucleotide
ucugucauacggaugcgca

SEQ ID NO: 2969321 - RNA, 19 nt, Artificial Sequence
  Description of Artificial Sequence: Synthetic oligonucleotide
uuccuaagagcguuuuggg

SEQ ID NO: 2969322 - RNA, 19 nt, Artificial Sequence
  Description of Artificial Sequence: Synthetic oligonucleotide
aacgaugugauguccuggu

SEQ ID NO: 2969323 - RNA, 19 nt, Artificial Sequence
  Description of Artificial Sequence: Synthetic oligonucleotide
uugagcaacgccucuagcu

SEQ ID NO: 2969324 - RNA, 19 nt, Artificial Sequence
  Description of Artificial Sequence: Synthetic oligonucleotide
auguccugguaccauggcc

SEQ ID NO: 2969325 - RNA, 19 nt, Artificial Sequence
  Description of Artificial Sequence: Synthetic oligonucleotide
gacuucaauagaaacgaug

SEQ ID NO: 2969326 - RNA, 19 nt, Artificial Sequence
  Description of Artificial Sequence: Synthetic oligonucleotide
uuaaacuuccuaagagcgu

SEQ ID NO: 2969327 - RNA, 19 nt, Artificial Sequence
  Description of Artificial Sequence: Synthetic oligonucleotide
uguugagcaacgccucuag

SEQ ID NO: 2969328 - RNA, 19 nt, Artificial Sequence
  Description of Artificial Sequence: Synthetic oligonucleotide
accuccucgggccuuaaac

SEQ ID NO: 2969329 - RNA, 19 nt, Artificial Sequence
  Description of Artificial Sequence: Synthetic oligonucleotide
aaacgaugugauguccugg

SEQ ID NO: 2969330 - RNA, 19 nt, Artificial Sequence
  Description of Artificial Sequence: Synthetic oligonucleotide
gaugacauuacagucgcga

SEQ ID NO: 2969331 - RNA, 19 nt, Artificial Sequence
  Description of Artificial Sequence: Synthetic oligonucleotide
ucuccgcagaaaaugaauc

SEQ ID NO: 2969332 - RNA, 19 nt, Artificial Sequence
  Description of Artificial Sequence: Synthetic oligonucleotide
aauuccugcgcagagccca

SEQ ID NO: 2969333 - RNA, 19 nt, Artificial Sequence
  Description of Artificial Sequence: Synthetic oligonucleotide
aaucagacggcuugaggaa

SEQ ID NO: 2969334 - RNA, 19 nt, Artificial Sequence
  Description of Artificial Sequence: Synthetic oligonucleotide
uccgcagaaaaugaaucag

SEQ ID NO: 2969335 - RNA, 19 nt, Artificial Sequence
  Description of Artificial Sequence: Synthetic oligonucleotide
ugguaccauggccagaccc

SEQ ID NO: 2969336 - RNA, 19 nt, Artificial Sequence
  Description of Artificial Sequence: Synthetic oligonucleotide
gaaacgaugugauguccug

SEQ ID NO: 2969337 - RNA, 19 nt, Artificial Sequence
  Description of Artificial Sequence: Synthetic oligonucleotide
ccuuccaucugucauacgg

SEQ ID NO: 2969338 - RNA, 19 nt, Artificial Sequence
  Description of Artificial Sequence: Synthetic oligonucleotide
auuacagucgcgaucggug

SEQ ID NO: 2969339 - RNA, 19 nt, Artificial Sequence
  Description of Artificial Sequence: Synthetic oligonucleotide
uccucucguagcagcaugg

SEQ ID NO: 2969340 - RNA, 19 nt, Artificial Sequence
  Description of Artificial Sequence: Synthetic oligonucleotide
ucugacgccgacugcaaca

SEQ ID NO: 2969341 - RNA, 19 nt, Artificial Sequence
  Description of Artificial Sequence: Synthetic oligonucleotide
ugacauuacagucgcgauc

SEQ ID NO: 2969342 - RNA, 19 nt, Artificial Sequence
  Description of Artificial Sequence: Synthetic oligonucleotide
augcgcauggucuuguuga

SEQ ID NO: 2969343 - RNA, 19 nt, Artificial Sequence
  Description of Artificial Sequence: Synthetic oligonucleotide
gcagaaaaugaaucagacg

SEQ ID NO: 2969344 - RNA, 19 nt, Artificial Sequence
  Description of Artificial Sequence: Synthetic oligonucleotide
aaugaaucagacggcuuga

SEQ ID NO: 2969345 - RNA, 19 nt, Artificial Sequence
  Description of Artificial Sequence: Synthetic oligonucleotide
ccaucugucauacggaugc

SEQ ID NO: 2969346 - RNA, 19 nt, Artificial Sequence
  Description of Artificial Sequence: Synthetic oligonucleotide
ccuuaaacuuccuaagagc

SEQ ID NO: 2969347 - RNA, 19 nt, Artificial Sequence
  Description of Artificial Sequence: Synthetic oligonucleotide
acaggaagcagccgacuag

SEQ ID NO: 2969348 - RNA, 19 nt, Artificial Sequence
  Description of Artificial Sequence: Synthetic oligonucleotide
uaaacuuccuaagagcguu

SEQ ID NO: 2969349 - RNA, 19 nt, Artificial Sequence
  Description of Artificial Sequence: Synthetic oligonucleotide
ggaauuccugcgcagagcc

SEQ ID NO: 2969350 - RNA, 19 nt, Artificial Sequence
  Description of Artificial Sequence: Synthetic oligonucleotide
uuacagucgcgaucggugc

SEQ ID NO: 2969351 - RNA, 19 nt, Artificial Sequence
  Description of Artificial Sequence: Synthetic oligonucleotide
ucuuguugagcaacgccuc

SEQ ID NO: 2969352 - RNA, 19 nt, Artificial Sequence
  Description of Artificial Sequence: Synthetic oligonucleotide
ugucauacggaugcgcaug

SEQ ID NO: 2969353 - RNA, 19 nt, Artificial Sequence
  Description of Artificial Sequence: Synthetic oligonucleotide
acuaguguccuuccaucug

SEQ ID NO: 2969354 - RNA, 19 nt, Artificial Sequence
  Description of Artificial Sequence: Synthetic oligonucleotide
cuucaauagaaacgaugug

SEQ ID NO: 2969355 - RNA, 19 nt, Artificial Sequence
  Description of Artificial Sequence: Synthetic oligonucleotide
ugcgcagagcccaggauga

SEQ ID NO: 2969356 - RNA, 19 nt, Artificial Sequence
  Description of Artificial Sequence: Synthetic oligonucleotide
uucuccgcagaaaaugaau

SEQ ID NO: 2969357 - RNA, 19 nt, Artificial Sequence
  Description of Artificial Sequence: Synthetic oligonucleotide
gccuuaaacuuccuaagag

SEQ ID NO: 2969358 - RNA, 19 nt, Artificial Sequence
  Description of Artificial Sequence: Synthetic oligonucleotide
agcguuuugggucgggugu

SEQ ID NO: 2969359 - RNA, 19 nt, Artificial Sequence
  Description of Artificial Sequence: Synthetic oligonucleotide
aucugucauacggaugcgc

SEQ ID NO: 2969360 - RNA, 19 nt, Artificial Sequence
  Description of Artificial Sequence: Synthetic oligonucleotide
uugaggaauuccugcgcag

SEQ ID NO: 2969361 - RNA, 19 nt, Artificial Sequence
  Description of Artificial Sequence: Synthetic oligonucleotide
uccuaagagcguuuugggu

SEQ ID NO: 2969362 - RNA, 19 nt, Artificial Sequence
  Description of Artificial Sequence: Synthetic oligonucleotide
cucguagcagcauggucgg

SEQ ID NO: 2969363 - RNA, 19 nt, Artificial Sequence
  Description of Artificial Sequence: Synthetic oligonucleotide
aagcagccgacuagugucc

SEQ ID NO: 2969364 - RNA, 19 nt, Artificial Sequence
  Description of Artificial Sequence: Synthetic oligonucleotide
uguucagaucucgcgagug

SEQ ID NO: 2969365 - RNA, 19 nt, Artificial Sequence
  Description of Artificial Sequence: Synthetic oligonucleotide
gucauacggaugcgcaugg

SEQ ID NO: 2969366 - RNA, 19 nt, Artificial Sequence
  Description of Artificial Sequence: Synthetic oligonucleotide
caauagaaacgaugugaug

SEQ ID NO: 2969367 - RNA, 19 nt, Artificial Sequence
  Description of Artificial Sequence: Synthetic oligonucleotide
gacgccgacugcaacagcc

SEQ ID NO: 2969368 - RNA, 19 nt, Artificial Sequence
  Description of Artificial Sequence: Synthetic oligonucleotide
gaugcgcauggucuuguug

SEQ ID NO: 2969369 - RNA, 19 nt, Artificial Sequence
  Description of Artificial Sequence: Synthetic oligonucleotide
uccaucugucauacggaug

SEQ ID NO: 2969370 - RNA, 19 nt, Artificial Sequence
  Description of Artificial Sequence: Synthetic oligonucleotide
uagaaacgaugugaugucc

SEQ ID NO: 2969371 - RNA, 19 nt, Artificial Sequence
  Description of Artificial Sequence: Synthetic oligonucleotide
ccuaagagcguuuuggguc

SEQ ID NO: 2969372 - RNA, 19 nt, Artificial Sequence
  Description of Artificial Sequence: Synthetic oligonucleotide
gaaaaugaaucagacggcu

SEQ ID NO: 2969373 - RNA, 19 nt, Artificial Sequence
  Description of Artificial Sequence: Synthetic oligonucleotide
ucgcgaucggugcacagga

SEQ ID NO: 2969374 - RNA, 19 nt, Artificial Sequence
  Description of Artificial Sequence: Synthetic oligonucleotide
uuuugggucggguguucag

SEQ ID NO: 2969375 - RNA, 19 nt, Artificial Sequence
  Description of Artificial Sequence: Synthetic oligonucleotide
ucggugcacaggaagcagc

SEQ ID NO: 2969376 - RNA, 19 nt, Artificial Sequence
  Description of Artificial Sequence: Synthetic oligonucleotide
uggagcugcucugacgccg

SEQ ID NO: 2969377 - RNA, 19 nt, Artificial Sequence
  Description of Artificial Sequence: Synthetic oligonucleotide
agcauggucggcccagcuc

SEQ ID NO: 2969378 - RNA, 19 nt, Artificial Sequence
  Description of Artificial Sequence: Synthetic oligonucleotide
gguguucagaucucgcgag

SEQ ID NO: 2969379 - RNA, 19 nt, Artificial Sequence
  Description of Artificial Sequence: Synthetic oligonucleotide
ggcuugaggaauuccugcg

SEQ ID NO: 2969380 - RNA, 19 nt, Artificial Sequence
  Description of Artificial Sequence: Synthetic oligonucleotide
uuccccgucagaguccccg

SEQ ID NO: 2969381 - RNA, 19 nt, Artificial Sequence
  Description of Artificial Sequence: Synthetic oligonucleotide
uucagaucucgcgagugcu

SEQ ID NO: 2969382 - RNA, 19 nt, Artificial Sequence
  Description of Artificial Sequence: Synthetic oligonucleotide
aacagccguucuccucucg

SEQ ID NO: 2969383 - RNA, 19 nt, Artificial Sequence
  Description of Artificial Sequence: Synthetic oligonucleotide
gagcaacgccucuagcugc

SEQ ID NO: 2969384 - RNA, 19 nt, Artificial Sequence
  Description of Artificial Sequence: Synthetic oligonucleotide
ugaggaauuccugcgcaga

SEQ ID NO: 2969385 - RNA, 19 nt, Artificial Sequence
  Description of Artificial Sequence: Synthetic oligonucleotide
cauacggaugcgcaugguc

SEQ ID NO: 2969386 - RNA, 19 nt, Artificial Sequence
  Description of Artificial Sequence: Synthetic oligonucleotide
uguccuuccaucugucaua

SEQ ID NO: 2969387 - RNA, 19 nt, Artificial Sequence
  Description of Artificial Sequence: Synthetic oligonucleotide
uuccaucugucauacggau

SEQ ID NO: 2969388 - RNA, 19 nt, Artificial Sequence
  Description of Artificial Sequence: Synthetic oligonucleotide
agaucucgcgagugcuccc

SEQ ID NO: 2969389 - RNA, 19 nt, Artificial Sequence
  Description of Artificial Sequence: Synthetic oligonucleotide
auacggaugcgcauggucu

SEQ ID NO: 2969390 - RNA, 19 nt, Artificial Sequence
  Description of Artificial Sequence: Synthetic oligonucleotide
agccguucuccucucguag

SEQ ID NO: 2969391 - RNA, 19 nt, Artificial Sequence
  Description of Artificial Sequence: Synthetic oligonucleotide
guucagaucucgcgagugc

SEQ ID NO: 2969392 - RNA, 19 nt, Artificial Sequence
  Description of Artificial Sequence: Synthetic oligonucleotide
ugcucugacgccgacugca

SEQ ID NO: 2969393 - RNA, 19 nt, Artificial Sequence
  Description of Artificial Sequence: Synthetic oligonucleotide
augacauuacagucgcgau

SEQ ID NO: 2969394 - RNA, 19 nt, Artificial Sequence
  Description of Artificial Sequence: Synthetic oligonucleotide
gauguccugguaccauggc

SEQ ID NO: 2969395 - RNA, 19 nt, Artificial Sequence
  Description of Artificial Sequence: Synthetic oligonucleotide
agcacacgggguucuccgc

SEQ ID NO: 2969396 - RNA, 19 nt, Artificial Sequence
  Description of Artificial Sequence: Synthetic oligonucleotide
cauggucuuguugagcaac

SEQ ID NO: 2969397 - RNA, 19 nt, Artificial Sequence
  Description of Artificial Sequence: Synthetic oligonucleotide
ugcacaggaagcagccgac

SEQ ID NO: 2969398 - RNA, 19 nt, Artificial Sequence
  Description of Artificial Sequence: Synthetic oligonucleotide
uuugggucggguguucaga

SEQ ID NO: 2969399 - RNA, 19 nt, Artificial Sequence
  Description of Artificial Sequence: Synthetic oligonucleotide
cuugaggaauuccugcgca

SEQ ID NO: 2969400 - RNA, 19 nt, Artificial Sequence
  Description of Artificial Sequence: Synthetic oligonucleotide
ucucccuuuggacuucaau

SEQ ID NO: 2969401 - RNA, 19 nt, Artificial Sequence
  Description of Artificial Sequence: Synthetic oligonucleotide
cucgcgagugcucccaggc

SEQ ID NO: 2969402 - RNA, 19 nt, Artificial Sequence
  Description of Artificial Sequence: Synthetic oligonucleotide
ugcgcauggucuuguugag

SEQ ID NO: 2969403 - RNA, 19 nt, Artificial Sequence
  Description of Artificial Sequence: Synthetic oligonucleotide
aaaaugaaucagacggcuu

SEQ ID NO: 2969404 - RNA, 19 nt, Artificial Sequence
  Description of Artificial Sequence: Synthetic oligonucleotide
acuuccuaagagcguuuug

SEQ ID NO: 2969405 - RNA, 19 nt, Artificial Sequence
  Description of Artificial Sequence: Synthetic oligonucleotide
agaaacgaugugauguccu

SEQ ID NO: 2969406 - RNA, 19 nt, Artificial Sequence
  Description of Artificial Sequence: Synthetic oligonucleotide
gagcguuuugggucgggug

SEQ ID NO: 2969407 - RNA, 19 nt, Artificial Sequence
  Description of Artificial Sequence: Synthetic oligonucleotide
gugauguccugguaccaug

SEQ ID NO: 2969408 - RNA, 19 nt, Artificial Sequence
  Description of Artificial Sequence: Synthetic oligonucleotide
ucggguguucagaucucgc

SEQ ID NO: 2969409 - RNA, 19 nt, Artificial Sequence
  Description of Artificial Sequence: Synthetic oligonucleotide
uacagucgcgaucggugca

SEQ ID NO: 2969410 - RNA, 19 nt, Artificial Sequence
  Description of Artificial Sequence: Synthetic oligonucleotide
guagcagcauggucggccc

SEQ ID NO: 2969411 - RNA, 19 nt, Artificial Sequence
  Description of Artificial Sequence: Synthetic oligonucleotide
cagcacacgggguucuccg

SEQ ID NO: 2969412 - RNA, 19 nt, Artificial Sequence
  Description of Artificial Sequence: Synthetic oligonucleotide
cugcgcagagcccaggaug

SEQ ID NO: 2969413 - RNA, 19 nt, Artificial Sequence
  Description of Artificial Sequence: Synthetic oligonucleotide
gcauggucggcccagcucc

SEQ ID NO: 2969414 - RNA, 19 nt, Artificial Sequence
  Description of Artificial Sequence: Synthetic oligonucleotide
agccgacuaguguccuucc

SEQ ID NO: 2969415 - RNA, 19 nt, Artificial Sequence
  Description of Artificial Sequence: Synthetic oligonucleotide
cuccgcagaaaaugaauca

SEQ ID NO: 2969416 - RNA, 19 nt, Artificial Sequence
  Description of Artificial Sequence: Synthetic oligonucleotide
auggucuuguugagcaacg

SEQ ID NO: 2969417 - RNA, 19 nt, Artificial Sequence
  Description of Artificial Sequence: Synthetic oligonucleotide
cuuccaucugucauacgga

SEQ ID NO: 2969418 - RNA, 19 nt, Artificial Sequence
  Description of Artificial Sequence: Synthetic oligonucleotide
ucagaucucgcgagugcuc

SEQ ID NO: 2969419 - RNA, 19 nt, Artificial Sequence
  Description of Artificial Sequence: Synthetic oligonucleotide
acagucgcgaucggugcac

SEQ ID NO: 2969420 - RNA, 19 nt, Artificial Sequence
  Description of Artificial Sequence: Synthetic oligonucleotide
uguuccccgucagaguccc

SEQ ID NO: 2969421 - RNA, 19 nt, Artificial Sequence
  Description of Artificial Sequence: Synthetic oligonucleotide
uccucgggccuuaaacuuc

SEQ ID NO: 2969422 - RNA, 19 nt, Artificial Sequence
  Description of Artificial Sequence: Synthetic oligonucleotide
cuccuguuccccgucagag

SEQ ID NO: 2969423 - RNA, 19 nt, Artificial Sequence
  Description of Artificial Sequence: Synthetic oligonucleotide
ccaggaugacauuacaguc

SEQ ID NO: 2969424 - RNA, 19 nt, Artificial Sequence
  Description of Artificial Sequence: Synthetic oligonucleotide
cuagcugcugccgggcacg

SEQ ID NO: 2969425 - RNA, 19 nt, Artificial Sequence
  Description of Artificial Sequence: Synthetic oligonucleotide
cagaucucgcgagugcucc

SEQ ID NO: 2969426 - RNA, 19 nt, Artificial Sequence
  Description of Artificial Sequence: Synthetic oligonucleotide
gacugcaacagccguucuc

SEQ ID NO: 2969427 - RNA, 19 nt, Artificial Sequence
  Description of Artificial Sequence: Synthetic oligonucleotide
agacggcuugaggaauucc

SEQ ID NO: 2969428 - RNA, 19 nt, Artificial Sequence
  Description of Artificial Sequence: Synthetic oligonucleotide
cauggccagacccagcaca

SEQ ID NO: 2969429 - RNA, 19 nt, Artificial Sequence
  Description of Artificial Sequence: Synthetic oligonucleotide
uccuccuguuccccgucag

SEQ ID NO: 2969430 - RNA, 19 nt, Artificial Sequence
  Description of Artificial Sequence: Synthetic oligonucleotide
ggccagacccagcacacgg

SEQ ID NO: 2969431 - RNA, 19 nt, Artificial Sequence
  Description of Artificial Sequence: Synthetic oligonucleotide
ucucgcgagugcucccagg

SEQ ID NO: 2969432 - RNA, 19 nt, Artificial Sequence
  Description of Artificial Sequence: Synthetic oligonucleotide
aguguccuuccaucuguca

SEQ ID NO: 2969433 - RNA, 19 nt, Artificial Sequence
  Description of Artificial Sequence: Synthetic oligonucleotide
gugcacaggaagcagccga

SEQ ID NO: 2969434 - RNA, 19 nt, Artificial Sequence
  Description of Artificial Sequence: Synthetic oligonucleotide
auggccagacccagcacac

SEQ ID NO: 2969435 - RNA, 19 nt, Artificial Sequence
  Description of Artificial Sequence: Synthetic oligonucleotide
gcugcucugacgccgacug

SEQ ID NO: 2969436 - RNA, 19 nt, Artificial Sequence
  Description of Artificial Sequence: Synthetic oligonucleotide
ugugauguccugguaccau

SEQ ID NO: 2969437 - RNA, 19 nt, Artificial Sequence
  Description of Artificial Sequence: Synthetic oligonucleotide
guugagcaacgccucuagc

SEQ ID NO: 2969438 - RNA, 19 nt, Artificial Sequence
  Description of Artificial Sequence: Synthetic oligonucleotide
augaaucagacggcuugag

SEQ ID NO: 2969439 - RNA, 19 nt, Artificial Sequence
  Description of Artificial Sequence: Synthetic oligonucleotide
ugcaacagccguucuccuc

SEQ ID NO: 2969440 - RNA, 19 nt, Artificial Sequence
  Description of Artificial Sequence: Synthetic oligonucleotide
acagccguucuccucucgu

SEQ ID NO: 2969441 - RNA, 19 nt, Artificial Sequence
  Description of Artificial Sequence: Synthetic oligonucleotide
ucagacggcuugaggaauu

SEQ ID NO: 2969442 - RNA, 19 nt, Artificial Sequence
  Description of Artificial Sequence: Synthetic oligonucleotide
uugggucggguguucagau

SEQ ID NO: 2969443 - RNA, 19 nt, Artificial Sequence
  Description of Artificial Sequence: Synthetic oligonucleotide
gucgcgaucggugcacagg

SEQ ID NO: 2969444 - RNA, 19 nt, Artificial Sequence
  Description of Artificial Sequence: Synthetic oligonucleotide
cgcagaaaaugaaucagac

SEQ ID NO: 2969445 - RNA, 19 nt, Artificial Sequence
  Description of Artificial Sequence: Synthetic oligonucleotide
agacccagcacacgggguu

SEQ ID NO: 2969446 - RNA, 19 nt, Artificial Sequence
  Description of Artificial Sequence: Synthetic oligonucleotide
acauuacagucgcgaucgg

SEQ ID NO: 2969447 - RNA, 19 nt, Artificial Sequence
  Description of Artificial Sequence: Synthetic oligonucleotide
gaucggugcacaggaagca

SEQ ID NO: 2969448 - RNA, 19 nt, Artificial Sequence
  Description of Artificial Sequence: Synthetic oligonucleotide
gacuaguguccuuccaucu

SEQ ID NO: 2969449 - RNA, 19 nt, Artificial Sequence
  Description of Artificial Sequence: Synthetic oligonucleotide
uccugcgcagagcccagga

SEQ ID NO: 2969450 - RNA, 19 nt, Artificial Sequence
  Description of Artificial Sequence: Synthetic oligonucleotide
gcuugaggaauuccugcgc

SEQ ID NO: 2969451 - RNA, 19 nt, Artificial Sequence
  Description of Artificial Sequence: Synthetic oligonucleotide
ggguucuccgcagaaaaug

SEQ ID NO: 2969452 - RNA, 19 nt, Artificial Sequence
  Description of Artificial Sequence: Synthetic oligonucleotide
gucuuguugagcaacgccu

SEQ ID NO: 2969453 - RNA, 19 nt, Artificial Sequence
  Description of Artificial Sequence: Synthetic oligonucleotide
aacuuccuaagagcguuuu

SEQ ID NO: 2969454 - RNA, 19 nt, Artificial Sequence
  Description of Artificial Sequence: Synthetic oligonucleotide
uggucuuguugagcaacgc

SEQ ID NO: 2969455 - RNA, 19 nt, Artificial Sequence
  Description of Artificial Sequence: Synthetic oligonucleotide
aagagcguuuugggucggg

SEQ ID NO: 2969456 - RNA, 19 nt, Artificial Sequence
  Description of Artificial Sequence: Synthetic oligonucleotide
aguccuccuguuccccguc

SEQ ID NO: 2969457 - RNA, 19 nt, Artificial Sequence
  Description of Artificial Sequence: Synthetic oligonucleotide
gcgaucggugcacaggaag

SEQ ID NO: 2969458 - RNA, 19 nt, Artificial Sequence
  Description of Artificial Sequence: Synthetic oligonucleotide
gucggguguucagaucucg

SEQ ID NO: 2969459 - RNA, 19 nt, Artificial Sequence
  Description of Artificial Sequence: Synthetic oligonucleotide
aucggugcacaggaagcag

SEQ ID NO: 2969460 - RNA, 19 nt, Artificial Sequence
  Description of Artificial Sequence: Synthetic oligonucleotide
cugacgccgacugcaacag

SEQ ID NO: 2969461 - RNA, 19 nt, Artificial Sequence
  Description of Artificial Sequence: Synthetic oligonucleotide
uccuguuccccgucagagu

SEQ ID NO: 2969462 - RNA, 19 nt, Artificial Sequence
  Description of Artificial Sequence: Synthetic oligonucleotide
cucucguagcagcaugguc

SEQ ID NO: 2969463 - RNA, 19 nt, Artificial Sequence
  Description of Artificial Sequence: Synthetic oligonucleotide
guaccauggccagacccag

SEQ ID NO: 2969464 - RNA, 19 nt, Artificial Sequence
  Description of Artificial Sequence: Synthetic oligonucleotide
cuguuccccgucagagucc

SEQ ID NO: 2969465 - RNA, 19 nt, Artificial Sequence
  Description of Artificial Sequence: Synthetic oligonucleotide
caacgccucuagcugcugc

SEQ ID NO: 2969466 - RNA, 19 nt, Artificial Sequence
  Description of Artificial Sequence: Synthetic oligonucleotide
uaagagcguuuugggucgg

SEQ ID NO: 2969467 - RNA, 19 nt, Artificial Sequence
  Description of Artificial Sequence: Synthetic oligonucleotide
uacggaugcgcauggucuu

SEQ ID NO: 2969468 - RNA, 19 nt, Artificial Sequence
  Description of Artificial Sequence: Synthetic oligonucleotide
agcccaggaugacauuaca

SEQ ID NO: 2969469 - RNA, 19 nt, Artificial Sequence
  Description of Artificial Sequence: Synthetic oligonucleotide
guccugguaccauggccag

SEQ ID NO: 2969470 - RNA, 19 nt, Artificial Sequence
  Description of Artificial Sequence: Synthetic oligonucleotide
cacacgggguucuccgcag

SEQ ID NO: 2969471 - RNA, 19 nt, Artificial Sequence
  Description of Artificial Sequence: Synthetic oligonucleotide
acggcuugaggaauuccug

SEQ ID NO: 2969472 - RNA, 19 nt, Artificial Sequence
  Description of Artificial Sequence: Synthetic oligonucleotide
ccugggaccuccucgggcc

SEQ ID NO: 2969473 - RNA, 19 nt, Artificial Sequence
  Description of Artificial Sequence: Synthetic oligonucleotide
ggccuuaaacuuccuaaga

SEQ ID NO: 2969474 - RNA, 19 nt, Artificial Sequence
  Description of Artificial Sequence: Synthetic oligonucleotide
gaauuccugcgcagagccc

SEQ ID NO: 2969475 - RNA, 19 nt, Artificial Sequence
  Description of Artificial Sequence: Synthetic oligonucleotide
guccuuccaucugucauac

SEQ ID NO: 2969476 - RNA, 19 nt, Artificial Sequence
  Description of Artificial Sequence: Synthetic oligonucleotide
caucugucauacggaugcg

SEQ ID NO: 2969477 - RNA, 19 nt, Artificial Sequence
  Description of Artificial Sequence: Synthetic oligonucleotide
ucgggccuuaaacuuccua

SEQ ID NO: 2969478 - RNA, 19 nt, Artificial Sequence
  Description of Artificial Sequence: Synthetic oligonucleotide
cuaguguccuuccaucugu

SEQ ID NO: 2969479 - RNA, 19 nt, Artificial Sequence
  Description of Artificial Sequence: Synthetic oligonucleotide
uuguugagcaacgccucua

SEQ ID NO: 2969480 - RNA, 19 nt, Artificial Sequence
  Description of Artificial Sequence: Synthetic oligonucleotide
uccuuccaucugucauacg

SEQ ID NO: 2969481 - RNA, 19 nt, Artificial Sequence
  Description of Artificial Sequence: Synthetic oligonucleotide
cauggucggcccagcuccg

SEQ ID NO: 2969482 - RNA, 19 nt, Artificial Sequence
  Description of Artificial Sequence: Synthetic oligonucleotide
uggucggcccagcuccggc

SEQ ID NO: 2969483 - RNA, 19 nt, Artificial Sequence
  Description of Artificial Sequence: Synthetic oligonucleotide
ggguguucagaucucgcga

SEQ ID NO: 2969484 - RNA, 19 nt, Artificial Sequence
  Description of Artificial Sequence: Synthetic oligonucleotide
agucgcgaucggugcacag

SEQ ID NO: 2969485 - RNA, 19 nt, Artificial Sequence
  Description of Artificial Sequence: Synthetic oligonucleotide
gacggcuugaggaauuccu

SEQ ID NO: 2969486 - RNA, 19 nt, Artificial Sequence
  Description of Artificial Sequence: Synthetic oligonucleotide
ccagcuccggccauuggcc

SEQ ID NO: 2969487 - RNA, 19 nt, Artificial Sequence
  Description of Artificial Sequence: Synthetic oligonucleotide
cgaugugauguccugguac

SEQ ID NO: 2969488 - RNA, 19 nt, Artificial Sequence
  Description of Artificial Sequence: Synthetic oligonucleotide
gcugcugccgggcacgcgc

SEQ ID NO: 2969489 - RNA, 19 nt, Artificial Sequence
  Description of Artificial Sequence: Synthetic oligonucleotide
ccuuuggacuucaauagaa

SEQ ID NO: 2969490 - RNA, 19 nt, Artificial Sequence
  Description of Artificial Sequence: Synthetic oligonucleotide
ucgcgagugcucccaggcu

SEQ ID NO: 2969491 - RNA, 19 nt, Artificial Sequence
  Description of Artificial Sequence: Synthetic oligonucleotide
gagcccaggaugacauuac

SEQ ID NO: 2969492 - RNA, 19 nt, Artificial Sequence
  Description of Artificial Sequence: Synthetic oligonucleotide
ccagacccagcacacgggg

SEQ ID NO: 2969493 - RNA, 19 nt, Artificial Sequence
  Description of Artificial Sequence: Synthetic oligonucleotide
ggcccugggaccuccucgg

SEQ ID NO: 2969494 - RNA, 19 nt, Artificial Sequence
  Description of Artificial Sequence: Synthetic oligonucleotide
gguucuccgcagaaaauga

SEQ ID NO: 2969495 - RNA, 19 nt, Artificial Sequence
  Description of Artificial Sequence: Synthetic oligonucleotide
gguaccauggccagaccca

SEQ ID NO: 2969496 - RNA, 19 nt, Artificial Sequence
  Description of Artificial Sequence: Synthetic oligonucleotide
aucucgcgagugcucccag

SEQ ID NO: 2969497 - RNA, 19 nt, Artificial Sequence
  Description of Artificial Sequence: Synthetic oligonucleotide
ccugguaccauggccagac

SEQ ID NO: 2969498 - RNA, 19 nt, Artificial Sequence
  Description of Artificial Sequence: Synthetic oligonucleotide
aaacuuccuaagagcguuu

SEQ ID NO: 2969499 - RNA, 19 nt, Artificial Sequence
  Description of Artificial Sequence: Synthetic oligonucleotide
agagcguuuugggucgggu

SEQ ID NO: 2969500 - RNA, 19 nt, Artificial Sequence
  Description of Artificial Sequence: Synthetic oligonucleotide
cuggagcugcucugacgcc

SEQ ID NO: 2969501 - RNA, 19 nt, Artificial Sequence
  Description of Artificial Sequence: Synthetic oligonucleotide
ugacgccgacugcaacagc

SEQ ID NO: 2969502 - RNA, 19 nt, Artificial Sequence
  Description of Artificial Sequence: Synthetic oligonucleotide
aucagacggcuugaggaau

SEQ ID NO: 2969503 - RNA, 19 nt, Artificial Sequence
  Description of Artificial Sequence: Synthetic oligonucleotide
cgaucggugcacaggaagc

SEQ ID NO: 2969504 - RNA, 19 nt, Artificial Sequence
  Description of Artificial Sequence: Synthetic oligonucleotide
cagcuccggccauuggccc

SEQ ID NO: 2969505 - RNA, 19 nt, Artificial Sequence
  Description of Artificial Sequence: Synthetic oligonucleotide
gaucucgcgagugcuccca

SEQ ID NO: 2969506 - RNA, 19 nt, Artificial Sequence
  Description of Artificial Sequence: Synthetic oligonucleotide
acgcgcagccggcgagucc

SEQ ID NO: 2969507 - RNA, 19 nt, Artificial Sequence
  Description of Artificial Sequence: Synthetic oligonucleotide
ccucgggccuuaaacuucc

SEQ ID NO: 2969508 - RNA, 19 nt, Artificial Sequence
  Description of Artificial Sequence: Synthetic oligonucleotide
cugccgggcacgcgcagcc

SEQ ID NO: 2969509 - RNA, 19 nt, Artificial Sequence
  Description of Artificial Sequence: Synthetic oligonucleotide
acgccucuagcugcugccg

SEQ ID NO: 2969510 - RNA, 19 nt, Artificial Sequence
  Description of Artificial Sequence: Synthetic oligonucleotide
cagccgacuaguguccuuc

SEQ ID NO: 2969511 - RNA, 19 nt, Artificial Sequence
  Description of Artificial Sequence: Synthetic oligonucleotide
acgccgacugcaacagccg

SEQ ID NO: 2969512 - RNA, 19 nt, Artificial Sequence
  Description of Artificial Sequence: Synthetic oligonucleotide
augugauguccugguacca

SEQ ID NO: 2969513 - RNA, 19 nt, Artificial Sequence
  Description of Artificial Sequence: Synthetic oligonucleotide
ggccauuggcccugggacc

SEQ ID NO: 2969514 - RNA, 19 nt, Artificial Sequence
  Description of Artificial Sequence: Synthetic oligonucleotide
gccucuagcugcugccggg

SEQ ID NO: 2969515 - RNA, 19 nt, Artificial Sequence
  Description of Artificial Sequence: Synthetic oligonucleotide
cggguguucagaucucgcg

SEQ ID NO: 2969516 - RNA, 19 nt, Artificial Sequence
  Description of Artificial Sequence: Synthetic oligonucleotide
agcuccggccauuggcccu

SEQ ID NO: 2969517 - RNA, 19 nt, Artificial Sequence
  Description of Artificial Sequence: Synthetic oligonucleotide
gcccaggaugacauuacag

SEQ ID NO: 2969518 - RNA, 19 nt, Artificial Sequence
  Description of Artificial Sequence: Synthetic oligonucleotide
gcaacagccguucuccucu

SEQ ID NO: 2969519 - RNA, 19 nt, Artificial Sequence
  Description of Artificial Sequence: Synthetic oligonucleotide
gggucggguguucagaucu

SEQ ID NO: 2969520 - RNA, 19 nt, Artificial Sequence
  Description of Artificial Sequence: Synthetic oligonucleotide
cucugacgccgacugcaac

SEQ ID NO: 2969521 - RNA, 19 nt, Artificial Sequence
  Description of Artificial Sequence: Synthetic oligonucleotide
ucauacggaugcgcauggu

SEQ ID NO: 2969522 - RNA, 19 nt, Artificial Sequence
  Description of Artificial Sequence: Synthetic oligonucleotide
guguccuuccaucugucau

SEQ ID NO: 2969523 - RNA, 19 nt, Artificial Sequence
  Description of Artificial Sequence: Synthetic oligonucleotide
cccagcuccggccauuggc

SEQ ID NO: 2969524 - RNA, 19 nt, Artificial Sequence
  Description of Artificial Sequence: Synthetic oligonucleotide
acgaugugauguccuggua

SEQ ID NO: 2969525 - RNA, 19 nt, Artificial Sequence
  Description of Artificial Sequence: Synthetic oligonucleotide
ugggucggguguucagauc

SEQ ID NO: 2969526 - RNA, 19 nt, Artificial Sequence
  Description of Artificial Sequence: Synthetic oligonucleotide
ucuccucucguagcagcau

SEQ ID NO: 2969527 - RNA, 19 nt, Artificial Sequence
  Description of Artificial Sequence: Synthetic oligonucleotide
ggugcacaggaagcagccg

SEQ ID NO: 2969528 - RNA, 19 nt, Artificial Sequence
  Description of Artificial Sequence: Synthetic oligonucleotide
gucagaguccccggcgcug

SEQ ID NO: 2969529 - RNA, 19 nt, Artificial Sequence
  Description of Artificial Sequence: Synthetic oligonucleotide
cauuggcccugggaccucc

SEQ ID NO: 2969530 - RNA, 19 nt, Artificial Sequence
  Description of Artificial Sequence: Synthetic oligonucleotide
cguagcagcauggucggcc

SEQ ID NO: 2969531 - RNA, 19 nt, Artificial Sequence
  Description of Artificial Sequence: Synthetic oligonucleotide
cacaggaagcagccgacua

SEQ ID NO: 2969532 - RNA, 19 nt, Artificial Sequence
  Description of Artificial Sequence: Synthetic oligonucleotide
ggcgaguccuccuguuccc

SEQ ID NO: 2969533 - RNA, 19 nt, Artificial Sequence
  Description of Artificial Sequence: Synthetic oligonucleotide
guucuccgcagaaaaugaa

SEQ ID NO: 2969534 - RNA, 19 nt, Artificial Sequence
  Description of Artificial Sequence: Synthetic oligonucleotide
agcaacgccucuagcugcu

SEQ ID NO: 2969535 - RNA, 19 nt, Artificial Sequence
  Description of Artificial Sequence: Synthetic oligonucleotide
guuuugggucggguguuca

SEQ ID NO: 2969536 - RNA, 19 nt, Artificial Sequence
  Description of Artificial Sequence: Synthetic oligonucleotide
gccguucuccucucguagc

SEQ ID NO: 2969537 - RNA, 19 nt, Artificial Sequence
  Description of Artificial Sequence: Synthetic oligonucleotide
cgcauggucuuguugagca

SEQ ID NO: 2969538 - RNA, 19 nt, Artificial Sequence
  Description of Artificial Sequence: Synthetic oligonucleotide
cugguaccauggccagacc

SEQ ID NO: 2969539 - RNA, 19 nt, Artificial Sequence
  Description of Artificial Sequence: Synthetic oligonucleotide
uuggcccugggaccuccuc

SEQ ID NO: 2969540 - RNA, 19 nt, Artificial Sequence
  Description of Artificial Sequence: Synthetic oligonucleotide
acggaugcgcauggucuug

SEQ ID NO: 2969541 - RNA, 19 nt, Artificial Sequence
  Description of Artificial Sequence: Synthetic oligonucleotide
ggaagcagccgacuagugu

SEQ ID NO: 2969542 - RNA, 19 nt, Artificial Sequence
  Description of Artificial Sequence: Synthetic oligonucleotide
ugcugccgggcacgcgcag

SEQ ID NO: 2969543 - RNA, 19 nt, Artificial Sequence
  Description of Artificial Sequence: Synthetic oligonucleotide
ccgcagaaaaugaaucaga

SEQ ID NO: 2969544 - RNA, 19 nt, Artificial Sequence
  Description of Artificial Sequence: Synthetic oligonucleotide
cccaggaugacauuacagu

SEQ ID NO: 2969545 - RNA, 19 nt, Artificial Sequence
  Description of Artificial Sequence: Synthetic oligonucleotide
aggaagcagccgacuagug

SEQ ID NO: 2969546 - RNA, 19 nt, Artificial Sequence
  Description of Artificial Sequence: Synthetic oligonucleotide
cggcuugaggaauuccugc

SEQ ID NO: 2969547 - RNA, 19 nt, Artificial Sequence
  Description of Artificial Sequence: Synthetic oligonucleotide
acacgggguucuccgcaga

SEQ ID NO: 2969548 - RNA, 19 nt, Artificial Sequence
  Description of Artificial Sequence: Synthetic oligonucleotide
agaguccccggcgcuggag

SEQ ID NO: 2969549 - RNA, 19 nt, Artificial Sequence
  Description of Artificial Sequence: Synthetic oligonucleotide
auuccugcgcagagcccag

SEQ ID NO: 2969550 - RNA, 19 nt, Artificial Sequence
  Description of Artificial Sequence: Synthetic oligonucleotide
cccgucagaguccccggcg

SEQ ID NO: 2969551 - RNA, 19 nt, Artificial Sequence
  Description of Artificial Sequence: Synthetic oligonucleotide
cugcucugacgccgacugc

SEQ ID NO: 2969552 - RNA, 19 nt, Artificial Sequence
  Description of Artificial Sequence: Synthetic oligonucleotide
ggaugacauuacagucgcg

SEQ ID NO: 2969553 - RNA, 19 nt, Artificial Sequence
  Description of Artificial Sequence: Synthetic oligonucleotide
uccugguaccauggccaga

SEQ ID NO: 2969554 - RNA, 19 nt, Artificial Sequence
  Description of Artificial Sequence: Synthetic oligonucleotide
cagacggcuugaggaauuc

SEQ ID NO: 2969555 - RNA, 19 nt, Artificial Sequence
  Description of Artificial Sequence: Synthetic oligonucleotide
gacccagcacacgggguuc

SEQ ID NO: 2969556 - RNA, 19 nt, Artificial Sequence
  Description of Artificial Sequence: Synthetic oligonucleotide
auggucggcccagcuccgg

SEQ ID NO: 2969557 - RNA, 19 nt, Artificial Sequence
  Description of Artificial Sequence: Synthetic oligonucleotide
cagccggcgaguccuccug

SEQ ID NO: 2969558 - RNA, 19 nt, Artificial Sequence
  Description of Artificial Sequence: Synthetic oligonucleotide
uccggccauuggcccuggg

SEQ ID NO: 2969559 - RNA, 19 nt, Artificial Sequence
  Description of Artificial Sequence: Synthetic oligonucleotide
cggugcacaggaagcagcc

SEQ ID NO: 2969560 - RNA, 19 nt, Artificial Sequence
  Description of Artificial Sequence: Synthetic oligonucleotide
caacagccguucuccucuc

SEQ ID NO: 2969561 - RNA, 19 nt, Artificial Sequence
  Description of Artificial Sequence: Synthetic oligonucleotide
cgacuaguguccuuccauc

SEQ ID NO: 2969562 - RNA, 19 nt, Artificial Sequence
  Description of Artificial Sequence: Synthetic oligonucleotide
cggccauuggcccugggac

SEQ ID NO: 2969563 - RNA, 19 nt, Artificial Sequence
  Description of Artificial Sequence: Synthetic oligonucleotide
ggucggcccagcuccggcc

SEQ ID NO: 2969564 - RNA, 19 nt, Artificial Sequence
  Description of Artificial Sequence: Synthetic oligonucleotide
gaguccuccuguuccccgu

SEQ ID NO: 2969565 - RNA, 19 nt, Artificial Sequence
  Description of Artificial Sequence: Synthetic oligonucleotide
gccagacccagcacacggg

SEQ ID NO: 2969566 - RNA, 19 nt, Artificial Sequence
  Description of Artificial Sequence: Synthetic oligonucleotide
cauuacagucgcgaucggu

SEQ ID NO: 2969567 - RNA, 19 nt, Artificial Sequence
  Description of Artificial Sequence: Synthetic oligonucleotide
guguucagaucucgcgagu

SEQ ID NO: 2969568 - RNA, 19 nt, Artificial Sequence
  Description of Artificial Sequence: Synthetic oligonucleotide
agcagccgacuaguguccu

SEQ ID NO: 2969569 - RNA, 19 nt, Artificial Sequence
  Description of Artificial Sequence: Synthetic oligonucleotide
ggcacgcgcagccggcgag

SEQ ID NO: 2969570 - RNA, 19 nt, Artificial Sequence
  Description of Artificial Sequence: Synthetic oligonucleotide
ccgucagaguccccggcgc

SEQ ID NO: 2969571 - RNA, 19 nt, Artificial Sequence
  Description of Artificial Sequence: Synthetic oligonucleotide
ugccgggcacgcgcagccg

SEQ ID NO: 2969572 - RNA, 19 nt, Artificial Sequence
  Description of Artificial Sequence: Synthetic oligonucleotide
gccgggcacgcgcagccgg

SEQ ID NO: 2969573 - RNA, 19 nt, Artificial Sequence
  Description of Artificial Sequence: Synthetic oligonucleotide
caggaagcagccgacuagu

SEQ ID NO: 2969574 - RNA, 19 nt, Artificial Sequence
  Description of Artificial Sequence: Synthetic oligonucleotide
ccgacugcaacagccguuc

SEQ ID NO: 2969575 - RNA, 19 nt, Artificial Sequence
  Description of Artificial Sequence: Synthetic oligonucleotide
cgggccuuaaacuuccuaa

SEQ ID NO: 2969576 - RNA, 19 nt, Artificial Sequence
  Description of Artificial Sequence: Synthetic oligonucleotide
ucguagcagcauggucggc

SEQ ID NO: 2969577 - RNA, 19 nt, Artificial Sequence
  Description of Artificial Sequence: Synthetic oligonucleotide
gcacacgggguucuccgca

SEQ ID NO: 2969578 - RNA, 19 nt, Artificial Sequence
  Description of Artificial Sequence: Synthetic oligonucleotide
cggcgaguccuccuguucc

SEQ ID NO: 2969579 - RNA, 19 nt, Artificial Sequence
  Description of Artificial Sequence: Synthetic oligonucleotide
cugucauacggaugcgcau

SEQ ID NO: 2969580 - RNA, 19 nt, Artificial Sequence
  Description of Artificial Sequence: Synthetic oligonucleotide
cucuagcugcugccgggca

SEQ ID NO: 2969581 - RNA, 19 nt, Artificial Sequence
  Description of Artificial Sequence: Synthetic oligonucleotide
cuccucgggccuuaaacuu

SEQ ID NO: 2969582 - RNA, 19 nt, Artificial Sequence
  Description of Artificial Sequence: Synthetic oligonucleotide
guccuccuguuccccguca

SEQ ID NO: 2969583 - RNA, 19 nt, Artificial Sequence
  Description of Artificial Sequence: Synthetic oligonucleotide
cccuuuggacuucaauaga

SEQ ID NO: 2969584 - RNA, 19 nt, Artificial Sequence
  Description of Artificial Sequence: Synthetic oligonucleotide
cgaguccuccuguuccccg

SEQ ID NO: 2969585 - RNA, 19 nt, Artificial Sequence
  Description of Artificial Sequence: Synthetic oligonucleotide
acgggguucuccgcagaaa

SEQ ID NO: 2969586 - RNA, 19 nt, Artificial Sequence
  Description of Artificial Sequence: Synthetic oligonucleotide
gagcugcucugacgccgac

SEQ ID NO: 2969587 - RNA, 19 nt, Artificial Sequence
  Description of Artificial Sequence: Synthetic oligonucleotide
uagcugcugccgggcacgc

SEQ ID NO: 2969588 - RNA, 19 nt, Artificial Sequence
  Description of Artificial Sequence: Synthetic oligonucleotide
cgcuggagcugcucugacg

SEQ ID NO: 2969589 - RNA, 19 nt, Artificial Sequence
  Description of Artificial Sequence: Synthetic oligonucleotide
cccugggaccuccucgggc

SEQ ID NO: 2969590 - RNA, 19 nt, Artificial Sequence
  Description of Artificial Sequence: Synthetic oligonucleotide
agcugcugccgggcacgcg

SEQ ID NO: 2969591 - RNA, 19 nt, Artificial Sequence
  Description of Artificial Sequence: Synthetic oligonucleotide
acccagcacacgggguucu

SEQ ID NO: 2969592 - RNA, 19 nt, Artificial Sequence
  Description of Artificial Sequence: Synthetic oligonucleotide
cacgggguucuccgcagaa

SEQ ID NO: 2969593 - RNA, 19 nt, Artificial Sequence
  Description of Artificial Sequence: Synthetic oligonucleotide
cagccguucuccucucgua

SEQ ID NO: 2969594 - RNA, 19 nt, Artificial Sequence
  Description of Artificial Sequence: Synthetic oligonucleotide
cgcgagugcucccaggcuc

SEQ ID NO: 2969595 - RNA, 19 nt, Artificial Sequence
  Description of Artificial Sequence: Synthetic oligonucleotide
ccagcacacgggguucucc

SEQ ID NO: 2969596 - RNA, 19 nt, Artificial Sequence
  Description of Artificial Sequence: Synthetic oligonucleotide
gcgcauggucuuguugagc

SEQ ID NO: 2969597 - RNA, 19 nt, Artificial Sequence
  Description of Artificial Sequence: Synthetic oligonucleotide
gccgacuaguguccuucca

SEQ ID NO: 2969598 - RNA, 19 nt, Artificial Sequence
  Description of Artificial Sequence: Synthetic oligonucleotide
ccguucuccucucguagca

SEQ ID NO: 2969599 - RNA, 19 nt, Artificial Sequence
  Description of Artificial Sequence: Synthetic oligonucleotide
ccuccucgggccuuaaacu

SEQ ID NO: 2969600 - RNA, 19 nt, Artificial Sequence
  Description of Artificial Sequence: Synthetic oligonucleotide
gcauggucuuguugagcaa

SEQ ID NO: 2969601 - RNA, 19 nt, Artificial Sequence
  Description of Artificial Sequence: Synthetic oligonucleotide
gcagagcccaggaugacau

SEQ ID NO: 2969602 - RNA, 19 nt, Artificial Sequence
  Description of Artificial Sequence: Synthetic oligonucleotide
gcccugggaccuccucggg

SEQ ID NO: 2969603 - RNA, 19 nt, Artificial Sequence
  Description of Artificial Sequence: Synthetic oligonucleotide
cugcugccgggcacgcgca

SEQ ID NO: 2969604 - RNA, 19 nt, Artificial Sequence
  Description of Artificial Sequence: Synthetic oligonucleotide
cagacccagcacacggggu

SEQ ID NO: 2969605 - RNA, 19 nt, Artificial Sequence
  Description of Artificial Sequence: Synthetic oligonucleotide
auuggcccugggaccuccu

SEQ ID NO: 2969606 - RNA, 19 nt, Artificial Sequence
  Description of Artificial Sequence: Synthetic oligonucleotide
gcgaguccuccuguucccc

SEQ ID NO: 2969607 - RNA, 19 nt, Artificial Sequence
  Description of Artificial Sequence: Synthetic oligonucleotide
ggagcugcucugacgccga

SEQ ID NO: 2969608 - RNA, 19 nt, Artificial Sequence
  Description of Artificial Sequence: Synthetic oligonucleotide
ggcgcuggagcugcucuga

SEQ ID NO: 2969609 - RNA, 19 nt, Artificial Sequence
  Description of Artificial Sequence: Synthetic oligonucleotide
guccccggcgcuggagcug

SEQ ID NO: 2969610 - RNA, 19 nt, Artificial Sequence
  Description of Artificial Sequence: Synthetic oligonucleotide
cacgcgcagccggcgaguc

SEQ ID NO: 2969611 - RNA, 19 nt, Artificial Sequence
  Description of Artificial Sequence: Synthetic oligonucleotide
gcuccggccauuggcccug

SEQ ID NO: 2969612 - RNA, 19 nt, Artificial Sequence
  Description of Artificial Sequence: Synthetic oligonucleotide
cugcaacagccguucuccu

SEQ ID NO: 2969613 - RNA, 19 nt, Artificial Sequence
  Description of Artificial Sequence: Synthetic oligonucleotide
cgggguucuccgcagaaaa

SEQ ID NO: 2969614 - RNA, 19 nt, Artificial Sequence
  Description of Artificial Sequence: Synthetic oligonucleotide
ccauggccagacccagcac

SEQ ID NO: 2969615 - RNA, 19 nt, Artificial Sequence
  Description of Artificial Sequence: Synthetic oligonucleotide
gcagcauggucggcccagc

SEQ ID NO: 2969616 - RNA, 19 nt, Artificial Sequence
  Description of Artificial Sequence: Synthetic oligonucleotide
ugggaccuccucgggccuu

SEQ ID NO: 2969617 - RNA, 19 nt, Artificial Sequence
  Description of Artificial Sequence: Synthetic oligonucleotide
ccccgucagaguccccggc

SEQ ID NO: 2969618 - RNA, 19 nt, Artificial Sequence
  Description of Artificial Sequence: Synthetic oligonucleotide
ggucggguguucagaucuc

SEQ ID NO: 2969619 - RNA, 19 nt, Artificial Sequence
  Description of Artificial Sequence: Synthetic oligonucleotide
gcugccgggcacgcgcagc

SEQ ID NO: 2969620 - RNA, 19 nt, Artificial Sequence
  Description of Artificial Sequence: Synthetic oligonucleotide
gcccagcuccggccauugg

SEQ ID NO: 2969621 - RNA, 19 nt, Artificial Sequence
  Description of Artificial Sequence: Synthetic oligonucleotide
ccggcgaguccuccuguuc

SEQ ID NO: 2969622 - RNA, 19 nt, Artificial Sequence
  Description of Artificial Sequence: Synthetic oligonucleotide
ccggccauuggcccuggga

SEQ ID NO: 2969623 - RNA, 19 nt, Artificial Sequence
  Description of Artificial Sequence: Synthetic oligonucleotide
ccgggcacgcgcagccggc

SEQ ID NO: 2969624 - RNA, 19 nt, Artificial Sequence
  Description of Artificial Sequence: Synthetic oligonucleotide
cuccggccauuggcccugg

SEQ ID NO: 2969625 - RNA, 19 nt, Artificial Sequence
  Description of Artificial Sequence: Synthetic oligonucleotide
cagucgcgaucggugcaca

SEQ ID NO: 2969626 - RNA, 19 nt, Artificial Sequence
  Description of Artificial Sequence: Synthetic oligonucleotide
ccgacuaguguccuuccau

SEQ ID NO: 2969627 - RNA, 19 nt, Artificial Sequence
  Description of Artificial Sequence: Synthetic oligonucleotide
gcgcuggagcugcucugac

SEQ ID NO: 2969628 - RNA, 19 nt, Artificial Sequence
  Description of Artificial Sequence: Synthetic oligonucleotide
ccuccuguuccccgucaga

SEQ ID NO: 2969629 - RNA, 19 nt, Artificial Sequence
  Description of Artificial Sequence: Synthetic oligonucleotide
guuccccgucagagucccc

SEQ ID NO: 2969630 - RNA, 19 nt, Artificial Sequence
  Description of Artificial Sequence: Synthetic oligonucleotide
gcaacgccucuagcugcug

SEQ ID NO: 2969631 - RNA, 19 nt, Artificial Sequence
  Description of Artificial Sequence: Synthetic oligonucleotide
ggacuucaauagaaacgau

SEQ ID NO: 2969632 - RNA, 19 nt, Artificial Sequence
  Description of Artificial Sequence: Synthetic oligonucleotide
cagaguccccggcgcugga

SEQ ID NO: 2969633 - RNA, 19 nt, Artificial Sequence
  Description of Artificial Sequence: Synthetic oligonucleotide
cagcauggucggcccagcu

SEQ ID NO: 2969634 - RNA, 19 nt, Artificial Sequence
  Description of Artificial Sequence: Synthetic oligonucleotide
gcucugacgccgacugcaa

SEQ ID NO: 2969635 - RNA, 19 nt, Artificial Sequence
  Description of Artificial Sequence: Synthetic oligonucleotide
cugggaccuccucgggccu

SEQ ID NO: 2969636 - RNA, 19 nt, Artificial Sequence
  Description of Artificial Sequence: Synthetic oligonucleotide
gggcacgcgcagccggcga

SEQ ID NO: 2969637 - RNA, 19 nt, Artificial Sequence
  Description of Artificial Sequence: Synthetic oligonucleotide
cguuuugggucggguguuc

SEQ ID NO: 2969638 - RNA, 19 nt, Artificial Sequence
  Description of Artificial Sequence: Synthetic oligonucleotide
cucgggccuuaaacuuccu

SEQ ID NO: 2969639 - RNA, 19 nt, Artificial Sequence
  Description of Artificial Sequence: Synthetic oligonucleotide
gcgagugcucccaggcucu

SEQ ID NO: 2969640 - RNA, 19 nt, Artificial Sequence
  Description of Artificial Sequence: Synthetic oligonucleotide
gggguucuccgcagaaaau

SEQ ID NO: 2969641 - RNA, 19 nt, Artificial Sequence
  Description of Artificial Sequence: Synthetic oligonucleotide
gcacaggaagcagccgacu

SEQ ID NO: 2969642 - RNA, 19 nt, Artificial Sequence
  Description of Artificial Sequence: Synthetic oligonucleotide
gcagccggcgaguccuccu

SEQ ID NO: 2969643 - RNA, 19 nt, Artificial Sequence
  Description of Artificial Sequence: Synthetic oligonucleotide
cgcagagcccaggaugaca

SEQ ID NO: 2969644 - RNA, 19 nt, Artificial Sequence
  Description of Artificial Sequence: Synthetic oligonucleotide
cggcgcuggagcugcucug

SEQ ID NO: 2969645 - RNA, 19 nt, Artificial Sequence
  Description of Artificial Sequence: Synthetic oligonucleotide
gcgcagagcccaggaugac

SEQ ID NO: 2969646 - RNA, 19 nt, Artificial Sequence
  Description of Artificial Sequence: Synthetic oligonucleotide
cagagcccaggaugacauu

SEQ ID NO: 2969647 - RNA, 19 nt, Artificial Sequence
  Description of Artificial Sequence: Synthetic oligonucleotide
gggaccuccucgggccuua

SEQ ID NO: 2969648 - RNA, 19 nt, Artificial Sequence
  Description of Artificial Sequence: Synthetic oligonucleotide
cccagcacacgggguucuc

SEQ ID NO: 2969649 - RNA, 19 nt, Artificial Sequence
  Description of Artificial Sequence: Synthetic oligonucleotide
cgggcacgcgcagccggcg

SEQ ID NO: 2969650 - RNA, 19 nt, Artificial Sequence
  Description of Artificial Sequence: Synthetic oligonucleotide
gcguuuugggucggguguu

SEQ ID NO: 2969651 - RNA, 19 nt, Artificial Sequence
  Description of Artificial Sequence: Synthetic oligonucleotide
ccauuggcccugggaccuc

SEQ ID NO: 2969652 - RNA, 19 nt, Artificial Sequence
  Description of Artificial Sequence: Synthetic oligonucleotide
ccggcgcuggagcugcucu

SEQ ID NO: 2969653 - RNA, 19 nt, Artificial Sequence
  Description of Artificial Sequence: Synthetic oligonucleotide
gccgacugcaacagccguu

SEQ ID NO: 2969654 - RNA, 19 nt, Artificial Sequence
  Description of Artificial Sequence: Synthetic oligonucleotide
ccucucguagcagcauggu

SEQ ID NO: 2969655 - RNA, 19 nt, Artificial Sequence
  Description of Artificial Sequence: Synthetic oligonucleotide
gcagccgacuaguguccuu

SEQ ID NO: 2969656 - RNA, 19 nt, Artificial Sequence
  Description of Artificial Sequence: Synthetic oligonucleotide
ccugcgcagagcccaggau

SEQ ID NO: 2969657 - RNA, 19 nt, Artificial Sequence
  Description of Artificial Sequence: Synthetic oligonucleotide
cgcagccggcgaguccucc

SEQ ID NO: 2969658 - RNA, 19 nt, Artificial Sequence
  Description of Artificial Sequence: Synthetic oligonucleotide
cgcgcagccggcgaguccu

SEQ ID NO: 2969659 - RNA, 19 nt, Artificial Sequence
  Description of Artificial Sequence: Synthetic oligonucleotide
gccggcgaguccuccuguu

SEQ ID NO: 2969660 - RNA, 19 nt, Artificial Sequence
  Description of Artificial Sequence: Synthetic oligonucleotide
cgcgaucggugcacaggaa

SEQ ID NO: 2969661 - RNA, 19 nt, Artificial Sequence
  Description of Artificial Sequence: Synthetic oligonucleotide
cccggcgcuggagcugcuc

SEQ ID NO: 2969662 - RNA, 19 nt, Artificial Sequence
  Description of Artificial Sequence: Synthetic oligonucleotide
cgucagaguccccggcgcu

SEQ ID NO: 2969663 - RNA, 19 nt, Artificial Sequence
  Description of Artificial Sequence: Synthetic oligonucleotide
ggaccuccucgggccuuaa

SEQ ID NO: 2969664 - RNA, 19 nt, Artificial Sequence
  Description of Artificial Sequence: Synthetic oligonucleotide
gcacgcgcagccggcgagu

SEQ ID NO: 2969665 - RNA, 19 nt, Artificial Sequence
  Description of Artificial Sequence: Synthetic oligonucleotide
cgccgacugcaacagccgu

SEQ ID NO: 2969666 - RNA, 19 nt, Artificial Sequence
  Description of Artificial Sequence: Synthetic oligonucleotide
gcgcagccggcgaguccuc

SEQ ID NO: 2969667 - RNA, 19 nt, Artificial Sequence
  Description of Artificial Sequence: Synthetic oligonucleotide
cgagugcucccaggcucuu

SEQ ID NO: 2969668 - RNA, 19 nt, Artificial Sequence
  Description of Artificial Sequence: Synthetic oligonucleotide
ccccggcgcuggagcugcu

SEQ ID NO: 2969669 - RNA, 19 nt, Artificial Sequence
  Description of Artificial Sequence: Synthetic oligonucleotide
cggcccagcuccggccauu

SEQ ID NO: 2969670 - RNA, 19 nt, Artificial Sequence
  Description of Artificial Sequence: Synthetic oligonucleotide
ucuuucaucacacagcucc

SEQ ID NO: 2969671 - RNA, 19 nt, Artificial Sequence
  Description of Artificial Sequence: Synthetic oligonucleotide
acaauuuucaucaaacugc

SEQ ID NO: 2969672 - RNA, 19 nt, Artificial Sequence
  Description of Artificial Sequence: Synthetic oligonucleotide
ucauacucgcuuaugaugg

SEQ ID NO: 2969673 - RNA, 19 nt, Artificial Sequence
  Description of Artificial Sequence: Synthetic oligonucleotide
uacauuauccuccaauagg

SEQ ID NO: 2969674 - RNA, 19 nt, Artificial Sequence
  Description of Artificial Sequence: Synthetic oligonucleotide
auuuucaucaaacugcaag

SEQ ID NO: 2969675 - RNA, 19 nt, Artificial Sequence
  Description of Artificial Sequence: Synthetic oligonucleotide
uuguacuuuauacacacag

SEQ ID NO: 2969676 - RNA, 19 nt, Artificial Sequence
  Description of Artificial Sequence: Synthetic oligonucleotide
uucucuacagacuucaaag

SEQ ID NO: 2969677 - RNA, 19 nt, Artificial Sequence
  Description of Artificial Sequence: Synthetic oligonucleotide
acagacuucaaagaguucc

SEQ ID NO: 2969678 - RNA, 19 nt, Artificial Sequence
  Description of Artificial Sequence: Synthetic oligonucleotide
caagaaaucugucugaggc

SEQ ID NO: 2969679 - RNA, 19 nt, Artificial Sequence
  Description of Artificial Sequence: Synthetic oligonucleotide
acuucaaagaguuccacuc

SEQ ID NO: 2969680 - RNA, 19 nt, Artificial Sequence
  Description of Artificial Sequence: Synthetic oligonucleotide
cucauuuacauuauccucc

SEQ ID NO: 2969681 - RNA, 19 nt, Artificial Sequence
  Description of Artificial Sequence: Synthetic oligonucleotide
gacaauuuucaucaaacug

SEQ ID NO: 2969682 - RNA, 19 nt, Artificial Sequence
  Description of Artificial Sequence: Synthetic oligonucleotide
uuuucaucaaacugcaagc

SEQ ID NO: 2969683 - RNA, 19 nt, Artificial Sequence
  Description of Artificial Sequence: Synthetic oligonucleotide
uuuucuuucaucacacagc

SEQ ID NO: 2969684 - RNA, 19 nt, Artificial Sequence
  Description of Artificial Sequence: Synthetic oligonucleotide
guugagacaauuuucauca

SEQ ID NO: 2969685 - RNA, 19 nt, Artificial Sequence
  Description of Artificial Sequence: Synthetic oligonucleotide
uguacuuuauacacacagg

SEQ ID NO: 2969686 - RNA, 19 nt, Artificial Sequence
  Description of Artificial Sequence: Synthetic oligonucleotide
uuauccuccaauaggcacg

SEQ ID NO: 2969687 - RNA, 19 nt, Artificial Sequence
  Description of Artificial Sequence: Synthetic oligonucleotide
ugcacaagaaaucugucug

SEQ ID NO: 2969688 - RNA, 19 nt, Artificial Sequence
  Description of Artificial Sequence: Synthetic oligonucleotide
auuauccuccaauaggcac

SEQ ID NO: 2969689 - RNA, 19 nt, Artificial Sequence
  Description of Artificial Sequence: Synthetic oligonucleotide
acauuauccuccaauaggc

SEQ ID NO: 2969690 - RNA, 19 nt, Artificial Sequence
  Description of Artificial Sequence: Synthetic oligonucleotide
uuucuuucaucacacagcu

SEQ ID NO: 2969691 - RNA, 19 nt, Artificial Sequence
  Description of Artificial Sequence: Synthetic oligonucleotide
auaggcacgaagcuucugc

SEQ ID NO: 2969692 - RNA, 19 nt, Artificial Sequence
  Description of Artificial Sequence: Synthetic oligonucleotide
cuuuauacacacaggacag

SEQ ID NO: 2969693 - RNA, 19 nt, Artificial Sequence
  Description of Artificial Sequence: Synthetic oligonucleotide
ucaucaaacugcaagcucu

SEQ ID NO: 2969694 - RNA, 19 nt, Artificial Sequence
  Description of Artificial Sequence: Synthetic oligonucleotide
auacacacaggacagauga

SEQ ID NO: 2969695 - RNA, 19 nt, Artificial Sequence
  Description of Artificial Sequence: Synthetic oligonucleotide
uggacaauucucuacagac

SEQ ID NO: 2969696 - RNA, 19 nt, Artificial Sequence
  Description of Artificial Sequence: Synthetic oligonucleotide
ucuugcacaagaaaucugu

SEQ ID NO: 2969697 - RNA, 19 nt, Artificial Sequence
  Description of Artificial Sequence: Synthetic oligonucleotide
auuauucucagguuguacu

SEQ ID NO: 2969698 - RNA, 19 nt, Artificial Sequence
  Description of Artificial Sequence: Synthetic oligonucleotide
uguccugcagcacagcuag

SEQ ID NO: 2969699 - RNA, 19 nt, Artificial Sequence
  Description of Artificial Sequence: Synthetic oligonucleotide
ucagccaacaugcuguuga

SEQ ID NO: 2969700 - RNA, 19 nt, Artificial Sequence
  Description of Artificial Sequence: Synthetic oligonucleotide
cuuuucuuucaucacacag

SEQ ID NO: 2969701 - RNA, 19 nt, Artificial Sequence
  Description of Artificial Sequence: Synthetic oligonucleotide
uguucaauguccugcagca

SEQ ID NO: 2969702 - RNA, 19 nt, Artificial Sequence
  Description of Artificial Sequence: Synthetic oligonucleotide
uuuacauuauccuccaaua

SEQ ID NO: 2969703 - RNA, 19 nt, Artificial Sequence
  Description of Artificial Sequence: Synthetic oligonucleotide
ucuacagacuucaaagagu

SEQ ID NO: 2969704 - RNA, 19 nt, Artificial Sequence
  Description of Artificial Sequence: Synthetic oligonucleotide
uucaauguccugcagcaca

SEQ ID NO: 2969705 - RNA, 19 nt, Artificial Sequence
  Description of Artificial Sequence: Synthetic oligonucleotide
ucagguuguacuuuauaca

SEQ ID NO: 2969706 - RNA, 19 nt, Artificial Sequence
  Description of Artificial Sequence: Synthetic oligonucleotide
auuuacauuauccuccaau

SEQ ID NO: 2969707 - RNA, 19 nt, Artificial Sequence
  Description of Artificial Sequence: Synthetic oligonucleotide
ucccacucagccaacaugc

SEQ ID NO: 2969708 - RNA, 19 nt, Artificial Sequence
  Description of Artificial Sequence: Synthetic oligonucleotide
guacuuuauacacacagga

SEQ ID NO: 2969709 - RNA, 19 nt, Artificial Sequence
  Description of Artificial Sequence: Synthetic oligonucleotide
gaaacaaggcuucuggaca

SEQ ID NO: 2969710 - RNA, 19 nt, Artificial Sequence
  Description of Artificial Sequence: Synthetic oligonucleotide
uucauuauucucagguugu

SEQ ID NO: 2969711 - RNA, 19 nt, Artificial Sequence
  Description of Artificial Sequence: Synthetic oligonucleotide
uucuggacaauucucuaca

SEQ ID NO: 2969712 - RNA, 19 nt, Artificial Sequence
  Description of Artificial Sequence: Synthetic oligonucleotide
uucucauacucgcuuauga

SEQ ID NO: 2969713 - RNA, 19 nt, Artificial Sequence
  Description of Artificial Sequence: Synthetic oligonucleotide
cucagguuguacuuuauac

SEQ ID NO: 2969714 - RNA, 19 nt, Artificial Sequence
  Description of Artificial Sequence: Synthetic oligonucleotide
auggacuuuucuuucauca

SEQ ID NO: 2969715 - RNA, 19 nt, Artificial Sequence
  Description of Artificial Sequence: Synthetic oligonucleotide
cagguuguacuuuauacac

SEQ ID NO: 2969716 - RNA, 19 nt, Artificial Sequence
  Description of Artificial Sequence: Synthetic oligonucleotide
ugcucugucaacucuggag

SEQ ID NO: 2969717 - RNA, 19 nt, Artificial Sequence
  Description of Artificial Sequence: Synthetic oligonucleotide
uguugagacaauuuucauc

SEQ ID NO: 2969718 - RNA, 19 nt, Artificial Sequence
  Description of Artificial Sequence: Synthetic oligonucleotide
agaguuccacucuuccucc

SEQ ID NO: 2969719 - RNA, 19 nt, Artificial Sequence
  Description of Artificial Sequence: Synthetic oligonucleotide
aucugucugaggcuuuucc

SEQ ID NO: 2969720 - RNA, 19 nt, Artificial Sequence
  Description of Artificial Sequence: Synthetic oligonucleotide
gagacaauuuucaucaaac

SEQ ID NO: 2969721 - RNA, 19 nt, Artificial Sequence
  Description of Artificial Sequence: Synthetic oligonucleotide
ugcucauuuacauuauccu

SEQ ID NO: 2969722 - RNA, 19 nt, Artificial Sequence
  Description of Artificial Sequence: Synthetic oligonucleotide
aaggcuucuggacaauucu

SEQ ID NO: 2969723 - RNA, 19 nt, Artificial Sequence
  Description of Artificial Sequence: Synthetic oligonucleotide
aagaaaucugucugaggcu

SEQ ID NO: 2969724 - RNA, 19 nt, Artificial Sequence
  Description of Artificial Sequence: Synthetic oligonucleotide
acugugcucauuuacauua

SEQ ID NO: 2969725 - RNA, 19 nt, Artificial Sequence
  Description of Artificial Sequence: Synthetic oligonucleotide
cucuacagacuucaaagag

SEQ ID NO: 2969726 - RNA, 19 nt, Artificial Sequence
  Description of Artificial Sequence: Synthetic oligonucleotide
guuugcuucccacucagcc

SEQ ID NO: 2969727 - RNA, 19 nt, Artificial Sequence
  Description of Artificial Sequence: Synthetic oligonucleotide
uacuuuauacacacaggac

SEQ ID NO: 2969728 - RNA, 19 nt, Artificial Sequence
  Description of Artificial Sequence: Synthetic oligonucleotide
ggaugugcaggccacaugg

SEQ ID NO: 2969729 - RNA, 19 nt, Artificial Sequence
  Description of Artificial Sequence: Synthetic oligonucleotide
uccuccaauaggcacgaag

SEQ ID NO: 2969730 - RNA, 19 nt, Artificial Sequence
  Description of Artificial Sequence: Synthetic oligonucleotide
ucaauguccugcagcacag

SEQ ID NO: 2969731 - RNA, 19 nt, Artificial Sequence
  Description of Artificial Sequence: Synthetic oligonucleotide
cucauacucgcuuaugaug

SEQ ID NO: 2969732 - RNA, 19 nt, Artificial Sequence
  Description of Artificial Sequence: Synthetic oligonucleotide
agugaaugggaugugcagg

SEQ ID NO: 2969733 - RNA, 19 nt, Artificial Sequence
  Description of Artificial Sequence: Synthetic oligonucleotide
uccuccaucacuucuugca

SEQ ID NO: 2969734 - RNA, 19 nt, Artificial Sequence
  Description of Artificial Sequence: Synthetic oligonucleotide
uggugugccaccuccagcc

SEQ ID NO: 2969735 - RNA, 19 nt, Artificial Sequence
  Description of Artificial Sequence: Synthetic oligonucleotide
acuucuugcacaagaaauc

SEQ ID NO: 2969736 - RNA, 19 nt, Artificial Sequence
  Description of Artificial Sequence: Synthetic oligonucleotide
ugaggcuuuucccuggugu

SEQ ID NO: 2969737 - RNA, 19 nt, Artificial Sequence
  Description of Artificial Sequence: Synthetic oligonucleotide
ugagacaauuuucaucaaa

SEQ ID NO: 2969738 - RNA, 19 nt, Artificial Sequence
  Description of Artificial Sequence: Synthetic oligonucleotide
uaugauggacuuuucuuuc

SEQ ID NO: 2969739 - RNA, 19 nt, Artificial Sequence
  Description of Artificial Sequence: Synthetic oligonucleotide
ugcacugugcucauuuaca

SEQ ID NO: 2969740 - RNA, 19 nt, Artificial Sequence
  Description of Artificial Sequence: Synthetic oligonucleotide
ucauuuacauuauccucca

SEQ ID NO: 2969741 - RNA, 19 nt, Artificial Sequence
  Description of Artificial Sequence: Synthetic oligonucleotide
acaagaaaucugucugagg

SEQ ID NO: 2969742 - RNA, 19 nt, Artificial Sequence
  Description of Artificial Sequence: Synthetic oligonucleotide
ugugcaggccacauggaca

SEQ ID NO: 2969743 - RNA, 19 nt, Artificial Sequence
  Description of Artificial Sequence: Synthetic oligonucleotide
uggacacaugaccacacug

SEQ ID NO: 2969744 - RNA, 19 nt, Artificial Sequence
  Description of Artificial Sequence: Synthetic oligonucleotide
agucccaacugaaacaagg

SEQ ID NO: 2969745 - RNA, 19 nt, Artificial Sequence
  Description of Artificial Sequence: Synthetic oligonucleotide
aaugggaugugcaggccac

SEQ ID NO: 2969746 - RNA, 19 nt, Artificial Sequence
  Description of Artificial Sequence: Synthetic oligonucleotide
ucucuacagacuucaaaga

SEQ ID NO: 2969747 - RNA, 19 nt, Artificial Sequence
  Description of Artificial Sequence: Synthetic oligonucleotide
agacaauuuucaucaaacu

SEQ ID NO: 2969748 - RNA, 19 nt, Artificial Sequence
  Description of Artificial Sequence: Synthetic oligonucleotide
caaagaguuccacucuucc

SEQ ID NO: 2969749 - RNA, 19 nt, Artificial Sequence
  Description of Artificial Sequence: Synthetic oligonucleotide
acacacaggacagaugagg

SEQ ID NO: 2969750 - RNA, 19 nt, Artificial Sequence
  Description of Artificial Sequence: Synthetic oligonucleotide
uauacacacaggacagaug

SEQ ID NO: 2969751 - RNA, 19 nt, Artificial Sequence
  Description of Artificial Sequence: Synthetic oligonucleotide
ucugucugaggcuuuuccc

SEQ ID NO: 2969752 - RNA, 19 nt, Artificial Sequence
  Description of Artificial Sequence: Synthetic oligonucleotide
gguuguacuuuauacacac

SEQ ID NO: 2969753 - RNA, 19 nt, Artificial Sequence
  Description of Artificial Sequence: Synthetic oligonucleotide
aaacaaggcuucuggacaa

SEQ ID NO: 2969754 - RNA, 19 nt, Artificial Sequence
  Description of Artificial Sequence: Synthetic oligonucleotide
uugcacaagaaaucugucu

SEQ ID NO: 2969755 - RNA, 19 nt, Artificial Sequence
  Description of Artificial Sequence: Synthetic oligonucleotide
ugugccaccuccagccugg

SEQ ID NO: 2969756 - RNA, 19 nt, Artificial Sequence
  Description of Artificial Sequence: Synthetic oligonucleotide
uggagagugaaugggaugu

SEQ ID NO: 2969757 - RNA, 19 nt, Artificial Sequence
  Description of Artificial Sequence: Synthetic oligonucleotide
uuugcuucccacucagcca

SEQ ID NO: 2969758 - RNA, 19 nt, Artificial Sequence
  Description of Artificial Sequence: Synthetic oligonucleotide
ugcuguugagacaauuuuc

SEQ ID NO: 2969759 - RNA, 19 nt, Artificial Sequence
  Description of Artificial Sequence: Synthetic oligonucleotide
cacaugaccacacuguuca

SEQ ID NO: 2969760 - RNA, 19 nt, Artificial Sequence
  Description of Artificial Sequence: Synthetic oligonucleotide
augugcaggccacauggac

SEQ ID NO: 2969761 - RNA, 19 nt, Artificial Sequence
  Description of Artificial Sequence: Synthetic oligonucleotide
caauuuucaucaaacugca

SEQ ID NO: 2969762 - RNA, 19 nt, Artificial Sequence
  Description of Artificial Sequence: Synthetic oligonucleotide
ucccaacugaaacaaggcu

SEQ ID NO: 2969763 - RNA, 19 nt, Artificial Sequence
  Description of Artificial Sequence: Synthetic oligonucleotide
cugcagcacagcuaggucc

SEQ ID NO: 2969764 - RNA, 19 nt, Artificial Sequence
  Description of Artificial Sequence: Synthetic oligonucleotide
uuucaucaaacugcaagcu

SEQ ID NO: 2969765 - RNA, 19 nt, Artificial Sequence
  Description of Artificial Sequence: Synthetic oligonucleotide
cuguucaauguccugcagc

SEQ ID NO: 2969766 - RNA, 19 nt, Artificial Sequence
  Description of Artificial Sequence: Synthetic oligonucleotide
ucuggacaauucucuacag

SEQ ID NO: 2969767 - RNA, 19 nt, Artificial Sequence
  Description of Artificial Sequence: Synthetic oligonucleotide
uuauacacacaggacagau

SEQ ID NO: 2969768 - RNA, 19 nt, Artificial Sequence
  Description of Artificial Sequence: Synthetic oligonucleotide
uucuugcacaagaaaucug

SEQ ID NO: 2969769 - RNA, 19 nt, Artificial Sequence
  Description of Artificial Sequence: Synthetic oligonucleotide
acagcuccuguucaauguc

SEQ ID NO: 2969770 - RNA, 19 nt, Artificial Sequence
  Description of Artificial Sequence: Synthetic oligonucleotide
gacuuuucuuucaucacac

SEQ ID NO: 2969771 - RNA, 19 nt, Artificial Sequence
  Description of Artificial Sequence: Synthetic oligonucleotide
caaacugcaagcucuucuc

SEQ ID NO: 2969772 - RNA, 19 nt, Artificial Sequence
  Description of Artificial Sequence: Synthetic oligonucleotide
uccucuggcagucccaacu

SEQ ID NO: 2969773 - RNA, 19 nt, Artificial Sequence
  Description of Artificial Sequence: Synthetic oligonucleotide
uucccacucagccaacaug

SEQ ID NO: 2969774 - RNA, 19 nt, Artificial Sequence
  Description of Artificial Sequence: Synthetic oligonucleotide
acacaggacagaugagggg

SEQ ID NO: 2969775 - RNA, 19 nt, Artificial Sequence
  Description of Artificial Sequence: Synthetic oligonucleotide
ucuggagagugaaugggau

SEQ ID NO: 2969776 - RNA, 19 nt, Artificial Sequence
  Description of Artificial Sequence: Synthetic oligonucleotide
cuucuggacaauucucuac

SEQ ID NO: 2969777 - RNA, 19 nt, Artificial Sequence
  Description of Artificial Sequence: Synthetic oligonucleotide
uggcagucccaacugaaac

SEQ ID NO: 2969778 - RNA, 19 nt, Artificial Sequence
  Description of Artificial Sequence: Synthetic oligonucleotide
uucaaagaguuccacucuu

SEQ ID NO: 2969779 - RNA, 19 nt, Artificial Sequence
  Description of Artificial Sequence: Synthetic oligonucleotide
aacugcaagcucuucucau

SEQ ID NO: 2969780 - RNA, 19 nt, Artificial Sequence
  Description of Artificial Sequence: Synthetic oligonucleotide
uuauucucagguuguacuu

SEQ ID NO: 2969781 - RNA, 19 nt, Artificial Sequence
  Description of Artificial Sequence: Synthetic oligonucleotide
gugcucauuuacauuaucc

SEQ ID NO: 2969782 - RNA, 19 nt, Artificial Sequence
  Description of Artificial Sequence: Synthetic oligonucleotide
uacucgcuuaugauggacu

SEQ ID NO: 2969783 - RNA, 19 nt, Artificial Sequence
  Description of Artificial Sequence: Synthetic oligonucleotide
accacacuguucauuauuc

SEQ ID NO: 2969784 - RNA, 19 nt, Artificial Sequence
  Description of Artificial Sequence: Synthetic oligonucleotide
ucacuucuugcacaagaaa

SEQ ID NO: 2969785 - RNA, 19 nt, Artificial Sequence
  Description of Artificial Sequence: Synthetic oligonucleotide
ucaaagaguuccacucuuc

SEQ ID NO: 2969786 - RNA, 19 nt, Artificial Sequence
  Description of Artificial Sequence: Synthetic oligonucleotide
cacuguucauuauucucag

SEQ ID NO: 2969787 - RNA, 19 nt, Artificial Sequence
  Description of Artificial Sequence: Synthetic oligonucleotide
ugcagcacagcuagguccu

SEQ ID NO: 2969788 - RNA, 19 nt, Artificial Sequence
  Description of Artificial Sequence: Synthetic oligonucleotide
acacuguucauuauucuca

SEQ ID NO: 2969789 - RNA, 19 nt, Artificial Sequence
  Description of Artificial Sequence: Synthetic oligonucleotide
aacugaaacaaggcuucug

SEQ ID NO: 2969790 - RNA, 19 nt, Artificial Sequence
  Description of Artificial Sequence: Synthetic oligonucleotide
ucucauacucgcuuaugau

SEQ ID NO: 2969791 - RNA, 19 nt, Artificial Sequence
  Description of Artificial Sequence: Synthetic oligonucleotide
augaccacacuguucauua

SEQ ID NO: 2969792 - RNA, 19 nt, Artificial Sequence
  Description of Artificial Sequence: Synthetic oligonucleotide
acuguucauuauucucagg

SEQ ID NO: 2969793 - RNA, 19 nt, Artificial Sequence
  Description of Artificial Sequence: Synthetic oligonucleotide
ccuccaauaggcacgaagc

SEQ ID NO: 2969794 - RNA, 19 nt, Artificial Sequence
  Description of Artificial Sequence: Synthetic oligonucleotide
aagcuucugcucugucaac

SEQ ID NO: 2969795 - RNA, 19 nt, Artificial Sequence
  Description of Artificial Sequence: Synthetic oligonucleotide
uggacuuuucuuucaucac

SEQ ID NO: 2969796 - RNA, 19 nt, Artificial Sequence
  Description of Artificial Sequence: Synthetic oligonucleotide
caacucuggagagugaaug

SEQ ID NO: 2969797 - RNA, 19 nt, Artificial Sequence
  Description of Artificial Sequence: Synthetic oligonucleotide
acagcuagguccucuggca

SEQ ID NO: 2969798 - RNA, 19 nt, Artificial Sequence
  Description of Artificial Sequence: Synthetic oligonucleotide
cacaagaaaucugucugag

SEQ ID NO: 2969799 - RNA, 19 nt, Artificial Sequence
  Description of Artificial Sequence: Synthetic oligonucleotide
gccaacaugcuguugagac

SEQ ID NO: 2969800 - RNA, 19 nt, Artificial Sequence
  Description of Artificial Sequence: Synthetic oligonucleotide
uccuguucaauguccugca

SEQ ID NO: 2969801 - RNA, 19 nt, Artificial Sequence
  Description of Artificial Sequence: Synthetic oligonucleotide
gccacauggacacaugacc

SEQ ID NO: 2969802 - RNA, 19 nt, Artificial Sequence
  Description of Artificial Sequence: Synthetic oligonucleotide
uacacacaggacagaugag

SEQ ID NO: 2969803 - RNA, 19 nt, Artificial Sequence
  Description of Artificial Sequence: Synthetic oligonucleotide
cuccuguucaauguccugc

SEQ ID NO: 2969804 - RNA, 19 nt, Artificial Sequence
  Description of Artificial Sequence: Synthetic oligonucleotide
ucuggcagucccaacugaa

SEQ ID NO: 2969805 - RNA, 19 nt, Artificial Sequence
  Description of Artificial Sequence: Synthetic oligonucleotide
ugauggacuuuucuuucau

SEQ ID NO: 2969806 - RNA, 19 nt, Artificial Sequence
  Description of Artificial Sequence: Synthetic oligonucleotide
auacucgcuuaugauggac

SEQ ID NO: 2969807 - RNA, 19 nt, Artificial Sequence
  Description of Artificial Sequence: Synthetic oligonucleotide
aucacacagcuccuguuca

SEQ ID NO: 2969808 - RNA, 19 nt, Artificial Sequence
  Description of Artificial Sequence: Synthetic oligonucleotide
agacuucaaagaguuccac

SEQ ID NO: 2969809 - RNA, 19 nt, Artificial Sequence
  Description of Artificial Sequence: Synthetic oligonucleotide
acgagugugcacugugcuc

SEQ ID NO: 2969810 - RNA, 19 nt, Artificial Sequence
  Description of Artificial Sequence: Synthetic oligonucleotide
gagagugaaugggaugugc

SEQ ID NO: 2969811 - RNA, 19 nt, Artificial Sequence
  Description of Artificial Sequence: Synthetic oligonucleotide
cuugcacaagaaaucuguc

SEQ ID NO: 2969812 - RNA, 19 nt, Artificial Sequence
  Description of Artificial Sequence: Synthetic oligonucleotide
ugugcucauuuacauuauc

SEQ ID NO: 2969813 - RNA, 19 nt, Artificial Sequence
  Description of Artificial Sequence: Synthetic oligonucleotide
cauggacacaugaccacac

SEQ ID NO: 2969814 - RNA, 19 nt, Artificial Sequence
  Description of Artificial Sequence: Synthetic oligonucleotide
augcuguugagacaauuuu

SEQ ID NO: 2969815 - RNA, 19 nt, Artificial Sequence
  Description of Artificial Sequence: Synthetic oligonucleotide
augauggacuuuucuuuca

SEQ ID NO: 2969816 - RNA, 19 nt, Artificial Sequence
  Description of Artificial Sequence: Synthetic oligonucleotide
cugucaacucuggagagug

SEQ ID NO: 2969817 - RNA, 19 nt, Artificial Sequence
  Description of Artificial Sequence: Synthetic oligonucleotide
agaaaucugucugaggcuu

SEQ ID NO: 2969818 - RNA, 19 nt, Artificial Sequence
  Description of Artificial Sequence: Synthetic oligonucleotide
caucacuucuugcacaaga

SEQ ID NO: 2969819 - RNA, 19 nt, Artificial Sequence
  Description of Artificial Sequence: Synthetic oligonucleotide
gauggacuuuucuuucauc

SEQ ID NO: 2969820 - RNA, 19 nt, Artificial Sequence
  Description of Artificial Sequence: Synthetic oligonucleotide
ucuucucauacucgcuuau

SEQ ID NO: 2969821 - RNA, 19 nt, Artificial Sequence
  Description of Artificial Sequence: Synthetic oligonucleotide
ccaauaggcacgaagcuuc

SEQ ID NO: 2969822 - RNA, 19 nt, Artificial Sequence
  Description of Artificial Sequence: Synthetic oligonucleotide
caucacacagcuccuguuc

SEQ ID NO: 2969823 - RNA, 19 nt, Artificial Sequence
  Description of Artificial Sequence: Synthetic oligonucleotide
cugcaagcucuucucauac

SEQ ID NO: 2969824 - RNA, 19 nt, Artificial Sequence
  Description of Artificial Sequence: Synthetic oligonucleotide
ucccuggugugccaccucc

SEQ ID NO: 2969825 - RNA, 19 nt, Artificial Sequence
  Description of Artificial Sequence: Synthetic oligonucleotide
cauuauucucagguuguac

SEQ ID NO: 2969826 - RNA, 19 nt, Artificial Sequence
  Description of Artificial Sequence: Synthetic oligonucleotide
ucucagguuguacuuuaua

SEQ ID NO: 2969827 - RNA, 19 nt, Artificial Sequence
  Description of Artificial Sequence: Synthetic oligonucleotide
aaucugucugaggcuuuuc

SEQ ID NO: 2969828 - RNA, 19 nt, Artificial Sequence
  Description of Artificial Sequence: Synthetic oligonucleotide
cacauggacacaugaccac

SEQ ID NO: 2969829 - RNA, 19 nt, Artificial Sequence
  Description of Artificial Sequence: Synthetic oligonucleotide
caaggcuucuggacaauuc

SEQ ID NO: 2969830 - RNA, 19 nt, Artificial Sequence
  Description of Artificial Sequence: Synthetic oligonucleotide
uaggcacgaagcuucugcu

SEQ ID NO: 2969831 - RNA, 19 nt, Artificial Sequence
  Description of Artificial Sequence: Synthetic oligonucleotide
acacagcuccuguucaaug

SEQ ID NO: 2969832 - RNA, 19 nt, Artificial Sequence
  Description of Artificial Sequence: Synthetic oligonucleotide
uagguccucuggcaguccc

SEQ ID NO: 2969833 - RNA, 19 nt, Artificial Sequence
  Description of Artificial Sequence: Synthetic oligonucleotide
caauucucuacagacuuca

SEQ ID NO: 2969834 - RNA, 19 nt, Artificial Sequence
  Description of Artificial Sequence: Synthetic oligonucleotide
gugcaggccacauggacac

SEQ ID NO: 2969835 - RNA, 19 nt, Artificial Sequence
  Description of Artificial Sequence: Synthetic oligonucleotide
gcucauuuacauuauccuc

SEQ ID NO: 2969836 - RNA, 19 nt, Artificial Sequence
  Description of Artificial Sequence: Synthetic oligonucleotide
ucgcuuaugauggacuuuu

SEQ ID NO: 2969837 - RNA, 19 nt, Artificial Sequence
  Description of Artificial Sequence: Synthetic oligonucleotide
aggcacgaagcuucugcuc

SEQ ID NO: 2969838 - RNA, 19 nt, Artificial Sequence
  Description of Artificial Sequence: Synthetic oligonucleotide
ggacuuuucuuucaucaca

SEQ ID NO: 2969839 - RNA, 19 nt, Artificial Sequence
  Description of Artificial Sequence: Synthetic oligonucleotide
cuggagagugaaugggaug

SEQ ID NO: 2969840 - RNA, 19 nt, Artificial Sequence
  Description of Artificial Sequence: Synthetic oligonucleotide
cuuaugauggacuuuucuu

SEQ ID NO: 2969841 - RNA, 19 nt, Artificial Sequence
  Description of Artificial Sequence: Synthetic oligonucleotide
ucaacucuggagagugaau

SEQ ID NO: 2969842 - RNA, 19 nt, Artificial Sequence
  Description of Artificial Sequence: Synthetic oligonucleotide
uccaauaggcacgaagcuu

SEQ ID NO: 2969843 - RNA, 19 nt, Artificial Sequence
  Description of Artificial Sequence: Synthetic oligonucleotide
gucugaggcuuuucccugg

SEQ ID NO: 2969844 - RNA, 19 nt, Artificial Sequence
  Description of Artificial Sequence: Synthetic oligonucleotide
auucucagguuguacuuua

SEQ ID NO: 2969845 - RNA, 19 nt, Artificial Sequence
  Description of Artificial Sequence: Synthetic oligonucleotide
uauccuccaauaggcacga

SEQ ID NO: 2969846 - RNA, 19 nt, Artificial Sequence
  Description of Artificial Sequence: Synthetic oligonucleotide
acacaugaccacacuguuc

SEQ ID NO: 2969847 - RNA, 19 nt, Artificial Sequence
  Description of Artificial Sequence: Synthetic oligonucleotide
uuuucccuggugugccacc

SEQ ID NO: 2969848 - RNA, 19 nt, Artificial Sequence
  Description of Artificial Sequence: Synthetic oligonucleotide
gucccaacugaaacaaggc

SEQ ID NO: 2969849 - RNA, 19 nt, Artificial Sequence
  Description of Artificial Sequence: Synthetic oligonucleotide
aauaggcacgaagcuucug

SEQ ID NO: 2969850 - RNA, 19 nt, Artificial Sequence
  Description of Artificial Sequence: Synthetic oligonucleotide
gacuucaaagaguuccacu

SEQ ID NO: 2969851 - RNA, 19 nt, Artificial Sequence
  Description of Artificial Sequence: Synthetic oligonucleotide
cauuauccuccaauaggca

SEQ ID NO: 2969852 - RNA, 19 nt, Artificial Sequence
  Description of Artificial Sequence: Synthetic oligonucleotide
ucugucaacucuggagagu

SEQ ID NO: 2969853 - RNA, 19 nt, Artificial Sequence
  Description of Artificial Sequence: Synthetic oligonucleotide
agcacagcuagguccucug

SEQ ID NO: 2969854 - RNA, 19 nt, Artificial Sequence
  Description of Artificial Sequence: Synthetic oligonucleotide
gcuguugagacaauuuuca

SEQ ID NO: 2969855 - RNA, 19 nt, Artificial Sequence
  Description of Artificial Sequence: Synthetic oligonucleotide
acauggacacaugaccaca

SEQ ID NO: 2969856 - RNA, 19 nt, Artificial Sequence
  Description of Artificial Sequence: Synthetic oligonucleotide
cacuucuugcacaagaaau

SEQ ID NO: 2969857 - RNA, 19 nt, Artificial Sequence
  Description of Artificial Sequence: Synthetic oligonucleotide
gcaagcucuucucauacuc

SEQ ID NO: 2969858 - RNA, 19 nt, Artificial Sequence
  Description of Artificial Sequence: Synthetic oligonucleotide
acugcaagcucuucucaua

SEQ ID NO: 2969859 - RNA, 19 nt, Artificial Sequence
  Description of Artificial Sequence: Synthetic oligonucleotide
gcucugucaacucuggaga

SEQ ID NO: 2969860 - RNA, 19 nt, Artificial Sequence
  Description of Artificial Sequence: Synthetic oligonucleotide
ucugaggcuuuucccuggu

SEQ ID NO: 2969861 - RNA, 19 nt, Artificial Sequence
  Description of Artificial Sequence: Synthetic oligonucleotide
uauucucagguuguacuuu

SEQ ID NO: 2969862 - RNA, 19 nt, Artificial Sequence
  Description of Artificial Sequence: Synthetic oligonucleotide
gugcacugugcucauuuac

SEQ ID NO: 2969863 - RNA, 19 nt, Artificial Sequence
  Description of Artificial Sequence: Synthetic oligonucleotide
ugaaugggaugugcaggcc

SEQ ID NO: 2969864 - RNA, 19 nt, Artificial Sequence
  Description of Artificial Sequence: Synthetic oligonucleotide
aggccacauggacacauga

SEQ ID NO: 2969865 - RNA, 19 nt, Artificial Sequence
  Description of Artificial Sequence: Synthetic oligonucleotide
cuuccuccaucacuucuug

SEQ ID NO: 2969866 - RNA, 19 nt, Artificial Sequence
  Description of Artificial Sequence: Synthetic oligonucleotide
cuacagacuucaaagaguu

SEQ ID NO: 2969867 - RNA, 19 nt, Artificial Sequence
  Description of Artificial Sequence: Synthetic oligonucleotide
cugaaacaaggcuucugga

SEQ ID NO: 2969868 - RNA, 19 nt, Artificial Sequence
  Description of Artificial Sequence: Synthetic oligonucleotide
cacucagccaacaugcugu

SEQ ID NO: 2969869 - RNA, 19 nt, Artificial Sequence
  Description of Artificial Sequence: Synthetic oligonucleotide
ugcaagcucuucucauacu

SEQ ID NO: 2969870 - RNA, 19 nt, Artificial Sequence
  Description of Artificial Sequence: Synthetic oligonucleotide
ugucaacucuggagaguga

SEQ ID NO: 2969871 - RNA, 19 nt, Artificial Sequence
  Description of Artificial Sequence: Synthetic oligonucleotide
aaaucugucugaggcuuuu

SEQ ID NO: 2969872 - RNA, 19 nt, Artificial Sequence
  Description of Artificial Sequence: Synthetic oligonucleotide
uacagacuucaaagaguuc

SEQ ID NO: 2969873 - RNA, 19 nt, Artificial Sequence
  Description of Artificial Sequence: Synthetic oligonucleotide
auggacacaugaccacacu

SEQ ID NO: 2969874 - RNA, 19 nt, Artificial Sequence
  Description of Artificial Sequence: Synthetic oligonucleotide
ucaucacacagcuccuguu

SEQ ID NO: 2969875 - RNA, 19 nt, Artificial Sequence
  Description of Artificial Sequence: Synthetic oligonucleotide
agcuagguccucuggcagu

SEQ ID NO: 2969876 - RNA, 19 nt, Artificial Sequence
  Description of Artificial Sequence: Synthetic oligonucleotide
uuccuccaucacuucuugc

SEQ ID NO: 2969877 - RNA, 19 nt, Artificial Sequence
  Description of Artificial Sequence: Synthetic oligonucleotide
uugagacaauuuucaucaa

SEQ ID NO: 2969878 - RNA, 19 nt, Artificial Sequence
  Description of Artificial Sequence: Synthetic oligonucleotide
aauuuucaucaaacugcaa

SEQ ID NO: 2969879 - RNA, 19 nt, Artificial Sequence
  Description of Artificial Sequence: Synthetic oligonucleotide
acgaagcuucugcucuguc

SEQ ID NO: 2969880 - RNA, 19 nt, Artificial Sequence
  Description of Artificial Sequence: Synthetic oligonucleotide
ucauuauucucagguugua

SEQ ID NO: 2969881 - RNA, 19 nt, Artificial Sequence
  Description of Artificial Sequence: Synthetic oligonucleotide
aucacuucuugcacaagaa

SEQ ID NO: 2969882 - RNA, 19 nt, Artificial Sequence
  Description of Artificial Sequence: Synthetic oligonucleotide
cuggacaauucucuacaga

SEQ ID NO: 2969883 - RNA, 19 nt, Artificial Sequence
  Description of Artificial Sequence: Synthetic oligonucleotide
ugugcacugugcucauuua

SEQ ID NO: 2969884 - RNA, 19 nt, Artificial Sequence
  Description of Artificial Sequence: Synthetic oligonucleotide
cagcuagguccucuggcag

SEQ ID NO: 2969885 - RNA, 19 nt, Artificial Sequence
  Description of Artificial Sequence: Synthetic oligonucleotide
uucucagguuguacuuuau

SEQ ID NO: 2969886 - RNA, 19 nt, Artificial Sequence
  Description of Artificial Sequence: Synthetic oligonucleotide
uucuuucaucacacagcuc

SEQ ID NO: 2969887 - RNA, 19 nt, Artificial Sequence
  Description of Artificial Sequence: Synthetic oligonucleotide
ggguuugcuucccacucag

SEQ ID NO: 2969888 - RNA, 19 nt, Artificial Sequence
  Description of Artificial Sequence: Synthetic oligonucleotide
cuggugugccaccuccagc

SEQ ID NO: 2969889 - RNA, 19 nt, Artificial Sequence
  Description of Artificial Sequence: Synthetic oligonucleotide
cuucucauacucgcuuaug

SEQ ID NO: 2969890 - RNA, 19 nt, Artificial Sequence
  Description of Artificial Sequence: Synthetic oligonucleotide
gacgagugugcacugugcu

SEQ ID NO: 2969891 - RNA, 19 nt, Artificial Sequence
  Description of Artificial Sequence: Synthetic oligonucleotide
aguuccacucuuccuccau

SEQ ID NO: 2969892 - RNA, 19 nt, Artificial Sequence
  Description of Artificial Sequence: Synthetic oligonucleotide
agguuguacuuuauacaca

SEQ ID NO: 2969893 - RNA, 19 nt, Artificial Sequence
  Description of Artificial Sequence: Synthetic oligonucleotide
cuucuugcacaagaaaucu

SEQ ID NO: 2969894 - RNA, 19 nt, Artificial Sequence
  Description of Artificial Sequence: Synthetic oligonucleotide
aauucucuacagacuucaa

SEQ ID NO: 2969895 - RNA, 19 nt, Artificial Sequence
  Description of Artificial Sequence: Synthetic oligonucleotide
ggcagucccaacugaaaca

SEQ ID NO: 2969896 - RNA, 19 nt, Artificial Sequence
  Description of Artificial Sequence: Synthetic oligonucleotide
uuucccuggugugccaccu

SEQ ID NO: 2969897 - RNA, 19 nt, Artificial Sequence
  Description of Artificial Sequence: Synthetic oligonucleotide
gucaacucuggagagugaa

SEQ ID NO: 2969898 - RNA, 19 nt, Artificial Sequence
  Description of Artificial Sequence: Synthetic oligonucleotide
guuccacucuuccuccauc

SEQ ID NO: 2969899 - RNA, 19 nt, Artificial Sequence
  Description of Artificial Sequence: Synthetic oligonucleotide
cugucugaggcuuuucccu

SEQ ID NO: 2969900 - RNA, 19 nt, Artificial Sequence
  Description of Artificial Sequence: Synthetic oligonucleotide
cuucaaagaguuccacucu

SEQ ID NO: 2969901 - RNA, 19 nt, Artificial Sequence
  Description of Artificial Sequence: Synthetic oligonucleotide
cuuuucccuggugugccac

SEQ ID NO: 2969902 - RNA, 19 nt, Artificial Sequence
  Description of Artificial Sequence: Synthetic oligonucleotide
ugccaccuccagccuggcg

SEQ ID NO: 2969903 - RNA, 19 nt, Artificial Sequence
  Description of Artificial Sequence: Synthetic oligonucleotide
cagucccaacugaaacaag

SEQ ID NO: 2969904 - RNA, 19 nt, Artificial Sequence
  Description of Artificial Sequence: Synthetic oligonucleotide
gcacaagaaaucugucuga

SEQ ID NO: 2969905 - RNA, 19 nt, Artificial Sequence
  Description of Artificial Sequence: Synthetic oligonucleotide
ccacauggacacaugacca

SEQ ID NO: 2969906 - RNA, 19 nt, Artificial Sequence
  Description of Artificial Sequence: Synthetic oligonucleotide
gacacaugaccacacuguu

SEQ ID NO: 2969907 - RNA, 19 nt, Artificial Sequence
  Description of Artificial Sequence: Synthetic oligonucleotide
gggacgagugugcacugug

SEQ ID NO: 2969908 - RNA, 19 nt, Artificial Sequence
  Description of Artificial Sequence: Synthetic oligonucleotide
uggggacgagugugcacug

SEQ ID NO: 2969909 - RNA, 19 nt, Artificial Sequence
  Description of Artificial Sequence: Synthetic oligonucleotide
caugcuguugagacaauuu

SEQ ID NO: 2969910 - RNA, 19 nt, Artificial Sequence
  Description of Artificial Sequence: Synthetic oligonucleotide
aacaaggcuucuggacaau

SEQ ID NO: 2969911 - RNA, 19 nt, Artificial Sequence
  Description of Artificial Sequence: Synthetic oligonucleotide
cauacucgcuuaugaugga

SEQ ID NO: 2969912 - RNA, 19 nt, Artificial Sequence
  Description of Artificial Sequence: Synthetic oligonucleotide
acaugcuguugagacaauu

SEQ ID NO: 2969913 - RNA, 19 nt, Artificial Sequence
  Description of Artificial Sequence: Synthetic oligonucleotide
agcuccuguucaauguccu

SEQ ID NO: 2969914 - RNA, 19 nt, Artificial Sequence
  Description of Artificial Sequence: Synthetic oligonucleotide
gaccacacuguucauuauu

SEQ ID NO: 2969915 - RNA, 19 nt, Artificial Sequence
  Description of Artificial Sequence: Synthetic oligonucleotide
guuguacuuuauacacaca

SEQ ID NO: 2969916 - RNA, 19 nt, Artificial Sequence
  Description of Artificial Sequence: Synthetic oligonucleotide
ugggaugugcaggccacau

SEQ ID NO: 2969917 - RNA, 19 nt, Artificial Sequence
  Description of Artificial Sequence: Synthetic oligonucleotide
cucuucucauacucgcuua

SEQ ID NO: 2969918 - RNA, 19 nt, Artificial Sequence
  Description of Artificial Sequence: Synthetic oligonucleotide
gcuuaugauggacuuuucu

SEQ ID NO: 2969919 - RNA, 19 nt, Artificial Sequence
  Description of Artificial Sequence: Synthetic oligonucleotide
gaugugcaggccacaugga

SEQ ID NO: 2969920 - RNA, 19 nt, Artificial Sequence
  Description of Artificial Sequence: Synthetic oligonucleotide
gaguuccacucuuccucca

SEQ ID NO: 2969921 - RNA, 19 nt, Artificial Sequence
  Description of Artificial Sequence: Synthetic oligonucleotide
ggcacgaagcuucugcucu

SEQ ID NO: 2969922 - RNA, 19 nt, Artificial Sequence
  Description of Artificial Sequence: Synthetic oligonucleotide
guucaauguccugcagcac

SEQ ID NO: 2969923 - RNA, 19 nt, Artificial Sequence
  Description of Artificial Sequence: Synthetic oligonucleotide
caggccacauggacacaug

SEQ ID NO: 2969924 - RNA, 19 nt, Artificial Sequence
  Description of Artificial Sequence: Synthetic oligonucleotide
agcucuucucauacucgcu

SEQ ID NO: 2969925 - RNA, 19 nt, Artificial Sequence
  Description of Artificial Sequence: Synthetic oligonucleotide
cuuucaucacacagcuccu

SEQ ID NO: 2969926 - RNA, 19 nt, Artificial Sequence
  Description of Artificial Sequence: Synthetic oligonucleotide
cuggcagucccaacugaaa

SEQ ID NO: 2969927 - RNA, 19 nt, Artificial Sequence
  Description of Artificial Sequence: Synthetic oligonucleotide
gcacagcuagguccucugg

SEQ ID NO: 2969928 - RNA, 19 nt, Artificial Sequence
  Description of Artificial Sequence: Synthetic oligonucleotide
acucagccaacaugcuguu

SEQ ID NO: 2969929 - RNA, 19 nt, Artificial Sequence
  Description of Artificial Sequence: Synthetic oligonucleotide
cuccaauaggcacgaagcu

SEQ ID NO: 2969930 - RNA, 19 nt, Artificial Sequence
  Description of Artificial Sequence: Synthetic oligonucleotide
agccaacaugcuguugaga

SEQ ID NO: 2969931 - RNA, 19 nt, Artificial Sequence
  Description of Artificial Sequence: Synthetic oligonucleotide
guggggacgagugugcacu

SEQ ID NO: 2969932 - RNA, 19 nt, Artificial Sequence
  Description of Artificial Sequence: Synthetic oligonucleotide
acaaggcuucuggacaauu

SEQ ID NO: 2969933 - RNA, 19 nt, Artificial Sequence
  Description of Artificial Sequence: Synthetic oligonucleotide
gcagucccaacugaaacaa

SEQ ID NO: 2969934 - RNA, 19 nt, Artificial Sequence
  Description of Artificial Sequence: Synthetic oligonucleotide
cugaggcuuuucccuggug

SEQ ID NO: 2969935 - RNA, 19 nt, Artificial Sequence
  Description of Artificial Sequence: Synthetic oligonucleotide
ccacucagccaacaugcug

SEQ ID NO: 2969936 - RNA, 19 nt, Artificial Sequence
  Description of Artificial Sequence: Synthetic oligonucleotide
gggaugugcaggccacaug

SEQ ID NO: 2969937 - RNA, 19 nt, Artificial Sequence
  Description of Artificial Sequence: Synthetic oligonucleotide
ggacgagugugcacugugc

SEQ ID NO: 2969938 - RNA, 19 nt, Artificial Sequence
  Description of Artificial Sequence: Synthetic oligonucleotide
ggacacaugaccacacugu

SEQ ID NO: 2969939 - RNA, 19 nt, Artificial Sequence
  Description of Artificial Sequence: Synthetic oligonucleotide
gugugcacugugcucauuu

SEQ ID NO: 2969940 - RNA, 19 nt, Artificial Sequence
  Description of Artificial Sequence: Synthetic oligonucleotide
uucccuggugugccaccuc

SEQ ID NO: 2969941 - RNA, 19 nt, Artificial Sequence
  Description of Artificial Sequence: Synthetic oligonucleotide
cucuggcagucccaacuga

SEQ ID NO: 2969942 - RNA, 19 nt, Artificial Sequence
  Description of Artificial Sequence: Synthetic oligonucleotide
gcuccuguucaauguccug

SEQ ID NO: 2969943 - RNA, 19 nt, Artificial Sequence
  Description of Artificial Sequence: Synthetic oligonucleotide
cuagguccucuggcagucc

SEQ ID NO: 2969944 - RNA, 19 nt, Artificial Sequence
  Description of Artificial Sequence: Synthetic oligonucleotide
cuguugagacaauuuucau

SEQ ID NO: 2969945 - RNA, 19 nt, Artificial Sequence
  Description of Artificial Sequence: Synthetic oligonucleotide
aacaugcuguugagacaau

SEQ ID NO: 2969946 - RNA, 19 nt, Artificial Sequence
  Description of Artificial Sequence: Synthetic oligonucleotide
ggagagugaaugggaugug

SEQ ID NO: 2969947 - RNA, 19 nt, Artificial Sequence
  Description of Artificial Sequence: Synthetic oligonucleotide
ccuggugugccaccuccag

SEQ ID NO: 2969948 - RNA, 19 nt, Artificial Sequence
  Description of Artificial Sequence: Synthetic oligonucleotide
ggccacauggacacaugac

SEQ ID NO: 2969949 - RNA, 19 nt, Artificial Sequence
  Description of Artificial Sequence: Synthetic oligonucleotide
ccuguucaauguccugcag

SEQ ID NO: 2969950 - RNA, 19 nt, Artificial Sequence
  Description of Artificial Sequence: Synthetic oligonucleotide
cucagccaacaugcuguug

SEQ ID NO: 2969951 - RNA, 19 nt, Artificial Sequence
  Description of Artificial Sequence: Synthetic oligonucleotide
ccaacaugcuguugagaca

SEQ ID NO: 2969952 - RNA, 19 nt, Artificial Sequence
  Description of Artificial Sequence: Synthetic oligonucleotide
cauuuacauuauccuccaa

SEQ ID NO: 2969953 - RNA, 19 nt, Artificial Sequence
  Description of Artificial Sequence: Synthetic oligonucleotide
ccucuggcagucccaacug

SEQ ID NO: 2969954 - RNA, 19 nt, Artificial Sequence
  Description of Artificial Sequence: Synthetic oligonucleotide
gggguuugcuucccacuca

SEQ ID NO: 2969955 - RNA, 19 nt, Artificial Sequence
  Description of Artificial Sequence: Synthetic oligonucleotide
ggacaauucucuacagacu

SEQ ID NO: 2969956 - RNA, 19 nt, Artificial Sequence
  Description of Artificial Sequence: Synthetic oligonucleotide
cccaacugaaacaaggcuu

SEQ ID NO: 2969957 - RNA, 19 nt, Artificial Sequence
  Description of Artificial Sequence: Synthetic oligonucleotide
ggcuucuggacaauucucu

SEQ ID NO: 2969958 - RNA, 19 nt, Artificial Sequence
  Description of Artificial Sequence: Synthetic oligonucleotide
caauaggcacgaagcuucu

SEQ ID NO: 2969959 - RNA, 19 nt, Artificial Sequence
  Description of Artificial Sequence: Synthetic oligonucleotide
gcuagguccucuggcaguc

SEQ ID NO: 2969960 - RNA, 19 nt, Artificial Sequence
  Description of Artificial Sequence: Synthetic oligonucleotide
ccugcagcacagcuagguc

SEQ ID NO: 2969961 - RNA, 19 nt, Artificial Sequence
  Description of Artificial Sequence: Synthetic oligonucleotide
caucaaacugcaagcucuu

SEQ ID NO: 2969962 - RNA, 19 nt, Artificial Sequence
  Description of Artificial Sequence: Synthetic oligonucleotide
cgaagcuucugcucuguca

SEQ ID NO: 2969963 - RNA, 19 nt, Artificial Sequence
  Description of Artificial Sequence: Synthetic oligonucleotide
cgagugugcacugugcuca

SEQ ID NO: 2969964 - RNA, 19 nt, Artificial Sequence
  Description of Artificial Sequence: Synthetic oligonucleotide
gguuugcuucccacucagc

SEQ ID NO: 2969965 - RNA, 19 nt, Artificial Sequence
  Description of Artificial Sequence: Synthetic oligonucleotide
cugcucugucaacucugga

SEQ ID NO: 2969966 - RNA, 19 nt, Artificial Sequence
  Description of Artificial Sequence: Synthetic oligonucleotide
gcacugugcucauuuacau

SEQ ID NO: 2969967 - RNA, 19 nt, Artificial Sequence
  Description of Artificial Sequence: Synthetic oligonucleotide
guccucuggcagucccaac

SEQ ID NO: 2969968 - RNA, 19 nt, Artificial Sequence
  Description of Artificial Sequence: Synthetic oligonucleotide
ugcaggccacauggacaca

SEQ ID NO: 2969969 - RNA, 19 nt, Artificial Sequence
  Description of Artificial Sequence: Synthetic oligonucleotide
gaaaucugucugaggcuuu

SEQ ID NO: 2969970 - RNA, 19 nt, Artificial Sequence
  Description of Artificial Sequence: Synthetic oligonucleotide
agguccucuggcaguccca

SEQ ID NO: 2969971 - RNA, 19 nt, Artificial Sequence
  Description of Artificial Sequence: Synthetic oligonucleotide
cugugcucauuuacauuau

SEQ ID NO: 2969972 - RNA, 19 nt, Artificial Sequence
  Description of Artificial Sequence: Synthetic oligonucleotide
cacugugcucauuuacauu

SEQ ID NO: 2969973 - RNA, 19 nt, Artificial Sequence
  Description of Artificial Sequence: Synthetic oligonucleotide
caugaccacacuguucauu

SEQ ID NO: 2969974 - RNA, 19 nt, Artificial Sequence
  Description of Artificial Sequence: Synthetic oligonucleotide
cuucccacucagccaacau

SEQ ID NO: 2969975 - RNA, 19 nt, Artificial Sequence
  Description of Artificial Sequence: Synthetic oligonucleotide
gcuuuucccuggugugcca

SEQ ID NO: 2969976 - RNA, 19 nt, Artificial Sequence
  Description of Artificial Sequence: Synthetic oligonucleotide
gagugugcacugugcucau

SEQ ID NO: 2969977 - RNA, 19 nt, Artificial Sequence
  Description of Artificial Sequence: Synthetic oligonucleotide
gguccucuggcagucccaa

SEQ ID NO: 2969978 - RNA, 19 nt, Artificial Sequence
  Description of Artificial Sequence: Synthetic oligonucleotide
agugugcacugugcucauu

SEQ ID NO: 2969979 - RNA, 19 nt, Artificial Sequence
  Description of Artificial Sequence: Synthetic oligonucleotide
gcuucccacucagccaaca

SEQ ID NO: 2969980 - RNA, 19 nt, Artificial Sequence
  Description of Artificial Sequence: Synthetic oligonucleotide
cacacagcuccuguucaau

SEQ ID NO: 2969981 - RNA, 19 nt, Artificial Sequence
  Description of Artificial Sequence: Synthetic oligonucleotide
ccacacuguucauuauucu

SEQ ID NO: 2969982 - RNA, 19 nt, Artificial Sequence
  Description of Artificial Sequence: Synthetic oligonucleotide
cacgaagcuucugcucugu

SEQ ID NO: 2969983 - RNA, 19 nt, Artificial Sequence
  Description of Artificial Sequence: Synthetic oligonucleotide
cgcuuaugauggacuuuuc

SEQ ID NO: 2969984 - RNA, 19 nt, Artificial Sequence
  Description of Artificial Sequence: Synthetic oligonucleotide
cucgcuuaugauggacuuu

SEQ ID NO: 2969985 - RNA, 19 nt, Artificial Sequence
  Description of Artificial Sequence: Synthetic oligonucleotide
gcaggccacauggacacau

SEQ ID NO: 2969986 - RNA, 19 nt, Artificial Sequence
  Description of Artificial Sequence: Synthetic oligonucleotide
ggugugccaccuccagccu

SEQ ID NO: 2969987 - RNA, 19 nt, Artificial Sequence
  Description of Artificial Sequence: Synthetic oligonucleotide
cagcacagcuagguccucu

SEQ ID NO: 2969988 - RNA, 19 nt, Artificial Sequence
  Description of Artificial Sequence: Synthetic oligonucleotide
auccuccaauaggcacgaa

SEQ ID NO: 2969989 - RNA, 19 nt, Artificial Sequence
  Description of Artificial Sequence: Synthetic oligonucleotide
cccacucagccaacaugcu

SEQ ID NO: 2969990 - RNA, 19 nt, Artificial Sequence
  Description of Artificial Sequence: Synthetic oligonucleotide
ggggacgagugugcacugu

SEQ ID NO: 2969991 - RNA, 19 nt, Artificial Sequence
  Description of Artificial Sequence: Synthetic oligonucleotide
uucaaggagacccagaucg

SEQ ID NO: 2969992 - RNA, 19 nt, Artificial Sequence
  Description of Artificial Sequence: Synthetic oligonucleotide
aaaauaaauaccgagcuag

SEQ ID NO: 2969993 - RNA, 19 nt, Artificial Sequence
  Description of Artificial Sequence: Synthetic oligonucleotide
auaaauuuauucuucaaag

SEQ ID NO: 2969994 - RNA, 19 nt, Artificial Sequence
  Description of Artificial Sequence: Synthetic oligonucleotide
uucaucuucaucuaagccg

SEQ ID NO: 2969995 - RNA, 19 nt, Artificial Sequence
  Description of Artificial Sequence: Synthetic oligonucleotide
aauaaauuuauucuucaaa

SEQ ID NO: 2969996 - RNA, 19 nt, Artificial Sequence
  Description of Artificial Sequence: Synthetic oligonucleotide
gaagucaucuucuacauug

SEQ ID NO: 2969997 - RNA, 19 nt, Artificial Sequence
  Description of Artificial Sequence: Synthetic oligonucleotide
aaauuuauucuucaaagua

SEQ ID NO: 2969998 - RNA, 19 nt, Artificial Sequence
  Description of Artificial Sequence: Synthetic oligonucleotide
aaugaauaaauuuauucuu

SEQ ID NO: 2969999 - RNA, 19 nt, Artificial Sequence
  Description of Artificial Sequence: Synthetic oligonucleotide
uucuacauugucaucaucc

SEQ ID NO: 2970000 - RNA, 19 nt, Artificial Sequence
  Description of Artificial Sequence: Synthetic oligonucleotide
ucaucuucaucuaagccgg

SEQ ID NO: 2970001 - RNA, 19 nt, Artificial Sequence
  Description of Artificial Sequence: Synthetic oligonucleotide
aauuuauucuucaaaguag

SEQ ID NO: 2970002 - RNA, 19 nt, Artificial Sequence
  Description of Artificial Sequence: Synthetic oligonucleotide
uagaauuuaguacacaguc

SEQ ID NO: 2970003 - RNA, 19 nt, Artificial Sequence
  Description of Artificial Sequence: Synthetic oligonucleotide
ucaaaguagcccaugcucg

SEQ ID NO: 2970004 - RNA, 19 nt, Artificial Sequence
  Description of Artificial Sequence: Synthetic oligonucleotide
uaaauaccgagcuagauaa

SEQ ID NO: 2970005 - RNA, 19 nt, Artificial Sequence
  Description of Artificial Sequence: Synthetic oligonucleotide
ugaaguuuccaucuuguag

SEQ ID NO: 2970006 - RNA, 19 nt, Artificial Sequence
  Description of Artificial Sequence: Synthetic oligonucleotide
uagauaaugaauaaauuua

SEQ ID NO: 2970007 - RNA, 19 nt, Artificial Sequence
  Description of Artificial Sequence: Synthetic oligonucleotide
auguuuaaggucuugcaac

SEQ ID NO: 2970008 - RNA, 19 nt, Artificial Sequence
  Description of Artificial Sequence: Synthetic oligonucleotide
uauucuucaaaguagccca

SEQ ID NO: 2970009 - RNA, 19 nt, Artificial Sequence
  Description of Artificial Sequence: Synthetic oligonucleotide
gaauuuaguacacagucca

SEQ ID NO: 2970010 - RNA, 19 nt, Artificial Sequence
  Description of Artificial Sequence: Synthetic oligonucleotide
aaguuuccaucuuguagcc

SEQ ID NO: 2970011 - RNA, 19 nt, Artificial Sequence
  Description of Artificial Sequence: Synthetic oligonucleotide
uaaauuuauucuucaaagu

SEQ ID NO: 2970012 - RNA, 19 nt, Artificial Sequence
  Description of Artificial Sequence: Synthetic oligonucleotide
acacaguccauguuuaagg

SEQ ID NO: 2970013 - RNA, 19 nt, Artificial Sequence
  Description of Artificial Sequence: Synthetic oligonucleotide
uuauucuucaaaguagccc

SEQ ID NO: 2970014 - RNA, 19 nt, Artificial Sequence
  Description of Artificial Sequence: Synthetic oligonucleotide
aaacuccucgaacucgucg

SEQ ID NO: 2970015 - RNA, 19 nt, Artificial Sequence
  Description of Artificial Sequence: Synthetic oligonucleotide
uucaaaguagcccaugcuc

SEQ ID NO: 2970016 - RNA, 19 nt, Artificial Sequence
  Description of Artificial Sequence: Synthetic oligonucleotide
uuucuggaugcuaugaagu

SEQ ID NO: 2970017 - RNA, 19 nt, Artificial Sequence
  Description of Artificial Sequence: Synthetic oligonucleotide
uacauugucaucaucccaa

SEQ ID NO: 2970018 - RNA, 19 nt, Artificial Sequence
  Description of Artificial Sequence: Synthetic oligonucleotide
uuuauucuucaaaguagcc

SEQ ID NO: 2970019 - RNA, 19 nt, Artificial Sequence
  Description of Artificial Sequence: Synthetic oligonucleotide
ugcuucuucuccgacaucg

SEQ ID NO: 2970020 - RNA, 19 nt, Artificial Sequence
  Description of Artificial Sequence: Synthetic oligonucleotide
aauaccgagcuagauaaug

SEQ ID NO: 2970021 - RNA, 19 nt, Artificial Sequence
  Description of Artificial Sequence: Synthetic oligonucleotide
agaauuuaguacacagucc

SEQ ID NO: 2970022 - RNA, 19 nt, Artificial Sequence
  Description of Artificial Sequence: Synthetic oligonucleotide
auuucuggaugcuaugaag

SEQ ID NO: 2970023 - RNA, 19 nt, Artificial Sequence
  Description of Artificial Sequence: Synthetic oligonucleotide
auugucaucaucccaauua

SEQ ID NO: 2970024 - RNA, 19 nt, Artificial Sequence
  Description of Artificial Sequence: Synthetic oligonucleotide
uaugaaguuuccaucuugu

SEQ ID NO: 2970025 - RNA, 19 nt, Artificial Sequence
  Description of Artificial Sequence: Synthetic oligonucleotide
ucuacauugucaucauccc

SEQ ID NO: 2970026 - RNA, 19 nt, Artificial Sequence
  Description of Artificial Sequence: Synthetic oligonucleotide
gauuggagaagucaucuuc

SEQ ID NO: 2970027 - RNA, 19 nt, Artificial Sequence
  Description of Artificial Sequence: Synthetic oligonucleotide
cuugcaacauuucuggaug

SEQ ID NO: 2970028 - RNA, 19 nt, Artificial Sequence
  Description of Artificial Sequence: Synthetic oligonucleotide
uauccucccagacaugugc

SEQ ID NO: 2970029 - RNA, 19 nt, Artificial Sequence
  Description of Artificial Sequence: Synthetic oligonucleotide
ugcuaugaaguuuccaucu

SEQ ID NO: 2970030 - RNA, 19 nt, Artificial Sequence
  Description of Artificial Sequence: Synthetic oligonucleotide
aaggucuugcaacauuucu

SEQ ID NO: 2970031 - RNA, 19 nt, Artificial Sequence
  Description of Artificial Sequence: Synthetic oligonucleotide
ucuucaucuaagccggccc

SEQ ID NO: 2970032 - RNA, 19 nt, Artificial Sequence
  Description of Artificial Sequence: Synthetic oligonucleotide
uuucuguccuagaauuuag

SEQ ID NO: 2970033 - RNA, 19 nt, Artificial Sequence
  Description of Artificial Sequence: Synthetic oligonucleotide
cuguccuagaauuuaguac

SEQ ID NO: 2970034 - RNA, 19 nt, Artificial Sequence
  Description of Artificial Sequence: Synthetic oligonucleotide
uuaaggucuugcaacauuu

SEQ ID NO: 2970035 - RNA, 19 nt, Artificial Sequence
  Description of Artificial Sequence: Synthetic oligonucleotide
auaaauaccgagcuagaua

SEQ ID NO: 2970036 - RNA, 19 nt, Artificial Sequence
  Description of Artificial Sequence: Synthetic oligonucleotide
aucccaauuauccucccag

SEQ ID NO: 2970037 - RNA, 19 nt, Artificial Sequence
  Description of Artificial Sequence: Synthetic oligonucleotide
ucgcgcugcacccagaagc

SEQ ID NO: 2970038 - RNA, 19 nt, Artificial Sequence
  Description of Artificial Sequence: Synthetic oligonucleotide
caucuuguagccaugcuuc

SEQ ID NO: 2970039 - RNA, 19 nt, Artificial Sequence
  Description of Artificial Sequence: Synthetic oligonucleotide
ggucuugcaacauuucugg

SEQ ID NO: 2970040 - RNA, 19 nt, Artificial Sequence
  Description of Artificial Sequence: Synthetic oligonucleotide
aggagacccagaucgaccg

SEQ ID NO: 2970041 - RNA, 19 nt, Artificial Sequence
  Description of Artificial Sequence: Synthetic oligonucleotide
uccgacaucgcgcugcacc

SEQ ID NO: 2970042 - RNA, 19 nt, Artificial Sequence
  Description of Artificial Sequence: Synthetic oligonucleotide
aacauuucuggaugcuaug

SEQ ID NO: 2970043 - RNA, 19 nt, Artificial Sequence
  Description of Artificial Sequence: Synthetic oligonucleotide
augcuaugaaguuuccauc

SEQ ID NO: 2970044 - RNA, 19 nt, Artificial Sequence
  Description of Artificial Sequence: Synthetic oligonucleotide
cucgucguccucuucaagg

SEQ ID NO: 2970045 - RNA, 19 nt, Artificial Sequence
  Description of Artificial Sequence: Synthetic oligonucleotide
aacuccucgaacucgucgu

SEQ ID NO: 2970046 - RNA, 19 nt, Artificial Sequence
  Description of Artificial Sequence: Synthetic oligonucleotide
agacaugugcaucuucauc

SEQ ID NO: 2970047 - RNA, 19 nt, Artificial Sequence
  Description of Artificial Sequence: Synthetic oligonucleotide
agaagcaccacacucggau

SEQ ID NO: 2970048 - RNA, 19 nt, Artificial Sequence
  Description of Artificial Sequence: Synthetic oligonucleotide
aauaaauaccgagcuagau

SEQ ID NO: 2970049 - RNA, 19 nt, Artificial Sequence
  Description of Artificial Sequence: Synthetic oligonucleotide
ucuagcucagcacguagcu

SEQ ID NO: 2970050 - RNA, 19 nt, Artificial Sequence
  Description of Artificial Sequence: Synthetic oligonucleotide
ucuugcaacauuucuggau

SEQ ID NO: 2970051 - RNA, 19 nt, Artificial Sequence
  Description of Artificial Sequence: Synthetic oligonucleotide
uaguacacaguccauguuu

SEQ ID NO: 2970052 - RNA, 19 nt, Artificial Sequence
  Description of Artificial Sequence: Synthetic oligonucleotide
cuggaugcuaugaaguuuc

SEQ ID NO: 2970053 - RNA, 19 nt, Artificial Sequence
  Description of Artificial Sequence: Synthetic oligonucleotide
acccagaagcaccacacuc

SEQ ID NO: 2970054 - RNA, 19 nt, Artificial Sequence
  Description of Artificial Sequence: Synthetic oligonucleotide
acccagaucgaccggcugc

SEQ ID NO: 2970055 - RNA, 19 nt, Artificial Sequence
  Description of Artificial Sequence: Synthetic oligonucleotide
ccuagaauuuaguacacag

SEQ ID NO: 2970056 - RNA, 19 nt, Artificial Sequence
  Description of Artificial Sequence: Synthetic oligonucleotide
acaguccauguuuaagguc

SEQ ID NO: 2970057 - RNA, 19 nt, Artificial Sequence
  Description of Artificial Sequence: Synthetic oligonucleotide
agcuagauaaugaauaaau

SEQ ID NO: 2970058 - RNA, 19 nt, Artificial Sequence
  Description of Artificial Sequence: Synthetic oligonucleotide
gaauaaauuuauucuucaa

SEQ ID NO: 2970059 - RNA, 19 nt, Artificial Sequence
  Description of Artificial Sequence: Synthetic oligonucleotide
cuagauaaugaauaaauuu

SEQ ID NO: 2970060 - RNA, 19 nt, Artificial Sequence
  Description of Artificial Sequence: Synthetic oligonucleotide
gaugcuaugaaguuuccau

SEQ ID NO: 2970061 - RNA, 19 nt, Artificial Sequence
  Description of Artificial Sequence: Synthetic oligonucleotide
agauaaugaauaaauuuau

SEQ ID NO: 2970062 - RNA, 19 nt, Artificial Sequence
  Description of Artificial Sequence: Synthetic oligonucleotide
cucagcacguagcugauug

SEQ ID NO: 2970063 - RNA, 19 nt, Artificial Sequence
  Description of Artificial Sequence: Synthetic oligonucleotide
uuuaaggucuugcaacauu

SEQ ID NO: 2970064 - RNA, 19 nt, Artificial Sequence
  Description of Artificial Sequence: Synthetic oligonucleotide
gcuucucuagcucagcacg

SEQ ID NO: 2970065 - RNA, 19 nt, Artificial Sequence
  Description of Artificial Sequence: Synthetic oligonucleotide
guagccaugcuucucuagc

SEQ ID NO: 2970066 - RNA, 19 nt, Artificial Sequence
  Description of Artificial Sequence: Synthetic oligonucleotide
uugucaucaucccaauuau

SEQ ID NO: 2970067 - RNA, 19 nt, Artificial Sequence
  Description of Artificial Sequence: Synthetic oligonucleotide
ucuguccuagaauuuagua

SEQ ID NO: 2970068 - RNA, 19 nt, Artificial Sequence
  Description of Artificial Sequence: Synthetic oligonucleotide
gacacuggcgccaccauag

SEQ ID NO: 2970069 - RNA, 19 nt, Artificial Sequence
  Description of Artificial Sequence: Synthetic oligonucleotide
cuaugaaguuuccaucuug

SEQ ID NO: 2970070 - RNA, 19 nt, Artificial Sequence
  Description of Artificial Sequence: Synthetic oligonucleotide
uacacaguccauguuuaag

SEQ ID NO: 2970071 - RNA, 19 nt, Artificial Sequence
  Description of Artificial Sequence: Synthetic oligonucleotide
ucguuucuguccuagaauu

SEQ ID NO: 2970072 - RNA, 19 nt, Artificial Sequence
  Description of Artificial Sequence: Synthetic oligonucleotide
uuccgcgggaaacuccucg

SEQ ID NO: 2970073 - RNA, 19 nt, Artificial Sequence
  Description of Artificial Sequence: Synthetic oligonucleotide
guccucuucaaggagaccc

SEQ ID NO: 2970074 - RNA, 19 nt, Artificial Sequence
  Description of Artificial Sequence: Synthetic oligonucleotide
ucucuagcucagcacguag

SEQ ID NO: 2970075 - RNA, 19 nt, Artificial Sequence
  Description of Artificial Sequence: Synthetic oligonucleotide
agucaucuucuacauuguc

SEQ ID NO: 2970076 - RNA, 19 nt, Artificial Sequence
  Description of Artificial Sequence: Synthetic oligonucleotide
uccauguuuaaggucuugc

SEQ ID NO: 2970077 - RNA, 19 nt, Artificial Sequence
  Description of Artificial Sequence: Synthetic oligonucleotide
auuauccucccagacaugu

SEQ ID NO: 2970078 - RNA, 19 nt, Artificial Sequence
  Description of Artificial Sequence: Synthetic oligonucleotide
aucuucaucuaagccggcc

SEQ ID NO: 2970079 - RNA, 19 nt, Artificial Sequence
  Description of Artificial Sequence: Synthetic oligonucleotide
uggagaagucaucuucuac

SEQ ID NO: 2970080 - RNA, 19 nt, Artificial Sequence
  Description of Artificial Sequence: Synthetic oligonucleotide
ucuucuccgacaucgcgcu

SEQ ID NO: 2970081 - RNA, 19 nt, Artificial Sequence
  Description of Artificial Sequence: Synthetic oligonucleotide
ggagaagucaucuucuaca

SEQ ID NO: 2970082 - RNA, 19 nt, Artificial Sequence
  Description of Artificial Sequence: Synthetic oligonucleotide
aaauaaauaccgagcuaga

SEQ ID NO: 2970083 - RNA, 19 nt, Artificial Sequence
  Description of Artificial Sequence: Synthetic oligonucleotide
cucaggacucgucaggcgc

SEQ ID NO: 2970084 - RNA, 19 nt, Artificial Sequence
  Description of Artificial Sequence: Synthetic oligonucleotide
ucuuccgcgggaaacuccu

SEQ ID NO: 2970085 - RNA, 19 nt, Artificial Sequence
  Description of Artificial Sequence: Synthetic oligonucleotide
gaagccucaggacucguca

SEQ ID NO: 2970086 - RNA, 19 nt, Artificial Sequence
  Description of Artificial Sequence: Synthetic oligonucleotide
cuucuucuccgacaucgcg

SEQ ID NO: 2970087 - RNA, 19 nt, Artificial Sequence
  Description of Artificial Sequence: Synthetic oligonucleotide
uguagccaugcuucucuag

SEQ ID NO: 2970088 - RNA, 19 nt, Artificial Sequence
  Description of Artificial Sequence: Synthetic oligonucleotide
ucagcacguagcugauugg

SEQ ID NO: 2970089 - RNA, 19 nt, Artificial Sequence
  Description of Artificial Sequence: Synthetic oligonucleotide
aagccucaggacucgucag

SEQ ID NO: 2970090 - RNA, 19 nt, Artificial Sequence
  Description of Artificial Sequence: Synthetic oligonucleotide
gaacucgucguccucuuca

SEQ ID NO: 2970091 - RNA, 19 nt, Artificial Sequence
  Description of Artificial Sequence: Synthetic oligonucleotide
ucaggacucgucaggcgcc

SEQ ID NO: 2970092 - RNA, 19 nt, Artificial Sequence
  Description of Artificial Sequence: Synthetic oligonucleotide
uucuguccuagaauuuagu

SEQ ID NO: 2970093 - RNA, 19 nt, Artificial Sequence
  Description of Artificial Sequence: Synthetic oligonucleotide
ucuaagccggcccagucuu

SEQ ID NO: 2970094 - RNA, 19 nt, Artificial Sequence
  Description of Artificial Sequence: Synthetic oligonucleotide
uugcaacauuucuggaugc

SEQ ID NO: 2970095 - RNA, 19 nt, Artificial Sequence
  Description of Artificial Sequence: Synthetic oligonucleotide
cucuagcucagcacguagc

SEQ ID NO: 2970096 - RNA, 19 nt, Artificial Sequence
  Description of Artificial Sequence: Synthetic oligonucleotide
uagcugauuggagaaguca

SEQ ID NO: 2970097 - RNA, 19 nt, Artificial Sequence
  Description of Artificial Sequence: Synthetic oligonucleotide
agccaugcuucucuagcuc

SEQ ID NO: 2970098 - RNA, 19 nt, Artificial Sequence
  Description of Artificial Sequence: Synthetic oligonucleotide
aguagcccaugcucguuuc

SEQ ID NO: 2970099 - RNA, 19 nt, Artificial Sequence
  Description of Artificial Sequence: Synthetic oligonucleotide
accacacucggauccgccg

SEQ ID NO: 2970100 - RNA, 19 nt, Artificial Sequence
  Description of Artificial Sequence: Synthetic oligonucleotide
ucgucguccucuucaagga

SEQ ID NO: 2970101 - RNA, 19 nt, Artificial Sequence
  Description of Artificial Sequence: Synthetic oligonucleotide
aaggaagccucaggacucg

SEQ ID NO: 2970102 - RNA, 19 nt, Artificial Sequence
  Description of Artificial Sequence: Synthetic oligonucleotide
cauguuuaaggucuugcaa

SEQ ID NO: 2970103 - RNA, 19 nt, Artificial Sequence
  Description of Artificial Sequence: Synthetic oligonucleotide
uaaggucuugcaacauuuc

SEQ ID NO: 2970104 - RNA, 19 nt, Artificial Sequence
  Description of Artificial Sequence: Synthetic oligonucleotide
uaccgagcuagauaaugaa

SEQ ID NO: 2970105 - RNA, 19 nt, Artificial Sequence
  Description of Artificial Sequence: Synthetic oligonucleotide
uuauccucccagacaugug

SEQ ID NO: 2970106 - RNA, 19 nt, Artificial Sequence
  Description of Artificial Sequence: Synthetic oligonucleotide
ucuucuacauugucaucau

SEQ ID NO: 2970107 - RNA, 19 nt, Artificial Sequence
  Description of Artificial Sequence: Synthetic oligonucleotide
ucaaggagacccagaucga

SEQ ID NO: 2970108 - RNA, 19 nt, Artificial Sequence
  Description of Artificial Sequence: Synthetic oligonucleotide
ugucaucaucccaauuauc

SEQ ID NO: 2970109 - RNA, 19 nt, Artificial Sequence
  Description of Artificial Sequence: Synthetic oligonucleotide
agaucgaccggcugcuucu

SEQ ID NO: 2970110 - RNA, 19 nt, Artificial Sequence
  Description of Artificial Sequence: Synthetic oligonucleotide
gaaggaagccucaggacuc

SEQ ID NO: 2970111 - RNA, 19 nt, Artificial Sequence
  Description of Artificial Sequence: Synthetic oligonucleotide
uccucuucaaggagaccca

SEQ ID NO: 2970112 - RNA, 19 nt, Artificial Sequence
  Description of Artificial Sequence: Synthetic oligonucleotide
caagccggaaggaagccuc

SEQ ID NO: 2970113 - RNA, 19 nt, Artificial Sequence
  Description of Artificial Sequence: Synthetic oligonucleotide
uuuccaucuuguagccaug

SEQ ID NO: 2970114 - RNA, 19 nt, Artificial Sequence
  Description of Artificial Sequence: Synthetic oligonucleotide
aggucuugcaacauuucug

SEQ ID NO: 2970115 - RNA, 19 nt, Artificial Sequence
  Description of Artificial Sequence: Synthetic oligonucleotide
ucguccucuucaaggagac

SEQ ID NO: 2970116 - RNA, 19 nt, Artificial Sequence
  Description of Artificial Sequence: Synthetic oligonucleotide
cuggcgccaccauagagac

SEQ ID NO: 2970117 - RNA, 19 nt, Artificial Sequence
  Description of Artificial Sequence: Synthetic oligonucleotide
uucuccgacaucgcgcugc

SEQ ID NO: 2970118 - RNA, 19 nt, Artificial Sequence
  Description of Artificial Sequence: Synthetic oligonucleotide
acauuucuggaugcuauga

SEQ ID NO: 2970119 - RNA, 19 nt, Artificial Sequence
  Description of Artificial Sequence: Synthetic oligonucleotide
agccucaggacucgucagg

SEQ ID NO: 2970120 - RNA, 19 nt, Artificial Sequence
  Description of Artificial Sequence: Synthetic oligonucleotide
uccgccgccaagccggaag

SEQ ID NO: 2970121 - RNA, 19 nt, Artificial Sequence
  Description of Artificial Sequence: Synthetic oligonucleotide
aucuaagccggcccagucu

SEQ ID NO: 2970122 - RNA, 19 nt, Artificial Sequence
  Description of Artificial Sequence: Synthetic oligonucleotide
caguccauguuuaaggucu

SEQ ID NO: 2970123 - RNA, 19 nt, Artificial Sequence
  Description of Artificial Sequence: Synthetic oligonucleotide
caauuauccucccagacau

SEQ ID NO: 2970124 - RNA, 19 nt, Artificial Sequence
  Description of Artificial Sequence: Synthetic oligonucleotide
ucccaauuauccucccaga

SEQ ID NO: 2970125 - RNA, 19 nt, Artificial Sequence
  Description of Artificial Sequence: Synthetic oligonucleotide
uagccaugcuucucuagcu

SEQ ID NO: 2970126 - RNA, 19 nt, Artificial Sequence
  Description of Artificial Sequence: Synthetic oligonucleotide
aauuuaguacacaguccau

SEQ ID NO: 2970127 - RNA, 19 nt, Artificial Sequence
  Description of Artificial Sequence: Synthetic oligonucleotide
aaguagcccaugcucguuu

SEQ ID NO: 2970128 - RNA, 19 nt, Artificial Sequence
  Description of Artificial Sequence: Synthetic oligonucleotide
gacaucgcgcugcacccag

SEQ ID NO: 2970129 - RNA, 19 nt, Artificial Sequence
  Description of Artificial Sequence: Synthetic oligonucleotide
cccagaagcaccacacucg

SEQ ID NO: 2970130 - RNA, 19 nt, Artificial Sequence
  Description of Artificial Sequence: Synthetic oligonucleotide
cuagaauuuaguacacagu

SEQ ID NO: 2970131 - RNA, 19 nt, Artificial Sequence
  Description of Artificial Sequence: Synthetic oligonucleotide
uuccaucuuguagccaugc

SEQ ID NO: 2970132 - RNA, 19 nt, Artificial Sequence
  Description of Artificial Sequence: Synthetic oligonucleotide
uucaucuaagccggcccag

SEQ ID NO: 2970133 - RNA, 19 nt, Artificial Sequence
  Description of Artificial Sequence: Synthetic oligonucleotide
ucuggaugcuaugaaguuu

SEQ ID NO: 2970134 - RNA, 19 nt, Artificial Sequence
  Description of Artificial Sequence: Synthetic oligonucleotide
augugcaucuucaucuuca

SEQ ID NO: 2970135 - RNA, 19 nt, Artificial Sequence
  Description of Artificial Sequence: Synthetic oligonucleotide
auaccgagcuagauaauga

SEQ ID NO: 2970136 - RNA, 19 nt, Artificial Sequence
  Description of Artificial Sequence: Synthetic oligonucleotide
uccaucuuguagccaugcu

SEQ ID NO: 2970137 - RNA, 19 nt, Artificial Sequence
  Description of Artificial Sequence: Synthetic oligonucleotide
aacucgucguccucuucaa

SEQ ID NO: 2970138 - RNA, 19 nt, Artificial Sequence
  Description of Artificial Sequence: Synthetic oligonucleotide
aagucaucuucuacauugu

SEQ ID NO: 2970139 - RNA, 19 nt, Artificial Sequence
  Description of Artificial Sequence: Synthetic oligonucleotide
uggaugcuaugaaguuucc

SEQ ID NO: 2970140 - RNA, 19 nt, Artificial Sequence
  Description of Artificial Sequence: Synthetic oligonucleotide
acuccucgaacucgucguc

SEQ ID NO: 2970141 - RNA, 19 nt, Artificial Sequence
  Description of Artificial Sequence: Synthetic oligonucleotide
uccuagaauuuaguacaca

SEQ ID NO: 2970142 - RNA, 19 nt, Artificial Sequence
  Description of Artificial Sequence: Synthetic oligonucleotide
ugugcaucuucaucuucau

SEQ ID NO: 2970143 - RNA, 19 nt, Artificial Sequence
  Description of Artificial Sequence: Synthetic oligonucleotide
gagacccagaucgaccggc

SEQ ID NO: 2970144 - RNA, 19 nt, Artificial Sequence
  Description of Artificial Sequence: Synthetic oligonucleotide
ggauccgccgccaagccgg

SEQ ID NO: 2970145 - RNA, 19 nt, Artificial Sequence
  Description of Artificial Sequence: Synthetic oligonucleotide
gaagcaccacacucggauc

SEQ ID NO: 2970146 - RNA, 19 nt, Artificial Sequence
  Description of Artificial Sequence: Synthetic oligonucleotide
acuggcgccaccauagaga

SEQ ID NO: 2970147 - RNA, 19 nt, Artificial Sequence
  Description of Artificial Sequence: Synthetic oligonucleotide
ucgaccggcugcuucuucu

SEQ ID NO: 2970148 - RNA, 19 nt, Artificial Sequence
  Description of Artificial Sequence: Synthetic oligonucleotide
agccggcccagucuuccgc

SEQ ID NO: 2970149 - RNA, 19 nt, Artificial Sequence
  Description of Artificial Sequence: Synthetic oligonucleotide
uaagccggcccagucuucc

SEQ ID NO: 2970150 - RNA, 19 nt, Artificial Sequence
  Description of Artificial Sequence: Synthetic oligonucleotide
cuacauugucaucauccca

SEQ ID NO: 2970151 - RNA, 19 nt, Artificial Sequence
  Description of Artificial Sequence: Synthetic oligonucleotide
acucgucaggcgccgccgc

SEQ ID NO: 2970152 - RNA, 19 nt, Artificial Sequence
  Description of Artificial Sequence: Synthetic oligonucleotide
ugcaacauuucuggaugcu

SEQ ID NO: 2970153 - RNA, 19 nt, Artificial Sequence
  Description of Artificial Sequence: Synthetic oligonucleotide
gagaagucaucuucuacau

SEQ ID NO: 2970154 - RNA, 19 nt, Artificial Sequence
  Description of Artificial Sequence: Synthetic oligonucleotide
aauuauccucccagacaug

SEQ ID NO: 2970155 - RNA, 19 nt, Artificial Sequence
  Description of Artificial Sequence: Synthetic oligonucleotide
ugauuggagaagucaucuu

SEQ ID NO: 2970156 - RNA, 19 nt, Artificial Sequence
  Description of Artificial Sequence: Synthetic oligonucleotide
aagccggcccagucuuccg

SEQ ID NO: 2970157 - RNA, 19 nt, Artificial Sequence
  Description of Artificial Sequence: Synthetic oligonucleotide
augaaguuuccaucuugua

SEQ ID NO: 2970158 - RNA, 19 nt, Artificial Sequence
  Description of Artificial Sequence: Synthetic oligonucleotide
cucggauccgccgccaagc

SEQ ID NO: 2970159 - RNA, 19 nt, Artificial Sequence
  Description of Artificial Sequence: Synthetic oligonucleotide
agcugauuggagaagucau

SEQ ID NO: 2970160 - RNA, 19 nt, Artificial Sequence
  Description of Artificial Sequence: Synthetic oligonucleotide
cuucaaggagacccagauc

SEQ ID NO: 2970161 - RNA, 19 nt, Artificial Sequence
  Description of Artificial Sequence: Synthetic oligonucleotide
gggaaacuccucgaacucg

SEQ ID NO: 2970162 - RNA, 19 nt, Artificial Sequence
  Description of Artificial Sequence: Synthetic oligonucleotide
guuucuguccuagaauuua

SEQ ID NO: 2970163 - RNA, 19 nt, Artificial Sequence
  Description of Artificial Sequence: Synthetic oligonucleotide
caaggagacccagaucgac

SEQ ID NO: 2970164 - RNA, 19 nt, Artificial Sequence
  Description of Artificial Sequence: Synthetic oligonucleotide
acauugucaucaucccaau

SEQ ID NO: 2970165 - RNA, 19 nt, Artificial Sequence
  Description of Artificial Sequence: Synthetic oligonucleotide
ucggauccgccgccaagcc

SEQ ID NO: 2970166 - RNA, 19 nt, Artificial Sequence
  Description of Artificial Sequence: Synthetic oligonucleotide
agucuuccgcgggaaacuc

SEQ ID NO: 2970167 - RNA, 19 nt, Artificial Sequence
  Description of Artificial Sequence: Synthetic oligonucleotide
cuucaucuaagccggccca

SEQ ID NO: 2970168 - RNA, 19 nt, Artificial Sequence
  Description of Artificial Sequence: Synthetic oligonucleotide
ccagaagcaccacacucgg

SEQ ID NO: 2970169 - RNA, 19 nt, Artificial Sequence
  Description of Artificial Sequence: Synthetic oligonucleotide
uccgcgggaaacuccucga

SEQ ID NO: 2970170 - RNA, 19 nt, Artificial Sequence
  Description of Artificial Sequence: Synthetic oligonucleotide
gagcuagauaaugaauaaa

SEQ ID NO: 2970171 - RNA, 19 nt, Artificial Sequence
  Description of Artificial Sequence: Synthetic oligonucleotide
ucaggcgccgccgccgacg

SEQ ID NO: 2970172 - RNA, 19 nt, Artificial Sequence
  Description of Artificial Sequence: Synthetic oligonucleotide
aguacacaguccauguuua

SEQ ID NO: 2970173 - RNA, 19 nt, Artificial Sequence
  Description of Artificial Sequence: Synthetic oligonucleotide
cacguagcugauuggagaa

SEQ ID NO: 2970174 - RNA, 19 nt, Artificial Sequence
  Description of Artificial Sequence: Synthetic oligonucleotide
uagcccaugcucguuucug

SEQ ID NO: 2970175 - RNA, 19 nt, Artificial Sequence
  Description of Artificial Sequence: Synthetic oligonucleotide
agcacguagcugauuggag

SEQ ID NO: 2970176 - RNA, 19 nt, Artificial Sequence
  Description of Artificial Sequence: Synthetic oligonucleotide
caugugcaucuucaucuuc

SEQ ID NO: 2970177 - RNA, 19 nt, Artificial Sequence
  Description of Artificial Sequence: Synthetic oligonucleotide
cauuucuggaugcuaugaa

SEQ ID NO: 2970178 - RNA, 19 nt, Artificial Sequence
  Description of Artificial Sequence: Synthetic oligonucleotide
gacucgucaggcgccgccg

SEQ ID NO: 2970179 - RNA, 19 nt, Artificial Sequence
  Description of Artificial Sequence: Synthetic oligonucleotide
agaagucaucuucuacauu

SEQ ID NO: 2970180 - RNA, 19 nt, Artificial Sequence
  Description of Artificial Sequence: Synthetic oligonucleotide
cuucuacauugucaucauc

SEQ ID NO: 2970181 - RNA, 19 nt, Artificial Sequence
  Description of Artificial Sequence: Synthetic oligonucleotide
acucggauccgccgccaag

SEQ ID NO: 2970182 - RNA, 19 nt, Artificial Sequence
  Description of Artificial Sequence: Synthetic oligonucleotide
ucuccgacaucgcgcugca

SEQ ID NO: 2970183 - RNA, 19 nt, Artificial Sequence
  Description of Artificial Sequence: Synthetic oligonucleotide
cacuggcgccaccauagag

SEQ ID NO: 2970184 - RNA, 19 nt, Artificial Sequence
  Description of Artificial Sequence: Synthetic oligonucleotide
agcaccacacucggauccg

SEQ ID NO: 2970185 - RNA, 19 nt, Artificial Sequence
  Description of Artificial Sequence: Synthetic oligonucleotide
agcccaugcucguuucugu

SEQ ID NO: 2970186 - RNA, 19 nt, Artificial Sequence
  Description of Artificial Sequence: Synthetic oligonucleotide
ucaucuaagccggcccagu

SEQ ID NO: 2970187 - RNA, 19 nt, Artificial Sequence
  Description of Artificial Sequence: Synthetic oligonucleotide
caucuaagccggcccaguc

SEQ ID NO: 2970188 - RNA, 19 nt, Artificial Sequence
  Description of Artificial Sequence: Synthetic oligonucleotide
caucuucuacauugucauc

SEQ ID NO: 2970189 - RNA, 19 nt, Artificial Sequence
  Description of Artificial Sequence: Synthetic oligonucleotide
acucgucguccucuucaag

SEQ ID NO: 2970190 - RNA, 19 nt, Artificial Sequence
  Description of Artificial Sequence: Synthetic oligonucleotide
gaccggcugcuucuucucc

SEQ ID NO: 2970191 - RNA, 19 nt, Artificial Sequence
  Description of Artificial Sequence: Synthetic oligonucleotide
aaaguagcccaugcucguu

SEQ ID NO: 2970192 - RNA, 19 nt, Artificial Sequence
  Description of Artificial Sequence: Synthetic oligonucleotide
cacacucggauccgccgcc

SEQ ID NO: 2970193 - RNA, 19 nt, Artificial Sequence
  Description of Artificial Sequence: Synthetic oligonucleotide
augcucguuucuguccuag

SEQ ID NO: 2970194 - RNA, 19 nt, Artificial Sequence
  Description of Artificial Sequence: Synthetic oligonucleotide
cugauuggagaagucaucu

SEQ ID NO: 2970195 - RNA, 19 nt, Artificial Sequence
  Description of Artificial Sequence: Synthetic oligonucleotide
ucgucaggcgccgccgccg

SEQ ID NO: 2970196 - RNA, 19 nt, Artificial Sequence
  Description of Artificial Sequence: Synthetic oligonucleotide
caccacacucggauccgcc

SEQ ID NO: 2970197 - RNA, 19 nt, Artificial Sequence
  Description of Artificial Sequence: Synthetic oligonucleotide
gacgacacuggcgccacca

SEQ ID NO: 2970198 - RNA, 19 nt, Artificial Sequence
  Description of Artificial Sequence: Synthetic oligonucleotide
cccaauuauccucccagac

SEQ ID NO: 2970199 - RNA, 19 nt, Artificial Sequence
  Description of Artificial Sequence: Synthetic oligonucleotide
cagaucgaccggcugcuuc

SEQ ID NO: 2970200 - RNA, 19 nt, Artificial Sequence
  Description of Artificial Sequence: Synthetic oligonucleotide
ugcucguuucuguccuaga

SEQ ID NO: 2970201 - RNA, 19 nt, Artificial Sequence
  Description of Artificial Sequence: Synthetic oligonucleotide
cuagcucagcacguagcug

SEQ ID NO: 2970202 - RNA, 19 nt, Artificial Sequence
  Description of Artificial Sequence: Synthetic oligonucleotide
gcacguagcugauuggaga

SEQ ID NO: 2970203 - RNA, 19 nt, Artificial Sequence
  Description of Artificial Sequence: Synthetic oligonucleotide
aucgaccggcugcuucuuc

SEQ ID NO: 2970204 - RNA, 19 nt, Artificial Sequence
  Description of Artificial Sequence: Synthetic oligonucleotide
ccaauuauccucccagaca

SEQ ID NO: 2970205 - RNA, 19 nt, Artificial Sequence
  Description of Artificial Sequence: Synthetic oligonucleotide
ccagacaugugcaucuuca

SEQ ID NO: 2970206 - RNA, 19 nt, Artificial Sequence
  Description of Artificial Sequence: Synthetic oligonucleotide
aaauaccgagcuagauaau

SEQ ID NO: 2970207 - RNA, 19 nt, Artificial Sequence
  Description of Artificial Sequence: Synthetic oligonucleotide
gacccagaucgaccggcug

SEQ ID NO: 2970208 - RNA, 19 nt, Artificial Sequence
  Description of Artificial Sequence: Synthetic oligonucleotide
acguagcugauuggagaag

SEQ ID NO: 2970209 - RNA, 19 nt, Artificial Sequence
  Description of Artificial Sequence: Synthetic oligonucleotide
ccgagcuagauaaugaaua

SEQ ID NO: 2970210 - RNA, 19 nt, Artificial Sequence
  Description of Artificial Sequence: Synthetic oligonucleotide
caucuucaucuaagccggc

SEQ ID NO: 2970211 - RNA, 19 nt, Artificial Sequence
  Description of Artificial Sequence: Synthetic oligonucleotide
cuccucgaacucgucgucc

SEQ ID NO: 2970212 - RNA, 19 nt, Artificial Sequence
  Description of Artificial Sequence: Synthetic oligonucleotide
aucgcgcugcacccagaag

SEQ ID NO: 2970213 - RNA, 19 nt, Artificial Sequence
  Description of Artificial Sequence: Synthetic oligonucleotide
gucguccucuucaaggaga

SEQ ID NO: 2970214 - RNA, 19 nt, Artificial Sequence
  Description of Artificial Sequence: Synthetic oligonucleotide
accgagcuagauaaugaau

SEQ ID NO: 2970215 - RNA, 19 nt, Artificial Sequence
  Description of Artificial Sequence: Synthetic oligonucleotide
cacaguccauguuuaaggu

SEQ ID NO: 2970216 - RNA, 19 nt, Artificial Sequence
  Description of Artificial Sequence: Synthetic oligonucleotide
gucuugcaacauuucugga

SEQ ID NO: 2970217 - RNA, 19 nt, Artificial Sequence
  Description of Artificial Sequence: Synthetic oligonucleotide
uuguagccaugcuucucua

SEQ ID NO: 2970218 - RNA, 19 nt, Artificial Sequence
  Description of Artificial Sequence: Synthetic oligonucleotide
cuucaaaguagcccaugcu

SEQ ID NO: 2970219 - RNA, 19 nt, Artificial Sequence
  Description of Artificial Sequence: Synthetic oligonucleotide
uucucuagcucagcacgua

SEQ ID NO: 2970220 - RNA, 19 nt, Artificial Sequence
  Description of Artificial Sequence: Synthetic oligonucleotide
uccucccagacaugugcau

SEQ ID NO: 2970221 - RNA, 19 nt, Artificial Sequence
  Description of Artificial Sequence: Synthetic oligonucleotide
ccgccgacgacacuggcgc

SEQ ID NO: 2970222 - RNA, 19 nt, Artificial Sequence
  Description of Artificial Sequence: Synthetic oligonucleotide
guagcugauuggagaaguc

SEQ ID NO: 2970223 - RNA, 19 nt, Artificial Sequence
  Description of Artificial Sequence: Synthetic oligonucleotide
ccauguuuaaggucuugca

SEQ ID NO: 2970224 - RNA, 19 nt, Artificial Sequence
  Description of Artificial Sequence: Synthetic oligonucleotide
gccggaaggaagccucagg

SEQ ID NO: 2970225 - RNA, 19 nt, Artificial Sequence
  Description of Artificial Sequence: Synthetic oligonucleotide
gccaugcuucucuagcuca

SEQ ID NO: 2970226 - RNA, 19 nt, Artificial Sequence
  Description of Artificial Sequence: Synthetic oligonucleotide
caaaguagcccaugcucgu

SEQ ID NO: 2970227 - RNA, 19 nt, Artificial Sequence
  Description of Artificial Sequence: Synthetic oligonucleotide
ccgacaucgcgcugcaccc

SEQ ID NO: 2970228 - RNA, 19 nt, Artificial Sequence
  Description of Artificial Sequence: Synthetic oligonucleotide
guacacaguccauguuuaa

SEQ ID NO: 2970229 - RNA, 19 nt, Artificial Sequence
  Description of Artificial Sequence: Synthetic oligonucleotide
ggagacccagaucgaccgg

SEQ ID NO: 2970230 - RNA, 19 nt, Artificial Sequence
  Description of Artificial Sequence: Synthetic oligonucleotide
cucccagacaugugcaucu

SEQ ID NO: 2970231 - RNA, 19 nt, Artificial Sequence
  Description of Artificial Sequence: Synthetic oligonucleotide
caucccaauuauccuccca

SEQ ID NO: 2970232 - RNA, 19 nt, Artificial Sequence
  Description of Artificial Sequence: Synthetic oligonucleotide
ucgaacucgucguccucuu

SEQ ID NO: 2970233 - RNA, 19 nt, Artificial Sequence
  Description of Artificial Sequence: Synthetic oligonucleotide
ccaugcuucucuagcucag

SEQ ID NO: 2970234 - RNA, 19 nt, Artificial Sequence
  Description of Artificial Sequence: Synthetic oligonucleotide
cagcacguagcugauugga

SEQ ID NO: 2970235 - RNA, 19 nt, Artificial Sequence
  Description of Artificial Sequence: Synthetic oligonucleotide
gcucguuucuguccuagaa

SEQ ID NO: 2970236 - RNA, 19 nt, Artificial Sequence
  Description of Artificial Sequence: Synthetic oligonucleotide
caggacucgucaggcgccg

SEQ ID NO: 2970237 - RNA, 19 nt, Artificial Sequence
  Description of Artificial Sequence: Synthetic oligonucleotide
gucuuccgcgggaaacucc

SEQ ID NO: 2970238 - RNA, 19 nt, Artificial Sequence
  Description of Artificial Sequence: Synthetic oligonucleotide
auccucccagacaugugca

SEQ ID NO: 2970239 - RNA, 19 nt, Artificial Sequence
  Description of Artificial Sequence: Synthetic oligonucleotide
guccauguuuaaggucuug

SEQ ID NO: 2970240 - RNA, 19 nt, Artificial Sequence
  Description of Artificial Sequence: Synthetic oligonucleotide
acacuggcgccaccauaga

SEQ ID NO: 2970241 - RNA, 19 nt, Artificial Sequence
  Description of Artificial Sequence: Synthetic oligonucleotide
cucguuucuguccuagaau

SEQ ID NO: 2970242 - RNA, 19 nt, Artificial Sequence
  Description of Artificial Sequence: Synthetic oligonucleotide
cucgucaggcgccgccgcc

SEQ ID NO: 2970243 - RNA, 19 nt, Artificial Sequence
  Description of Artificial Sequence: Synthetic oligonucleotide
gcgggaaacuccucgaacu

SEQ ID NO: 2970244 - RNA, 19 nt, Artificial Sequence
  Description of Artificial Sequence: Synthetic oligonucleotide
ccggaaggaagccucagga

SEQ ID NO: 2970245 - RNA, 19 nt, Artificial Sequence
  Description of Artificial Sequence: Synthetic oligonucleotide
cuaagccggcccagucuuc

SEQ ID NO: 2970246 - RNA, 19 nt, Artificial Sequence
  Description of Artificial Sequence: Synthetic oligonucleotide
gcugauuggagaagucauc

SEQ ID NO: 2970247 - RNA, 19 nt, Artificial Sequence
  Description of Artificial Sequence: Synthetic oligonucleotide
cuucucuagcucagcacgu

SEQ ID NO: 2970248 - RNA, 19 nt, Artificial Sequence
  Description of Artificial Sequence: Synthetic oligonucleotide
ccgccaagccggaaggaag

SEQ ID NO: 2970249 - RNA, 19 nt, Artificial Sequence
  Description of Artificial Sequence: Synthetic oligonucleotide
aggacucgucaggcgccgc

SEQ ID NO: 2970250 - RNA, 19 nt, Artificial Sequence
  Description of Artificial Sequence: Synthetic oligonucleotide
ccucaggacucgucaggcg

SEQ ID NO: 2970251 - RNA, 19 nt, Artificial Sequence
  Description of Artificial Sequence: Synthetic oligonucleotide
agccggaaggaagccucag

SEQ ID NO: 2970252 - RNA, 19 nt, Artificial Sequence
  Description of Artificial Sequence: Synthetic oligonucleotide
ggacucgucaggcgccgcc

SEQ ID NO: 2970253 - RNA, 19 nt, Artificial Sequence
  Description of Artificial Sequence: Synthetic oligonucleotide
ccacacucggauccgccgc

SEQ ID NO: 2970254 - RNA, 19 nt, Artificial Sequence
  Description of Artificial Sequence: Synthetic oligonucleotide
ggcugcuucuucuccgaca

SEQ ID NO: 2970255 - RNA, 19 nt, Artificial Sequence
  Description of Artificial Sequence: Synthetic oligonucleotide
ggaugcuaugaaguuucca

SEQ ID NO: 2970256 - RNA, 19 nt, Artificial Sequence
  Description of Artificial Sequence: Synthetic oligonucleotide
gcuagauaaugaauaaauu

SEQ ID NO: 2970257 - RNA, 19 nt, Artificial Sequence
  Description of Artificial Sequence: Synthetic oligonucleotide
acgacacuggcgccaccau

SEQ ID NO: 2970258 - RNA, 19 nt, Artificial Sequence
  Description of Artificial Sequence: Synthetic oligonucleotide
gccucaggacucgucaggc

SEQ ID NO: 2970259 - RNA, 19 nt, Artificial Sequence
  Description of Artificial Sequence: Synthetic oligonucleotide
gccggcccagucuuccgcg

SEQ ID NO: 2970260 - RNA, 19 nt, Artificial Sequence
  Description of Artificial Sequence: Synthetic oligonucleotide
gcugcuucuucuccgacau

SEQ ID NO: 2970261 - RNA, 19 nt, Artificial Sequence
  Description of Artificial Sequence: Synthetic oligonucleotide
ccagucuuccgcgggaaac

SEQ ID NO: 2970262 - RNA, 19 nt, Artificial Sequence
  Description of Artificial Sequence: Synthetic oligonucleotide
cgagcuagauaaugaauaa

SEQ ID NO: 2970263 - RNA, 19 nt, Artificial Sequence
  Description of Artificial Sequence: Synthetic oligonucleotide
cgccaagccggaaggaagc

SEQ ID NO: 2970264 - RNA, 19 nt, Artificial Sequence
  Description of Artificial Sequence: Synthetic oligonucleotide
agacccagaucgaccggcu

SEQ ID NO: 2970265 - RNA, 19 nt, Artificial Sequence
  Description of Artificial Sequence: Synthetic oligonucleotide
caucgcgcugcacccagaa

SEQ ID NO: 2970266 - RNA, 19 nt, Artificial Sequence
  Description of Artificial Sequence: Synthetic oligonucleotide
ggaaacuccucgaacucgu

SEQ ID NO: 2970267 - RNA, 19 nt, Artificial Sequence
  Description of Artificial Sequence: Synthetic oligonucleotide
cuuccgcgggaaacuccuc

SEQ ID NO: 2970268 - RNA, 19 nt, Artificial Sequence
  Description of Artificial Sequence: Synthetic oligonucleotide
guuuaaggucuugcaacau

SEQ ID NO: 2970269 - RNA, 19 nt, Artificial Sequence
  Description of Artificial Sequence: Synthetic oligonucleotide
cagaagcaccacacucgga

SEQ ID NO: 2970270 - RNA, 19 nt, Artificial Sequence
  Description of Artificial Sequence: Synthetic oligonucleotide
cggaaggaagccucaggac

SEQ ID NO: 2970271 - RNA, 19 nt, Artificial Sequence
  Description of Artificial Sequence: Synthetic oligonucleotide
gccgccgacgacacuggcg

SEQ ID NO: 2970272 - RNA, 19 nt, Artificial Sequence
  Description of Artificial Sequence: Synthetic oligonucleotide
gcuucuucuccgacaucgc

SEQ ID NO: 2970273 - RNA, 19 nt, Artificial Sequence
  Description of Artificial Sequence: Synthetic oligonucleotide
cuucuccgacaucgcgcug

SEQ ID NO: 2970274 - RNA, 19 nt, Artificial Sequence
  Description of Artificial Sequence: Synthetic oligonucleotide
gcaacauuucuggaugcua

SEQ ID NO: 2970275 - RNA, 19 nt, Artificial Sequence
  Description of Artificial Sequence: Synthetic oligonucleotide
ccucuucaaggagacccag

SEQ ID NO: 2970276 - RNA, 19 nt, Artificial Sequence
  Description of Artificial Sequence: Synthetic oligonucleotide
cucgaacucgucguccucu

SEQ ID NO: 2970277 - RNA, 19 nt, Artificial Sequence
  Description of Artificial Sequence: Synthetic oligonucleotide
gcccaugcucguuucuguc

SEQ ID NO: 2970278 - RNA, 19 nt, Artificial Sequence
  Description of Artificial Sequence: Synthetic oligonucleotide
ucccagacaugugcaucuu

SEQ ID NO: 2970279 - RNA, 19 nt, Artificial Sequence
  Description of Artificial Sequence: Synthetic oligonucleotide
guagcccaugcucguuucu

SEQ ID NO: 2970280 - RNA, 19 nt, Artificial Sequence
  Description of Artificial Sequence: Synthetic oligonucleotide
aggaagccucaggacucgu

SEQ ID NO: 2970281 - RNA, 19 nt, Artificial Sequence
  Description of Artificial Sequence: Synthetic oligonucleotide
acacucggauccgccgcca

SEQ ID NO: 2970282 - RNA, 19 nt, Artificial Sequence
  Description of Artificial Sequence: Synthetic oligonucleotide
ccgccgccaagccggaagg

SEQ ID NO: 2970283 - RNA, 19 nt, Artificial Sequence
  Description of Artificial Sequence: Synthetic oligonucleotide
ggaagccucaggacucguc

SEQ ID NO: 2970284 - RNA, 19 nt, Artificial Sequence
  Description of Artificial Sequence: Synthetic oligonucleotide
gccaagccggaaggaagcc

SEQ ID NO: 2970285 - RNA, 19 nt, Artificial Sequence
  Description of Artificial Sequence: Synthetic oligonucleotide
cgggaaacuccucgaacuc

SEQ ID NO: 2970286 - RNA, 19 nt, Artificial Sequence
  Description of Artificial Sequence: Synthetic oligonucleotide
cccagacaugugcaucuuc

SEQ ID NO: 2970287 - RNA, 19 nt, Artificial Sequence
  Description of Artificial Sequence: Synthetic oligonucleotide
ccucccagacaugugcauc

SEQ ID NO: 2970288 - RNA, 19 nt, Artificial Sequence
  Description of Artificial Sequence: Synthetic oligonucleotide
agcucagcacguagcugau

SEQ ID NO: 2970289 - RNA, 19 nt, Artificial Sequence
  Description of Artificial Sequence: Synthetic oligonucleotide
cgcgggaaacuccucgaac

SEQ ID NO: 2970290 - RNA, 19 nt, Artificial Sequence
  Description of Artificial Sequence: Synthetic oligonucleotide
cagucuuccgcgggaaacu

SEQ ID NO: 2970291 - RNA, 19 nt, Artificial Sequence
  Description of Artificial Sequence: Synthetic oligonucleotide
cauugucaucaucccaauu

SEQ ID NO: 2970292 - RNA, 19 nt, Artificial Sequence
  Description of Artificial Sequence: Synthetic oligonucleotide
ccaucuuguagccaugcuu

SEQ ID NO: 2970293 - RNA, 19 nt, Artificial Sequence
  Description of Artificial Sequence: Synthetic oligonucleotide
ggcgccgccgccgacgaca

SEQ ID NO: 2970294 - RNA, 19 nt, Artificial Sequence
  Description of Artificial Sequence: Synthetic oligonucleotide
caugcucguuucuguccua

SEQ ID NO: 2970295 - RNA, 19 nt, Artificial Sequence
  Description of Artificial Sequence: Synthetic oligonucleotide
ggcccagucuuccgcggga

SEQ ID NO: 2970296 - RNA, 19 nt, Artificial Sequence
  Description of Artificial Sequence: Synthetic oligonucleotide
cacccagaagcaccacacu

SEQ ID NO: 2970297 - RNA, 19 nt, Artificial Sequence
  Description of Artificial Sequence: Synthetic oligonucleotide
ccggcccagucuuccgcgg

SEQ ID NO: 2970298 - RNA, 19 nt, Artificial Sequence
  Description of Artificial Sequence: Synthetic oligonucleotide
cggauccgccgccaagccg

SEQ ID NO: 2970299 - RNA, 19 nt, Artificial Sequence
  Description of Artificial Sequence: Synthetic oligonucleotide
gcaccacacucggauccgc

SEQ ID NO: 2970300 - RNA, 19 nt, Artificial Sequence
  Description of Artificial Sequence: Synthetic oligonucleotide
gccgacgacacuggcgcca

SEQ ID NO: 2970301 - RNA, 19 nt, Artificial Sequence
  Description of Artificial Sequence: Synthetic oligonucleotide
gauccgccgccaagccgga

SEQ ID NO: 2970302 - RNA, 19 nt, Artificial Sequence
  Description of Artificial Sequence: Synthetic oligonucleotide
acaucgcgcugcacccaga

SEQ ID NO: 2970303 - RNA, 19 nt, Artificial Sequence
  Description of Artificial Sequence: Synthetic oligonucleotide
caggcgccgccgccgacga

SEQ ID NO: 2970304 - RNA, 19 nt, Artificial Sequence
  Description of Artificial Sequence: Synthetic oligonucleotide
cgcgcugcacccagaagca

SEQ ID NO: 2970305 - RNA, 19 nt, Artificial Sequence
  Description of Artificial Sequence: Synthetic oligonucleotide
cacucggauccgccgccaa

SEQ ID NO: 2970306 - RNA, 19 nt, Artificial Sequence
  Description of Artificial Sequence: Synthetic oligonucleotide
ccgccgccgacgacacugg

SEQ ID NO: 2970307 - RNA, 19 nt, Artificial Sequence
  Description of Artificial Sequence: Synthetic oligonucleotide
gucaggcgccgccgccgac

SEQ ID NO: 2970308 - RNA, 19 nt, Artificial Sequence
  Description of Artificial Sequence: Synthetic oligonucleotide
cguagcugauuggagaagu

SEQ ID NO: 2970309 - RNA, 19 nt, Artificial Sequence
  Description of Artificial Sequence: Synthetic oligonucleotide
gccgccaagccggaaggaa

SEQ ID NO: 2970310 - RNA, 19 nt, Artificial Sequence
  Description of Artificial Sequence: Synthetic oligonucleotide
ccggcugcuucuucuccga

SEQ ID NO: 2970311 - RNA, 19 nt, Artificial Sequence
  Description of Artificial Sequence: Synthetic oligonucleotide
cuccgacaucgcgcugcac

SEQ ID NO: 2970312 - RNA, 19 nt, Artificial Sequence
  Description of Artificial Sequence: Synthetic oligonucleotide
ccgacgacacuggcgccac

SEQ ID NO: 2970313 - RNA, 19 nt, Artificial Sequence
  Description of Artificial Sequence: Synthetic oligonucleotide
cgaccggcugcuucuucuc

SEQ ID NO: 2970314 - RNA, 19 nt, Artificial Sequence
  Description of Artificial Sequence: Synthetic oligonucleotide
gaucgaccggcugcuucuu

SEQ ID NO: 2970315 - RNA, 19 nt, Artificial Sequence
  Description of Artificial Sequence: Synthetic oligonucleotide
cgaacucgucguccucuuc

SEQ ID NO: 2970316 - RNA, 19 nt, Artificial Sequence
  Description of Artificial Sequence: Synthetic oligonucleotide
gcgcugcacccagaagcac

SEQ ID NO: 2970317 - RNA, 19 nt, Artificial Sequence
  Description of Artificial Sequence: Synthetic oligonucleotide
cguuucuguccuagaauuu

SEQ ID NO: 2970318 - RNA, 19 nt, Artificial Sequence
  Description of Artificial Sequence: Synthetic oligonucleotide
ccgcgggaaacuccucgaa

SEQ ID NO: 2970319 - RNA, 19 nt, Artificial Sequence
  Description of Artificial Sequence: Synthetic oligonucleotide
cccagaucgaccggcugcu

SEQ ID NO: 2970320 - RNA, 19 nt, Artificial Sequence
  Description of Artificial Sequence: Synthetic oligonucleotide
ccaagccggaaggaagccu

SEQ ID NO: 2970321 - RNA, 19 nt, Artificial Sequence
  Description of Artificial Sequence: Synthetic oligonucleotide
gcccagucuuccgcgggaa

SEQ ID NO: 2970322 - RNA, 19 nt, Artificial Sequence
  Description of Artificial Sequence: Synthetic oligonucleotide
cggcugcuucuucuccgac

SEQ ID NO: 2970323 - RNA, 19 nt, Artificial Sequence
  Description of Artificial Sequence: Synthetic oligonucleotide
cgccgacgacacuggcgcc

SEQ ID NO: 2970324 - RNA, 19 nt, Artificial Sequence
  Description of Artificial Sequence: Synthetic oligonucleotide
auccgccgccaagccggaa

SEQ ID NO: 2970325 - RNA, 19 nt, Artificial Sequence
  Description of Artificial Sequence: Synthetic oligonucleotide
cccagucuuccgcgggaaa

SEQ ID NO: 2970326 - RNA, 19 nt, Artificial Sequence
  Description of Artificial Sequence: Synthetic oligonucleotide
cgacacuggcgccaccaua

SEQ ID NO: 2970327 - RNA, 19 nt, Artificial Sequence
  Description of Artificial Sequence: Synthetic oligonucleotide
cgacgacacuggcgccacc

SEQ ID NO: 2970328 - RNA, 19 nt, Artificial Sequence
  Description of Artificial Sequence: Synthetic oligonucleotide
cgccgccgacgacacuggc

SEQ ID NO: 2970329 - RNA, 19 nt, Artificial Sequence
  Description of Artificial Sequence: Synthetic oligonucleotide
cgucaggcgccgccgccga

SEQ ID NO: 2970330 - RNA, 19 nt, Artificial Sequence
  Description of Artificial Sequence: Synthetic oligonucleotide
cgacaucgcgcugcaccca

SEQ ID NO: 2970331 - RNA, 19 nt, Artificial Sequence
  Description of Artificial Sequence: Synthetic oligonucleotide
gcucagcacguagcugauu

SEQ ID NO: 2970332 - RNA, 19 nt, Artificial Sequence
  Description of Artificial Sequence: Synthetic oligonucleotide
cgccgccaagccggaagga

SEQ ID NO: 2970333 - RNA, 19 nt, Artificial Sequence
  Description of Artificial Sequence: Synthetic oligonucleotide
ccagaucgaccggcugcuu

SEQ ID NO: 2970334 - RNA, 19 nt, Artificial Sequence
  Description of Artificial Sequence: Synthetic oligonucleotide
aagauugacacacaauucc

SEQ ID NO: 2970335 - RNA, 19 nt, Artificial Sequence
  Description of Artificial Sequence: Synthetic oligonucleotide
aauauagaaauuucccagc

SEQ ID NO: 2970336 - RNA, 19 nt, Artificial Sequence
  Description of Artificial Sequence: Synthetic oligonucleotide
aagacuaagauugacacac

SEQ ID NO: 2970337 - RNA, 19 nt, Artificial Sequence
  Description of Artificial Sequence: Synthetic oligonucleotide
aaagucuccaaguagauca

SEQ ID NO: 2970338 - RNA, 19 nt, Artificial Sequence
  Description of Artificial Sequence: Synthetic oligonucleotide
aauggcaaagaguaaauug

SEQ ID NO: 2970339 - RNA, 19 nt, Artificial Sequence
  Description of Artificial Sequence: Synthetic oligonucleotide
gagauagaaaaucagaaug

SEQ ID NO: 2970340 - RNA, 19 nt, Artificial Sequence
  Description of Artificial Sequence: Synthetic oligonucleotide
gauaauacaauauagaaau

SEQ ID NO: 2970341 - RNA, 19 nt, Artificial Sequence
  Description of Artificial Sequence: Synthetic oligonucleotide
aaugauuucaagugcagcu

SEQ ID NO: 2970342 - RNA, 19 nt, Artificial Sequence
  Description of Artificial Sequence: Synthetic oligonucleotide
aaguagaucaaaucuagug

SEQ ID NO: 2970343 - RNA, 19 nt, Artificial Sequence
  Description of Artificial Sequence: Synthetic oligonucleotide
uacaauauagaaauuuccc

SEQ ID NO: 2970344 - RNA, 19 nt, Artificial Sequence
  Description of Artificial Sequence: Synthetic oligonucleotide
auauagaaauuucccagcc

SEQ ID NO: 2970345 - RNA, 19 nt, Artificial Sequence
  Description of Artificial Sequence: Synthetic oligonucleotide
aaucagaaugauuucaagu

SEQ ID NO: 2970346 - RNA, 19 nt, Artificial Sequence
  Description of Artificial Sequence: Synthetic oligonucleotide
aucagaaugauuucaagug

SEQ ID NO: 2970347 - RNA, 19 nt, Artificial Sequence
  Description of Artificial Sequence: Synthetic oligonucleotide
aaaaucugaggcuauagaa

SEQ ID NO: 2970348 - RNA, 19 nt, Artificial Sequence
  Description of Artificial Sequence: Synthetic oligonucleotide
uaaauuguaggauaauaca

SEQ ID NO: 2970349 - RNA, 19 nt, Artificial Sequence
  Description of Artificial Sequence: Synthetic oligonucleotide
aaucuagugauucccagug

SEQ ID NO: 2970350 - RNA, 19 nt, Artificial Sequence
  Description of Artificial Sequence: Synthetic oligonucleotide
gacaccaugagauagaaaa

SEQ ID NO: 2970351 - RNA, 19 nt, Artificial Sequence
  Description of Artificial Sequence: Synthetic oligonucleotide
acaauguugucacaauggc

SEQ ID NO: 2970352 - RNA, 19 nt, Artificial Sequence
  Description of Artificial Sequence: Synthetic oligonucleotide
aacaacagaagacaccaug

SEQ ID NO: 2970353 - RNA, 19 nt, Artificial Sequence
  Description of Artificial Sequence: Synthetic oligonucleotide
ucaagacuaagauugacac

SEQ ID NO: 2970354 - RNA, 19 nt, Artificial Sequence
  Description of Artificial Sequence: Synthetic oligonucleotide
uguucuugacaucacaggc

SEQ ID NO: 2970355 - RNA, 19 nt, Artificial Sequence
  Description of Artificial Sequence: Synthetic oligonucleotide
ugaucuuugucauaguugu

SEQ ID NO: 2970356 - RNA, 19 nt, Artificial Sequence
  Description of Artificial Sequence: Synthetic oligonucleotide
gaauuuucugaccaaacac

SEQ ID NO: 2970357 - RNA, 19 nt, Artificial Sequence
  Description of Artificial Sequence: Synthetic oligonucleotide
auacaauauagaaauuucc

SEQ ID NO: 2970358 - RNA, 19 nt, Artificial Sequence
  Description of Artificial Sequence: Synthetic oligonucleotide
aguagaucaaaucuaguga

SEQ ID NO: 2970359 - RNA, 19 nt, Artificial Sequence
  Description of Artificial Sequence: Synthetic oligonucleotide
caaaaguggaaagagaggc

SEQ ID NO: 2970360 - RNA, 19 nt, Artificial Sequence
  Description of Artificial Sequence: Synthetic oligonucleotide
uauagaaaccaacaacaga

SEQ ID NO: 2970361 - RNA, 19 nt, Artificial Sequence
  Description of Artificial Sequence: Synthetic oligonucleotide
aaaucagaaugauuucaag

SEQ ID NO: 2970362 - RNA, 19 nt, Artificial Sequence
  Description of Artificial Sequence: Synthetic oligonucleotide
ugaauuuucugaccaaaca

SEQ ID NO: 2970363 - RNA, 19 nt, Artificial Sequence
  Description of Artificial Sequence: Synthetic oligonucleotide
uguaggauaauacaauaua

SEQ ID NO: 2970364 - RNA, 19 nt, Artificial Sequence
  Description of Artificial Sequence: Synthetic oligonucleotide
aucaaaucuagugauuccc

SEQ ID NO: 2970365 - RNA, 19 nt, Artificial Sequence
  Description of Artificial Sequence: Synthetic oligonucleotide
aauguugucacaauggcaa

SEQ ID NO: 2970366 - RNA, 19 nt, Artificial Sequence
  Description of Artificial Sequence: Synthetic oligonucleotide
acaauauagaaauuuccca

SEQ ID NO: 2970367 - RNA, 19 nt, Artificial Sequence
  Description of Artificial Sequence: Synthetic oligonucleotide
caauuaaaaucuuccaaag

SEQ ID NO: 2970368 - RNA, 19 nt, Artificial Sequence
  Description of Artificial Sequence: Synthetic oligonucleotide
cacaauguugucacaaugg

SEQ ID NO: 2970369 - RNA, 19 nt, Artificial Sequence
  Description of Artificial Sequence: Synthetic oligonucleotide
aaaaucuuccaaagucucc

SEQ ID NO: 2970370 - RNA, 19 nt, Artificial Sequence
  Description of Artificial Sequence: Synthetic oligonucleotide
uucuugacaucacaggcag

SEQ ID NO: 2970371 - RNA, 19 nt, Artificial Sequence
  Description of Artificial Sequence: Synthetic oligonucleotide
aggauaauacaauauagaa

SEQ ID NO: 2970372 - RNA, 19 nt, Artificial Sequence
  Description of Artificial Sequence: Synthetic oligonucleotide
aagugcagcucccacaaag

SEQ ID NO: 2970373 - RNA, 19 nt, Artificial Sequence
  Description of Artificial Sequence: Synthetic oligonucleotide
auagaaaccaacaacagaa

SEQ ID NO: 2970374 - RNA, 19 nt, Artificial Sequence
  Description of Artificial Sequence: Synthetic oligonucleotide
aaaccaacaacagaagaca

SEQ ID NO: 2970375 - RNA, 19 nt, Artificial Sequence
  Description of Artificial Sequence: Synthetic oligonucleotide
aguugugucauccuucuug

SEQ ID NO: 2970376 - RNA, 19 nt, Artificial Sequence
  Description of Artificial Sequence: Synthetic oligonucleotide
ucccacaaagccaaaagug

SEQ ID NO: 2970377 - RNA, 19 nt, Artificial Sequence
  Description of Artificial Sequence: Synthetic oligonucleotide
ugacacacaauucccaaug

SEQ ID NO: 2970378 - RNA, 19 nt, Artificial Sequence
  Description of Artificial Sequence: Synthetic oligonucleotide
aagaguaaauuguaggaua

SEQ ID NO: 2970379 - RNA, 19 nt, Artificial Sequence
  Description of Artificial Sequence: Synthetic oligonucleotide
aauuuucugaccaaacaca

SEQ ID NO: 2970380 - RNA, 19 nt, Artificial Sequence
  Description of Artificial Sequence: Synthetic oligonucleotide
agaucaaaucuagugauuc

SEQ ID NO: 2970381 - RNA, 19 nt, Artificial Sequence
  Description of Artificial Sequence: Synthetic oligonucleotide
ugacaucacaggcagagca

SEQ ID NO: 2970382 - RNA, 19 nt, Artificial Sequence
  Description of Artificial Sequence: Synthetic oligonucleotide
aaauuucccagccaauuaa

SEQ ID NO: 2970383 - RNA, 19 nt, Artificial Sequence
  Description of Artificial Sequence: Synthetic oligonucleotide
guaggauaauacaauauag

SEQ ID NO: 2970384 - RNA, 19 nt, Artificial Sequence
  Description of Artificial Sequence: Synthetic oligonucleotide
aacagaagacaccaugaga

SEQ ID NO: 2970385 - RNA, 19 nt, Artificial Sequence
  Description of Artificial Sequence: Synthetic oligonucleotide
uuuuguucuucucguacag

SEQ ID NO: 2970386 - RNA, 19 nt, Artificial Sequence
  Description of Artificial Sequence: Synthetic oligonucleotide
uggcauugcagucucauca

SEQ ID NO: 2970387 - RNA, 19 nt, Artificial Sequence
  Description of Artificial Sequence: Synthetic oligonucleotide
aaauuguaggauaauacaa

SEQ ID NO: 2970388 - RNA, 19 nt, Artificial Sequence
  Description of Artificial Sequence: Synthetic oligonucleotide
aaugaucuuugucauaguu

SEQ ID NO: 2970389 - RNA, 19 nt, Artificial Sequence
  Description of Artificial Sequence: Synthetic oligonucleotide
gaaaccaacaacagaagac

SEQ ID NO: 2970390 - RNA, 19 nt, Artificial Sequence
  Description of Artificial Sequence: Synthetic oligonucleotide
auagaaauuucccagccaa

SEQ ID NO: 2970391 - RNA, 19 nt, Artificial Sequence
  Description of Artificial Sequence: Synthetic oligonucleotide
aaaucuuccaaagucucca

SEQ ID NO: 2970392 - RNA, 19 nt, Artificial Sequence
  Description of Artificial Sequence: Synthetic oligonucleotide
uaaaaucuuccaaagucuc

SEQ ID NO: 2970393 - RNA, 19 nt, Artificial Sequence
  Description of Artificial Sequence: Synthetic oligonucleotide
ugauuucaagugcagcucc

SEQ ID NO: 2970394 - RNA, 19 nt, Artificial Sequence
  Description of Artificial Sequence: Synthetic oligonucleotide
gcaaagaguaaauuguagg

SEQ ID NO: 2970395 - RNA, 19 nt, Artificial Sequence
  Description of Artificial Sequence: Synthetic oligonucleotide
aaaucuagugauucccagu

SEQ ID NO: 2970396 - RNA, 19 nt, Artificial Sequence
  Description of Artificial Sequence: Synthetic oligonucleotide
guaaauuguaggauaauac

SEQ ID NO: 2970397 - RNA, 19 nt, Artificial Sequence
  Description of Artificial Sequence: Synthetic oligonucleotide
uucccagccaauuaaaauc

SEQ ID NO: 2970398 - RNA, 19 nt, Artificial Sequence
  Description of Artificial Sequence: Synthetic oligonucleotide
agagaggcgcuuccuaucc

SEQ ID NO: 2970399 - RNA, 19 nt, Artificial Sequence
  Description of Artificial Sequence: Synthetic oligonucleotide
cagccaauuaaaaucuucc

SEQ ID NO: 2970400 - RNA, 19 nt, Artificial Sequence
  Description of Artificial Sequence: Synthetic oligonucleotide
ugugucauccuucuugggu

SEQ ID NO: 2970401 - RNA, 19 nt, Artificial Sequence
  Description of Artificial Sequence: Synthetic oligonucleotide
aagccaaaaguggaaagag

SEQ ID NO: 2970402 - RNA, 19 nt, Artificial Sequence
  Description of Artificial Sequence: Synthetic oligonucleotide
guugugucauccuucuugg

SEQ ID NO: 2970403 - RNA, 19 nt, Artificial Sequence
  Description of Artificial Sequence: Synthetic oligonucleotide
aaaaguggaaagagaggcg

SEQ ID NO: 2970404 - RNA, 19 nt, Artificial Sequence
  Description of Artificial Sequence: Synthetic oligonucleotide
uaagauugacacacaauuc

SEQ ID NO: 2970405 - RNA, 19 nt, Artificial Sequence
  Description of Artificial Sequence: Synthetic oligonucleotide
aaagaguaaauuguaggau

SEQ ID NO: 2970406 - RNA, 19 nt, Artificial Sequence
  Description of Artificial Sequence: Synthetic oligonucleotide
agauugacacacaauuccc

SEQ ID NO: 2970407 - RNA, 19 nt, Artificial Sequence
  Description of Artificial Sequence: Synthetic oligonucleotide
ugagauagaaaaucagaau

SEQ ID NO: 2970408 - RNA, 19 nt, Artificial Sequence
  Description of Artificial Sequence: Synthetic oligonucleotide
ucuuccaaagucuccaagu

SEQ ID NO: 2970409 - RNA, 19 nt, Artificial Sequence
  Description of Artificial Sequence: Synthetic oligonucleotide
aaagccaaaaguggaaaga

SEQ ID NO: 2970410 - RNA, 19 nt, Artificial Sequence
  Description of Artificial Sequence: Synthetic oligonucleotide
uauagaaauuucccagcca

SEQ ID NO: 2970411 - RNA, 19 nt, Artificial Sequence
  Description of Artificial Sequence: Synthetic oligonucleotide
aauuguaggauaauacaau

SEQ ID NO: 2970412 - RNA, 19 nt, Artificial Sequence
  Description of Artificial Sequence: Synthetic oligonucleotide
caaagaguaaauuguagga

SEQ ID NO: 2970413 - RNA, 19 nt, Artificial Sequence
  Description of Artificial Sequence: Synthetic oligonucleotide
gaaaaucagaaugauuuca

SEQ ID NO: 2970414 - RNA, 19 nt, Artificial Sequence
  Description of Artificial Sequence: Synthetic oligonucleotide
auucccaaugaucuuuguc

SEQ ID NO: 2970415 - RNA, 19 nt, Artificial Sequence
  Description of Artificial Sequence: Synthetic oligonucleotide
ucaaaucuagugauuccca

SEQ ID NO: 2970416 - RNA, 19 nt, Artificial Sequence
  Description of Artificial Sequence: Synthetic oligonucleotide
agaaaccaacaacagaaga

SEQ ID NO: 2970417 - RNA, 19 nt, Artificial Sequence
  Description of Artificial Sequence: Synthetic oligonucleotide
uucccuuuuggcauugcag

SEQ ID NO: 2970418 - RNA, 19 nt, Artificial Sequence
  Description of Artificial Sequence: Synthetic oligonucleotide
uagaaaccaacaacagaag

SEQ ID NO: 2970419 - RNA, 19 nt, Artificial Sequence
  Description of Artificial Sequence: Synthetic oligonucleotide
gaucaaaucuagugauucc

SEQ ID NO: 2970420 - RNA, 19 nt, Artificial Sequence
  Description of Artificial Sequence: Synthetic oligonucleotide
ugucacaauggcaaagagu

SEQ ID NO: 2970421 - RNA, 19 nt, Artificial Sequence
  Description of Artificial Sequence: Synthetic oligonucleotide
ucugaggcuauagaaacca

SEQ ID NO: 2970422 - RNA, 19 nt, Artificial Sequence
  Description of Artificial Sequence: Synthetic oligonucleotide
aagagaggcgcuuccuauc

SEQ ID NO: 2970423 - RNA, 19 nt, Artificial Sequence
  Description of Artificial Sequence: Synthetic oligonucleotide
cugaccaaacacaauguug

SEQ ID NO: 2970424 - RNA, 19 nt, Artificial Sequence
  Description of Artificial Sequence: Synthetic oligonucleotide
uccaaguagaucaaaucua

SEQ ID NO: 2970425 - RNA, 19 nt, Artificial Sequence
  Description of Artificial Sequence: Synthetic oligonucleotide
acagaagacaccaugagau

SEQ ID NO: 2970426 - RNA, 19 nt, Artificial Sequence
  Description of Artificial Sequence: Synthetic oligonucleotide
caugagauagaaaaucaga

SEQ ID NO: 2970427 - RNA, 19 nt, Artificial Sequence
  Description of Artificial Sequence: Synthetic oligonucleotide
ugaggcuauagaaaccaac

SEQ ID NO: 2970428 - RNA, 19 nt, Artificial Sequence
  Description of Artificial Sequence: Synthetic oligonucleotide
ucccagccaauuaaaaucu

SEQ ID NO: 2970429 - RNA, 19 nt, Artificial Sequence
  Description of Artificial Sequence: Synthetic oligonucleotide
cacacaauucccaaugauc

SEQ ID NO: 2970430 - RNA, 19 nt, Artificial Sequence
  Description of Artificial Sequence: Synthetic oligonucleotide
gacgugaauuuucugacca

SEQ ID NO: 2970431 - RNA, 19 nt, Artificial Sequence
  Description of Artificial Sequence: Synthetic oligonucleotide
acacaauucccaaugaucu

SEQ ID NO: 2970432 - RNA, 19 nt, Artificial Sequence
  Description of Artificial Sequence: Synthetic oligonucleotide
uuguaggauaauacaauau

SEQ ID NO: 2970433 - RNA, 19 nt, Artificial Sequence
  Description of Artificial Sequence: Synthetic oligonucleotide
agauagaaaaucagaauga

SEQ ID NO: 2970434 - RNA, 19 nt, Artificial Sequence
  Description of Artificial Sequence: Synthetic oligonucleotide
aaccaacaacagaagacac

SEQ ID NO: 2970435 - RNA, 19 nt, Artificial Sequence
  Description of Artificial Sequence: Synthetic oligonucleotide
auuguaggauaauacaaua

SEQ ID NO: 2970436 - RNA, 19 nt, Artificial Sequence
  Description of Artificial Sequence: Synthetic oligonucleotide
aaaaucagaaugauuucaa

SEQ ID NO: 2970437 - RNA, 19 nt, Artificial Sequence
  Description of Artificial Sequence: Synthetic oligonucleotide
aaagagaggcgcuuccuau

SEQ ID NO: 2970438 - RNA, 19 nt, Artificial Sequence
  Description of Artificial Sequence: Synthetic oligonucleotide
ucaagugcagcucccacaa

SEQ ID NO: 2970439 - RNA, 19 nt, Artificial Sequence
  Description of Artificial Sequence: Synthetic oligonucleotide
gucacaauggcaaagagua

SEQ ID NO: 2970440 - RNA, 19 nt, Artificial Sequence
  Description of Artificial Sequence: Synthetic oligonucleotide
guguucuugacaucacagg

SEQ ID NO: 2970441 - RNA, 19 nt, Artificial Sequence
  Description of Artificial Sequence: Synthetic oligonucleotide
ucucguacagcugacguga

SEQ ID NO: 2970442 - RNA, 19 nt, Artificial Sequence
  Description of Artificial Sequence: Synthetic oligonucleotide
acacaauguugucacaaug

SEQ ID NO: 2970443 - RNA, 19 nt, Artificial Sequence
  Description of Artificial Sequence: Synthetic oligonucleotide
ucuagugauucccaguguu

SEQ ID NO: 2970444 - RNA, 19 nt, Artificial Sequence
  Description of Artificial Sequence: Synthetic oligonucleotide
cugacgugaauuuucugac

SEQ ID NO: 2970445 - RNA, 19 nt, Artificial Sequence
  Description of Artificial Sequence: Synthetic oligonucleotide
caaaucuagugauucccag

SEQ ID NO: 2970446 - RNA, 19 nt, Artificial Sequence
  Description of Artificial Sequence: Synthetic oligonucleotide
uugucacaauggcaaagag

SEQ ID NO: 2970447 - RNA, 19 nt, Artificial Sequence
  Description of Artificial Sequence: Synthetic oligonucleotide
ucuccaaguagaucaaauc

SEQ ID NO: 2970448 - RNA, 19 nt, Artificial Sequence
  Description of Artificial Sequence: Synthetic oligonucleotide
auaguugugucauccuucu

SEQ ID NO: 2970449 - RNA, 19 nt, Artificial Sequence
  Description of Artificial Sequence: Synthetic oligonucleotide
uucugaccaaacacaaugu

SEQ ID NO: 2970450 - RNA, 19 nt, Artificial Sequence
  Description of Artificial Sequence: Synthetic oligonucleotide
auggcaaagaguaaauugu

SEQ ID NO: 2970451 - RNA, 19 nt, Artificial Sequence
  Description of Artificial Sequence: Synthetic oligonucleotide
accaacaacagaagacacc

SEQ ID NO: 2970452 - RNA, 19 nt, Artificial Sequence
  Description of Artificial Sequence: Synthetic oligonucleotide
cauaguugugucauccuuc

SEQ ID NO: 2970453 - RNA, 19 nt, Artificial Sequence
  Description of Artificial Sequence: Synthetic oligonucleotide
caaagccaaaaguggaaag

SEQ ID NO: 2970454 - RNA, 19 nt, Artificial Sequence
  Description of Artificial Sequence: Synthetic oligonucleotide
aucuuugucauaguugugu

SEQ ID NO: 2970455 - RNA, 19 nt, Artificial Sequence
  Description of Artificial Sequence: Synthetic oligonucleotide
aacacaauguugucacaau

SEQ ID NO: 2970456 - RNA, 19 nt, Artificial Sequence
  Description of Artificial Sequence: Synthetic oligonucleotide
gcuauagaaaccaacaaca

SEQ ID NO: 2970457 - RNA, 19 nt, Artificial Sequence
  Description of Artificial Sequence: Synthetic oligonucleotide
uuucccagccaauuaaaau

SEQ ID NO: 2970458 - RNA, 19 nt, Artificial Sequence
  Description of Artificial Sequence: Synthetic oligonucleotide
uucccaguguucuugacau

SEQ ID NO: 2970459 - RNA, 19 nt, Artificial Sequence
  Description of Artificial Sequence: Synthetic oligonucleotide
augauuucaagugcagcuc

SEQ ID NO: 2970460 - RNA, 19 nt, Artificial Sequence
  Description of Artificial Sequence: Synthetic oligonucleotide
augagauagaaaaucagaa

SEQ ID NO: 2970461 - RNA, 19 nt, Artificial Sequence
  Description of Artificial Sequence: Synthetic oligonucleotide
aguguucuugacaucacag

SEQ ID NO: 2970462 - RNA, 19 nt, Artificial Sequence
  Description of Artificial Sequence: Synthetic oligonucleotide
aguaaauuguaggauaaua

SEQ ID NO: 2970463 - RNA, 19 nt, Artificial Sequence
  Description of Artificial Sequence: Synthetic oligonucleotide
uguugucacaauggcaaag

SEQ ID NO: 2970464 - RNA, 19 nt, Artificial Sequence
  Description of Artificial Sequence: Synthetic oligonucleotide
gaggcuauagaaaccaaca

SEQ ID NO: 2970465 - RNA, 19 nt, Artificial Sequence
  Description of Artificial Sequence: Synthetic oligonucleotide
uuggguguaaaguuuccaa

SEQ ID NO: 2970466 - RNA, 19 nt, Artificial Sequence
  Description of Artificial Sequence: Synthetic oligonucleotide
gugucauccuucuugggug

SEQ ID NO: 2970467 - RNA, 19 nt, Artificial Sequence
  Description of Artificial Sequence: Synthetic oligonucleotide
uucaagugcagcucccaca

SEQ ID NO: 2970468 - RNA, 19 nt, Artificial Sequence
  Description of Artificial Sequence: Synthetic oligonucleotide
cuaagauugacacacaauu

SEQ ID NO: 2970469 - RNA, 19 nt, Artificial Sequence
  Description of Artificial Sequence: Synthetic oligonucleotide
uguucuucucguacagcug

SEQ ID NO: 2970470 - RNA, 19 nt, Artificial Sequence
  Description of Artificial Sequence: Synthetic oligonucleotide
ugcagcucccacaaagcca

SEQ ID NO: 2970471 - RNA, 19 nt, Artificial Sequence
  Description of Artificial Sequence: Synthetic oligonucleotide
auugacacacaauucccaa

SEQ ID NO: 2970472 - RNA, 19 nt, Artificial Sequence
  Description of Artificial Sequence: Synthetic oligonucleotide
agccaauuaaaaucuucca

SEQ ID NO: 2970473 - RNA, 19 nt, Artificial Sequence
  Description of Artificial Sequence: Synthetic oligonucleotide
gccaaaaguggaaagagag

SEQ ID NO: 2970474 - RNA, 19 nt, Artificial Sequence
  Description of Artificial Sequence: Synthetic oligonucleotide
uggaaagagaggcgcuucc

SEQ ID NO: 2970475 - RNA, 19 nt, Artificial Sequence
  Description of Artificial Sequence: Synthetic oligonucleotide
ucuuugucauaguuguguc

SEQ ID NO: 2970476 - RNA, 19 nt, Artificial Sequence
  Description of Artificial Sequence: Synthetic oligonucleotide
ggcuauagaaaccaacaac

SEQ ID NO: 2970477 - RNA, 19 nt, Artificial Sequence
  Description of Artificial Sequence: Synthetic oligonucleotide
ucauaguugugucauccuu

SEQ ID NO: 2970478 - RNA, 19 nt, Artificial Sequence
  Description of Artificial Sequence: Synthetic oligonucleotide
cucaagacuaagauugaca

SEQ ID NO: 2970479 - RNA, 19 nt, Artificial Sequence
  Description of Artificial Sequence: Synthetic oligonucleotide
caacagaagacaccaugag

SEQ ID NO: 2970480 - RNA, 19 nt, Artificial Sequence
  Description of Artificial Sequence: Synthetic oligonucleotide
augaucuuugucauaguug

SEQ ID NO: 2970481 - RNA, 19 nt, Artificial Sequence
  Description of Artificial Sequence: Synthetic oligonucleotide
acagcugacgugaauuuuc

SEQ ID NO: 2970482 - RNA, 19 nt, Artificial Sequence
  Description of Artificial Sequence: Synthetic oligonucleotide
uggguguaaaguuuccaaa

SEQ ID NO: 2970483 - RNA, 19 nt, Artificial Sequence
  Description of Artificial Sequence: Synthetic oligonucleotide
ucuuggguguaaaguuucc

SEQ ID NO: 2970484 - RNA, 19 nt, Artificial Sequence
  Description of Artificial Sequence: Synthetic oligonucleotide
cagaaugauuucaagugca

SEQ ID NO: 2970485 - RNA, 19 nt, Artificial Sequence
  Description of Artificial Sequence: Synthetic oligonucleotide
ugacgugaauuuucugacc

SEQ ID NO: 2970486 - RNA, 19 nt, Artificial Sequence
  Description of Artificial Sequence: Synthetic oligonucleotide
ccaaguagaucaaaucuag

SEQ ID NO: 2970487 - RNA, 19 nt, Artificial Sequence
  Description of Artificial Sequence: Synthetic oligonucleotide
agugcagcucccacaaagc

SEQ ID NO: 2970488 - RNA, 19 nt, Artificial Sequence
  Description of Artificial Sequence: Synthetic oligonucleotide
ucugaccaaacacaauguu

SEQ ID NO: 2970489 - RNA, 19 nt, Artificial Sequence
  Description of Artificial Sequence: Synthetic oligonucleotide
auucccaguguucuugaca

SEQ ID NO: 2970490 - RNA, 19 nt, Artificial Sequence
  Description of Artificial Sequence: Synthetic oligonucleotide
uuucaagugcagcucccac

SEQ ID NO: 2970491 - RNA, 19 nt, Artificial Sequence
  Description of Artificial Sequence: Synthetic oligonucleotide
uccuucuuggguguaaagu

SEQ ID NO: 2970492 - RNA, 19 nt, Artificial Sequence
  Description of Artificial Sequence: Synthetic oligonucleotide
acaacagaagacaccauga

SEQ ID NO: 2970493 - RNA, 19 nt, Artificial Sequence
  Description of Artificial Sequence: Synthetic oligonucleotide
gaaauuucccagccaauua

SEQ ID NO: 2970494 - RNA, 19 nt, Artificial Sequence
  Description of Artificial Sequence: Synthetic oligonucleotide
guucuucucguacagcuga

SEQ ID NO: 2970495 - RNA, 19 nt, Artificial Sequence
  Description of Artificial Sequence: Synthetic oligonucleotide
uucucguacagcugacgug

SEQ ID NO: 2970496 - RNA, 19 nt, Artificial Sequence
  Description of Artificial Sequence: Synthetic oligonucleotide
uagugauucccaguguucu

SEQ ID NO: 2970497 - RNA, 19 nt, Artificial Sequence
  Description of Artificial Sequence: Synthetic oligonucleotide
uggcaaagaguaaauugua

SEQ ID NO: 2970498 - RNA, 19 nt, Artificial Sequence
  Description of Artificial Sequence: Synthetic oligonucleotide
caccaugagauagaaaauc

SEQ ID NO: 2970499 - RNA, 19 nt, Artificial Sequence
  Description of Artificial Sequence: Synthetic oligonucleotide
gacuaagauugacacacaa

SEQ ID NO: 2970500 - RNA, 19 nt, Artificial Sequence
  Description of Artificial Sequence: Synthetic oligonucleotide
ccaaugaucuuugucauag

SEQ ID NO: 2970501 - RNA, 19 nt, Artificial Sequence
  Description of Artificial Sequence: Synthetic oligonucleotide
uuuucugaccaaacacaau

SEQ ID NO: 2970502 - RNA, 19 nt, Artificial Sequence
  Description of Artificial Sequence: Synthetic oligonucleotide
aauucccaaugaucuuugu

SEQ ID NO: 2970503 - RNA, 19 nt, Artificial Sequence
  Description of Artificial Sequence: Synthetic oligonucleotide
aucugaggcuauagaaacc

SEQ ID NO: 2970504 - RNA, 19 nt, Artificial Sequence
  Description of Artificial Sequence: Synthetic oligonucleotide
guagaucaaaucuagugau

SEQ ID NO: 2970505 - RNA, 19 nt, Artificial Sequence
  Description of Artificial Sequence: Synthetic oligonucleotide
accaugagauagaaaauca

SEQ ID NO: 2970506 - RNA, 19 nt, Artificial Sequence
  Description of Artificial Sequence: Synthetic oligonucleotide
agaaugauuucaagugcag

SEQ ID NO: 2970507 - RNA, 19 nt, Artificial Sequence
  Description of Artificial Sequence: Synthetic oligonucleotide
agagcucaagacuaagauu

SEQ ID NO: 2970508 - RNA, 19 nt, Artificial Sequence
  Description of Artificial Sequence: Synthetic oligonucleotide
cuagugauucccaguguuc

SEQ ID NO: 2970509 - RNA, 19 nt, Artificial Sequence
  Description of Artificial Sequence: Synthetic oligonucleotide
ucuucucguacagcugacg

SEQ ID NO: 2970510 - RNA, 19 nt, Artificial Sequence
  Description of Artificial Sequence: Synthetic oligonucleotide
caauucccaaugaucuuug

SEQ ID NO: 2970511 - RNA, 19 nt, Artificial Sequence
  Description of Artificial Sequence: Synthetic oligonucleotide
gauugacacacaauuccca

SEQ ID NO: 2970512 - RNA, 19 nt, Artificial Sequence
  Description of Artificial Sequence: Synthetic oligonucleotide
aaucuuccaaagucuccaa

SEQ ID NO: 2970513 - RNA, 19 nt, Artificial Sequence
  Description of Artificial Sequence: Synthetic oligonucleotide
auuuucugaccaaacacaa

SEQ ID NO: 2970514 - RNA, 19 nt, Artificial Sequence
  Description of Artificial Sequence: Synthetic oligonucleotide
agaguaaauuguaggauaa

SEQ ID NO: 2970515 - RNA, 19 nt, Artificial Sequence
  Description of Artificial Sequence: Synthetic oligonucleotide
ccaaaaguggaaagagagg

SEQ ID NO: 2970516 - RNA, 19 nt, Artificial Sequence
  Description of Artificial Sequence: Synthetic oligonucleotide
gcugacgugaauuuucuga

SEQ ID NO: 2970517 - RNA, 19 nt, Artificial Sequence
  Description of Artificial Sequence: Synthetic oligonucleotide
agaaauuucccagccaauu

SEQ ID NO: 2970518 - RNA, 19 nt, Artificial Sequence
  Description of Artificial Sequence: Synthetic oligonucleotide
accccuuguucccuuuugg

SEQ ID NO: 2970519 - RNA, 19 nt, Artificial Sequence
  Description of Artificial Sequence: Synthetic oligonucleotide
uagaucaaaucuagugauu

SEQ ID NO: 2970520 - RNA, 19 nt, Artificial Sequence
  Description of Artificial Sequence: Synthetic oligonucleotide
aauuucccagccaauuaaa

SEQ ID NO: 2970521 - RNA, 19 nt, Artificial Sequence
  Description of Artificial Sequence: Synthetic oligonucleotide
ccaauuaaaaucuuccaaa

SEQ ID NO: 2970522 - RNA, 19 nt, Artificial Sequence
  Description of Artificial Sequence: Synthetic oligonucleotide
aagacaccaugagauagaa

SEQ ID NO: 2970523 - RNA, 19 nt, Artificial Sequence
  Description of Artificial Sequence: Synthetic oligonucleotide
uagaaauuucccagccaau

SEQ ID NO: 2970524 - RNA, 19 nt, Artificial Sequence
  Description of Artificial Sequence: Synthetic oligonucleotide
aggcuauagaaaccaacaa

SEQ ID NO: 2970525 - RNA, 19 nt, Artificial Sequence
  Description of Artificial Sequence: Synthetic oligonucleotide
acaggcagagcagagcuca

SEQ ID NO: 2970526 - RNA, 19 nt, Artificial Sequence
  Description of Artificial Sequence: Synthetic oligonucleotide
gauuucaagugcagcuccc

SEQ ID NO: 2970527 - RNA, 19 nt, Artificial Sequence
  Description of Artificial Sequence: Synthetic oligonucleotide
uuuggcauugcagucucau

SEQ ID NO: 2970528 - RNA, 19 nt, Artificial Sequence
  Description of Artificial Sequence: Synthetic oligonucleotide
cuccaaguagaucaaaucu

SEQ ID NO: 2970529 - RNA, 19 nt, Artificial Sequence
  Description of Artificial Sequence: Synthetic oligonucleotide
acacacaauucccaaugau

SEQ ID NO: 2970530 - RNA, 19 nt, Artificial Sequence
  Description of Artificial Sequence: Synthetic oligonucleotide
ugauucccaguguucuuga

SEQ ID NO: 2970531 - RNA, 19 nt, Artificial Sequence
  Description of Artificial Sequence: Synthetic oligonucleotide
uugacacacaauucccaau

SEQ ID NO: 2970532 - RNA, 19 nt, Artificial Sequence
  Description of Artificial Sequence: Synthetic oligonucleotide
acaauucccaaugaucuuu

SEQ ID NO: 2970533 - RNA, 19 nt, Artificial Sequence
  Description of Artificial Sequence: Synthetic oligonucleotide
uugugucauccuucuuggg

SEQ ID NO: 2970534 - RNA, 19 nt, Artificial Sequence
  Description of Artificial Sequence: Synthetic oligonucleotide
gacacacaauucccaauga

SEQ ID NO: 2970535 - RNA, 19 nt, Artificial Sequence
  Description of Artificial Sequence: Synthetic oligonucleotide
agagcagagcucaagacua

SEQ ID NO: 2970536 - RNA, 19 nt, Artificial Sequence
  Description of Artificial Sequence: Synthetic oligonucleotide
gauagaaaaucagaaugau

SEQ ID NO: 2970537 - RNA, 19 nt, Artificial Sequence
  Description of Artificial Sequence: Synthetic oligonucleotide
ggcaaagaguaaauuguag

SEQ ID NO: 2970538 - RNA, 19 nt, Artificial Sequence
  Description of Artificial Sequence: Synthetic oligonucleotide
guugucacaauggcaaaga

SEQ ID NO: 2970539 - RNA, 19 nt, Artificial Sequence
  Description of Artificial Sequence: Synthetic oligonucleotide
acaaagccaaaaguggaaa

SEQ ID NO: 2970540 - RNA, 19 nt, Artificial Sequence
  Description of Artificial Sequence: Synthetic oligonucleotide
gugaauuuucugaccaaac

SEQ ID NO: 2970541 - RNA, 19 nt, Artificial Sequence
  Description of Artificial Sequence: Synthetic oligonucleotide
ugucauccuucuugggugu

SEQ ID NO: 2970542 - RNA, 19 nt, Artificial Sequence
  Description of Artificial Sequence: Synthetic oligonucleotide
agaggcgcuuccuauccca

SEQ ID NO: 2970543 - RNA, 19 nt, Artificial Sequence
  Description of Artificial Sequence: Synthetic oligonucleotide
cuuugucauaguuguguca

SEQ ID NO: 2970544 - RNA, 19 nt, Artificial Sequence
  Description of Artificial Sequence: Synthetic oligonucleotide
caucacaggcagagcagag

SEQ ID NO: 2970545 - RNA, 19 nt, Artificial Sequence
  Description of Artificial Sequence: Synthetic oligonucleotide
gugauucccaguguucuug

SEQ ID NO: 2970546 - RNA, 19 nt, Artificial Sequence
  Description of Artificial Sequence: Synthetic oligonucleotide
uaucccaggaccccuuguu

SEQ ID NO: 2970547 - RNA, 19 nt, Artificial Sequence
  Description of Artificial Sequence: Synthetic oligonucleotide
ucacaauggcaaagaguaa

SEQ ID NO: 2970548 - RNA, 19 nt, Artificial Sequence
  Description of Artificial Sequence: Synthetic oligonucleotide
cacaauggcaaagaguaaa

SEQ ID NO: 2970549 - RNA, 19 nt, Artificial Sequence
  Description of Artificial Sequence: Synthetic oligonucleotide
guucuugacaucacaggca

SEQ ID NO: 2970550 - RNA, 19 nt, Artificial Sequence
  Description of Artificial Sequence: Synthetic oligonucleotide
acuaagauugacacacaau

SEQ ID NO: 2970551 - RNA, 19 nt, Artificial Sequence
  Description of Artificial Sequence: Synthetic oligonucleotide
caagacuaagauugacaca

SEQ ID NO: 2970552 - RNA, 19 nt, Artificial Sequence
  Description of Artificial Sequence: Synthetic oligonucleotide
gaaagagaggcgcuuccua

SEQ ID NO: 2970553 - RNA, 19 nt, Artificial Sequence
  Description of Artificial Sequence: Synthetic oligonucleotide
auccuucuuggguguaaag

SEQ ID NO: 2970554 - RNA, 19 nt, Artificial Sequence
  Description of Artificial Sequence: Synthetic oligonucleotide
gcucccacaaagccaaaag

SEQ ID NO: 2970555 - RNA, 19 nt, Artificial Sequence
  Description of Artificial Sequence: Synthetic oligonucleotide
aucuagugauucccagugu

SEQ ID NO: 2970556 - RNA, 19 nt, Artificial Sequence
  Description of Artificial Sequence: Synthetic oligonucleotide
cuuccuaucccaggacccc

SEQ ID NO: 2970557 - RNA, 19 nt, Artificial Sequence
  Description of Artificial Sequence: Synthetic oligonucleotide
cacaaagccaaaaguggaa

SEQ ID NO: 2970558 - RNA, 19 nt, Artificial Sequence
  Description of Artificial Sequence: Synthetic oligonucleotide
ucuugacaucacaggcaga

SEQ ID NO: 2970559 - RNA, 19 nt, Artificial Sequence
  Description of Artificial Sequence: Synthetic oligonucleotide
auuucaagugcagcuccca

SEQ ID NO: 2970560 - RNA, 19 nt, Artificial Sequence
  Description of Artificial Sequence: Synthetic oligonucleotide
ggguguaaaguuuccaaaa

SEQ ID NO: 2970561 - RNA, 19 nt, Artificial Sequence
  Description of Artificial Sequence: Synthetic oligonucleotide
ccaacaacagaagacacca

SEQ ID NO: 2970562 - RNA, 19 nt, Artificial Sequence
  Description of Artificial Sequence: Synthetic oligonucleotide
gaccccuuguucccuuuug

SEQ ID NO: 2970563 - RNA, 19 nt, Artificial Sequence
  Description of Artificial Sequence: Synthetic oligonucleotide
gaucuuugucauaguugug

SEQ ID NO: 2970564 - RNA, 19 nt, Artificial Sequence
  Description of Artificial Sequence: Synthetic oligonucleotide
uugacaucacaggcagagc

SEQ ID NO: 2970565 - RNA, 19 nt, Artificial Sequence
  Description of Artificial Sequence: Synthetic oligonucleotide
caaagucuccaaguagauc

SEQ ID NO: 2970566 - RNA, 19 nt, Artificial Sequence
  Description of Artificial Sequence: Synthetic oligonucleotide
agcagagcucaagacuaag

SEQ ID NO: 2970567 - RNA, 19 nt, Artificial Sequence
  Description of Artificial Sequence: Synthetic oligonucleotide
uuggcauugcagucucauc

SEQ ID NO: 2970568 - RNA, 19 nt, Artificial Sequence
  Description of Artificial Sequence: Synthetic oligonucleotide
uuuuggcauugcagucuca

SEQ ID NO: 2970569 - RNA, 19 nt, Artificial Sequence
  Description of Artificial Sequence: Synthetic oligonucleotide
aggcgcuuccuaucccagg

SEQ ID NO: 2970570 - RNA, 19 nt, Artificial Sequence
  Description of Artificial Sequence: Synthetic oligonucleotide
auaauacaauauagaaauu

SEQ ID NO: 2970571 - RNA, 19 nt, Artificial Sequence
  Description of Artificial Sequence: Synthetic oligonucleotide
agcugacgugaauuuucug

SEQ ID NO: 2970572 - RNA, 19 nt, Artificial Sequence
  Description of Artificial Sequence: Synthetic oligonucleotide
auuucccagccaauuaaaa

SEQ ID NO: 2970573 - RNA, 19 nt, Artificial Sequence
  Description of Artificial Sequence: Synthetic oligonucleotide
guucccuuuuggcauugca

SEQ ID NO: 2970574 - RNA, 19 nt, Artificial Sequence
  Description of Artificial Sequence: Synthetic oligonucleotide
uugucauaguugugucauc

SEQ ID NO: 2970575 - RNA, 19 nt, Artificial Sequence
  Description of Artificial Sequence: Synthetic oligonucleotide
agccaaaaguggaaagaga

SEQ ID NO: 2970576 - RNA, 19 nt, Artificial Sequence
  Description of Artificial Sequence: Synthetic oligonucleotide
auguugucacaauggcaaa

SEQ ID NO: 2970577 - RNA, 19 nt, Artificial Sequence
  Description of Artificial Sequence: Synthetic oligonucleotide
ccagccaauuaaaaucuuc

SEQ ID NO: 2970578 - RNA, 19 nt, Artificial Sequence
  Description of Artificial Sequence: Synthetic oligonucleotide
agugauucccaguguucuu

SEQ ID NO: 2970579 - RNA, 19 nt, Artificial Sequence
  Description of Artificial Sequence: Synthetic oligonucleotide
gagaggcgcuuccuauccc

SEQ ID NO: 2970580 - RNA, 19 nt, Artificial Sequence
  Description of Artificial Sequence: Synthetic oligonucleotide
acgugaauuuucugaccaa

SEQ ID NO: 2970581 - RNA, 19 nt, Artificial Sequence
  Description of Artificial Sequence: Synthetic oligonucleotide
ggcagagcagagcucaaga

SEQ ID NO: 2970582 - RNA, 19 nt, Artificial Sequence
  Description of Artificial Sequence: Synthetic oligonucleotide
gcagagcagagcucaagac

SEQ ID NO: 2970583 - RNA, 19 nt, Artificial Sequence
  Description of Artificial Sequence: Synthetic oligonucleotide
cagagcagagcucaagacu

SEQ ID NO: 2970584 - RNA, 19 nt, Artificial Sequence
  Description of Artificial Sequence: Synthetic oligonucleotide
cagagcucaagacuaagau

SEQ ID NO: 2970585 - RNA, 19 nt, Artificial Sequence
  Description of Artificial Sequence: Synthetic oligonucleotide
cuuggguguaaaguuucca

SEQ ID NO: 2970586 - RNA, 19 nt, Artificial Sequence
  Description of Artificial Sequence: Synthetic oligonucleotide
aguggaaagagaggcgcuu

SEQ ID NO: 2970587 - RNA, 19 nt, Artificial Sequence
  Description of Artificial Sequence: Synthetic oligonucleotide
acaccaugagauagaaaau

SEQ ID NO: 2970588 - RNA, 19 nt, Artificial Sequence
  Description of Artificial Sequence: Synthetic oligonucleotide
uacagcugacgugaauuuu

SEQ ID NO: 2970589 - RNA, 19 nt, Artificial Sequence
  Description of Artificial Sequence: Synthetic oligonucleotide
ucguacagcugacgugaau

SEQ ID NO: 2970590 - RNA, 19 nt, Artificial Sequence
  Description of Artificial Sequence: Synthetic oligonucleotide
caaacacaauguugucaca

SEQ ID NO: 2970591 - RNA, 19 nt, Artificial Sequence
  Description of Artificial Sequence: Synthetic oligonucleotide
caguguucuugacaucaca

SEQ ID NO: 2970592 - RNA, 19 nt, Artificial Sequence
  Description of Artificial Sequence: Synthetic oligonucleotide
ucauccuucuuggguguaa

SEQ ID NO: 2970593 - RNA, 19 nt, Artificial Sequence
  Description of Artificial Sequence: Synthetic oligonucleotide
uuccuaucccaggaccccu

SEQ ID NO: 2970594 - RNA, 19 nt, Artificial Sequence
  Description of Artificial Sequence: Synthetic oligonucleotide
cuucucguacagcugacgu

SEQ ID NO: 2970595 - RNA, 19 nt, Artificial Sequence
  Description of Artificial Sequence: Synthetic oligonucleotide
gcuuccuaucccaggaccc

SEQ ID NO: 2970596 - RNA, 19 nt, Artificial Sequence
  Description of Artificial Sequence: Synthetic oligonucleotide
gaggcgcuuccuaucccag

SEQ ID NO: 2970597 - RNA, 19 nt, Artificial Sequence
  Description of Artificial Sequence: Synthetic oligonucleotide
uuguucccuuuuggcauug

SEQ ID NO: 2970598 - RNA, 19 nt, Artificial Sequence
  Description of Artificial Sequence: Synthetic oligonucleotide
caaguagaucaaaucuagu

SEQ ID NO: 2970599 - RNA, 19 nt, Artificial Sequence
  Description of Artificial Sequence: Synthetic oligonucleotide
aggcagagcagagcucaag

SEQ ID NO: 2970600 - RNA, 19 nt, Artificial Sequence
  Description of Artificial Sequence: Synthetic oligonucleotide
cucccacaaagccaaaagu

SEQ ID NO: 2970601 - RNA, 19 nt, Artificial Sequence
  Description of Artificial Sequence: Synthetic oligonucleotide
ggcgcuuccuaucccagga

SEQ ID NO: 2970602 - RNA, 19 nt, Artificial Sequence
  Description of Artificial Sequence: Synthetic oligonucleotide
guggaaagagaggcgcuuc

SEQ ID NO: 2970603 - RNA, 19 nt, Artificial Sequence
  Description of Artificial Sequence: Synthetic oligonucleotide
gucauaguugugucauccu

SEQ ID NO: 2970604 - RNA, 19 nt, Artificial Sequence
  Description of Artificial Sequence: Synthetic oligonucleotide
agcucaagacuaagauuga

SEQ ID NO: 2970605 - RNA, 19 nt, Artificial Sequence
  Description of Artificial Sequence: Synthetic oligonucleotide
cagaagacaccaugagaua

SEQ ID NO: 2970606 - RNA, 19 nt, Artificial Sequence
  Description of Artificial Sequence: Synthetic oligonucleotide
agacuaagauugacacaca

SEQ ID NO: 2970607 - RNA, 19 nt, Artificial Sequence
  Description of Artificial Sequence: Synthetic oligonucleotide
ccccuuguucccuuuuggc

SEQ ID NO: 2970608 - RNA, 19 nt, Artificial Sequence
  Description of Artificial Sequence: Synthetic oligonucleotide
uguucccuuuuggcauugc

SEQ ID NO: 2970609 - RNA, 19 nt, Artificial Sequence
  Description of Artificial Sequence: Synthetic oligonucleotide
uccuaucccaggaccccuu

SEQ ID NO: 2970610 - RNA, 19 nt, Artificial Sequence
  Description of Artificial Sequence: Synthetic oligonucleotide
uaguugugucauccuucuu

SEQ ID NO: 2970611 - RNA, 19 nt, Artificial Sequence
  Description of Artificial Sequence: Synthetic oligonucleotide
gcauugcagucucaucaac

SEQ ID NO: 2970612 - RNA, 19 nt, Artificial Sequence
  Description of Artificial Sequence: Synthetic oligonucleotide
ggcauugcagucucaucaa

SEQ ID NO: 2970613 - RNA, 19 nt, Artificial Sequence
  Description of Artificial Sequence: Synthetic oligonucleotide
gcucaagacuaagauugac

SEQ ID NO: 2970614 - RNA, 19 nt, Artificial Sequence
  Description of Artificial Sequence: Synthetic oligonucleotide
agucuccaaguagaucaaa

SEQ ID NO: 2970615 - RNA, 19 nt, Artificial Sequence
  Description of Artificial Sequence: Synthetic oligonucleotide
cccuuguucccuuuuggca

SEQ ID NO: 2970616 - RNA, 19 nt, Artificial Sequence
  Description of Artificial Sequence: Synthetic oligonucleotide
cccaguguucuugacauca

SEQ ID NO: 2970617 - RNA, 19 nt, Artificial Sequence
  Description of Artificial Sequence: Synthetic oligonucleotide
gaguaaauuguaggauaau

SEQ ID NO: 2970618 - RNA, 19 nt, Artificial Sequence
  Description of Artificial Sequence: Synthetic oligonucleotide
agcucccacaaagccaaaa

SEQ ID NO: 2970619 - RNA, 19 nt, Artificial Sequence
  Description of Artificial Sequence: Synthetic oligonucleotide
ucccaguguucuugacauc

SEQ ID NO: 2970620 - RNA, 19 nt, Artificial Sequence
  Description of Artificial Sequence: Synthetic oligonucleotide
cugaggcuauagaaaccaa

SEQ ID NO: 2970621 - RNA, 19 nt, Artificial Sequence
  Description of Artificial Sequence: Synthetic oligonucleotide
guacagcugacgugaauuu

SEQ ID NO: 2970622 - RNA, 19 nt, Artificial Sequence
  Description of Artificial Sequence: Synthetic oligonucleotide
cccaggaccccuuguuccc

SEQ ID NO: 2970623 - RNA, 19 nt, Artificial Sequence
  Description of Artificial Sequence: Synthetic oligonucleotide
cgcuuccuaucccaggacc

SEQ ID NO: 2970624 - RNA, 19 nt, Artificial Sequence
  Description of Artificial Sequence: Synthetic oligonucleotide
gcagagcucaagacuaaga

SEQ ID NO: 2970625 - RNA, 19 nt, Artificial Sequence
  Description of Artificial Sequence: Synthetic oligonucleotide
ccaguguucuugacaucac

SEQ ID NO: 2970626 - RNA, 19 nt, Artificial Sequence
  Description of Artificial Sequence: Synthetic oligonucleotide
cagcugacgugaauuuucu

SEQ ID NO: 2970627 - RNA, 19 nt, Artificial Sequence
  Description of Artificial Sequence: Synthetic oligonucleotide
cauccuucuuggguguaaa

SEQ ID NO: 2970628 - RNA, 19 nt, Artificial Sequence
  Description of Artificial Sequence: Synthetic oligonucleotide
gagcagagcucaagacuaa

SEQ ID NO: 2970629 - RNA, 19 nt, Artificial Sequence
  Description of Artificial Sequence: Synthetic oligonucleotide
ccuucuuggguguaaaguu

SEQ ID NO: 2970630 - RNA, 19 nt, Artificial Sequence
  Description of Artificial Sequence: Synthetic oligonucleotide
caaugaucuuugucauagu

SEQ ID NO: 2970631 - RNA, 19 nt, Artificial Sequence
  Description of Artificial Sequence: Synthetic oligonucleotide
ccuuguucccuuuuggcau

SEQ ID NO: 2970632 - RNA, 19 nt, Artificial Sequence
  Description of Artificial Sequence: Synthetic oligonucleotide
cacaauucccaaugaucuu

SEQ ID NO: 2970633 - RNA, 19 nt, Artificial Sequence
  Description of Artificial Sequence: Synthetic oligonucleotide
cuuguucccuuuuggcauu

SEQ ID NO: 2970634 - RNA, 19 nt, Artificial Sequence
  Description of Artificial Sequence: Synthetic oligonucleotide
caauggcaaagaguaaauu

SEQ ID NO: 2970635 - RNA, 19 nt, Artificial Sequence
  Description of Artificial Sequence: Synthetic oligonucleotide
ccuaucccaggaccccuug

SEQ ID NO: 2970636 - RNA, 19 nt, Artificial Sequence
  Description of Artificial Sequence: Synthetic oligonucleotide
cucguacagcugacgugaa

SEQ ID NO: 2970637 - RNA, 19 nt, Artificial Sequence
  Description of Artificial Sequence: Synthetic oligonucleotide
ggaaagagaggcgcuuccu

SEQ ID NO: 2970638 - RNA, 19 nt, Artificial Sequence
  Description of Artificial Sequence: Synthetic oligonucleotide
cgugaauuuucugaccaaa

SEQ ID NO: 2970639 - RNA, 19 nt, Artificial Sequence
  Description of Artificial Sequence: Synthetic oligonucleotide
cuaucccaggaccccuugu

SEQ ID NO: 2970640 - RNA, 19 nt, Artificial Sequence
  Description of Artificial Sequence: Synthetic oligonucleotide
gcgcuuccuaucccaggac

SEQ ID NO: 2970641 - RNA, 19 nt, Artificial Sequence
  Description of Artificial Sequence: Synthetic oligonucleotide
gucauccuucuugggugua

SEQ ID NO: 2970642 - RNA, 19 nt, Artificial Sequence
  Description of Artificial Sequence: Synthetic oligonucleotide
cccaaugaucuuugucaua

SEQ ID NO: 2970643 - RNA, 19 nt, Artificial Sequence
  Description of Artificial Sequence: Synthetic oligonucleotide
cguacagcugacgugaauu

SEQ ID NO: 2970644 - RNA, 19 nt, Artificial Sequence
  Description of Artificial Sequence: Synthetic oligonucleotide
cagcucccacaaagccaaa

SEQ ID NO: 2970645 - RNA, 19 nt, Artificial Sequence
  Description of Artificial Sequence: Synthetic oligonucleotide
caggaccccuuguucccuu

SEQ ID NO: 2970646 - RNA, 19 nt, Artificial Sequence
  Description of Artificial Sequence: Synthetic oligonucleotide
ggaccccuuguucccuuuu

SEQ ID NO: 2970647 - RNA, 19 nt, Artificial Sequence
  Description of Artificial Sequence: Synthetic oligonucleotide
cccagccaauuaaaaucuu

SEQ ID NO: 2970648 - RNA, 19 nt, Artificial Sequence
  Description of Artificial Sequence: Synthetic oligonucleotide
ccaggaccccuuguucccu

SEQ ID NO: 2970649 - RNA, 19 nt, Artificial Sequence
  Description of Artificial Sequence: Synthetic oligonucleotide
ugagccacacacacacagg

SEQ ID NO: 2970650 - RNA, 19 nt, Artificial Sequence
  Description of Artificial Sequence: Synthetic oligonucleotide
cugagccacacacacacag

SEQ ID NO: 2970651 - RNA, 19 nt, Artificial Sequence
  Description of Artificial Sequence: Synthetic oligonucleotide
gccacacacacacagguag

SEQ ID NO: 2970652 - RNA, 19 nt, Artificial Sequence
  Description of Artificial Sequence: Synthetic oligonucleotide
gagccacacacacacaggu

SEQ ID NO: 2970653 - RNA, 19 nt, Artificial Sequence
  Description of Artificial Sequence: Synthetic oligonucleotide
ccacacacacacagguagg

SEQ ID NO: 2970654 - RNA, 19 nt, Artificial Sequence
  Description of Artificial Sequence: Synthetic oligonucleotide
cacacacacacagguagga

SEQ ID NO: 2970655 - RNA, 19 nt, Artificial Sequence
  Description of Artificial Sequence: Synthetic oligonucleotide
agccacacacacacaggua

SEQ ID NO: 2970656 - RNA, 19 nt, Artificial Sequence
  Description of Artificial Sequence: Synthetic oligonucleotide
ccugagccacacacacaca

SEQ ID NO: 2970657 - RNA, 19 nt, Artificial Sequence
  Description of Artificial Sequence: Synthetic oligonucleotide
aauaauagaugguuuguac

SEQ ID NO: 2970658 - RNA, 19 nt, Artificial Sequence
  Description of Artificial Sequence: Synthetic oligonucleotide
aaauagauggagaaggucc

SEQ ID NO: 2970659 - RNA, 19 nt, Artificial Sequence
  Description of Artificial Sequence: Synthetic oligonucleotide
aaggacuuuggucacauac

SEQ ID NO: 2970660 - RNA, 19 nt, Artificial Sequence
  Description of Artificial Sequence: Synthetic oligonucleotide
uaaacuauaguucaccaga

SEQ ID NO: 2970661 - RNA, 19 nt, Artificial Sequence
  Description of Artificial Sequence: Synthetic oligonucleotide
gaagaagucacaauaauag

SEQ ID NO: 2970662 - RNA, 19 nt, Artificial Sequence
  Description of Artificial Sequence: Synthetic oligonucleotide
aagucacaauaauagaugg

SEQ ID NO: 2970663 - RNA, 19 nt, Artificial Sequence
  Description of Artificial Sequence: Synthetic oligonucleotide
aaaugugucauucucaaau

SEQ ID NO: 2970664 - RNA, 19 nt, Artificial Sequence
  Description of Artificial Sequence: Synthetic oligonucleotide
gauccaguuggcuagauag

SEQ ID NO: 2970665 - RNA, 19 nt, Artificial Sequence
  Description of Artificial Sequence: Synthetic oligonucleotide
uccaaauagauggagaagg

SEQ ID NO: 2970666 - RNA, 19 nt, Artificial Sequence
  Description of Artificial Sequence: Synthetic oligonucleotide
acuauaguucaccagaaag

SEQ ID NO: 2970667 - RNA, 19 nt, Artificial Sequence
  Description of Artificial Sequence: Synthetic oligonucleotide
aaauucucugucugguacc

SEQ ID NO: 2970668 - RNA, 19 nt, Artificial Sequence
  Description of Artificial Sequence: Synthetic oligonucleotide
uuuagacuggcauugguag

SEQ ID NO: 2970669 - RNA, 19 nt, Artificial Sequence
  Description of Artificial Sequence: Synthetic oligonucleotide
cuauaguucaccagaaagg

SEQ ID NO: 2970670 - RNA, 19 nt, Artificial Sequence
  Description of Artificial Sequence: Synthetic oligonucleotide
accaagaggaacuccagcc

SEQ ID NO: 2970671 - RNA, 19 nt, Artificial Sequence
  Description of Artificial Sequence: Synthetic oligonucleotide
aaaggaaaggccaaaucac

SEQ ID NO: 2970672 - RNA, 19 nt, Artificial Sequence
  Description of Artificial Sequence: Synthetic oligonucleotide
uuuggucacauacaaguag

SEQ ID NO: 2970673 - RNA, 19 nt, Artificial Sequence
  Description of Artificial Sequence: Synthetic oligonucleotide
aaggccaaaucacugggac

SEQ ID NO: 2970674 - RNA, 19 nt, Artificial Sequence
  Description of Artificial Sequence: Synthetic oligonucleotide
ugagaucugauucauagaa

SEQ ID NO: 2970675 - RNA, 19 nt, Artificial Sequence
  Description of Artificial Sequence: Synthetic oligonucleotide
acuuuggucacauacaagu

SEQ ID NO: 2970676 - RNA, 19 nt, Artificial Sequence
  Description of Artificial Sequence: Synthetic oligonucleotide
aggaagaacaaguagugag

SEQ ID NO: 2970677 - RNA, 19 nt, Artificial Sequence
  Description of Artificial Sequence: Synthetic oligonucleotide
aaucacugggaccaagagg

SEQ ID NO: 2970678 - RNA, 19 nt, Artificial Sequence
  Description of Artificial Sequence: Synthetic oligonucleotide
gauucauagaaauucucug

SEQ ID NO: 2970679 - RNA, 19 nt, Artificial Sequence
  Description of Artificial Sequence: Synthetic oligonucleotide
gaaaggaaaggccaaauca

SEQ ID NO: 2970680 - RNA, 19 nt, Artificial Sequence
  Description of Artificial Sequence: Synthetic oligonucleotide
aucugauucauagaaauuc

SEQ ID NO: 2970681 - RNA, 19 nt, Artificial Sequence
  Description of Artificial Sequence: Synthetic oligonucleotide
uuuccuuuaaggacuuugg

SEQ ID NO: 2970682 - RNA, 19 nt, Artificial Sequence
  Description of Artificial Sequence: Synthetic oligonucleotide
uuuguacuacuccagacac

SEQ ID NO: 2970683 - RNA, 19 nt, Artificial Sequence
  Description of Artificial Sequence: Synthetic oligonucleotide
ugauucauagaaauucucu

SEQ ID NO: 2970684 - RNA, 19 nt, Artificial Sequence
  Description of Artificial Sequence: Synthetic oligonucleotide
uuaacuucuuuccuuuaag

SEQ ID NO: 2970685 - RNA, 19 nt, Artificial Sequence
  Description of Artificial Sequence: Synthetic oligonucleotide
uauagugugguccuucucu

SEQ ID NO: 2970686 - RNA, 19 nt, Artificial Sequence
  Description of Artificial Sequence: Synthetic oligonucleotide
aacuucuuuccuuuaagga

SEQ ID NO: 2970687 - RNA, 19 nt, Artificial Sequence
  Description of Artificial Sequence: Synthetic oligonucleotide
aguagaagaagucacaaua

SEQ ID NO: 2970688 - RNA, 19 nt, Artificial Sequence
  Description of Artificial Sequence: Synthetic oligonucleotide
aauagaugguuuguacuac

SEQ ID NO: 2970689 - RNA, 19 nt, Artificial Sequence
  Description of Artificial Sequence: Synthetic oligonucleotide
aaugugucauucucaaaug

SEQ ID NO: 2970690 - RNA, 19 nt, Artificial Sequence
  Description of Artificial Sequence: Synthetic oligonucleotide
agaugguuuguacuacucc

SEQ ID NO: 2970691 - RNA, 19 nt, Artificial Sequence
  Description of Artificial Sequence: Synthetic oligonucleotide
uaacuucuuuccuuuaagg

SEQ ID NO: 2970692 - RNA, 19 nt, Artificial Sequence
  Description of Artificial Sequence: Synthetic oligonucleotide
uacaaguagaagaagucac

SEQ ID NO: 2970693 - RNA, 19 nt, Artificial Sequence
  Description of Artificial Sequence: Synthetic oligonucleotide
auagaaauucucugucugg

SEQ ID NO: 2970694 - RNA, 19 nt, Artificial Sequence
  Description of Artificial Sequence: Synthetic oligonucleotide
auaauagaugguuuguacu

SEQ ID NO: 2970695 - RNA, 19 nt, Artificial Sequence
  Description of Artificial Sequence: Synthetic oligonucleotide
gauagagugcccgauacag

SEQ ID NO: 2970696 - RNA, 19 nt, Artificial Sequence
  Description of Artificial Sequence: Synthetic oligonucleotide
uaguucaccagaaaggaaa

SEQ ID NO: 2970697 - RNA, 19 nt, Artificial Sequence
  Description of Artificial Sequence: Synthetic oligonucleotide
uauaguucaccagaaagga

SEQ ID NO: 2970698 - RNA, 19 nt, Artificial Sequence
  Description of Artificial Sequence: Synthetic oligonucleotide
gaaaggccaaaucacuggg

SEQ ID NO: 2970699 - RNA, 19 nt, Artificial Sequence
  Description of Artificial Sequence: Synthetic oligonucleotide
aaguagugaguggugaugg

SEQ ID NO: 2970700 - RNA, 19 nt, Artificial Sequence
  Description of Artificial Sequence: Synthetic oligonucleotide
aaaucacugggaccaagag

SEQ ID NO: 2970701 - RNA, 19 nt, Artificial Sequence
  Description of Artificial Sequence: Synthetic oligonucleotide
uguaaacuauaguucacca

SEQ ID NO: 2970702 - RNA, 19 nt, Artificial Sequence
  Description of Artificial Sequence: Synthetic oligonucleotide
gaaauucucugucugguac

SEQ ID NO: 2970703 - RNA, 19 nt, Artificial Sequence
  Description of Artificial Sequence: Synthetic oligonucleotide
gaagucacaauaauagaug

SEQ ID NO: 2970704 - RNA, 19 nt, Artificial Sequence
  Description of Artificial Sequence: Synthetic oligonucleotide
ucugauucauagaaauucu

SEQ ID NO: 2970705 - RNA, 19 nt, Artificial Sequence
  Description of Artificial Sequence: Synthetic oligonucleotide
aagaagucacaauaauaga

SEQ ID NO: 2970706 - RNA, 19 nt, Artificial Sequence
  Description of Artificial Sequence: Synthetic oligonucleotide
uguacuacuccagacacca

SEQ ID NO: 2970707 - RNA, 19 nt, Artificial Sequence
  Description of Artificial Sequence: Synthetic oligonucleotide
uucauagaaauucucuguc

SEQ ID NO: 2970708 - RNA, 19 nt, Artificial Sequence
  Description of Artificial Sequence: Synthetic oligonucleotide
ugguguguaaacuauaguu

SEQ ID NO: 2970709 - RNA, 19 nt, Artificial Sequence
  Description of Artificial Sequence: Synthetic oligonucleotide
agaucugauucauagaaau

SEQ ID NO: 2970710 - RNA, 19 nt, Artificial Sequence
  Description of Artificial Sequence: Synthetic oligonucleotide
uucaccagaaaggaaaggc

SEQ ID NO: 2970711 - RNA, 19 nt, Artificial Sequence
  Description of Artificial Sequence: Synthetic oligonucleotide
uagagugcccgauacagcc

SEQ ID NO: 2970712 - RNA, 19 nt, Artificial Sequence
  Description of Artificial Sequence: Synthetic oligonucleotide
cacaauaauagaugguuug

SEQ ID NO: 2970713 - RNA, 19 nt, Artificial Sequence
  Description of Artificial Sequence: Synthetic oligonucleotide
ucaccagaaaggaaaggcc

SEQ ID NO: 2970714 - RNA, 19 nt, Artificial Sequence
  Description of Artificial Sequence: Synthetic oligonucleotide
uaauagaugguuuguacua

SEQ ID NO: 2970715 - RNA, 19 nt, Artificial Sequence
  Description of Artificial Sequence: Synthetic oligonucleotide
gaugguuuguacuacucca

SEQ ID NO: 2970716 - RNA, 19 nt, Artificial Sequence
  Description of Artificial Sequence: Synthetic oligonucleotide
guaggcuuaacuucuuucc

SEQ ID NO: 2970717 - RNA, 19 nt, Artificial Sequence
  Description of Artificial Sequence: Synthetic oligonucleotide
uuggucacauacaaguaga

SEQ ID NO: 2970718 - RNA, 19 nt, Artificial Sequence
  Description of Artificial Sequence: Synthetic oligonucleotide
uccagaguaccuccguugg

SEQ ID NO: 2970719 - RNA, 19 nt, Artificial Sequence
  Description of Artificial Sequence: Synthetic oligonucleotide
cauagaaauucucugucug

SEQ ID NO: 2970720 - RNA, 19 nt, Artificial Sequence
  Description of Artificial Sequence: Synthetic oligonucleotide
aucacugggaccaagagga

SEQ ID NO: 2970721 - RNA, 19 nt, Artificial Sequence
  Description of Artificial Sequence: Synthetic oligonucleotide
ucaugaagagcuguggcag

SEQ ID NO: 2970722 - RNA, 19 nt, Artificial Sequence
  Description of Artificial Sequence: Synthetic oligonucleotide
aauucucugucugguaccg

SEQ ID NO: 2970723 - RNA, 19 nt, Artificial Sequence
  Description of Artificial Sequence: Synthetic oligonucleotide
cauacaaguagaagaaguc

SEQ ID NO: 2970724 - RNA, 19 nt, Artificial Sequence
  Description of Artificial Sequence: Synthetic oligonucleotide
guaaacuauaguucaccag

SEQ ID NO: 2970725 - RNA, 19 nt, Artificial Sequence
  Description of Artificial Sequence: Synthetic oligonucleotide
gaucaugaagagcuguggc

SEQ ID NO: 2970726 - RNA, 19 nt, Artificial Sequence
  Description of Artificial Sequence: Synthetic oligonucleotide
caguuggcuagauagagug

SEQ ID NO: 2970727 - RNA, 19 nt, Artificial Sequence
  Description of Artificial Sequence: Synthetic oligonucleotide
uccuuuaaggacuuugguc

SEQ ID NO: 2970728 - RNA, 19 nt, Artificial Sequence
  Description of Artificial Sequence: Synthetic oligonucleotide
ugugucauucucaaauguc

SEQ ID NO: 2970729 - RNA, 19 nt, Artificial Sequence
  Description of Artificial Sequence: Synthetic oligonucleotide
ugcucuggcugccuuauag

SEQ ID NO: 2970730 - RNA, 19 nt, Artificial Sequence
  Description of Artificial Sequence: Synthetic oligonucleotide
uagauagagugcccgauac

SEQ ID NO: 2970731 - RNA, 19 nt, Artificial Sequence
  Description of Artificial Sequence: Synthetic oligonucleotide
agaacaaguagugaguggu

SEQ ID NO: 2970732 - RNA, 19 nt, Artificial Sequence
  Description of Artificial Sequence: Synthetic oligonucleotide
uuagacuggcauugguagg

SEQ ID NO: 2970733 - RNA, 19 nt, Artificial Sequence
  Description of Artificial Sequence: Synthetic oligonucleotide
ucucuuuagacuggcauug

SEQ ID NO: 2970734 - RNA, 19 nt, Artificial Sequence
  Description of Artificial Sequence: Synthetic oligonucleotide
gaagaacaaguagugagug

SEQ ID NO: 2970735 - RNA, 19 nt, Artificial Sequence
  Description of Artificial Sequence: Synthetic oligonucleotide
uacuacuccagacaccacu

SEQ ID NO: 2970736 - RNA, 19 nt, Artificial Sequence
  Description of Artificial Sequence: Synthetic oligonucleotide
auggagaagguccagagua

SEQ ID NO: 2970737 - RNA, 19 nt, Artificial Sequence
  Description of Artificial Sequence: Synthetic oligonucleotide
ucauagaaauucucugucu

SEQ ID NO: 2970738 - RNA, 19 nt, Artificial Sequence
  Description of Artificial Sequence: Synthetic oligonucleotide
ugaucaugaagagcugugg

SEQ ID NO: 2970739 - RNA, 19 nt, Artificial Sequence
  Description of Artificial Sequence: Synthetic oligonucleotide
uagugaguggugauggucu

SEQ ID NO: 2970740 - RNA, 19 nt, Artificial Sequence
  Description of Artificial Sequence: Synthetic oligonucleotide
uaccgccagauccaguugg

SEQ ID NO: 2970741 - RNA, 19 nt, Artificial Sequence
  Description of Artificial Sequence: Synthetic oligonucleotide
guguguaaacuauaguuca

SEQ ID NO: 2970742 - RNA, 19 nt, Artificial Sequence
  Description of Artificial Sequence: Synthetic oligonucleotide
uagaagaagucacaauaau

SEQ ID NO: 2970743 - RNA, 19 nt, Artificial Sequence
  Description of Artificial Sequence: Synthetic oligonucleotide
cauugguaggcuuaacuuc

SEQ ID NO: 2970744 - RNA, 19 nt, Artificial Sequence
  Description of Artificial Sequence: Synthetic oligonucleotide
acuccaaauagauggagaa

SEQ ID NO: 2970745 - RNA, 19 nt, Artificial Sequence
  Description of Artificial Sequence: Synthetic oligonucleotide
aauagauggagaaggucca

SEQ ID NO: 2970746 - RNA, 19 nt, Artificial Sequence
  Description of Artificial Sequence: Synthetic oligonucleotide
uguguaaacuauaguucac

SEQ ID NO: 2970747 - RNA, 19 nt, Artificial Sequence
  Description of Artificial Sequence: Synthetic oligonucleotide
agaagucacaauaauagau

SEQ ID NO: 2970748 - RNA, 19 nt, Artificial Sequence
  Description of Artificial Sequence: Synthetic oligonucleotide
gucugguaccgccagaucc

SEQ ID NO: 2970749 - RNA, 19 nt, Artificial Sequence
  Description of Artificial Sequence: Synthetic oligonucleotide
aacaaguagugagugguga

SEQ ID NO: 2970750 - RNA, 19 nt, Artificial Sequence
  Description of Artificial Sequence: Synthetic oligonucleotide
guuggcuagauagagugcc

SEQ ID NO: 2970751 - RNA, 19 nt, Artificial Sequence
  Description of Artificial Sequence: Synthetic oligonucleotide
aucaugaagagcuguggca

SEQ ID NO: 2970752 - RNA, 19 nt, Artificial Sequence
  Description of Artificial Sequence: Synthetic oligonucleotide
acauacaaguagaagaagu

SEQ ID NO: 2970753 - RNA, 19 nt, Artificial Sequence
  Description of Artificial Sequence: Synthetic oligonucleotide
uccaguuggcuagauagag

SEQ ID NO: 2970754 - RNA, 19 nt, Artificial Sequence
  Description of Artificial Sequence: Synthetic oligonucleotide
caagaggaacuccagccgg

SEQ ID NO: 2970755 - RNA, 19 nt, Artificial Sequence
  Description of Artificial Sequence: Synthetic oligonucleotide
uucucugucugguaccgcc

SEQ ID NO: 2970756 - RNA, 19 nt, Artificial Sequence
  Description of Artificial Sequence: Synthetic oligonucleotide
auacaaguagaagaaguca

SEQ ID NO: 2970757 - RNA, 19 nt, Artificial Sequence
  Description of Artificial Sequence: Synthetic oligonucleotide
guugguguguaaacuauag

SEQ ID NO: 2970758 - RNA, 19 nt, Artificial Sequence
  Description of Artificial Sequence: Synthetic oligonucleotide
gaagguccagaguaccucc

SEQ ID NO: 2970759 - RNA, 19 nt, Artificial Sequence
  Description of Artificial Sequence: Synthetic oligonucleotide
aaguagaagaagucacaau

SEQ ID NO: 2970760 - RNA, 19 nt, Artificial Sequence
  Description of Artificial Sequence: Synthetic oligonucleotide
ggaaaggccaaaucacugg

SEQ ID NO: 2970761 - RNA, 19 nt, Artificial Sequence
  Description of Artificial Sequence: Synthetic oligonucleotide
guuuguacuacuccagaca

SEQ ID NO: 2970762 - RNA, 19 nt, Artificial Sequence
  Description of Artificial Sequence: Synthetic oligonucleotide
ucugguaccgccagaucca

SEQ ID NO: 2970763 - RNA, 19 nt, Artificial Sequence
  Description of Artificial Sequence: Synthetic oligonucleotide
ugucauucucaaaugucaa

SEQ ID NO: 2970764 - RNA, 19 nt, Artificial Sequence
  Description of Artificial Sequence: Synthetic oligonucleotide
gguccuucucuuuagacug

SEQ ID NO: 2970765 - RNA, 19 nt, Artificial Sequence
  Description of Artificial Sequence: Synthetic oligonucleotide
aggccaaaucacugggacc

SEQ ID NO: 2970766 - RNA, 19 nt, Artificial Sequence
  Description of Artificial Sequence: Synthetic oligonucleotide
uaggcuuaacuucuuuccu

SEQ ID NO: 2970767 - RNA, 19 nt, Artificial Sequence
  Description of Artificial Sequence: Synthetic oligonucleotide
uagaaauucucugucuggu

SEQ ID NO: 2970768 - RNA, 19 nt, Artificial Sequence
  Description of Artificial Sequence: Synthetic oligonucleotide
uagacuggcauugguaggc

SEQ ID NO: 2970769 - RNA, 19 nt, Artificial Sequence
  Description of Artificial Sequence: Synthetic oligonucleotide
ucacaauaauagaugguuu

SEQ ID NO: 2970770 - RNA, 19 nt, Artificial Sequence
  Description of Artificial Sequence: Synthetic oligonucleotide
ugguccuucucuuuagacu

SEQ ID NO: 2970771 - RNA, 19 nt, Artificial Sequence
  Description of Artificial Sequence: Synthetic oligonucleotide
ucuuuagacuggcauuggu

SEQ ID NO: 2970772 - RNA, 19 nt, Artificial Sequence
  Description of Artificial Sequence: Synthetic oligonucleotide
uuccuuuaaggacuuuggu

SEQ ID NO: 2970773 - RNA, 19 nt, Artificial Sequence
  Description of Artificial Sequence: Synthetic oligonucleotide
acaauaauagaugguuugu

SEQ ID NO: 2970774 - RNA, 19 nt, Artificial Sequence
  Description of Artificial Sequence: Synthetic oligonucleotide
cugccuuauaguguggucc

SEQ ID NO: 2970775 - RNA, 19 nt, Artificial Sequence
  Description of Artificial Sequence: Synthetic oligonucleotide
aaggaaaggccaaaucacu

SEQ ID NO: 2970776 - RNA, 19 nt, Artificial Sequence
  Description of Artificial Sequence: Synthetic oligonucleotide
ccuuuaaggacuuugguca

SEQ ID NO: 2970777 - RNA, 19 nt, Artificial Sequence
  Description of Artificial Sequence: Synthetic oligonucleotide
cuuuccuuuaaggacuuug

SEQ ID NO: 2970778 - RNA, 19 nt, Artificial Sequence
  Description of Artificial Sequence: Synthetic oligonucleotide
ugguuuguacuacuccaga

SEQ ID NO: 2970779 - RNA, 19 nt, Artificial Sequence
  Description of Artificial Sequence: Synthetic oligonucleotide
accacugagaucugauuca

SEQ ID NO: 2970780 - RNA, 19 nt, Artificial Sequence
  Description of Artificial Sequence: Synthetic oligonucleotide
guguaaacuauaguucacc

SEQ ID NO: 2970781 - RNA, 19 nt, Artificial Sequence
  Description of Artificial Sequence: Synthetic oligonucleotide
aacuauaguucaccagaaa

SEQ ID NO: 2970782 - RNA, 19 nt, Artificial Sequence
  Description of Artificial Sequence: Synthetic oligonucleotide
ucuggcugccuuauagugu

SEQ ID NO: 2970783 - RNA, 19 nt, Artificial Sequence
  Description of Artificial Sequence: Synthetic oligonucleotide
augugucauucucaaaugu

SEQ ID NO: 2970784 - RNA, 19 nt, Artificial Sequence
  Description of Artificial Sequence: Synthetic oligonucleotide
auagaugguuuguacuacu

SEQ ID NO: 2970785 - RNA, 19 nt, Artificial Sequence
  Description of Artificial Sequence: Synthetic oligonucleotide
uugguguguaaacuauagu

SEQ ID NO: 2970786 - RNA, 19 nt, Artificial Sequence
  Description of Artificial Sequence: Synthetic oligonucleotide
auugguaggcuuaacuucu

SEQ ID NO: 2970787 - RNA, 19 nt, Artificial Sequence
  Description of Artificial Sequence: Synthetic oligonucleotide
cuggcugccuuauagugug

SEQ ID NO: 2970788 - RNA, 19 nt, Artificial Sequence
  Description of Artificial Sequence: Synthetic oligonucleotide
cugauucauagaaauucuc

SEQ ID NO: 2970789 - RNA, 19 nt, Artificial Sequence
  Description of Artificial Sequence: Synthetic oligonucleotide
cugaucaugaagagcugug

SEQ ID NO: 2970790 - RNA, 19 nt, Artificial Sequence
  Description of Artificial Sequence: Synthetic oligonucleotide
ugaguggugauggucucag

SEQ ID NO: 2970791 - RNA, 19 nt, Artificial Sequence
  Description of Artificial Sequence: Synthetic oligonucleotide
caccacugagaucugauuc

SEQ ID NO: 2970792 - RNA, 19 nt, Artificial Sequence
  Description of Artificial Sequence: Synthetic oligonucleotide
cuuuaaggacuuuggucac

SEQ ID NO: 2970793 - RNA, 19 nt, Artificial Sequence
  Description of Artificial Sequence: Synthetic oligonucleotide
uagaugguuuguacuacuc

SEQ ID NO: 2970794 - RNA, 19 nt, Artificial Sequence
  Description of Artificial Sequence: Synthetic oligonucleotide
uucucuuuagacuggcauu

SEQ ID NO: 2970795 - RNA, 19 nt, Artificial Sequence
  Description of Artificial Sequence: Synthetic oligonucleotide
uggcuagauagagugcccg

SEQ ID NO: 2970796 - RNA, 19 nt, Artificial Sequence
  Description of Artificial Sequence: Synthetic oligonucleotide
uuguacuacuccagacacc

SEQ ID NO: 2970797 - RNA, 19 nt, Artificial Sequence
  Description of Artificial Sequence: Synthetic oligonucleotide
caugaagagcuguggcagg

SEQ ID NO: 2970798 - RNA, 19 nt, Artificial Sequence
  Description of Artificial Sequence: Synthetic oligonucleotide
ugacuccaaauagauggag

SEQ ID NO: 2970799 - RNA, 19 nt, Artificial Sequence
  Description of Artificial Sequence: Synthetic oligonucleotide
gaccaagaggaacuccagc

SEQ ID NO: 2970800 - RNA, 19 nt, Artificial Sequence
  Description of Artificial Sequence: Synthetic oligonucleotide
auagagugcccgauacagc

SEQ ID NO: 2970801 - RNA, 19 nt, Artificial Sequence
  Description of Artificial Sequence: Synthetic oligonucleotide
aaacuauaguucaccagaa

SEQ ID NO: 2970802 - RNA, 19 nt, Artificial Sequence
  Description of Artificial Sequence: Synthetic oligonucleotide
agugaguggugauggucuc

SEQ ID NO: 2970803 - RNA, 19 nt, Artificial Sequence
  Description of Artificial Sequence: Synthetic oligonucleotide
cucuggcugccuuauagug

SEQ ID NO: 2970804 - RNA, 19 nt, Artificial Sequence
  Description of Artificial Sequence: Synthetic oligonucleotide
ugccuuauagugugguccu

SEQ ID NO: 2970805 - RNA, 19 nt, Artificial Sequence
  Description of Artificial Sequence: Synthetic oligonucleotide
gagugcccgauacagcccc

SEQ ID NO: 2970806 - RNA, 19 nt, Artificial Sequence
  Description of Artificial Sequence: Synthetic oligonucleotide
uuggcuagauagagugccc

SEQ ID NO: 2970807 - RNA, 19 nt, Artificial Sequence
  Description of Artificial Sequence: Synthetic oligonucleotide
uggagaagguccagaguac

SEQ ID NO: 2970808 - RNA, 19 nt, Artificial Sequence
  Description of Artificial Sequence: Synthetic oligonucleotide
agaagaagucacaauaaua

SEQ ID NO: 2970809 - RNA, 19 nt, Artificial Sequence
  Description of Artificial Sequence: Synthetic oligonucleotide
gugucauucucaaauguca

SEQ ID NO: 2970810 - RNA, 19 nt, Artificial Sequence
  Description of Artificial Sequence: Synthetic oligonucleotide
aguuggcuagauagagugc

SEQ ID NO: 2970811 - RNA, 19 nt, Artificial Sequence
  Description of Artificial Sequence: Synthetic oligonucleotide
gguguguaaacuauaguuc

SEQ ID NO: 2970812 - RNA, 19 nt, Artificial Sequence
  Description of Artificial Sequence: Synthetic oligonucleotide
caccagaaaggaaaggcca

SEQ ID NO: 2970813 - RNA, 19 nt, Artificial Sequence
  Description of Artificial Sequence: Synthetic oligonucleotide
uccguugguguguaaacua

SEQ ID NO: 2970814 - RNA, 19 nt, Artificial Sequence
  Description of Artificial Sequence: Synthetic oligonucleotide
ugugguccuucucuuuaga

SEQ ID NO: 2970815 - RNA, 19 nt, Artificial Sequence
  Description of Artificial Sequence: Synthetic oligonucleotide
acugggaccaagaggaacu

SEQ ID NO: 2970816 - RNA, 19 nt, Artificial Sequence
  Description of Artificial Sequence: Synthetic oligonucleotide
agccggaaaugugucauuc

SEQ ID NO: 2970817 - RNA, 19 nt, Artificial Sequence
  Description of Artificial Sequence: Synthetic oligonucleotide
acaaguagaagaagucaca

SEQ ID NO: 2970818 - RNA, 19 nt, Artificial Sequence
  Description of Artificial Sequence: Synthetic oligonucleotide
uuauagugugguccuucuc

SEQ ID NO: 2970819 - RNA, 19 nt, Artificial Sequence
  Description of Artificial Sequence: Synthetic oligonucleotide
uggucacauacaaguagaa

SEQ ID NO: 2970820 - RNA, 19 nt, Artificial Sequence
  Description of Artificial Sequence: Synthetic oligonucleotide
acaaguagugaguggugau

SEQ ID NO: 2970821 - RNA, 19 nt, Artificial Sequence
  Description of Artificial Sequence: Synthetic oligonucleotide
uguggcaggauggccacug

SEQ ID NO: 2970822 - RNA, 19 nt, Artificial Sequence
  Description of Artificial Sequence: Synthetic oligonucleotide
cacauacaaguagaagaag

SEQ ID NO: 2970823 - RNA, 19 nt, Artificial Sequence
  Description of Artificial Sequence: Synthetic oligonucleotide
caaaucacugggaccaaga

SEQ ID NO: 2970824 - RNA, 19 nt, Artificial Sequence
  Description of Artificial Sequence: Synthetic oligonucleotide
guccagaguaccuccguug

SEQ ID NO: 2970825 - RNA, 19 nt, Artificial Sequence
  Description of Artificial Sequence: Synthetic oligonucleotide
cuuaacuucuuuccuuuaa

SEQ ID NO: 2970826 - RNA, 19 nt, Artificial Sequence
  Description of Artificial Sequence: Synthetic oligonucleotide
ggaaaugugucauucucaa

SEQ ID NO: 2970827 - RNA, 19 nt, Artificial Sequence
  Description of Artificial Sequence: Synthetic oligonucleotide
gguuuguacuacuccagac

SEQ ID NO: 2970828 - RNA, 19 nt, Artificial Sequence
  Description of Artificial Sequence: Synthetic oligonucleotide
caaguagugaguggugaug

SEQ ID NO: 2970829 - RNA, 19 nt, Artificial Sequence
  Description of Artificial Sequence: Synthetic oligonucleotide
cuuuagacuggcauuggua

SEQ ID NO: 2970830 - RNA, 19 nt, Artificial Sequence
  Description of Artificial Sequence: Synthetic oligonucleotide
gacuuuggucacauacaag

SEQ ID NO: 2970831 - RNA, 19 nt, Artificial Sequence
  Description of Artificial Sequence: Synthetic oligonucleotide
gccagauccaguuggcuag

SEQ ID NO: 2970832 - RNA, 19 nt, Artificial Sequence
  Description of Artificial Sequence: Synthetic oligonucleotide
cuccaaauagauggagaag

SEQ ID NO: 2970833 - RNA, 19 nt, Artificial Sequence
  Description of Artificial Sequence: Synthetic oligonucleotide
auggccacugacuccaaau

SEQ ID NO: 2970834 - RNA, 19 nt, Artificial Sequence
  Description of Artificial Sequence: Synthetic oligonucleotide
gaacaaguagugaguggug

SEQ ID NO: 2970835 - RNA, 19 nt, Artificial Sequence
  Description of Artificial Sequence: Synthetic oligonucleotide
agauagagugcccgauaca

SEQ ID NO: 2970836 - RNA, 19 nt, Artificial Sequence
  Description of Artificial Sequence: Synthetic oligonucleotide
gacuccaaauagauggaga

SEQ ID NO: 2970837 - RNA, 19 nt, Artificial Sequence
  Description of Artificial Sequence: Synthetic oligonucleotide
aagguccagaguaccuccg

SEQ ID NO: 2970838 - RNA, 19 nt, Artificial Sequence
  Description of Artificial Sequence: Synthetic oligonucleotide
ucucugucugguaccgcca

SEQ ID NO: 2970839 - RNA, 19 nt, Artificial Sequence
  Description of Artificial Sequence: Synthetic oligonucleotide
augguuuguacuacuccag

SEQ ID NO: 2970840 - RNA, 19 nt, Artificial Sequence
  Description of Artificial Sequence: Synthetic oligonucleotide
acuacuccagacaccacug

SEQ ID NO: 2970841 - RNA, 19 nt, Artificial Sequence
  Description of Artificial Sequence: Synthetic oligonucleotide
cagaguaccuccguuggug

SEQ ID NO: 2970842 - RNA, 19 nt, Artificial Sequence
  Description of Artificial Sequence: Synthetic oligonucleotide
guucaccagaaaggaaagg

SEQ ID NO: 2970843 - RNA, 19 nt, Artificial Sequence
  Description of Artificial Sequence: Synthetic oligonucleotide
augguuugcucuggcugcc

SEQ ID NO: 2970844 - RNA, 19 nt, Artificial Sequence
  Description of Artificial Sequence: Synthetic oligonucleotide
aaaggccaaaucacuggga

SEQ ID NO: 2970845 - RNA, 19 nt, Artificial Sequence
  Description of Artificial Sequence: Synthetic oligonucleotide
aacuccagccggaaaugug

SEQ ID NO: 2970846 - RNA, 19 nt, Artificial Sequence
  Description of Artificial Sequence: Synthetic oligonucleotide
agaaauucucugucuggua

SEQ ID NO: 2970847 - RNA, 19 nt, Artificial Sequence
  Description of Artificial Sequence: Synthetic oligonucleotide
gguaggcuuaacuucuuuc

SEQ ID NO: 2970848 - RNA, 19 nt, Artificial Sequence
  Description of Artificial Sequence: Synthetic oligonucleotide
gucacaauaauagaugguu

SEQ ID NO: 2970849 - RNA, 19 nt, Artificial Sequence
  Description of Artificial Sequence: Synthetic oligonucleotide
aggacuuuggucacauaca

SEQ ID NO: 2970850 - RNA, 19 nt, Artificial Sequence
  Description of Artificial Sequence: Synthetic oligonucleotide
agucacaauaauagauggu

SEQ ID NO: 2970851 - RNA, 19 nt, Artificial Sequence
  Description of Artificial Sequence: Synthetic oligonucleotide
ccaagaggaacuccagccg

SEQ ID NO: 2970852 - RNA, 19 nt, Artificial Sequence
  Description of Artificial Sequence: Synthetic oligonucleotide
aguagugaguggugauggu

SEQ ID NO: 2970853 - RNA, 19 nt, Artificial Sequence
  Description of Artificial Sequence: Synthetic oligonucleotide
ugcccgauacagccccagg

SEQ ID NO: 2970854 - RNA, 19 nt, Artificial Sequence
  Description of Artificial Sequence: Synthetic oligonucleotide
ggucacauacaaguagaag

SEQ ID NO: 2970855 - RNA, 19 nt, Artificial Sequence
  Description of Artificial Sequence: Synthetic oligonucleotide
gaaaugugucauucucaaa

SEQ ID NO: 2970856 - RNA, 19 nt, Artificial Sequence
  Description of Artificial Sequence: Synthetic oligonucleotide
aggcuuaacuucuuuccuu

SEQ ID NO: 2970857 - RNA, 19 nt, Artificial Sequence
  Description of Artificial Sequence: Synthetic oligonucleotide
gugguccuucucuuuagac

SEQ ID NO: 2970858 - RNA, 19 nt, Artificial Sequence
  Description of Artificial Sequence: Synthetic oligonucleotide
acuccagccggaaaugugu

SEQ ID NO: 2970859 - RNA, 19 nt, Artificial Sequence
  Description of Artificial Sequence: Synthetic oligonucleotide
agccccaggaagaacaagu

SEQ ID NO: 2970860 - RNA, 19 nt, Artificial Sequence
  Description of Artificial Sequence: Synthetic oligonucleotide
caaguagaagaagucacaa

SEQ ID NO: 2970861 - RNA, 19 nt, Artificial Sequence
  Description of Artificial Sequence: Synthetic oligonucleotide
aguaccuccguuggugugu

SEQ ID NO: 2970862 - RNA, 19 nt, Artificial Sequence
  Description of Artificial Sequence: Synthetic oligonucleotide
guagugaguggugaugguc

SEQ ID NO: 2970863 - RNA, 19 nt, Artificial Sequence
  Description of Artificial Sequence: Synthetic oligonucleotide
gugugguccuucucuuuag

SEQ ID NO: 2970864 - RNA, 19 nt, Artificial Sequence
  Description of Artificial Sequence: Synthetic oligonucleotide
gucauucucaaaugucaaa

SEQ ID NO: 2970865 - RNA, 19 nt, Artificial Sequence
  Description of Artificial Sequence: Synthetic oligonucleotide
ggccaaaucacugggacca

SEQ ID NO: 2970866 - RNA, 19 nt, Artificial Sequence
  Description of Artificial Sequence: Synthetic oligonucleotide
uccagccggaaauguguca

SEQ ID NO: 2970867 - RNA, 19 nt, Artificial Sequence
  Description of Artificial Sequence: Synthetic oligonucleotide
ucugucugguaccgccaga

SEQ ID NO: 2970868 - RNA, 19 nt, Artificial Sequence
  Description of Artificial Sequence: Synthetic oligonucleotide
uggcaggauggccacugac

SEQ ID NO: 2970869 - RNA, 19 nt, Artificial Sequence
  Description of Artificial Sequence: Synthetic oligonucleotide
auucucugucugguaccgc

SEQ ID NO: 2970870 - RNA, 19 nt, Artificial Sequence
  Description of Artificial Sequence: Synthetic oligonucleotide
gaguaccuccguuggugug

SEQ ID NO: 2970871 - RNA, 19 nt, Artificial Sequence
  Description of Artificial Sequence: Synthetic oligonucleotide
cucuuuagacuggcauugg

SEQ ID NO: 2970872 - RNA, 19 nt, Artificial Sequence
  Description of Artificial Sequence: Synthetic oligonucleotide
gauacagccccaggaagaa

SEQ ID NO: 2970873 - RNA, 19 nt, Artificial Sequence
  Description of Artificial Sequence: Synthetic oligonucleotide
cugagaucugauucauaga

SEQ ID NO: 2970874 - RNA, 19 nt, Artificial Sequence
  Description of Artificial Sequence: Synthetic oligonucleotide
ggacuuuggucacauacaa

SEQ ID NO: 2970875 - RNA, 19 nt, Artificial Sequence
  Description of Artificial Sequence: Synthetic oligonucleotide
acuccagacaccacugaga

SEQ ID NO: 2970876 - RNA, 19 nt, Artificial Sequence
  Description of Artificial Sequence: Synthetic oligonucleotide
cucugucugguaccgccag

SEQ ID NO: 2970877 - RNA, 19 nt, Artificial Sequence
  Description of Artificial Sequence: Synthetic oligonucleotide
gagaucugauucauagaaa

SEQ ID NO: 2970878 - RNA, 19 nt, Artificial Sequence
  Description of Artificial Sequence: Synthetic oligonucleotide
agcuguggcaggauggcca

SEQ ID NO: 2970879 - RNA, 19 nt, Artificial Sequence
  Description of Artificial Sequence: Synthetic oligonucleotide
ccagacaccacugagaucu

SEQ ID NO: 2970880 - RNA, 19 nt, Artificial Sequence
  Description of Artificial Sequence: Synthetic oligonucleotide
caauaauagaugguuugua

SEQ ID NO: 2970881 - RNA, 19 nt, Artificial Sequence
  Description of Artificial Sequence: Synthetic oligonucleotide
auacagccccaggaagaac

SEQ ID NO: 2970882 - RNA, 19 nt, Artificial Sequence
  Description of Artificial Sequence: Synthetic oligonucleotide
cuucucuuuagacuggcau

SEQ ID NO: 2970883 - RNA, 19 nt, Artificial Sequence
  Description of Artificial Sequence: Synthetic oligonucleotide
ggagaagguccagaguacc

SEQ ID NO: 2970884 - RNA, 19 nt, Artificial Sequence
  Description of Artificial Sequence: Synthetic oligonucleotide
ugguaggcuuaacuucuuu

SEQ ID NO: 2970885 - RNA, 19 nt, Artificial Sequence
  Description of Artificial Sequence: Synthetic oligonucleotide
ugggaccaagaggaacucc

SEQ ID NO: 2970886 - RNA, 19 nt, Artificial Sequence
  Description of Artificial Sequence: Synthetic oligonucleotide
accgccagauccaguuggc

SEQ ID NO: 2970887 - RNA, 19 nt, Artificial Sequence
  Description of Artificial Sequence: Synthetic oligonucleotide
ugucugguaccgccagauc

SEQ ID NO: 2970888 - RNA, 19 nt, Artificial Sequence
  Description of Artificial Sequence: Synthetic oligonucleotide
acaccacugagaucugauu

SEQ ID NO: 2970889 - RNA, 19 nt, Artificial Sequence
  Description of Artificial Sequence: Synthetic oligonucleotide
uggcugccuuauagugugg

SEQ ID NO: 2970890 - RNA, 19 nt, Artificial Sequence
  Description of Artificial Sequence: Synthetic oligonucleotide
auaguucaccagaaaggaa

SEQ ID NO: 2970891 - RNA, 19 nt, Artificial Sequence
  Description of Artificial Sequence: Synthetic oligonucleotide
cuuauagugugguccuucu

SEQ ID NO: 2970892 - RNA, 19 nt, Artificial Sequence
  Description of Artificial Sequence: Synthetic oligonucleotide
cacugggaccaagaggaac

SEQ ID NO: 2970893 - RNA, 19 nt, Artificial Sequence
  Description of Artificial Sequence: Synthetic oligonucleotide
agauccaguuggcuagaua

SEQ ID NO: 2970894 - RNA, 19 nt, Artificial Sequence
  Description of Artificial Sequence: Synthetic oligonucleotide
agguccagaguaccuccgu

SEQ ID NO: 2970895 - RNA, 19 nt, Artificial Sequence
  Description of Artificial Sequence: Synthetic oligonucleotide
guccuucucuuuagacugg

SEQ ID NO: 2970896 - RNA, 19 nt, Artificial Sequence
  Description of Artificial Sequence: Synthetic oligonucleotide
cuagauagagugcccgaua

SEQ ID NO: 2970897 - RNA, 19 nt, Artificial Sequence
  Description of Artificial Sequence: Synthetic oligonucleotide
ccggaaaugugucauucuc

SEQ ID NO: 2970898 - RNA, 19 nt, Artificial Sequence
  Description of Artificial Sequence: Synthetic oligonucleotide
cuccagccggaaauguguc

SEQ ID NO: 2970899 - RNA, 19 nt, Artificial Sequence
  Description of Artificial Sequence: Synthetic oligonucleotide
gaguggugauggucucagc

SEQ ID NO: 2970900 - RNA, 19 nt, Artificial Sequence
  Description of Artificial Sequence: Synthetic oligonucleotide
uugguaggcuuaacuucuu

SEQ ID NO: 2970901 - RNA, 19 nt, Artificial Sequence
  Description of Artificial Sequence: Synthetic oligonucleotide
guaccgccagauccaguug

SEQ ID NO: 2970902 - RNA, 19 nt, Artificial Sequence
  Description of Artificial Sequence: Synthetic oligonucleotide
gggaccaagaggaacucca

SEQ ID NO: 2970903 - RNA, 19 nt, Artificial Sequence
  Description of Artificial Sequence: Synthetic oligonucleotide
acuggcauugguaggcuua

SEQ ID NO: 2970904 - RNA, 19 nt, Artificial Sequence
  Description of Artificial Sequence: Synthetic oligonucleotide
ggcauugguaggcuuaacu

SEQ ID NO: 2970905 - RNA, 19 nt, Artificial Sequence
  Description of Artificial Sequence: Synthetic oligonucleotide
ucacugggaccaagaggaa

SEQ ID NO: 2970906 - RNA, 19 nt, Artificial Sequence
  Description of Artificial Sequence: Synthetic oligonucleotide
ggaacuccagccggaaaug

SEQ ID NO: 2970907 - RNA, 19 nt, Artificial Sequence
  Description of Artificial Sequence: Synthetic oligonucleotide
uccagacaccacugagauc

SEQ ID NO: 2970908 - RNA, 19 nt, Artificial Sequence
  Description of Artificial Sequence: Synthetic oligonucleotide
caggaagaacaaguaguga

SEQ ID NO: 2970909 - RNA, 19 nt, Artificial Sequence
  Description of Artificial Sequence: Synthetic oligonucleotide
ccgauacagccccaggaag

SEQ ID NO: 2970910 - RNA, 19 nt, Artificial Sequence
  Description of Artificial Sequence: Synthetic oligonucleotide
ggaagaacaaguagugagu

SEQ ID NO: 2970911 - RNA, 19 nt, Artificial Sequence
  Description of Artificial Sequence: Synthetic oligonucleotide
uagugugguccuucucuuu

SEQ ID NO: 2970912 - RNA, 19 nt, Artificial Sequence
  Description of Artificial Sequence: Synthetic oligonucleotide
ugaagagcuguggcaggau

SEQ ID NO: 2970913 - RNA, 19 nt, Artificial Sequence
  Description of Artificial Sequence: Synthetic oligonucleotide
cuccagacaccacugagau

SEQ ID NO: 2970914 - RNA, 19 nt, Artificial Sequence
  Description of Artificial Sequence: Synthetic oligonucleotide
accuccguugguguguaaa

SEQ ID NO: 2970915 - RNA, 19 nt, Artificial Sequence
  Description of Artificial Sequence: Synthetic oligonucleotide
gaucugauucauagaaauu

SEQ ID NO: 2970916 - RNA, 19 nt, Artificial Sequence
  Description of Artificial Sequence: Synthetic oligonucleotide
ccuccguugguguguaaac

SEQ ID NO: 2970917 - RNA, 19 nt, Artificial Sequence
  Description of Artificial Sequence: Synthetic oligonucleotide
ggaccaagaggaacuccag

SEQ ID NO: 2970918 - RNA, 19 nt, Artificial Sequence
  Description of Artificial Sequence: Synthetic oligonucleotide
uaaggacuuuggucacaua

SEQ ID NO: 2970919 - RNA, 19 nt, Artificial Sequence
  Description of Artificial Sequence: Synthetic oligonucleotide
cugguaccgccagauccag

SEQ ID NO: 2970920 - RNA, 19 nt, Artificial Sequence
  Description of Artificial Sequence: Synthetic oligonucleotide
cuacuccagacaccacuga

SEQ ID NO: 2970921 - RNA, 19 nt, Artificial Sequence
  Description of Artificial Sequence: Synthetic oligonucleotide
agacaccacugagaucuga

SEQ ID NO: 2970922 - RNA, 19 nt, Artificial Sequence
  Description of Artificial Sequence: Synthetic oligonucleotide
gagaagguccagaguaccu

SEQ ID NO: 2970923 - RNA, 19 nt, Artificial Sequence
  Description of Artificial Sequence: Synthetic oligonucleotide
ugguaccgccagauccagu

SEQ ID NO: 2970924 - RNA, 19 nt, Artificial Sequence
  Description of Artificial Sequence: Synthetic oligonucleotide
gcauugguaggcuuaacuu

SEQ ID NO: 2970925 - RNA, 19 nt, Artificial Sequence
  Description of Artificial Sequence: Synthetic oligonucleotide
agacuggcauugguaggcu

SEQ ID NO: 2970926 - RNA, 19 nt, Artificial Sequence
  Description of Artificial Sequence: Synthetic oligonucleotide
guuugcucuggcugccuua

SEQ ID NO: 2970927 - RNA, 19 nt, Artificial Sequence
  Description of Artificial Sequence: Synthetic oligonucleotide
gguaccgccagauccaguu

SEQ ID NO: 2970928 - RNA, 19 nt, Artificial Sequence
  Description of Artificial Sequence: Synthetic oligonucleotide
ggcuagauagagugcccga

SEQ ID NO: 2970929 - RNA, 19 nt, Artificial Sequence
  Description of Artificial Sequence: Synthetic oligonucleotide
gacaccacugagaucugau

SEQ ID NO: 2970930 - RNA, 19 nt, Artificial Sequence
  Description of Artificial Sequence: Synthetic oligonucleotide
ccuuauagugugguccuuc

SEQ ID NO: 2970931 - RNA, 19 nt, Artificial Sequence
  Description of Artificial Sequence: Synthetic oligonucleotide
cugggaccaagaggaacuc

SEQ ID NO: 2970932 - RNA, 19 nt, Artificial Sequence
  Description of Artificial Sequence: Synthetic oligonucleotide
gcccgauacagccccagga

SEQ ID NO: 2970933 - RNA, 19 nt, Artificial Sequence
  Description of Artificial Sequence: Synthetic oligonucleotide
gcugccuuauagugugguc

SEQ ID NO: 2970934 - RNA, 19 nt, Artificial Sequence
  Description of Artificial Sequence: Synthetic oligonucleotide
gaacuccagccggaaaugu

SEQ ID NO: 2970935 - RNA, 19 nt, Artificial Sequence
  Description of Artificial Sequence: Synthetic oligonucleotide
cagacaccacugagaucug

SEQ ID NO: 2970936 - RNA, 19 nt, Artificial Sequence
  Description of Artificial Sequence: Synthetic oligonucleotide
gugaguggugauggucuca

SEQ ID NO: 2970937 - RNA, 19 nt, Artificial Sequence
  Description of Artificial Sequence: Synthetic oligonucleotide
ggcuuaacuucuuuccuuu

SEQ ID NO: 2970938 - RNA, 19 nt, Artificial Sequence
  Description of Artificial Sequence: Synthetic oligonucleotide
ugguuugcucuggcugccu

SEQ ID NO: 2970939 - RNA, 19 nt, Artificial Sequence
  Description of Artificial Sequence: Synthetic oligonucleotide
ccaaaucacugggaccaag

SEQ ID NO: 2970940 - RNA, 19 nt, Artificial Sequence
  Description of Artificial Sequence: Synthetic oligonucleotide
cggaaaugugucauucuca

SEQ ID NO: 2970941 - RNA, 19 nt, Artificial Sequence
  Description of Artificial Sequence: Synthetic oligonucleotide
cgauacagccccaggaaga

SEQ ID NO: 2970942 - RNA, 19 nt, Artificial Sequence
  Description of Artificial Sequence: Synthetic oligonucleotide
uggcauugguaggcuuaac

SEQ ID NO: 2970943 - RNA, 19 nt, Artificial Sequence
  Description of Artificial Sequence: Synthetic oligonucleotide
cagccccaggaagaacaag

SEQ ID NO: 2970944 - RNA, 19 nt, Artificial Sequence
  Description of Artificial Sequence: Synthetic oligonucleotide
ccaaauagauggagaaggu

SEQ ID NO: 2970945 - RNA, 19 nt, Artificial Sequence
  Description of Artificial Sequence: Synthetic oligonucleotide
gugcccgauacagccccag

SEQ ID NO: 2970946 - RNA, 19 nt, Artificial Sequence
  Description of Artificial Sequence: Synthetic oligonucleotide
cuggcauugguaggcuuaa

SEQ ID NO: 2970947 - RNA, 19 nt, Artificial Sequence
  Description of Artificial Sequence: Synthetic oligonucleotide
ucuuuccuuuaaggacuuu

SEQ ID NO: 2970948 - RNA, 19 nt, Artificial Sequence
  Description of Artificial Sequence: Synthetic oligonucleotide
guacuacuccagacaccac

SEQ ID NO: 2970949 - RNA, 19 nt, Artificial Sequence
  Description of Artificial Sequence: Synthetic oligonucleotide
uugcucuggcugccuuaua

SEQ ID NO: 2970950 - RNA, 19 nt, Artificial Sequence
  Description of Artificial Sequence: Synthetic oligonucleotide
cacugagaucugauucaua

SEQ ID NO: 2970951 - RNA, 19 nt, Artificial Sequence
  Description of Artificial Sequence: Synthetic oligonucleotide
gcuuaacuucuuuccuuua

SEQ ID NO: 2970952 - RNA, 19 nt, Artificial Sequence
  Description of Artificial Sequence: Synthetic oligonucleotide
cuccguugguguguaaacu

SEQ ID NO: 2970953 - RNA, 19 nt, Artificial Sequence
  Description of Artificial Sequence: Synthetic oligonucleotide
guggcaggauggccacuga

SEQ ID NO: 2970954 - RNA, 19 nt, Artificial Sequence
  Description of Artificial Sequence: Synthetic oligonucleotide
cccgauacagccccaggaa

SEQ ID NO: 2970955 - RNA, 19 nt, Artificial Sequence
  Description of Artificial Sequence: Synthetic oligonucleotide
cugucugguaccgccagau

SEQ ID NO: 2970956 - RNA, 19 nt, Artificial Sequence
  Description of Artificial Sequence: Synthetic oligonucleotide
gacuggcauugguaggcuu

SEQ ID NO: 2970957 - RNA, 19 nt, Artificial Sequence
  Description of Artificial Sequence: Synthetic oligonucleotide
gcucuggcugccuuauagu

SEQ ID NO: 2970958 - RNA, 19 nt, Artificial Sequence
  Description of Artificial Sequence: Synthetic oligonucleotide
gcuagauagagugcccgau

SEQ ID NO: 2970959 - RNA, 19 nt, Artificial Sequence
  Description of Artificial Sequence: Synthetic oligonucleotide
ccuucucuuuagacuggca

SEQ ID NO: 2970960 - RNA, 19 nt, Artificial Sequence
  Description of Artificial Sequence: Synthetic oligonucleotide
gccggaaaugugucauucu

SEQ ID NO: 2970961 - RNA, 19 nt, Artificial Sequence
  Description of Artificial Sequence: Synthetic oligonucleotide
agugcccgauacagcccca

SEQ ID NO: 2970962 - RNA, 19 nt, Artificial Sequence
  Description of Artificial Sequence: Synthetic oligonucleotide
uaccuccguugguguguaa

SEQ ID NO: 2970963 - RNA, 19 nt, Artificial Sequence
  Description of Artificial Sequence: Synthetic oligonucleotide
guaccuccguuggugugua

SEQ ID NO: 2970964 - RNA, 19 nt, Artificial Sequence
  Description of Artificial Sequence: Synthetic oligonucleotide
ccaguuggcuagauagagu

SEQ ID NO: 2970965 - RNA, 19 nt, Artificial Sequence
  Description of Artificial Sequence: Synthetic oligonucleotide
gguccagaguaccuccguu

SEQ ID NO: 2970966 - RNA, 19 nt, Artificial Sequence
  Description of Artificial Sequence: Synthetic oligonucleotide
cguugguguguaaacuaua

SEQ ID NO: 2970967 - RNA, 19 nt, Artificial Sequence
  Description of Artificial Sequence: Synthetic oligonucleotide
ggcugccuuauaguguggu

SEQ ID NO: 2970968 - RNA, 19 nt, Artificial Sequence
  Description of Artificial Sequence: Synthetic oligonucleotide
gccccaggaagaacaagua

SEQ ID NO: 2970969 - RNA, 19 nt, Artificial Sequence
  Description of Artificial Sequence: Synthetic oligonucleotide
ccguugguguguaaacuau

SEQ ID NO: 2970970 - RNA, 19 nt, Artificial Sequence
  Description of Artificial Sequence: Synthetic oligonucleotide
cgccagauccaguuggcua

SEQ ID NO: 2970971 - RNA, 19 nt, Artificial Sequence
  Description of Artificial Sequence: Synthetic oligonucleotide
gguuugcucuggcugccuu

SEQ ID NO: 2970972 - RNA, 19 nt, Artificial Sequence
  Description of Artificial Sequence: Synthetic oligonucleotide
ccagccggaaaugugucau

SEQ ID NO: 2970973 - RNA, 19 nt, Artificial Sequence
  Description of Artificial Sequence: Synthetic oligonucleotide
cagccggaaaugugucauu

SEQ ID NO: 2970974 - RNA, 19 nt, Artificial Sequence
  Description of Artificial Sequence: Synthetic oligonucleotide
gccaaaucacugggaccaa

SEQ ID NO: 2970975 - RNA, 19 nt, Artificial Sequence
  Description of Artificial Sequence: Synthetic oligonucleotide
ccagaguaccuccguuggu

SEQ ID NO: 2970976 - RNA, 19 nt, Artificial Sequence
  Description of Artificial Sequence: Synthetic oligonucleotide
cagauccaguuggcuagau

SEQ ID NO: 2970977 - RNA, 19 nt, Artificial Sequence
  Description of Artificial Sequence: Synthetic oligonucleotide
ccacugagaucugauucau

SEQ ID NO: 2970978 - RNA, 19 nt, Artificial Sequence
  Description of Artificial Sequence: Synthetic oligonucleotide
cuguggcaggauggccacu

SEQ ID NO: 2970979 - RNA, 19 nt, Artificial Sequence
  Description of Artificial Sequence: Synthetic oligonucleotide
gccuuauagugugguccuu

SEQ ID NO: 2970980 - RNA, 19 nt, Artificial Sequence
  Description of Artificial Sequence: Synthetic oligonucleotide
ccgccagauccaguuggcu

SEQ ID NO: 2970981 - RNA, 19 nt, Artificial Sequence
  Description of Artificial Sequence: Synthetic oligonucleotide
aauuaugggagguggaggc

SEQ ID NO: 2970982 - RNA, 19 nt, Artificial Sequence
  Description of Artificial Sequence: Synthetic oligonucleotide
auagauuuuguguugaggg

SEQ ID NO: 2970983 - RNA, 19 nt, Artificial Sequence
  Description of Artificial Sequence: Synthetic oligonucleotide
gaaagaggcaucucgaugg

SEQ ID NO: 2970984 - RNA, 19 nt, Artificial Sequence
  Description of Artificial Sequence: Synthetic oligonucleotide
aacuccucgagacaagccc

SEQ ID NO: 2970985 - RNA, 19 nt, Artificial Sequence
  Description of Artificial Sequence: Synthetic oligonucleotide
aaagaauagauuuuguguu

SEQ ID NO: 2970986 - RNA, 19 nt, Artificial Sequence
  Description of Artificial Sequence: Synthetic oligonucleotide
gagaguggcauucagcugg

SEQ ID NO: 2970987 - RNA, 19 nt, Artificial Sequence
  Description of Artificial Sequence: Synthetic oligonucleotide
aagagaguggcauucagcu

SEQ ID NO: 2970988 - RNA, 19 nt, Artificial Sequence
  Description of Artificial Sequence: Synthetic oligonucleotide
aggcaggccacauugaugc

SEQ ID NO: 2970989 - RNA, 19 nt, Artificial Sequence
  Description of Artificial Sequence: Synthetic oligonucleotide
aauagauuuuguguugagg

SEQ ID NO: 2970990 - RNA, 19 nt, Artificial Sequence
  Description of Artificial Sequence: Synthetic oligonucleotide
ucauccaggacaaagaaua

SEQ ID NO: 2970991 - RNA, 19 nt, Artificial Sequence
  Description of Artificial Sequence: Synthetic oligonucleotide
aagaauagauuuuguguug

SEQ ID NO: 2970992 - RNA, 19 nt, Artificial Sequence
  Description of Artificial Sequence: Synthetic oligonucleotide
ugucauucagucucgagug

SEQ ID NO: 2970993 - RNA, 19 nt, Artificial Sequence
  Description of Artificial Sequence: Synthetic oligonucleotide
acaucuccugcccacaccc

SEQ ID NO: 2970994 - RNA, 19 nt, Artificial Sequence
  Description of Artificial Sequence: Synthetic oligonucleotide
aagcccuuuagucaccuag

SEQ ID NO: 2970995 - RNA, 19 nt, Artificial Sequence
  Description of Artificial Sequence: Synthetic oligonucleotide
ucagucucgagugugacag

SEQ ID NO: 2970996 - RNA, 19 nt, Artificial Sequence
  Description of Artificial Sequence: Synthetic oligonucleotide
ucaccuagcaaccuggagu

SEQ ID NO: 2970997 - RNA, 19 nt, Artificial Sequence
  Description of Artificial Sequence: Synthetic oligonucleotide
ugaggguuuguuuccaggg

SEQ ID NO: 2970998 - RNA, 19 nt, Artificial Sequence
  Description of Artificial Sequence: Synthetic oligonucleotide
agacaagcccuuuagucac

SEQ ID NO: 2970999 - RNA, 19 nt, Artificial Sequence
  Description of Artificial Sequence: Synthetic oligonucleotide
uguguugaggguuuguuuc

SEQ ID NO: 2971000 - RNA, 19 nt, Artificial Sequence
  Description of Artificial Sequence: Synthetic oligonucleotide
uggagaguacuccuggaag

SEQ ID NO: 2971001 - RNA, 19 nt, Artificial Sequence
  Description of Artificial Sequence: Synthetic oligonucleotide
accugcauggugcauggcc

SEQ ID NO: 2971002 - RNA, 19 nt, Artificial Sequence
  Description of Artificial Sequence: Synthetic oligonucleotide
gacaggauuggguuggcag

SEQ ID NO: 2971003 - RNA, 19 nt, Artificial Sequence
  Description of Artificial Sequence: Synthetic oligonucleotide
auagaucugcagcagagcu

SEQ ID NO: 2971004 - RNA, 19 nt, Artificial Sequence
  Description of Artificial Sequence: Synthetic oligonucleotide
uacuccuggaagcaggcag

SEQ ID NO: 2971005 - RNA, 19 nt, Artificial Sequence
  Description of Artificial Sequence: Synthetic oligonucleotide
ugugacaggauuggguugg

SEQ ID NO: 2971006 - RNA, 19 nt, Artificial Sequence
  Description of Artificial Sequence: Synthetic oligonucleotide
augucauucagucucgagu

SEQ ID NO: 2971007 - RNA, 19 nt, Artificial Sequence
  Description of Artificial Sequence: Synthetic oligonucleotide
uagucaccuagcaaccugg

SEQ ID NO: 2971008 - RNA, 19 nt, Artificial Sequence
  Description of Artificial Sequence: Synthetic oligonucleotide
aaagaggcaucucgauggg

SEQ ID NO: 2971009 - RNA, 19 nt, Artificial Sequence
  Description of Artificial Sequence: Synthetic oligonucleotide
cuuuagucaccuagcaacc

SEQ ID NO: 2971010 - RNA, 19 nt, Artificial Sequence
  Description of Artificial Sequence: Synthetic oligonucleotide
agagcugaagggaagagag

SEQ ID NO: 2971011 - RNA, 19 nt, Artificial Sequence
  Description of Artificial Sequence: Synthetic oligonucleotide
auuggguuggcagugcugg

SEQ ID NO: 2971012 - RNA, 19 nt, Artificial Sequence
  Description of Artificial Sequence: Synthetic oligonucleotide
uuagucaccuagcaaccug

SEQ ID NO: 2971013 - RNA, 19 nt, Artificial Sequence
  Description of Artificial Sequence: Synthetic oligonucleotide
cuuuucauccaggacaaag

SEQ ID NO: 2971014 - RNA, 19 nt, Artificial Sequence
  Description of Artificial Sequence: Synthetic oligonucleotide
agaaagaggcaucucgaug

SEQ ID NO: 2971015 - RNA, 19 nt, Artificial Sequence
  Description of Artificial Sequence: Synthetic oligonucleotide
gagacaagcccuuuaguca

SEQ ID NO: 2971016 - RNA, 19 nt, Artificial Sequence
  Description of Artificial Sequence: Synthetic oligonucleotide
agaggcaucucgauggggc

SEQ ID NO: 2971017 - RNA, 19 nt, Artificial Sequence
  Description of Artificial Sequence: Synthetic oligonucleotide
uggaggcaggcauagaucu

SEQ ID NO: 2971018 - RNA, 19 nt, Artificial Sequence
  Description of Artificial Sequence: Synthetic oligonucleotide
uugaggguuuguuuccagg

SEQ ID NO: 2971019 - RNA, 19 nt, Artificial Sequence
  Description of Artificial Sequence: Synthetic oligonucleotide
gauggggcaaggcaacucc

SEQ ID NO: 2971020 - RNA, 19 nt, Artificial Sequence
  Description of Artificial Sequence: Synthetic oligonucleotide
ugguggagaguacuccugg

SEQ ID NO: 2971021 - RNA, 19 nt, Artificial Sequence
  Description of Artificial Sequence: Synthetic oligonucleotide
ccuuuagucaccuagcaac

SEQ ID NO: 2971022 - RNA, 19 nt, Artificial Sequence
  Description of Artificial Sequence: Synthetic oligonucleotide
caaggcaacuccucgagac

SEQ ID NO: 2971023 - RNA, 19 nt, Artificial Sequence
  Description of Artificial Sequence: Synthetic oligonucleotide
gaauagauuuuguguugag

SEQ ID NO: 2971024 - RNA, 19 nt, Artificial Sequence
  Description of Artificial Sequence: Synthetic oligonucleotide
ucugucacuaugucauuca

SEQ ID NO: 2971025 - RNA, 19 nt, Artificial Sequence
  Description of Artificial Sequence: Synthetic oligonucleotide
cauucagcuggacaucucc

SEQ ID NO: 2971026 - RNA, 19 nt, Artificial Sequence
  Description of Artificial Sequence: Synthetic oligonucleotide
aagaaagaggcaucucgau

SEQ ID NO: 2971027 - RNA, 19 nt, Artificial Sequence
  Description of Artificial Sequence: Synthetic oligonucleotide
uaugucauucagucucgag

SEQ ID NO: 2971028 - RNA, 19 nt, Artificial Sequence
  Description of Artificial Sequence: Synthetic oligonucleotide
uagauuuuguguugagggu

SEQ ID NO: 2971029 - RNA, 19 nt, Artificial Sequence
  Description of Artificial Sequence: Synthetic oligonucleotide
agcugaagggaagagagug

SEQ ID NO: 2971030 - RNA, 19 nt, Artificial Sequence
  Description of Artificial Sequence: Synthetic oligonucleotide
agugugacaggauuggguu

SEQ ID NO: 2971031 - RNA, 19 nt, Artificial Sequence
  Description of Artificial Sequence: Synthetic oligonucleotide
ggcagugccaccugcaugg

SEQ ID NO: 2971032 - RNA, 19 nt, Artificial Sequence
  Description of Artificial Sequence: Synthetic oligonucleotide
ccaagaaagaggcaucucg

SEQ ID NO: 2971033 - RNA, 19 nt, Artificial Sequence
  Description of Artificial Sequence: Synthetic oligonucleotide
ucgagugugacaggauugg

SEQ ID NO: 2971034 - RNA, 19 nt, Artificial Sequence
  Description of Artificial Sequence: Synthetic oligonucleotide
uugcaaggcgaguuugggg

SEQ ID NO: 2971035 - RNA, 19 nt, Artificial Sequence
  Description of Artificial Sequence: Synthetic oligonucleotide
agggccugcaauuauggga

SEQ ID NO: 2971036 - RNA, 19 nt, Artificial Sequence
  Description of Artificial Sequence: Synthetic oligonucleotide
auugaugcuggcccuucuc

SEQ ID NO: 2971037 - RNA, 19 nt, Artificial Sequence
  Description of Artificial Sequence: Synthetic oligonucleotide
uugaugcuggcccuucuca

SEQ ID NO: 2971038 - RNA, 19 nt, Artificial Sequence
  Description of Artificial Sequence: Synthetic oligonucleotide
ugucacuaugucauucagu

SEQ ID NO: 2971039 - RNA, 19 nt, Artificial Sequence
  Description of Artificial Sequence: Synthetic oligonucleotide
ucucgauggggcaaggcaa

SEQ ID NO: 2971040 - RNA, 19 nt, Artificial Sequence
  Description of Artificial Sequence: Synthetic oligonucleotide
caauuaugggagguggagg

SEQ ID NO: 2971041 - RNA, 19 nt, Artificial Sequence
  Description of Artificial Sequence: Synthetic oligonucleotide
uagaucugcagcagagcug

SEQ ID NO: 2971042 - RNA, 19 nt, Artificial Sequence
  Description of Artificial Sequence: Synthetic oligonucleotide
uuaugggagguggaggcag

SEQ ID NO: 2971043 - RNA, 19 nt, Artificial Sequence
  Description of Artificial Sequence: Synthetic oligonucleotide
caccuagcaaccuggagug

SEQ ID NO: 2971044 - RNA, 19 nt, Artificial Sequence
  Description of Artificial Sequence: Synthetic oligonucleotide
aucucgauggggcaaggca

SEQ ID NO: 2971045 - RNA, 19 nt, Artificial Sequence
  Description of Artificial Sequence: Synthetic oligonucleotide
gaagagaguggcauucagc

SEQ ID NO: 2971046 - RNA, 19 nt, Artificial Sequence
  Description of Artificial Sequence: Synthetic oligonucleotide
agaucugcagcagagcuga

SEQ ID NO: 2971047 - RNA, 19 nt, Artificial Sequence
  Description of Artificial Sequence: Synthetic oligonucleotide
aguggcauucagcuggaca

SEQ ID NO: 2971048 - RNA, 19 nt, Artificial Sequence
  Description of Artificial Sequence: Synthetic oligonucleotide
agaauagauuuuguguuga

SEQ ID NO: 2971049 - RNA, 19 nt, Artificial Sequence
  Description of Artificial Sequence: Synthetic oligonucleotide
ugcaauuaugggaggugga

SEQ ID NO: 2971050 - RNA, 19 nt, Artificial Sequence
  Description of Artificial Sequence: Synthetic oligonucleotide
gaggggccaagaaagaggc

SEQ ID NO: 2971051 - RNA, 19 nt, Artificial Sequence
  Description of Artificial Sequence: Synthetic oligonucleotide
ucuccugcccacacccugg

SEQ ID NO: 2971052 - RNA, 19 nt, Artificial Sequence
  Description of Artificial Sequence: Synthetic oligonucleotide
cugaagggaagagaguggc

SEQ ID NO: 2971053 - RNA, 19 nt, Artificial Sequence
  Description of Artificial Sequence: Synthetic oligonucleotide
gaguacuccuggaagcagg

SEQ ID NO: 2971054 - RNA, 19 nt, Artificial Sequence
  Description of Artificial Sequence: Synthetic oligonucleotide
ggcagauguggccaggugg

SEQ ID NO: 2971055 - RNA, 19 nt, Artificial Sequence
  Description of Artificial Sequence: Synthetic oligonucleotide
cucgagacaagcccuuuag

SEQ ID NO: 2971056 - RNA, 19 nt, Artificial Sequence
  Description of Artificial Sequence: Synthetic oligonucleotide
cugcaauuaugggaggugg

SEQ ID NO: 2971057 - RNA, 19 nt, Artificial Sequence
  Description of Artificial Sequence: Synthetic oligonucleotide
ugaugcuggcccuucucag

SEQ ID NO: 2971058 - RNA, 19 nt, Artificial Sequence
  Description of Artificial Sequence: Synthetic oligonucleotide
ucauucagucucgagugug

SEQ ID NO: 2971059 - RNA, 19 nt, Artificial Sequence
  Description of Artificial Sequence: Synthetic oligonucleotide
acaggauuggguuggcagu

SEQ ID NO: 2971060 - RNA, 19 nt, Artificial Sequence
  Description of Artificial Sequence: Synthetic oligonucleotide
aaggcaacuccucgagaca

SEQ ID NO: 2971061 - RNA, 19 nt, Artificial Sequence
  Description of Artificial Sequence: Synthetic oligonucleotide
agagggcagugccaccugc

SEQ ID NO: 2971062 - RNA, 19 nt, Artificial Sequence
  Description of Artificial Sequence: Synthetic oligonucleotide
gaggcaggcauagaucugc

SEQ ID NO: 2971063 - RNA, 19 nt, Artificial Sequence
  Description of Artificial Sequence: Synthetic oligonucleotide
uucucagaggccuuuucau

SEQ ID NO: 2971064 - RNA, 19 nt, Artificial Sequence
  Description of Artificial Sequence: Synthetic oligonucleotide
caagaaagaggcaucucga

SEQ ID NO: 2971065 - RNA, 19 nt, Artificial Sequence
  Description of Artificial Sequence: Synthetic oligonucleotide
cucgagugugacaggauug

SEQ ID NO: 2971066 - RNA, 19 nt, Artificial Sequence
  Description of Artificial Sequence: Synthetic oligonucleotide
ggagaguacuccuggaagc

SEQ ID NO: 2971067 - RNA, 19 nt, Artificial Sequence
  Description of Artificial Sequence: Synthetic oligonucleotide
ccuggaggggccaagaaag

SEQ ID NO: 2971068 - RNA, 19 nt, Artificial Sequence
  Description of Artificial Sequence: Synthetic oligonucleotide
ucucgagugugacaggauu

SEQ ID NO: 2971069 - RNA, 19 nt, Artificial Sequence
  Description of Artificial Sequence: Synthetic oligonucleotide
agcuuucccuugcaaggcg

SEQ ID NO: 2971070 - RNA, 19 nt, Artificial Sequence
  Description of Artificial Sequence: Synthetic oligonucleotide
gcaggcauagaucugcagc

SEQ ID NO: 2971071 - RNA, 19 nt, Artificial Sequence
  Description of Artificial Sequence: Synthetic oligonucleotide
uuuguuuccagggccugca

SEQ ID NO: 2971072 - RNA, 19 nt, Artificial Sequence
  Description of Artificial Sequence: Synthetic oligonucleotide
uccagggccugcaauuaug

SEQ ID NO: 2971073 - RNA, 19 nt, Artificial Sequence
  Description of Artificial Sequence: Synthetic oligonucleotide
aggugguggagaguacucc

SEQ ID NO: 2971074 - RNA, 19 nt, Artificial Sequence
  Description of Artificial Sequence: Synthetic oligonucleotide
ggacaaagaauagauuuug

SEQ ID NO: 2971075 - RNA, 19 nt, Artificial Sequence
  Description of Artificial Sequence: Synthetic oligonucleotide
uggcugagagggcagugcc

SEQ ID NO: 2971076 - RNA, 19 nt, Artificial Sequence
  Description of Artificial Sequence: Synthetic oligonucleotide
cauccaggacaaagaauag

SEQ ID NO: 2971077 - RNA, 19 nt, Artificial Sequence
  Description of Artificial Sequence: Synthetic oligonucleotide
cuugcaaggcgaguuuggg

SEQ ID NO: 2971078 - RNA, 19 nt, Artificial Sequence
  Description of Artificial Sequence: Synthetic oligonucleotide
aggccuuuucauccaggac

SEQ ID NO: 2971079 - RNA, 19 nt, Artificial Sequence
  Description of Artificial Sequence: Synthetic oligonucleotide
ccagcuuucccuugcaagg

SEQ ID NO: 2971080 - RNA, 19 nt, Artificial Sequence
  Description of Artificial Sequence: Synthetic oligonucleotide
ugaagggaagagaguggca

SEQ ID NO: 2971081 - RNA, 19 nt, Artificial Sequence
  Description of Artificial Sequence: Synthetic oligonucleotide
ucucagaggccuuuucauc

SEQ ID NO: 2971082 - RNA, 19 nt, Artificial Sequence
  Description of Artificial Sequence: Synthetic oligonucleotide
augcuggcccuucucagag

SEQ ID NO: 2971083 - RNA, 19 nt, Artificial Sequence
  Description of Artificial Sequence: Synthetic oligonucleotide
auucagucucgagugugac

SEQ ID NO: 2971084 - RNA, 19 nt, Artificial Sequence
  Description of Artificial Sequence: Synthetic oligonucleotide
agauguggccagguggugg

SEQ ID NO: 2971085 - RNA, 19 nt, Artificial Sequence
  Description of Artificial Sequence: Synthetic oligonucleotide
agauuuuguguugaggguu

SEQ ID NO: 2971086 - RNA, 19 nt, Artificial Sequence
  Description of Artificial Sequence: Synthetic oligonucleotide
caggcauagaucugcagca

SEQ ID NO: 2971087 - RNA, 19 nt, Artificial Sequence
  Description of Artificial Sequence: Synthetic oligonucleotide
agcccuuuagucaccuagc

SEQ ID NO: 2971088 - RNA, 19 nt, Artificial Sequence
  Description of Artificial Sequence: Synthetic oligonucleotide
aagaggcaucucgaugggg

SEQ ID NO: 2971089 - RNA, 19 nt, Artificial Sequence
  Description of Artificial Sequence: Synthetic oligonucleotide
uggaggggccaagaaagag

SEQ ID NO: 2971090 - RNA, 19 nt, Artificial Sequence
  Description of Artificial Sequence: Synthetic oligonucleotide
guguugaggguuuguuucc

SEQ ID NO: 2971091 - RNA, 19 nt, Artificial Sequence
  Description of Artificial Sequence: Synthetic oligonucleotide
ucagaggccuuuucaucca

SEQ ID NO: 2971092 - RNA, 19 nt, Artificial Sequence
  Description of Artificial Sequence: Synthetic oligonucleotide
agagaguggcauucagcug

SEQ ID NO: 2971093 - RNA, 19 nt, Artificial Sequence
  Description of Artificial Sequence: Synthetic oligonucleotide
ucgagacaagcccuuuagu

SEQ ID NO: 2971094 - RNA, 19 nt, Artificial Sequence
  Description of Artificial Sequence: Synthetic oligonucleotide
uuuagucaccuagcaaccu

SEQ ID NO: 2971095 - RNA, 19 nt, Artificial Sequence
  Description of Artificial Sequence: Synthetic oligonucleotide
cauagaucugcagcagagc

SEQ ID NO: 2971096 - RNA, 19 nt, Artificial Sequence
  Description of Artificial Sequence: Synthetic oligonucleotide
uuuguguugaggguuuguu

SEQ ID NO: 2971097 - RNA, 19 nt, Artificial Sequence
  Description of Artificial Sequence: Synthetic oligonucleotide
uucagucucgagugugaca

SEQ ID NO: 2971098 - RNA, 19 nt, Artificial Sequence
  Description of Artificial Sequence: Synthetic oligonucleotide
gcagugcuggcugagaggg

SEQ ID NO: 2971099 - RNA, 19 nt, Artificial Sequence
  Description of Artificial Sequence: Synthetic oligonucleotide
cugucacuaugucauucag

SEQ ID NO: 2971100 - RNA, 19 nt, Artificial Sequence
  Description of Artificial Sequence: Synthetic oligonucleotide
ugagagggcagugccaccu

SEQ ID NO: 2971101 - RNA, 19 nt, Artificial Sequence
  Description of Artificial Sequence: Synthetic oligonucleotide
gauguggccagguggugga

SEQ ID NO: 2971102 - RNA, 19 nt, Artificial Sequence
  Description of Artificial Sequence: Synthetic oligonucleotide
uuguguugaggguuuguuu

SEQ ID NO: 2971103 - RNA, 19 nt, Artificial Sequence
  Description of Artificial Sequence: Synthetic oligonucleotide
uguuuccagggccugcaau

SEQ ID NO: 2971104 - RNA, 19 nt, Artificial Sequence
  Description of Artificial Sequence: Synthetic oligonucleotide
gacaucuccugcccacacc

SEQ ID NO: 2971105 - RNA, 19 nt, Artificial Sequence
  Description of Artificial Sequence: Synthetic oligonucleotide
caacuccucgagacaagcc

SEQ ID NO: 2971106 - RNA, 19 nt, Artificial Sequence
  Description of Artificial Sequence: Synthetic oligonucleotide
cuuucccuugcaaggcgag

SEQ ID NO: 2971107 - RNA, 19 nt, Artificial Sequence
  Description of Artificial Sequence: Synthetic oligonucleotide
agugcuggcugagagggca

SEQ ID NO: 2971108 - RNA, 19 nt, Artificial Sequence
  Description of Artificial Sequence: Synthetic oligonucleotide
aagggaagagaguggcauu

SEQ ID NO: 2971109 - RNA, 19 nt, Artificial Sequence
  Description of Artificial Sequence: Synthetic oligonucleotide
gaugcuggcccuucucaga

SEQ ID NO: 2971110 - RNA, 19 nt, Artificial Sequence
  Description of Artificial Sequence: Synthetic oligonucleotide
uguugaggguuuguuucca

SEQ ID NO: 2971111 - RNA, 19 nt, Artificial Sequence
  Description of Artificial Sequence: Synthetic oligonucleotide
ggaggggccaagaaagagg

SEQ ID NO: 2971112 - RNA, 19 nt, Artificial Sequence
  Description of Artificial Sequence: Synthetic oligonucleotide
aucuccugcccacacccug

SEQ ID NO: 2971113 - RNA, 19 nt, Artificial Sequence
  Description of Artificial Sequence: Synthetic oligonucleotide
gucaccuagcaaccuggag

SEQ ID NO: 2971114 - RNA, 19 nt, Artificial Sequence
  Description of Artificial Sequence: Synthetic oligonucleotide
cuucucagaggccuuuuca

SEQ ID NO: 2971115 - RNA, 19 nt, Artificial Sequence
  Description of Artificial Sequence: Synthetic oligonucleotide
cuggacaucuccugcccac

SEQ ID NO: 2971116 - RNA, 19 nt, Artificial Sequence
  Description of Artificial Sequence: Synthetic oligonucleotide
cucgauggggcaaggcaac

SEQ ID NO: 2971117 - RNA, 19 nt, Artificial Sequence
  Description of Artificial Sequence: Synthetic oligonucleotide
gagaguacuccuggaagca

SEQ ID NO: 2971118 - RNA, 19 nt, Artificial Sequence
  Description of Artificial Sequence: Synthetic oligonucleotide
gggccugcaauuaugggag

SEQ ID NO: 2971119 - RNA, 19 nt, Artificial Sequence
  Description of Artificial Sequence: Synthetic oligonucleotide
gagguggaggcaggcauag

SEQ ID NO: 2971120 - RNA, 19 nt, Artificial Sequence
  Description of Artificial Sequence: Synthetic oligonucleotide
agucucgagugugacagga

SEQ ID NO: 2971121 - RNA, 19 nt, Artificial Sequence
  Description of Artificial Sequence: Synthetic oligonucleotide
uuuuguguugaggguuugu

SEQ ID NO: 2971122 - RNA, 19 nt, Artificial Sequence
  Description of Artificial Sequence: Synthetic oligonucleotide
aggauuggguuggcagugc

SEQ ID NO: 2971123 - RNA, 19 nt, Artificial Sequence
  Description of Artificial Sequence: Synthetic oligonucleotide
guggcauucagcuggacau

SEQ ID NO: 2971124 - RNA, 19 nt, Artificial Sequence
  Description of Artificial Sequence: Synthetic oligonucleotide
auccaggacaaagaauaga

SEQ ID NO: 2971125 - RNA, 19 nt, Artificial Sequence
  Description of Artificial Sequence: Synthetic oligonucleotide
gugugacaggauuggguug

SEQ ID NO: 2971126 - RNA, 19 nt, Artificial Sequence
  Description of Artificial Sequence: Synthetic oligonucleotide
agaguacuccuggaagcag

SEQ ID NO: 2971127 - RNA, 19 nt, Artificial Sequence
  Description of Artificial Sequence: Synthetic oligonucleotide
gaguggcucugucacuaug

SEQ ID NO: 2971128 - RNA, 19 nt, Artificial Sequence
  Description of Artificial Sequence: Synthetic oligonucleotide
guggccaggugguggagag

SEQ ID NO: 2971129 - RNA, 19 nt, Artificial Sequence
  Description of Artificial Sequence: Synthetic oligonucleotide
ggcaaggcaacuccucgag

SEQ ID NO: 2971130 - RNA, 19 nt, Artificial Sequence
  Description of Artificial Sequence: Synthetic oligonucleotide
gcauagaucugcagcagag

SEQ ID NO: 2971131 - RNA, 19 nt, Artificial Sequence
  Description of Artificial Sequence: Synthetic oligonucleotide
acauugaugcuggcccuuc

SEQ ID NO: 2971132 - RNA, 19 nt, Artificial Sequence
  Description of Artificial Sequence: Synthetic oligonucleotide
gauuggguuggcagugcug

SEQ ID NO: 2971133 - RNA, 19 nt, Artificial Sequence
  Description of Artificial Sequence: Synthetic oligonucleotide
cuggaagcaggcaggccac

SEQ ID NO: 2971134 - RNA, 19 nt, Artificial Sequence
  Description of Artificial Sequence: Synthetic oligonucleotide
caggcaggccacauugaug

SEQ ID NO: 2971135 - RNA, 19 nt, Artificial Sequence
  Description of Artificial Sequence: Synthetic oligonucleotide
gaagggaagagaguggcau

SEQ ID NO: 2971136 - RNA, 19 nt, Artificial Sequence
  Description of Artificial Sequence: Synthetic oligonucleotide
cauucagucucgaguguga

SEQ ID NO: 2971137 - RNA, 19 nt, Artificial Sequence
  Description of Artificial Sequence: Synthetic oligonucleotide
uggaguggcucugucacua

SEQ ID NO: 2971138 - RNA, 19 nt, Artificial Sequence
  Description of Artificial Sequence: Synthetic oligonucleotide
agcaaccuggaguggcucu

SEQ ID NO: 2971139 - RNA, 19 nt, Artificial Sequence
  Description of Artificial Sequence: Synthetic oligonucleotide
cagggccugcaauuauggg

SEQ ID NO: 2971140 - RNA, 19 nt, Artificial Sequence
  Description of Artificial Sequence: Synthetic oligonucleotide
ccuggaguggcucugucac

SEQ ID NO: 2971141 - RNA, 19 nt, Artificial Sequence
  Description of Artificial Sequence: Synthetic oligonucleotide
cucugucacuaugucauuc

SEQ ID NO: 2971142 - RNA, 19 nt, Artificial Sequence
  Description of Artificial Sequence: Synthetic oligonucleotide
uggggcaaggcaacuccuc

SEQ ID NO: 2971143 - RNA, 19 nt, Artificial Sequence
  Description of Artificial Sequence: Synthetic oligonucleotide
caggauuggguuggcagug

SEQ ID NO: 2971144 - RNA, 19 nt, Artificial Sequence
  Description of Artificial Sequence: Synthetic oligonucleotide
gacaaagaauagauuuugu

SEQ ID NO: 2971145 - RNA, 19 nt, Artificial Sequence
  Description of Artificial Sequence: Synthetic oligonucleotide
gaggcaucucgauggggca

SEQ ID NO: 2971146 - RNA, 19 nt, Artificial Sequence
  Description of Artificial Sequence: Synthetic oligonucleotide
uucccuugcaaggcgaguu

SEQ ID NO: 2971147 - RNA, 19 nt, Artificial Sequence
  Description of Artificial Sequence: Synthetic oligonucleotide
ccagggccugcaauuaugg

SEQ ID NO: 2971148 - RNA, 19 nt, Artificial Sequence
  Description of Artificial Sequence: Synthetic oligonucleotide
auuaugggagguggaggca

SEQ ID NO: 2971149 - RNA, 19 nt, Artificial Sequence
  Description of Artificial Sequence: Synthetic oligonucleotide
agcagagcugaagggaaga

SEQ ID NO: 2971150 - RNA, 19 nt, Artificial Sequence
  Description of Artificial Sequence: Synthetic oligonucleotide
cagcuuucccuugcaaggc

SEQ ID NO: 2971151 - RNA, 19 nt, Artificial Sequence
  Description of Artificial Sequence: Synthetic oligonucleotide
guuuguuuccagggccugc

SEQ ID NO: 2971152 - RNA, 19 nt, Artificial Sequence
  Description of Artificial Sequence: Synthetic oligonucleotide
gcugaagggaagagagugg

SEQ ID NO: 2971153 - RNA, 19 nt, Artificial Sequence
  Description of Artificial Sequence: Synthetic oligonucleotide
auuuuguguugaggguuug

SEQ ID NO: 2971154 - RNA, 19 nt, Artificial Sequence
  Description of Artificial Sequence: Synthetic oligonucleotide
uuuccagggccugcaauua

SEQ ID NO: 2971155 - RNA, 19 nt, Artificial Sequence
  Description of Artificial Sequence: Synthetic oligonucleotide
guggagaguacuccuggaa

SEQ ID NO: 2971156 - RNA, 19 nt, Artificial Sequence
  Description of Artificial Sequence: Synthetic oligonucleotide
cuggcugagagggcagugc

SEQ ID NO: 2971157 - RNA, 19 nt, Artificial Sequence
  Description of Artificial Sequence: Synthetic oligonucleotide
caggugguggagaguacuc

SEQ ID NO: 2971158 - RNA, 19 nt, Artificial Sequence
  Description of Artificial Sequence: Synthetic oligonucleotide
auucagcuggacaucuccu

SEQ ID NO: 2971159 - RNA, 19 nt, Artificial Sequence
  Description of Artificial Sequence: Synthetic oligonucleotide
acuccucgagacaagcccu

SEQ ID NO: 2971160 - RNA, 19 nt, Artificial Sequence
  Description of Artificial Sequence: Synthetic oligonucleotide
ccuugcaaggcgaguuugg

SEQ ID NO: 2971161 - RNA, 19 nt, Artificial Sequence
  Description of Artificial Sequence: Synthetic oligonucleotide
uuccagggccugcaauuau

SEQ ID NO: 2971162 - RNA, 19 nt, Artificial Sequence
  Description of Artificial Sequence: Synthetic oligonucleotide
aggcaacuccucgagacaa

SEQ ID NO: 2971163 - RNA, 19 nt, Artificial Sequence
  Description of Artificial Sequence: Synthetic oligonucleotide
uguggccaggugguggaga

SEQ ID NO: 2971164 - RNA, 19 nt, Artificial Sequence
  Description of Artificial Sequence: Synthetic oligonucleotide
gagugugacaggauugggu

SEQ ID NO: 2971165 - RNA, 19 nt, Artificial Sequence
  Description of Artificial Sequence: Synthetic oligonucleotide
aggcagauguggccaggug

SEQ ID NO: 2971166 - RNA, 19 nt, Artificial Sequence
  Description of Artificial Sequence: Synthetic oligonucleotide
uuucccuugcaaggcgagu

SEQ ID NO: 2971167 - RNA, 19 nt, Artificial Sequence
  Description of Artificial Sequence: Synthetic oligonucleotide
cagaggccuuuucauccag

SEQ ID NO: 2971168 - RNA, 19 nt, Artificial Sequence
  Description of Artificial Sequence: Synthetic oligonucleotide
guggcucugucacuauguc

SEQ ID NO: 2971169 - RNA, 19 nt, Artificial Sequence
  Description of Artificial Sequence: Synthetic oligonucleotide
uggacaucuccugcccaca

SEQ ID NO: 2971170 - RNA, 19 nt, Artificial Sequence
  Description of Artificial Sequence: Synthetic oligonucleotide
ccuggaagcaggcaggcca

SEQ ID NO: 2971171 - RNA, 19 nt, Artificial Sequence
  Description of Artificial Sequence: Synthetic oligonucleotide
ccuagcaaccuggaguggc

SEQ ID NO: 2971172 - RNA, 19 nt, Artificial Sequence
  Description of Artificial Sequence: Synthetic oligonucleotide
guuggcagugcuggcugag

SEQ ID NO: 2971173 - RNA, 19 nt, Artificial Sequence
  Description of Artificial Sequence: Synthetic oligonucleotide
gacaagcccuuuagucacc

SEQ ID NO: 2971174 - RNA, 19 nt, Artificial Sequence
  Description of Artificial Sequence: Synthetic oligonucleotide
acaagcccuuuagucaccu

SEQ ID NO: 2971175 - RNA, 19 nt, Artificial Sequence
  Description of Artificial Sequence: Synthetic oligonucleotide
uuguuuccagggccugcaa

SEQ ID NO: 2971176 - RNA, 19 nt, Artificial Sequence
  Description of Artificial Sequence: Synthetic oligonucleotide
aggccacauugaugcuggc

SEQ ID NO: 2971177 - RNA, 19 nt, Artificial Sequence
  Description of Artificial Sequence: Synthetic oligonucleotide
ucccuugcaaggcgaguuu

SEQ ID NO: 2971178 - RNA, 19 nt, Artificial Sequence
  Description of Artificial Sequence: Synthetic oligonucleotide
gugguggagaguacuccug

SEQ ID NO: 2971179 - RNA, 19 nt, Artificial Sequence
  Description of Artificial Sequence: Synthetic oligonucleotide
ugacaggauuggguuggca

SEQ ID NO: 2971180 - RNA, 19 nt, Artificial Sequence
  Description of Artificial Sequence: Synthetic oligonucleotide
guuuccagggccugcaauu

SEQ ID NO: 2971181 - RNA, 19 nt, Artificial Sequence
  Description of Artificial Sequence: Synthetic oligonucleotide
cagucucgagugugacagg

SEQ ID NO: 2971182 - RNA, 19 nt, Artificial Sequence
  Description of Artificial Sequence: Synthetic oligonucleotide
ggcauagaucugcagcaga

SEQ ID NO: 2971183 - RNA, 19 nt, Artificial Sequence
  Description of Artificial Sequence: Synthetic oligonucleotide
cugagagggcagugccacc

SEQ ID NO: 2971184 - RNA, 19 nt, Artificial Sequence
  Description of Artificial Sequence: Synthetic oligonucleotide
gcaacuccucgagacaagc

SEQ ID NO: 2971185 - RNA, 19 nt, Artificial Sequence
  Description of Artificial Sequence: Synthetic oligonucleotide
caucucgauggggcaaggc

SEQ ID NO: 2971186 - RNA, 19 nt, Artificial Sequence
  Description of Artificial Sequence: Synthetic oligonucleotide
guggaggcaggcauagauc

SEQ ID NO: 2971187 - RNA, 19 nt, Artificial Sequence
  Description of Artificial Sequence: Synthetic oligonucleotide
cuccuggaagcaggcaggc

SEQ ID NO: 2971188 - RNA, 19 nt, Artificial Sequence
  Description of Artificial Sequence: Synthetic oligonucleotide
gauuuuguguugaggguuu

SEQ ID NO: 2971189 - RNA, 19 nt, Artificial Sequence
  Description of Artificial Sequence: Synthetic oligonucleotide
ggguuggcagugcuggcug

SEQ ID NO: 2971190 - RNA, 19 nt, Artificial Sequence
  Description of Artificial Sequence: Synthetic oligonucleotide
agggcagugccaccugcau

SEQ ID NO: 2971191 - RNA, 19 nt, Artificial Sequence
  Description of Artificial Sequence: Synthetic oligonucleotide
gcugagagggcagugccac

SEQ ID NO: 2971192 - RNA, 19 nt, Artificial Sequence
  Description of Artificial Sequence: Synthetic oligonucleotide
uuggcagugcuggcugaga

SEQ ID NO: 2971193 - RNA, 19 nt, Artificial Sequence
  Description of Artificial Sequence: Synthetic oligonucleotide
cagagcugaagggaagaga

SEQ ID NO: 2971194 - RNA, 19 nt, Artificial Sequence
  Description of Artificial Sequence: Synthetic oligonucleotide
uccuggaagcaggcaggcc

SEQ ID NO: 2971195 - RNA, 19 nt, Artificial Sequence
  Description of Artificial Sequence: Synthetic oligonucleotide
gguggaggcaggcauagau

SEQ ID NO: 2971196 - RNA, 19 nt, Artificial Sequence
  Description of Artificial Sequence: Synthetic oligonucleotide
accuagcaaccuggagugg

SEQ ID NO: 2971197 - RNA, 19 nt, Artificial Sequence
  Description of Artificial Sequence: Synthetic oligonucleotide
cuggaggggccaagaaaga

SEQ ID NO: 2971198 - RNA, 19 nt, Artificial Sequence
  Description of Artificial Sequence: Synthetic oligonucleotide
gcaggccacauugaugcug

SEQ ID NO: 2971199 - RNA, 19 nt, Artificial Sequence
  Description of Artificial Sequence: Synthetic oligonucleotide
ggcaucucgauggggcaag

SEQ ID NO: 2971200 - RNA, 19 nt, Artificial Sequence
  Description of Artificial Sequence: Synthetic oligonucleotide
ccugcaauuaugggaggug

SEQ ID NO: 2971201 - RNA, 19 nt, Artificial Sequence
  Description of Artificial Sequence: Synthetic oligonucleotide
gguggagaguacuccugga

SEQ ID NO: 2971202 - RNA, 19 nt, Artificial Sequence
  Description of Artificial Sequence: Synthetic oligonucleotide
ggccacauugaugcuggcc

SEQ ID NO: 2971203 - RNA, 19 nt, Artificial Sequence
  Description of Artificial Sequence: Synthetic oligonucleotide
agucaccuagcaaccugga

SEQ ID NO: 2971204 - RNA, 19 nt, Artificial Sequence
  Description of Artificial Sequence: Synthetic oligonucleotide
ggugguggagaguacuccu

SEQ ID NO: 2971205 - RNA, 19 nt, Artificial Sequence
  Description of Artificial Sequence: Synthetic oligonucleotide
gcccuuuagucaccuagca

SEQ ID NO: 2971206 - RNA, 19 nt, Artificial Sequence
  Description of Artificial Sequence: Synthetic oligonucleotide
cagugcuggcugagagggc

SEQ ID NO: 2971207 - RNA, 19 nt, Artificial Sequence
  Description of Artificial Sequence: Synthetic oligonucleotide
gccaccugcauggugcaug

SEQ ID NO: 2971208 - RNA, 19 nt, Artificial Sequence
  Description of Artificial Sequence: Synthetic oligonucleotide
gguuuguuuccagggccug

SEQ ID NO: 2971209 - RNA, 19 nt, Artificial Sequence
  Description of Artificial Sequence: Synthetic oligonucleotide
gagggcagugccaccugca

SEQ ID NO: 2971210 - RNA, 19 nt, Artificial Sequence
  Description of Artificial Sequence: Synthetic oligonucleotide
gucauucagucucgagugu

SEQ ID NO: 2971211 - RNA, 19 nt, Artificial Sequence
  Description of Artificial Sequence: Synthetic oligonucleotide
agaguggcauucagcugga

SEQ ID NO: 2971212 - RNA, 19 nt, Artificial Sequence
  Description of Artificial Sequence: Synthetic oligonucleotide
ugcccacacccuggagggg

SEQ ID NO: 2971213 - RNA, 19 nt, Artificial Sequence
  Description of Artificial Sequence: Synthetic oligonucleotide
gggcagugccaccugcaug

SEQ ID NO: 2971214 - RNA, 19 nt, Artificial Sequence
  Description of Artificial Sequence: Synthetic oligonucleotide
auggggcaaggcaacuccu

SEQ ID NO: 2971215 - RNA, 19 nt, Artificial Sequence
  Description of Artificial Sequence: Synthetic oligonucleotide
ugcuggcugagagggcagu

SEQ ID NO: 2971216 - RNA, 19 nt, Artificial Sequence
  Description of Artificial Sequence: Synthetic oligonucleotide
ggccugcaauuaugggagg

SEQ ID NO: 2971217 - RNA, 19 nt, Artificial Sequence
  Description of Artificial Sequence: Synthetic oligonucleotide
uggaagcaggcaggccaca

SEQ ID NO: 2971218 - RNA, 19 nt, Artificial Sequence
  Description of Artificial Sequence: Synthetic oligonucleotide
acccuggaggggccaagaa

SEQ ID NO: 2971219 - RNA, 19 nt, Artificial Sequence
  Description of Artificial Sequence: Synthetic oligonucleotide
gccuuuucauccaggacaa

SEQ ID NO: 2971220 - RNA, 19 nt, Artificial Sequence
  Description of Artificial Sequence: Synthetic oligonucleotide
cagauguggccagguggug

SEQ ID NO: 2971221 - RNA, 19 nt, Artificial Sequence
  Description of Artificial Sequence: Synthetic oligonucleotide
gggcaaggcaacuccucga

SEQ ID NO: 2971222 - RNA, 19 nt, Artificial Sequence
  Description of Artificial Sequence: Synthetic oligonucleotide
gugacaggauuggguuggc

SEQ ID NO: 2971223 - RNA, 19 nt, Artificial Sequence
  Description of Artificial Sequence: Synthetic oligonucleotide
aggcaucucgauggggcaa

SEQ ID NO: 2971224 - RNA, 19 nt, Artificial Sequence
  Description of Artificial Sequence: Synthetic oligonucleotide
ggcaacuccucgagacaag

SEQ ID NO: 2971225 - RNA, 19 nt, Artificial Sequence
  Description of Artificial Sequence: Synthetic oligonucleotide
acacccuggaggggccaag

SEQ ID NO: 2971226 - RNA, 19 nt, Artificial Sequence
  Description of Artificial Sequence: Synthetic oligonucleotide
gcaaggcaacuccucgaga

SEQ ID NO: 2971227 - RNA, 19 nt, Artificial Sequence
  Description of Artificial Sequence: Synthetic oligonucleotide
gugccaccugcauggugca

SEQ ID NO: 2971228 - RNA, 19 nt, Artificial Sequence
  Description of Artificial Sequence: Synthetic oligonucleotide
gugcuggcugagagggcag

SEQ ID NO: 2971229 - RNA, 19 nt, Artificial Sequence
  Description of Artificial Sequence: Synthetic oligonucleotide
auguggccaggugguggag

SEQ ID NO: 2971230 - RNA, 19 nt, Artificial Sequence
  Description of Artificial Sequence: Synthetic oligonucleotide
guacuccuggaagcaggca

SEQ ID NO: 2971231 - RNA, 19 nt, Artificial Sequence
  Description of Artificial Sequence: Synthetic oligonucleotide
uccucgagacaagcccuuu

SEQ ID NO: 2971232 - RNA, 19 nt, Artificial Sequence
  Description of Artificial Sequence: Synthetic oligonucleotide
gagcugaagggaagagagu

SEQ ID NO: 2971233 - RNA, 19 nt, Artificial Sequence
  Description of Artificial Sequence: Synthetic oligonucleotide
gcagauguggccagguggu

SEQ ID NO: 2971234 - RNA, 19 nt, Artificial Sequence
  Description of Artificial Sequence: Synthetic oligonucleotide
ggccaggugguggagagua

SEQ ID NO: 2971235 - RNA, 19 nt, Artificial Sequence
  Description of Artificial Sequence: Synthetic oligonucleotide
gggaagagaguggcauuca

SEQ ID NO: 2971236 - RNA, 19 nt, Artificial Sequence
  Description of Artificial Sequence: Synthetic oligonucleotide
gggagguggaggcaggcau

SEQ ID NO: 2971237 - RNA, 19 nt, Artificial Sequence
  Description of Artificial Sequence: Synthetic oligonucleotide
gcuuucccuugcaaggcga

SEQ ID NO: 2971238 - RNA, 19 nt, Artificial Sequence
  Description of Artificial Sequence: Synthetic oligonucleotide
gguuggcagugcuggcuga

SEQ ID NO: 2971239 - RNA, 19 nt, Artificial Sequence
  Description of Artificial Sequence: Synthetic oligonucleotide
gggccaagaaagaggcauc

SEQ ID NO: 2971240 - RNA, 19 nt, Artificial Sequence
  Description of Artificial Sequence: Synthetic oligonucleotide
ccugcauggugcauggccu

SEQ ID NO: 2971241 - RNA, 19 nt, Artificial Sequence
  Description of Artificial Sequence: Synthetic oligonucleotide
ggcauucagcuggacaucu

SEQ ID NO: 2971242 - RNA, 19 nt, Artificial Sequence
  Description of Artificial Sequence: Synthetic oligonucleotide
cauugaugcuggcccuucu

SEQ ID NO: 2971243 - RNA, 19 nt, Artificial Sequence
  Description of Artificial Sequence: Synthetic oligonucleotide
gcaucucgauggggcaagg

SEQ ID NO: 2971244 - RNA, 19 nt, Artificial Sequence
  Description of Artificial Sequence: Synthetic oligonucleotide
ggauuggguuggcagugcu

SEQ ID NO: 2971245 - RNA, 19 nt, Artificial Sequence
  Description of Artificial Sequence: Synthetic oligonucleotide
uggccaggugguggagagu

SEQ ID NO: 2971246 - RNA, 19 nt, Artificial Sequence
  Description of Artificial Sequence: Synthetic oligonucleotide
cgagugugacaggauuggg

SEQ ID NO: 2971247 - RNA, 19 nt, Artificial Sequence
  Description of Artificial Sequence: Synthetic oligonucleotide
gaguggcauucagcuggac

SEQ ID NO: 2971248 - RNA, 19 nt, Artificial Sequence
  Description of Artificial Sequence: Synthetic oligonucleotide
ggccaagaaagaggcaucu

SEQ ID NO: 2971249 - RNA, 19 nt, Artificial Sequence
  Description of Artificial Sequence: Synthetic oligonucleotide
gccaagaaagaggcaucuc

SEQ ID NO: 2971250 - RNA, 19 nt, Artificial Sequence
  Description of Artificial Sequence: Synthetic oligonucleotide
cccuuuagucaccuagcaa

SEQ ID NO: 2971251 - RNA, 19 nt, Artificial Sequence
  Description of Artificial Sequence: Synthetic oligonucleotide
cccacacccuggaggggcc

SEQ ID NO: 2971252 - RNA, 19 nt, Artificial Sequence
  Description of Artificial Sequence: Synthetic oligonucleotide
agguggaggcaggcauaga

SEQ ID NO: 2971253 - RNA, 19 nt, Artificial Sequence
  Description of Artificial Sequence: Synthetic oligonucleotide
ggguuuguuuccagggccu

SEQ ID NO: 2971254 - RNA, 19 nt, Artificial Sequence
  Description of Artificial Sequence: Synthetic oligonucleotide
cuggaguggcucugucacu

SEQ ID NO: 2971255 - RNA, 19 nt, Artificial Sequence
  Description of Artificial Sequence: Synthetic oligonucleotide
ggcugagagggcagugcca

SEQ ID NO: 2971256 - RNA, 19 nt, Artificial Sequence
  Description of Artificial Sequence: Synthetic oligonucleotide
cacccuggaggggccaaga

SEQ ID NO: 2971257 - RNA, 19 nt, Artificial Sequence
  Description of Artificial Sequence: Synthetic oligonucleotide
caagcccuuuagucaccua

SEQ ID NO: 2971258 - RNA, 19 nt, Artificial Sequence
  Description of Artificial Sequence: Synthetic oligonucleotide
cccuggaggggccaagaaa

SEQ ID NO: 2971259 - RNA, 19 nt, Artificial Sequence
  Description of Artificial Sequence: Synthetic oligonucleotide
ugccaccugcauggugcau

SEQ ID NO: 2971260 - RNA, 19 nt, Artificial Sequence
  Description of Artificial Sequence: Synthetic oligonucleotide
caucuccugcccacacccu

SEQ ID NO: 2971261 - RNA, 19 nt, Artificial Sequence
  Description of Artificial Sequence: Synthetic oligonucleotide
gaucugcagcagagcugaa

SEQ ID NO: 2971262 - RNA, 19 nt, Artificial Sequence
  Description of Artificial Sequence: Synthetic oligonucleotide
cugcauggugcauggccuu

SEQ ID NO: 2971263 - RNA, 19 nt, Artificial Sequence
  Description of Artificial Sequence: Synthetic oligonucleotide
gccugcaauuaugggaggu

SEQ ID NO: 2971264 - RNA, 19 nt, Artificial Sequence
  Description of Artificial Sequence: Synthetic oligonucleotide
cuccucgagacaagcccuu

SEQ ID NO: 2971265 - RNA, 19 nt, Artificial Sequence
  Description of Artificial Sequence: Synthetic oligonucleotide
gucucgagugugacaggau

SEQ ID NO: 2971266 - RNA, 19 nt, Artificial Sequence
  Description of Artificial Sequence: Synthetic oligonucleotide
ccacauugaugcuggcccu

SEQ ID NO: 2971267 - RNA, 19 nt, Artificial Sequence
  Description of Artificial Sequence: Synthetic oligonucleotide
cgauggggcaaggcaacuc

SEQ ID NO: 2971268 - RNA, 19 nt, Artificial Sequence
  Description of Artificial Sequence: Synthetic oligonucleotide
ccucgagacaagcccuuua

SEQ ID NO: 2971269 - RNA, 19 nt, Artificial Sequence
  Description of Artificial Sequence: Synthetic oligonucleotide
cacauugaugcuggcccuu

SEQ ID NO: 2971270 - RNA, 19 nt, Artificial Sequence
  Description of Artificial Sequence: Synthetic oligonucleotide
gccaggugguggagaguac

SEQ ID NO: 2971271 - RNA, 19 nt, Artificial Sequence
  Description of Artificial Sequence: Synthetic oligonucleotide
ccaggugguggagaguacu

SEQ ID NO: 2971272 - RNA, 19 nt, Artificial Sequence
  Description of Artificial Sequence: Synthetic oligonucleotide
cacacccuggaggggccaa

SEQ ID NO: 2971273 - RNA, 19 nt, Artificial Sequence
  Description of Artificial Sequence: Synthetic oligonucleotide
ggaguggcucugucacuau

SEQ ID NO: 2971274 - RNA, 19 nt, Artificial Sequence
  Description of Artificial Sequence: Synthetic oligonucleotide
ggcaggccacauugaugcu

SEQ ID NO: 2971275 - RNA, 19 nt, Artificial Sequence
  Description of Artificial Sequence: Synthetic oligonucleotide
gcucugucacuaugucauu

SEQ ID NO: 2971276 - RNA, 19 nt, Artificial Sequence
  Description of Artificial Sequence: Synthetic oligonucleotide
ccuuuucauccaggacaaa

SEQ ID NO: 2971277 - RNA, 19 nt, Artificial Sequence
  Description of Artificial Sequence: Synthetic oligonucleotide
gcagugccaccugcauggu

SEQ ID NO: 2971278 - RNA, 19 nt, Artificial Sequence
  Description of Artificial Sequence: Synthetic oligonucleotide
ccacacccuggaggggcca

SEQ ID NO: 2971279 - RNA, 19 nt, Artificial Sequence
  Description of Artificial Sequence: Synthetic oligonucleotide
gaaaggaauacuuagcugc

SEQ ID NO: 2971280 - RNA, 19 nt, Artificial Sequence
  Description of Artificial Sequence: Synthetic oligonucleotide
auaagucacagccauagac

SEQ ID NO: 2971281 - RNA, 19 nt, Artificial Sequence
  Description of Artificial Sequence: Synthetic oligonucleotide
aaagcugggauccuucacg

SEQ ID NO: 2971282 - RNA, 19 nt, Artificial Sequence
  Description of Artificial Sequence: Synthetic oligonucleotide
guacacauaagucacagcc

SEQ ID NO: 2971283 - RNA, 19 nt, Artificial Sequence
  Description of Artificial Sequence: Synthetic oligonucleotide
ugaaguacacauaagucac

SEQ ID NO: 2971284 - RNA, 19 nt, Artificial Sequence
  Description of Artificial Sequence: Synthetic oligonucleotide
uccucaacaguucucaaag

SEQ ID NO: 2971285 - RNA, 19 nt, Artificial Sequence
  Description of Artificial Sequence: Synthetic oligonucleotide
aaagucaccucuucaauga

SEQ ID NO: 2971286 - RNA, 19 nt, Artificial Sequence
  Description of Artificial Sequence: Synthetic oligonucleotide
ugagguuuccuacuucugg

SEQ ID NO: 2971287 - RNA, 19 nt, Artificial Sequence
  Description of Artificial Sequence: Synthetic oligonucleotide
aagucacagccauagacag

SEQ ID NO: 2971288 - RNA, 19 nt, Artificial Sequence
  Description of Artificial Sequence: Synthetic oligonucleotide
aauacuuagcugcuuuucu

SEQ ID NO: 2971289 - RNA, 19 nt, Artificial Sequence
  Description of Artificial Sequence: Synthetic oligonucleotide
uagugaaguacacauaagu

SEQ ID NO: 2971290 - RNA, 19 nt, Artificial Sequence
  Description of Artificial Sequence: Synthetic oligonucleotide
ucaacaguucucaaaguca

SEQ ID NO: 2971291 - RNA, 19 nt, Artificial Sequence
  Description of Artificial Sequence: Synthetic oligonucleotide
ugaacuguagucaugguuu

SEQ ID NO: 2971292 - RNA, 19 nt, Artificial Sequence
  Description of Artificial Sequence: Synthetic oligonucleotide
uuuucuugaacuguaguca

SEQ ID NO: 2971293 - RNA, 19 nt, Artificial Sequence
  Description of Artificial Sequence: Synthetic oligonucleotide
uaagucacagccauagaca

SEQ ID NO: 2971294 - RNA, 19 nt, Artificial Sequence
  Description of Artificial Sequence: Synthetic oligonucleotide
auuuguaggagcacugugc

SEQ ID NO: 2971295 - RNA, 19 nt, Artificial Sequence
  Description of Artificial Sequence: Synthetic oligonucleotide
acugauuccgguaaugugg

SEQ ID NO: 2971296 - RNA, 19 nt, Artificial Sequence
  Description of Artificial Sequence: Synthetic oligonucleotide
acuucugaaguguuuguuc

SEQ ID NO: 2971297 - RNA, 19 nt, Artificial Sequence
  Description of Artificial Sequence: Synthetic oligonucleotide
gaaguguuuguucugcagc

SEQ ID NO: 2971298 - RNA, 19 nt, Artificial Sequence
  Description of Artificial Sequence: Synthetic oligonucleotide
uaacaggcaauccagucca

SEQ ID NO: 2971299 - RNA, 19 nt, Artificial Sequence
  Description of Artificial Sequence: Synthetic oligonucleotide
uuuguaggagcacugugca

SEQ ID NO: 2971300 - RNA, 19 nt, Artificial Sequence
  Description of Artificial Sequence: Synthetic oligonucleotide
ucuucaaugagcugauaca

SEQ ID NO: 2971301 - RNA, 19 nt, Artificial Sequence
  Description of Artificial Sequence: Synthetic oligonucleotide
aaggcugagcugcuucucc

SEQ ID NO: 2971302 - RNA, 19 nt, Artificial Sequence
  Description of Artificial Sequence: Synthetic oligonucleotide
gucacagccauagacagcg

SEQ ID NO: 2971303 - RNA, 19 nt, Artificial Sequence
  Description of Artificial Sequence: Synthetic oligonucleotide
cuuuucuugaacuguaguc

SEQ ID NO: 2971304 - RNA, 19 nt, Artificial Sequence
  Description of Artificial Sequence: Synthetic oligonucleotide
gugaaguacacauaaguca

SEQ ID NO: 2971305 - RNA, 19 nt, Artificial Sequence
  Description of Artificial Sequence: Synthetic oligonucleotide
uuagucugcagacaguguc

SEQ ID NO: 2971306 - RNA, 19 nt, Artificial Sequence
  Description of Artificial Sequence: Synthetic oligonucleotide
agugaaguacacauaaguc

SEQ ID NO: 2971307 - RNA, 19 nt, Artificial Sequence
  Description of Artificial Sequence: Synthetic oligonucleotide
acauaagucacagccauag

SEQ ID NO: 2971308 - RNA, 19 nt, Artificial Sequence
  Description of Artificial Sequence: Synthetic oligonucleotide
agcaccaucacccggaagu

SEQ ID NO: 2971309 - RNA, 19 nt, Artificial Sequence
  Description of Artificial Sequence: Synthetic oligonucleotide
aaguacacauaagucacag

SEQ ID NO: 2971310 - RNA, 19 nt, Artificial Sequence
  Description of Artificial Sequence: Synthetic oligonucleotide
ugauacagcugcuucuuag

SEQ ID NO: 2971311 - RNA, 19 nt, Artificial Sequence
  Description of Artificial Sequence: Synthetic oligonucleotide
aaguguuuguucugcagcu

SEQ ID NO: 2971312 - RNA, 19 nt, Artificial Sequence
  Description of Artificial Sequence: Synthetic oligonucleotide
uccucuaacaggcaaucca

SEQ ID NO: 2971313 - RNA, 19 nt, Artificial Sequence
  Description of Artificial Sequence: Synthetic oligonucleotide
guuagugaaguacacauaa

SEQ ID NO: 2971314 - RNA, 19 nt, Artificial Sequence
  Description of Artificial Sequence: Synthetic oligonucleotide
cuaacaggcaauccagucc

SEQ ID NO: 2971315 - RNA, 19 nt, Artificial Sequence
  Description of Artificial Sequence: Synthetic oligonucleotide
ugguuagugaaguacacau

SEQ ID NO: 2971316 - RNA, 19 nt, Artificial Sequence
  Description of Artificial Sequence: Synthetic oligonucleotide
aagcugggauccuucacgg

SEQ ID NO: 2971317 - RNA, 19 nt, Artificial Sequence
  Description of Artificial Sequence: Synthetic oligonucleotide
aaugugggcugccacucuc

SEQ ID NO: 2971318 - RNA, 19 nt, Artificial Sequence
  Description of Artificial Sequence: Synthetic oligonucleotide
uuagugaaguacacauaag

SEQ ID NO: 2971319 - RNA, 19 nt, Artificial Sequence
  Description of Artificial Sequence: Synthetic oligonucleotide
aguacacauaagucacagc

SEQ ID NO: 2971320 - RNA, 19 nt, Artificial Sequence
  Description of Artificial Sequence: Synthetic oligonucleotide
cuucuuagucugcagacag

SEQ ID NO: 2971321 - RNA, 19 nt, Artificial Sequence
  Description of Artificial Sequence: Synthetic oligonucleotide
uagucugcagacagugucg

SEQ ID NO: 2971322 - RNA, 19 nt, Artificial Sequence
  Description of Artificial Sequence: Synthetic oligonucleotide
uguaggagcacugugcaga

SEQ ID NO: 2971323 - RNA, 19 nt, Artificial Sequence
  Description of Artificial Sequence: Synthetic oligonucleotide
ucuuagucugcagacagug

SEQ ID NO: 2971324 - RNA, 19 nt, Artificial Sequence
  Description of Artificial Sequence: Synthetic oligonucleotide
ugggcugccacucucugag

SEQ ID NO: 2971325 - RNA, 19 nt, Artificial Sequence
  Description of Artificial Sequence: Synthetic oligonucleotide
ugaaguguuuguucugcag

SEQ ID NO: 2971326 - RNA, 19 nt, Artificial Sequence
  Description of Artificial Sequence: Synthetic oligonucleotide
ucugagguuuccuacuucu

SEQ ID NO: 2971327 - RNA, 19 nt, Artificial Sequence
  Description of Artificial Sequence: Synthetic oligonucleotide
ucacggguccccauggagg

SEQ ID NO: 2971328 - RNA, 19 nt, Artificial Sequence
  Description of Artificial Sequence: Synthetic oligonucleotide
uacacauaagucacagcca

SEQ ID NO: 2971329 - RNA, 19 nt, Artificial Sequence
  Description of Artificial Sequence: Synthetic oligonucleotide
uacuuagcugcuuuucuug

SEQ ID NO: 2971330 - RNA, 19 nt, Artificial Sequence
  Description of Artificial Sequence: Synthetic oligonucleotide
cucuucaaugagcugauac

SEQ ID NO: 2971331 - RNA, 19 nt, Artificial Sequence
  Description of Artificial Sequence: Synthetic oligonucleotide
auagacagcguuugcagga

SEQ ID NO: 2971332 - RNA, 19 nt, Artificial Sequence
  Description of Artificial Sequence: Synthetic oligonucleotide
uuagcugcuuuucuugaac

SEQ ID NO: 2971333 - RNA, 19 nt, Artificial Sequence
  Description of Artificial Sequence: Synthetic oligonucleotide
acucucugagguuuccuac

SEQ ID NO: 2971334 - RNA, 19 nt, Artificial Sequence
  Description of Artificial Sequence: Synthetic oligonucleotide
caacaguucucaaagucac

SEQ ID NO: 2971335 - RNA, 19 nt, Artificial Sequence
  Description of Artificial Sequence: Synthetic oligonucleotide
agcugcuucaucugguuag

SEQ ID NO: 2971336 - RNA, 19 nt, Artificial Sequence
  Description of Artificial Sequence: Synthetic oligonucleotide
agguuuccuacuucugggc

SEQ ID NO: 2971337 - RNA, 19 nt, Artificial Sequence
  Description of Artificial Sequence: Synthetic oligonucleotide
cugauuccgguaauguggg

SEQ ID NO: 2971338 - RNA, 19 nt, Artificial Sequence
  Description of Artificial Sequence: Synthetic oligonucleotide
aauccaguccacuucugaa

SEQ ID NO: 2971339 - RNA, 19 nt, Artificial Sequence
  Description of Artificial Sequence: Synthetic oligonucleotide
auacagcugcuucuuaguc

SEQ ID NO: 2971340 - RNA, 19 nt, Artificial Sequence
  Description of Artificial Sequence: Synthetic oligonucleotide
cauagacagcguuugcagg

SEQ ID NO: 2971341 - RNA, 19 nt, Artificial Sequence
  Description of Artificial Sequence: Synthetic oligonucleotide
uugcaggagcauuuguagg

SEQ ID NO: 2971342 - RNA, 19 nt, Artificial Sequence
  Description of Artificial Sequence: Synthetic oligonucleotide
ucugaaguguuuguucugc

SEQ ID NO: 2971343 - RNA, 19 nt, Artificial Sequence
  Description of Artificial Sequence: Synthetic oligonucleotide
cucaacaguucucaaaguc

SEQ ID NO: 2971344 - RNA, 19 nt, Artificial Sequence
  Description of Artificial Sequence: Synthetic oligonucleotide
ucuaacaggcaauccaguc

SEQ ID NO: 2971345 - RNA, 19 nt, Artificial Sequence
  Description of Artificial Sequence: Synthetic oligonucleotide
uguagucaugguuuccuca

SEQ ID NO: 2971346 - RNA, 19 nt, Artificial Sequence
  Description of Artificial Sequence: Synthetic oligonucleotide
caaagucaccucuucaaug

SEQ ID NO: 2971347 - RNA, 19 nt, Artificial Sequence
  Description of Artificial Sequence: Synthetic oligonucleotide
aggagcacugugcagagca

SEQ ID NO: 2971348 - RNA, 19 nt, Artificial Sequence
  Description of Artificial Sequence: Synthetic oligonucleotide
guuuccuacuucugggcgg

SEQ ID NO: 2971349 - RNA, 19 nt, Artificial Sequence
  Description of Artificial Sequence: Synthetic oligonucleotide
uugaacuguagucaugguu

SEQ ID NO: 2971350 - RNA, 19 nt, Artificial Sequence
  Description of Artificial Sequence: Synthetic oligonucleotide
aacuguagucaugguuucc

SEQ ID NO: 2971351 - RNA, 19 nt, Artificial Sequence
  Description of Artificial Sequence: Synthetic oligonucleotide
aacaguucucaaagucacc

SEQ ID NO: 2971352 - RNA, 19 nt, Artificial Sequence
  Description of Artificial Sequence: Synthetic oligonucleotide
aagugcuggccaaagcugg

SEQ ID NO: 2971353 - RNA, 19 nt, Artificial Sequence
  Description of Artificial Sequence: Synthetic oligonucleotide
ucugguuagugaaguacac

SEQ ID NO: 2971354 - RNA, 19 nt, Artificial Sequence
  Description of Artificial Sequence: Synthetic oligonucleotide
uccaguccacuucugaagu

SEQ ID NO: 2971355 - RNA, 19 nt, Artificial Sequence
  Description of Artificial Sequence: Synthetic oligonucleotide
ucaaagucaccucuucaau

SEQ ID NO: 2971356 - RNA, 19 nt, Artificial Sequence
  Description of Artificial Sequence: Synthetic oligonucleotide
ucaugguuuccucaacagu

SEQ ID NO: 2971357 - RNA, 19 nt, Artificial Sequence
  Description of Artificial Sequence: Synthetic oligonucleotide
uccacuucugaaguguuug

SEQ ID NO: 2971358 - RNA, 19 nt, Artificial Sequence
  Description of Artificial Sequence: Synthetic oligonucleotide
auccaguccacuucugaag

SEQ ID NO: 2971359 - RNA, 19 nt, Artificial Sequence
  Description of Artificial Sequence: Synthetic oligonucleotide
ugcuucuuagucugcagac

SEQ ID NO: 2971360 - RNA, 19 nt, Artificial Sequence
  Description of Artificial Sequence: Synthetic oligonucleotide
uuucuugaacuguagucau

SEQ ID NO: 2971361 - RNA, 19 nt, Artificial Sequence
  Description of Artificial Sequence: Synthetic oligonucleotide
gacugauuccgguaaugug

SEQ ID NO: 2971362 - RNA, 19 nt, Artificial Sequence
  Description of Artificial Sequence: Synthetic oligonucleotide
gucaugguuuccucaacag

SEQ ID NO: 2971363 - RNA, 19 nt, Artificial Sequence
  Description of Artificial Sequence: Synthetic oligonucleotide
uucacggguccccauggag

SEQ ID NO: 2971364 - RNA, 19 nt, Artificial Sequence
  Description of Artificial Sequence: Synthetic oligonucleotide
aaaggaauacuuagcugcu

SEQ ID NO: 2971365 - RNA, 19 nt, Artificial Sequence
  Description of Artificial Sequence: Synthetic oligonucleotide
uucaucugguuagugaagu

SEQ ID NO: 2971366 - RNA, 19 nt, Artificial Sequence
  Description of Artificial Sequence: Synthetic oligonucleotide
uuuccuacuucugggcggg

SEQ ID NO: 2971367 - RNA, 19 nt, Artificial Sequence
  Description of Artificial Sequence: Synthetic oligonucleotide
agucaugguuuccucaaca

SEQ ID NO: 2971368 - RNA, 19 nt, Artificial Sequence
  Description of Artificial Sequence: Synthetic oligonucleotide
auuccgguaaugugggcug

SEQ ID NO: 2971369 - RNA, 19 nt, Artificial Sequence
  Description of Artificial Sequence: Synthetic oligonucleotide
aggcaauccaguccacuuc

SEQ ID NO: 2971370 - RNA, 19 nt, Artificial Sequence
  Description of Artificial Sequence: Synthetic oligonucleotide
acagugucggaucuccucu

SEQ ID NO: 2971371 - RNA, 19 nt, Artificial Sequence
  Description of Artificial Sequence: Synthetic oligonucleotide
gugcagagcaccaucaccc

SEQ ID NO: 2971372 - RNA, 19 nt, Artificial Sequence
  Description of Artificial Sequence: Synthetic oligonucleotide
guguuuguucugcagcugc

SEQ ID NO: 2971373 - RNA, 19 nt, Artificial Sequence
  Description of Artificial Sequence: Synthetic oligonucleotide
aucuccucuucaguggggc

SEQ ID NO: 2971374 - RNA, 19 nt, Artificial Sequence
  Description of Artificial Sequence: Synthetic oligonucleotide
uuaaggcugagcugcuucu

SEQ ID NO: 2971375 - RNA, 19 nt, Artificial Sequence
  Description of Artificial Sequence: Synthetic oligonucleotide
agucaccucuucaaugagc

SEQ ID NO: 2971376 - RNA, 19 nt, Artificial Sequence
  Description of Artificial Sequence: Synthetic oligonucleotide
cauuuguaggagcacugug

SEQ ID NO: 2971377 - RNA, 19 nt, Artificial Sequence
  Description of Artificial Sequence: Synthetic oligonucleotide
cuggccaaagcugggaucc

SEQ ID NO: 2971378 - RNA, 19 nt, Artificial Sequence
  Description of Artificial Sequence: Synthetic oligonucleotide
gagggcaugguccugucca

SEQ ID NO: 2971379 - RNA, 19 nt, Artificial Sequence
  Description of Artificial Sequence: Synthetic oligonucleotide
uucuugaacuguagucaug

SEQ ID NO: 2971380 - RNA, 19 nt, Artificial Sequence
  Description of Artificial Sequence: Synthetic oligonucleotide
gaagugcuggccaaagcug

SEQ ID NO: 2971381 - RNA, 19 nt, Artificial Sequence
  Description of Artificial Sequence: Synthetic oligonucleotide
ugcagagcaccaucacccg

SEQ ID NO: 2971382 - RNA, 19 nt, Artificial Sequence
  Description of Artificial Sequence: Synthetic oligonucleotide
caucugguuagugaaguac

SEQ ID NO: 2971383 - RNA, 19 nt, Artificial Sequence
  Description of Artificial Sequence: Synthetic oligonucleotide
uucucaaagucaccucuuc

SEQ ID NO: 2971384 - RNA, 19 nt, Artificial Sequence
  Description of Artificial Sequence: Synthetic oligonucleotide
cuucaucugguuagugaag

SEQ ID NO: 2971385 - RNA, 19 nt, Artificial Sequence
  Description of Artificial Sequence: Synthetic oligonucleotide
ggaaaggaauacuuagcug

SEQ ID NO: 2971386 - RNA, 19 nt, Artificial Sequence
  Description of Artificial Sequence: Synthetic oligonucleotide
gguuuccuacuucugggcg

SEQ ID NO: 2971387 - RNA, 19 nt, Artificial Sequence
  Description of Artificial Sequence: Synthetic oligonucleotide
gcuccaggaauccucaucc

SEQ ID NO: 2971388 - RNA, 19 nt, Artificial Sequence
  Description of Artificial Sequence: Synthetic oligonucleotide
gaauacuuagcugcuuuuc

SEQ ID NO: 2971389 - RNA, 19 nt, Artificial Sequence
  Description of Artificial Sequence: Synthetic oligonucleotide
uucugaaguguuuguucug

SEQ ID NO: 2971390 - RNA, 19 nt, Artificial Sequence
  Description of Artificial Sequence: Synthetic oligonucleotide
acuuagcugcuuuucuuga

SEQ ID NO: 2971391 - RNA, 19 nt, Artificial Sequence
  Description of Artificial Sequence: Synthetic oligonucleotide
uucugggcgggaaaggaau

SEQ ID NO: 2971392 - RNA, 19 nt, Artificial Sequence
  Description of Artificial Sequence: Synthetic oligonucleotide
uuguucugcagcugcuuca

SEQ ID NO: 2971393 - RNA, 19 nt, Artificial Sequence
  Description of Artificial Sequence: Synthetic oligonucleotide
ucugcagacagugucggau

SEQ ID NO: 2971394 - RNA, 19 nt, Artificial Sequence
  Description of Artificial Sequence: Synthetic oligonucleotide
ugcuucuccgacugauucc

SEQ ID NO: 2971395 - RNA, 19 nt, Artificial Sequence
  Description of Artificial Sequence: Synthetic oligonucleotide
ugguuuccucaacaguucu

SEQ ID NO: 2971396 - RNA, 19 nt, Artificial Sequence
  Description of Artificial Sequence: Synthetic oligonucleotide
aggaauacuuagcugcuuu

SEQ ID NO: 2971397 - RNA, 19 nt, Artificial Sequence
  Description of Artificial Sequence: Synthetic oligonucleotide
uagcugcuuuucuugaacu

SEQ ID NO: 2971398 - RNA, 19 nt, Artificial Sequence
  Description of Artificial Sequence: Synthetic oligonucleotide
uuccucaacaguucucaaa

SEQ ID NO: 2971399 - RNA, 19 nt, Artificial Sequence
  Description of Artificial Sequence: Synthetic oligonucleotide
agacagcguuugcaggagc

SEQ ID NO: 2971400 - RNA, 19 nt, Artificial Sequence
  Description of Artificial Sequence: Synthetic oligonucleotide
agcugcuuuucuugaacug

SEQ ID NO: 2971401 - RNA, 19 nt, Artificial Sequence
  Description of Artificial Sequence: Synthetic oligonucleotide
ugcagacagugucggaucu

SEQ ID NO: 2971402 - RNA, 19 nt, Artificial Sequence
  Description of Artificial Sequence: Synthetic oligonucleotide
cucaaagucaccucuucaa

SEQ ID NO: 2971403 - RNA, 19 nt, Artificial Sequence
  Description of Artificial Sequence: Synthetic oligonucleotide
gcgggaaaggaauacuuag

SEQ ID NO: 2971404 - RNA, 19 nt, Artificial Sequence
  Description of Artificial Sequence: Synthetic oligonucleotide
agugucggaucuccucuuc

SEQ ID NO: 2971405 - RNA, 19 nt, Artificial Sequence
  Description of Artificial Sequence: Synthetic oligonucleotide
ucaguggggcuccaggaau

SEQ ID NO: 2971406 - RNA, 19 nt, Artificial Sequence
  Description of Artificial Sequence: Synthetic oligonucleotide
cacggguccccauggaggg

SEQ ID NO: 2971407 - RNA, 19 nt, Artificial Sequence
  Description of Artificial Sequence: Synthetic oligonucleotide
auacuuagcugcuuuucuu

SEQ ID NO: 2971408 - RNA, 19 nt, Artificial Sequence
  Description of Artificial Sequence: Synthetic oligonucleotide
ccaggaauccucauccucc

SEQ ID NO: 2971409 - RNA, 19 nt, Artificial Sequence
  Description of Artificial Sequence: Synthetic oligonucleotide
gacagugucggaucuccuc

SEQ ID NO: 2971410 - RNA, 19 nt, Artificial Sequence
  Description of Artificial Sequence: Synthetic oligonucleotide
uucaguggggcuccaggaa

SEQ ID NO: 2971411 - RNA, 19 nt, Artificial Sequence
  Description of Artificial Sequence: Synthetic oligonucleotide
agucugcagacagugucgg

SEQ ID NO: 2971412 - RNA, 19 nt, Artificial Sequence
  Description of Artificial Sequence: Synthetic oligonucleotide
gaacuguagucaugguuuc

SEQ ID NO: 2971413 - RNA, 19 nt, Artificial Sequence
  Description of Artificial Sequence: Synthetic oligonucleotide
aggcugagcugcuucuccg

SEQ ID NO: 2971414 - RNA, 19 nt, Artificial Sequence
  Description of Artificial Sequence: Synthetic oligonucleotide
uucuuagucugcagacagu

SEQ ID NO: 2971415 - RNA, 19 nt, Artificial Sequence
  Description of Artificial Sequence: Synthetic oligonucleotide
uuguaggagcacugugcag

SEQ ID NO: 2971416 - RNA, 19 nt, Artificial Sequence
  Description of Artificial Sequence: Synthetic oligonucleotide
augguuuccucaacaguuc

SEQ ID NO: 2971417 - RNA, 19 nt, Artificial Sequence
  Description of Artificial Sequence: Synthetic oligonucleotide
guaggagcacugugcagag

SEQ ID NO: 2971418 - RNA, 19 nt, Artificial Sequence
  Description of Artificial Sequence: Synthetic oligonucleotide
guagucaugguuuccucaa

SEQ ID NO: 2971419 - RNA, 19 nt, Artificial Sequence
  Description of Artificial Sequence: Synthetic oligonucleotide
aucacccggaagugcuggc

SEQ ID NO: 2971420 - RNA, 19 nt, Artificial Sequence
  Description of Artificial Sequence: Synthetic oligonucleotide
aucugguuagugaaguaca

SEQ ID NO: 2971421 - RNA, 19 nt, Artificial Sequence
  Description of Artificial Sequence: Synthetic oligonucleotide
gagcugauacagcugcuuc

SEQ ID NO: 2971422 - RNA, 19 nt, Artificial Sequence
  Description of Artificial Sequence: Synthetic oligonucleotide
cagacagugucggaucucc

SEQ ID NO: 2971423 - RNA, 19 nt, Artificial Sequence
  Description of Artificial Sequence: Synthetic oligonucleotide
uccuucacggguccccaug

SEQ ID NO: 2971424 - RNA, 19 nt, Artificial Sequence
  Description of Artificial Sequence: Synthetic oligonucleotide
aguggggcuccaggaaucc

SEQ ID NO: 2971425 - RNA, 19 nt, Artificial Sequence
  Description of Artificial Sequence: Synthetic oligonucleotide
gauacagcugcuucuuagu

SEQ ID NO: 2971426 - RNA, 19 nt, Artificial Sequence
  Description of Artificial Sequence: Synthetic oligonucleotide
ccucuaacaggcaauccag

SEQ ID NO: 2971427 - RNA, 19 nt, Artificial Sequence
  Description of Artificial Sequence: Synthetic oligonucleotide
cugcuucuccgacugauuc

SEQ ID NO: 2971428 - RNA, 19 nt, Artificial Sequence
  Description of Artificial Sequence: Synthetic oligonucleotide
caugguuuccucaacaguu

SEQ ID NO: 2971429 - RNA, 19 nt, Artificial Sequence
  Description of Artificial Sequence: Synthetic oligonucleotide
ccauagacagcguuugcag

SEQ ID NO: 2971430 - RNA, 19 nt, Artificial Sequence
  Description of Artificial Sequence: Synthetic oligonucleotide
agucacagccauagacagc

SEQ ID NO: 2971431 - RNA, 19 nt, Artificial Sequence
  Description of Artificial Sequence: Synthetic oligonucleotide
uucuccgacugauuccggu

SEQ ID NO: 2971432 - RNA, 19 nt, Artificial Sequence
  Description of Artificial Sequence: Synthetic oligonucleotide
uagacagcguuugcaggag

SEQ ID NO: 2971433 - RNA, 19 nt, Artificial Sequence
  Description of Artificial Sequence: Synthetic oligonucleotide
ucucugagguuuccuacuu

SEQ ID NO: 2971434 - RNA, 19 nt, Artificial Sequence
  Description of Artificial Sequence: Synthetic oligonucleotide
cuucugaaguguuuguucu

SEQ ID NO: 2971435 - RNA, 19 nt, Artificial Sequence
  Description of Artificial Sequence: Synthetic oligonucleotide
caccucuucaaugagcuga

SEQ ID NO: 2971436 - RNA, 19 nt, Artificial Sequence
  Description of Artificial Sequence: Synthetic oligonucleotide
ugggauccuucacgggucc

SEQ ID NO: 2971437 - RNA, 19 nt, Artificial Sequence
  Description of Artificial Sequence: Synthetic oligonucleotide
uagucaugguuuccucaac

SEQ ID NO: 2971438 - RNA, 19 nt, Artificial Sequence
  Description of Artificial Sequence: Synthetic oligonucleotide
aggagcauuuguaggagca

SEQ ID NO: 2971439 - RNA, 19 nt, Artificial Sequence
  Description of Artificial Sequence: Synthetic oligonucleotide
ugugggcugccacucucug

SEQ ID NO: 2971440 - RNA, 19 nt, Artificial Sequence
  Description of Artificial Sequence: Synthetic oligonucleotide
gcuucuccgacugauuccg

SEQ ID NO: 2971441 - RNA, 19 nt, Artificial Sequence
  Description of Artificial Sequence: Synthetic oligonucleotide
uggggcuccaggaauccuc

SEQ ID NO: 2971442 - RNA, 19 nt, Artificial Sequence
  Description of Artificial Sequence: Synthetic oligonucleotide
uccuccucuaacaggcaau

SEQ ID NO: 2971443 - RNA, 19 nt, Artificial Sequence
  Description of Artificial Sequence: Synthetic oligonucleotide
caggagcauuuguaggagc

SEQ ID NO: 2971444 - RNA, 19 nt, Artificial Sequence
  Description of Artificial Sequence: Synthetic oligonucleotide
agcauuuguaggagcacug

SEQ ID NO: 2971445 - RNA, 19 nt, Artificial Sequence
  Description of Artificial Sequence: Synthetic oligonucleotide
cugcagcugcuucaucugg

SEQ ID NO: 2971446 - RNA, 19 nt, Artificial Sequence
  Description of Artificial Sequence: Synthetic oligonucleotide
cuacuucugggcgggaaag

SEQ ID NO: 2971447 - RNA, 19 nt, Artificial Sequence
  Description of Artificial Sequence: Synthetic oligonucleotide
caaagcugggauccuucac

SEQ ID NO: 2971448 - RNA, 19 nt, Artificial Sequence
  Description of Artificial Sequence: Synthetic oligonucleotide
gagcacugugcagagcacc

SEQ ID NO: 2971449 - RNA, 19 nt, Artificial Sequence
  Description of Artificial Sequence: Synthetic oligonucleotide
gggaaaggaauacuuagcu

SEQ ID NO: 2971450 - RNA, 19 nt, Artificial Sequence
  Description of Artificial Sequence: Synthetic oligonucleotide
uaaugugggcugccacucu

SEQ ID NO: 2971451 - RNA, 19 nt, Artificial Sequence
  Description of Artificial Sequence: Synthetic oligonucleotide
aauccucauccuccucuaa

SEQ ID NO: 2971452 - RNA, 19 nt, Artificial Sequence
  Description of Artificial Sequence: Synthetic oligonucleotide
cccauggagggcauggucc

SEQ ID NO: 2971453 - RNA, 19 nt, Artificial Sequence
  Description of Artificial Sequence: Synthetic oligonucleotide
gcuucaucugguuagugaa

SEQ ID NO: 2971454 - RNA, 19 nt, Artificial Sequence
  Description of Artificial Sequence: Synthetic oligonucleotide
cugagguuuccuacuucug

SEQ ID NO: 2971455 - RNA, 19 nt, Artificial Sequence
  Description of Artificial Sequence: Synthetic oligonucleotide
gauuccgguaaugugggcu

SEQ ID NO: 2971456 - RNA, 19 nt, Artificial Sequence
  Description of Artificial Sequence: Synthetic oligonucleotide
gaaguacacauaagucaca

SEQ ID NO: 2971457 - RNA, 19 nt, Artificial Sequence
  Description of Artificial Sequence: Synthetic oligonucleotide
ucuccgacugauuccggua

SEQ ID NO: 2971458 - RNA, 19 nt, Artificial Sequence
  Description of Artificial Sequence: Synthetic oligonucleotide
caucacccggaagugcugg

SEQ ID NO: 2971459 - RNA, 19 nt, Artificial Sequence
  Description of Artificial Sequence: Synthetic oligonucleotide
uccucuucaguggggcucc

SEQ ID NO: 2971460 - RNA, 19 nt, Artificial Sequence
  Description of Artificial Sequence: Synthetic oligonucleotide
ucaucugguuagugaagua

SEQ ID NO: 2971461 - RNA, 19 nt, Artificial Sequence
  Description of Artificial Sequence: Synthetic oligonucleotide
gaucuccucuucagugggg

SEQ ID NO: 2971462 - RNA, 19 nt, Artificial Sequence
  Description of Artificial Sequence: Synthetic oligonucleotide
acuucugggcgggaaagga

SEQ ID NO: 2971463 - RNA, 19 nt, Artificial Sequence
  Description of Artificial Sequence: Synthetic oligonucleotide
acugugcagagcaccauca

SEQ ID NO: 2971464 - RNA, 19 nt, Artificial Sequence
  Description of Artificial Sequence: Synthetic oligonucleotide
agcugggauccuucacggg

SEQ ID NO: 2971465 - RNA, 19 nt, Artificial Sequence
  Description of Artificial Sequence: Synthetic oligonucleotide
cugggauccuucacggguc

SEQ ID NO: 2971466 - RNA, 19 nt, Artificial Sequence
  Description of Artificial Sequence: Synthetic oligonucleotide
ggaagugcuggccaaagcu

SEQ ID NO: 2971467 - RNA, 19 nt, Artificial Sequence
  Description of Artificial Sequence: Synthetic oligonucleotide
gacagcguuugcaggagca

SEQ ID NO: 2971468 - RNA, 19 nt, Artificial Sequence
  Description of Artificial Sequence: Synthetic oligonucleotide
cuucaguggggcuccagga

SEQ ID NO: 2971469 - RNA, 19 nt, Artificial Sequence
  Description of Artificial Sequence: Synthetic oligonucleotide
aguguuuguucugcagcug

SEQ ID NO: 2971470 - RNA, 19 nt, Artificial Sequence
  Description of Artificial Sequence: Synthetic oligonucleotide
aacaggcaauccaguccac

SEQ ID NO: 2971471 - RNA, 19 nt, Artificial Sequence
  Description of Artificial Sequence: Synthetic oligonucleotide
accaucacccggaagugcu

SEQ ID NO: 2971472 - RNA, 19 nt, Artificial Sequence
  Description of Artificial Sequence: Synthetic oligonucleotide
guccccauggagggcaugg

SEQ ID NO: 2971473 - RNA, 19 nt, Artificial Sequence
  Description of Artificial Sequence: Synthetic oligonucleotide
cugcagacagugucggauc

SEQ ID NO: 2971474 - RNA, 19 nt, Artificial Sequence
  Description of Artificial Sequence: Synthetic oligonucleotide
uguucugcagcugcuucau

SEQ ID NO: 2971475 - RNA, 19 nt, Artificial Sequence
  Description of Artificial Sequence: Synthetic oligonucleotide
cagagcaccaucacccgga

SEQ ID NO: 2971476 - RNA, 19 nt, Artificial Sequence
  Description of Artificial Sequence: Synthetic oligonucleotide
ucaccucuucaaugagcug

SEQ ID NO: 2971477 - RNA, 19 nt, Artificial Sequence
  Description of Artificial Sequence: Synthetic oligonucleotide
ugauuccgguaaugugggc

SEQ ID NO: 2971478 - RNA, 19 nt, Artificial Sequence
  Description of Artificial Sequence: Synthetic oligonucleotide
cagccauagacagcguuug

SEQ ID NO: 2971479 - RNA, 19 nt, Artificial Sequence
  Description of Artificial Sequence: Synthetic oligonucleotide
ugagcugauacagcugcuu

SEQ ID NO: 2971480 - RNA, 19 nt, Artificial Sequence
  Description of Artificial Sequence: Synthetic oligonucleotide
guuugcaggagcauuugua

SEQ ID NO: 2971481 - RNA, 19 nt, Artificial Sequence
  Description of Artificial Sequence: Synthetic oligonucleotide
cuguagucaugguuuccuc

SEQ ID NO: 2971482 - RNA, 19 nt, Artificial Sequence
  Description of Artificial Sequence: Synthetic oligonucleotide
cacugugcagagcaccauc

SEQ ID NO: 2971483 - RNA, 19 nt, Artificial Sequence
  Description of Artificial Sequence: Synthetic oligonucleotide
caauccaguccacuucuga

SEQ ID NO: 2971484 - RNA, 19 nt, Artificial Sequence
  Description of Artificial Sequence: Synthetic oligonucleotide
ucugggcgggaaaggaaua

SEQ ID NO: 2971485 - RNA, 19 nt, Artificial Sequence
  Description of Artificial Sequence: Synthetic oligonucleotide
aaggaauacuuagcugcuu

SEQ ID NO: 2971486 - RNA, 19 nt, Artificial Sequence
  Description of Artificial Sequence: Synthetic oligonucleotide
gucaccucuucaaugagcu

SEQ ID NO: 2971487 - RNA, 19 nt, Artificial Sequence
  Description of Artificial Sequence: Synthetic oligonucleotide
cugcuucuuagucugcaga

SEQ ID NO: 2971488 - RNA, 19 nt, Artificial Sequence
  Description of Artificial Sequence: Synthetic oligonucleotide
agugcuggccaaagcuggg

SEQ ID NO: 2971489 - RNA, 19 nt, Artificial Sequence
  Description of Artificial Sequence: Synthetic oligonucleotide
cuuagcugcuuuucuugaa

SEQ ID NO: 2971490 - RNA, 19 nt, Artificial Sequence
  Description of Artificial Sequence: Synthetic oligonucleotide
cuucuccgacugauuccgg

SEQ ID NO: 2971491 - RNA, 19 nt, Artificial Sequence
  Description of Artificial Sequence: Synthetic oligonucleotide
ugggcgggaaaggaauacu

SEQ ID NO: 2971492 - RNA, 19 nt, Artificial Sequence
  Description of Artificial Sequence: Synthetic oligonucleotide
cugaaguguuuguucugca

SEQ ID NO: 2971493 - RNA, 19 nt, Artificial Sequence
  Description of Artificial Sequence: Synthetic oligonucleotide
uccgacugauuccgguaau

SEQ ID NO: 2971494 - RNA, 19 nt, Artificial Sequence
  Description of Artificial Sequence: Synthetic oligonucleotide
acagccauagacagcguuu

SEQ ID NO: 2971495 - RNA, 19 nt, Artificial Sequence
  Description of Artificial Sequence: Synthetic oligonucleotide
cugugcagagcaccaucac

SEQ ID NO: 2971496 - RNA, 19 nt, Artificial Sequence
  Description of Artificial Sequence: Synthetic oligonucleotide
agcacugugcagagcacca

SEQ ID NO: 2971497 - RNA, 19 nt, Artificial Sequence
  Description of Artificial Sequence: Synthetic oligonucleotide
cucugagguuuccuacuuc

SEQ ID NO: 2971498 - RNA, 19 nt, Artificial Sequence
  Description of Artificial Sequence: Synthetic oligonucleotide
acaggcaauccaguccacu

SEQ ID NO: 2971499 - RNA, 19 nt, Artificial Sequence
  Description of Artificial Sequence: Synthetic oligonucleotide
gcagagcaccaucacccgg

SEQ ID NO: 2971500 - RNA, 19 nt, Artificial Sequence
  Description of Artificial Sequence: Synthetic oligonucleotide
cuccucuaacaggcaaucc

SEQ ID NO: 2971501 - RNA, 19 nt, Artificial Sequence
  Description of Artificial Sequence: Synthetic oligonucleotide
cauaagucacagccauaga

SEQ ID NO: 2971502 - RNA, 19 nt, Artificial Sequence
  Description of Artificial Sequence: Synthetic oligonucleotide
cugguuagugaaguacaca

SEQ ID NO: 2971503 - RNA, 19 nt, Artificial Sequence
  Description of Artificial Sequence: Synthetic oligonucleotide
caguggggcuccaggaauc

SEQ ID NO: 2971504 - RNA, 19 nt, Artificial Sequence
  Description of Artificial Sequence: Synthetic oligonucleotide
uccgguaaugugggcugcc

SEQ ID NO: 2971505 - RNA, 19 nt, Artificial Sequence
  Description of Artificial Sequence: Synthetic oligonucleotide
uaaggcugagcugcuucuc

SEQ ID NO: 2971506 - RNA, 19 nt, Artificial Sequence
  Description of Artificial Sequence: Synthetic oligonucleotide
cugggcgggaaaggaauac

SEQ ID NO: 2971507 - RNA, 19 nt, Artificial Sequence
  Description of Artificial Sequence: Synthetic oligonucleotide
uuccgguaaugugggcugc

SEQ ID NO: 2971508 - RNA, 19 nt, Artificial Sequence
  Description of Artificial Sequence: Synthetic oligonucleotide
gagcaccaucacccggaag

SEQ ID NO: 2971509 - RNA, 19 nt, Artificial Sequence
  Description of Artificial Sequence: Synthetic oligonucleotide
agcugcuucuccgacugau

SEQ ID NO: 2971510 - RNA, 19 nt, Artificial Sequence
  Description of Artificial Sequence: Synthetic oligonucleotide
ccuucacggguccccaugg

SEQ ID NO: 2971511 - RNA, 19 nt, Artificial Sequence
  Description of Artificial Sequence: Synthetic oligonucleotide
agcguuugcaggagcauuu

SEQ ID NO: 2971512 - RNA, 19 nt, Artificial Sequence
  Description of Artificial Sequence: Synthetic oligonucleotide
gugucggaucuccucuuca

SEQ ID NO: 2971513 - RNA, 19 nt, Artificial Sequence
  Description of Artificial Sequence: Synthetic oligonucleotide
gauccuucacgggucccca

SEQ ID NO: 2971514 - RNA, 19 nt, Artificial Sequence
  Description of Artificial Sequence: Synthetic oligonucleotide
uccuacuucugggcgggaa

SEQ ID NO: 2971515 - RNA, 19 nt, Artificial Sequence
  Description of Artificial Sequence: Synthetic oligonucleotide
agagcaccaucacccggaa

SEQ ID NO: 2971516 - RNA, 19 nt, Artificial Sequence
  Description of Artificial Sequence: Synthetic oligonucleotide
cggaucuccucuucagugg

SEQ ID NO: 2971517 - RNA, 19 nt, Artificial Sequence
  Description of Artificial Sequence: Synthetic oligonucleotide
cuccgacugauuccgguaa

SEQ ID NO: 2971518 - RNA, 19 nt, Artificial Sequence
  Description of Artificial Sequence: Synthetic oligonucleotide
ucacagccauagacagcgu

SEQ ID NO: 2971519 - RNA, 19 nt, Artificial Sequence
  Description of Artificial Sequence: Synthetic oligonucleotide
gccauagacagcguuugca

SEQ ID NO: 2971520 - RNA, 19 nt, Artificial Sequence
  Description of Artificial Sequence: Synthetic oligonucleotide
ugccacucucugagguuuc

SEQ ID NO: 2971521 - RNA, 19 nt, Artificial Sequence
  Description of Artificial Sequence: Synthetic oligonucleotide
cucucugagguuuccuacu

SEQ ID NO: 2971522 - RNA, 19 nt, Artificial Sequence
  Description of Artificial Sequence: Synthetic oligonucleotide
ggcaauccaguccacuucu

SEQ ID NO: 2971523 - RNA, 19 nt, Artificial Sequence
  Description of Artificial Sequence: Synthetic oligonucleotide
gcugggauccuucacgggu

SEQ ID NO: 2971524 - RNA, 19 nt, Artificial Sequence
  Description of Artificial Sequence: Synthetic oligonucleotide
ggcuccaggaauccucauc

SEQ ID NO: 2971525 - RNA, 19 nt, Artificial Sequence
  Description of Artificial Sequence: Synthetic oligonucleotide
cuuagucugcagacagugu

SEQ ID NO: 2971526 - RNA, 19 nt, Artificial Sequence
  Description of Artificial Sequence: Synthetic oligonucleotide
gcuuuucuugaacuguagu

SEQ ID NO: 2971527 - RNA, 19 nt, Artificial Sequence
  Description of Artificial Sequence: Synthetic oligonucleotide
ggagcauuuguaggagcac

SEQ ID NO: 2971528 - RNA, 19 nt, Artificial Sequence
  Description of Artificial Sequence: Synthetic oligonucleotide
uaggagcacugugcagagc

SEQ ID NO: 2971529 - RNA, 19 nt, Artificial Sequence
  Description of Artificial Sequence: Synthetic oligonucleotide
cucuaacaggcaauccagu

SEQ ID NO: 2971530 - RNA, 19 nt, Artificial Sequence
  Description of Artificial Sequence: Synthetic oligonucleotide
acagcguuugcaggagcau

SEQ ID NO: 2971531 - RNA, 19 nt, Artificial Sequence
  Description of Artificial Sequence: Synthetic oligonucleotide
gcaugguccuguccaaguc

SEQ ID NO: 2971532 - RNA, 19 nt, Artificial Sequence
  Description of Artificial Sequence: Synthetic oligonucleotide
acggguccccauggagggc

SEQ ID NO: 2971533 - RNA, 19 nt, Artificial Sequence
  Description of Artificial Sequence: Synthetic oligonucleotide
gcugagcugcuucuccgac

SEQ ID NO: 2971534 - RNA, 19 nt, Artificial Sequence
  Description of Artificial Sequence: Synthetic oligonucleotide
cacccggaagugcuggcca

SEQ ID NO: 2971535 - RNA, 19 nt, Artificial Sequence
  Description of Artificial Sequence: Synthetic oligonucleotide
augagcugauacagcugcu

SEQ ID NO: 2971536 - RNA, 19 nt, Artificial Sequence
  Description of Artificial Sequence: Synthetic oligonucleotide
gcuucuuagucugcagaca

SEQ ID NO: 2971537 - RNA, 19 nt, Artificial Sequence
  Description of Artificial Sequence: Synthetic oligonucleotide
gucggaucuccucuucagu

SEQ ID NO: 2971538 - RNA, 19 nt, Artificial Sequence
  Description of Artificial Sequence: Synthetic oligonucleotide
uggagggcaugguccuguc

SEQ ID NO: 2971539 - RNA, 19 nt, Artificial Sequence
  Description of Artificial Sequence: Synthetic oligonucleotide
ggagggcaugguccugucc

SEQ ID NO: 2971540 - RNA, 19 nt, Artificial Sequence
  Description of Artificial Sequence: Synthetic oligonucleotide
acccggaagugcuggccaa

SEQ ID NO: 2971541 - RNA, 19 nt, Artificial Sequence
  Description of Artificial Sequence: Synthetic oligonucleotide
cuugaacuguagucauggu

SEQ ID NO: 2971542 - RNA, 19 nt, Artificial Sequence
  Description of Artificial Sequence: Synthetic oligonucleotide
gugggcugccacucucuga

SEQ ID NO: 2971543 - RNA, 19 nt, Artificial Sequence
  Description of Artificial Sequence: Synthetic oligonucleotide
aguccacuucugaaguguu

SEQ ID NO: 2971544 - RNA, 19 nt, Artificial Sequence
  Description of Artificial Sequence: Synthetic oligonucleotide
gcuggccaaagcugggauc

SEQ ID NO: 2971545 - RNA, 19 nt, Artificial Sequence
  Description of Artificial Sequence: Synthetic oligonucleotide
augugggcugccacucucu

SEQ ID NO: 2971546 - RNA, 19 nt, Artificial Sequence
  Description of Artificial Sequence: Synthetic oligonucleotide
cauccuccucuaacaggca

SEQ ID NO: 2971547 - RNA, 19 nt, Artificial Sequence
  Description of Artificial Sequence: Synthetic oligonucleotide
gguuagugaaguacacaua

SEQ ID NO: 2971548 - RNA, 19 nt, Artificial Sequence
  Description of Artificial Sequence: Synthetic oligonucleotide
caggaauccucauccuccu

SEQ ID NO: 2971549 - RNA, 19 nt, Artificial Sequence
  Description of Artificial Sequence: Synthetic oligonucleotide
ccaguccacuucugaagug

SEQ ID NO: 2971550 - RNA, 19 nt, Artificial Sequence
  Description of Artificial Sequence: Synthetic oligonucleotide
uccccauggagggcauggu

SEQ ID NO: 2971551 - RNA, 19 nt, Artificial Sequence
  Description of Artificial Sequence: Synthetic oligonucleotide
caguccacuucugaagugu

SEQ ID NO: 2971552 - RNA, 19 nt, Artificial Sequence
  Description of Artificial Sequence: Synthetic oligonucleotide
cauggagggcaugguccug

SEQ ID NO: 2971553 - RNA, 19 nt, Artificial Sequence
  Description of Artificial Sequence: Synthetic oligonucleotide
caggcaauccaguccacuu

SEQ ID NO: 2971554 - RNA, 19 nt, Artificial Sequence
  Description of Artificial Sequence: Synthetic oligonucleotide
cuucacggguccccaugga

SEQ ID NO: 2971555 - RNA, 19 nt, Artificial Sequence
  Description of Artificial Sequence: Synthetic oligonucleotide
agacagugucggaucuccu

SEQ ID NO: 2971556 - RNA, 19 nt, Artificial Sequence
  Description of Artificial Sequence: Synthetic oligonucleotide
ggaauacuuagcugcuuuu

SEQ ID NO: 2971557 - RNA, 19 nt, Artificial Sequence
  Description of Artificial Sequence: Synthetic oligonucleotide
auccuucacggguccccau

SEQ ID NO: 2971558 - RNA, 19 nt, Artificial Sequence
  Description of Artificial Sequence: Synthetic oligonucleotide
ccaaagcugggauccuuca

SEQ ID NO: 2971559 - RNA, 19 nt, Artificial Sequence
  Description of Artificial Sequence: Synthetic oligonucleotide
cugauacagcugcuucuua

SEQ ID NO: 2971560 - RNA, 19 nt, Artificial Sequence
  Description of Artificial Sequence: Synthetic oligonucleotide
ccuccucuaacaggcaauc

SEQ ID NO: 2971561 - RNA, 19 nt, Artificial Sequence
  Description of Artificial Sequence: Synthetic oligonucleotide
ggcugagcugcuucuccga

SEQ ID NO: 2971562 - RNA, 19 nt, Artificial Sequence
  Description of Artificial Sequence: Synthetic oligonucleotide
cugagcugcuucuccgacu

SEQ ID NO: 2971563 - RNA, 19 nt, Artificial Sequence
  Description of Artificial Sequence: Synthetic oligonucleotide
ggcaugguccuguccaagu

SEQ ID NO: 2971564 - RNA, 19 nt, Artificial Sequence
  Description of Artificial Sequence: Synthetic oligonucleotide
gccaaagcugggauccuuc

SEQ ID NO: 2971565 - RNA, 19 nt, Artificial Sequence
  Description of Artificial Sequence: Synthetic oligonucleotide
ggcugccacucucugaggu

SEQ ID NO: 2971566 - RNA, 19 nt, Artificial Sequence
  Description of Artificial Sequence: Synthetic oligonucleotide
ggcgggaaaggaauacuua

SEQ ID NO: 2971567 - RNA, 19 nt, Artificial Sequence
  Description of Artificial Sequence: Synthetic oligonucleotide
gcguuugcaggagcauuug

SEQ ID NO: 2971568 - RNA, 19 nt, Artificial Sequence
  Description of Artificial Sequence: Synthetic oligonucleotide
gggcaugguccuguccaag

SEQ ID NO: 2971569 - RNA, 19 nt, Artificial Sequence
  Description of Artificial Sequence: Synthetic oligonucleotide
gggcugccacucucugagg

SEQ ID NO: 2971570 - RNA, 19 nt, Artificial Sequence
  Description of Artificial Sequence: Synthetic oligonucleotide
ccgacugauuccgguaaug

SEQ ID NO: 2971571 - RNA, 19 nt, Artificial Sequence
  Description of Artificial Sequence: Synthetic oligonucleotide
ccaucacccggaagugcug

SEQ ID NO: 2971572 - RNA, 19 nt, Artificial Sequence
  Description of Artificial Sequence: Synthetic oligonucleotide
cacagccauagacagcguu

SEQ ID NO: 2971573 - RNA, 19 nt, Artificial Sequence
  Description of Artificial Sequence: Synthetic oligonucleotide
uuccuacuucugggcggga

SEQ ID NO: 2971574 - RNA, 19 nt, Artificial Sequence
  Description of Artificial Sequence: Synthetic oligonucleotide
ggagcacugugcagagcac

SEQ ID NO: 2971575 - RNA, 19 nt, Artificial Sequence
  Description of Artificial Sequence: Synthetic oligonucleotide
ccuacuucugggcgggaaa

SEQ ID NO: 2971576 - RNA, 19 nt, Artificial Sequence
  Description of Artificial Sequence: Synthetic oligonucleotide
cggaagugcuggccaaagc

SEQ ID NO: 2971577 - RNA, 19 nt, Artificial Sequence
  Description of Artificial Sequence: Synthetic oligonucleotide
ggggcuccaggaauccuca

SEQ ID NO: 2971578 - RNA, 19 nt, Artificial Sequence
  Description of Artificial Sequence: Synthetic oligonucleotide
ccggaagugcuggccaaag

SEQ ID NO: 2971579 - RNA, 19 nt, Artificial Sequence
  Description of Artificial Sequence: Synthetic oligonucleotide
cuccaggaauccucauccu

SEQ ID NO: 2971580 - RNA, 19 nt, Artificial Sequence
  Description of Artificial Sequence: Synthetic oligonucleotide
gccacucucugagguuucc

SEQ ID NO: 2971581 - RNA, 19 nt, Artificial Sequence
  Description of Artificial Sequence: Synthetic oligonucleotide
gcauuuguaggagcacugu

SEQ ID NO: 2971582 - RNA, 19 nt, Artificial Sequence
  Description of Artificial Sequence: Synthetic oligonucleotide
cgguaaugugggcugccac

SEQ ID NO: 2971583 - RNA, 19 nt, Artificial Sequence
  Description of Artificial Sequence: Synthetic oligonucleotide
gcagacagugucggaucuc

SEQ ID NO: 2971584 - RNA, 19 nt, Artificial Sequence
  Description of Artificial Sequence: Synthetic oligonucleotide
cugccacucucugagguuu

SEQ ID NO: 2971585 - RNA, 19 nt, Artificial Sequence
  Description of Artificial Sequence: Synthetic oligonucleotide
ccauggagggcaugguccu

SEQ ID NO: 2971586 - RNA, 19 nt, Artificial Sequence
  Description of Artificial Sequence: Synthetic oligonucleotide
ccucaacaguucucaaagu

SEQ ID NO: 2971587 - RNA, 19 nt, Artificial Sequence
  Description of Artificial Sequence: Synthetic oligonucleotide
gcugcuucaucugguuagu

SEQ ID NO: 2971588 - RNA, 19 nt, Artificial Sequence
  Description of Artificial Sequence: Synthetic oligonucleotide
guccacuucugaaguguuu

SEQ ID NO: 2971589 - RNA, 19 nt, Artificial Sequence
  Description of Artificial Sequence: Synthetic oligonucleotide
ccacuucugaaguguuugu

SEQ ID NO: 2971590 - RNA, 19 nt, Artificial Sequence
  Description of Artificial Sequence: Synthetic oligonucleotide
cagugucggaucuccucuu

SEQ ID NO: 2971591 - RNA, 19 nt, Artificial Sequence
  Description of Artificial Sequence: Synthetic oligonucleotide
cagcguuugcaggagcauu

SEQ ID NO: 2971592 - RNA, 19 nt, Artificial Sequence
  Description of Artificial Sequence: Synthetic oligonucleotide
gggcgggaaaggaauacuu

SEQ ID NO: 2971593 - RNA, 19 nt, Artificial Sequence
  Description of Artificial Sequence: Synthetic oligonucleotide
gguccccauggagggcaug

SEQ ID NO: 2971594 - RNA, 19 nt, Artificial Sequence
  Description of Artificial Sequence: Synthetic oligonucleotide
gcugccacucucugagguu

SEQ ID NO: 2971595 - RNA, 19 nt, Artificial Sequence
  Description of Artificial Sequence: Synthetic oligonucleotide
ccgguaaugugggcugcca

SEQ ID NO: 2971596 - RNA, 19 nt, Artificial Sequence
  Description of Artificial Sequence: Synthetic oligonucleotide
guggggcuccaggaauccu

SEQ ID NO: 2971597 - RNA, 19 nt, Artificial Sequence
  Description of Artificial Sequence: Synthetic oligonucleotide
cgacugauuccgguaaugu

SEQ ID NO: 2971598 - RNA, 19 nt, Artificial Sequence
  Description of Artificial Sequence: Synthetic oligonucleotide
cguuugcaggagcauuugu

SEQ ID NO: 2971599 - RNA, 19 nt, Artificial Sequence
  Description of Artificial Sequence: Synthetic oligonucleotide
cggguccccauggagggca

SEQ ID NO: 2971600 - RNA, 19 nt, Artificial Sequence
  Description of Artificial Sequence: Synthetic oligonucleotide
ggccaaagcugggauccuu

SEQ ID NO: 2971601 - RNA, 19 nt, Artificial Sequence
  Description of Artificial Sequence: Synthetic oligonucleotide
gcacugugcagagcaccau

SEQ ID NO: 2971602 - RNA, 19 nt, Artificial Sequence
  Description of Artificial Sequence: Synthetic oligonucleotide
ccacucucugagguuuccu

SEQ ID NO: 2971603 - RNA, 19 nt, Artificial Sequence
  Description of Artificial Sequence: Synthetic oligonucleotide
gggcuccaggaauccucau

SEQ ID NO: 2971604 - RNA, 19 nt, Artificial Sequence
  Description of Artificial Sequence: Synthetic oligonucleotide
ggguccccauggagggcau

SEQ ID NO: 2971605 - RNA, 19 nt, Artificial Sequence
  Description of Artificial Sequence: Synthetic oligonucleotide
  modified_base (10)..(10): a, c, u, g, unknown or other
aacaaaaccngacugcuug

SEQ ID NO: 2971606 - RNA, 19 nt, Artificial Sequence
  Description of Artificial Sequence: Synthetic oligonucleotide
caaacauugacucaggaac

SEQ ID NO: 2971607 - RNA, 19 nt, Artificial Sequence
  Description of Artificial Sequence: Synthetic oligonucleotide
accaacagaggguugaucc

SEQ ID NO: 2971608 - RNA, 19 nt, Artificial Sequence
  Description of Artificial Sequence: Synthetic oligonucleotide
aaacucaggguucuccucc

SEQ ID NO: 2971609 - RNA, 19 nt, Artificial Sequence
  Description of Artificial Sequence: Synthetic oligonucleotide
aagucggucaaacauugac

SEQ ID NO: 2971610 - RNA, 19 nt, Artificial Sequence
  Description of Artificial Sequence: Synthetic oligonucleotide
  modified_base (19)..(19): a, c, u, g, unknown or other
ugacucaggaacaaaaccn

SEQ ID NO: 2971611 - RNA, 19 nt, Artificial Sequence
  Description of Artificial Sequence: Synthetic oligonucleotide
aaguagaggcgacagcagc

SEQ ID NO: 2971612 - RNA, 19 nt, Artificial Sequence
  Description of Artificial Sequence: Synthetic oligonucleotide
agcaacugcaaacucaggg

SEQ ID NO: 2971613 - RNA, 19 nt, Artificial Sequence
  Description of Artificial Sequence: Synthetic oligonucleotide
gauucugaaggcuugucag

SEQ ID NO: 2971614 - RNA, 19 nt, Artificial Sequence
  Description of Artificial Sequence: Synthetic oligonucleotide
ugaucccugaaguagaggc

SEQ ID NO: 2971615 - RNA, 19 nt, Artificial Sequence
  Description of Artificial Sequence: Synthetic oligonucleotide
uugacucaggaacaaaacc

SEQ ID NO: 2971616 - RNA, 19 nt, Artificial Sequence
  Description of Artificial Sequence: Synthetic oligonucleotide
ugagaagucggucaaacau

SEQ ID NO: 2971617 - RNA, 19 nt, Artificial Sequence
  Description of Artificial Sequence: Synthetic oligonucleotide
aaacaggcuguucaccaac

SEQ ID NO: 2971618 - RNA, 19 nt, Artificial Sequence
  Description of Artificial Sequence: Synthetic oligonucleotide
ugucaguccagucuggagc

SEQ ID NO: 2971619 - RNA, 19 nt, Artificial Sequence
  Description of Artificial Sequence: Synthetic oligonucleotide
aggcuugucagguccaucc

SEQ ID NO: 2971620 - RNA, 19 nt, Artificial Sequence
  Description of Artificial Sequence: Synthetic oligonucleotide
ugaaguagaggcgacagca

SEQ ID NO: 2971621 - RNA, 19 nt, Artificial Sequence
  Description of Artificial Sequence: Synthetic oligonucleotide
acuaugucaguccagucug

SEQ ID NO: 2971622 - RNA, 19 nt, Artificial Sequence
  Description of Artificial Sequence: Synthetic oligonucleotide
  modified_base (7)..(7): a, c, u, g, unknown or other
aaaaccngacugcuugacu

SEQ ID NO: 2971623 - RNA, 19 nt, Artificial Sequence
  Description of Artificial Sequence: Synthetic oligonucleotide
uuugcgucgccuccggugg

SEQ ID NO: 2971624 - RNA, 19 nt, Artificial Sequence
  Description of Artificial Sequence: Synthetic oligonucleotide
  modified_base (6)..(6): a, c, u, g, unknown or other
aaaccngacugcuugacua

SEQ ID NO: 2971625 - RNA, 19 nt, Artificial Sequence
  Description of Artificial Sequence: Synthetic oligonucleotide
  modified_base (16)..(16): a, c, u, g, unknown or other
cucaggaacaaaaccngac

SEQ ID NO: 2971626 - RNA, 19 nt, Artificial Sequence
  Description of Artificial Sequence: Synthetic oligonucleotide
gacugcuugacuaugucag

SEQ ID NO: 2971627 - RNA, 19 nt, Artificial Sequence
  Description of Artificial Sequence: Synthetic oligonucleotide
  modified_base (13)..(13): a, c, u, g, unknown or other
aggaacaaaaccngacugc

SEQ ID NO: 2971628 - RNA, 19 nt, Artificial Sequence
  Description of Artificial Sequence: Synthetic oligonucleotide
  modified_base (14)..(14): a, c, u, g, unknown or other
caggaacaaaaccngacug

SEQ ID NO: 2971629 - RNA, 19 nt, Artificial Sequence
  Description of Artificial Sequence: Synthetic oligonucleotide
uccaucccagcaaacaggc

SEQ ID NO: 2971630 - RNA, 19 nt, Artificial Sequence
  Description of Artificial Sequence: Synthetic oligonucleotide
auugacucaggaacaaaac

SEQ ID NO: 2971631 - RNA, 19 nt, Artificial Sequence
  Description of Artificial Sequence: Synthetic oligonucleotide
uggagcaacugcaaacuca

SEQ ID NO: 2971632 - RNA, 19 nt, Artificial Sequence
  Description of Artificial Sequence: Synthetic oligonucleotide
  modified_base (18)..(18): a, c, u, g, unknown or other
gacucaggaacaaaaccng

SEQ ID NO: 2971633 - RNA, 19 nt, Artificial Sequence
  Description of Artificial Sequence: Synthetic oligonucleotide
agaggguugaucccugaag

SEQ ID NO: 2971634 - RNA, 19 nt, Artificial Sequence
  Description of Artificial Sequence: Synthetic oligonucleotide
agcccugccagcuggaggg

SEQ ID NO: 2971635 - RNA, 19 nt, Artificial Sequence
  Description of Artificial Sequence: Synthetic oligonucleotide
aguagaggcgacagcagcc

SEQ ID NO: 2971636 - RNA, 19 nt, Artificial Sequence
  Description of Artificial Sequence: Synthetic oligonucleotide
uucuccccgaaccacaggu

SEQ ID NO: 2971637 - RNA, 19 nt, Artificial Sequence
  Description of Artificial Sequence: Synthetic oligonucleotide
aaacauugacucaggaaca

SEQ ID NO: 2971638 - RNA, 19 nt, Artificial Sequence
  Description of Artificial Sequence: Synthetic oligonucleotide
agauucugaaggcuuguca

SEQ ID NO: 2971639 - RNA, 19 nt, Artificial Sequence
  Description of Artificial Sequence: Synthetic oligonucleotide
gucggucaaacauugacuc

SEQ ID NO: 2971640 - RNA, 19 nt, Artificial Sequence
  Description of Artificial Sequence: Synthetic oligonucleotide
ugcuugacuaugucagucc

SEQ ID NO: 2971641 - RNA, 19 nt, Artificial Sequence
  Description of Artificial Sequence: Synthetic oligonucleotide
uggagauucugaaggcuug

SEQ ID NO: 2971642 - RNA, 19 nt, Artificial Sequence
  Description of Artificial Sequence: Synthetic oligonucleotide
aggguucuccuccagccac

SEQ ID NO: 2971643 - RNA, 19 nt, Artificial Sequence
  Description of Artificial Sequence: Synthetic oligonucleotide
gcuguucaccaacagaggg

SEQ ID NO: 2971644 - RNA, 19 nt, Artificial Sequence
  Description of Artificial Sequence: Synthetic oligonucleotide
auucccggcagcaucaggg

SEQ ID NO: 2971645 - RNA, 19 nt, Artificial Sequence
  Description of Artificial Sequence: Synthetic oligonucleotide
cuugucagguccaucccag

SEQ ID NO: 2971646 - RNA, 19 nt, Artificial Sequence
  Description of Artificial Sequence: Synthetic oligonucleotide
uccagucuggagcaacugc

SEQ ID NO: 2971647 - RNA, 19 nt, Artificial Sequence
  Description of Artificial Sequence: Synthetic oligonucleotide
uugacuaugucaguccagu

SEQ ID NO: 2971648 - RNA, 19 nt, Artificial Sequence
  Description of Artificial Sequence: Synthetic oligonucleotide
ucuggagcaacugcaaacu

SEQ ID NO: 2971649 - RNA, 19 nt, Artificial Sequence
  Description of Artificial Sequence: Synthetic oligonucleotide
aacugcaaacucaggguuc

SEQ ID NO: 2971650 - RNA, 19 nt, Artificial Sequence
  Description of Artificial Sequence: Synthetic oligonucleotide
ugucagguccaucccagca

SEQ ID NO: 2971651 - RNA, 19 nt, Artificial Sequence
  Description of Artificial Sequence: Synthetic oligonucleotide
agcaaacaggcuguucacc

SEQ ID NO: 2971652 - RNA, 19 nt, Artificial Sequence
  Description of Artificial Sequence: Synthetic oligonucleotide
ugggccuccguccucuccg

SEQ ID NO: 2971653 - RNA, 19 nt, Artificial Sequence
  Description of Artificial Sequence: Synthetic oligonucleotide
uucaccaacagaggguuga

SEQ ID NO: 2971654 - RNA, 19 nt, Artificial Sequence
  Description of Artificial Sequence: Synthetic oligonucleotide
gaucccugaaguagaggcg

SEQ ID NO: 2971655 - RNA, 19 nt, Artificial Sequence
  Description of Artificial Sequence: Synthetic oligonucleotide
uccuccagccaccugggca

SEQ ID NO: 2971656 - RNA, 19 nt, Artificial Sequence
  Description of Artificial Sequence: Synthetic oligonucleotide
agaagucggucaaacauug

SEQ ID NO: 2971657 - RNA, 19 nt, Artificial Sequence
  Description of Artificial Sequence: Synthetic oligonucleotide
caugagcccugccagcugg

SEQ ID NO: 2971658 - RNA, 19 nt, Artificial Sequence
  Description of Artificial Sequence: Synthetic oligonucleotide
cauugacucaggaacaaaa

SEQ ID NO: 2971659 - RNA, 19 nt, Artificial Sequence
  Description of Artificial Sequence: Synthetic oligonucleotide
cacucuugggccuccgucc

SEQ ID NO: 2971660 - RNA, 19 nt, Artificial Sequence
  Description of Artificial Sequence: Synthetic oligonucleotide
gacuaugucaguccagucu

SEQ ID NO: 2971661 - RNA, 19 nt, Artificial Sequence
  Description of Artificial Sequence: Synthetic oligonucleotide
cuugacuaugucaguccag

SEQ ID NO: 2971662 - RNA, 19 nt, Artificial Sequence
  Description of Artificial Sequence: Synthetic oligonucleotide
gucuggagcaacugcaaac

SEQ ID NO: 2971663 - RNA, 19 nt, Artificial Sequence
  Description of Artificial Sequence: Synthetic oligonucleotide
  modified_base (5)..(5): a, c, u, g, unknown or other
aaccngacugcuugacuau

SEQ ID NO: 2971664 - RNA, 19 nt, Artificial Sequence
  Description of Artificial Sequence: Synthetic oligonucleotide
uucuuugcgucgccuccgg

SEQ ID NO: 2971665 - RNA, 19 nt, Artificial Sequence
  Description of Artificial Sequence: Synthetic oligonucleotide
  modified_base (9)..(9): a, c, u, g, unknown or other
acaaaaccngacugcuuga

SEQ ID NO: 2971666 - RNA, 19 nt, Artificial Sequence
  Description of Artificial Sequence: Synthetic oligonucleotide
uguucaccaacagaggguu

SEQ ID NO: 2971667 - RNA, 19 nt, Artificial Sequence
  Description of Artificial Sequence: Synthetic oligonucleotide
aacauugacucaggaacaa

SEQ ID NO: 2971668 - RNA, 19 nt, Artificial Sequence
  Description of Artificial Sequence: Synthetic oligonucleotide
uccgacuggcuccuucucc

SEQ ID NO: 2971669 - RNA, 19 nt, Artificial Sequence
  Description of Artificial Sequence: Synthetic oligonucleotide
cuuugcgucgccuccggug

SEQ ID NO: 2971670 - RNA, 19 nt, Artificial Sequence
  Description of Artificial Sequence: Synthetic oligonucleotide
ucuggagauucugaaggcu

SEQ ID NO: 2971671 - RNA, 19 nt, Artificial Sequence
  Description of Artificial Sequence: Synthetic oligonucleotide
gaaguagaggcgacagcag

SEQ ID NO: 2971672 - RNA, 19 nt, Artificial Sequence
  Description of Artificial Sequence: Synthetic oligonucleotide
ggcgaucucacucuugggc

SEQ ID NO: 2971673 - RNA, 19 nt, Artificial Sequence
  Description of Artificial Sequence: Synthetic oligonucleotide
cuaugucaguccagucugg

SEQ ID NO: 2971674 - RNA, 19 nt, Artificial Sequence
  Description of Artificial Sequence: Synthetic oligonucleotide
guagaggcgacagcagccg

SEQ ID NO: 2971675 - RNA, 19 nt, Artificial Sequence
  Description of Artificial Sequence: Synthetic oligonucleotide
ugcucgggcgaucucacuc

SEQ ID NO: 2971676 - RNA, 19 nt, Artificial Sequence
  Description of Artificial Sequence: Synthetic oligonucleotide
augucaguccagucuggag

SEQ ID NO: 2971677 - RNA, 19 nt, Artificial Sequence
  Description of Artificial Sequence: Synthetic oligonucleotide
ugcagcggcugcucgggcg

SEQ ID NO: 2971678 - RNA, 19 nt, Artificial Sequence
  Description of Artificial Sequence: Synthetic oligonucleotide
ggagcaacugcaaacucag

SEQ ID NO: 2971679 - RNA, 19 nt, Artificial Sequence
  Description of Artificial Sequence: Synthetic oligonucleotide
uucccggcagcaucagggg

SEQ ID NO: 2971680 - RNA, 19 nt, Artificial Sequence
  Description of Artificial Sequence: Synthetic oligonucleotide
ucggucaaacauugacuca

SEQ ID NO: 2971681 - RNA, 19 nt, Artificial Sequence
  Description of Artificial Sequence: Synthetic oligonucleotide
uugaucccugaaguagagg

SEQ ID NO: 2971682 - RNA, 19 nt, Artificial Sequence
  Description of Artificial Sequence: Synthetic oligonucleotide
cugggcagaauuacgaaaa

SEQ ID NO: 2971683 - RNA, 19 nt, Artificial Sequence
  Description of Artificial Sequence: Synthetic oligonucleotide
guccaucccagcaaacagg

SEQ ID NO: 2971684 - RNA, 19 nt, Artificial Sequence
  Description of Artificial Sequence: Synthetic oligonucleotide
uccuucuccccgaaccaca

SEQ ID NO: 2971685 - RNA, 19 nt, Artificial Sequence
  Description of Artificial Sequence: Synthetic oligonucleotide
agucggucaaacauugacu

SEQ ID NO: 2971686 - RNA, 19 nt, Artificial Sequence
  Description of Artificial Sequence: Synthetic oligonucleotide
agcaucaggggcagcacgg

SEQ ID NO: 2971687 - RNA, 19 nt, Artificial Sequence
  Description of Artificial Sequence: Synthetic oligonucleotide
gacuggcuccuucuccccg

SEQ ID NO: 2971688 - RNA, 19 nt, Artificial Sequence
  Description of Artificial Sequence: Synthetic oligonucleotide
uaugucaguccagucugga

SEQ ID NO: 2971689 - RNA, 19 nt, Artificial Sequence
  Description of Artificial Sequence: Synthetic oligonucleotide
aucaggggcagcacggccg

SEQ ID NO: 2971690 - RNA, 19 nt, Artificial Sequence
  Description of Artificial Sequence: Synthetic oligonucleotide
agguucuggagauucugaa

SEQ ID NO: 2971691 - RNA, 19 nt, Artificial Sequence
  Description of Artificial Sequence: Synthetic oligonucleotide
gucaguccagucuggagca

SEQ ID NO: 2971692 - RNA, 19 nt, Artificial Sequence
  Description of Artificial Sequence: Synthetic oligonucleotide
agcacggccggguucuuug

SEQ ID NO: 2971693 - RNA, 19 nt, Artificial Sequence
  Description of Artificial Sequence: Synthetic oligonucleotide
ucuccgacuggcuccuucu

SEQ ID NO: 2971694 - RNA, 19 nt, Artificial Sequence
  Description of Artificial Sequence: Synthetic oligonucleotide
guugaucccugaaguagag

SEQ ID NO: 2971695 - RNA, 19 nt, Artificial Sequence
  Description of Artificial Sequence: Synthetic oligonucleotide
ggguugaucccugaaguag

SEQ ID NO: 2971696 - RNA, 19 nt, Artificial Sequence
  Description of Artificial Sequence: Synthetic oligonucleotide
aucccugaaguagaggcga

SEQ ID NO: 2971697 - RNA, 19 nt, Artificial Sequence
  Description of Artificial Sequence: Synthetic oligonucleotide
aaggcuugucagguccauc

SEQ ID NO: 2971698 - RNA, 19 nt, Artificial Sequence
  Description of Artificial Sequence: Synthetic oligonucleotide
gucaaacauugacucagga

SEQ ID NO: 2971699 - RNA, 19 nt, Artificial Sequence
  Description of Artificial Sequence: Synthetic oligonucleotide
agggacuggagguucugga

SEQ ID NO: 2971700 - RNA, 19 nt, Artificial Sequence
  Description of Artificial Sequence: Synthetic oligonucleotide
ggcuccuucuccccgaacc

SEQ ID NO: 2971701 - RNA, 19 nt, Artificial Sequence
  Description of Artificial Sequence: Synthetic oligonucleotide
gcgaucucacucuugggcc

SEQ ID NO: 2971702 - RNA, 19 nt, Artificial Sequence
  Description of Artificial Sequence: Synthetic oligonucleotide
acugcuugacuaugucagu

SEQ ID NO: 2971703 - RNA, 19 nt, Artificial Sequence
  Description of Artificial Sequence: Synthetic oligonucleotide
caaacucaggguucuccuc

SEQ ID NO: 2971704 - RNA, 19 nt, Artificial Sequence
  Description of Artificial Sequence: Synthetic oligonucleotide
guucuuugcgucgccuccg

SEQ ID NO: 2971705 - RNA, 19 nt, Artificial Sequence
  Description of Artificial Sequence: Synthetic oligonucleotide
cuggagguucuggagauuc

SEQ ID NO: 2971706 - RNA, 19 nt, Artificial Sequence
  Description of Artificial Sequence: Synthetic oligonucleotide
aacaggcuguucaccaaca

SEQ ID NO: 2971707 - RNA, 19 nt, Artificial Sequence
  Description of Artificial Sequence: Synthetic oligonucleotide
  modified_base (8)..(8): a, c, u, g, unknown or other
caaaaccngacugcuugac

SEQ ID NO: 2971708 - RNA, 19 nt, Artificial Sequence
  Description of Artificial Sequence: Synthetic oligonucleotide
cagcaucaggggcagcacg

SEQ ID NO: 2971709 - RNA, 19 nt, Artificial Sequence
  Description of Artificial Sequence: Synthetic oligonucleotide
gguucuuugcgucgccucc

SEQ ID NO: 2971710 - RNA, 19 nt, Artificial Sequence
  Description of Artificial Sequence: Synthetic oligonucleotide
gcaaacaggcuguucacca

SEQ ID NO: 2971711 - RNA, 19 nt, Artificial Sequence
  Description of Artificial Sequence: Synthetic oligonucleotide
ucugaaggcuugucagguc

SEQ ID NO: 2971712 - RNA, 19 nt, Artificial Sequence
  Description of Artificial Sequence: Synthetic oligonucleotide
aacagaggguugaucccug

SEQ ID NO: 2971713 - RNA, 19 nt, Artificial Sequence
  Description of Artificial Sequence: Synthetic oligonucleotide
guccucuccgacuggcucc

SEQ ID NO: 2971714 - RNA, 19 nt, Artificial Sequence
  Description of Artificial Sequence: Synthetic oligonucleotide
ugacuaugucaguccaguc

SEQ ID NO: 2971715 - RNA, 19 nt, Artificial Sequence
  Description of Artificial Sequence: Synthetic oligonucleotide
cagcaaacaggcuguucac

SEQ ID NO: 2971716 - RNA, 19 nt, Artificial Sequence
  Description of Artificial Sequence: Synthetic oligonucleotide
uggagguucuggagauucu

SEQ ID NO: 2971717 - RNA, 19 nt, Artificial Sequence
  Description of Artificial Sequence: Synthetic oligonucleotide
uagaggcgacagcagccgc

SEQ ID NO: 2971718 - RNA, 19 nt, Artificial Sequence
  Description of Artificial Sequence: Synthetic oligonucleotide
  modified_base (2)..(2): a, c, u, g, unknown or other
cngacugcuugacuauguc

SEQ ID NO: 2971719 - RNA, 19 nt, Artificial Sequence
  Description of Artificial Sequence: Synthetic oligonucleotide
uccccgaaccacaggucca

SEQ ID NO: 2971720 - RNA, 19 nt, Artificial Sequence
  Description of Artificial Sequence: Synthetic oligonucleotide
uugucagguccaucccagc

SEQ ID NO: 2971721 - RNA, 19 nt, Artificial Sequence
  Description of Artificial Sequence: Synthetic oligonucleotide
caccugggcagaauuacga

SEQ ID NO: 2971722 - RNA, 19 nt, Artificial Sequence
  Description of Artificial Sequence: Synthetic oligonucleotide
caucaggggcagcacggcc

SEQ ID NO: 2971723 - RNA, 19 nt, Artificial Sequence
  Description of Artificial Sequence: Synthetic oligonucleotide
ucccggcagcaucaggggc

SEQ ID NO: 2971724 - RNA, 19 nt, Artificial Sequence
  Description of Artificial Sequence: Synthetic oligonucleotide
agguccaucccagcaaaca

SEQ ID NO: 2971725 - RNA, 19 nt, Artificial Sequence
  Description of Artificial Sequence: Synthetic oligonucleotide
gggacuggagguucuggag

SEQ ID NO: 2971726 - RNA, 19 nt, Artificial Sequence
  Description of Artificial Sequence: Synthetic oligonucleotide
gugagaagucggucaaaca

SEQ ID NO: 2971727 - RNA, 19 nt, Artificial Sequence
  Description of Artificial Sequence: Synthetic oligonucleotide
agggaagcccaugagcccu

SEQ ID NO: 2971728 - RNA, 19 nt, Artificial Sequence
  Description of Artificial Sequence: Synthetic oligonucleotide
ccagcaaacaggcuguuca

SEQ ID NO: 2971729 - RNA, 19 nt, Artificial Sequence
  Description of Artificial Sequence: Synthetic oligonucleotide
cuggagggaagcccaugag

SEQ ID NO: 2971730 - RNA, 19 nt, Artificial Sequence
  Description of Artificial Sequence: Synthetic oligonucleotide
ucuugggccuccguccucu

SEQ ID NO: 2971731 - RNA, 19 nt, Artificial Sequence
  Description of Artificial Sequence: Synthetic oligonucleotide
caguccuggagggaagccc

SEQ ID NO: 2971732 - RNA, 19 nt, Artificial Sequence
  Description of Artificial Sequence: Synthetic oligonucleotide
accacagguccagugagaa

SEQ ID NO: 2971733 - RNA, 19 nt, Artificial Sequence
  Description of Artificial Sequence: Synthetic oligonucleotide
  modified_base (17)..(17): a, c, u, g, unknown or other
acucaggaacaaaaccnga

SEQ ID NO: 2971734 - RNA, 19 nt, Artificial Sequence
  Description of Artificial Sequence: Synthetic oligonucleotide
  modified_base (4)..(4): a, c, u, g, unknown or other
accngacugcuugacuaug

SEQ ID NO: 2971735 - RNA, 19 nt, Artificial Sequence
  Description of Artificial Sequence: Synthetic oligonucleotide
accugggcagaauuacgaa

SEQ ID NO: 2971736 - RNA, 19 nt, Artificial Sequence
  Description of Artificial Sequence: Synthetic oligonucleotide
ccaacagaggguugauccc

SEQ ID NO: 2971737 - RNA, 19 nt, Artificial Sequence
  Description of Artificial Sequence: Synthetic oligonucleotide
uggagggacuggagguucu

SEQ ID NO: 2971738 - RNA, 19 nt, Artificial Sequence
  Description of Artificial Sequence: Synthetic oligonucleotide
cauucccggcagcaucagg

SEQ ID NO: 2971739 - RNA, 19 nt, Artificial Sequence
  Description of Artificial Sequence: Synthetic oligonucleotide
acuggcuccuucuccccga

SEQ ID NO: 2971740 - RNA, 19 nt, Artificial Sequence
  Description of Artificial Sequence: Synthetic oligonucleotide
acagguccagugagaaguc

SEQ ID NO: 2971741 - RNA, 19 nt, Artificial Sequence
  Description of Artificial Sequence: Synthetic oligonucleotide
ggucaaacauugacucagg

SEQ ID NO: 2971742 - RNA, 19 nt, Artificial Sequence
  Description of Artificial Sequence: Synthetic oligonucleotide
ucuccccgaaccacagguc

SEQ ID NO: 2971743 - RNA, 19 nt, Artificial Sequence
  Description of Artificial Sequence: Synthetic oligonucleotide
ucccugaaguagaggcgac

SEQ ID NO: 2971744 - RNA, 19 nt, Artificial Sequence
  Description of Artificial Sequence: Synthetic oligonucleotide
gagauucugaaggcuuguc

SEQ ID NO: 2971745 - RNA, 19 nt, Artificial Sequence
  Description of Artificial Sequence: Synthetic oligonucleotide
aucccagcaaacaggcugu

SEQ ID NO: 2971746 - RNA, 19 nt, Artificial Sequence
  Description of Artificial Sequence: Synthetic oligonucleotide
cuggagcaacugcaaacuc

SEQ ID NO: 2971747 - RNA, 19 nt, Artificial Sequence
  Description of Artificial Sequence: Synthetic oligonucleotide
gucagguccaucccagcaa

SEQ ID NO: 2971748 - RNA, 19 nt, Artificial Sequence
  Description of Artificial Sequence: Synthetic oligonucleotide
uugggccuccguccucucc

SEQ ID NO: 2971749 - RNA, 19 nt, Artificial Sequence
  Description of Artificial Sequence: Synthetic oligonucleotide
cuucuccccgaaccacagg

SEQ ID NO: 2971750 - RNA, 19 nt, Artificial Sequence
  Description of Artificial Sequence: Synthetic oligonucleotide
aucucacucuugggccucc

SEQ ID NO: 2971751 - RNA, 19 nt, Artificial Sequence
  Description of Artificial Sequence: Synthetic oligonucleotide
cagguccagugagaagucg

SEQ ID NO: 2971752 - RNA, 19 nt, Artificial Sequence
  Description of Artificial Sequence: Synthetic oligonucleotide
uccguccucuccgacuggc

SEQ ID NO: 2971753 - RNA, 19 nt, Artificial Sequence
  Description of Artificial Sequence: Synthetic oligonucleotide
aaccacagguccagugaga

SEQ ID NO: 2971754 - RNA, 19 nt, Artificial Sequence
  Description of Artificial Sequence: Synthetic oligonucleotide
gcuugacuaugucagucca

SEQ ID NO: 2971755 - RNA, 19 nt, Artificial Sequence
  Description of Artificial Sequence: Synthetic oligonucleotide
gaggcgacagcagccgcug

SEQ ID NO: 2971756 - RNA, 19 nt, Artificial Sequence
  Description of Artificial Sequence: Synthetic oligonucleotide
ggagguucuggagauucug

SEQ ID NO: 2971757 - RNA, 19 nt, Artificial Sequence
  Description of Artificial Sequence: Synthetic oligonucleotide
ucgggcgaucucacucuug

SEQ ID NO: 2971758 - RNA, 19 nt, Artificial Sequence
  Description of Artificial Sequence: Synthetic oligonucleotide
uccggugguggcagcugug

SEQ ID NO: 2971759 - RNA, 19 nt, Artificial Sequence
  Description of Artificial Sequence: Synthetic oligonucleotide
gaagcccaugagcccugcc

SEQ ID NO: 2971760 - RNA, 19 nt, Artificial Sequence
  Description of Artificial Sequence: Synthetic oligonucleotide
cacggccggguucuuugcg

SEQ ID NO: 2971761 - RNA, 19 nt, Artificial Sequence
  Description of Artificial Sequence: Synthetic oligonucleotide
  modified_base (12)..(12): a, c, u, g, unknown or other
ggaacaaaaccngacugcu

SEQ ID NO: 2971762 - RNA, 19 nt, Artificial Sequence
  Description of Artificial Sequence: Synthetic oligonucleotide
gacuggagguucuggagau

SEQ ID NO: 2971763 - RNA, 19 nt, Artificial Sequence
  Description of Artificial Sequence: Synthetic oligonucleotide
acggccggguucuuugcgu

SEQ ID NO: 2971764 - RNA, 19 nt, Artificial Sequence
  Description of Artificial Sequence: Synthetic oligonucleotide
gguugaucccugaaguaga

SEQ ID NO: 2971765 - RNA, 19 nt, Artificial Sequence
  Description of Artificial Sequence: Synthetic oligonucleotide
ucuuugcgucgccuccggu

SEQ ID NO: 2971766 - RNA, 19 nt, Artificial Sequence
  Description of Artificial Sequence: Synthetic oligonucleotide
cuguucaccaacagagggu

SEQ ID NO: 2971767 - RNA, 19 nt, Artificial Sequence
  Description of Artificial Sequence: Synthetic oligonucleotide
uggccaguccuggagggaa

SEQ ID NO: 2971768 - RNA, 19 nt, Artificial Sequence
  Description of Artificial Sequence: Synthetic oligonucleotide
cggucaaacauugacucag

SEQ ID NO: 2971769 - RNA, 19 nt, Artificial Sequence
  Description of Artificial Sequence: Synthetic oligonucleotide
aggcccgccauucccggca

SEQ ID NO: 2971770 - RNA, 19 nt, Artificial Sequence
  Description of Artificial Sequence: Synthetic oligonucleotide
acauugacucaggaacaaa

SEQ ID NO: 2971771 - RNA, 19 nt, Artificial Sequence
  Description of Artificial Sequence: Synthetic oligonucleotide
ucucacucuugggccuccg

SEQ ID NO: 2971772 - RNA, 19 nt, Artificial Sequence
  Description of Artificial Sequence: Synthetic oligonucleotide
caaacaggcuguucaccaa

SEQ ID NO: 2971773 - RNA, 19 nt, Artificial Sequence
  Description of Artificial Sequence: Synthetic oligonucleotide
ccgacuggcuccuucuccc

SEQ ID NO: 2971774 - RNA, 19 nt, Artificial Sequence
  Description of Artificial Sequence: Synthetic oligonucleotide
aguccagucuggagcaacu

SEQ ID NO: 2971775 - RNA, 19 nt, Artificial Sequence
  Description of Artificial Sequence: Synthetic oligonucleotide
gagaagucggucaaacauu

SEQ ID NO: 2971776 - RNA, 19 nt, Artificial Sequence
  Description of Artificial Sequence: Synthetic oligonucleotide
ccagucuggagcaacugca

SEQ ID NO: 2971777 - RNA, 19 nt, Artificial Sequence
  Description of Artificial Sequence: Synthetic oligonucleotide
ccaccugggcagaauuacg

SEQ ID NO: 2971778 - RNA, 19 nt, Artificial Sequence
  Description of Artificial Sequence: Synthetic oligonucleotide
gaucucacucuugggccuc

SEQ ID NO: 2971779 - RNA, 19 nt, Artificial Sequence
  Description of Artificial Sequence: Synthetic oligonucleotide
gaagucggucaaacauuga

SEQ ID NO: 2971780 - RNA, 19 nt, Artificial Sequence
  Description of Artificial Sequence: Synthetic oligonucleotide
ggcuugucagguccauccc

SEQ ID NO: 2971781 - RNA, 19 nt, Artificial Sequence
  Description of Artificial Sequence: Synthetic oligonucleotide
cuggagggacuggagguuc

SEQ ID NO: 2971782 - RNA, 19 nt, Artificial Sequence
  Description of Artificial Sequence: Synthetic oligonucleotide
uccuggagggaagcccaug

SEQ ID NO: 2971783 - RNA, 19 nt, Artificial Sequence
  Description of Artificial Sequence: Synthetic oligonucleotide
ucgccuccggugguggcag

SEQ ID NO: 2971784 - RNA, 19 nt, Artificial Sequence
  Description of Artificial Sequence: Synthetic oligonucleotide
caguccagucuggagcaac

SEQ ID NO: 2971785 - RNA, 19 nt, Artificial Sequence
  Description of Artificial Sequence: Synthetic oligonucleotide
ucaccaacagaggguugau

SEQ ID NO: 2971786 - RNA, 19 nt, Artificial Sequence
  Description of Artificial Sequence: Synthetic oligonucleotide
cgggcgaucucacucuugg

SEQ ID NO: 2971787 - RNA, 19 nt, Artificial Sequence
  Description of Artificial Sequence: Synthetic oligonucleotide
agaggcgacagcagccgcu

SEQ ID NO: 2971788 - RNA, 19 nt, Artificial Sequence
  Description of Artificial Sequence: Synthetic oligonucleotide
cucuccgacuggcuccuuc

SEQ ID NO: 2971789 - RNA, 19 nt, Artificial Sequence
  Description of Artificial Sequence: Synthetic oligonucleotide
cuccuucuccccgaaccac

SEQ ID NO: 2971790 - RNA, 19 nt, Artificial Sequence
  Description of Artificial Sequence: Synthetic oligonucleotide
uggcagcuguggccagucc

SEQ ID NO: 2971791 - RNA, 19 nt, Artificial Sequence
  Description of Artificial Sequence: Synthetic oligonucleotide
uccucuccgacuggcuccu

SEQ ID NO: 2971792 - RNA, 19 nt, Artificial Sequence
  Description of Artificial Sequence: Synthetic oligonucleotide
cagguccaucccagcaaac

SEQ ID NO: 2971793 - RNA, 19 nt, Artificial Sequence
  Description of Artificial Sequence: Synthetic oligonucleotide
cuggagauucugaaggcuu

SEQ ID NO: 2971794 - RNA, 19 nt, Artificial Sequence
  Description of Artificial Sequence: Synthetic oligonucleotide
guccagucuggagcaacug

SEQ ID NO: 2971795 - RNA, 19 nt, Artificial Sequence
  Description of Artificial Sequence: Synthetic oligonucleotide
cagucuggagcaacugcaa

SEQ ID NO: 2971796 - RNA, 19 nt, Artificial Sequence
  Description of Artificial Sequence: Synthetic oligonucleotide
ccuucuccccgaaccacag

SEQ ID NO: 2971797 - RNA, 19 nt, Artificial Sequence
  Description of Artificial Sequence: Synthetic oligonucleotide
ccuccguccucuccgacug

SEQ ID NO: 2971798 - RNA, 19 nt, Artificial Sequence
  Description of Artificial Sequence: Synthetic oligonucleotide
gggcgaucucacucuuggg

SEQ ID NO: 2971799 - RNA, 19 nt, Artificial Sequence
  Description of Artificial Sequence: Synthetic oligonucleotide
ggccggguucuuugcgucg

SEQ ID NO: 2971800 - RNA, 19 nt, Artificial Sequence
  Description of Artificial Sequence: Synthetic oligonucleotide
guucaccaacagaggguug

SEQ ID NO: 2971801 - RNA, 19 nt, Artificial Sequence
  Description of Artificial Sequence: Synthetic oligonucleotide
gcugcagcggcugcucggg

SEQ ID NO: 2971802 - RNA, 19 nt, Artificial Sequence
  Description of Artificial Sequence: Synthetic oligonucleotide
guccagugagaagucgguc

SEQ ID NO: 2971803 - RNA, 19 nt, Artificial Sequence
  Description of Artificial Sequence: Synthetic oligonucleotide
gcaaacucaggguucuccu

SEQ ID NO: 2971804 - RNA, 19 nt, Artificial Sequence
  Description of Artificial Sequence: Synthetic oligonucleotide
ccgaaccacagguccagug

SEQ ID NO: 2971805 - RNA, 19 nt, Artificial Sequence
  Description of Artificial Sequence: Synthetic oligonucleotide
gccaccugggcagaauuac

SEQ ID NO: 2971806 - RNA, 19 nt, Artificial Sequence
  Description of Artificial Sequence: Synthetic oligonucleotide
ggguucuuugcgucgccuc

SEQ ID NO: 2971807 - RNA, 19 nt, Artificial Sequence
  Description of Artificial Sequence: Synthetic oligonucleotide
caccaacagaggguugauc

SEQ ID NO: 2971808 - RNA, 19 nt, Artificial Sequence
  Description of Artificial Sequence: Synthetic oligonucleotide
ugcgucgccuccgguggug

SEQ ID NO: 2971809 - RNA, 19 nt, Artificial Sequence
  Description of Artificial Sequence: Synthetic oligonucleotide
caggguucuccuccagcca

SEQ ID NO: 2971810 - RNA, 19 nt, Artificial Sequence
  Description of Artificial Sequence: Synthetic oligonucleotide
caacagaggguugaucccu

SEQ ID NO: 2971811 - RNA, 19 nt, Artificial Sequence
  Description of Artificial Sequence: Synthetic oligonucleotide
ccugggcagaauuacgaaa

SEQ ID NO: 2971812 - RNA, 19 nt, Artificial Sequence
  Description of Artificial Sequence: Synthetic oligonucleotide
  modified_base (11)..(11): a, c, u, g, unknown or other
gaacaaaaccngacugcuu

SEQ ID NO: 2971813 - RNA, 19 nt, Artificial Sequence
  Description of Artificial Sequence: Synthetic oligonucleotide
uugcgucgccuccgguggu

SEQ ID NO: 2971814 - RNA, 19 nt, Artificial Sequence
  Description of Artificial Sequence: Synthetic oligonucleotide
gcuccuucuccccgaacca

SEQ ID NO: 2971815 - RNA, 19 nt, Artificial Sequence
  Description of Artificial Sequence: Synthetic oligonucleotide
cuccgacuggcuccuucuc

SEQ ID NO: 2971816 - RNA, 19 nt, Artificial Sequence
  Description of Artificial Sequence: Synthetic oligonucleotide
guucuccuccagccaccug

SEQ ID NO: 2971817 - RNA, 19 nt, Artificial Sequence
  Description of Artificial Sequence: Synthetic oligonucleotide
cagaggguugaucccugaa

SEQ ID NO: 2971818 - RNA, 19 nt, Artificial Sequence
  Description of Artificial Sequence: Synthetic oligonucleotide
uggcuccuucuccccgaac

SEQ ID NO: 2971819 - RNA, 19 nt, Artificial Sequence
  Description of Artificial Sequence: Synthetic oligonucleotide
ucaguccagucuggagcaa

SEQ ID NO: 2971820 - RNA, 19 nt, Artificial Sequence
  Description of Artificial Sequence: Synthetic oligonucleotide
cuccguccucuccgacugg

SEQ ID NO: 2971821 - RNA, 19 nt, Artificial Sequence
  Description of Artificial Sequence: Synthetic oligonucleotide
guggcagcuguggccaguc

SEQ ID NO: 2971822 - RNA, 19 nt, Artificial Sequence
  Description of Artificial Sequence: Synthetic oligonucleotide
cgaaccacagguccaguga

SEQ ID NO: 2971823 - RNA, 19 nt, Artificial Sequence
  Description of Artificial Sequence: Synthetic oligonucleotide
ccacagguccagugagaag

SEQ ID NO: 2971824 - RNA, 19 nt, Artificial Sequence
  Description of Artificial Sequence: Synthetic oligonucleotide
ggcugcucgggcgaucuca

SEQ ID NO: 2971825 - RNA, 19 nt, Artificial Sequence
  Description of Artificial Sequence: Synthetic oligonucleotide
cugcagcggcugcucgggc

SEQ ID NO: 2971826 - RNA, 19 nt, Artificial Sequence
  Description of Artificial Sequence: Synthetic oligonucleotide
cccggcagcaucaggggca

SEQ ID NO: 2971827 - RNA, 19 nt, Artificial Sequence
  Description of Artificial Sequence: Synthetic oligonucleotide
gucgccuccggugguggca

SEQ ID NO: 2971828 - RNA, 19 nt, Artificial Sequence
  Description of Artificial Sequence: Synthetic oligonucleotide
ccggugguggcagcugugg

SEQ ID NO: 2971829 - RNA, 19 nt, Artificial Sequence
  Description of Artificial Sequence: Synthetic oligonucleotide
gccaguccuggagggaagc

SEQ ID NO: 2971830 - RNA, 19 nt, Artificial Sequence
  Description of Artificial Sequence: Synthetic oligonucleotide
ggguucuccuccagccacc

SEQ ID NO: 2971831 - RNA, 19 nt, Artificial Sequence
  Description of Artificial Sequence: Synthetic oligonucleotide
cuugggccuccguccucuc

SEQ ID NO: 2971832 - RNA, 19 nt, Artificial Sequence
  Description of Artificial Sequence: Synthetic oligonucleotide
acuggagguucuggagauu

SEQ ID NO: 2971833 - RNA, 19 nt, Artificial Sequence
  Description of Artificial Sequence: Synthetic oligonucleotide
ggagggacuggagguucug

SEQ ID NO: 2971834 - RNA, 19 nt, Artificial Sequence
  Description of Artificial Sequence: Synthetic oligonucleotide
agcggcugcucgggcgauc

SEQ ID NO: 2971835 - RNA, 19 nt, Artificial Sequence
  Description of Artificial Sequence: Synthetic oligonucleotide
gcagcggcugcucgggcga

SEQ ID NO: 2971836 - RNA, 19 nt, Artificial Sequence
  Description of Artificial Sequence: Synthetic oligonucleotide
gccggguucuuugcgucgc

SEQ ID NO: 2971837 - RNA, 19 nt, Artificial Sequence
  Description of Artificial Sequence: Synthetic oligonucleotide
agccaccugggcagaauua

SEQ ID NO: 2971838 - RNA, 19 nt, Artificial Sequence
  Description of Artificial Sequence: Synthetic oligonucleotide
gaaggcuugucagguccau

SEQ ID NO: 2971839 - RNA, 19 nt, Artificial Sequence
  Description of Artificial Sequence: Synthetic oligonucleotide
uccagccaccugggcagaa

SEQ ID NO: 2971840 - RNA, 19 nt, Artificial Sequence
  Description of Artificial Sequence: Synthetic oligonucleotide
cugcaaacucaggguucuc

SEQ ID NO: 2971841 - RNA, 19 nt, Artificial Sequence
  Description of Artificial Sequence: Synthetic oligonucleotide
ggagauucugaaggcuugu

SEQ ID NO: 2971842 - RNA, 19 nt, Artificial Sequence
  Description of Artificial Sequence: Synthetic oligonucleotide
gcacggccggguucuuugc

SEQ ID NO: 2971843 - RNA, 19 nt, Artificial Sequence
  Description of Artificial Sequence: Synthetic oligonucleotide
ccaguccuggagggaagcc

SEQ ID NO: 2971844 - RNA, 19 nt, Artificial Sequence
  Description of Artificial Sequence: Synthetic oligonucleotide
augagcccugccagcugga

SEQ ID NO: 2971845 - RNA, 19 nt, Artificial Sequence
  Description of Artificial Sequence: Synthetic oligonucleotide
gcugcucgggcgaucucac

SEQ ID NO: 2971846 - RNA, 19 nt, Artificial Sequence
  Description of Artificial Sequence: Synthetic oligonucleotide
ggccaguccuggagggaag

SEQ ID NO: 2971847 - RNA, 19 nt, Artificial Sequence
  Description of Artificial Sequence: Synthetic oligonucleotide
ucccagcaaacaggcuguu

SEQ ID NO: 2971848 - RNA, 19 nt, Artificial Sequence
  Description of Artificial Sequence: Synthetic oligonucleotide
gcucgggcgaucucacucu

SEQ ID NO: 2971849 - RNA, 19 nt, Artificial Sequence
  Description of Artificial Sequence: Synthetic oligonucleotide
cguccucuccgacuggcuc

SEQ ID NO: 2971850 - RNA, 19 nt, Artificial Sequence
  Description of Artificial Sequence: Synthetic oligonucleotide
  modified_base (3)..(3): a, c, u, g, unknown or other
ccngacugcuugacuaugu

SEQ ID NO: 2971851 - RNA, 19 nt, Artificial Sequence
  Description of Artificial Sequence: Synthetic oligonucleotide
ccccgaaccacagguccag

SEQ ID NO: 2971852 - RNA, 19 nt, Artificial Sequence
  Description of Artificial Sequence: Synthetic oligonucleotide
ccaugagcccugccagcug

SEQ ID NO: 2971853 - RNA, 19 nt, Artificial Sequence
  Description of Artificial Sequence: Synthetic oligonucleotide
ggcccgccauucccggcag

SEQ ID NO: 2971854 - RNA, 19 nt, Artificial Sequence
  Description of Artificial Sequence: Synthetic oligonucleotide
cgccauucccggcagcauc

SEQ ID NO: 2971855 - RNA, 19 nt, Artificial Sequence
  Description of Artificial Sequence: Synthetic oligonucleotide
cuggcuccuucuccccgaa

SEQ ID NO: 2971856 - RNA, 19 nt, Artificial Sequence
  Description of Artificial Sequence: Synthetic oligonucleotide
gcgucgccuccgguggugg

SEQ ID NO: 2971857 - RNA, 19 nt, Artificial Sequence
  Description of Artificial Sequence: Synthetic oligonucleotide
ggcagcacggccggguucu

SEQ ID NO: 2971858 - RNA, 19 nt, Artificial Sequence
  Description of Artificial Sequence: Synthetic oligonucleotide
cucacucuugggccuccgu

SEQ ID NO: 2971859 - RNA, 19 nt, Artificial Sequence
  Description of Artificial Sequence: Synthetic oligonucleotide
ccggguucuuugcgucgcc

SEQ ID NO: 2971860 - RNA, 19 nt, Artificial Sequence
  Description of Artificial Sequence: Synthetic oligonucleotide
ccggcagcaucaggggcag

SEQ ID NO: 2971861 - RNA, 19 nt, Artificial Sequence
  Description of Artificial Sequence: Synthetic oligonucleotide
cagccaccugggcagaauu

SEQ ID NO: 2971862 - RNA, 19 nt, Artificial Sequence
  Description of Artificial Sequence: Synthetic oligonucleotide
gggcagcacggccggguuc

SEQ ID NO: 2971863 - RNA, 19 nt, Artificial Sequence
  Description of Artificial Sequence: Synthetic oligonucleotide
ccauucccggcagcaucag

SEQ ID NO: 2971864 - RNA, 19 nt, Artificial Sequence
  Description of Artificial Sequence: Synthetic oligonucleotide
gccuccguccucuccgacu

SEQ ID NO: 2971865 - RNA, 19 nt, Artificial Sequence
  Description of Artificial Sequence: Synthetic oligonucleotide
gguucuccuccagccaccu

SEQ ID NO: 2971866 - RNA, 19 nt, Artificial Sequence
  Description of Artificial Sequence: Synthetic oligonucleotide
cccugaaguagaggcgaca

SEQ ID NO: 2971867 - RNA, 19 nt, Artificial Sequence
  Description of Artificial Sequence: Synthetic oligonucleotide
ggccuccguccucuccgac

SEQ ID NO: 2971868 - RNA, 19 nt, Artificial Sequence
  Description of Artificial Sequence: Synthetic oligonucleotide
gggccuccguccucuccga

SEQ ID NO: 2971869 - RNA, 19 nt, Artificial Sequence
  Description of Artificial Sequence: Synthetic oligonucleotide
ccuccggugguggcagcug

SEQ ID NO: 2971870 - RNA, 19 nt, Artificial Sequence
  Description of Artificial Sequence: Synthetic oligonucleotide
cggccggguucuuugcguc

SEQ ID NO: 2971871 - RNA, 19 nt, Artificial Sequence
  Description of Artificial Sequence: Synthetic oligonucleotide
cgaucucacucuugggccu

SEQ ID NO: 2971872 - RNA, 19 nt, Artificial Sequence
  Description of Artificial Sequence: Synthetic oligonucleotide
cugcucgggcgaucucacu

SEQ ID NO: 2971873 - RNA, 19 nt, Artificial Sequence
  Description of Artificial Sequence: Synthetic oligonucleotide
cucgggcgaucucacucuu

SEQ ID NO: 2971874 - RNA, 19 nt, Artificial Sequence
  Description of Artificial Sequence: Synthetic oligonucleotide
cccaugagcccugccagcu

SEQ ID NO: 2971875 - RNA, 19 nt, Artificial Sequence
  Description of Artificial Sequence: Synthetic oligonucleotide
cgucgccuccggugguggc

SEQ ID NO: 2971876 - RNA, 19 nt, Artificial Sequence
  Description of Artificial Sequence: Synthetic oligonucleotide
gcccgccauucccggcagc

SEQ ID NO: 2971877 - RNA, 19 nt, Artificial Sequence
  Description of Artificial Sequence: Synthetic oligonucleotide
gcggcugcucgggcgaucu

SEQ ID NO: 2971878 - RNA, 19 nt, Artificial Sequence
  Description of Artificial Sequence: Synthetic oligonucleotide
ccaucccagcaaacaggcu

SEQ ID NO: 2971879 - RNA, 19 nt, Artificial Sequence
  Description of Artificial Sequence: Synthetic oligonucleotide
guccuggagggaagcccau

SEQ ID NO: 2971880 - RNA, 19 nt, Artificial Sequence
  Description of Artificial Sequence: Synthetic oligonucleotide
gccuccggugguggcagcu

SEQ ID NO: 2971881 - RNA, 19 nt, Artificial Sequence
  Description of Artificial Sequence: Synthetic oligonucleotide
ccguccucuccgacuggcu

SEQ ID NO: 2971882 - RNA, 19 nt, Artificial Sequence
  Description of Artificial Sequence: Synthetic oligonucleotide
cgccuccggugguggcagc

SEQ ID NO: 2971883 - RNA, 19 nt, Artificial Sequence
  Description of Artificial Sequence: Synthetic oligonucleotide
cagcacggccggguucuuu

SEQ ID NO: 2971884 - RNA, 19 nt, Artificial Sequence
  Description of Artificial Sequence: Synthetic oligonucleotide
cggguucuuugcgucgccu

SEQ ID NO: 2971885 - RNA, 19 nt, Artificial Sequence
  Description of Artificial Sequence: Synthetic oligonucleotide
cggcugcucgggcgaucuc

SEQ ID NO: 2971886 - RNA, 19 nt, Artificial Sequence
  Description of Artificial Sequence: Synthetic oligonucleotide
cccgaaccacagguccagu

SEQ ID NO: 2971887 - RNA, 19 nt, Artificial Sequence
  Description of Artificial Sequence: Synthetic oligonucleotide
cagcggcugcucgggcgau

SEQ ID NO: 2971888 - RNA, 19 nt, Artificial Sequence
  Description of Artificial Sequence: Synthetic oligonucleotide
ccgccauucccggcagcau

SEQ ID NO: 2971889 - RNA, 19 nt, Artificial Sequence
  Description of Artificial Sequence: Synthetic oligonucleotide
gcagcacggccggguucuu

SEQ ID NO: 2971890 - RNA, 19 nt, Artificial Sequence
  Description of Artificial Sequence: Synthetic oligonucleotide
ccucuccgacuggcuccuu

SEQ ID NO: 2971891 - RNA, 19 nt, Artificial Sequence
  Description of Artificial Sequence: Synthetic oligonucleotide
  modified_base (1)..(1): a, c, u, g, unknown or other
ngacugcuugacuauguca

SEQ ID NO: 2971892 - RNA, 19 nt, Artificial Sequence
  Description of Artificial Sequence: Synthetic oligonucleotide
uuauuauccagcauaauaa

SEQ ID NO: 2971893 - RNA, 19 nt, Artificial Sequence
  Description of Artificial Sequence: Synthetic oligonucleotide
uuauccagcauaauaagca

SEQ ID NO: 2971894 - RNA, 19 nt, Artificial Sequence
  Description of Artificial Sequence: Synthetic oligonucleotide
aaugacuggagguacacga

SEQ ID NO: 2971895 - RNA, 19 nt, Artificial Sequence
  Description of Artificial Sequence: Synthetic oligonucleotide
acauccaccugauugagcg

SEQ ID NO: 2971896 - RNA, 19 nt, Artificial Sequence
  Description of Artificial Sequence: Synthetic oligonucleotide
uuucuuauuauccagcaua

SEQ ID NO: 2971897 - RNA, 19 nt, Artificial Sequence
  Description of Artificial Sequence: Synthetic oligonucleotide
aagaauucugcaauucgcc

SEQ ID NO: 2971898 - RNA, 19 nt, Artificial Sequence
  Description of Artificial Sequence: Synthetic oligonucleotide
gauuuucaaggccagaagc

SEQ ID NO: 2971899 - RNA, 19 nt, Artificial Sequence
  Description of Artificial Sequence: Synthetic oligonucleotide
auuacuaaguucuuguccu

SEQ ID NO: 2971900 - RNA, 19 nt, Artificial Sequence
  Description of Artificial Sequence: Synthetic oligonucleotide
aauuucuuauuauccagca

SEQ ID NO: 2971901 - RNA, 19 nt, Artificial Sequence
  Description of Artificial Sequence: Synthetic oligonucleotide
aguucuuguccuuaggcac

SEQ ID NO: 2971902 - RNA, 19 nt, Artificial Sequence
  Description of Artificial Sequence: Synthetic oligonucleotide
aagaggggcacacagucgg

SEQ ID NO: 2971903 - RNA, 19 nt, Artificial Sequence
  Description of Artificial Sequence: Synthetic oligonucleotide
agaauucugcaauucgccc

SEQ ID NO: 2971904 - RNA, 19 nt, Artificial Sequence
  Description of Artificial Sequence: Synthetic oligonucleotide
agaggcauucuccugaccg

SEQ ID NO: 2971905 - RNA, 19 nt, Artificial Sequence
  Description of Artificial Sequence: Synthetic oligonucleotide
uguccuuaggcacccaucg

SEQ ID NO: 2971906 - RNA, 19 nt, Artificial Sequence
  Description of Artificial Sequence: Synthetic oligonucleotide
uauuauccagcauaauaag

SEQ ID NO: 2971907 - RNA, 19 nt, Artificial Sequence
  Description of Artificial Sequence: Synthetic oligonucleotide
uaaguucuuguccuuaggc

SEQ ID NO: 2971908 - RNA, 19 nt, Artificial Sequence
  Description of Artificial Sequence: Synthetic oligonucleotide
aauucugcaauucgcccag

SEQ ID NO: 2971909 - RNA, 19 nt, Artificial Sequence
  Description of Artificial Sequence: Synthetic oligonucleotide
aagcccagggcucuggucg

SEQ ID NO: 2971910 - RNA, 19 nt, Artificial Sequence
  Description of Artificial Sequence: Synthetic oligonucleotide
agcaacaacccguugacag

SEQ ID NO: 2971911 - RNA, 19 nt, Artificial Sequence
  Description of Artificial Sequence: Synthetic oligonucleotide
auuuucaaggccagaagcc

SEQ ID NO: 2971912 - RNA, 19 nt, Artificial Sequence
  Description of Artificial Sequence: Synthetic oligonucleotide
uccagcauaauaagcacug

SEQ ID NO: 2971913 - RNA, 19 nt, Artificial Sequence
  Description of Artificial Sequence: Synthetic oligonucleotide
aaggccagaagcccagggc

SEQ ID NO: 2971914 - RNA, 19 nt, Artificial Sequence
  Description of Artificial Sequence: Synthetic oligonucleotide
cauuacuaaguucuugucc

SEQ ID NO: 2971915 - RNA, 19 nt, Artificial Sequence
  Description of Artificial Sequence: Synthetic oligonucleotide
uaauaagcacugcaucagg

SEQ ID NO: 2971916 - RNA, 19 nt, Artificial Sequence
  Description of Artificial Sequence: Synthetic oligonucleotide
auuauccagcauaauaagc

SEQ ID NO: 2971917 - RNA, 19 nt, Artificial Sequence
  Description of Artificial Sequence: Synthetic oligonucleotide
aauaagcacugcaucaggg

SEQ ID NO: 2971918 - RNA, 19 nt, Artificial Sequence
  Description of Artificial Sequence: Synthetic oligonucleotide
ucuaaggcagcauuggcgu

SEQ ID NO: 2971919 - RNA, 19 nt, Artificial Sequence
  Description of Artificial Sequence: Synthetic oligonucleotide
aaguucuuguccuuaggca

SEQ ID NO: 2971920 - RNA, 19 nt, Artificial Sequence
  Description of Artificial Sequence: Synthetic oligonucleotide
acagcugacguauggguac

SEQ ID NO: 2971921 - RNA, 19 nt, Artificial Sequence
  Description of Artificial Sequence: Synthetic oligonucleotide
caccaauuucuuauuaucc

SEQ ID NO: 2971922 - RNA, 19 nt, Artificial Sequence
  Description of Artificial Sequence: Synthetic oligonucleotide
caauuucuuauuauccagc

SEQ ID NO: 2971923 - RNA, 19 nt, Artificial Sequence
  Description of Artificial Sequence: Synthetic oligonucleotide
gaagaauucugcaauucgc

SEQ ID NO: 2971924 - RNA, 19 nt, Artificial Sequence
  Description of Artificial Sequence: Synthetic oligonucleotide
cauaauaagcacugcauca

SEQ ID NO: 2971925 - RNA, 19 nt, Artificial Sequence
  Description of Artificial Sequence: Synthetic oligonucleotide
aagaccuuggguucuccag

SEQ ID NO: 2971926 - RNA, 19 nt, Artificial Sequence
  Description of Artificial Sequence: Synthetic oligonucleotide
ugacuggagguacacgagg

SEQ ID NO: 2971927 - RNA, 19 nt, Artificial Sequence
  Description of Artificial Sequence: Synthetic oligonucleotide
accaauuucuuauuaucca

SEQ ID NO: 2971928 - RNA, 19 nt, Artificial Sequence
  Description of Artificial Sequence: Synthetic oligonucleotide
auaauaagcacugcaucag

SEQ ID NO: 2971929 - RNA, 19 nt, Artificial Sequence
  Description of Artificial Sequence: Synthetic oligonucleotide
uucuuauuauccagcauaa

SEQ ID NO: 2971930 - RNA, 19 nt, Artificial Sequence
  Description of Artificial Sequence: Synthetic oligonucleotide
gacggauagggccagguug

SEQ ID NO: 2971931 - RNA, 19 nt, Artificial Sequence
  Description of Artificial Sequence: Synthetic oligonucleotide
aauucgcccagcgauuuuc

SEQ ID NO: 2971932 - RNA, 19 nt, Artificial Sequence
  Description of Artificial Sequence: Synthetic oligonucleotide
acauuacuaaguucuuguc

SEQ ID NO: 2971933 - RNA, 19 nt, Artificial Sequence
  Description of Artificial Sequence: Synthetic oligonucleotide
ugaggcagaggcauucucc

SEQ ID NO: 2971934 - RNA, 19 nt, Artificial Sequence
  Description of Artificial Sequence: Synthetic oligonucleotide
uuuucaaggccagaagccc

SEQ ID NO: 2971935 - RNA, 19 nt, Artificial Sequence
  Description of Artificial Sequence: Synthetic oligonucleotide
ggaagaauucugcaauucg

SEQ ID NO: 2971936 - RNA, 19 nt, Artificial Sequence
  Description of Artificial Sequence: Synthetic oligonucleotide
cuuauuauccagcauaaua

SEQ ID NO: 2971937 - RNA, 19 nt, Artificial Sequence
  Description of Artificial Sequence: Synthetic oligonucleotide
ucaccaauuucuuauuauc

SEQ ID NO: 2971938 - RNA, 19 nt, Artificial Sequence
  Description of Artificial Sequence: Synthetic oligonucleotide
agguacacgaggccgaguc

SEQ ID NO: 2971939 - RNA, 19 nt, Artificial Sequence
  Description of Artificial Sequence: Synthetic oligonucleotide
guugacagcugacguaugg

SEQ ID NO: 2971940 - RNA, 19 nt, Artificial Sequence
  Description of Artificial Sequence: Synthetic oligonucleotide
ucucucucgacucuuccca

SEQ ID NO: 2971941 - RNA, 19 nt, Artificial Sequence
  Description of Artificial Sequence: Synthetic oligonucleotide
guugcuguggaagaggggc

SEQ ID NO: 2971942 - RNA, 19 nt, Artificial Sequence
  Description of Artificial Sequence: Synthetic oligonucleotide
cagucggugaggcagaggc

SEQ ID NO: 2971943 - RNA, 19 nt, Artificial Sequence
  Description of Artificial Sequence: Synthetic oligonucleotide
acuaaguucuuguccuuag

SEQ ID NO: 2971944 - RNA, 19 nt, Artificial Sequence
  Description of Artificial Sequence: Synthetic oligonucleotide
gaauucugcaauucgccca

SEQ ID NO: 2971945 - RNA, 19 nt, Artificial Sequence
  Description of Artificial Sequence: Synthetic oligonucleotide
uauccagcauaauaagcac

SEQ ID NO: 2971946 - RNA, 19 nt, Artificial Sequence
  Description of Artificial Sequence: Synthetic oligonucleotide
guaguacccagcuaccacc

SEQ ID NO: 2971947 - RNA, 19 nt, Artificial Sequence
  Description of Artificial Sequence: Synthetic oligonucleotide
uucugcaauucgcccagcg

SEQ ID NO: 2971948 - RNA, 19 nt, Artificial Sequence
  Description of Artificial Sequence: Synthetic oligonucleotide
agaccuuggguucuccagg

SEQ ID NO: 2971949 - RNA, 19 nt, Artificial Sequence
  Description of Artificial Sequence: Synthetic oligonucleotide
uuucaaggccagaagccca

SEQ ID NO: 2971950 - RNA, 19 nt, Artificial Sequence
  Description of Artificial Sequence: Synthetic oligonucleotide
caucagggaagaauucugc

SEQ ID NO: 2971951 - RNA, 19 nt, Artificial Sequence
  Description of Artificial Sequence: Synthetic oligonucleotide
gucuaaggcagcauuggcg

SEQ ID NO: 2971952 - RNA, 19 nt, Artificial Sequence
  Description of Artificial Sequence: Synthetic oligonucleotide
uuaggcacccaucgaagac

SEQ ID NO: 2971953 - RNA, 19 nt, Artificial Sequence
  Description of Artificial Sequence: Synthetic oligonucleotide
uugagcgcgaccuccagac

SEQ ID NO: 2971954 - RNA, 19 nt, Artificial Sequence
  Description of Artificial Sequence: Synthetic oligonucleotide
gagcgcgaccuccagacgg

SEQ ID NO: 2971955 - RNA, 19 nt, Artificial Sequence
  Description of Artificial Sequence: Synthetic oligonucleotide
aacccguugacagcugacg

SEQ ID NO: 2971956 - RNA, 19 nt, Artificial Sequence
  Description of Artificial Sequence: Synthetic oligonucleotide
auaagcacugcaucaggga

SEQ ID NO: 2971957 - RNA, 19 nt, Artificial Sequence
  Description of Artificial Sequence: Synthetic oligonucleotide
cucuggucgucuaaggcag

SEQ ID NO: 2971958 - RNA, 19 nt, Artificial Sequence
  Description of Artificial Sequence: Synthetic oligonucleotide
agucucuccacauuacuaa

SEQ ID NO: 2971959 - RNA, 19 nt, Artificial Sequence
  Description of Artificial Sequence: Synthetic oligonucleotide
uccuuaggcacccaucgaa

SEQ ID NO: 2971960 - RNA, 19 nt, Artificial Sequence
  Description of Artificial Sequence: Synthetic oligonucleotide
uugacagcugacguauggg

SEQ ID NO: 2971961 - RNA, 19 nt, Artificial Sequence
  Description of Artificial Sequence: Synthetic oligonucleotide
cuaaguucuuguccuuagg

SEQ ID NO: 2971962 - RNA, 19 nt, Artificial Sequence
  Description of Artificial Sequence: Synthetic oligonucleotide
cacacagucggugaggcag

SEQ ID NO: 2971963 - RNA, 19 nt, Artificial Sequence
  Description of Artificial Sequence: Synthetic oligonucleotide
acaaugacuggagguacac

SEQ ID NO: 2971964 - RNA, 19 nt, Artificial Sequence
  Description of Artificial Sequence: Synthetic oligonucleotide
ucgucuaaggcagcauugg

SEQ ID NO: 2971965 - RNA, 19 nt, Artificial Sequence
  Description of Artificial Sequence: Synthetic oligonucleotide
ucugcaauucgcccagcga

SEQ ID NO: 2971966 - RNA, 19 nt, Artificial Sequence
  Description of Artificial Sequence: Synthetic oligonucleotide
ucucuccacauuacuaagu

SEQ ID NO: 2971967 - RNA, 19 nt, Artificial Sequence
  Description of Artificial Sequence: Synthetic oligonucleotide
acggauagggccagguugc

SEQ ID NO: 2971968 - RNA, 19 nt, Artificial Sequence
  Description of Artificial Sequence: Synthetic oligonucleotide
cuccacauuacuaaguucu

SEQ ID NO: 2971969 - RNA, 19 nt, Artificial Sequence
  Description of Artificial Sequence: Synthetic oligonucleotide
uacccagcuaccaccagac

SEQ ID NO: 2971970 - RNA, 19 nt, Artificial Sequence
  Description of Artificial Sequence: Synthetic oligonucleotide
ccaauuucuuauuauccag

SEQ ID NO: 2971971 - RNA, 19 nt, Artificial Sequence
  Description of Artificial Sequence: Synthetic oligonucleotide
auucuccugaccgcggcgc

SEQ ID NO: 2971972 - RNA, 19 nt, Artificial Sequence
  Description of Artificial Sequence: Synthetic oligonucleotide
cugugcgccccacacaucc

SEQ ID NO: 2971973 - RNA, 19 nt, Artificial Sequence
  Description of Artificial Sequence: Synthetic oligonucleotide
caccagaccggccugugcg

SEQ ID NO: 2971974 - RNA, 19 nt, Artificial Sequence
  Description of Artificial Sequence: Synthetic oligonucleotide
agcauuggcgugguaguac

SEQ ID NO: 2971975 - RNA, 19 nt, Artificial Sequence
  Description of Artificial Sequence: Synthetic oligonucleotide
ucgcccagcgauuuucaag

SEQ ID NO: 2971976 - RNA, 19 nt, Artificial Sequence
  Description of Artificial Sequence: Synthetic oligonucleotide
gauagggccagguugcugu

SEQ ID NO: 2971977 - RNA, 19 nt, Artificial Sequence
  Description of Artificial Sequence: Synthetic oligonucleotide
cuggagguacacgaggccg

SEQ ID NO: 2971978 - RNA, 19 nt, Artificial Sequence
  Description of Artificial Sequence: Synthetic oligonucleotide
cugacguauggguaccgag

SEQ ID NO: 2971979 - RNA, 19 nt, Artificial Sequence
  Description of Artificial Sequence: Synthetic oligonucleotide
agcauaauaagcacugcau

SEQ ID NO: 2971980 - RNA, 19 nt, Artificial Sequence
  Description of Artificial Sequence: Synthetic oligonucleotide
ucuccaggacaaugacugg

SEQ ID NO: 2971981 - RNA, 19 nt, Artificial Sequence
  Description of Artificial Sequence: Synthetic oligonucleotide
gaggcauucuccugaccgc

SEQ ID NO: 2971982 - RNA, 19 nt, Artificial Sequence
  Description of Artificial Sequence: Synthetic oligonucleotide
uaggcacccaucgaagacc

SEQ ID NO: 2971983 - RNA, 19 nt, Artificial Sequence
  Description of Artificial Sequence: Synthetic oligonucleotide
gucucuccacauuacuaag

SEQ ID NO: 2971984 - RNA, 19 nt, Artificial Sequence
  Description of Artificial Sequence: Synthetic oligonucleotide
ugauugagcgcgaccucca

SEQ ID NO: 2971985 - RNA, 19 nt, Artificial Sequence
  Description of Artificial Sequence: Synthetic oligonucleotide
gaagaggggcacacagucg

SEQ ID NO: 2971986 - RNA, 19 nt, Artificial Sequence
  Description of Artificial Sequence: Synthetic oligonucleotide
gacucuucccagucucucc

SEQ ID NO: 2971987 - RNA, 19 nt, Artificial Sequence
  Description of Artificial Sequence: Synthetic oligonucleotide
gaccuccagacggauaggg

SEQ ID NO: 2971988 - RNA, 19 nt, Artificial Sequence
  Description of Artificial Sequence: Synthetic oligonucleotide
accugauugagcgcgaccu

SEQ ID NO: 2971989 - RNA, 19 nt, Artificial Sequence
  Description of Artificial Sequence: Synthetic oligonucleotide
gacuggagguacacgaggc

SEQ ID NO: 2971990 - RNA, 19 nt, Artificial Sequence
  Description of Artificial Sequence: Synthetic oligonucleotide
uggagguacacgaggccga

SEQ ID NO: 2971991 - RNA, 19 nt, Artificial Sequence
  Description of Artificial Sequence: Synthetic oligonucleotide
acugcaucagggaagaauu

SEQ ID NO: 2971992 - RNA, 19 nt, Artificial Sequence
  Description of Artificial Sequence: Synthetic oligonucleotide
ccacacauccaccugauug

SEQ ID NO: 2971993 - RNA, 19 nt, Artificial Sequence
  Description of Artificial Sequence: Synthetic oligonucleotide
cugauugagcgcgaccucc

SEQ ID NO: 2971994 - RNA, 19 nt, Artificial Sequence
  Description of Artificial Sequence: Synthetic oligonucleotide
caucgaagaccuuggguuc

SEQ ID NO: 2971995 - RNA, 19 nt, Artificial Sequence
  Description of Artificial Sequence: Synthetic oligonucleotide
cacacauccaccugauuga

SEQ ID NO: 2971996 - RNA, 19 nt, Artificial Sequence
  Description of Artificial Sequence: Synthetic oligonucleotide
ucuccacauuacuaaguuc

SEQ ID NO: 2971997 - RNA, 19 nt, Artificial Sequence
  Description of Artificial Sequence: Synthetic oligonucleotide
ggaagaggggcacacaguc

SEQ ID NO: 2971998 - RNA, 19 nt, Artificial Sequence
  Description of Artificial Sequence: Synthetic oligonucleotide
gcauaauaagcacugcauc

SEQ ID NO: 2971999 - RNA, 19 nt, Artificial Sequence
  Description of Artificial Sequence: Synthetic oligonucleotide
cacccaucgaagaccuugg

SEQ ID NO: 2972000 - RNA, 19 nt, Artificial Sequence
  Description of Artificial Sequence: Synthetic oligonucleotide
acucuucccagucucucca

SEQ ID NO: 2972001 - RNA, 19 nt, Artificial Sequence
  Description of Artificial Sequence: Synthetic oligonucleotide
uuggcgugguaguacccag

SEQ ID NO: 2972002 - RNA, 19 nt, Artificial Sequence
  Description of Artificial Sequence: Synthetic oligonucleotide
cacauuacuaaguucuugu

SEQ ID NO: 2972003 - RNA, 19 nt, Artificial Sequence
  Description of Artificial Sequence: Synthetic oligonucleotide
accagaccggccugugcgc

SEQ ID NO: 2972004 - RNA, 19 nt, Artificial Sequence
  Description of Artificial Sequence: Synthetic oligonucleotide
cccagcuaccaccagaccg

SEQ ID NO: 2972005 - RNA, 19 nt, Artificial Sequence
  Description of Artificial Sequence: Synthetic oligonucleotide
ucccagucucuccacauua

SEQ ID NO: 2972006 - RNA, 19 nt, Artificial Sequence
  Description of Artificial Sequence: Synthetic oligonucleotide
cagcauaauaagcacugca

SEQ ID NO: 2972007 - RNA, 19 nt, Artificial Sequence
  Description of Artificial Sequence: Synthetic oligonucleotide
agguugcuguggaagaggg

SEQ ID NO: 2972008 - RNA, 19 nt, Artificial Sequence
  Description of Artificial Sequence: Synthetic oligonucleotide
ccagcuaccaccagaccgg

SEQ ID NO: 2972009 - RNA, 19 nt, Artificial Sequence
  Description of Artificial Sequence: Synthetic oligonucleotide
aggccgagucaccaauuuc

SEQ ID NO: 2972010 - RNA, 19 nt, Artificial Sequence
  Description of Artificial Sequence: Synthetic oligonucleotide
gcgaccuccagacggauag

SEQ ID NO: 2972011 - RNA, 19 nt, Artificial Sequence
  Description of Artificial Sequence: Synthetic oligonucleotide
ccuccagacggauagggcc

SEQ ID NO: 2972012 - RNA, 19 nt, Artificial Sequence
  Description of Artificial Sequence: Synthetic oligonucleotide
gauugagcgcgaccuccag

SEQ ID NO: 2972013 - RNA, 19 nt, Artificial Sequence
  Description of Artificial Sequence: Synthetic oligonucleotide
uugcuguggaagaggggca

SEQ ID NO: 2972014 - RNA, 19 nt, Artificial Sequence
  Description of Artificial Sequence: Synthetic oligonucleotide
guucuuguccuuaggcacc

SEQ ID NO: 2972015 - RNA, 19 nt, Artificial Sequence
  Description of Artificial Sequence: Synthetic oligonucleotide
cuuggguucuccaggacaa

SEQ ID NO: 2972016 - RNA, 19 nt, Artificial Sequence
  Description of Artificial Sequence: Synthetic oligonucleotide
uucuccugaccgcggcgcg

SEQ ID NO: 2972017 - RNA, 19 nt, Artificial Sequence
  Description of Artificial Sequence: Synthetic oligonucleotide
uuguccuuaggcacccauc

SEQ ID NO: 2972018 - RNA, 19 nt, Artificial Sequence
  Description of Artificial Sequence: Synthetic oligonucleotide
agucaccaauuucuuauua

SEQ ID NO: 2972019 - RNA, 19 nt, Artificial Sequence
  Description of Artificial Sequence: Synthetic oligonucleotide
aggcauucuccugaccgcg

SEQ ID NO: 2972020 - RNA, 19 nt, Artificial Sequence
  Description of Artificial Sequence: Synthetic oligonucleotide
ugagcgcgaccuccagacg

SEQ ID NO: 2972021 - RNA, 19 nt, Artificial Sequence
  Description of Artificial Sequence: Synthetic oligonucleotide
uggguucuccaggacaaug

SEQ ID NO: 2972022 - RNA, 19 nt, Artificial Sequence
  Description of Artificial Sequence: Synthetic oligonucleotide
cucgacucuucccagucuc

SEQ ID NO: 2972023 - RNA, 19 nt, Artificial Sequence
  Description of Artificial Sequence: Synthetic oligonucleotide
cgugguaguacccagcuac

SEQ ID NO: 2972024 - RNA, 19 nt, Artificial Sequence
  Description of Artificial Sequence: Synthetic oligonucleotide
uucuuguccuuaggcaccc

SEQ ID NO: 2972025 - RNA, 19 nt, Artificial Sequence
  Description of Artificial Sequence: Synthetic oligonucleotide
ggcagcauuggcgugguag

SEQ ID NO: 2972026 - RNA, 19 nt, Artificial Sequence
  Description of Artificial Sequence: Synthetic oligonucleotide
cuuaggcacccaucgaaga

SEQ ID NO: 2972027 - RNA, 19 nt, Artificial Sequence
  Description of Artificial Sequence: Synthetic oligonucleotide
uacacgaggccgagucacc

SEQ ID NO: 2972028 - RNA, 19 nt, Artificial Sequence
  Description of Artificial Sequence: Synthetic oligonucleotide
ugcaauucgcccagcgauu

SEQ ID NO: 2972029 - RNA, 19 nt, Artificial Sequence
  Description of Artificial Sequence: Synthetic oligonucleotide
cauucuccugaccgcggcg

SEQ ID NO: 2972030 - RNA, 19 nt, Artificial Sequence
  Description of Artificial Sequence: Synthetic oligonucleotide
uccacauuacuaaguucuu

SEQ ID NO: 2972031 - RNA, 19 nt, Artificial Sequence
  Description of Artificial Sequence: Synthetic oligonucleotide
aggacaaugacuggaggua

SEQ ID NO: 2972032 - RNA, 19 nt, Artificial Sequence
  Description of Artificial Sequence: Synthetic oligonucleotide
gguaguacccagcuaccac

SEQ ID NO: 2972033 - RNA, 19 nt, Artificial Sequence
  Description of Artificial Sequence: Synthetic oligonucleotide
cagguugcuguggaagagg

SEQ ID NO: 2972034 - RNA, 19 nt, Artificial Sequence
  Description of Artificial Sequence: Synthetic oligonucleotide
auugagcgcgaccuccaga

SEQ ID NO: 2972035 - RNA, 19 nt, Artificial Sequence
  Description of Artificial Sequence: Synthetic oligonucleotide
caaugacuggagguacacg

SEQ ID NO: 2972036 - RNA, 19 nt, Artificial Sequence
  Description of Artificial Sequence: Synthetic oligonucleotide
gaagaccuuggguucucca

SEQ ID NO: 2972037 - RNA, 19 nt, Artificial Sequence
  Description of Artificial Sequence: Synthetic oligonucleotide
acaacccguugacagcuga

SEQ ID NO: 2972038 - RNA, 19 nt, Artificial Sequence
  Description of Artificial Sequence: Synthetic oligonucleotide
acccguugacagcugacgu

SEQ ID NO: 2972039 - RNA, 19 nt, Artificial Sequence
  Description of Artificial Sequence: Synthetic oligonucleotide
gucgucuaaggcagcauug

SEQ ID NO: 2972040 - RNA, 19 nt, Artificial Sequence
  Description of Artificial Sequence: Synthetic oligonucleotide
ucucgacucuucccagucu

SEQ ID NO: 2972041 - RNA, 19 nt, Artificial Sequence
  Description of Artificial Sequence: Synthetic oligonucleotide
auuggcgugguaguaccca

SEQ ID NO: 2972042 - RNA, 19 nt, Artificial Sequence
  Description of Artificial Sequence: Synthetic oligonucleotide
accuccagacggauagggc

SEQ ID NO: 2972043 - RNA, 19 nt, Artificial Sequence
  Description of Artificial Sequence: Synthetic oligonucleotide
guacacgaggccgagucac

SEQ ID NO: 2972044 - RNA, 19 nt, Artificial Sequence
  Description of Artificial Sequence: Synthetic oligonucleotide
ugguaguacccagcuacca

SEQ ID NO: 2972045 - RNA, 19 nt, Artificial Sequence
  Description of Artificial Sequence: Synthetic oligonucleotide
uacuaaguucuuguccuua

SEQ ID NO: 2972046 - RNA, 19 nt, Artificial Sequence
  Description of Artificial Sequence: Synthetic oligonucleotide
acacauccaccugauugag

SEQ ID NO: 2972047 - RNA, 19 nt, Artificial Sequence
  Description of Artificial Sequence: Synthetic oligonucleotide
acccaucgaagaccuuggg

SEQ ID NO: 2972048 - RNA, 19 nt, Artificial Sequence
  Description of Artificial Sequence: Synthetic oligonucleotide
agggaagaauucugcaauu

SEQ ID NO: 2972049 - RNA, 19 nt, Artificial Sequence
  Description of Artificial Sequence: Synthetic oligonucleotide
accuuggguucuccaggac

SEQ ID NO: 2972050 - RNA, 19 nt, Artificial Sequence
  Description of Artificial Sequence: Synthetic oligonucleotide
cauuggcgugguaguaccc

SEQ ID NO: 2972051 - RNA, 19 nt, Artificial Sequence
  Description of Artificial Sequence: Synthetic oligonucleotide
acccagcuaccaccagacc

SEQ ID NO: 2972052 - RNA, 19 nt, Artificial Sequence
  Description of Artificial Sequence: Synthetic oligonucleotide
gaccuuggguucuccagga

SEQ ID NO: 2972053 - RNA, 19 nt, Artificial Sequence
  Description of Artificial Sequence: Synthetic oligonucleotide
ucucucgacucuucccagu

SEQ ID NO: 2972054 - RNA, 19 nt, Artificial Sequence
  Description of Artificial Sequence: Synthetic oligonucleotide
ucuuauuauccagcauaau

SEQ ID NO: 2972055 - RNA, 19 nt, Artificial Sequence
  Description of Artificial Sequence: Synthetic oligonucleotide
augacuggagguacacgag

SEQ ID NO: 2972056 - RNA, 19 nt, Artificial Sequence
  Description of Artificial Sequence: Synthetic oligonucleotide
uuacuaaguucuuguccuu

SEQ ID NO: 2972057 - RNA, 19 nt, Artificial Sequence
  Description of Artificial Sequence: Synthetic oligonucleotide
ucgacucuucccagucucu

SEQ ID NO: 2972058 - RNA, 19 nt, Artificial Sequence
  Description of Artificial Sequence: Synthetic oligonucleotide
auccagcauaauaagcacu

SEQ ID NO: 2972059 - RNA, 19 nt, Artificial Sequence
  Description of Artificial Sequence: Synthetic oligonucleotide
cgcccagcgauuuucaagg

SEQ ID NO: 2972060 - RNA, 19 nt, Artificial Sequence
  Description of Artificial Sequence: Synthetic oligonucleotide
uggcgugguaguacccagc

SEQ ID NO: 2972061 - RNA, 19 nt, Artificial Sequence
  Description of Artificial Sequence: Synthetic oligonucleotide
gcaacaacccguugacagc

SEQ ID NO: 2972062 - RNA, 19 nt, Artificial Sequence
  Description of Artificial Sequence: Synthetic oligonucleotide
gcgggagccagcaacaacc

SEQ ID NO: 2972063 - RNA, 19 nt, Artificial Sequence
  Description of Artificial Sequence: Synthetic oligonucleotide
cucucucgacucuucccag

SEQ ID NO: 2972064 - RNA, 19 nt, Artificial Sequence
  Description of Artificial Sequence: Synthetic oligonucleotide
ucuggucgucuaaggcagc

SEQ ID NO: 2972065 - RNA, 19 nt, Artificial Sequence
  Description of Artificial Sequence: Synthetic oligonucleotide
cucucgacucuucccaguc

SEQ ID NO: 2972066 - RNA, 19 nt, Artificial Sequence
  Description of Artificial Sequence: Synthetic oligonucleotide
accacucucucucgacucu

SEQ ID NO: 2972067 - RNA, 19 nt, Artificial Sequence
  Description of Artificial Sequence: Synthetic oligonucleotide
gaggcagaggcauucuccu

SEQ ID NO: 2972068 - RNA, 19 nt, Artificial Sequence
  Description of Artificial Sequence: Synthetic oligonucleotide
cagcgauuuucaaggccag

SEQ ID NO: 2972069 - RNA, 19 nt, Artificial Sequence
  Description of Artificial Sequence: Synthetic oligonucleotide
agugcucccaccacucucu

SEQ ID NO: 2972070 - RNA, 19 nt, Artificial Sequence
  Description of Artificial Sequence: Synthetic oligonucleotide
gcauuggcgugguaguacc

SEQ ID NO: 2972071 - RNA, 19 nt, Artificial Sequence
  Description of Artificial Sequence: Synthetic oligonucleotide
cauccaccugauugagcgc

SEQ ID NO: 2972072 - RNA, 19 nt, Artificial Sequence
  Description of Artificial Sequence: Synthetic oligonucleotide
gcucuggucgucuaaggca

SEQ ID NO: 2972073 - RNA, 19 nt, Artificial Sequence
  Description of Artificial Sequence: Synthetic oligonucleotide
caccacucucucucgacuc

SEQ ID NO: 2972074 - RNA, 19 nt, Artificial Sequence
  Description of Artificial Sequence: Synthetic oligonucleotide
aggggcacacagucgguga

SEQ ID NO: 2972075 - RNA, 19 nt, Artificial Sequence
  Description of Artificial Sequence: Synthetic oligonucleotide
ccagcgauuuucaaggcca

SEQ ID NO: 2972076 - RNA, 19 nt, Artificial Sequence
  Description of Artificial Sequence: Synthetic oligonucleotide
gacaaugacuggagguaca

SEQ ID NO: 2972077 - RNA, 19 nt, Artificial Sequence
  Description of Artificial Sequence: Synthetic oligonucleotide
cugcaucagggaagaauuc

SEQ ID NO: 2972078 - RNA, 19 nt, Artificial Sequence
  Description of Artificial Sequence: Synthetic oligonucleotide
ggcucuggucgucuaaggc

SEQ ID NO: 2972079 - RNA, 19 nt, Artificial Sequence
  Description of Artificial Sequence: Synthetic oligonucleotide
ggcagaggcauucuccuga

SEQ ID NO: 2972080 - RNA, 19 nt, Artificial Sequence
  Description of Artificial Sequence: Synthetic oligonucleotide
ugcgccccacacauccacc

SEQ ID NO: 2972081 - RNA, 19 nt, Artificial Sequence
  Description of Artificial Sequence: Synthetic oligonucleotide
ccuuaggcacccaucgaag

SEQ ID NO: 2972082 - RNA, 19 nt, Artificial Sequence
  Description of Artificial Sequence: Synthetic oligonucleotide
agggccagguugcugugga

SEQ ID NO: 2972083 - RNA, 19 nt, Artificial Sequence
  Description of Artificial Sequence: Synthetic oligonucleotide
cuccagacggauagggcca

SEQ ID NO: 2972084 - RNA, 19 nt, Artificial Sequence
  Description of Artificial Sequence: Synthetic oligonucleotide
aucgaagaccuuggguucu

SEQ ID NO: 2972085 - RNA, 19 nt, Artificial Sequence
  Description of Artificial Sequence: Synthetic oligonucleotide
gccagcaacaacccguuga

SEQ ID NO: 2972086 - RNA, 19 nt, Artificial Sequence
  Description of Artificial Sequence: Synthetic oligonucleotide
ugcuguggaagaggggcac

SEQ ID NO: 2972087 - RNA, 19 nt, Artificial Sequence
  Description of Artificial Sequence: Synthetic oligonucleotide
caggacaaugacuggaggu

SEQ ID NO: 2972088 - RNA, 19 nt, Artificial Sequence
  Description of Artificial Sequence: Synthetic oligonucleotide
gucaccaauuucuuauuau

SEQ ID NO: 2972089 - RNA, 19 nt, Artificial Sequence
  Description of Artificial Sequence: Synthetic oligonucleotide
agggcucuggucgucuaag

SEQ ID NO: 2972090 - RNA, 19 nt, Artificial Sequence
  Description of Artificial Sequence: Synthetic oligonucleotide
ccagcaacaacccguugac

SEQ ID NO: 2972091 - RNA, 19 nt, Artificial Sequence
  Description of Artificial Sequence: Synthetic oligonucleotide
uccaccugauugagcgcga

SEQ ID NO: 2972092 - RNA, 19 nt, Artificial Sequence
  Description of Artificial Sequence: Synthetic oligonucleotide
caacccguugacagcugac

SEQ ID NO: 2972093 - RNA, 19 nt, Artificial Sequence
  Description of Artificial Sequence: Synthetic oligonucleotide
ucuccugaccgcggcgcgg

SEQ ID NO: 2972094 - RNA, 19 nt, Artificial Sequence
  Description of Artificial Sequence: Synthetic oligonucleotide
gaagcccagggcucugguc

SEQ ID NO: 2972095 - RNA, 19 nt, Artificial Sequence
  Description of Artificial Sequence: Synthetic oligonucleotide
gcaucagggaagaauucug

SEQ ID NO: 2972096 - RNA, 19 nt, Artificial Sequence
  Description of Artificial Sequence: Synthetic oligonucleotide
auucugcaauucgcccagc

SEQ ID NO: 2972097 - RNA, 19 nt, Artificial Sequence
  Description of Artificial Sequence: Synthetic oligonucleotide
uccagacggauagggccag

SEQ ID NO: 2972098 - RNA, 19 nt, Artificial Sequence
  Description of Artificial Sequence: Synthetic oligonucleotide
caccugauugagcgcgacc

SEQ ID NO: 2972099 - RNA, 19 nt, Artificial Sequence
  Description of Artificial Sequence: Synthetic oligonucleotide
gaggggcacacagucggug

SEQ ID NO: 2972100 - RNA, 19 nt, Artificial Sequence
  Description of Artificial Sequence: Synthetic oligonucleotide
agaccggccugugcgcccc

SEQ ID NO: 2972101 - RNA, 19 nt, Artificial Sequence
  Description of Artificial Sequence: Synthetic oligonucleotide
acgaggccgagucaccaau

SEQ ID NO: 2972102 - RNA, 19 nt, Artificial Sequence
  Description of Artificial Sequence: Synthetic oligonucleotide
ugugcgccccacacaucca

SEQ ID NO: 2972103 - RNA, 19 nt, Artificial Sequence
  Description of Artificial Sequence: Synthetic oligonucleotide
agaagcccagggcucuggu

SEQ ID NO: 2972104 - RNA, 19 nt, Artificial Sequence
  Description of Artificial Sequence: Synthetic oligonucleotide
cagucucuccacauuacua

SEQ ID NO: 2972105 - RNA, 19 nt, Artificial Sequence
  Description of Artificial Sequence: Synthetic oligonucleotide
cucccaccacucucucucg

SEQ ID NO: 2972106 - RNA, 19 nt, Artificial Sequence
  Description of Artificial Sequence: Synthetic oligonucleotide
gcacccaucgaagaccuug

SEQ ID NO: 2972107 - RNA, 19 nt, Artificial Sequence
  Description of Artificial Sequence: Synthetic oligonucleotide
aggcagaggcauucuccug

SEQ ID NO: 2972108 - RNA, 19 nt, Artificial Sequence
  Description of Artificial Sequence: Synthetic oligonucleotide
ucccaccacucucucucga

SEQ ID NO: 2972109 - RNA, 19 nt, Artificial Sequence
  Description of Artificial Sequence: Synthetic oligonucleotide
gugguaguacccagcuacc

SEQ ID NO: 2972110 - RNA, 19 nt, Artificial Sequence
  Description of Artificial Sequence: Synthetic oligonucleotide
cugaccgcggcgcgggagc

SEQ ID NO: 2972111 - RNA, 19 nt, Artificial Sequence
  Description of Artificial Sequence: Synthetic oligonucleotide
gacagcugacguaugggua

SEQ ID NO: 2972112 - RNA, 19 nt, Artificial Sequence
  Description of Artificial Sequence: Synthetic oligonucleotide
aaggcagcauuggcguggu

SEQ ID NO: 2972113 - RNA, 19 nt, Artificial Sequence
  Description of Artificial Sequence: Synthetic oligonucleotide
cugcaauucgcccagcgau

SEQ ID NO: 2972114 - RNA, 19 nt, Artificial Sequence
  Description of Artificial Sequence: Synthetic oligonucleotide
ggacaaugacuggagguac

SEQ ID NO: 2972115 - RNA, 19 nt, Artificial Sequence
  Description of Artificial Sequence: Synthetic oligonucleotide
cagugcucccaccacucuc

SEQ ID NO: 2972116 - RNA, 19 nt, Artificial Sequence
  Description of Artificial Sequence: Synthetic oligonucleotide
ccaggacaaugacuggagg

SEQ ID NO: 2972117 - RNA, 19 nt, Artificial Sequence
  Description of Artificial Sequence: Synthetic oligonucleotide
gggaagaauucugcaauuc

SEQ ID NO: 2972118 - RNA, 19 nt, Artificial Sequence
  Description of Artificial Sequence: Synthetic oligonucleotide
aacaacccguugacagcug

SEQ ID NO: 2972119 - RNA, 19 nt, Artificial Sequence
  Description of Artificial Sequence: Synthetic oligonucleotide
gugaggcagaggcauucuc

SEQ ID NO: 2972120 - RNA, 19 nt, Artificial Sequence
  Description of Artificial Sequence: Synthetic oligonucleotide
agcugacguauggguaccg

SEQ ID NO: 2972121 - RNA, 19 nt, Artificial Sequence
  Description of Artificial Sequence: Synthetic oligonucleotide
uucgcccagcgauuuucaa

SEQ ID NO: 2972122 - RNA, 19 nt, Artificial Sequence
  Description of Artificial Sequence: Synthetic oligonucleotide
ggccagguugcuguggaag

SEQ ID NO: 2972123 - RNA, 19 nt, Artificial Sequence
  Description of Artificial Sequence: Synthetic oligonucleotide
agacggauagggccagguu

SEQ ID NO: 2972124 - RNA, 19 nt, Artificial Sequence
  Description of Artificial Sequence: Synthetic oligonucleotide
cgauuuucaaggccagaag

SEQ ID NO: 2972125 - RNA, 19 nt, Artificial Sequence
  Description of Artificial Sequence: Synthetic oligonucleotide
cucuucccagucucuccac

SEQ ID NO: 2972126 - RNA, 19 nt, Artificial Sequence
  Description of Artificial Sequence: Synthetic oligonucleotide
cccagcgauuuucaaggcc

SEQ ID NO: 2972127 - RNA, 19 nt, Artificial Sequence
  Description of Artificial Sequence: Synthetic oligonucleotide
gcuaccaccagaccggccu

SEQ ID NO: 2972128 - RNA, 19 nt, Artificial Sequence
  Description of Artificial Sequence: Synthetic oligonucleotide
gggagccagcaacaacccg

SEQ ID NO: 2972129 - RNA, 19 nt, Artificial Sequence
  Description of Artificial Sequence: Synthetic oligonucleotide
cuaccaccagaccggccug

SEQ ID NO: 2972130 - RNA, 19 nt, Artificial Sequence
  Description of Artificial Sequence: Synthetic oligonucleotide
cacucucucucgacucuuc

SEQ ID NO: 2972131 - RNA, 19 nt, Artificial Sequence
  Description of Artificial Sequence: Synthetic oligonucleotide
acagucggugaggcagagg

SEQ ID NO: 2972132 - RNA, 19 nt, Artificial Sequence
  Description of Artificial Sequence: Synthetic oligonucleotide
acacgaggccgagucacca

SEQ ID NO: 2972133 - RNA, 19 nt, Artificial Sequence
  Description of Artificial Sequence: Synthetic oligonucleotide
ggcacacagucggugaggc

SEQ ID NO: 2972134 - RNA, 19 nt, Artificial Sequence
  Description of Artificial Sequence: Synthetic oligonucleotide
ugcucccaccacucucucu

SEQ ID NO: 2972135 - RNA, 19 nt, Artificial Sequence
  Description of Artificial Sequence: Synthetic oligonucleotide
gggcucuggucgucuaagg

SEQ ID NO: 2972136 - RNA, 19 nt, Artificial Sequence
  Description of Artificial Sequence: Synthetic oligonucleotide
gcauucuccugaccgcggc

SEQ ID NO: 2972137 - RNA, 19 nt, Artificial Sequence
  Description of Artificial Sequence: Synthetic oligonucleotide
ggggcacacagucggugag

SEQ ID NO: 2972138 - RNA, 19 nt, Artificial Sequence
  Description of Artificial Sequence: Synthetic oligonucleotide
cagcugacguauggguacc

SEQ ID NO: 2972139 - RNA, 19 nt, Artificial Sequence
  Description of Artificial Sequence: Synthetic oligonucleotide
gcgauuuucaaggccagaa

SEQ ID NO: 2972140 - RNA, 19 nt, Artificial Sequence
  Description of Artificial Sequence: Synthetic oligonucleotide
cuccugaccgcggcgcggg

SEQ ID NO: 2972141 - RNA, 19 nt, Artificial Sequence
  Description of Artificial Sequence: Synthetic oligonucleotide
cagaagcccagggcucugg

SEQ ID NO: 2972142 - RNA, 19 nt, Artificial Sequence
  Description of Artificial Sequence: Synthetic oligonucleotide
agcgauuuucaaggccaga

SEQ ID NO: 2972143 - RNA, 19 nt, Artificial Sequence
  Description of Artificial Sequence: Synthetic oligonucleotide
agcuaccaccagaccggcc

SEQ ID NO: 2972144 - RNA, 19 nt, Artificial Sequence
  Description of Artificial Sequence: Synthetic oligonucleotide
gugcgccccacacauccac

SEQ ID NO: 2972145 - RNA, 19 nt, Artificial Sequence
  Description of Artificial Sequence: Synthetic oligonucleotide
aggcacccaucgaagaccu

SEQ ID NO: 2972146 - RNA, 19 nt, Artificial Sequence
  Description of Artificial Sequence: Synthetic oligonucleotide
cucuccacauuacuaaguu

SEQ ID NO: 2972147 - RNA, 19 nt, Artificial Sequence
  Description of Artificial Sequence: Synthetic oligonucleotide
ccacauuacuaaguucuug

SEQ ID NO: 2972148 - RNA, 19 nt, Artificial Sequence
  Description of Artificial Sequence: Synthetic oligonucleotide
gguugcuguggaagagggg

SEQ ID NO: 2972149 - RNA, 19 nt, Artificial Sequence
  Description of Artificial Sequence: Synthetic oligonucleotide
caacaacccguugacagcu

SEQ ID NO: 2972150 - RNA, 19 nt, Artificial Sequence
  Description of Artificial Sequence: Synthetic oligonucleotide
guccuuaggcacccaucga

SEQ ID NO: 2972151 - RNA, 19 nt, Artificial Sequence
  Description of Artificial Sequence: Synthetic oligonucleotide
cagaccggccugugcgccc

SEQ ID NO: 2972152 - RNA, 19 nt, Artificial Sequence
  Description of Artificial Sequence: Synthetic oligonucleotide
ggagccagcaacaacccgu

SEQ ID NO: 2972153 - RNA, 19 nt, Artificial Sequence
  Description of Artificial Sequence: Synthetic oligonucleotide
auucgcccagcgauuuuca

SEQ ID NO: 2972154 - RNA, 19 nt, Artificial Sequence
  Description of Artificial Sequence: Synthetic oligonucleotide
ccaucgaagaccuuggguu

SEQ ID NO: 2972155 - RNA, 19 nt, Artificial Sequence
  Description of Artificial Sequence: Synthetic oligonucleotide
gccagguugcuguggaaga

SEQ ID NO: 2972156 - RNA, 19 nt, Artificial Sequence
  Description of Artificial Sequence: Synthetic oligonucleotide
agccagcaacaacccguug

SEQ ID NO: 2972157 - RNA, 19 nt, Artificial Sequence
  Description of Artificial Sequence: Synthetic oligonucleotide
gagucaccaauuucuuauu

SEQ ID NO: 2972158 - RNA, 19 nt, Artificial Sequence
  Description of Artificial Sequence: Synthetic oligonucleotide
ucgaagaccuuggguucuc

SEQ ID NO: 2972159 - RNA, 19 nt, Artificial Sequence
  Description of Artificial Sequence: Synthetic oligonucleotide
ccuuggguucuccaggaca

SEQ ID NO: 2972160 - RNA, 19 nt, Artificial Sequence
  Description of Artificial Sequence: Synthetic oligonucleotide
ucggugaggcagaggcauu

SEQ ID NO: 2972161 - RNA, 19 nt, Artificial Sequence
  Description of Artificial Sequence: Synthetic oligonucleotide
ccagcauaauaagcacugc

SEQ ID NO: 2972162 - RNA, 19 nt, Artificial Sequence
  Description of Artificial Sequence: Synthetic oligonucleotide
agcccagggcucuggucgu

SEQ ID NO: 2972163 - RNA, 19 nt, Artificial Sequence
  Description of Artificial Sequence: Synthetic oligonucleotide
gcagaggcauucuccugac

SEQ ID NO: 2972164 - RNA, 19 nt, Artificial Sequence
  Description of Artificial Sequence: Synthetic oligonucleotide
ggccgagucaccaauuucu

SEQ ID NO: 2972165 - RNA, 19 nt, Artificial Sequence
  Description of Artificial Sequence: Synthetic oligonucleotide
ggcauucuccugaccgcgg

SEQ ID NO: 2972166 - RNA, 19 nt, Artificial Sequence
  Description of Artificial Sequence: Synthetic oligonucleotide
gguacacgaggccgaguca

SEQ ID NO: 2972167 - RNA, 19 nt, Artificial Sequence
  Description of Artificial Sequence: Synthetic oligonucleotide
cgucuaaggcagcauuggc

SEQ ID NO: 2972168 - RNA, 19 nt, Artificial Sequence
  Description of Artificial Sequence: Synthetic oligonucleotide
uggucgucuaaggcagcau

SEQ ID NO: 2972169 - RNA, 19 nt, Artificial Sequence
  Description of Artificial Sequence: Synthetic oligonucleotide
cacagucggugaggcagag

SEQ ID NO: 2972170 - RNA, 19 nt, Artificial Sequence
  Description of Artificial Sequence: Synthetic oligonucleotide
acacagucggugaggcaga

SEQ ID NO: 2972171 - RNA, 19 nt, Artificial Sequence
  Description of Artificial Sequence: Synthetic oligonucleotide
ggagguacacgaggccgag

SEQ ID NO: 2972172 - RNA, 19 nt, Artificial Sequence
  Description of Artificial Sequence: Synthetic oligonucleotide
gucggugaggcagaggcau

SEQ ID NO: 2972173 - RNA, 19 nt, Artificial Sequence
  Description of Artificial Sequence: Synthetic oligonucleotide
cuggucgucuaaggcagca

SEQ ID NO: 2972174 - RNA, 19 nt, Artificial Sequence
  Description of Artificial Sequence: Synthetic oligonucleotide
cagcuaccaccagaccggc

SEQ ID NO: 2972175 - RNA, 19 nt, Artificial Sequence
  Description of Artificial Sequence: Synthetic oligonucleotide
gggcacacagucggugagg

SEQ ID NO: 2972176 - RNA, 19 nt, Artificial Sequence
  Description of Artificial Sequence: Synthetic oligonucleotide
gaggccgagucaccaauuu

SEQ ID NO: 2972177 - RNA, 19 nt, Artificial Sequence
  Description of Artificial Sequence: Synthetic oligonucleotide
cccagucucuccacauuac

SEQ ID NO: 2972178 - RNA, 19 nt, Artificial Sequence
  Description of Artificial Sequence: Synthetic oligonucleotide
agucggugaggcagaggca

SEQ ID NO: 2972179 - RNA, 19 nt, Artificial Sequence
  Description of Artificial Sequence: Synthetic oligonucleotide
ccagguugcuguggaagag

SEQ ID NO: 2972180 - RNA, 19 nt, Artificial Sequence
  Description of Artificial Sequence: Synthetic oligonucleotide
uuggguucuccaggacaau

SEQ ID NO: 2972181 - RNA, 19 nt, Artificial Sequence
  Description of Artificial Sequence: Synthetic oligonucleotide
gccccacacauccaccuga

SEQ ID NO: 2972182 - RNA, 19 nt, Artificial Sequence
  Description of Artificial Sequence: Synthetic oligonucleotide
accgcggcgcgggagccag

SEQ ID NO: 2972183 - RNA, 19 nt, Artificial Sequence
  Description of Artificial Sequence: Synthetic oligonucleotide
ugaccgcggcgcgggagcc

SEQ ID NO: 2972184 - RNA, 19 nt, Artificial Sequence
  Description of Artificial Sequence: Synthetic oligonucleotide
gcagcauuggcgugguagu

SEQ ID NO: 2972185 - RNA, 19 nt, Artificial Sequence
  Description of Artificial Sequence: Synthetic oligonucleotide
agcgcgaccuccagacgga

SEQ ID NO: 2972186 - RNA, 19 nt, Artificial Sequence
  Description of Artificial Sequence: Synthetic oligonucleotide
cuucccagucucuccacau

SEQ ID NO: 2972187 - RNA, 19 nt, Artificial Sequence
  Description of Artificial Sequence: Synthetic oligonucleotide
cuuguccuuaggcacccau

SEQ ID NO: 2972188 - RNA, 19 nt, Artificial Sequence
  Description of Artificial Sequence: Synthetic oligonucleotide
cgagucaccaauuucuuau

SEQ ID NO: 2972189 - RNA, 19 nt, Artificial Sequence
  Description of Artificial Sequence: Synthetic oligonucleotide
ggcgugguaguacccagcu

SEQ ID NO: 2972190 - RNA, 19 nt, Artificial Sequence
  Description of Artificial Sequence: Synthetic oligonucleotide
ggauagggccagguugcug

SEQ ID NO: 2972191 - RNA, 19 nt, Artificial Sequence
  Description of Artificial Sequence: Synthetic oligonucleotide
cccaccacucucucucgac

SEQ ID NO: 2972192 - RNA, 19 nt, Artificial Sequence
  Description of Artificial Sequence: Synthetic oligonucleotide
agaggggcacacagucggu

SEQ ID NO: 2972193 - RNA, 19 nt, Artificial Sequence
  Description of Artificial Sequence: Synthetic oligonucleotide
gcccagcgauuuucaaggc

SEQ ID NO: 2972194 - RNA, 19 nt, Artificial Sequence
  Description of Artificial Sequence: Synthetic oligonucleotide
ccugauugagcgcgaccuc

SEQ ID NO: 2972195 - RNA, 19 nt, Artificial Sequence
  Description of Artificial Sequence: Synthetic oligonucleotide
uccugaccgcggcgcggga

SEQ ID NO: 2972196 - RNA, 19 nt, Artificial Sequence
  Description of Artificial Sequence: Synthetic oligonucleotide
cacgaggccgagucaccaa

SEQ ID NO: 2972197 - RNA, 19 nt, Artificial Sequence
  Description of Artificial Sequence: Synthetic oligonucleotide
cagcaacaacccguugaca

SEQ ID NO: 2972198 - RNA, 19 nt, Artificial Sequence
  Description of Artificial Sequence: Synthetic oligonucleotide
cgggagccagcaacaaccc

SEQ ID NO: 2972199 - RNA, 19 nt, Artificial Sequence
  Description of Artificial Sequence: Synthetic oligonucleotide
gugcucccaccacucucuc

SEQ ID NO: 2972200 - RNA, 19 nt, Artificial Sequence
  Description of Artificial Sequence: Synthetic oligonucleotide
gccugugcgccccacacau

SEQ ID NO: 2972201 - RNA, 19 nt, Artificial Sequence
  Description of Artificial Sequence: Synthetic oligonucleotide
gcugacguauggguaccga

SEQ ID NO: 2972202 - RNA, 19 nt, Artificial Sequence
  Description of Artificial Sequence: Synthetic oligonucleotide
ccaccagaccggccugugc

SEQ ID NO: 2972203 - RNA, 19 nt, Artificial Sequence
  Description of Artificial Sequence: Synthetic oligonucleotide
accggccugugcgccccac

SEQ ID NO: 2972204 - RNA, 19 nt, Artificial Sequence
  Description of Artificial Sequence: Synthetic oligonucleotide
gagccagcaacaacccguu

SEQ ID NO: 2972205 - RNA, 19 nt, Artificial Sequence
  Description of Artificial Sequence: Synthetic oligonucleotide
ggccagaagcccagggcuc

SEQ ID NO: 2972206 - RNA, 19 nt, Artificial Sequence
  Description of Artificial Sequence: Synthetic oligonucleotide
ccagaccggccugugcgcc

SEQ ID NO: 2972207 - RNA, 19 nt, Artificial Sequence
  Description of Artificial Sequence: Synthetic oligonucleotide
cagggcucuggucgucuaa

SEQ ID NO: 2972208 - RNA, 19 nt, Artificial Sequence
  Description of Artificial Sequence: Synthetic oligonucleotide
ggcgcgggagccagcaaca

SEQ ID NO: 2972209 - RNA, 19 nt, Artificial Sequence
  Description of Artificial Sequence: Synthetic oligonucleotide
cagacggauagggccaggu

SEQ ID NO: 2972210 - RNA, 19 nt, Artificial Sequence
  Description of Artificial Sequence: Synthetic oligonucleotide
cccaucgaagaccuugggu

SEQ ID NO: 2972211 - RNA, 19 nt, Artificial Sequence
  Description of Artificial Sequence: Synthetic oligonucleotide
cagcauuggcgugguagua

SEQ ID NO: 2972212 - RNA, 19 nt, Artificial Sequence
  Description of Artificial Sequence: Synthetic oligonucleotide
gcacacagucggugaggca

SEQ ID NO: 2972213 - RNA, 19 nt, Artificial Sequence
  Description of Artificial Sequence: Synthetic oligonucleotide
gcuguggaagaggggcaca

SEQ ID NO: 2972214 - RNA, 19 nt, Artificial Sequence
  Description of Artificial Sequence: Synthetic oligonucleotide
cccguugacagcugacgua

SEQ ID NO: 2972215 - RNA, 19 nt, Artificial Sequence
  Description of Artificial Sequence: Synthetic oligonucleotide
ccagucucuccacauuacu

SEQ ID NO: 2972216 - RNA, 19 nt, Artificial Sequence
  Description of Artificial Sequence: Synthetic oligonucleotide
cguugacagcugacguaug

SEQ ID NO: 2972217 - RNA, 19 nt, Artificial Sequence
  Description of Artificial Sequence: Synthetic oligonucleotide
ccgagucaccaauuucuua

SEQ ID NO: 2972218 - RNA, 19 nt, Artificial Sequence
  Description of Artificial Sequence: Synthetic oligonucleotide
gagguacacgaggccgagu

SEQ ID NO: 2972219 - RNA, 19 nt, Artificial Sequence
  Description of Artificial Sequence: Synthetic oligonucleotide
cggcgcgggagccagcaac

SEQ ID NO: 2972220 - RNA, 19 nt, Artificial Sequence
  Description of Artificial Sequence: Synthetic oligonucleotide
ccaccugauugagcgcgac

SEQ ID NO: 2972221 - RNA, 19 nt, Artificial Sequence
  Description of Artificial Sequence: Synthetic oligonucleotide
ccugaccgcggcgcgggag

SEQ ID NO: 2972222 - RNA, 19 nt, Artificial Sequence
  Description of Artificial Sequence: Synthetic oligonucleotide
cgaagaccuuggguucucc

SEQ ID NO: 2972223 - RNA, 19 nt, Artificial Sequence
  Description of Artificial Sequence: Synthetic oligonucleotide
ggugaggcagaggcauucu

SEQ ID NO: 2972224 - RNA, 19 nt, Artificial Sequence
  Description of Artificial Sequence: Synthetic oligonucleotide
cgacucuucccagucucuc

SEQ ID NO: 2972225 - RNA, 19 nt, Artificial Sequence
  Description of Artificial Sequence: Synthetic oligonucleotide
cgcgggagccagcaacaac

SEQ ID NO: 2972226 - RNA, 19 nt, Artificial Sequence
  Description of Artificial Sequence: Synthetic oligonucleotide
gcaauucgcccagcgauuu

SEQ ID NO: 2972227 - RNA, 19 nt, Artificial Sequence
  Description of Artificial Sequence: Synthetic oligonucleotide
ccguugacagcugacguau

SEQ ID NO: 2972228 - RNA, 19 nt, Artificial Sequence
  Description of Artificial Sequence: Synthetic oligonucleotide
cggccugugcgccccacac

SEQ ID NO: 2972229 - RNA, 19 nt, Artificial Sequence
  Description of Artificial Sequence: Synthetic oligonucleotide
ccagacggauagggccagg

SEQ ID NO: 2972230 - RNA, 19 nt, Artificial Sequence
  Description of Artificial Sequence: Synthetic oligonucleotide
gcgccccacacauccaccu

SEQ ID NO: 2972231 - RNA, 19 nt, Artificial Sequence
  Description of Artificial Sequence: Synthetic oligonucleotide
cggugaggcagaggcauuc

SEQ ID NO: 2972232 - RNA, 19 nt, Artificial Sequence
  Description of Artificial Sequence: Synthetic oligonucleotide
ccugugcgccccacacauc

SEQ ID NO: 2972233 - RNA, 19 nt, Artificial Sequence
  Description of Artificial Sequence: Synthetic oligonucleotide
ccaccacucucucucgacu

SEQ ID NO: 2972234 - RNA, 19 nt, Artificial Sequence
  Description of Artificial Sequence: Synthetic oligonucleotide
caauucgcccagcgauuuu

SEQ ID NO: 2972235 - RNA, 19 nt, Artificial Sequence
  Description of Artificial Sequence: Synthetic oligonucleotide
gccagaagcccagggcucu

SEQ ID NO: 2972236 - RNA, 19 nt, Artificial Sequence
  Description of Artificial Sequence: Synthetic oligonucleotide
gaccgcggcgcgggagcca

SEQ ID NO: 2972237 - RNA, 19 nt, Artificial Sequence
  Description of Artificial Sequence: Synthetic oligonucleotide
gcgugguaguacccagcua

SEQ ID NO: 2972238 - RNA, 19 nt, Artificial Sequence
  Description of Artificial Sequence: Synthetic oligonucleotide
ccagaagcccagggcucug

SEQ ID NO: 2972239 - RNA, 19 nt, Artificial Sequence
  Description of Artificial Sequence: Synthetic oligonucleotide
cgaccuccagacggauagg

SEQ ID NO: 2972240 - RNA, 19 nt, Artificial Sequence
  Description of Artificial Sequence: Synthetic oligonucleotide
gaccggccugugcgcccca

SEQ ID NO: 2972241 - RNA, 19 nt, Artificial Sequence
  Description of Artificial Sequence: Synthetic oligonucleotide
gggccagguugcuguggaa

SEQ ID NO: 2972242 - RNA, 19 nt, Artificial Sequence
  Description of Artificial Sequence: Synthetic oligonucleotide
aggcagcauuggcguggua

SEQ ID NO: 2972243 - RNA, 19 nt, Artificial Sequence
  Description of Artificial Sequence: Synthetic oligonucleotide
cgccccacacauccaccug

SEQ ID NO: 2972244 - RNA, 19 nt, Artificial Sequence
  Description of Artificial Sequence: Synthetic oligonucleotide
gccgagucaccaauuucuu

SEQ ID NO: 2972245 - RNA, 19 nt, Artificial Sequence
  Description of Artificial Sequence: Synthetic oligonucleotide
ccagggcucuggucgucua

SEQ ID NO: 2972246 - RNA, 19 nt, Artificial Sequence
  Description of Artificial Sequence: Synthetic oligonucleotide
ccccacacauccaccugau

SEQ ID NO: 2972247 - RNA, 19 nt, Artificial Sequence
  Description of Artificial Sequence: Synthetic oligonucleotide
gcgcgggagccagcaacaa

SEQ ID NO: 2972248 - RNA, 19 nt, Artificial Sequence
  Description of Artificial Sequence: Synthetic oligonucleotide
ccggccugugcgccccaca

SEQ ID NO: 2972249 - RNA, 19 nt, Artificial Sequence
  Description of Artificial Sequence: Synthetic oligonucleotide
gcccagggcucuggucguc

SEQ ID NO: 2972250 - RNA, 19 nt, Artificial Sequence
  Description of Artificial Sequence: Synthetic oligonucleotide
cgcgaccuccagacggaua

SEQ ID NO: 2972251 - RNA, 19 nt, Artificial Sequence
  Description of Artificial Sequence: Synthetic oligonucleotide
cgcggcgcgggagccagca

SEQ ID NO: 2972252 - RNA, 19 nt, Artificial Sequence
  Description of Artificial Sequence: Synthetic oligonucleotide
gcggcgcgggagccagcaa

SEQ ID NO: 2972253 - RNA, 19 nt, Artificial Sequence
  Description of Artificial Sequence: Synthetic oligonucleotide
cccagggcucuggucgucu

SEQ ID NO: 2972254 - RNA, 19 nt, Artificial Sequence
  Description of Artificial Sequence: Synthetic oligonucleotide
ccacucucucucgacucuu

SEQ ID NO: 2972255 - RNA, 19 nt, Artificial Sequence
  Description of Artificial Sequence: Synthetic oligonucleotide
cgaggccgagucaccaauu

SEQ ID NO: 2972256 - RNA, 19 nt, Artificial Sequence
  Description of Artificial Sequence: Synthetic oligonucleotide
ccgcggcgcgggagccagc

SEQ ID NO: 2972257 - RNA, 19 nt, Artificial Sequence
  Description of Artificial Sequence: Synthetic oligonucleotide
cccacacauccaccugauu

SEQ ID NO: 2972258 - RNA, 19 nt, Artificial Sequence
  Description of Artificial Sequence: Synthetic oligonucleotide
gcgcgaccuccagacggau

SEQ ID NO: 2972259 - RNA, 19 nt, Artificial Sequence
  Description of Artificial Sequence: Synthetic oligonucleotide
ggcacccaucgaagaccuu

SEQ ID NO: 2972260 - RNA, 19 nt, Artificial Sequence
  Description of Artificial Sequence: Synthetic oligonucleotide
cggauagggccagguugcu

SEQ ID NO: 2972261 - RNA, 19 nt, Artificial Sequence
  Description of Artificial Sequence: Synthetic oligonucleotide
ugaauucuggugaagaugg

SEQ ID NO: 2972262 - RNA, 19 nt, Artificial Sequence
  Description of Artificial Sequence: Synthetic oligonucleotide
accuguuugagguauaugc

SEQ ID NO: 2972263 - RNA, 19 nt, Artificial Sequence
  Description of Artificial Sequence: Synthetic oligonucleotide
ucuuguauagccauagucc

SEQ ID NO: 2972264 - RNA, 19 nt, Artificial Sequence
  Description of Artificial Sequence: Synthetic oligonucleotide
aaacacccgagucaggacc

SEQ ID NO: 2972265 - RNA, 19 nt, Artificial Sequence
  Description of Artificial Sequence: Synthetic oligonucleotide
aacggggucuuguauagcc

SEQ ID NO: 2972266 - RNA, 19 nt, Artificial Sequence
  Description of Artificial Sequence: Synthetic oligonucleotide
aaugugaucaagccuaccu

SEQ ID NO: 2972267 - RNA, 19 nt, Artificial Sequence
  Description of Artificial Sequence: Synthetic oligonucleotide
ucugcuggcacaaagcugc

SEQ ID NO: 2972268 - RNA, 19 nt, Artificial Sequence
  Description of Artificial Sequence: Synthetic oligonucleotide
aaggccaugaaugugauca

SEQ ID NO: 2972269 - RNA, 19 nt, Artificial Sequence
  Description of Artificial Sequence: Synthetic oligonucleotide
gauuaccccaauuucagcc

SEQ ID NO: 2972270 - RNA, 19 nt, Artificial Sequence
  Description of Artificial Sequence: Synthetic oligonucleotide
aagguggagaguccgaggg

SEQ ID NO: 2972271 - RNA, 19 nt, Artificial Sequence
  Description of Artificial Sequence: Synthetic oligonucleotide
aagccuaccuguuugaggu

SEQ ID NO: 2972272 - RNA, 19 nt, Artificial Sequence
  Description of Artificial Sequence: Synthetic oligonucleotide
cuuguauagccauaguccc

SEQ ID NO: 2972273 - RNA, 19 nt, Artificial Sequence
  Description of Artificial Sequence: Synthetic oligonucleotide
aagacaucaaggcgggagg

SEQ ID NO: 2972274 - RNA, 19 nt, Artificial Sequence
  Description of Artificial Sequence: Synthetic oligonucleotide
ccagugaugacuuugaccc

SEQ ID NO: 2972275 - RNA, 19 nt, Artificial Sequence
  Description of Artificial Sequence: Synthetic oligonucleotide
ugagguauaugcuuuuccc

SEQ ID NO: 2972276 - RNA, 19 nt, Artificial Sequence
  Description of Artificial Sequence: Synthetic oligonucleotide
acuggcaagagccagcaag

SEQ ID NO: 2972277 - RNA, 19 nt, Artificial Sequence
  Description of Artificial Sequence: Synthetic oligonucleotide
uucggggagaguaacgggg

SEQ ID NO: 2972278 - RNA, 19 nt, Artificial Sequence
  Description of Artificial Sequence: Synthetic oligonucleotide
uguauagccauagucccgg

SEQ ID NO: 2972279 - RNA, 19 nt, Artificial Sequence
  Description of Artificial Sequence: Synthetic oligonucleotide
ucaaucaugaagguggaga

SEQ ID NO: 2972280 - RNA, 19 nt, Artificial Sequence
  Description of Artificial Sequence: Synthetic oligonucleotide
aagauggcaucgauuaccc

SEQ ID NO: 2972281 - RNA, 19 nt, Artificial Sequence
  Description of Artificial Sequence: Synthetic oligonucleotide
ucgauuaccccaauuucag

SEQ ID NO: 2972282 - RNA, 19 nt, Artificial Sequence
  Description of Artificial Sequence: Synthetic oligonucleotide
cagcaagacaucaaggcgg

SEQ ID NO: 2972283 - RNA, 19 nt, Artificial Sequence
  Description of Artificial Sequence: Synthetic oligonucleotide
aucaugaagguggagaguc

SEQ ID NO: 2972284 - RNA, 19 nt, Artificial Sequence
  Description of Artificial Sequence: Synthetic oligonucleotide
auaugcuuuucccugagga

SEQ ID NO: 2972285 - RNA, 19 nt, Artificial Sequence
  Description of Artificial Sequence: Synthetic oligonucleotide
agggagauggauucacagc

SEQ ID NO: 2972286 - RNA, 19 nt, Artificial Sequence
  Description of Artificial Sequence: Synthetic oligonucleotide
aaggcgggaggcaaggucc

SEQ ID NO: 2972287 - RNA, 19 nt, Artificial Sequence
  Description of Artificial Sequence: Synthetic oligonucleotide
gaagauggcaucgauuacc

SEQ ID NO: 2972288 - RNA, 19 nt, Artificial Sequence
  Description of Artificial Sequence: Synthetic oligonucleotide
acagcugugaauucuggug

SEQ ID NO: 2972289 - RNA, 19 nt, Artificial Sequence
  Description of Artificial Sequence: Synthetic oligonucleotide
aauuucagccuccucugcu

SEQ ID NO: 2972290 - RNA, 19 nt, Artificial Sequence
  Description of Artificial Sequence: Synthetic oligonucleotide
caaucaugaagguggagag

SEQ ID NO: 2972291 - RNA, 19 nt, Artificial Sequence
  Description of Artificial Sequence: Synthetic oligonucleotide
uugagguauaugcuuuucc

SEQ ID NO: 2972292 - RNA, 19 nt, Artificial Sequence
  Description of Artificial Sequence: Synthetic oligonucleotide
gagaguccgagggagaugg

SEQ ID NO: 2972293 - RNA, 19 nt, Artificial Sequence
  Description of Artificial Sequence: Synthetic oligonucleotide
uuguauagccauagucccg

SEQ ID NO: 2972294 - RNA, 19 nt, Artificial Sequence
  Description of Artificial Sequence: Synthetic oligonucleotide
gauucggggagaguaacgg

SEQ ID NO: 2972295 - RNA, 19 nt, Artificial Sequence
  Description of Artificial Sequence: Synthetic oligonucleotide
agguauaugcuuuucccug

SEQ ID NO: 2972296 - RNA, 19 nt, Artificial Sequence
  Description of Artificial Sequence: Synthetic oligonucleotide
ugugaucaagccuaccugu

SEQ ID NO: 2972297 - RNA, 19 nt, Artificial Sequence
  Description of Artificial Sequence: Synthetic oligonucleotide
uccagugaugacuuugacc

SEQ ID NO: 2972298 - RNA, 19 nt, Artificial Sequence
  Description of Artificial Sequence: Synthetic oligonucleotide
ucuugauccguacuccaug

SEQ ID NO: 2972299 - RNA, 19 nt, Artificial Sequence
  Description of Artificial Sequence: Synthetic oligonucleotide
cuugauccguacuccaugg

SEQ ID NO: 2972300 - RNA, 19 nt, Artificial Sequence
  Description of Artificial Sequence: Synthetic oligonucleotide
gaucaagccuaccuguuug

SEQ ID NO: 2972301 - RNA, 19 nt, Artificial Sequence
  Description of Artificial Sequence: Synthetic oligonucleotide
uguggaguugggcacgaag

SEQ ID NO: 2972302 - RNA, 19 nt, Artificial Sequence
  Description of Artificial Sequence: Synthetic oligonucleotide
uacuccauggauucgggga

SEQ ID NO: 2972303 - RNA, 19 nt, Artificial Sequence
  Description of Artificial Sequence: Synthetic oligonucleotide
uauaugcuuuucccugagg

SEQ ID NO: 2972304 - RNA, 19 nt, Artificial Sequence
  Description of Artificial Sequence: Synthetic oligonucleotide
auccguacuccauggauuc

SEQ ID NO: 2972305 - RNA, 19 nt, Artificial Sequence
  Description of Artificial Sequence: Synthetic oligonucleotide
agucuguggaguugggcac

SEQ ID NO: 2972306 - RNA, 19 nt, Artificial Sequence
  Description of Artificial Sequence: Synthetic oligonucleotide
  modified_base (10)..(10): a, c, u, g, unknown or other
agucccgggnagcacuggc

SEQ ID NO: 2972307 - RNA, 19 nt, Artificial Sequence
  Description of Artificial Sequence: Synthetic oligonucleotide
gguucgugcacacaguucc

SEQ ID NO: 2972308 - RNA, 19 nt, Artificial Sequence
  Description of Artificial Sequence: Synthetic oligonucleotide
uucacagcugugaauucug

SEQ ID NO: 2972309 - RNA, 19 nt, Artificial Sequence
  Description of Artificial Sequence: Synthetic oligonucleotide
uguuugagguauaugcuuu

SEQ ID NO: 2972310 - RNA, 19 nt, Artificial Sequence
  Description of Artificial Sequence: Synthetic oligonucleotide
  modified_base (3)..(3): a, c, u, g, unknown or other
ggnagcacuggcaagagcc

SEQ ID NO: 2972311 - RNA, 19 nt, Artificial Sequence
  Description of Artificial Sequence: Synthetic oligonucleotide
agguccaaacacccgaguc

SEQ ID NO: 2972312 - RNA, 19 nt, Artificial Sequence
  Description of Artificial Sequence: Synthetic oligonucleotide
acacaguuccaucaggggu

SEQ ID NO: 2972313 - RNA, 19 nt, Artificial Sequence
  Description of Artificial Sequence: Synthetic oligonucleotide
uuucagccuccucugcugg

SEQ ID NO: 2972314 - RNA, 19 nt, Artificial Sequence
  Description of Artificial Sequence: Synthetic oligonucleotide
augacuuugacccucccuu

SEQ ID NO: 2972315 - RNA, 19 nt, Artificial Sequence
  Description of Artificial Sequence: Synthetic oligonucleotide
gucuuguauagccauaguc

SEQ ID NO: 2972316 - RNA, 19 nt, Artificial Sequence
  Description of Artificial Sequence: Synthetic oligonucleotide
gugaagauggcaucgauua

SEQ ID NO: 2972317 - RNA, 19 nt, Artificial Sequence
  Description of Artificial Sequence: Synthetic oligonucleotide
  modified_base (18)..(18): a, c, u, g, unknown or other
auagccauagucccgggna

SEQ ID NO: 2972318 - RNA, 19 nt, Artificial Sequence
  Description of Artificial Sequence: Synthetic oligonucleotide
guaacggggucuuguauag

SEQ ID NO: 2972319 - RNA, 19 nt, Artificial Sequence
  Description of Artificial Sequence: Synthetic oligonucleotide
  modified_base (2)..(2): a, c, u, g, unknown or other
unccugccauucuugaucc

SEQ ID NO: 2972320 - RNA, 19 nt, Artificial Sequence
  Description of Artificial Sequence: Synthetic oligonucleotide
agugaugacuuugacccuc

SEQ ID NO: 2972321 - RNA, 19 nt, Artificial Sequence
  Description of Artificial Sequence: Synthetic oligonucleotide
gacuuugacccucccuugg

SEQ ID NO: 2972322 - RNA, 19 nt, Artificial Sequence
  Description of Artificial Sequence: Synthetic oligonucleotide
augugaucaagccuaccug

SEQ ID NO: 2972323 - RNA, 19 nt, Artificial Sequence
  Description of Artificial Sequence: Synthetic oligonucleotide
uuuucccugaggaguuggg

SEQ ID NO: 2972324 - RNA, 19 nt, Artificial Sequence
  Description of Artificial Sequence: Synthetic oligonucleotide
acuccauggauucggggag

SEQ ID NO: 2972325 - RNA, 19 nt, Artificial Sequence
  Description of Artificial Sequence: Synthetic oligonucleotide
gagccagcaagacaucaag

SEQ ID NO: 2972326 - RNA, 19 nt, Artificial Sequence
  Description of Artificial Sequence: Synthetic oligonucleotide
cuugguugcugccacaguc

SEQ ID NO: 2972327 - RNA, 19 nt, Artificial Sequence
  Description of Artificial Sequence: Synthetic oligonucleotide
gaagguggagaguccgagg

SEQ ID NO: 2972328 - RNA, 19 nt, Artificial Sequence
  Description of Artificial Sequence: Synthetic oligonucleotide
ucacagcugugaauucugg

SEQ ID NO: 2972329 - RNA, 19 nt, Artificial Sequence
  Description of Artificial Sequence: Synthetic oligonucleotide
caagccuaccuguuugagg

SEQ ID NO: 2972330 - RNA, 19 nt, Artificial Sequence
  Description of Artificial Sequence: Synthetic oligonucleotide
auuaccccaauuucagccu

SEQ ID NO: 2972331 - RNA, 19 nt, Artificial Sequence
  Description of Artificial Sequence: Synthetic oligonucleotide
ugugaauucuggugaagau

SEQ ID NO: 2972332 - RNA, 19 nt, Artificial Sequence
  Description of Artificial Sequence: Synthetic oligonucleotide
guggaguugggcacgaagg

SEQ ID NO: 2972333 - RNA, 19 nt, Artificial Sequence
  Description of Artificial Sequence: Synthetic oligonucleotide
gauggauucacagcuguga

SEQ ID NO: 2972334 - RNA, 19 nt, Artificial Sequence
  Description of Artificial Sequence: Synthetic oligonucleotide
ugauccguacuccauggau

SEQ ID NO: 2972335 - RNA, 19 nt, Artificial Sequence
  Description of Artificial Sequence: Synthetic oligonucleotide
  modified_base (3)..(3): a, c, u, g, unknown or other
gunccugccauucuugauc

SEQ ID NO: 2972336 - RNA, 19 nt, Artificial Sequence
  Description of Artificial Sequence: Synthetic oligonucleotide
uccucugcuggcacaaagc

SEQ ID NO: 2972337 - RNA, 19 nt, Artificial Sequence
  Description of Artificial Sequence: Synthetic oligonucleotide
caugaagguggagaguccg

SEQ ID NO: 2972338 - RNA, 19 nt, Artificial Sequence
  Description of Artificial Sequence: Synthetic oligonucleotide
cacaaagcugcccaccaag

SEQ ID NO: 2972339 - RNA, 19 nt, Artificial Sequence
  Description of Artificial Sequence: Synthetic oligonucleotide
  modified_base (13)..(13): a, c, u, g, unknown or other
uccaucaggggunccugcc

SEQ ID NO: 2972340 - RNA, 19 nt, Artificial Sequence
  Description of Artificial Sequence: Synthetic oligonucleotide
ugaggaguuggguccagug

SEQ ID NO: 2972341 - RNA, 19 nt, Artificial Sequence
  Description of Artificial Sequence: Synthetic oligonucleotide
auuucagccuccucugcug

SEQ ID NO: 2972342 - RNA, 19 nt, Artificial Sequence
  Description of Artificial Sequence: Synthetic oligonucleotide
auucggggagaguaacggg

SEQ ID NO: 2972343 - RNA, 19 nt, Artificial Sequence
  Description of Artificial Sequence: Synthetic oligonucleotide
aguaacggggucuuguaua

SEQ ID NO: 2972344 - RNA, 19 nt, Artificial Sequence
  Description of Artificial Sequence: Synthetic oligonucleotide
cauucuugauccguacucc

SEQ ID NO: 2972345 - RNA, 19 nt, Artificial Sequence
  Description of Artificial Sequence: Synthetic oligonucleotide
  modified_base (19)..(19): a, c, u, g, unknown or other
uauagccauagucccgggn

SEQ ID NO: 2972346 - RNA, 19 nt, Artificial Sequence
  Description of Artificial Sequence: Synthetic oligonucleotide
cacacaguuccaucagggg

SEQ ID NO: 2972347 - RNA, 19 nt, Artificial Sequence
  Description of Artificial Sequence: Synthetic oligonucleotide
caucgauuaccccaauuuc

SEQ ID NO: 2972348 - RNA, 19 nt, Artificial Sequence
  Description of Artificial Sequence: Synthetic oligonucleotide
gugaauucuggugaagaug

SEQ ID NO: 2972349 - RNA, 19 nt, Artificial Sequence
  Description of Artificial Sequence: Synthetic oligonucleotide
aacacccgagucaggaccg

SEQ ID NO: 2972350 - RNA, 19 nt, Artificial Sequence
  Description of Artificial Sequence: Synthetic oligonucleotide
uggaguugggcacgaaggu

SEQ ID NO: 2972351 - RNA, 19 nt, Artificial Sequence
  Description of Artificial Sequence: Synthetic oligonucleotide
gaggcaagguccaaacacc

SEQ ID NO: 2972352 - RNA, 19 nt, Artificial Sequence
  Description of Artificial Sequence: Synthetic oligonucleotide
agacaucaaggcgggaggc

SEQ ID NO: 2972353 - RNA, 19 nt, Artificial Sequence
  Description of Artificial Sequence: Synthetic oligonucleotide
uugguugcugccacagucu

SEQ ID NO: 2972354 - RNA, 19 nt, Artificial Sequence
  Description of Artificial Sequence: Synthetic oligonucleotide
aucgauuaccccaauuuca

SEQ ID NO: 2972355 - RNA, 19 nt, Artificial Sequence
  Description of Artificial Sequence: Synthetic oligonucleotide
aggaguuggguccagugau

SEQ ID NO: 2972356 - RNA, 19 nt, Artificial Sequence
  Description of Artificial Sequence: Synthetic oligonucleotide
aagguucgugcacacaguu

SEQ ID NO: 2972357 - RNA, 19 nt, Artificial Sequence
  Description of Artificial Sequence: Synthetic oligonucleotide
ugaagauggcaucgauuac

SEQ ID NO: 2972358 - RNA, 19 nt, Artificial Sequence
  Description of Artificial Sequence: Synthetic oligonucleotide
  modified_base (17)..(17): a, c, u, g, unknown or other
uagccauagucccgggnag

SEQ ID NO: 2972359 - RNA, 19 nt, Artificial Sequence
  Description of Artificial Sequence: Synthetic oligonucleotide
  modified_base (16)..(16): a, c, u, g, unknown or other
agccauagucccgggnagc

SEQ ID NO: 2972360 - RNA, 19 nt, Artificial Sequence
  Description of Artificial Sequence: Synthetic oligonucleotide
guugcugccacagucugug

SEQ ID NO: 2972361 - RNA, 19 nt, Artificial Sequence
  Description of Artificial Sequence: Synthetic oligonucleotide
auucuugauccguacucca

SEQ ID NO: 2972362 - RNA, 19 nt, Artificial Sequence
  Description of Artificial Sequence: Synthetic oligonucleotide
aggcaagguccaaacaccc

SEQ ID NO: 2972363 - RNA, 19 nt, Artificial Sequence
  Description of Artificial Sequence: Synthetic oligonucleotide
guauaugcuuuucccugag

SEQ ID NO: 2972364 - RNA, 19 nt, Artificial Sequence
  Description of Artificial Sequence: Synthetic oligonucleotide
agauggcaucgauuacccc

SEQ ID NO: 2972365 - RNA, 19 nt, Artificial Sequence
  Description of Artificial Sequence: Synthetic oligonucleotide
acagucuguggaguugggc

SEQ ID NO: 2972366 - RNA, 19 nt, Artificial Sequence
  Description of Artificial Sequence: Synthetic oligonucleotide
gccagcaagacaucaaggc

SEQ ID NO: 2972367 - RNA, 19 nt, Artificial Sequence
  Description of Artificial Sequence: Synthetic oligonucleotide
  modified_base (16)..(16): a, c, u, g, unknown or other
aguuccaucaggggunccu

SEQ ID NO: 2972368 - RNA, 19 nt, Artificial Sequence
  Description of Artificial Sequence: Synthetic oligonucleotide
cccaccaaggccaugaaug

SEQ ID NO: 2972369 - RNA, 19 nt, Artificial Sequence
  Description of Artificial Sequence: Synthetic oligonucleotide
  modified_base (14)..(14): a, c, u, g, unknown or other
uuccaucaggggunccugc

SEQ ID NO: 2972370 - RNA, 19 nt, Artificial Sequence
  Description of Artificial Sequence: Synthetic oligonucleotide
ccaugaaugugaucaagcc

SEQ ID NO: 2972371 - RNA, 19 nt, Artificial Sequence
  Description of Artificial Sequence: Synthetic oligonucleotide
aaucaugaagguggagagu

SEQ ID NO: 2972372 - RNA, 19 nt, Artificial Sequence
  Description of Artificial Sequence: Synthetic oligonucleotide
ugacuuugacccucccuug

SEQ ID NO: 2972373 - RNA, 19 nt, Artificial Sequence
  Description of Artificial Sequence: Synthetic oligonucleotide
augcuuuucccugaggagu

SEQ ID NO: 2972374 - RNA, 19 nt, Artificial Sequence
  Description of Artificial Sequence: Synthetic oligonucleotide
gagucaggaccgaagcccg

SEQ ID NO: 2972375 - RNA, 19 nt, Artificial Sequence
  Description of Artificial Sequence: Synthetic oligonucleotide
aagagccagcaagacauca

SEQ ID NO: 2972376 - RNA, 19 nt, Artificial Sequence
  Description of Artificial Sequence: Synthetic oligonucleotide
gaguugggcacgaagguuc

SEQ ID NO: 2972377 - RNA, 19 nt, Artificial Sequence
  Description of Artificial Sequence: Synthetic oligonucleotide
aagguccaaacacccgagu

SEQ ID NO: 2972378 - RNA, 19 nt, Artificial Sequence
  Description of Artificial Sequence: Synthetic oligonucleotide
aguuggguccagugaugac

SEQ ID NO: 2972379 - RNA, 19 nt, Artificial Sequence
  Description of Artificial Sequence: Synthetic oligonucleotide
acaaagcugcccaccaagg

SEQ ID NO: 2972380 - RNA, 19 nt, Artificial Sequence
  Description of Artificial Sequence: Synthetic oligonucleotide
ccagcaagacaucaaggcg

SEQ ID NO: 2972381 - RNA, 19 nt, Artificial Sequence
  Description of Artificial Sequence: Synthetic oligonucleotide
agcaagacaucaaggcggg

SEQ ID NO: 2972382 - RNA, 19 nt, Artificial Sequence
  Description of Artificial Sequence: Synthetic oligonucleotide
guccaaacacccgagucag

SEQ ID NO: 2972383 - RNA, 19 nt, Artificial Sequence
  Description of Artificial Sequence: Synthetic oligonucleotide
caagguccaaacacccgag

SEQ ID NO: 2972384 - RNA, 19 nt, Artificial Sequence
  Description of Artificial Sequence: Synthetic oligonucleotide
cagucuguggaguugggca

SEQ ID NO: 2972385 - RNA, 19 nt, Artificial Sequence
  Description of Artificial Sequence: Synthetic oligonucleotide
auucacagcugugaauucu

SEQ ID NO: 2972386 - RNA, 19 nt, Artificial Sequence
  Description of Artificial Sequence: Synthetic oligonucleotide
auggauucacagcugugaa

SEQ ID NO: 2972387 - RNA, 19 nt, Artificial Sequence
  Description of Artificial Sequence: Synthetic oligonucleotide
ucaagccuaccuguuugag

SEQ ID NO: 2972388 - RNA, 19 nt, Artificial Sequence
  Description of Artificial Sequence: Synthetic oligonucleotide
ugaucaagccuaccuguuu

SEQ ID NO: 2972389 - RNA, 19 nt, Artificial Sequence
  Description of Artificial Sequence: Synthetic oligonucleotide
uuaccccaauuucagccuc

SEQ ID NO: 2972390 - RNA, 19 nt, Artificial Sequence
  Description of Artificial Sequence: Synthetic oligonucleotide
uucuugauccguacuccau

SEQ ID NO: 2972391 - RNA, 19 nt, Artificial Sequence
  Description of Artificial Sequence: Synthetic oligonucleotide
guacuccauggauucgggg

SEQ ID NO: 2972392 - RNA, 19 nt, Artificial Sequence
  Description of Artificial Sequence: Synthetic oligonucleotide
ugggcacgaagguucgugc

SEQ ID NO: 2972393 - RNA, 19 nt, Artificial Sequence
  Description of Artificial Sequence: Synthetic oligonucleotide
cuuuucccugaggaguugg

SEQ ID NO: 2972394 - RNA, 19 nt, Artificial Sequence
  Description of Artificial Sequence: Synthetic oligonucleotide
uuggguccagugaugacuu

SEQ ID NO: 2972395 - RNA, 19 nt, Artificial Sequence
  Description of Artificial Sequence: Synthetic oligonucleotide
gaggaguuggguccaguga

SEQ ID NO: 2972396 - RNA, 19 nt, Artificial Sequence
  Description of Artificial Sequence: Synthetic oligonucleotide
uuugagguauaugcuuuuc

SEQ ID NO: 2972397 - RNA, 19 nt, Artificial Sequence
  Description of Artificial Sequence: Synthetic oligonucleotide
gagguauaugcuuuucccu

SEQ ID NO: 2972398 - RNA, 19 nt, Artificial Sequence
  Description of Artificial Sequence: Synthetic oligonucleotide
aucaaggcgggaggcaagg

SEQ ID NO: 2972399 - RNA, 19 nt, Artificial Sequence
  Description of Artificial Sequence: Synthetic oligonucleotide
  modified_base (18)..(18): a, c, u, g, unknown or other
acaguuccaucaggggunc

SEQ ID NO: 2972400 - RNA, 19 nt, Artificial Sequence
  Description of Artificial Sequence: Synthetic oligonucleotide
ugcuuuucccugaggaguu

SEQ ID NO: 2972401 - RNA, 19 nt, Artificial Sequence
  Description of Artificial Sequence: Synthetic oligonucleotide
uccaaacacccgagucagg

SEQ ID NO: 2972402 - RNA, 19 nt, Artificial Sequence
  Description of Artificial Sequence: Synthetic oligonucleotide
ucggggagaguaacggggu

SEQ ID NO: 2972403 - RNA, 19 nt, Artificial Sequence
  Description of Artificial Sequence: Synthetic oligonucleotide
uugggcacgaagguucgug

SEQ ID NO: 2972404 - RNA, 19 nt, Artificial Sequence
  Description of Artificial Sequence: Synthetic oligonucleotide
caauuucagccuccucugc

SEQ ID NO: 2972405 - RNA, 19 nt, Artificial Sequence
  Description of Artificial Sequence: Synthetic oligonucleotide
uggauucacagcugugaau

SEQ ID NO: 2972406 - RNA, 19 nt, Artificial Sequence
  Description of Artificial Sequence: Synthetic oligonucleotide
aucaagccuaccuguuuga

SEQ ID NO: 2972407 - RNA, 19 nt, Artificial Sequence
  Description of Artificial Sequence: Synthetic oligonucleotide
acuuugacccucccuuggu

SEQ ID NO: 2972408 - RNA, 19 nt, Artificial Sequence
  Description of Artificial Sequence: Synthetic oligonucleotide
uugauccguacuccaugga

SEQ ID NO: 2972409 - RNA, 19 nt, Artificial Sequence
  Description of Artificial Sequence: Synthetic oligonucleotide
ucaggaccgaagcccgagc

SEQ ID NO: 2972410 - RNA, 19 nt, Artificial Sequence
  Description of Artificial Sequence: Synthetic oligonucleotide
uaccccaauuucagccucc

SEQ ID NO: 2972411 - RNA, 19 nt, Artificial Sequence
  Description of Artificial Sequence: Synthetic oligonucleotide
caggaccgaagcccgagcc

SEQ ID NO: 2972412 - RNA, 19 nt, Artificial Sequence
  Description of Artificial Sequence: Synthetic oligonucleotide
cucugcuggcacaaagcug

SEQ ID NO: 2972413 - RNA, 19 nt, Artificial Sequence
  Description of Artificial Sequence: Synthetic oligonucleotide
cagcugugaauucugguga

SEQ ID NO: 2972414 - RNA, 19 nt, Artificial Sequence
  Description of Artificial Sequence: Synthetic oligonucleotide
  modified_base (19)..(19): a, c, u, g, unknown or other
cacaguuccaucaggggun

SEQ ID NO: 2972415 - RNA, 19 nt, Artificial Sequence
  Description of Artificial Sequence: Synthetic oligonucleotide
gagauggauucacagcugu

SEQ ID NO: 2972416 - RNA, 19 nt, Artificial Sequence
  Description of Artificial Sequence: Synthetic oligonucleotide
agccagcaagacaucaagg

SEQ ID NO: 2972417 - RNA, 19 nt, Artificial Sequence
  Description of Artificial Sequence: Synthetic oligonucleotide
cauggauucggggagagua

SEQ ID NO: 2972418 - RNA, 19 nt, Artificial Sequence
  Description of Artificial Sequence: Synthetic oligonucleotide
gggagauggauucacagcu

SEQ ID NO: 2972419 - RNA, 19 nt, Artificial Sequence
  Description of Artificial Sequence: Synthetic oligonucleotide
ugaugacuuugacccuccc

SEQ ID NO: 2972420 - RNA, 19 nt, Artificial Sequence
  Description of Artificial Sequence: Synthetic oligonucleotide
gguccaaacacccgaguca

SEQ ID NO: 2972421 - RNA, 19 nt, Artificial Sequence
  Description of Artificial Sequence: Synthetic oligonucleotide
caaacacccgagucaggac

SEQ ID NO: 2972422 - RNA, 19 nt, Artificial Sequence
  Description of Artificial Sequence: Synthetic oligonucleotide
caugaaugugaucaagccu

SEQ ID NO: 2972423 - RNA, 19 nt, Artificial Sequence
  Description of Artificial Sequence: Synthetic oligonucleotide
ugccauucuugauccguac

SEQ ID NO: 2972424 - RNA, 19 nt, Artificial Sequence
  Description of Artificial Sequence: Synthetic oligonucleotide
  modified_base (8)..(8): a, c, u, g, unknown or other
ucccgggnagcacuggcaa

SEQ ID NO: 2972425 - RNA, 19 nt, Artificial Sequence
  Description of Artificial Sequence: Synthetic oligonucleotide
agcccgagccagcaccugg

SEQ ID NO: 2972426 - RNA, 19 nt, Artificial Sequence
  Description of Artificial Sequence: Synthetic oligonucleotide
  modified_base (9)..(9): a, c, u, g, unknown or other
ucaggggunccugccauuc

SEQ ID NO: 2972427 - RNA, 19 nt, Artificial Sequence
  Description of Artificial Sequence: Synthetic oligonucleotide
guccgagggagauggauuc

SEQ ID NO: 2972428 - RNA, 19 nt, Artificial Sequence
  Description of Artificial Sequence: Synthetic oligonucleotide
gguggagaguccgagggag

SEQ ID NO: 2972429 - RNA, 19 nt, Artificial Sequence
  Description of Artificial Sequence: Synthetic oligonucleotide
gcacacaguuccaucaggg

SEQ ID NO: 2972430 - RNA, 19 nt, Artificial Sequence
  Description of Artificial Sequence: Synthetic oligonucleotide
cuccucugcuggcacaaag

SEQ ID NO: 2972431 - RNA, 19 nt, Artificial Sequence
  Description of Artificial Sequence: Synthetic oligonucleotide
uccauggauucggggagag

SEQ ID NO: 2972432 - RNA, 19 nt, Artificial Sequence
  Description of Artificial Sequence: Synthetic oligonucleotide
  modified_base (7)..(7): a, c, u, g, unknown or other
aggggunccugccauucuu

SEQ ID NO: 2972433 - RNA, 19 nt, Artificial Sequence
  Description of Artificial Sequence: Synthetic oligonucleotide
uggauucggggagaguaac

SEQ ID NO: 2972434 - RNA, 19 nt, Artificial Sequence
  Description of Artificial Sequence: Synthetic oligonucleotide
gguauaugcuuuucccuga

SEQ ID NO: 2972435 - RNA, 19 nt, Artificial Sequence
  Description of Artificial Sequence: Synthetic oligonucleotide
agaguaacggggucuugua

SEQ ID NO: 2972436 - RNA, 19 nt, Artificial Sequence
  Description of Artificial Sequence: Synthetic oligonucleotide
gaaugugaucaagccuacc

SEQ ID NO: 2972437 - RNA, 19 nt, Artificial Sequence
  Description of Artificial Sequence: Synthetic oligonucleotide
cgaagguucgugcacacag

SEQ ID NO: 2972438 - RNA, 19 nt, Artificial Sequence
  Description of Artificial Sequence: Synthetic oligonucleotide
ccaauuucagccuccucug

SEQ ID NO: 2972439 - RNA, 19 nt, Artificial Sequence
  Description of Artificial Sequence: Synthetic oligonucleotide
cugugaauucuggugaaga

SEQ ID NO: 2972440 - RNA, 19 nt, Artificial Sequence
  Description of Artificial Sequence: Synthetic oligonucleotide
gaugacuuugacccucccu

SEQ ID NO: 2972441 - RNA, 19 nt, Artificial Sequence
  Description of Artificial Sequence: Synthetic oligonucleotide
gcaagguccaaacacccga

SEQ ID NO: 2972442 - RNA, 19 nt, Artificial Sequence
  Description of Artificial Sequence: Synthetic oligonucleotide
gccaugaaugugaucaagc

SEQ ID NO: 2972443 - RNA, 19 nt, Artificial Sequence
  Description of Artificial Sequence: Synthetic oligonucleotide
caucaaggcgggaggcaag

SEQ ID NO: 2972444 - RNA, 19 nt, Artificial Sequence
  Description of Artificial Sequence: Synthetic oligonucleotide
gaauucuggugaagauggc

SEQ ID NO: 2972445 - RNA, 19 nt, Artificial Sequence
  Description of Artificial Sequence: Synthetic oligonucleotide
guauagccauagucccggg

SEQ ID NO: 2972446 - RNA, 19 nt, Artificial Sequence
  Description of Artificial Sequence: Synthetic oligonucleotide
gaguuggguccagugauga

SEQ ID NO: 2972447 - RNA, 19 nt, Artificial Sequence
  Description of Artificial Sequence: Synthetic oligonucleotide
gggucuuguauagccauag

SEQ ID NO: 2972448 - RNA, 19 nt, Artificial Sequence
  Description of Artificial Sequence: Synthetic oligonucleotide
caaggcgggaggcaagguc

SEQ ID NO: 2972449 - RNA, 19 nt, Artificial Sequence
  Description of Artificial Sequence: Synthetic oligonucleotide
uccguacuccauggauucg

SEQ ID NO: 2972450 - RNA, 19 nt, Artificial Sequence
  Description of Artificial Sequence: Synthetic oligonucleotide
ccauucuugauccguacuc

SEQ ID NO: 2972451 - RNA, 19 nt, Artificial Sequence
  Description of Artificial Sequence: Synthetic oligonucleotide
acccucccuugguugcugc

SEQ ID NO: 2972452 - RNA, 19 nt, Artificial Sequence
  Description of Artificial Sequence: Synthetic oligonucleotide
agcugugaauucuggugaa

SEQ ID NO: 2972453 - RNA, 19 nt, Artificial Sequence
  Description of Artificial Sequence: Synthetic oligonucleotide
uaccuguuugagguauaug

SEQ ID NO: 2972454 - RNA, 19 nt, Artificial Sequence
  Description of Artificial Sequence: Synthetic oligonucleotide
uggcacaaagcugcccacc

SEQ ID NO: 2972455 - RNA, 19 nt, Artificial Sequence
  Description of Artificial Sequence: Synthetic oligonucleotide
ucagccuccucugcuggca

SEQ ID NO: 2972456 - RNA, 19 nt, Artificial Sequence
  Description of Artificial Sequence: Synthetic oligonucleotide
uucagccuccucugcuggc

SEQ ID NO: 2972457 - RNA, 19 nt, Artificial Sequence
  Description of Artificial Sequence: Synthetic oligonucleotide
  modified_base (2)..(2): a, c, u, g, unknown or other
gnagcacuggcaagagcca

SEQ ID NO: 2972458 - RNA, 19 nt, Artificial Sequence
  Description of Artificial Sequence: Synthetic oligonucleotide
gcuggcacaaagcugccca

SEQ ID NO: 2972459 - RNA, 19 nt, Artificial Sequence
  Description of Artificial Sequence: Synthetic oligonucleotide
ucgugcacacaguuccauc

SEQ ID NO: 2972460 - RNA, 19 nt, Artificial Sequence
  Description of Artificial Sequence: Synthetic oligonucleotide
guuggguccagugaugacu

SEQ ID NO: 2972461 - RNA, 19 nt, Artificial Sequence
  Description of Artificial Sequence: Synthetic oligonucleotide
agguucgugcacacaguuc

SEQ ID NO: 2972462 - RNA, 19 nt, Artificial Sequence
  Description of Artificial Sequence: Synthetic oligonucleotide
uggagaguccgagggagau

SEQ ID NO: 2972463 - RNA, 19 nt, Artificial Sequence
  Description of Artificial Sequence: Synthetic oligonucleotide
aggaccgaagcccgagcca

SEQ ID NO: 2972464 - RNA, 19 nt, Artificial Sequence
  Description of Artificial Sequence: Synthetic oligonucleotide
acaucaaggcgggaggcaa

SEQ ID NO: 2972465 - RNA, 19 nt, Artificial Sequence
  Description of Artificial Sequence: Synthetic oligonucleotide
cacagucuguggaguuggg

SEQ ID NO: 2972466 - RNA, 19 nt, Artificial Sequence
  Description of Artificial Sequence: Synthetic oligonucleotide
  modified_base (15)..(15): a, c, u, g, unknown or other
guuccaucaggggunccug

SEQ ID NO: 2972467 - RNA, 19 nt, Artificial Sequence
  Description of Artificial Sequence: Synthetic oligonucleotide
gcaagagccagcaagacau

SEQ ID NO: 2972468 - RNA, 19 nt, Artificial Sequence
  Description of Artificial Sequence: Synthetic oligonucleotide
cacgaagguucgugcacac

SEQ ID NO: 2972469 - RNA, 19 nt, Artificial Sequence
  Description of Artificial Sequence: Synthetic oligonucleotide
agauggauucacagcugug

SEQ ID NO: 2972470 - RNA, 19 nt, Artificial Sequence
  Description of Artificial Sequence: Synthetic oligonucleotide
ggauucggggagaguaacg

SEQ ID NO: 2972471 - RNA, 19 nt, Artificial Sequence
  Description of Artificial Sequence: Synthetic oligonucleotide
gagaguaacggggucuugu

SEQ ID NO: 2972472 - RNA, 19 nt, Artificial Sequence
  Description of Artificial Sequence: Synthetic oligonucleotide
cuggcacaaagcugcccac

SEQ ID NO: 2972473 - RNA, 19 nt, Artificial Sequence
  Description of Artificial Sequence: Synthetic oligonucleotide
gugaugacuuugacccucc

SEQ ID NO: 2972474 - RNA, 19 nt, Artificial Sequence
  Description of Artificial Sequence: Synthetic oligonucleotide
agguggagaguccgaggga

SEQ ID NO: 2972475 - RNA, 19 nt, Artificial Sequence
  Description of Artificial Sequence: Synthetic oligonucleotide
gacaucaaggcgggaggca

SEQ ID NO: 2972476 - RNA, 19 nt, Artificial Sequence
  Description of Artificial Sequence: Synthetic oligonucleotide
ucuguggaguugggcacga

SEQ ID NO: 2972477 - RNA, 19 nt, Artificial Sequence
  Description of Artificial Sequence: Synthetic oligonucleotide
ggcaagagccagcaagaca

SEQ ID NO: 2972478 - RNA, 19 nt, Artificial Sequence
  Description of Artificial Sequence: Synthetic oligonucleotide
ggaccgaagcccgagccag

SEQ ID NO: 2972479 - RNA, 19 nt, Artificial Sequence
  Description of Artificial Sequence: Synthetic oligonucleotide
uucgugcacacaguuccau

SEQ ID NO: 2972480 - RNA, 19 nt, Artificial Sequence
  Description of Artificial Sequence: Synthetic oligonucleotide
uaacggggucuuguauagc

SEQ ID NO: 2972481 - RNA, 19 nt, Artificial Sequence
  Description of Artificial Sequence: Synthetic oligonucleotide
auggcaucgauuaccccaa

SEQ ID NO: 2972482 - RNA, 19 nt, Artificial Sequence
  Description of Artificial Sequence: Synthetic oligonucleotide
cuguuugagguauaugcuu

SEQ ID NO: 2972483 - RNA, 19 nt, Artificial Sequence
  Description of Artificial Sequence: Synthetic oligonucleotide
ggcacgaagguucgugcac

SEQ ID NO: 2972484 - RNA, 19 nt, Artificial Sequence
  Description of Artificial Sequence: Synthetic oligonucleotide
cgagucaggaccgaagccc

SEQ ID NO: 2972485 - RNA, 19 nt, Artificial Sequence
  Description of Artificial Sequence: Synthetic oligonucleotide
ggcaagguccaaacacccg

SEQ ID NO: 2972486 - RNA, 19 nt, Artificial Sequence
  Description of Artificial Sequence: Synthetic oligonucleotide
  modified_base (10)..(10): a, c, u, g, unknown or other
aucaggggunccugccauu

SEQ ID NO: 2972487 - RNA, 19 nt, Artificial Sequence
  Description of Artificial Sequence: Synthetic oligonucleotide
cccgagucaggaccgaagc

SEQ ID NO: 2972488 - RNA, 19 nt, Artificial Sequence
  Description of Artificial Sequence: Synthetic oligonucleotide
ggcacaaagcugcccacca

SEQ ID NO: 2972489 - RNA, 19 nt, Artificial Sequence
  Description of Artificial Sequence: Synthetic oligonucleotide
caagagccagcaagacauc

SEQ ID NO: 2972490 - RNA, 19 nt, Artificial Sequence
  Description of Artificial Sequence: Synthetic oligonucleotide
ugcuggcacaaagcugccc

SEQ ID NO: 2972491 - RNA, 19 nt, Artificial Sequence
  Description of Artificial Sequence: Synthetic oligonucleotide
ggauucacagcugugaauu

SEQ ID NO: 2972492 - RNA, 19 nt, Artificial Sequence
  Description of Artificial Sequence: Synthetic oligonucleotide
ggccaugaaugugaucaag

SEQ ID NO: 2972493 - RNA, 19 nt, Artificial Sequence
  Description of Artificial Sequence: Synthetic oligonucleotide
caccaaggccaugaaugug

SEQ ID NO: 2972494 - RNA, 19 nt, Artificial Sequence
  Description of Artificial Sequence: Synthetic oligonucleotide
uccgagggagauggauuca

SEQ ID NO: 2972495 - RNA, 19 nt, Artificial Sequence
  Description of Artificial Sequence: Synthetic oligonucleotide
gcaucgauuaccccaauuu

SEQ ID NO: 2972496 - RNA, 19 nt, Artificial Sequence
  Description of Artificial Sequence: Synthetic oligonucleotide
agagccagcaagacaucaa

SEQ ID NO: 2972497 - RNA, 19 nt, Artificial Sequence
  Description of Artificial Sequence: Synthetic oligonucleotide
ggagauggauucacagcug

SEQ ID NO: 2972498 - RNA, 19 nt, Artificial Sequence
  Description of Artificial Sequence: Synthetic oligonucleotide
aguccgagggagauggauu

SEQ ID NO: 2972499 - RNA, 19 nt, Artificial Sequence
  Description of Artificial Sequence: Synthetic oligonucleotide
cccaauuucagccuccucu

SEQ ID NO: 2972500 - RNA, 19 nt, Artificial Sequence
  Description of Artificial Sequence: Synthetic oligonucleotide
aggccaugaaugugaucaa

SEQ ID NO: 2972501 - RNA, 19 nt, Artificial Sequence
  Description of Artificial Sequence: Synthetic oligonucleotide
gauccguacuccauggauu

SEQ ID NO: 2972502 - RNA, 19 nt, Artificial Sequence
  Description of Artificial Sequence: Synthetic oligonucleotide
ccacagucuguggaguugg

SEQ ID NO: 2972503 - RNA, 19 nt, Artificial Sequence
  Description of Artificial Sequence: Synthetic oligonucleotide
acccgagucaggaccgaag

SEQ ID NO: 2972504 - RNA, 19 nt, Artificial Sequence
  Description of Artificial Sequence: Synthetic oligonucleotide
  modified_base (4)..(4): a, c, u, g, unknown or other
gggnagcacuggcaagagc

SEQ ID NO: 2972505 - RNA, 19 nt, Artificial Sequence
  Description of Artificial Sequence: Synthetic oligonucleotide
ccguacuccauggauucgg

SEQ ID NO: 2972506 - RNA, 19 nt, Artificial Sequence
  Description of Artificial Sequence: Synthetic oligonucleotide
caaggccaugaaugugauc

SEQ ID NO: 2972507 - RNA, 19 nt, Artificial Sequence
  Description of Artificial Sequence: Synthetic oligonucleotide
cgaagcccgagccagcacc

SEQ ID NO: 2972508 - RNA, 19 nt, Artificial Sequence
  Description of Artificial Sequence: Synthetic oligonucleotide
gaguaacggggucuuguau

SEQ ID NO: 2972509 - RNA, 19 nt, Artificial Sequence
  Description of Artificial Sequence: Synthetic oligonucleotide
augaagguggagaguccga

SEQ ID NO: 2972510 - RNA, 19 nt, Artificial Sequence
  Description of Artificial Sequence: Synthetic oligonucleotide
auggauucggggagaguaa

SEQ ID NO: 2972511 - RNA, 19 nt, Artificial Sequence
  Description of Artificial Sequence: Synthetic oligonucleotide
accgaagcccgagccagca

SEQ ID NO: 2972512 - RNA, 19 nt, Artificial Sequence
  Description of Artificial Sequence: Synthetic oligonucleotide
ucaaggcgggaggcaaggu

SEQ ID NO: 2972513 - RNA, 19 nt, Artificial Sequence
  Description of Artificial Sequence: Synthetic oligonucleotide
gcugugaauucuggugaag

SEQ ID NO: 2972514 - RNA, 19 nt, Artificial Sequence
  Description of Artificial Sequence: Synthetic oligonucleotide
ucccuugguugcugccaca

SEQ ID NO: 2972515 - RNA, 19 nt, Artificial Sequence
  Description of Artificial Sequence: Synthetic oligonucleotide
cguacuccauggauucggg

SEQ ID NO: 2972516 - RNA, 19 nt, Artificial Sequence
  Description of Artificial Sequence: Synthetic oligonucleotide
guuugagguauaugcuuuu

SEQ ID NO: 2972517 - RNA, 19 nt, Artificial Sequence
  Description of Artificial Sequence: Synthetic oligonucleotide
ccaaacacccgagucagga

SEQ ID NO: 2972518 - RNA, 19 nt, Artificial Sequence
  Description of Artificial Sequence: Synthetic oligonucleotide
gaagguucgugcacacagu

SEQ ID NO: 2972519 - RNA, 19 nt, Artificial Sequence
  Description of Artificial Sequence: Synthetic oligonucleotide
  modified_base (5)..(5): a, c, u, g, unknown or other
gggunccugccauucuuga

SEQ ID NO: 2972520 - RNA, 19 nt, Artificial Sequence
  Description of Artificial Sequence: Synthetic oligonucleotide
cgugcacacaguuccauca

SEQ ID NO: 2972521 - RNA, 19 nt, Artificial Sequence
  Description of Artificial Sequence: Synthetic oligonucleotide
ggaguuggguccagugaug

SEQ ID NO: 2972522 - RNA, 19 nt, Artificial Sequence
  Description of Artificial Sequence: Synthetic oligonucleotide
cacagcugugaauucuggu

SEQ ID NO: 2972523 - RNA, 19 nt, Artificial Sequence
  Description of Artificial Sequence: Synthetic oligonucleotide
ugacccucccuugguugcu

SEQ ID NO: 2972524 - RNA, 19 nt, Artificial Sequence
  Description of Artificial Sequence: Synthetic oligonucleotide
cgauuaccccaauuucagc

SEQ ID NO: 2972525 - RNA, 19 nt, Artificial Sequence
  Description of Artificial Sequence: Synthetic oligonucleotide
accccaauuucagccuccu

SEQ ID NO: 2972526 - RNA, 19 nt, Artificial Sequence
  Description of Artificial Sequence: Synthetic oligonucleotide
cugccauucuugauccgua

SEQ ID NO: 2972527 - RNA, 19 nt, Artificial Sequence
  Description of Artificial Sequence: Synthetic oligonucleotide
acggggucuuguauagcca

SEQ ID NO: 2972528 - RNA, 19 nt, Artificial Sequence
  Description of Artificial Sequence: Synthetic oligonucleotide
ccgagucaggaccgaagcc

SEQ ID NO: 2972529 - RNA, 19 nt, Artificial Sequence
  Description of Artificial Sequence: Synthetic oligonucleotide
ugcccaccaaggccaugaa

SEQ ID NO: 2972530 - RNA, 19 nt, Artificial Sequence
  Description of Artificial Sequence: Synthetic oligonucleotide
acgaagguucgugcacaca

SEQ ID NO: 2972531 - RNA, 19 nt, Artificial Sequence
  Description of Artificial Sequence: Synthetic oligonucleotide
agccuccucugcuggcaca

SEQ ID NO: 2972532 - RNA, 19 nt, Artificial Sequence
  Description of Artificial Sequence: Synthetic oligonucleotide
ccuguuugagguauaugcu

SEQ ID NO: 2972533 - RNA, 19 nt, Artificial Sequence
  Description of Artificial Sequence: Synthetic oligonucleotide
aagcccgagccagcaccug

SEQ ID NO: 2972534 - RNA, 19 nt, Artificial Sequence
  Description of Artificial Sequence: Synthetic oligonucleotide
  modified_base (6)..(6): a, c, u, g, unknown or other
ggggunccugccauucuug

SEQ ID NO: 2972535 - RNA, 19 nt, Artificial Sequence
  Description of Artificial Sequence: Synthetic oligonucleotide
guucgugcacacaguucca

SEQ ID NO: 2972536 - RNA, 19 nt, Artificial Sequence
  Description of Artificial Sequence: Synthetic oligonucleotide
gacccucccuugguugcug

SEQ ID NO: 2972537 - RNA, 19 nt, Artificial Sequence
  Description of Artificial Sequence: Synthetic oligonucleotide
gaccgaagcccgagccagc

SEQ ID NO: 2972538 - RNA, 19 nt, Artificial Sequence
  Description of Artificial Sequence: Synthetic oligonucleotide
  modified_base (7)..(7): a, c, u, g, unknown or other
cccgggnagcacuggcaag

SEQ ID NO: 2972539 - RNA, 19 nt, Artificial Sequence
  Description of Artificial Sequence: Synthetic oligonucleotide
gggcacgaagguucgugca

SEQ ID NO: 2972540 - RNA, 19 nt, Artificial Sequence
  Description of Artificial Sequence: Synthetic oligonucleotide
gggaggcaagguccaaaca

SEQ ID NO: 2972541 - RNA, 19 nt, Artificial Sequence
  Description of Artificial Sequence: Synthetic oligonucleotide
gccacagucuguggaguug

SEQ ID NO: 2972542 - RNA, 19 nt, Artificial Sequence
  Description of Artificial Sequence: Synthetic oligonucleotide
uggcaucgauuaccccaau

SEQ ID NO: 2972543 - RNA, 19 nt, Artificial Sequence
  Description of Artificial Sequence: Synthetic oligonucleotide
gaguccgagggagauggau

SEQ ID NO: 2972544 - RNA, 19 nt, Artificial Sequence
  Description of Artificial Sequence: Synthetic oligonucleotide
ggagaguccgagggagaug

SEQ ID NO: 2972545 - RNA, 19 nt, Artificial Sequence
  Description of Artificial Sequence: Synthetic oligonucleotide
  modified_base (9)..(9): a, c, u, g, unknown or other
gucccgggnagcacuggca

SEQ ID NO: 2972546 - RNA, 19 nt, Artificial Sequence
  Description of Artificial Sequence: Synthetic oligonucleotide
gaagcccgagccagcaccu

SEQ ID NO: 2972547 - RNA, 19 nt, Artificial Sequence
  Description of Artificial Sequence: Synthetic oligonucleotide
cccuugguugcugccacag

SEQ ID NO: 2972548 - RNA, 19 nt, Artificial Sequence
  Description of Artificial Sequence: Synthetic oligonucleotide
agccuaccuguuugaggua

SEQ ID NO: 2972549 - RNA, 19 nt, Artificial Sequence
  Description of Artificial Sequence: Synthetic oligonucleotide
  modified_base (14)..(14): a, c, u, g, unknown or other
ccauagucccgggnagcac

SEQ ID NO: 2972550 - RNA, 19 nt, Artificial Sequence
  Description of Artificial Sequence: Synthetic oligonucleotide
gcacgaagguucgugcaca

SEQ ID NO: 2972551 - RNA, 19 nt, Artificial Sequence
  Description of Artificial Sequence: Synthetic oligonucleotide
cgggaggcaagguccaaac

SEQ ID NO: 2972552 - RNA, 19 nt, Artificial Sequence
  Description of Artificial Sequence: Synthetic oligonucleotide
guggagaguccgagggaga

SEQ ID NO: 2972553 - RNA, 19 nt, Artificial Sequence
  Description of Artificial Sequence: Synthetic oligonucleotide
  modified_base (4)..(4): a, c, u, g, unknown or other
ggunccugccauucuugau

SEQ ID NO: 2972554 - RNA, 19 nt, Artificial Sequence
  Description of Artificial Sequence: Synthetic oligonucleotide
ccagcaccuggcacugcag

SEQ ID NO: 2972555 - RNA, 19 nt, Artificial Sequence
  Description of Artificial Sequence: Synthetic oligonucleotide
  modified_base (15)..(15): a, c, u, g, unknown or other
gccauagucccgggnagca

SEQ ID NO: 2972556 - RNA, 19 nt, Artificial Sequence
  Description of Artificial Sequence: Synthetic oligonucleotide
ccgagggagauggauucac

SEQ ID NO: 2972557 - RNA, 19 nt, Artificial Sequence
  Description of Artificial Sequence: Synthetic oligonucleotide
  modified_base (11)..(11): a, c, u, g, unknown or other
caucaggggunccugccau

SEQ ID NO: 2972558 - RNA, 19 nt, Artificial Sequence
  Description of Artificial Sequence: Synthetic oligonucleotide
agucaggaccgaagcccga

SEQ ID NO: 2972559 - RNA, 19 nt, Artificial Sequence
  Description of Artificial Sequence: Synthetic oligonucleotide
cuccauggauucggggaga

SEQ ID NO: 2972560 - RNA, 19 nt, Artificial Sequence
  Description of Artificial Sequence: Synthetic oligonucleotide
gccauucuugauccguacu

SEQ ID NO: 2972561 - RNA, 19 nt, Artificial Sequence
  Description of Artificial Sequence: Synthetic oligonucleotide
uggguccagugaugacuuu

SEQ ID NO: 2972562 - RNA, 19 nt, Artificial Sequence
  Description of Artificial Sequence: Synthetic oligonucleotide
ggugaagauggcaucgauu

SEQ ID NO: 2972563 - RNA, 19 nt, Artificial Sequence
  Description of Artificial Sequence: Synthetic oligonucleotide
ggucuuguauagccauagu

SEQ ID NO: 2972564 - RNA, 19 nt, Artificial Sequence
  Description of Artificial Sequence: Synthetic oligonucleotide
  modified_base (6)..(6): a, c, u, g, unknown or other
ccgggnagcacuggcaaga

SEQ ID NO: 2972565 - RNA, 19 nt, Artificial Sequence
  Description of Artificial Sequence: Synthetic oligonucleotide
cuaccuguuugagguauau

SEQ ID NO: 2972566 - RNA, 19 nt, Artificial Sequence
  Description of Artificial Sequence: Synthetic oligonucleotide
gcuuuucccugaggaguug

SEQ ID NO: 2972567 - RNA, 19 nt, Artificial Sequence
  Description of Artificial Sequence: Synthetic oligonucleotide
cagugaugacuuugacccu

SEQ ID NO: 2972568 - RNA, 19 nt, Artificial Sequence
  Description of Artificial Sequence: Synthetic oligonucleotide
aggcgggaggcaaggucca

SEQ ID NO: 2972569 - RNA, 19 nt, Artificial Sequence
  Description of Artificial Sequence: Synthetic oligonucleotide
gugaucaagccuaccuguu

SEQ ID NO: 2972570 - RNA, 19 nt, Artificial Sequence
  Description of Artificial Sequence: Synthetic oligonucleotide
  modified_base (17)..(17): a, c, u, g, unknown or other
caguuccaucagggguncc

SEQ ID NO: 2972571 - RNA, 19 nt, Artificial Sequence
  Description of Artificial Sequence: Synthetic oligonucleotide
  modified_base (12)..(12): a, c, u, g, unknown or other
ccaucaggggunccugcca

SEQ ID NO: 2972572 - RNA, 19 nt, Artificial Sequence
  Description of Artificial Sequence: Synthetic oligonucleotide
ccucugcuggcacaaagcu

SEQ ID NO: 2972573 - RNA, 19 nt, Artificial Sequence
  Description of Artificial Sequence: Synthetic oligonucleotide
acacccgagucaggaccga

SEQ ID NO: 2972574 - RNA, 19 nt, Artificial Sequence
  Description of Artificial Sequence: Synthetic oligonucleotide
ggggagaguaacggggucu

SEQ ID NO: 2972575 - RNA, 19 nt, Artificial Sequence
  Description of Artificial Sequence: Synthetic oligonucleotide
ccgagccagcaccuggcac

SEQ ID NO: 2972576 - RNA, 19 nt, Artificial Sequence
  Description of Artificial Sequence: Synthetic oligonucleotide
ccaccaaggccaugaaugu

SEQ ID NO: 2972577 - RNA, 19 nt, Artificial Sequence
  Description of Artificial Sequence: Synthetic oligonucleotide
gcccgagccagcaccuggc

SEQ ID NO: 2972578 - RNA, 19 nt, Artificial Sequence
  Description of Artificial Sequence: Synthetic oligonucleotide
agaguccgagggagaugga

SEQ ID NO: 2972579 - RNA, 19 nt, Artificial Sequence
  Description of Artificial Sequence: Synthetic oligonucleotide
ggcaucgauuaccccaauu

SEQ ID NO: 2972580 - RNA, 19 nt, Artificial Sequence
  Description of Artificial Sequence: Synthetic oligonucleotide
ggaguugggcacgaagguu

SEQ ID NO: 2972581 - RNA, 19 nt, Artificial Sequence
  Description of Artificial Sequence: Synthetic oligonucleotide
cgagggagauggauucaca

SEQ ID NO: 2972582 - RNA, 19 nt, Artificial Sequence
  Description of Artificial Sequence: Synthetic oligonucleotide
ccugccauucuugauccgu

SEQ ID NO: 2972583 - RNA, 19 nt, Artificial Sequence
  Description of Artificial Sequence: Synthetic oligonucleotide
  modified_base (5)..(5): a, c, u, g, unknown or other
cgggnagcacuggcaagag

SEQ ID NO: 2972584 - RNA, 19 nt, Artificial Sequence
  Description of Artificial Sequence: Synthetic oligonucleotide
  modified_base (8)..(8): a, c, u, g, unknown or other
caggggunccugccauucu

SEQ ID NO: 2972585 - RNA, 19 nt, Artificial Sequence
  Description of Artificial Sequence: Synthetic oligonucleotide
gccuaccuguuugagguau

SEQ ID NO: 2972586 - RNA, 19 nt, Artificial Sequence
  Description of Artificial Sequence: Synthetic oligonucleotide
cacuggcaagagccagcaa

SEQ ID NO: 2972587 - RNA, 19 nt, Artificial Sequence
  Description of Artificial Sequence: Synthetic oligonucleotide
ggggucuuguauagccaua

SEQ ID NO: 2972588 - RNA, 19 nt, Artificial Sequence
  Description of Artificial Sequence: Synthetic oligonucleotide
ccugaggaguuggguccag

SEQ ID NO: 2972589 - RNA, 19 nt, Artificial Sequence
  Description of Artificial Sequence: Synthetic oligonucleotide
ccccaauuucagccuccuc

SEQ ID NO: 2972590 - RNA, 19 nt, Artificial Sequence
  Description of Artificial Sequence: Synthetic oligonucleotide
gccuccucugcuggcacaa

SEQ ID NO: 2972591 - RNA, 19 nt, Artificial Sequence
  Description of Artificial Sequence: Synthetic oligonucleotide
ccuaccuguuugagguaua

SEQ ID NO: 2972592 - RNA, 19 nt, Artificial Sequence
  Description of Artificial Sequence: Synthetic oligonucleotide
ccgaagcccgagccagcac

SEQ ID NO: 2972593 - RNA, 19 nt, Artificial Sequence
  Description of Artificial Sequence: Synthetic oligonucleotide
cugaggaguuggguccagu

SEQ ID NO: 2972594 - RNA, 19 nt, Artificial Sequence
  Description of Artificial Sequence: Synthetic oligonucleotide
cacccgagucaggaccgaa

SEQ ID NO: 2972595 - RNA, 19 nt, Artificial Sequence
  Description of Artificial Sequence: Synthetic oligonucleotide
gguugcugccacagucugu

SEQ ID NO: 2972596 - RNA, 19 nt, Artificial Sequence
  Description of Artificial Sequence: Synthetic oligonucleotide
guugggcacgaagguucgu

SEQ ID NO: 2972597 - RNA, 19 nt, Artificial Sequence
  Description of Artificial Sequence: Synthetic oligonucleotide
gcaagacaucaaggcggga

SEQ ID NO: 2972598 - RNA, 19 nt, Artificial Sequence
  Description of Artificial Sequence: Synthetic oligonucleotide
gcgggaggcaagguccaaa

SEQ ID NO: 2972599 - RNA, 19 nt, Artificial Sequence
  Description of Artificial Sequence: Synthetic oligonucleotide
cggggagaguaacgggguc

SEQ ID NO: 2972600 - RNA, 19 nt, Artificial Sequence
  Description of Artificial Sequence: Synthetic oligonucleotide
ccaaggccaugaaugugau

SEQ ID NO: 2972601 - RNA, 19 nt, Artificial Sequence
  Description of Artificial Sequence: Synthetic oligonucleotide
gcccaccaaggccaugaau

SEQ ID NO: 2972602 - RNA, 19 nt, Artificial Sequence
  Description of Artificial Sequence: Synthetic oligonucleotide
cuguggaguugggcacgaa

SEQ ID NO: 2972603 - RNA, 19 nt, Artificial Sequence
  Description of Artificial Sequence: Synthetic oligonucleotide
cccugaggaguugggucca

SEQ ID NO: 2972604 - RNA, 19 nt, Artificial Sequence
  Description of Artificial Sequence: Synthetic oligonucleotide
cccgagccagcaccuggca

SEQ ID NO: 2972605 - RNA, 19 nt, Artificial Sequence
  Description of Artificial Sequence: Synthetic oligonucleotide
cggggucuuguauagccau

SEQ ID NO: 2972606 - RNA, 19 nt, Artificial Sequence
  Description of Artificial Sequence: Synthetic oligonucleotide
ccuugguugcugccacagu

SEQ ID NO: 2972607 - RNA, 19 nt, Artificial Sequence
  Description of Artificial Sequence: Synthetic oligonucleotide
ggcgggaggcaagguccaa

SEQ ID NO: 2972608 - RNA, 19 nt, Artificial Sequence
  Description of Artificial Sequence: Synthetic oligonucleotide
ccauggauucggggagagu

SEQ ID NO: 2972609 - RNA, 19 nt, Artificial Sequence
  Description of Artificial Sequence: Synthetic oligonucleotide
ccuccucugcuggcacaaa

SEQ ID NO: 2972610 - RNA, 19 nt, Artificial Sequence
  Description of Artificial Sequence: Synthetic oligonucleotide
  modified_base (1)..(1): a, c, u, g, unknown or other
nccugccauucuugauccg

SEQ ID NO: 2972611 - RNA, 19 nt, Artificial Sequence
  Description of Artificial Sequence: Synthetic oligonucleotide
aaauuuagguccuacaugc

SEQ ID NO: 2972612 - RNA, 19 nt, Artificial Sequence
  Description of Artificial Sequence: Synthetic oligonucleotide
acuuuauuuuaauaaaugc

SEQ ID NO: 2972613 - RNA, 19 nt, Artificial Sequence
  Description of Artificial Sequence: Synthetic oligonucleotide
cauagauaaauuuaggucc

SEQ ID NO: 2972614 - RNA, 19 nt, Artificial Sequence
  Description of Artificial Sequence: Synthetic oligonucleotide
uuuugauaaacucuuaaag

SEQ ID NO: 2972615 - RNA, 19 nt, Artificial Sequence
  Description of Artificial Sequence: Synthetic oligonucleotide
aaguuuaaacacuacaauc

SEQ ID NO: 2972616 - RNA, 19 nt, Artificial Sequence
  Description of Artificial Sequence: Synthetic oligonucleotide
uguaaauccaaacaggagc

SEQ ID NO: 2972617 - RNA, 19 nt, Artificial Sequence
  Description of Artificial Sequence: Synthetic oligonucleotide
uuuccaauggcuuugagag

SEQ ID NO: 2972618 - RNA, 19 nt, Artificial Sequence
  Description of Artificial Sequence: Synthetic oligonucleotide
acucuuaaaguuuaaacac

SEQ ID NO: 2972619 - RNA, 19 nt, Artificial Sequence
  Description of Artificial Sequence: Synthetic oligonucleotide
uuuuaauaaaugcauacca

SEQ ID NO: 2972620 - RNA, 19 nt, Artificial Sequence
  Description of Artificial Sequence: Synthetic oligonucleotide
uuaaacacuacaaucagga

SEQ ID NO: 2972621 - RNA, 19 nt, Artificial Sequence
  Description of Artificial Sequence: Synthetic oligonucleotide
auaaaugcauaccaaauuc

SEQ ID NO: 2972622 - RNA, 19 nt, Artificial Sequence
  Description of Artificial Sequence: Synthetic oligonucleotide
aacucuuaaaguuuaaaca

SEQ ID NO: 2972623 - RNA, 19 nt, Artificial Sequence
  Description of Artificial Sequence: Synthetic oligonucleotide
acauagauaaauuuagguc

SEQ ID NO: 2972624 - RNA, 19 nt, Artificial Sequence
  Description of Artificial Sequence: Synthetic oligonucleotide
uucauagagaacuaaagug

SEQ ID NO: 2972625 - RNA, 19 nt, Artificial Sequence
  Description of Artificial Sequence: Synthetic oligonucleotide
aauuagucuacaccucugc

SEQ ID NO: 2972626 - RNA, 19 nt, Artificial Sequence
  Description of Artificial Sequence: Synthetic oligonucleotide
uaggaaaugaccgacauag

SEQ ID NO: 2972627 - RNA, 19 nt, Artificial Sequence
  Description of Artificial Sequence: Synthetic oligonucleotide
ucauagagaacuaaaguga

SEQ ID NO: 2972628 - RNA, 19 nt, Artificial Sequence
  Description of Artificial Sequence: Synthetic oligonucleotide
aaaugaccgacauagauaa

SEQ ID NO: 2972629 - RNA, 19 nt, Artificial Sequence
  Description of Artificial Sequence: Synthetic oligonucleotide
uauuuuaauaaaugcauac

SEQ ID NO: 2972630 - RNA, 19 nt, Artificial Sequence
  Description of Artificial Sequence: Synthetic oligonucleotide
aacaggagcacacacaaca

SEQ ID NO: 2972631 - RNA, 19 nt, Artificial Sequence
  Description of Artificial Sequence: Synthetic oligonucleotide
auuuuaauaaaugcauacc

SEQ ID NO: 2972632 - RNA, 19 nt, Artificial Sequence
  Description of Artificial Sequence: Synthetic oligonucleotide
aagaacaccaggcuauuuc

SEQ ID NO: 2972633 - RNA, 19 nt, Artificial Sequence
  Description of Artificial Sequence: Synthetic oligonucleotide
uuuaaacacuacaaucagg

SEQ ID NO: 2972634 - RNA, 19 nt, Artificial Sequence
  Description of Artificial Sequence: Synthetic oligonucleotide
ucuucauagagaacuaaag

SEQ ID NO: 2972635 - RNA, 19 nt, Artificial Sequence
  Description of Artificial Sequence: Synthetic oligonucleotide
acauuacugcuguaaaucc

SEQ ID NO: 2972636 - RNA, 19 nt, Artificial Sequence
  Description of Artificial Sequence: Synthetic oligonucleotide
aacacuacaaucaggagug

SEQ ID NO: 2972637 - RNA, 19 nt, Artificial Sequence
  Description of Artificial Sequence: Synthetic oligonucleotide
uaaauuuagguccuacaug

SEQ ID NO: 2972638 - RNA, 19 nt, Artificial Sequence
  Description of Artificial Sequence: Synthetic oligonucleotide
uuuacacuugacauuacug

SEQ ID NO: 2972639 - RNA, 19 nt, Artificial Sequence
  Description of Artificial Sequence: Synthetic oligonucleotide
aauaaaugcauaccaaauu

SEQ ID NO: 2972640 - RNA, 19 nt, Artificial Sequence
  Description of Artificial Sequence: Synthetic oligonucleotide
uuacacuugacauuacugc

SEQ ID NO: 2972641 - RNA, 19 nt, Artificial Sequence
  Description of Artificial Sequence: Synthetic oligonucleotide
aggaguguuguuuuacucc

SEQ ID NO: 2972642 - RNA, 19 nt, Artificial Sequence
  Description of Artificial Sequence: Synthetic oligonucleotide
uuuacuccucuucauagag

SEQ ID NO: 2972643 - RNA, 19 nt, Artificial Sequence
  Description of Artificial Sequence: Synthetic oligonucleotide
uuucugaagaacaccaggc

SEQ ID NO: 2972644 - RNA, 19 nt, Artificial Sequence
  Description of Artificial Sequence: Synthetic oligonucleotide
uuaauaaaugcauaccaaa

SEQ ID NO: 2972645 - RNA, 19 nt, Artificial Sequence
  Description of Artificial Sequence: Synthetic oligonucleotide
uuuaauaaaugcauaccaa

SEQ ID NO: 2972646 - RNA, 19 nt, Artificial Sequence
  Description of Artificial Sequence: Synthetic oligonucleotide
ugcuguaaauccaaacagg

SEQ ID NO: 2972647 - RNA, 19 nt, Artificial Sequence
  Description of Artificial Sequence: Synthetic oligonucleotide
agagauuuacacuugacau

SEQ ID NO: 2972648 - RNA, 19 nt, Artificial Sequence
  Description of Artificial Sequence: Synthetic oligonucleotide
aacaccaggcuauuucugg

SEQ ID NO: 2972649 - RNA, 19 nt, Artificial Sequence
  Description of Artificial Sequence: Synthetic oligonucleotide
aacuuuauuuuaauaaaug

SEQ ID NO: 2972650 - RNA, 19 nt, Artificial Sequence
  Description of Artificial Sequence: Synthetic oligonucleotide
uagagaacuaaagugaaug

SEQ ID NO: 2972651 - RNA, 19 nt, Artificial Sequence
  Description of Artificial Sequence: Synthetic oligonucleotide
cacaacaggaugcaaaggg

SEQ ID NO: 2972652 - RNA, 19 nt, Artificial Sequence
  Description of Artificial Sequence: Synthetic oligonucleotide
uuuagguccuacaugccag

SEQ ID NO: 2972653 - RNA, 19 nt, Artificial Sequence
  Description of Artificial Sequence: Synthetic oligonucleotide
uaauaaaugcauaccaaau

SEQ ID NO: 2972654 - RNA, 19 nt, Artificial Sequence
  Description of Artificial Sequence: Synthetic oligonucleotide
auaaauuuagguccuacau

SEQ ID NO: 2972655 - RNA, 19 nt, Artificial Sequence
  Description of Artificial Sequence: Synthetic oligonucleotide
aguuuaaacacuacaauca

SEQ ID NO: 2972656 - RNA, 19 nt, Artificial Sequence
  Description of Artificial Sequence: Synthetic oligonucleotide
acugcuguaaauccaaaca

SEQ ID NO: 2972657 - RNA, 19 nt, Artificial Sequence
  Description of Artificial Sequence: Synthetic oligonucleotide
guuuaaacacuacaaucag

SEQ ID NO: 2972658 - RNA, 19 nt, Artificial Sequence
  Description of Artificial Sequence: Synthetic oligonucleotide
ucaauuagucuacaccucu

SEQ ID NO: 2972659 - RNA, 19 nt, Artificial Sequence
  Description of Artificial Sequence: Synthetic oligonucleotide
guuuuacuccucuucauag

SEQ ID NO: 2972660 - RNA, 19 nt, Artificial Sequence
  Description of Artificial Sequence: Synthetic oligonucleotide
cuuucugaagaacaccagg

SEQ ID NO: 2972661 - RNA, 19 nt, Artificial Sequence
  Description of Artificial Sequence: Synthetic oligonucleotide
ucuuaaaguuuaaacacua

SEQ ID NO: 2972662 - RNA, 19 nt, Artificial Sequence
  Description of Artificial Sequence: Synthetic oligonucleotide
augcauaccaaauucaaaa

SEQ ID NO: 2972663 - RNA, 19 nt, Artificial Sequence
  Description of Artificial Sequence: Synthetic oligonucleotide
ugcuuucugaagaacacca

SEQ ID NO: 2972664 - RNA, 19 nt, Artificial Sequence
  Description of Artificial Sequence: Synthetic oligonucleotide
uuauuuuaauaaaugcaua

SEQ ID NO: 2972665 - RNA, 19 nt, Artificial Sequence
  Description of Artificial Sequence: Synthetic oligonucleotide
uuuuccaauggcuuugaga

SEQ ID NO: 2972666 - RNA, 19 nt, Artificial Sequence
  Description of Artificial Sequence: Synthetic oligonucleotide
ucucucacccaucaauuag

SEQ ID NO: 2972667 - RNA, 19 nt, Artificial Sequence
  Description of Artificial Sequence: Synthetic oligonucleotide
ugauaaacucuuaaaguuu

SEQ ID NO: 2972668 - RNA, 19 nt, Artificial Sequence
  Description of Artificial Sequence: Synthetic oligonucleotide
gauaaauuuagguccuaca

SEQ ID NO: 2972669 - RNA, 19 nt, Artificial Sequence
  Description of Artificial Sequence: Synthetic oligonucleotide
uguuguuuuacuccucuuc

SEQ ID NO: 2972670 - RNA, 19 nt, Artificial Sequence
  Description of Artificial Sequence: Synthetic oligonucleotide
uuuaggaaaugaccgacau

SEQ ID NO: 2972671 - RNA, 19 nt, Artificial Sequence
  Description of Artificial Sequence: Synthetic oligonucleotide
gaugcaaagggaaugguca

SEQ ID NO: 2972672 - RNA, 19 nt, Artificial Sequence
  Description of Artificial Sequence: Synthetic oligonucleotide
gagagauuuacacuugaca

SEQ ID NO: 2972673 - RNA, 19 nt, Artificial Sequence
  Description of Artificial Sequence: Synthetic oligonucleotide
ucacucuucccauucagca

SEQ ID NO: 2972674 - RNA, 19 nt, Artificial Sequence
  Description of Artificial Sequence: Synthetic oligonucleotide
uuugagagauuuacacuug

SEQ ID NO: 2972675 - RNA, 19 nt, Artificial Sequence
  Description of Artificial Sequence: Synthetic oligonucleotide
uuuuaggaaaugaccgaca

SEQ ID NO: 2972676 - RNA, 19 nt, Artificial Sequence
  Description of Artificial Sequence: Synthetic oligonucleotide
agggaauggucacucuucc

SEQ ID NO: 2972677 - RNA, 19 nt, Artificial Sequence
  Description of Artificial Sequence: Synthetic oligonucleotide
agcacacacaacaggaugc

SEQ ID NO: 2972678 - RNA, 19 nt, Artificial Sequence
  Description of Artificial Sequence: Synthetic oligonucleotide
cugcuguaaauccaaacag

SEQ ID NO: 2972679 - RNA, 19 nt, Artificial Sequence
  Description of Artificial Sequence: Synthetic oligonucleotide
ucugcuuucugaagaacac

SEQ ID NO: 2972680 - RNA, 19 nt, Artificial Sequence
  Description of Artificial Sequence: Synthetic oligonucleotide
uacacuugacauuacugcu

SEQ ID NO: 2972681 - RNA, 19 nt, Artificial Sequence
  Description of Artificial Sequence: Synthetic oligonucleotide
gacauagauaaauuuaggu

SEQ ID NO: 2972682 - RNA, 19 nt, Artificial Sequence
  Description of Artificial Sequence: Synthetic oligonucleotide
aauuuagguccuacaugcc

SEQ ID NO: 2972683 - RNA, 19 nt, Artificial Sequence
  Description of Artificial Sequence: Synthetic oligonucleotide
gacauuacugcuguaaauc

SEQ ID NO: 2972684 - RNA, 19 nt, Artificial Sequence
  Description of Artificial Sequence: Synthetic oligonucleotide
agauaaauuuagguccuac

SEQ ID NO: 2972685 - RNA, 19 nt, Artificial Sequence
  Description of Artificial Sequence: Synthetic oligonucleotide
auuuagguccuacaugcca

SEQ ID NO: 2972686 - RNA, 19 nt, Artificial Sequence
  Description of Artificial Sequence: Synthetic oligonucleotide
uacuccucuucauagagaa

SEQ ID NO: 2972687 - RNA, 19 nt, Artificial Sequence
  Description of Artificial Sequence: Synthetic oligonucleotide
ucugaagaacaccaggcua

SEQ ID NO: 2972688 - RNA, 19 nt, Artificial Sequence
  Description of Artificial Sequence: Synthetic oligonucleotide
cacacaacaggaugcaaag

SEQ ID NO: 2972689 - RNA, 19 nt, Artificial Sequence
  Description of Artificial Sequence: Synthetic oligonucleotide
cuuaaaguuuaaacacuac

SEQ ID NO: 2972690 - RNA, 19 nt, Artificial Sequence
  Description of Artificial Sequence: Synthetic oligonucleotide
auuuacacuugacauuacu

SEQ ID NO: 2972691 - RNA, 19 nt, Artificial Sequence
  Description of Artificial Sequence: Synthetic oligonucleotide
agagaacuaaagugaaugu

SEQ ID NO: 2972692 - RNA, 19 nt, Artificial Sequence
  Description of Artificial Sequence: Synthetic oligonucleotide
uucugaagaacaccaggcu

SEQ ID NO: 2972693 - RNA, 19 nt, Artificial Sequence
  Description of Artificial Sequence: Synthetic oligonucleotide
aagggaauggucacucuuc

SEQ ID NO: 2972694 - RNA, 19 nt, Artificial Sequence
  Description of Artificial Sequence: Synthetic oligonucleotide
uugacauuacugcuguaaa

SEQ ID NO: 2972695 - RNA, 19 nt, Artificial Sequence
  Description of Artificial Sequence: Synthetic oligonucleotide
ucguaugugguucucucac

SEQ ID NO: 2972696 - RNA, 19 nt, Artificial Sequence
  Description of Artificial Sequence: Synthetic oligonucleotide
uugagagauuuacacuuga

SEQ ID NO: 2972697 - RNA, 19 nt, Artificial Sequence
  Description of Artificial Sequence: Synthetic oligonucleotide
cuguaaauccaaacaggag

SEQ ID NO: 2972698 - RNA, 19 nt, Artificial Sequence
  Description of Artificial Sequence: Synthetic oligonucleotide
agaacaccaggcuauuucu

SEQ ID NO: 2972699 - RNA, 19 nt, Artificial Sequence
  Description of Artificial Sequence: Synthetic oligonucleotide
guuguuuuacuccucuuca

SEQ ID NO: 2972700 - RNA, 19 nt, Artificial Sequence
  Description of Artificial Sequence: Synthetic oligonucleotide
uguuuuacuccucuucaua

SEQ ID NO: 2972701 - RNA, 19 nt, Artificial Sequence
  Description of Artificial Sequence: Synthetic oligonucleotide
aaagggaauggucacucuu

SEQ ID NO: 2972702 - RNA, 19 nt, Artificial Sequence
  Description of Artificial Sequence: Synthetic oligonucleotide
aguguuguuuuacuccucu

SEQ ID NO: 2972703 - RNA, 19 nt, Artificial Sequence
  Description of Artificial Sequence: Synthetic oligonucleotide
guaugugguucucucaccc

SEQ ID NO: 2972704 - RNA, 19 nt, Artificial Sequence
  Description of Artificial Sequence: Synthetic oligonucleotide
agauuuacacuugacauua

SEQ ID NO: 2972705 - RNA, 19 nt, Artificial Sequence
  Description of Artificial Sequence: Synthetic oligonucleotide
augcaaagggaauggucac

SEQ ID NO: 2972706 - RNA, 19 nt, Artificial Sequence
  Description of Artificial Sequence: Synthetic oligonucleotide
uagucuacaccucugcuuu

SEQ ID NO: 2972707 - RNA, 19 nt, Artificial Sequence
  Description of Artificial Sequence: Synthetic oligonucleotide
acuacaaucaggaguguug

SEQ ID NO: 2972708 - RNA, 19 nt, Artificial Sequence
  Description of Artificial Sequence: Synthetic oligonucleotide
caucaauuagucuacaccu

SEQ ID NO: 2972709 - RNA, 19 nt, Artificial Sequence
  Description of Artificial Sequence: Synthetic oligonucleotide
ugagagauuuacacuugac

SEQ ID NO: 2972710 - RNA, 19 nt, Artificial Sequence
  Description of Artificial Sequence: Synthetic oligonucleotide
gagcacacacaacaggaug

SEQ ID NO: 2972711 - RNA, 19 nt, Artificial Sequence
  Description of Artificial Sequence: Synthetic oligonucleotide
auggucacucuucccauuc

SEQ ID NO: 2972712 - RNA, 19 nt, Artificial Sequence
  Description of Artificial Sequence: Synthetic oligonucleotide
guaaauccaaacaggagca

SEQ ID NO: 2972713 - RNA, 19 nt, Artificial Sequence
  Description of Artificial Sequence: Synthetic oligonucleotide
ucccauucagcaugcaggc

SEQ ID NO: 2972714 - RNA, 19 nt, Artificial Sequence
  Description of Artificial Sequence: Synthetic oligonucleotide
auuagucuacaccucugcu

SEQ ID NO: 2972715 - RNA, 19 nt, Artificial Sequence
  Description of Artificial Sequence: Synthetic oligonucleotide
agaacuaaagugaauguuu

SEQ ID NO: 2972716 - RNA, 19 nt, Artificial Sequence
  Description of Artificial Sequence: Synthetic oligonucleotide
uuagucuacaccucugcuu

SEQ ID NO: 2972717 - RNA, 19 nt, Artificial Sequence
  Description of Artificial Sequence: Synthetic oligonucleotide
ggcuuugagagauuuacac

SEQ ID NO: 2972718 - RNA, 19 nt, Artificial Sequence
  Description of Artificial Sequence: Synthetic oligonucleotide
uaaacucuuaaaguuuaaa

SEQ ID NO: 2972719 - RNA, 19 nt, Artificial Sequence
  Description of Artificial Sequence: Synthetic oligonucleotide
gauaaacucuuaaaguuua

SEQ ID NO: 2972720 - RNA, 19 nt, Artificial Sequence
  Description of Artificial Sequence: Synthetic oligonucleotide
acaccaggcuauuucuggg

SEQ ID NO: 2972721 - RNA, 19 nt, Artificial Sequence
  Description of Artificial Sequence: Synthetic oligonucleotide
aucaggaguguuguuuuac

SEQ ID NO: 2972722 - RNA, 19 nt, Artificial Sequence
  Description of Artificial Sequence: Synthetic oligonucleotide
ccaucaauuagucuacacc

SEQ ID NO: 2972723 - RNA, 19 nt, Artificial Sequence
  Description of Artificial Sequence: Synthetic oligonucleotide
ccgacauagauaaauuuag

SEQ ID NO: 2972724 - RNA, 19 nt, Artificial Sequence
  Description of Artificial Sequence: Synthetic oligonucleotide
auagauaaauuuagguccu

SEQ ID NO: 2972725 - RNA, 19 nt, Artificial Sequence
  Description of Artificial Sequence: Synthetic oligonucleotide
uacugcuguaaauccaaac

SEQ ID NO: 2972726 - RNA, 19 nt, Artificial Sequence
  Description of Artificial Sequence: Synthetic oligonucleotide
uggcuccucccucagaaug

SEQ ID NO: 2972727 - RNA, 19 nt, Artificial Sequence
  Description of Artificial Sequence: Synthetic oligonucleotide
cagaauguguugcugagga

SEQ ID NO: 2972728 - RNA, 19 nt, Artificial Sequence
  Description of Artificial Sequence: Synthetic oligonucleotide
uacaccucugcuuucugaa

SEQ ID NO: 2972729 - RNA, 19 nt, Artificial Sequence
  Description of Artificial Sequence: Synthetic oligonucleotide
gaucguaugugguucucuc

SEQ ID NO: 2972730 - RNA, 19 nt, Artificial Sequence
  Description of Artificial Sequence: Synthetic oligonucleotide
augaccgacauagauaaau

SEQ ID NO: 2972731 - RNA, 19 nt, Artificial Sequence
  Description of Artificial Sequence: Synthetic oligonucleotide
aggcccagaucguaugugg

SEQ ID NO: 2972732 - RNA, 19 nt, Artificial Sequence
  Description of Artificial Sequence: Synthetic oligonucleotide
cauagagaacuaaagugaa

SEQ ID NO: 2972733 - RNA, 19 nt, Artificial Sequence
  Description of Artificial Sequence: Synthetic oligonucleotide
ucaggaguguuguuuuacu

SEQ ID NO: 2972734 - RNA, 19 nt, Artificial Sequence
  Description of Artificial Sequence: Synthetic oligonucleotide
ugacauuacugcuguaaau

SEQ ID NO: 2972735 - RNA, 19 nt, Artificial Sequence
  Description of Artificial Sequence: Synthetic oligonucleotide
gaaaugaccgacauagaua

SEQ ID NO: 2972736 - RNA, 19 nt, Artificial Sequence
  Description of Artificial Sequence: Synthetic oligonucleotide
aucaauuagucuacaccuc

SEQ ID NO: 2972737 - RNA, 19 nt, Artificial Sequence
  Description of Artificial Sequence: Synthetic oligonucleotide
uuacuccucuucauagaga

SEQ ID NO: 2972738 - RNA, 19 nt, Artificial Sequence
  Description of Artificial Sequence: Synthetic oligonucleotide
acaggaugcaaagggaaug

SEQ ID NO: 2972739 - RNA, 19 nt, Artificial Sequence
  Description of Artificial Sequence: Synthetic oligonucleotide
ucagcaugcaggcccagau

SEQ ID NO: 2972740 - RNA, 19 nt, Artificial Sequence
  Description of Artificial Sequence: Synthetic oligonucleotide
cuuugagagauuuacacuu

SEQ ID NO: 2972741 - RNA, 19 nt, Artificial Sequence
  Description of Artificial Sequence: Synthetic oligonucleotide
cuucccauucagcaugcag

SEQ ID NO: 2972742 - RNA, 19 nt, Artificial Sequence
  Description of Artificial Sequence: Synthetic oligonucleotide
gauggcuccucccucagaa

SEQ ID NO: 2972743 - RNA, 19 nt, Artificial Sequence
  Description of Artificial Sequence: Synthetic oligonucleotide
caauuagucuacaccucug

SEQ ID NO: 2972744 - RNA, 19 nt, Artificial Sequence
  Description of Artificial Sequence: Synthetic oligonucleotide
caggagcacacacaacagg

SEQ ID NO: 2972745 - RNA, 19 nt, Artificial Sequence
  Description of Artificial Sequence: Synthetic oligonucleotide
ggaauggucacucuuccca

SEQ ID NO: 2972746 - RNA, 19 nt, Artificial Sequence
  Description of Artificial Sequence: Synthetic oligonucleotide
uuagguccuacaugccagc

SEQ ID NO: 2972747 - RNA, 19 nt, Artificial Sequence
  Description of Artificial Sequence: Synthetic oligonucleotide
ugaccgacauagauaaauu

SEQ ID NO: 2972748 - RNA, 19 nt, Artificial Sequence
  Description of Artificial Sequence: Synthetic oligonucleotide
cuucauagagaacuaaagu

SEQ ID NO: 2972749 - RNA, 19 nt, Artificial Sequence
  Description of Artificial Sequence: Synthetic oligonucleotide
ucucacccaucaauuaguc

SEQ ID NO: 2972750 - RNA, 19 nt, Artificial Sequence
  Description of Artificial Sequence: Synthetic oligonucleotide
auuacugcuguaaauccaa

SEQ ID NO: 2972751 - RNA, 19 nt, Artificial Sequence
  Description of Artificial Sequence: Synthetic oligonucleotide
uuaggaaaugaccgacaua

SEQ ID NO: 2972752 - RNA, 19 nt, Artificial Sequence
  Description of Artificial Sequence: Synthetic oligonucleotide
acaaucaggaguguuguuu

SEQ ID NO: 2972753 - RNA, 19 nt, Artificial Sequence
  Description of Artificial Sequence: Synthetic oligonucleotide
uggcuuugagagauuuaca

SEQ ID NO: 2972754 - RNA, 19 nt, Artificial Sequence
  Description of Artificial Sequence: Synthetic oligonucleotide
ccauucagcaugcaggccc

SEQ ID NO: 2972755 - RNA, 19 nt, Artificial Sequence
  Description of Artificial Sequence: Synthetic oligonucleotide
uaugugguucucucaccca

SEQ ID NO: 2972756 - RNA, 19 nt, Artificial Sequence
  Description of Artificial Sequence: Synthetic oligonucleotide
cauuacugcuguaaaucca

SEQ ID NO: 2972757 - RNA, 19 nt, Artificial Sequence
  Description of Artificial Sequence: Synthetic oligonucleotide
aggagcacacacaacagga

SEQ ID NO: 2972758 - RNA, 19 nt, Artificial Sequence
  Description of Artificial Sequence: Synthetic oligonucleotide
uuguuuuacuccucuucau

SEQ ID NO: 2972759 - RNA, 19 nt, Artificial Sequence
  Description of Artificial Sequence: Synthetic oligonucleotide
caccaggcuauuucugggg

SEQ ID NO: 2972760 - RNA, 19 nt, Artificial Sequence
  Description of Artificial Sequence: Synthetic oligonucleotide
cacccaucaauuagucuac

SEQ ID NO: 2972761 - RNA, 19 nt, Artificial Sequence
  Description of Artificial Sequence: Synthetic oligonucleotide
aacaggaugcaaagggaau

SEQ ID NO: 2972762 - RNA, 19 nt, Artificial Sequence
  Description of Artificial Sequence: Synthetic oligonucleotide
ucuacaccucugcuuucug

SEQ ID NO: 2972763 - RNA, 19 nt, Artificial Sequence
  Description of Artificial Sequence: Synthetic oligonucleotide
aucguaugugguucucuca

SEQ ID NO: 2972764 - RNA, 19 nt, Artificial Sequence
  Description of Artificial Sequence: Synthetic oligonucleotide
acacuugacauuacugcug

SEQ ID NO: 2972765 - RNA, 19 nt, Artificial Sequence
  Description of Artificial Sequence: Synthetic oligonucleotide
accgacauagauaaauuua

SEQ ID NO: 2972766 - RNA, 19 nt, Artificial Sequence
  Description of Artificial Sequence: Synthetic oligonucleotide
cucuucauagagaacuaaa

SEQ ID NO: 2972767 - RNA, 19 nt, Artificial Sequence
  Description of Artificial Sequence: Synthetic oligonucleotide
caggaguguuguuuuacuc

SEQ ID NO: 2972768 - RNA, 19 nt, Artificial Sequence
  Description of Artificial Sequence: Synthetic oligonucleotide
acacaacaggaugcaaagg

SEQ ID NO: 2972769 - RNA, 19 nt, Artificial Sequence
  Description of Artificial Sequence: Synthetic oligonucleotide
cuugacauuacugcuguaa

SEQ ID NO: 2972770 - RNA, 19 nt, Artificial Sequence
  Description of Artificial Sequence: Synthetic oligonucleotide
cucccucagaauguguugc

SEQ ID NO: 2972771 - RNA, 19 nt, Artificial Sequence
  Description of Artificial Sequence: Synthetic oligonucleotide
aauggucacucuucccauu

SEQ ID NO: 2972772 - RNA, 19 nt, Artificial Sequence
  Description of Artificial Sequence: Synthetic oligonucleotide
augugguucucucacccau

SEQ ID NO: 2972773 - RNA, 19 nt, Artificial Sequence
  Description of Artificial Sequence: Synthetic oligonucleotide
acaacaggaugcaaaggga

SEQ ID NO: 2972774 - RNA, 19 nt, Artificial Sequence
  Description of Artificial Sequence: Synthetic oligonucleotide
uguggauggcuccucccuc

SEQ ID NO: 2972775 - RNA, 19 nt, Artificial Sequence
  Description of Artificial Sequence: Synthetic oligonucleotide
acaccucugcuuucugaag

SEQ ID NO: 2972776 - RNA, 19 nt, Artificial Sequence
  Description of Artificial Sequence: Synthetic oligonucleotide
cucuuaaaguuuaaacacu

SEQ ID NO: 2972777 - RNA, 19 nt, Artificial Sequence
  Description of Artificial Sequence: Synthetic oligonucleotide
uccucccucagaauguguu

SEQ ID NO: 2972778 - RNA, 19 nt, Artificial Sequence
  Description of Artificial Sequence: Synthetic oligonucleotide
uucucucacccaucaauua

SEQ ID NO: 2972779 - RNA, 19 nt, Artificial Sequence
  Description of Artificial Sequence: Synthetic oligonucleotide
gcuguaaauccaaacagga

SEQ ID NO: 2972780 - RNA, 19 nt, Artificial Sequence
  Description of Artificial Sequence: Synthetic oligonucleotide
ugcaggcccagaucguaug

SEQ ID NO: 2972781 - RNA, 19 nt, Artificial Sequence
  Description of Artificial Sequence: Synthetic oligonucleotide
caacaggaugcaaagggaa

SEQ ID NO: 2972782 - RNA, 19 nt, Artificial Sequence
  Description of Artificial Sequence: Synthetic oligonucleotide
uuacugcuguaaauccaaa

SEQ ID NO: 2972783 - RNA, 19 nt, Artificial Sequence
  Description of Artificial Sequence: Synthetic oligonucleotide
cugcuuucugaagaacacc

SEQ ID NO: 2972784 - RNA, 19 nt, Artificial Sequence
  Description of Artificial Sequence: Synthetic oligonucleotide
gagauuuacacuugacauu

SEQ ID NO: 2972785 - RNA, 19 nt, Artificial Sequence
  Description of Artificial Sequence: Synthetic oligonucleotide
ugugguucucucacccauc

SEQ ID NO: 2972786 - RNA, 19 nt, Artificial Sequence
  Description of Artificial Sequence: Synthetic oligonucleotide
uuccaauggcuuugagaga

SEQ ID NO: 2972787 - RNA, 19 nt, Artificial Sequence
  Description of Artificial Sequence: Synthetic oligonucleotide
agucuacaccucugcuuuc

SEQ ID NO: 2972788 - RNA, 19 nt, Artificial Sequence
  Description of Artificial Sequence: Synthetic oligonucleotide
uccucuucauagagaacua

SEQ ID NO: 2972789 - RNA, 19 nt, Artificial Sequence
  Description of Artificial Sequence: Synthetic oligonucleotide
gaacaccaggcuauuucug

SEQ ID NO: 2972790 - RNA, 19 nt, Artificial Sequence
  Description of Artificial Sequence: Synthetic oligonucleotide
acaggagcacacacaacag

SEQ ID NO: 2972791 - RNA, 19 nt, Artificial Sequence
  Description of Artificial Sequence: Synthetic oligonucleotide
ugcaaagggaauggucacu

SEQ ID NO: 2972792 - RNA, 19 nt, Artificial Sequence
  Description of Artificial Sequence: Synthetic oligonucleotide
cucuucccauucagcaugc

SEQ ID NO: 2972793 - RNA, 19 nt, Artificial Sequence
  Description of Artificial Sequence: Synthetic oligonucleotide
cuccucuucauagagaacu

SEQ ID NO: 2972794 - RNA, 19 nt, Artificial Sequence
  Description of Artificial Sequence: Synthetic oligonucleotide
uggucacucuucccauuca

SEQ ID NO: 2972795 - RNA, 19 nt, Artificial Sequence
  Description of Artificial Sequence: Synthetic oligonucleotide
cgacauagauaaauuuagg

SEQ ID NO: 2972796 - RNA, 19 nt, Artificial Sequence
  Description of Artificial Sequence: Synthetic oligonucleotide
ggaaaugaccgacauagau

SEQ ID NO: 2972797 - RNA, 19 nt, Artificial Sequence
  Description of Artificial Sequence: Synthetic oligonucleotide
cugaagaacaccaggcuau

SEQ ID NO: 2972798 - RNA, 19 nt, Artificial Sequence
  Description of Artificial Sequence: Synthetic oligonucleotide
gugguucucucacccauca

SEQ ID NO: 2972799 - RNA, 19 nt, Artificial Sequence
  Description of Artificial Sequence: Synthetic oligonucleotide
ucccucagaauguguugcu

SEQ ID NO: 2972800 - RNA, 19 nt, Artificial Sequence
  Description of Artificial Sequence: Synthetic oligonucleotide
accucugcuuucugaagaa

SEQ ID NO: 2972801 - RNA, 19 nt, Artificial Sequence
  Description of Artificial Sequence: Synthetic oligonucleotide
agaucguaugugguucucu

SEQ ID NO: 2972802 - RNA, 19 nt, Artificial Sequence
  Description of Artificial Sequence: Synthetic oligonucleotide
auagagaacuaaagugaau

SEQ ID NO: 2972803 - RNA, 19 nt, Artificial Sequence
  Description of Artificial Sequence: Synthetic oligonucleotide
caccucugcuuucugaaga

SEQ ID NO: 2972804 - RNA, 19 nt, Artificial Sequence
  Description of Artificial Sequence: Synthetic oligonucleotide
gagaacuaaagugaauguu

SEQ ID NO: 2972805 - RNA, 19 nt, Artificial Sequence
  Description of Artificial Sequence: Synthetic oligonucleotide
gauuuacacuugacauuac

SEQ ID NO: 2972806 - RNA, 19 nt, Artificial Sequence
  Description of Artificial Sequence: Synthetic oligonucleotide
gaacuaaagugaauguuuu

SEQ ID NO: 2972807 - RNA, 19 nt, Artificial Sequence
  Description of Artificial Sequence: Synthetic oligonucleotide
gaccgacauagauaaauuu

SEQ ID NO: 2972808 - RNA, 19 nt, Artificial Sequence
  Description of Artificial Sequence: Synthetic oligonucleotide
cauucagcaugcaggccca

SEQ ID NO: 2972809 - RNA, 19 nt, Artificial Sequence
  Description of Artificial Sequence: Synthetic oligonucleotide
auaaacucuuaaaguuuaa

SEQ ID NO: 2972810 - RNA, 19 nt, Artificial Sequence
  Description of Artificial Sequence: Synthetic oligonucleotide
ggaguguuguuuuacuccu

SEQ ID NO: 2972811 - RNA, 19 nt, Artificial Sequence
  Description of Artificial Sequence: Synthetic oligonucleotide
cuacaccucugcuuucuga

SEQ ID NO: 2972812 - RNA, 19 nt, Artificial Sequence
  Description of Artificial Sequence: Synthetic oligonucleotide
acuccucuucauagagaac

SEQ ID NO: 2972813 - RNA, 19 nt, Artificial Sequence
  Description of Artificial Sequence: Synthetic oligonucleotide
agguccuacaugccagcau

SEQ ID NO: 2972814 - RNA, 19 nt, Artificial Sequence
  Description of Artificial Sequence: Synthetic oligonucleotide
uagguccuacaugccagca

SEQ ID NO: 2972815 - RNA, 19 nt, Artificial Sequence
  Description of Artificial Sequence: Synthetic oligonucleotide
uacaaucaggaguguuguu

SEQ ID NO: 2972816 - RNA, 19 nt, Artificial Sequence
  Description of Artificial Sequence: Synthetic oligonucleotide
ugaagaacaccaggcuauu

SEQ ID NO: 2972817 - RNA, 19 nt, Artificial Sequence
  Description of Artificial Sequence: Synthetic oligonucleotide
gaauggucacucuucccau

SEQ ID NO: 2972818 - RNA, 19 nt, Artificial Sequence
  Description of Artificial Sequence: Synthetic oligonucleotide
uucagcaugcaggcccaga

SEQ ID NO: 2972819 - RNA, 19 nt, Artificial Sequence
  Description of Artificial Sequence: Synthetic oligonucleotide
ggaugcaaagggaaugguc

SEQ ID NO: 2972820 - RNA, 19 nt, Artificial Sequence
  Description of Artificial Sequence: Synthetic oligonucleotide
uagauaaauuuagguccua

SEQ ID NO: 2972821 - RNA, 19 nt, Artificial Sequence
  Description of Artificial Sequence: Synthetic oligonucleotide
guggauggcuccucccuca

SEQ ID NO: 2972822 - RNA, 19 nt, Artificial Sequence
  Description of Artificial Sequence: Synthetic oligonucleotide
cucucacccaucaauuagu

SEQ ID NO: 2972823 - RNA, 19 nt, Artificial Sequence
  Description of Artificial Sequence: Synthetic oligonucleotide
gcuuugagagauuuacacu

SEQ ID NO: 2972824 - RNA, 19 nt, Artificial Sequence
  Description of Artificial Sequence: Synthetic oligonucleotide
gcaaagggaauggucacuc

SEQ ID NO: 2972825 - RNA, 19 nt, Artificial Sequence
  Description of Artificial Sequence: Synthetic oligonucleotide
gguucucucacccaucaau

SEQ ID NO: 2972826 - RNA, 19 nt, Artificial Sequence
  Description of Artificial Sequence: Synthetic oligonucleotide
aggaugcaaagggaauggu

SEQ ID NO: 2972827 - RNA, 19 nt, Artificial Sequence
  Description of Artificial Sequence: Synthetic oligonucleotide
gggaauggucacucuuccc

SEQ ID NO: 2972828 - RNA, 19 nt, Artificial Sequence
  Description of Artificial Sequence: Synthetic oligonucleotide
gcuuucugaagaacaccag

SEQ ID NO: 2972829 - RNA, 19 nt, Artificial Sequence
  Description of Artificial Sequence: Synthetic oligonucleotide
cuacaaucaggaguguugu

SEQ ID NO: 2972830 - RNA, 19 nt, Artificial Sequence
  Description of Artificial Sequence: Synthetic oligonucleotide
uccuacaugccagcauuuu

SEQ ID NO: 2972831 - RNA, 19 nt, Artificial Sequence
  Description of Artificial Sequence: Synthetic oligonucleotide
ugguucucucacccaucaa

SEQ ID NO: 2972832 - RNA, 19 nt, Artificial Sequence
  Description of Artificial Sequence: Synthetic oligonucleotide
cccaucaauuagucuacac

SEQ ID NO: 2972833 - RNA, 19 nt, Artificial Sequence
  Description of Artificial Sequence: Synthetic oligonucleotide
ccucagaauguguugcuga

SEQ ID NO: 2972834 - RNA, 19 nt, Artificial Sequence
  Description of Artificial Sequence: Synthetic oligonucleotide
cagcaugcaggcccagauc

SEQ ID NO: 2972835 - RNA, 19 nt, Artificial Sequence
  Description of Artificial Sequence: Synthetic oligonucleotide
aaugaccgacauagauaaa

SEQ ID NO: 2972836 - RNA, 19 nt, Artificial Sequence
  Description of Artificial Sequence: Synthetic oligonucleotide
gaguguuguuuuacuccuc

SEQ ID NO: 2972837 - RNA, 19 nt, Artificial Sequence
  Description of Artificial Sequence: Synthetic oligonucleotide
aggaaaugaccgacauaga

SEQ ID NO: 2972838 - RNA, 19 nt, Artificial Sequence
  Description of Artificial Sequence: Synthetic oligonucleotide
caggcccagaucguaugug

SEQ ID NO: 2972839 - RNA, 19 nt, Artificial Sequence
  Description of Artificial Sequence: Synthetic oligonucleotide
cguaugugguucucucacc

SEQ ID NO: 2972840 - RNA, 19 nt, Artificial Sequence
  Description of Artificial Sequence: Synthetic oligonucleotide
guguggauggcuccucccu

SEQ ID NO: 2972841 - RNA, 19 nt, Artificial Sequence
  Description of Artificial Sequence: Synthetic oligonucleotide
ucuucccauucagcaugca

SEQ ID NO: 2972842 - RNA, 19 nt, Artificial Sequence
  Description of Artificial Sequence: Synthetic oligonucleotide
auggcuccucccucagaau

SEQ ID NO: 2972843 - RNA, 19 nt, Artificial Sequence
  Description of Artificial Sequence: Synthetic oligonucleotide
ccucccucagaauguguug

SEQ ID NO: 2972844 - RNA, 19 nt, Artificial Sequence
  Description of Artificial Sequence: Synthetic oligonucleotide
acuugacauuacugcugua

SEQ ID NO: 2972845 - RNA, 19 nt, Artificial Sequence
  Description of Artificial Sequence: Synthetic oligonucleotide
guucucucacccaucaauu

SEQ ID NO: 2972846 - RNA, 19 nt, Artificial Sequence
  Description of Artificial Sequence: Synthetic oligonucleotide
ggguguggauggcuccucc

SEQ ID NO: 2972847 - RNA, 19 nt, Artificial Sequence
  Description of Artificial Sequence: Synthetic oligonucleotide
gguccuacaugccagcauu

SEQ ID NO: 2972848 - RNA, 19 nt, Artificial Sequence
  Description of Artificial Sequence: Synthetic oligonucleotide
acccaucaauuagucuaca

SEQ ID NO: 2972849 - RNA, 19 nt, Artificial Sequence
  Description of Artificial Sequence: Synthetic oligonucleotide
cucacccaucaauuagucu

SEQ ID NO: 2972850 - RNA, 19 nt, Artificial Sequence
  Description of Artificial Sequence: Synthetic oligonucleotide
cagaucguaugugguucuc

SEQ ID NO: 2972851 - RNA, 19 nt, Artificial Sequence
  Description of Artificial Sequence: Synthetic oligonucleotide
auucagcaugcaggcccag

SEQ ID NO: 2972852 - RNA, 19 nt, Artificial Sequence
  Description of Artificial Sequence: Synthetic oligonucleotide
acacuacaaucaggagugu

SEQ ID NO: 2972853 - RNA, 19 nt, Artificial Sequence
  Description of Artificial Sequence: Synthetic oligonucleotide
caaagggaauggucacucu

SEQ ID NO: 2972854 - RNA, 19 nt, Artificial Sequence
  Description of Artificial Sequence: Synthetic oligonucleotide
gucuacaccucugcuuucu

SEQ ID NO: 2972855 - RNA, 19 nt, Artificial Sequence
  Description of Artificial Sequence: Synthetic oligonucleotide
cacucuucccauucagcau

SEQ ID NO: 2972856 - RNA, 19 nt, Artificial Sequence
  Description of Artificial Sequence: Synthetic oligonucleotide
caugcaggcccagaucgua

SEQ ID NO: 2972857 - RNA, 19 nt, Artificial Sequence
  Description of Artificial Sequence: Synthetic oligonucleotide
augcaggcccagaucguau

SEQ ID NO: 2972858 - RNA, 19 nt, Artificial Sequence
  Description of Artificial Sequence: Synthetic oligonucleotide
caauggcuuugagagauuu

SEQ ID NO: 2972859 - RNA, 19 nt, Artificial Sequence
  Description of Artificial Sequence: Synthetic oligonucleotide
gaagaacaccaggcuauuu

SEQ ID NO: 2972860 - RNA, 19 nt, Artificial Sequence
  Description of Artificial Sequence: Synthetic oligonucleotide
gcuccucccucagaaugug

SEQ ID NO: 2972861 - RNA, 19 nt, Artificial Sequence
  Description of Artificial Sequence: Synthetic oligonucleotide
cacacacaacaggaugcaa

SEQ ID NO: 2972862 - RNA, 19 nt, Artificial Sequence
  Description of Artificial Sequence: Synthetic oligonucleotide
cccucagaauguguugcug

SEQ ID NO: 2972863 - RNA, 19 nt, Artificial Sequence
  Description of Artificial Sequence: Synthetic oligonucleotide
guguuguuuuacuccucuu

SEQ ID NO: 2972864 - RNA, 19 nt, Artificial Sequence
  Description of Artificial Sequence: Synthetic oligonucleotide
ccucugcuuucugaagaac

SEQ ID NO: 2972865 - RNA, 19 nt, Artificial Sequence
  Description of Artificial Sequence: Synthetic oligonucleotide
cacuacaaucaggaguguu

SEQ ID NO: 2972866 - RNA, 19 nt, Artificial Sequence
  Description of Artificial Sequence: Synthetic oligonucleotide
ggauggcuccucccucaga

SEQ ID NO: 2972867 - RNA, 19 nt, Artificial Sequence
  Description of Artificial Sequence: Synthetic oligonucleotide
ggagcacacacaacaggau

SEQ ID NO: 2972868 - RNA, 19 nt, Artificial Sequence
  Description of Artificial Sequence: Synthetic oligonucleotide
ccucuucauagagaacuaa

SEQ ID NO: 2972869 - RNA, 19 nt, Artificial Sequence
  Description of Artificial Sequence: Synthetic oligonucleotide
gcaggcccagaucguaugu

SEQ ID NO: 2972870 - RNA, 19 nt, Artificial Sequence
  Description of Artificial Sequence: Synthetic oligonucleotide
ggcuccucccucagaaugu

SEQ ID NO: 2972871 - RNA, 19 nt, Artificial Sequence
  Description of Artificial Sequence: Synthetic oligonucleotide
cuccucccucagaaugugu

SEQ ID NO: 2972872 - RNA, 19 nt, Artificial Sequence
  Description of Artificial Sequence: Synthetic oligonucleotide
ccagaucguaugugguucu

SEQ ID NO: 2972873 - RNA, 19 nt, Artificial Sequence
  Description of Artificial Sequence: Synthetic oligonucleotide
gcccagaucguaugugguu

SEQ ID NO: 2972874 - RNA, 19 nt, Artificial Sequence
  Description of Artificial Sequence: Synthetic oligonucleotide
ggcccagaucguauguggu

SEQ ID NO: 2972875 - RNA, 19 nt, Artificial Sequence
  Description of Artificial Sequence: Synthetic oligonucleotide
gggguguggauggcuccuc

SEQ ID NO: 2972876 - RNA, 19 nt, Artificial Sequence
  Description of Artificial Sequence: Synthetic oligonucleotide
ccaauggcuuugagagauu

SEQ ID NO: 2972877 - RNA, 19 nt, Artificial Sequence
  Description of Artificial Sequence: Synthetic oligonucleotide
auauacuccaaacagagcc

SEQ ID NO: 2972878 - RNA, 19 nt, Artificial Sequence
  Description of Artificial Sequence: Synthetic oligonucleotide
aaacauucugcuuccaacc

SEQ ID NO: 2972879 - RNA, 19 nt, Artificial Sequence
  Description of Artificial Sequence: Synthetic oligonucleotide
ugucauauacuccaaacag

SEQ ID NO: 2972880 - RNA, 19 nt, Artificial Sequence
  Description of Artificial Sequence: Synthetic oligonucleotide
ucauauacuccaaacagag

SEQ ID NO: 2972881 - RNA, 19 nt, Artificial Sequence
  Description of Artificial Sequence: Synthetic oligonucleotide
aaaguguuuguagagauag

SEQ ID NO: 2972882 - RNA, 19 nt, Artificial Sequence
  Description of Artificial Sequence: Synthetic oligonucleotide
uccucuuucggauacaacg

SEQ ID NO: 2972883 - RNA, 19 nt, Artificial Sequence
  Description of Artificial Sequence: Synthetic oligonucleotide
gauauugucauauacucca

SEQ ID NO: 2972884 - RNA, 19 nt, Artificial Sequence
  Description of Artificial Sequence: Synthetic oligonucleotide
auucauuuccucuccagcc

SEQ ID NO: 2972885 - RNA, 19 nt, Artificial Sequence
  Description of Artificial Sequence: Synthetic oligonucleotide
auugucauauacuccaaac

SEQ ID NO: 2972886 - RNA, 19 nt, Artificial Sequence
  Description of Artificial Sequence: Synthetic oligonucleotide
uuuguuaagguugugcagg

SEQ ID NO: 2972887 - RNA, 19 nt, Artificial Sequence
  Description of Artificial Sequence: Synthetic oligonucleotide
uguuuguagagauaguuga

SEQ ID NO: 2972888 - RNA, 19 nt, Artificial Sequence
  Description of Artificial Sequence: Synthetic oligonucleotide
aaacagagcccucuucucg

SEQ ID NO: 2972889 - RNA, 19 nt, Artificial Sequence
  Description of Artificial Sequence: Synthetic oligonucleotide
uuguagagauaguugaucc

SEQ ID NO: 2972890 - RNA, 19 nt, Artificial Sequence
  Description of Artificial Sequence: Synthetic oligonucleotide
uguaauucauuuccucucc

SEQ ID NO: 2972891 - RNA, 19 nt, Artificial Sequence
  Description of Artificial Sequence: Synthetic oligonucleotide
ugcgagaagcuucugaagc

SEQ ID NO: 2972892 - RNA, 19 nt, Artificial Sequence
  Description of Artificial Sequence: Synthetic oligonucleotide
uguagagauaguugauccg

SEQ ID NO: 2972893 - RNA, 19 nt, Artificial Sequence
  Description of Artificial Sequence: Synthetic oligonucleotide
auuacacuagcgccugucc

SEQ ID NO: 2972894 - RNA, 19 nt, Artificial Sequence
  Description of Artificial Sequence: Synthetic oligonucleotide
ucugcuuccaaccauucuc

SEQ ID NO: 2972895 - RNA, 19 nt, Artificial Sequence
  Description of Artificial Sequence: Synthetic oligonucleotide
uucuuuugggugcuuuucg

SEQ ID NO: 2972896 - RNA, 19 nt, Artificial Sequence
  Description of Artificial Sequence: Synthetic oligonucleotide
ucaucggcaaacauucugc

SEQ ID NO: 2972897 - RNA, 19 nt, Artificial Sequence
  Description of Artificial Sequence: Synthetic oligonucleotide
uuaaaguguuuguagagau

SEQ ID NO: 2972898 - RNA, 19 nt, Artificial Sequence
  Description of Artificial Sequence: Synthetic oligonucleotide
ucggcaaacauucugcuuc

SEQ ID NO: 2972899 - RNA, 19 nt, Artificial Sequence
  Description of Artificial Sequence: Synthetic oligonucleotide
gauacaacgcuguaauuca

SEQ ID NO: 2972900 - RNA, 19 nt, Artificial Sequence
  Description of Artificial Sequence: Synthetic oligonucleotide
uccgauauugucauauacu

SEQ ID NO: 2972901 - RNA, 19 nt, Artificial Sequence
  Description of Artificial Sequence: Synthetic oligonucleotide
aagguugugcaggucaucg

SEQ ID NO: 2972902 - RNA, 19 nt, Artificial Sequence
  Description of Artificial Sequence: Synthetic oligonucleotide
uuuucgaaauuccccagga

SEQ ID NO: 2972903 - RNA, 19 nt, Artificial Sequence
  Description of Artificial Sequence: Synthetic oligonucleotide
aaccauucuccucuuucgg

SEQ ID NO: 2972904 - RNA, 19 nt, Artificial Sequence
  Description of Artificial Sequence: Synthetic oligonucleotide
uauacuccaaacagagccc

SEQ ID NO: 2972905 - RNA, 19 nt, Artificial Sequence
  Description of Artificial Sequence: Synthetic oligonucleotide
cugaagcucgccaagggcg

SEQ ID NO: 2972906 - RNA, 19 nt, Artificial Sequence
  Description of Artificial Sequence: Synthetic oligonucleotide
ucgaaauuccccaggauuc

SEQ ID NO: 2972907 - RNA, 19 nt, Artificial Sequence
  Description of Artificial Sequence: Synthetic oligonucleotide
gauccguuuguuaagguug

SEQ ID NO: 2972908 - RNA, 19 nt, Artificial Sequence
  Description of Artificial Sequence: Synthetic oligonucleotide
ugcuuuucgaaauucccca

SEQ ID NO: 2972909 - RNA, 19 nt, Artificial Sequence
  Description of Artificial Sequence: Synthetic oligonucleotide
gaucaguucuuuugggugc

SEQ ID NO: 2972910 - RNA, 19 nt, Artificial Sequence
  Description of Artificial Sequence: Synthetic oligonucleotide
ucccaugccgguuaaagug

SEQ ID NO: 2972911 - RNA, 19 nt, Artificial Sequence
  Description of Artificial Sequence: Synthetic oligonucleotide
cucgaagccacacugggcc

SEQ ID NO: 2972912 - RNA, 19 nt, Artificial Sequence
  Description of Artificial Sequence: Synthetic oligonucleotide
uucgaaauuccccaggauu

SEQ ID NO: 2972913 - RNA, 19 nt, Artificial Sequence
  Description of Artificial Sequence: Synthetic oligonucleotide
caaacauucugcuuccaac

SEQ ID NO: 2972914 - RNA, 19 nt, Artificial Sequence
  Description of Artificial Sequence: Synthetic oligonucleotide
ucggauacaacgcuguaau

SEQ ID NO: 2972915 - RNA, 19 nt, Artificial Sequence
  Description of Artificial Sequence: Synthetic oligonucleotide
cuugaucaguucuuuuggg

SEQ ID NO: 2972916 - RNA, 19 nt, Artificial Sequence
  Description of Artificial Sequence: Synthetic oligonucleotide
gagauaguugauccguuug

SEQ ID NO: 2972917 - RNA, 19 nt, Artificial Sequence
  Description of Artificial Sequence: Synthetic oligonucleotide
uuccgauauugucauauac

SEQ ID NO: 2972918 - RNA, 19 nt, Artificial Sequence
  Description of Artificial Sequence: Synthetic oligonucleotide
guuaagguugugcagguca

SEQ ID NO: 2972919 - RNA, 19 nt, Artificial Sequence
  Description of Artificial Sequence: Synthetic oligonucleotide
uucugaagcucgccaaggg

SEQ ID NO: 2972920 - RNA, 19 nt, Artificial Sequence
  Description of Artificial Sequence: Synthetic oligonucleotide
uaguugauccguuuguuaa

SEQ ID NO: 2972921 - RNA, 19 nt, Artificial Sequence
  Description of Artificial Sequence: Synthetic oligonucleotide
ggaagggugagccugacgc

SEQ ID NO: 2972922 - RNA, 19 nt, Artificial Sequence
  Description of Artificial Sequence: Synthetic oligonucleotide
aggucaucggcaaacauuc

SEQ ID NO: 2972923 - RNA, 19 nt, Artificial Sequence
  Description of Artificial Sequence: Synthetic oligonucleotide
auucuccucuuucggauac

SEQ ID NO: 2972924 - RNA, 19 nt, Artificial Sequence
  Description of Artificial Sequence: Synthetic oligonucleotide
cuuuucgaaauuccccagg

SEQ ID NO: 2972925 - RNA, 19 nt, Artificial Sequence
  Description of Artificial Sequence: Synthetic oligonucleotide
ucagcggggcagcaaaccg

SEQ ID NO: 2972926 - RNA, 19 nt, Artificial Sequence
  Description of Artificial Sequence: Synthetic oligonucleotide
ucuuucggauacaacgcug

SEQ ID NO: 2972927 - RNA, 19 nt, Artificial Sequence
  Description of Artificial Sequence: Synthetic oligonucleotide
guuuguuaagguugugcag

SEQ ID NO: 2972928 - RNA, 19 nt, Artificial Sequence
  Description of Artificial Sequence: Synthetic oligonucleotide
caaccauucuccucuuucg

SEQ ID NO: 2972929 - RNA, 19 nt, Artificial Sequence
  Description of Artificial Sequence: Synthetic oligonucleotide
gguuaaaguguuuguagag

SEQ ID NO: 2972930 - RNA, 19 nt, Artificial Sequence
  Description of Artificial Sequence: Synthetic oligonucleotide
uuuguagagauaguugauc

SEQ ID NO: 2972931 - RNA, 19 nt, Artificial Sequence
  Description of Artificial Sequence: Synthetic oligonucleotide
uugaucaguucuuuugggu

SEQ ID NO: 2972932 - RNA, 19 nt, Artificial Sequence
  Description of Artificial Sequence: Synthetic oligonucleotide
agauaguugauccguuugu

SEQ ID NO: 2972933 - RNA, 19 nt, Artificial Sequence
  Description of Artificial Sequence: Synthetic oligonucleotide
uucauuuccucuccagccu

SEQ ID NO: 2972934 - RNA, 19 nt, Artificial Sequence
  Description of Artificial Sequence: Synthetic oligonucleotide
aguugauccguuuguuaag

SEQ ID NO: 2972935 - RNA, 19 nt, Artificial Sequence
  Description of Artificial Sequence: Synthetic oligonucleotide
acaggcuccugcuugccac

SEQ ID NO: 2972936 - RNA, 19 nt, Artificial Sequence
  Description of Artificial Sequence: Synthetic oligonucleotide
cuguaauucauuuccucuc

SEQ ID NO: 2972937 - RNA, 19 nt, Artificial Sequence
  Description of Artificial Sequence: Synthetic oligonucleotide
aacagagcccucuucucgu

SEQ ID NO: 2972938 - RNA, 19 nt, Artificial Sequence
  Description of Artificial Sequence: Synthetic oligonucleotide
uuccccaggauuccgauau

SEQ ID NO: 2972939 - RNA, 19 nt, Artificial Sequence
  Description of Artificial Sequence: Synthetic oligonucleotide
guugauccguuuguuaagg

SEQ ID NO: 2972940 - RNA, 19 nt, Artificial Sequence
  Description of Artificial Sequence: Synthetic oligonucleotide
uccugcuugccacccaagg

SEQ ID NO: 2972941 - RNA, 19 nt, Artificial Sequence
  Description of Artificial Sequence: Synthetic oligonucleotide
uuacacuagcgccugucca

SEQ ID NO: 2972942 - RNA, 19 nt, Artificial Sequence
  Description of Artificial Sequence: Synthetic oligonucleotide
aagggugagccugacgcgg

SEQ ID NO: 2972943 - RNA, 19 nt, Artificial Sequence
  Description of Artificial Sequence: Synthetic oligonucleotide
uuuugggugcuuuucgaaa

SEQ ID NO: 2972944 - RNA, 19 nt, Artificial Sequence
  Description of Artificial Sequence: Synthetic oligonucleotide
uauugucauauacuccaaa

SEQ ID NO: 2972945 - RNA, 19 nt, Artificial Sequence
  Description of Artificial Sequence: Synthetic oligonucleotide
uuugggugcuuuucgaaau

SEQ ID NO: 2972946 - RNA, 19 nt, Artificial Sequence
  Description of Artificial Sequence: Synthetic oligonucleotide
agagcccucuucucguccc

SEQ ID NO: 2972947 - RNA, 19 nt, Artificial Sequence
  Description of Artificial Sequence: Synthetic oligonucleotide
ucuuuugggugcuuuucga

SEQ ID NO: 2972948 - RNA, 19 nt, Artificial Sequence
  Description of Artificial Sequence: Synthetic oligonucleotide
cauauacuccaaacagagc

SEQ ID NO: 2972949 - RNA, 19 nt, Artificial Sequence
  Description of Artificial Sequence: Synthetic oligonucleotide
ucagcagcgggacacccug

SEQ ID NO: 2972950 - RNA, 19 nt, Artificial Sequence
  Description of Artificial Sequence: Synthetic oligonucleotide
uccucuccagccucgaagc

SEQ ID NO: 2972951 - RNA, 19 nt, Artificial Sequence
  Description of Artificial Sequence: Synthetic oligonucleotide
aagcuucugaagcucgcca

SEQ ID NO: 2972952 - RNA, 19 nt, Artificial Sequence
  Description of Artificial Sequence: Synthetic oligonucleotide
cacacugggcccuugauca

SEQ ID NO: 2972953 - RNA, 19 nt, Artificial Sequence
  Description of Artificial Sequence: Synthetic oligonucleotide
gaagggugagccugacgcg

SEQ ID NO: 2972954 - RNA, 19 nt, Artificial Sequence
  Description of Artificial Sequence: Synthetic oligonucleotide
gucaucggcaaacauucug

SEQ ID NO: 2972955 - RNA, 19 nt, Artificial Sequence
  Description of Artificial Sequence: Synthetic oligonucleotide
caggauuccgauauuguca

SEQ ID NO: 2972956 - RNA, 19 nt, Artificial Sequence
  Description of Artificial Sequence: Synthetic oligonucleotide
aagacuccccgccauuaca

SEQ ID NO: 2972957 - RNA, 19 nt, Artificial Sequence
  Description of Artificial Sequence: Synthetic oligonucleotide
ugcuugccacccaaggaag

SEQ ID NO: 2972958 - RNA, 19 nt, Artificial Sequence
  Description of Artificial Sequence: Synthetic oligonucleotide
aguguuuguagagauaguu

SEQ ID NO: 2972959 - RNA, 19 nt, Artificial Sequence
  Description of Artificial Sequence: Synthetic oligonucleotide
gaaauuccccaggauuccg

SEQ ID NO: 2972960 - RNA, 19 nt, Artificial Sequence
  Description of Artificial Sequence: Synthetic oligonucleotide
cugcuuccaaccauucucc

SEQ ID NO: 2972961 - RNA, 19 nt, Artificial Sequence
  Description of Artificial Sequence: Synthetic oligonucleotide
aggauuccgauauugucau

SEQ ID NO: 2972962 - RNA, 19 nt, Artificial Sequence
  Description of Artificial Sequence: Synthetic oligonucleotide
uacacuagcgccuguccac

SEQ ID NO: 2972963 - RNA, 19 nt, Artificial Sequence
  Description of Artificial Sequence: Synthetic oligonucleotide
guuaaaguguuuguagaga

SEQ ID NO: 2972964 - RNA, 19 nt, Artificial Sequence
  Description of Artificial Sequence: Synthetic oligonucleotide
uuaagguugugcaggucau

SEQ ID NO: 2972965 - RNA, 19 nt, Artificial Sequence
  Description of Artificial Sequence: Synthetic oligonucleotide
acccaaggaagacuccccg

SEQ ID NO: 2972966 - RNA, 19 nt, Artificial Sequence
  Description of Artificial Sequence: Synthetic oligonucleotide
uaaaguguuuguagagaua

SEQ ID NO: 2972967 - RNA, 19 nt, Artificial Sequence
  Description of Artificial Sequence: Synthetic oligonucleotide
acaacgcuguaauucauuu

SEQ ID NO: 2972968 - RNA, 19 nt, Artificial Sequence
  Description of Artificial Sequence: Synthetic oligonucleotide
aauuccccaggauuccgau

SEQ ID NO: 2972969 - RNA, 19 nt, Artificial Sequence
  Description of Artificial Sequence: Synthetic oligonucleotide
ucuccagccucgaagccac

SEQ ID NO: 2972970 - RNA, 19 nt, Artificial Sequence
  Description of Artificial Sequence: Synthetic oligonucleotide
guguuuguagagauaguug

SEQ ID NO: 2972971 - RNA, 19 nt, Artificial Sequence
  Description of Artificial Sequence: Synthetic oligonucleotide
ggauacaacgcuguaauuc

SEQ ID NO: 2972972 - RNA, 19 nt, Artificial Sequence
  Description of Artificial Sequence: Synthetic oligonucleotide
uuguuaagguugugcaggu

SEQ ID NO: 2972973 - RNA, 19 nt, Artificial Sequence
  Description of Artificial Sequence: Synthetic oligonucleotide
ugauccguuuguuaagguu

SEQ ID NO: 2972974 - RNA, 19 nt, Artificial Sequence
  Description of Artificial Sequence: Synthetic oligonucleotide
cagcgauccaccacucugg

SEQ ID NO: 2972975 - RNA, 19 nt, Artificial Sequence
  Description of Artificial Sequence: Synthetic oligonucleotide
ccgauauugucauauacuc

SEQ ID NO: 2972976 - RNA, 19 nt, Artificial Sequence
  Description of Artificial Sequence: Synthetic oligonucleotide
cuucccaugccgguuaaag

SEQ ID NO: 2972977 - RNA, 19 nt, Artificial Sequence
  Description of Artificial Sequence: Synthetic oligonucleotide
auaguugauccguuuguua

SEQ ID NO: 2972978 - RNA, 19 nt, Artificial Sequence
  Description of Artificial Sequence: Synthetic oligonucleotide
ucauuuccucuccagccuc

SEQ ID NO: 2972979 - RNA, 19 nt, Artificial Sequence
  Description of Artificial Sequence: Synthetic oligonucleotide
cuucucgucccagcgaucc

SEQ ID NO: 2972980 - RNA, 19 nt, Artificial Sequence
  Description of Artificial Sequence: Synthetic oligonucleotide
ccuugaucaguucuuuugg

SEQ ID NO: 2972981 - RNA, 19 nt, Artificial Sequence
  Description of Artificial Sequence: Synthetic oligonucleotide
ugaagcucgccaagggcgu

SEQ ID NO: 2972982 - RNA, 19 nt, Artificial Sequence
  Description of Artificial Sequence: Synthetic oligonucleotide
ugccacccaaggaagacuc

SEQ ID NO: 2972983 - RNA, 19 nt, Artificial Sequence
  Description of Artificial Sequence: Synthetic oligonucleotide
aaggaagacuccccgccau

SEQ ID NO: 2972984 - RNA, 19 nt, Artificial Sequence
  Description of Artificial Sequence: Synthetic oligonucleotide
uuucgaaauuccccaggau

SEQ ID NO: 2972985 - RNA, 19 nt, Artificial Sequence
  Description of Artificial Sequence: Synthetic oligonucleotide
gugcuuuucgaaauucccc

SEQ ID NO: 2972986 - RNA, 19 nt, Artificial Sequence
  Description of Artificial Sequence: Synthetic oligonucleotide
gguugugcaggucaucggc

SEQ ID NO: 2972987 - RNA, 19 nt, Artificial Sequence
  Description of Artificial Sequence: Synthetic oligonucleotide
cucgccaagggcgucaggc

SEQ ID NO: 2972988 - RNA, 19 nt, Artificial Sequence
  Description of Artificial Sequence: Synthetic oligonucleotide
cuucugaagcucgccaagg

SEQ ID NO: 2972989 - RNA, 19 nt, Artificial Sequence
  Description of Artificial Sequence: Synthetic oligonucleotide
accauucuccucuuucgga

SEQ ID NO: 2972990 - RNA, 19 nt, Artificial Sequence
  Description of Artificial Sequence: Synthetic oligonucleotide
cauuuccucuccagccucg

SEQ ID NO: 2972991 - RNA, 19 nt, Artificial Sequence
  Description of Artificial Sequence: Synthetic oligonucleotide
agcgauccaccacucuggg

SEQ ID NO: 2972992 - RNA, 19 nt, Artificial Sequence
  Description of Artificial Sequence: Synthetic oligonucleotide
gucauauacuccaaacaga

SEQ ID NO: 2972993 - RNA, 19 nt, Artificial Sequence
  Description of Artificial Sequence: Synthetic oligonucleotide
acacuagcgccuguccacc

SEQ ID NO: 2972994 - RNA, 19 nt, Artificial Sequence
  Description of Artificial Sequence: Synthetic oligonucleotide
uacaacgcuguaauucauu

SEQ ID NO: 2972995 - RNA, 19 nt, Artificial Sequence
  Description of Artificial Sequence: Synthetic oligonucleotide
agguugugcaggucaucgg

SEQ ID NO: 2972996 - RNA, 19 nt, Artificial Sequence
  Description of Artificial Sequence: Synthetic oligonucleotide
gaagcuucugaagcucgcc

SEQ ID NO: 2972997 - RNA, 19 nt, Artificial Sequence
  Description of Artificial Sequence: Synthetic oligonucleotide
uucccaugccgguuaaagu

SEQ ID NO: 2972998 - RNA, 19 nt, Artificial Sequence
  Description of Artificial Sequence: Synthetic oligonucleotide
uccaaacagagcccucuuc

SEQ ID NO: 2972999 - RNA, 19 nt, Artificial Sequence
  Description of Artificial Sequence: Synthetic oligonucleotide
uucggauacaacgcuguaa

SEQ ID NO: 2973000 - RNA, 19 nt, Artificial Sequence
  Description of Artificial Sequence: Synthetic oligonucleotide
agacuccccgccauuacac

SEQ ID NO: 2973001 - RNA, 19 nt, Artificial Sequence
  Description of Artificial Sequence: Synthetic oligonucleotide
cuuccaaccauucuccucu

SEQ ID NO: 2973002 - RNA, 19 nt, Artificial Sequence
  Description of Artificial Sequence: Synthetic oligonucleotide
gauuccgauauugucauau

SEQ ID NO: 2973003 - RNA, 19 nt, Artificial Sequence
  Description of Artificial Sequence: Synthetic oligonucleotide
agagauaguugauccguuu

SEQ ID NO: 2973004 - RNA, 19 nt, Artificial Sequence
  Description of Artificial Sequence: Synthetic oligonucleotide
caaacagagcccucuucuc

SEQ ID NO: 2973005 - RNA, 19 nt, Artificial Sequence
  Description of Artificial Sequence: Synthetic oligonucleotide
ccgguuaaaguguuuguag

SEQ ID NO: 2973006 - RNA, 19 nt, Artificial Sequence
  Description of Artificial Sequence: Synthetic oligonucleotide
ggugcuuuucgaaauuccc

SEQ ID NO: 2973007 - RNA, 19 nt, Artificial Sequence
  Description of Artificial Sequence: Synthetic oligonucleotide
ccucuuucggauacaacgc

SEQ ID NO: 2973008 - RNA, 19 nt, Artificial Sequence
  Description of Artificial Sequence: Synthetic oligonucleotide
augccgguuaaaguguuug

SEQ ID NO: 2973009 - RNA, 19 nt, Artificial Sequence
  Description of Artificial Sequence: Synthetic oligonucleotide
auacuccaaacagagcccu

SEQ ID NO: 2973010 - RNA, 19 nt, Artificial Sequence
  Description of Artificial Sequence: Synthetic oligonucleotide
agcggggcagcaaaccggc

SEQ ID NO: 2973011 - RNA, 19 nt, Artificial Sequence
  Description of Artificial Sequence: Synthetic oligonucleotide
aaauuccccaggauuccga

SEQ ID NO: 2973012 - RNA, 19 nt, Artificial Sequence
  Description of Artificial Sequence: Synthetic oligonucleotide
uagagauaguugauccguu

SEQ ID NO: 2973013 - RNA, 19 nt, Artificial Sequence
  Description of Artificial Sequence: Synthetic oligonucleotide
acauucugcuuccaaccau

SEQ ID NO: 2973014 - RNA, 19 nt, Artificial Sequence
  Description of Artificial Sequence: Synthetic oligonucleotide
guaauucauuuccucucca

SEQ ID NO: 2973015 - RNA, 19 nt, Artificial Sequence
  Description of Artificial Sequence: Synthetic oligonucleotide
acuagcgccuguccaccuc

SEQ ID NO: 2973016 - RNA, 19 nt, Artificial Sequence
  Description of Artificial Sequence: Synthetic oligonucleotide
acacccugcgagaagcuuc

SEQ ID NO: 2973017 - RNA, 19 nt, Artificial Sequence
  Description of Artificial Sequence: Synthetic oligonucleotide
uugauccguuuguuaaggu

SEQ ID NO: 2973018 - RNA, 19 nt, Artificial Sequence
  Description of Artificial Sequence: Synthetic oligonucleotide
cugcgagaagcuucugaag

SEQ ID NO: 2973019 - RNA, 19 nt, Artificial Sequence
  Description of Artificial Sequence: Synthetic oligonucleotide
agggcgucaggccccacag

SEQ ID NO: 2973020 - RNA, 19 nt, Artificial Sequence
  Description of Artificial Sequence: Synthetic oligonucleotide
aagggcgucaggccccaca

SEQ ID NO: 2973021 - RNA, 19 nt, Artificial Sequence
  Description of Artificial Sequence: Synthetic oligonucleotide
gaagacuccccgccauuac

SEQ ID NO: 2973022 - RNA, 19 nt, Artificial Sequence
  Description of Artificial Sequence: Synthetic oligonucleotide
gacgcgggucagcagcggg

SEQ ID NO: 2973023 - RNA, 19 nt, Artificial Sequence
  Description of Artificial Sequence: Synthetic oligonucleotide
cuccccgccauuacacuag

SEQ ID NO: 2973024 - RNA, 19 nt, Artificial Sequence
  Description of Artificial Sequence: Synthetic oligonucleotide
guagagauaguugauccgu

SEQ ID NO: 2973025 - RNA, 19 nt, Artificial Sequence
  Description of Artificial Sequence: Synthetic oligonucleotide
uugugcaggucaucggcaa

SEQ ID NO: 2973026 - RNA, 19 nt, Artificial Sequence
  Description of Artificial Sequence: Synthetic oligonucleotide
cacccaaggaagacucccc

SEQ ID NO: 2973027 - RNA, 19 nt, Artificial Sequence
  Description of Artificial Sequence: Synthetic oligonucleotide
acuccaaacagagcccucu

SEQ ID NO: 2973028 - RNA, 19 nt, Artificial Sequence
  Description of Artificial Sequence: Synthetic oligonucleotide
cagccucgaagccacacug

SEQ ID NO: 2973029 - RNA, 19 nt, Artificial Sequence
  Description of Artificial Sequence: Synthetic oligonucleotide
cagcggggcagcaaaccgg

SEQ ID NO: 2973030 - RNA, 19 nt, Artificial Sequence
  Description of Artificial Sequence: Synthetic oligonucleotide
acagagcccucuucucguc

SEQ ID NO: 2973031 - RNA, 19 nt, Artificial Sequence
  Description of Artificial Sequence: Synthetic oligonucleotide
caacgcuguaauucauuuc

SEQ ID NO: 2973032 - RNA, 19 nt, Artificial Sequence
  Description of Artificial Sequence: Synthetic oligonucleotide
cagcgggacacccugcgag

SEQ ID NO: 2973033 - RNA, 19 nt, Artificial Sequence
  Description of Artificial Sequence: Synthetic oligonucleotide
cugacgcgggucagcagcg

SEQ ID NO: 2973034 - RNA, 19 nt, Artificial Sequence
  Description of Artificial Sequence: Synthetic oligonucleotide
uuucggauacaacgcugua

SEQ ID NO: 2973035 - RNA, 19 nt, Artificial Sequence
  Description of Artificial Sequence: Synthetic oligonucleotide
ugccgguuaaaguguuugu

SEQ ID NO: 2973036 - RNA, 19 nt, Artificial Sequence
  Description of Artificial Sequence: Synthetic oligonucleotide
cuugccacccaaggaagac

SEQ ID NO: 2973037 - RNA, 19 nt, Artificial Sequence
  Description of Artificial Sequence: Synthetic oligonucleotide
ggcgucaggccccacaggc

SEQ ID NO: 2973038 - RNA, 19 nt, Artificial Sequence
  Description of Artificial Sequence: Synthetic oligonucleotide
ccaaggaagacuccccgcc

SEQ ID NO: 2973039 - RNA, 19 nt, Artificial Sequence
  Description of Artificial Sequence: Synthetic oligonucleotide
aggccccacaggcuccugc

SEQ ID NO: 2973040 - RNA, 19 nt, Artificial Sequence
  Description of Artificial Sequence: Synthetic oligonucleotide
gcgccuguccaccucagcg

SEQ ID NO: 2973041 - RNA, 19 nt, Artificial Sequence
  Description of Artificial Sequence: Synthetic oligonucleotide
auucugcuuccaaccauuc

SEQ ID NO: 2973042 - RNA, 19 nt, Artificial Sequence
  Description of Artificial Sequence: Synthetic oligonucleotide
cccuugaucaguucuuuug

SEQ ID NO: 2973043 - RNA, 19 nt, Artificial Sequence
  Description of Artificial Sequence: Synthetic oligonucleotide
ucgccaagggcgucaggcc

SEQ ID NO: 2973044 - RNA, 19 nt, Artificial Sequence
  Description of Artificial Sequence: Synthetic oligonucleotide
cauuacacuagcgccuguc

SEQ ID NO: 2973045 - RNA, 19 nt, Artificial Sequence
  Description of Artificial Sequence: Synthetic oligonucleotide
cgauauugucauauacucc

SEQ ID NO: 2973046 - RNA, 19 nt, Artificial Sequence
  Description of Artificial Sequence: Synthetic oligonucleotide
gcuuuucgaaauuccccag

SEQ ID NO: 2973047 - RNA, 19 nt, Artificial Sequence
  Description of Artificial Sequence: Synthetic oligonucleotide
cuuuugggugcuuuucgaa

SEQ ID NO: 2973048 - RNA, 19 nt, Artificial Sequence
  Description of Artificial Sequence: Synthetic oligonucleotide
cugcuugccacccaaggaa

SEQ ID NO: 2973049 - RNA, 19 nt, Artificial Sequence
  Description of Artificial Sequence: Synthetic oligonucleotide
cccgccauuacacuagcgc

SEQ ID NO: 2973050 - RNA, 19 nt, Artificial Sequence
  Description of Artificial Sequence: Synthetic oligonucleotide
ugugcaggucaucggcaaa

SEQ ID NO: 2973051 - RNA, 19 nt, Artificial Sequence
  Description of Artificial Sequence: Synthetic oligonucleotide
guucuuuugggugcuuuuc

SEQ ID NO: 2973052 - RNA, 19 nt, Artificial Sequence
  Description of Artificial Sequence: Synthetic oligonucleotide
aaguguuuguagagauagu

SEQ ID NO: 2973053 - RNA, 19 nt, Artificial Sequence
  Description of Artificial Sequence: Synthetic oligonucleotide
ucuccucuuucggauacaa

SEQ ID NO: 2973054 - RNA, 19 nt, Artificial Sequence
  Description of Artificial Sequence: Synthetic oligonucleotide
gccucgaagccacacuggg

SEQ ID NO: 2973055 - RNA, 19 nt, Artificial Sequence
  Description of Artificial Sequence: Synthetic oligonucleotide
ccgccauuacacuagcgcc

SEQ ID NO: 2973056 - RNA, 19 nt, Artificial Sequence
  Description of Artificial Sequence: Synthetic oligonucleotide
uugggugcuuuucgaaauu

SEQ ID NO: 2973057 - RNA, 19 nt, Artificial Sequence
  Description of Artificial Sequence: Synthetic oligonucleotide
auuccgauauugucauaua

SEQ ID NO: 2973058 - RNA, 19 nt, Artificial Sequence
  Description of Artificial Sequence: Synthetic oligonucleotide
cuuucggauacaacgcugu

SEQ ID NO: 2973059 - RNA, 19 nt, Artificial Sequence
  Description of Artificial Sequence: Synthetic oligonucleotide
ugcuuccaaccauucuccu

SEQ ID NO: 2973060 - RNA, 19 nt, Artificial Sequence
  Description of Artificial Sequence: Synthetic oligonucleotide
ugggugcuuuucgaaauuc

SEQ ID NO: 2973061 - RNA, 19 nt, Artificial Sequence
  Description of Artificial Sequence: Synthetic oligonucleotide
ccugacgcgggucagcagc

SEQ ID NO: 2973062 - RNA, 19 nt, Artificial Sequence
  Description of Artificial Sequence: Synthetic oligonucleotide
ggggcagcaaaccggccgg

SEQ ID NO: 2973063 - RNA, 19 nt, Artificial Sequence
  Description of Artificial Sequence: Synthetic oligonucleotide
accucagcggggcagcaaa

SEQ ID NO: 2973064 - RNA, 19 nt, Artificial Sequence
  Description of Artificial Sequence: Synthetic oligonucleotide
ccaggauuccgauauuguc

SEQ ID NO: 2973065 - RNA, 19 nt, Artificial Sequence
  Description of Artificial Sequence: Synthetic oligonucleotide
aucggcaaacauucugcuu

SEQ ID NO: 2973066 - RNA, 19 nt, Artificial Sequence
  Description of Artificial Sequence: Synthetic oligonucleotide
cucagcggggcagcaaacc

SEQ ID NO: 2973067 - RNA, 19 nt, Artificial Sequence
  Description of Artificial Sequence: Synthetic oligonucleotide
cuguccaccucagcggggc

SEQ ID NO: 2973068 - RNA, 19 nt, Artificial Sequence
  Description of Artificial Sequence: Synthetic oligonucleotide
ccaaccauucuccucuuuc

SEQ ID NO: 2973069 - RNA, 19 nt, Artificial Sequence
  Description of Artificial Sequence: Synthetic oligonucleotide
uugccacccaaggaagacu

SEQ ID NO: 2973070 - RNA, 19 nt, Artificial Sequence
  Description of Artificial Sequence: Synthetic oligonucleotide
cagagcccucuucucgucc

SEQ ID NO: 2973071 - RNA, 19 nt, Artificial Sequence
  Description of Artificial Sequence: Synthetic oligonucleotide
uacuccaaacagagcccuc

SEQ ID NO: 2973072 - RNA, 19 nt, Artificial Sequence
  Description of Artificial Sequence: Synthetic oligonucleotide
cguuuguuaagguugugca

SEQ ID NO: 2973073 - RNA, 19 nt, Artificial Sequence
  Description of Artificial Sequence: Synthetic oligonucleotide
uccccgccauuacacuagc

SEQ ID NO: 2973074 - RNA, 19 nt, Artificial Sequence
  Description of Artificial Sequence: Synthetic oligonucleotide
cuccucuuucggauacaac

SEQ ID NO: 2973075 - RNA, 19 nt, Artificial Sequence
  Description of Artificial Sequence: Synthetic oligonucleotide
cagcaaaccggccggaaaa

SEQ ID NO: 2973076 - RNA, 19 nt, Artificial Sequence
  Description of Artificial Sequence: Synthetic oligonucleotide
uguuaagguugugcagguc

SEQ ID NO: 2973077 - RNA, 19 nt, Artificial Sequence
  Description of Artificial Sequence: Synthetic oligonucleotide
gugcaggucaucggcaaac

SEQ ID NO: 2973078 - RNA, 19 nt, Artificial Sequence
  Description of Artificial Sequence: Synthetic oligonucleotide
ccagcgauccaccacucug

SEQ ID NO: 2973079 - RNA, 19 nt, Artificial Sequence
  Description of Artificial Sequence: Synthetic oligonucleotide
auccguuuguuaagguugu

SEQ ID NO: 2973080 - RNA, 19 nt, Artificial Sequence
  Description of Artificial Sequence: Synthetic oligonucleotide
uuuccucuccagccucgaa

SEQ ID NO: 2973081 - RNA, 19 nt, Artificial Sequence
  Description of Artificial Sequence: Synthetic oligonucleotide
uucucgucccagcgaucca

SEQ ID NO: 2973082 - RNA, 19 nt, Artificial Sequence
  Description of Artificial Sequence: Synthetic oligonucleotide
acuccccgccauuacacua

SEQ ID NO: 2973083 - RNA, 19 nt, Artificial Sequence
  Description of Artificial Sequence: Synthetic oligonucleotide
gccuguccaccucagcggg

SEQ ID NO: 2973084 - RNA, 19 nt, Artificial Sequence
  Description of Artificial Sequence: Synthetic oligonucleotide
guugugcaggucaucggca

SEQ ID NO: 2973085 - RNA, 19 nt, Artificial Sequence
  Description of Artificial Sequence: Synthetic oligonucleotide
gggacacccugcgagaagc

SEQ ID NO: 2973086 - RNA, 19 nt, Artificial Sequence
  Description of Artificial Sequence: Synthetic oligonucleotide
auauugucauauacuccaa

SEQ ID NO: 2973087 - RNA, 19 nt, Artificial Sequence
  Description of Artificial Sequence: Synthetic oligonucleotide
ccguuuguuaagguugugc

SEQ ID NO: 2973088 - RNA, 19 nt, Artificial Sequence
  Description of Artificial Sequence: Synthetic oligonucleotide
uaagguugugcaggucauc

SEQ ID NO: 2973089 - RNA, 19 nt, Artificial Sequence
  Description of Artificial Sequence: Synthetic oligonucleotide
ugagccugacgcgggucag

SEQ ID NO: 2973090 - RNA, 19 nt, Artificial Sequence
  Description of Artificial Sequence: Synthetic oligonucleotide
agcgggacacccugcgaga

SEQ ID NO: 2973091 - RNA, 19 nt, Artificial Sequence
  Description of Artificial Sequence: Synthetic oligonucleotide
uccaccucagcggggcagc

SEQ ID NO: 2973092 - RNA, 19 nt, Artificial Sequence
  Description of Artificial Sequence: Synthetic oligonucleotide
agccucgaagccacacugg

SEQ ID NO: 2973093 - RNA, 19 nt, Artificial Sequence
  Description of Artificial Sequence: Synthetic oligonucleotide
uccagccucgaagccacac

SEQ ID NO: 2973094 - RNA, 19 nt, Artificial Sequence
  Description of Artificial Sequence: Synthetic oligonucleotide
ucuucucgucccagcgauc

SEQ ID NO: 2973095 - RNA, 19 nt, Artificial Sequence
  Description of Artificial Sequence: Synthetic oligonucleotide
aggcuccugcuugccaccc

SEQ ID NO: 2973096 - RNA, 19 nt, Artificial Sequence
  Description of Artificial Sequence: Synthetic oligonucleotide
caaggaagacuccccgcca

SEQ ID NO: 2973097 - RNA, 19 nt, Artificial Sequence
  Description of Artificial Sequence: Synthetic oligonucleotide
gauaguugauccguuuguu

SEQ ID NO: 2973098 - RNA, 19 nt, Artificial Sequence
  Description of Artificial Sequence: Synthetic oligonucleotide
gugagccugacgcggguca

SEQ ID NO: 2973099 - RNA, 19 nt, Artificial Sequence
  Description of Artificial Sequence: Synthetic oligonucleotide
caggcuccugcuugccacc

SEQ ID NO: 2973100 - RNA, 19 nt, Artificial Sequence
  Description of Artificial Sequence: Synthetic oligonucleotide
ucgucccagcgauccacca

SEQ ID NO: 2973101 - RNA, 19 nt, Artificial Sequence
  Description of Artificial Sequence: Synthetic oligonucleotide
aagcucgccaagggcguca

SEQ ID NO: 2973102 - RNA, 19 nt, Artificial Sequence
  Description of Artificial Sequence: Synthetic oligonucleotide
cuagcgccuguccaccuca

SEQ ID NO: 2973103 - RNA, 19 nt, Artificial Sequence
  Description of Artificial Sequence: Synthetic oligonucleotide
uccguuuguuaagguugug

SEQ ID NO: 2973104 - RNA, 19 nt, Artificial Sequence
  Description of Artificial Sequence: Synthetic oligonucleotide
gucccagcgauccaccacu

SEQ ID NO: 2973105 - RNA, 19 nt, Artificial Sequence
  Description of Artificial Sequence: Synthetic oligonucleotide
uagcgccuguccaccucag

SEQ ID NO: 2973106 - RNA, 19 nt, Artificial Sequence
  Description of Artificial Sequence: Synthetic oligonucleotide
cccucuucucgucccagcg

SEQ ID NO: 2973107 - RNA, 19 nt, Artificial Sequence
  Description of Artificial Sequence: Synthetic oligonucleotide
auuccccaggauuccgaua

SEQ ID NO: 2973108 - RNA, 19 nt, Artificial Sequence
  Description of Artificial Sequence: Synthetic oligonucleotide
uguccaccucagcggggca

SEQ ID NO: 2973109 - RNA, 19 nt, Artificial Sequence
  Description of Artificial Sequence: Synthetic oligonucleotide
uccaaccauucuccucuuu

SEQ ID NO: 2973110 - RNA, 19 nt, Artificial Sequence
  Description of Artificial Sequence: Synthetic oligonucleotide
agggugagccugacgcggg

SEQ ID NO: 2973111 - RNA, 19 nt, Artificial Sequence
  Description of Artificial Sequence: Synthetic oligonucleotide
uucuccucuuucggauaca

SEQ ID NO: 2973112 - RNA, 19 nt, Artificial Sequence
  Description of Artificial Sequence: Synthetic oligonucleotide
ugacgcgggucagcagcgg

SEQ ID NO: 2973113 - RNA, 19 nt, Artificial Sequence
  Description of Artificial Sequence: Synthetic oligonucleotide
auacaacgcuguaauucau

SEQ ID NO: 2973114 - RNA, 19 nt, Artificial Sequence
  Description of Artificial Sequence: Synthetic oligonucleotide
caggucaucggcaaacauu

SEQ ID NO: 2973115 - RNA, 19 nt, Artificial Sequence
  Description of Artificial Sequence: Synthetic oligonucleotide
cauucugcuuccaaccauu

SEQ ID NO: 2973116 - RNA, 19 nt, Artificial Sequence
  Description of Artificial Sequence: Synthetic oligonucleotide
cuccugcuugccacccaag

SEQ ID NO: 2973117 - RNA, 19 nt, Artificial Sequence
  Description of Artificial Sequence: Synthetic oligonucleotide
cucuccagccucgaagcca

SEQ ID NO: 2973118 - RNA, 19 nt, Artificial Sequence
  Description of Artificial Sequence: Synthetic oligonucleotide
auuuccucuccagccucga

SEQ ID NO: 2973119 - RNA, 19 nt, Artificial Sequence
  Description of Artificial Sequence: Synthetic oligonucleotide
cauucuccucuuucggaua

SEQ ID NO: 2973120 - RNA, 19 nt, Artificial Sequence
  Description of Artificial Sequence: Synthetic oligonucleotide
guuuguagagauaguugau

SEQ ID NO: 2973121 - RNA, 19 nt, Artificial Sequence
  Description of Artificial Sequence: Synthetic oligonucleotide
cccaaggaagacuccccgc

SEQ ID NO: 2973122 - RNA, 19 nt, Artificial Sequence
  Description of Artificial Sequence: Synthetic oligonucleotide
ccugcgagaagcuucugaa

SEQ ID NO: 2973123 - RNA, 19 nt, Artificial Sequence
  Description of Artificial Sequence: Synthetic oligonucleotide
agccacacugggcccuuga

SEQ ID NO: 2973124 - RNA, 19 nt, Artificial Sequence
  Description of Artificial Sequence: Synthetic oligonucleotide
ccacccaaggaagacuccc

SEQ ID NO: 2973125 - RNA, 19 nt, Artificial Sequence
  Description of Artificial Sequence: Synthetic oligonucleotide
aggaagacuccccgccauu

SEQ ID NO: 2973126 - RNA, 19 nt, Artificial Sequence
  Description of Artificial Sequence: Synthetic oligonucleotide
gccauuacacuagcgccug

SEQ ID NO: 2973127 - RNA, 19 nt, Artificial Sequence
  Description of Artificial Sequence: Synthetic oligonucleotide
caucggcaaacauucugcu

SEQ ID NO: 2973128 - RNA, 19 nt, Artificial Sequence
  Description of Artificial Sequence: Synthetic oligonucleotide
agccugacgcgggucagca

SEQ ID NO: 2973129 - RNA, 19 nt, Artificial Sequence
  Description of Artificial Sequence: Synthetic oligonucleotide
guccaccucagcggggcag

SEQ ID NO: 2973130 - RNA, 19 nt, Artificial Sequence
  Description of Artificial Sequence: Synthetic oligonucleotide
ucccagcgauccaccacuc

SEQ ID NO: 2973131 - RNA, 19 nt, Artificial Sequence
  Description of Artificial Sequence: Synthetic oligonucleotide
cgguuaaaguguuuguaga

SEQ ID NO: 2973132 - RNA, 19 nt, Artificial Sequence
  Description of Artificial Sequence: Synthetic oligonucleotide
gcgauccaccacucugggg

SEQ ID NO: 2973133 - RNA, 19 nt, Artificial Sequence
  Description of Artificial Sequence: Synthetic oligonucleotide
cucuucucgucccagcgau

SEQ ID NO: 2973134 - RNA, 19 nt, Artificial Sequence
  Description of Artificial Sequence: Synthetic oligonucleotide
cgaaauuccccaggauucc

SEQ ID NO: 2973135 - RNA, 19 nt, Artificial Sequence
  Description of Artificial Sequence: Synthetic oligonucleotide
uuccaaccauucuccucuu

SEQ ID NO: 2973136 - RNA, 19 nt, Artificial Sequence
  Description of Artificial Sequence: Synthetic oligonucleotide
ucaggccccacaggcuccu

SEQ ID NO: 2973137 - RNA, 19 nt, Artificial Sequence
  Description of Artificial Sequence: Synthetic oligonucleotide
gggcggaagggugagccug

SEQ ID NO: 2973138 - RNA, 19 nt, Artificial Sequence
  Description of Artificial Sequence: Synthetic oligonucleotide
gagccugacgcgggucagc

SEQ ID NO: 2973139 - RNA, 19 nt, Artificial Sequence
  Description of Artificial Sequence: Synthetic oligonucleotide
cggggcagcaaaccggccg

SEQ ID NO: 2973140 - RNA, 19 nt, Artificial Sequence
  Description of Artificial Sequence: Synthetic oligonucleotide
cccacaggcuccugcuugc

SEQ ID NO: 2973141 - RNA, 19 nt, Artificial Sequence
  Description of Artificial Sequence: Synthetic oligonucleotide
agcccucuucucgucccag

SEQ ID NO: 2973142 - RNA, 19 nt, Artificial Sequence
  Description of Artificial Sequence: Synthetic oligonucleotide
ccacacugggcccuugauc

SEQ ID NO: 2973143 - RNA, 19 nt, Artificial Sequence
  Description of Artificial Sequence: Synthetic oligonucleotide
gacuccccgccauuacacu

SEQ ID NO: 2973144 - RNA, 19 nt, Artificial Sequence
  Description of Artificial Sequence: Synthetic oligonucleotide
cgccuguccaccucagcgg

SEQ ID NO: 2973145 - RNA, 19 nt, Artificial Sequence
  Description of Artificial Sequence: Synthetic oligonucleotide
gcgagaagcuucugaagcu

SEQ ID NO: 2973146 - RNA, 19 nt, Artificial Sequence
  Description of Artificial Sequence: Synthetic oligonucleotide
gaagcucgccaagggcguc

SEQ ID NO: 2973147 - RNA, 19 nt, Artificial Sequence
  Description of Artificial Sequence: Synthetic oligonucleotide
agcucgccaagggcgucag

SEQ ID NO: 2973148 - RNA, 19 nt, Artificial Sequence
  Description of Artificial Sequence: Synthetic oligonucleotide
gagcccucuucucguccca

SEQ ID NO: 2973149 - RNA, 19 nt, Artificial Sequence
  Description of Artificial Sequence: Synthetic oligonucleotide
cggcaaacauucugcuucc

SEQ ID NO: 2973150 - RNA, 19 nt, Artificial Sequence
  Description of Artificial Sequence: Synthetic oligonucleotide
ccugcuugccacccaagga

SEQ ID NO: 2973151 - RNA, 19 nt, Artificial Sequence
  Description of Artificial Sequence: Synthetic oligonucleotide
cacaggcuccugcuugcca

SEQ ID NO: 2973152 - RNA, 19 nt, Artificial Sequence
  Description of Artificial Sequence: Synthetic oligonucleotide
gcagcaaaccggccggaaa

SEQ ID NO: 2973153 - RNA, 19 nt, Artificial Sequence
  Description of Artificial Sequence: Synthetic oligonucleotide
ccccacaggcuccugcuug

SEQ ID NO: 2973154 - RNA, 19 nt, Artificial Sequence
  Description of Artificial Sequence: Synthetic oligonucleotide
ccccaggauuccgauauug

SEQ ID NO: 2973155 - RNA, 19 nt, Artificial Sequence
  Description of Artificial Sequence: Synthetic oligonucleotide
ggucagcagcgggacaccc

SEQ ID NO: 2973156 - RNA, 19 nt, Artificial Sequence
  Description of Artificial Sequence: Synthetic oligonucleotide
aagccacacugggcccuug

SEQ ID NO: 2973157 - RNA, 19 nt, Artificial Sequence
  Description of Artificial Sequence: Synthetic oligonucleotide
acugggcccuugaucaguu

SEQ ID NO: 2973158 - RNA, 19 nt, Artificial Sequence
  Description of Artificial Sequence: Synthetic oligonucleotide
cacccugcgagaagcuucu

SEQ ID NO: 2973159 - RNA, 19 nt, Artificial Sequence
  Description of Artificial Sequence: Synthetic oligonucleotide
gccgguuaaaguguuugua

SEQ ID NO: 2973160 - RNA, 19 nt, Artificial Sequence
  Description of Artificial Sequence: Synthetic oligonucleotide
cugggcccuugaucaguuc

SEQ ID NO: 2973161 - RNA, 19 nt, Artificial Sequence
  Description of Artificial Sequence: Synthetic oligonucleotide
ucaguucuuuugggugcuu

SEQ ID NO: 2973162 - RNA, 19 nt, Artificial Sequence
  Description of Artificial Sequence: Synthetic oligonucleotide
gggcgucaggccccacagg

SEQ ID NO: 2973163 - RNA, 19 nt, Artificial Sequence
  Description of Artificial Sequence: Synthetic oligonucleotide
acgcgggucagcagcggga

SEQ ID NO: 2973164 - RNA, 19 nt, Artificial Sequence
  Description of Artificial Sequence: Synthetic oligonucleotide
ccucuccagccucgaagcc

SEQ ID NO: 2973165 - RNA, 19 nt, Artificial Sequence
  Description of Artificial Sequence: Synthetic oligonucleotide
cgccaagggcgucaggccc

SEQ ID NO: 2973166 - RNA, 19 nt, Artificial Sequence
  Description of Artificial Sequence: Synthetic oligonucleotide
ggaagacuccccgccauua

SEQ ID NO: 2973167 - RNA, 19 nt, Artificial Sequence
  Description of Artificial Sequence: Synthetic oligonucleotide
gcuccugcuugccacccaa

SEQ ID NO: 2973168 - RNA, 19 nt, Artificial Sequence
  Description of Artificial Sequence: Synthetic oligonucleotide
ccauucuccucuuucggau

SEQ ID NO: 2973169 - RNA, 19 nt, Artificial Sequence
  Description of Artificial Sequence: Synthetic oligonucleotide
acuucccaugccgguuaaa

SEQ ID NO: 2973170 - RNA, 19 nt, Artificial Sequence
  Description of Artificial Sequence: Synthetic oligonucleotide
ccccgccauuacacuagcg

SEQ ID NO: 2973171 - RNA, 19 nt, Artificial Sequence
  Description of Artificial Sequence: Synthetic oligonucleotide
gcuugccacccaaggaaga

SEQ ID NO: 2973172 - RNA, 19 nt, Artificial Sequence
  Description of Artificial Sequence: Synthetic oligonucleotide
cgggucagcagcgggacac

SEQ ID NO: 2973173 - RNA, 19 nt, Artificial Sequence
  Description of Artificial Sequence: Synthetic oligonucleotide
cccugcgagaagcuucuga

SEQ ID NO: 2973174 - RNA, 19 nt, Artificial Sequence
  Description of Artificial Sequence: Synthetic oligonucleotide
ccucagcggggcagcaaac

SEQ ID NO: 2973175 - RNA, 19 nt, Artificial Sequence
  Description of Artificial Sequence: Synthetic oligonucleotide
gacacccugcgagaagcuu

SEQ ID NO: 2973176 - RNA, 19 nt, Artificial Sequence
  Description of Artificial Sequence: Synthetic oligonucleotide
cccaugccgguuaaagugu

SEQ ID NO: 2973177 - RNA, 19 nt, Artificial Sequence
  Description of Artificial Sequence: Synthetic oligonucleotide
gccacccaaggaagacucc

SEQ ID NO: 2973178 - RNA, 19 nt, Artificial Sequence
  Description of Artificial Sequence: Synthetic oligonucleotide
ggugagccugacgcggguc

SEQ ID NO: 2973179 - RNA, 19 nt, Artificial Sequence
  Description of Artificial Sequence: Synthetic oligonucleotide
cggaagggugagccugacg

SEQ ID NO: 2973180 - RNA, 19 nt, Artificial Sequence
  Description of Artificial Sequence: Synthetic oligonucleotide
gggucagcagcgggacacc

SEQ ID NO: 2973181 - RNA, 19 nt, Artificial Sequence
  Description of Artificial Sequence: Synthetic oligonucleotide
cccaggauuccgauauugu

SEQ ID NO: 2973182 - RNA, 19 nt, Artificial Sequence
  Description of Artificial Sequence: Synthetic oligonucleotide
ccucuucucgucccagcga

SEQ ID NO: 2973183 - RNA, 19 nt, Artificial Sequence
  Description of Artificial Sequence: Synthetic oligonucleotide
cgucccagcgauccaccac

SEQ ID NO: 2973184 - RNA, 19 nt, Artificial Sequence
  Description of Artificial Sequence: Synthetic oligonucleotide
gccugacgcgggucagcag

SEQ ID NO: 2973185 - RNA, 19 nt, Artificial Sequence
  Description of Artificial Sequence: Synthetic oligonucleotide
gucagcagcgggacacccu

SEQ ID NO: 2973186 - RNA, 19 nt, Artificial Sequence
  Description of Artificial Sequence: Synthetic oligonucleotide
caugccgguuaaaguguuu

SEQ ID NO: 2973187 - RNA, 19 nt, Artificial Sequence
  Description of Artificial Sequence: Synthetic oligonucleotide
ggcggaagggugagccuga

SEQ ID NO: 2973188 - RNA, 19 nt, Artificial Sequence
  Description of Artificial Sequence: Synthetic oligonucleotide
cuccaaacagagcccucuu

SEQ ID NO: 2973189 - RNA, 19 nt, Artificial Sequence
  Description of Artificial Sequence: Synthetic oligonucleotide
gcucgccaagggcgucagg

SEQ ID NO: 2973190 - RNA, 19 nt, Artificial Sequence
  Description of Artificial Sequence: Synthetic oligonucleotide
ggauuccgauauugucaua

SEQ ID NO: 2973191 - RNA, 19 nt, Artificial Sequence
  Description of Artificial Sequence: Synthetic oligonucleotide
gcaggucaucggcaaacau

SEQ ID NO: 2973192 - RNA, 19 nt, Artificial Sequence
  Description of Artificial Sequence: Synthetic oligonucleotide
cacugggcccuugaucagu

SEQ ID NO: 2973193 - RNA, 19 nt, Artificial Sequence
  Description of Artificial Sequence: Synthetic oligonucleotide
acccugcgagaagcuucug

SEQ ID NO: 2973194 - RNA, 19 nt, Artificial Sequence
  Description of Artificial Sequence: Synthetic oligonucleotide
cacuagcgccuguccaccu

SEQ ID NO: 2973195 - RNA, 19 nt, Artificial Sequence
  Description of Artificial Sequence: Synthetic oligonucleotide
ggccccacaggcuccugcu

SEQ ID NO: 2973196 - RNA, 19 nt, Artificial Sequence
  Description of Artificial Sequence: Synthetic oligonucleotide
caguucuuuugggugcuuu

SEQ ID NO: 2973197 - RNA, 19 nt, Artificial Sequence
  Description of Artificial Sequence: Synthetic oligonucleotide
ggcuccugcuugccaccca

SEQ ID NO: 2973198 - RNA, 19 nt, Artificial Sequence
  Description of Artificial Sequence: Synthetic oligonucleotide
cgccauuacacuagcgccu

SEQ ID NO: 2973199 - RNA, 19 nt, Artificial Sequence
  Description of Artificial Sequence: Synthetic oligonucleotide
cgggacacccugcgagaag

SEQ ID NO: 2973200 - RNA, 19 nt, Artificial Sequence
  Description of Artificial Sequence: Synthetic oligonucleotide
ggcagcaaaccggccggaa

SEQ ID NO: 2973201 - RNA, 19 nt, Artificial Sequence
  Description of Artificial Sequence: Synthetic oligonucleotide
gaagccacacugggcccuu

SEQ ID NO: 2973202 - RNA, 19 nt, Artificial Sequence
  Description of Artificial Sequence: Synthetic oligonucleotide
cuccagccucgaagccaca

SEQ ID NO: 2973203 - RNA, 19 nt, Artificial Sequence
  Description of Artificial Sequence: Synthetic oligonucleotide
ggucaucggcaaacauucu

SEQ ID NO: 2973204 - RNA, 19 nt, Artificial Sequence
  Description of Artificial Sequence: Synthetic oligonucleotide
ccagccucgaagccacacu

SEQ ID NO: 2973205 - RNA, 19 nt, Artificial Sequence
  Description of Artificial Sequence: Synthetic oligonucleotide
gcgggacacccugcgagaa

SEQ ID NO: 2973206 - RNA, 19 nt, Artificial Sequence
  Description of Artificial Sequence: Synthetic oligonucleotide
caccucagcggggcagcaa

SEQ ID NO: 2973207 - RNA, 19 nt, Artificial Sequence
  Description of Artificial Sequence: Synthetic oligonucleotide
gcggaagggugagccugac

SEQ ID NO: 2973208 - RNA, 19 nt, Artificial Sequence
  Description of Artificial Sequence: Synthetic oligonucleotide
cgcgggucagcagcgggac

SEQ ID NO: 2973209 - RNA, 19 nt, Artificial Sequence
  Description of Artificial Sequence: Synthetic oligonucleotide
gcgggucagcagcgggaca

SEQ ID NO: 2973210 - RNA, 19 nt, Artificial Sequence
  Description of Artificial Sequence: Synthetic oligonucleotide
ggggcggaagggugagccu

SEQ ID NO: 2973211 - RNA, 19 nt, Artificial Sequence
  Description of Artificial Sequence: Synthetic oligonucleotide
gccacacugggcccuugau

SEQ ID NO: 2973212 - RNA, 19 nt, Artificial Sequence
  Description of Artificial Sequence: Synthetic oligonucleotide
gcccuugaucaguucuuuu

SEQ ID NO: 2973213 - RNA, 19 nt, Artificial Sequence
  Description of Artificial Sequence: Synthetic oligonucleotide
caagggcgucaggccccac

SEQ ID NO: 2973214 - RNA, 19 nt, Artificial Sequence
  Description of Artificial Sequence: Synthetic oligonucleotide
gggugagccugacgcgggu

SEQ ID NO: 2973215 - RNA, 19 nt, Artificial Sequence
  Description of Artificial Sequence: Synthetic oligonucleotide
caggccccacaggcuccug

SEQ ID NO: 2973216 - RNA, 19 nt, Artificial Sequence
  Description of Artificial Sequence: Synthetic oligonucleotide
gcggggcagcaaaccggcc

SEQ ID NO: 2973217 - RNA, 19 nt, Artificial Sequence
  Description of Artificial Sequence: Synthetic oligonucleotide
gggcagcaaaccggccgga

SEQ ID NO: 2973218 - RNA, 19 nt, Artificial Sequence
  Description of Artificial Sequence: Synthetic oligonucleotide
ggacacccugcgagaagcu

SEQ ID NO: 2973219 - RNA, 19 nt, Artificial Sequence
  Description of Artificial Sequence: Synthetic oligonucleotide
gggcccuugaucaguucuu

SEQ ID NO: 2973220 - RNA, 19 nt, Artificial Sequence
  Description of Artificial Sequence: Synthetic oligonucleotide
ccaugccgguuaaaguguu

SEQ ID NO: 2973221 - RNA, 19 nt, Artificial Sequence
  Description of Artificial Sequence: Synthetic oligonucleotide
gcgucaggccccacaggcu

SEQ ID NO: 2973222 - RNA, 19 nt, Artificial Sequence
  Description of Artificial Sequence: Synthetic oligonucleotide
ccaagggcgucaggcccca

SEQ ID NO: 2973223 - RNA, 19 nt, Artificial Sequence
  Description of Artificial Sequence: Synthetic oligonucleotide
ccauuacacuagcgccugu

SEQ ID NO: 2973224 - RNA, 19 nt, Artificial Sequence
  Description of Artificial Sequence: Synthetic oligonucleotide
cccagcgauccaccacucu

SEQ ID NO: 2973225 - RNA, 19 nt, Artificial Sequence
  Description of Artificial Sequence: Synthetic oligonucleotide
cgaagccacacugggcccu

SEQ ID NO: 2973226 - RNA, 19 nt, Artificial Sequence
  Description of Artificial Sequence: Synthetic oligonucleotide
cggauacaacgcuguaauu

SEQ ID NO: 2973227 - RNA, 19 nt, Artificial Sequence
  Description of Artificial Sequence: Synthetic oligonucleotide
ccaccucagcggggcagca

SEQ ID NO: 2973228 - RNA, 19 nt, Artificial Sequence
  Description of Artificial Sequence: Synthetic oligonucleotide
gccccacaggcuccugcuu

SEQ ID NO: 2973229 - RNA, 19 nt, Artificial Sequence
  Description of Artificial Sequence: Synthetic oligonucleotide
aagauaagaugcuagaaac

SEQ ID NO: 2973230 - RNA, 19 nt, Artificial Sequence
  Description of Artificial Sequence: Synthetic oligonucleotide
gaugcuagaaacucaaugg

SEQ ID NO: 2973231 - RNA, 19 nt, Artificial Sequence
  Description of Artificial Sequence: Synthetic oligonucleotide
uuaaaagauaagaugcuag

SEQ ID NO: 2973232 - RNA, 19 nt, Artificial Sequence
  Description of Artificial Sequence: Synthetic oligonucleotide
ucuaucuucaaacugugcc

SEQ ID NO: 2973233 - RNA, 19 nt, Artificial Sequence
  Description of Artificial Sequence: Synthetic oligonucleotide
aacagucugauccagguag

SEQ ID NO: 2973234 - RNA, 19 nt, Artificial Sequence
  Description of Artificial Sequence: Synthetic oligonucleotide
ucaauuucuaucuucaaac

SEQ ID NO: 2973235 - RNA, 19 nt, Artificial Sequence
  Description of Artificial Sequence: Synthetic oligonucleotide
aaguaaucaauuucuaucu

SEQ ID NO: 2973236 - RNA, 19 nt, Artificial Sequence
  Description of Artificial Sequence: Synthetic oligonucleotide
uaaaucuacaguagcaacc

SEQ ID NO: 2973237 - RNA, 19 nt, Artificial Sequence
  Description of Artificial Sequence: Synthetic oligonucleotide
accgcaaucaaccggauac

SEQ ID NO: 2973238 - RNA, 19 nt, Artificial Sequence
  Description of Artificial Sequence: Synthetic oligonucleotide
cucaaugggauuuuggagg

SEQ ID NO: 2973239 - RNA, 19 nt, Artificial Sequence
  Description of Artificial Sequence: Synthetic oligonucleotide
aaagauaagaugcuagaaa

SEQ ID NO: 2973240 - RNA, 19 nt, Artificial Sequence
  Description of Artificial Sequence: Synthetic oligonucleotide
uacaguagcaaccaagugu

SEQ ID NO: 2973241 - RNA, 19 nt, Artificial Sequence
  Description of Artificial Sequence: Synthetic oligonucleotide
uaaucaauuucuaucuuca

SEQ ID NO: 2973242 - RNA, 19 nt, Artificial Sequence
  Description of Artificial Sequence: Synthetic oligonucleotide
aaucuucucauuuucgacu

SEQ ID NO: 2973243 - RNA, 19 nt, Artificial Sequence
  Description of Artificial Sequence: Synthetic oligonucleotide
uaagauaggcacaacaguc

SEQ ID NO: 2973244 - RNA, 19 nt, Artificial Sequence
  Description of Artificial Sequence: Synthetic oligonucleotide
aaucguguaaaucuacagu

SEQ ID NO: 2973245 - RNA, 19 nt, Artificial Sequence
  Description of Artificial Sequence: Synthetic oligonucleotide
caaguaaucaauuucuauc

SEQ ID NO: 2973246 - RNA, 19 nt, Artificial Sequence
  Description of Artificial Sequence: Synthetic oligonucleotide
uuuuaaaagauaagaugcu

SEQ ID NO: 2973247 - RNA, 19 nt, Artificial Sequence
  Description of Artificial Sequence: Synthetic oligonucleotide
gaagucacggcaaugagag

SEQ ID NO: 2973248 - RNA, 19 nt, Artificial Sequence
  Description of Artificial Sequence: Synthetic oligonucleotide
ugcaagcacagcaagaccc

SEQ ID NO: 2973249 - RNA, 19 nt, Artificial Sequence
  Description of Artificial Sequence: Synthetic oligonucleotide
cucauuuucgacuauccgc

SEQ ID NO: 2973250 - RNA, 19 nt, Artificial Sequence
  Description of Artificial Sequence: Synthetic oligonucleotide
ucauuuucgacuauccgcu

SEQ ID NO: 2973251 - RNA, 19 nt, Artificial Sequence
  Description of Artificial Sequence: Synthetic oligonucleotide
aacucaaugggauuuugga

SEQ ID NO: 2973252 - RNA, 19 nt, Artificial Sequence
  Description of Artificial Sequence: Synthetic oligonucleotide
uaaaagauaagaugcuaga

SEQ ID NO: 2973253 - RNA, 19 nt, Artificial Sequence
  Description of Artificial Sequence: Synthetic oligonucleotide
aaagacugcagauccaccu

SEQ ID NO: 2973254 - RNA, 19 nt, Artificial Sequence
  Description of Artificial Sequence: Synthetic oligonucleotide
aacguugucugugaggccg

SEQ ID NO: 2973255 - RNA, 19 nt, Artificial Sequence
  Description of Artificial Sequence: Synthetic oligonucleotide
ucuacaguagcaaccaagu

SEQ ID NO: 2973256 - RNA, 19 nt, Artificial Sequence
  Description of Artificial Sequence: Synthetic oligonucleotide
uucugcauuaaucuucuca

SEQ ID NO: 2973257 - RNA, 19 nt, Artificial Sequence
  Description of Artificial Sequence: Synthetic oligonucleotide
ucaacguugucugugaggc

SEQ ID NO: 2973258 - RNA, 19 nt, Artificial Sequence
  Description of Artificial Sequence: Synthetic oligonucleotide
aggucuuuccuuugcaagc

SEQ ID NO: 2973259 - RNA, 19 nt, Artificial Sequence
  Description of Artificial Sequence: Synthetic oligonucleotide
agaugcuagaaacucaaug

SEQ ID NO: 2973260 - RNA, 19 nt, Artificial Sequence
  Description of Artificial Sequence: Synthetic oligonucleotide
uaguaagauaggcacaaca

SEQ ID NO: 2973261 - RNA, 19 nt, Artificial Sequence
  Description of Artificial Sequence: Synthetic oligonucleotide
uaaucguguaaaucuacag

SEQ ID NO: 2973262 - RNA, 19 nt, Artificial Sequence
  Description of Artificial Sequence: Synthetic oligonucleotide
augcuagaaacucaauggg

SEQ ID NO: 2973263 - RNA, 19 nt, Artificial Sequence
  Description of Artificial Sequence: Synthetic oligonucleotide
ucucauuuucgacuauccg

SEQ ID NO: 2973264 - RNA, 19 nt, Artificial Sequence
  Description of Artificial Sequence: Synthetic oligonucleotide
gauaagaugcuagaaacuc

SEQ ID NO: 2973265 - RNA, 19 nt, Artificial Sequence
  Description of Artificial Sequence: Synthetic oligonucleotide
ugcucugacuccauggcgg

SEQ ID NO: 2973266 - RNA, 19 nt, Artificial Sequence
  Description of Artificial Sequence: Synthetic oligonucleotide
ucugcauuaaucuucucau

SEQ ID NO: 2973267 - RNA, 19 nt, Artificial Sequence
  Description of Artificial Sequence: Synthetic oligonucleotide
cugcaaaccgcaaucaacc

SEQ ID NO: 2973268 - RNA, 19 nt, Artificial Sequence
  Description of Artificial Sequence: Synthetic oligonucleotide
uggcaaagacugcagaucc

SEQ ID NO: 2973269 - RNA, 19 nt, Artificial Sequence
  Description of Artificial Sequence: Synthetic oligonucleotide
uaagaugcuagaaacucaa

SEQ ID NO: 2973270 - RNA, 19 nt, Artificial Sequence
  Description of Artificial Sequence: Synthetic oligonucleotide
aaaucuacaguagcaacca

SEQ ID NO: 2973271 - RNA, 19 nt, Artificial Sequence
  Description of Artificial Sequence: Synthetic oligonucleotide
uuuucugcauuaaucuucu

SEQ ID NO: 2973272 - RNA, 19 nt, Artificial Sequence
  Description of Artificial Sequence: Synthetic oligonucleotide
aguaagauaggcacaacag

SEQ ID NO: 2973273 - RNA, 19 nt, Artificial Sequence
  Description of Artificial Sequence: Synthetic oligonucleotide
uucgacuauccgcucaacg

SEQ ID NO: 2973274 - RNA, 19 nt, Artificial Sequence
  Description of Artificial Sequence: Synthetic oligonucleotide
ugcauuaaucuucucauuu

SEQ ID NO: 2973275 - RNA, 19 nt, Artificial Sequence
  Description of Artificial Sequence: Synthetic oligonucleotide
uucucauuuucgacuaucc

SEQ ID NO: 2973276 - RNA, 19 nt, Artificial Sequence
  Description of Artificial Sequence: Synthetic oligonucleotide
acucaaugggauuuuggag

SEQ ID NO: 2973277 - RNA, 19 nt, Artificial Sequence
  Description of Artificial Sequence: Synthetic oligonucleotide
aucguguaaaucuacagua

SEQ ID NO: 2973278 - RNA, 19 nt, Artificial Sequence
  Description of Artificial Sequence: Synthetic oligonucleotide
ucguguaaaucuacaguag

SEQ ID NO: 2973279 - RNA, 19 nt, Artificial Sequence
  Description of Artificial Sequence: Synthetic oligonucleotide
aaaagauaagaugcuagaa

SEQ ID NO: 2973280 - RNA, 19 nt, Artificial Sequence
  Description of Artificial Sequence: Synthetic oligonucleotide
uuugcaagcacagcaagac

SEQ ID NO: 2973281 - RNA, 19 nt, Artificial Sequence
  Description of Artificial Sequence: Synthetic oligonucleotide
ugcuagaaacucaauggga

SEQ ID NO: 2973282 - RNA, 19 nt, Artificial Sequence
  Description of Artificial Sequence: Synthetic oligonucleotide
agcaagacccuguaguaag

SEQ ID NO: 2973283 - RNA, 19 nt, Artificial Sequence
  Description of Artificial Sequence: Synthetic oligonucleotide
aaugggauuuuggaggucu

SEQ ID NO: 2973284 - RNA, 19 nt, Artificial Sequence
  Description of Artificial Sequence: Synthetic oligonucleotide
aaugagagcugccucguaa

SEQ ID NO: 2973285 - RNA, 19 nt, Artificial Sequence
  Description of Artificial Sequence: Synthetic oligonucleotide
cacggguuggcaaagacug

SEQ ID NO: 2973286 - RNA, 19 nt, Artificial Sequence
  Description of Artificial Sequence: Synthetic oligonucleotide
uguaaaucuacaguagcaa

SEQ ID NO: 2973287 - RNA, 19 nt, Artificial Sequence
  Description of Artificial Sequence: Synthetic oligonucleotide
agacccuguaguaagauag

SEQ ID NO: 2973288 - RNA, 19 nt, Artificial Sequence
  Description of Artificial Sequence: Synthetic oligonucleotide
ugugaggccguacucggag

SEQ ID NO: 2973289 - RNA, 19 nt, Artificial Sequence
  Description of Artificial Sequence: Synthetic oligonucleotide
uucccaaguaaucaauuuc

SEQ ID NO: 2973290 - RNA, 19 nt, Artificial Sequence
  Description of Artificial Sequence: Synthetic oligonucleotide
uguaguaagauaggcacaa

SEQ ID NO: 2973291 - RNA, 19 nt, Artificial Sequence
  Description of Artificial Sequence: Synthetic oligonucleotide
gaggucuuuccuuugcaag

SEQ ID NO: 2973292 - RNA, 19 nt, Artificial Sequence
  Description of Artificial Sequence: Synthetic oligonucleotide
aaacucaaugggauuuugg

SEQ ID NO: 2973293 - RNA, 19 nt, Artificial Sequence
  Description of Artificial Sequence: Synthetic oligonucleotide
aggguuuucugcaaccugc

SEQ ID NO: 2973294 - RNA, 19 nt, Artificial Sequence
  Description of Artificial Sequence: Synthetic oligonucleotide
uuuaaaagauaagaugcua

SEQ ID NO: 2973295 - RNA, 19 nt, Artificial Sequence
  Description of Artificial Sequence: Synthetic oligonucleotide
ucugugaggccguacucgg

SEQ ID NO: 2973296 - RNA, 19 nt, Artificial Sequence
  Description of Artificial Sequence: Synthetic oligonucleotide
guaaaucuacaguagcaac

SEQ ID NO: 2973297 - RNA, 19 nt, Artificial Sequence
  Description of Artificial Sequence: Synthetic oligonucleotide
cuuuccuuugcaagcacag

SEQ ID NO: 2973298 - RNA, 19 nt, Artificial Sequence
  Description of Artificial Sequence: Synthetic oligonucleotide
ucgacuauccgcucaacgu

SEQ ID NO: 2973299 - RNA, 19 nt, Artificial Sequence
  Description of Artificial Sequence: Synthetic oligonucleotide
acaguagcaaccaagugug

SEQ ID NO: 2973300 - RNA, 19 nt, Artificial Sequence
  Description of Artificial Sequence: Synthetic oligonucleotide
aucaaccggauaccagucc

SEQ ID NO: 2973301 - RNA, 19 nt, Artificial Sequence
  Description of Artificial Sequence: Synthetic oligonucleotide
aucugcucugacuccaugg

SEQ ID NO: 2973302 - RNA, 19 nt, Artificial Sequence
  Description of Artificial Sequence: Synthetic oligonucleotide
ucugcucugacuccauggc

SEQ ID NO: 2973303 - RNA, 19 nt, Artificial Sequence
  Description of Artificial Sequence: Synthetic oligonucleotide
ugucuuucuucccaaguaa

SEQ ID NO: 2973304 - RNA, 19 nt, Artificial Sequence
  Description of Artificial Sequence: Synthetic oligonucleotide
agugaggguuuucugcaac

SEQ ID NO: 2973305 - RNA, 19 nt, Artificial Sequence
  Description of Artificial Sequence: Synthetic oligonucleotide
cauuaaucuucucauuuuc

SEQ ID NO: 2973306 - RNA, 19 nt, Artificial Sequence
  Description of Artificial Sequence: Synthetic oligonucleotide
accaagugugucuuucuuc

SEQ ID NO: 2973307 - RNA, 19 nt, Artificial Sequence
  Description of Artificial Sequence: Synthetic oligonucleotide
acaacagucugauccaggu

SEQ ID NO: 2973308 - RNA, 19 nt, Artificial Sequence
  Description of Artificial Sequence: Synthetic oligonucleotide
ugcaaaccgcaaucaaccg

SEQ ID NO: 2973309 - RNA, 19 nt, Artificial Sequence
  Description of Artificial Sequence: Synthetic oligonucleotide
ucaaugggauuuuggaggu

SEQ ID NO: 2973310 - RNA, 19 nt, Artificial Sequence
  Description of Artificial Sequence: Synthetic oligonucleotide
aguagcaaccaaguguguc

SEQ ID NO: 2973311 - RNA, 19 nt, Artificial Sequence
  Description of Artificial Sequence: Synthetic oligonucleotide
ucuuucuucccaaguaauc

SEQ ID NO: 2973312 - RNA, 19 nt, Artificial Sequence
  Description of Artificial Sequence: Synthetic oligonucleotide
ccuguaguaagauaggcac

SEQ ID NO: 2973313 - RNA, 19 nt, Artificial Sequence
  Description of Artificial Sequence: Synthetic oligonucleotide
agucacggcaaugagagcu

SEQ ID NO: 2973314 - RNA, 19 nt, Artificial Sequence
  Description of Artificial Sequence: Synthetic oligonucleotide
ugugucuuucuucccaagu

SEQ ID NO: 2973315 - RNA, 19 nt, Artificial Sequence
  Description of Artificial Sequence: Synthetic oligonucleotide
aaucaaccggauaccaguc

SEQ ID NO: 2973316 - RNA, 19 nt, Artificial Sequence
  Description of Artificial Sequence: Synthetic oligonucleotide
agauaggcacaacagucug

SEQ ID NO: 2973317 - RNA, 19 nt, Artificial Sequence
  Description of Artificial Sequence: Synthetic oligonucleotide
uucaaacugugccuuauuu

SEQ ID NO: 2973318 - RNA, 19 nt, Artificial Sequence
  Description of Artificial Sequence: Synthetic oligonucleotide
gucugauccagguaggcac

SEQ ID NO: 2973319 - RNA, 19 nt, Artificial Sequence
  Description of Artificial Sequence: Synthetic oligonucleotide
aagauaggcacaacagucu

SEQ ID NO: 2973320 - RNA, 19 nt, Artificial Sequence
  Description of Artificial Sequence: Synthetic oligonucleotide
ucuuuccuuugcaagcaca

SEQ ID NO: 2973321 - RNA, 19 nt, Artificial Sequence
  Description of Artificial Sequence: Synthetic oligonucleotide
gagagcugccucguaaucg

SEQ ID NO: 2973322 - RNA, 19 nt, Artificial Sequence
  Description of Artificial Sequence: Synthetic oligonucleotide
cucguaaucguguaaaucu

SEQ ID NO: 2973323 - RNA, 19 nt, Artificial Sequence
  Description of Artificial Sequence: Synthetic oligonucleotide
uggcggacccugcaaaccg

SEQ ID NO: 2973324 - RNA, 19 nt, Artificial Sequence
  Description of Artificial Sequence: Synthetic oligonucleotide
agacugcagauccaccuuc

SEQ ID NO: 2973325 - RNA, 19 nt, Artificial Sequence
  Description of Artificial Sequence: Synthetic oligonucleotide
cucaacguugucugugagg

SEQ ID NO: 2973326 - RNA, 19 nt, Artificial Sequence
  Description of Artificial Sequence: Synthetic oligonucleotide
ugcagauccaccuucuguu

SEQ ID NO: 2973327 - RNA, 19 nt, Artificial Sequence
  Description of Artificial Sequence: Synthetic oligonucleotide
ucaaacugugccuuauuuu

SEQ ID NO: 2973328 - RNA, 19 nt, Artificial Sequence
  Description of Artificial Sequence: Synthetic oligonucleotide
uuucuucccaaguaaucaa

SEQ ID NO: 2973329 - RNA, 19 nt, Artificial Sequence
  Description of Artificial Sequence: Synthetic oligonucleotide
caaaccgcaaucaaccgga

SEQ ID NO: 2973330 - RNA, 19 nt, Artificial Sequence
  Description of Artificial Sequence: Synthetic oligonucleotide
uuuucgacuauccgcucaa

SEQ ID NO: 2973331 - RNA, 19 nt, Artificial Sequence
  Description of Artificial Sequence: Synthetic oligonucleotide
acccuguaguaagauaggc

SEQ ID NO: 2973332 - RNA, 19 nt, Artificial Sequence
  Description of Artificial Sequence: Synthetic oligonucleotide
aagucacggcaaugagagc

SEQ ID NO: 2973333 - RNA, 19 nt, Artificial Sequence
  Description of Artificial Sequence: Synthetic oligonucleotide
uucuaucuucaaacugugc

SEQ ID NO: 2973334 - RNA, 19 nt, Artificial Sequence
  Description of Artificial Sequence: Synthetic oligonucleotide
auuuucgacuauccgcuca

SEQ ID NO: 2973335 - RNA, 19 nt, Artificial Sequence
  Description of Artificial Sequence: Synthetic oligonucleotide
aucuacaguagcaaccaag

SEQ ID NO: 2973336 - RNA, 19 nt, Artificial Sequence
  Description of Artificial Sequence: Synthetic oligonucleotide
ggcaaugagagcugccucg

SEQ ID NO: 2973337 - RNA, 19 nt, Artificial Sequence
  Description of Artificial Sequence: Synthetic oligonucleotide
uccagguaggcacggguug

SEQ ID NO: 2973338 - RNA, 19 nt, Artificial Sequence
  Description of Artificial Sequence: Synthetic oligonucleotide
uuuuggaggucuuuccuuu

SEQ ID NO: 2973339 - RNA, 19 nt, Artificial Sequence
  Description of Artificial Sequence: Synthetic oligonucleotide
uugcaagcacagcaagacc

SEQ ID NO: 2973340 - RNA, 19 nt, Artificial Sequence
  Description of Artificial Sequence: Synthetic oligonucleotide
ugcaaccugcgucuguccc

SEQ ID NO: 2973341 - RNA, 19 nt, Artificial Sequence
  Description of Artificial Sequence: Synthetic oligonucleotide
ccaagugugucuuucuucc

SEQ ID NO: 2973342 - RNA, 19 nt, Artificial Sequence
  Description of Artificial Sequence: Synthetic oligonucleotide
ucugacuccauggcggacc

SEQ ID NO: 2973343 - RNA, 19 nt, Artificial Sequence
  Description of Artificial Sequence: Synthetic oligonucleotide
cuuucuucccaaguaauca

SEQ ID NO: 2973344 - RNA, 19 nt, Artificial Sequence
  Description of Artificial Sequence: Synthetic oligonucleotide
ucuucccaaguaaucaauu

SEQ ID NO: 2973345 - RNA, 19 nt, Artificial Sequence
  Description of Artificial Sequence: Synthetic oligonucleotide
auccgcucaacguugucug

SEQ ID NO: 2973346 - RNA, 19 nt, Artificial Sequence
  Description of Artificial Sequence: Synthetic oligonucleotide
agagcugccucguaaucgu

SEQ ID NO: 2973347 - RNA, 19 nt, Artificial Sequence
  Description of Artificial Sequence: Synthetic oligonucleotide
ucguaaucguguaaaucua

SEQ ID NO: 2973348 - RNA, 19 nt, Artificial Sequence
  Description of Artificial Sequence: Synthetic oligonucleotide
ugaggccguacucggagug

SEQ ID NO: 2973349 - RNA, 19 nt, Artificial Sequence
  Description of Artificial Sequence: Synthetic oligonucleotide
cacaacagucugauccagg

SEQ ID NO: 2973350 - RNA, 19 nt, Artificial Sequence
  Description of Artificial Sequence: Synthetic oligonucleotide
uccagcaucugcucugacu

SEQ ID NO: 2973351 - RNA, 19 nt, Artificial Sequence
  Description of Artificial Sequence: Synthetic oligonucleotide
caaagacugcagauccacc

SEQ ID NO: 2973352 - RNA, 19 nt, Artificial Sequence
  Description of Artificial Sequence: Synthetic oligonucleotide
auaagaugcuagaaacuca

SEQ ID NO: 2973353 - RNA, 19 nt, Artificial Sequence
  Description of Artificial Sequence: Synthetic oligonucleotide
agauaagaugcuagaaacu

SEQ ID NO: 2973354 - RNA, 19 nt, Artificial Sequence
  Description of Artificial Sequence: Synthetic oligonucleotide
auuuuggaggucuuuccuu

SEQ ID NO: 2973355 - RNA, 19 nt, Artificial Sequence
  Description of Artificial Sequence: Synthetic oligonucleotide
aagacugcagauccaccuu

SEQ ID NO: 2973356 - RNA, 19 nt, Artificial Sequence
  Description of Artificial Sequence: Synthetic oligonucleotide
uuggcaaagacugcagauc

SEQ ID NO: 2973357 - RNA, 19 nt, Artificial Sequence
  Description of Artificial Sequence: Synthetic oligonucleotide
aucuucucauuuucgacua

SEQ ID NO: 2973358 - RNA, 19 nt, Artificial Sequence
  Description of Artificial Sequence: Synthetic oligonucleotide
gcaaaccgcaaucaaccgg

SEQ ID NO: 2973359 - RNA, 19 nt, Artificial Sequence
  Description of Artificial Sequence: Synthetic oligonucleotide
gaaacucaaugggauuuug

SEQ ID NO: 2973360 - RNA, 19 nt, Artificial Sequence
  Description of Artificial Sequence: Synthetic oligonucleotide
guaagauaggcacaacagu

SEQ ID NO: 2973361 - RNA, 19 nt, Artificial Sequence
  Description of Artificial Sequence: Synthetic oligonucleotide
aaccaagugugucuuucuu

SEQ ID NO: 2973362 - RNA, 19 nt, Artificial Sequence
  Description of Artificial Sequence: Synthetic oligonucleotide
uauccgcucaacguugucu

SEQ ID NO: 2973363 - RNA, 19 nt, Artificial Sequence
  Description of Artificial Sequence: Synthetic oligonucleotide
gucugugaggccguacucg

SEQ ID NO: 2973364 - RNA, 19 nt, Artificial Sequence
  Description of Artificial Sequence: Synthetic oligonucleotide
guguaaaucuacaguagca

SEQ ID NO: 2973365 - RNA, 19 nt, Artificial Sequence
  Description of Artificial Sequence: Synthetic oligonucleotide
ggauuuuggaggucuuucc

SEQ ID NO: 2973366 - RNA, 19 nt, Artificial Sequence
  Description of Artificial Sequence: Synthetic oligonucleotide
gauuuuggaggucuuuccu

SEQ ID NO: 2973367 - RNA, 19 nt, Artificial Sequence
  Description of Artificial Sequence: Synthetic oligonucleotide
aagacccuguaguaagaua

SEQ ID NO: 2973368 - RNA, 19 nt, Artificial Sequence
  Description of Artificial Sequence: Synthetic oligonucleotide
gacuauccgcucaacguug

SEQ ID NO: 2973369 - RNA, 19 nt, Artificial Sequence
  Description of Artificial Sequence: Synthetic oligonucleotide
auaggcacaacagucugau

SEQ ID NO: 2973370 - RNA, 19 nt, Artificial Sequence
  Description of Artificial Sequence: Synthetic oligonucleotide
gugaggguuuucugcaacc

SEQ ID NO: 2973371 - RNA, 19 nt, Artificial Sequence
  Description of Artificial Sequence: Synthetic oligonucleotide
gacccugcaaaccgcaauc

SEQ ID NO: 2973372 - RNA, 19 nt, Artificial Sequence
  Description of Artificial Sequence: Synthetic oligonucleotide
aaucuacaguagcaaccaa

SEQ ID NO: 2973373 - RNA, 19 nt, Artificial Sequence
  Description of Artificial Sequence: Synthetic oligonucleotide
gacccuguaguaagauagg

SEQ ID NO: 2973374 - RNA, 19 nt, Artificial Sequence
  Description of Artificial Sequence: Synthetic oligonucleotide
cuacaguagcaaccaagug

SEQ ID NO: 2973375 - RNA, 19 nt, Artificial Sequence
  Description of Artificial Sequence: Synthetic oligonucleotide
auggcggacccugcaaacc

SEQ ID NO: 2973376 - RNA, 19 nt, Artificial Sequence
  Description of Artificial Sequence: Synthetic oligonucleotide
acagcaagacccuguagua

SEQ ID NO: 2973377 - RNA, 19 nt, Artificial Sequence
  Description of Artificial Sequence: Synthetic oligonucleotide
agggaagucacggcaauga

SEQ ID NO: 2973378 - RNA, 19 nt, Artificial Sequence
  Description of Artificial Sequence: Synthetic oligonucleotide
guaaucguguaaaucuaca

SEQ ID NO: 2973379 - RNA, 19 nt, Artificial Sequence
  Description of Artificial Sequence: Synthetic oligonucleotide
cuuugcaagcacagcaaga

SEQ ID NO: 2973380 - RNA, 19 nt, Artificial Sequence
  Description of Artificial Sequence: Synthetic oligonucleotide
cugcucugacuccauggcg

SEQ ID NO: 2973381 - RNA, 19 nt, Artificial Sequence
  Description of Artificial Sequence: Synthetic oligonucleotide
gacuccauggcggacccug

SEQ ID NO: 2973382 - RNA, 19 nt, Artificial Sequence
  Description of Artificial Sequence: Synthetic oligonucleotide
guagcaaccaagugugucu

SEQ ID NO: 2973383 - RNA, 19 nt, Artificial Sequence
  Description of Artificial Sequence: Synthetic oligonucleotide
ugagagcugccucguaauc

SEQ ID NO: 2973384 - RNA, 19 nt, Artificial Sequence
  Description of Artificial Sequence: Synthetic oligonucleotide
caagugugucuuucuuccc

SEQ ID NO: 2973385 - RNA, 19 nt, Artificial Sequence
  Description of Artificial Sequence: Synthetic oligonucleotide
caaucaaccggauaccagu

SEQ ID NO: 2973386 - RNA, 19 nt, Artificial Sequence
  Description of Artificial Sequence: Synthetic oligonucleotide
cuaucuucaaacugugccu

SEQ ID NO: 2973387 - RNA, 19 nt, Artificial Sequence
  Description of Artificial Sequence: Synthetic oligonucleotide
agugugucuuucuucccaa

SEQ ID NO: 2973388 - RNA, 19 nt, Artificial Sequence
  Description of Artificial Sequence: Synthetic oligonucleotide
ucggagugaggguuuucug

SEQ ID NO: 2973389 - RNA, 19 nt, Artificial Sequence
  Description of Artificial Sequence: Synthetic oligonucleotide
ucugcaaccugcgucuguc

SEQ ID NO: 2973390 - RNA, 19 nt, Artificial Sequence
  Description of Artificial Sequence: Synthetic oligonucleotide
ugccucguaaucguguaaa

SEQ ID NO: 2973391 - RNA, 19 nt, Artificial Sequence
  Description of Artificial Sequence: Synthetic oligonucleotide
ugucugugaggccguacuc

SEQ ID NO: 2973392 - RNA, 19 nt, Artificial Sequence
  Description of Artificial Sequence: Synthetic oligonucleotide
cuucucauuuucgacuauc

SEQ ID NO: 2973393 - RNA, 19 nt, Artificial Sequence
  Description of Artificial Sequence: Synthetic oligonucleotide
augagagcugccucguaau

SEQ ID NO: 2973394 - RNA, 19 nt, Artificial Sequence
  Description of Artificial Sequence: Synthetic oligonucleotide
ccaccuucuguuuugauga

SEQ ID NO: 2973395 - RNA, 19 nt, Artificial Sequence
  Description of Artificial Sequence: Synthetic oligonucleotide
ugcgucugucccuccagca

SEQ ID NO: 2973396 - RNA, 19 nt, Artificial Sequence
  Description of Artificial Sequence: Synthetic oligonucleotide
cguguaaaucuacaguagc

SEQ ID NO: 2973397 - RNA, 19 nt, Artificial Sequence
  Description of Artificial Sequence: Synthetic oligonucleotide
ccugcaaaccgcaaucaac

SEQ ID NO: 2973398 - RNA, 19 nt, Artificial Sequence
  Description of Artificial Sequence: Synthetic oligonucleotide
cuguaguaagauaggcaca

SEQ ID NO: 2973399 - RNA, 19 nt, Artificial Sequence
  Description of Artificial Sequence: Synthetic oligonucleotide
ggagugaggguuuucugca

SEQ ID NO: 2973400 - RNA, 19 nt, Artificial Sequence
  Description of Artificial Sequence: Synthetic oligonucleotide
acagucugauccagguagg

SEQ ID NO: 2973401 - RNA, 19 nt, Artificial Sequence
  Description of Artificial Sequence: Synthetic oligonucleotide
cacagcaagacccuguagu

SEQ ID NO: 2973402 - RNA, 19 nt, Artificial Sequence
  Description of Artificial Sequence: Synthetic oligonucleotide
acugcagauccaccuucug

SEQ ID NO: 2973403 - RNA, 19 nt, Artificial Sequence
  Description of Artificial Sequence: Synthetic oligonucleotide
cauggcggacccugcaaac

SEQ ID NO: 2973404 - RNA, 19 nt, Artificial Sequence
  Description of Artificial Sequence: Synthetic oligonucleotide
acggcaaugagagcugccu

SEQ ID NO: 2973405 - RNA, 19 nt, Artificial Sequence
  Description of Artificial Sequence: Synthetic oligonucleotide
gauaggcacaacagucuga

SEQ ID NO: 2973406 - RNA, 19 nt, Artificial Sequence
  Description of Artificial Sequence: Synthetic oligonucleotide
gugucuuucuucccaagua

SEQ ID NO: 2973407 - RNA, 19 nt, Artificial Sequence
  Description of Artificial Sequence: Synthetic oligonucleotide
aagcacagcaagacccugu

SEQ ID NO: 2973408 - RNA, 19 nt, Artificial Sequence
  Description of Artificial Sequence: Synthetic oligonucleotide
ugauccagguaggcacggg

SEQ ID NO: 2973409 - RNA, 19 nt, Artificial Sequence
  Description of Artificial Sequence: Synthetic oligonucleotide
agucugauccagguaggca

SEQ ID NO: 2973410 - RNA, 19 nt, Artificial Sequence
  Description of Artificial Sequence: Synthetic oligonucleotide
cugacuccauggcggaccc

SEQ ID NO: 2973411 - RNA, 19 nt, Artificial Sequence
  Description of Artificial Sequence: Synthetic oligonucleotide
guuggcaaagacugcagau

SEQ ID NO: 2973412 - RNA, 19 nt, Artificial Sequence
  Description of Artificial Sequence: Synthetic oligonucleotide
aaccgcaaucaaccggaua

SEQ ID NO: 2973413 - RNA, 19 nt, Artificial Sequence
  Description of Artificial Sequence: Synthetic oligonucleotide
ucuucucauuuucgacuau

SEQ ID NO: 2973414 - RNA, 19 nt, Artificial Sequence
  Description of Artificial Sequence: Synthetic oligonucleotide
agcaucugcucugacucca

SEQ ID NO: 2973415 - RNA, 19 nt, Artificial Sequence
  Description of Artificial Sequence: Synthetic oligonucleotide
agcacagcaagacccugua

SEQ ID NO: 2973416 - RNA, 19 nt, Artificial Sequence
  Description of Artificial Sequence: Synthetic oligonucleotide
gugugucuuucuucccaag

SEQ ID NO: 2973417 - RNA, 19 nt, Artificial Sequence
  Description of Artificial Sequence: Synthetic oligonucleotide
gccguacucggagugaggg

SEQ ID NO: 2973418 - RNA, 19 nt, Artificial Sequence
  Description of Artificial Sequence: Synthetic oligonucleotide
guaggcacggguuggcaaa

SEQ ID NO: 2973419 - RNA, 19 nt, Artificial Sequence
  Description of Artificial Sequence: Synthetic oligonucleotide
gcaaagacugcagauccac

SEQ ID NO: 2973420 - RNA, 19 nt, Artificial Sequence
  Description of Artificial Sequence: Synthetic oligonucleotide
gggaagucacggcaaugag

SEQ ID NO: 2973421 - RNA, 19 nt, Artificial Sequence
  Description of Artificial Sequence: Synthetic oligonucleotide
cauuuucgacuauccgcuc

SEQ ID NO: 2973422 - RNA, 19 nt, Artificial Sequence
  Description of Artificial Sequence: Synthetic oligonucleotide
gauccagguaggcacgggu

SEQ ID NO: 2973423 - RNA, 19 nt, Artificial Sequence
  Description of Artificial Sequence: Synthetic oligonucleotide
caacguugucugugaggcc

SEQ ID NO: 2973424 - RNA, 19 nt, Artificial Sequence
  Description of Artificial Sequence: Synthetic oligonucleotide
ccuuugcaagcacagcaag

SEQ ID NO: 2973425 - RNA, 19 nt, Artificial Sequence
  Description of Artificial Sequence: Synthetic oligonucleotide
cacggcaaugagagcugcc

SEQ ID NO: 2973426 - RNA, 19 nt, Artificial Sequence
  Description of Artificial Sequence: Synthetic oligonucleotide
aagaugcuagaaacucaau

SEQ ID NO: 2973427 - RNA, 19 nt, Artificial Sequence
  Description of Artificial Sequence: Synthetic oligonucleotide
agaaacucaaugggauuuu

SEQ ID NO: 2973428 - RNA, 19 nt, Artificial Sequence
  Description of Artificial Sequence: Synthetic oligonucleotide
acggguuggcaaagacugc

SEQ ID NO: 2973429 - RNA, 19 nt, Artificial Sequence
  Description of Artificial Sequence: Synthetic oligonucleotide
gagggaagucacggcaaug

SEQ ID NO: 2973430 - RNA, 19 nt, Artificial Sequence
  Description of Artificial Sequence: Synthetic oligonucleotide
ggcacaacagucugaucca

SEQ ID NO: 2973431 - RNA, 19 nt, Artificial Sequence
  Description of Artificial Sequence: Synthetic oligonucleotide
ggguuuucugcaaccugcg

SEQ ID NO: 2973432 - RNA, 19 nt, Artificial Sequence
  Description of Artificial Sequence: Synthetic oligonucleotide
cugauccagguaggcacgg

SEQ ID NO: 2973433 - RNA, 19 nt, Artificial Sequence
  Description of Artificial Sequence: Synthetic oligonucleotide
uaggcacggguuggcaaag

SEQ ID NO: 2973434 - RNA, 19 nt, Artificial Sequence
  Description of Artificial Sequence: Synthetic oligonucleotide
gcaaucaaccggauaccag

SEQ ID NO: 2973435 - RNA, 19 nt, Artificial Sequence
  Description of Artificial Sequence: Synthetic oligonucleotide
cguaaucguguaaaucuac

SEQ ID NO: 2973436 - RNA, 19 nt, Artificial Sequence
  Description of Artificial Sequence: Synthetic oligonucleotide
gucuuuccuuugcaagcac

SEQ ID NO: 2973437 - RNA, 19 nt, Artificial Sequence
  Description of Artificial Sequence: Synthetic oligonucleotide
gguuggcaaagacugcaga

SEQ ID NO: 2973438 - RNA, 19 nt, Artificial Sequence
  Description of Artificial Sequence: Synthetic oligonucleotide
ggaagucacggcaaugaga

SEQ ID NO: 2973439 - RNA, 19 nt, Artificial Sequence
  Description of Artificial Sequence: Synthetic oligonucleotide
cugcaaccugcgucugucc

SEQ ID NO: 2973440 - RNA, 19 nt, Artificial Sequence
  Description of Artificial Sequence: Synthetic oligonucleotide
cggagugaggguuuucugc

SEQ ID NO: 2973441 - RNA, 19 nt, Artificial Sequence
  Description of Artificial Sequence: Synthetic oligonucleotide
cugcgucugucccuccagc

SEQ ID NO: 2973442 - RNA, 19 nt, Artificial Sequence
  Description of Artificial Sequence: Synthetic oligonucleotide
ggggagggaagucacggca

SEQ ID NO: 2973443 - RNA, 19 nt, Artificial Sequence
  Description of Artificial Sequence: Synthetic oligonucleotide
caucugcucugacuccaug

SEQ ID NO: 2973444 - RNA, 19 nt, Artificial Sequence
  Description of Artificial Sequence: Synthetic oligonucleotide
gucacggcaaugagagcug

SEQ ID NO: 2973445 - RNA, 19 nt, Artificial Sequence
  Description of Artificial Sequence: Synthetic oligonucleotide
aucuucaaacugugccuua

SEQ ID NO: 2973446 - RNA, 19 nt, Artificial Sequence
  Description of Artificial Sequence: Synthetic oligonucleotide
acuccauggcggacccugc

SEQ ID NO: 2973447 - RNA, 19 nt, Artificial Sequence
  Description of Artificial Sequence: Synthetic oligonucleotide
uagcaaccaagugugucuu

SEQ ID NO: 2973448 - RNA, 19 nt, Artificial Sequence
  Description of Artificial Sequence: Synthetic oligonucleotide
aggccguacucggagugag

SEQ ID NO: 2973449 - RNA, 19 nt, Artificial Sequence
  Description of Artificial Sequence: Synthetic oligonucleotide
guaguaagauaggcacaac

SEQ ID NO: 2973450 - RNA, 19 nt, Artificial Sequence
  Description of Artificial Sequence: Synthetic oligonucleotide
uccgcucaacguugucugu

SEQ ID NO: 2973451 - RNA, 19 nt, Artificial Sequence
  Description of Artificial Sequence: Synthetic oligonucleotide
gagugaggguuuucugcaa

SEQ ID NO: 2973452 - RNA, 19 nt, Artificial Sequence
  Description of Artificial Sequence: Synthetic oligonucleotide
uuucugcauuaaucuucuc

SEQ ID NO: 2973453 - RNA, 19 nt, Artificial Sequence
  Description of Artificial Sequence: Synthetic oligonucleotide
uuucgacuauccgcucaac

SEQ ID NO: 2973454 - RNA, 19 nt, Artificial Sequence
  Description of Artificial Sequence: Synthetic oligonucleotide
cuucccaaguaaucaauuu

SEQ ID NO: 2973455 - RNA, 19 nt, Artificial Sequence
  Description of Artificial Sequence: Synthetic oligonucleotide
cuagaaacucaaugggauu

SEQ ID NO: 2973456 - RNA, 19 nt, Artificial Sequence
  Description of Artificial Sequence: Synthetic oligonucleotide
ggucuuuccuuugcaagca

SEQ ID NO: 2973457 - RNA, 19 nt, Artificial Sequence
  Description of Artificial Sequence: Synthetic oligonucleotide
gcuagaaacucaaugggau

SEQ ID NO: 2973458 - RNA, 19 nt, Artificial Sequence
  Description of Artificial Sequence: Synthetic oligonucleotide
ugggauuuuggaggucuuu

SEQ ID NO: 2973459 - RNA, 19 nt, Artificial Sequence
  Description of Artificial Sequence: Synthetic oligonucleotide
agcugccucguaaucgugu

SEQ ID NO: 2973460 - RNA, 19 nt, Artificial Sequence
  Description of Artificial Sequence: Synthetic oligonucleotide
acccugcaaaccgcaauca

SEQ ID NO: 2973461 - RNA, 19 nt, Artificial Sequence
  Description of Artificial Sequence: Synthetic oligonucleotide
caaccugcgucugucccuc

SEQ ID NO: 2973462 - RNA, 19 nt, Artificial Sequence
  Description of Artificial Sequence: Synthetic oligonucleotide
uaggcacaacagucugauc

SEQ ID NO: 2973463 - RNA, 19 nt, Artificial Sequence
  Description of Artificial Sequence: Synthetic oligonucleotide
ggcacggguuggcaaagac

SEQ ID NO: 2973464 - RNA, 19 nt, Artificial Sequence
  Description of Artificial Sequence: Synthetic oligonucleotide
gcucaacguugucugugag

SEQ ID NO: 2973465 - RNA, 19 nt, Artificial Sequence
  Description of Artificial Sequence: Synthetic oligonucleotide
cccuguaguaagauaggca

SEQ ID NO: 2973466 - RNA, 19 nt, Artificial Sequence
  Description of Artificial Sequence: Synthetic oligonucleotide
cuauccgcucaacguuguc

SEQ ID NO: 2973467 - RNA, 19 nt, Artificial Sequence
  Description of Artificial Sequence: Synthetic oligonucleotide
ccucguaaucguguaaauc

SEQ ID NO: 2973468 - RNA, 19 nt, Artificial Sequence
  Description of Artificial Sequence: Synthetic oligonucleotide
cagguaggcacggguuggc

SEQ ID NO: 2973469 - RNA, 19 nt, Artificial Sequence
  Description of Artificial Sequence: Synthetic oligonucleotide
cugcagauccaccuucugu

SEQ ID NO: 2973470 - RNA, 19 nt, Artificial Sequence
  Description of Artificial Sequence: Synthetic oligonucleotide
acucggagugaggguuuuc

SEQ ID NO: 2973471 - RNA, 19 nt, Artificial Sequence
  Description of Artificial Sequence: Synthetic oligonucleotide
aaaccgcaaucaaccggau

SEQ ID NO: 2973472 - RNA, 19 nt, Artificial Sequence
  Description of Artificial Sequence: Synthetic oligonucleotide
agcaaccaagugugucuuu

SEQ ID NO: 2973473 - RNA, 19 nt, Artificial Sequence
  Description of Artificial Sequence: Synthetic oligonucleotide
gguaggcacggguuggcaa

SEQ ID NO: 2973474 - RNA, 19 nt, Artificial Sequence
  Description of Artificial Sequence: Synthetic oligonucleotide
gcacagcaagacccuguag

SEQ ID NO: 2973475 - RNA, 19 nt, Artificial Sequence
  Description of Artificial Sequence: Synthetic oligonucleotide
accuucuguuuugaugauu

SEQ ID NO: 2973476 - RNA, 19 nt, Artificial Sequence
  Description of Artificial Sequence: Synthetic oligonucleotide
gcauuaaucuucucauuuu

SEQ ID NO: 2973477 - RNA, 19 nt, Artificial Sequence
  Description of Artificial Sequence: Synthetic oligonucleotide
gucccuccagcaucugcuc

SEQ ID NO: 2973478 - RNA, 19 nt, Artificial Sequence
  Description of Artificial Sequence: Synthetic oligonucleotide
gcacaacagucugauccag

SEQ ID NO: 2973479 - RNA, 19 nt, Artificial Sequence
  Description of Artificial Sequence: Synthetic oligonucleotide
caaccaagugugucuuucu

SEQ ID NO: 2973480 - RNA, 19 nt, Artificial Sequence
  Description of Artificial Sequence: Synthetic oligonucleotide
gagcugccucguaaucgug

SEQ ID NO: 2973481 - RNA, 19 nt, Artificial Sequence
  Description of Artificial Sequence: Synthetic oligonucleotide
auccagguaggcacggguu

SEQ ID NO: 2973482 - RNA, 19 nt, Artificial Sequence
  Description of Artificial Sequence: Synthetic oligonucleotide
caacagucugauccaggua

SEQ ID NO: 2973483 - RNA, 19 nt, Artificial Sequence
  Description of Artificial Sequence: Synthetic oligonucleotide
gaggccguacucggaguga

SEQ ID NO: 2973484 - RNA, 19 nt, Artificial Sequence
  Description of Artificial Sequence: Synthetic oligonucleotide
gucuuucuucccaaguaau

SEQ ID NO: 2973485 - RNA, 19 nt, Artificial Sequence
  Description of Artificial Sequence: Synthetic oligonucleotide
ccaaguaaucaauuucuau

SEQ ID NO: 2973486 - RNA, 19 nt, Artificial Sequence
  Description of Artificial Sequence: Synthetic oligonucleotide
ccuucuguuuugaugauuu

SEQ ID NO: 2973487 - RNA, 19 nt, Artificial Sequence
  Description of Artificial Sequence: Synthetic oligonucleotide
caaugggauuuuggagguc

SEQ ID NO: 2973488 - RNA, 19 nt, Artificial Sequence
  Description of Artificial Sequence: Synthetic oligonucleotide
agguaggcacggguuggca

SEQ ID NO: 2973489 - RNA, 19 nt, Artificial Sequence
  Description of Artificial Sequence: Synthetic oligonucleotide
gacugcagauccaccuucu

SEQ ID NO: 2973490 - RNA, 19 nt, Artificial Sequence
  Description of Artificial Sequence: Synthetic oligonucleotide
cagcaagacccuguaguaa

SEQ ID NO: 2973491 - RNA, 19 nt, Artificial Sequence
  Description of Artificial Sequence: Synthetic oligonucleotide
cucggagugaggguuuucu

SEQ ID NO: 2973492 - RNA, 19 nt, Artificial Sequence
  Description of Artificial Sequence: Synthetic oligonucleotide
cugugaggccguacucgga

SEQ ID NO: 2973493 - RNA, 19 nt, Artificial Sequence
  Description of Artificial Sequence: Synthetic oligonucleotide
uacucggagugaggguuuu

SEQ ID NO: 2973494 - RNA, 19 nt, Artificial Sequence
  Description of Artificial Sequence: Synthetic oligonucleotide
cuccauggcggacccugca

SEQ ID NO: 2973495 - RNA, 19 nt, Artificial Sequence
  Description of Artificial Sequence: Synthetic oligonucleotide
cucugacuccauggcggac

SEQ ID NO: 2973496 - RNA, 19 nt, Artificial Sequence
  Description of Artificial Sequence: Synthetic oligonucleotide
ccugcgucugucccuccag

SEQ ID NO: 2973497 - RNA, 19 nt, Artificial Sequence
  Description of Artificial Sequence: Synthetic oligonucleotide
gcucugacuccauggcgga

SEQ ID NO: 2973498 - RNA, 19 nt, Artificial Sequence
  Description of Artificial Sequence: Synthetic oligonucleotide
ccgcaaucaaccggauacc

SEQ ID NO: 2973499 - RNA, 19 nt, Artificial Sequence
  Description of Artificial Sequence: Synthetic oligonucleotide
cccaaguaaucaauuucua

SEQ ID NO: 2973500 - RNA, 19 nt, Artificial Sequence
  Description of Artificial Sequence: Synthetic oligonucleotide
cugcauuaaucuucucauu

SEQ ID NO: 2973501 - RNA, 19 nt, Artificial Sequence
  Description of Artificial Sequence: Synthetic oligonucleotide
ggcaaagacugcagaucca

SEQ ID NO: 2973502 - RNA, 19 nt, Artificial Sequence
  Description of Artificial Sequence: Synthetic oligonucleotide
cuccagcaucugcucugac

SEQ ID NO: 2973503 - RNA, 19 nt, Artificial Sequence
  Description of Artificial Sequence: Synthetic oligonucleotide
gcugccucguaaucgugua

SEQ ID NO: 2973504 - RNA, 19 nt, Artificial Sequence
  Description of Artificial Sequence: Synthetic oligonucleotide
acguugucugugaggccgu

SEQ ID NO: 2973505 - RNA, 19 nt, Artificial Sequence
  Description of Artificial Sequence: Synthetic oligonucleotide
cgucugucccuccagcauc

SEQ ID NO: 2973506 - RNA, 19 nt, Artificial Sequence
  Description of Artificial Sequence: Synthetic oligonucleotide
gcaagacccuguaguaaga

SEQ ID NO: 2973507 - RNA, 19 nt, Artificial Sequence
  Description of Artificial Sequence: Synthetic oligonucleotide
gguuuucugcaaccugcgu

SEQ ID NO: 2973508 - RNA, 19 nt, Artificial Sequence
  Description of Artificial Sequence: Synthetic oligonucleotide
cugccucguaaucguguaa

SEQ ID NO: 2973509 - RNA, 19 nt, Artificial Sequence
  Description of Artificial Sequence: Synthetic oligonucleotide
augggauuuuggaggucuu

SEQ ID NO: 2973510 - RNA, 19 nt, Artificial Sequence
  Description of Artificial Sequence: Synthetic oligonucleotide
cuucaaacugugccuuauu

SEQ ID NO: 2973511 - RNA, 19 nt, Artificial Sequence
  Description of Artificial Sequence: Synthetic oligonucleotide
cuucuguuuugaugauuuu

SEQ ID NO: 2973512 - RNA, 19 nt, Artificial Sequence
  Description of Artificial Sequence: Synthetic oligonucleotide
caagacccuguaguaagau

SEQ ID NO: 2973513 - RNA, 19 nt, Artificial Sequence
  Description of Artificial Sequence: Synthetic oligonucleotide
gucugucccuccagcaucu

SEQ ID NO: 2973514 - RNA, 19 nt, Artificial Sequence
  Description of Artificial Sequence: Synthetic oligonucleotide
gugaggccguacucggagu

SEQ ID NO: 2973515 - RNA, 19 nt, Artificial Sequence
  Description of Artificial Sequence: Synthetic oligonucleotide
ggcggacccugcaaaccgc

SEQ ID NO: 2973516 - RNA, 19 nt, Artificial Sequence
  Description of Artificial Sequence: Synthetic oligonucleotide
ccgcucaacguugucugug

SEQ ID NO: 2973517 - RNA, 19 nt, Artificial Sequence
  Description of Artificial Sequence: Synthetic oligonucleotide
caaugagagcugccucgua

SEQ ID NO: 2973518 - RNA, 19 nt, Artificial Sequence
  Description of Artificial Sequence: Synthetic oligonucleotide
ggccguacucggagugagg

SEQ ID NO: 2973519 - RNA, 19 nt, Artificial Sequence
  Description of Artificial Sequence: Synthetic oligonucleotide
cagauccaccuucuguuuu

SEQ ID NO: 2973520 - RNA, 19 nt, Artificial Sequence
  Description of Artificial Sequence: Synthetic oligonucleotide
gggagggaagucacggcaa

SEQ ID NO: 2973521 - RNA, 19 nt, Artificial Sequence
  Description of Artificial Sequence: Synthetic oligonucleotide
gcaaccugcgucugucccu

SEQ ID NO: 2973522 - RNA, 19 nt, Artificial Sequence
  Description of Artificial Sequence: Synthetic oligonucleotide
ugacuccauggcggacccu

SEQ ID NO: 2973523 - RNA, 19 nt, Artificial Sequence
  Description of Artificial Sequence: Synthetic oligonucleotide
aggcacggguuggcaaaga

SEQ ID NO: 2973524 - RNA, 19 nt, Artificial Sequence
  Description of Artificial Sequence: Synthetic oligonucleotide
ggacccugcaaaccgcaau

SEQ ID NO: 2973525 - RNA, 19 nt, Artificial Sequence
  Description of Artificial Sequence: Synthetic oligonucleotide
ggagggaagucacggcaau

SEQ ID NO: 2973526 - RNA, 19 nt, Artificial Sequence
  Description of Artificial Sequence: Synthetic oligonucleotide
gcaagcacagcaagacccu

SEQ ID NO: 2973527 - RNA, 19 nt, Artificial Sequence
  Description of Artificial Sequence: Synthetic oligonucleotide
caguagcaaccaagugugu

SEQ ID NO: 2973528 - RNA, 19 nt, Artificial Sequence
  Description of Artificial Sequence: Synthetic oligonucleotide
gcaaugagagcugccucgu

SEQ ID NO: 2973529 - RNA, 19 nt, Artificial Sequence
  Description of Artificial Sequence: Synthetic oligonucleotide
ccauggcggacccugcaaa

SEQ ID NO: 2973530 - RNA, 19 nt, Artificial Sequence
  Description of Artificial Sequence: Synthetic oligonucleotide
gcacggguuggcaaagacu

SEQ ID NO: 2973531 - RNA, 19 nt, Artificial Sequence
  Description of Artificial Sequence: Synthetic oligonucleotide
cgcucaacguugucuguga

SEQ ID NO: 2973532 - RNA, 19 nt, Artificial Sequence
  Description of Artificial Sequence: Synthetic oligonucleotide
cggcaaugagagcugccuc

SEQ ID NO: 2973533 - RNA, 19 nt, Artificial Sequence
  Description of Artificial Sequence: Synthetic oligonucleotide
cggguuggcaaagacugca

SEQ ID NO: 2973534 - RNA, 19 nt, Artificial Sequence
  Description of Artificial Sequence: Synthetic oligonucleotide
cgcaaucaaccggauacca

SEQ ID NO: 2973535 - RNA, 19 nt, Artificial Sequence
  Description of Artificial Sequence: Synthetic oligonucleotide
gcagauccaccuucuguuu

SEQ ID NO: 2973536 - RNA, 19 nt, Artificial Sequence
  Description of Artificial Sequence: Synthetic oligonucleotide
cccugcaaaccgcaaucaa

SEQ ID NO: 2973537 - RNA, 19 nt, Artificial Sequence
  Description of Artificial Sequence: Synthetic oligonucleotide
caccuucuguuuugaugau

SEQ ID NO: 2973538 - RNA, 19 nt, Artificial Sequence
  Description of Artificial Sequence: Synthetic oligonucleotide
gccucguaaucguguaaau

SEQ ID NO: 2973539 - RNA, 19 nt, Artificial Sequence
  Description of Artificial Sequence: Synthetic oligonucleotide
gcggacccugcaaaccgca

SEQ ID NO: 2973540 - RNA, 19 nt, Artificial Sequence
  Description of Artificial Sequence: Synthetic oligonucleotide
guacucggagugaggguuu

SEQ ID NO: 2973541 - RNA, 19 nt, Artificial Sequence
  Description of Artificial Sequence: Synthetic oligonucleotide
gcgucugucccuccagcau

SEQ ID NO: 2973542 - RNA, 19 nt, Artificial Sequence
  Description of Artificial Sequence: Synthetic oligonucleotide
ccuccagcaucugcucuga

SEQ ID NO: 2973543 - RNA, 19 nt, Artificial Sequence
  Description of Artificial Sequence: Synthetic oligonucleotide
cgacuauccgcucaacguu

SEQ ID NO: 2973544 - RNA, 19 nt, Artificial Sequence
  Description of Artificial Sequence: Synthetic oligonucleotide
cguacucggagugaggguu

SEQ ID NO: 2973545 - RNA, 19 nt, Artificial Sequence
  Description of Artificial Sequence: Synthetic oligonucleotide
ccguacucggagugagggu

SEQ ID NO: 2973546 - RNA, 19 nt, Artificial Sequence
  Description of Artificial Sequence: Synthetic oligonucleotide
gcaucugcucugacuccau

SEQ ID NO: 2973547 - RNA, 19 nt, Artificial Sequence
  Description of Artificial Sequence: Synthetic oligonucleotide
cggacccugcaaaccgcaa

SEQ ID NO: 2973548 - RNA, 19 nt, Artificial Sequence
  Description of Artificial Sequence: Synthetic oligonucleotide
cguugucugugaggccgua

SEQ ID NO: 2973549 - RNA, 19 nt, Artificial Sequence
  Description of Artificial Sequence: Synthetic oligonucleotide
agaaauacagugcagauuc

SEQ ID NO: 2973550 - RNA, 19 nt, Artificial Sequence
  Description of Artificial Sequence: Synthetic oligonucleotide
aacaacuacaaacaguguc

SEQ ID NO: 2973551 - RNA, 19 nt, Artificial Sequence
  Description of Artificial Sequence: Synthetic oligonucleotide
ucugaaugcaugaacaugc

SEQ ID NO: 2973552 - RNA, 19 nt, Artificial Sequence
  Description of Artificial Sequence: Synthetic oligonucleotide
aauacucugagaaauacag

SEQ ID NO: 2973553 - RNA, 19 nt, Artificial Sequence
  Description of Artificial Sequence: Synthetic oligonucleotide
aagcguaacugauaguagc

SEQ ID NO: 2973554 - RNA, 19 nt, Artificial Sequence
  Description of Artificial Sequence: Synthetic oligonucleotide
aacaugcucaggaagaggc

SEQ ID NO: 2973555 - RNA, 19 nt, Artificial Sequence
  Description of Artificial Sequence: Synthetic oligonucleotide
uacucugagaaauacagug

SEQ ID NO: 2973556 - RNA, 19 nt, Artificial Sequence
  Description of Artificial Sequence: Synthetic oligonucleotide
aaugggaugcacaagguag

SEQ ID NO: 2973557 - RNA, 19 nt, Artificial Sequence
  Description of Artificial Sequence: Synthetic oligonucleotide
ugguguaauacucugagaa

SEQ ID NO: 2973558 - RNA, 19 nt, Artificial Sequence
  Description of Artificial Sequence: Synthetic oligonucleotide
ugaucugaaugcaugaaca

SEQ ID NO: 2973559 - RNA, 19 nt, Artificial Sequence
  Description of Artificial Sequence: Synthetic oligonucleotide
uguuuggugaucugaaugc

SEQ ID NO: 2973560 - RNA, 19 nt, Artificial Sequence
  Description of Artificial Sequence: Synthetic oligonucleotide
aaugcaugaacaugcucag

SEQ ID NO: 2973561 - RNA, 19 nt, Artificial Sequence
  Description of Artificial Sequence: Synthetic oligonucleotide
gaaaguccagcccagcacg

SEQ ID NO: 2973562 - RNA, 19 nt, Artificial Sequence
  Description of Artificial Sequence: Synthetic oligonucleotide
ucagcagagagaaagucca

SEQ ID NO: 2973563 - RNA, 19 nt, Artificial Sequence
  Description of Artificial Sequence: Synthetic oligonucleotide
uuucacuggcugcugaugg

SEQ ID NO: 2973564 - RNA, 19 nt, Artificial Sequence
  Description of Artificial Sequence: Synthetic oligonucleotide
ugcaugaacaugcucagga

SEQ ID NO: 2973565 - RNA, 19 nt, Artificial Sequence
  Description of Artificial Sequence: Synthetic oligonucleotide
uccauagccuuccugacag

SEQ ID NO: 2973566 - RNA, 19 nt, Artificial Sequence
  Description of Artificial Sequence: Synthetic oligonucleotide
ugacaggcaaagaugaccc

SEQ ID NO: 2973567 - RNA, 19 nt, Artificial Sequence
  Description of Artificial Sequence: Synthetic oligonucleotide
uggagggccugauagaugg

SEQ ID NO: 2973568 - RNA, 19 nt, Artificial Sequence
  Description of Artificial Sequence: Synthetic oligonucleotide
acuacaaacagugucagca

SEQ ID NO: 2973569 - RNA, 19 nt, Artificial Sequence
  Description of Artificial Sequence: Synthetic oligonucleotide
uuguuuggugaucugaaug

SEQ ID NO: 2973570 - RNA, 19 nt, Artificial Sequence
  Description of Artificial Sequence: Synthetic oligonucleotide
agugucagcagagagaaag

SEQ ID NO: 2973571 - RNA, 19 nt, Artificial Sequence
  Description of Artificial Sequence: Synthetic oligonucleotide
ucgauggagggccugauag

SEQ ID NO: 2973572 - RNA, 19 nt, Artificial Sequence
  Description of Artificial Sequence: Synthetic oligonucleotide
cacaaugggaugcacaagg

SEQ ID NO: 2973573 - RNA, 19 nt, Artificial Sequence
  Description of Artificial Sequence: Synthetic oligonucleotide
caaggaacgggccacaccg

SEQ ID NO: 2973574 - RNA, 19 nt, Artificial Sequence
  Description of Artificial Sequence: Synthetic oligonucleotide
uagcaagcguaacugauag

SEQ ID NO: 2973575 - RNA, 19 nt, Artificial Sequence
  Description of Artificial Sequence: Synthetic oligonucleotide
agaaagcacaugcuucacc

SEQ ID NO: 2973576 - RNA, 19 nt, Artificial Sequence
  Description of Artificial Sequence: Synthetic oligonucleotide
gaaugcaugaacaugcuca

SEQ ID NO: 2973577 - RNA, 19 nt, Artificial Sequence
  Description of Artificial Sequence: Synthetic oligonucleotide
cagggcaacaacuacaaac

SEQ ID NO: 2973578 - RNA, 19 nt, Artificial Sequence
  Description of Artificial Sequence: Synthetic oligonucleotide
agaaaguccagcccagcac

SEQ ID NO: 2973579 - RNA, 19 nt, Artificial Sequence
  Description of Artificial Sequence: Synthetic oligonucleotide
cuugguguaauacucugag

SEQ ID NO: 2973580 - RNA, 19 nt, Artificial Sequence
  Description of Artificial Sequence: Synthetic oligonucleotide
aacuacaaacagugucagc

SEQ ID NO: 2973581 - RNA, 19 nt, Artificial Sequence
  Description of Artificial Sequence: Synthetic oligonucleotide
ucuugagaauguuuguuug

SEQ ID NO: 2973582 - RNA, 19 nt, Artificial Sequence
  Description of Artificial Sequence: Synthetic oligonucleotide
uccacuauguaugccaggg

SEQ ID NO: 2973583 - RNA, 19 nt, Artificial Sequence
  Description of Artificial Sequence: Synthetic oligonucleotide
gagaauguuuguuugguga

SEQ ID NO: 2973584 - RNA, 19 nt, Artificial Sequence
  Description of Artificial Sequence: Synthetic oligonucleotide
aauguuuguuuggugaucu

SEQ ID NO: 2973585 - RNA, 19 nt, Artificial Sequence
  Description of Artificial Sequence: Synthetic oligonucleotide
agagagaaaguccagccca

SEQ ID NO: 2973586 - RNA, 19 nt, Artificial Sequence
  Description of Artificial Sequence: Synthetic oligonucleotide
gauaguagccgggagacgc

SEQ ID NO: 2973587 - RNA, 19 nt, Artificial Sequence
  Description of Artificial Sequence: Synthetic oligonucleotide
ucaccagaccuccauagcc

SEQ ID NO: 2973588 - RNA, 19 nt, Artificial Sequence
  Description of Artificial Sequence: Synthetic oligonucleotide
cuugagaauguuuguuugg

SEQ ID NO: 2973589 - RNA, 19 nt, Artificial Sequence
  Description of Artificial Sequence: Synthetic oligonucleotide
ugcaccgucgucuugagaa

SEQ ID NO: 2973590 - RNA, 19 nt, Artificial Sequence
  Description of Artificial Sequence: Synthetic oligonucleotide
uccugacaggcaaagauga

SEQ ID NO: 2973591 - RNA, 19 nt, Artificial Sequence
  Description of Artificial Sequence: Synthetic oligonucleotide
uuggugaucugaaugcaug

SEQ ID NO: 2973592 - RNA, 19 nt, Artificial Sequence
  Description of Artificial Sequence: Synthetic oligonucleotide
uaauacucugagaaauaca

SEQ ID NO: 2973593 - RNA, 19 nt, Artificial Sequence
  Description of Artificial Sequence: Synthetic oligonucleotide
aagguagcaagcguaacug

SEQ ID NO: 2973594 - RNA, 19 nt, Artificial Sequence
  Description of Artificial Sequence: Synthetic oligonucleotide
acaagaaagcacaugcuuc

SEQ ID NO: 2973595 - RNA, 19 nt, Artificial Sequence
  Description of Artificial Sequence: Synthetic oligonucleotide
gaugccacaagaaagcaca

SEQ ID NO: 2973596 - RNA, 19 nt, Artificial Sequence
  Description of Artificial Sequence: Synthetic oligonucleotide
ucugagaaauacagugcag

SEQ ID NO: 2973597 - RNA, 19 nt, Artificial Sequence
  Description of Artificial Sequence: Synthetic oligonucleotide
aagaugacccagcccacag

SEQ ID NO: 2973598 - RNA, 19 nt, Artificial Sequence
  Description of Artificial Sequence: Synthetic oligonucleotide
agaggugucguccacuaug

SEQ ID NO: 2973599 - RNA, 19 nt, Artificial Sequence
  Description of Artificial Sequence: Synthetic oligonucleotide
caugaacaugcucaggaag

SEQ ID NO: 2973600 - RNA, 19 nt, Artificial Sequence
  Description of Artificial Sequence: Synthetic oligonucleotide
aaauacagugcagauuccu

SEQ ID NO: 2973601 - RNA, 19 nt, Artificial Sequence
  Description of Artificial Sequence: Synthetic oligonucleotide
acucugagaaauacagugc

SEQ ID NO: 2973602 - RNA, 19 nt, Artificial Sequence
  Description of Artificial Sequence: Synthetic oligonucleotide
aagcacaugcuucaccaga

SEQ ID NO: 2973603 - RNA, 19 nt, Artificial Sequence
  Description of Artificial Sequence: Synthetic oligonucleotide
cauggcagagguuggagag

SEQ ID NO: 2973604 - RNA, 19 nt, Artificial Sequence
  Description of Artificial Sequence: Synthetic oligonucleotide
agcguaacugauaguagcc

SEQ ID NO: 2973605 - RNA, 19 nt, Artificial Sequence
  Description of Artificial Sequence: Synthetic oligonucleotide
aaagcacaugcuucaccag

SEQ ID NO: 2973606 - RNA, 19 nt, Artificial Sequence
  Description of Artificial Sequence: Synthetic oligonucleotide
gcaaagaugacccagccca

SEQ ID NO: 2973607 - RNA, 19 nt, Artificial Sequence
  Description of Artificial Sequence: Synthetic oligonucleotide
gauuccuuucacuggcugc

SEQ ID NO: 2973608 - RNA, 19 nt, Artificial Sequence
  Description of Artificial Sequence: Synthetic oligonucleotide
agcagagagaaaguccagc

SEQ ID NO: 2973609 - RNA, 19 nt, Artificial Sequence
  Description of Artificial Sequence: Synthetic oligonucleotide
aagaggcccacaaggaacg

SEQ ID NO: 2973610 - RNA, 19 nt, Artificial Sequence
  Description of Artificial Sequence: Synthetic oligonucleotide
aggcaaagaugacccagcc

SEQ ID NO: 2973611 - RNA, 19 nt, Artificial Sequence
  Description of Artificial Sequence: Synthetic oligonucleotide
aacugauaguagccgggag

SEQ ID NO: 2973612 - RNA, 19 nt, Artificial Sequence
  Description of Artificial Sequence: Synthetic oligonucleotide
aucacaaugggaugcacaa

SEQ ID NO: 2973613 - RNA, 19 nt, Artificial Sequence
  Description of Artificial Sequence: Synthetic oligonucleotide
acaacuacaaacaguguca

SEQ ID NO: 2973614 - RNA, 19 nt, Artificial Sequence
  Description of Artificial Sequence: Synthetic oligonucleotide
gccacaagaaagcacaugc

SEQ ID NO: 2973615 - RNA, 19 nt, Artificial Sequence
  Description of Artificial Sequence: Synthetic oligonucleotide
uguaauacucugagaaaua

SEQ ID NO: 2973616 - RNA, 19 nt, Artificial Sequence
  Description of Artificial Sequence: Synthetic oligonucleotide
acugauaguagccgggaga

SEQ ID NO: 2973617 - RNA, 19 nt, Artificial Sequence
  Description of Artificial Sequence: Synthetic oligonucleotide
ugagaaauacagugcagau

SEQ ID NO: 2973618 - RNA, 19 nt, Artificial Sequence
  Description of Artificial Sequence: Synthetic oligonucleotide
ucguccacuauguaugcca

SEQ ID NO: 2973619 - RNA, 19 nt, Artificial Sequence
  Description of Artificial Sequence: Synthetic oligonucleotide
ggaugcacaagguagcaag

SEQ ID NO: 2973620 - RNA, 19 nt, Artificial Sequence
  Description of Artificial Sequence: Synthetic oligonucleotide
uguuuguuuggugaucuga

SEQ ID NO: 2973621 - RNA, 19 nt, Artificial Sequence
  Description of Artificial Sequence: Synthetic oligonucleotide
cuucaccagaccuccauag

SEQ ID NO: 2973622 - RNA, 19 nt, Artificial Sequence
  Description of Artificial Sequence: Synthetic oligonucleotide
ugagaauguuuguuuggug

SEQ ID NO: 2973623 - RNA, 19 nt, Artificial Sequence
  Description of Artificial Sequence: Synthetic oligonucleotide
aguccagcccagcacggcc

SEQ ID NO: 2973624 - RNA, 19 nt, Artificial Sequence
  Description of Artificial Sequence: Synthetic oligonucleotide
gaugacccagcccacagca

SEQ ID NO: 2973625 - RNA, 19 nt, Artificial Sequence
  Description of Artificial Sequence: Synthetic oligonucleotide
accuccauagccuuccuga

SEQ ID NO: 2973626 - RNA, 19 nt, Artificial Sequence
  Description of Artificial Sequence: Synthetic oligonucleotide
aagaaagcacaugcuucac

SEQ ID NO: 2973627 - RNA, 19 nt, Artificial Sequence
  Description of Artificial Sequence: Synthetic oligonucleotide
uagauggcagcagccaugg

SEQ ID NO: 2973628 - RNA, 19 nt, Artificial Sequence
  Description of Artificial Sequence: Synthetic oligonucleotide
guaauacucugagaaauac

SEQ ID NO: 2973629 - RNA, 19 nt, Artificial Sequence
  Description of Artificial Sequence: Synthetic oligonucleotide
guaacugauaguagccggg

SEQ ID NO: 2973630 - RNA, 19 nt, Artificial Sequence
  Description of Artificial Sequence: Synthetic oligonucleotide
gugcagauuccuuucacug

SEQ ID NO: 2973631 - RNA, 19 nt, Artificial Sequence
  Description of Artificial Sequence: Synthetic oligonucleotide
uugagaauguuuguuuggu

SEQ ID NO: 2973632 - RNA, 19 nt, Artificial Sequence
  Description of Artificial Sequence: Synthetic oligonucleotide
uaugccagggcaacaacua

SEQ ID NO: 2973633 - RNA, 19 nt, Artificial Sequence
  Description of Artificial Sequence: Synthetic oligonucleotide
cuacaaacagugucagcag

SEQ ID NO: 2973634 - RNA, 19 nt, Artificial Sequence
  Description of Artificial Sequence: Synthetic oligonucleotide
ugcccacaggguucgaugg

SEQ ID NO: 2973635 - RNA, 19 nt, Artificial Sequence
  Description of Artificial Sequence: Synthetic oligonucleotide
agaauguuuguuuggugau

SEQ ID NO: 2973636 - RNA, 19 nt, Artificial Sequence
  Description of Artificial Sequence: Synthetic oligonucleotide
aggaacgggccacaccggc

SEQ ID NO: 2973637 - RNA, 19 nt, Artificial Sequence
  Description of Artificial Sequence: Synthetic oligonucleotide
ugcacaagguagcaagcgu

SEQ ID NO: 2973638 - RNA, 19 nt, Artificial Sequence
  Description of Artificial Sequence: Synthetic oligonucleotide
aacagugucagcagagaga

SEQ ID NO: 2973639 - RNA, 19 nt, Artificial Sequence
  Description of Artificial Sequence: Synthetic oligonucleotide
caagaaagcacaugcuuca

SEQ ID NO: 2973640 - RNA, 19 nt, Artificial Sequence
  Description of Artificial Sequence: Synthetic oligonucleotide
agaugacccagcccacagc

SEQ ID NO: 2973641 - RNA, 19 nt, Artificial Sequence
  Description of Artificial Sequence: Synthetic oligonucleotide
caagcguaacugauaguag

SEQ ID NO: 2973642 - RNA, 19 nt, Artificial Sequence
  Description of Artificial Sequence: Synthetic oligonucleotide
gaagaggcccacaaggaac

SEQ ID NO: 2973643 - RNA, 19 nt, Artificial Sequence
  Description of Artificial Sequence: Synthetic oligonucleotide
caugcuucaccagaccucc

SEQ ID NO: 2973644 - RNA, 19 nt, Artificial Sequence
  Description of Artificial Sequence: Synthetic oligonucleotide
gugaucugaaugcaugaac

SEQ ID NO: 2973645 - RNA, 19 nt, Artificial Sequence
  Description of Artificial Sequence: Synthetic oligonucleotide
uuuggugaucugaaugcau

SEQ ID NO: 2973646 - RNA, 19 nt, Artificial Sequence
  Description of Artificial Sequence: Synthetic oligonucleotide
cucugagaaauacagugca

SEQ ID NO: 2973647 - RNA, 19 nt, Artificial Sequence
  Description of Artificial Sequence: Synthetic oligonucleotide
agggcaacaacuacaaaca

SEQ ID NO: 2973648 - RNA, 19 nt, Artificial Sequence
  Description of Artificial Sequence: Synthetic oligonucleotide
uucaccagaccuccauagc

SEQ ID NO: 2973649 - RNA, 19 nt, Artificial Sequence
  Description of Artificial Sequence: Synthetic oligonucleotide
augggaugcacaagguagc

SEQ ID NO: 2973650 - RNA, 19 nt, Artificial Sequence
  Description of Artificial Sequence: Synthetic oligonucleotide
ugaaugcaugaacaugcuc

SEQ ID NO: 2973651 - RNA, 19 nt, Artificial Sequence
  Description of Artificial Sequence: Synthetic oligonucleotide
acagugucagcagagagaa

SEQ ID NO: 2973652 - RNA, 19 nt, Artificial Sequence
  Description of Artificial Sequence: Synthetic oligonucleotide
ugccagggcaacaacuaca

SEQ ID NO: 2973653 - RNA, 19 nt, Artificial Sequence
  Description of Artificial Sequence: Synthetic oligonucleotide
agggcuugguguaauacuc

SEQ ID NO: 2973654 - RNA, 19 nt, Artificial Sequence
  Description of Artificial Sequence: Synthetic oligonucleotide
uggugaucugaaugcauga

SEQ ID NO: 2973655 - RNA, 19 nt, Artificial Sequence
  Description of Artificial Sequence: Synthetic oligonucleotide
cagagagaaaguccagccc

SEQ ID NO: 2973656 - RNA, 19 nt, Artificial Sequence
  Description of Artificial Sequence: Synthetic oligonucleotide
uagggcuugguguaauacu

SEQ ID NO: 2973657 - RNA, 19 nt, Artificial Sequence
  Description of Artificial Sequence: Synthetic oligonucleotide
acaggcaaagaugacccag

SEQ ID NO: 2973658 - RNA, 19 nt, Artificial Sequence
  Description of Artificial Sequence: Synthetic oligonucleotide
aucugaaugcaugaacaug

SEQ ID NO: 2973659 - RNA, 19 nt, Artificial Sequence
  Description of Artificial Sequence: Synthetic oligonucleotide
cacaggguucgauggaggg

SEQ ID NO: 2973660 - RNA, 19 nt, Artificial Sequence
  Description of Artificial Sequence: Synthetic oligonucleotide
gugucguccacuauguaug

SEQ ID NO: 2973661 - RNA, 19 nt, Artificial Sequence
  Description of Artificial Sequence: Synthetic oligonucleotide
uacagugcagauuccuuuc

SEQ ID NO: 2973662 - RNA, 19 nt, Artificial Sequence
  Description of Artificial Sequence: Synthetic oligonucleotide
cugauaguagccgggagac

SEQ ID NO: 2973663 - RNA, 19 nt, Artificial Sequence
  Description of Artificial Sequence: Synthetic oligonucleotide
caugcucaggaagaggccc

SEQ ID NO: 2973664 - RNA, 19 nt, Artificial Sequence
  Description of Artificial Sequence: Synthetic oligonucleotide
gaacgggccacaccggcag

SEQ ID NO: 2973665 - RNA, 19 nt, Artificial Sequence
  Description of Artificial Sequence: Synthetic oligonucleotide
cacuauguaugccagggca

SEQ ID NO: 2973666 - RNA, 19 nt, Artificial Sequence
  Description of Artificial Sequence: Synthetic oligonucleotide
gacgccagaugccacaaga

SEQ ID NO: 2973667 - RNA, 19 nt, Artificial Sequence
  Description of Artificial Sequence: Synthetic oligonucleotide
gaacaugcucaggaagagg

SEQ ID NO: 2973668 - RNA, 19 nt, Artificial Sequence
  Description of Artificial Sequence: Synthetic oligonucleotide
agagguuggagaggugucg

SEQ ID NO: 2973669 - RNA, 19 nt, Artificial Sequence
  Description of Artificial Sequence: Synthetic oligonucleotide
uagccuuccugacaggcaa

SEQ ID NO: 2973670 - RNA, 19 nt, Artificial Sequence
  Description of Artificial Sequence: Synthetic oligonucleotide
caggguucgauggagggcc

SEQ ID NO: 2973671 - RNA, 19 nt, Artificial Sequence
  Description of Artificial Sequence: Synthetic oligonucleotide
agauuccuuucacuggcug

SEQ ID NO: 2973672 - RNA, 19 nt, Artificial Sequence
  Description of Artificial Sequence: Synthetic oligonucleotide
gucagcagagagaaagucc

SEQ ID NO: 2973673 - RNA, 19 nt, Artificial Sequence
  Description of Artificial Sequence: Synthetic oligonucleotide
ccagaugccacaagaaagc

SEQ ID NO: 2973674 - RNA, 19 nt, Artificial Sequence
  Description of Artificial Sequence: Synthetic oligonucleotide
uuuguuuggugaucugaau

SEQ ID NO: 2973675 - RNA, 19 nt, Artificial Sequence
  Description of Artificial Sequence: Synthetic oligonucleotide
agcacaugcuucaccagac

SEQ ID NO: 2973676 - RNA, 19 nt, Artificial Sequence
  Description of Artificial Sequence: Synthetic oligonucleotide
augcacaagguagcaagcg

SEQ ID NO: 2973677 - RNA, 19 nt, Artificial Sequence
  Description of Artificial Sequence: Synthetic oligonucleotide
caggcaaagaugacccagc

SEQ ID NO: 2973678 - RNA, 19 nt, Artificial Sequence
  Description of Artificial Sequence: Synthetic oligonucleotide
augccagggcaacaacuac

SEQ ID NO: 2973679 - RNA, 19 nt, Artificial Sequence
  Description of Artificial Sequence: Synthetic oligonucleotide
aggcccacaaggaacgggc

SEQ ID NO: 2973680 - RNA, 19 nt, Artificial Sequence
  Description of Artificial Sequence: Synthetic oligonucleotide
auacagugcagauuccuuu

SEQ ID NO: 2973681 - RNA, 19 nt, Artificial Sequence
  Description of Artificial Sequence: Synthetic oligonucleotide
cauagccuuccugacaggc

SEQ ID NO: 2973682 - RNA, 19 nt, Artificial Sequence
  Description of Artificial Sequence: Synthetic oligonucleotide
acaggguucgauggagggc

SEQ ID NO: 2973683 - RNA, 19 nt, Artificial Sequence
  Description of Artificial Sequence: Synthetic oligonucleotide
gagaaaguccagcccagca

SEQ ID NO: 2973684 - RNA, 19 nt, Artificial Sequence
  Description of Artificial Sequence: Synthetic oligonucleotide
agaugccacaagaaagcac

SEQ ID NO: 2973685 - RNA, 19 nt, Artificial Sequence
  Description of Artificial Sequence: Synthetic oligonucleotide
gaugcacaagguagcaagc

SEQ ID NO: 2973686 - RNA, 19 nt, Artificial Sequence
  Description of Artificial Sequence: Synthetic oligonucleotide
gcagagagaaaguccagcc

SEQ ID NO: 2973687 - RNA, 19 nt, Artificial Sequence
  Description of Artificial Sequence: Synthetic oligonucleotide
gcagauuccuuucacuggc

SEQ ID NO: 2973688 - RNA, 19 nt, Artificial Sequence
  Description of Artificial Sequence: Synthetic oligonucleotide
uguaugccagggcaacaac

SEQ ID NO: 2973689 - RNA, 19 nt, Artificial Sequence
  Description of Artificial Sequence: Synthetic oligonucleotide
uugguguaauacucugaga

SEQ ID NO: 2973690 - RNA, 19 nt, Artificial Sequence
  Description of Artificial Sequence: Synthetic oligonucleotide
aaaguccagcccagcacgg

SEQ ID NO: 2973691 - RNA, 19 nt, Artificial Sequence
  Description of Artificial Sequence: Synthetic oligonucleotide
agagaaaguccagcccagc

SEQ ID NO: 2973692 - RNA, 19 nt, Artificial Sequence
  Description of Artificial Sequence: Synthetic oligonucleotide
aaguccagcccagcacggc

SEQ ID NO: 2973693 - RNA, 19 nt, Artificial Sequence
  Description of Artificial Sequence: Synthetic oligonucleotide
aauacagugcagauuccuu

SEQ ID NO: 2973694 - RNA, 19 nt, Artificial Sequence
  Description of Artificial Sequence: Synthetic oligonucleotide
aaagaugacccagcccaca

SEQ ID NO: 2973695 - RNA, 19 nt, Artificial Sequence
  Description of Artificial Sequence: Synthetic oligonucleotide
ugucguccacuauguaugc

SEQ ID NO: 2973696 - RNA, 19 nt, Artificial Sequence
  Description of Artificial Sequence: Synthetic oligonucleotide
uaacugauaguagccggga

SEQ ID NO: 2973697 - RNA, 19 nt, Artificial Sequence
  Description of Artificial Sequence: Synthetic oligonucleotide
caacuacaaacagugucag

SEQ ID NO: 2973698 - RNA, 19 nt, Artificial Sequence
  Description of Artificial Sequence: Synthetic oligonucleotide
ucacuggcugcugauggag

SEQ ID NO: 2973699 - RNA, 19 nt, Artificial Sequence
  Description of Artificial Sequence: Synthetic oligonucleotide
acaugcuucaccagaccuc

SEQ ID NO: 2973700 - RNA, 19 nt, Artificial Sequence
  Description of Artificial Sequence: Synthetic oligonucleotide
acaagguagcaagcguaac

SEQ ID NO: 2973701 - RNA, 19 nt, Artificial Sequence
  Description of Artificial Sequence: Synthetic oligonucleotide
acaugcucaggaagaggcc

SEQ ID NO: 2973702 - RNA, 19 nt, Artificial Sequence
  Description of Artificial Sequence: Synthetic oligonucleotide
gaaauacagugcagauucc

SEQ ID NO: 2973703 - RNA, 19 nt, Artificial Sequence
  Description of Artificial Sequence: Synthetic oligonucleotide
gagagaaaguccagcccag

SEQ ID NO: 2973704 - RNA, 19 nt, Artificial Sequence
  Description of Artificial Sequence: Synthetic oligonucleotide
cuauguaugccagggcaac

SEQ ID NO: 2973705 - RNA, 19 nt, Artificial Sequence
  Description of Artificial Sequence: Synthetic oligonucleotide
gccagaugccacaagaaag

SEQ ID NO: 2973706 - RNA, 19 nt, Artificial Sequence
  Description of Artificial Sequence: Synthetic oligonucleotide
auaguagccgggagacgcc

SEQ ID NO: 2973707 - RNA, 19 nt, Artificial Sequence
  Description of Artificial Sequence: Synthetic oligonucleotide
uccuuucacuggcugcuga

SEQ ID NO: 2973708 - RNA, 19 nt, Artificial Sequence
  Description of Artificial Sequence: Synthetic oligonucleotide
ugauaguagccgggagacg

SEQ ID NO: 2973709 - RNA, 19 nt, Artificial Sequence
  Description of Artificial Sequence: Synthetic oligonucleotide
acagugcagauuccuuuca

SEQ ID NO: 2973710 - RNA, 19 nt, Artificial Sequence
  Description of Artificial Sequence: Synthetic oligonucleotide
ugcuucaccagaccuccau

SEQ ID NO: 2973711 - RNA, 19 nt, Artificial Sequence
  Description of Artificial Sequence: Synthetic oligonucleotide
gaauguuuguuuggugauc

SEQ ID NO: 2973712 - RNA, 19 nt, Artificial Sequence
  Description of Artificial Sequence: Synthetic oligonucleotide
ucacaaugggaugcacaag

SEQ ID NO: 2973713 - RNA, 19 nt, Artificial Sequence
  Description of Artificial Sequence: Synthetic oligonucleotide
uucacuggcugcugaugga

SEQ ID NO: 2973714 - RNA, 19 nt, Artificial Sequence
  Description of Artificial Sequence: Synthetic oligonucleotide
uauguaugccagggcaaca

SEQ ID NO: 2973715 - RNA, 19 nt, Artificial Sequence
  Description of Artificial Sequence: Synthetic oligonucleotide
ccugauagauggcagcagc

SEQ ID NO: 2973716 - RNA, 19 nt, Artificial Sequence
  Description of Artificial Sequence: Synthetic oligonucleotide
auagauggcagcagccaug

SEQ ID NO: 2973717 - RNA, 19 nt, Artificial Sequence
  Description of Artificial Sequence: Synthetic oligonucleotide
caaagaugacccagcccac

SEQ ID NO: 2973718 - RNA, 19 nt, Artificial Sequence
  Description of Artificial Sequence: Synthetic oligonucleotide
cguaacugauaguagccgg

SEQ ID NO: 2973719 - RNA, 19 nt, Artificial Sequence
  Description of Artificial Sequence: Synthetic oligonucleotide
cagaccuccauagccuucc

SEQ ID NO: 2973720 - RNA, 19 nt, Artificial Sequence
  Description of Artificial Sequence: Synthetic oligonucleotide
agguagcaagcguaacuga

SEQ ID NO: 2973721 - RNA, 19 nt, Artificial Sequence
  Description of Artificial Sequence: Synthetic oligonucleotide
agguuggagaggugucguc

SEQ ID NO: 2973722 - RNA, 19 nt, Artificial Sequence
  Description of Artificial Sequence: Synthetic oligonucleotide
guuuguuuggugaucugaa

SEQ ID NO: 2973723 - RNA, 19 nt, Artificial Sequence
  Description of Artificial Sequence: Synthetic oligonucleotide
acuggcugcugauggagau

SEQ ID NO: 2973724 - RNA, 19 nt, Artificial Sequence
  Description of Artificial Sequence: Synthetic oligonucleotide
ugccacaagaaagcacaug

SEQ ID NO: 2973725 - RNA, 19 nt, Artificial Sequence
  Description of Artificial Sequence: Synthetic oligonucleotide
guguaauacucugagaaau

SEQ ID NO: 2973726 - RNA, 19 nt, Artificial Sequence
  Description of Artificial Sequence: Synthetic oligonucleotide
guccacuauguaugccagg

SEQ ID NO: 2973727 - RNA, 19 nt, Artificial Sequence
  Description of Artificial Sequence: Synthetic oligonucleotide
guuggagaggugucgucca

SEQ ID NO: 2973728 - RNA, 19 nt, Artificial Sequence
  Description of Artificial Sequence: Synthetic oligonucleotide
guagggcuugguguaauac

SEQ ID NO: 2973729 - RNA, 19 nt, Artificial Sequence
  Description of Artificial Sequence: Synthetic oligonucleotide
gauagauggcagcagccau

SEQ ID NO: 2973730 - RNA, 19 nt, Artificial Sequence
  Description of Artificial Sequence: Synthetic oligonucleotide
auggcagagguuggagagg

SEQ ID NO: 2973731 - RNA, 19 nt, Artificial Sequence
  Description of Artificial Sequence: Synthetic oligonucleotide
gccgggagacgccagaugc

SEQ ID NO: 2973732 - RNA, 19 nt, Artificial Sequence
  Description of Artificial Sequence: Synthetic oligonucleotide
auguuuguuuggugaucug

SEQ ID NO: 2973733 - RNA, 19 nt, Artificial Sequence
  Description of Artificial Sequence: Synthetic oligonucleotide
ugggaugcacaagguagca

SEQ ID NO: 2973734 - RNA, 19 nt, Artificial Sequence
  Description of Artificial Sequence: Synthetic oligonucleotide
aaggaacgggccacaccgg

SEQ ID NO: 2973735 - RNA, 19 nt, Artificial Sequence
  Description of Artificial Sequence: Synthetic oligonucleotide
gcaagcguaacugauagua

SEQ ID NO: 2973736 - RNA, 19 nt, Artificial Sequence
  Description of Artificial Sequence: Synthetic oligonucleotide
ggcuugguguaauacucug

SEQ ID NO: 2973737 - RNA, 19 nt, Artificial Sequence
  Description of Artificial Sequence: Synthetic oligonucleotide
cuuccugacaggcaaagau

SEQ ID NO: 2973738 - RNA, 19 nt, Artificial Sequence
  Description of Artificial Sequence: Synthetic oligonucleotide
cugcccacaggguucgaug

SEQ ID NO: 2973739 - RNA, 19 nt, Artificial Sequence
  Description of Artificial Sequence: Synthetic oligonucleotide
gguuggagaggugucgucc

SEQ ID NO: 2973740 - RNA, 19 nt, Artificial Sequence
  Description of Artificial Sequence: Synthetic oligonucleotide
auacucugagaaauacagu

SEQ ID NO: 2973741 - RNA, 19 nt, Artificial Sequence
  Description of Artificial Sequence: Synthetic oligonucleotide
gguguaauacucugagaaa

SEQ ID NO: 2973742 - RNA, 19 nt, Artificial Sequence
  Description of Artificial Sequence: Synthetic oligonucleotide
cuuucacuggcugcugaug

SEQ ID NO: 2973743 - RNA, 19 nt, Artificial Sequence
  Description of Artificial Sequence: Synthetic oligonucleotide
uuggagaggugucguccac

SEQ ID NO: 2973744 - RNA, 19 nt, Artificial Sequence
  Description of Artificial Sequence: Synthetic oligonucleotide
acuauguaugccagggcaa

SEQ ID NO: 2973745 - RNA, 19 nt, Artificial Sequence
  Description of Artificial Sequence: Synthetic oligonucleotide
ggcaaagaugacccagccc

SEQ ID NO: 2973746 - RNA, 19 nt, Artificial Sequence
  Description of Artificial Sequence: Synthetic oligonucleotide
guuuggugaucugaaugca

SEQ ID NO: 2973747 - RNA, 19 nt, Artificial Sequence
  Description of Artificial Sequence: Synthetic oligonucleotide
aggaagaggcccacaagga

SEQ ID NO: 2973748 - RNA, 19 nt, Artificial Sequence
  Description of Artificial Sequence: Synthetic oligonucleotide
gcguaacugauaguagccg

SEQ ID NO: 2973749 - RNA, 19 nt, Artificial Sequence
  Description of Artificial Sequence: Synthetic oligonucleotide
augcaugaacaugcucagg

SEQ ID NO: 2973750 - RNA, 19 nt, Artificial Sequence
  Description of Artificial Sequence: Synthetic oligonucleotide
cagagguuggagagguguc

SEQ ID NO: 2973751 - RNA, 19 nt, Artificial Sequence
  Description of Artificial Sequence: Synthetic oligonucleotide
cacaagguagcaagcguaa

SEQ ID NO: 2973752 - RNA, 19 nt, Artificial Sequence
  Description of Artificial Sequence: Synthetic oligonucleotide
caagguagcaagcguaacu

SEQ ID NO: 2973753 - RNA, 19 nt, Artificial Sequence
  Description of Artificial Sequence: Synthetic oligonucleotide
acaaugggaugcacaaggu

SEQ ID NO: 2973754 - RNA, 19 nt, Artificial Sequence
  Description of Artificial Sequence: Synthetic oligonucleotide
gaccuccauagccuuccug

SEQ ID NO: 2973755 - RNA, 19 nt, Artificial Sequence
  Description of Artificial Sequence: Synthetic oligonucleotide
gagggccugauagauggca

SEQ ID NO: 2973756 - RNA, 19 nt, Artificial Sequence
  Description of Artificial Sequence: Synthetic oligonucleotide
cagcagagagaaaguccag

SEQ ID NO: 2973757 - RNA, 19 nt, Artificial Sequence
  Description of Artificial Sequence: Synthetic oligonucleotide
uucgauggagggccugaua

SEQ ID NO: 2973758 - RNA, 19 nt, Artificial Sequence
  Description of Artificial Sequence: Synthetic oligonucleotide
gacaggcaaagaugaccca

SEQ ID NO: 2973759 - RNA, 19 nt, Artificial Sequence
  Description of Artificial Sequence: Synthetic oligonucleotide
agcaagcguaacugauagu

SEQ ID NO: 2973760 - RNA, 19 nt, Artificial Sequence
  Description of Artificial Sequence: Synthetic oligonucleotide
gauggagggccugauagau

SEQ ID NO: 2973761 - RNA, 19 nt, Artificial Sequence
  Description of Artificial Sequence: Synthetic oligonucleotide
cacaagaaagcacaugcuu

SEQ ID NO: 2973762 - RNA, 19 nt, Artificial Sequence
  Description of Artificial Sequence: Synthetic oligonucleotide
uggagaggugucguccacu

SEQ ID NO: 2973763 - RNA, 19 nt, Artificial Sequence
  Description of Artificial Sequence: Synthetic oligonucleotide
uaguagccgggagacgcca

SEQ ID NO: 2973764 - RNA, 19 nt, Artificial Sequence
  Description of Artificial Sequence: Synthetic oligonucleotide
agggccugauagauggcag

SEQ ID NO: 2973765 - RNA, 19 nt, Artificial Sequence
  Description of Artificial Sequence: Synthetic oligonucleotide
aguagggcuugguguaaua

SEQ ID NO: 2973766 - RNA, 19 nt, Artificial Sequence
  Description of Artificial Sequence: Synthetic oligonucleotide
accagaccuccauagccuu

SEQ ID NO: 2973767 - RNA, 19 nt, Artificial Sequence
  Description of Artificial Sequence: Synthetic oligonucleotide
caaugggaugcacaaggua

SEQ ID NO: 2973768 - RNA, 19 nt, Artificial Sequence
  Description of Artificial Sequence: Synthetic oligonucleotide
cacaugcuucaccagaccu

SEQ ID NO: 2973769 - RNA, 19 nt, Artificial Sequence
  Description of Artificial Sequence: Synthetic oligonucleotide
gagaaauacagugcagauu

SEQ ID NO: 2973770 - RNA, 19 nt, Artificial Sequence
  Description of Artificial Sequence: Synthetic oligonucleotide
ggaagaggcccacaaggaa

SEQ ID NO: 2973771 - RNA, 19 nt, Artificial Sequence
  Description of Artificial Sequence: Synthetic oligonucleotide
guagcaagcguaacugaua

SEQ ID NO: 2973772 - RNA, 19 nt, Artificial Sequence
  Description of Artificial Sequence: Synthetic oligonucleotide
ggccacaccggcaguaggg

SEQ ID NO: 2973773 - RNA, 19 nt, Artificial Sequence
  Description of Artificial Sequence: Synthetic oligonucleotide
agacgccagaugccacaag

SEQ ID NO: 2973774 - RNA, 19 nt, Artificial Sequence
  Description of Artificial Sequence: Synthetic oligonucleotide
ggugucguccacuauguau

SEQ ID NO: 2973775 - RNA, 19 nt, Artificial Sequence
  Description of Artificial Sequence: Synthetic oligonucleotide
uuccuuucacuggcugcug

SEQ ID NO: 2973776 - RNA, 19 nt, Artificial Sequence
  Description of Artificial Sequence: Synthetic oligonucleotide
aacgggccacaccggcagu

SEQ ID NO: 2973777 - RNA, 19 nt, Artificial Sequence
  Description of Artificial Sequence: Synthetic oligonucleotide
agccgggagacgccagaug

SEQ ID NO: 2973778 - RNA, 19 nt, Artificial Sequence
  Description of Artificial Sequence: Synthetic oligonucleotide
guaugccagggcaacaacu

SEQ ID NO: 2973779 - RNA, 19 nt, Artificial Sequence
  Description of Artificial Sequence: Synthetic oligonucleotide
caccgucgucuugagaaug

SEQ ID NO: 2973780 - RNA, 19 nt, Artificial Sequence
  Description of Artificial Sequence: Synthetic oligonucleotide
cagaugccacaagaaagca

SEQ ID NO: 2973781 - RNA, 19 nt, Artificial Sequence
  Description of Artificial Sequence: Synthetic oligonucleotide
gaggugucguccacuaugu

SEQ ID NO: 2973782 - RNA, 19 nt, Artificial Sequence
  Description of Artificial Sequence: Synthetic oligonucleotide
ggagacgccagaugccaca

SEQ ID NO: 2973783 - RNA, 19 nt, Artificial Sequence
  Description of Artificial Sequence: Synthetic oligonucleotide
gucguccacuauguaugcc

SEQ ID NO: 2973784 - RNA, 19 nt, Artificial Sequence
  Description of Artificial Sequence: Synthetic oligonucleotide
ccacaggguucgauggagg

SEQ ID NO: 2973785 - RNA, 19 nt, Artificial Sequence
  Description of Artificial Sequence: Synthetic oligonucleotide
gcacaugcuucaccagacc

SEQ ID NO: 2973786 - RNA, 19 nt, Artificial Sequence
  Description of Artificial Sequence: Synthetic oligonucleotide
ugcucaggaagaggcccac

SEQ ID NO: 2973787 - RNA, 19 nt, Artificial Sequence
  Description of Artificial Sequence: Synthetic oligonucleotide
cugaaugcaugaacaugcu

SEQ ID NO: 2973788 - RNA, 19 nt, Artificial Sequence
  Description of Artificial Sequence: Synthetic oligonucleotide
accgucgucuugagaaugu

SEQ ID NO: 2973789 - RNA, 19 nt, Artificial Sequence
  Description of Artificial Sequence: Synthetic oligonucleotide
auggagggccugauagaug

SEQ ID NO: 2973790 - RNA, 19 nt, Artificial Sequence
  Description of Artificial Sequence: Synthetic oligonucleotide
cagcccacagcagcugccc

SEQ ID NO: 2973791 - RNA, 19 nt, Artificial Sequence
  Description of Artificial Sequence: Synthetic oligonucleotide
guagccgggagacgccaga

SEQ ID NO: 2973792 - RNA, 19 nt, Artificial Sequence
  Description of Artificial Sequence: Synthetic oligonucleotide
cagcugcccacaggguucg

SEQ ID NO: 2973793 - RNA, 19 nt, Artificial Sequence
  Description of Artificial Sequence: Synthetic oligonucleotide
gcaugaacaugcucaggaa

SEQ ID NO: 2973794 - RNA, 19 nt, Artificial Sequence
  Description of Artificial Sequence: Synthetic oligonucleotide
augcucaggaagaggccca

SEQ ID NO: 2973795 - RNA, 19 nt, Artificial Sequence
  Description of Artificial Sequence: Synthetic oligonucleotide
caccagaccuccauagccu

SEQ ID NO: 2973796 - RNA, 19 nt, Artificial Sequence
  Description of Artificial Sequence: Synthetic oligonucleotide
acaccggcaguagggcuug

SEQ ID NO: 2973797 - RNA, 19 nt, Artificial Sequence
  Description of Artificial Sequence: Synthetic oligonucleotide
ccacuauguaugccagggc

SEQ ID NO: 2973798 - RNA, 19 nt, Artificial Sequence
  Description of Artificial Sequence: Synthetic oligonucleotide
aguagccgggagacgccag

SEQ ID NO: 2973799 - RNA, 19 nt, Artificial Sequence
  Description of Artificial Sequence: Synthetic oligonucleotide
ggugaucugaaugcaugaa

SEQ ID NO: 2973800 - RNA, 19 nt, Artificial Sequence
  Description of Artificial Sequence: Synthetic oligonucleotide
agaccuccauagccuuccu

SEQ ID NO: 2973801 - RNA, 19 nt, Artificial Sequence
  Description of Artificial Sequence: Synthetic oligonucleotide
augacccagcccacagcag

SEQ ID NO: 2973802 - RNA, 19 nt, Artificial Sequence
  Description of Artificial Sequence: Synthetic oligonucleotide
cguccacuauguaugccag

SEQ ID NO: 2973803 - RNA, 19 nt, Artificial Sequence
  Description of Artificial Sequence: Synthetic oligonucleotide
cacuggcugcugauggaga

SEQ ID NO: 2973804 - RNA, 19 nt, Artificial Sequence
  Description of Artificial Sequence: Synthetic oligonucleotide
agcccacagcagcugccca

SEQ ID NO: 2973805 - RNA, 19 nt, Artificial Sequence
  Description of Artificial Sequence: Synthetic oligonucleotide
ccugacaggcaaagaugac

SEQ ID NO: 2973806 - RNA, 19 nt, Artificial Sequence
  Description of Artificial Sequence: Synthetic oligonucleotide
gagguuggagaggugucgu

SEQ ID NO: 2973807 - RNA, 19 nt, Artificial Sequence
  Description of Artificial Sequence: Synthetic oligonucleotide
ggagaggugucguccacua

SEQ ID NO: 2973808 - RNA, 19 nt, Artificial Sequence
  Description of Artificial Sequence: Synthetic oligonucleotide
gagacgccagaugccacaa

SEQ ID NO: 2973809 - RNA, 19 nt, Artificial Sequence
  Description of Artificial Sequence: Synthetic oligonucleotide
caacaacuacaaacagugu

SEQ ID NO: 2973810 - RNA, 19 nt, Artificial Sequence
  Description of Artificial Sequence: Synthetic oligonucleotide
ggccugauagauggcagca

SEQ ID NO: 2973811 - RNA, 19 nt, Artificial Sequence
  Description of Artificial Sequence: Synthetic oligonucleotide
agccauggcagagguugga

SEQ ID NO: 2973812 - RNA, 19 nt, Artificial Sequence
  Description of Artificial Sequence: Synthetic oligonucleotide
acgccagaugccacaagaa

SEQ ID NO: 2973813 - RNA, 19 nt, Artificial Sequence
  Description of Artificial Sequence: Synthetic oligonucleotide
gccauggcagagguuggag

SEQ ID NO: 2973814 - RNA, 19 nt, Artificial Sequence
  Description of Artificial Sequence: Synthetic oligonucleotide
gccuuccugacaggcaaag

SEQ ID NO: 2973815 - RNA, 19 nt, Artificial Sequence
  Description of Artificial Sequence: Synthetic oligonucleotide
gcuugguguaauacucuga

SEQ ID NO: 2973816 - RNA, 19 nt, Artificial Sequence
  Description of Artificial Sequence: Synthetic oligonucleotide
gguagcaagcguaacugau

SEQ ID NO: 2973817 - RNA, 19 nt, Artificial Sequence
  Description of Artificial Sequence: Synthetic oligonucleotide
cccacaaggaacgggccac

SEQ ID NO: 2973818 - RNA, 19 nt, Artificial Sequence
  Description of Artificial Sequence: Synthetic oligonucleotide
cccacaggguucgauggag

SEQ ID NO: 2973819 - RNA, 19 nt, Artificial Sequence
  Description of Artificial Sequence: Synthetic oligonucleotide
gcacaagguagcaagcgua

SEQ ID NO: 2973820 - RNA, 19 nt, Artificial Sequence
  Description of Artificial Sequence: Synthetic oligonucleotide
uagccgggagacgccagau

SEQ ID NO: 2973821 - RNA, 19 nt, Artificial Sequence
  Description of Artificial Sequence: Synthetic oligonucleotide
gcagagguuggagaggugu

SEQ ID NO: 2973822 - RNA, 19 nt, Artificial Sequence
  Description of Artificial Sequence: Synthetic oligonucleotide
ccggcaguagggcuuggug

SEQ ID NO: 2973823 - RNA, 19 nt, Artificial Sequence
  Description of Artificial Sequence: Synthetic oligonucleotide
ccgggagacgccagaugcc

SEQ ID NO: 2973824 - RNA, 19 nt, Artificial Sequence
  Description of Artificial Sequence: Synthetic oligonucleotide
augccacaagaaagcacau

SEQ ID NO: 2973825 - RNA, 19 nt, Artificial Sequence
  Description of Artificial Sequence: Synthetic oligonucleotide
ccauggcagagguuggaga

SEQ ID NO: 2973826 - RNA, 19 nt, Artificial Sequence
  Description of Artificial Sequence: Synthetic oligonucleotide
gccagggcaacaacuacaa

SEQ ID NO: 2973827 - RNA, 19 nt, Artificial Sequence
  Description of Artificial Sequence: Synthetic oligonucleotide
aggugucguccacuaugua

SEQ ID NO: 2973828 - RNA, 19 nt, Artificial Sequence
  Description of Artificial Sequence: Synthetic oligonucleotide
gguucgauggagggccuga

SEQ ID NO: 2973829 - RNA, 19 nt, Artificial Sequence
  Description of Artificial Sequence: Synthetic oligonucleotide
gcagcugcccacaggguuc

SEQ ID NO: 2973830 - RNA, 19 nt, Artificial Sequence
  Description of Artificial Sequence: Synthetic oligonucleotide
ccauagccuuccugacagg

SEQ ID NO: 2973831 - RNA, 19 nt, Artificial Sequence
  Description of Artificial Sequence: Synthetic oligonucleotide
gccacaccggcaguagggc

SEQ ID NO: 2973832 - RNA, 19 nt, Artificial Sequence
  Description of Artificial Sequence: Synthetic oligonucleotide
acccagcccacagcagcug

SEQ ID NO: 2973833 - RNA, 19 nt, Artificial Sequence
  Description of Artificial Sequence: Synthetic oligonucleotide
cagauuccuuucacuggcu

SEQ ID NO: 2973834 - RNA, 19 nt, Artificial Sequence
  Description of Artificial Sequence: Synthetic oligonucleotide
gacccagcccacagcagcu

SEQ ID NO: 2973835 - RNA, 19 nt, Artificial Sequence
  Description of Artificial Sequence: Synthetic oligonucleotide
cccagcccacagcagcugc

SEQ ID NO: 2973836 - RNA, 19 nt, Artificial Sequence
  Description of Artificial Sequence: Synthetic oligonucleotide
gcuucaccagaccuccaua

SEQ ID NO: 2973837 - RNA, 19 nt, Artificial Sequence
  Description of Artificial Sequence: Synthetic oligonucleotide
cacaccggcaguagggcuu

SEQ ID NO: 2973838 - RNA, 19 nt, Artificial Sequence
  Description of Artificial Sequence: Synthetic oligonucleotide
gagaggugucguccacuau

SEQ ID NO: 2973839 - RNA, 19 nt, Artificial Sequence
  Description of Artificial Sequence: Synthetic oligonucleotide
ggcccacaaggaacgggcc

SEQ ID NO: 2973840 - RNA, 19 nt, Artificial Sequence
  Description of Artificial Sequence: Synthetic oligonucleotide
ccugcaccgucgucuugag

SEQ ID NO: 2973841 - RNA, 19 nt, Artificial Sequence
  Description of Artificial Sequence: Synthetic oligonucleotide
ccagaccuccauagccuuc

SEQ ID NO: 2973842 - RNA, 19 nt, Artificial Sequence
  Description of Artificial Sequence: Synthetic oligonucleotide
ggaacgggccacaccggca

SEQ ID NO: 2973843 - RNA, 19 nt, Artificial Sequence
  Description of Artificial Sequence: Synthetic oligonucleotide
ccacaagaaagcacaugcu

SEQ ID NO: 2973844 - RNA, 19 nt, Artificial Sequence
  Description of Artificial Sequence: Synthetic oligonucleotide
acgggccacaccggcagua

SEQ ID NO: 2973845 - RNA, 19 nt, Artificial Sequence
  Description of Artificial Sequence: Synthetic oligonucleotide
gggaugcacaagguagcaa

SEQ ID NO: 2973846 - RNA, 19 nt, Artificial Sequence
  Description of Artificial Sequence: Synthetic oligonucleotide
aggguucgauggagggccu

SEQ ID NO: 2973847 - RNA, 19 nt, Artificial Sequence
  Description of Artificial Sequence: Synthetic oligonucleotide
ggagggccugauagauggc

SEQ ID NO: 2973848 - RNA, 19 nt, Artificial Sequence
  Description of Artificial Sequence: Synthetic oligonucleotide
agccuuccugacaggcaaa

SEQ ID NO: 2973849 - RNA, 19 nt, Artificial Sequence
  Description of Artificial Sequence: Synthetic oligonucleotide
cugcaccgucgucuugaga

SEQ ID NO: 2973850 - RNA, 19 nt, Artificial Sequence
  Description of Artificial Sequence: Synthetic oligonucleotide
gggagacgccagaugccac

SEQ ID NO: 2973851 - RNA, 19 nt, Artificial Sequence
  Description of Artificial Sequence: Synthetic oligonucleotide
ggguucgauggagggccug

SEQ ID NO: 2973852 - RNA, 19 nt, Artificial Sequence
  Description of Artificial Sequence: Synthetic oligonucleotide
cgccagaugccacaagaaa

SEQ ID NO: 2973853 - RNA, 19 nt, Artificial Sequence
  Description of Artificial Sequence: Synthetic oligonucleotide
ggcagagguuggagaggug

SEQ ID NO: 2973854 - RNA, 19 nt, Artificial Sequence
  Description of Artificial Sequence: Synthetic oligonucleotide
gggcuugguguaauacucu

SEQ ID NO: 2973855 - RNA, 19 nt, Artificial Sequence
  Description of Artificial Sequence: Synthetic oligonucleotide
guucgauggagggccugau

SEQ ID NO: 2973856 - RNA, 19 nt, Artificial Sequence
  Description of Artificial Sequence: Synthetic oligonucleotide
gcaguagggcuugguguaa

SEQ ID NO: 2973857 - RNA, 19 nt, Artificial Sequence
  Description of Artificial Sequence: Synthetic oligonucleotide
caccggcaguagggcuugg

SEQ ID NO: 2973858 - RNA, 19 nt, Artificial Sequence
  Description of Artificial Sequence: Synthetic oligonucleotide
cggcaguagggcuuggugu

SEQ ID NO: 2973859 - RNA, 19 nt, Artificial Sequence
  Description of Artificial Sequence: Synthetic oligonucleotide
ggccugcaccgucgucuug

SEQ ID NO: 2973860 - RNA, 19 nt, Artificial Sequence
  Description of Artificial Sequence: Synthetic oligonucleotide
cagcagcugcccacagggu

SEQ ID NO: 2973861 - RNA, 19 nt, Artificial Sequence
  Description of Artificial Sequence: Synthetic oligonucleotide
ccuuucacuggcugcugau

SEQ ID NO: 2973862 - RNA, 19 nt, Artificial Sequence
  Description of Artificial Sequence: Synthetic oligonucleotide
cgggagacgccagaugcca

SEQ ID NO: 2973863 - RNA, 19 nt, Artificial Sequence
  Description of Artificial Sequence: Synthetic oligonucleotide
gcaccgucgucuugagaau

SEQ ID NO: 2973864 - RNA, 19 nt, Artificial Sequence
  Description of Artificial Sequence: Synthetic oligonucleotide
caguagggcuugguguaau

SEQ ID NO: 2973865 - RNA, 19 nt, Artificial Sequence
  Description of Artificial Sequence: Synthetic oligonucleotide
ccagggcaacaacuacaaa

SEQ ID NO: 2973866 - RNA, 19 nt, Artificial Sequence
  Description of Artificial Sequence: Synthetic oligonucleotide
ccacaaggaacgggccaca

SEQ ID NO: 2973867 - RNA, 19 nt, Artificial Sequence
  Description of Artificial Sequence: Synthetic oligonucleotide
ccacaccggcaguagggcu

SEQ ID NO: 2973868 - RNA, 19 nt, Artificial Sequence
  Description of Artificial Sequence: Synthetic oligonucleotide
cgucgucuugagaauguuu

SEQ ID NO: 2973869 - RNA, 19 nt, Artificial Sequence
  Description of Artificial Sequence: Synthetic oligonucleotide
gcugcccacaggguucgau

SEQ ID NO: 2973870 - RNA, 19 nt, Artificial Sequence
  Description of Artificial Sequence: Synthetic oligonucleotide
gcacggccugcaccgucgu

SEQ ID NO: 2973871 - RNA, 19 nt, Artificial Sequence
  Description of Artificial Sequence: Synthetic oligonucleotide
ccgucgucuugagaauguu

SEQ ID NO: 2973872 - RNA, 19 nt, Artificial Sequence
  Description of Artificial Sequence: Synthetic oligonucleotide
aauaacaugguguagggca

SEQ ID NO: 2973873 - RNA, 19 nt, Artificial Sequence
  Description of Artificial Sequence: Synthetic oligonucleotide
  modified_base (17)..(17): a, c, u, g, unknown or other
ucaugcuucacaaaagngg

SEQ ID NO: 2973874 - RNA, 19 nt, Artificial Sequence
  Description of Artificial Sequence: Synthetic oligonucleotide
caccucaugaauaacaugg

SEQ ID NO: 2973875 - RNA, 19 nt, Artificial Sequence
  Description of Artificial Sequence: Synthetic oligonucleotide
  modified_base (16)..(16): a, c, u, g, unknown or other
caugcuucacaaaagnggc

SEQ ID NO: 2973876 - RNA, 19 nt, Artificial Sequence
  Description of Artificial Sequence: Synthetic oligonucleotide
ugaauaacaugguguaggg

SEQ ID NO: 2973877 - RNA, 19 nt, Artificial Sequence
  Description of Artificial Sequence: Synthetic oligonucleotide
augaauaacaugguguagg

SEQ ID NO: 2973878 - RNA, 19 nt, Artificial Sequence
  Description of Artificial Sequence: Synthetic oligonucleotide
  modified_base (8)..(8): a, c, u, g, unknown or other
acaaaagnggcccugggca

SEQ ID NO: 2973879 - RNA, 19 nt, Artificial Sequence
  Description of Artificial Sequence: Synthetic oligonucleotide
uggaauggcaugaaggccu

SEQ ID NO: 2973880 - RNA, 19 nt, Artificial Sequence
  Description of Artificial Sequence: Synthetic oligonucleotide
  modified_base (14)..(14): a, c, u, g, unknown or other
ugcuucacaaaagnggccc

SEQ ID NO: 2973881 - RNA, 19 nt, Artificial Sequence
  Description of Artificial Sequence: Synthetic oligonucleotide
  modified_base (10)..(10): a, c, u, g, unknown or other
ucacaaaagnggcccuggg

SEQ ID NO: 2973882 - RNA, 19 nt, Artificial Sequence
  Description of Artificial Sequence: Synthetic oligonucleotide
ucaugaauaacauggugua

SEQ ID NO: 2973883 - RNA, 19 nt, Artificial Sequence
  Description of Artificial Sequence: Synthetic oligonucleotide
aacaugguguagggcaugc

SEQ ID NO: 2973884 - RNA, 19 nt, Artificial Sequence
  Description of Artificial Sequence: Synthetic oligonucleotide
  modified_base (18)..(18): a, c, u, g, unknown or other
cucaugcuucacaaaagng

SEQ ID NO: 2973885 - RNA, 19 nt, Artificial Sequence
  Description of Artificial Sequence: Synthetic oligonucleotide
  modified_base (11)..(11): a, c, u, g, unknown or other
uucacaaaagnggcccugg

SEQ ID NO: 2973886 - RNA, 19 nt, Artificial Sequence
  Description of Artificial Sequence: Synthetic oligonucleotide
ugcucugcggccuggaaug

SEQ ID NO: 2973887 - RNA, 19 nt, Artificial Sequence
  Description of Artificial Sequence: Synthetic oligonucleotide
  modified_base (6)..(6): a, c, u, g, unknown or other
aaaagnggcccugggcauc

SEQ ID NO: 2973888 - RNA, 19 nt, Artificial Sequence
  Description of Artificial Sequence: Synthetic oligonucleotide
cucaugaauaacauggugu

SEQ ID NO: 2973889 - RNA, 19 nt, Artificial Sequence
  Description of Artificial Sequence: Synthetic oligonucleotide
  modified_base (9)..(9): a, c, u, g, unknown or other
cacaaaagnggcccugggc

SEQ ID NO: 2973890 - RNA, 19 nt, Artificial Sequence
  Description of Artificial Sequence: Synthetic oligonucleotide
  modified_base (2)..(2): a, c, u, g, unknown or other
gnggcccugggcaucaagg

SEQ ID NO: 2973891 - RNA, 19 nt, Artificial Sequence
  Description of Artificial Sequence: Synthetic oligonucleotide
ccuggaauggcaugaaggc

SEQ ID NO: 2973892 - RNA, 19 nt, Artificial Sequence
  Description of Artificial Sequence: Synthetic oligonucleotide
gaauaacaugguguagggc

SEQ ID NO: 2973893 - RNA, 19 nt, Artificial Sequence
  Description of Artificial Sequence: Synthetic oligonucleotide
uccaugcggggccacgggg

SEQ ID NO: 2973894 - RNA, 19 nt, Artificial Sequence
  Description of Artificial Sequence: Synthetic oligonucleotide
ucugcggccuggaauggca

SEQ ID NO: 2973895 - RNA, 19 nt, Artificial Sequence
  Description of Artificial Sequence: Synthetic oligonucleotide
caugaauaacaugguguag

SEQ ID NO: 2973896 - RNA, 19 nt, Artificial Sequence
  Description of Artificial Sequence: Synthetic oligonucleotide
  modified_base (15)..(15): a, c, u, g, unknown or other
augcuucacaaaagnggcc

SEQ ID NO: 2973897 - RNA, 19 nt, Artificial Sequence
  Description of Artificial Sequence: Synthetic oligonucleotide
cuggaauggcaugaaggcc

SEQ ID NO: 2973898 - RNA, 19 nt, Artificial Sequence
  Description of Artificial Sequence: Synthetic oligonucleotide
  modified_base (5)..(5): a, c, u, g, unknown or other
aaagnggcccugggcauca

SEQ ID NO: 2973899 - RNA, 19 nt, Artificial Sequence
  Description of Artificial Sequence: Synthetic oligonucleotide
cacggcaugcucugcggcc

SEQ ID NO: 2973900 - RNA, 19 nt, Artificial Sequence
  Description of Artificial Sequence: Synthetic oligonucleotide
  modified_base (12)..(12): a, c, u, g, unknown or other
cuucacaaaagnggcccug

SEQ ID NO: 2973901 - RNA, 19 nt, Artificial Sequence
  Description of Artificial Sequence: Synthetic oligonucleotide
uaacaugguguagggcaug

SEQ ID NO: 2973902 - RNA, 19 nt, Artificial Sequence
  Description of Artificial Sequence: Synthetic oligonucleotide
auaacaugguguagggcau

SEQ ID NO: 2973903 - RNA, 19 nt, Artificial Sequence
  Description of Artificial Sequence: Synthetic oligonucleotide
ccucaugaauaacauggug

SEQ ID NO: 2973904 - RNA, 19 nt, Artificial Sequence
  Description of Artificial Sequence: Synthetic oligonucleotide
  modified_base (3)..(3): a, c, u, g, unknown or other
agnggcccugggcaucaag

SEQ ID NO: 2973905 - RNA, 19 nt, Artificial Sequence
  Description of Artificial Sequence: Synthetic oligonucleotide
accucaugaauaacauggu

SEQ ID NO: 2973906 - RNA, 19 nt, Artificial Sequence
  Description of Artificial Sequence: Synthetic oligonucleotide
ugcggccuggaauggcaug

SEQ ID NO: 2973907 - RNA, 19 nt, Artificial Sequence
  Description of Artificial Sequence: Synthetic oligonucleotide
  modified_base (19)..(19): a, c, u, g, unknown or other
ccucaugcuucacaaaagn

SEQ ID NO: 2973908 - RNA, 19 nt, Artificial Sequence
  Description of Artificial Sequence: Synthetic oligonucleotide
cuccaugcggggccacggg

SEQ ID NO: 2973909 - RNA, 19 nt, Artificial Sequence
  Description of Artificial Sequence: Synthetic oligonucleotide
  modified_base (7)..(7): a, c, u, g, unknown or other
caaaagnggcccugggcau

SEQ ID NO: 2973910 - RNA, 19 nt, Artificial Sequence
  Description of Artificial Sequence: Synthetic oligonucleotide
acggcaugcucugcggccu

SEQ ID NO: 2973911 - RNA, 19 nt, Artificial Sequence
  Description of Artificial Sequence: Synthetic oligonucleotide
ggccuggaauggcaugaag

SEQ ID NO: 2973912 - RNA, 19 nt, Artificial Sequence
  Description of Artificial Sequence: Synthetic oligonucleotide
cucugcggccuggaauggc

SEQ ID NO: 2973913 - RNA, 19 nt, Artificial Sequence
  Description of Artificial Sequence: Synthetic oligonucleotide
cccacggcaugcucugcgg

SEQ ID NO: 2973914 - RNA, 19 nt, Artificial Sequence
  Description of Artificial Sequence: Synthetic oligonucleotide
gcuccaugcggggccacgg

SEQ ID NO: 2973915 - RNA, 19 nt, Artificial Sequence
  Description of Artificial Sequence: Synthetic oligonucleotide
ccccacggcaugcucugcg

SEQ ID NO: 2973916 - RNA, 19 nt, Artificial Sequence
  Description of Artificial Sequence: Synthetic oligonucleotide
ccacggcaugcucugcggc

SEQ ID NO: 2973917 - RNA, 19 nt, Artificial Sequence
  Description of Artificial Sequence: Synthetic oligonucleotide
caugcucugcggccuggaa

SEQ ID NO: 2973918 - RNA, 19 nt, Artificial Sequence
  Description of Artificial Sequence: Synthetic oligonucleotide
gcggccuggaauggcauga

SEQ ID NO: 2973919 - RNA, 19 nt, Artificial Sequence
  Description of Artificial Sequence: Synthetic oligonucleotide
gcucugcggccuggaaugg

SEQ ID NO: 2973920 - RNA, 19 nt, Artificial Sequence
  Description of Artificial Sequence: Synthetic oligonucleotide
  modified_base (4)..(4): a, c, u, g, unknown or other
aagnggcccugggcaucaa

SEQ ID NO: 2973921 - RNA, 19 nt, Artificial Sequence
  Description of Artificial Sequence: Synthetic oligonucleotide
  modified_base (13)..(13): a, c, u, g, unknown or other
gcuucacaaaagnggcccu

SEQ ID NO: 2973922 - RNA, 19 nt, Artificial Sequence
  Description of Artificial Sequence: Synthetic oligonucleotide
gagcuccaugcggggccac

SEQ ID NO: 2973923 - RNA, 19 nt, Artificial Sequence
  Description of Artificial Sequence: Synthetic oligonucleotide
cugcggccuggaauggcau

SEQ ID NO: 2973924 - RNA, 19 nt, Artificial Sequence
  Description of Artificial Sequence: Synthetic oligonucleotide
guuauaauuacucucaugc

SEQ ID NO: 2973925 - RNA, 19 nt, Artificial Sequence
  Description of Artificial Sequence: Synthetic oligonucleotide
agugaugucauccuggagc

SEQ ID NO: 2973926 - RNA, 19 nt, Artificial Sequence
  Description of Artificial Sequence: Synthetic oligonucleotide
ucuauagcaauacagagac

SEQ ID NO: 2973927 - RNA, 19 nt, Artificial Sequence
  Description of Artificial Sequence: Synthetic oligonucleotide
ugaaauaucccguagucgg

SEQ ID NO: 2973928 - RNA, 19 nt, Artificial Sequence
  Description of Artificial Sequence: Synthetic oligonucleotide
uauagcaauacagagacag

SEQ ID NO: 2973929 - RNA, 19 nt, Artificial Sequence
  Description of Artificial Sequence: Synthetic oligonucleotide
uauaauuacucucaugcug

SEQ ID NO: 2973930 - RNA, 19 nt, Artificial Sequence
  Description of Artificial Sequence: Synthetic oligonucleotide
cuauugaucugaaauaucc

SEQ ID NO: 2973931 - RNA, 19 nt, Artificial Sequence
  Description of Artificial Sequence: Synthetic oligonucleotide
auugaucugaaauaucccg

SEQ ID NO: 2973932 - RNA, 19 nt, Artificial Sequence
  Description of Artificial Sequence: Synthetic oligonucleotide
uguguuauaauuacucuca

SEQ ID NO: 2973933 - RNA, 19 nt, Artificial Sequence
  Description of Artificial Sequence: Synthetic oligonucleotide
aaugagcugaagcagaaga

SEQ ID NO: 2973934 - RNA, 19 nt, Artificial Sequence
  Description of Artificial Sequence: Synthetic oligonucleotide
aauauacugggugagaucu

SEQ ID NO: 2973935 - RNA, 19 nt, Artificial Sequence
  Description of Artificial Sequence: Synthetic oligonucleotide
uccauuucuacuucuauag

SEQ ID NO: 2973936 - RNA, 19 nt, Artificial Sequence
  Description of Artificial Sequence: Synthetic oligonucleotide
aauacagagacagaaugag

SEQ ID NO: 2973937 - RNA, 19 nt, Artificial Sequence
  Description of Artificial Sequence: Synthetic oligonucleotide
uacuucuauagcaauacag

SEQ ID NO: 2973938 - RNA, 19 nt, Artificial Sequence
  Description of Artificial Sequence: Synthetic oligonucleotide
caucauuacaccaguaucg

SEQ ID NO: 2973939 - RNA, 19 nt, Artificial Sequence
  Description of Artificial Sequence: Synthetic oligonucleotide
gagaucucgguuuugacag

SEQ ID NO: 2973940 - RNA, 19 nt, Artificial Sequence
  Description of Artificial Sequence: Synthetic oligonucleotide
gaagcagaagagcacagcg

SEQ ID NO: 2973941 - RNA, 19 nt, Artificial Sequence
  Description of Artificial Sequence: Synthetic oligonucleotide
uggagcaacacacugcagg

SEQ ID NO: 2973942 - RNA, 19 nt, Artificial Sequence
  Description of Artificial Sequence: Synthetic oligonucleotide
agaacaugugaccuuuucc

SEQ ID NO: 2973943 - RNA, 19 nt, Artificial Sequence
  Description of Artificial Sequence: Synthetic oligonucleotide
uuugccaucauuacaccag

SEQ ID NO: 2973944 - RNA, 19 nt, Artificial Sequence
  Description of Artificial Sequence: Synthetic oligonucleotide
aaucgugcuugucuaaagg

SEQ ID NO: 2973945 - RNA, 19 nt, Artificial Sequence
  Description of Artificial Sequence: Synthetic oligonucleotide
aguccaagaacaugugacc

SEQ ID NO: 2973946 - RNA, 19 nt, Artificial Sequence
  Description of Artificial Sequence: Synthetic oligonucleotide
aauaucccguagucggugc

SEQ ID NO: 2973947 - RNA, 19 nt, Artificial Sequence
  Description of Artificial Sequence: Synthetic oligonucleotide
ucuguuuaaaucgugcuug

SEQ ID NO: 2973948 - RNA, 19 nt, Artificial Sequence
  Description of Artificial Sequence: Synthetic oligonucleotide
ggugcuuuggucuuuacgg

SEQ ID NO: 2973949 - RNA, 19 nt, Artificial Sequence
  Description of Artificial Sequence: Synthetic oligonucleotide
ucuaaugccuuguggaucc

SEQ ID NO: 2973950 - RNA, 19 nt, Artificial Sequence
  Description of Artificial Sequence: Synthetic oligonucleotide
cuucuauagcaauacagag

SEQ ID NO: 2973951 - RNA, 19 nt, Artificial Sequence
  Description of Artificial Sequence: Synthetic oligonucleotide
uugagugaugucauccugg

SEQ ID NO: 2973952 - RNA, 19 nt, Artificial Sequence
  Description of Artificial Sequence: Synthetic oligonucleotide
aagaacaugugaccuuuuc

SEQ ID NO: 2973953 - RNA, 19 nt, Artificial Sequence
  Description of Artificial Sequence: Synthetic oligonucleotide
uucuauagcaauacagaga

SEQ ID NO: 2973954 - RNA, 19 nt, Artificial Sequence
  Description of Artificial Sequence: Synthetic oligonucleotide
ucggcuauugaucugaaau

SEQ ID NO: 2973955 - RNA, 19 nt, Artificial Sequence
  Description of Artificial Sequence: Synthetic oligonucleotide
uuguguguuauaauuacuc

SEQ ID NO: 2973956 - RNA, 19 nt, Artificial Sequence
  Description of Artificial Sequence: Synthetic oligonucleotide
ucauccuggagcaacacac

SEQ ID NO: 2973957 - RNA, 19 nt, Artificial Sequence
  Description of Artificial Sequence: Synthetic oligonucleotide
uauugaucugaaauauccc

SEQ ID NO: 2973958 - RNA, 19 nt, Artificial Sequence
  Description of Artificial Sequence: Synthetic oligonucleotide
aagagcacagcgguuagac

SEQ ID NO: 2973959 - RNA, 19 nt, Artificial Sequence
  Description of Artificial Sequence: Synthetic oligonucleotide
uguaguuuguagcuugugu

SEQ ID NO: 2973960 - RNA, 19 nt, Artificial Sequence
  Description of Artificial Sequence: Synthetic oligonucleotide
gaacaugugaccuuuucca

SEQ ID NO: 2973961 - RNA, 19 nt, Artificial Sequence
  Description of Artificial Sequence: Synthetic oligonucleotide
ucugaaauaucccguaguc

SEQ ID NO: 2973962 - RNA, 19 nt, Artificial Sequence
  Description of Artificial Sequence: Synthetic oligonucleotide
ucgugcuugucuaaagggg

SEQ ID NO: 2973963 - RNA, 19 nt, Artificial Sequence
  Description of Artificial Sequence: Synthetic oligonucleotide
guaguuuguagcuugugug

SEQ ID NO: 2973964 - RNA, 19 nt, Artificial Sequence
  Description of Artificial Sequence: Synthetic oligonucleotide
uuuaaaucgugcuugucua

SEQ ID NO: 2973965 - RNA, 19 nt, Artificial Sequence
  Description of Artificial Sequence: Synthetic oligonucleotide
uacgguuguaguuuguagc

SEQ ID NO: 2973966 - RNA, 19 nt, Artificial Sequence
  Description of Artificial Sequence: Synthetic oligonucleotide
aaaucgugcuugucuaaag

SEQ ID NO: 2973967 - RNA, 19 nt, Artificial Sequence
  Description of Artificial Sequence: Synthetic oligonucleotide
aucgugcuugucuaaaggg

SEQ ID NO: 2973968 - RNA, 19 nt, Artificial Sequence
  Description of Artificial Sequence: Synthetic oligonucleotide
ugcaggguaucccacaggc

SEQ ID NO: 2973969 - RNA, 19 nt, Artificial Sequence
  Description of Artificial Sequence: Synthetic oligonucleotide
ugcucuaaugccuugugga

SEQ ID NO: 2973970 - RNA, 19 nt, Artificial Sequence
  Description of Artificial Sequence: Synthetic oligonucleotide
ucuacuucuauagcaauac

SEQ ID NO: 2973971 - RNA, 19 nt, Artificial Sequence
  Description of Artificial Sequence: Synthetic oligonucleotide
uccauuuugcuccuguuuc

SEQ ID NO: 2973972 - RNA, 19 nt, Artificial Sequence
  Description of Artificial Sequence: Synthetic oligonucleotide
uguguguuauaauuacucu

SEQ ID NO: 2973973 - RNA, 19 nt, Artificial Sequence
  Description of Artificial Sequence: Synthetic oligonucleotide
uguuauaauuacucucaug

SEQ ID NO: 2973974 - RNA, 19 nt, Artificial Sequence
  Description of Artificial Sequence: Synthetic oligonucleotide
aaaggggaguccaagaaca

SEQ ID NO: 2973975 - RNA, 19 nt, Artificial Sequence
  Description of Artificial Sequence: Synthetic oligonucleotide
uuauaauuacucucaugcu

SEQ ID NO: 2973976 - RNA, 19 nt, Artificial Sequence
  Description of Artificial Sequence: Synthetic oligonucleotide
ugagaucucgguuuugaca

SEQ ID NO: 2973977 - RNA, 19 nt, Artificial Sequence
  Description of Artificial Sequence: Synthetic oligonucleotide
agcgguuagacuccacagc

SEQ ID NO: 2973978 - RNA, 19 nt, Artificial Sequence
  Description of Artificial Sequence: Synthetic oligonucleotide
ucgguuuugacaguggucu

SEQ ID NO: 2973979 - RNA, 19 nt, Artificial Sequence
  Description of Artificial Sequence: Synthetic oligonucleotide
uugaucugaaauaucccgu

SEQ ID NO: 2973980 - RNA, 19 nt, Artificial Sequence
  Description of Artificial Sequence: Synthetic oligonucleotide
uuucuguuuaaaucgugcu

SEQ ID NO: 2973981 - RNA, 19 nt, Artificial Sequence
  Description of Artificial Sequence: Synthetic oligonucleotide
uuugacaguggucucucca

SEQ ID NO: 2973982 - RNA, 19 nt, Artificial Sequence
  Description of Artificial Sequence: Synthetic oligonucleotide
uuguggaucccugacaacc

SEQ ID NO: 2973983 - RNA, 19 nt, Artificial Sequence
  Description of Artificial Sequence: Synthetic oligonucleotide
cauuucuacuucuauagca

SEQ ID NO: 2973984 - RNA, 19 nt, Artificial Sequence
  Description of Artificial Sequence: Synthetic oligonucleotide
uaaaggggaguccaagaac

SEQ ID NO: 2973985 - RNA, 19 nt, Artificial Sequence
  Description of Artificial Sequence: Synthetic oligonucleotide
uccacagcccugaauauac

SEQ ID NO: 2973986 - RNA, 19 nt, Artificial Sequence
  Description of Artificial Sequence: Synthetic oligonucleotide
accaguaucggcuauugau

SEQ ID NO: 2973987 - RNA, 19 nt, Artificial Sequence
  Description of Artificial Sequence: Synthetic oligonucleotide
auaauuacucucaugcuga

SEQ ID NO: 2973988 - RNA, 19 nt, Artificial Sequence
  Description of Artificial Sequence: Synthetic oligonucleotide
gagcacagcgguuagacuc

SEQ ID NO: 2973989 - RNA, 19 nt, Artificial Sequence
  Description of Artificial Sequence: Synthetic oligonucleotide
uuacgguuguaguuuguag

SEQ ID NO: 2973990 - RNA, 19 nt, Artificial Sequence
  Description of Artificial Sequence: Synthetic oligonucleotide
ucuaaaggggaguccaaga

SEQ ID NO: 2973991 - RNA, 19 nt, Artificial Sequence
  Description of Artificial Sequence: Synthetic oligonucleotide
gaucugaaauaucccguag

SEQ ID NO: 2973992 - RNA, 19 nt, Artificial Sequence
  Description of Artificial Sequence: Synthetic oligonucleotide
uguuucuguuuaaaucgug

SEQ ID NO: 2973993 - RNA, 19 nt, Artificial Sequence
  Description of Artificial Sequence: Synthetic oligonucleotide
agcagaagagcacagcggu

SEQ ID NO: 2973994 - RNA, 19 nt, Artificial Sequence
  Description of Artificial Sequence: Synthetic oligonucleotide
ucccugacaacccucuuug

SEQ ID NO: 2973995 - RNA, 19 nt, Artificial Sequence
  Description of Artificial Sequence: Synthetic oligonucleotide
ugagcugaagcagaagagc

SEQ ID NO: 2973996 - RNA, 19 nt, Artificial Sequence
  Description of Artificial Sequence: Synthetic oligonucleotide
gcaauacagagacagaaug

SEQ ID NO: 2973997 - RNA, 19 nt, Artificial Sequence
  Description of Artificial Sequence: Synthetic oligonucleotide
uuuugccaucauuacacca

SEQ ID NO: 2973998 - RNA, 19 nt, Artificial Sequence
  Description of Artificial Sequence: Synthetic oligonucleotide
acaguggucucuccaugcc

SEQ ID NO: 2973999 - RNA, 19 nt, Artificial Sequence
  Description of Artificial Sequence: Synthetic oligonucleotide
gaguccaagaacaugugac

SEQ ID NO: 2974000 - RNA, 19 nt, Artificial Sequence
  Description of Artificial Sequence: Synthetic oligonucleotide
uguagcuuguguguuauaa

SEQ ID NO: 2974001 - RNA, 19 nt, Artificial Sequence
  Description of Artificial Sequence: Synthetic oligonucleotide
uaguuuguagcuugugugu

SEQ ID NO: 2974002 - RNA, 19 nt, Artificial Sequence
  Description of Artificial Sequence: Synthetic oligonucleotide
acuucuauagcaauacaga

SEQ ID NO: 2974003 - RNA, 19 nt, Artificial Sequence
  Description of Artificial Sequence: Synthetic oligonucleotide
ugaccuuuuccauuucuac

SEQ ID NO: 2974004 - RNA, 19 nt, Artificial Sequence
  Description of Artificial Sequence: Synthetic oligonucleotide
aacacacugcaggguaucc

SEQ ID NO: 2974005 - RNA, 19 nt, Artificial Sequence
  Description of Artificial Sequence: Synthetic oligonucleotide
acauuccauggcuugagug

SEQ ID NO: 2974006 - RNA, 19 nt, Artificial Sequence
  Description of Artificial Sequence: Synthetic oligonucleotide
cugacaacccucuuugcac

SEQ ID NO: 2974007 - RNA, 19 nt, Artificial Sequence
  Description of Artificial Sequence: Synthetic oligonucleotide
uaucccacaggcauucacu

SEQ ID NO: 2974008 - RNA, 19 nt, Artificial Sequence
  Description of Artificial Sequence: Synthetic oligonucleotide
guuucuguuuaaaucgugc

SEQ ID NO: 2974009 - RNA, 19 nt, Artificial Sequence
  Description of Artificial Sequence: Synthetic oligonucleotide
aaauaucccguagucggug

SEQ ID NO: 2974010 - RNA, 19 nt, Artificial Sequence
  Description of Artificial Sequence: Synthetic oligonucleotide
uuggucuuuacgguuguag

SEQ ID NO: 2974011 - RNA, 19 nt, Artificial Sequence
  Description of Artificial Sequence: Synthetic oligonucleotide
ugaauauacugggugagau

SEQ ID NO: 2974012 - RNA, 19 nt, Artificial Sequence
  Description of Artificial Sequence: Synthetic oligonucleotide
uagcaauacagagacagaa

SEQ ID NO: 2974013 - RNA, 19 nt, Artificial Sequence
  Description of Artificial Sequence: Synthetic oligonucleotide
guguguuauaauuacucuc

SEQ ID NO: 2974014 - RNA, 19 nt, Artificial Sequence
  Description of Artificial Sequence: Synthetic oligonucleotide
auacagagacagaaugagc

SEQ ID NO: 2974015 - RNA, 19 nt, Artificial Sequence
  Description of Artificial Sequence: Synthetic oligonucleotide
uguggaucccugacaaccc

SEQ ID NO: 2974016 - RNA, 19 nt, Artificial Sequence
  Description of Artificial Sequence: Synthetic oligonucleotide
aacaugugaccuuuuccau

SEQ ID NO: 2974017 - RNA, 19 nt, Artificial Sequence
  Description of Artificial Sequence: Synthetic oligonucleotide
cugaaauaucccguagucg

SEQ ID NO: 2974018 - RNA, 19 nt, Artificial Sequence
  Description of Artificial Sequence: Synthetic oligonucleotide
aucugaaauaucccguagu

SEQ ID NO: 2974019 - RNA, 19 nt, Artificial Sequence
  Description of Artificial Sequence: Synthetic oligonucleotide
aagcagaagagcacagcgg

SEQ ID NO: 2974020 - RNA, 19 nt, Artificial Sequence
  Description of Artificial Sequence: Synthetic oligonucleotide
acgguuguaguuuguagcu

SEQ ID NO: 2974021 - RNA, 19 nt, Artificial Sequence
  Description of Artificial Sequence: Synthetic oligonucleotide
guuuaaaucgugcuugucu

SEQ ID NO: 2974022 - RNA, 19 nt, Artificial Sequence
  Description of Artificial Sequence: Synthetic oligonucleotide
uugucuaaaggggagucca

SEQ ID NO: 2974023 - RNA, 19 nt, Artificial Sequence
  Description of Artificial Sequence: Synthetic oligonucleotide
ucuuuacgguuguaguuug

SEQ ID NO: 2974024 - RNA, 19 nt, Artificial Sequence
  Description of Artificial Sequence: Synthetic oligonucleotide
gguuuugccaucauuacac

SEQ ID NO: 2974025 - RNA, 19 nt, Artificial Sequence
  Description of Artificial Sequence: Synthetic oligonucleotide
accuuuuccauuucuacuu

SEQ ID NO: 2974026 - RNA, 19 nt, Artificial Sequence
  Description of Artificial Sequence: Synthetic oligonucleotide
uuuccauuucuacuucuau

SEQ ID NO: 2974027 - RNA, 19 nt, Artificial Sequence
  Description of Artificial Sequence: Synthetic oligonucleotide
uagcuuguguguuauaauu

SEQ ID NO: 2974028 - RNA, 19 nt, Artificial Sequence
  Description of Artificial Sequence: Synthetic oligonucleotide
gacaguggucucuccaugc

SEQ ID NO: 2974029 - RNA, 19 nt, Artificial Sequence
  Description of Artificial Sequence: Synthetic oligonucleotide
ugugaccuuuuccauuucu

SEQ ID NO: 2974030 - RNA, 19 nt, Artificial Sequence
  Description of Artificial Sequence: Synthetic oligonucleotide
gacuccacagcccugaaua

SEQ ID NO: 2974031 - RNA, 19 nt, Artificial Sequence
  Description of Artificial Sequence: Synthetic oligonucleotide
augcucuaaugccuugugg

SEQ ID NO: 2974032 - RNA, 19 nt, Artificial Sequence
  Description of Artificial Sequence: Synthetic oligonucleotide
cagcccugaauauacuggg

SEQ ID NO: 2974033 - RNA, 19 nt, Artificial Sequence
  Description of Artificial Sequence: Synthetic oligonucleotide
acagagacagaaugagcug

SEQ ID NO: 2974034 - RNA, 19 nt, Artificial Sequence
  Description of Artificial Sequence: Synthetic oligonucleotide
gaugucauccuggagcaac

SEQ ID NO: 2974035 - RNA, 19 nt, Artificial Sequence
  Description of Artificial Sequence: Synthetic oligonucleotide
uccuggagcaacacacugc

SEQ ID NO: 2974036 - RNA, 19 nt, Artificial Sequence
  Description of Artificial Sequence: Synthetic oligonucleotide
uucuacuucuauagcaaua

SEQ ID NO: 2974037 - RNA, 19 nt, Artificial Sequence
  Description of Artificial Sequence: Synthetic oligonucleotide
ggagcaacacacugcaggg

SEQ ID NO: 2974038 - RNA, 19 nt, Artificial Sequence
  Description of Artificial Sequence: Synthetic oligonucleotide
ugaucugaaauaucccgua

SEQ ID NO: 2974039 - RNA, 19 nt, Artificial Sequence
  Description of Artificial Sequence: Synthetic oligonucleotide
gaauauacugggugagauc

SEQ ID NO: 2974040 - RNA, 19 nt, Artificial Sequence
  Description of Artificial Sequence: Synthetic oligonucleotide
uggucuuuacgguuguagu

SEQ ID NO: 2974041 - RNA, 19 nt, Artificial Sequence
  Description of Artificial Sequence: Synthetic oligonucleotide
acagcccugaauauacugg

SEQ ID NO: 2974042 - RNA, 19 nt, Artificial Sequence
  Description of Artificial Sequence: Synthetic oligonucleotide
caauacagagacagaauga

SEQ ID NO: 2974043 - RNA, 19 nt, Artificial Sequence
  Description of Artificial Sequence: Synthetic oligonucleotide
ucucgguuuugacaguggu

SEQ ID NO: 2974044 - RNA, 19 nt, Artificial Sequence
  Description of Artificial Sequence: Synthetic oligonucleotide
ucauuacaccaguaucggc

SEQ ID NO: 2974045 - RNA, 19 nt, Artificial Sequence
  Description of Artificial Sequence: Synthetic oligonucleotide
ugacaacccucuuugcaca

SEQ ID NO: 2974046 - RNA, 19 nt, Artificial Sequence
  Description of Artificial Sequence: Synthetic oligonucleotide
caggcauucacugcucucg

SEQ ID NO: 2974047 - RNA, 19 nt, Artificial Sequence
  Description of Artificial Sequence: Synthetic oligonucleotide
gguuguaguuuguagcuug

SEQ ID NO: 2974048 - RNA, 19 nt, Artificial Sequence
  Description of Artificial Sequence: Synthetic oligonucleotide
acugcaggguaucccacag

SEQ ID NO: 2974049 - RNA, 19 nt, Artificial Sequence
  Description of Artificial Sequence: Synthetic oligonucleotide
cauuccauggcuugaguga

SEQ ID NO: 2974050 - RNA, 19 nt, Artificial Sequence
  Description of Artificial Sequence: Synthetic oligonucleotide
uuagacuccacagcccuga

SEQ ID NO: 2974051 - RNA, 19 nt, Artificial Sequence
  Description of Artificial Sequence: Synthetic oligonucleotide
cauuacaccaguaucggcu

SEQ ID NO: 2974052 - RNA, 19 nt, Artificial Sequence
  Description of Artificial Sequence: Synthetic oligonucleotide
uuucuacuucuauagcaau

SEQ ID NO: 2974053 - RNA, 19 nt, Artificial Sequence
  Description of Artificial Sequence: Synthetic oligonucleotide
aguggucucuccaugccac

SEQ ID NO: 2974054 - RNA, 19 nt, Artificial Sequence
  Description of Artificial Sequence: Synthetic oligonucleotide
cuugagugaugucauccug

SEQ ID NO: 2974055 - RNA, 19 nt, Artificial Sequence
  Description of Artificial Sequence: Synthetic oligonucleotide
auuucuacuucuauagcaa

SEQ ID NO: 2974056 - RNA, 19 nt, Artificial Sequence
  Description of Artificial Sequence: Synthetic oligonucleotide
uugcacauuccauggcuug

SEQ ID NO: 2974057 - RNA, 19 nt, Artificial Sequence
  Description of Artificial Sequence: Synthetic oligonucleotide
cuccaugccacccaugcuc

SEQ ID NO: 2974058 - RNA, 19 nt, Artificial Sequence
  Description of Artificial Sequence: Synthetic oligonucleotide
uuaaaucgugcuugucuaa

SEQ ID NO: 2974059 - RNA, 19 nt, Artificial Sequence
  Description of Artificial Sequence: Synthetic oligonucleotide
gcauucacugcucucgggg

SEQ ID NO: 2974060 - RNA, 19 nt, Artificial Sequence
  Description of Artificial Sequence: Synthetic oligonucleotide
acugcucucgggguuuugc

SEQ ID NO: 2974061 - RNA, 19 nt, Artificial Sequence
  Description of Artificial Sequence: Synthetic oligonucleotide
ugacaguggucucuccaug

SEQ ID NO: 2974062 - RNA, 19 nt, Artificial Sequence
  Description of Artificial Sequence: Synthetic oligonucleotide
cauggcuugagugauguca

SEQ ID NO: 2974063 - RNA, 19 nt, Artificial Sequence
  Description of Artificial Sequence: Synthetic oligonucleotide
ugaagcagaagagcacagc

SEQ ID NO: 2974064 - RNA, 19 nt, Artificial Sequence
  Description of Artificial Sequence: Synthetic oligonucleotide
agaagagcacagcgguuag

SEQ ID NO: 2974065 - RNA, 19 nt, Artificial Sequence
  Description of Artificial Sequence: Synthetic oligonucleotide
aucccacaggcauucacug

SEQ ID NO: 2974066 - RNA, 19 nt, Artificial Sequence
  Description of Artificial Sequence: Synthetic oligonucleotide
uuugcacauuccauggcuu

SEQ ID NO: 2974067 - RNA, 19 nt, Artificial Sequence
  Description of Artificial Sequence: Synthetic oligonucleotide
uugccaucauuacaccagu

SEQ ID NO: 2974068 - RNA, 19 nt, Artificial Sequence
  Description of Artificial Sequence: Synthetic oligonucleotide
agcacagcgguuagacucc

SEQ ID NO: 2974069 - RNA, 19 nt, Artificial Sequence
  Description of Artificial Sequence: Synthetic oligonucleotide
gugaugucauccuggagca

SEQ ID NO: 2974070 - RNA, 19 nt, Artificial Sequence
  Description of Artificial Sequence: Synthetic oligonucleotide
auccuggagcaacacacug

SEQ ID NO: 2974071 - RNA, 19 nt, Artificial Sequence
  Description of Artificial Sequence: Synthetic oligonucleotide
acacacugcaggguauccc

SEQ ID NO: 2974072 - RNA, 19 nt, Artificial Sequence
  Description of Artificial Sequence: Synthetic oligonucleotide
acaggcauucacugcucuc

SEQ ID NO: 2974073 - RNA, 19 nt, Artificial Sequence
  Description of Artificial Sequence: Synthetic oligonucleotide
guuuugccaucauuacacc

SEQ ID NO: 2974074 - RNA, 19 nt, Artificial Sequence
  Description of Artificial Sequence: Synthetic oligonucleotide
uaaaucgugcuugucuaaa

SEQ ID NO: 2974075 - RNA, 19 nt, Artificial Sequence
  Description of Artificial Sequence: Synthetic oligonucleotide
uuuguagcuuguguguuau

SEQ ID NO: 2974076 - RNA, 19 nt, Artificial Sequence
  Description of Artificial Sequence: Synthetic oligonucleotide
cacagcccugaauauacug

SEQ ID NO: 2974077 - RNA, 19 nt, Artificial Sequence
  Description of Artificial Sequence: Synthetic oligonucleotide
agcaacacacugcagggua

SEQ ID NO: 2974078 - RNA, 19 nt, Artificial Sequence
  Description of Artificial Sequence: Synthetic oligonucleotide
uugacaguggucucuccau

SEQ ID NO: 2974079 - RNA, 19 nt, Artificial Sequence
  Description of Artificial Sequence: Synthetic oligonucleotide
gaucucgguuuugacagug

SEQ ID NO: 2974080 - RNA, 19 nt, Artificial Sequence
  Description of Artificial Sequence: Synthetic oligonucleotide
augagcugaagcagaagag

SEQ ID NO: 2974081 - RNA, 19 nt, Artificial Sequence
  Description of Artificial Sequence: Synthetic oligonucleotide
cugaagcagaagagcacag

SEQ ID NO: 2974082 - RNA, 19 nt, Artificial Sequence
  Description of Artificial Sequence: Synthetic oligonucleotide
auuacaccaguaucggcua

SEQ ID NO: 2974083 - RNA, 19 nt, Artificial Sequence
  Description of Artificial Sequence: Synthetic oligonucleotide
uuuacgguuguaguuugua

SEQ ID NO: 2974084 - RNA, 19 nt, Artificial Sequence
  Description of Artificial Sequence: Synthetic oligonucleotide
uccauggcuugagugaugu

SEQ ID NO: 2974085 - RNA, 19 nt, Artificial Sequence
  Description of Artificial Sequence: Synthetic oligonucleotide
auuuugcuccuguuucugu

SEQ ID NO: 2974086 - RNA, 19 nt, Artificial Sequence
  Description of Artificial Sequence: Synthetic oligonucleotide
aguaucggcuauugaucug

SEQ ID NO: 2974087 - RNA, 19 nt, Artificial Sequence
  Description of Artificial Sequence: Synthetic oligonucleotide
gcgguuagacuccacagcc

SEQ ID NO: 2974088 - RNA, 19 nt, Artificial Sequence
  Description of Artificial Sequence: Synthetic oligonucleotide
cuugucuaaaggggagucc

SEQ ID NO: 2974089 - RNA, 19 nt, Artificial Sequence
  Description of Artificial Sequence: Synthetic oligonucleotide
cuaaaggggaguccaagaa

SEQ ID NO: 2974090 - RNA, 19 nt, Artificial Sequence
  Description of Artificial Sequence: Synthetic oligonucleotide
uacugggugagaucucggu

SEQ ID NO: 2974091 - RNA, 19 nt, Artificial Sequence
  Description of Artificial Sequence: Synthetic oligonucleotide
uuuugacaguggucucucc

SEQ ID NO: 2974092 - RNA, 19 nt, Artificial Sequence
  Description of Artificial Sequence: Synthetic oligonucleotide
gaaugagcugaagcagaag

SEQ ID NO: 2974093 - RNA, 19 nt, Artificial Sequence
  Description of Artificial Sequence: Synthetic oligonucleotide
gucuaaaggggaguccaag

SEQ ID NO: 2974094 - RNA, 19 nt, Artificial Sequence
  Description of Artificial Sequence: Synthetic oligonucleotide
acaugugaccuuuuccauu

SEQ ID NO: 2974095 - RNA, 19 nt, Artificial Sequence
  Description of Artificial Sequence: Synthetic oligonucleotide
acccucuuugcacauucca

SEQ ID NO: 2974096 - RNA, 19 nt, Artificial Sequence
  Description of Artificial Sequence: Synthetic oligonucleotide
caugcucuaaugccuugug

SEQ ID NO: 2974097 - RNA, 19 nt, Artificial Sequence
  Description of Artificial Sequence: Synthetic oligonucleotide
ugccuuguggaucccugac

SEQ ID NO: 2974098 - RNA, 19 nt, Artificial Sequence
  Description of Artificial Sequence: Synthetic oligonucleotide
ugcucucgggguuuugcca

SEQ ID NO: 2974099 - RNA, 19 nt, Artificial Sequence
  Description of Artificial Sequence: Synthetic oligonucleotide
gaccuuuuccauuucuacu

SEQ ID NO: 2974100 - RNA, 19 nt, Artificial Sequence
  Description of Artificial Sequence: Synthetic oligonucleotide
uccaagaacaugugaccuu

SEQ ID NO: 2974101 - RNA, 19 nt, Artificial Sequence
  Description of Artificial Sequence: Synthetic oligonucleotide
gagugaugucauccuggag

SEQ ID NO: 2974102 - RNA, 19 nt, Artificial Sequence
  Description of Artificial Sequence: Synthetic oligonucleotide
guaucggcuauugaucuga

SEQ ID NO: 2974103 - RNA, 19 nt, Artificial Sequence
  Description of Artificial Sequence: Synthetic oligonucleotide
cucgguuuugacagugguc

SEQ ID NO: 2974104 - RNA, 19 nt, Artificial Sequence
  Description of Artificial Sequence: Synthetic oligonucleotide
ugcuuuggucuuuacgguu

SEQ ID NO: 2974105 - RNA, 19 nt, Artificial Sequence
  Description of Artificial Sequence: Synthetic oligonucleotide
ugucuaaaggggaguccaa

SEQ ID NO: 2974106 - RNA, 19 nt, Artificial Sequence
  Description of Artificial Sequence: Synthetic oligonucleotide
guagucggugcuuuggucu

SEQ ID NO: 2974107 - RNA, 19 nt, Artificial Sequence
  Description of Artificial Sequence: Synthetic oligonucleotide
uuguaguuuguagcuugug

SEQ ID NO: 2974108 - RNA, 19 nt, Artificial Sequence
  Description of Artificial Sequence: Synthetic oligonucleotide
ugcacauuccauggcuuga

SEQ ID NO: 2974109 - RNA, 19 nt, Artificial Sequence
  Description of Artificial Sequence: Synthetic oligonucleotide
cauuuugcuccuguuucug

SEQ ID NO: 2974110 - RNA, 19 nt, Artificial Sequence
  Description of Artificial Sequence: Synthetic oligonucleotide
guaucccacaggcauucac

SEQ ID NO: 2974111 - RNA, 19 nt, Artificial Sequence
  Description of Artificial Sequence: Synthetic oligonucleotide
ccaucauuacaccaguauc

SEQ ID NO: 2974112 - RNA, 19 nt, Artificial Sequence
  Description of Artificial Sequence: Synthetic oligonucleotide
cucuaaugccuuguggauc

SEQ ID NO: 2974113 - RNA, 19 nt, Artificial Sequence
  Description of Artificial Sequence: Synthetic oligonucleotide
gagacagaaugagcugaag

SEQ ID NO: 2974114 - RNA, 19 nt, Artificial Sequence
  Description of Artificial Sequence: Synthetic oligonucleotide
ucccacaggcauucacugc

SEQ ID NO: 2974115 - RNA, 19 nt, Artificial Sequence
  Description of Artificial Sequence: Synthetic oligonucleotide
cacacugcaggguauccca

SEQ ID NO: 2974116 - RNA, 19 nt, Artificial Sequence
  Description of Artificial Sequence: Synthetic oligonucleotide
uguuuaaaucgugcuuguc

SEQ ID NO: 2974117 - RNA, 19 nt, Artificial Sequence
  Description of Artificial Sequence: Synthetic oligonucleotide
ggcuugagugaugucaucc

SEQ ID NO: 2974118 - RNA, 19 nt, Artificial Sequence
  Description of Artificial Sequence: Synthetic oligonucleotide
ccacccaugcucuaaugcc

SEQ ID NO: 2974119 - RNA, 19 nt, Artificial Sequence
  Description of Artificial Sequence: Synthetic oligonucleotide
ccaguaucggcuauugauc

SEQ ID NO: 2974120 - RNA, 19 nt, Artificial Sequence
  Description of Artificial Sequence: Synthetic oligonucleotide
acugggugagaucucgguu

SEQ ID NO: 2974121 - RNA, 19 nt, Artificial Sequence
  Description of Artificial Sequence: Synthetic oligonucleotide
gcccugaauauacugggug

SEQ ID NO: 2974122 - RNA, 19 nt, Artificial Sequence
  Description of Artificial Sequence: Synthetic oligonucleotide
cugcucucgggguuuugcc

SEQ ID NO: 2974123 - RNA, 19 nt, Artificial Sequence
  Description of Artificial Sequence: Synthetic oligonucleotide
cuuugcacauuccauggcu

SEQ ID NO: 2974124 - RNA, 19 nt, Artificial Sequence
  Description of Artificial Sequence: Synthetic oligonucleotide
cagagacagaaugagcuga

SEQ ID NO: 2974125 - RNA, 19 nt, Artificial Sequence
  Description of Artificial Sequence: Synthetic oligonucleotide
uggaucccugacaacccuc

SEQ ID NO: 2974126 - RNA, 19 nt, Artificial Sequence
  Description of Artificial Sequence: Synthetic oligonucleotide
ugcuugucuaaaggggagu

SEQ ID NO: 2974127 - RNA, 19 nt, Artificial Sequence
  Description of Artificial Sequence: Synthetic oligonucleotide
agagcacagcgguuagacu

SEQ ID NO: 2974128 - RNA, 19 nt, Artificial Sequence
  Description of Artificial Sequence: Synthetic oligonucleotide
agcaauacagagacagaau

SEQ ID NO: 2974129 - RNA, 19 nt, Artificial Sequence
  Description of Artificial Sequence: Synthetic oligonucleotide
uugcuccuguuucuguuua

SEQ ID NO: 2974130 - RNA, 19 nt, Artificial Sequence
  Description of Artificial Sequence: Synthetic oligonucleotide
uuccauggcuugagugaug

SEQ ID NO: 2974131 - RNA, 19 nt, Artificial Sequence
  Description of Artificial Sequence: Synthetic oligonucleotide
gugagaucucgguuuugac

SEQ ID NO: 2974132 - RNA, 19 nt, Artificial Sequence
  Description of Artificial Sequence: Synthetic oligonucleotide
acaccaguaucggcuauug

SEQ ID NO: 2974133 - RNA, 19 nt, Artificial Sequence
  Description of Artificial Sequence: Synthetic oligonucleotide
auaucccguagucggugcu

SEQ ID NO: 2974134 - RNA, 19 nt, Artificial Sequence
  Description of Artificial Sequence: Synthetic oligonucleotide
uggucucuccaugccaccc

SEQ ID NO: 2974135 - RNA, 19 nt, Artificial Sequence
  Description of Artificial Sequence: Synthetic oligonucleotide
auagcaauacagagacaga

SEQ ID NO: 2974136 - RNA, 19 nt, Artificial Sequence
  Description of Artificial Sequence: Synthetic oligonucleotide
gugcuugucuaaaggggag

SEQ ID NO: 2974137 - RNA, 19 nt, Artificial Sequence
  Description of Artificial Sequence: Synthetic oligonucleotide
cuuguggaucccugacaac

SEQ ID NO: 2974138 - RNA, 19 nt, Artificial Sequence
  Description of Artificial Sequence: Synthetic oligonucleotide
auauacugggugagaucuc

SEQ ID NO: 2974139 - RNA, 19 nt, Artificial Sequence
  Description of Artificial Sequence: Synthetic oligonucleotide
aguuuguagcuuguguguu

SEQ ID NO: 2974140 - RNA, 19 nt, Artificial Sequence
  Description of Artificial Sequence: Synthetic oligonucleotide
guuuugacaguggucucuc

SEQ ID NO: 2974141 - RNA, 19 nt, Artificial Sequence
  Description of Artificial Sequence: Synthetic oligonucleotide
augugaccuuuuccauuuc

SEQ ID NO: 2974142 - RNA, 19 nt, Artificial Sequence
  Description of Artificial Sequence: Synthetic oligonucleotide
aucccugacaacccucuuu

SEQ ID NO: 2974143 - RNA, 19 nt, Artificial Sequence
  Description of Artificial Sequence: Synthetic oligonucleotide
agcuuguguguuauaauua

SEQ ID NO: 2974144 - RNA, 19 nt, Artificial Sequence
  Description of Artificial Sequence: Synthetic oligonucleotide
ugggugagaucucgguuuu

SEQ ID NO: 2974145 - RNA, 19 nt, Artificial Sequence
  Description of Artificial Sequence: Synthetic oligonucleotide
uuacaccaguaucggcuau

SEQ ID NO: 2974146 - RNA, 19 nt, Artificial Sequence
  Description of Artificial Sequence: Synthetic oligonucleotide
uaucggcuauugaucugaa

SEQ ID NO: 2974147 - RNA, 19 nt, Artificial Sequence
  Description of Artificial Sequence: Synthetic oligonucleotide
cuacuucuauagcaauaca

SEQ ID NO: 2974148 - RNA, 19 nt, Artificial Sequence
  Description of Artificial Sequence: Synthetic oligonucleotide
ccugaauauacugggugag

SEQ ID NO: 2974149 - RNA, 19 nt, Artificial Sequence
  Description of Artificial Sequence: Synthetic oligonucleotide
gggguuuugccaucauuac

SEQ ID NO: 2974150 - RNA, 19 nt, Artificial Sequence
  Description of Artificial Sequence: Synthetic oligonucleotide
ccauuucuacuucuauagc

SEQ ID NO: 2974151 - RNA, 19 nt, Artificial Sequence
  Description of Artificial Sequence: Synthetic oligonucleotide
aggggaguccaagaacaug

SEQ ID NO: 2974152 - RNA, 19 nt, Artificial Sequence
  Description of Artificial Sequence: Synthetic oligonucleotide
auucacugcucucgggguu

SEQ ID NO: 2974153 - RNA, 19 nt, Artificial Sequence
  Description of Artificial Sequence: Synthetic oligonucleotide
gucauccuggagcaacaca

SEQ ID NO: 2974154 - RNA, 19 nt, Artificial Sequence
  Description of Artificial Sequence: Synthetic oligonucleotide
aucucgguuuugacagugg

SEQ ID NO: 2974155 - RNA, 19 nt, Artificial Sequence
  Description of Artificial Sequence: Synthetic oligonucleotide
auacugggugagaucucgg

SEQ ID NO: 2974156 - RNA, 19 nt, Artificial Sequence
  Description of Artificial Sequence: Synthetic oligonucleotide
ucgggguuuugccaucauu

SEQ ID NO: 2974157 - RNA, 19 nt, Artificial Sequence
  Description of Artificial Sequence: Synthetic oligonucleotide
guuuguagcuuguguguua

SEQ ID NO: 2974158 - RNA, 19 nt, Artificial Sequence
  Description of Artificial Sequence: Synthetic oligonucleotide
gcuuuggucuuuacgguug

SEQ ID NO: 2974159 - RNA, 19 nt, Artificial Sequence
  Description of Artificial Sequence: Synthetic oligonucleotide
caguaucggcuauugaucu

SEQ ID NO: 2974160 - RNA, 19 nt, Artificial Sequence
  Description of Artificial Sequence: Synthetic oligonucleotide
ggaguccaagaacauguga

SEQ ID NO: 2974161 - RNA, 19 nt, Artificial Sequence
  Description of Artificial Sequence: Synthetic oligonucleotide
uaaugccuuguggaucccu

SEQ ID NO: 2974162 - RNA, 19 nt, Artificial Sequence
  Description of Artificial Sequence: Synthetic oligonucleotide
cugcaggguaucccacagg

SEQ ID NO: 2974163 - RNA, 19 nt, Artificial Sequence
  Description of Artificial Sequence: Synthetic oligonucleotide
ggguuuugccaucauuaca

SEQ ID NO: 2974164 - RNA, 19 nt, Artificial Sequence
  Description of Artificial Sequence: Synthetic oligonucleotide
ugccacccaugcucuaaug

SEQ ID NO: 2974165 - RNA, 19 nt, Artificial Sequence
  Description of Artificial Sequence: Synthetic oligonucleotide
augccuuguggaucccuga

SEQ ID NO: 2974166 - RNA, 19 nt, Artificial Sequence
  Description of Artificial Sequence: Synthetic oligonucleotide
agaucucgguuuugacagu

SEQ ID NO: 2974167 - RNA, 19 nt, Artificial Sequence
  Description of Artificial Sequence: Synthetic oligonucleotide
ugucauccuggagcaacac

SEQ ID NO: 2974168 - RNA, 19 nt, Artificial Sequence
  Description of Artificial Sequence: Synthetic oligonucleotide
caugugaccuuuuccauuu

SEQ ID NO: 2974169 - RNA, 19 nt, Artificial Sequence
  Description of Artificial Sequence: Synthetic oligonucleotide
gcugaagcagaagagcaca

SEQ ID NO: 2974170 - RNA, 19 nt, Artificial Sequence
  Description of Artificial Sequence: Synthetic oligonucleotide
auggcuugagugaugucau

SEQ ID NO: 2974171 - RNA, 19 nt, Artificial Sequence
  Description of Artificial Sequence: Synthetic oligonucleotide
ugccaucauuacaccagua

SEQ ID NO: 2974172 - RNA, 19 nt, Artificial Sequence
  Description of Artificial Sequence: Synthetic oligonucleotide
acacugcaggguaucccac

SEQ ID NO: 2974173 - RNA, 19 nt, Artificial Sequence
  Description of Artificial Sequence: Synthetic oligonucleotide
caggguaucccacaggcau

SEQ ID NO: 2974174 - RNA, 19 nt, Artificial Sequence
  Description of Artificial Sequence: Synthetic oligonucleotide
uagucggugcuuuggucuu

SEQ ID NO: 2974175 - RNA, 19 nt, Artificial Sequence
  Description of Artificial Sequence: Synthetic oligonucleotide
gguuagacuccacagcccu

SEQ ID NO: 2974176 - RNA, 19 nt, Artificial Sequence
  Description of Artificial Sequence: Synthetic oligonucleotide
cugaauauacugggugaga

SEQ ID NO: 2974177 - RNA, 19 nt, Artificial Sequence
  Description of Artificial Sequence: Synthetic oligonucleotide
ggugagaucucgguuuuga

SEQ ID NO: 2974178 - RNA, 19 nt, Artificial Sequence
  Description of Artificial Sequence: Synthetic oligonucleotide
cuauagcaauacagagaca

SEQ ID NO: 2974179 - RNA, 19 nt, Artificial Sequence
  Description of Artificial Sequence: Synthetic oligonucleotide
cuggagcaacacacugcag

SEQ ID NO: 2974180 - RNA, 19 nt, Artificial Sequence
  Description of Artificial Sequence: Synthetic oligonucleotide
agagacagaaugagcugaa

SEQ ID NO: 2974181 - RNA, 19 nt, Artificial Sequence
  Description of Artificial Sequence: Synthetic oligonucleotide
cagaagagcacagcgguua

SEQ ID NO: 2974182 - RNA, 19 nt, Artificial Sequence
  Description of Artificial Sequence: Synthetic oligonucleotide
guuagacuccacagcccug

SEQ ID NO: 2974183 - RNA, 19 nt, Artificial Sequence
  Description of Artificial Sequence: Synthetic oligonucleotide
ucucgggguuuugccauca

SEQ ID NO: 2974184 - RNA, 19 nt, Artificial Sequence
  Description of Artificial Sequence: Synthetic oligonucleotide
aaggggaguccaagaacau

SEQ ID NO: 2974185 - RNA, 19 nt, Artificial Sequence
  Description of Artificial Sequence: Synthetic oligonucleotide
ccuggagcaacacacugca

SEQ ID NO: 2974186 - RNA, 19 nt, Artificial Sequence
  Description of Artificial Sequence: Synthetic oligonucleotide
cuguuucuguuuaaaucgu

SEQ ID NO: 2974187 - RNA, 19 nt, Artificial Sequence
  Description of Artificial Sequence: Synthetic oligonucleotide
aucggcuauugaucugaaa

SEQ ID NO: 2974188 - RNA, 19 nt, Artificial Sequence
  Description of Artificial Sequence: Synthetic oligonucleotide
guagcuuguguguuauaau

SEQ ID NO: 2974189 - RNA, 19 nt, Artificial Sequence
  Description of Artificial Sequence: Synthetic oligonucleotide
guccaagaacaugugaccu

SEQ ID NO: 2974190 - RNA, 19 nt, Artificial Sequence
  Description of Artificial Sequence: Synthetic oligonucleotide
uucacugcucucgggguuu

SEQ ID NO: 2974191 - RNA, 19 nt, Artificial Sequence
  Description of Artificial Sequence: Synthetic oligonucleotide
guggucucuccaugccacc

SEQ ID NO: 2974192 - RNA, 19 nt, Artificial Sequence
  Description of Artificial Sequence: Synthetic oligonucleotide
uacaccaguaucggcuauu

SEQ ID NO: 2974193 - RNA, 19 nt, Artificial Sequence
  Description of Artificial Sequence: Synthetic oligonucleotide
augucauccuggagcaaca

SEQ ID NO: 2974194 - RNA, 19 nt, Artificial Sequence
  Description of Artificial Sequence: Synthetic oligonucleotide
agacuccacagcccugaau

SEQ ID NO: 2974195 - RNA, 19 nt, Artificial Sequence
  Description of Artificial Sequence: Synthetic oligonucleotide
gcuauugaucugaaauauc

SEQ ID NO: 2974196 - RNA, 19 nt, Artificial Sequence
  Description of Artificial Sequence: Synthetic oligonucleotide
caacacacugcaggguauc

SEQ ID NO: 2974197 - RNA, 19 nt, Artificial Sequence
  Description of Artificial Sequence: Synthetic oligonucleotide
gucuuuacgguuguaguuu

SEQ ID NO: 2974198 - RNA, 19 nt, Artificial Sequence
  Description of Artificial Sequence: Synthetic oligonucleotide
uagacuccacagcccugaa

SEQ ID NO: 2974199 - RNA, 19 nt, Artificial Sequence
  Description of Artificial Sequence: Synthetic oligonucleotide
ggggaguccaagaacaugu

SEQ ID NO: 2974200 - RNA, 19 nt, Artificial Sequence
  Description of Artificial Sequence: Synthetic oligonucleotide
gaagagcacagcgguuaga

SEQ ID NO: 2974201 - RNA, 19 nt, Artificial Sequence
  Description of Artificial Sequence: Synthetic oligonucleotide
augccacccaugcucuaau

SEQ ID NO: 2974202 - RNA, 19 nt, Artificial Sequence
  Description of Artificial Sequence: Synthetic oligonucleotide
guguuauaauuacucucau

SEQ ID NO: 2974203 - RNA, 19 nt, Artificial Sequence
  Description of Artificial Sequence: Synthetic oligonucleotide
uggcuugagugaugucauc

SEQ ID NO: 2974204 - RNA, 19 nt, Artificial Sequence
  Description of Artificial Sequence: Synthetic oligonucleotide
ucccguagucggugcuuug

SEQ ID NO: 2974205 - RNA, 19 nt, Artificial Sequence
  Description of Artificial Sequence: Synthetic oligonucleotide
cuguuuaaaucgugcuugu

SEQ ID NO: 2974206 - RNA, 19 nt, Artificial Sequence
  Description of Artificial Sequence: Synthetic oligonucleotide
cccugaauauacuggguga

SEQ ID NO: 2974207 - RNA, 19 nt, Artificial Sequence
  Description of Artificial Sequence: Synthetic oligonucleotide
cugggugagaucucgguuu

SEQ ID NO: 2974208 - RNA, 19 nt, Artificial Sequence
  Description of Artificial Sequence: Synthetic oligonucleotide
gugcuuuggucuuuacggu

SEQ ID NO: 2974209 - RNA, 19 nt, Artificial Sequence
  Description of Artificial Sequence: Synthetic oligonucleotide
gcacauuccauggcuugag

SEQ ID NO: 2974210 - RNA, 19 nt, Artificial Sequence
  Description of Artificial Sequence: Synthetic oligonucleotide
caguggucucuccaugcca

SEQ ID NO: 2974211 - RNA, 19 nt, Artificial Sequence
  Description of Artificial Sequence: Synthetic oligonucleotide
gugaccuuuuccauuucua

SEQ ID NO: 2974212 - RNA, 19 nt, Artificial Sequence
  Description of Artificial Sequence: Synthetic oligonucleotide
cacugcaggguaucccaca

SEQ ID NO: 2974213 - RNA, 19 nt, Artificial Sequence
  Description of Artificial Sequence: Synthetic oligonucleotide
gucuccauuuugcuccugu

SEQ ID NO: 2974214 - RNA, 19 nt, Artificial Sequence
  Description of Artificial Sequence: Synthetic oligonucleotide
ggcuauugaucugaaauau

SEQ ID NO: 2974215 - RNA, 19 nt, Artificial Sequence
  Description of Artificial Sequence: Synthetic oligonucleotide
ccuuguggaucccugacaa

SEQ ID NO: 2974216 - RNA, 19 nt, Artificial Sequence
  Description of Artificial Sequence: Synthetic oligonucleotide
cacccaugcucuaaugccu

SEQ ID NO: 2974217 - RNA, 19 nt, Artificial Sequence
  Description of Artificial Sequence: Synthetic oligonucleotide
gcuugucuaaaggggaguc

SEQ ID NO: 2974218 - RNA, 19 nt, Artificial Sequence
  Description of Artificial Sequence: Synthetic oligonucleotide
uaucccguagucggugcuu

SEQ ID NO: 2974219 - RNA, 19 nt, Artificial Sequence
  Description of Artificial Sequence: Synthetic oligonucleotide
agcccugaauauacugggu

SEQ ID NO: 2974220 - RNA, 19 nt, Artificial Sequence
  Description of Artificial Sequence: Synthetic oligonucleotide
cuaaugccuuguggauccc

SEQ ID NO: 2974221 - RNA, 19 nt, Artificial Sequence
  Description of Artificial Sequence: Synthetic oligonucleotide
uuuggucuuuacgguugua

SEQ ID NO: 2974222 - RNA, 19 nt, Artificial Sequence
  Description of Artificial Sequence: Synthetic oligonucleotide
uuguagcuuguguguuaua

SEQ ID NO: 2974223 - RNA, 19 nt, Artificial Sequence
  Description of Artificial Sequence: Synthetic oligonucleotide
cgugcuugucuaaagggga

SEQ ID NO: 2974224 - RNA, 19 nt, Artificial Sequence
  Description of Artificial Sequence: Synthetic oligonucleotide
ggucuuuacgguuguaguu

SEQ ID NO: 2974225 - RNA, 19 nt, Artificial Sequence
  Description of Artificial Sequence: Synthetic oligonucleotide
gccaucauuacaccaguau

SEQ ID NO: 2974226 - RNA, 19 nt, Artificial Sequence
  Description of Artificial Sequence: Synthetic oligonucleotide
guuguaguuuguagcuugu

SEQ ID NO: 2974227 - RNA, 19 nt, Artificial Sequence
  Description of Artificial Sequence: Synthetic oligonucleotide
cggugcuuuggucuuuacg

SEQ ID NO: 2974228 - RNA, 19 nt, Artificial Sequence
  Description of Artificial Sequence: Synthetic oligonucleotide
ucggugcuuuggucuuuac

SEQ ID NO: 2974229 - RNA, 19 nt, Artificial Sequence
  Description of Artificial Sequence: Synthetic oligonucleotide
cucucgggguuuugccauc

SEQ ID NO: 2974230 - RNA, 19 nt, Artificial Sequence
  Description of Artificial Sequence: Synthetic oligonucleotide
ugaugucauccuggagcaa

SEQ ID NO: 2974231 - RNA, 19 nt, Artificial Sequence
  Description of Artificial Sequence: Synthetic oligonucleotide
ggguaucccacaggcauuc

SEQ ID NO: 2974232 - RNA, 19 nt, Artificial Sequence
  Description of Artificial Sequence: Synthetic oligonucleotide
cuccuguuucuguuuaaau

SEQ ID NO: 2974233 - RNA, 19 nt, Artificial Sequence
  Description of Artificial Sequence: Synthetic oligonucleotide
gguuuugacaguggucucu

SEQ ID NO: 2974234 - RNA, 19 nt, Artificial Sequence
  Description of Artificial Sequence: Synthetic oligonucleotide
ggucucuccaugccaccca

SEQ ID NO: 2974235 - RNA, 19 nt, Artificial Sequence
  Description of Artificial Sequence: Synthetic oligonucleotide
cauccuggagcaacacacu

SEQ ID NO: 2974236 - RNA, 19 nt, Artificial Sequence
  Description of Artificial Sequence: Synthetic oligonucleotide
cccguagucggugcuuugg

SEQ ID NO: 2974237 - RNA, 19 nt, Artificial Sequence
  Description of Artificial Sequence: Synthetic oligonucleotide
cacagcgguuagacuccac

SEQ ID NO: 2974238 - RNA, 19 nt, Artificial Sequence
  Description of Artificial Sequence: Synthetic oligonucleotide
caugccacccaugcucuaa

SEQ ID NO: 2974239 - RNA, 19 nt, Artificial Sequence
  Description of Artificial Sequence: Synthetic oligonucleotide
cuuuggucuuuacgguugu

SEQ ID NO: 2974240 - RNA, 19 nt, Artificial Sequence
  Description of Artificial Sequence: Synthetic oligonucleotide
gccuuguggaucccugaca

SEQ ID NO: 2974241 - RNA, 19 nt, Artificial Sequence
  Description of Artificial Sequence: Synthetic oligonucleotide
guggaucccugacaacccu

SEQ ID NO: 2974242 - RNA, 19 nt, Artificial Sequence
  Description of Artificial Sequence: Synthetic oligonucleotide
cuccauuuugcuccuguuu

SEQ ID NO: 2974243 - RNA, 19 nt, Artificial Sequence
  Description of Artificial Sequence: Synthetic oligonucleotide
cuuuacgguuguaguuugu

SEQ ID NO: 2974244 - RNA, 19 nt, Artificial Sequence
  Description of Artificial Sequence: Synthetic oligonucleotide
caccaguaucggcuauuga

SEQ ID NO: 2974245 - RNA, 19 nt, Artificial Sequence
  Description of Artificial Sequence: Synthetic oligonucleotide
acccaugcucuaaugccuu

SEQ ID NO: 2974246 - RNA, 19 nt, Artificial Sequence
  Description of Artificial Sequence: Synthetic oligonucleotide
cgguuagacuccacagccc

SEQ ID NO: 2974247 - RNA, 19 nt, Artificial Sequence
  Description of Artificial Sequence: Synthetic oligonucleotide
aucccguagucggugcuuu

SEQ ID NO: 2974248 - RNA, 19 nt, Artificial Sequence
  Description of Artificial Sequence: Synthetic oligonucleotide
aggguaucccacaggcauu

SEQ ID NO: 2974249 - RNA, 19 nt, Artificial Sequence
  Description of Artificial Sequence: Synthetic oligonucleotide
gagcaacacacugcagggu

SEQ ID NO: 2974250 - RNA, 19 nt, Artificial Sequence
  Description of Artificial Sequence: Synthetic oligonucleotide
gcucuaaugccuuguggau

SEQ ID NO: 2974251 - RNA, 19 nt, Artificial Sequence
  Description of Artificial Sequence: Synthetic oligonucleotide
acaacccucuuugcacauu

SEQ ID NO: 2974252 - RNA, 19 nt, Artificial Sequence
  Description of Artificial Sequence: Synthetic oligonucleotide
cguagucggugcuuugguc

SEQ ID NO: 2974253 - RNA, 19 nt, Artificial Sequence
  Description of Artificial Sequence: Synthetic oligonucleotide
cccacaggcauucacugcu

SEQ ID NO: 2974254 - RNA, 19 nt, Artificial Sequence
  Description of Artificial Sequence: Synthetic oligonucleotide
cccugacaacccucuuugc

SEQ ID NO: 2974255 - RNA, 19 nt, Artificial Sequence
  Description of Artificial Sequence: Synthetic oligonucleotide
cacaggcauucacugcucu

SEQ ID NO: 2974256 - RNA, 19 nt, Artificial Sequence
  Description of Artificial Sequence: Synthetic oligonucleotide
cacauuccauggcuugagu

SEQ ID NO: 2974257 - RNA, 19 nt, Artificial Sequence
  Description of Artificial Sequence: Synthetic oligonucleotide
gcuccuguuucuguuuaaa

SEQ ID NO: 2974258 - RNA, 19 nt, Artificial Sequence
  Description of Artificial Sequence: Synthetic oligonucleotide
cccaugcucuaaugccuug

SEQ ID NO: 2974259 - RNA, 19 nt, Artificial Sequence
  Description of Artificial Sequence: Synthetic oligonucleotide
cggcuauugaucugaaaua

SEQ ID NO: 2974260 - RNA, 19 nt, Artificial Sequence
  Description of Artificial Sequence: Synthetic oligonucleotide
ccauuuugcuccuguuucu

SEQ ID NO: 2974261 - RNA, 19 nt, Artificial Sequence
  Description of Artificial Sequence: Synthetic oligonucleotide
ucacugcucucgggguuuu

SEQ ID NO: 2974262 - RNA, 19 nt, Artificial Sequence
  Description of Artificial Sequence: Synthetic oligonucleotide
ggaucccugacaacccucu

SEQ ID NO: 2974263 - RNA, 19 nt, Artificial Sequence
  Description of Artificial Sequence: Synthetic oligonucleotide
gaucccugacaacccucuu

SEQ ID NO: 2974264 - RNA, 19 nt, Artificial Sequence
  Description of Artificial Sequence: Synthetic oligonucleotide
gcucucgggguuuugccau

SEQ ID NO: 2974265 - RNA, 19 nt, Artificial Sequence
  Description of Artificial Sequence: Synthetic oligonucleotide
agucggugcuuuggucuuu

SEQ ID NO: 2974266 - RNA, 19 nt, Artificial Sequence
  Description of Artificial Sequence: Synthetic oligonucleotide
gucggugcuuuggucuuua

SEQ ID NO: 2974267 - RNA, 19 nt, Artificial Sequence
  Description of Artificial Sequence: Synthetic oligonucleotide
gcaggguaucccacaggca

SEQ ID NO: 2974268 - RNA, 19 nt, Artificial Sequence
  Description of Artificial Sequence: Synthetic oligonucleotide
gggugagaucucgguuuug

SEQ ID NO: 2974269 - RNA, 19 nt, Artificial Sequence
  Description of Artificial Sequence: Synthetic oligonucleotide
cacugcucucgggguuuug

SEQ ID NO: 2974270 - RNA, 19 nt, Artificial Sequence
  Description of Artificial Sequence: Synthetic oligonucleotide
ccaagaacaugugaccuuu

SEQ ID NO: 2974271 - RNA, 19 nt, Artificial Sequence
  Description of Artificial Sequence: Synthetic oligonucleotide
gguaucccacaggcauuca

SEQ ID NO: 2974272 - RNA, 19 nt, Artificial Sequence
  Description of Artificial Sequence: Synthetic oligonucleotide
cgguuuugacaguggucuc

SEQ ID NO: 2974273 - RNA, 19 nt, Artificial Sequence
  Description of Artificial Sequence: Synthetic oligonucleotide
ccauggcuugagugauguc

SEQ ID NO: 2974274 - RNA, 19 nt, Artificial Sequence
  Description of Artificial Sequence: Synthetic oligonucleotide
gcaacacacugcaggguau

SEQ ID NO: 2974275 - RNA, 19 nt, Artificial Sequence
  Description of Artificial Sequence: Synthetic oligonucleotide
gcacagcgguuagacucca

SEQ ID NO: 2974276 - RNA, 19 nt, Artificial Sequence
  Description of Artificial Sequence: Synthetic oligonucleotide
ccaugcucuaaugccuugu

SEQ ID NO: 2974277 - RNA, 19 nt, Artificial Sequence
  Description of Artificial Sequence: Synthetic oligonucleotide
ccguagucggugcuuuggu

SEQ ID NO: 2974278 - RNA, 19 nt, Artificial Sequence
  Description of Artificial Sequence: Synthetic oligonucleotide
gcagaagagcacagcgguu

SEQ ID NO: 2974279 - RNA, 19 nt, Artificial Sequence
  Description of Artificial Sequence: Synthetic oligonucleotide
cucgggguuuugccaucau

SEQ ID NO: 2974280 - RNA, 19 nt, Artificial Sequence
  Description of Artificial Sequence: Synthetic oligonucleotide
ccacagcccugaauauacu

SEQ ID NO: 2974281 - RNA, 19 nt, Artificial Sequence
  Description of Artificial Sequence: Synthetic oligonucleotide
ccaugccacccaugcucua

SEQ ID NO: 2974282 - RNA, 19 nt, Artificial Sequence
  Description of Artificial Sequence: Synthetic oligonucleotide
cgguuguaguuuguagcuu

SEQ ID NO: 2974283 - RNA, 19 nt, Artificial Sequence
  Description of Artificial Sequence: Synthetic oligonucleotide
gauuacauucauuuuaggg

SEQ ID NO: 2974284 - RNA, 19 nt, Artificial Sequence
  Description of Artificial Sequence: Synthetic oligonucleotide
auuacauucauuuuagggu

SEQ ID NO: 2974285 - RNA, 19 nt, Artificial Sequence
  Description of Artificial Sequence: Synthetic oligonucleotide
uuuauguguuuuaagauga

SEQ ID NO: 2974286 - RNA, 19 nt, Artificial Sequence
  Description of Artificial Sequence: Synthetic oligonucleotide
uuuaagaugacuguguugu

SEQ ID NO: 2974287 - RNA, 19 nt, Artificial Sequence
  Description of Artificial Sequence: Synthetic oligonucleotide
uuuuauguguuuuaagaug

SEQ ID NO: 2974288 - RNA, 19 nt, Artificial Sequence
  Description of Artificial Sequence: Synthetic oligonucleotide
aagacuacuacguugugca

SEQ ID NO: 2974289 - RNA, 19 nt, Artificial Sequence
  Description of Artificial Sequence: Synthetic oligonucleotide
ucuacauugauuacauuca

SEQ ID NO: 2974290 - RNA, 19 nt, Artificial Sequence
  Description of Artificial Sequence: Synthetic oligonucleotide
uaucacauugauuacauuc

SEQ ID NO: 2974291 - RNA, 19 nt, Artificial Sequence
  Description of Artificial Sequence: Synthetic oligonucleotide
uugauuacauucauuuuag

SEQ ID NO: 2974292 - RNA, 19 nt, Artificial Sequence
  Description of Artificial Sequence: Synthetic oligonucleotide
uuugaagacuacuacguug

SEQ ID NO: 2974293 - RNA, 19 nt, Artificial Sequence
  Description of Artificial Sequence: Synthetic oligonucleotide
uguuugaagacuacuacgu

SEQ ID NO: 2974294 - RNA, 19 nt, Artificial Sequence
  Description of Artificial Sequence: Synthetic oligonucleotide
ucuuucucuacauugauua

SEQ ID NO: 2974295 - RNA, 19 nt, Artificial Sequence
  Description of Artificial Sequence: Synthetic oligonucleotide
cucuacauugauuacauuc

SEQ ID NO: 2974296 - RNA, 19 nt, Artificial Sequence
  Description of Artificial Sequence: Synthetic oligonucleotide
auugauuacauucauuuua

SEQ ID NO: 2974297 - RNA, 19 nt, Artificial Sequence
  Description of Artificial Sequence: Synthetic oligonucleotide
uuuucggagacucuugugu

SEQ ID NO: 2974298 - RNA, 19 nt, Artificial Sequence
  Description of Artificial Sequence: Synthetic oligonucleotide
uguuuuaagaugacugugu

SEQ ID NO: 2974299 - RNA, 19 nt, Artificial Sequence
  Description of Artificial Sequence: Synthetic oligonucleotide
uucaugucuuugaagauga

SEQ ID NO: 2974300 - RNA, 19 nt, Artificial Sequence
  Description of Artificial Sequence: Synthetic oligonucleotide
ucuuguguuuugcaaaggc

SEQ ID NO: 2974301 - RNA, 19 nt, Artificial Sequence
  Description of Artificial Sequence: Synthetic oligonucleotide
uguguuugaagacuacuac

SEQ ID NO: 2974302 - RNA, 19 nt, Artificial Sequence
  Description of Artificial Sequence: Synthetic oligonucleotide
uugaagacuacuacguugu

SEQ ID NO: 2974303 - RNA, 19 nt, Artificial Sequence
  Description of Artificial Sequence: Synthetic oligonucleotide
uucauuuuaggguuucucu

SEQ ID NO: 2974304 - RNA, 19 nt, Artificial Sequence
  Description of Artificial Sequence: Synthetic oligonucleotide
guguuugaagacuacuacg

SEQ ID NO: 2974305 - RNA, 19 nt, Artificial Sequence
  Description of Artificial Sequence: Synthetic oligonucleotide
uuggagauuacugaguugu

SEQ ID NO: 2974306 - RNA, 19 nt, Artificial Sequence
  Description of Artificial Sequence: Synthetic oligonucleotide
uguguuuuaagaugacugu

SEQ ID NO: 2974307 - RNA, 19 nt, Artificial Sequence
  Description of Artificial Sequence: Synthetic oligonucleotide
cauuuuaggguuucucucc

SEQ ID NO: 2974308 - RNA, 19 nt, Artificial Sequence
  Description of Artificial Sequence: Synthetic oligonucleotide
uacugaguugugcaaaggc

SEQ ID NO: 2974309 - RNA, 19 nt, Artificial Sequence
  Description of Artificial Sequence: Synthetic oligonucleotide
uuuuauguguuugaagacu

SEQ ID NO: 2974310 - RNA, 19 nt, Artificial Sequence
  Description of Artificial Sequence: Synthetic oligonucleotide
uuuauguguuugaagacua

SEQ ID NO: 2974311 - RNA, 19 nt, Artificial Sequence
  Description of Artificial Sequence: Synthetic oligonucleotide
augucuuugaagaugacug

SEQ ID NO: 2974312 - RNA, 19 nt, Artificial Sequence
  Description of Artificial Sequence: Synthetic oligonucleotide
uuacauucauuuuaggguu

SEQ ID NO: 2974313 - RNA, 19 nt, Artificial Sequence
  Description of Artificial Sequence: Synthetic oligonucleotide
acuacuacguugugcaaag

SEQ ID NO: 2974314 - RNA, 19 nt, Artificial Sequence
  Description of Artificial Sequence: Synthetic oligonucleotide
uuuuaagaugacuguguug

SEQ ID NO: 2974315 - RNA, 19 nt, Artificial Sequence
  Description of Artificial Sequence: Synthetic oligonucleotide
ugucuuuggagauuacuga

SEQ ID NO: 2974316 - RNA, 19 nt, Artificial Sequence
  Description of Artificial Sequence: Synthetic oligonucleotide
auuacugaguugugcaaag

SEQ ID NO: 2974317 - RNA, 19 nt, Artificial Sequence
  Description of Artificial Sequence: Synthetic oligonucleotide
uuuauguuuucggagacuc

SEQ ID NO: 2974318 - RNA, 19 nt, Artificial Sequence
  Description of Artificial Sequence: Synthetic oligonucleotide
guugugaaaaggcuuuacc

SEQ ID NO: 2974319 - RNA, 19 nt, Artificial Sequence
  Description of Artificial Sequence: Synthetic oligonucleotide
gagauuacugaguugugca

SEQ ID NO: 2974320 - RNA, 19 nt, Artificial Sequence
  Description of Artificial Sequence: Synthetic oligonucleotide
auguguuuuaagaugacug

SEQ ID NO: 2974321 - RNA, 19 nt, Artificial Sequence
  Description of Artificial Sequence: Synthetic oligonucleotide
uuguguuuugcaaaggcuu

SEQ ID NO: 2974322 - RNA, 19 nt, Artificial Sequence
  Description of Artificial Sequence: Synthetic oligonucleotide
uuucucuacauugauuaca

SEQ ID NO: 2974323 - RNA, 19 nt, Artificial Sequence
  Description of Artificial Sequence: Synthetic oligonucleotide
ucauuuuaggguuucucuc

SEQ ID NO: 2974324 - RNA, 19 nt, Artificial Sequence
  Description of Artificial Sequence: Synthetic oligonucleotide
uucucuacauugauuacau

SEQ ID NO: 2974325 - RNA, 19 nt, Artificial Sequence
  Description of Artificial Sequence: Synthetic oligonucleotide
ugauuacauucauuuuagg

SEQ ID NO: 2974326 - RNA, 19 nt, Artificial Sequence
  Description of Artificial Sequence: Synthetic oligonucleotide
uguguugugaaaaggcuuu

SEQ ID NO: 2974327 - RNA, 19 nt, Artificial Sequence
  Description of Artificial Sequence: Synthetic oligonucleotide
ucuuuggagauuacugagu

SEQ ID NO: 2974328 - RNA, 19 nt, Artificial Sequence
  Description of Artificial Sequence: Synthetic oligonucleotide
ugcgcaaaggcuuuaucac

SEQ ID NO: 2974329 - RNA, 19 nt, Artificial Sequence
  Description of Artificial Sequence: Synthetic oligonucleotide
uuuaggguuucucuccagu

SEQ ID NO: 2974330 - RNA, 19 nt, Artificial Sequence
  Description of Artificial Sequence: Synthetic oligonucleotide
guuucuuucaugucuuuga

SEQ ID NO: 2974331 - RNA, 19 nt, Artificial Sequence
  Description of Artificial Sequence: Synthetic oligonucleotide
auucauuuuaggguuucuc

SEQ ID NO: 2974332 - RNA, 19 nt, Artificial Sequence
  Description of Artificial Sequence: Synthetic oligonucleotide
uuuaugucuuuggagauua

SEQ ID NO: 2974333 - RNA, 19 nt, Artificial Sequence
  Description of Artificial Sequence: Synthetic oligonucleotide
uguuuucggagacucuugu

SEQ ID NO: 2974334 - RNA, 19 nt, Artificial Sequence
  Description of Artificial Sequence: Synthetic oligonucleotide
gaagacuacuacguugugc

SEQ ID NO: 2974335 - RNA, 19 nt, Artificial Sequence
  Description of Artificial Sequence: Synthetic oligonucleotide
uauguguuugaagacuacu

SEQ ID NO: 2974336 - RNA, 19 nt, Artificial Sequence
  Description of Artificial Sequence: Synthetic oligonucleotide
uauguguuuuaagaugacu

SEQ ID NO: 2974337 - RNA, 19 nt, Artificial Sequence
  Description of Artificial Sequence: Synthetic oligonucleotide
aucacauugauuacauuca

SEQ ID NO: 2974338 - RNA, 19 nt, Artificial Sequence
  Description of Artificial Sequence: Synthetic oligonucleotide
augucuuuggagauuacug

SEQ ID NO: 2974339 - RNA, 19 nt, Artificial Sequence
  Description of Artificial Sequence: Synthetic oligonucleotide
uuuggagauuacugaguug

SEQ ID NO: 2974340 - RNA, 19 nt, Artificial Sequence
  Description of Artificial Sequence: Synthetic oligonucleotide
uaugucuuuggagauuacu

SEQ ID NO: 2974341 - RNA, 19 nt, Artificial Sequence
  Description of Artificial Sequence: Synthetic oligonucleotide
ugaagaugacugugcugcg

SEQ ID NO: 2974342 - RNA, 19 nt, Artificial Sequence
  Description of Artificial Sequence: Synthetic oligonucleotide
ugucuuugaagaugacugu

SEQ ID NO: 2974343 - RNA, 19 nt, Artificial Sequence
  Description of Artificial Sequence: Synthetic oligonucleotide
uguguuuugcaaaggcuuu

SEQ ID NO: 2974344 - RNA, 19 nt, Artificial Sequence
  Description of Artificial Sequence: Synthetic oligonucleotide
auuuuaggguuucucucca

SEQ ID NO: 2974345 - RNA, 19 nt, Artificial Sequence
  Description of Artificial Sequence: Synthetic oligonucleotide
uuauguguuuuaagaugac

SEQ ID NO: 2974346 - RNA, 19 nt, Artificial Sequence
  Description of Artificial Sequence: Synthetic oligonucleotide
uuauguguuugaagacuac

SEQ ID NO: 2974347 - RNA, 19 nt, Artificial Sequence
  Description of Artificial Sequence: Synthetic oligonucleotide
uauguuuucggagacucuu

SEQ ID NO: 2974348 - RNA, 19 nt, Artificial Sequence
  Description of Artificial Sequence: Synthetic oligonucleotide
aagucuuucucuacauuga

SEQ ID NO: 2974349 - RNA, 19 nt, Artificial Sequence
  Description of Artificial Sequence: Synthetic oligonucleotide
aguugugcaaaggcuuuac

SEQ ID NO: 2974350 - RNA, 19 nt, Artificial Sequence
  Description of Artificial Sequence: Synthetic oligonucleotide
uuacugaguugugcaaagg

SEQ ID NO: 2974351 - RNA, 19 nt, Artificial Sequence
  Description of Artificial Sequence: Synthetic oligonucleotide
gaugacuguguugugaaaa

SEQ ID NO: 2974352 - RNA, 19 nt, Artificial Sequence
  Description of Artificial Sequence: Synthetic oligonucleotide
gacucuuguguuuugcaaa

SEQ ID NO: 2974353 - RNA, 19 nt, Artificial Sequence
  Description of Artificial Sequence: Synthetic oligonucleotide
guguuuuaagaugacugug

SEQ ID NO: 2974354 - RNA, 19 nt, Artificial Sequence
  Description of Artificial Sequence: Synthetic oligonucleotide
uuaagaugacuguguugug

SEQ ID NO: 2974355 - RNA, 19 nt, Artificial Sequence
  Description of Artificial Sequence: Synthetic oligonucleotide
uuauguuuucggagacucu

SEQ ID NO: 2974356 - RNA, 19 nt, Artificial Sequence
  Description of Artificial Sequence: Synthetic oligonucleotide
acauucauuuuaggguuuc

SEQ ID NO: 2974357 - RNA, 19 nt, Artificial Sequence
  Description of Artificial Sequence: Synthetic oligonucleotide
cuuucucuacauugauuac

SEQ ID NO: 2974358 - RNA, 19 nt, Artificial Sequence
  Description of Artificial Sequence: Synthetic oligonucleotide
guuuugcaaaggcuuuacc

SEQ ID NO: 2974359 - RNA, 19 nt, Artificial Sequence
  Description of Artificial Sequence: Synthetic oligonucleotide
uguuuugcaaaggcuuuac

SEQ ID NO: 2974360 - RNA, 19 nt, Artificial Sequence
  Description of Artificial Sequence: Synthetic oligonucleotide
uuuuauguuuucggagacu

SEQ ID NO: 2974361 - RNA, 19 nt, Artificial Sequence
  Description of Artificial Sequence: Synthetic oligonucleotide
gucuuugaagaugacugug

SEQ ID NO: 2974362 - RNA, 19 nt, Artificial Sequence
  Description of Artificial Sequence: Synthetic oligonucleotide
cugcgcaaaggcuuuauca

SEQ ID NO: 2974363 - RNA, 19 nt, Artificial Sequence
  Description of Artificial Sequence: Synthetic oligonucleotide
agauuacugaguugugcaa

SEQ ID NO: 2974364 - RNA, 19 nt, Artificial Sequence
  Description of Artificial Sequence: Synthetic oligonucleotide
uguugugaaaaggcuuuac

SEQ ID NO: 2974365 - RNA, 19 nt, Artificial Sequence
  Description of Artificial Sequence: Synthetic oligonucleotide
acuguguugugaaaaggcu

SEQ ID NO: 2974366 - RNA, 19 nt, Artificial Sequence
  Description of Artificial Sequence: Synthetic oligonucleotide
ugaagacuacuacguugug

SEQ ID NO: 2974367 - RNA, 19 nt, Artificial Sequence
  Description of Artificial Sequence: Synthetic oligonucleotide
uggagauuacugaguugug

SEQ ID NO: 2974368 - RNA, 19 nt, Artificial Sequence
  Description of Artificial Sequence: Synthetic oligonucleotide
gauuacugaguugugcaaa

SEQ ID NO: 2974369 - RNA, 19 nt, Artificial Sequence
  Description of Artificial Sequence: Synthetic oligonucleotide
agucuuucucuacauugau

SEQ ID NO: 2974370 - RNA, 19 nt, Artificial Sequence
  Description of Artificial Sequence: Synthetic oligonucleotide
caguauguuucuuucaugu

SEQ ID NO: 2974371 - RNA, 19 nt, Artificial Sequence
  Description of Artificial Sequence: Synthetic oligonucleotide
uuucggagacucuuguguu

SEQ ID NO: 2974372 - RNA, 19 nt, Artificial Sequence
  Description of Artificial Sequence: Synthetic oligonucleotide
guuuucggagacucuugug

SEQ ID NO: 2974373 - RNA, 19 nt, Artificial Sequence
  Description of Artificial Sequence: Synthetic oligonucleotide
ggagauuacugaguugugc

SEQ ID NO: 2974374 - RNA, 19 nt, Artificial Sequence
  Description of Artificial Sequence: Synthetic oligonucleotide
uuuuaugucuuuggagauu

SEQ ID NO: 2974375 - RNA, 19 nt, Artificial Sequence
  Description of Artificial Sequence: Synthetic oligonucleotide
uacauucauuuuaggguuu

SEQ ID NO: 2974376 - RNA, 19 nt, Artificial Sequence
  Description of Artificial Sequence: Synthetic oligonucleotide
ugugcugcgcaaaggcuuu

SEQ ID NO: 2974377 - RNA, 19 nt, Artificial Sequence
  Description of Artificial Sequence: Synthetic oligonucleotide
cuuguguuuugcaaaggcu

SEQ ID NO: 2974378 - RNA, 19 nt, Artificial Sequence
  Description of Artificial Sequence: Synthetic oligonucleotide
gacuacuacguugugcaaa

SEQ ID NO: 2974379 - RNA, 19 nt, Artificial Sequence
  Description of Artificial Sequence: Synthetic oligonucleotide
uuaugucuuuggagauuac

SEQ ID NO: 2974380 - RNA, 19 nt, Artificial Sequence
  Description of Artificial Sequence: Synthetic oligonucleotide
auguguuugaagacuacua

SEQ ID NO: 2974381 - RNA, 19 nt, Artificial Sequence
  Description of Artificial Sequence: Synthetic oligonucleotide
cucuuguguuuugcaaagg

SEQ ID NO: 2974382 - RNA, 19 nt, Artificial Sequence
  Description of Artificial Sequence: Synthetic oligonucleotide
uuaucacauugauuacauu

SEQ ID NO: 2974383 - RNA, 19 nt, Artificial Sequence
  Description of Artificial Sequence: Synthetic oligonucleotide
ucaugucuuugaagaugac

SEQ ID NO: 2974384 - RNA, 19 nt, Artificial Sequence
  Description of Artificial Sequence: Synthetic oligonucleotide
uucggagacucuuguguuu

SEQ ID NO: 2974385 - RNA, 19 nt, Artificial Sequence
  Description of Artificial Sequence: Synthetic oligonucleotide
auguuuucggagacucuug

SEQ ID NO: 2974386 - RNA, 19 nt, Artificial Sequence
  Description of Artificial Sequence: Synthetic oligonucleotide
cuuuggagauuacugaguu

SEQ ID NO: 2974387 - RNA, 19 nt, Artificial Sequence
  Description of Artificial Sequence: Synthetic oligonucleotide
agaugacuguguugugaaa

SEQ ID NO: 2974388 - RNA, 19 nt, Artificial Sequence
  Description of Artificial Sequence: Synthetic oligonucleotide
ucggagacucuuguguuuu

SEQ ID NO: 2974389 - RNA, 19 nt, Artificial Sequence
  Description of Artificial Sequence: Synthetic oligonucleotide
caugucuuugaagaugacu

SEQ ID NO: 2974390 - RNA, 19 nt, Artificial Sequence
  Description of Artificial Sequence: Synthetic oligonucleotide
cugaguugugcaaaggcuu

SEQ ID NO: 2974391 - RNA, 19 nt, Artificial Sequence
  Description of Artificial Sequence: Synthetic oligonucleotide
cuacuacguugugcaaagg

SEQ ID NO: 2974392 - RNA, 19 nt, Artificial Sequence
  Description of Artificial Sequence: Synthetic oligonucleotide
ucucuacauugauuacauu

SEQ ID NO: 2974393 - RNA, 19 nt, Artificial Sequence
  Description of Artificial Sequence: Synthetic oligonucleotide
agacuacuacguugugcaa

SEQ ID NO: 2974394 - RNA, 19 nt, Artificial Sequence
  Description of Artificial Sequence: Synthetic oligonucleotide
auguuucuuucaugucuuu

SEQ ID NO: 2974395 - RNA, 19 nt, Artificial Sequence
  Description of Artificial Sequence: Synthetic oligonucleotide
cauugauuacauucauuuu

SEQ ID NO: 2974396 - RNA, 19 nt, Artificial Sequence
  Description of Artificial Sequence: Synthetic oligonucleotide
guuugaagacuacuacguu

SEQ ID NO: 2974397 - RNA, 19 nt, Artificial Sequence
  Description of Artificial Sequence: Synthetic oligonucleotide
cuacauugauuacauucau

SEQ ID NO: 2974398 - RNA, 19 nt, Artificial Sequence
  Description of Artificial Sequence: Synthetic oligonucleotide
cuguguugugaaaaggcuu

SEQ ID NO: 2974399 - RNA, 19 nt, Artificial Sequence
  Description of Artificial Sequence: Synthetic oligonucleotide
gcgcaaaggcuuuaucaca

SEQ ID NO: 2974400 - RNA, 19 nt, Artificial Sequence
  Description of Artificial Sequence: Synthetic oligonucleotide
ugcugcgcaaaggcuuuau

SEQ ID NO: 2974401 - RNA, 19 nt, Artificial Sequence
  Description of Artificial Sequence: Synthetic oligonucleotide
gaguugugcaaaggcuuua

SEQ ID NO: 2974402 - RNA, 19 nt, Artificial Sequence
  Description of Artificial Sequence: Synthetic oligonucleotide
gcugcgcaaaggcuuuauc

SEQ ID NO: 2974403 - RNA, 19 nt, Artificial Sequence
  Description of Artificial Sequence: Synthetic oligonucleotide
guguugugaaaaggcuuua

SEQ ID NO: 2974404 - RNA, 19 nt, Artificial Sequence
  Description of Artificial Sequence: Synthetic oligonucleotide
gucuuucucuacauugauu

SEQ ID NO: 2974405 - RNA, 19 nt, Artificial Sequence
  Description of Artificial Sequence: Synthetic oligonucleotide
cauucauuuuaggguuucu

SEQ ID NO: 2974406 - RNA, 19 nt, Artificial Sequence
  Description of Artificial Sequence: Synthetic oligonucleotide
cggagacucuuguguuuug

SEQ ID NO: 2974407 - RNA, 19 nt, Artificial Sequence
  Description of Artificial Sequence: Synthetic oligonucleotide
gugcugcgcaaaggcuuua

SEQ ID NO: 2974408 - RNA, 19 nt, Artificial Sequence
  Description of Artificial Sequence: Synthetic oligonucleotide
aaugaugagaucaucuggg

SEQ ID NO: 2974409 - RNA, 19 nt, Artificial Sequence
  Description of Artificial Sequence: Synthetic oligonucleotide
ugaaucuggguuuucaaug

SEQ ID NO: 2974410 - RNA, 19 nt, Artificial Sequence
  Description of Artificial Sequence: Synthetic oligonucleotide
ucuggguuuucaaugauga

SEQ ID NO: 2974411 - RNA, 19 nt, Artificial Sequence
  Description of Artificial Sequence: Synthetic oligonucleotide
uucaaugaugagaucaucu

SEQ ID NO: 2974412 - RNA, 19 nt, Artificial Sequence
  Description of Artificial Sequence: Synthetic oligonucleotide
aaagccgccccucucugcc

SEQ ID NO: 2974413 - RNA, 19 nt, Artificial Sequence
  Description of Artificial Sequence: Synthetic oligonucleotide
gacgccuucacucagggug

SEQ ID NO: 2974414 - RNA, 19 nt, Artificial Sequence
  Description of Artificial Sequence: Synthetic oligonucleotide
ugacucuugagacugaauc

SEQ ID NO: 2974415 - RNA, 19 nt, Artificial Sequence
  Description of Artificial Sequence: Synthetic oligonucleotide
ucaagucugacucuugaga

SEQ ID NO: 2974416 - RNA, 19 nt, Artificial Sequence
  Description of Artificial Sequence: Synthetic oligonucleotide
gaucaucugggucucaucc

SEQ ID NO: 2974417 - RNA, 19 nt, Artificial Sequence
  Description of Artificial Sequence: Synthetic oligonucleotide
gaccccaucagacaccugg

SEQ ID NO: 2974418 - RNA, 19 nt, Artificial Sequence
  Description of Artificial Sequence: Synthetic oligonucleotide
guugaggucgucuuccugg

SEQ ID NO: 2974419 - RNA, 19 nt, Artificial Sequence
  Description of Artificial Sequence: Synthetic oligonucleotide
uccugcguggacuucaggg

SEQ ID NO: 2974420 - RNA, 19 nt, Artificial Sequence
  Description of Artificial Sequence: Synthetic oligonucleotide
ucuugagacugaaucuggg

SEQ ID NO: 2974421 - RNA, 19 nt, Artificial Sequence
  Description of Artificial Sequence: Synthetic oligonucleotide
guuuucaaugaugagauca

SEQ ID NO: 2974422 - RNA, 19 nt, Artificial Sequence
  Description of Artificial Sequence: Synthetic oligonucleotide
guugaucucauccugcgug

SEQ ID NO: 2974423 - RNA, 19 nt, Artificial Sequence
  Description of Artificial Sequence: Synthetic oligonucleotide
uccacucugacuuggcccg

SEQ ID NO: 2974424 - RNA, 19 nt, Artificial Sequence
  Description of Artificial Sequence: Synthetic oligonucleotide
uggguuuucaaugaugaga

SEQ ID NO: 2974425 - RNA, 19 nt, Artificial Sequence
  Description of Artificial Sequence: Synthetic oligonucleotide
gacuucagggacuugagga

SEQ ID NO: 2974426 - RNA, 19 nt, Artificial Sequence
  Description of Artificial Sequence: Synthetic oligonucleotide
ucagacaccugguucauac

SEQ ID NO: 2974427 - RNA, 19 nt, Artificial Sequence
  Description of Artificial Sequence: Synthetic oligonucleotide
auagcuugcuucuugccug

SEQ ID NO: 2974428 - RNA, 19 nt, Artificial Sequence
  Description of Artificial Sequence: Synthetic oligonucleotide
ucuuccugggacuucaagu

SEQ ID NO: 2974429 - RNA, 19 nt, Artificial Sequence
  Description of Artificial Sequence: Synthetic oligonucleotide
uuuucaaugaugagaucau

SEQ ID NO: 2974430 - RNA, 19 nt, Artificial Sequence
  Description of Artificial Sequence: Synthetic oligonucleotide
caagucugacucuugagac

SEQ ID NO: 2974431 - RNA, 19 nt, Artificial Sequence
  Description of Artificial Sequence: Synthetic oligonucleotide
ugguucauacuguucuagg

SEQ ID NO: 2974432 - RNA, 19 nt, Artificial Sequence
  Description of Artificial Sequence: Synthetic oligonucleotide
ucugacuuggcccgguuga

SEQ ID NO: 2974433 - RNA, 19 nt, Artificial Sequence
  Description of Artificial Sequence: Synthetic oligonucleotide
cauccuggcauuucugacg

SEQ ID NO: 2974434 - RNA, 19 nt, Artificial Sequence
  Description of Artificial Sequence: Synthetic oligonucleotide
uucauacuguucuaggcuc

SEQ ID NO: 2974435 - RNA, 19 nt, Artificial Sequence
  Description of Artificial Sequence: Synthetic oligonucleotide
uguucuaggcuccggugag

SEQ ID NO: 2974436 - RNA, 19 nt, Artificial Sequence
  Description of Artificial Sequence: Synthetic oligonucleotide
accugguucauacuguucu

SEQ ID NO: 2974437 - RNA, 19 nt, Artificial Sequence
  Description of Artificial Sequence: Synthetic oligonucleotide
agcugcgauagcuugcuuc

SEQ ID NO: 2974438 - RNA, 19 nt, Artificial Sequence
  Description of Artificial Sequence: Synthetic oligonucleotide
uccggugagcuucuaggcg

SEQ ID NO: 2974439 - RNA, 19 nt, Artificial Sequence
  Description of Artificial Sequence: Synthetic oligonucleotide
ucaucugggucucauccug

SEQ ID NO: 2974440 - RNA, 19 nt, Artificial Sequence
  Description of Artificial Sequence: Synthetic oligonucleotide
uugagacugaaucuggguu

SEQ ID NO: 2974441 - RNA, 19 nt, Artificial Sequence
  Description of Artificial Sequence: Synthetic oligonucleotide
ucugacgcacgucacucag

SEQ ID NO: 2974442 - RNA, 19 nt, Artificial Sequence
  Description of Artificial Sequence: Synthetic oligonucleotide
uuccacucugacuuggccc

SEQ ID NO: 2974443 - RNA, 19 nt, Artificial Sequence
  Description of Artificial Sequence: Synthetic oligonucleotide
gaaucuggguuuucaauga

SEQ ID NO: 2974444 - RNA, 19 nt, Artificial Sequence
  Description of Artificial Sequence: Synthetic oligonucleotide
uucaagucugacucuugag

SEQ ID NO: 2974445 - RNA, 19 nt, Artificial Sequence
  Description of Artificial Sequence: Synthetic oligonucleotide
ugacgcacgucacucagca

SEQ ID NO: 2974446 - RNA, 19 nt, Artificial Sequence
  Description of Artificial Sequence: Synthetic oligonucleotide
uucuaggcgguucuccugc

SEQ ID NO: 2974447 - RNA, 19 nt, Artificial Sequence
  Description of Artificial Sequence: Synthetic oligonucleotide
agacaccugguucauacug

SEQ ID NO: 2974448 - RNA, 19 nt, Artificial Sequence
  Description of Artificial Sequence: Synthetic oligonucleotide
acgcacgucacucagcaug

SEQ ID NO: 2974449 - RNA, 19 nt, Artificial Sequence
  Description of Artificial Sequence: Synthetic oligonucleotide
gggacuucaagucugacuc

SEQ ID NO: 2974450 - RNA, 19 nt, Artificial Sequence
  Description of Artificial Sequence: Synthetic oligonucleotide
ucauacuguucuaggcucc

SEQ ID NO: 2974451 - RNA, 19 nt, Artificial Sequence
  Description of Artificial Sequence: Synthetic oligonucleotide
cuuccugggacuucaaguc

SEQ ID NO: 2974452 - RNA, 19 nt, Artificial Sequence
  Description of Artificial Sequence: Synthetic oligonucleotide
guccaucucguccaggcgg

SEQ ID NO: 2974453 - RNA, 19 nt, Artificial Sequence
  Description of Artificial Sequence: Synthetic oligonucleotide
gaugcucuguuccacucug

SEQ ID NO: 2974454 - RNA, 19 nt, Artificial Sequence
  Description of Artificial Sequence: Synthetic oligonucleotide
ugcgauagcuugcuucuug

SEQ ID NO: 2974455 - RNA, 19 nt, Artificial Sequence
  Description of Artificial Sequence: Synthetic oligonucleotide
ugaugagaucaucuggguc

SEQ ID NO: 2974456 - RNA, 19 nt, Artificial Sequence
  Description of Artificial Sequence: Synthetic oligonucleotide
cucuugagacugaaucugg

SEQ ID NO: 2974457 - RNA, 19 nt, Artificial Sequence
  Description of Artificial Sequence: Synthetic oligonucleotide
acgucacucagcauguccc

SEQ ID NO: 2974458 - RNA, 19 nt, Artificial Sequence
  Description of Artificial Sequence: Synthetic oligonucleotide
aggcuggugccagagaccc

SEQ ID NO: 2974459 - RNA, 19 nt, Artificial Sequence
  Description of Artificial Sequence: Synthetic oligonucleotide
uugaggucgucuuccuggg

SEQ ID NO: 2974460 - RNA, 19 nt, Artificial Sequence
  Description of Artificial Sequence: Synthetic oligonucleotide
acucuugagacugaaucug

SEQ ID NO: 2974461 - RNA, 19 nt, Artificial Sequence
  Description of Artificial Sequence: Synthetic oligonucleotide
agucugacucuugagacug

SEQ ID NO: 2974462 - RNA, 19 nt, Artificial Sequence
  Description of Artificial Sequence: Synthetic oligonucleotide
ugagacugaaucuggguuu

SEQ ID NO: 2974463 - RNA, 19 nt, Artificial Sequence
  Description of Artificial Sequence: Synthetic oligonucleotide
ugguccaucucguccaggc

SEQ ID NO: 2974464 - RNA, 19 nt, Artificial Sequence
  Description of Artificial Sequence: Synthetic oligonucleotide
gguucauacuguucuaggc

SEQ ID NO: 2974465 - RNA, 19 nt, Artificial Sequence
  Description of Artificial Sequence: Synthetic oligonucleotide
uggacuucagggacuugag

SEQ ID NO: 2974466 - RNA, 19 nt, Artificial Sequence
  Description of Artificial Sequence: Synthetic oligonucleotide
uccugggacuucaagucug

SEQ ID NO: 2974467 - RNA, 19 nt, Artificial Sequence
  Description of Artificial Sequence: Synthetic oligonucleotide
auggcuccaaagccgcccc

SEQ ID NO: 2974468 - RNA, 19 nt, Artificial Sequence
  Description of Artificial Sequence: Synthetic oligonucleotide
ugggacuucaagucugacu

SEQ ID NO: 2974469 - RNA, 19 nt, Artificial Sequence
  Description of Artificial Sequence: Synthetic oligonucleotide
cuugaggauggucuccagc

SEQ ID NO: 2974470 - RNA, 19 nt, Artificial Sequence
  Description of Artificial Sequence: Synthetic oligonucleotide
uacuguucuaggcuccggu

SEQ ID NO: 2974471 - RNA, 19 nt, Artificial Sequence
  Description of Artificial Sequence: Synthetic oligonucleotide
gaggucgucuuccugggac

SEQ ID NO: 2974472 - RNA, 19 nt, Artificial Sequence
  Description of Artificial Sequence: Synthetic oligonucleotide
auuucugacgcacgucacu

SEQ ID NO: 2974473 - RNA, 19 nt, Artificial Sequence
  Description of Artificial Sequence: Synthetic oligonucleotide
ugcugguccaucucgucca

SEQ ID NO: 2974474 - RNA, 19 nt, Artificial Sequence
  Description of Artificial Sequence: Synthetic oligonucleotide
cagcaagacgccuucacuc

SEQ ID NO: 2974475 - RNA, 19 nt, Artificial Sequence
  Description of Artificial Sequence: Synthetic oligonucleotide
aaucuggguuuucaaugau

SEQ ID NO: 2974476 - RNA, 19 nt, Artificial Sequence
  Description of Artificial Sequence: Synthetic oligonucleotide
ucauccuggcauuucugac

SEQ ID NO: 2974477 - RNA, 19 nt, Artificial Sequence
  Description of Artificial Sequence: Synthetic oligonucleotide
agcuucuaggcgguucucc

SEQ ID NO: 2974478 - RNA, 19 nt, Artificial Sequence
  Description of Artificial Sequence: Synthetic oligonucleotide
cagagaccccaucagacac

SEQ ID NO: 2974479 - RNA, 19 nt, Artificial Sequence
  Description of Artificial Sequence: Synthetic oligonucleotide
uaggcgguucuccugcagc

SEQ ID NO: 2974480 - RNA, 19 nt, Artificial Sequence
  Description of Artificial Sequence: Synthetic oligonucleotide
agcaagacgccuucacuca

SEQ ID NO: 2974481 - RNA, 19 nt, Artificial Sequence
  Description of Artificial Sequence: Synthetic oligonucleotide
gauagcuugcuucuugccu

SEQ ID NO: 2974482 - RNA, 19 nt, Artificial Sequence
  Description of Artificial Sequence: Synthetic oligonucleotide
cuuggacuucugcuggucc

SEQ ID NO: 2974483 - RNA, 19 nt, Artificial Sequence
  Description of Artificial Sequence: Synthetic oligonucleotide
acuguucuaggcuccggug

SEQ ID NO: 2974484 - RNA, 19 nt, Artificial Sequence
  Description of Artificial Sequence: Synthetic oligonucleotide
ugcucuguuccacucugac

SEQ ID NO: 2974485 - RNA, 19 nt, Artificial Sequence
  Description of Artificial Sequence: Synthetic oligonucleotide
cuuggcccgguugaggucg

SEQ ID NO: 2974486 - RNA, 19 nt, Artificial Sequence
  Description of Artificial Sequence: Synthetic oligonucleotide
ucucauccuggcauuucug

SEQ ID NO: 2974487 - RNA, 19 nt, Artificial Sequence
  Description of Artificial Sequence: Synthetic oligonucleotide
uuggacuucugcuggucca

SEQ ID NO: 2974488 - RNA, 19 nt, Artificial Sequence
  Description of Artificial Sequence: Synthetic oligonucleotide
augaugagaucaucugggu

SEQ ID NO: 2974489 - RNA, 19 nt, Artificial Sequence
  Description of Artificial Sequence: Synthetic oligonucleotide
ucuccagcugggcacgccc

SEQ ID NO: 2974490 - RNA, 19 nt, Artificial Sequence
  Description of Artificial Sequence: Synthetic oligonucleotide
acucaggguggccagguca

SEQ ID NO: 2974491 - RNA, 19 nt, Artificial Sequence
  Description of Artificial Sequence: Synthetic oligonucleotide
agggacuugaggauggucu

SEQ ID NO: 2974492 - RNA, 19 nt, Artificial Sequence
  Description of Artificial Sequence: Synthetic oligonucleotide
uuucugacgcacgucacuc

SEQ ID NO: 2974493 - RNA, 19 nt, Artificial Sequence
  Description of Artificial Sequence: Synthetic oligonucleotide
uagcuugcuucuugccugg

SEQ ID NO: 2974494 - RNA, 19 nt, Artificial Sequence
  Description of Artificial Sequence: Synthetic oligonucleotide
uggcauuucugacgcacgu

SEQ ID NO: 2974495 - RNA, 19 nt, Artificial Sequence
  Description of Artificial Sequence: Synthetic oligonucleotide
cuggcauuucugacgcacg

SEQ ID NO: 2974496 - RNA, 19 nt, Artificial Sequence
  Description of Artificial Sequence: Synthetic oligonucleotide
cacgucacucagcaugucc

SEQ ID NO: 2974497 - RNA, 19 nt, Artificial Sequence
  Description of Artificial Sequence: Synthetic oligonucleotide
caagacgccuucacucagg

SEQ ID NO: 2974498 - RNA, 19 nt, Artificial Sequence
  Description of Artificial Sequence: Synthetic oligonucleotide
guucauacuguucuaggcu

SEQ ID NO: 2974499 - RNA, 19 nt, Artificial Sequence
  Description of Artificial Sequence: Synthetic oligonucleotide
augucccgaagcuuggacu

SEQ ID NO: 2974500 - RNA, 19 nt, Artificial Sequence
  Description of Artificial Sequence: Synthetic oligonucleotide
acugaaucuggguuuucaa

SEQ ID NO: 2974501 - RNA, 19 nt, Artificial Sequence
  Description of Artificial Sequence: Synthetic oligonucleotide
gauggucuccagcugggca

SEQ ID NO: 2974502 - RNA, 19 nt, Artificial Sequence
  Description of Artificial Sequence: Synthetic oligonucleotide
gacucuugagacugaaucu

SEQ ID NO: 2974503 - RNA, 19 nt, Artificial Sequence
  Description of Artificial Sequence: Synthetic oligonucleotide
ugccagagaccccaucaga

SEQ ID NO: 2974504 - RNA, 19 nt, Artificial Sequence
  Description of Artificial Sequence: Synthetic oligonucleotide
ucuugccugguugaucuca

SEQ ID NO: 2974505 - RNA, 19 nt, Artificial Sequence
  Description of Artificial Sequence: Synthetic oligonucleotide
cucaggguggccaggucag

SEQ ID NO: 2974506 - RNA, 19 nt, Artificial Sequence
  Description of Artificial Sequence: Synthetic oligonucleotide
gcuccggugagcuucuagg

SEQ ID NO: 2974507 - RNA, 19 nt, Artificial Sequence
  Description of Artificial Sequence: Synthetic oligonucleotide
ugucccgaagcuuggacuu

SEQ ID NO: 2974508 - RNA, 19 nt, Artificial Sequence
  Description of Artificial Sequence: Synthetic oligonucleotide
ucugccagcaagacgccuu

SEQ ID NO: 2974509 - RNA, 19 nt, Artificial Sequence
  Description of Artificial Sequence: Synthetic oligonucleotide
uuucaaugaugagaucauc

SEQ ID NO: 2974510 - RNA, 19 nt, Artificial Sequence
  Description of Artificial Sequence: Synthetic oligonucleotide
cuccggugagcuucuaggc

SEQ ID NO: 2974511 - RNA, 19 nt, Artificial Sequence
  Description of Artificial Sequence: Synthetic oligonucleotide
caucugggucucauccugg

SEQ ID NO: 2974512 - RNA, 19 nt, Artificial Sequence
  Description of Artificial Sequence: Synthetic oligonucleotide
agagaccccaucagacacc

SEQ ID NO: 2974513 - RNA, 19 nt, Artificial Sequence
  Description of Artificial Sequence: Synthetic oligonucleotide
guuccacucugacuuggcc

SEQ ID NO: 2974514 - RNA, 19 nt, Artificial Sequence
  Description of Artificial Sequence: Synthetic oligonucleotide
cauacuguucuaggcuccg

SEQ ID NO: 2974515 - RNA, 19 nt, Artificial Sequence
  Description of Artificial Sequence: Synthetic oligonucleotide
cugguucauacuguucuag

SEQ ID NO: 2974516 - RNA, 19 nt, Artificial Sequence
  Description of Artificial Sequence: Synthetic oligonucleotide
uuggaugcucuguuccacu

SEQ ID NO: 2974517 - RNA, 19 nt, Artificial Sequence
  Description of Artificial Sequence: Synthetic oligonucleotide
ucauccugcguggacuuca

SEQ ID NO: 2974518 - RNA, 19 nt, Artificial Sequence
  Description of Artificial Sequence: Synthetic oligonucleotide
ucugggucucauccuggca

SEQ ID NO: 2974519 - RNA, 19 nt, Artificial Sequence
  Description of Artificial Sequence: Synthetic oligonucleotide
uucugcugguccaucucgu

SEQ ID NO: 2974520 - RNA, 19 nt, Artificial Sequence
  Description of Artificial Sequence: Synthetic oligonucleotide
cuaggcuccggugagcuuc

SEQ ID NO: 2974521 - RNA, 19 nt, Artificial Sequence
  Description of Artificial Sequence: Synthetic oligonucleotide
uugcuucuugccugguuga

SEQ ID NO: 2974522 - RNA, 19 nt, Artificial Sequence
  Description of Artificial Sequence: Synthetic oligonucleotide
cauuucugacgcacgucac

SEQ ID NO: 2974523 - RNA, 19 nt, Artificial Sequence
  Description of Artificial Sequence: Synthetic oligonucleotide
cuggguuuucaaugaugag

SEQ ID NO: 2974524 - RNA, 19 nt, Artificial Sequence
  Description of Artificial Sequence: Synthetic oligonucleotide
cuucaagucugacucuuga

SEQ ID NO: 2974525 - RNA, 19 nt, Artificial Sequence
  Description of Artificial Sequence: Synthetic oligonucleotide
ugacuuggcccgguugagg

SEQ ID NO: 2974526 - RNA, 19 nt, Artificial Sequence
  Description of Artificial Sequence: Synthetic oligonucleotide
cuucuugccugguugaucu

SEQ ID NO: 2974527 - RNA, 19 nt, Artificial Sequence
  Description of Artificial Sequence: Synthetic oligonucleotide
gaucucauccugcguggac

SEQ ID NO: 2974528 - RNA, 19 nt, Artificial Sequence
  Description of Artificial Sequence: Synthetic oligonucleotide
ggcuuggaugcucuguucc

SEQ ID NO: 2974529 - RNA, 19 nt, Artificial Sequence
  Description of Artificial Sequence: Synthetic oligonucleotide
uucuaggcuccggugagcu

SEQ ID NO: 2974530 - RNA, 19 nt, Artificial Sequence
  Description of Artificial Sequence: Synthetic oligonucleotide
uccagcugggcacgcccgg

SEQ ID NO: 2974531 - RNA, 19 nt, Artificial Sequence
  Description of Artificial Sequence: Synthetic oligonucleotide
guccaggcgguccugagca

SEQ ID NO: 2974532 - RNA, 19 nt, Artificial Sequence
  Description of Artificial Sequence: Synthetic oligonucleotide
aucucauccugcguggacu

SEQ ID NO: 2974533 - RNA, 19 nt, Artificial Sequence
  Description of Artificial Sequence: Synthetic oligonucleotide
caugucccgaagcuuggac

SEQ ID NO: 2974534 - RNA, 19 nt, Artificial Sequence
  Description of Artificial Sequence: Synthetic oligonucleotide
gcauuucugacgcacguca

SEQ ID NO: 2974535 - RNA, 19 nt, Artificial Sequence
  Description of Artificial Sequence: Synthetic oligonucleotide
cauggcuccaaagccgccc

SEQ ID NO: 2974536 - RNA, 19 nt, Artificial Sequence
  Description of Artificial Sequence: Synthetic oligonucleotide
ucacucagcaugucccgaa

SEQ ID NO: 2974537 - RNA, 19 nt, Artificial Sequence
  Description of Artificial Sequence: Synthetic oligonucleotide
ugcguggacuucagggacu

SEQ ID NO: 2974538 - RNA, 19 nt, Artificial Sequence
  Description of Artificial Sequence: Synthetic oligonucleotide
cugcguggacuucagggac

SEQ ID NO: 2974539 - RNA, 19 nt, Artificial Sequence
  Description of Artificial Sequence: Synthetic oligonucleotide
cuuggaugcucuguuccac

SEQ ID NO: 2974540 - RNA, 19 nt, Artificial Sequence
  Description of Artificial Sequence: Synthetic oligonucleotide
cuucuaggcgguucuccug

SEQ ID NO: 2974541 - RNA, 19 nt, Artificial Sequence
  Description of Artificial Sequence: Synthetic oligonucleotide
ggacuucagggacuugagg

SEQ ID NO: 2974542 - RNA, 19 nt, Artificial Sequence
  Description of Artificial Sequence: Synthetic oligonucleotide
uggaugcucuguuccacuc

SEQ ID NO: 2974543 - RNA, 19 nt, Artificial Sequence
  Description of Artificial Sequence: Synthetic oligonucleotide
uucugacgcacgucacuca

SEQ ID NO: 2974544 - RNA, 19 nt, Artificial Sequence
  Description of Artificial Sequence: Synthetic oligonucleotide
aucuggguuuucaaugaug

SEQ ID NO: 2974545 - RNA, 19 nt, Artificial Sequence
  Description of Artificial Sequence: Synthetic oligonucleotide
ccggugagcuucuaggcgg

SEQ ID NO: 2974546 - RNA, 19 nt, Artificial Sequence
  Description of Artificial Sequence: Synthetic oligonucleotide
ucugacucuugagacugaa

SEQ ID NO: 2974547 - RNA, 19 nt, Artificial Sequence
  Description of Artificial Sequence: Synthetic oligonucleotide
ucgucuuccugggacuuca

SEQ ID NO: 2974548 - RNA, 19 nt, Artificial Sequence
  Description of Artificial Sequence: Synthetic oligonucleotide
uucacucaggguggccagg

SEQ ID NO: 2974549 - RNA, 19 nt, Artificial Sequence
  Description of Artificial Sequence: Synthetic oligonucleotide
gugccagagaccccaucag

SEQ ID NO: 2974550 - RNA, 19 nt, Artificial Sequence
  Description of Artificial Sequence: Synthetic oligonucleotide
acuuggcccgguugagguc

SEQ ID NO: 2974551 - RNA, 19 nt, Artificial Sequence
  Description of Artificial Sequence: Synthetic oligonucleotide
cugcagcugcgauagcuug

SEQ ID NO: 2974552 - RNA, 19 nt, Artificial Sequence
  Description of Artificial Sequence: Synthetic oligonucleotide
ggugccagagaccccauca

SEQ ID NO: 2974553 - RNA, 19 nt, Artificial Sequence
  Description of Artificial Sequence: Synthetic oligonucleotide
guggacuucagggacuuga

SEQ ID NO: 2974554 - RNA, 19 nt, Artificial Sequence
  Description of Artificial Sequence: Synthetic oligonucleotide
cuguucuaggcuccgguga

SEQ ID NO: 2974555 - RNA, 19 nt, Artificial Sequence
  Description of Artificial Sequence: Synthetic oligonucleotide
uucuccugcagcugcgaua

SEQ ID NO: 2974556 - RNA, 19 nt, Artificial Sequence
  Description of Artificial Sequence: Synthetic oligonucleotide
aucucguccaggcgguccu

SEQ ID NO: 2974557 - RNA, 19 nt, Artificial Sequence
  Description of Artificial Sequence: Synthetic oligonucleotide
uggucuccagcugggcacg

SEQ ID NO: 2974558 - RNA, 19 nt, Artificial Sequence
  Description of Artificial Sequence: Synthetic oligonucleotide
gacuugaggauggucucca

SEQ ID NO: 2974559 - RNA, 19 nt, Artificial Sequence
  Description of Artificial Sequence: Synthetic oligonucleotide
caggcuggugccagagacc

SEQ ID NO: 2974560 - RNA, 19 nt, Artificial Sequence
  Description of Artificial Sequence: Synthetic oligonucleotide
aggcgguucuccugcagcu

SEQ ID NO: 2974561 - RNA, 19 nt, Artificial Sequence
  Description of Artificial Sequence: Synthetic oligonucleotide
auacuguucuaggcuccgg

SEQ ID NO: 2974562 - RNA, 19 nt, Artificial Sequence
  Description of Artificial Sequence: Synthetic oligonucleotide
gacuuggcccgguugaggu

SEQ ID NO: 2974563 - RNA, 19 nt, Artificial Sequence
  Description of Artificial Sequence: Synthetic oligonucleotide
aggucgucuuccugggacu

SEQ ID NO: 2974564 - RNA, 19 nt, Artificial Sequence
  Description of Artificial Sequence: Synthetic oligonucleotide
acaccugguucauacuguu

SEQ ID NO: 2974565 - RNA, 19 nt, Artificial Sequence
  Description of Artificial Sequence: Synthetic oligonucleotide
cacucagcaugucccgaag

SEQ ID NO: 2974566 - RNA, 19 nt, Artificial Sequence
  Description of Artificial Sequence: Synthetic oligonucleotide
cugacgcacgucacucagc

SEQ ID NO: 2974567 - RNA, 19 nt, Artificial Sequence
  Description of Artificial Sequence: Synthetic oligonucleotide
ucucauccugcguggacuu

SEQ ID NO: 2974568 - RNA, 19 nt, Artificial Sequence
  Description of Artificial Sequence: Synthetic oligonucleotide
acgccuucacucagggugg

SEQ ID NO: 2974569 - RNA, 19 nt, Artificial Sequence
  Description of Artificial Sequence: Synthetic oligonucleotide
cuccagcugggcacgcccg

SEQ ID NO: 2974570 - RNA, 19 nt, Artificial Sequence
  Description of Artificial Sequence: Synthetic oligonucleotide
gcgauagcuugcuucuugc

SEQ ID NO: 2974571 - RNA, 19 nt, Artificial Sequence
  Description of Artificial Sequence: Synthetic oligonucleotide
caaagccgccccucucugc

SEQ ID NO: 2974572 - RNA, 19 nt, Artificial Sequence
  Description of Artificial Sequence: Synthetic oligonucleotide
agcaugucccgaagcuugg

SEQ ID NO: 2974573 - RNA, 19 nt, Artificial Sequence
  Description of Artificial Sequence: Synthetic oligonucleotide
ugaggucgucuuccuggga

SEQ ID NO: 2974574 - RNA, 19 nt, Artificial Sequence
  Description of Artificial Sequence: Synthetic oligonucleotide
ucuaggcgguucuccugca

SEQ ID NO: 2974575 - RNA, 19 nt, Artificial Sequence
  Description of Artificial Sequence: Synthetic oligonucleotide
ucagcaugucccgaagcuu

SEQ ID NO: 2974576 - RNA, 19 nt, Artificial Sequence
  Description of Artificial Sequence: Synthetic oligonucleotide
gguccaucucguccaggcg

SEQ ID NO: 2974577 - RNA, 19 nt, Artificial Sequence
  Description of Artificial Sequence: Synthetic oligonucleotide
cauccugcguggacuucag

SEQ ID NO: 2974578 - RNA, 19 nt, Artificial Sequence
  Description of Artificial Sequence: Synthetic oligonucleotide
ccaucagacaccugguuca

SEQ ID NO: 2974579 - RNA, 19 nt, Artificial Sequence
  Description of Artificial Sequence: Synthetic oligonucleotide
caucucguccaggcggucc

SEQ ID NO: 2974580 - RNA, 19 nt, Artificial Sequence
  Description of Artificial Sequence: Synthetic oligonucleotide
ucacucaggguggccaggu

SEQ ID NO: 2974581 - RNA, 19 nt, Artificial Sequence
  Description of Artificial Sequence: Synthetic oligonucleotide
cuaggcgguucuccugcag

SEQ ID NO: 2974582 - RNA, 19 nt, Artificial Sequence
  Description of Artificial Sequence: Synthetic oligonucleotide
acuucaagucugacucuug

SEQ ID NO: 2974583 - RNA, 19 nt, Artificial Sequence
  Description of Artificial Sequence: Synthetic oligonucleotide
auccugcguggacuucagg

SEQ ID NO: 2974584 - RNA, 19 nt, Artificial Sequence
  Description of Artificial Sequence: Synthetic oligonucleotide
ucguccaggcgguccugag

SEQ ID NO: 2974585 - RNA, 19 nt, Artificial Sequence
  Description of Artificial Sequence: Synthetic oligonucleotide
agcuuggacuucugcuggu

SEQ ID NO: 2974586 - RNA, 19 nt, Artificial Sequence
  Description of Artificial Sequence: Synthetic oligonucleotide
ggguuuucaaugaugagau

SEQ ID NO: 2974587 - RNA, 19 nt, Artificial Sequence
  Description of Artificial Sequence: Synthetic oligonucleotide
gcaagacgccuucacucag

SEQ ID NO: 2974588 - RNA, 19 nt, Artificial Sequence
  Description of Artificial Sequence: Synthetic oligonucleotide
ggucaggcaggcuggugcc

SEQ ID NO: 2974589 - RNA, 19 nt, Artificial Sequence
  Description of Artificial Sequence: Synthetic oligonucleotide
uaggcuccggugagcuucu

SEQ ID NO: 2974590 - RNA, 19 nt, Artificial Sequence
  Description of Artificial Sequence: Synthetic oligonucleotide
ggcacgcccggcuuggaug

SEQ ID NO: 2974591 - RNA, 19 nt, Artificial Sequence
  Description of Artificial Sequence: Synthetic oligonucleotide
cucagcaugucccgaagcu

SEQ ID NO: 2974592 - RNA, 19 nt, Artificial Sequence
  Description of Artificial Sequence: Synthetic oligonucleotide
cccaucagacaccugguuc

SEQ ID NO: 2974593 - RNA, 19 nt, Artificial Sequence
  Description of Artificial Sequence: Synthetic oligonucleotide
gacuucugcugguccaucu

SEQ ID NO: 2974594 - RNA, 19 nt, Artificial Sequence
  Description of Artificial Sequence: Synthetic oligonucleotide
cugaaucuggguuuucaau

SEQ ID NO: 2974595 - RNA, 19 nt, Artificial Sequence
  Description of Artificial Sequence: Synthetic oligonucleotide
caccugguucauacuguuc

SEQ ID NO: 2974596 - RNA, 19 nt, Artificial Sequence
  Description of Artificial Sequence: Synthetic oligonucleotide
ugggucucauccuggcauu

SEQ ID NO: 2974597 - RNA, 19 nt, Artificial Sequence
  Description of Artificial Sequence: Synthetic oligonucleotide
gccagagaccccaucagac

SEQ ID NO: 2974598 - RNA, 19 nt, Artificial Sequence
  Description of Artificial Sequence: Synthetic oligonucleotide
agacugaaucuggguuuuc

SEQ ID NO: 2974599 - RNA, 19 nt, Artificial Sequence
  Description of Artificial Sequence: Synthetic oligonucleotide
uggacuucugcugguccau

SEQ ID NO: 2974600 - RNA, 19 nt, Artificial Sequence
  Description of Artificial Sequence: Synthetic oligonucleotide
cugacuuggcccgguugag

SEQ ID NO: 2974601 - RNA, 19 nt, Artificial Sequence
  Description of Artificial Sequence: Synthetic oligonucleotide
gguugaggucgucuuccug

SEQ ID NO: 2974602 - RNA, 19 nt, Artificial Sequence
  Description of Artificial Sequence: Synthetic oligonucleotide
gacaccugguucauacugu

SEQ ID NO: 2974603 - RNA, 19 nt, Artificial Sequence
  Description of Artificial Sequence: Synthetic oligonucleotide
agccgccccucucugccag

SEQ ID NO: 2974604 - RNA, 19 nt, Artificial Sequence
  Description of Artificial Sequence: Synthetic oligonucleotide
gcgguucuccugcagcugc

SEQ ID NO: 2974605 - RNA, 19 nt, Artificial Sequence
  Description of Artificial Sequence: Synthetic oligonucleotide
ccuggcauuucugacgcac

SEQ ID NO: 2974606 - RNA, 19 nt, Artificial Sequence
  Description of Artificial Sequence: Synthetic oligonucleotide
aagccgccccucucugcca

SEQ ID NO: 2974607 - RNA, 19 nt, Artificial Sequence
  Description of Artificial Sequence: Synthetic oligonucleotide
cugccagcaagacgccuuc

SEQ ID NO: 2974608 - RNA, 19 nt, Artificial Sequence
  Description of Artificial Sequence: Synthetic oligonucleotide
ccucucugccagcaagacg

SEQ ID NO: 2974609 - RNA, 19 nt, Artificial Sequence
  Description of Artificial Sequence: Synthetic oligonucleotide
gugagcuucuaggcgguuc

SEQ ID NO: 2974610 - RNA, 19 nt, Artificial Sequence
  Description of Artificial Sequence: Synthetic oligonucleotide
gcugcgauagcuugcuucu

SEQ ID NO: 2974611 - RNA, 19 nt, Artificial Sequence
  Description of Artificial Sequence: Synthetic oligonucleotide
gguuuucaaugaugagauc

SEQ ID NO: 2974612 - RNA, 19 nt, Artificial Sequence
  Description of Artificial Sequence: Synthetic oligonucleotide
guucuaggcuccggugagc

SEQ ID NO: 2974613 - RNA, 19 nt, Artificial Sequence
  Description of Artificial Sequence: Synthetic oligonucleotide
ggacuugaggauggucucc

SEQ ID NO: 2974614 - RNA, 19 nt, Artificial Sequence
  Description of Artificial Sequence: Synthetic oligonucleotide
cugggucucauccuggcau

SEQ ID NO: 2974615 - RNA, 19 nt, Artificial Sequence
  Description of Artificial Sequence: Synthetic oligonucleotide
aggcaggcuggugccagag

SEQ ID NO: 2974616 - RNA, 19 nt, Artificial Sequence
  Description of Artificial Sequence: Synthetic oligonucleotide
gcacgcccggcuuggaugc

SEQ ID NO: 2974617 - RNA, 19 nt, Artificial Sequence
  Description of Artificial Sequence: Synthetic oligonucleotide
ugagaucaucugggucuca

SEQ ID NO: 2974618 - RNA, 19 nt, Artificial Sequence
  Description of Artificial Sequence: Synthetic oligonucleotide
uucuugccugguugaucuc

SEQ ID NO: 2974619 - RNA, 19 nt, Artificial Sequence
  Description of Artificial Sequence: Synthetic oligonucleotide
gagaccccaucagacaccu

SEQ ID NO: 2974620 - RNA, 19 nt, Artificial Sequence
  Description of Artificial Sequence: Synthetic oligonucleotide
uugccugguugaucucauc

SEQ ID NO: 2974621 - RNA, 19 nt, Artificial Sequence
  Description of Artificial Sequence: Synthetic oligonucleotide
ugcuucuugccugguugau

SEQ ID NO: 2974622 - RNA, 19 nt, Artificial Sequence
  Description of Artificial Sequence: Synthetic oligonucleotide
gccccucucugccagcaag

SEQ ID NO: 2974623 - RNA, 19 nt, Artificial Sequence
  Description of Artificial Sequence: Synthetic oligonucleotide
agacgccuucacucagggu

SEQ ID NO: 2974624 - RNA, 19 nt, Artificial Sequence
  Description of Artificial Sequence: Synthetic oligonucleotide
gccagcaagacgccuucac

SEQ ID NO: 2974625 - RNA, 19 nt, Artificial Sequence
  Description of Artificial Sequence: Synthetic oligonucleotide
gcuggugccagagacccca

SEQ ID NO: 2974626 - RNA, 19 nt, Artificial Sequence
  Description of Artificial Sequence: Synthetic oligonucleotide
cugggcacgcccggcuugg

SEQ ID NO: 2974627 - RNA, 19 nt, Artificial Sequence
  Description of Artificial Sequence: Synthetic oligonucleotide
gacuucaagucugacucuu

SEQ ID NO: 2974628 - RNA, 19 nt, Artificial Sequence
  Description of Artificial Sequence: Synthetic oligonucleotide
ccgaagcuuggacuucugc

SEQ ID NO: 2974629 - RNA, 19 nt, Artificial Sequence
  Description of Artificial Sequence: Synthetic oligonucleotide
ccgguugaggucgucuucc

SEQ ID NO: 2974630 - RNA, 19 nt, Artificial Sequence
  Description of Artificial Sequence: Synthetic oligonucleotide
ggcuccggugagcuucuag

SEQ ID NO: 2974631 - RNA, 19 nt, Artificial Sequence
  Description of Artificial Sequence: Synthetic oligonucleotide
uggcuccaaagccgccccu

SEQ ID NO: 2974632 - RNA, 19 nt, Artificial Sequence
  Description of Artificial Sequence: Synthetic oligonucleotide
ccugcguggacuucaggga

SEQ ID NO: 2974633 - RNA, 19 nt, Artificial Sequence
  Description of Artificial Sequence: Synthetic oligonucleotide
cgucacucagcaugucccg

SEQ ID NO: 2974634 - RNA, 19 nt, Artificial Sequence
  Description of Artificial Sequence: Synthetic oligonucleotide
gucacucagcaugucccga

SEQ ID NO: 2974635 - RNA, 19 nt, Artificial Sequence
  Description of Artificial Sequence: Synthetic oligonucleotide
cgauagcuugcuucuugcc

SEQ ID NO: 2974636 - RNA, 19 nt, Artificial Sequence
  Description of Artificial Sequence: Synthetic oligonucleotide
ucuaggcuccggugagcuu

SEQ ID NO: 2974637 - RNA, 19 nt, Artificial Sequence
  Description of Artificial Sequence: Synthetic oligonucleotide
gagaucaucugggucucau

SEQ ID NO: 2974638 - RNA, 19 nt, Artificial Sequence
  Description of Artificial Sequence: Synthetic oligonucleotide
cugggacuucaagucugac

SEQ ID NO: 2974639 - RNA, 19 nt, Artificial Sequence
  Description of Artificial Sequence: Synthetic oligonucleotide
accccaucagacaccuggu

SEQ ID NO: 2974640 - RNA, 19 nt, Artificial Sequence
  Description of Artificial Sequence: Synthetic oligonucleotide
ccagagaccccaucagaca

SEQ ID NO: 2974641 - RNA, 19 nt, Artificial Sequence
  Description of Artificial Sequence: Synthetic oligonucleotide
gagacugaaucuggguuuu

SEQ ID NO: 2974642 - RNA, 19 nt, Artificial Sequence
  Description of Artificial Sequence: Synthetic oligonucleotide
ugccagcaagacgccuuca

SEQ ID NO: 2974643 - RNA, 19 nt, Artificial Sequence
  Description of Artificial Sequence: Synthetic oligonucleotide
ucucguccaggcgguccug

SEQ ID NO: 2974644 - RNA, 19 nt, Artificial Sequence
  Description of Artificial Sequence: Synthetic oligonucleotide
ggcauuucugacgcacguc

SEQ ID NO: 2974645 - RNA, 19 nt, Artificial Sequence
  Description of Artificial Sequence: Synthetic oligonucleotide
acgcccggcuuggaugcuc

SEQ ID NO: 2974646 - RNA, 19 nt, Artificial Sequence
  Description of Artificial Sequence: Synthetic oligonucleotide
uuggcccgguugaggucgu

SEQ ID NO: 2974647 - RNA, 19 nt, Artificial Sequence
  Description of Artificial Sequence: Synthetic oligonucleotide
gcuucuaggcgguucuccu

SEQ ID NO: 2974648 - RNA, 19 nt, Artificial Sequence
  Description of Artificial Sequence: Synthetic oligonucleotide
gcuucuugccugguugauc

SEQ ID NO: 2974649 - RNA, 19 nt, Artificial Sequence
  Description of Artificial Sequence: Synthetic oligonucleotide
cuugccugguugaucucau

SEQ ID NO: 2974650 - RNA, 19 nt, Artificial Sequence
  Description of Artificial Sequence: Synthetic oligonucleotide
agcugggcacgcccggcuu

SEQ ID NO: 2974651 - RNA, 19 nt, Artificial Sequence
  Description of Artificial Sequence: Synthetic oligonucleotide
ccaaagccgccccucucug

SEQ ID NO: 2974652 - RNA, 19 nt, Artificial Sequence
  Description of Artificial Sequence: Synthetic oligonucleotide
gucuccagcugggcacgcc

SEQ ID NO: 2974653 - RNA, 19 nt, Artificial Sequence
  Description of Artificial Sequence: Synthetic oligonucleotide
gccugguugaucucauccu

SEQ ID NO: 2974654 - RNA, 19 nt, Artificial Sequence
  Description of Artificial Sequence: Synthetic oligonucleotide
augcucuguuccacucuga

SEQ ID NO: 2974655 - RNA, 19 nt, Artificial Sequence
  Description of Artificial Sequence: Synthetic oligonucleotide
ggauggucuccagcugggc

SEQ ID NO: 2974656 - RNA, 19 nt, Artificial Sequence
  Description of Artificial Sequence: Synthetic oligonucleotide
gguugaucucauccugcgu

SEQ ID NO: 2974657 - RNA, 19 nt, Artificial Sequence
  Description of Artificial Sequence: Synthetic oligonucleotide
gcugggcacgcccggcuug

SEQ ID NO: 2974658 - RNA, 19 nt, Artificial Sequence
  Description of Artificial Sequence: Synthetic oligonucleotide
ggaugcucuguuccacucu

SEQ ID NO: 2974659 - RNA, 19 nt, Artificial Sequence
  Description of Artificial Sequence: Synthetic oligonucleotide
cucauccugcguggacuuc

SEQ ID NO: 2974660 - RNA, 19 nt, Artificial Sequence
  Description of Artificial Sequence: Synthetic oligonucleotide
aucagacaccugguucaua

SEQ ID NO: 2974661 - RNA, 19 nt, Artificial Sequence
  Description of Artificial Sequence: Synthetic oligonucleotide
ggucucauccuggcauuuc

SEQ ID NO: 2974662 - RNA, 19 nt, Artificial Sequence
  Description of Artificial Sequence: Synthetic oligonucleotide
gucgucuuccugggacuuc

SEQ ID NO: 2974663 - RNA, 19 nt, Artificial Sequence
  Description of Artificial Sequence: Synthetic oligonucleotide
cugacucuugagacugaau

SEQ ID NO: 2974664 - RNA, 19 nt, Artificial Sequence
  Description of Artificial Sequence: Synthetic oligonucleotide
gucccgaagcuuggacuuc

SEQ ID NO: 2974665 - RNA, 19 nt, Artificial Sequence
  Description of Artificial Sequence: Synthetic oligonucleotide
cagacaccugguucauacu

SEQ ID NO: 2974666 - RNA, 19 nt, Artificial Sequence
  Description of Artificial Sequence: Synthetic oligonucleotide
ggacuucaagucugacucu

SEQ ID NO: 2974667 - RNA, 19 nt, Artificial Sequence
  Description of Artificial Sequence: Synthetic oligonucleotide
gcuuggacuucugcugguc

SEQ ID NO: 2974668 - RNA, 19 nt, Artificial Sequence
  Description of Artificial Sequence: Synthetic oligonucleotide
ccauggcuccaaagccgcc

SEQ ID NO: 2974669 - RNA, 19 nt, Artificial Sequence
  Description of Artificial Sequence: Synthetic oligonucleotide
ggcgguucuccugcagcug

SEQ ID NO: 2974670 - RNA, 19 nt, Artificial Sequence
  Description of Artificial Sequence: Synthetic oligonucleotide
guucuccugcagcugcgau

SEQ ID NO: 2974671 - RNA, 19 nt, Artificial Sequence
  Description of Artificial Sequence: Synthetic oligonucleotide
gucugacucuugagacuga

SEQ ID NO: 2974672 - RNA, 19 nt, Artificial Sequence
  Description of Artificial Sequence: Synthetic oligonucleotide
ccugggacuucaagucuga

SEQ ID NO: 2974673 - RNA, 19 nt, Artificial Sequence
  Description of Artificial Sequence: Synthetic oligonucleotide
agcuugcuucuugccuggu

SEQ ID NO: 2974674 - RNA, 19 nt, Artificial Sequence
  Description of Artificial Sequence: Synthetic oligonucleotide
cgguucuccugcagcugcg

SEQ ID NO: 2974675 - RNA, 19 nt, Artificial Sequence
  Description of Artificial Sequence: Synthetic oligonucleotide
cguccaggcgguccugagc

SEQ ID NO: 2974676 - RNA, 19 nt, Artificial Sequence
  Description of Artificial Sequence: Synthetic oligonucleotide
ggcuccaaagccgccccuc

SEQ ID NO: 2974677 - RNA, 19 nt, Artificial Sequence
  Description of Artificial Sequence: Synthetic oligonucleotide
gguucuccugcagcugcga

SEQ ID NO: 2974678 - RNA, 19 nt, Artificial Sequence
  Description of Artificial Sequence: Synthetic oligonucleotide
cccgguugaggucgucuuc

SEQ ID NO: 2974679 - RNA, 19 nt, Artificial Sequence
  Description of Artificial Sequence: Synthetic oligonucleotide
cucguccaggcgguccuga

SEQ ID NO: 2974680 - RNA, 19 nt, Artificial Sequence
  Description of Artificial Sequence: Synthetic oligonucleotide
ccugguucauacuguucua

SEQ ID NO: 2974681 - RNA, 19 nt, Artificial Sequence
  Description of Artificial Sequence: Synthetic oligonucleotide
gcagcugcgauagcuugcu

SEQ ID NO: 2974682 - RNA, 19 nt, Artificial Sequence
  Description of Artificial Sequence: Synthetic oligonucleotide
cccucucugccagcaagac

SEQ ID NO: 2974683 - RNA, 19 nt, Artificial Sequence
  Description of Artificial Sequence: Synthetic oligonucleotide
caggcaggcuggugccaga

SEQ ID NO: 2974684 - RNA, 19 nt, Artificial Sequence
  Description of Artificial Sequence: Synthetic oligonucleotide
gacgcacgucacucagcau

SEQ ID NO: 2974685 - RNA, 19 nt, Artificial Sequence
  Description of Artificial Sequence: Synthetic oligonucleotide
ggacuucugcugguccauc

SEQ ID NO: 2974686 - RNA, 19 nt, Artificial Sequence
  Description of Artificial Sequence: Synthetic oligonucleotide
cccgaagcuuggacuucug

SEQ ID NO: 2974687 - RNA, 19 nt, Artificial Sequence
  Description of Artificial Sequence: Synthetic oligonucleotide
ccccucucugccagcaaga

SEQ ID NO: 2974688 - RNA, 19 nt, Artificial Sequence
  Description of Artificial Sequence: Synthetic oligonucleotide
ugggcacgcccggcuugga

SEQ ID NO: 2974689 - RNA, 19 nt, Artificial Sequence
  Description of Artificial Sequence: Synthetic oligonucleotide
gccuucacucaggguggcc

SEQ ID NO: 2974690 - RNA, 19 nt, Artificial Sequence
  Description of Artificial Sequence: Synthetic oligonucleotide
agaccccaucagacaccug

SEQ ID NO: 2974691 - RNA, 19 nt, Artificial Sequence
  Description of Artificial Sequence: Synthetic oligonucleotide
caucagacaccugguucau

SEQ ID NO: 2974692 - RNA, 19 nt, Artificial Sequence
  Description of Artificial Sequence: Synthetic oligonucleotide
ccagcugggcacgcccggc

SEQ ID NO: 2974693 - RNA, 19 nt, Artificial Sequence
  Description of Artificial Sequence: Synthetic oligonucleotide
gcaugucccgaagcuugga

SEQ ID NO: 2974694 - RNA, 19 nt, Artificial Sequence
  Description of Artificial Sequence: Synthetic oligonucleotide
ccacucugacuuggcccgg

SEQ ID NO: 2974695 - RNA, 19 nt, Artificial Sequence
  Description of Artificial Sequence: Synthetic oligonucleotide
ggucuccagcugggcacgc

SEQ ID NO: 2974696 - RNA, 19 nt, Artificial Sequence
  Description of Artificial Sequence: Synthetic oligonucleotide
ggcuggugccagagacccc

SEQ ID NO: 2974697 - RNA, 19 nt, Artificial Sequence
  Description of Artificial Sequence: Synthetic oligonucleotide
cagcugggcacgcccggcu

SEQ ID NO: 2974698 - RNA, 19 nt, Artificial Sequence
  Description of Artificial Sequence: Synthetic oligonucleotide
ccugcagcugcgauagcuu

SEQ ID NO: 2974699 - RNA, 19 nt, Artificial Sequence
  Description of Artificial Sequence: Synthetic oligonucleotide
cgcacgucacucagcaugu

SEQ ID NO: 2974700 - RNA, 19 nt, Artificial Sequence
  Description of Artificial Sequence: Synthetic oligonucleotide
cacucugacuuggcccggu

SEQ ID NO: 2974701 - RNA, 19 nt, Artificial Sequence
  Description of Artificial Sequence: Synthetic oligonucleotide
gcccggcuuggaugcucug

SEQ ID NO: 2974702 - RNA, 19 nt, Artificial Sequence
  Description of Artificial Sequence: Synthetic oligonucleotide
uggcccgguugaggucguc

SEQ ID NO: 2974703 - RNA, 19 nt, Artificial Sequence
  Description of Artificial Sequence: Synthetic oligonucleotide
gccgccccucucugccagc

SEQ ID NO: 2974704 - RNA, 19 nt, Artificial Sequence
  Description of Artificial Sequence: Synthetic oligonucleotide
gcacgucacucagcauguc

SEQ ID NO: 2974705 - RNA, 19 nt, Artificial Sequence
  Description of Artificial Sequence: Synthetic oligonucleotide
ggcccgguugaggucgucu

SEQ ID NO: 2974706 - RNA, 19 nt, Artificial Sequence
  Description of Artificial Sequence: Synthetic oligonucleotide
gcccgguugaggucgucuu

SEQ ID NO: 2974707 - RNA, 19 nt, Artificial Sequence
  Description of Artificial Sequence: Synthetic oligonucleotide
ccggcuuggaugcucuguu

SEQ ID NO: 2974708 - RNA, 19 nt, Artificial Sequence
  Description of Artificial Sequence: Synthetic oligonucleotide
cgccuucacucaggguggc

SEQ ID NO: 2974709 - RNA, 19 nt, Artificial Sequence
  Description of Artificial Sequence: Synthetic oligonucleotide
cugcgauagcuugcuucuu

SEQ ID NO: 2974710 - RNA, 19 nt, Artificial Sequence
  Description of Artificial Sequence: Synthetic oligonucleotide
gcguggacuucagggacuu

SEQ ID NO: 2974711 - RNA, 19 nt, Artificial Sequence
  Description of Artificial Sequence: Synthetic oligonucleotide
gggcacgcccggcuuggau

SEQ ID NO: 2974712 - RNA, 19 nt, Artificial Sequence
  Description of Artificial Sequence: Synthetic oligonucleotide
gggucucauccuggcauuu

SEQ ID NO: 2974713 - RNA, 19 nt, Artificial Sequence
  Description of Artificial Sequence: Synthetic oligonucleotide
cguggacuucagggacuug

SEQ ID NO: 2974714 - RNA, 19 nt, Artificial Sequence
  Description of Artificial Sequence: Synthetic oligonucleotide
cccggcuuggaugcucugu

SEQ ID NO: 2974715 - RNA, 19 nt, Artificial Sequence
  Description of Artificial Sequence: Synthetic oligonucleotide
ccgccccucucugccagca

SEQ ID NO: 2974716 - RNA, 19 nt, Artificial Sequence
  Description of Artificial Sequence: Synthetic oligonucleotide
ccccaucagacaccugguu

SEQ ID NO: 2974717 - RNA, 19 nt, Artificial Sequence
  Description of Artificial Sequence: Synthetic oligonucleotide
cagcugcgauagcuugcuu

SEQ ID NO: 2974718 - RNA, 19 nt, Artificial Sequence
  Description of Artificial Sequence: Synthetic oligonucleotide
cggugagcuucuaggcggu

SEQ ID NO: 2974719 - RNA, 19 nt, Artificial Sequence
  Description of Artificial Sequence: Synthetic oligonucleotide
cgucuuccugggacuucaa

SEQ ID NO: 2974720 - RNA, 19 nt, Artificial Sequence
  Description of Artificial Sequence: Synthetic oligonucleotide
ggugagcuucuaggcgguu

SEQ ID NO: 2974721 - RNA, 19 nt, Artificial Sequence
  Description of Artificial Sequence: Synthetic oligonucleotide
cgguugaggucgucuuccu

SEQ ID NO: 2974722 - RNA, 19 nt, Artificial Sequence
  Description of Artificial Sequence: Synthetic oligonucleotide
cacgcccggcuuggaugcu

SEQ ID NO: 2974723 - RNA, 19 nt, Artificial Sequence
  Description of Artificial Sequence: Synthetic oligonucleotide
cgcccggcuuggaugcucu

SEQ ID NO: 2974724 - RNA, 19 nt, Artificial Sequence
  Description of Artificial Sequence: Synthetic oligonucleotide
agaugaaugacucaugccc

SEQ ID NO: 2974725 - RNA, 19 nt, Artificial Sequence
  Description of Artificial Sequence: Synthetic oligonucleotide
aaaguuaauuauuauccac

SEQ ID NO: 2974726 - RNA, 19 nt, Artificial Sequence
  Description of Artificial Sequence: Synthetic oligonucleotide
auuauuauccaccacaugu

SEQ ID NO: 2974727 - RNA, 19 nt, Artificial Sequence
  Description of Artificial Sequence: Synthetic oligonucleotide
uaucuuuaaaucuacagga

SEQ ID NO: 2974728 - RNA, 19 nt, Artificial Sequence
  Description of Artificial Sequence: Synthetic oligonucleotide
aaguuaauuauuauccacc

SEQ ID NO: 2974729 - RNA, 19 nt, Artificial Sequence
  Description of Artificial Sequence: Synthetic oligonucleotide
guaucuuuaaaucuacagg

SEQ ID NO: 2974730 - RNA, 19 nt, Artificial Sequence
  Description of Artificial Sequence: Synthetic oligonucleotide
aaaggaaggucacugaugu

SEQ ID NO: 2974731 - RNA, 19 nt, Artificial Sequence
  Description of Artificial Sequence: Synthetic oligonucleotide
uguacugaucaccagugcg

SEQ ID NO: 2974732 - RNA, 19 nt, Artificial Sequence
  Description of Artificial Sequence: Synthetic oligonucleotide
ugagguuuugcccaagagg

SEQ ID NO: 2974733 - RNA, 19 nt, Artificial Sequence
  Description of Artificial Sequence: Synthetic oligonucleotide
ugcaagaaaaggaagguca

SEQ ID NO: 2974734 - RNA, 19 nt, Artificial Sequence
  Description of Artificial Sequence: Synthetic oligonucleotide
aagaaagauccauuccucg

SEQ ID NO: 2974735 - RNA, 19 nt, Artificial Sequence
  Description of Artificial Sequence: Synthetic oligonucleotide
aaaaguuaauuauuaucca

SEQ ID NO: 2974736 - RNA, 19 nt, Artificial Sequence
  Description of Artificial Sequence: Synthetic oligonucleotide
uaccaaaagagcuauagcu

SEQ ID NO: 2974737 - RNA, 19 nt, Artificial Sequence
  Description of Artificial Sequence: Synthetic oligonucleotide
aauauuaagugcugguacu

SEQ ID NO: 2974738 - RNA, 19 nt, Artificial Sequence
  Description of Artificial Sequence: Synthetic oligonucleotide
uaauauuaagugcugguac

SEQ ID NO: 2974739 - RNA, 19 nt, Artificial Sequence
  Description of Artificial Sequence: Synthetic oligonucleotide
uuugugaaccccauuacca

SEQ ID NO: 2974740 - RNA, 19 nt, Artificial Sequence
  Description of Artificial Sequence: Synthetic oligonucleotide
ucuuuaaaucuacaggaga

SEQ ID NO: 2974741 - RNA, 19 nt, Artificial Sequence
  Description of Artificial Sequence: Synthetic oligonucleotide
aaccccauuaccaaaagag

SEQ ID NO: 2974742 - RNA, 19 nt, Artificial Sequence
  Description of Artificial Sequence: Synthetic oligonucleotide
ugcgagacucccaagaaag

SEQ ID NO: 2974743 - RNA, 19 nt, Artificial Sequence
  Description of Artificial Sequence: Synthetic oligonucleotide
uucguaaugagguuuugcc

SEQ ID NO: 2974744 - RNA, 19 nt, Artificial Sequence
  Description of Artificial Sequence: Synthetic oligonucleotide
aacuucaugcgguugaggu

SEQ ID NO: 2974745 - RNA, 19 nt, Artificial Sequence
  Description of Artificial Sequence: Synthetic oligonucleotide
uuauuauccaccacaugug

SEQ ID NO: 2974746 - RNA, 19 nt, Artificial Sequence
  Description of Artificial Sequence: Synthetic oligonucleotide
aaaagagcuauagcuguac

SEQ ID NO: 2974747 - RNA, 19 nt, Artificial Sequence
  Description of Artificial Sequence: Synthetic oligonucleotide
auuaccaaaagagcuauag

SEQ ID NO: 2974748 - RNA, 19 nt, Artificial Sequence
  Description of Artificial Sequence: Synthetic oligonucleotide
gagguuuugcccaagaggc

SEQ ID NO: 2974749 - RNA, 19 nt, Artificial Sequence
  Description of Artificial Sequence: Synthetic oligonucleotide
uuaaaucuacaggagauga

SEQ ID NO: 2974750 - RNA, 19 nt, Artificial Sequence
  Description of Artificial Sequence: Synthetic oligonucleotide
agaaagauccauuccucgg

SEQ ID NO: 2974751 - RNA, 19 nt, Artificial Sequence
  Description of Artificial Sequence: Synthetic oligonucleotide
cucugcaagaaaaggaagg

SEQ ID NO: 2974752 - RNA, 19 nt, Artificial Sequence
  Description of Artificial Sequence: Synthetic oligonucleotide
ugagguugaauucguaaug

SEQ ID NO: 2974753 - RNA, 19 nt, Artificial Sequence
  Description of Artificial Sequence: Synthetic oligonucleotide
aguuaauuauuauccacca

SEQ ID NO: 2974754 - RNA, 19 nt, Artificial Sequence
  Description of Artificial Sequence: Synthetic oligonucleotide
ucacugauguugcugagug

SEQ ID NO: 2974755 - RNA, 19 nt, Artificial Sequence
  Description of Artificial Sequence: Synthetic oligonucleotide
aagagcuauagcuguacug

SEQ ID NO: 2974756 - RNA, 19 nt, Artificial Sequence
  Description of Artificial Sequence: Synthetic oligonucleotide
agacucccaagaaagaucc

SEQ ID NO: 2974757 - RNA, 19 nt, Artificial Sequence
  Description of Artificial Sequence: Synthetic oligonucleotide
aucuuguuuuguuugaugu

SEQ ID NO: 2974758 - RNA, 19 nt, Artificial Sequence
  Description of Artificial Sequence: Synthetic oligonucleotide
uuacuaagcgcgcucuccg

SEQ ID NO: 2974759 - RNA, 19 nt, Artificial Sequence
  Description of Artificial Sequence: Synthetic oligonucleotide
aauuauuauccaccacaug

SEQ ID NO: 2974760 - RNA, 19 nt, Artificial Sequence
  Description of Artificial Sequence: Synthetic oligonucleotide
ugugguaucuuuaaaucua

SEQ ID NO: 2974761 - RNA, 19 nt, Artificial Sequence
  Description of Artificial Sequence: Synthetic oligonucleotide
gguaucuuuaaaucuacag

SEQ ID NO: 2974762 - RNA, 19 nt, Artificial Sequence
  Description of Artificial Sequence: Synthetic oligonucleotide
uaauuauuauccaccacau

SEQ ID NO: 2974763 - RNA, 19 nt, Artificial Sequence
  Description of Artificial Sequence: Synthetic oligonucleotide
uuaccaaaagagcuauagc

SEQ ID NO: 2974764 - RNA, 19 nt, Artificial Sequence
  Description of Artificial Sequence: Synthetic oligonucleotide
cuugugguaucuuuaaauc

SEQ ID NO: 2974765 - RNA, 19 nt, Artificial Sequence
  Description of Artificial Sequence: Synthetic oligonucleotide
uucucugcaagaaaaggaa

SEQ ID NO: 2974766 - RNA, 19 nt, Artificial Sequence
  Description of Artificial Sequence: Synthetic oligonucleotide
uuauccaccacaugugugu

SEQ ID NO: 2974767 - RNA, 19 nt, Artificial Sequence
  Description of Artificial Sequence: Synthetic oligonucleotide
auuaagugcugguacuguc

SEQ ID NO: 2974768 - RNA, 19 nt, Artificial Sequence
  Description of Artificial Sequence: Synthetic oligonucleotide
acugucaauaguuuaguaa

SEQ ID NO: 2974769 - RNA, 19 nt, Artificial Sequence
  Description of Artificial Sequence: Synthetic oligonucleotide
aaaucuacaggagaugaau

SEQ ID NO: 2974770 - RNA, 19 nt, Artificial Sequence
  Description of Artificial Sequence: Synthetic oligonucleotide
uguuuuguuugaugugccg

SEQ ID NO: 2974771 - RNA, 19 nt, Artificial Sequence
  Description of Artificial Sequence: Synthetic oligonucleotide
uauagcuguacugaucacc

SEQ ID NO: 2974772 - RNA, 19 nt, Artificial Sequence
  Description of Artificial Sequence: Synthetic oligonucleotide
uauuauccaccacaugugu

SEQ ID NO: 2974773 - RNA, 19 nt, Artificial Sequence
  Description of Artificial Sequence: Synthetic oligonucleotide
uuaagugcugguacuguca

SEQ ID NO: 2974774 - RNA, 19 nt, Artificial Sequence
  Description of Artificial Sequence: Synthetic oligonucleotide
uugugguaucuuuaaaucu

SEQ ID NO: 2974775 - RNA, 19 nt, Artificial Sequence
  Description of Artificial Sequence: Synthetic oligonucleotide
uuuaaaucuacaggagaug

SEQ ID NO: 2974776 - RNA, 19 nt, Artificial Sequence
  Description of Artificial Sequence: Synthetic oligonucleotide
uggauaauauuaagugcug

SEQ ID NO: 2974777 - RNA, 19 nt, Artificial Sequence
  Description of Artificial Sequence: Synthetic oligonucleotide
acuugugguaucuuuaaau

SEQ ID NO: 2974778 - RNA, 19 nt, Artificial Sequence
  Description of Artificial Sequence: Synthetic oligonucleotide
ucucugcaagaaaaggaag

SEQ ID NO: 2974779 - RNA, 19 nt, Artificial Sequence
  Description of Artificial Sequence: Synthetic oligonucleotide
uacaggagaugaaugacuc

SEQ ID NO: 2974780 - RNA, 19 nt, Artificial Sequence
  Description of Artificial Sequence: Synthetic oligonucleotide
ucguaaugagguuuugccc

SEQ ID NO: 2974781 - RNA, 19 nt, Artificial Sequence
  Description of Artificial Sequence: Synthetic oligonucleotide
auucguaaugagguuuugc

SEQ ID NO: 2974782 - RNA, 19 nt, Artificial Sequence
  Description of Artificial Sequence: Synthetic oligonucleotide
aguucucugcaagaaaagg

SEQ ID NO: 2974783 - RNA, 19 nt, Artificial Sequence
  Description of Artificial Sequence: Synthetic oligonucleotide
aucuacaggagaugaauga

SEQ ID NO: 2974784 - RNA, 19 nt, Artificial Sequence
  Description of Artificial Sequence: Synthetic oligonucleotide
aaaaggaaggucacugaug

SEQ ID NO: 2974785 - RNA, 19 nt, Artificial Sequence
  Description of Artificial Sequence: Synthetic oligonucleotide
ugcugagugcaccauuucc

SEQ ID NO: 2974786 - RNA, 19 nt, Artificial Sequence
  Description of Artificial Sequence: Synthetic oligonucleotide
gauaauauuaagugcuggu

SEQ ID NO: 2974787 - RNA, 19 nt, Artificial Sequence
  Description of Artificial Sequence: Synthetic oligonucleotide
guuugugaaccccauuacc

SEQ ID NO: 2974788 - RNA, 19 nt, Artificial Sequence
  Description of Artificial Sequence: Synthetic oligonucleotide
uccccugaacuucaugcgg

SEQ ID NO: 2974789 - RNA, 19 nt, Artificial Sequence
  Description of Artificial Sequence: Synthetic oligonucleotide
agagcuauagcuguacuga

SEQ ID NO: 2974790 - RNA, 19 nt, Artificial Sequence
  Description of Artificial Sequence: Synthetic oligonucleotide
aaucuacaggagaugaaug

SEQ ID NO: 2974791 - RNA, 19 nt, Artificial Sequence
  Description of Artificial Sequence: Synthetic oligonucleotide
aaagagcuauagcuguacu

SEQ ID NO: 2974792 - RNA, 19 nt, Artificial Sequence
  Description of Artificial Sequence: Synthetic oligonucleotide
gaaagauccauuccucgga

SEQ ID NO: 2974793 - RNA, 19 nt, Artificial Sequence
  Description of Artificial Sequence: Synthetic oligonucleotide
aaugagguuuugcccaaga

SEQ ID NO: 2974794 - RNA, 19 nt, Artificial Sequence
  Description of Artificial Sequence: Synthetic oligonucleotide
gagaugaaugacucaugcc

SEQ ID NO: 2974795 - RNA, 19 nt, Artificial Sequence
  Description of Artificial Sequence: Synthetic oligonucleotide
ucccuggauaauauuaagu

SEQ ID NO: 2974796 - RNA, 19 nt, Artificial Sequence
  Description of Artificial Sequence: Synthetic oligonucleotide
uuuacuaagcgcgcucucc

SEQ ID NO: 2974797 - RNA, 19 nt, Artificial Sequence
  Description of Artificial Sequence: Synthetic oligonucleotide
acugauguugcugagugca

SEQ ID NO: 2974798 - RNA, 19 nt, Artificial Sequence
  Description of Artificial Sequence: Synthetic oligonucleotide
guugaauucguaaugaggu

SEQ ID NO: 2974799 - RNA, 19 nt, Artificial Sequence
  Description of Artificial Sequence: Synthetic oligonucleotide
cuggauaauauuaagugcu

SEQ ID NO: 2974800 - RNA, 19 nt, Artificial Sequence
  Description of Artificial Sequence: Synthetic oligonucleotide
uuuuggaaaggcagaguuc

SEQ ID NO: 2974801 - RNA, 19 nt, Artificial Sequence
  Description of Artificial Sequence: Synthetic oligonucleotide
ucugcaagaaaaggaaggu

SEQ ID NO: 2974802 - RNA, 19 nt, Artificial Sequence
  Description of Artificial Sequence: Synthetic oligonucleotide
ggagaugaaugacucaugc

SEQ ID NO: 2974803 - RNA, 19 nt, Artificial Sequence
  Description of Artificial Sequence: Synthetic oligonucleotide
cuucaugcgguugagguug

SEQ ID NO: 2974804 - RNA, 19 nt, Artificial Sequence
  Description of Artificial Sequence: Synthetic oligonucleotide
gguugaauucguaaugagg

SEQ ID NO: 2974805 - RNA, 19 nt, Artificial Sequence
  Description of Artificial Sequence: Synthetic oligonucleotide
caagaaagauccauuccuc

SEQ ID NO: 2974806 - RNA, 19 nt, Artificial Sequence
  Description of Artificial Sequence: Synthetic oligonucleotide
ucuacaggagaugaaugac

SEQ ID NO: 2974807 - RNA, 19 nt, Artificial Sequence
  Description of Artificial Sequence: Synthetic oligonucleotide
uucccuggauaauauuaag

SEQ ID NO: 2974808 - RNA, 19 nt, Artificial Sequence
  Description of Artificial Sequence: Synthetic oligonucleotide
uaaaucuacaggagaugaa

SEQ ID NO: 2974809 - RNA, 19 nt, Artificial Sequence
  Description of Artificial Sequence: Synthetic oligonucleotide
cugaucaccagugcgagac

SEQ ID NO: 2974810 - RNA, 19 nt, Artificial Sequence
  Description of Artificial Sequence: Synthetic oligonucleotide
ugaaccccauuaccaaaag

SEQ ID NO: 2974811 - RNA, 19 nt, Artificial Sequence
  Description of Artificial Sequence: Synthetic oligonucleotide
accccauuaccaaaagagc

SEQ ID NO: 2974812 - RNA, 19 nt, Artificial Sequence
  Description of Artificial Sequence: Synthetic oligonucleotide
guuaauuauuauccaccac

SEQ ID NO: 2974813 - RNA, 19 nt, Artificial Sequence
  Description of Artificial Sequence: Synthetic oligonucleotide
gguacugucaauaguuuag

SEQ ID NO: 2974814 - RNA, 19 nt, Artificial Sequence
  Description of Artificial Sequence: Synthetic oligonucleotide
uuuuccaucuuguuuuguu

SEQ ID NO: 2974815 - RNA, 19 nt, Artificial Sequence
  Description of Artificial Sequence: Synthetic oligonucleotide
accaaaagagcuauagcug

SEQ ID NO: 2974816 - RNA, 19 nt, Artificial Sequence
  Description of Artificial Sequence: Synthetic oligonucleotide
agguugaauucguaaugag

SEQ ID NO: 2974817 - RNA, 19 nt, Artificial Sequence
  Description of Artificial Sequence: Synthetic oligonucleotide
ucccaagaaagauccauuc

SEQ ID NO: 2974818 - RNA, 19 nt, Artificial Sequence
  Description of Artificial Sequence: Synthetic oligonucleotide
ugaauucguaaugagguuu

SEQ ID NO: 2974819 - RNA, 19 nt, Artificial Sequence
  Description of Artificial Sequence: Synthetic oligonucleotide
agcuguacugaucaccagu

SEQ ID NO: 2974820 - RNA, 19 nt, Artificial Sequence
  Description of Artificial Sequence: Synthetic oligonucleotide
gcuauagcuguacugauca

SEQ ID NO: 2974821 - RNA, 19 nt, Artificial Sequence
  Description of Artificial Sequence: Synthetic oligonucleotide
ccuggauaauauuaagugc

SEQ ID NO: 2974822 - RNA, 19 nt, Artificial Sequence
  Description of Artificial Sequence: Synthetic oligonucleotide
aaggucacugauguugcug

SEQ ID NO: 2974823 - RNA, 19 nt, Artificial Sequence
  Description of Artificial Sequence: Synthetic oligonucleotide
cugagugcaccauuucccc

SEQ ID NO: 2974824 - RNA, 19 nt, Artificial Sequence
  Description of Artificial Sequence: Synthetic oligonucleotide
auauuaagugcugguacug

SEQ ID NO: 2974825 - RNA, 19 nt, Artificial Sequence
  Description of Artificial Sequence: Synthetic oligonucleotide
auaauauuaagugcuggua

SEQ ID NO: 2974826 - RNA, 19 nt, Artificial Sequence
  Description of Artificial Sequence: Synthetic oligonucleotide
aucuuuaaaucuacaggag

SEQ ID NO: 2974827 - RNA, 19 nt, Artificial Sequence
  Description of Artificial Sequence: Synthetic oligonucleotide
gagugcaccauuuccccug

SEQ ID NO: 2974828 - RNA, 19 nt, Artificial Sequence
  Description of Artificial Sequence: Synthetic oligonucleotide
uaagugcugguacugucaa

SEQ ID NO: 2974829 - RNA, 19 nt, Artificial Sequence
  Description of Artificial Sequence: Synthetic oligonucleotide
ucuccguuugugaacccca

SEQ ID NO: 2974830 - RNA, 19 nt, Artificial Sequence
  Description of Artificial Sequence: Synthetic oligonucleotide
cccuggauaauauuaagug

SEQ ID NO: 2974831 - RNA, 19 nt, Artificial Sequence
  Description of Artificial Sequence: Synthetic oligonucleotide
ggauaauauuaagugcugg

SEQ ID NO: 2974832 - RNA, 19 nt, Artificial Sequence
  Description of Artificial Sequence: Synthetic oligonucleotide
uccaucuuguuuuguuuga

SEQ ID NO: 2974833 - RNA, 19 nt, Artificial Sequence
  Description of Artificial Sequence: Synthetic oligonucleotide
cuuuaaaucuacaggagau

SEQ ID NO: 2974834 - RNA, 19 nt, Artificial Sequence
  Description of Artificial Sequence: Synthetic oligonucleotide
aggucacugauguugcuga

SEQ ID NO: 2974835 - RNA, 19 nt, Artificial Sequence
  Description of Artificial Sequence: Synthetic oligonucleotide
caucuuguuuuguuugaug

SEQ ID NO: 2974836 - RNA, 19 nt, Artificial Sequence
  Description of Artificial Sequence: Synthetic oligonucleotide
guugagguugaauucguaa

SEQ ID NO: 2974837 - RNA, 19 nt, Artificial Sequence
  Description of Artificial Sequence: Synthetic oligonucleotide
ugauguugcugagugcacc

SEQ ID NO: 2974838 - RNA, 19 nt, Artificial Sequence
  Description of Artificial Sequence: Synthetic oligonucleotide
gauguugcugagugcacca

SEQ ID NO: 2974839 - RNA, 19 nt, Artificial Sequence
  Description of Artificial Sequence: Synthetic oligonucleotide
uuuccaucuuguuuuguuu

SEQ ID NO: 2974840 - RNA, 19 nt, Artificial Sequence
  Description of Artificial Sequence: Synthetic oligonucleotide
uugugaaccccauuaccaa

SEQ ID NO: 2974841 - RNA, 19 nt, Artificial Sequence
  Description of Artificial Sequence: Synthetic oligonucleotide
ugguaucuuuaaaucuaca

SEQ ID NO: 2974842 - RNA, 19 nt, Artificial Sequence
  Description of Artificial Sequence: Synthetic oligonucleotide
ugcaccauuuccccugaac

SEQ ID NO: 2974843 - RNA, 19 nt, Artificial Sequence
  Description of Artificial Sequence: Synthetic oligonucleotide
uauuaagugcugguacugu

SEQ ID NO: 2974844 - RNA, 19 nt, Artificial Sequence
  Description of Artificial Sequence: Synthetic oligonucleotide
uacugaucaccagugcgag

SEQ ID NO: 2974845 - RNA, 19 nt, Artificial Sequence
  Description of Artificial Sequence: Synthetic oligonucleotide
aagauccauuccucggacu

SEQ ID NO: 2974846 - RNA, 19 nt, Artificial Sequence
  Description of Artificial Sequence: Synthetic oligonucleotide
ugugaaccccauuaccaaa

SEQ ID NO: 2974847 - RNA, 19 nt, Artificial Sequence
  Description of Artificial Sequence: Synthetic oligonucleotide
agaguucucugcaagaaaa

SEQ ID NO: 2974848 - RNA, 19 nt, Artificial Sequence
  Description of Artificial Sequence: Synthetic oligonucleotide
aagaggcuucccuggauaa

SEQ ID NO: 2974849 - RNA, 19 nt, Artificial Sequence
  Description of Artificial Sequence: Synthetic oligonucleotide
augcgguugagguugaauu

SEQ ID NO: 2974850 - RNA, 19 nt, Artificial Sequence
  Description of Artificial Sequence: Synthetic oligonucleotide
auguguguguguguguguc

SEQ ID NO: 2974851 - RNA, 19 nt, Artificial Sequence
  Description of Artificial Sequence: Synthetic oligonucleotide
gagguugaauucguaauga

SEQ ID NO: 2974852 - RNA, 19 nt, Artificial Sequence
  Description of Artificial Sequence: Synthetic oligonucleotide
uccaccacaugugugugug

SEQ ID NO: 2974853 - RNA, 19 nt, Artificial Sequence
  Description of Artificial Sequence: Synthetic oligonucleotide
acaccucucucucucucuc

SEQ ID NO: 2974854 - RNA, 19 nt, Artificial Sequence
  Description of Artificial Sequence: Synthetic oligonucleotide
guucucugcaagaaaagga

SEQ ID NO: 2974855 - RNA, 19 nt, Artificial Sequence
  Description of Artificial Sequence: Synthetic oligonucleotide
gaagaauagcccuaauuuu

SEQ ID NO: 2974856 - RNA, 19 nt, Artificial Sequence
  Description of Artificial Sequence: Synthetic oligonucleotide
ugugugugugucccacacc

SEQ ID NO: 2974857 - RNA, 19 nt, Artificial Sequence
  Description of Artificial Sequence: Synthetic oligonucleotide
ugaacuucaugcgguugag

SEQ ID NO: 2974858 - RNA, 19 nt, Artificial Sequence
  Description of Artificial Sequence: Synthetic oligonucleotide
aauucguaaugagguuuug

SEQ ID NO: 2974859 - RNA, 19 nt, Artificial Sequence
  Description of Artificial Sequence: Synthetic oligonucleotide
ugcugguacugucaauagu

SEQ ID NO: 2974860 - RNA, 19 nt, Artificial Sequence
  Description of Artificial Sequence: Synthetic oligonucleotide
accucucucucucucucuc

SEQ ID NO: 2974861 - RNA, 19 nt, Artificial Sequence
  Description of Artificial Sequence: Synthetic oligonucleotide
acaugugugugugugugug

SEQ ID NO: 2974862 - RNA, 19 nt, Artificial Sequence
  Description of Artificial Sequence: Synthetic oligonucleotide
ugugugugugugugugucc

SEQ ID NO: 2974863 - RNA, 19 nt, Artificial Sequence
  Description of Artificial Sequence: Synthetic oligonucleotide
gaguucucugcaagaaaag

SEQ ID NO: 2974864 - RNA, 19 nt, Artificial Sequence
  Description of Artificial Sequence: Synthetic oligonucleotide
uuuuacuaagcgcgcucuc

SEQ ID NO: 2974865 - RNA, 19 nt, Artificial Sequence
  Description of Artificial Sequence: Synthetic oligonucleotide
ggaagaauagcccuaauuu

SEQ ID NO: 2974866 - RNA, 19 nt, Artificial Sequence
  Description of Artificial Sequence: Synthetic oligonucleotide
uugcccaagaggcuucccu

SEQ ID NO: 2974867 - RNA, 19 nt, Artificial Sequence
  Description of Artificial Sequence: Synthetic oligonucleotide
ugcccaagaggcuucccug

SEQ ID NO: 2974868 - RNA, 19 nt, Artificial Sequence
  Description of Artificial Sequence: Synthetic oligonucleotide
uugaauucguaaugagguu

SEQ ID NO: 2974869 - RNA, 19 nt, Artificial Sequence
  Description of Artificial Sequence: Synthetic oligonucleotide
aggcagaguucucugcaag

SEQ ID NO: 2974870 - RNA, 19 nt, Artificial Sequence
  Description of Artificial Sequence: Synthetic oligonucleotide
gaaaaggaaggucacugau

SEQ ID NO: 2974871 - RNA, 19 nt, Artificial Sequence
  Description of Artificial Sequence: Synthetic oligonucleotide
agugcugguacugucaaua

SEQ ID NO: 2974872 - RNA, 19 nt, Artificial Sequence
  Description of Artificial Sequence: Synthetic oligonucleotide
ugucccacaccucucucuc

SEQ ID NO: 2974873 - RNA, 19 nt, Artificial Sequence
  Description of Artificial Sequence: Synthetic oligonucleotide
auuauccaccacaugugug

SEQ ID NO: 2974874 - RNA, 19 nt, Artificial Sequence
  Description of Artificial Sequence: Synthetic oligonucleotide
aaggcagaguucucugcaa

SEQ ID NO: 2974875 - RNA, 19 nt, Artificial Sequence
  Description of Artificial Sequence: Synthetic oligonucleotide
gagacucccaagaaagauc

SEQ ID NO: 2974876 - RNA, 19 nt, Artificial Sequence
  Description of Artificial Sequence: Synthetic oligonucleotide
agcuauagcuguacugauc

SEQ ID NO: 2974877 - RNA, 19 nt, Artificial Sequence
  Description of Artificial Sequence: Synthetic oligonucleotide
gaacuucaugcgguugagg

SEQ ID NO: 2974878 - RNA, 19 nt, Artificial Sequence
  Description of Artificial Sequence: Synthetic oligonucleotide
cugaacuucaugcgguuga

SEQ ID NO: 2974879 - RNA, 19 nt, Artificial Sequence
  Description of Artificial Sequence: Synthetic oligonucleotide
agugcgagacucccaagaa

SEQ ID NO: 2974880 - RNA, 19 nt, Artificial Sequence
  Description of Artificial Sequence: Synthetic oligonucleotide
uacugucaauaguuuagua

SEQ ID NO: 2974881 - RNA, 19 nt, Artificial Sequence
  Description of Artificial Sequence: Synthetic oligonucleotide
aucaccagugcgagacucc

SEQ ID NO: 2974882 - RNA, 19 nt, Artificial Sequence
  Description of Artificial Sequence: Synthetic oligonucleotide
acaggagaugaaugacuca

SEQ ID NO: 2974883 - RNA, 19 nt, Artificial Sequence
  Description of Artificial Sequence: Synthetic oligonucleotide
gaaccccauuaccaaaaga

SEQ ID NO: 2974884 - RNA, 19 nt, Artificial Sequence
  Description of Artificial Sequence: Synthetic oligonucleotide
cuucccuggauaauauuaa

SEQ ID NO: 2974885 - RNA, 19 nt, Artificial Sequence
  Description of Artificial Sequence: Synthetic oligonucleotide
gaugaaugacucaugcccu

SEQ ID NO: 2974886 - RNA, 19 nt, Artificial Sequence
  Description of Artificial Sequence: Synthetic oligonucleotide
ugagugcaccauuuccccu

SEQ ID NO: 2974887 - RNA, 19 nt, Artificial Sequence
  Description of Artificial Sequence: Synthetic oligonucleotide
cuguacugaucaccagugc

SEQ ID NO: 2974888 - RNA, 19 nt, Artificial Sequence
  Description of Artificial Sequence: Synthetic oligonucleotide
acucccaagaaagauccau

SEQ ID NO: 2974889 - RNA, 19 nt, Artificial Sequence
  Description of Artificial Sequence: Synthetic oligonucleotide
gugcugguacugucaauag

SEQ ID NO: 2974890 - RNA, 19 nt, Artificial Sequence
  Description of Artificial Sequence: Synthetic oligonucleotide
ucccacaccucucucucuc

SEQ ID NO: 2974891 - RNA, 19 nt, Artificial Sequence
  Description of Artificial Sequence: Synthetic oligonucleotide
uguugcugagugcaccauu

SEQ ID NO: 2974892 - RNA, 19 nt, Artificial Sequence
  Description of Artificial Sequence: Synthetic oligonucleotide
gugguaucuuuaaaucuac

SEQ ID NO: 2974893 - RNA, 19 nt, Artificial Sequence
  Description of Artificial Sequence: Synthetic oligonucleotide
guguguguguguguguccc

SEQ ID NO: 2974894 - RNA, 19 nt, Artificial Sequence
  Description of Artificial Sequence: Synthetic oligonucleotide
gugugugugugucccacac

SEQ ID NO: 2974895 - RNA, 19 nt, Artificial Sequence
  Description of Artificial Sequence: Synthetic oligonucleotide
guacugaucaccagugcga

SEQ ID NO: 2974896 - RNA, 19 nt, Artificial Sequence
  Description of Artificial Sequence: Synthetic oligonucleotide
uauccaccacaugugugug

SEQ ID NO: 2974897 - RNA, 19 nt, Artificial Sequence
  Description of Artificial Sequence: Synthetic oligonucleotide
uuguuugaugugccguuuu

SEQ ID NO: 2974898 - RNA, 19 nt, Artificial Sequence
  Description of Artificial Sequence: Synthetic oligonucleotide
gugugugugucccacaccu

SEQ ID NO: 2974899 - RNA, 19 nt, Artificial Sequence
  Description of Artificial Sequence: Synthetic oligonucleotide
ugugugucccacaccucuc

SEQ ID NO: 2974900 - RNA, 19 nt, Artificial Sequence
  Description of Artificial Sequence: Synthetic oligonucleotide
ucggacuugugguaucuuu

SEQ ID NO: 2974901 - RNA, 19 nt, Artificial Sequence
  Description of Artificial Sequence: Synthetic oligonucleotide
gaucaccagugcgagacuc

SEQ ID NO: 2974902 - RNA, 19 nt, Artificial Sequence
  Description of Artificial Sequence: Synthetic oligonucleotide
gcugagugcaccauuuccc

SEQ ID NO: 2974903 - RNA, 19 nt, Artificial Sequence
  Description of Artificial Sequence: Synthetic oligonucleotide
ugugugugugugucccaca

SEQ ID NO: 2974904 - RNA, 19 nt, Artificial Sequence
  Description of Artificial Sequence: Synthetic oligonucleotide
gauccauuccucggacuug

SEQ ID NO: 2974905 - RNA, 19 nt, Artificial Sequence
  Description of Artificial Sequence: Synthetic oligonucleotide
uagcuguacugaucaccag

SEQ ID NO: 2974906 - RNA, 19 nt, Artificial Sequence
  Description of Artificial Sequence: Synthetic oligonucleotide
acuucaugcgguugagguu

SEQ ID NO: 2974907 - RNA, 19 nt, Artificial Sequence
  Description of Artificial Sequence: Synthetic oligonucleotide
gcgguugagguugaauucg

SEQ ID NO: 2974908 - RNA, 19 nt, Artificial Sequence
  Description of Artificial Sequence: Synthetic oligonucleotide
cugcaagaaaaggaagguc

SEQ ID NO: 2974909 - RNA, 19 nt, Artificial Sequence
  Description of Artificial Sequence: Synthetic oligonucleotide
cauuccucggacuuguggu

SEQ ID NO: 2974910 - RNA, 19 nt, Artificial Sequence
  Description of Artificial Sequence: Synthetic oligonucleotide
cuauagcuguacugaucac

SEQ ID NO: 2974911 - RNA, 19 nt, Artificial Sequence
  Description of Artificial Sequence: Synthetic oligonucleotide
cccaagaaagauccauucc

SEQ ID NO: 2974912 - RNA, 19 nt, Artificial Sequence
  Description of Artificial Sequence: Synthetic oligonucleotide
uuuguuugaugugccguuu

SEQ ID NO: 2974913 - RNA, 19 nt, Artificial Sequence
  Description of Artificial Sequence: Synthetic oligonucleotide
caccacaugugugugugug

SEQ ID NO: 2974914 - RNA, 19 nt, Artificial Sequence
  Description of Artificial Sequence: Synthetic oligonucleotide
accacaugugugugugugu

SEQ ID NO: 2974915 - RNA, 19 nt, Artificial Sequence
  Description of Artificial Sequence: Synthetic oligonucleotide
cacugauguugcugagugc

SEQ ID NO: 2974916 - RNA, 19 nt, Artificial Sequence
  Description of Artificial Sequence: Synthetic oligonucleotide
uuuugcccaagaggcuucc

SEQ ID NO: 2974917 - RNA, 19 nt, Artificial Sequence
  Description of Artificial Sequence: Synthetic oligonucleotide
cugauguugcugagugcac

SEQ ID NO: 2974918 - RNA, 19 nt, Artificial Sequence
  Description of Artificial Sequence: Synthetic oligonucleotide
uaaugagguuuugcccaag

SEQ ID NO: 2974919 - RNA, 19 nt, Artificial Sequence
  Description of Artificial Sequence: Synthetic oligonucleotide
augaaugacucaugcccuu

SEQ ID NO: 2974920 - RNA, 19 nt, Artificial Sequence
  Description of Artificial Sequence: Synthetic oligonucleotide
cuacaggagaugaaugacu

SEQ ID NO: 2974921 - RNA, 19 nt, Artificial Sequence
  Description of Artificial Sequence: Synthetic oligonucleotide
cguaaugagguuuugccca

SEQ ID NO: 2974922 - RNA, 19 nt, Artificial Sequence
  Description of Artificial Sequence: Synthetic oligonucleotide
uacuaagcgcgcucuccgu

SEQ ID NO: 2974923 - RNA, 19 nt, Artificial Sequence
  Description of Artificial Sequence: Synthetic oligonucleotide
uguguguguguguguccca

SEQ ID NO: 2974924 - RNA, 19 nt, Artificial Sequence
  Description of Artificial Sequence: Synthetic oligonucleotide
gcuguacugaucaccagug

SEQ ID NO: 2974925 - RNA, 19 nt, Artificial Sequence
  Description of Artificial Sequence: Synthetic oligonucleotide
gacuugugguaucuuuaaa

SEQ ID NO: 2974926 - RNA, 19 nt, Artificial Sequence
  Description of Artificial Sequence: Synthetic oligonucleotide
ugaucaccagugcgagacu

SEQ ID NO: 2974927 - RNA, 19 nt, Artificial Sequence
  Description of Artificial Sequence: Synthetic oligonucleotide
cucuccguuugugaacccc

SEQ ID NO: 2974928 - RNA, 19 nt, Artificial Sequence
  Description of Artificial Sequence: Synthetic oligonucleotide
guaaugagguuuugcccaa

SEQ ID NO: 2974929 - RNA, 19 nt, Artificial Sequence
  Description of Artificial Sequence: Synthetic oligonucleotide
uugcugagugcaccauuuc

SEQ ID NO: 2974930 - RNA, 19 nt, Artificial Sequence
  Description of Artificial Sequence: Synthetic oligonucleotide
ugugucccacaccucucuc

SEQ ID NO: 2974931 - RNA, 19 nt, Artificial Sequence
  Description of Artificial Sequence: Synthetic oligonucleotide
guuuuguuugaugugccgu

SEQ ID NO: 2974932 - RNA, 19 nt, Artificial Sequence
  Description of Artificial Sequence: Synthetic oligonucleotide
auccauuccucggacuugu

SEQ ID NO: 2974933 - RNA, 19 nt, Artificial Sequence
  Description of Artificial Sequence: Synthetic oligonucleotide
auuccucggacuuguggua

SEQ ID NO: 2974934 - RNA, 19 nt, Artificial Sequence
  Description of Artificial Sequence: Synthetic oligonucleotide
aagugcugguacugucaau

SEQ ID NO: 2974935 - RNA, 19 nt, Artificial Sequence
  Description of Artificial Sequence: Synthetic oligonucleotide
agugcaccauuuccccuga

SEQ ID NO: 2974936 - RNA, 19 nt, Artificial Sequence
  Description of Artificial Sequence: Synthetic oligonucleotide
acuaagcgcgcucuccguu

SEQ ID NO: 2974937 - RNA, 19 nt, Artificial Sequence
  Description of Artificial Sequence: Synthetic oligonucleotide
aaggaaggucacugauguu

SEQ ID NO: 2974938 - RNA, 19 nt, Artificial Sequence
  Description of Artificial Sequence: Synthetic oligonucleotide
cagugcgagacucccaaga

SEQ ID NO: 2974939 - RNA, 19 nt, Artificial Sequence
  Description of Artificial Sequence: Synthetic oligonucleotide
ccauuccucggacuugugg

SEQ ID NO: 2974940 - RNA, 19 nt, Artificial Sequence
  Description of Artificial Sequence: Synthetic oligonucleotide
aggagaugaaugacucaug

SEQ ID NO: 2974941 - RNA, 19 nt, Artificial Sequence
  Description of Artificial Sequence: Synthetic oligonucleotide
uucaugcgguugagguuga

SEQ ID NO: 2974942 - RNA, 19 nt, Artificial Sequence
  Description of Artificial Sequence: Synthetic oligonucleotide
acugaucaccagugcgaga

SEQ ID NO: 2974943 - RNA, 19 nt, Artificial Sequence
  Description of Artificial Sequence: Synthetic oligonucleotide
gcaagaaaaggaaggucac

SEQ ID NO: 2974944 - RNA, 19 nt, Artificial Sequence
  Description of Artificial Sequence: Synthetic oligonucleotide
ugaaugacucaugcccuuu

SEQ ID NO: 2974945 - RNA, 19 nt, Artificial Sequence
  Description of Artificial Sequence: Synthetic oligonucleotide
gaggcuucccuggauaaua

SEQ ID NO: 2974946 - RNA, 19 nt, Artificial Sequence
  Description of Artificial Sequence: Synthetic oligonucleotide
caaaagagcuauagcugua

SEQ ID NO: 2974947 - RNA, 19 nt, Artificial Sequence
  Description of Artificial Sequence: Synthetic oligonucleotide
ccaagaaagauccauuccu

SEQ ID NO: 2974948 - RNA, 19 nt, Artificial Sequence
  Description of Artificial Sequence: Synthetic oligonucleotide
gugugugucccacaccucu

SEQ ID NO: 2974949 - RNA, 19 nt, Artificial Sequence
  Description of Artificial Sequence: Synthetic oligonucleotide
auccaccacaugugugugu

SEQ ID NO: 2974950 - RNA, 19 nt, Artificial Sequence
  Description of Artificial Sequence: Synthetic oligonucleotide
gugaaccccauuaccaaaa

SEQ ID NO: 2974951 - RNA, 19 nt, Artificial Sequence
  Description of Artificial Sequence: Synthetic oligonucleotide
uccguuugugaaccccauu

SEQ ID NO: 2974952 - RNA, 19 nt, Artificial Sequence
  Description of Artificial Sequence: Synthetic oligonucleotide
uccauuccucggacuugug

SEQ ID NO: 2974953 - RNA, 19 nt, Artificial Sequence
  Description of Artificial Sequence: Synthetic oligonucleotide
gaauucguaaugagguuuu

SEQ ID NO: 2974954 - RNA, 19 nt, Artificial Sequence
  Description of Artificial Sequence: Synthetic oligonucleotide
ggacuugugguaucuuuaa

SEQ ID NO: 2974955 - RNA, 19 nt, Artificial Sequence
  Description of Artificial Sequence: Synthetic oligonucleotide
uuccucggacuugugguau

SEQ ID NO: 2974956 - RNA, 19 nt, Artificial Sequence
  Description of Artificial Sequence: Synthetic oligonucleotide
ccaaaagagcuauagcugu

SEQ ID NO: 2974957 - RNA, 19 nt, Artificial Sequence
  Description of Artificial Sequence: Synthetic oligonucleotide
uuugcccaagaggcuuccc

SEQ ID NO: 2974958 - RNA, 19 nt, Artificial Sequence
  Description of Artificial Sequence: Synthetic oligonucleotide
caagaggcuucccuggaua

SEQ ID NO: 2974959 - RNA, 19 nt, Artificial Sequence
  Description of Artificial Sequence: Synthetic oligonucleotide
gugugugugugugucccac

SEQ ID NO: 2974960 - RNA, 19 nt, Artificial Sequence
  Description of Artificial Sequence: Synthetic oligonucleotide
ggucacugauguugcugag

SEQ ID NO: 2974961 - RNA, 19 nt, Artificial Sequence
  Description of Artificial Sequence: Synthetic oligonucleotide
gugcgagacucccaagaaa

SEQ ID NO: 2974962 - RNA, 19 nt, Artificial Sequence
  Description of Artificial Sequence: Synthetic oligonucleotide
guuuugcccaagaggcuuc

SEQ ID NO: 2974963 - RNA, 19 nt, Artificial Sequence
  Description of Artificial Sequence: Synthetic oligonucleotide
caggagaugaaugacucau

SEQ ID NO: 2974964 - RNA, 19 nt, Artificial Sequence
  Description of Artificial Sequence: Synthetic oligonucleotide
guacugucaauaguuuagu

SEQ ID NO: 2974965 - RNA, 19 nt, Artificial Sequence
  Description of Artificial Sequence: Synthetic oligonucleotide
gcuucccuggauaauauua

SEQ ID NO: 2974966 - RNA, 19 nt, Artificial Sequence
  Description of Artificial Sequence: Synthetic oligonucleotide
uccucggacuugugguauc

SEQ ID NO: 2974967 - RNA, 19 nt, Artificial Sequence
  Description of Artificial Sequence: Synthetic oligonucleotide
aagcgcgcucuccguuugu

SEQ ID NO: 2974968 - RNA, 19 nt, Artificial Sequence
  Description of Artificial Sequence: Synthetic oligonucleotide
gagcuauagcuguacugau

SEQ ID NO: 2974969 - RNA, 19 nt, Artificial Sequence
  Description of Artificial Sequence: Synthetic oligonucleotide
agguuuugcccaagaggcu

SEQ ID NO: 2974970 - RNA, 19 nt, Artificial Sequence
  Description of Artificial Sequence: Synthetic oligonucleotide
ccccauuaccaaaagagcu

SEQ ID NO: 2974971 - RNA, 19 nt, Artificial Sequence
  Description of Artificial Sequence: Synthetic oligonucleotide
gaaugacucaugcccuuuu

SEQ ID NO: 2974972 - RNA, 19 nt, Artificial Sequence
  Description of Artificial Sequence: Synthetic oligonucleotide
ccacaugugugugugugug

SEQ ID NO: 2974973 - RNA, 19 nt, Artificial Sequence
  Description of Artificial Sequence: Synthetic oligonucleotide
cguuugugaaccccauuac

SEQ ID NO: 2974974 - RNA, 19 nt, Artificial Sequence
  Description of Artificial Sequence: Synthetic oligonucleotide
gcugguacugucaauaguu

SEQ ID NO: 2974975 - RNA, 19 nt, Artificial Sequence
  Description of Artificial Sequence: Synthetic oligonucleotide
cccauuaccaaaagagcua

SEQ ID NO: 2974976 - RNA, 19 nt, Artificial Sequence
  Description of Artificial Sequence: Synthetic oligonucleotide
cauuaccaaaagagcuaua

SEQ ID NO: 2974977 - RNA, 19 nt, Artificial Sequence
  Description of Artificial Sequence: Synthetic oligonucleotide
agaggcuucccuggauaau

SEQ ID NO: 2974978 - RNA, 19 nt, Artificial Sequence
  Description of Artificial Sequence: Synthetic oligonucleotide
guugcugagugcaccauuu

SEQ ID NO: 2974979 - RNA, 19 nt, Artificial Sequence
  Description of Artificial Sequence: Synthetic oligonucleotide
ccguuugugaaccccauua

SEQ ID NO: 2974980 - RNA, 19 nt, Artificial Sequence
  Description of Artificial Sequence: Synthetic oligonucleotide
agcgcgcucuccguuugug

SEQ ID NO: 2974981 - RNA, 19 nt, Artificial Sequence
  Description of Artificial Sequence: Synthetic oligonucleotide
gugucccacaccucucucu

SEQ ID NO: 2974982 - RNA, 19 nt, Artificial Sequence
  Description of Artificial Sequence: Synthetic oligonucleotide
caccauuuccccugaacuu

SEQ ID NO: 2974983 - RNA, 19 nt, Artificial Sequence
  Description of Artificial Sequence: Synthetic oligonucleotide
gugugucccacaccucucu

SEQ ID NO: 2974984 - RNA, 19 nt, Artificial Sequence
  Description of Artificial Sequence: Synthetic oligonucleotide
cucccaagaaagauccauu

SEQ ID NO: 2974985 - RNA, 19 nt, Artificial Sequence
  Description of Artificial Sequence: Synthetic oligonucleotide
auguugcugagugcaccau

SEQ ID NO: 2974986 - RNA, 19 nt, Artificial Sequence
  Description of Artificial Sequence: Synthetic oligonucleotide
gucacugauguugcugagu

SEQ ID NO: 2974987 - RNA, 19 nt, Artificial Sequence
  Description of Artificial Sequence: Synthetic oligonucleotide
gacucccaagaaagaucca

SEQ ID NO: 2974988 - RNA, 19 nt, Artificial Sequence
  Description of Artificial Sequence: Synthetic oligonucleotide
aggcuucccuggauaauau

SEQ ID NO: 2974989 - RNA, 19 nt, Artificial Sequence
  Description of Artificial Sequence: Synthetic oligonucleotide
caugugugugugugugugu

SEQ ID NO: 2974990 - RNA, 19 nt, Artificial Sequence
  Description of Artificial Sequence: Synthetic oligonucleotide
cugguacugucaauaguuu

SEQ ID NO: 2974991 - RNA, 19 nt, Artificial Sequence
  Description of Artificial Sequence: Synthetic oligonucleotide
ccugaacuucaugcgguug

SEQ ID NO: 2974992 - RNA, 19 nt, Artificial Sequence
  Description of Artificial Sequence: Synthetic oligonucleotide
cgcucuccguuugugaacc

SEQ ID NO: 2974993 - RNA, 19 nt, Artificial Sequence
  Description of Artificial Sequence: Synthetic oligonucleotide
cacaccucucucucucucu

SEQ ID NO: 2974994 - RNA, 19 nt, Artificial Sequence
  Description of Artificial Sequence: Synthetic oligonucleotide
cacaugugugugugugugu

SEQ ID NO: 2974995 - RNA, 19 nt, Artificial Sequence
  Description of Artificial Sequence: Synthetic oligonucleotide
gguuuugcccaagaggcuu

SEQ ID NO: 2974996 - RNA, 19 nt, Artificial Sequence
  Description of Artificial Sequence: Synthetic oligonucleotide
gcgcucuccguuugugaac

SEQ ID NO: 2974997 - RNA, 19 nt, Artificial Sequence
  Description of Artificial Sequence: Synthetic oligonucleotide
cuaagcgcgcucuccguuu

SEQ ID NO: 2974998 - RNA, 19 nt, Artificial Sequence
  Description of Artificial Sequence: Synthetic oligonucleotide
ccagugcgagacucccaag

SEQ ID NO: 2974999 - RNA, 19 nt, Artificial Sequence
  Description of Artificial Sequence: Synthetic oligonucleotide
ucaugcgguugagguugaa

SEQ ID NO: 2975000 - RNA, 19 nt, Artificial Sequence
  Description of Artificial Sequence: Synthetic oligonucleotide
ccacaccucucucucucuc

SEQ ID NO: 2975001 - RNA, 19 nt, Artificial Sequence
  Description of Artificial Sequence: Synthetic oligonucleotide
caugcgguugagguugaau

SEQ ID NO: 2975002 - RNA, 19 nt, Artificial Sequence
  Description of Artificial Sequence: Synthetic oligonucleotide
gcucuccguuugugaaccc

SEQ ID NO: 2975003 - RNA, 19 nt, Artificial Sequence
  Description of Artificial Sequence: Synthetic oligonucleotide
gcgagacucccaagaaaga

SEQ ID NO: 2975004 - RNA, 19 nt, Artificial Sequence
  Description of Artificial Sequence: Synthetic oligonucleotide
gguugagguugaauucgua

SEQ ID NO: 2975005 - RNA, 19 nt, Artificial Sequence
  Description of Artificial Sequence: Synthetic oligonucleotide
ccauuaccaaaagagcuau

SEQ ID NO: 2975006 - RNA, 19 nt, Artificial Sequence
  Description of Artificial Sequence: Synthetic oligonucleotide
cuccguuugugaaccccau

SEQ ID NO: 2975007 - RNA, 19 nt, Artificial Sequence
  Description of Artificial Sequence: Synthetic oligonucleotide
cggacuugugguaucuuua

SEQ ID NO: 2975008 - RNA, 19 nt, Artificial Sequence
  Description of Artificial Sequence: Synthetic oligonucleotide
gucccacaccucucucucu

SEQ ID NO: 2975009 - RNA, 19 nt, Artificial Sequence
  Description of Artificial Sequence: Synthetic oligonucleotide
caccucucucucucucucu

SEQ ID NO: 2975010 - RNA, 19 nt, Artificial Sequence
  Description of Artificial Sequence: Synthetic oligonucleotide
gcgcgcucuccguuuguga

SEQ ID NO: 2975011 - RNA, 19 nt, Artificial Sequence
  Description of Artificial Sequence: Synthetic oligonucleotide
ccccugaacuucaugcggu

SEQ ID NO: 2975012 - RNA, 19 nt, Artificial Sequence
  Description of Artificial Sequence: Synthetic oligonucleotide
cgcgcucuccguuugugaa

SEQ ID NO: 2975013 - RNA, 19 nt, Artificial Sequence
  Description of Artificial Sequence: Synthetic oligonucleotide
gugcaccauuuccccugaa

SEQ ID NO: 2975014 - RNA, 19 nt, Artificial Sequence
  Description of Artificial Sequence: Synthetic oligonucleotide
ggcuucccuggauaauauu

SEQ ID NO: 2975015 - RNA, 19 nt, Artificial Sequence
  Description of Artificial Sequence: Synthetic oligonucleotide
cgagacucccaagaaagau

SEQ ID NO: 2975016 - RNA, 19 nt, Artificial Sequence
  Description of Artificial Sequence: Synthetic oligonucleotide
ccaagaggcuucccuggau

SEQ ID NO: 2975017 - RNA, 19 nt, Artificial Sequence
  Description of Artificial Sequence: Synthetic oligonucleotide
cucggacuugugguaucuu

SEQ ID NO: 2975018 - RNA, 19 nt, Artificial Sequence
  Description of Artificial Sequence: Synthetic oligonucleotide
ccucggacuugugguaucu

SEQ ID NO: 2975019 - RNA, 19 nt, Artificial Sequence
  Description of Artificial Sequence: Synthetic oligonucleotide
cccacaccucucucucucu

SEQ ID NO: 2975020 - RNA, 19 nt, Artificial Sequence
  Description of Artificial Sequence: Synthetic oligonucleotide
cccugaacuucaugcgguu

SEQ ID NO: 2975021 - RNA, 19 nt, Artificial Sequence
  Description of Artificial Sequence: Synthetic oligonucleotide
ccaccacaugugugugugu

SEQ ID NO: 2975022 - RNA, 19 nt, Artificial Sequence
  Description of Artificial Sequence: Synthetic oligonucleotide
uuucuuagaacccugaugg

SEQ ID NO: 2975023 - RNA, 19 nt, Artificial Sequence
  Description of Artificial Sequence: Synthetic oligonucleotide
auaauuuucuauaauaucc

SEQ ID NO: 2975024 - RNA, 19 nt, Artificial Sequence
  Description of Artificial Sequence: Synthetic oligonucleotide
aauaauuuucuauaauauc

SEQ ID NO: 2975025 - RNA, 19 nt, Artificial Sequence
  Description of Artificial Sequence: Synthetic oligonucleotide
ucaucaaucauacaaauaa

SEQ ID NO: 2975026 - RNA, 19 nt, Artificial Sequence
  Description of Artificial Sequence: Synthetic oligonucleotide
ucuauaauaucccagggca

SEQ ID NO: 2975027 - RNA, 19 nt, Artificial Sequence
  Description of Artificial Sequence: Synthetic oligonucleotide
aauuucacuccucuuuucc

SEQ ID NO: 2975028 - RNA, 19 nt, Artificial Sequence
  Description of Artificial Sequence: Synthetic oligonucleotide
uuuucuauaauaucccagg

SEQ ID NO: 2975029 - RNA, 19 nt, Artificial Sequence
  Description of Artificial Sequence: Synthetic oligonucleotide
uuuauuuucaucaaucaua

SEQ ID NO: 2975030 - RNA, 19 nt, Artificial Sequence
  Description of Artificial Sequence: Synthetic oligonucleotide
ucaauggucucuuuggucg

SEQ ID NO: 2975031 - RNA, 19 nt, Artificial Sequence
  Description of Artificial Sequence: Synthetic oligonucleotide
auuuucaucaaucauacaa

SEQ ID NO: 2975032 - RNA, 19 nt, Artificial Sequence
  Description of Artificial Sequence: Synthetic oligonucleotide
uaauuuucuauaauauccc

SEQ ID NO: 2975033 - RNA, 19 nt, Artificial Sequence
  Description of Artificial Sequence: Synthetic oligonucleotide
aauaucccagggcaaaccg

SEQ ID NO: 2975034 - RNA, 19 nt, Artificial Sequence
  Description of Artificial Sequence: Synthetic oligonucleotide
uguuuuauuuucaucaauc

SEQ ID NO: 2975035 - RNA, 19 nt, Artificial Sequence
  Description of Artificial Sequence: Synthetic oligonucleotide
aaccgguaaaauuuggcag

SEQ ID NO: 2975036 - RNA, 19 nt, Artificial Sequence
  Description of Artificial Sequence: Synthetic oligonucleotide
uuucuauaauaucccaggg

SEQ ID NO: 2975037 - RNA, 19 nt, Artificial Sequence
  Description of Artificial Sequence: Synthetic oligonucleotide
aaauccuccagucuaggcu

SEQ ID NO: 2975038 - RNA, 19 nt, Artificial Sequence
  Description of Artificial Sequence: Synthetic oligonucleotide
aaaccgguaaaauuuggca

SEQ ID NO: 2975039 - RNA, 19 nt, Artificial Sequence
  Description of Artificial Sequence: Synthetic oligonucleotide
aaauuuggcaguccgauua

SEQ ID NO: 2975040 - RNA, 19 nt, Artificial Sequence
  Description of Artificial Sequence: Synthetic oligonucleotide
aauuuucuauaauauccca

SEQ ID NO: 2975041 - RNA, 19 nt, Artificial Sequence
  Description of Artificial Sequence: Synthetic oligonucleotide
cuuagaacccugaugggcg

SEQ ID NO: 2975042 - RNA, 19 nt, Artificial Sequence
  Description of Artificial Sequence: Synthetic oligonucleotide
aaauaauuuucuauaauau

SEQ ID NO: 2975043 - RNA, 19 nt, Artificial Sequence
  Description of Artificial Sequence: Synthetic oligonucleotide
ucaaucauacaaauaauuu

SEQ ID NO: 2975044 - RNA, 19 nt, Artificial Sequence
  Description of Artificial Sequence: Synthetic oligonucleotide
uuuuaggaaauuucacucc

SEQ ID NO: 2975045 - RNA, 19 nt, Artificial Sequence
  Description of Artificial Sequence: Synthetic oligonucleotide
cuuuuaggaaauuucacuc

SEQ ID NO: 2975046 - RNA, 19 nt, Artificial Sequence
  Description of Artificial Sequence: Synthetic oligonucleotide
uugucugccauuuucuuag

SEQ ID NO: 2975047 - RNA, 19 nt, Artificial Sequence
  Description of Artificial Sequence: Synthetic oligonucleotide
uucuauaauaucccagggc

SEQ ID NO: 2975048 - RNA, 19 nt, Artificial Sequence
  Description of Artificial Sequence: Synthetic oligonucleotide
uuuaggaaauuucacuccu

SEQ ID NO: 2975049 - RNA, 19 nt, Artificial Sequence
  Description of Artificial Sequence: Synthetic oligonucleotide
cugccauuuucuuagaacc

SEQ ID NO: 2975050 - RNA, 19 nt, Artificial Sequence
  Description of Artificial Sequence: Synthetic oligonucleotide
uuggccuuaucgaagcugg

SEQ ID NO: 2975051 - RNA, 19 nt, Artificial Sequence
  Description of Artificial Sequence: Synthetic oligonucleotide
uuuuauuuucaucaaucau

SEQ ID NO: 2975052 - RNA, 19 nt, Artificial Sequence
  Description of Artificial Sequence: Synthetic oligonucleotide
guguguuuuauuuucauca

SEQ ID NO: 2975053 - RNA, 19 nt, Artificial Sequence
  Description of Artificial Sequence: Synthetic oligonucleotide
auacaaauaauuuucuaua

SEQ ID NO: 2975054 - RNA, 19 nt, Artificial Sequence
  Description of Artificial Sequence: Synthetic oligonucleotide
uucacagugcagcuugugg

SEQ ID NO: 2975055 - RNA, 19 nt, Artificial Sequence
  Description of Artificial Sequence: Synthetic oligonucleotide
aaauuucacuccucuuuuc

SEQ ID NO: 2975056 - RNA, 19 nt, Artificial Sequence
  Description of Artificial Sequence: Synthetic oligonucleotide
gguaaaauuuggcaguccg

SEQ ID NO: 2975057 - RNA, 19 nt, Artificial Sequence
  Description of Artificial Sequence: Synthetic oligonucleotide
uacaaauaauuuucuauaa

SEQ ID NO: 2975058 - RNA, 19 nt, Artificial Sequence
  Description of Artificial Sequence: Synthetic oligonucleotide
cucuuuuccuguucaaugg

SEQ ID NO: 2975059 - RNA, 19 nt, Artificial Sequence
  Description of Artificial Sequence: Synthetic oligonucleotide
uuggcaguccgauuagugg

SEQ ID NO: 2975060 - RNA, 19 nt, Artificial Sequence
  Description of Artificial Sequence: Synthetic oligonucleotide
caaauaauuuucuauaaua

SEQ ID NO: 2975061 - RNA, 19 nt, Artificial Sequence
  Description of Artificial Sequence: Synthetic oligonucleotide
aaugcccggguucacagug

SEQ ID NO: 2975062 - RNA, 19 nt, Artificial Sequence
  Description of Artificial Sequence: Synthetic oligonucleotide
uggcaguccgauuaguggg

SEQ ID NO: 2975063 - RNA, 19 nt, Artificial Sequence
  Description of Artificial Sequence: Synthetic oligonucleotide
uuuuccuguucaauggucu

SEQ ID NO: 2975064 - RNA, 19 nt, Artificial Sequence
  Description of Artificial Sequence: Synthetic oligonucleotide
aauuuggcaguccgauuag

SEQ ID NO: 2975065 - RNA, 19 nt, Artificial Sequence
  Description of Artificial Sequence: Synthetic oligonucleotide
uaggaaauuucacuccucu

SEQ ID NO: 2975066 - RNA, 19 nt, Artificial Sequence
  Description of Artificial Sequence: Synthetic oligonucleotide
cucgcguccaucuugcagg

SEQ ID NO: 2975067 - RNA, 19 nt, Artificial Sequence
  Description of Artificial Sequence: Synthetic oligonucleotide
agcuuggccuuaucgaagc

SEQ ID NO: 2975068 - RNA, 19 nt, Artificial Sequence
  Description of Artificial Sequence: Synthetic oligonucleotide
ucacagugcagcuuguggc

SEQ ID NO: 2975069 - RNA, 19 nt, Artificial Sequence
  Description of Artificial Sequence: Synthetic oligonucleotide
uaggcuuuuaggaaauuuc

SEQ ID NO: 2975070 - RNA, 19 nt, Artificial Sequence
  Description of Artificial Sequence: Synthetic oligonucleotide
ucuuagaacccugaugggc

SEQ ID NO: 2975071 - RNA, 19 nt, Artificial Sequence
  Description of Artificial Sequence: Synthetic oligonucleotide
uuccuccacaucacgaggg

SEQ ID NO: 2975072 - RNA, 19 nt, Artificial Sequence
  Description of Artificial Sequence: Synthetic oligonucleotide
uccagucuaggcuuuuagg

SEQ ID NO: 2975073 - RNA, 19 nt, Artificial Sequence
  Description of Artificial Sequence: Synthetic oligonucleotide
ucuuccuccacaucacgag

SEQ ID NO: 2975074 - RNA, 19 nt, Artificial Sequence
  Description of Artificial Sequence: Synthetic oligonucleotide
uuuggcaguccgauuagug

SEQ ID NO: 2975075 - RNA, 19 nt, Artificial Sequence
  Description of Artificial Sequence: Synthetic oligonucleotide
uuucaucaaucauacaaau

SEQ ID NO: 2975076 - RNA, 19 nt, Artificial Sequence
  Description of Artificial Sequence: Synthetic oligonucleotide
uaaaauuuggcaguccgau

SEQ ID NO: 2975077 - RNA, 19 nt, Artificial Sequence
  Description of Artificial Sequence: Synthetic oligonucleotide
caaaccgguaaaauuuggc

SEQ ID NO: 2975078 - RNA, 19 nt, Artificial Sequence
  Description of Artificial Sequence: Synthetic oligonucleotide
auuuucuauaauaucccag

SEQ ID NO: 2975079 - RNA, 19 nt, Artificial Sequence
  Description of Artificial Sequence: Synthetic oligonucleotide
uuucacuccucuuuuccug

SEQ ID NO: 2975080 - RNA, 19 nt, Artificial Sequence
  Description of Artificial Sequence: Synthetic oligonucleotide
uucagagacccacgggccg

SEQ ID NO: 2975081 - RNA, 19 nt, Artificial Sequence
  Description of Artificial Sequence: Synthetic oligonucleotide
aauccuccagucuaggcuu

SEQ ID NO: 2975082 - RNA, 19 nt, Artificial Sequence
  Description of Artificial Sequence: Synthetic oligonucleotide
uauaauaucccagggcaaa

SEQ ID NO: 2975083 - RNA, 19 nt, Artificial Sequence
  Description of Artificial Sequence: Synthetic oligonucleotide
uguguuuuauuuucaucaa

SEQ ID NO: 2975084 - RNA, 19 nt, Artificial Sequence
  Description of Artificial Sequence: Synthetic oligonucleotide
aucgaagcuggcgauuucc

SEQ ID NO: 2975085 - RNA, 19 nt, Artificial Sequence
  Description of Artificial Sequence: Synthetic oligonucleotide
uaggguggagaaauccucc

SEQ ID NO: 2975086 - RNA, 19 nt, Artificial Sequence
  Description of Artificial Sequence: Synthetic oligonucleotide
accgguaaaauuuggcagu

SEQ ID NO: 2975087 - RNA, 19 nt, Artificial Sequence
  Description of Artificial Sequence: Synthetic oligonucleotide
ucuuuuccuguucaauggu

SEQ ID NO: 2975088 - RNA, 19 nt, Artificial Sequence
  Description of Artificial Sequence: Synthetic oligonucleotide
ucuuuggucggcagggugu

SEQ ID NO: 2975089 - RNA, 19 nt, Artificial Sequence
  Description of Artificial Sequence: Synthetic oligonucleotide
uaucccagggcaaaccggu

SEQ ID NO: 2975090 - RNA, 19 nt, Artificial Sequence
  Description of Artificial Sequence: Synthetic oligonucleotide
uucaucaaucauacaaaua

SEQ ID NO: 2975091 - RNA, 19 nt, Artificial Sequence
  Description of Artificial Sequence: Synthetic oligonucleotide
uucuuagaacccugauggg

SEQ ID NO: 2975092 - RNA, 19 nt, Artificial Sequence
  Description of Artificial Sequence: Synthetic oligonucleotide
aauggucucuuuggucggc

SEQ ID NO: 2975093 - RNA, 19 nt, Artificial Sequence
  Description of Artificial Sequence: Synthetic oligonucleotide
gaaauccuccagucuaggc

SEQ ID NO: 2975094 - RNA, 19 nt, Artificial Sequence
  Description of Artificial Sequence: Synthetic oligonucleotide
auaauaucccagggcaaac

SEQ ID NO: 2975095 - RNA, 19 nt, Artificial Sequence
  Description of Artificial Sequence: Synthetic oligonucleotide
cauacaaauaauuuucuau

SEQ ID NO: 2975096 - RNA, 19 nt, Artificial Sequence
  Description of Artificial Sequence: Synthetic oligonucleotide
ucagcuuggccuuaucgaa

SEQ ID NO: 2975097 - RNA, 19 nt, Artificial Sequence
  Description of Artificial Sequence: Synthetic oligonucleotide
aaaauuuggcaguccgauu

SEQ ID NO: 2975098 - RNA, 19 nt, Artificial Sequence
  Description of Artificial Sequence: Synthetic oligonucleotide
ucggucuucuucagcuugg

SEQ ID NO: 2975099 - RNA, 19 nt, Artificial Sequence
  Description of Artificial Sequence: Synthetic oligonucleotide
auuucacuccucuuuuccu

SEQ ID NO: 2975100 - RNA, 19 nt, Artificial Sequence
  Description of Artificial Sequence: Synthetic oligonucleotide
agucuaggcuuuuaggaaa

SEQ ID NO: 2975101 - RNA, 19 nt, Artificial Sequence
  Description of Artificial Sequence: Synthetic oligonucleotide
uucaauggucucuuugguc

SEQ ID NO: 2975102 - RNA, 19 nt, Artificial Sequence
  Description of Artificial Sequence: Synthetic oligonucleotide
uaauaucccagggcaaacc

SEQ ID NO: 2975103 - RNA, 19 nt, Artificial Sequence
  Description of Artificial Sequence: Synthetic oligonucleotide
uggagaaauccuccagucu

SEQ ID NO: 2975104 - RNA, 19 nt, Artificial Sequence
  Description of Artificial Sequence: Synthetic oligonucleotide
ugcgucucggucuucuuca

SEQ ID NO: 2975105 - RNA, 19 nt, Artificial Sequence
  Description of Artificial Sequence: Synthetic oligonucleotide
ucuugcagguggcucuucc

SEQ ID NO: 2975106 - RNA, 19 nt, Artificial Sequence
  Description of Artificial Sequence: Synthetic oligonucleotide
aucaaucauacaaauaauu

SEQ ID NO: 2975107 - RNA, 19 nt, Artificial Sequence
  Description of Artificial Sequence: Synthetic oligonucleotide
agacccacgggccgguggc

SEQ ID NO: 2975108 - RNA, 19 nt, Artificial Sequence
  Description of Artificial Sequence: Synthetic oligonucleotide
uccuccacaucacgagggg

SEQ ID NO: 2975109 - RNA, 19 nt, Artificial Sequence
  Description of Artificial Sequence: Synthetic oligonucleotide
uuaggaaauuucacuccuc

SEQ ID NO: 2975110 - RNA, 19 nt, Artificial Sequence
  Description of Artificial Sequence: Synthetic oligonucleotide
gacggggugggguagggug

SEQ ID NO: 2975111 - RNA, 19 nt, Artificial Sequence
  Description of Artificial Sequence: Synthetic oligonucleotide
ucggagaugacgggguggg

SEQ ID NO: 2975112 - RNA, 19 nt, Artificial Sequence
  Description of Artificial Sequence: Synthetic oligonucleotide
gucucuuuggucggcaggg

SEQ ID NO: 2975113 - RNA, 19 nt, Artificial Sequence
  Description of Artificial Sequence: Synthetic oligonucleotide
cuuuuccuguucaaugguc

SEQ ID NO: 2975114 - RNA, 19 nt, Artificial Sequence
  Description of Artificial Sequence: Synthetic oligonucleotide
auuuucuuagaacccugau

SEQ ID NO: 2975115 - RNA, 19 nt, Artificial Sequence
  Description of Artificial Sequence: Synthetic oligonucleotide
aggguguucuucuccugcg

SEQ ID NO: 2975116 - RNA, 19 nt, Artificial Sequence
  Description of Artificial Sequence: Synthetic oligonucleotide
cuuccuccacaucacgagg

SEQ ID NO: 2975117 - RNA, 19 nt, Artificial Sequence
  Description of Artificial Sequence: Synthetic oligonucleotide
uucuccugcgucucggucu

SEQ ID NO: 2975118 - RNA, 19 nt, Artificial Sequence
  Description of Artificial Sequence: Synthetic oligonucleotide
gagaaauccuccagucuag

SEQ ID NO: 2975119 - RNA, 19 nt, Artificial Sequence
  Description of Artificial Sequence: Synthetic oligonucleotide
cuguucaauggucucuuug

SEQ ID NO: 2975120 - RNA, 19 nt, Artificial Sequence
  Description of Artificial Sequence: Synthetic oligonucleotide
ucgaagcuggcgauuuccc

SEQ ID NO: 2975121 - RNA, 19 nt, Artificial Sequence
  Description of Artificial Sequence: Synthetic oligonucleotide
ugcagguggcucuuccucc

SEQ ID NO: 2975122 - RNA, 19 nt, Artificial Sequence
  Description of Artificial Sequence: Synthetic oligonucleotide
agggcaaaccgguaaaauu

SEQ ID NO: 2975123 - RNA, 19 nt, Artificial Sequence
  Description of Artificial Sequence: Synthetic oligonucleotide
uauuuucaucaaucauaca

SEQ ID NO: 2975124 - RNA, 19 nt, Artificial Sequence
  Description of Artificial Sequence: Synthetic oligonucleotide
uucacuccucuuuuccugu

SEQ ID NO: 2975125 - RNA, 19 nt, Artificial Sequence
  Description of Artificial Sequence: Synthetic oligonucleotide
caauggucucuuuggucgg

SEQ ID NO: 2975126 - RNA, 19 nt, Artificial Sequence
  Description of Artificial Sequence: Synthetic oligonucleotide
gcguccaucuugcaggugg

SEQ ID NO: 2975127 - RNA, 19 nt, Artificial Sequence
  Description of Artificial Sequence: Synthetic oligonucleotide
caaucauacaaauaauuuu

SEQ ID NO: 2975128 - RNA, 19 nt, Artificial Sequence
  Description of Artificial Sequence: Synthetic oligonucleotide
guggagaaauccuccaguc

SEQ ID NO: 2975129 - RNA, 19 nt, Artificial Sequence
  Description of Artificial Sequence: Synthetic oligonucleotide
agaaauccuccagucuagg

SEQ ID NO: 2975130 - RNA, 19 nt, Artificial Sequence
  Description of Artificial Sequence: Synthetic oligonucleotide
acuccucuuuuccuguuca

SEQ ID NO: 2975131 - RNA, 19 nt, Artificial Sequence
  Description of Artificial Sequence: Synthetic oligonucleotide
uuagaacccugaugggcga

SEQ ID NO: 2975132 - RNA, 19 nt, Artificial Sequence
  Description of Artificial Sequence: Synthetic oligonucleotide
ugggguaggguggagaaau

SEQ ID NO: 2975133 - RNA, 19 nt, Artificial Sequence
  Description of Artificial Sequence: Synthetic oligonucleotide
aggcuuuuaggaaauuuca

SEQ ID NO: 2975134 - RNA, 19 nt, Artificial Sequence
  Description of Artificial Sequence: Synthetic oligonucleotide
ucagagacccacgggccgg

SEQ ID NO: 2975135 - RNA, 19 nt, Artificial Sequence
  Description of Artificial Sequence: Synthetic oligonucleotide
uuuccuguucaauggucuc

SEQ ID NO: 2975136 - RNA, 19 nt, Artificial Sequence
  Description of Artificial Sequence: Synthetic oligonucleotide
caggguguucuucuccugc

SEQ ID NO: 2975137 - RNA, 19 nt, Artificial Sequence
  Description of Artificial Sequence: Synthetic oligonucleotide
ggagaaauccuccagucua

SEQ ID NO: 2975138 - RNA, 19 nt, Artificial Sequence
  Description of Artificial Sequence: Synthetic oligonucleotide
auaucccagggcaaaccgg

SEQ ID NO: 2975139 - RNA, 19 nt, Artificial Sequence
  Description of Artificial Sequence: Synthetic oligonucleotide
aacccugaugggcgaacca

SEQ ID NO: 2975140 - RNA, 19 nt, Artificial Sequence
  Description of Artificial Sequence: Synthetic oligonucleotide
cauuuucuuagaacccuga

SEQ ID NO: 2975141 - RNA, 19 nt, Artificial Sequence
  Description of Artificial Sequence: Synthetic oligonucleotide
uuaucgaagcuggcgauuu

SEQ ID NO: 2975142 - RNA, 19 nt, Artificial Sequence
  Description of Artificial Sequence: Synthetic oligonucleotide
cuccagucuaggcuuuuag

SEQ ID NO: 2975143 - RNA, 19 nt, Artificial Sequence
  Description of Artificial Sequence: Synthetic oligonucleotide
ugcagcuuguggcucgcgu

SEQ ID NO: 2975144 - RNA, 19 nt, Artificial Sequence
  Description of Artificial Sequence: Synthetic oligonucleotide
ggguucacagugcagcuug

SEQ ID NO: 2975145 - RNA, 19 nt, Artificial Sequence
  Description of Artificial Sequence: Synthetic oligonucleotide
ucucggagaugacggggug

SEQ ID NO: 2975146 - RNA, 19 nt, Artificial Sequence
  Description of Artificial Sequence: Synthetic oligonucleotide
guggcaucggcgcggaaug

SEQ ID NO: 2975147 - RNA, 19 nt, Artificial Sequence
  Description of Artificial Sequence: Synthetic oligonucleotide
cagcuuguggcucgcgucc

SEQ ID NO: 2975148 - RNA, 19 nt, Artificial Sequence
  Description of Artificial Sequence: Synthetic oligonucleotide
gcuuuuaggaaauuucacu

SEQ ID NO: 2975149 - RNA, 19 nt, Artificial Sequence
  Description of Artificial Sequence: Synthetic oligonucleotide
guaaaauuuggcaguccga

SEQ ID NO: 2975150 - RNA, 19 nt, Artificial Sequence
  Description of Artificial Sequence: Synthetic oligonucleotide
gagacccacgggccggugg

SEQ ID NO: 2975151 - RNA, 19 nt, Artificial Sequence
  Description of Artificial Sequence: Synthetic oligonucleotide
cagcuuggccuuaucgaag

SEQ ID NO: 2975152 - RNA, 19 nt, Artificial Sequence
  Description of Artificial Sequence: Synthetic oligonucleotide
uggcucgcguccaucuugc

SEQ ID NO: 2975153 - RNA, 19 nt, Artificial Sequence
  Description of Artificial Sequence: Synthetic oligonucleotide
ggaaugcccggguucacag

SEQ ID NO: 2975154 - RNA, 19 nt, Artificial Sequence
  Description of Artificial Sequence: Synthetic oligonucleotide
agguguguuuuauuuucau

SEQ ID NO: 2975155 - RNA, 19 nt, Artificial Sequence
  Description of Artificial Sequence: Synthetic oligonucleotide
gguguguuuuauuuucauc

SEQ ID NO: 2975156 - RNA, 19 nt, Artificial Sequence
  Description of Artificial Sequence: Synthetic oligonucleotide
uuguggcucgcguccaucu

SEQ ID NO: 2975157 - RNA, 19 nt, Artificial Sequence
  Description of Artificial Sequence: Synthetic oligonucleotide
ucccagggcaaaccgguaa

SEQ ID NO: 2975158 - RNA, 19 nt, Artificial Sequence
  Description of Artificial Sequence: Synthetic oligonucleotide
cuauaauaucccagggcaa

SEQ ID NO: 2975159 - RNA, 19 nt, Artificial Sequence
  Description of Artificial Sequence: Synthetic oligonucleotide
aggguggagaaauccucca

SEQ ID NO: 2975160 - RNA, 19 nt, Artificial Sequence
  Description of Artificial Sequence: Synthetic oligonucleotide
ggggucucggagaugacgg

SEQ ID NO: 2975161 - RNA, 19 nt, Artificial Sequence
  Description of Artificial Sequence: Synthetic oligonucleotide
agaacccugaugggcgaac

SEQ ID NO: 2975162 - RNA, 19 nt, Artificial Sequence
  Description of Artificial Sequence: Synthetic oligonucleotide
cagugcagcuuguggcucg

SEQ ID NO: 2975163 - RNA, 19 nt, Artificial Sequence
  Description of Artificial Sequence: Synthetic oligonucleotide
guaggguggagaaauccuc

SEQ ID NO: 2975164 - RNA, 19 nt, Artificial Sequence
  Description of Artificial Sequence: Synthetic oligonucleotide
aggaaauuucacuccucuu

SEQ ID NO: 2975165 - RNA, 19 nt, Artificial Sequence
  Description of Artificial Sequence: Synthetic oligonucleotide
cucuuuggucggcagggug

SEQ ID NO: 2975166 - RNA, 19 nt, Artificial Sequence
  Description of Artificial Sequence: Synthetic oligonucleotide
gaugacggggugggguagg

SEQ ID NO: 2975167 - RNA, 19 nt, Artificial Sequence
  Description of Artificial Sequence: Synthetic oligonucleotide
uuggucggcaggguguucu

SEQ ID NO: 2975168 - RNA, 19 nt, Artificial Sequence
  Description of Artificial Sequence: Synthetic oligonucleotide
ccagucuaggcuuuuagga

SEQ ID NO: 2975169 - RNA, 19 nt, Artificial Sequence
  Description of Artificial Sequence: Synthetic oligonucleotide
cagucuaggcuuuuaggaa

SEQ ID NO: 2975170 - RNA, 19 nt, Artificial Sequence
  Description of Artificial Sequence: Synthetic oligonucleotide
ggucucuuuggucggcagg

SEQ ID NO: 2975171 - RNA, 19 nt, Artificial Sequence
  Description of Artificial Sequence: Synthetic oligonucleotide
ggaaauuucacuccucuuu

SEQ ID NO: 2975172 - RNA, 19 nt, Artificial Sequence
  Description of Artificial Sequence: Synthetic oligonucleotide
uguucuucuccugcgucuc

SEQ ID NO: 2975173 - RNA, 19 nt, Artificial Sequence
  Description of Artificial Sequence: Synthetic oligonucleotide
uggucucuuuggucggcag

SEQ ID NO: 2975174 - RNA, 19 nt, Artificial Sequence
  Description of Artificial Sequence: Synthetic oligonucleotide
uccaucuugcagguggcuc

SEQ ID NO: 2975175 - RNA, 19 nt, Artificial Sequence
  Description of Artificial Sequence: Synthetic oligonucleotide
gucucggucuucuucagcu

SEQ ID NO: 2975176 - RNA, 19 nt, Artificial Sequence
  Description of Artificial Sequence: Synthetic oligonucleotide
caucggcgcggaaugcccg

SEQ ID NO: 2975177 - RNA, 19 nt, Artificial Sequence
  Description of Artificial Sequence: Synthetic oligonucleotide
uccucuuuuccuguucaau

SEQ ID NO: 2975178 - RNA, 19 nt, Artificial Sequence
  Description of Artificial Sequence: Synthetic oligonucleotide
acagugcagcuuguggcuc

SEQ ID NO: 2975179 - RNA, 19 nt, Artificial Sequence
  Description of Artificial Sequence: Synthetic oligonucleotide
guggcucgcguccaucuug

SEQ ID NO: 2975180 - RNA, 19 nt, Artificial Sequence
  Description of Artificial Sequence: Synthetic oligonucleotide
ugcccggguucacagugca

SEQ ID NO: 2975181 - RNA, 19 nt, Artificial Sequence
  Description of Artificial Sequence: Synthetic oligonucleotide
acgagguguguuuuauuuu

SEQ ID NO: 2975182 - RNA, 19 nt, Artificial Sequence
  Description of Artificial Sequence: Synthetic oligonucleotide
cuugucugccauuuucuua

SEQ ID NO: 2975183 - RNA, 19 nt, Artificial Sequence
  Description of Artificial Sequence: Synthetic oligonucleotide
agugcagcuuguggcucgc

SEQ ID NO: 2975184 - RNA, 19 nt, Artificial Sequence
  Description of Artificial Sequence: Synthetic oligonucleotide
aucggcgcggaaugcccgg

SEQ ID NO: 2975185 - RNA, 19 nt, Artificial Sequence
  Description of Artificial Sequence: Synthetic oligonucleotide
ccugaugggcgaaccaagg

SEQ ID NO: 2975186 - RNA, 19 nt, Artificial Sequence
  Description of Artificial Sequence: Synthetic oligonucleotide
ggccuuaucgaagcuggcg

SEQ ID NO: 2975187 - RNA, 19 nt, Artificial Sequence
  Description of Artificial Sequence: Synthetic oligonucleotide
cucggagaugacggggugg

SEQ ID NO: 2975188 - RNA, 19 nt, Artificial Sequence
  Description of Artificial Sequence: Synthetic oligonucleotide
gaacccugaugggcgaacc

SEQ ID NO: 2975189 - RNA, 19 nt, Artificial Sequence
  Description of Artificial Sequence: Synthetic oligonucleotide
uguccggcuugucugccau

SEQ ID NO: 2975190 - RNA, 19 nt, Artificial Sequence
  Description of Artificial Sequence: Synthetic oligonucleotide
uaucgaagcuggcgauuuc

SEQ ID NO: 2975191 - RNA, 19 nt, Artificial Sequence
  Description of Artificial Sequence: Synthetic oligonucleotide
gagguguguuuuauuuuca

SEQ ID NO: 2975192 - RNA, 19 nt, Artificial Sequence
  Description of Artificial Sequence: Synthetic oligonucleotide
ggcuuuuaggaaauuucac

SEQ ID NO: 2975193 - RNA, 19 nt, Artificial Sequence
  Description of Artificial Sequence: Synthetic oligonucleotide
gcaaaccgguaaaauuugg

SEQ ID NO: 2975194 - RNA, 19 nt, Artificial Sequence
  Description of Artificial Sequence: Synthetic oligonucleotide
ggcaaaccgguaaaauuug

SEQ ID NO: 2975195 - RNA, 19 nt, Artificial Sequence
  Description of Artificial Sequence: Synthetic oligonucleotide
ucuucuccugcgucucggu

SEQ ID NO: 2975196 - RNA, 19 nt, Artificial Sequence
  Description of Artificial Sequence: Synthetic oligonucleotide
gagaugacgggguggggua

SEQ ID NO: 2975197 - RNA, 19 nt, Artificial Sequence
  Description of Artificial Sequence: Synthetic oligonucleotide
ggucucggagaugacgggg

SEQ ID NO: 2975198 - RNA, 19 nt, Artificial Sequence
  Description of Artificial Sequence: Synthetic oligonucleotide
uggccuuaucgaagcuggc

SEQ ID NO: 2975199 - RNA, 19 nt, Artificial Sequence
  Description of Artificial Sequence: Synthetic oligonucleotide
gccuuaucgaagcuggcga

SEQ ID NO: 2975200 - RNA, 19 nt, Artificial Sequence
  Description of Artificial Sequence: Synthetic oligonucleotide
caucaaucauacaaauaau

SEQ ID NO: 2975201 - RNA, 19 nt, Artificial Sequence
  Description of Artificial Sequence: Synthetic oligonucleotide
ucuccugcgucucggucuu

SEQ ID NO: 2975202 - RNA, 19 nt, Artificial Sequence
  Description of Artificial Sequence: Synthetic oligonucleotide
cgagguguguuuuauuuuc

SEQ ID NO: 2975203 - RNA, 19 nt, Artificial Sequence
  Description of Artificial Sequence: Synthetic oligonucleotide
ugucugccauuuucuuaga

SEQ ID NO: 2975204 - RNA, 19 nt, Artificial Sequence
  Description of Artificial Sequence: Synthetic oligonucleotide
ucuucagcuuggccuuauc

SEQ ID NO: 2975205 - RNA, 19 nt, Artificial Sequence
  Description of Artificial Sequence: Synthetic oligonucleotide
cccauguccggcuugucug

SEQ ID NO: 2975206 - RNA, 19 nt, Artificial Sequence
  Description of Artificial Sequence: Synthetic oligonucleotide
ggguaggguggagaaaucc

SEQ ID NO: 2975207 - RNA, 19 nt, Artificial Sequence
  Description of Artificial Sequence: Synthetic oligonucleotide
auuuggcaguccgauuagu

SEQ ID NO: 2975208 - RNA, 19 nt, Artificial Sequence
  Description of Artificial Sequence: Synthetic oligonucleotide
gguguucuucuccugcguc

SEQ ID NO: 2975209 - RNA, 19 nt, Artificial Sequence
  Description of Artificial Sequence: Synthetic oligonucleotide
ggcaguccgauuagugggg

SEQ ID NO: 2975210 - RNA, 19 nt, Artificial Sequence
  Description of Artificial Sequence: Synthetic oligonucleotide
agaugacggggugggguag

SEQ ID NO: 2975211 - RNA, 19 nt, Artificial Sequence
  Description of Artificial Sequence: Synthetic oligonucleotide
cugcgucucggucuucuuc

SEQ ID NO: 2975212 - RNA, 19 nt, Artificial Sequence
  Description of Artificial Sequence: Synthetic oligonucleotide
cuucuccugcgucucgguc

SEQ ID NO: 2975213 - RNA, 19 nt, Artificial Sequence
  Description of Artificial Sequence: Synthetic oligonucleotide
guucacagugcagcuugug

SEQ ID NO: 2975214 - RNA, 19 nt, Artificial Sequence
  Description of Artificial Sequence: Synthetic oligonucleotide
gguggagaaauccuccagu

SEQ ID NO: 2975215 - RNA, 19 nt, Artificial Sequence
  Description of Artificial Sequence: Synthetic oligonucleotide
gcucgcguccaucuugcag

SEQ ID NO: 2975216 - RNA, 19 nt, Artificial Sequence
  Description of Artificial Sequence: Synthetic oligonucleotide
ucgcguccaucuugcaggu

SEQ ID NO: 2975217 - RNA, 19 nt, Artificial Sequence
  Description of Artificial Sequence: Synthetic oligonucleotide
cacuccucuuuuccuguuc

SEQ ID NO: 2975218 - RNA, 19 nt, Artificial Sequence
  Description of Artificial Sequence: Synthetic oligonucleotide
acggggugggguagggugg

SEQ ID NO: 2975219 - RNA, 19 nt, Artificial Sequence
  Description of Artificial Sequence: Synthetic oligonucleotide
ggucuucuucagcuuggcc

SEQ ID NO: 2975220 - RNA, 19 nt, Artificial Sequence
  Description of Artificial Sequence: Synthetic oligonucleotide
uccggcuugucugccauuu

SEQ ID NO: 2975221 - RNA, 19 nt, Artificial Sequence
  Description of Artificial Sequence: Synthetic oligonucleotide
cacgagguguguuuuauuu

SEQ ID NO: 2975222 - RNA, 19 nt, Artificial Sequence
  Description of Artificial Sequence: Synthetic oligonucleotide
augcccggguucacagugc

SEQ ID NO: 2975223 - RNA, 19 nt, Artificial Sequence
  Description of Artificial Sequence: Synthetic oligonucleotide
uccugcgucucggucuucu

SEQ ID NO: 2975224 - RNA, 19 nt, Artificial Sequence
  Description of Artificial Sequence: Synthetic oligonucleotide
uguggcucgcguccaucuu

SEQ ID NO: 2975225 - RNA, 19 nt, Artificial Sequence
  Description of Artificial Sequence: Synthetic oligonucleotide
augacggggugggguaggg

SEQ ID NO: 2975226 - RNA, 19 nt, Artificial Sequence
  Description of Artificial Sequence: Synthetic oligonucleotide
guguucuucuccugcgucu

SEQ ID NO: 2975227 - RNA, 19 nt, Artificial Sequence
  Description of Artificial Sequence: Synthetic oligonucleotide
ucucuuuggucggcagggu

SEQ ID NO: 2975228 - RNA, 19 nt, Artificial Sequence
  Description of Artificial Sequence: Synthetic oligonucleotide
cccggguucacagugcagc

SEQ ID NO: 2975229 - RNA, 19 nt, Artificial Sequence
  Description of Artificial Sequence: Synthetic oligonucleotide
acccugaugggcgaaccaa

SEQ ID NO: 2975230 - RNA, 19 nt, Artificial Sequence
  Description of Artificial Sequence: Synthetic oligonucleotide
cauguccggcuugucugcc

SEQ ID NO: 2975231 - RNA, 19 nt, Artificial Sequence
  Description of Artificial Sequence: Synthetic oligonucleotide
acgggccgguggcaucggc

SEQ ID NO: 2975232 - RNA, 19 nt, Artificial Sequence
  Description of Artificial Sequence: Synthetic oligonucleotide
gggucucggagaugacggg

SEQ ID NO: 2975233 - RNA, 19 nt, Artificial Sequence
  Description of Artificial Sequence: Synthetic oligonucleotide
cacagugcagcuuguggcu

SEQ ID NO: 2975234 - RNA, 19 nt, Artificial Sequence
  Description of Artificial Sequence: Synthetic oligonucleotide
ucggcaggguguucuucuc

SEQ ID NO: 2975235 - RNA, 19 nt, Artificial Sequence
  Description of Artificial Sequence: Synthetic oligonucleotide
auguccggcuugucugcca

SEQ ID NO: 2975236 - RNA, 19 nt, Artificial Sequence
  Description of Artificial Sequence: Synthetic oligonucleotide
ucuaggcuuuuaggaaauu

SEQ ID NO: 2975237 - RNA, 19 nt, Artificial Sequence
  Description of Artificial Sequence: Synthetic oligonucleotide
cccugaugggcgaaccaag

SEQ ID NO: 2975238 - RNA, 19 nt, Artificial Sequence
  Description of Artificial Sequence: Synthetic oligonucleotide
ucacuccucuuuuccuguu

SEQ ID NO: 2975239 - RNA, 19 nt, Artificial Sequence
  Description of Artificial Sequence: Synthetic oligonucleotide
auggucucuuuggucggca

SEQ ID NO: 2975240 - RNA, 19 nt, Artificial Sequence
  Description of Artificial Sequence: Synthetic oligonucleotide
gucggcaggguguucuucu

SEQ ID NO: 2975241 - RNA, 19 nt, Artificial Sequence
  Description of Artificial Sequence: Synthetic oligonucleotide
ucggcgcggaaugcccggg

SEQ ID NO: 2975242 - RNA, 19 nt, Artificial Sequence
  Description of Artificial Sequence: Synthetic oligonucleotide
ccauguccggcuugucugc

SEQ ID NO: 2975243 - RNA, 19 nt, Artificial Sequence
  Description of Artificial Sequence: Synthetic oligonucleotide
uucuucagcuuggccuuau

SEQ ID NO: 2975244 - RNA, 19 nt, Artificial Sequence
  Description of Artificial Sequence: Synthetic oligonucleotide
cuuguggcucgcguccauc

SEQ ID NO: 2975245 - RNA, 19 nt, Artificial Sequence
  Description of Artificial Sequence: Synthetic oligonucleotide
uagaacccugaugggcgaa

SEQ ID NO: 2975246 - RNA, 19 nt, Artificial Sequence
  Description of Artificial Sequence: Synthetic oligonucleotide
gggccgguggcaucggcgc

SEQ ID NO: 2975247 - RNA, 19 nt, Artificial Sequence
  Description of Artificial Sequence: Synthetic oligonucleotide
gggcaaaccgguaaaauuu

SEQ ID NO: 2975248 - RNA, 19 nt, Artificial Sequence
  Description of Artificial Sequence: Synthetic oligonucleotide
ccccuucagagacccacgg

SEQ ID NO: 2975249 - RNA, 19 nt, Artificial Sequence
  Description of Artificial Sequence: Synthetic oligonucleotide
cgaagcuggcgauuucccc

SEQ ID NO: 2975250 - RNA, 19 nt, Artificial Sequence
  Description of Artificial Sequence: Synthetic oligonucleotide
uggcaucggcgcggaaugc

SEQ ID NO: 2975251 - RNA, 19 nt, Artificial Sequence
  Description of Artificial Sequence: Synthetic oligonucleotide
cuaggcuuuuaggaaauuu

SEQ ID NO: 2975252 - RNA, 19 nt, Artificial Sequence
  Description of Artificial Sequence: Synthetic oligonucleotide
gguaggguggagaaauccu

SEQ ID NO: 2975253 - RNA, 19 nt, Artificial Sequence
  Description of Artificial Sequence: Synthetic oligonucleotide
gaaugcccggguucacagu

SEQ ID NO: 2975254 - RNA, 19 nt, Artificial Sequence
  Description of Artificial Sequence: Synthetic oligonucleotide
gccauuuucuuagaacccu

SEQ ID NO: 2975255 - RNA, 19 nt, Artificial Sequence
  Description of Artificial Sequence: Synthetic oligonucleotide
agcuuguggcucgcgucca

SEQ ID NO: 2975256 - RNA, 19 nt, Artificial Sequence
  Description of Artificial Sequence: Synthetic oligonucleotide
cagguggcucuuccuccac

SEQ ID NO: 2975257 - RNA, 19 nt, Artificial Sequence
  Description of Artificial Sequence: Synthetic oligonucleotide
ggcucuuccuccacaucac

SEQ ID NO: 2975258 - RNA, 19 nt, Artificial Sequence
  Description of Artificial Sequence: Synthetic oligonucleotide
gcaggguguucuucuccug

SEQ ID NO: 2975259 - RNA, 19 nt, Artificial Sequence
  Description of Artificial Sequence: Synthetic oligonucleotide
gcaucggcgcggaaugccc

SEQ ID NO: 2975260 - RNA, 19 nt, Artificial Sequence
  Description of Artificial Sequence: Synthetic oligonucleotide
cuccucuuuuccuguucaa

SEQ ID NO: 2975261 - RNA, 19 nt, Artificial Sequence
  Description of Artificial Sequence: Synthetic oligonucleotide
uuuggucggcaggguguuc

SEQ ID NO: 2975262 - RNA, 19 nt, Artificial Sequence
  Description of Artificial Sequence: Synthetic oligonucleotide
ggagaugacgggguggggu

SEQ ID NO: 2975263 - RNA, 19 nt, Artificial Sequence
  Description of Artificial Sequence: Synthetic oligonucleotide
ggcaggguguucuucuccu

SEQ ID NO: 2975264 - RNA, 19 nt, Artificial Sequence
  Description of Artificial Sequence: Synthetic oligonucleotide
ccgguaaaauuuggcaguc

SEQ ID NO: 2975265 - RNA, 19 nt, Artificial Sequence
  Description of Artificial Sequence: Synthetic oligonucleotide
gucucggagaugacggggu

SEQ ID NO: 2975266 - RNA, 19 nt, Artificial Sequence
  Description of Artificial Sequence: Synthetic oligonucleotide
gucuaggcuuuuaggaaau

SEQ ID NO: 2975267 - RNA, 19 nt, Artificial Sequence
  Description of Artificial Sequence: Synthetic oligonucleotide
cguccaucuugcagguggc

SEQ ID NO: 2975268 - RNA, 19 nt, Artificial Sequence
  Description of Artificial Sequence: Synthetic oligonucleotide
gcgucucggucuucuucag

SEQ ID NO: 2975269 - RNA, 19 nt, Artificial Sequence
  Description of Artificial Sequence: Synthetic oligonucleotide
gccgguggcaucggcgcgg

SEQ ID NO: 2975270 - RNA, 19 nt, Artificial Sequence
  Description of Artificial Sequence: Synthetic oligonucleotide
ggcuugucugccauuuucu

SEQ ID NO: 2975271 - RNA, 19 nt, Artificial Sequence
  Description of Artificial Sequence: Synthetic oligonucleotide
gugcagcuuguggcucgcg

SEQ ID NO: 2975272 - RNA, 19 nt, Artificial Sequence
  Description of Artificial Sequence: Synthetic oligonucleotide
cggcuugucugccauuuuc

SEQ ID NO: 2975273 - RNA, 19 nt, Artificial Sequence
  Description of Artificial Sequence: Synthetic oligonucleotide
ccacgggccgguggcaucg

SEQ ID NO: 2975274 - RNA, 19 nt, Artificial Sequence
  Description of Artificial Sequence: Synthetic oligonucleotide
cuuaucgaagcuggcgauu

SEQ ID NO: 2975275 - RNA, 19 nt, Artificial Sequence
  Description of Artificial Sequence: Synthetic oligonucleotide
cgguaaaauuuggcagucc

SEQ ID NO: 2975276 - RNA, 19 nt, Artificial Sequence
  Description of Artificial Sequence: Synthetic oligonucleotide
agagacccacgggccggug

SEQ ID NO: 2975277 - RNA, 19 nt, Artificial Sequence
  Description of Artificial Sequence: Synthetic oligonucleotide
gcgcggaaugcccggguuc

SEQ ID NO: 2975278 - RNA, 19 nt, Artificial Sequence
  Description of Artificial Sequence: Synthetic oligonucleotide
cgggccgguggcaucggcg

SEQ ID NO: 2975279 - RNA, 19 nt, Artificial Sequence
  Description of Artificial Sequence: Synthetic oligonucleotide
cagggcaaaccgguaaaau

SEQ ID NO: 2975280 - RNA, 19 nt, Artificial Sequence
  Description of Artificial Sequence: Synthetic oligonucleotide
gguggcaucggcgcggaau

SEQ ID NO: 2975281 - RNA, 19 nt, Artificial Sequence
  Description of Artificial Sequence: Synthetic oligonucleotide
gugggguaggguggagaaa

SEQ ID NO: 2975282 - RNA, 19 nt, Artificial Sequence
  Description of Artificial Sequence: Synthetic oligonucleotide
cgucucggucuucuucagc

SEQ ID NO: 2975283 - RNA, 19 nt, Artificial Sequence
  Description of Artificial Sequence: Synthetic oligonucleotide
cggcaggguguucuucucc

SEQ ID NO: 2975284 - RNA, 19 nt, Artificial Sequence
  Description of Artificial Sequence: Synthetic oligonucleotide
gcuugucugccauuuucuu

SEQ ID NO: 2975285 - RNA, 19 nt, Artificial Sequence
  Description of Artificial Sequence: Synthetic oligonucleotide
ggguguucuucuccugcgu

SEQ ID NO: 2975286 - RNA, 19 nt, Artificial Sequence
  Description of Artificial Sequence: Synthetic oligonucleotide
acccacgggccgguggcau

SEQ ID NO: 2975287 - RNA, 19 nt, Artificial Sequence
  Description of Artificial Sequence: Synthetic oligonucleotide
aucccagggcaaaccggua

SEQ ID NO: 2975288 - RNA, 19 nt, Artificial Sequence
  Description of Artificial Sequence: Synthetic oligonucleotide
ggucggcaggguguucuuc

SEQ ID NO: 2975289 - RNA, 19 nt, Artificial Sequence
  Description of Artificial Sequence: Synthetic oligonucleotide
gacccacgggccgguggca

SEQ ID NO: 2975290 - RNA, 19 nt, Artificial Sequence
  Description of Artificial Sequence: Synthetic oligonucleotide
cacgggccgguggcaucgg

SEQ ID NO: 2975291 - RNA, 19 nt, Artificial Sequence
  Description of Artificial Sequence: Synthetic oligonucleotide
gggguaggguggagaaauc

SEQ ID NO: 2975292 - RNA, 19 nt, Artificial Sequence
  Description of Artificial Sequence: Synthetic oligonucleotide
ccuuaucgaagcuggcgau

SEQ ID NO: 2975293 - RNA, 19 nt, Artificial Sequence
  Description of Artificial Sequence: Synthetic oligonucleotide
cuuuggucggcaggguguu

SEQ ID NO: 2975294 - RNA, 19 nt, Artificial Sequence
  Description of Artificial Sequence: Synthetic oligonucleotide
cuucuucagcuuggccuua

SEQ ID NO: 2975295 - RNA, 19 nt, Artificial Sequence
  Description of Artificial Sequence: Synthetic oligonucleotide
guccaucuugcagguggcu

SEQ ID NO: 2975296 - RNA, 19 nt, Artificial Sequence
  Description of Artificial Sequence: Synthetic oligonucleotide
cggucuucuucagcuuggc

SEQ ID NO: 2975297 - RNA, 19 nt, Artificial Sequence
  Description of Artificial Sequence: Synthetic oligonucleotide
gccacgagguguguuuuau

SEQ ID NO: 2975298 - RNA, 19 nt, Artificial Sequence
  Description of Artificial Sequence: Synthetic oligonucleotide
gcccggguucacagugcag

SEQ ID NO: 2975299 - RNA, 19 nt, Artificial Sequence
  Description of Artificial Sequence: Synthetic oligonucleotide
ccagggcaaaccgguaaaa

SEQ ID NO: 2975300 - RNA, 19 nt, Artificial Sequence
  Description of Artificial Sequence: Synthetic oligonucleotide
gguucacagugcagcuugu

SEQ ID NO: 2975301 - RNA, 19 nt, Artificial Sequence
  Description of Artificial Sequence: Synthetic oligonucleotide
ggcucgcguccaucuugca

SEQ ID NO: 2975302 - RNA, 19 nt, Artificial Sequence
  Description of Artificial Sequence: Synthetic oligonucleotide
ccccauguccggcuugucu

SEQ ID NO: 2975303 - RNA, 19 nt, Artificial Sequence
  Description of Artificial Sequence: Synthetic oligonucleotide
ccggguucacagugcagcu

SEQ ID NO: 2975304 - RNA, 19 nt, Artificial Sequence
  Description of Artificial Sequence: Synthetic oligonucleotide
cgcggaaugcccggguuca

SEQ ID NO: 2975305 - RNA, 19 nt, Artificial Sequence
  Description of Artificial Sequence: Synthetic oligonucleotide
cccacgggccgguggcauc

SEQ ID NO: 2975306 - RNA, 19 nt, Artificial Sequence
  Description of Artificial Sequence: Synthetic oligonucleotide
gcggaaugcccggguucac

SEQ ID NO: 2975307 - RNA, 19 nt, Artificial Sequence
  Description of Artificial Sequence: Synthetic oligonucleotide
cggagaugacggggugggg

SEQ ID NO: 2975308 - RNA, 19 nt, Artificial Sequence
  Description of Artificial Sequence: Synthetic oligonucleotide
ggcgcggaaugcccggguu

SEQ ID NO: 2975309 - RNA, 19 nt, Artificial Sequence
  Description of Artificial Sequence: Synthetic oligonucleotide
cagagacccacgggccggu

SEQ ID NO: 2975310 - RNA, 19 nt, Artificial Sequence
  Description of Artificial Sequence: Synthetic oligonucleotide
cuccugcgucucggucuuc

SEQ ID NO: 2975311 - RNA, 19 nt, Artificial Sequence
  Description of Artificial Sequence: Synthetic oligonucleotide
cggaaugcccggguucaca

SEQ ID NO: 2975312 - RNA, 19 nt, Artificial Sequence
  Description of Artificial Sequence: Synthetic oligonucleotide
gcuuguggcucgcguccau

SEQ ID NO: 2975313 - RNA, 19 nt, Artificial Sequence
  Description of Artificial Sequence: Synthetic oligonucleotide
guccggcuugucugccauu

SEQ ID NO: 2975314 - RNA, 19 nt, Artificial Sequence
  Description of Artificial Sequence: Synthetic oligonucleotide
ccuccagucuaggcuuuua

SEQ ID NO: 2975315 - RNA, 19 nt, Artificial Sequence
  Description of Artificial Sequence: Synthetic oligonucleotide
ccacgagguguguuuuauu

SEQ ID NO: 2975316 - RNA, 19 nt, Artificial Sequence
  Description of Artificial Sequence: Synthetic oligonucleotide
cgcguccaucuugcaggug

SEQ ID NO: 2975317 - RNA, 19 nt, Artificial Sequence
  Description of Artificial Sequence: Synthetic oligonucleotide
ccgguggcaucggcgcgga

SEQ ID NO: 2975318 - RNA, 19 nt, Artificial Sequence
  Description of Artificial Sequence: Synthetic oligonucleotide
ccugcgucucggucuucuu

SEQ ID NO: 2975319 - RNA, 19 nt, Artificial Sequence
  Description of Artificial Sequence: Synthetic oligonucleotide
ccggcuugucugccauuuu

SEQ ID NO: 2975320 - RNA, 19 nt, Artificial Sequence
  Description of Artificial Sequence: Synthetic oligonucleotide
cggguucacagugcagcuu

SEQ ID NO: 2975321 - RNA, 19 nt, Artificial Sequence
  Description of Artificial Sequence: Synthetic oligonucleotide
cggcgcggaaugcccgggu

SEQ ID NO: 2975322 - RNA, 19 nt, Artificial Sequence
  Description of Artificial Sequence: Synthetic oligonucleotide
cgguggcaucggcgcggaa

SEQ ID NO: 2975323 - RNA, 19 nt, Artificial Sequence
  Description of Artificial Sequence: Synthetic oligonucleotide
auaagcuccaacuugaugg

SEQ ID NO: 2975324 - RNA, 19 nt, Artificial Sequence
  Description of Artificial Sequence: Synthetic oligonucleotide
cagaguaccccucagaugg

SEQ ID NO: 2975325 - RNA, 19 nt, Artificial Sequence
  Description of Artificial Sequence: Synthetic oligonucleotide
uaccaucacaauaaggagg

SEQ ID NO: 2975326 - RNA, 19 nt, Artificial Sequence
  Description of Artificial Sequence: Synthetic oligonucleotide
aucacaauaaggaggacgc

SEQ ID NO: 2975327 - RNA, 19 nt, Artificial Sequence
  Description of Artificial Sequence: Synthetic oligonucleotide
cuugcagguacauagggcc

SEQ ID NO: 2975328 - RNA, 19 nt, Artificial Sequence
  Description of Artificial Sequence: Synthetic oligonucleotide
uuucccggcaauaagcucc

SEQ ID NO: 2975329 - RNA, 19 nt, Artificial Sequence
  Description of Artificial Sequence: Synthetic oligonucleotide
ucuugcuucggccacauac

SEQ ID NO: 2975330 - RNA, 19 nt, Artificial Sequence
  Description of Artificial Sequence: Synthetic oligonucleotide
aaggguugcuucuugcuuc

SEQ ID NO: 2975331 - RNA, 19 nt, Artificial Sequence
  Description of Artificial Sequence: Synthetic oligonucleotide
uacuugcucacucuugugg

SEQ ID NO: 2975332 - RNA, 19 nt, Artificial Sequence
  Description of Artificial Sequence: Synthetic oligonucleotide
aaggaggacgcuugguggc

SEQ ID NO: 2975333 - RNA, 19 nt, Artificial Sequence
  Description of Artificial Sequence: Synthetic oligonucleotide
aauaagcuccaacuugaug

SEQ ID NO: 2975334 - RNA, 19 nt, Artificial Sequence
  Description of Artificial Sequence: Synthetic oligonucleotide
aacuugaguggggaaaggc

SEQ ID NO: 2975335 - RNA, 19 nt, Artificial Sequence
  Description of Artificial Sequence: Synthetic oligonucleotide
aaggcaggcaggcagaagu

SEQ ID NO: 2975336 - RNA, 19 nt, Artificial Sequence
  Description of Artificial Sequence: Synthetic oligonucleotide
uaaggaggacgcuuggugg

SEQ ID NO: 2975337 - RNA, 19 nt, Artificial Sequence
  Description of Artificial Sequence: Synthetic oligonucleotide
uggcacagcuucaacaagg

SEQ ID NO: 2975338 - RNA, 19 nt, Artificial Sequence
  Description of Artificial Sequence: Synthetic oligonucleotide
uacauagggccacugugcg

SEQ ID NO: 2975339 - RNA, 19 nt, Artificial Sequence
  Description of Artificial Sequence: Synthetic oligonucleotide
uggccuugcagguacauag

SEQ ID NO: 2975340 - RNA, 19 nt, Artificial Sequence
  Description of Artificial Sequence: Synthetic oligonucleotide
uuuucugugccaccacggg

SEQ ID NO: 2975341 - RNA, 19 nt, Artificial Sequence
  Description of Artificial Sequence: Synthetic oligonucleotide
uguacuugcucacucuugu

SEQ ID NO: 2975342 - RNA, 19 nt, Artificial Sequence
  Description of Artificial Sequence: Synthetic oligonucleotide
uaagcuccaacuugauggg

SEQ ID NO: 2975343 - RNA, 19 nt, Artificial Sequence
  Description of Artificial Sequence: Synthetic oligonucleotide
auaaggaggacgcuuggug

SEQ ID NO: 2975344 - RNA, 19 nt, Artificial Sequence
  Description of Artificial Sequence: Synthetic oligonucleotide
acuugcucacucuuguggg

SEQ ID NO: 2975345 - RNA, 19 nt, Artificial Sequence
  Description of Artificial Sequence: Synthetic oligonucleotide
caucacaauaaggaggacg

SEQ ID NO: 2975346 - RNA, 19 nt, Artificial Sequence
  Description of Artificial Sequence: Synthetic oligonucleotide
accaucuguagguuuuccc

SEQ ID NO: 2975347 - RNA, 19 nt, Artificial Sequence
  Description of Artificial Sequence: Synthetic oligonucleotide
agaagugggagccaucaca

SEQ ID NO: 2975348 - RNA, 19 nt, Artificial Sequence
  Description of Artificial Sequence: Synthetic oligonucleotide
aucuguagguuuucccggc

SEQ ID NO: 2975349 - RNA, 19 nt, Artificial Sequence
  Description of Artificial Sequence: Synthetic oligonucleotide
acuugaguggggaaaggcc

SEQ ID NO: 2975350 - RNA, 19 nt, Artificial Sequence
  Description of Artificial Sequence: Synthetic oligonucleotide
gguaccaucacaauaagga

SEQ ID NO: 2975351 - RNA, 19 nt, Artificial Sequence
  Description of Artificial Sequence: Synthetic oligonucleotide
aaggccagugcgcuggaag

SEQ ID NO: 2975352 - RNA, 19 nt, Artificial Sequence
  Description of Artificial Sequence: Synthetic oligonucleotide
uggggaaccaucgagccag

SEQ ID NO: 2975353 - RNA, 19 nt, Artificial Sequence
  Description of Artificial Sequence: Synthetic oligonucleotide
aacuugauggguguuuucu

SEQ ID NO: 2975354 - RNA, 19 nt, Artificial Sequence
  Description of Artificial Sequence: Synthetic oligonucleotide
caucgagccagccaagagg

SEQ ID NO: 2975355 - RNA, 19 nt, Artificial Sequence
  Description of Artificial Sequence: Synthetic oligonucleotide
guggggaaaggccagugcg

SEQ ID NO: 2975356 - RNA, 19 nt, Artificial Sequence
  Description of Artificial Sequence: Synthetic oligonucleotide
ugaacuugaguggggaaag

SEQ ID NO: 2975357 - RNA, 19 nt, Artificial Sequence
  Description of Artificial Sequence: Synthetic oligonucleotide
uucggccacauacacacca

SEQ ID NO: 2975358 - RNA, 19 nt, Artificial Sequence
  Description of Artificial Sequence: Synthetic oligonucleotide
gaagugggagccaucacag

SEQ ID NO: 2975359 - RNA, 19 nt, Artificial Sequence
  Description of Artificial Sequence: Synthetic oligonucleotide
caucuguagguuuucccgg

SEQ ID NO: 2975360 - RNA, 19 nt, Artificial Sequence
  Description of Artificial Sequence: Synthetic oligonucleotide
aagaagugggagccaucac

SEQ ID NO: 2975361 - RNA, 19 nt, Artificial Sequence
  Description of Artificial Sequence: Synthetic oligonucleotide
aguggggaaaggccagugc

SEQ ID NO: 2975362 - RNA, 19 nt, Artificial Sequence
  Description of Artificial Sequence: Synthetic oligonucleotide
cauagggccacugugcggg

SEQ ID NO: 2975363 - RNA, 19 nt, Artificial Sequence
  Description of Artificial Sequence: Synthetic oligonucleotide
gcuucaacaaggcaggcag

SEQ ID NO: 2975364 - RNA, 19 nt, Artificial Sequence
  Description of Artificial Sequence: Synthetic oligonucleotide
uguggguaccaucacaaua

SEQ ID NO: 2975365 - RNA, 19 nt, Artificial Sequence
  Description of Artificial Sequence: Synthetic oligonucleotide
ucuggcacagcuucaacaa

SEQ ID NO: 2975366 - RNA, 19 nt, Artificial Sequence
  Description of Artificial Sequence: Synthetic oligonucleotide
guugcuucuugcuucggcc

SEQ ID NO: 2975367 - RNA, 19 nt, Artificial Sequence
  Description of Artificial Sequence: Synthetic oligonucleotide
uuuggcugggucccugggg

SEQ ID NO: 2975368 - RNA, 19 nt, Artificial Sequence
  Description of Artificial Sequence: Synthetic oligonucleotide
gcagaagugauuuggaaac

SEQ ID NO: 2975369 - RNA, 19 nt, Artificial Sequence
  Description of Artificial Sequence: Synthetic oligonucleotide
ucuuguggguaccaucaca

SEQ ID NO: 2975370 - RNA, 19 nt, Artificial Sequence
  Description of Artificial Sequence: Synthetic oligonucleotide
gauggguguuuucugugcc

SEQ ID NO: 2975371 - RNA, 19 nt, Artificial Sequence
  Description of Artificial Sequence: Synthetic oligonucleotide
uucaacaaggcaggcaggc

SEQ ID NO: 2975372 - RNA, 19 nt, Artificial Sequence
  Description of Artificial Sequence: Synthetic oligonucleotide
gagauuucccgccucuggc

SEQ ID NO: 2975373 - RNA, 19 nt, Artificial Sequence
  Description of Artificial Sequence: Synthetic oligonucleotide
ugauggguguuuucugugc

SEQ ID NO: 2975374 - RNA, 19 nt, Artificial Sequence
  Description of Artificial Sequence: Synthetic oligonucleotide
caacaaggcaggcaggcag

SEQ ID NO: 2975375 - RNA, 19 nt, Artificial Sequence
  Description of Artificial Sequence: Synthetic oligonucleotide
uucugcuuucuguacuugc

SEQ ID NO: 2975376 - RNA, 19 nt, Artificial Sequence
  Description of Artificial Sequence: Synthetic oligonucleotide
gaaccaucgagccagccaa

SEQ ID NO: 2975377 - RNA, 19 nt, Artificial Sequence
  Description of Artificial Sequence: Synthetic oligonucleotide
ggcaauaagcuccaacuug

SEQ ID NO: 2975378 - RNA, 19 nt, Artificial Sequence
  Description of Artificial Sequence: Synthetic oligonucleotide
uugaguggggaaaggccag

SEQ ID NO: 2975379 - RNA, 19 nt, Artificial Sequence
  Description of Artificial Sequence: Synthetic oligonucleotide
uugauggguguuuucugug

SEQ ID NO: 2975380 - RNA, 19 nt, Artificial Sequence
  Description of Artificial Sequence: Synthetic oligonucleotide
cuugaguggggaaaggcca

SEQ ID NO: 2975381 - RNA, 19 nt, Artificial Sequence
  Description of Artificial Sequence: Synthetic oligonucleotide
accaucacaauaaggagga

SEQ ID NO: 2975382 - RNA, 19 nt, Artificial Sequence
  Description of Artificial Sequence: Synthetic oligonucleotide
gguacauagggccacugug

SEQ ID NO: 2975383 - RNA, 19 nt, Artificial Sequence
  Description of Artificial Sequence: Synthetic oligonucleotide
ugugcgggucucuugggcc

SEQ ID NO: 2975384 - RNA, 19 nt, Artificial Sequence
  Description of Artificial Sequence: Synthetic oligonucleotide
acaauaaggaggacgcuug

SEQ ID NO: 2975385 - RNA, 19 nt, Artificial Sequence
  Description of Artificial Sequence: Synthetic oligonucleotide
uuucugugccaccacgggu

SEQ ID NO: 2975386 - RNA, 19 nt, Artificial Sequence
  Description of Artificial Sequence: Synthetic oligonucleotide
gccaagaggagauuucccg

SEQ ID NO: 2975387 - RNA, 19 nt, Artificial Sequence
  Description of Artificial Sequence: Synthetic oligonucleotide
ugugccaccacggguuugg

SEQ ID NO: 2975388 - RNA, 19 nt, Artificial Sequence
  Description of Artificial Sequence: Synthetic oligonucleotide
aauaaggaggacgcuuggu

SEQ ID NO: 2975389 - RNA, 19 nt, Artificial Sequence
  Description of Artificial Sequence: Synthetic oligonucleotide
gcuucggccacauacacac

SEQ ID NO: 2975390 - RNA, 19 nt, Artificial Sequence
  Description of Artificial Sequence: Synthetic oligonucleotide
acuugauggguguuuucug

SEQ ID NO: 2975391 - RNA, 19 nt, Artificial Sequence
  Description of Artificial Sequence: Synthetic oligonucleotide
aagaggagauuucccgccu

SEQ ID NO: 2975392 - RNA, 19 nt, Artificial Sequence
  Description of Artificial Sequence: Synthetic oligonucleotide
gaagaagugggagccauca

SEQ ID NO: 2975393 - RNA, 19 nt, Artificial Sequence
  Description of Artificial Sequence: Synthetic oligonucleotide
uugaacuugaguggggaaa

SEQ ID NO: 2975394 - RNA, 19 nt, Artificial Sequence
  Description of Artificial Sequence: Synthetic oligonucleotide
ccaucuguagguuuucccg

SEQ ID NO: 2975395 - RNA, 19 nt, Artificial Sequence
  Description of Artificial Sequence: Synthetic oligonucleotide
ucuugggccuugaacuuga

SEQ ID NO: 2975396 - RNA, 19 nt, Artificial Sequence
  Description of Artificial Sequence: Synthetic oligonucleotide
ucccuggggaaccaucgag

SEQ ID NO: 2975397 - RNA, 19 nt, Artificial Sequence
  Description of Artificial Sequence: Synthetic oligonucleotide
uucugugccaccacggguu

SEQ ID NO: 2975398 - RNA, 19 nt, Artificial Sequence
  Description of Artificial Sequence: Synthetic oligonucleotide
agugcgcuggaagaagugg

SEQ ID NO: 2975399 - RNA, 19 nt, Artificial Sequence
  Description of Artificial Sequence: Synthetic oligonucleotide
agaaggguugcuucuugcu

SEQ ID NO: 2975400 - RNA, 19 nt, Artificial Sequence
  Description of Artificial Sequence: Synthetic oligonucleotide
uggguaccaucacaauaag

SEQ ID NO: 2975401 - RNA, 19 nt, Artificial Sequence
  Description of Artificial Sequence: Synthetic oligonucleotide
uggggaaaggccagugcgc

SEQ ID NO: 2975402 - RNA, 19 nt, Artificial Sequence
  Description of Artificial Sequence: Synthetic oligonucleotide
cacugugcgggucucuugg

SEQ ID NO: 2975403 - RNA, 19 nt, Artificial Sequence
  Description of Artificial Sequence: Synthetic oligonucleotide
ucagauggggaucccacuu

SEQ ID NO: 2975404 - RNA, 19 nt, Artificial Sequence
  Description of Artificial Sequence: Synthetic oligonucleotide
gucucuugggccuugaacu

SEQ ID NO: 2975405 - RNA, 19 nt, Artificial Sequence
  Description of Artificial Sequence: Synthetic oligonucleotide
agguuuucccggcaauaag

SEQ ID NO: 2975406 - RNA, 19 nt, Artificial Sequence
  Description of Artificial Sequence: Synthetic oligonucleotide
ucacagaaggguugcuucu

SEQ ID NO: 2975407 - RNA, 19 nt, Artificial Sequence
  Description of Artificial Sequence: Synthetic oligonucleotide
caauaaggaggacgcuugg

SEQ ID NO: 2975408 - RNA, 19 nt, Artificial Sequence
  Description of Artificial Sequence: Synthetic oligonucleotide
ucuguacuugcucacucuu

SEQ ID NO: 2975409 - RNA, 19 nt, Artificial Sequence
  Description of Artificial Sequence: Synthetic oligonucleotide
guacauagggccacugugc

SEQ ID NO: 2975410 - RNA, 19 nt, Artificial Sequence
  Description of Artificial Sequence: Synthetic oligonucleotide
cuuguggguaccaucacaa

SEQ ID NO: 2975411 - RNA, 19 nt, Artificial Sequence
  Description of Artificial Sequence: Synthetic oligonucleotide
aggguugcuucuugcuucg

SEQ ID NO: 2975412 - RNA, 19 nt, Artificial Sequence
  Description of Artificial Sequence: Synthetic oligonucleotide
uucuguacuugcucacucu

SEQ ID NO: 2975413 - RNA, 19 nt, Artificial Sequence
  Description of Artificial Sequence: Synthetic oligonucleotide
acggguuuggcuggguccc

SEQ ID NO: 2975414 - RNA, 19 nt, Artificial Sequence
  Description of Artificial Sequence: Synthetic oligonucleotide
cuucaacaaggcaggcagg

SEQ ID NO: 2975415 - RNA, 19 nt, Artificial Sequence
  Description of Artificial Sequence: Synthetic oligonucleotide
gauuucccgccucuggcac

SEQ ID NO: 2975416 - RNA, 19 nt, Artificial Sequence
  Description of Artificial Sequence: Synthetic oligonucleotide
agaggagauuucccgccuc

SEQ ID NO: 2975417 - RNA, 19 nt, Artificial Sequence
  Description of Artificial Sequence: Synthetic oligonucleotide
uguagguuuucccggcaau

SEQ ID NO: 2975418 - RNA, 19 nt, Artificial Sequence
  Description of Artificial Sequence: Synthetic oligonucleotide
ucuguagguuuucccggca

SEQ ID NO: 2975419 - RNA, 19 nt, Artificial Sequence
  Description of Artificial Sequence: Synthetic oligonucleotide
uugcuucuugcuucggcca

SEQ ID NO: 2975420 - RNA, 19 nt, Artificial Sequence
  Description of Artificial Sequence: Synthetic oligonucleotide
ugcgcuggaagaaguggga

SEQ ID NO: 2975421 - RNA, 19 nt, Artificial Sequence
  Description of Artificial Sequence: Synthetic oligonucleotide
gaagugauuuggaaacaga

SEQ ID NO: 2975422 - RNA, 19 nt, Artificial Sequence
  Description of Artificial Sequence: Synthetic oligonucleotide
uugcagguacauagggcca

SEQ ID NO: 2975423 - RNA, 19 nt, Artificial Sequence
  Description of Artificial Sequence: Synthetic oligonucleotide
agauuucccgccucuggca

SEQ ID NO: 2975424 - RNA, 19 nt, Artificial Sequence
  Description of Artificial Sequence: Synthetic oligonucleotide
ggagauuucccgccucugg

SEQ ID NO: 2975425 - RNA, 19 nt, Artificial Sequence
  Description of Artificial Sequence: Synthetic oligonucleotide
acauagggccacugugcgg

SEQ ID NO: 2975426 - RNA, 19 nt, Artificial Sequence
  Description of Artificial Sequence: Synthetic oligonucleotide
agugauuuggaaacagaaa

SEQ ID NO: 2975427 - RNA, 19 nt, Artificial Sequence
  Description of Artificial Sequence: Synthetic oligonucleotide
uugcuucggccacauacac

SEQ ID NO: 2975428 - RNA, 19 nt, Artificial Sequence
  Description of Artificial Sequence: Synthetic oligonucleotide
cacggguuuggcugggucc

SEQ ID NO: 2975429 - RNA, 19 nt, Artificial Sequence
  Description of Artificial Sequence: Synthetic oligonucleotide
gcaggcagaagugauuugg

SEQ ID NO: 2975430 - RNA, 19 nt, Artificial Sequence
  Description of Artificial Sequence: Synthetic oligonucleotide
cagaaggguugcuucuugc

SEQ ID NO: 2975431 - RNA, 19 nt, Artificial Sequence
  Description of Artificial Sequence: Synthetic oligonucleotide
ggaaaggccagugcgcugg

SEQ ID NO: 2975432 - RNA, 19 nt, Artificial Sequence
  Description of Artificial Sequence: Synthetic oligonucleotide
agccaagaggagauuuccc

SEQ ID NO: 2975433 - RNA, 19 nt, Artificial Sequence
  Description of Artificial Sequence: Synthetic oligonucleotide
cuugcuucggccacauaca

SEQ ID NO: 2975434 - RNA, 19 nt, Artificial Sequence
  Description of Artificial Sequence: Synthetic oligonucleotide
guggguaccaucacaauaa

SEQ ID NO: 2975435 - RNA, 19 nt, Artificial Sequence
  Description of Artificial Sequence: Synthetic oligonucleotide
aucgagccagccaagagga

SEQ ID NO: 2975436 - RNA, 19 nt, Artificial Sequence
  Description of Artificial Sequence: Synthetic oligonucleotide
uggggaucccacuucugcu

SEQ ID NO: 2975437 - RNA, 19 nt, Artificial Sequence
  Description of Artificial Sequence: Synthetic oligonucleotide
cuguacuugcucacucuug

SEQ ID NO: 2975438 - RNA, 19 nt, Artificial Sequence
  Description of Artificial Sequence: Synthetic oligonucleotide
uuuucccggcaauaagcuc

SEQ ID NO: 2975439 - RNA, 19 nt, Artificial Sequence
  Description of Artificial Sequence: Synthetic oligonucleotide
uagguuuucccggcaauaa

SEQ ID NO: 2975440 - RNA, 19 nt, Artificial Sequence
  Description of Artificial Sequence: Synthetic oligonucleotide
ugcuucggccacauacaca

SEQ ID NO: 2975441 - RNA, 19 nt, Artificial Sequence
  Description of Artificial Sequence: Synthetic oligonucleotide
gccaccacggguuuggcug

SEQ ID NO: 2975442 - RNA, 19 nt, Artificial Sequence
  Description of Artificial Sequence: Synthetic oligonucleotide
gugcgcuggaagaaguggg

SEQ ID NO: 2975443 - RNA, 19 nt, Artificial Sequence
  Description of Artificial Sequence: Synthetic oligonucleotide
cagccaagaggagauuucc

SEQ ID NO: 2975444 - RNA, 19 nt, Artificial Sequence
  Description of Artificial Sequence: Synthetic oligonucleotide
gaguaccccucagaugggg

SEQ ID NO: 2975445 - RNA, 19 nt, Artificial Sequence
  Description of Artificial Sequence: Synthetic oligonucleotide
aacaaggcaggcaggcaga

SEQ ID NO: 2975446 - RNA, 19 nt, Artificial Sequence
  Description of Artificial Sequence: Synthetic oligonucleotide
cucuggcacagcuucaaca

SEQ ID NO: 2975447 - RNA, 19 nt, Artificial Sequence
  Description of Artificial Sequence: Synthetic oligonucleotide
agguacauagggccacugu

SEQ ID NO: 2975448 - RNA, 19 nt, Artificial Sequence
  Description of Artificial Sequence: Synthetic oligonucleotide
ggcagaagugauuuggaaa

SEQ ID NO: 2975449 - RNA, 19 nt, Artificial Sequence
  Description of Artificial Sequence: Synthetic oligonucleotide
aagugggagccaucacaga

SEQ ID NO: 2975450 - RNA, 19 nt, Artificial Sequence
  Description of Artificial Sequence: Synthetic oligonucleotide
acugugcgggucucuuggg

SEQ ID NO: 2975451 - RNA, 19 nt, Artificial Sequence
  Description of Artificial Sequence: Synthetic oligonucleotide
aggaggacgcuugguggcc

SEQ ID NO: 2975452 - RNA, 19 nt, Artificial Sequence
  Description of Artificial Sequence: Synthetic oligonucleotide
uugggccuugaacuugagu

SEQ ID NO: 2975453 - RNA, 19 nt, Artificial Sequence
  Description of Artificial Sequence: Synthetic oligonucleotide
ccaagaggagauuucccgc

SEQ ID NO: 2975454 - RNA, 19 nt, Artificial Sequence
  Description of Artificial Sequence: Synthetic oligonucleotide
uggguguuuucugugccac

SEQ ID NO: 2975455 - RNA, 19 nt, Artificial Sequence
  Description of Artificial Sequence: Synthetic oligonucleotide
uuucccgccucuggcacag

SEQ ID NO: 2975456 - RNA, 19 nt, Artificial Sequence
  Description of Artificial Sequence: Synthetic oligonucleotide
ucaacaaggcaggcaggca

SEQ ID NO: 2975457 - RNA, 19 nt, Artificial Sequence
  Description of Artificial Sequence: Synthetic oligonucleotide
gccuugcagguacauaggg

SEQ ID NO: 2975458 - RNA, 19 nt, Artificial Sequence
  Description of Artificial Sequence: Synthetic oligonucleotide
agcuccaacuugaugggug

SEQ ID NO: 2975459 - RNA, 19 nt, Artificial Sequence
  Description of Artificial Sequence: Synthetic oligonucleotide
uucccggcaauaagcucca

SEQ ID NO: 2975460 - RNA, 19 nt, Artificial Sequence
  Description of Artificial Sequence: Synthetic oligonucleotide
aggcagaagugauuuggaa

SEQ ID NO: 2975461 - RNA, 19 nt, Artificial Sequence
  Description of Artificial Sequence: Synthetic oligonucleotide
gcaauaagcuccaacuuga

SEQ ID NO: 2975462 - RNA, 19 nt, Artificial Sequence
  Description of Artificial Sequence: Synthetic oligonucleotide
auggguguuuucugugcca

SEQ ID NO: 2975463 - RNA, 19 nt, Artificial Sequence
  Description of Artificial Sequence: Synthetic oligonucleotide
cugcuuucuguacuugcuc

SEQ ID NO: 2975464 - RNA, 19 nt, Artificial Sequence
  Description of Artificial Sequence: Synthetic oligonucleotide
cacucuuguggguaccauc

SEQ ID NO: 2975465 - RNA, 19 nt, Artificial Sequence
  Description of Artificial Sequence: Synthetic oligonucleotide
ugcagguacauagggccac

SEQ ID NO: 2975466 - RNA, 19 nt, Artificial Sequence
  Description of Artificial Sequence: Synthetic oligonucleotide
gugggagccaucacagaag

SEQ ID NO: 2975467 - RNA, 19 nt, Artificial Sequence
  Description of Artificial Sequence: Synthetic oligonucleotide
aggccagugcgcuggaaga

SEQ ID NO: 2975468 - RNA, 19 nt, Artificial Sequence
  Description of Artificial Sequence: Synthetic oligonucleotide
uggaagaagugggagccau

SEQ ID NO: 2975469 - RNA, 19 nt, Artificial Sequence
  Description of Artificial Sequence: Synthetic oligonucleotide
guacuugcucacucuugug

SEQ ID NO: 2975470 - RNA, 19 nt, Artificial Sequence
  Description of Artificial Sequence: Synthetic oligonucleotide
ucucuugggccuugaacuu

SEQ ID NO: 2975471 - RNA, 19 nt, Artificial Sequence
  Description of Artificial Sequence: Synthetic oligonucleotide
cuggcacagcuucaacaag

SEQ ID NO: 2975472 - RNA, 19 nt, Artificial Sequence
  Description of Artificial Sequence: Synthetic oligonucleotide
acgcuugguggccuugcag

SEQ ID NO: 2975473 - RNA, 19 nt, Artificial Sequence
  Description of Artificial Sequence: Synthetic oligonucleotide
ggucucuugggccuugaac

SEQ ID NO: 2975474 - RNA, 19 nt, Artificial Sequence
  Description of Artificial Sequence: Synthetic oligonucleotide
ugcucacucuuguggguac

SEQ ID NO: 2975475 - RNA, 19 nt, Artificial Sequence
  Description of Artificial Sequence: Synthetic oligonucleotide
cuugauggguguuuucugu

SEQ ID NO: 2975476 - RNA, 19 nt, Artificial Sequence
  Description of Artificial Sequence: Synthetic oligonucleotide
gccacauacacaccaucug

SEQ ID NO: 2975477 - RNA, 19 nt, Artificial Sequence
  Description of Artificial Sequence: Synthetic oligonucleotide
gguugcuucuugcuucggc

SEQ ID NO: 2975478 - RNA, 19 nt, Artificial Sequence
  Description of Artificial Sequence: Synthetic oligonucleotide
ccuugcagguacauagggc

SEQ ID NO: 2975479 - RNA, 19 nt, Artificial Sequence
  Description of Artificial Sequence: Synthetic oligonucleotide
cacauacacaccaucugua

SEQ ID NO: 2975480 - RNA, 19 nt, Artificial Sequence
  Description of Artificial Sequence: Synthetic oligonucleotide
cugugcgggucucuugggc

SEQ ID NO: 2975481 - RNA, 19 nt, Artificial Sequence
  Description of Artificial Sequence: Synthetic oligonucleotide
ggccuugaacuugaguggg

SEQ ID NO: 2975482 - RNA, 19 nt, Artificial Sequence
  Description of Artificial Sequence: Synthetic oligonucleotide
ccuggggaaccaucgagcc

SEQ ID NO: 2975483 - RNA, 19 nt, Artificial Sequence
  Description of Artificial Sequence: Synthetic oligonucleotide
ucacaauaaggaggacgcu

SEQ ID NO: 2975484 - RNA, 19 nt, Artificial Sequence
  Description of Artificial Sequence: Synthetic oligonucleotide
agcuucaacaaggcaggca

SEQ ID NO: 2975485 - RNA, 19 nt, Artificial Sequence
  Description of Artificial Sequence: Synthetic oligonucleotide
agccagaguaccccucaga

SEQ ID NO: 2975486 - RNA, 19 nt, Artificial Sequence
  Description of Artificial Sequence: Synthetic oligonucleotide
ggguaccaucacaauaagg

SEQ ID NO: 2975487 - RNA, 19 nt, Artificial Sequence
  Description of Artificial Sequence: Synthetic oligonucleotide
ggaaccaucgagccagcca

SEQ ID NO: 2975488 - RNA, 19 nt, Artificial Sequence
  Description of Artificial Sequence: Synthetic oligonucleotide
cagauggggaucccacuuc

SEQ ID NO: 2975489 - RNA, 19 nt, Artificial Sequence
  Description of Artificial Sequence: Synthetic oligonucleotide
gagccagaguaccccucag

SEQ ID NO: 2975490 - RNA, 19 nt, Artificial Sequence
  Description of Artificial Sequence: Synthetic oligonucleotide
ggucccuggggaaccaucg

SEQ ID NO: 2975491 - RNA, 19 nt, Artificial Sequence
  Description of Artificial Sequence: Synthetic oligonucleotide
uuguggguaccaucacaau

SEQ ID NO: 2975492 - RNA, 19 nt, Artificial Sequence
  Description of Artificial Sequence: Synthetic oligonucleotide
caacuugauggguguuuuc

SEQ ID NO: 2975493 - RNA, 19 nt, Artificial Sequence
  Description of Artificial Sequence: Synthetic oligonucleotide
agggccacugugcgggucu

SEQ ID NO: 2975494 - RNA, 19 nt, Artificial Sequence
  Description of Artificial Sequence: Synthetic oligonucleotide
ggagccaucacagaagggu

SEQ ID NO: 2975495 - RNA, 19 nt, Artificial Sequence
  Description of Artificial Sequence: Synthetic oligonucleotide
ucgagccagccaagaggag

SEQ ID NO: 2975496 - RNA, 19 nt, Artificial Sequence
  Description of Artificial Sequence: Synthetic oligonucleotide
ucggccacauacacaccau

SEQ ID NO: 2975497 - RNA, 19 nt, Artificial Sequence
  Description of Artificial Sequence: Synthetic oligonucleotide
gaguggggaaaggccagug

SEQ ID NO: 2975498 - RNA, 19 nt, Artificial Sequence
  Description of Artificial Sequence: Synthetic oligonucleotide
caggcagaagugauuugga

SEQ ID NO: 2975499 - RNA, 19 nt, Artificial Sequence
  Description of Artificial Sequence: Synthetic oligonucleotide
aagcuccaacuugaugggu

SEQ ID NO: 2975500 - RNA, 19 nt, Artificial Sequence
  Description of Artificial Sequence: Synthetic oligonucleotide
cuugaacuugaguggggaa

SEQ ID NO: 2975501 - RNA, 19 nt, Artificial Sequence
  Description of Artificial Sequence: Synthetic oligonucleotide
agccaucacagaaggguug

SEQ ID NO: 2975502 - RNA, 19 nt, Artificial Sequence
  Description of Artificial Sequence: Synthetic oligonucleotide
gguuuggcugggucccugg

SEQ ID NO: 2975503 - RNA, 19 nt, Artificial Sequence
  Description of Artificial Sequence: Synthetic oligonucleotide
uugcucacucuugugggua

SEQ ID NO: 2975504 - RNA, 19 nt, Artificial Sequence
  Description of Artificial Sequence: Synthetic oligonucleotide
cagugcgcuggaagaagug

SEQ ID NO: 2975505 - RNA, 19 nt, Artificial Sequence
  Description of Artificial Sequence: Synthetic oligonucleotide
ucccgccucuggcacagcu

SEQ ID NO: 2975506 - RNA, 19 nt, Artificial Sequence
  Description of Artificial Sequence: Synthetic oligonucleotide
cgcuugguggccuugcagg

SEQ ID NO: 2975507 - RNA, 19 nt, Artificial Sequence
  Description of Artificial Sequence: Synthetic oligonucleotide
aggcaggcagaagugauuu

SEQ ID NO: 2975508 - RNA, 19 nt, Artificial Sequence
  Description of Artificial Sequence: Synthetic oligonucleotide
gaaggguugcuucuugcuu

SEQ ID NO: 2975509 - RNA, 19 nt, Artificial Sequence
  Description of Artificial Sequence: Synthetic oligonucleotide
auuucccgccucuggcaca

SEQ ID NO: 2975510 - RNA, 19 nt, Artificial Sequence
  Description of Artificial Sequence: Synthetic oligonucleotide
cucuuguggguaccaucac

SEQ ID NO: 2975511 - RNA, 19 nt, Artificial Sequence
  Description of Artificial Sequence: Synthetic oligonucleotide
aaccaucgagccagccaag

SEQ ID NO: 2975512 - RNA, 19 nt, Artificial Sequence
  Description of Artificial Sequence: Synthetic oligonucleotide
cucuugggccuugaacuug

SEQ ID NO: 2975513 - RNA, 19 nt, Artificial Sequence
  Description of Artificial Sequence: Synthetic oligonucleotide
uacacaccaucuguagguu

SEQ ID NO: 2975514 - RNA, 19 nt, Artificial Sequence
  Description of Artificial Sequence: Synthetic oligonucleotide
ugaguggggaaaggccagu

SEQ ID NO: 2975515 - RNA, 19 nt, Artificial Sequence
  Description of Artificial Sequence: Synthetic oligonucleotide
agaguaccccucagauggg

SEQ ID NO: 2975516 - RNA, 19 nt, Artificial Sequence
  Description of Artificial Sequence: Synthetic oligonucleotide
ucugugccaccacggguuu

SEQ ID NO: 2975517 - RNA, 19 nt, Artificial Sequence
  Description of Artificial Sequence: Synthetic oligonucleotide
cuucggccacauacacacc

SEQ ID NO: 2975518 - RNA, 19 nt, Artificial Sequence
  Description of Artificial Sequence: Synthetic oligonucleotide
cccuggggaaccaucgagc

SEQ ID NO: 2975519 - RNA, 19 nt, Artificial Sequence
  Description of Artificial Sequence: Synthetic oligonucleotide
gaggagauuucccgccucu

SEQ ID NO: 2975520 - RNA, 19 nt, Artificial Sequence
  Description of Artificial Sequence: Synthetic oligonucleotide
aggagauuucccgccucug

SEQ ID NO: 2975521 - RNA, 19 nt, Artificial Sequence
  Description of Artificial Sequence: Synthetic oligonucleotide
accaucgagccagccaaga

SEQ ID NO: 2975522 - RNA, 19 nt, Artificial Sequence
  Description of Artificial Sequence: Synthetic oligonucleotide
cuugggccuugaacuugag

SEQ ID NO: 2975523 - RNA, 19 nt, Artificial Sequence
  Description of Artificial Sequence: Synthetic oligonucleotide
aguaccccucagaugggga

SEQ ID NO: 2975524 - RNA, 19 nt, Artificial Sequence
  Description of Artificial Sequence: Synthetic oligonucleotide
gccaucacagaaggguugc

SEQ ID NO: 2975525 - RNA, 19 nt, Artificial Sequence
  Description of Artificial Sequence: Synthetic oligonucleotide
ccagaguaccccucagaug

SEQ ID NO: 2975526 - RNA, 19 nt, Artificial Sequence
  Description of Artificial Sequence: Synthetic oligonucleotide
guagguuuucccggcaaua

SEQ ID NO: 2975527 - RNA, 19 nt, Artificial Sequence
  Description of Artificial Sequence: Synthetic oligonucleotide
uaccccucagauggggauc

SEQ ID NO: 2975528 - RNA, 19 nt, Artificial Sequence
  Description of Artificial Sequence: Synthetic oligonucleotide
gacgcuugguggccuugca

SEQ ID NO: 2975529 - RNA, 19 nt, Artificial Sequence
  Description of Artificial Sequence: Synthetic oligonucleotide
ggagccagaguaccccuca

SEQ ID NO: 2975530 - RNA, 19 nt, Artificial Sequence
  Description of Artificial Sequence: Synthetic oligonucleotide
ucacucuuguggguaccau

SEQ ID NO: 2975531 - RNA, 19 nt, Artificial Sequence
  Description of Artificial Sequence: Synthetic oligonucleotide
ggccuugcagguacauagg

SEQ ID NO: 2975532 - RNA, 19 nt, Artificial Sequence
  Description of Artificial Sequence: Synthetic oligonucleotide
ccggcaauaagcuccaacu

SEQ ID NO: 2975533 - RNA, 19 nt, Artificial Sequence
  Description of Artificial Sequence: Synthetic oligonucleotide
cacuucugcuuucuguacu

SEQ ID NO: 2975534 - RNA, 19 nt, Artificial Sequence
  Description of Artificial Sequence: Synthetic oligonucleotide
aggcaggcaggcagaagug

SEQ ID NO: 2975535 - RNA, 19 nt, Artificial Sequence
  Description of Artificial Sequence: Synthetic oligonucleotide
ccaucgagccagccaagag

SEQ ID NO: 2975536 - RNA, 19 nt, Artificial Sequence
  Description of Artificial Sequence: Synthetic oligonucleotide
cuguagguuuucccggcaa

SEQ ID NO: 2975537 - RNA, 19 nt, Artificial Sequence
  Description of Artificial Sequence: Synthetic oligonucleotide
ggguguuuucugugccacc

SEQ ID NO: 2975538 - RNA, 19 nt, Artificial Sequence
  Description of Artificial Sequence: Synthetic oligonucleotide
cacaauaaggaggacgcuu

SEQ ID NO: 2975539 - RNA, 19 nt, Artificial Sequence
  Description of Artificial Sequence: Synthetic oligonucleotide
cagguacauagggccacug

SEQ ID NO: 2975540 - RNA, 19 nt, Artificial Sequence
  Description of Artificial Sequence: Synthetic oligonucleotide
ccacuucugcuuucuguac

SEQ ID NO: 2975541 - RNA, 19 nt, Artificial Sequence
  Description of Artificial Sequence: Synthetic oligonucleotide
cuugcucacucuugugggu

SEQ ID NO: 2975542 - RNA, 19 nt, Artificial Sequence
  Description of Artificial Sequence: Synthetic oligonucleotide
cuggggaaccaucgagcca

SEQ ID NO: 2975543 - RNA, 19 nt, Artificial Sequence
  Description of Artificial Sequence: Synthetic oligonucleotide
acaaggcaggcaggcagaa

SEQ ID NO: 2975544 - RNA, 19 nt, Artificial Sequence
  Description of Artificial Sequence: Synthetic oligonucleotide
cagcuucaacaaggcaggc

SEQ ID NO: 2975545 - RNA, 19 nt, Artificial Sequence
  Description of Artificial Sequence: Synthetic oligonucleotide
ggcaggcagaagugauuug

SEQ ID NO: 2975546 - RNA, 19 nt, Artificial Sequence
  Description of Artificial Sequence: Synthetic oligonucleotide
auagggccacugugcgggu

SEQ ID NO: 2975547 - RNA, 19 nt, Artificial Sequence
  Description of Artificial Sequence: Synthetic oligonucleotide
cucacucuuguggguacca

SEQ ID NO: 2975548 - RNA, 19 nt, Artificial Sequence
  Description of Artificial Sequence: Synthetic oligonucleotide
gccagugcgcuggaagaag

SEQ ID NO: 2975549 - RNA, 19 nt, Artificial Sequence
  Description of Artificial Sequence: Synthetic oligonucleotide
cccggcaauaagcuccaac

SEQ ID NO: 2975550 - RNA, 19 nt, Artificial Sequence
  Description of Artificial Sequence: Synthetic oligonucleotide
ccaccacggguuuggcugg

SEQ ID NO: 2975551 - RNA, 19 nt, Artificial Sequence
  Description of Artificial Sequence: Synthetic oligonucleotide
cucagauggggaucccacu

SEQ ID NO: 2975552 - RNA, 19 nt, Artificial Sequence
  Description of Artificial Sequence: Synthetic oligonucleotide
gggaaaggccagugcgcug

SEQ ID NO: 2975553 - RNA, 19 nt, Artificial Sequence
  Description of Artificial Sequence: Synthetic oligonucleotide
gcgcuggaagaagugggag

SEQ ID NO: 2975554 - RNA, 19 nt, Artificial Sequence
  Description of Artificial Sequence: Synthetic oligonucleotide
gccagaguaccccucagau

SEQ ID NO: 2975555 - RNA, 19 nt, Artificial Sequence
  Description of Artificial Sequence: Synthetic oligonucleotide
guaccccucagauggggau

SEQ ID NO: 2975556 - RNA, 19 nt, Artificial Sequence
  Description of Artificial Sequence: Synthetic oligonucleotide
caauaagcuccaacuugau

SEQ ID NO: 2975557 - RNA, 19 nt, Artificial Sequence
  Description of Artificial Sequence: Synthetic oligonucleotide
gucccuggggaaccaucga

SEQ ID NO: 2975558 - RNA, 19 nt, Artificial Sequence
  Description of Artificial Sequence: Synthetic oligonucleotide
gagccaucacagaaggguu

SEQ ID NO: 2975559 - RNA, 19 nt, Artificial Sequence
  Description of Artificial Sequence: Synthetic oligonucleotide
ccuugaacuugagugggga

SEQ ID NO: 2975560 - RNA, 19 nt, Artificial Sequence
  Description of Artificial Sequence: Synthetic oligonucleotide
gggagccaucacagaaggg

SEQ ID NO: 2975561 - RNA, 19 nt, Artificial Sequence
  Description of Artificial Sequence: Synthetic oligonucleotide
ccgccucuggcacagcuuc

SEQ ID NO: 2975562 - RNA, 19 nt, Artificial Sequence
  Description of Artificial Sequence: Synthetic oligonucleotide
aggacgcuugguggccuug

SEQ ID NO: 2975563 - RNA, 19 nt, Artificial Sequence
  Description of Artificial Sequence: Synthetic oligonucleotide
uucuugcuucggccacaua

SEQ ID NO: 2975564 - RNA, 19 nt, Artificial Sequence
  Description of Artificial Sequence: Synthetic oligonucleotide
ggccacauacacaccaucu

SEQ ID NO: 2975565 - RNA, 19 nt, Artificial Sequence
  Description of Artificial Sequence: Synthetic oligonucleotide
cuggaagaagugggagcca

SEQ ID NO: 2975566 - RNA, 19 nt, Artificial Sequence
  Description of Artificial Sequence: Synthetic oligonucleotide
gcuccaacuugaugggugu

SEQ ID NO: 2975567 - RNA, 19 nt, Artificial Sequence
  Description of Artificial Sequence: Synthetic oligonucleotide
ggaucccacuucugcuuuc

SEQ ID NO: 2975568 - RNA, 19 nt, Artificial Sequence
  Description of Artificial Sequence: Synthetic oligonucleotide
ggaagaagugggagccauc

SEQ ID NO: 2975569 - RNA, 19 nt, Artificial Sequence
  Description of Artificial Sequence: Synthetic oligonucleotide
ggcaggcaggcagaaguga

SEQ ID NO: 2975570 - RNA, 19 nt, Artificial Sequence
  Description of Artificial Sequence: Synthetic oligonucleotide
caccacggguuuggcuggg

SEQ ID NO: 2975571 - RNA, 19 nt, Artificial Sequence
  Description of Artificial Sequence: Synthetic oligonucleotide
gugcgggucucuugggccu

SEQ ID NO: 2975572 - RNA, 19 nt, Artificial Sequence
  Description of Artificial Sequence: Synthetic oligonucleotide
ggacgcuugguggccuugc

SEQ ID NO: 2975573 - RNA, 19 nt, Artificial Sequence
  Description of Artificial Sequence: Synthetic oligonucleotide
gcucacucuuguggguacc

SEQ ID NO: 2975574 - RNA, 19 nt, Artificial Sequence
  Description of Artificial Sequence: Synthetic oligonucleotide
caucacagaaggguugcuu

SEQ ID NO: 2975575 - RNA, 19 nt, Artificial Sequence
  Description of Artificial Sequence: Synthetic oligonucleotide
gcuugguggccuugcaggu

SEQ ID NO: 2975576 - RNA, 19 nt, Artificial Sequence
  Description of Artificial Sequence: Synthetic oligonucleotide
gggaaccaucgagccagcc

SEQ ID NO: 2975577 - RNA, 19 nt, Artificial Sequence
  Description of Artificial Sequence: Synthetic oligonucleotide
cugugccaccacggguuug

SEQ ID NO: 2975578 - RNA, 19 nt, Artificial Sequence
  Description of Artificial Sequence: Synthetic oligonucleotide
ccacugugcgggucucuug

SEQ ID NO: 2975579 - RNA, 19 nt, Artificial Sequence
  Description of Artificial Sequence: Synthetic oligonucleotide
ggggaaaggccagugcgcu

SEQ ID NO: 2975580 - RNA, 19 nt, Artificial Sequence
  Description of Artificial Sequence: Synthetic oligonucleotide
ccucuggcacagcuucaac

SEQ ID NO: 2975581 - RNA, 19 nt, Artificial Sequence
  Description of Artificial Sequence: Synthetic oligonucleotide
ggguugcuucuugcuucgg

SEQ ID NO: 2975582 - RNA, 19 nt, Artificial Sequence
  Description of Artificial Sequence: Synthetic oligonucleotide
guggccuugcagguacaua

SEQ ID NO: 2975583 - RNA, 19 nt, Artificial Sequence
  Description of Artificial Sequence: Synthetic oligonucleotide
ugggucccuggggaaccau

SEQ ID NO: 2975584 - RNA, 19 nt, Artificial Sequence
  Description of Artificial Sequence: Synthetic oligonucleotide
ggguuuggcugggucccug

SEQ ID NO: 2975585 - RNA, 19 nt, Artificial Sequence
  Description of Artificial Sequence: Synthetic oligonucleotide
ccacggguuuggcuggguc

SEQ ID NO: 2975586 - RNA, 19 nt, Artificial Sequence
  Description of Artificial Sequence: Synthetic oligonucleotide
caggcaggcagaagugauu

SEQ ID NO: 2975587 - RNA, 19 nt, Artificial Sequence
  Description of Artificial Sequence: Synthetic oligonucleotide
ugcgggucucuugggccuu

SEQ ID NO: 2975588 - RNA, 19 nt, Artificial Sequence
  Description of Artificial Sequence: Synthetic oligonucleotide
ggggaucccacuucugcuu

SEQ ID NO: 2975589 - RNA, 19 nt, Artificial Sequence
  Description of Artificial Sequence: Synthetic oligonucleotide
accacggguuuggcugggu

SEQ ID NO: 2975590 - RNA, 19 nt, Artificial Sequence
  Description of Artificial Sequence: Synthetic oligonucleotide
gugccaccacggguuuggc

SEQ ID NO: 2975591 - RNA, 19 nt, Artificial Sequence
  Description of Artificial Sequence: Synthetic oligonucleotide
cgagccagccaagaggaga

SEQ ID NO: 2975592 - RNA, 19 nt, Artificial Sequence
  Description of Artificial Sequence: Synthetic oligonucleotide
ccaucacaauaaggaggac

SEQ ID NO: 2975593 - RNA, 19 nt, Artificial Sequence
  Description of Artificial Sequence: Synthetic oligonucleotide
gggucccuggggaaccauc

SEQ ID NO: 2975594 - RNA, 19 nt, Artificial Sequence
  Description of Artificial Sequence: Synthetic oligonucleotide
ggccagugcgcuggaagaa

SEQ ID NO: 2975595 - RNA, 19 nt, Artificial Sequence
  Description of Artificial Sequence: Synthetic oligonucleotide
ccagugcgcuggaagaagu

SEQ ID NO: 2975596 - RNA, 19 nt, Artificial Sequence
  Description of Artificial Sequence: Synthetic oligonucleotide
cacagaaggguugcuucuu

SEQ ID NO: 2975597 - RNA, 19 nt, Artificial Sequence
  Description of Artificial Sequence: Synthetic oligonucleotide
gggaucccacuucugcuuu

SEQ ID NO: 2975598 - RNA, 19 nt, Artificial Sequence
  Description of Artificial Sequence: Synthetic oligonucleotide
gccucuggcacagcuucaa

SEQ ID NO: 2975599 - RNA, 19 nt, Artificial Sequence
  Description of Artificial Sequence: Synthetic oligonucleotide
cggccacauacacaccauc

SEQ ID NO: 2975600 - RNA, 19 nt, Artificial Sequence
  Description of Artificial Sequence: Synthetic oligonucleotide
gaggacgcuugguggccuu

SEQ ID NO: 2975601 - RNA, 19 nt, Artificial Sequence
  Description of Artificial Sequence: Synthetic oligonucleotide
gcaggcaggcagaagugau

SEQ ID NO: 2975602 - RNA, 19 nt, Artificial Sequence
  Description of Artificial Sequence: Synthetic oligonucleotide
ggggaaccaucgagccagc

SEQ ID NO: 2975603 - RNA, 19 nt, Artificial Sequence
  Description of Artificial Sequence: Synthetic oligonucleotide
uucccgccucuggcacagc

SEQ ID NO: 2975604 - RNA, 19 nt, Artificial Sequence
  Description of Artificial Sequence: Synthetic oligonucleotide
gggucucuugggccuugaa

SEQ ID NO: 2975605 - RNA, 19 nt, Artificial Sequence
  Description of Artificial Sequence: Synthetic oligonucleotide
ucccggcaauaagcuccaa

SEQ ID NO: 2975606 - RNA, 19 nt, Artificial Sequence
  Description of Artificial Sequence: Synthetic oligonucleotide
cccucagauggggauccca

SEQ ID NO: 2975607 - RNA, 19 nt, Artificial Sequence
  Description of Artificial Sequence: Synthetic oligonucleotide
ccaacuugauggguguuuu

SEQ ID NO: 2975608 - RNA, 19 nt, Artificial Sequence
  Description of Artificial Sequence: Synthetic oligonucleotide
gcagguacauagggccacu

SEQ ID NO: 2975609 - RNA, 19 nt, Artificial Sequence
  Description of Artificial Sequence: Synthetic oligonucleotide
ggaggacgcuugguggccu

SEQ ID NO: 2975610 - RNA, 19 nt, Artificial Sequence
  Description of Artificial Sequence: Synthetic oligonucleotide
gguggccuugcagguacau

SEQ ID NO: 2975611 - RNA, 19 nt, Artificial Sequence
  Description of Artificial Sequence: Synthetic oligonucleotide
cuccaacuugauggguguu

SEQ ID NO: 2975612 - RNA, 19 nt, Artificial Sequence
  Description of Artificial Sequence: Synthetic oligonucleotide
gcgggucucuugggccuug

SEQ ID NO: 2975613 - RNA, 19 nt, Artificial Sequence
  Description of Artificial Sequence: Synthetic oligonucleotide
cggcaauaagcuccaacuu

SEQ ID NO: 2975614 - RNA, 19 nt, Artificial Sequence
  Description of Artificial Sequence: Synthetic oligonucleotide
ccccucagauggggauccc

SEQ ID NO: 2975615 - RNA, 19 nt, Artificial Sequence
  Description of Artificial Sequence: Synthetic oligonucleotide
gccacugugcgggucucuu

SEQ ID NO: 2975616 - RNA, 19 nt, Artificial Sequence
  Description of Artificial Sequence: Synthetic oligonucleotide
cgccucuggcacagcuuca

SEQ ID NO: 2975617 - RNA, 19 nt, Artificial Sequence
  Description of Artificial Sequence: Synthetic oligonucleotide
ccaucacagaaggguugcu

SEQ ID NO: 2975618 - RNA, 19 nt, Artificial Sequence
  Description of Artificial Sequence: Synthetic oligonucleotide
ggccacugugcgggucucu

SEQ ID NO: 2975619 - RNA, 19 nt, Artificial Sequence
  Description of Artificial Sequence: Synthetic oligonucleotide
cccgccucuggcacagcuu

SEQ ID NO: 2975620 - RNA, 19 nt, Artificial Sequence
  Description of Artificial Sequence: Synthetic oligonucleotide
cgggucucuugggccuuga

SEQ ID NO: 2975621 - RNA, 19 nt, Artificial Sequence
  Description of Artificial Sequence: Synthetic oligonucleotide
cggguuuggcugggucccu

SEQ ID NO: 2975622 - RNA, 19 nt, Artificial Sequence
  Description of Artificial Sequence: Synthetic oligonucleotide
agaaaaggcauucuggucc

SEQ ID NO: 2975623 - RNA, 19 nt, Artificial Sequence
  Description of Artificial Sequence: Synthetic oligonucleotide
aauaucuugaaugaugaac

SEQ ID NO: 2975624 - RNA, 19 nt, Artificial Sequence
  Description of Artificial Sequence: Synthetic oligonucleotide
aaugucuacacacuguagg

SEQ ID NO: 2975625 - RNA, 19 nt, Artificial Sequence
  Description of Artificial Sequence: Synthetic oligonucleotide
aaugaugaacuucuucccc

SEQ ID NO: 2975626 - RNA, 19 nt, Artificial Sequence
  Description of Artificial Sequence: Synthetic oligonucleotide
ugaaugaugaacuucuucc

SEQ ID NO: 2975627 - RNA, 19 nt, Artificial Sequence
  Description of Artificial Sequence: Synthetic oligonucleotide
aagaauguuuuccaagcgg

SEQ ID NO: 2975628 - RNA, 19 nt, Artificial Sequence
  Description of Artificial Sequence: Synthetic oligonucleotide
uccaaguacagcaagaacu

SEQ ID NO: 2975629 - RNA, 19 nt, Artificial Sequence
  Description of Artificial Sequence: Synthetic oligonucleotide
ugugucaucaauaucuuga

SEQ ID NO: 2975630 - RNA, 19 nt, Artificial Sequence
  Description of Artificial Sequence: Synthetic oligonucleotide
uuugucugaaucaauggcc

SEQ ID NO: 2975631 - RNA, 19 nt, Artificial Sequence
  Description of Artificial Sequence: Synthetic oligonucleotide
aacguugaccaucuucucc

SEQ ID NO: 2975632 - RNA, 19 nt, Artificial Sequence
  Description of Artificial Sequence: Synthetic oligonucleotide
ucaauaucuugaaugauga

SEQ ID NO: 2975633 - RNA, 19 nt, Artificial Sequence
  Description of Artificial Sequence: Synthetic oligonucleotide
aaucaauggcccugcagcc

SEQ ID NO: 2975634 - RNA, 19 nt, Artificial Sequence
  Description of Artificial Sequence: Synthetic oligonucleotide
gucaucaauaucuugaaug

SEQ ID NO: 2975635 - RNA, 19 nt, Artificial Sequence
  Description of Artificial Sequence: Synthetic oligonucleotide
ucuugaaugaugaacuucu

SEQ ID NO: 2975636 - RNA, 19 nt, Artificial Sequence
  Description of Artificial Sequence: Synthetic oligonucleotide
auuggacucauccaaguac

SEQ ID NO: 2975637 - RNA, 19 nt, Artificial Sequence
  Description of Artificial Sequence: Synthetic oligonucleotide
gaaucaauggcccugcagc

SEQ ID NO: 2975638 - RNA, 19 nt, Artificial Sequence
  Description of Artificial Sequence: Synthetic oligonucleotide
auucugguccaucaguucc

SEQ ID NO: 2975639 - RNA, 19 nt, Artificial Sequence
  Description of Artificial Sequence: Synthetic oligonucleotide
aagcacuccuuucaaaacg

SEQ ID NO: 2975640 - RNA, 19 nt, Artificial Sequence
  Description of Artificial Sequence: Synthetic oligonucleotide
aguauuuucacuucugggu

SEQ ID NO: 2975641 - RNA, 19 nt, Artificial Sequence
  Description of Artificial Sequence: Synthetic oligonucleotide
uuuugucugaaucaauggc

SEQ ID NO: 2975642 - RNA, 19 nt, Artificial Sequence
  Description of Artificial Sequence: Synthetic oligonucleotide
ucuauaagcacuccuuuca

SEQ ID NO: 2975643 - RNA, 19 nt, Artificial Sequence
  Description of Artificial Sequence: Synthetic oligonucleotide
aggaucgcauucuauaagc

SEQ ID NO: 2975644 - RNA, 19 nt, Artificial Sequence
  Description of Artificial Sequence: Synthetic oligonucleotide
uccgcaaugacaaacacau

SEQ ID NO: 2975645 - RNA, 19 nt, Artificial Sequence
  Description of Artificial Sequence: Synthetic oligonucleotide
ucaucaauaucuugaauga

SEQ ID NO: 2975646 - RNA, 19 nt, Artificial Sequence
  Description of Artificial Sequence: Synthetic oligonucleotide
aaaacguugaccaucuucu

SEQ ID NO: 2975647 - RNA, 19 nt, Artificial Sequence
  Description of Artificial Sequence: Synthetic oligonucleotide
ucuucucccaggcaggugg

SEQ ID NO: 2975648 - RNA, 19 nt, Artificial Sequence
  Description of Artificial Sequence: Synthetic oligonucleotide
uuccaagcggcucagagcc

SEQ ID NO: 2975649 - RNA, 19 nt, Artificial Sequence
  Description of Artificial Sequence: Synthetic oligonucleotide
aagagaaaaggcauucugg

SEQ ID NO: 2975650 - RNA, 19 nt, Artificial Sequence
  Description of Artificial Sequence: Synthetic oligonucleotide
acguugaccaucuucuccc

SEQ ID NO: 2975651 - RNA, 19 nt, Artificial Sequence
  Description of Artificial Sequence: Synthetic oligonucleotide
uaguauuuucacuucuggg

SEQ ID NO: 2975652 - RNA, 19 nt, Artificial Sequence
  Description of Artificial Sequence: Synthetic oligonucleotide
agaauguuuuccaagcggc

SEQ ID NO: 2975653 - RNA, 19 nt, Artificial Sequence
  Description of Artificial Sequence: Synthetic oligonucleotide
ucuggguaagagaaaaggc

SEQ ID NO: 2975654 - RNA, 19 nt, Artificial Sequence
  Description of Artificial Sequence: Synthetic oligonucleotide
gaggacauugaccagcucc

SEQ ID NO: 2975655 - RNA, 19 nt, Artificial Sequence
  Description of Artificial Sequence: Synthetic oligonucleotide
gaagucaagaauguuuucc

SEQ ID NO: 2975656 - RNA, 19 nt, Artificial Sequence
  Description of Artificial Sequence: Synthetic oligonucleotide
uuuuccaagcggcucagag

SEQ ID NO: 2975657 - RNA, 19 nt, Artificial Sequence
  Description of Artificial Sequence: Synthetic oligonucleotide
aagucaagaauguuuucca

SEQ ID NO: 2975658 - RNA, 19 nt, Artificial Sequence
  Description of Artificial Sequence: Synthetic oligonucleotide
aaaaugcucaugaaauguc

SEQ ID NO: 2975659 - RNA, 19 nt, Artificial Sequence
  Description of Artificial Sequence: Synthetic oligonucleotide
uccuggaggacauugacca

SEQ ID NO: 2975660 - RNA, 19 nt, Artificial Sequence
  Description of Artificial Sequence: Synthetic oligonucleotide
gacucauccaaguacagca

SEQ ID NO: 2975661 - RNA, 19 nt, Artificial Sequence
  Description of Artificial Sequence: Synthetic oligonucleotide
guuuguaauucccacgugc

SEQ ID NO: 2975662 - RNA, 19 nt, Artificial Sequence
  Description of Artificial Sequence: Synthetic oligonucleotide
uuuguaauucccacgugcu

SEQ ID NO: 2975663 - RNA, 19 nt, Artificial Sequence
  Description of Artificial Sequence: Synthetic oligonucleotide
aauggggccucucucaugu

SEQ ID NO: 2975664 - RNA, 19 nt, Artificial Sequence
  Description of Artificial Sequence: Synthetic oligonucleotide
aaacacaugugugucauca

SEQ ID NO: 2975665 - RNA, 19 nt, Artificial Sequence
  Description of Artificial Sequence: Synthetic oligonucleotide
uugucugaaucaauggccc

SEQ ID NO: 2975666 - RNA, 19 nt, Artificial Sequence
  Description of Artificial Sequence: Synthetic oligonucleotide
gaaugaugaacuucuuccc

SEQ ID NO: 2975667 - RNA, 19 nt, Artificial Sequence
  Description of Artificial Sequence: Synthetic oligonucleotide
augaacuucuuccccaagg

SEQ ID NO: 2975668 - RNA, 19 nt, Artificial Sequence
  Description of Artificial Sequence: Synthetic oligonucleotide
cuaguauuuucacuucugg

SEQ ID NO: 2975669 - RNA, 19 nt, Artificial Sequence
  Description of Artificial Sequence: Synthetic oligonucleotide
caaggcauuggacucaucc

SEQ ID NO: 2975670 - RNA, 19 nt, Artificial Sequence
  Description of Artificial Sequence: Synthetic oligonucleotide
agagaaaaggcauucuggu

SEQ ID NO: 2975671 - RNA, 19 nt, Artificial Sequence
  Description of Artificial Sequence: Synthetic oligonucleotide
ucagcagcuaguauuuuca

SEQ ID NO: 2975672 - RNA, 19 nt, Artificial Sequence
  Description of Artificial Sequence: Synthetic oligonucleotide
auaucuugaaugaugaacu

SEQ ID NO: 2975673 - RNA, 19 nt, Artificial Sequence
  Description of Artificial Sequence: Synthetic oligonucleotide
ucacuucuggguaagagaa

SEQ ID NO: 2975674 - RNA, 19 nt, Artificial Sequence
  Description of Artificial Sequence: Synthetic oligonucleotide
uucaaaacguugaccaucu

SEQ ID NO: 2975675 - RNA, 19 nt, Artificial Sequence
  Description of Artificial Sequence: Synthetic oligonucleotide
ugguuuguaauucccacgu

SEQ ID NO: 2975676 - RNA, 19 nt, Artificial Sequence
  Description of Artificial Sequence: Synthetic oligonucleotide
augacaaacacaugugugu

SEQ ID NO: 2975677 - RNA, 19 nt, Artificial Sequence
  Description of Artificial Sequence: Synthetic oligonucleotide
ucccacaaaaugcucauga

SEQ ID NO: 2975678 - RNA, 19 nt, Artificial Sequence
  Description of Artificial Sequence: Synthetic oligonucleotide
cuguaggagacucugaaug

SEQ ID NO: 2975679 - RNA, 19 nt, Artificial Sequence
  Description of Artificial Sequence: Synthetic oligonucleotide
ugaaaugucuacacacugu

SEQ ID NO: 2975680 - RNA, 19 nt, Artificial Sequence
  Description of Artificial Sequence: Synthetic oligonucleotide
uguaauucccacgugcuca

SEQ ID NO: 2975681 - RNA, 19 nt, Artificial Sequence
  Description of Artificial Sequence: Synthetic oligonucleotide
acugcuucauggcaggauc

SEQ ID NO: 2975682 - RNA, 19 nt, Artificial Sequence
  Description of Artificial Sequence: Synthetic oligonucleotide
augaaaugucuacacacug

SEQ ID NO: 2975683 - RNA, 19 nt, Artificial Sequence
  Description of Artificial Sequence: Synthetic oligonucleotide
uuggacucauccaaguaca

SEQ ID NO: 2975684 - RNA, 19 nt, Artificial Sequence
  Description of Artificial Sequence: Synthetic oligonucleotide
acaaaaugcucaugaaaug

SEQ ID NO: 2975685 - RNA, 19 nt, Artificial Sequence
  Description of Artificial Sequence: Synthetic oligonucleotide
augcucaugaaaugucuac

SEQ ID NO: 2975686 - RNA, 19 nt, Artificial Sequence
  Description of Artificial Sequence: Synthetic oligonucleotide
uugaccaucuucucccagg

SEQ ID NO: 2975687 - RNA, 19 nt, Artificial Sequence
  Description of Artificial Sequence: Synthetic oligonucleotide
auaagcacuccuuucaaaa

SEQ ID NO: 2975688 - RNA, 19 nt, Artificial Sequence
  Description of Artificial Sequence: Synthetic oligonucleotide
ugaaucaauggcccugcag

SEQ ID NO: 2975689 - RNA, 19 nt, Artificial Sequence
  Description of Artificial Sequence: Synthetic oligonucleotide
ucugugguuuguaauuccc

SEQ ID NO: 2975690 - RNA, 19 nt, Artificial Sequence
  Description of Artificial Sequence: Synthetic oligonucleotide
aucaguuggggcuuuuguc

SEQ ID NO: 2975691 - RNA, 19 nt, Artificial Sequence
  Description of Artificial Sequence: Synthetic oligonucleotide
aaucaguuggggcuuuugu

SEQ ID NO: 2975692 - RNA, 19 nt, Artificial Sequence
  Description of Artificial Sequence: Synthetic oligonucleotide
uaggagacucugaaugggg

SEQ ID NO: 2975693 - RNA, 19 nt, Artificial Sequence
  Description of Artificial Sequence: Synthetic oligonucleotide
aaggcauucugguccauca

SEQ ID NO: 2975694 - RNA, 19 nt, Artificial Sequence
  Description of Artificial Sequence: Synthetic oligonucleotide
uucacuucuggguaagaga

SEQ ID NO: 2975695 - RNA, 19 nt, Artificial Sequence
  Description of Artificial Sequence: Synthetic oligonucleotide
uggguaagagaaaaggcau

SEQ ID NO: 2975696 - RNA, 19 nt, Artificial Sequence
  Description of Artificial Sequence: Synthetic oligonucleotide
uugaaugaugaacuucuuc

SEQ ID NO: 2975697 - RNA, 19 nt, Artificial Sequence
  Description of Artificial Sequence: Synthetic oligonucleotide
ugugguuuguaauucccac

SEQ ID NO: 2975698 - RNA, 19 nt, Artificial Sequence
  Description of Artificial Sequence: Synthetic oligonucleotide
aagaacugcuucauggcag

SEQ ID NO: 2975699 - RNA, 19 nt, Artificial Sequence
  Description of Artificial Sequence: Synthetic oligonucleotide
caagaauguuuuccaagcg

SEQ ID NO: 2975700 - RNA, 19 nt, Artificial Sequence
  Description of Artificial Sequence: Synthetic oligonucleotide
cagccuucccacaaaaugc

SEQ ID NO: 2975701 - RNA, 19 nt, Artificial Sequence
  Description of Artificial Sequence: Synthetic oligonucleotide
uacagcaagaacugcuuca

SEQ ID NO: 2975702 - RNA, 19 nt, Artificial Sequence
  Description of Artificial Sequence: Synthetic oligonucleotide
aauucccacgugcucagca

SEQ ID NO: 2975703 - RNA, 19 nt, Artificial Sequence
  Description of Artificial Sequence: Synthetic oligonucleotide
aaacguugaccaucuucuc

SEQ ID NO: 2975704 - RNA, 19 nt, Artificial Sequence
  Description of Artificial Sequence: Synthetic oligonucleotide
agaacugcuucauggcagg

SEQ ID NO: 2975705 - RNA, 19 nt, Artificial Sequence
  Description of Artificial Sequence: Synthetic oligonucleotide
aaggcauuggacucaucca

SEQ ID NO: 2975706 - RNA, 19 nt, Artificial Sequence
  Description of Artificial Sequence: Synthetic oligonucleotide
ucauccaaguacagcaaga

SEQ ID NO: 2975707 - RNA, 19 nt, Artificial Sequence
  Description of Artificial Sequence: Synthetic oligonucleotide
gaucgcauucuauaagcac

SEQ ID NO: 2975708 - RNA, 19 nt, Artificial Sequence
  Description of Artificial Sequence: Synthetic oligonucleotide
caucaguuccccuacucgc

SEQ ID NO: 2975709 - RNA, 19 nt, Artificial Sequence
  Description of Artificial Sequence: Synthetic oligonucleotide
caaaacguugaccaucuuc

SEQ ID NO: 2975710 - RNA, 19 nt, Artificial Sequence
  Description of Artificial Sequence: Synthetic oligonucleotide
ucuacacacuguaggagac

SEQ ID NO: 2975711 - RNA, 19 nt, Artificial Sequence
  Description of Artificial Sequence: Synthetic oligonucleotide
uuucaaaacguugaccauc

SEQ ID NO: 2975712 - RNA, 19 nt, Artificial Sequence
  Description of Artificial Sequence: Synthetic oligonucleotide
aaaugcucaugaaaugucu

SEQ ID NO: 2975713 - RNA, 19 nt, Artificial Sequence
  Description of Artificial Sequence: Synthetic oligonucleotide
uuucacuucuggguaagag

SEQ ID NO: 2975714 - RNA, 19 nt, Artificial Sequence
  Description of Artificial Sequence: Synthetic oligonucleotide
uuccccaaggcauuggacu

SEQ ID NO: 2975715 - RNA, 19 nt, Artificial Sequence
  Description of Artificial Sequence: Synthetic oligonucleotide
cuggguaagagaaaaggca

SEQ ID NO: 2975716 - RNA, 19 nt, Artificial Sequence
  Description of Artificial Sequence: Synthetic oligonucleotide
gugguuuguaauucccacg

SEQ ID NO: 2975717 - RNA, 19 nt, Artificial Sequence
  Description of Artificial Sequence: Synthetic oligonucleotide
aucuugaaugaugaacuuc

SEQ ID NO: 2975718 - RNA, 19 nt, Artificial Sequence
  Description of Artificial Sequence: Synthetic oligonucleotide
aaguacagcaagaacugcu

SEQ ID NO: 2975719 - RNA, 19 nt, Artificial Sequence
  Description of Artificial Sequence: Synthetic oligonucleotide
uuuccaagcggcucagagc

SEQ ID NO: 2975720 - RNA, 19 nt, Artificial Sequence
  Description of Artificial Sequence: Synthetic oligonucleotide
uaagcacuccuuucaaaac

SEQ ID NO: 2975721 - RNA, 19 nt, Artificial Sequence
  Description of Artificial Sequence: Synthetic oligonucleotide
acaugugugucaucaauau

SEQ ID NO: 2975722 - RNA, 19 nt, Artificial Sequence
  Description of Artificial Sequence: Synthetic oligonucleotide
ugaccaucuucucccaggc

SEQ ID NO: 2975723 - RNA, 19 nt, Artificial Sequence
  Description of Artificial Sequence: Synthetic oligonucleotide
uucuauaagcacuccuuuc

SEQ ID NO: 2975724 - RNA, 19 nt, Artificial Sequence
  Description of Artificial Sequence: Synthetic oligonucleotide
ugucuacacacuguaggag

SEQ ID NO: 2975725 - RNA, 19 nt, Artificial Sequence
  Description of Artificial Sequence: Synthetic oligonucleotide
aacuucuuccccaaggcau

SEQ ID NO: 2975726 - RNA, 19 nt, Artificial Sequence
  Description of Artificial Sequence: Synthetic oligonucleotide
aaaugucuacacacuguag

SEQ ID NO: 2975727 - RNA, 19 nt, Artificial Sequence
  Description of Artificial Sequence: Synthetic oligonucleotide
aaaggcauucugguccauc

SEQ ID NO: 2975728 - RNA, 19 nt, Artificial Sequence
  Description of Artificial Sequence: Synthetic oligonucleotide
uggggcuuuugucugaauc

SEQ ID NO: 2975729 - RNA, 19 nt, Artificial Sequence
  Description of Artificial Sequence: Synthetic oligonucleotide
aggacauugaccagcuccg

SEQ ID NO: 2975730 - RNA, 19 nt, Artificial Sequence
  Description of Artificial Sequence: Synthetic oligonucleotide
uucugguccaucaguuccc

SEQ ID NO: 2975731 - RNA, 19 nt, Artificial Sequence
  Description of Artificial Sequence: Synthetic oligonucleotide
uauaagcacuccuuucaaa

SEQ ID NO: 2975732 - RNA, 19 nt, Artificial Sequence
  Description of Artificial Sequence: Synthetic oligonucleotide
aucgcauucuauaagcacu

SEQ ID NO: 2975733 - RNA, 19 nt, Artificial Sequence
  Description of Artificial Sequence: Synthetic oligonucleotide
auguuuuccaagcggcuca

SEQ ID NO: 2975734 - RNA, 19 nt, Artificial Sequence
  Description of Artificial Sequence: Synthetic oligonucleotide
cacaaaaugcucaugaaau

SEQ ID NO: 2975735 - RNA, 19 nt, Artificial Sequence
  Description of Artificial Sequence: Synthetic oligonucleotide
gagaaaaggcauucugguc

SEQ ID NO: 2975736 - RNA, 19 nt, Artificial Sequence
  Description of Artificial Sequence: Synthetic oligonucleotide
uauuuucacuucuggguaa

SEQ ID NO: 2975737 - RNA, 19 nt, Artificial Sequence
  Description of Artificial Sequence: Synthetic oligonucleotide
ucugaaucaauggcccugc

SEQ ID NO: 2975738 - RNA, 19 nt, Artificial Sequence
  Description of Artificial Sequence: Synthetic oligonucleotide
uccuuucaaaacguugacc

SEQ ID NO: 2975739 - RNA, 19 nt, Artificial Sequence
  Description of Artificial Sequence: Synthetic oligonucleotide
auucuauaagcacuccuuu

SEQ ID NO: 2975740 - RNA, 19 nt, Artificial Sequence
  Description of Artificial Sequence: Synthetic oligonucleotide
ccuuucaaaacguugacca

SEQ ID NO: 2975741 - RNA, 19 nt, Artificial Sequence
  Description of Artificial Sequence: Synthetic oligonucleotide
acuccuuucaaaacguuga

SEQ ID NO: 2975742 - RNA, 19 nt, Artificial Sequence
  Description of Artificial Sequence: Synthetic oligonucleotide
cacuccuuucaaaacguug

SEQ ID NO: 2975743 - RNA, 19 nt, Artificial Sequence
  Description of Artificial Sequence: Synthetic oligonucleotide
agcuaguauuuucacuucu

SEQ ID NO: 2975744 - RNA, 19 nt, Artificial Sequence
  Description of Artificial Sequence: Synthetic oligonucleotide
ugcucaugaaaugucuaca

SEQ ID NO: 2975745 - RNA, 19 nt, Artificial Sequence
  Description of Artificial Sequence: Synthetic oligonucleotide
cucauccaaguacagcaag

SEQ ID NO: 2975746 - RNA, 19 nt, Artificial Sequence
  Description of Artificial Sequence: Synthetic oligonucleotide
gaaaaggcauucuggucca

SEQ ID NO: 2975747 - RNA, 19 nt, Artificial Sequence
  Description of Artificial Sequence: Synthetic oligonucleotide
aggagacucugaauggggc

SEQ ID NO: 2975748 - RNA, 19 nt, Artificial Sequence
  Description of Artificial Sequence: Synthetic oligonucleotide
ucgcauucuauaagcacuc

SEQ ID NO: 2975749 - RNA, 19 nt, Artificial Sequence
  Description of Artificial Sequence: Synthetic oligonucleotide
guauuuucacuucugggua

SEQ ID NO: 2975750 - RNA, 19 nt, Artificial Sequence
  Description of Artificial Sequence: Synthetic oligonucleotide
uuccccuacucgcuccugg

SEQ ID NO: 2975751 - RNA, 19 nt, Artificial Sequence
  Description of Artificial Sequence: Synthetic oligonucleotide
guaauucccacgugcucag

SEQ ID NO: 2975752 - RNA, 19 nt, Artificial Sequence
  Description of Artificial Sequence: Synthetic oligonucleotide
ugacaaacacauguguguc

SEQ ID NO: 2975753 - RNA, 19 nt, Artificial Sequence
  Description of Artificial Sequence: Synthetic oligonucleotide
acauugaccagcuccgcaa

SEQ ID NO: 2975754 - RNA, 19 nt, Artificial Sequence
  Description of Artificial Sequence: Synthetic oligonucleotide
agcagcuaguauuuucacu

SEQ ID NO: 2975755 - RNA, 19 nt, Artificial Sequence
  Description of Artificial Sequence: Synthetic oligonucleotide
ucuuccccaaggcauugga

SEQ ID NO: 2975756 - RNA, 19 nt, Artificial Sequence
  Description of Artificial Sequence: Synthetic oligonucleotide
ugcagacgaagucaagaau

SEQ ID NO: 2975757 - RNA, 19 nt, Artificial Sequence
  Description of Artificial Sequence: Synthetic oligonucleotide
gucuacacacuguaggaga

SEQ ID NO: 2975758 - RNA, 19 nt, Artificial Sequence
  Description of Artificial Sequence: Synthetic oligonucleotide
augucugugguuuguaauu

SEQ ID NO: 2975759 - RNA, 19 nt, Artificial Sequence
  Description of Artificial Sequence: Synthetic oligonucleotide
gcagacgaagucaagaaug

SEQ ID NO: 2975760 - RNA, 19 nt, Artificial Sequence
  Description of Artificial Sequence: Synthetic oligonucleotide
uggacucauccaaguacag

SEQ ID NO: 2975761 - RNA, 19 nt, Artificial Sequence
  Description of Artificial Sequence: Synthetic oligonucleotide
acuucuggguaagagaaaa

SEQ ID NO: 2975762 - RNA, 19 nt, Artificial Sequence
  Description of Artificial Sequence: Synthetic oligonucleotide
agguggugcagacgaaguc

SEQ ID NO: 2975763 - RNA, 19 nt, Artificial Sequence
  Description of Artificial Sequence: Synthetic oligonucleotide
aggcagguggugcagacga

SEQ ID NO: 2975764 - RNA, 19 nt, Artificial Sequence
  Description of Artificial Sequence: Synthetic oligonucleotide
cugcuucauggcaggaucg

SEQ ID NO: 2975765 - RNA, 19 nt, Artificial Sequence
  Description of Artificial Sequence: Synthetic oligonucleotide
ugucaucaauaucuugaau

SEQ ID NO: 2975766 - RNA, 19 nt, Artificial Sequence
  Description of Artificial Sequence: Synthetic oligonucleotide
acacaugugugucaucaau

SEQ ID NO: 2975767 - RNA, 19 nt, Artificial Sequence
  Description of Artificial Sequence: Synthetic oligonucleotide
gacaaacacauguguguca

SEQ ID NO: 2975768 - RNA, 19 nt, Artificial Sequence
  Description of Artificial Sequence: Synthetic oligonucleotide
aggcauuggacucauccaa

SEQ ID NO: 2975769 - RNA, 19 nt, Artificial Sequence
  Description of Artificial Sequence: Synthetic oligonucleotide
uuguaauucccacgugcuc

SEQ ID NO: 2975770 - RNA, 19 nt, Artificial Sequence
  Description of Artificial Sequence: Synthetic oligonucleotide
uggaggacauugaccagcu

SEQ ID NO: 2975771 - RNA, 19 nt, Artificial Sequence
  Description of Artificial Sequence: Synthetic oligonucleotide
auucccacgugcucagcag

SEQ ID NO: 2975772 - RNA, 19 nt, Artificial Sequence
  Description of Artificial Sequence: Synthetic oligonucleotide
aaaucaguuggggcuuuug

SEQ ID NO: 2975773 - RNA, 19 nt, Artificial Sequence
  Description of Artificial Sequence: Synthetic oligonucleotide
ugugugucaucaauaucuu

SEQ ID NO: 2975774 - RNA, 19 nt, Artificial Sequence
  Description of Artificial Sequence: Synthetic oligonucleotide
ucucucaugucugugguuu

SEQ ID NO: 2975775 - RNA, 19 nt, Artificial Sequence
  Description of Artificial Sequence: Synthetic oligonucleotide
cuggaggacauugaccagc

SEQ ID NO: 2975776 - RNA, 19 nt, Artificial Sequence
  Description of Artificial Sequence: Synthetic oligonucleotide
gcagccuucccacaaaaug

SEQ ID NO: 2975777 - RNA, 19 nt, Artificial Sequence
  Description of Artificial Sequence: Synthetic oligonucleotide
ugcucagcagcuaguauuu

SEQ ID NO: 2975778 - RNA, 19 nt, Artificial Sequence
  Description of Artificial Sequence: Synthetic oligonucleotide
caggaucgcauucuauaag

SEQ ID NO: 2975779 - RNA, 19 nt, Artificial Sequence
  Description of Artificial Sequence: Synthetic oligonucleotide
cuccuggaggacauugacc

SEQ ID NO: 2975780 - RNA, 19 nt, Artificial Sequence
  Description of Artificial Sequence: Synthetic oligonucleotide
aauggcccugcagccuucc

SEQ ID NO: 2975781 - RNA, 19 nt, Artificial Sequence
  Description of Artificial Sequence: Synthetic oligonucleotide
cucagcagcuaguauuuuc

SEQ ID NO: 2975782 - RNA, 19 nt, Artificial Sequence
  Description of Artificial Sequence: Synthetic oligonucleotide
cuucuggguaagagaaaag

SEQ ID NO: 2975783 - RNA, 19 nt, Artificial Sequence
  Description of Artificial Sequence: Synthetic oligonucleotide
agucaagaauguuuuccaa

SEQ ID NO: 2975784 - RNA, 19 nt, Artificial Sequence
  Description of Artificial Sequence: Synthetic oligonucleotide
uugaccagcuccgcaauga

SEQ ID NO: 2975785 - RNA, 19 nt, Artificial Sequence
  Description of Artificial Sequence: Synthetic oligonucleotide
uacacacuguaggagacuc

SEQ ID NO: 2975786 - RNA, 19 nt, Artificial Sequence
  Description of Artificial Sequence: Synthetic oligonucleotide
ugaugaacuucuuccccaa

SEQ ID NO: 2975787 - RNA, 19 nt, Artificial Sequence
  Description of Artificial Sequence: Synthetic oligonucleotide
ccaaguacagcaagaacug

SEQ ID NO: 2975788 - RNA, 19 nt, Artificial Sequence
  Description of Artificial Sequence: Synthetic oligonucleotide
aacacaugugugucaucaa

SEQ ID NO: 2975789 - RNA, 19 nt, Artificial Sequence
  Description of Artificial Sequence: Synthetic oligonucleotide
gcuuuugucugaaucaaug

SEQ ID NO: 2975790 - RNA, 19 nt, Artificial Sequence
  Description of Artificial Sequence: Synthetic oligonucleotide
uaucuugaaugaugaacuu

SEQ ID NO: 2975791 - RNA, 19 nt, Artificial Sequence
  Description of Artificial Sequence: Synthetic oligonucleotide
uucccacgugcucagcagc

SEQ ID NO: 2975792 - RNA, 19 nt, Artificial Sequence
  Description of Artificial Sequence: Synthetic oligonucleotide
cacacuguaggagacucug

SEQ ID NO: 2975793 - RNA, 19 nt, Artificial Sequence
  Description of Artificial Sequence: Synthetic oligonucleotide
aaugcucaugaaaugucua

SEQ ID NO: 2975794 - RNA, 19 nt, Artificial Sequence
  Description of Artificial Sequence: Synthetic oligonucleotide
ugguccaucaguuccccua

SEQ ID NO: 2975795 - RNA, 19 nt, Artificial Sequence
  Description of Artificial Sequence: Synthetic oligonucleotide
ugaauggggccucucucau

SEQ ID NO: 2975796 - RNA, 19 nt, Artificial Sequence
  Description of Artificial Sequence: Synthetic oligonucleotide
gcaagaacugcuucauggc

SEQ ID NO: 2975797 - RNA, 19 nt, Artificial Sequence
  Description of Artificial Sequence: Synthetic oligonucleotide
gacauugaccagcuccgca

SEQ ID NO: 2975798 - RNA, 19 nt, Artificial Sequence
  Description of Artificial Sequence: Synthetic oligonucleotide
ugucugaaucaauggcccu

SEQ ID NO: 2975799 - RNA, 19 nt, Artificial Sequence
  Description of Artificial Sequence: Synthetic oligonucleotide
cucaugaaaugucuacaca

SEQ ID NO: 2975800 - RNA, 19 nt, Artificial Sequence
  Description of Artificial Sequence: Synthetic oligonucleotide
gguaagagaaaaggcauuc

SEQ ID NO: 2975801 - RNA, 19 nt, Artificial Sequence
  Description of Artificial Sequence: Synthetic oligonucleotide
uggggccucucucaugucu

SEQ ID NO: 2975802 - RNA, 19 nt, Artificial Sequence
  Description of Artificial Sequence: Synthetic oligonucleotide
ucaauggcccugcagccuu

SEQ ID NO: 2975803 - RNA, 19 nt, Artificial Sequence
  Description of Artificial Sequence: Synthetic oligonucleotide
gcucaugaaaugucuacac

SEQ ID NO: 2975804 - RNA, 19 nt, Artificial Sequence
  Description of Artificial Sequence: Synthetic oligonucleotide
caugugugucaucaauauc

SEQ ID NO: 2975805 - RNA, 19 nt, Artificial Sequence
  Description of Artificial Sequence: Synthetic oligonucleotide
acgaagucaagaauguuuu

SEQ ID NO: 2975806 - RNA, 19 nt, Artificial Sequence
  Description of Artificial Sequence: Synthetic oligonucleotide
cuccuuucaaaacguugac

SEQ ID NO: 2975807 - RNA, 19 nt, Artificial Sequence
  Description of Artificial Sequence: Synthetic oligonucleotide
auugaccagcuccgcaaug

SEQ ID NO: 2975808 - RNA, 19 nt, Artificial Sequence
  Description of Artificial Sequence: Synthetic oligonucleotide
uguuuuccaagcggcucag

SEQ ID NO: 2975809 - RNA, 19 nt, Artificial Sequence
  Description of Artificial Sequence: Synthetic oligonucleotide
uccccaaggcauuggacuc

SEQ ID NO: 2975810 - RNA, 19 nt, Artificial Sequence
  Description of Artificial Sequence: Synthetic oligonucleotide
caaaaugcucaugaaaugu

SEQ ID NO: 2975811 - RNA, 19 nt, Artificial Sequence
  Description of Artificial Sequence: Synthetic oligonucleotide
ucaguuccccuacucgcuc

SEQ ID NO: 2975812 - RNA, 19 nt, Artificial Sequence
  Description of Artificial Sequence: Synthetic oligonucleotide
gucugaaucaauggcccug

SEQ ID NO: 2975813 - RNA, 19 nt, Artificial Sequence
  Description of Artificial Sequence: Synthetic oligonucleotide
accagcuccgcaaugacaa

SEQ ID NO: 2975814 - RNA, 19 nt, Artificial Sequence
  Description of Artificial Sequence: Synthetic oligonucleotide
ucauggcaggaucgcauuc

SEQ ID NO: 2975815 - RNA, 19 nt, Artificial Sequence
  Description of Artificial Sequence: Synthetic oligonucleotide
caugaaaugucuacacacu

SEQ ID NO: 2975816 - RNA, 19 nt, Artificial Sequence
  Description of Artificial Sequence: Synthetic oligonucleotide
ggagacucugaauggggcc

SEQ ID NO: 2975817 - RNA, 19 nt, Artificial Sequence
  Description of Artificial Sequence: Synthetic oligonucleotide
caaguacagcaagaacugc

SEQ ID NO: 2975818 - RNA, 19 nt, Artificial Sequence
  Description of Artificial Sequence: Synthetic oligonucleotide
gugugucaucaauaucuug

SEQ ID NO: 2975819 - RNA, 19 nt, Artificial Sequence
  Description of Artificial Sequence: Synthetic oligonucleotide
ugaccagcuccgcaaugac

SEQ ID NO: 2975820 - RNA, 19 nt, Artificial Sequence
  Description of Artificial Sequence: Synthetic oligonucleotide
gcaaugacaaacacaugug

SEQ ID NO: 2975821 - RNA, 19 nt, Artificial Sequence
  Description of Artificial Sequence: Synthetic oligonucleotide
ucucccaggcagguggugc

SEQ ID NO: 2975822 - RNA, 19 nt, Artificial Sequence
  Description of Artificial Sequence: Synthetic oligonucleotide
gugucaucaauaucuugaa

SEQ ID NO: 2975823 - RNA, 19 nt, Artificial Sequence
  Description of Artificial Sequence: Synthetic oligonucleotide
guugaccaucuucucccag

SEQ ID NO: 2975824 - RNA, 19 nt, Artificial Sequence
  Description of Artificial Sequence: Synthetic oligonucleotide
aggcauucugguccaucag

SEQ ID NO: 2975825 - RNA, 19 nt, Artificial Sequence
  Description of Artificial Sequence: Synthetic oligonucleotide
cuuccccaaggcauuggac

SEQ ID NO: 2975826 - RNA, 19 nt, Artificial Sequence
  Description of Artificial Sequence: Synthetic oligonucleotide
ugcuucauggcaggaucgc

SEQ ID NO: 2975827 - RNA, 19 nt, Artificial Sequence
  Description of Artificial Sequence: Synthetic oligonucleotide
caguuggggcuuuugucug

SEQ ID NO: 2975828 - RNA, 19 nt, Artificial Sequence
  Description of Artificial Sequence: Synthetic oligonucleotide
uucauggcaggaucgcauu

SEQ ID NO: 2975829 - RNA, 19 nt, Artificial Sequence
  Description of Artificial Sequence: Synthetic oligonucleotide
gacgaagucaagaauguuu

SEQ ID NO: 2975830 - RNA, 19 nt, Artificial Sequence
  Description of Artificial Sequence: Synthetic oligonucleotide
ggggcuuuugucugaauca

SEQ ID NO: 2975831 - RNA, 19 nt, Artificial Sequence
  Description of Artificial Sequence: Synthetic oligonucleotide
guacagcaagaacugcuuc

SEQ ID NO: 2975832 - RNA, 19 nt, Artificial Sequence
  Description of Artificial Sequence: Synthetic oligonucleotide
aacugcuucauggcaggau

SEQ ID NO: 2975833 - RNA, 19 nt, Artificial Sequence
  Description of Artificial Sequence: Synthetic oligonucleotide
ccaucaguuccccuacucg

SEQ ID NO: 2975834 - RNA, 19 nt, Artificial Sequence
  Description of Artificial Sequence: Synthetic oligonucleotide
agcacuccuuucaaaacgu

SEQ ID NO: 2975835 - RNA, 19 nt, Artificial Sequence
  Description of Artificial Sequence: Synthetic oligonucleotide
ucccacgugcucagcagcu

SEQ ID NO: 2975836 - RNA, 19 nt, Artificial Sequence
  Description of Artificial Sequence: Synthetic oligonucleotide
gaauggggccucucucaug

SEQ ID NO: 2975837 - RNA, 19 nt, Artificial Sequence
  Description of Artificial Sequence: Synthetic oligonucleotide
acagcaagaacugcuucau

SEQ ID NO: 2975838 - RNA, 19 nt, Artificial Sequence
  Description of Artificial Sequence: Synthetic oligonucleotide
cauucuauaagcacuccuu

SEQ ID NO: 2975839 - RNA, 19 nt, Artificial Sequence
  Description of Artificial Sequence: Synthetic oligonucleotide
cacaugugugucaucaaua

SEQ ID NO: 2975840 - RNA, 19 nt, Artificial Sequence
  Description of Artificial Sequence: Synthetic oligonucleotide
ucucaugucugugguuugu

SEQ ID NO: 2975841 - RNA, 19 nt, Artificial Sequence
  Description of Artificial Sequence: Synthetic oligonucleotide
gugcagacgaagucaagaa

SEQ ID NO: 2975842 - RNA, 19 nt, Artificial Sequence
  Description of Artificial Sequence: Synthetic oligonucleotide
uucuuccccaaggcauugg

SEQ ID NO: 2975843 - RNA, 19 nt, Artificial Sequence
  Description of Artificial Sequence: Synthetic oligonucleotide
cugugguuuguaauuccca

SEQ ID NO: 2975844 - RNA, 19 nt, Artificial Sequence
  Description of Artificial Sequence: Synthetic oligonucleotide
gccucucucaugucugugg

SEQ ID NO: 2975845 - RNA, 19 nt, Artificial Sequence
  Description of Artificial Sequence: Synthetic oligonucleotide
aguacagcaagaacugcuu

SEQ ID NO: 2975846 - RNA, 19 nt, Artificial Sequence
  Description of Artificial Sequence: Synthetic oligonucleotide
cuauaagcacuccuuucaa

SEQ ID NO: 2975847 - RNA, 19 nt, Artificial Sequence
  Description of Artificial Sequence: Synthetic oligonucleotide
uggugcagacgaagucaag

SEQ ID NO: 2975848 - RNA, 19 nt, Artificial Sequence
  Description of Artificial Sequence: Synthetic oligonucleotide
cagcuaguauuuucacuuc

SEQ ID NO: 2975849 - RNA, 19 nt, Artificial Sequence
  Description of Artificial Sequence: Synthetic oligonucleotide
cacuguaggagacucugaa

SEQ ID NO: 2975850 - RNA, 19 nt, Artificial Sequence
  Description of Artificial Sequence: Synthetic oligonucleotide
uuuucacuucuggguaaga

SEQ ID NO: 2975851 - RNA, 19 nt, Artificial Sequence
  Description of Artificial Sequence: Synthetic oligonucleotide
gcuaguauuuucacuucug

SEQ ID NO: 2975852 - RNA, 19 nt, Artificial Sequence
  Description of Artificial Sequence: Synthetic oligonucleotide
cagcagcuaguauuuucac

SEQ ID NO: 2975853 - RNA, 19 nt, Artificial Sequence
  Description of Artificial Sequence: Synthetic oligonucleotide
ggugcagacgaagucaaga

SEQ ID NO: 2975854 - RNA, 19 nt, Artificial Sequence
  Description of Artificial Sequence: Synthetic oligonucleotide
gcagcuaguauuuucacuu

SEQ ID NO: 2975855 - RNA, 19 nt, Artificial Sequence
  Description of Artificial Sequence: Synthetic oligonucleotide
ugcagccuucccacaaaau

SEQ ID NO: 2975856 - RNA, 19 nt, Artificial Sequence
  Description of Artificial Sequence: Synthetic oligonucleotide
agccuucccacaaaaugcu

SEQ ID NO: 2975857 - RNA, 19 nt, Artificial Sequence
  Description of Artificial Sequence: Synthetic oligonucleotide
caguuccccuacucgcucc

SEQ ID NO: 2975858 - RNA, 19 nt, Artificial Sequence
  Description of Artificial Sequence: Synthetic oligonucleotide
aucaguuccccuacucgcu

SEQ ID NO: 2975859 - RNA, 19 nt, Artificial Sequence
  Description of Artificial Sequence: Synthetic oligonucleotide
cucucaugucugugguuug

SEQ ID NO: 2975860 - RNA, 19 nt, Artificial Sequence
  Description of Artificial Sequence: Synthetic oligonucleotide
gguggugcagacgaaguca

SEQ ID NO: 2975861 - RNA, 19 nt, Artificial Sequence
  Description of Artificial Sequence: Synthetic oligonucleotide
gguuuguaauucccacgug

SEQ ID NO: 2975862 - RNA, 19 nt, Artificial Sequence
  Description of Artificial Sequence: Synthetic oligonucleotide
aguuccccuacucgcuccu

SEQ ID NO: 2975863 - RNA, 19 nt, Artificial Sequence
  Description of Artificial Sequence: Synthetic oligonucleotide
agacucugaauggggccuc

SEQ ID NO: 2975864 - RNA, 19 nt, Artificial Sequence
  Description of Artificial Sequence: Synthetic oligonucleotide
agcuccgcaaugacaaaca

SEQ ID NO: 2975865 - RNA, 19 nt, Artificial Sequence
  Description of Artificial Sequence: Synthetic oligonucleotide
uccccuacucgcuccugga

SEQ ID NO: 2975866 - RNA, 19 nt, Artificial Sequence
  Description of Artificial Sequence: Synthetic oligonucleotide
aucaauggcccugcagccu

SEQ ID NO: 2975867 - RNA, 19 nt, Artificial Sequence
  Description of Artificial Sequence: Synthetic oligonucleotide
uucccacaaaaugcucaug

SEQ ID NO: 2975868 - RNA, 19 nt, Artificial Sequence
  Description of Artificial Sequence: Synthetic oligonucleotide
cagcuccgcaaugacaaac

SEQ ID NO: 2975869 - RNA, 19 nt, Artificial Sequence
  Description of Artificial Sequence: Synthetic oligonucleotide
agcggcucagagccugcag

SEQ ID NO: 2975870 - RNA, 19 nt, Artificial Sequence
  Description of Artificial Sequence: Synthetic oligonucleotide
cagacgaagucaagaaugu

SEQ ID NO: 2975871 - RNA, 19 nt, Artificial Sequence
  Description of Artificial Sequence: Synthetic oligonucleotide
caauaucuugaaugaugaa

SEQ ID NO: 2975872 - RNA, 19 nt, Artificial Sequence
  Description of Artificial Sequence: Synthetic oligonucleotide
ggcaggaucgcauucuaua

SEQ ID NO: 2975873 - RNA, 19 nt, Artificial Sequence
  Description of Artificial Sequence: Synthetic oligonucleotide
ggcauuggacucauccaag

SEQ ID NO: 2975874 - RNA, 19 nt, Artificial Sequence
  Description of Artificial Sequence: Synthetic oligonucleotide
gguccaucaguuccccuac

SEQ ID NO: 2975875 - RNA, 19 nt, Artificial Sequence
  Description of Artificial Sequence: Synthetic oligonucleotide
cccuacucgcuccuggagg

SEQ ID NO: 2975876 - RNA, 19 nt, Artificial Sequence
  Description of Artificial Sequence: Synthetic oligonucleotide
ggacucauccaaguacagc

SEQ ID NO: 2975877 - RNA, 19 nt, Artificial Sequence
  Description of Artificial Sequence: Synthetic oligonucleotide
gagacucugaauggggccu

SEQ ID NO: 2975878 - RNA, 19 nt, Artificial Sequence
  Description of Artificial Sequence: Synthetic oligonucleotide
cauuggacucauccaagua

SEQ ID NO: 2975879 - RNA, 19 nt, Artificial Sequence
  Description of Artificial Sequence: Synthetic oligonucleotide
uggcaggaucgcauucuau

SEQ ID NO: 2975880 - RNA, 19 nt, Artificial Sequence
  Description of Artificial Sequence: Synthetic oligonucleotide
gcaggaucgcauucuauaa

SEQ ID NO: 2975881 - RNA, 19 nt, Artificial Sequence
  Description of Artificial Sequence: Synthetic oligonucleotide
cagcaagaacugcuucaug

SEQ ID NO: 2975882 - RNA, 19 nt, Artificial Sequence
  Description of Artificial Sequence: Synthetic oligonucleotide
ccuucccacaaaaugcuca

SEQ ID NO: 2975883 - RNA, 19 nt, Artificial Sequence
  Description of Artificial Sequence: Synthetic oligonucleotide
gugcucagcagcuaguauu

SEQ ID NO: 2975884 - RNA, 19 nt, Artificial Sequence
  Description of Artificial Sequence: Synthetic oligonucleotide
guaagagaaaaggcauucu

SEQ ID NO: 2975885 - RNA, 19 nt, Artificial Sequence
  Description of Artificial Sequence: Synthetic oligonucleotide
cgcaaugacaaacacaugu

SEQ ID NO: 2975886 - RNA, 19 nt, Artificial Sequence
  Description of Artificial Sequence: Synthetic oligonucleotide
auggcaggaucgcauucua

SEQ ID NO: 2975887 - RNA, 19 nt, Artificial Sequence
  Description of Artificial Sequence: Synthetic oligonucleotide
ccacaaaaugcucaugaaa

SEQ ID NO: 2975888 - RNA, 19 nt, Artificial Sequence
  Description of Artificial Sequence: Synthetic oligonucleotide
gcuccuggaggacauugac

SEQ ID NO: 2975889 - RNA, 19 nt, Artificial Sequence
  Description of Artificial Sequence: Synthetic oligonucleotide
ucaaaacguugaccaucuu

SEQ ID NO: 2975890 - RNA, 19 nt, Artificial Sequence
  Description of Artificial Sequence: Synthetic oligonucleotide
gcggcucagagccugcagc

SEQ ID NO: 2975891 - RNA, 19 nt, Artificial Sequence
  Description of Artificial Sequence: Synthetic oligonucleotide
uaauucccacgugcucagc

SEQ ID NO: 2975892 - RNA, 19 nt, Artificial Sequence
  Description of Artificial Sequence: Synthetic oligonucleotide
caagcggcucagagccugc

SEQ ID NO: 2975893 - RNA, 19 nt, Artificial Sequence
  Description of Artificial Sequence: Synthetic oligonucleotide
acucauccaaguacagcaa

SEQ ID NO: 2975894 - RNA, 19 nt, Artificial Sequence
  Description of Artificial Sequence: Synthetic oligonucleotide
cuucauggcaggaucgcau

SEQ ID NO: 2975895 - RNA, 19 nt, Artificial Sequence
  Description of Artificial Sequence: Synthetic oligonucleotide
gaccaucuucucccaggca

SEQ ID NO: 2975896 - RNA, 19 nt, Artificial Sequence
  Description of Artificial Sequence: Synthetic oligonucleotide
acucugaauggggccucuc

SEQ ID NO: 2975897 - RNA, 19 nt, Artificial Sequence
  Description of Artificial Sequence: Synthetic oligonucleotide
uccaagcggcucagagccu

SEQ ID NO: 2975898 - RNA, 19 nt, Artificial Sequence
  Description of Artificial Sequence: Synthetic oligonucleotide
caggcagguggugcagacg

SEQ ID NO: 2975899 - RNA, 19 nt, Artificial Sequence
  Description of Artificial Sequence: Synthetic oligonucleotide
ggaucgcauucuauaagca

SEQ ID NO: 2975900 - RNA, 19 nt, Artificial Sequence
  Description of Artificial Sequence: Synthetic oligonucleotide
agacgaagucaagaauguu

SEQ ID NO: 2975901 - RNA, 19 nt, Artificial Sequence
  Description of Artificial Sequence: Synthetic oligonucleotide
aaaaggcauucugguccau

SEQ ID NO: 2975902 - RNA, 19 nt, Artificial Sequence
  Description of Artificial Sequence: Synthetic oligonucleotide
auggggccucucucauguc

SEQ ID NO: 2975903 - RNA, 19 nt, Artificial Sequence
  Description of Artificial Sequence: Synthetic oligonucleotide
gcauucuauaagcacuccu

SEQ ID NO: 2975904 - RNA, 19 nt, Artificial Sequence
  Description of Artificial Sequence: Synthetic oligonucleotide
gcuccgcaaugacaaacac

SEQ ID NO: 2975905 - RNA, 19 nt, Artificial Sequence
  Description of Artificial Sequence: Synthetic oligonucleotide
guggugcagacgaagucaa

SEQ ID NO: 2975906 - RNA, 19 nt, Artificial Sequence
  Description of Artificial Sequence: Synthetic oligonucleotide
ggcauucugguccaucagu

SEQ ID NO: 2975907 - RNA, 19 nt, Artificial Sequence
  Description of Artificial Sequence: Synthetic oligonucleotide
acacuguaggagacucuga

SEQ ID NO: 2975908 - RNA, 19 nt, Artificial Sequence
  Description of Artificial Sequence: Synthetic oligonucleotide
aagcggcucagagccugca

SEQ ID NO: 2975909 - RNA, 19 nt, Artificial Sequence
  Description of Artificial Sequence: Synthetic oligonucleotide
uucucccaggcagguggug

SEQ ID NO: 2975910 - RNA, 19 nt, Artificial Sequence
  Description of Artificial Sequence: Synthetic oligonucleotide
aucuucucccaggcaggug

SEQ ID NO: 2975911 - RNA, 19 nt, Artificial Sequence
  Description of Artificial Sequence: Synthetic oligonucleotide
ccacgugcucagcagcuag

SEQ ID NO: 2975912 - RNA, 19 nt, Artificial Sequence
  Description of Artificial Sequence: Synthetic oligonucleotide
acacacuguaggagacucu

SEQ ID NO: 2975913 - RNA, 19 nt, Artificial Sequence
  Description of Artificial Sequence: Synthetic oligonucleotide
ccuacucgcuccuggagga

SEQ ID NO: 2975914 - RNA, 19 nt, Artificial Sequence
  Description of Artificial Sequence: Synthetic oligonucleotide
cauggcaggaucgcauucu

SEQ ID NO: 2975915 - RNA, 19 nt, Artificial Sequence
  Description of Artificial Sequence: Synthetic oligonucleotide
cagguggugcagacgaagu

SEQ ID NO: 2975916 - RNA, 19 nt, Artificial Sequence
  Description of Artificial Sequence: Synthetic oligonucleotide
gcauuggacucauccaagu

SEQ ID NO: 2975917 - RNA, 19 nt, Artificial Sequence
  Description of Artificial Sequence: Synthetic oligonucleotide
cugaaucaauggcccugca

SEQ ID NO: 2975918 - RNA, 19 nt, Artificial Sequence
  Description of Artificial Sequence: Synthetic oligonucleotide
cuugaaugaugaacuucuu

SEQ ID NO: 2975919 - RNA, 19 nt, Artificial Sequence
  Description of Artificial Sequence: Synthetic oligonucleotide
caauggcccugcagccuuc

SEQ ID NO: 2975920 - RNA, 19 nt, Artificial Sequence
  Description of Artificial Sequence: Synthetic oligonucleotide
caucaauaucuugaaugau

SEQ ID NO: 2975921 - RNA, 19 nt, Artificial Sequence
  Description of Artificial Sequence: Synthetic oligonucleotide
uuggggcuuuugucugaau

SEQ ID NO: 2975922 - RNA, 19 nt, Artificial Sequence
  Description of Artificial Sequence: Synthetic oligonucleotide
cugcagccuucccacaaaa

SEQ ID NO: 2975923 - RNA, 19 nt, Artificial Sequence
  Description of Artificial Sequence: Synthetic oligonucleotide
guuggggcuuuugucugaa

SEQ ID NO: 2975924 - RNA, 19 nt, Artificial Sequence
  Description of Artificial Sequence: Synthetic oligonucleotide
gggcuuuugucugaaucaa

SEQ ID NO: 2975925 - RNA, 19 nt, Artificial Sequence
  Description of Artificial Sequence: Synthetic oligonucleotide
ggacauugaccagcuccgc

SEQ ID NO: 2975926 - RNA, 19 nt, Artificial Sequence
  Description of Artificial Sequence: Synthetic oligonucleotide
cuacucgcuccuggaggac

SEQ ID NO: 2975927 - RNA, 19 nt, Artificial Sequence
  Description of Artificial Sequence: Synthetic oligonucleotide
cgaagucaagaauguuuuc

SEQ ID NO: 2975928 - RNA, 19 nt, Artificial Sequence
  Description of Artificial Sequence: Synthetic oligonucleotide
ccaagcggcucagagccug

SEQ ID NO: 2975929 - RNA, 19 nt, Artificial Sequence
  Description of Artificial Sequence: Synthetic oligonucleotide
cccacaaaaugcucaugaa

SEQ ID NO: 2975930 - RNA, 19 nt, Artificial Sequence
  Description of Artificial Sequence: Synthetic oligonucleotide
cucaugucugugguuugua

SEQ ID NO: 2975931 - RNA, 19 nt, Artificial Sequence
  Description of Artificial Sequence: Synthetic oligonucleotide
gcuucauggcaggaucgca

SEQ ID NO: 2975932 - RNA, 19 nt, Artificial Sequence
  Description of Artificial Sequence: Synthetic oligonucleotide
cauugaccagcuccgcaau

SEQ ID NO: 2975933 - RNA, 19 nt, Artificial Sequence
  Description of Artificial Sequence: Synthetic oligonucleotide
guuccccuacucgcuccug

SEQ ID NO: 2975934 - RNA, 19 nt, Artificial Sequence
  Description of Artificial Sequence: Synthetic oligonucleotide
cuacacacuguaggagacu

SEQ ID NO: 2975935 - RNA, 19 nt, Artificial Sequence
  Description of Artificial Sequence: Synthetic oligonucleotide
ccccuacucgcuccuggag

SEQ ID NO: 2975936 - RNA, 19 nt, Artificial Sequence
  Description of Artificial Sequence: Synthetic oligonucleotide
ccgcaaugacaaacacaug

SEQ ID NO: 2975937 - RNA, 19 nt, Artificial Sequence
  Description of Artificial Sequence: Synthetic oligonucleotide
cacgugcucagcagcuagu

SEQ ID NO: 2975938 - RNA, 19 nt, Artificial Sequence
  Description of Artificial Sequence: Synthetic oligonucleotide
ggaggacauugaccagcuc

SEQ ID NO: 2975939 - RNA, 19 nt, Artificial Sequence
  Description of Artificial Sequence: Synthetic oligonucleotide
cgcauucuauaagcacucc

SEQ ID NO: 2975940 - RNA, 19 nt, Artificial Sequence
  Description of Artificial Sequence: Synthetic oligonucleotide
cuucucccaggcagguggu

SEQ ID NO: 2975941 - RNA, 19 nt, Artificial Sequence
  Description of Artificial Sequence: Synthetic oligonucleotide
gacucugaauggggccucu

SEQ ID NO: 2975942 - RNA, 19 nt, Artificial Sequence
  Description of Artificial Sequence: Synthetic oligonucleotide
gcauucugguccaucaguu

SEQ ID NO: 2975943 - RNA, 19 nt, Artificial Sequence
  Description of Artificial Sequence: Synthetic oligonucleotide
guccaucaguuccccuacu

SEQ ID NO: 2975944 - RNA, 19 nt, Artificial Sequence
  Description of Artificial Sequence: Synthetic oligonucleotide
ggguaagagaaaaggcauu

SEQ ID NO: 2975945 - RNA, 19 nt, Artificial Sequence
  Description of Artificial Sequence: Synthetic oligonucleotide
ccucucucaugucuguggu

SEQ ID NO: 2975946 - RNA, 19 nt, Artificial Sequence
  Description of Artificial Sequence: Synthetic oligonucleotide
cugguccaucaguuccccu

SEQ ID NO: 2975947 - RNA, 19 nt, Artificial Sequence
  Description of Artificial Sequence: Synthetic oligonucleotide
ggcuuuugucugaaucaau

SEQ ID NO: 2975948 - RNA, 19 nt, Artificial Sequence
  Description of Artificial Sequence: Synthetic oligonucleotide
ccugcagccuucccacaaa

SEQ ID NO: 2975949 - RNA, 19 nt, Artificial Sequence
  Description of Artificial Sequence: Synthetic oligonucleotide
cguugaccaucuucuccca

SEQ ID NO: 2975950 - RNA, 19 nt, Artificial Sequence
  Description of Artificial Sequence: Synthetic oligonucleotide
cccugcagccuucccacaa

SEQ ID NO: 2975951 - RNA, 19 nt, Artificial Sequence
  Description of Artificial Sequence: Synthetic oligonucleotide
ccaaggcauuggacucauc

SEQ ID NO: 2975952 - RNA, 19 nt, Artificial Sequence
  Description of Artificial Sequence: Synthetic oligonucleotide
ccccaaggcauuggacuca

SEQ ID NO: 2975953 - RNA, 19 nt, Artificial Sequence
  Description of Artificial Sequence: Synthetic oligonucleotide
ccagcuccgcaaugacaaa

SEQ ID NO: 2975954 - RNA, 19 nt, Artificial Sequence
  Description of Artificial Sequence: Synthetic oligonucleotide
ggcagguggugcagacgaa

SEQ ID NO: 2975955 - RNA, 19 nt, Artificial Sequence
  Description of Artificial Sequence: Synthetic oligonucleotide
gcccugcagccuucccaca

SEQ ID NO: 2975956 - RNA, 19 nt, Artificial Sequence
  Description of Artificial Sequence: Synthetic oligonucleotide
gcacuccuuucaaaacguu

SEQ ID NO: 2975957 - RNA, 19 nt, Artificial Sequence
  Description of Artificial Sequence: Synthetic oligonucleotide
cgugcucagcagcuaguau

SEQ ID NO: 2975958 - RNA, 19 nt, Artificial Sequence
  Description of Artificial Sequence: Synthetic oligonucleotide
gcucagcagcuaguauuuu

SEQ ID NO: 2975959 - RNA, 19 nt, Artificial Sequence
  Description of Artificial Sequence: Synthetic oligonucleotide
cccaaggcauuggacucau

SEQ ID NO: 2975960 - RNA, 19 nt, Artificial Sequence
  Description of Artificial Sequence: Synthetic oligonucleotide
cccacgugcucagcagcua

SEQ ID NO: 2975961 - RNA, 19 nt, Artificial Sequence
  Description of Artificial Sequence: Synthetic oligonucleotide
cucgcuccuggaggacauu

SEQ ID NO: 2975962 - RNA, 19 nt, Artificial Sequence
  Description of Artificial Sequence: Synthetic oligonucleotide
acaauuauguccuuggacc

SEQ ID NO: 2975963 - RNA, 19 nt, Artificial Sequence
  Description of Artificial Sequence: Synthetic oligonucleotide
aacaauuauguccuuggac

SEQ ID NO: 2975964 - RNA, 19 nt, Artificial Sequence
  Description of Artificial Sequence: Synthetic oligonucleotide
uuugcugaaagaugcuucg

SEQ ID NO: 2975965 - RNA, 19 nt, Artificial Sequence
  Description of Artificial Sequence: Synthetic oligonucleotide
ugagguagcacucguggcg

SEQ ID NO: 2975966 - RNA, 19 nt, Artificial Sequence
  Description of Artificial Sequence: Synthetic oligonucleotide
aauuauguccuuggacccc

SEQ ID NO: 2975967 - RNA, 19 nt, Artificial Sequence
  Description of Artificial Sequence: Synthetic oligonucleotide
agaugcuucgccguggucc

SEQ ID NO: 2975968 - RNA, 19 nt, Artificial Sequence
  Description of Artificial Sequence: Synthetic oligonucleotide
cuugagguagcacucgugg

SEQ ID NO: 2975969 - RNA, 19 nt, Artificial Sequence
  Description of Artificial Sequence: Synthetic oligonucleotide
guccccaacaauuaugucc

SEQ ID NO: 2975970 - RNA, 19 nt, Artificial Sequence
  Description of Artificial Sequence: Synthetic oligonucleotide
cauguuaucugcugagagg

SEQ ID NO: 2975971 - RNA, 19 nt, Artificial Sequence
  Description of Artificial Sequence: Synthetic oligonucleotide
cauuccaggggucucaagg

SEQ ID NO: 2975972 - RNA, 19 nt, Artificial Sequence
  Description of Artificial Sequence: Synthetic oligonucleotide
uccccaguugaucugagcc

SEQ ID NO: 2975973 - RNA, 19 nt, Artificial Sequence
  Description of Artificial Sequence: Synthetic oligonucleotide
uccccaacaauuauguccu

SEQ ID NO: 2975974 - RNA, 19 nt, Artificial Sequence
  Description of Artificial Sequence: Synthetic oligonucleotide
acauguuaucugcugagag

SEQ ID NO: 2975975 - RNA, 19 nt, Artificial Sequence
  Description of Artificial Sequence: Synthetic oligonucleotide
auuuguccaggcaagggcc

SEQ ID NO: 2975976 - RNA, 19 nt, Artificial Sequence
  Description of Artificial Sequence: Synthetic oligonucleotide
ucucuguagauuucagucc

SEQ ID NO: 2975977 - RNA, 19 nt, Artificial Sequence
  Description of Artificial Sequence: Synthetic oligonucleotide
ugcugaaagaugcuucgcc

SEQ ID NO: 2975978 - RNA, 19 nt, Artificial Sequence
  Description of Artificial Sequence: Synthetic oligonucleotide
agcgugaugaagcccuugc

SEQ ID NO: 2975979 - RNA, 19 nt, Artificial Sequence
  Description of Artificial Sequence: Synthetic oligonucleotide
aagcccuugccgcagaugu

SEQ ID NO: 2975980 - RNA, 19 nt, Artificial Sequence
  Description of Artificial Sequence: Synthetic oligonucleotide
uugcugagcgugaugaagc

SEQ ID NO: 2975981 - RNA, 19 nt, Artificial Sequence
  Description of Artificial Sequence: Synthetic oligonucleotide
caauuauguccuuggaccc

SEQ ID NO: 2975982 - RNA, 19 nt, Artificial Sequence
  Description of Artificial Sequence: Synthetic oligonucleotide
uccaggggucucaaggucg

SEQ ID NO: 2975983 - RNA, 19 nt, Artificial Sequence
  Description of Artificial Sequence: Synthetic oligonucleotide
cucuguagauuucaguccc

SEQ ID NO: 2975984 - RNA, 19 nt, Artificial Sequence
  Description of Artificial Sequence: Synthetic oligonucleotide
uguggcacgggaagggccg

SEQ ID NO: 2975985 - RNA, 19 nt, Artificial Sequence
  Description of Artificial Sequence: Synthetic oligonucleotide
cauuuguccaggcaagggc

SEQ ID NO: 2975986 - RNA, 19 nt, Artificial Sequence
  Description of Artificial Sequence: Synthetic oligonucleotide
ucaguccccaacaauuaug

SEQ ID NO: 2975987 - RNA, 19 nt, Artificial Sequence
  Description of Artificial Sequence: Synthetic oligonucleotide
cuggagagauugcugagcg

SEQ ID NO: 2975988 - RNA, 19 nt, Artificial Sequence
  Description of Artificial Sequence: Synthetic oligonucleotide
ugaaagaugcuucgccgug

SEQ ID NO: 2975989 - RNA, 19 nt, Artificial Sequence
  Description of Artificial Sequence: Synthetic oligonucleotide
gagguguuaguggagaccc

SEQ ID NO: 2975990 - RNA, 19 nt, Artificial Sequence
  Description of Artificial Sequence: Synthetic oligonucleotide
guagauuucaguccccaac

SEQ ID NO: 2975991 - RNA, 19 nt, Artificial Sequence
  Description of Artificial Sequence: Synthetic oligonucleotide
auguuaucugcugagaggu

SEQ ID NO: 2975992 - RNA, 19 nt, Artificial Sequence
  Description of Artificial Sequence: Synthetic oligonucleotide
cuuugcugaaagaugcuuc

SEQ ID NO: 2975993 - RNA, 19 nt, Artificial Sequence
  Description of Artificial Sequence: Synthetic oligonucleotide
agagguguuaguggagacc

SEQ ID NO: 2975994 - RNA, 19 nt, Artificial Sequence
  Description of Artificial Sequence: Synthetic oligonucleotide
uucgccgugguccugugug

SEQ ID NO: 2975995 - RNA, 19 nt, Artificial Sequence
  Description of Artificial Sequence: Synthetic oligonucleotide
ucgagagagucucuguaga

SEQ ID NO: 2975996 - RNA, 19 nt, Artificial Sequence
  Description of Artificial Sequence: Synthetic oligonucleotide
ugcagcuucaggugccugg

SEQ ID NO: 2975997 - RNA, 19 nt, Artificial Sequence
  Description of Artificial Sequence: Synthetic oligonucleotide
uccucuucugcucuggcuc

SEQ ID NO: 2975998 - RNA, 19 nt, Artificial Sequence
  Description of Artificial Sequence: Synthetic oligonucleotide
agagagucucuguagauuu

SEQ ID NO: 2975999 - RNA, 19 nt, Artificial Sequence
  Description of Artificial Sequence: Synthetic oligonucleotide
caugcagcagccgauggcg

SEQ ID NO: 2976000 - RNA, 19 nt, Artificial Sequence
  Description of Artificial Sequence: Synthetic oligonucleotide
aaagaugcuucgccguggu

SEQ ID NO: 2976001 - RNA, 19 nt, Artificial Sequence
  Description of Artificial Sequence: Synthetic oligonucleotide
agauugcugagcgugauga

SEQ ID NO: 2976002 - RNA, 19 nt, Artificial Sequence
  Description of Artificial Sequence: Synthetic oligonucleotide
ccaacaauuauguccuugg

SEQ ID NO: 2976003 - RNA, 19 nt, Artificial Sequence
  Description of Artificial Sequence: Synthetic oligonucleotide
gcugaaagaugcuucgccg

SEQ ID NO: 2976004 - RNA, 19 nt, Artificial Sequence
  Description of Artificial Sequence: Synthetic oligonucleotide
auugcugagcgugaugaag

SEQ ID NO: 2976005 - RNA, 19 nt, Artificial Sequence
  Description of Artificial Sequence: Synthetic oligonucleotide
gaaagaugcuucgccgugg

SEQ ID NO: 2976006 - RNA, 19 nt, Artificial Sequence
  Description of Artificial Sequence: Synthetic oligonucleotide
ucaaggucgagagagucuc

SEQ ID NO: 2976007 - RNA, 19 nt, Artificial Sequence
  Description of Artificial Sequence: Synthetic oligonucleotide
ggucucaaggucgagagag

SEQ ID NO: 2976008 - RNA, 19 nt, Artificial Sequence
  Description of Artificial Sequence: Synthetic oligonucleotide
uuuguccaggcaagggccc

SEQ ID NO: 2976009 - RNA, 19 nt, Artificial Sequence
  Description of Artificial Sequence: Synthetic oligonucleotide
ugccuggagagauugcuga

SEQ ID NO: 2976010 - RNA, 19 nt, Artificial Sequence
  Description of Artificial Sequence: Synthetic oligonucleotide
uuucaguccccaacaauua

SEQ ID NO: 2976011 - RNA, 19 nt, Artificial Sequence
  Description of Artificial Sequence: Synthetic oligonucleotide
auuucaguccccaacaauu

SEQ ID NO: 2976012 - RNA, 19 nt, Artificial Sequence
  Description of Artificial Sequence: Synthetic oligonucleotide
gucgagagagucucuguag

SEQ ID NO: 2976013 - RNA, 19 nt, Artificial Sequence
  Description of Artificial Sequence: Synthetic oligonucleotide
ugagagguguuaguggaga

SEQ ID NO: 2976014 - RNA, 19 nt, Artificial Sequence
  Description of Artificial Sequence: Synthetic oligonucleotide
uugaucugagccugccugc

SEQ ID NO: 2976015 - RNA, 19 nt, Artificial Sequence
  Description of Artificial Sequence: Synthetic oligonucleotide
uugagguagcacucguggc

SEQ ID NO: 2976016 - RNA, 19 nt, Artificial Sequence
  Description of Artificial Sequence: Synthetic oligonucleotide
ucuguagauuucagucccc

SEQ ID NO: 2976017 - RNA, 19 nt, Artificial Sequence
  Description of Artificial Sequence: Synthetic oligonucleotide
uggguggcaccauuugucc

SEQ ID NO: 2976018 - RNA, 19 nt, Artificial Sequence
  Description of Artificial Sequence: Synthetic oligonucleotide
ucuggguggcaccauuugu

SEQ ID NO: 2976019 - RNA, 19 nt, Artificial Sequence
  Description of Artificial Sequence: Synthetic oligonucleotide
uucugcucuggcucugggg

SEQ ID NO: 2976020 - RNA, 19 nt, Artificial Sequence
  Description of Artificial Sequence: Synthetic oligonucleotide
auuccaggggucucaaggu

SEQ ID NO: 2976021 - RNA, 19 nt, Artificial Sequence
  Description of Artificial Sequence: Synthetic oligonucleotide
uggcgcuugagguagcacu

SEQ ID NO: 2976022 - RNA, 19 nt, Artificial Sequence
  Description of Artificial Sequence: Synthetic oligonucleotide
gagguagcacucguggcgg

SEQ ID NO: 2976023 - RNA, 19 nt, Artificial Sequence
  Description of Artificial Sequence: Synthetic oligonucleotide
agucucuguagauuucagu

SEQ ID NO: 2976024 - RNA, 19 nt, Artificial Sequence
  Description of Artificial Sequence: Synthetic oligonucleotide
uggaccccuuugcugaaag

SEQ ID NO: 2976025 - RNA, 19 nt, Artificial Sequence
  Description of Artificial Sequence: Synthetic oligonucleotide
uucuggguggcaccauuug

SEQ ID NO: 2976026 - RNA, 19 nt, Artificial Sequence
  Description of Artificial Sequence: Synthetic oligonucleotide
uguuaguggagacccguuu

SEQ ID NO: 2976027 - RNA, 19 nt, Artificial Sequence
  Description of Artificial Sequence: Synthetic oligonucleotide
cuccgugccaugcagcagc

SEQ ID NO: 2976028 - RNA, 19 nt, Artificial Sequence
  Description of Artificial Sequence: Synthetic oligonucleotide
ucugcugagagguguuagu

SEQ ID NO: 2976029 - RNA, 19 nt, Artificial Sequence
  Description of Artificial Sequence: Synthetic oligonucleotide
ggagagauugcugagcgug

SEQ ID NO: 2976030 - RNA, 19 nt, Artificial Sequence
  Description of Artificial Sequence: Synthetic oligonucleotide
aaggucgagagagucucug

SEQ ID NO: 2976031 - RNA, 19 nt, Artificial Sequence
  Description of Artificial Sequence: Synthetic oligonucleotide
gugcccacauguuaucugc

SEQ ID NO: 2976032 - RNA, 19 nt, Artificial Sequence
  Description of Artificial Sequence: Synthetic oligonucleotide
uccuuggaccccuuugcug

SEQ ID NO: 2976033 - RNA, 19 nt, Artificial Sequence
  Description of Artificial Sequence: Synthetic oligonucleotide
uguuaucugcugagaggug

SEQ ID NO: 2976034 - RNA, 19 nt, Artificial Sequence
  Description of Artificial Sequence: Synthetic oligonucleotide
uucaguccccaacaauuau

SEQ ID NO: 2976035 - RNA, 19 nt, Artificial Sequence
  Description of Artificial Sequence: Synthetic oligonucleotide
cuggguggcaccauuuguc

SEQ ID NO: 2976036 - RNA, 19 nt, Artificial Sequence
  Description of Artificial Sequence: Synthetic oligonucleotide
ugcugagcgugaugaagcc

SEQ ID NO: 2976037 - RNA, 19 nt, Artificial Sequence
  Description of Artificial Sequence: Synthetic oligonucleotide
auguccuuggaccccuuug

SEQ ID NO: 2976038 - RNA, 19 nt, Artificial Sequence
  Description of Artificial Sequence: Synthetic oligonucleotide
uccuguguggguucugggu

SEQ ID NO: 2976039 - RNA, 19 nt, Artificial Sequence
  Description of Artificial Sequence: Synthetic oligonucleotide
aagaugcuucgccgugguc

SEQ ID NO: 2976040 - RNA, 19 nt, Artificial Sequence
  Description of Artificial Sequence: Synthetic oligonucleotide
ugagccugccugcauucca

SEQ ID NO: 2976041 - RNA, 19 nt, Artificial Sequence
  Description of Artificial Sequence: Synthetic oligonucleotide
ucccuagguccccaguuga

SEQ ID NO: 2976042 - RNA, 19 nt, Artificial Sequence
  Description of Artificial Sequence: Synthetic oligonucleotide
gguggcaccauuuguccag

SEQ ID NO: 2976043 - RNA, 19 nt, Artificial Sequence
  Description of Artificial Sequence: Synthetic oligonucleotide
uguagauuucaguccccaa

SEQ ID NO: 2976044 - RNA, 19 nt, Artificial Sequence
  Description of Artificial Sequence: Synthetic oligonucleotide
cagccgauggcgcuugagg

SEQ ID NO: 2976045 - RNA, 19 nt, Artificial Sequence
  Description of Artificial Sequence: Synthetic oligonucleotide
ucucaaggucgagagaguc

SEQ ID NO: 2976046 - RNA, 19 nt, Artificial Sequence
  Description of Artificial Sequence: Synthetic oligonucleotide
agccgauggcgcuugaggu

SEQ ID NO: 2976047 - RNA, 19 nt, Artificial Sequence
  Description of Artificial Sequence: Synthetic oligonucleotide
gaugaagcccuugccgcag

SEQ ID NO: 2976048 - RNA, 19 nt, Artificial Sequence
  Description of Artificial Sequence: Synthetic oligonucleotide
ccccuuugcugaaagaugc

SEQ ID NO: 2976049 - RNA, 19 nt, Artificial Sequence
  Description of Artificial Sequence: Synthetic oligonucleotide
aguccccaacaauuauguc

SEQ ID NO: 2976050 - RNA, 19 nt, Artificial Sequence
  Description of Artificial Sequence: Synthetic oligonucleotide
ggggucucaaggucgagag

SEQ ID NO: 2976051 - RNA, 19 nt, Artificial Sequence
  Description of Artificial Sequence: Synthetic oligonucleotide
ucaguccaugccccugugc

SEQ ID NO: 2976052 - RNA, 19 nt, Artificial Sequence
  Description of Artificial Sequence: Synthetic oligonucleotide
uuuucaucccuaggucccc

SEQ ID NO: 2976053 - RNA, 19 nt, Artificial Sequence
  Description of Artificial Sequence: Synthetic oligonucleotide
auuauguccuuggaccccu

SEQ ID NO: 2976054 - RNA, 19 nt, Artificial Sequence
  Description of Artificial Sequence: Synthetic oligonucleotide
gcuucaggugccuggagag

SEQ ID NO: 2976055 - RNA, 19 nt, Artificial Sequence
  Description of Artificial Sequence: Synthetic oligonucleotide
accauuuguccaggcaagg

SEQ ID NO: 2976056 - RNA, 19 nt, Artificial Sequence
  Description of Artificial Sequence: Synthetic oligonucleotide
gagagguguuaguggagac

SEQ ID NO: 2976057 - RNA, 19 nt, Artificial Sequence
  Description of Artificial Sequence: Synthetic oligonucleotide
gagauugcugagcgugaug

SEQ ID NO: 2976058 - RNA, 19 nt, Artificial Sequence
  Description of Artificial Sequence: Synthetic oligonucleotide
aucccuagguccccaguug

SEQ ID NO: 2976059 - RNA, 19 nt, Artificial Sequence
  Description of Artificial Sequence: Synthetic oligonucleotide
ucguggcggaagaacuugc

SEQ ID NO: 2976060 - RNA, 19 nt, Artificial Sequence
  Description of Artificial Sequence: Synthetic oligonucleotide
aguccaugccccugugcag

SEQ ID NO: 2976061 - RNA, 19 nt, Artificial Sequence
  Description of Artificial Sequence: Synthetic oligonucleotide
uuaucugcugagagguguu

SEQ ID NO: 2976062 - RNA, 19 nt, Artificial Sequence
  Description of Artificial Sequence: Synthetic oligonucleotide
agauuucaguccccaacaa

SEQ ID NO: 2976063 - RNA, 19 nt, Artificial Sequence
  Description of Artificial Sequence: Synthetic oligonucleotide
uucaggugccuggagagau

SEQ ID NO: 2976064 - RNA, 19 nt, Artificial Sequence
  Description of Artificial Sequence: Synthetic oligonucleotide
cugagagguguuaguggag

SEQ ID NO: 2976065 - RNA, 19 nt, Artificial Sequence
  Description of Artificial Sequence: Synthetic oligonucleotide
ucugagccugccugcauuc

SEQ ID NO: 2976066 - RNA, 19 nt, Artificial Sequence
  Description of Artificial Sequence: Synthetic oligonucleotide
uuccaggggucucaagguc

SEQ ID NO: 2976067 - RNA, 19 nt, Artificial Sequence
  Description of Artificial Sequence: Synthetic oligonucleotide
aguugaucugagccugccu

SEQ ID NO: 2976068 - RNA, 19 nt, Artificial Sequence
  Description of Artificial Sequence: Synthetic oligonucleotide
cugugcagcuucaggugcc

SEQ ID NO: 2976069 - RNA, 19 nt, Artificial Sequence
  Description of Artificial Sequence: Synthetic oligonucleotide
uguggguucuggguggcac

SEQ ID NO: 2976070 - RNA, 19 nt, Artificial Sequence
  Description of Artificial Sequence: Synthetic oligonucleotide
gcugagagguguuagugga

SEQ ID NO: 2976071 - RNA, 19 nt, Artificial Sequence
  Description of Artificial Sequence: Synthetic oligonucleotide
uugccgcagauguggcacg

SEQ ID NO: 2976072 - RNA, 19 nt, Artificial Sequence
  Description of Artificial Sequence: Synthetic oligonucleotide
gagucucuguagauuucag

SEQ ID NO: 2976073 - RNA, 19 nt, Artificial Sequence
  Description of Artificial Sequence: Synthetic oligonucleotide
uucaucccuagguccccag

SEQ ID NO: 2976074 - RNA, 19 nt, Artificial Sequence
  Description of Artificial Sequence: Synthetic oligonucleotide
cugcugagagguguuagug

SEQ ID NO: 2976075 - RNA, 19 nt, Artificial Sequence
  Description of Artificial Sequence: Synthetic oligonucleotide
uugcugaaagaugcuucgc

SEQ ID NO: 2976076 - RNA, 19 nt, Artificial Sequence
  Description of Artificial Sequence: Synthetic oligonucleotide
uagcacucguggcggaaga

SEQ ID NO: 2976077 - RNA, 19 nt, Artificial Sequence
  Description of Artificial Sequence: Synthetic oligonucleotide
ugaucugagccugccugca

SEQ ID NO: 2976078 - RNA, 19 nt, Artificial Sequence
  Description of Artificial Sequence: Synthetic oligonucleotide
uggcuccucaguccaugcc

SEQ ID NO: 2976079 - RNA, 19 nt, Artificial Sequence
  Description of Artificial Sequence: Synthetic oligonucleotide
ucaucccuagguccccagu

SEQ ID NO: 2976080 - RNA, 19 nt, Artificial Sequence
  Description of Artificial Sequence: Synthetic oligonucleotide
ugcccacauguuaucugcu

SEQ ID NO: 2976081 - RNA, 19 nt, Artificial Sequence
  Description of Artificial Sequence: Synthetic oligonucleotide
gauuucaguccccaacaau

SEQ ID NO: 2976082 - RNA, 19 nt, Artificial Sequence
  Description of Artificial Sequence: Synthetic oligonucleotide
ucgccgugguccugugugg

SEQ ID NO: 2976083 - RNA, 19 nt, Artificial Sequence
  Description of Artificial Sequence: Synthetic oligonucleotide
cugagcgugaugaagcccu

SEQ ID NO: 2976084 - RNA, 19 nt, Artificial Sequence
  Description of Artificial Sequence: Synthetic oligonucleotide
uagguccccaguugaucug

SEQ ID NO: 2976085 - RNA, 19 nt, Artificial Sequence
  Description of Artificial Sequence: Synthetic oligonucleotide
guuaucugcugagaggugu

SEQ ID NO: 2976086 - RNA, 19 nt, Artificial Sequence
  Description of Artificial Sequence: Synthetic oligonucleotide
caacaauuauguccuugga

SEQ ID NO: 2976087 - RNA, 19 nt, Artificial Sequence
  Description of Artificial Sequence: Synthetic oligonucleotide
ccacauguuaucugcugag

SEQ ID NO: 2976088 - RNA, 19 nt, Artificial Sequence
  Description of Artificial Sequence: Synthetic oligonucleotide
ggaagggccgcuccgugcc

SEQ ID NO: 2976089 - RNA, 19 nt, Artificial Sequence
  Description of Artificial Sequence: Synthetic oligonucleotide
guccuguguggguucuggg

SEQ ID NO: 2976090 - RNA, 19 nt, Artificial Sequence
  Description of Artificial Sequence: Synthetic oligonucleotide
agccugccugcauuccagg

SEQ ID NO: 2976091 - RNA, 19 nt, Artificial Sequence
  Description of Artificial Sequence: Synthetic oligonucleotide
gagccugccugcauuccag

SEQ ID NO: 2976092 - RNA, 19 nt, Artificial Sequence
  Description of Artificial Sequence: Synthetic oligonucleotide
aggucgagagagucucugu

SEQ ID NO: 2976093 - RNA, 19 nt, Artificial Sequence
  Description of Artificial Sequence: Synthetic oligonucleotide
uccgugccaugcagcagcc

SEQ ID NO: 2976094 - RNA, 19 nt, Artificial Sequence
  Description of Artificial Sequence: Synthetic oligonucleotide
cuggcuccucaguccaugc

SEQ ID NO: 2976095 - RNA, 19 nt, Artificial Sequence
  Description of Artificial Sequence: Synthetic oligonucleotide
accccuuugcugaaagaug

SEQ ID NO: 2976096 - RNA, 19 nt, Artificial Sequence
  Description of Artificial Sequence: Synthetic oligonucleotide
aucugagccugccugcauu

SEQ ID NO: 2976097 - RNA, 19 nt, Artificial Sequence
  Description of Artificial Sequence: Synthetic oligonucleotide
cucguggcggaagaacuug

SEQ ID NO: 2976098 - RNA, 19 nt, Artificial Sequence
  Description of Artificial Sequence: Synthetic oligonucleotide
guccaugccccugugcagc

SEQ ID NO: 2976099 - RNA, 19 nt, Artificial Sequence
  Description of Artificial Sequence: Synthetic oligonucleotide
ggugcccacauguuaucug

SEQ ID NO: 2976100 - RNA, 19 nt, Artificial Sequence
  Description of Artificial Sequence: Synthetic oligonucleotide
caggugccuggagagauug

SEQ ID NO: 2976101 - RNA, 19 nt, Artificial Sequence
  Description of Artificial Sequence: Synthetic oligonucleotide
guggguucuggguggcacc

SEQ ID NO: 2976102 - RNA, 19 nt, Artificial Sequence
  Description of Artificial Sequence: Synthetic oligonucleotide
guagcacucguggcggaag

SEQ ID NO: 2976103 - RNA, 19 nt, Artificial Sequence
  Description of Artificial Sequence: Synthetic oligonucleotide
ccugccugcauuccagggg

SEQ ID NO: 2976104 - RNA, 19 nt, Artificial Sequence
  Description of Artificial Sequence: Synthetic oligonucleotide
caugccccugugcagcuuc

SEQ ID NO: 2976105 - RNA, 19 nt, Artificial Sequence
  Description of Artificial Sequence: Synthetic oligonucleotide
cacgggaagggccgcuccg

SEQ ID NO: 2976106 - RNA, 19 nt, Artificial Sequence
  Description of Artificial Sequence: Synthetic oligonucleotide
uggguucuggguggcacca

SEQ ID NO: 2976107 - RNA, 19 nt, Artificial Sequence
  Description of Artificial Sequence: Synthetic oligonucleotide
caguugaucugagccugcc

SEQ ID NO: 2976108 - RNA, 19 nt, Artificial Sequence
  Description of Artificial Sequence: Synthetic oligonucleotide
caguccccaacaauuaugu

SEQ ID NO: 2976109 - RNA, 19 nt, Artificial Sequence
  Description of Artificial Sequence: Synthetic oligonucleotide
gauugcugagcgugaugaa

SEQ ID NO: 2976110 - RNA, 19 nt, Artificial Sequence
  Description of Artificial Sequence: Synthetic oligonucleotide
uuucaucccuaggucccca

SEQ ID NO: 2976111 - RNA, 19 nt, Artificial Sequence
  Description of Artificial Sequence: Synthetic oligonucleotide
uauguccuuggaccccuuu

SEQ ID NO: 2976112 - RNA, 19 nt, Artificial Sequence
  Description of Artificial Sequence: Synthetic oligonucleotide
ugccgcagauguggcacgg

SEQ ID NO: 2976113 - RNA, 19 nt, Artificial Sequence
  Description of Artificial Sequence: Synthetic oligonucleotide
gagagauugcugagcguga

SEQ ID NO: 2976114 - RNA, 19 nt, Artificial Sequence
  Description of Artificial Sequence: Synthetic oligonucleotide
uguguggguucuggguggc

SEQ ID NO: 2976115 - RNA, 19 nt, Artificial Sequence
  Description of Artificial Sequence: Synthetic oligonucleotide
ugccaugcagcagccgaug

SEQ ID NO: 2976116 - RNA, 19 nt, Artificial Sequence
  Description of Artificial Sequence: Synthetic oligonucleotide
cugaaagaugcuucgccgu

SEQ ID NO: 2976117 - RNA, 19 nt, Artificial Sequence
  Description of Artificial Sequence: Synthetic oligonucleotide
agagauugcugagcgugau

SEQ ID NO: 2976118 - RNA, 19 nt, Artificial Sequence
  Description of Artificial Sequence: Synthetic oligonucleotide
gcccuugccgcagaugugg

SEQ ID NO: 2976119 - RNA, 19 nt, Artificial Sequence
  Description of Artificial Sequence: Synthetic oligonucleotide
uccucaguccaugccccug

SEQ ID NO: 2976120 - RNA, 19 nt, Artificial Sequence
  Description of Artificial Sequence: Synthetic oligonucleotide
ccuuggaccccuuugcuga

SEQ ID NO: 2976121 - RNA, 19 nt, Artificial Sequence
  Description of Artificial Sequence: Synthetic oligonucleotide
auggcgcuugagguagcac

SEQ ID NO: 2976122 - RNA, 19 nt, Artificial Sequence
  Description of Artificial Sequence: Synthetic oligonucleotide
agggcccuccucuucugcu

SEQ ID NO: 2976123 - RNA, 19 nt, Artificial Sequence
  Description of Artificial Sequence: Synthetic oligonucleotide
gaagcccuugccgcagaug

SEQ ID NO: 2976124 - RNA, 19 nt, Artificial Sequence
  Description of Artificial Sequence: Synthetic oligonucleotide
gguccuguguggguucugg

SEQ ID NO: 2976125 - RNA, 19 nt, Artificial Sequence
  Description of Artificial Sequence: Synthetic oligonucleotide
gaccccuuugcugaaagau

SEQ ID NO: 2976126 - RNA, 19 nt, Artificial Sequence
  Description of Artificial Sequence: Synthetic oligonucleotide
cuguagauuucagucccca

SEQ ID NO: 2976127 - RNA, 19 nt, Artificial Sequence
  Description of Artificial Sequence: Synthetic oligonucleotide
guuaguggagacccguuuu

SEQ ID NO: 2976128 - RNA, 19 nt, Artificial Sequence
  Description of Artificial Sequence: Synthetic oligonucleotide
ccauuuguccaggcaaggg

SEQ ID NO: 2976129 - RNA, 19 nt, Artificial Sequence
  Description of Artificial Sequence: Synthetic oligonucleotide
ugugcagcuucaggugccu

SEQ ID NO: 2976130 - RNA, 19 nt, Artificial Sequence
  Description of Artificial Sequence: Synthetic oligonucleotide
uccaugccccugugcagcu

SEQ ID NO: 2976131 - RNA, 19 nt, Artificial Sequence
  Description of Artificial Sequence: Synthetic oligonucleotide
aggggucucaaggucgaga

SEQ ID NO: 2976132 - RNA, 19 nt, Artificial Sequence
  Description of Artificial Sequence: Synthetic oligonucleotide
guccccaguugaucugagc

SEQ ID NO: 2976133 - RNA, 19 nt, Artificial Sequence
  Description of Artificial Sequence: Synthetic oligonucleotide
cacauguuaucugcugaga

SEQ ID NO: 2976134 - RNA, 19 nt, Artificial Sequence
  Description of Artificial Sequence: Synthetic oligonucleotide
ucaggugccuggagagauu

SEQ ID NO: 2976135 - RNA, 19 nt, Artificial Sequence
  Description of Artificial Sequence: Synthetic oligonucleotide
uggcaccauuuguccaggc

SEQ ID NO: 2976136 - RNA, 19 nt, Artificial Sequence
  Description of Artificial Sequence: Synthetic oligonucleotide
gccaugcagcagccgaugg

SEQ ID NO: 2976137 - RNA, 19 nt, Artificial Sequence
  Description of Artificial Sequence: Synthetic oligonucleotide
ugcuucgccgugguccugu

SEQ ID NO: 2976138 - RNA, 19 nt, Artificial Sequence
  Description of Artificial Sequence: Synthetic oligonucleotide
uaucugcugagagguguua

SEQ ID NO: 2976139 - RNA, 19 nt, Artificial Sequence
  Description of Artificial Sequence: Synthetic oligonucleotide
agguguuaguggagacccg

SEQ ID NO: 2976140 - RNA, 19 nt, Artificial Sequence
  Description of Artificial Sequence: Synthetic oligonucleotide
gugccuggagagauugcug

SEQ ID NO: 2976141 - RNA, 19 nt, Artificial Sequence
  Description of Artificial Sequence: Synthetic oligonucleotide
ggcaccauuuguccaggca

SEQ ID NO: 2976142 - RNA, 19 nt, Artificial Sequence
  Description of Artificial Sequence: Synthetic oligonucleotide
cacucguggcggaagaacu

SEQ ID NO: 2976143 - RNA, 19 nt, Artificial Sequence
  Description of Artificial Sequence: Synthetic oligonucleotide
gauggcgcuugagguagca

SEQ ID NO: 2976144 - RNA, 19 nt, Artificial Sequence
  Description of Artificial Sequence: Synthetic oligonucleotide
gcgugaugaagcccuugcc

SEQ ID NO: 2976145 - RNA, 19 nt, Artificial Sequence
  Description of Artificial Sequence: Synthetic oligonucleotide
gccugccugcauuccaggg

SEQ ID NO: 2976146 - RNA, 19 nt, Artificial Sequence
  Description of Artificial Sequence: Synthetic oligonucleotide
aggugccuggagagauugc

SEQ ID NO: 2976147 - RNA, 19 nt, Artificial Sequence
  Description of Artificial Sequence: Synthetic oligonucleotide
gcccacauguuaucugcug

SEQ ID NO: 2976148 - RNA, 19 nt, Artificial Sequence
  Description of Artificial Sequence: Synthetic oligonucleotide
ugagcgugaugaagcccuu

SEQ ID NO: 2976149 - RNA, 19 nt, Artificial Sequence
  Description of Artificial Sequence: Synthetic oligonucleotide
gagcgugaugaagcccuug

SEQ ID NO: 2976150 - RNA, 19 nt, Artificial Sequence
  Description of Artificial Sequence: Synthetic oligonucleotide
ggucgagagagucucugua

SEQ ID NO: 2976151 - RNA, 19 nt, Artificial Sequence
  Description of Artificial Sequence: Synthetic oligonucleotide
gagagagucucuguagauu

SEQ ID NO: 2976152 - RNA, 19 nt, Artificial Sequence
  Description of Artificial Sequence: Synthetic oligonucleotide
caagggcccuccucuucug

SEQ ID NO: 2976153 - RNA, 19 nt, Artificial Sequence
  Description of Artificial Sequence: Synthetic oligonucleotide
ccaugcagcagccgauggc

SEQ ID NO: 2976154 - RNA, 19 nt, Artificial Sequence
  Description of Artificial Sequence: Synthetic oligonucleotide
cugagccugccugcauucc

SEQ ID NO: 2976155 - RNA, 19 nt, Artificial Sequence
  Description of Artificial Sequence: Synthetic oligonucleotide
ccgauggcgcuugagguag

SEQ ID NO: 2976156 - RNA, 19 nt, Artificial Sequence
  Description of Artificial Sequence: Synthetic oligonucleotide
cccaguugaucugagccug

SEQ ID NO: 2976157 - RNA, 19 nt, Artificial Sequence
  Description of Artificial Sequence: Synthetic oligonucleotide
cccaacaauuauguccuug

SEQ ID NO: 2976158 - RNA, 19 nt, Artificial Sequence
  Description of Artificial Sequence: Synthetic oligonucleotide
caggcaagggcccuccucu

SEQ ID NO: 2976159 - RNA, 19 nt, Artificial Sequence
  Description of Artificial Sequence: Synthetic oligonucleotide
gccccugugcagcuucagg

SEQ ID NO: 2976160 - RNA, 19 nt, Artificial Sequence
  Description of Artificial Sequence: Synthetic oligonucleotide
cugccugcauuccaggggu

SEQ ID NO: 2976161 - RNA, 19 nt, Artificial Sequence
  Description of Artificial Sequence: Synthetic oligonucleotide
cccugugcagcuucaggug

SEQ ID NO: 2976162 - RNA, 19 nt, Artificial Sequence
  Description of Artificial Sequence: Synthetic oligonucleotide
gggaagggccgcuccgugc

SEQ ID NO: 2976163 - RNA, 19 nt, Artificial Sequence
  Description of Artificial Sequence: Synthetic oligonucleotide
cagcuucaggugccuggag

SEQ ID NO: 2976164 - RNA, 19 nt, Artificial Sequence
  Description of Artificial Sequence: Synthetic oligonucleotide
agguagcacucguggcgga

SEQ ID NO: 2976165 - RNA, 19 nt, Artificial Sequence
  Description of Artificial Sequence: Synthetic oligonucleotide
uuauguccuuggaccccuu

SEQ ID NO: 2976166 - RNA, 19 nt, Artificial Sequence
  Description of Artificial Sequence: Synthetic oligonucleotide
gcuccucaguccaugcccc

SEQ ID NO: 2976167 - RNA, 19 nt, Artificial Sequence
  Description of Artificial Sequence: Synthetic oligonucleotide
uccaggcaagggcccuccu

SEQ ID NO: 2976168 - RNA, 19 nt, Artificial Sequence
  Description of Artificial Sequence: Synthetic oligonucleotide
cccacauguuaucugcuga

SEQ ID NO: 2976169 - RNA, 19 nt, Artificial Sequence
  Description of Artificial Sequence: Synthetic oligonucleotide
ugccccugugcagcuucag

SEQ ID NO: 2976170 - RNA, 19 nt, Artificial Sequence
  Description of Artificial Sequence: Synthetic oligonucleotide
ccaguugaucugagccugc

SEQ ID NO: 2976171 - RNA, 19 nt, Artificial Sequence
  Description of Artificial Sequence: Synthetic oligonucleotide
gcuugagguagcacucgug

SEQ ID NO: 2976172 - RNA, 19 nt, Artificial Sequence
  Description of Artificial Sequence: Synthetic oligonucleotide
gcugagcgugaugaagccc

SEQ ID NO: 2976173 - RNA, 19 nt, Artificial Sequence
  Description of Artificial Sequence: Synthetic oligonucleotide
gccgcuccgugccaugcag

SEQ ID NO: 2976174 - RNA, 19 nt, Artificial Sequence
  Description of Artificial Sequence: Synthetic oligonucleotide
ugccugcauuccagggguc

SEQ ID NO: 2976175 - RNA, 19 nt, Artificial Sequence
  Description of Artificial Sequence: Synthetic oligonucleotide
ggcgcuugagguagcacuc

SEQ ID NO: 2976176 - RNA, 19 nt, Artificial Sequence
  Description of Artificial Sequence: Synthetic oligonucleotide
aagggccgcuccgugccau

SEQ ID NO: 2976177 - RNA, 19 nt, Artificial Sequence
  Description of Artificial Sequence: Synthetic oligonucleotide
gguguuaguggagacccgu

SEQ ID NO: 2976178 - RNA, 19 nt, Artificial Sequence
  Description of Artificial Sequence: Synthetic oligonucleotide
guccuuggaccccuuugcu

SEQ ID NO: 2976179 - RNA, 19 nt, Artificial Sequence
  Description of Artificial Sequence: Synthetic oligonucleotide
acucguggcggaagaacuu

SEQ ID NO: 2976180 - RNA, 19 nt, Artificial Sequence
  Description of Artificial Sequence: Synthetic oligonucleotide
gaagggccgcuccgugcca

SEQ ID NO: 2976181 - RNA, 19 nt, Artificial Sequence
  Description of Artificial Sequence: Synthetic oligonucleotide
cugcauuccaggggucuca

SEQ ID NO: 2976182 - RNA, 19 nt, Artificial Sequence
  Description of Artificial Sequence: Synthetic oligonucleotide
uuggaccccuuugcugaaa

SEQ ID NO: 2976183 - RNA, 19 nt, Artificial Sequence
  Description of Artificial Sequence: Synthetic oligonucleotide
cuuggaccccuuugcugaa

SEQ ID NO: 2976184 - RNA, 19 nt, Artificial Sequence
  Description of Artificial Sequence: Synthetic oligonucleotide
acgggaagggccgcuccgu

SEQ ID NO: 2976185 - RNA, 19 nt, Artificial Sequence
  Description of Artificial Sequence: Synthetic oligonucleotide
gcacucguggcggaagaac

SEQ ID NO: 2976186 - RNA, 19 nt, Artificial Sequence
  Description of Artificial Sequence: Synthetic oligonucleotide
ggugccuggagagauugcu

SEQ ID NO: 2976187 - RNA, 19 nt, Artificial Sequence
  Description of Artificial Sequence: Synthetic oligonucleotide
gcgcuugagguagcacucg

SEQ ID NO: 2976188 - RNA, 19 nt, Artificial Sequence
  Description of Artificial Sequence: Synthetic oligonucleotide
ggguggcaccauuugucca

SEQ ID NO: 2976189 - RNA, 19 nt, Artificial Sequence
  Description of Artificial Sequence: Synthetic oligonucleotide
gcauuccaggggucucaag

SEQ ID NO: 2976190 - RNA, 19 nt, Artificial Sequence
  Description of Artificial Sequence: Synthetic oligonucleotide
agcacucguggcggaagaa

SEQ ID NO: 2976191 - RNA, 19 nt, Artificial Sequence
  Description of Artificial Sequence: Synthetic oligonucleotide
ggcaagggcccuccucuuc

SEQ ID NO: 2976192 - RNA, 19 nt, Artificial Sequence
  Description of Artificial Sequence: Synthetic oligonucleotide
ugguccuguguggguucug

SEQ ID NO: 2976193 - RNA, 19 nt, Artificial Sequence
  Description of Artificial Sequence: Synthetic oligonucleotide
gaucugagccugccugcau

SEQ ID NO: 2976194 - RNA, 19 nt, Artificial Sequence
  Description of Artificial Sequence: Synthetic oligonucleotide
aggcaagggcccuccucuu

SEQ ID NO: 2976195 - RNA, 19 nt, Artificial Sequence
  Description of Artificial Sequence: Synthetic oligonucleotide
agggccgcuccgugccaug

SEQ ID NO: 2976196 - RNA, 19 nt, Artificial Sequence
  Description of Artificial Sequence: Synthetic oligonucleotide
caucccuagguccccaguu

SEQ ID NO: 2976197 - RNA, 19 nt, Artificial Sequence
  Description of Artificial Sequence: Synthetic oligonucleotide
agcccuugccgcagaugug

SEQ ID NO: 2976198 - RNA, 19 nt, Artificial Sequence
  Description of Artificial Sequence: Synthetic oligonucleotide
ggaccccuuugcugaaaga

SEQ ID NO: 2976199 - RNA, 19 nt, Artificial Sequence
  Description of Artificial Sequence: Synthetic oligonucleotide
gcagcuucaggugccugga

SEQ ID NO: 2976200 - RNA, 19 nt, Artificial Sequence
  Description of Artificial Sequence: Synthetic oligonucleotide
gcaagggcccuccucuucu

SEQ ID NO: 2976201 - RNA, 19 nt, Artificial Sequence
  Description of Artificial Sequence: Synthetic oligonucleotide
ggggugcccacauguuauc

SEQ ID NO: 2976202 - RNA, 19 nt, Artificial Sequence
  Description of Artificial Sequence: Synthetic oligonucleotide
gggucucaaggucgagaga

SEQ ID NO: 2976203 - RNA, 19 nt, Artificial Sequence
  Description of Artificial Sequence: Synthetic oligonucleotide
cagcagccgauggcgcuug

SEQ ID NO: 2976204 - RNA, 19 nt, Artificial Sequence
  Description of Artificial Sequence: Synthetic oligonucleotide
cccuugccgcagauguggc

SEQ ID NO: 2976205 - RNA, 19 nt, Artificial Sequence
  Description of Artificial Sequence: Synthetic oligonucleotide
gugcagcuucaggugccug

SEQ ID NO: 2976206 - RNA, 19 nt, Artificial Sequence
  Description of Artificial Sequence: Synthetic oligonucleotide
ccuggcuccucaguccaug

SEQ ID NO: 2976207 - RNA, 19 nt, Artificial Sequence
  Description of Artificial Sequence: Synthetic oligonucleotide
ccaggcaagggcccuccuc

SEQ ID NO: 2976208 - RNA, 19 nt, Artificial Sequence
  Description of Artificial Sequence: Synthetic oligonucleotide
guggcacgggaagggccgc

SEQ ID NO: 2976209 - RNA, 19 nt, Artificial Sequence
  Description of Artificial Sequence: Synthetic oligonucleotide
caggggucucaaggucgag

SEQ ID NO: 2976210 - RNA, 19 nt, Artificial Sequence
  Description of Artificial Sequence: Synthetic oligonucleotide
gggcccuccucuucugcuc

SEQ ID NO: 2976211 - RNA, 19 nt, Artificial Sequence
  Description of Artificial Sequence: Synthetic oligonucleotide
gccgauggcgcuugaggua

SEQ ID NO: 2976212 - RNA, 19 nt, Artificial Sequence
  Description of Artificial Sequence: Synthetic oligonucleotide
gcagccgauggcgcuugag

SEQ ID NO: 2976213 - RNA, 19 nt, Artificial Sequence
  Description of Artificial Sequence: Synthetic oligonucleotide
agcagccgauggcgcuuga

SEQ ID NO: 2976214 - RNA, 19 nt, Artificial Sequence
  Description of Artificial Sequence: Synthetic oligonucleotide
gucucaaggucgagagagu

SEQ ID NO: 2976215 - RNA, 19 nt, Artificial Sequence
  Description of Artificial Sequence: Synthetic oligonucleotide
ccaggggucucaaggucga

SEQ ID NO: 2976216 - RNA, 19 nt, Artificial Sequence
  Description of Artificial Sequence: Synthetic oligonucleotide
caaggucgagagagucucu

SEQ ID NO: 2976217 - RNA, 19 nt, Artificial Sequence
  Description of Artificial Sequence: Synthetic oligonucleotide
gcuccgugccaugcagcag

SEQ ID NO: 2976218 - RNA, 19 nt, Artificial Sequence
  Description of Artificial Sequence: Synthetic oligonucleotide
ccugcauuccaggggucuc

SEQ ID NO: 2976219 - RNA, 19 nt, Artificial Sequence
  Description of Artificial Sequence: Synthetic oligonucleotide
ccgcuccgugccaugcagc

SEQ ID NO: 2976220 - RNA, 19 nt, Artificial Sequence
  Description of Artificial Sequence: Synthetic oligonucleotide
gccgcagauguggcacggg

SEQ ID NO: 2976221 - RNA, 19 nt, Artificial Sequence
  Description of Artificial Sequence: Synthetic oligonucleotide
guucuggguggcaccauuu

SEQ ID NO: 2976222 - RNA, 19 nt, Artificial Sequence
  Description of Artificial Sequence: Synthetic oligonucleotide
gguagcacucguggcggaa

SEQ ID NO: 2976223 - RNA, 19 nt, Artificial Sequence
  Description of Artificial Sequence: Synthetic oligonucleotide
ccgcagauguggcacggga

SEQ ID NO: 2976224 - RNA, 19 nt, Artificial Sequence
  Description of Artificial Sequence: Synthetic oligonucleotide
augccccugugcagcuuca

SEQ ID NO: 2976225 - RNA, 19 nt, Artificial Sequence
  Description of Artificial Sequence: Synthetic oligonucleotide
gguucuggguggcaccauu

SEQ ID NO: 2976226 - RNA, 19 nt, Artificial Sequence
  Description of Artificial Sequence: Synthetic oligonucleotide
cgugguccuguguggguuc

SEQ ID NO: 2976227 - RNA, 19 nt, Artificial Sequence
  Description of Artificial Sequence: Synthetic oligonucleotide
gcuucgccgugguccugug

SEQ ID NO: 2976228 - RNA, 19 nt, Artificial Sequence
  Description of Artificial Sequence: Synthetic oligonucleotide
guguuaguggagacccguu

SEQ ID NO: 2976229 - RNA, 19 nt, Artificial Sequence
  Description of Artificial Sequence: Synthetic oligonucleotide
ccccaguugaucugagccu

SEQ ID NO: 2976230 - RNA, 19 nt, Artificial Sequence
  Description of Artificial Sequence: Synthetic oligonucleotide
gggccgcuccgugccaugc

SEQ ID NO: 2976231 - RNA, 19 nt, Artificial Sequence
  Description of Artificial Sequence: Synthetic oligonucleotide
cuccucaguccaugccccu

SEQ ID NO: 2976232 - RNA, 19 nt, Artificial Sequence
  Description of Artificial Sequence: Synthetic oligonucleotide
cgcuccgugccaugcagca

SEQ ID NO: 2976233 - RNA, 19 nt, Artificial Sequence
  Description of Artificial Sequence: Synthetic oligonucleotide
gggugcccacauguuaucu

SEQ ID NO: 2976234 - RNA, 19 nt, Artificial Sequence
  Description of Artificial Sequence: Synthetic oligonucleotide
gugccaugcagcagccgau

SEQ ID NO: 2976235 - RNA, 19 nt, Artificial Sequence
  Description of Artificial Sequence: Synthetic oligonucleotide
ggcacgggaagggccgcuc

SEQ ID NO: 2976236 - RNA, 19 nt, Artificial Sequence
  Description of Artificial Sequence: Synthetic oligonucleotide
gugguccuguguggguucu

SEQ ID NO: 2976237 - RNA, 19 nt, Artificial Sequence
  Description of Artificial Sequence: Synthetic oligonucleotide
cgccgugguccuguguggg

SEQ ID NO: 2976238 - RNA, 19 nt, Artificial Sequence
  Description of Artificial Sequence: Synthetic oligonucleotide
ggccgcuccgugccaugca

SEQ ID NO: 2976239 - RNA, 19 nt, Artificial Sequence
  Description of Artificial Sequence: Synthetic oligonucleotide
cuucgccgugguccugugu

SEQ ID NO: 2976240 - RNA, 19 nt, Artificial Sequence
  Description of Artificial Sequence: Synthetic oligonucleotide
ccuuugcugaaagaugcuu

SEQ ID NO: 2976241 - RNA, 19 nt, Artificial Sequence
  Description of Artificial Sequence: Synthetic oligonucleotide
gccugcauuccaggggucu

SEQ ID NO: 2976242 - RNA, 19 nt, Artificial Sequence
  Description of Artificial Sequence: Synthetic oligonucleotide
cccuuugcugaaagaugcu

SEQ ID NO: 2976243 - RNA, 19 nt, Artificial Sequence
  Description of Artificial Sequence: Synthetic oligonucleotide
cgauggcgcuugagguagc

SEQ ID NO: 2976244 - RNA, 19 nt, Artificial Sequence
  Description of Artificial Sequence: Synthetic oligonucleotide
cgggaagggccgcuccgug

SEQ ID NO: 2976245 - RNA, 19 nt, Artificial Sequence
  Description of Artificial Sequence: Synthetic oligonucleotide
cgagagagucucuguagau

SEQ ID NO: 2976246 - RNA, 19 nt, Artificial Sequence
  Description of Artificial Sequence: Synthetic oligonucleotide
ccgugccaugcagcagccg

SEQ ID NO: 2976247 - RNA, 19 nt, Artificial Sequence
  Description of Artificial Sequence: Synthetic oligonucleotide
ggggcccuggcuccucagu

SEQ ID NO: 2976248 - RNA, 19 nt, Artificial Sequence
  Description of Artificial Sequence: Synthetic oligonucleotide
gccgugguccugugugggu

SEQ ID NO: 2976249 - RNA, 19 nt, Artificial Sequence
  Description of Artificial Sequence: Synthetic oligonucleotide
cccuagguccccaguugau

SEQ ID NO: 2976250 - RNA, 19 nt, Artificial Sequence
  Description of Artificial Sequence: Synthetic oligonucleotide
gcagcagccgauggcgcuu

SEQ ID NO: 2976251 - RNA, 19 nt, Artificial Sequence
  Description of Artificial Sequence: Synthetic oligonucleotide
cgcuugagguagcacucgu

SEQ ID NO: 2976252 - RNA, 19 nt, Artificial Sequence
  Description of Artificial Sequence: Synthetic oligonucleotide
ccgugguccuguguggguu

SEQ ID NO: 2976253 - RNA, 19 nt, Artificial Sequence
  Description of Artificial Sequence: Synthetic oligonucleotide
ggguucuggguggcaccau

SEQ ID NO: 2976254 - RNA, 19 nt, Artificial Sequence
  Description of Artificial Sequence: Synthetic oligonucleotide
ccccaacaauuauguccuu

SEQ ID NO: 2976255 - RNA, 19 nt, Artificial Sequence
  Description of Artificial Sequence: Synthetic oligonucleotide
ccaugccccugugcagcuu

SEQ ID NO: 2976256 - RNA, 19 nt, Artificial Sequence
  Description of Artificial Sequence: Synthetic oligonucleotide
aaagaaagcacaucggucg

SEQ ID NO: 2976257 - RNA, 19 nt, Artificial Sequence
  Description of Artificial Sequence: Synthetic oligonucleotide
aauuauaaucaucugacga

SEQ ID NO: 2976258 - RNA, 19 nt, Artificial Sequence
  Description of Artificial Sequence: Synthetic oligonucleotide
caugaaaugggaaagaaag

SEQ ID NO: 2976259 - RNA, 19 nt, Artificial Sequence
  Description of Artificial Sequence: Synthetic oligonucleotide
ugggaaagaaagcacaucg

SEQ ID NO: 2976260 - RNA, 19 nt, Artificial Sequence
  Description of Artificial Sequence: Synthetic oligonucleotide
aaagcuucaguagaggccc

SEQ ID NO: 2976261 - RNA, 19 nt, Artificial Sequence
  Description of Artificial Sequence: Synthetic oligonucleotide
caaauuauaaucaucugac

SEQ ID NO: 2976262 - RNA, 19 nt, Artificial Sequence
  Description of Artificial Sequence: Synthetic oligonucleotide
aaauuauaaucaucugacg

SEQ ID NO: 2976263 - RNA, 19 nt, Artificial Sequence
  Description of Artificial Sequence: Synthetic oligonucleotide
auuauaaucaucugacgag

SEQ ID NO: 2976264 - RNA, 19 nt, Artificial Sequence
  Description of Artificial Sequence: Synthetic oligonucleotide
aguaaucuucauuuucucc

SEQ ID NO: 2976265 - RNA, 19 nt, Artificial Sequence
  Description of Artificial Sequence: Synthetic oligonucleotide
uuguugucaacacagauaa

SEQ ID NO: 2976266 - RNA, 19 nt, Artificial Sequence
  Description of Artificial Sequence: Synthetic oligonucleotide
ucccaaauuauaaucaucu

SEQ ID NO: 2976267 - RNA, 19 nt, Artificial Sequence
  Description of Artificial Sequence: Synthetic oligonucleotide
uucauuuucucccaaauua

SEQ ID NO: 2976268 - RNA, 19 nt, Artificial Sequence
  Description of Artificial Sequence: Synthetic oligonucleotide
ucagauucucaugaaaugg

SEQ ID NO: 2976269 - RNA, 19 nt, Artificial Sequence
  Description of Artificial Sequence: Synthetic oligonucleotide
ugaaaugggaaagaaagca

SEQ ID NO: 2976270 - RNA, 19 nt, Artificial Sequence
  Description of Artificial Sequence: Synthetic oligonucleotide
uguacucuaucucagggca

SEQ ID NO: 2976271 - RNA, 19 nt, Artificial Sequence
  Description of Artificial Sequence: Synthetic oligonucleotide
uuauaaucaucugacgagg

SEQ ID NO: 2976272 - RNA, 19 nt, Artificial Sequence
  Description of Artificial Sequence: Synthetic oligonucleotide
auuguacucuaucucaggg

SEQ ID NO: 2976273 - RNA, 19 nt, Artificial Sequence
  Description of Artificial Sequence: Synthetic oligonucleotide
ucuuuugccacucagccuc

SEQ ID NO: 2976274 - RNA, 19 nt, Artificial Sequence
  Description of Artificial Sequence: Synthetic oligonucleotide
auuaaugugcugaauacuc

SEQ ID NO: 2976275 - RNA, 19 nt, Artificial Sequence
  Description of Artificial Sequence: Synthetic oligonucleotide
aacacagauaauccccagg

SEQ ID NO: 2976276 - RNA, 19 nt, Artificial Sequence
  Description of Artificial Sequence: Synthetic oligonucleotide
uugucaacacagauaaucc

SEQ ID NO: 2976277 - RNA, 19 nt, Artificial Sequence
  Description of Artificial Sequence: Synthetic oligonucleotide
uguagauccuauuaaugug

SEQ ID NO: 2976278 - RNA, 19 nt, Artificial Sequence
  Description of Artificial Sequence: Synthetic oligonucleotide
aggucaaaauucuucacuc

SEQ ID NO: 2976279 - RNA, 19 nt, Artificial Sequence
  Description of Artificial Sequence: Synthetic oligonucleotide
uucuucacuccuaaaauac

SEQ ID NO: 2976280 - RNA, 19 nt, Artificial Sequence
  Description of Artificial Sequence: Synthetic oligonucleotide
acagauaauccccagguca

SEQ ID NO: 2976281 - RNA, 19 nt, Artificial Sequence
  Description of Artificial Sequence: Synthetic oligonucleotide
uuucagauucucaugaaau

SEQ ID NO: 2976282 - RNA, 19 nt, Artificial Sequence
  Description of Artificial Sequence: Synthetic oligonucleotide
gugggugaagcccagaagg

SEQ ID NO: 2976283 - RNA, 19 nt, Artificial Sequence
  Description of Artificial Sequence: Synthetic oligonucleotide
cuauuaaugugcugaauac

SEQ ID NO: 2976284 - RNA, 19 nt, Artificial Sequence
  Description of Artificial Sequence: Synthetic oligonucleotide
aauacucuuguugucaaca

SEQ ID NO: 2976285 - RNA, 19 nt, Artificial Sequence
  Description of Artificial Sequence: Synthetic oligonucleotide
uucucccaaauuauaauca

SEQ ID NO: 2976286 - RNA, 19 nt, Artificial Sequence
  Description of Artificial Sequence: Synthetic oligonucleotide
cuucacuccuaaaauaccc

SEQ ID NO: 2976287 - RNA, 19 nt, Artificial Sequence
  Description of Artificial Sequence: Synthetic oligonucleotide
aagcacaucggucgggacg

SEQ ID NO: 2976288 - RNA, 19 nt, Artificial Sequence
  Description of Artificial Sequence: Synthetic oligonucleotide
ugcuuucagauucucauga

SEQ ID NO: 2976289 - RNA, 19 nt, Artificial Sequence
  Description of Artificial Sequence: Synthetic oligonucleotide
ucaaagcuucaguagaggc

SEQ ID NO: 2976290 - RNA, 19 nt, Artificial Sequence
  Description of Artificial Sequence: Synthetic oligonucleotide
aagaaagcacaucggucgg

SEQ ID NO: 2976291 - RNA, 19 nt, Artificial Sequence
  Description of Artificial Sequence: Synthetic oligonucleotide
caucuuuugccacucagcc

SEQ ID NO: 2976292 - RNA, 19 nt, Artificial Sequence
  Description of Artificial Sequence: Synthetic oligonucleotide
uucagauucucaugaaaug

SEQ ID NO: 2976293 - RNA, 19 nt, Artificial Sequence
  Description of Artificial Sequence: Synthetic oligonucleotide
uucaauuccuccagcacca

SEQ ID NO: 2976294 - RNA, 19 nt, Artificial Sequence
  Description of Artificial Sequence: Synthetic oligonucleotide
uauaaucaucugacgaggc

SEQ ID NO: 2976295 - RNA, 19 nt, Artificial Sequence
  Description of Artificial Sequence: Synthetic oligonucleotide
cagauucucaugaaauggg

SEQ ID NO: 2976296 - RNA, 19 nt, Artificial Sequence
  Description of Artificial Sequence: Synthetic oligonucleotide
gauccuauuaaugugcuga

SEQ ID NO: 2976297 - RNA, 19 nt, Artificial Sequence
  Description of Artificial Sequence: Synthetic oligonucleotide
aaaugggaaagaaagcaca

SEQ ID NO: 2976298 - RNA, 19 nt, Artificial Sequence
  Description of Artificial Sequence: Synthetic oligonucleotide
ugguuguacaucuuuugcc

SEQ ID NO: 2976299 - RNA, 19 nt, Artificial Sequence
  Description of Artificial Sequence: Synthetic oligonucleotide
gguguaucgauucaauucc

SEQ ID NO: 2976300 - RNA, 19 nt, Artificial Sequence
  Description of Artificial Sequence: Synthetic oligonucleotide
ugcugaauacucuuguugu

SEQ ID NO: 2976301 - RNA, 19 nt, Artificial Sequence
  Description of Artificial Sequence: Synthetic oligonucleotide
uaucgauucaauuccucca

SEQ ID NO: 2976302 - RNA, 19 nt, Artificial Sequence
  Description of Artificial Sequence: Synthetic oligonucleotide
guugucaacacagauaauc

SEQ ID NO: 2976303 - RNA, 19 nt, Artificial Sequence
  Description of Artificial Sequence: Synthetic oligonucleotide
uacaucuuuugccacucag

SEQ ID NO: 2976304 - RNA, 19 nt, Artificial Sequence
  Description of Artificial Sequence: Synthetic oligonucleotide
ugucaacacagauaauccc

SEQ ID NO: 2976305 - RNA, 19 nt, Artificial Sequence
  Description of Artificial Sequence: Synthetic oligonucleotide
uucucaugaaaugggaaag

SEQ ID NO: 2976306 - RNA, 19 nt, Artificial Sequence
  Description of Artificial Sequence: Synthetic oligonucleotide
cauaguaaucuucauuuuc

SEQ ID NO: 2976307 - RNA, 19 nt, Artificial Sequence
  Description of Artificial Sequence: Synthetic oligonucleotide
ucaacacagauaaucccca

SEQ ID NO: 2976308 - RNA, 19 nt, Artificial Sequence
  Description of Artificial Sequence: Synthetic oligonucleotide
aauccccaggucaaaauuc

SEQ ID NO: 2976309 - RNA, 19 nt, Artificial Sequence
  Description of Artificial Sequence: Synthetic oligonucleotide
acacagauaauccccaggu

SEQ ID NO: 2976310 - RNA, 19 nt, Artificial Sequence
  Description of Artificial Sequence: Synthetic oligonucleotide
uucacuccuaaaauacccc

SEQ ID NO: 2976311 - RNA, 19 nt, Artificial Sequence
  Description of Artificial Sequence: Synthetic oligonucleotide
uaaucaucugacgaggcug

SEQ ID NO: 2976312 - RNA, 19 nt, Artificial Sequence
  Description of Artificial Sequence: Synthetic oligonucleotide
uuaaugugcugaauacucu

SEQ ID NO: 2976313 - RNA, 19 nt, Artificial Sequence
  Description of Artificial Sequence: Synthetic oligonucleotide
ucuucacuccuaaaauacc

SEQ ID NO: 2976314 - RNA, 19 nt, Artificial Sequence
  Description of Artificial Sequence: Synthetic oligonucleotide
uaucucagggcaucaaagc

SEQ ID NO: 2976315 - RNA, 19 nt, Artificial Sequence
  Description of Artificial Sequence: Synthetic oligonucleotide
accauuguacucuaucuca

SEQ ID NO: 2976316 - RNA, 19 nt, Artificial Sequence
  Description of Artificial Sequence: Synthetic oligonucleotide
guaucgauucaauuccucc

SEQ ID NO: 2976317 - RNA, 19 nt, Artificial Sequence
  Description of Artificial Sequence: Synthetic oligonucleotide
cuaucucagggcaucaaag

SEQ ID NO: 2976318 - RNA, 19 nt, Artificial Sequence
  Description of Artificial Sequence: Synthetic oligonucleotide
aucgauucaauuccuccag

SEQ ID NO: 2976319 - RNA, 19 nt, Artificial Sequence
  Description of Artificial Sequence: Synthetic oligonucleotide
aaucaucugacgaggcugg

SEQ ID NO: 2976320 - RNA, 19 nt, Artificial Sequence
  Description of Artificial Sequence: Synthetic oligonucleotide
ucauuuucucccaaauuau

SEQ ID NO: 2976321 - RNA, 19 nt, Artificial Sequence
  Description of Artificial Sequence: Synthetic oligonucleotide
auucucaugaaaugggaaa

SEQ ID NO: 2976322 - RNA, 19 nt, Artificial Sequence
  Description of Artificial Sequence: Synthetic oligonucleotide
guagauccuauuaaugugc

SEQ ID NO: 2976323 - RNA, 19 nt, Artificial Sequence
  Description of Artificial Sequence: Synthetic oligonucleotide
auaguaaucuucauuuucu

SEQ ID NO: 2976324 - RNA, 19 nt, Artificial Sequence
  Description of Artificial Sequence: Synthetic oligonucleotide
acucuuguugucaacacag

SEQ ID NO: 2976325 - RNA, 19 nt, Artificial Sequence
  Description of Artificial Sequence: Synthetic oligonucleotide
caucugacgaggcuggccg

SEQ ID NO: 2976326 - RNA, 19 nt, Artificial Sequence
  Description of Artificial Sequence: Synthetic oligonucleotide
ucuuguugucaacacagau

SEQ ID NO: 2976327 - RNA, 19 nt, Artificial Sequence
  Description of Artificial Sequence: Synthetic oligonucleotide
gauucaauuccuccagcac

SEQ ID NO: 2976328 - RNA, 19 nt, Artificial Sequence
  Description of Artificial Sequence: Synthetic oligonucleotide
uauuaaugugcugaauacu

SEQ ID NO: 2976329 - RNA, 19 nt, Artificial Sequence
  Description of Artificial Sequence: Synthetic oligonucleotide
gucaacacagauaaucccc

SEQ ID NO: 2976330 - RNA, 19 nt, Artificial Sequence
  Description of Artificial Sequence: Synthetic oligonucleotide
uuguacucuaucucagggc

SEQ ID NO: 2976331 - RNA, 19 nt, Artificial Sequence
  Description of Artificial Sequence: Synthetic oligonucleotide
caucaaagcuucaguagag

SEQ ID NO: 2976332 - RNA, 19 nt, Artificial Sequence
  Description of Artificial Sequence: Synthetic oligonucleotide
acaucuuuugccacucagc

SEQ ID NO: 2976333 - RNA, 19 nt, Artificial Sequence
  Description of Artificial Sequence: Synthetic oligonucleotide
aaagcacaucggucgggac

SEQ ID NO: 2976334 - RNA, 19 nt, Artificial Sequence
  Description of Artificial Sequence: Synthetic oligonucleotide
cauuguacucuaucucagg

SEQ ID NO: 2976335 - RNA, 19 nt, Artificial Sequence
  Description of Artificial Sequence: Synthetic oligonucleotide
auaaucaucugacgaggcu

SEQ ID NO: 2976336 - RNA, 19 nt, Artificial Sequence
  Description of Artificial Sequence: Synthetic oligonucleotide
acuccuaaaauaccccuga

SEQ ID NO: 2976337 - RNA, 19 nt, Artificial Sequence
  Description of Artificial Sequence: Synthetic oligonucleotide
cugguuguacaucuuuugc

SEQ ID NO: 2976338 - RNA, 19 nt, Artificial Sequence
  Description of Artificial Sequence: Synthetic oligonucleotide
ugacagaguccaugggugg

SEQ ID NO: 2976339 - RNA, 19 nt, Artificial Sequence
  Description of Artificial Sequence: Synthetic oligonucleotide
ucaaaauucuucacuccua

SEQ ID NO: 2976340 - RNA, 19 nt, Artificial Sequence
  Description of Artificial Sequence: Synthetic oligonucleotide
uucuccugguuguacaucu

SEQ ID NO: 2976341 - RNA, 19 nt, Artificial Sequence
  Description of Artificial Sequence: Synthetic oligonucleotide
ucuaucucagggcaucaaa

SEQ ID NO: 2976342 - RNA, 19 nt, Artificial Sequence
  Description of Artificial Sequence: Synthetic oligonucleotide
ugugggugaagcccagaag

SEQ ID NO: 2976343 - RNA, 19 nt, Artificial Sequence
  Description of Artificial Sequence: Synthetic oligonucleotide
uuuucuuccuguagauccu

SEQ ID NO: 2976344 - RNA, 19 nt, Artificial Sequence
  Description of Artificial Sequence: Synthetic oligonucleotide
gugcugaauacucuuguug

SEQ ID NO: 2976345 - RNA, 19 nt, Artificial Sequence
  Description of Artificial Sequence: Synthetic oligonucleotide
aaugugcugaauacucuug

SEQ ID NO: 2976346 - RNA, 19 nt, Artificial Sequence
  Description of Artificial Sequence: Synthetic oligonucleotide
uacucuuguugucaacaca

SEQ ID NO: 2976347 - RNA, 19 nt, Artificial Sequence
  Description of Artificial Sequence: Synthetic oligonucleotide
aaaauucuucacuccuaaa

SEQ ID NO: 2976348 - RNA, 19 nt, Artificial Sequence
  Description of Artificial Sequence: Synthetic oligonucleotide
uagauccuauuaaugugcu

SEQ ID NO: 2976349 - RNA, 19 nt, Artificial Sequence
  Description of Artificial Sequence: Synthetic oligonucleotide
uccaccauuguacucuauc

SEQ ID NO: 2976350 - RNA, 19 nt, Artificial Sequence
  Description of Artificial Sequence: Synthetic oligonucleotide
uugccacucagccucggag

SEQ ID NO: 2976351 - RNA, 19 nt, Artificial Sequence
  Description of Artificial Sequence: Synthetic oligonucleotide
ucacuccuaaaauaccccu

SEQ ID NO: 2976352 - RNA, 19 nt, Artificial Sequence
  Description of Artificial Sequence: Synthetic oligonucleotide
gaagcccagaaggugacag

SEQ ID NO: 2976353 - RNA, 19 nt, Artificial Sequence
  Description of Artificial Sequence: Synthetic oligonucleotide
ugaauacucuuguugucaa

SEQ ID NO: 2976354 - RNA, 19 nt, Artificial Sequence
  Description of Artificial Sequence: Synthetic oligonucleotide
uguaucgauucaauuccuc

SEQ ID NO: 2976355 - RNA, 19 nt, Artificial Sequence
  Description of Artificial Sequence: Synthetic oligonucleotide
auucuucacuccuaaaaua

SEQ ID NO: 2976356 - RNA, 19 nt, Artificial Sequence
  Description of Artificial Sequence: Synthetic oligonucleotide
gaaggugacagaguccaug

SEQ ID NO: 2976357 - RNA, 19 nt, Artificial Sequence
  Description of Artificial Sequence: Synthetic oligonucleotide
aucaaagcuucaguagagg

SEQ ID NO: 2976358 - RNA, 19 nt, Artificial Sequence
  Description of Artificial Sequence: Synthetic oligonucleotide
aaugggaaagaaagcacau

SEQ ID NO: 2976359 - RNA, 19 nt, Artificial Sequence
  Description of Artificial Sequence: Synthetic oligonucleotide
ggcaucaaagcuucaguag

SEQ ID NO: 2976360 - RNA, 19 nt, Artificial Sequence
  Description of Artificial Sequence: Synthetic oligonucleotide
uucaguagaggccccugcu

SEQ ID NO: 2976361 - RNA, 19 nt, Artificial Sequence
  Description of Artificial Sequence: Synthetic oligonucleotide
uaaugugcugaauacucuu

SEQ ID NO: 2976362 - RNA, 19 nt, Artificial Sequence
  Description of Artificial Sequence: Synthetic oligonucleotide
uaauccccaggucaaaauu

SEQ ID NO: 2976363 - RNA, 19 nt, Artificial Sequence
  Description of Artificial Sequence: Synthetic oligonucleotide
uccuguagauccuauuaau

SEQ ID NO: 2976364 - RNA, 19 nt, Artificial Sequence
  Description of Artificial Sequence: Synthetic oligonucleotide
ucucccaaauuauaaucau

SEQ ID NO: 2976365 - RNA, 19 nt, Artificial Sequence
  Description of Artificial Sequence: Synthetic oligonucleotide
uuguacaucuuuugccacu

SEQ ID NO: 2976366 - RNA, 19 nt, Artificial Sequence
  Description of Artificial Sequence: Synthetic oligonucleotide
ucgauucaauuccuccagc

SEQ ID NO: 2976367 - RNA, 19 nt, Artificial Sequence
  Description of Artificial Sequence: Synthetic oligonucleotide
aaguccccugcuuucagau

SEQ ID NO: 2976368 - RNA, 19 nt, Artificial Sequence
  Description of Artificial Sequence: Synthetic oligonucleotide
ucucagggcaucaaagcuu

SEQ ID NO: 2976369 - RNA, 19 nt, Artificial Sequence
  Description of Artificial Sequence: Synthetic oligonucleotide
uaguaaucuucauuuucuc

SEQ ID NO: 2976370 - RNA, 19 nt, Artificial Sequence
  Description of Artificial Sequence: Synthetic oligonucleotide
gguuguacaucuuuugcca

SEQ ID NO: 2976371 - RNA, 19 nt, Artificial Sequence
  Description of Artificial Sequence: Synthetic oligonucleotide
aaaguccccugcuuucaga

SEQ ID NO: 2976372 - RNA, 19 nt, Artificial Sequence
  Description of Artificial Sequence: Synthetic oligonucleotide
augugcugaauacucuugu

SEQ ID NO: 2976373 - RNA, 19 nt, Artificial Sequence
  Description of Artificial Sequence: Synthetic oligonucleotide
cucagggcaucaaagcuuc

SEQ ID NO: 2976374 - RNA, 19 nt, Artificial Sequence
  Description of Artificial Sequence: Synthetic oligonucleotide
agggacagggcucugucca

SEQ ID NO: 2976375 - RNA, 19 nt, Artificial Sequence
  Description of Artificial Sequence: Synthetic oligonucleotide
ccaaauuauaaucaucuga

SEQ ID NO: 2976376 - RNA, 19 nt, Artificial Sequence
  Description of Artificial Sequence: Synthetic oligonucleotide
cuuguugucaacacagaua

SEQ ID NO: 2976377 - RNA, 19 nt, Artificial Sequence
  Description of Artificial Sequence: Synthetic oligonucleotide
ucggaguugugggugaagc

SEQ ID NO: 2976378 - RNA, 19 nt, Artificial Sequence
  Description of Artificial Sequence: Synthetic oligonucleotide
uagaggccccugcucaggg

SEQ ID NO: 2976379 - RNA, 19 nt, Artificial Sequence
  Description of Artificial Sequence: Synthetic oligonucleotide
gaaaguccccugcuuucag

SEQ ID NO: 2976380 - RNA, 19 nt, Artificial Sequence
  Description of Artificial Sequence: Synthetic oligonucleotide
uugugggugaagcccagaa

SEQ ID NO: 2976381 - RNA, 19 nt, Artificial Sequence
  Description of Artificial Sequence: Synthetic oligonucleotide
cucccaaauuauaaucauc

SEQ ID NO: 2976382 - RNA, 19 nt, Artificial Sequence
  Description of Artificial Sequence: Synthetic oligonucleotide
auaauccccaggucaaaau

SEQ ID NO: 2976383 - RNA, 19 nt, Artificial Sequence
  Description of Artificial Sequence: Synthetic oligonucleotide
augggaaagaaagcacauc

SEQ ID NO: 2976384 - RNA, 19 nt, Artificial Sequence
  Description of Artificial Sequence: Synthetic oligonucleotide
cuguagauccuauuaaugu

SEQ ID NO: 2976385 - RNA, 19 nt, Artificial Sequence
  Description of Artificial Sequence: Synthetic oligonucleotide
auggguggcugucaccguc

SEQ ID NO: 2976386 - RNA, 19 nt, Artificial Sequence
  Description of Artificial Sequence: Synthetic oligonucleotide
aaucuucauuuucucccaa

SEQ ID NO: 2976387 - RNA, 19 nt, Artificial Sequence
  Description of Artificial Sequence: Synthetic oligonucleotide
ucauaguaaucuucauuuu

SEQ ID NO: 2976388 - RNA, 19 nt, Artificial Sequence
  Description of Artificial Sequence: Synthetic oligonucleotide
ucaggaugucauaguaauc

SEQ ID NO: 2976389 - RNA, 19 nt, Artificial Sequence
  Description of Artificial Sequence: Synthetic oligonucleotide
ugggugaagcccagaaggu

SEQ ID NO: 2976390 - RNA, 19 nt, Artificial Sequence
  Description of Artificial Sequence: Synthetic oligonucleotide
guuguacaucuuuugccac

SEQ ID NO: 2976391 - RNA, 19 nt, Artificial Sequence
  Description of Artificial Sequence: Synthetic oligonucleotide
uguacaucuuuugccacuc

SEQ ID NO: 2976392 - RNA, 19 nt, Artificial Sequence
  Description of Artificial Sequence: Synthetic oligonucleotide
gugacagaguccaugggug

SEQ ID NO: 2976393 - RNA, 19 nt, Artificial Sequence
  Description of Artificial Sequence: Synthetic oligonucleotide
guggcugucaccgucagga

SEQ ID NO: 2976394 - RNA, 19 nt, Artificial Sequence
  Description of Artificial Sequence: Synthetic oligonucleotide
ggucaaaauucuucacucc

SEQ ID NO: 2976395 - RNA, 19 nt, Artificial Sequence
  Description of Artificial Sequence: Synthetic oligonucleotide
ucaguagaggccccugcuc

SEQ ID NO: 2976396 - RNA, 19 nt, Artificial Sequence
  Description of Artificial Sequence: Synthetic oligonucleotide
agcccagaaggugacagag

SEQ ID NO: 2976397 - RNA, 19 nt, Artificial Sequence
  Description of Artificial Sequence: Synthetic oligonucleotide
caaaauucuucacuccuaa

SEQ ID NO: 2976398 - RNA, 19 nt, Artificial Sequence
  Description of Artificial Sequence: Synthetic oligonucleotide
cacuccuaaaauaccccug

SEQ ID NO: 2976399 - RNA, 19 nt, Artificial Sequence
  Description of Artificial Sequence: Synthetic oligonucleotide
gaauacucuuguugucaac

SEQ ID NO: 2976400 - RNA, 19 nt, Artificial Sequence
  Description of Artificial Sequence: Synthetic oligonucleotide
aucuuuugccacucagccu

SEQ ID NO: 2976401 - RNA, 19 nt, Artificial Sequence
  Description of Artificial Sequence: Synthetic oligonucleotide
aguagaggccccugcucag

SEQ ID NO: 2976402 - RNA, 19 nt, Artificial Sequence
  Description of Artificial Sequence: Synthetic oligonucleotide
agauccuauuaaugugcug

SEQ ID NO: 2976403 - RNA, 19 nt, Artificial Sequence
  Description of Artificial Sequence: Synthetic oligonucleotide
gauucucaugaaaugggaa

SEQ ID NO: 2976404 - RNA, 19 nt, Artificial Sequence
  Description of Artificial Sequence: Synthetic oligonucleotide
cuucaguagaggccccugc

SEQ ID NO: 2976405 - RNA, 19 nt, Artificial Sequence
  Description of Artificial Sequence: Synthetic oligonucleotide
ggaguugugggugaagccc

SEQ ID NO: 2976406 - RNA, 19 nt, Artificial Sequence
  Description of Artificial Sequence: Synthetic oligonucleotide
caccauuguacucuaucuc

SEQ ID NO: 2976407 - RNA, 19 nt, Artificial Sequence
  Description of Artificial Sequence: Synthetic oligonucleotide
agauucucaugaaauggga

SEQ ID NO: 2976408 - RNA, 19 nt, Artificial Sequence
  Description of Artificial Sequence: Synthetic oligonucleotide
cuuucagauucucaugaaa

SEQ ID NO: 2976409 - RNA, 19 nt, Artificial Sequence
  Description of Artificial Sequence: Synthetic oligonucleotide
ccuguagauccuauuaaug

SEQ ID NO: 2976410 - RNA, 19 nt, Artificial Sequence
  Description of Artificial Sequence: Synthetic oligonucleotide
cugcuuucagauucucaug

SEQ ID NO: 2976411 - RNA, 19 nt, Artificial Sequence
  Description of Artificial Sequence: Synthetic oligonucleotide
agaaagcacaucggucggg

SEQ ID NO: 2976412 - RNA, 19 nt, Artificial Sequence
  Description of Artificial Sequence: Synthetic oligonucleotide
ugcagccuggcuccggugu

SEQ ID NO: 2976413 - RNA, 19 nt, Artificial Sequence
  Description of Artificial Sequence: Synthetic oligonucleotide
caacacagauaauccccag

SEQ ID NO: 2976414 - RNA, 19 nt, Artificial Sequence
  Description of Artificial Sequence: Synthetic oligonucleotide
cuuccuguagauccuauua

SEQ ID NO: 2976415 - RNA, 19 nt, Artificial Sequence
  Description of Artificial Sequence: Synthetic oligonucleotide
ucugacgaggcuggccggg

SEQ ID NO: 2976416 - RNA, 19 nt, Artificial Sequence
  Description of Artificial Sequence: Synthetic oligonucleotide
ucaucugacgaggcuggcc

SEQ ID NO: 2976417 - RNA, 19 nt, Artificial Sequence
  Description of Artificial Sequence: Synthetic oligonucleotide
uccugguuguacaucuuuu

SEQ ID NO: 2976418 - RNA, 19 nt, Artificial Sequence
  Description of Artificial Sequence: Synthetic oligonucleotide
ugugcugaauacucuuguu

SEQ ID NO: 2976419 - RNA, 19 nt, Artificial Sequence
  Description of Artificial Sequence: Synthetic oligonucleotide
ugccacucagccucggagu

SEQ ID NO: 2976420 - RNA, 19 nt, Artificial Sequence
  Description of Artificial Sequence: Synthetic oligonucleotide
caggaugucauaguaaucu

SEQ ID NO: 2976421 - RNA, 19 nt, Artificial Sequence
  Description of Artificial Sequence: Synthetic oligonucleotide
gucaggaugucauaguaau

SEQ ID NO: 2976422 - RNA, 19 nt, Artificial Sequence
  Description of Artificial Sequence: Synthetic oligonucleotide
uuugccacucagccucgga

SEQ ID NO: 2976423 - RNA, 19 nt, Artificial Sequence
  Description of Artificial Sequence: Synthetic oligonucleotide
uacucuaucucagggcauc

SEQ ID NO: 2976424 - RNA, 19 nt, Artificial Sequence
  Description of Artificial Sequence: Synthetic oligonucleotide
auccuauuaaugugcugaa

SEQ ID NO: 2976425 - RNA, 19 nt, Artificial Sequence
  Description of Artificial Sequence: Synthetic oligonucleotide
uccgguguaucgauucaau

SEQ ID NO: 2976426 - RNA, 19 nt, Artificial Sequence
  Description of Artificial Sequence: Synthetic oligonucleotide
ggaaagaaagcacaucggu

SEQ ID NO: 2976427 - RNA, 19 nt, Artificial Sequence
  Description of Artificial Sequence: Synthetic oligonucleotide
gacagaguccauggguggc

SEQ ID NO: 2976428 - RNA, 19 nt, Artificial Sequence
  Description of Artificial Sequence: Synthetic oligonucleotide
gaaagcacaucggucggga

SEQ ID NO: 2976429 - RNA, 19 nt, Artificial Sequence
  Description of Artificial Sequence: Synthetic oligonucleotide
cuuuugccacucagccucg

SEQ ID NO: 2976430 - RNA, 19 nt, Artificial Sequence
  Description of Artificial Sequence: Synthetic oligonucleotide
gauaauccccaggucaaaa

SEQ ID NO: 2976431 - RNA, 19 nt, Artificial Sequence
  Description of Artificial Sequence: Synthetic oligonucleotide
agcacaucggucgggacgu

SEQ ID NO: 2976432 - RNA, 19 nt, Artificial Sequence
  Description of Artificial Sequence: Synthetic oligonucleotide
cagauaauccccaggucaa

SEQ ID NO: 2976433 - RNA, 19 nt, Artificial Sequence
  Description of Artificial Sequence: Synthetic oligonucleotide
ucuguccaccauuguacuc

SEQ ID NO: 2976434 - RNA, 19 nt, Artificial Sequence
  Description of Artificial Sequence: Synthetic oligonucleotide
cucagccucggaguugugg

SEQ ID NO: 2976435 - RNA, 19 nt, Artificial Sequence
  Description of Artificial Sequence: Synthetic oligonucleotide
aggaugucauaguaaucuu

SEQ ID NO: 2976436 - RNA, 19 nt, Artificial Sequence
  Description of Artificial Sequence: Synthetic oligonucleotide
uggguggcugucaccguca

SEQ ID NO: 2976437 - RNA, 19 nt, Artificial Sequence
  Description of Artificial Sequence: Synthetic oligonucleotide
cacagauaauccccagguc

SEQ ID NO: 2976438 - RNA, 19 nt, Artificial Sequence
  Description of Artificial Sequence: Synthetic oligonucleotide
ccuauuaaugugcugaaua

SEQ ID NO: 2976439 - RNA, 19 nt, Artificial Sequence
  Description of Artificial Sequence: Synthetic oligonucleotide
aagcuucaguagaggcccc

SEQ ID NO: 2976440 - RNA, 19 nt, Artificial Sequence
  Description of Artificial Sequence: Synthetic oligonucleotide
augucauaguaaucuucau

SEQ ID NO: 2976441 - RNA, 19 nt, Artificial Sequence
  Description of Artificial Sequence: Synthetic oligonucleotide
ccauuguacucuaucucag

SEQ ID NO: 2976442 - RNA, 19 nt, Artificial Sequence
  Description of Artificial Sequence: Synthetic oligonucleotide
accgucaggaugucauagu

SEQ ID NO: 2976443 - RNA, 19 nt, Artificial Sequence
  Description of Artificial Sequence: Synthetic oligonucleotide
aucugacgaggcuggccgg

SEQ ID NO: 2976444 - RNA, 19 nt, Artificial Sequence
  Description of Artificial Sequence: Synthetic oligonucleotide
cagggcaucaaagcuucag

SEQ ID NO: 2976445 - RNA, 19 nt, Artificial Sequence
  Description of Artificial Sequence: Synthetic oligonucleotide
cuccuaaaauaccccugac

SEQ ID NO: 2976446 - RNA, 19 nt, Artificial Sequence
  Description of Artificial Sequence: Synthetic oligonucleotide
gaguugugggugaagccca

SEQ ID NO: 2976447 - RNA, 19 nt, Artificial Sequence
  Description of Artificial Sequence: Synthetic oligonucleotide
caccgucaggaugucauag

SEQ ID NO: 2976448 - RNA, 19 nt, Artificial Sequence
  Description of Artificial Sequence: Synthetic oligonucleotide
aucaucugacgaggcuggc

SEQ ID NO: 2976449 - RNA, 19 nt, Artificial Sequence
  Description of Artificial Sequence: Synthetic oligonucleotide
cucaugaaaugggaaagaa

SEQ ID NO: 2976450 - RNA, 19 nt, Artificial Sequence
  Description of Artificial Sequence: Synthetic oligonucleotide
caggucaaaauucuucacu

SEQ ID NO: 2976451 - RNA, 19 nt, Artificial Sequence
  Description of Artificial Sequence: Synthetic oligonucleotide
uccauggguggcugucacc

SEQ ID NO: 2976452 - RNA, 19 nt, Artificial Sequence
  Description of Artificial Sequence: Synthetic oligonucleotide
ccauggguggcugucaccg

SEQ ID NO: 2976453 - RNA, 19 nt, Artificial Sequence
  Description of Artificial Sequence: Synthetic oligonucleotide
cgguguaucgauucaauuc

SEQ ID NO: 2976454 - RNA, 19 nt, Artificial Sequence
  Description of Artificial Sequence: Synthetic oligonucleotide
ccugguuguacaucuuuug

SEQ ID NO: 2976455 - RNA, 19 nt, Artificial Sequence
  Description of Artificial Sequence: Synthetic oligonucleotide
uguugucaacacagauaau

SEQ ID NO: 2976456 - RNA, 19 nt, Artificial Sequence
  Description of Artificial Sequence: Synthetic oligonucleotide
agaggccccugcucagggg

SEQ ID NO: 2976457 - RNA, 19 nt, Artificial Sequence
  Description of Artificial Sequence: Synthetic oligonucleotide
gcucuguccaccauuguac

SEQ ID NO: 2976458 - RNA, 19 nt, Artificial Sequence
  Description of Artificial Sequence: Synthetic oligonucleotide
uccuauuaaugugcugaau

SEQ ID NO: 2976459 - RNA, 19 nt, Artificial Sequence
  Description of Artificial Sequence: Synthetic oligonucleotide
ucaauuccuccagcaccag

SEQ ID NO: 2976460 - RNA, 19 nt, Artificial Sequence
  Description of Artificial Sequence: Synthetic oligonucleotide
ggugaagcccagaagguga

SEQ ID NO: 2976461 - RNA, 19 nt, Artificial Sequence
  Description of Artificial Sequence: Synthetic oligonucleotide
cccaaauuauaaucaucug

SEQ ID NO: 2976462 - RNA, 19 nt, Artificial Sequence
  Description of Artificial Sequence: Synthetic oligonucleotide
ggaugucauaguaaucuuc

SEQ ID NO: 2976463 - RNA, 19 nt, Artificial Sequence
  Description of Artificial Sequence: Synthetic oligonucleotide
auccccaggucaaaauucu

SEQ ID NO: 2976464 - RNA, 19 nt, Artificial Sequence
  Description of Artificial Sequence: Synthetic oligonucleotide
guagaggccccugcucagg

SEQ ID NO: 2976465 - RNA, 19 nt, Artificial Sequence
  Description of Artificial Sequence: Synthetic oligonucleotide
ggugacagaguccaugggu

SEQ ID NO: 2976466 - RNA, 19 nt, Artificial Sequence
  Description of Artificial Sequence: Synthetic oligonucleotide
aggcuggccggggaaaguc

SEQ ID NO: 2976467 - RNA, 19 nt, Artificial Sequence
  Description of Artificial Sequence: Synthetic oligonucleotide
cucuuguugucaacacaga

SEQ ID NO: 2976468 - RNA, 19 nt, Artificial Sequence
  Description of Artificial Sequence: Synthetic oligonucleotide
gcugaauacucuuguuguc

SEQ ID NO: 2976469 - RNA, 19 nt, Artificial Sequence
  Description of Artificial Sequence: Synthetic oligonucleotide
agggcucuguccaccauug

SEQ ID NO: 2976470 - RNA, 19 nt, Artificial Sequence
  Description of Artificial Sequence: Synthetic oligonucleotide
acagaguccauggguggcu

SEQ ID NO: 2976471 - RNA, 19 nt, Artificial Sequence
  Description of Artificial Sequence: Synthetic oligonucleotide
uuucuuccuguagauccua

SEQ ID NO: 2976472 - RNA, 19 nt, Artificial Sequence
  Description of Artificial Sequence: Synthetic oligonucleotide
gacagggcucuguccacca

SEQ ID NO: 2976473 - RNA, 19 nt, Artificial Sequence
  Description of Artificial Sequence: Synthetic oligonucleotide
uguccaccauuguacucua

SEQ ID NO: 2976474 - RNA, 19 nt, Artificial Sequence
  Description of Artificial Sequence: Synthetic oligonucleotide
ccagaaggugacagagucc

SEQ ID NO: 2976475 - RNA, 19 nt, Artificial Sequence
  Description of Artificial Sequence: Synthetic oligonucleotide
ugacgaggcuggccgggga

SEQ ID NO: 2976476 - RNA, 19 nt, Artificial Sequence
  Description of Artificial Sequence: Synthetic oligonucleotide
ggcugucaccgucaggaug

SEQ ID NO: 2976477 - RNA, 19 nt, Artificial Sequence
  Description of Artificial Sequence: Synthetic oligonucleotide
cccaggucaaaauucuuca

SEQ ID NO: 2976478 - RNA, 19 nt, Artificial Sequence
  Description of Artificial Sequence: Synthetic oligonucleotide
ucagggcaucaaagcuuca

SEQ ID NO: 2976479 - RNA, 19 nt, Artificial Sequence
  Description of Artificial Sequence: Synthetic oligonucleotide
agccucggaguugugggug

SEQ ID NO: 2976480 - RNA, 19 nt, Artificial Sequence
  Description of Artificial Sequence: Synthetic oligonucleotide
ugaagcccagaaggugaca

SEQ ID NO: 2976481 - RNA, 19 nt, Artificial Sequence
  Description of Artificial Sequence: Synthetic oligonucleotide
ccaggucaaaauucuucac

SEQ ID NO: 2976482 - RNA, 19 nt, Artificial Sequence
  Description of Artificial Sequence: Synthetic oligonucleotide
ccccaggucaaaauucuuc

SEQ ID NO: 2976483 - RNA, 19 nt, Artificial Sequence
  Description of Artificial Sequence: Synthetic oligonucleotide
ucaccgucaggaugucaua

SEQ ID NO: 2976484 - RNA, 19 nt, Artificial Sequence
  Description of Artificial Sequence: Synthetic oligonucleotide
guccauggguggcugucac

SEQ ID NO: 2976485 - RNA, 19 nt, Artificial Sequence
  Description of Artificial Sequence: Synthetic oligonucleotide
gggcaucaaagcuucagua

SEQ ID NO: 2976486 - RNA, 19 nt, Artificial Sequence
  Description of Artificial Sequence: Synthetic oligonucleotide
acucuaucucagggcauca

SEQ ID NO: 2976487 - RNA, 19 nt, Artificial Sequence
  Description of Artificial Sequence: Synthetic oligonucleotide
gaguccauggguggcuguc

SEQ ID NO: 2976488 - RNA, 19 nt, Artificial Sequence
  Description of Artificial Sequence: Synthetic oligonucleotide
cuucuccugguuguacauc

SEQ ID NO: 2976489 - RNA, 19 nt, Artificial Sequence
  Description of Artificial Sequence: Synthetic oligonucleotide
cuguccaccauuguacucu

SEQ ID NO: 2976490 - RNA, 19 nt, Artificial Sequence
  Description of Artificial Sequence: Synthetic oligonucleotide
gugaagcccagaaggugac

SEQ ID NO: 2976491 - RNA, 19 nt, Artificial Sequence
  Description of Artificial Sequence: Synthetic oligonucleotide
cuggccggggaaagucccc

SEQ ID NO: 2976492 - RNA, 19 nt, Artificial Sequence
  Description of Artificial Sequence: Synthetic oligonucleotide
ggcuccgguguaucgauuc

SEQ ID NO: 2976493 - RNA, 19 nt, Artificial Sequence
  Description of Artificial Sequence: Synthetic oligonucleotide
agauaauccccaggucaaa

SEQ ID NO: 2976494 - RNA, 19 nt, Artificial Sequence
  Description of Artificial Sequence: Synthetic oligonucleotide
ucuccugguuguacaucuu

SEQ ID NO: 2976495 - RNA, 19 nt, Artificial Sequence
  Description of Artificial Sequence: Synthetic oligonucleotide
ugcucaggggcugcagccu

SEQ ID NO: 2976496 - RNA, 19 nt, Artificial Sequence
  Description of Artificial Sequence: Synthetic oligonucleotide
cuucauuuucucccaaauu

SEQ ID NO: 2976497 - RNA, 19 nt, Artificial Sequence
  Description of Artificial Sequence: Synthetic oligonucleotide
gggugaagcccagaaggug

SEQ ID NO: 2976498 - RNA, 19 nt, Artificial Sequence
  Description of Artificial Sequence: Synthetic oligonucleotide
aguccauggguggcuguca

SEQ ID NO: 2976499 - RNA, 19 nt, Artificial Sequence
  Description of Artificial Sequence: Synthetic oligonucleotide
guacaucuuuugccacuca

SEQ ID NO: 2976500 - RNA, 19 nt, Artificial Sequence
  Description of Artificial Sequence: Synthetic oligonucleotide
ugucaccgucaggauguca

SEQ ID NO: 2976501 - RNA, 19 nt, Artificial Sequence
  Description of Artificial Sequence: Synthetic oligonucleotide
cugacgaggcuggccgggg

SEQ ID NO: 2976502 - RNA, 19 nt, Artificial Sequence
  Description of Artificial Sequence: Synthetic oligonucleotide
gacgaggcuggccggggaa

SEQ ID NO: 2976503 - RNA, 19 nt, Artificial Sequence
  Description of Artificial Sequence: Synthetic oligonucleotide
gucaccgucaggaugucau

SEQ ID NO: 2976504 - RNA, 19 nt, Artificial Sequence
  Description of Artificial Sequence: Synthetic oligonucleotide
ggcucuguccaccauugua

SEQ ID NO: 2976505 - RNA, 19 nt, Artificial Sequence
  Description of Artificial Sequence: Synthetic oligonucleotide
ccugcuuucagauucucau

SEQ ID NO: 2976506 - RNA, 19 nt, Artificial Sequence
  Description of Artificial Sequence: Synthetic oligonucleotide
cucggaguugugggugaag

SEQ ID NO: 2976507 - RNA, 19 nt, Artificial Sequence
  Description of Artificial Sequence: Synthetic oligonucleotide
ggaaaguccccugcuuuca

SEQ ID NO: 2976508 - RNA, 19 nt, Artificial Sequence
  Description of Artificial Sequence: Synthetic oligonucleotide
uggccggggaaaguccccu

SEQ ID NO: 2976509 - RNA, 19 nt, Artificial Sequence
  Description of Artificial Sequence: Synthetic oligonucleotide
cagaguccauggguggcug

SEQ ID NO: 2976510 - RNA, 19 nt, Artificial Sequence
  Description of Artificial Sequence: Synthetic oligonucleotide
agcuucaguagaggccccu

SEQ ID NO: 2976511 - RNA, 19 nt, Artificial Sequence
  Description of Artificial Sequence: Synthetic oligonucleotide
cucuguccaccauuguacu

SEQ ID NO: 2976512 - RNA, 19 nt, Artificial Sequence
  Description of Artificial Sequence: Synthetic oligonucleotide
gguggcugucaccgucagg

SEQ ID NO: 2976513 - RNA, 19 nt, Artificial Sequence
  Description of Artificial Sequence: Synthetic oligonucleotide
aguccccugcuuucagauu

SEQ ID NO: 2976514 - RNA, 19 nt, Artificial Sequence
  Description of Artificial Sequence: Synthetic oligonucleotide
acaucggucgggacguuuu

SEQ ID NO: 2976515 - RNA, 19 nt, Artificial Sequence
  Description of Artificial Sequence: Synthetic oligonucleotide
gcuuucagauucucaugaa

SEQ ID NO: 2976516 - RNA, 19 nt, Artificial Sequence
  Description of Artificial Sequence: Synthetic oligonucleotide
agccuggcuccgguguauc

SEQ ID NO: 2976517 - RNA, 19 nt, Artificial Sequence
  Description of Artificial Sequence: Synthetic oligonucleotide
uggcugucaccgucaggau

SEQ ID NO: 2976518 - RNA, 19 nt, Artificial Sequence
  Description of Artificial Sequence: Synthetic oligonucleotide
gccggggaaaguccccugc

SEQ ID NO: 2976519 - RNA, 19 nt, Artificial Sequence
  Description of Artificial Sequence: Synthetic oligonucleotide
gccuggcuccgguguaucg

SEQ ID NO: 2976520 - RNA, 19 nt, Artificial Sequence
  Description of Artificial Sequence: Synthetic oligonucleotide
ccaccauuguacucuaucu

SEQ ID NO: 2976521 - RNA, 19 nt, Artificial Sequence
  Description of Artificial Sequence: Synthetic oligonucleotide
cggaguugugggugaagcc

SEQ ID NO: 2976522 - RNA, 19 nt, Artificial Sequence
  Description of Artificial Sequence: Synthetic oligonucleotide
gcucaggggcugcagccug

SEQ ID NO: 2976523 - RNA, 19 nt, Artificial Sequence
  Description of Artificial Sequence: Synthetic oligonucleotide
guguaucgauucaauuccu

SEQ ID NO: 2976524 - RNA, 19 nt, Artificial Sequence
  Description of Artificial Sequence: Synthetic oligonucleotide
gcuggccggggaaaguccc

SEQ ID NO: 2976525 - RNA, 19 nt, Artificial Sequence
  Description of Artificial Sequence: Synthetic oligonucleotide
gcuucaguagaggccccug

SEQ ID NO: 2976526 - RNA, 19 nt, Artificial Sequence
  Description of Artificial Sequence: Synthetic oligonucleotide
cugcagccuggcuccggug

SEQ ID NO: 2976527 - RNA, 19 nt, Artificial Sequence
  Description of Artificial Sequence: Synthetic oligonucleotide
uggcuccgguguaucgauu

SEQ ID NO: 2976528 - RNA, 19 nt, Artificial Sequence
  Description of Artificial Sequence: Synthetic oligonucleotide
guugugggugaagcccaga

SEQ ID NO: 2976529 - RNA, 19 nt, Artificial Sequence
  Description of Artificial Sequence: Synthetic oligonucleotide
ggguggcugucaccgucag

SEQ ID NO: 2976530 - RNA, 19 nt, Artificial Sequence
  Description of Artificial Sequence: Synthetic oligonucleotide
gggacagggcucuguccac

SEQ ID NO: 2976531 - RNA, 19 nt, Artificial Sequence
  Description of Artificial Sequence: Synthetic oligonucleotide
cuccgguguaucgauucaa

SEQ ID NO: 2976532 - RNA, 19 nt, Artificial Sequence
  Description of Artificial Sequence: Synthetic oligonucleotide
cacucagccucggaguugu

SEQ ID NO: 2976533 - RNA, 19 nt, Artificial Sequence
  Description of Artificial Sequence: Synthetic oligonucleotide
cucuaucucagggcaucaa

SEQ ID NO: 2976534 - RNA, 19 nt, Artificial Sequence
  Description of Artificial Sequence: Synthetic oligonucleotide
gcuccgguguaucgauuca

SEQ ID NO: 2976535 - RNA, 19 nt, Artificial Sequence
  Description of Artificial Sequence: Synthetic oligonucleotide
agaaggugacagaguccau

SEQ ID NO: 2976536 - RNA, 19 nt, Artificial Sequence
  Description of Artificial Sequence: Synthetic oligonucleotide
ggcuggccggggaaagucc

SEQ ID NO: 2976537 - RNA, 19 nt, Artificial Sequence
  Description of Artificial Sequence: Synthetic oligonucleotide
cuccugguuguacaucuuu

SEQ ID NO: 2976538 - RNA, 19 nt, Artificial Sequence
  Description of Artificial Sequence: Synthetic oligonucleotide
ggggaaaguccccugcuuu

SEQ ID NO: 2976539 - RNA, 19 nt, Artificial Sequence
  Description of Artificial Sequence: Synthetic oligonucleotide
acgaggcuggccggggaaa

SEQ ID NO: 2976540 - RNA, 19 nt, Artificial Sequence
  Description of Artificial Sequence: Synthetic oligonucleotide
cuggcuccgguguaucgau

SEQ ID NO: 2976541 - RNA, 19 nt, Artificial Sequence
  Description of Artificial Sequence: Synthetic oligonucleotide
ccgucaggaugucauagua

SEQ ID NO: 2976542 - RNA, 19 nt, Artificial Sequence
  Description of Artificial Sequence: Synthetic oligonucleotide
gccucggaguuguggguga

SEQ ID NO: 2976543 - RNA, 19 nt, Artificial Sequence
  Description of Artificial Sequence: Synthetic oligonucleotide
ggccggggaaaguccccug

SEQ ID NO: 2976544 - RNA, 19 nt, Artificial Sequence
  Description of Artificial Sequence: Synthetic oligonucleotide
guacucuaucucagggcau

SEQ ID NO: 2976545 - RNA, 19 nt, Artificial Sequence
  Description of Artificial Sequence: Synthetic oligonucleotide
cugucaccgucaggauguc

SEQ ID NO: 2976546 - RNA, 19 nt, Artificial Sequence
  Description of Artificial Sequence: Synthetic oligonucleotide
ggcugcagccuggcuccgg

SEQ ID NO: 2976547 - RNA, 19 nt, Artificial Sequence
  Description of Artificial Sequence: Synthetic oligonucleotide
cauggguggcugucaccgu

SEQ ID NO: 2976548 - RNA, 19 nt, Artificial Sequence
  Description of Artificial Sequence: Synthetic oligonucleotide
cagccucggaguugugggu

SEQ ID NO: 2976549 - RNA, 19 nt, Artificial Sequence
  Description of Artificial Sequence: Synthetic oligonucleotide
gaggcuggccggggaaagu

SEQ ID NO: 2976550 - RNA, 19 nt, Artificial Sequence
  Description of Artificial Sequence: Synthetic oligonucleotide
ccuggcuccgguguaucga

SEQ ID NO: 2976551 - RNA, 19 nt, Artificial Sequence
  Description of Artificial Sequence: Synthetic oligonucleotide
ccacucagccucggaguug

SEQ ID NO: 2976552 - RNA, 19 nt, Artificial Sequence
  Description of Artificial Sequence: Synthetic oligonucleotide
gcugcagccuggcuccggu

SEQ ID NO: 2976553 - RNA, 19 nt, Artificial Sequence
  Description of Artificial Sequence: Synthetic oligonucleotide
acucagccucggaguugug

SEQ ID NO: 2976554 - RNA, 19 nt, Artificial Sequence
  Description of Artificial Sequence: Synthetic oligonucleotide
gcagccuggcuccggugua

SEQ ID NO: 2976555 - RNA, 19 nt, Artificial Sequence
  Description of Artificial Sequence: Synthetic oligonucleotide
cgaggcuggccggggaaag

SEQ ID NO: 2976556 - RNA, 19 nt, Artificial Sequence
  Description of Artificial Sequence: Synthetic oligonucleotide
ccgguguaucgauucaauu

SEQ ID NO: 2976557 - RNA, 19 nt, Artificial Sequence
  Description of Artificial Sequence: Synthetic oligonucleotide
gggcugcagccuggcuccg

SEQ ID NO: 2976558 - RNA, 19 nt, Artificial Sequence
  Description of Artificial Sequence: Synthetic oligonucleotide
gcccagaaggugacagagu

SEQ ID NO: 2976559 - RNA, 19 nt, Artificial Sequence
  Description of Artificial Sequence: Synthetic oligonucleotide
ccccugcuuucagauucuc

SEQ ID NO: 2976560 - RNA, 19 nt, Artificial Sequence
  Description of Artificial Sequence: Synthetic oligonucleotide
gggcucuguccaccauugu

SEQ ID NO: 2976561 - RNA, 19 nt, Artificial Sequence
  Description of Artificial Sequence: Synthetic oligonucleotide
ccggggaaaguccccugcu

SEQ ID NO: 2976562 - RNA, 19 nt, Artificial Sequence
  Description of Artificial Sequence: Synthetic oligonucleotide
guccaccauuguacucuau

SEQ ID NO: 2976563 - RNA, 19 nt, Artificial Sequence
  Description of Artificial Sequence: Synthetic oligonucleotide
cagccuggcuccgguguau

SEQ ID NO: 2976564 - RNA, 19 nt, Artificial Sequence
  Description of Artificial Sequence: Synthetic oligonucleotide
ccucggaguugugggugaa

SEQ ID NO: 2976565 - RNA, 19 nt, Artificial Sequence
  Description of Artificial Sequence: Synthetic oligonucleotide
cggggaaaguccccugcuu

SEQ ID NO: 2976566 - RNA, 19 nt, Artificial Sequence
  Description of Artificial Sequence: Synthetic oligonucleotide
aauggcaaaguuuucauuc

SEQ ID NO: 2976567 - RNA, 19 nt, Artificial Sequence
  Description of Artificial Sequence: Synthetic oligonucleotide
uuucucaucauaaaccugg

SEQ ID NO: 2976568 - RNA, 19 nt, Artificial Sequence
  Description of Artificial Sequence: Synthetic oligonucleotide
uuuauguacaccuucgggg

SEQ ID NO: 2976569 - RNA, 19 nt, Artificial Sequence
  Description of Artificial Sequence: Synthetic oligonucleotide
aauugcaggcuacaguagc

SEQ ID NO: 2976570 - RNA, 19 nt, Artificial Sequence
  Description of Artificial Sequence: Synthetic oligonucleotide
cucaucauaaaccuggccg

SEQ ID NO: 2976571 - RNA, 19 nt, Artificial Sequence
  Description of Artificial Sequence: Synthetic oligonucleotide
uuucugacgaucuacaaac

SEQ ID NO: 2976572 - RNA, 19 nt, Artificial Sequence
  Description of Artificial Sequence: Synthetic oligonucleotide
ucuuuguccaaauuuaugu

SEQ ID NO: 2976573 - RNA, 19 nt, Artificial Sequence
  Description of Artificial Sequence: Synthetic oligonucleotide
aauuuauguacaccuucgg

SEQ ID NO: 2976574 - RNA, 19 nt, Artificial Sequence
  Description of Artificial Sequence: Synthetic oligonucleotide
aaauuuauguacaccuucg

SEQ ID NO: 2976575 - RNA, 19 nt, Artificial Sequence
  Description of Artificial Sequence: Synthetic oligonucleotide
ucuacaaaccgaaucuucc

SEQ ID NO: 2976576 - RNA, 19 nt, Artificial Sequence
  Description of Artificial Sequence: Synthetic oligonucleotide
agucuuucucaucauaaac

SEQ ID NO: 2976577 - RNA, 19 nt, Artificial Sequence
  Description of Artificial Sequence: Synthetic oligonucleotide
auuuauguacaccuucggg

SEQ ID NO: 2976578 - RNA, 19 nt, Artificial Sequence
  Description of Artificial Sequence: Synthetic oligonucleotide
ucaucauaaaccuggccgg

SEQ ID NO: 2976579 - RNA, 19 nt, Artificial Sequence
  Description of Artificial Sequence: Synthetic oligonucleotide
ucugacgaucuacaaaccg

SEQ ID NO: 2976580 - RNA, 19 nt, Artificial Sequence
  Description of Artificial Sequence: Synthetic oligonucleotide
uaucaaaucaauggcaaag

SEQ ID NO: 2976581 - RNA, 19 nt, Artificial Sequence
  Description of Artificial Sequence: Synthetic oligonucleotide
uuuucguucucuuugucca

SEQ ID NO: 2976582 - RNA, 19 nt, Artificial Sequence
  Description of Artificial Sequence: Synthetic oligonucleotide
aaaucaauggcaaaguuuu

SEQ ID NO: 2976583 - RNA, 19 nt, Artificial Sequence
  Description of Artificial Sequence: Synthetic oligonucleotide
uuuguccaaauuuauguac

SEQ ID NO: 2976584 - RNA, 19 nt, Artificial Sequence
  Description of Artificial Sequence: Synthetic oligonucleotide
ucuuucucaucauaaaccu

SEQ ID NO: 2976585 - RNA, 19 nt, Artificial Sequence
  Description of Artificial Sequence: Synthetic oligonucleotide
acgaucuacaaaccgaauc

SEQ ID NO: 2976586 - RNA, 19 nt, Artificial Sequence
  Description of Artificial Sequence: Synthetic oligonucleotide
ugaauugcaggcuacagua

SEQ ID NO: 2976587 - RNA, 19 nt, Artificial Sequence
  Description of Artificial Sequence: Synthetic oligonucleotide
agaggaccaggacacagcc

SEQ ID NO: 2976588 - RNA, 19 nt, Artificial Sequence
  Description of Artificial Sequence: Synthetic oligonucleotide
ugcuaucaaaucaauggca

SEQ ID NO: 2976589 - RNA, 19 nt, Artificial Sequence
  Description of Artificial Sequence: Synthetic oligonucleotide
ugguccaccucauucacgg

SEQ ID NO: 2976590 - RNA, 19 nt, Artificial Sequence
  Description of Artificial Sequence: Synthetic oligonucleotide
uuguccaaauuuauguaca

SEQ ID NO: 2976591 - RNA, 19 nt, Artificial Sequence
  Description of Artificial Sequence: Synthetic oligonucleotide
uuauguacaccuucggggu

SEQ ID NO: 2976592 - RNA, 19 nt, Artificial Sequence
  Description of Artificial Sequence: Synthetic oligonucleotide
aaccgaaucuuccuguagu

SEQ ID NO: 2976593 - RNA, 19 nt, Artificial Sequence
  Description of Artificial Sequence: Synthetic oligonucleotide
caaauuuauguacaccuuc

SEQ ID NO: 2976594 - RNA, 19 nt, Artificial Sequence
  Description of Artificial Sequence: Synthetic oligonucleotide
acacuagugacggugcugc

SEQ ID NO: 2976595 - RNA, 19 nt, Artificial Sequence
  Description of Artificial Sequence: Synthetic oligonucleotide
ugcugcuugaauugcaggc

SEQ ID NO: 2976596 - RNA, 19 nt, Artificial Sequence
  Description of Artificial Sequence: Synthetic oligonucleotide
uacaaaccgaaucuuccug

SEQ ID NO: 2976597 - RNA, 19 nt, Artificial Sequence
  Description of Artificial Sequence: Synthetic oligonucleotide
uucucuuuguccaaauuua

SEQ ID NO: 2976598 - RNA, 19 nt, Artificial Sequence
  Description of Artificial Sequence: Synthetic oligonucleotide
acaguagccacacgucccc

SEQ ID NO: 2976599 - RNA, 19 nt, Artificial Sequence
  Description of Artificial Sequence: Synthetic oligonucleotide
gacacucgcaccccgaaag

SEQ ID NO: 2976600 - RNA, 19 nt, Artificial Sequence
  Description of Artificial Sequence: Synthetic oligonucleotide
uugaauugcaggcuacagu

SEQ ID NO: 2976601 - RNA, 19 nt, Artificial Sequence
  Description of Artificial Sequence: Synthetic oligonucleotide
aaaccgaaucuuccuguag

SEQ ID NO: 2976602 - RNA, 19 nt, Artificial Sequence
  Description of Artificial Sequence: Synthetic oligonucleotide
gucuuucucaucauaaacc

SEQ ID NO: 2976603 - RNA, 19 nt, Artificial Sequence
  Description of Artificial Sequence: Synthetic oligonucleotide
aaugacccgaugguccacc

SEQ ID NO: 2976604 - RNA, 19 nt, Artificial Sequence
  Description of Artificial Sequence: Synthetic oligonucleotide
ucgucagaggaccaggaca

SEQ ID NO: 2976605 - RNA, 19 nt, Artificial Sequence
  Description of Artificial Sequence: Synthetic oligonucleotide
ucauucaccucuuucugac

SEQ ID NO: 2976606 - RNA, 19 nt, Artificial Sequence
  Description of Artificial Sequence: Synthetic oligonucleotide
cugcuaucaaaucaauggc

SEQ ID NO: 2976607 - RNA, 19 nt, Artificial Sequence
  Description of Artificial Sequence: Synthetic oligonucleotide
aggaccaggacacagccca

SEQ ID NO: 2976608 - RNA, 19 nt, Artificial Sequence
  Description of Artificial Sequence: Synthetic oligonucleotide
uuuucgucagaggaccagg

SEQ ID NO: 2976609 - RNA, 19 nt, Artificial Sequence
  Description of Artificial Sequence: Synthetic oligonucleotide
ugacgaucuacaaaccgaa

SEQ ID NO: 2976610 - RNA, 19 nt, Artificial Sequence
  Description of Artificial Sequence: Synthetic oligonucleotide
ucauaaaccuggccggugu

SEQ ID NO: 2976611 - RNA, 19 nt, Artificial Sequence
  Description of Artificial Sequence: Synthetic oligonucleotide
gugaucuucuccccgcucg

SEQ ID NO: 2976612 - RNA, 19 nt, Artificial Sequence
  Description of Artificial Sequence: Synthetic oligonucleotide
ugcucugcuaucaaaucaa

SEQ ID NO: 2976613 - RNA, 19 nt, Artificial Sequence
  Description of Artificial Sequence: Synthetic oligonucleotide
auucaccucuuucugacga

SEQ ID NO: 2976614 - RNA, 19 nt, Artificial Sequence
  Description of Artificial Sequence: Synthetic oligonucleotide
cuacaguagccacacgucc

SEQ ID NO: 2976615 - RNA, 19 nt, Artificial Sequence
  Description of Artificial Sequence: Synthetic oligonucleotide
auugcaggcuacaguagcc

SEQ ID NO: 2976616 - RNA, 19 nt, Artificial Sequence
  Description of Artificial Sequence: Synthetic oligonucleotide
ucaaaucaauggcaaaguu

SEQ ID NO: 2976617 - RNA, 19 nt, Artificial Sequence
  Description of Artificial Sequence: Synthetic oligonucleotide
ucaauggcaaaguuuucau

SEQ ID NO: 2976618 - RNA, 19 nt, Artificial Sequence
  Description of Artificial Sequence: Synthetic oligonucleotide
uucgggguggcccaaggca

SEQ ID NO: 2976619 - RNA, 19 nt, Artificial Sequence
  Description of Artificial Sequence: Synthetic oligonucleotide
uguccaaauuuauguacac

SEQ ID NO: 2976620 - RNA, 19 nt, Artificial Sequence
  Description of Artificial Sequence: Synthetic oligonucleotide
uucauucaccucuuucuga

SEQ ID NO: 2976621 - RNA, 19 nt, Artificial Sequence
  Description of Artificial Sequence: Synthetic oligonucleotide
gacggugcugcuugaauug

SEQ ID NO: 2976622 - RNA, 19 nt, Artificial Sequence
  Description of Artificial Sequence: Synthetic oligonucleotide
acaaaccgaaucuuccugu

SEQ ID NO: 2976623 - RNA, 19 nt, Artificial Sequence
  Description of Artificial Sequence: Synthetic oligonucleotide
accgaaucuuccuguaguc

SEQ ID NO: 2976624 - RNA, 19 nt, Artificial Sequence
  Description of Artificial Sequence: Synthetic oligonucleotide
aucaauggcaaaguuuuca

SEQ ID NO: 2976625 - RNA, 19 nt, Artificial Sequence
  Description of Artificial Sequence: Synthetic oligonucleotide
uaaaccuggccggugugcg

SEQ ID NO: 2976626 - RNA, 19 nt, Artificial Sequence
  Description of Artificial Sequence: Synthetic oligonucleotide
cucuuuguccaaauuuaug

SEQ ID NO: 2976627 - RNA, 19 nt, Artificial Sequence
  Description of Artificial Sequence: Synthetic oligonucleotide
cuagugacggugcugcuug

SEQ ID NO: 2976628 - RNA, 19 nt, Artificial Sequence
  Description of Artificial Sequence: Synthetic oligonucleotide
auaaaccuggccggugugc

SEQ ID NO: 2976629 - RNA, 19 nt, Artificial Sequence
  Description of Artificial Sequence: Synthetic oligonucleotide
uguagucuuucucaucaua

SEQ ID NO: 2976630 - RNA, 19 nt, Artificial Sequence
  Description of Artificial Sequence: Synthetic oligonucleotide
cucgacgacacucgcaccc

SEQ ID NO: 2976631 - RNA, 19 nt, Artificial Sequence
  Description of Artificial Sequence: Synthetic oligonucleotide
gugugcgugaucuucuccc

SEQ ID NO: 2976632 - RNA, 19 nt, Artificial Sequence
  Description of Artificial Sequence: Synthetic oligonucleotide
ucucuuuguccaaauuuau

SEQ ID NO: 2976633 - RNA, 19 nt, Artificial Sequence
  Description of Artificial Sequence: Synthetic oligonucleotide
aucuacaaaccgaaucuuc

SEQ ID NO: 2976634 - RNA, 19 nt, Artificial Sequence
  Description of Artificial Sequence: Synthetic oligonucleotide
aucaaaucaauggcaaagu

SEQ ID NO: 2976635 - RNA, 19 nt, Artificial Sequence
  Description of Artificial Sequence: Synthetic oligonucleotide
auggcaaaguuuucauuca

SEQ ID NO: 2976636 - RNA, 19 nt, Artificial Sequence
  Description of Artificial Sequence: Synthetic oligonucleotide
ucagaggaccaggacacag

SEQ ID NO: 2976637 - RNA, 19 nt, Artificial Sequence
  Description of Artificial Sequence: Synthetic oligonucleotide
aaucaauggcaaaguuuuc

SEQ ID NO: 2976638 - RNA, 19 nt, Artificial Sequence
  Description of Artificial Sequence: Synthetic oligonucleotide
uauguacaccuucggggug

SEQ ID NO: 2976639 - RNA, 19 nt, Artificial Sequence
  Description of Artificial Sequence: Synthetic oligonucleotide
uuucgucagaggaccagga

SEQ ID NO: 2976640 - RNA, 19 nt, Artificial Sequence
  Description of Artificial Sequence: Synthetic oligonucleotide
gcaggcaaugacccgaugg

SEQ ID NO: 2976641 - RNA, 19 nt, Artificial Sequence
  Description of Artificial Sequence: Synthetic oligonucleotide
cuuucucaucauaaaccug

SEQ ID NO: 2976642 - RNA, 19 nt, Artificial Sequence
  Description of Artificial Sequence: Synthetic oligonucleotide
uacaccuucgggguggccc

SEQ ID NO: 2976643 - RNA, 19 nt, Artificial Sequence
  Description of Artificial Sequence: Synthetic oligonucleotide
aucuucuccccgcucgacg

SEQ ID NO: 2976644 - RNA, 19 nt, Artificial Sequence
  Description of Artificial Sequence: Synthetic oligonucleotide
uucugacgaucuacaaacc

SEQ ID NO: 2976645 - RNA, 19 nt, Artificial Sequence
  Description of Artificial Sequence: Synthetic oligonucleotide
cucugcuaucaaaucaaug

SEQ ID NO: 2976646 - RNA, 19 nt, Artificial Sequence
  Description of Artificial Sequence: Synthetic oligonucleotide
ucuucuccccgcucgacga

SEQ ID NO: 2976647 - RNA, 19 nt, Artificial Sequence
  Description of Artificial Sequence: Synthetic oligonucleotide
cuugaauugcaggcuacag

SEQ ID NO: 2976648 - RNA, 19 nt, Artificial Sequence
  Description of Artificial Sequence: Synthetic oligonucleotide
cugacgaucuacaaaccga

SEQ ID NO: 2976649 - RNA, 19 nt, Artificial Sequence
  Description of Artificial Sequence: Synthetic oligonucleotide
gaugguccaccucauucac

SEQ ID NO: 2976650 - RNA, 19 nt, Artificial Sequence
  Description of Artificial Sequence: Synthetic oligonucleotide
uagucuuucucaucauaaa

SEQ ID NO: 2976651 - RNA, 19 nt, Artificial Sequence
  Description of Artificial Sequence: Synthetic oligonucleotide
ucauucacgggcugcucug

SEQ ID NO: 2976652 - RNA, 19 nt, Artificial Sequence
  Description of Artificial Sequence: Synthetic oligonucleotide
gacccgaugguccaccuca

SEQ ID NO: 2976653 - RNA, 19 nt, Artificial Sequence
  Description of Artificial Sequence: Synthetic oligonucleotide
uccaccucauucacgggcu

SEQ ID NO: 2976654 - RNA, 19 nt, Artificial Sequence
  Description of Artificial Sequence: Synthetic oligonucleotide
ugugcgugaucuucucccc

SEQ ID NO: 2976655 - RNA, 19 nt, Artificial Sequence
  Description of Artificial Sequence: Synthetic oligonucleotide
ucuuucugacgaucuacaa

SEQ ID NO: 2976656 - RNA, 19 nt, Artificial Sequence
  Description of Artificial Sequence: Synthetic oligonucleotide
acucgcaccccgaaaggcc

SEQ ID NO: 2976657 - RNA, 19 nt, Artificial Sequence
  Description of Artificial Sequence: Synthetic oligonucleotide
guccaccucauucacgggc

SEQ ID NO: 2976658 - RNA, 19 nt, Artificial Sequence
  Description of Artificial Sequence: Synthetic oligonucleotide
gacacagcccacacuagug

SEQ ID NO: 2976659 - RNA, 19 nt, Artificial Sequence
  Description of Artificial Sequence: Synthetic oligonucleotide
auguacaccuucggggugg

SEQ ID NO: 2976660 - RNA, 19 nt, Artificial Sequence
  Description of Artificial Sequence: Synthetic oligonucleotide
gaauugcaggcuacaguag

SEQ ID NO: 2976661 - RNA, 19 nt, Artificial Sequence
  Description of Artificial Sequence: Synthetic oligonucleotide
cauucaccucuuucugacg

SEQ ID NO: 2976662 - RNA, 19 nt, Artificial Sequence
  Description of Artificial Sequence: Synthetic oligonucleotide
ugcuugaauugcaggcuac

SEQ ID NO: 2976663 - RNA, 19 nt, Artificial Sequence
  Description of Artificial Sequence: Synthetic oligonucleotide
uucgucagaggaccaggac

SEQ ID NO: 2976664 - RNA, 19 nt, Artificial Sequence
  Description of Artificial Sequence: Synthetic oligonucleotide
acacucgcaccccgaaagg

SEQ ID NO: 2976665 - RNA, 19 nt, Artificial Sequence
  Description of Artificial Sequence: Synthetic oligonucleotide
acacagcccacacuaguga

SEQ ID NO: 2976666 - RNA, 19 nt, Artificial Sequence
  Description of Artificial Sequence: Synthetic oligonucleotide
guagucuuucucaucauaa

SEQ ID NO: 2976667 - RNA, 19 nt, Artificial Sequence
  Description of Artificial Sequence: Synthetic oligonucleotide
cuuucugacgaucuacaaa

SEQ ID NO: 2976668 - RNA, 19 nt, Artificial Sequence
  Description of Artificial Sequence: Synthetic oligonucleotide
cagaggaccaggacacagc

SEQ ID NO: 2976669 - RNA, 19 nt, Artificial Sequence
  Description of Artificial Sequence: Synthetic oligonucleotide
gugcugcuugaauugcagg

SEQ ID NO: 2976670 - RNA, 19 nt, Artificial Sequence
  Description of Artificial Sequence: Synthetic oligonucleotide
ugacggugcugcuugaauu

SEQ ID NO: 2976671 - RNA, 19 nt, Artificial Sequence
  Description of Artificial Sequence: Synthetic oligonucleotide
cucgcaccccgaaaggccc

SEQ ID NO: 2976672 - RNA, 19 nt, Artificial Sequence
  Description of Artificial Sequence: Synthetic oligonucleotide
cagcccacacuagugacgg

SEQ ID NO: 2976673 - RNA, 19 nt, Artificial Sequence
  Description of Artificial Sequence: Synthetic oligonucleotide
ugaucuucuccccgcucga

SEQ ID NO: 2976674 - RNA, 19 nt, Artificial Sequence
  Description of Artificial Sequence: Synthetic oligonucleotide
ucgggguggcccaaggcac

SEQ ID NO: 2976675 - RNA, 19 nt, Artificial Sequence
  Description of Artificial Sequence: Synthetic oligonucleotide
cucuuucugacgaucuaca

SEQ ID NO: 2976676 - RNA, 19 nt, Artificial Sequence
  Description of Artificial Sequence: Synthetic oligonucleotide
ucacgggcugcucugcuau

SEQ ID NO: 2976677 - RNA, 19 nt, Artificial Sequence
  Description of Artificial Sequence: Synthetic oligonucleotide
aaggucaacgccgccgcca

SEQ ID NO: 2976678 - RNA, 19 nt, Artificial Sequence
  Description of Artificial Sequence: Synthetic oligonucleotide
ggcaaugacccgauggucc

SEQ ID NO: 2976679 - RNA, 19 nt, Artificial Sequence
  Description of Artificial Sequence: Synthetic oligonucleotide
acggugcugcuugaauugc

SEQ ID NO: 2976680 - RNA, 19 nt, Artificial Sequence
  Description of Artificial Sequence: Synthetic oligonucleotide
ugcaggcuacaguagccac

SEQ ID NO: 2976681 - RNA, 19 nt, Artificial Sequence
  Description of Artificial Sequence: Synthetic oligonucleotide
caaggcaccaccaccucca

SEQ ID NO: 2976682 - RNA, 19 nt, Artificial Sequence
  Description of Artificial Sequence: Synthetic oligonucleotide
uuccuguagucuuucucau

SEQ ID NO: 2976683 - RNA, 19 nt, Artificial Sequence
  Description of Artificial Sequence: Synthetic oligonucleotide
ccaucgcaggcaaugaccc

SEQ ID NO: 2976684 - RNA, 19 nt, Artificial Sequence
  Description of Artificial Sequence: Synthetic oligonucleotide
cacagcccacacuagugac

SEQ ID NO: 2976685 - RNA, 19 nt, Artificial Sequence
  Description of Artificial Sequence: Synthetic oligonucleotide
agcccuaggggagagccag

SEQ ID NO: 2976686 - RNA, 19 nt, Artificial Sequence
  Description of Artificial Sequence: Synthetic oligonucleotide
caggcuacaguagccacac

SEQ ID NO: 2976687 - RNA, 19 nt, Artificial Sequence
  Description of Artificial Sequence: Synthetic oligonucleotide
aaccuggccggugugcgug

SEQ ID NO: 2976688 - RNA, 19 nt, Artificial Sequence
  Description of Artificial Sequence: Synthetic oligonucleotide
aucgcaggcaaugacccga

SEQ ID NO: 2976689 - RNA, 19 nt, Artificial Sequence
  Description of Artificial Sequence: Synthetic oligonucleotide
cuaucaaaucaauggcaaa

SEQ ID NO: 2976690 - RNA, 19 nt, Artificial Sequence
  Description of Artificial Sequence: Synthetic oligonucleotide
aggcaaugacccgaugguc

SEQ ID NO: 2976691 - RNA, 19 nt, Artificial Sequence
  Description of Artificial Sequence: Synthetic oligonucleotide
acagcccacacuagugacg

SEQ ID NO: 2976692 - RNA, 19 nt, Artificial Sequence
  Description of Artificial Sequence: Synthetic oligonucleotide
gcaaaguuuucauucaccu

SEQ ID NO: 2976693 - RNA, 19 nt, Artificial Sequence
  Description of Artificial Sequence: Synthetic oligonucleotide
accuccaucgcaggcaaug

SEQ ID NO: 2976694 - RNA, 19 nt, Artificial Sequence
  Description of Artificial Sequence: Synthetic oligonucleotide
cauaaaccuggccggugug

SEQ ID NO: 2976695 - RNA, 19 nt, Artificial Sequence
  Description of Artificial Sequence: Synthetic oligonucleotide
ggcaaaguuuucauucacc

SEQ ID NO: 2976696 - RNA, 19 nt, Artificial Sequence
  Description of Artificial Sequence: Synthetic oligonucleotide
uuucguucucuuuguccaa

SEQ ID NO: 2976697 - RNA, 19 nt, Artificial Sequence
  Description of Artificial Sequence: Synthetic oligonucleotide
gugcgugaucuucuccccg

SEQ ID NO: 2976698 - RNA, 19 nt, Artificial Sequence
  Description of Artificial Sequence: Synthetic oligonucleotide
uggccggugugcgugaucu

SEQ ID NO: 2976699 - RNA, 19 nt, Artificial Sequence
  Description of Artificial Sequence: Synthetic oligonucleotide
ggaaggucaacgccgccgc

SEQ ID NO: 2976700 - RNA, 19 nt, Artificial Sequence
  Description of Artificial Sequence: Synthetic oligonucleotide
caucgcaggcaaugacccg

SEQ ID NO: 2976701 - RNA, 19 nt, Artificial Sequence
  Description of Artificial Sequence: Synthetic oligonucleotide
aaaccuggccggugugcgu

SEQ ID NO: 2976702 - RNA, 19 nt, Artificial Sequence
  Description of Artificial Sequence: Synthetic oligonucleotide
aucauaaaccuggccggug

SEQ ID NO: 2976703 - RNA, 19 nt, Artificial Sequence
  Description of Artificial Sequence: Synthetic oligonucleotide
aguagccacacguccccgu

SEQ ID NO: 2976704 - RNA, 19 nt, Artificial Sequence
  Description of Artificial Sequence: Synthetic oligonucleotide
gcuaucaaaucaauggcaa

SEQ ID NO: 2976705 - RNA, 19 nt, Artificial Sequence
  Description of Artificial Sequence: Synthetic oligonucleotide
ggggagagccagcagccgg

SEQ ID NO: 2976706 - RNA, 19 nt, Artificial Sequence
  Description of Artificial Sequence: Synthetic oligonucleotide
uucguucucuuuguccaaa

SEQ ID NO: 2976707 - RNA, 19 nt, Artificial Sequence
  Description of Artificial Sequence: Synthetic oligonucleotide
ucgcaccccgaaaggcccg

SEQ ID NO: 2976708 - RNA, 19 nt, Artificial Sequence
  Description of Artificial Sequence: Synthetic oligonucleotide
acaccuucgggguggccca

SEQ ID NO: 2976709 - RNA, 19 nt, Artificial Sequence
  Description of Artificial Sequence: Synthetic oligonucleotide
uucaccucuuucugacgau

SEQ ID NO: 2976710 - RNA, 19 nt, Artificial Sequence
  Description of Artificial Sequence: Synthetic oligonucleotide
aaguuuucauucaccucuu

SEQ ID NO: 2976711 - RNA, 19 nt, Artificial Sequence
  Description of Artificial Sequence: Synthetic oligonucleotide
cuucgggguggcccaaggc

SEQ ID NO: 2976712 - RNA, 19 nt, Artificial Sequence
  Description of Artificial Sequence: Synthetic oligonucleotide
cuccaucgcaggcaaugac

SEQ ID NO: 2976713 - RNA, 19 nt, Artificial Sequence
  Description of Artificial Sequence: Synthetic oligonucleotide
ggugcugcuugaauugcag

SEQ ID NO: 2976714 - RNA, 19 nt, Artificial Sequence
  Description of Artificial Sequence: Synthetic oligonucleotide
cuacaaaccgaaucuuccu

SEQ ID NO: 2976715 - RNA, 19 nt, Artificial Sequence
  Description of Artificial Sequence: Synthetic oligonucleotide
accaccuccaucgcaggca

SEQ ID NO: 2976716 - RNA, 19 nt, Artificial Sequence
  Description of Artificial Sequence: Synthetic oligonucleotide
cacucgcaccccgaaaggc

SEQ ID NO: 2976717 - RNA, 19 nt, Artificial Sequence
  Description of Artificial Sequence: Synthetic oligonucleotide
gaaggucaacgccgccgcc

SEQ ID NO: 2976718 - RNA, 19 nt, Artificial Sequence
  Description of Artificial Sequence: Synthetic oligonucleotide
ucguucucuuuguccaaau

SEQ ID NO: 2976719 - RNA, 19 nt, Artificial Sequence
  Description of Artificial Sequence: Synthetic oligonucleotide
auucacgggcugcucugcu

SEQ ID NO: 2976720 - RNA, 19 nt, Artificial Sequence
  Description of Artificial Sequence: Synthetic oligonucleotide
cgucagaggaccaggacac

SEQ ID NO: 2976721 - RNA, 19 nt, Artificial Sequence
  Description of Artificial Sequence: Synthetic oligonucleotide
gagagccagcagccggcgg

SEQ ID NO: 2976722 - RNA, 19 nt, Artificial Sequence
  Description of Artificial Sequence: Synthetic oligonucleotide
ggcuacaguagccacacgu

SEQ ID NO: 2976723 - RNA, 19 nt, Artificial Sequence
  Description of Artificial Sequence: Synthetic oligonucleotide
ucgacgacacucgcacccc

SEQ ID NO: 2976724 - RNA, 19 nt, Artificial Sequence
  Description of Artificial Sequence: Synthetic oligonucleotide
cacacuagugacggugcug

SEQ ID NO: 2976725 - RNA, 19 nt, Artificial Sequence
  Description of Artificial Sequence: Synthetic oligonucleotide
augguccaccucauucacg

SEQ ID NO: 2976726 - RNA, 19 nt, Artificial Sequence
  Description of Artificial Sequence: Synthetic oligonucleotide
accccgaaaggcccgcgca

SEQ ID NO: 2976727 - RNA, 19 nt, Artificial Sequence
  Description of Artificial Sequence: Synthetic oligonucleotide
ucuccccgcucgacgacac

SEQ ID NO: 2976728 - RNA, 19 nt, Artificial Sequence
  Description of Artificial Sequence: Synthetic oligonucleotide
aguuuucauucaccucuuu

SEQ ID NO: 2976729 - RNA, 19 nt, Artificial Sequence
  Description of Artificial Sequence: Synthetic oligonucleotide
gaaaggcccgcgcagcccu

SEQ ID NO: 2976730 - RNA, 19 nt, Artificial Sequence
  Description of Artificial Sequence: Synthetic oligonucleotide
ggugugcgugaucuucucc

SEQ ID NO: 2976731 - RNA, 19 nt, Artificial Sequence
  Description of Artificial Sequence: Synthetic oligonucleotide
accucauucacgggcugcu

SEQ ID NO: 2976732 - RNA, 19 nt, Artificial Sequence
  Description of Artificial Sequence: Synthetic oligonucleotide
cauucacgggcugcucugc

SEQ ID NO: 2976733 - RNA, 19 nt, Artificial Sequence
  Description of Artificial Sequence: Synthetic oligonucleotide
ccgaugguccaccucauuc

SEQ ID NO: 2976734 - RNA, 19 nt, Artificial Sequence
  Description of Artificial Sequence: Synthetic oligonucleotide
gaggaccaggacacagccc

SEQ ID NO: 2976735 - RNA, 19 nt, Artificial Sequence
  Description of Artificial Sequence: Synthetic oligonucleotide
acuagugacggugcugcuu

SEQ ID NO: 2976736 - RNA, 19 nt, Artificial Sequence
  Description of Artificial Sequence: Synthetic oligonucleotide
aggcaccaccaccuccauc

SEQ ID NO: 2976737 - RNA, 19 nt, Artificial Sequence
  Description of Artificial Sequence: Synthetic oligonucleotide
caaaccgaaucuuccugua

SEQ ID NO: 2976738 - RNA, 19 nt, Artificial Sequence
  Description of Artificial Sequence: Synthetic oligonucleotide
uguacaccuucgggguggc

SEQ ID NO: 2976739 - RNA, 19 nt, Artificial Sequence
  Description of Artificial Sequence: Synthetic oligonucleotide
uucacgggcugcucugcua

SEQ ID NO: 2976740 - RNA, 19 nt, Artificial Sequence
  Description of Artificial Sequence: Synthetic oligonucleotide
caccaccuccaucgcaggc

SEQ ID NO: 2976741 - RNA, 19 nt, Artificial Sequence
  Description of Artificial Sequence: Synthetic oligonucleotide
gcugcucugcuaucaaauc

SEQ ID NO: 2976742 - RNA, 19 nt, Artificial Sequence
  Description of Artificial Sequence: Synthetic oligonucleotide
ggcccaaggcaccaccacc

SEQ ID NO: 2976743 - RNA, 19 nt, Artificial Sequence
  Description of Artificial Sequence: Synthetic oligonucleotide
ugacccgaugguccaccuc

SEQ ID NO: 2976744 - RNA, 19 nt, Artificial Sequence
  Description of Artificial Sequence: Synthetic oligonucleotide
agccacacguccccguuuu

SEQ ID NO: 2976745 - RNA, 19 nt, Artificial Sequence
  Description of Artificial Sequence: Synthetic oligonucleotide
gcagcccuaggggagagcc

SEQ ID NO: 2976746 - RNA, 19 nt, Artificial Sequence
  Description of Artificial Sequence: Synthetic oligonucleotide
gcaaugacccgauggucca

SEQ ID NO: 2976747 - RNA, 19 nt, Artificial Sequence
  Description of Artificial Sequence: Synthetic oligonucleotide
cccacacuagugacggugc

SEQ ID NO: 2976748 - RNA, 19 nt, Artificial Sequence
  Description of Artificial Sequence: Synthetic oligonucleotide
caccucauucacgggcugc

SEQ ID NO: 2976749 - RNA, 19 nt, Artificial Sequence
  Description of Artificial Sequence: Synthetic oligonucleotide
accucuuucugacgaucua

SEQ ID NO: 2976750 - RNA, 19 nt, Artificial Sequence
  Description of Artificial Sequence: Synthetic oligonucleotide
uucuccccgcucgacgaca

SEQ ID NO: 2976751 - RNA, 19 nt, Artificial Sequence
  Description of Artificial Sequence: Synthetic oligonucleotide
gguggcccaaggcaccacc

SEQ ID NO: 2976752 - RNA, 19 nt, Artificial Sequence
  Description of Artificial Sequence: Synthetic oligonucleotide
uccccgcucgacgacacuc

SEQ ID NO: 2976753 - RNA, 19 nt, Artificial Sequence
  Description of Artificial Sequence: Synthetic oligonucleotide
agccggcggaaggucaacg

SEQ ID NO: 2976754 - RNA, 19 nt, Artificial Sequence
  Description of Artificial Sequence: Synthetic oligonucleotide
augacccgaugguccaccu

SEQ ID NO: 2976755 - RNA, 19 nt, Artificial Sequence
  Description of Artificial Sequence: Synthetic oligonucleotide
gaucuucuccccgcucgac

SEQ ID NO: 2976756 - RNA, 19 nt, Artificial Sequence
  Description of Artificial Sequence: Synthetic oligonucleotide
aggucaacgccgccgccau

SEQ ID NO: 2976757 - RNA, 19 nt, Artificial Sequence
  Description of Artificial Sequence: Synthetic oligonucleotide
gcuacaguagccacacguc

SEQ ID NO: 2976758 - RNA, 19 nt, Artificial Sequence
  Description of Artificial Sequence: Synthetic oligonucleotide
acgacacucgcaccccgaa

SEQ ID NO: 2976759 - RNA, 19 nt, Artificial Sequence
  Description of Artificial Sequence: Synthetic oligonucleotide
aggggagagccagcagccg

SEQ ID NO: 2976760 - RNA, 19 nt, Artificial Sequence
  Description of Artificial Sequence: Synthetic oligonucleotide
caggcaaugacccgauggu

SEQ ID NO: 2976761 - RNA, 19 nt, Artificial Sequence
  Description of Artificial Sequence: Synthetic oligonucleotide
ucgcaggcaaugacccgau

SEQ ID NO: 2976762 - RNA, 19 nt, Artificial Sequence
  Description of Artificial Sequence: Synthetic oligonucleotide
ccucuuucugacgaucuac

SEQ ID NO: 2976763 - RNA, 19 nt, Artificial Sequence
  Description of Artificial Sequence: Synthetic oligonucleotide
gccagcagccggcggaagg

SEQ ID NO: 2976764 - RNA, 19 nt, Artificial Sequence
  Description of Artificial Sequence: Synthetic oligonucleotide
gaucuacaaaccgaaucuu

SEQ ID NO: 2976765 - RNA, 19 nt, Artificial Sequence
  Description of Artificial Sequence: Synthetic oligonucleotide
aggacacagcccacacuag

SEQ ID NO: 2976766 - RNA, 19 nt, Artificial Sequence
  Description of Artificial Sequence: Synthetic oligonucleotide
aggcuacaguagccacacg

SEQ ID NO: 2976767 - RNA, 19 nt, Artificial Sequence
  Description of Artificial Sequence: Synthetic oligonucleotide
gcccacacuagugacggug

SEQ ID NO: 2976768 - RNA, 19 nt, Artificial Sequence
  Description of Artificial Sequence: Synthetic oligonucleotide
cugcuugaauugcaggcua

SEQ ID NO: 2976769 - RNA, 19 nt, Artificial Sequence
  Description of Artificial Sequence: Synthetic oligonucleotide
acgggcugcucugcuauca

SEQ ID NO: 2976770 - RNA, 19 nt, Artificial Sequence
  Description of Artificial Sequence: Synthetic oligonucleotide
uagugacggugcugcuuga

SEQ ID NO: 2976771 - RNA, 19 nt, Artificial Sequence
  Description of Artificial Sequence: Synthetic oligonucleotide
ccaaggcaccaccaccucc

SEQ ID NO: 2976772 - RNA, 19 nt, Artificial Sequence
  Description of Artificial Sequence: Synthetic oligonucleotide
gaccaggacacagcccaca

SEQ ID NO: 2976773 - RNA, 19 nt, Artificial Sequence
  Description of Artificial Sequence: Synthetic oligonucleotide
aaggcccgcgcagcccuag

SEQ ID NO: 2976774 - RNA, 19 nt, Artificial Sequence
  Description of Artificial Sequence: Synthetic oligonucleotide
caccccgaaaggcccgcgc

SEQ ID NO: 2976775 - RNA, 19 nt, Artificial Sequence
  Description of Artificial Sequence: Synthetic oligonucleotide
gguccaccucauucacggg

SEQ ID NO: 2976776 - RNA, 19 nt, Artificial Sequence
  Description of Artificial Sequence: Synthetic oligonucleotide
cggcggaaggucaacgccg

SEQ ID NO: 2976777 - RNA, 19 nt, Artificial Sequence
  Description of Artificial Sequence: Synthetic oligonucleotide
caguagccacacguccccg

SEQ ID NO: 2976778 - RNA, 19 nt, Artificial Sequence
  Description of Artificial Sequence: Synthetic oligonucleotide
uagccacacguccccguuu

SEQ ID NO: 2976779 - RNA, 19 nt, Artificial Sequence
  Description of Artificial Sequence: Synthetic oligonucleotide
cgaucuacaaaccgaaucu

SEQ ID NO: 2976780 - RNA, 19 nt, Artificial Sequence
  Description of Artificial Sequence: Synthetic oligonucleotide
cuucuccccgcucgacgac

SEQ ID NO: 2976781 - RNA, 19 nt, Artificial Sequence
  Description of Artificial Sequence: Synthetic oligonucleotide
gucaacgccgccgccaucu

SEQ ID NO: 2976782 - RNA, 19 nt, Artificial Sequence
  Description of Artificial Sequence: Synthetic oligonucleotide
gaaucuuccuguagucuuu

SEQ ID NO: 2976783 - RNA, 19 nt, Artificial Sequence
  Description of Artificial Sequence: Synthetic oligonucleotide
cgcucgacgacacucgcac

SEQ ID NO: 2976784 - RNA, 19 nt, Artificial Sequence
  Description of Artificial Sequence: Synthetic oligonucleotide
ccggcggaaggucaacgcc

SEQ ID NO: 2976785 - RNA, 19 nt, Artificial Sequence
  Description of Artificial Sequence: Synthetic oligonucleotide
caccucuuucugacgaucu

SEQ ID NO: 2976786 - RNA, 19 nt, Artificial Sequence
  Description of Artificial Sequence: Synthetic oligonucleotide
agugacggugcugcuugaa

SEQ ID NO: 2976787 - RNA, 19 nt, Artificial Sequence
  Description of Artificial Sequence: Synthetic oligonucleotide
gacgacacucgcaccccga

SEQ ID NO: 2976788 - RNA, 19 nt, Artificial Sequence
  Description of Artificial Sequence: Synthetic oligonucleotide
gcccgcgcagcccuagggg

SEQ ID NO: 2976789 - RNA, 19 nt, Artificial Sequence
  Description of Artificial Sequence: Synthetic oligonucleotide
caacgccgccgccaucuug

SEQ ID NO: 2976790 - RNA, 19 nt, Artificial Sequence
  Description of Artificial Sequence: Synthetic oligonucleotide
caaugacccgaugguccac

SEQ ID NO: 2976791 - RNA, 19 nt, Artificial Sequence
  Description of Artificial Sequence: Synthetic oligonucleotide
gccggcggaaggucaacgc

SEQ ID NO: 2976792 - RNA, 19 nt, Artificial Sequence
  Description of Artificial Sequence: Synthetic oligonucleotide
caauggcaaaguuuucauu

SEQ ID NO: 2976793 - RNA, 19 nt, Artificial Sequence
  Description of Artificial Sequence: Synthetic oligonucleotide
gcuugaauugcaggcuaca

SEQ ID NO: 2976794 - RNA, 19 nt, Artificial Sequence
  Description of Artificial Sequence: Synthetic oligonucleotide
gggagagccagcagccggc

SEQ ID NO: 2976795 - RNA, 19 nt, Artificial Sequence
  Description of Artificial Sequence: Synthetic oligonucleotide
ggagagccagcagccggcg

SEQ ID NO: 2976796 - RNA, 19 nt, Artificial Sequence
  Description of Artificial Sequence: Synthetic oligonucleotide
ggcggaaggucaacgccgc

SEQ ID NO: 2976797 - RNA, 19 nt, Artificial Sequence
  Description of Artificial Sequence: Synthetic oligonucleotide
ggcccgcgcagcccuaggg

SEQ ID NO: 2976798 - RNA, 19 nt, Artificial Sequence
  Description of Artificial Sequence: Synthetic oligonucleotide
cggaaggucaacgccgccg

SEQ ID NO: 2976799 - RNA, 19 nt, Artificial Sequence
  Description of Artificial Sequence: Synthetic oligonucleotide
agcagccggcggaagguca

SEQ ID NO: 2976800 - RNA, 19 nt, Artificial Sequence
  Description of Artificial Sequence: Synthetic oligonucleotide
ggacacagcccacacuagu

SEQ ID NO: 2976801 - RNA, 19 nt, Artificial Sequence
  Description of Artificial Sequence: Synthetic oligonucleotide
aggcccgcgcagcccuagg

SEQ ID NO: 2976802 - RNA, 19 nt, Artificial Sequence
  Description of Artificial Sequence: Synthetic oligonucleotide
cgaugguccaccucauuca

SEQ ID NO: 2976803 - RNA, 19 nt, Artificial Sequence
  Description of Artificial Sequence: Synthetic oligonucleotide
ccccgcucgacgacacucg

SEQ ID NO: 2976804 - RNA, 19 nt, Artificial Sequence
  Description of Artificial Sequence: Synthetic oligonucleotide
ucaacgccgccgccaucuu

SEQ ID NO: 2976805 - RNA, 19 nt, Artificial Sequence
  Description of Artificial Sequence: Synthetic oligonucleotide
gugacggugcugcuugaau

SEQ ID NO: 2976806 - RNA, 19 nt, Artificial Sequence
  Description of Artificial Sequence: Synthetic oligonucleotide
ccgaaaggcccgcgcagcc

SEQ ID NO: 2976807 - RNA, 19 nt, Artificial Sequence
  Description of Artificial Sequence: Synthetic oligonucleotide
ccuucgggguggcccaagg

SEQ ID NO: 2976808 - RNA, 19 nt, Artificial Sequence
  Description of Artificial Sequence: Synthetic oligonucleotide
gcugcuugaauugcaggcu

SEQ ID NO: 2976809 - RNA, 19 nt, Artificial Sequence
  Description of Artificial Sequence: Synthetic oligonucleotide
caucauaaaccuggccggu

SEQ ID NO: 2976810 - RNA, 19 nt, Artificial Sequence
  Description of Artificial Sequence: Synthetic oligonucleotide
gcaggcuacaguagccaca

SEQ ID NO: 2976811 - RNA, 19 nt, Artificial Sequence
  Description of Artificial Sequence: Synthetic oligonucleotide
guggcccaaggcaccacca

SEQ ID NO: 2976812 - RNA, 19 nt, Artificial Sequence
  Description of Artificial Sequence: Synthetic oligonucleotide
gacgaucuacaaaccgaau

SEQ ID NO: 2976813 - RNA, 19 nt, Artificial Sequence
  Description of Artificial Sequence: Synthetic oligonucleotide
accuggccggugugcguga

SEQ ID NO: 2976814 - RNA, 19 nt, Artificial Sequence
  Description of Artificial Sequence: Synthetic oligonucleotide
gcucgacgacacucgcacc

SEQ ID NO: 2976815 - RNA, 19 nt, Artificial Sequence
  Description of Artificial Sequence: Synthetic oligonucleotide
ccaccaccuccaucgcagg

SEQ ID NO: 2976816 - RNA, 19 nt, Artificial Sequence
  Description of Artificial Sequence: Synthetic oligonucleotide
gccggugugcgugaucuuc

SEQ ID NO: 2976817 - RNA, 19 nt, Artificial Sequence
  Description of Artificial Sequence: Synthetic oligonucleotide
agcccacacuagugacggu

SEQ ID NO: 2976818 - RNA, 19 nt, Artificial Sequence
  Description of Artificial Sequence: Synthetic oligonucleotide
cacgggcugcucugcuauc

SEQ ID NO: 2976819 - RNA, 19 nt, Artificial Sequence
  Description of Artificial Sequence: Synthetic oligonucleotide
accuucgggguggcccaag

SEQ ID NO: 2976820 - RNA, 19 nt, Artificial Sequence
  Description of Artificial Sequence: Synthetic oligonucleotide
gucagaggaccaggacaca

SEQ ID NO: 2976821 - RNA, 19 nt, Artificial Sequence
  Description of Artificial Sequence: Synthetic oligonucleotide
ccccgaaaggcccgcgcag

SEQ ID NO: 2976822 - RNA, 19 nt, Artificial Sequence
  Description of Artificial Sequence: Synthetic oligonucleotide
guagccacacguccccguu

SEQ ID NO: 2976823 - RNA, 19 nt, Artificial Sequence
  Description of Artificial Sequence: Synthetic oligonucleotide
ggcugcucugcuaucaaau

SEQ ID NO: 2976824 - RNA, 19 nt, Artificial Sequence
  Description of Artificial Sequence: Synthetic oligonucleotide
cccgaaaggcccgcgcagc

SEQ ID NO: 2976825 - RNA, 19 nt, Artificial Sequence
  Description of Artificial Sequence: Synthetic oligonucleotide
cagcccuaggggagagcca

SEQ ID NO: 2976826 - RNA, 19 nt, Artificial Sequence
  Description of Artificial Sequence: Synthetic oligonucleotide
cuggccggugugcgugauc

SEQ ID NO: 2976827 - RNA, 19 nt, Artificial Sequence
  Description of Artificial Sequence: Synthetic oligonucleotide
cuguagucuuucucaucau

SEQ ID NO: 2976828 - RNA, 19 nt, Artificial Sequence
  Description of Artificial Sequence: Synthetic oligonucleotide
gagccagcagccggcggaa

SEQ ID NO: 2976829 - RNA, 19 nt, Artificial Sequence
  Description of Artificial Sequence: Synthetic oligonucleotide
ccgcgcagcccuaggggag

SEQ ID NO: 2976830 - RNA, 19 nt, Artificial Sequence
  Description of Artificial Sequence: Synthetic oligonucleotide
guacaccuucgggguggcc

SEQ ID NO: 2976831 - RNA, 19 nt, Artificial Sequence
  Description of Artificial Sequence: Synthetic oligonucleotide
agccagcagccggcggaag

SEQ ID NO: 2976832 - RNA, 19 nt, Artificial Sequence
  Description of Artificial Sequence: Synthetic oligonucleotide
cccgcucgacgacacucgc

SEQ ID NO: 2976833 - RNA, 19 nt, Artificial Sequence
  Description of Artificial Sequence: Synthetic oligonucleotide
gggcugcucugcuaucaaa

SEQ ID NO: 2976834 - RNA, 19 nt, Artificial Sequence
  Description of Artificial Sequence: Synthetic oligonucleotide
gcggaaggucaacgccgcc

SEQ ID NO: 2976835 - RNA, 19 nt, Artificial Sequence
  Description of Artificial Sequence: Synthetic oligonucleotide
cgacgacacucgcaccccg

SEQ ID NO: 2976836 - RNA, 19 nt, Artificial Sequence
  Description of Artificial Sequence: Synthetic oligonucleotide
aaaggcccgcgcagcccua

SEQ ID NO: 2976837 - RNA, 19 nt, Artificial Sequence
  Description of Artificial Sequence: Synthetic oligonucleotide
cgaaucuuccuguagucuu

SEQ ID NO: 2976838 - RNA, 19 nt, Artificial Sequence
  Description of Artificial Sequence: Synthetic oligonucleotide
ccaccucauucacgggcug

SEQ ID NO: 2976839 - RNA, 19 nt, Artificial Sequence
  Description of Artificial Sequence: Synthetic oligonucleotide
cccgcgcagcccuagggga

SEQ ID NO: 2976840 - RNA, 19 nt, Artificial Sequence
  Description of Artificial Sequence: Synthetic oligonucleotide
cagccggcggaaggucaac

SEQ ID NO: 2976841 - RNA, 19 nt, Artificial Sequence
  Description of Artificial Sequence: Synthetic oligonucleotide
acccgaugguccaccucau

SEQ ID NO: 2976842 - RNA, 19 nt, Artificial Sequence
  Description of Artificial Sequence: Synthetic oligonucleotide
cccaaggcaccaccaccuc

SEQ ID NO: 2976843 - RNA, 19 nt, Artificial Sequence
  Description of Artificial Sequence: Synthetic oligonucleotide
cgugaucuucuccccgcuc

SEQ ID NO: 2976844 - RNA, 19 nt, Artificial Sequence
  Description of Artificial Sequence: Synthetic oligonucleotide
cgaaaggcccgcgcagccc

SEQ ID NO: 2976845 - RNA, 19 nt, Artificial Sequence
  Description of Artificial Sequence: Synthetic oligonucleotide
ggaccaggacacagcccac

SEQ ID NO: 2976846 - RNA, 19 nt, Artificial Sequence
  Description of Artificial Sequence: Synthetic oligonucleotide
cgggguggcccaaggcacc

SEQ ID NO: 2976847 - RNA, 19 nt, Artificial Sequence
  Description of Artificial Sequence: Synthetic oligonucleotide
cacuagugacggugcugcu

SEQ ID NO: 2976848 - RNA, 19 nt, Artificial Sequence
  Description of Artificial Sequence: Synthetic oligonucleotide
ccaccuccaucgcaggcaa

SEQ ID NO: 2976849 - RNA, 19 nt, Artificial Sequence
  Description of Artificial Sequence: Synthetic oligonucleotide
cccuaggggagagccagca

SEQ ID NO: 2976850 - RNA, 19 nt, Artificial Sequence
  Description of Artificial Sequence: Synthetic oligonucleotide
ccuccaucgcaggcaauga

SEQ ID NO: 2976851 - RNA, 19 nt, Artificial Sequence
  Description of Artificial Sequence: Synthetic oligonucleotide
gcaccccgaaaggcccgcg

SEQ ID NO: 2976852 - RNA, 19 nt, Artificial Sequence
  Description of Artificial Sequence: Synthetic oligonucleotide
ccucauucacgggcugcuc

SEQ ID NO: 2976853 - RNA, 19 nt, Artificial Sequence
  Description of Artificial Sequence: Synthetic oligonucleotide
gggguggcccaaggcacca

SEQ ID NO: 2976854 - RNA, 19 nt, Artificial Sequence
  Description of Artificial Sequence: Synthetic oligonucleotide
ccgaaucuuccuguagucu

SEQ ID NO: 2976855 - RNA, 19 nt, Artificial Sequence
  Description of Artificial Sequence: Synthetic oligonucleotide
ggucaacgccgccgccauc

SEQ ID NO: 2976856 - RNA, 19 nt, Artificial Sequence
  Description of Artificial Sequence: Synthetic oligonucleotide
cggugugcgugaucuucuc

SEQ ID NO: 2976857 - RNA, 19 nt, Artificial Sequence
  Description of Artificial Sequence: Synthetic oligonucleotide
cggugcugcuugaauugca

SEQ ID NO: 2976858 - RNA, 19 nt, Artificial Sequence
  Description of Artificial Sequence: Synthetic oligonucleotide
gcucugcuaucaaaucaau

SEQ ID NO: 2976859 - RNA, 19 nt, Artificial Sequence
  Description of Artificial Sequence: Synthetic oligonucleotide
gcgugaucuucuccccgcu

SEQ ID NO: 2976860 - RNA, 19 nt, Artificial Sequence
  Description of Artificial Sequence: Synthetic oligonucleotide
ccggugugcgugaucuucu

SEQ ID NO: 2976861 - RNA, 19 nt, Artificial Sequence
  Description of Artificial Sequence: Synthetic oligonucleotide
ccgcucgacgacacucgca

SEQ ID NO: 2976862 - RNA, 19 nt, Artificial Sequence
  Description of Artificial Sequence: Synthetic oligonucleotide
gcagccggcggaaggucaa

SEQ ID NO: 2976863 - RNA, 19 nt, Artificial Sequence
  Description of Artificial Sequence: Synthetic oligonucleotide
gcgcagcccuaggggagag

SEQ ID NO: 2976864 - RNA, 19 nt, Artificial Sequence
  Description of Artificial Sequence: Synthetic oligonucleotide
gcccuaggggagagccagc

SEQ ID NO: 2976865 - RNA, 19 nt, Artificial Sequence
  Description of Artificial Sequence: Synthetic oligonucleotide
ccacacuagugacggugcu

SEQ ID NO: 2976866 - RNA, 19 nt, Artificial Sequence
  Description of Artificial Sequence: Synthetic oligonucleotide
ggguggcccaaggcaccac

SEQ ID NO: 2976867 - RNA, 19 nt, Artificial Sequence
  Description of Artificial Sequence: Synthetic oligonucleotide
cgcaggcaaugacccgaug

SEQ ID NO: 2976868 - RNA, 19 nt, Artificial Sequence
  Description of Artificial Sequence: Synthetic oligonucleotide
cgcaccccgaaaggcccgc

SEQ ID NO: 2976869 - RNA, 19 nt, Artificial Sequence
  Description of Artificial Sequence: Synthetic oligonucleotide
cgacacucgcaccccgaaa

SEQ ID NO: 2976870 - RNA, 19 nt, Artificial Sequence
  Description of Artificial Sequence: Synthetic oligonucleotide
cguucucuuuguccaaauu

SEQ ID NO: 2976871 - RNA, 19 nt, Artificial Sequence
  Description of Artificial Sequence: Synthetic oligonucleotide
caccuucgggguggcccaa

SEQ ID NO: 2976872 - RNA, 19 nt, Artificial Sequence
  Description of Artificial Sequence: Synthetic oligonucleotide
cuccccgcucgacgacacu

SEQ ID NO: 2976873 - RNA, 19 nt, Artificial Sequence
  Description of Artificial Sequence: Synthetic oligonucleotide
caccuccaucgcaggcaau

SEQ ID NO: 2976874 - RNA, 19 nt, Artificial Sequence
  Description of Artificial Sequence: Synthetic oligonucleotide
cgggcugcucugcuaucaa

SEQ ID NO: 2976875 - RNA, 19 nt, Artificial Sequence
  Description of Artificial Sequence: Synthetic oligonucleotide
cgcagcccuaggggagagc

SEQ ID NO: 2976876 - RNA, 19 nt, Artificial Sequence
  Description of Artificial Sequence: Synthetic oligonucleotide
cgcgcagcccuaggggaga

SEQ ID NO: 2976877 - RNA, 19 nt, Artificial Sequence
  Description of Artificial Sequence: Synthetic oligonucleotide
ggccggugugcgugaucuu

SEQ ID NO: 2976878 - RNA, 19 nt, Artificial Sequence
  Description of Artificial Sequence: Synthetic oligonucleotide
cccgaugguccaccucauu

SEQ ID NO: 2976879 - RNA, 19 nt, Artificial Sequence
  Description of Artificial Sequence: Synthetic oligonucleotide
ccuggccggugugcgugau

SEQ ID NO: 2976880 - RNA, 19 nt, Artificial Sequence
  Description of Artificial Sequence: Synthetic oligonucleotide
aauucugcagcagugaucc

SEQ ID NO: 2976881 - RNA, 19 nt, Artificial Sequence
  Description of Artificial Sequence: Synthetic oligonucleotide
aaucagaauauccaaagug

SEQ ID NO: 2976882 - RNA, 19 nt, Artificial Sequence
  Description of Artificial Sequence: Synthetic oligonucleotide
ucuauuuccagaauuacca

SEQ ID NO: 2976883 - RNA, 19 nt, Artificial Sequence
  Description of Artificial Sequence: Synthetic oligonucleotide
aaaagaaaauggcuauccc

SEQ ID NO: 2976884 - RNA, 19 nt, Artificial Sequence
  Description of Artificial Sequence: Synthetic oligonucleotide
uguuuuacucaucauauug

SEQ ID NO: 2976885 - RNA, 19 nt, Artificial Sequence
  Description of Artificial Sequence: Synthetic oligonucleotide
uugucugcuauucagaagc

SEQ ID NO: 2976886 - RNA, 19 nt, Artificial Sequence
  Description of Artificial Sequence: Synthetic oligonucleotide
aggaugcaagaauagaucc

SEQ ID NO: 2976887 - RNA, 19 nt, Artificial Sequence
  Description of Artificial Sequence: Synthetic oligonucleotide
aaagaaaauggcuauccca

SEQ ID NO: 2976888 - RNA, 19 nt, Artificial Sequence
  Description of Artificial Sequence: Synthetic oligonucleotide
auaaguuacugguagagug

SEQ ID NO: 2976889 - RNA, 19 nt, Artificial Sequence
  Description of Artificial Sequence: Synthetic oligonucleotide
uuacucaucauauugucug

SEQ ID NO: 2976890 - RNA, 19 nt, Artificial Sequence
  Description of Artificial Sequence: Synthetic oligonucleotide
aauauccaaaguguuuugc

SEQ ID NO: 2976891 - RNA, 19 nt, Artificial Sequence
  Description of Artificial Sequence: Synthetic oligonucleotide
agaaucagaauauccaaag

SEQ ID NO: 2976892 - RNA, 19 nt, Artificial Sequence
  Description of Artificial Sequence: Synthetic oligonucleotide
aaacauguuuuacucauca

SEQ ID NO: 2976893 - RNA, 19 nt, Artificial Sequence
  Description of Artificial Sequence: Synthetic oligonucleotide
ucuuugguguacuauauug

SEQ ID NO: 2976894 - RNA, 19 nt, Artificial Sequence
  Description of Artificial Sequence: Synthetic oligonucleotide
guugcauacacucaaaaca

SEQ ID NO: 2976895 - RNA, 19 nt, Artificial Sequence
  Description of Artificial Sequence: Synthetic oligonucleotide
uucagaagcaucuuuggug

SEQ ID NO: 2976896 - RNA, 19 nt, Artificial Sequence
  Description of Artificial Sequence: Synthetic oligonucleotide
uuugcuguugcauacacuc

SEQ ID NO: 2976897 - RNA, 19 nt, Artificial Sequence
  Description of Artificial Sequence: Synthetic oligonucleotide
gauaucuuccuuucugggg

SEQ ID NO: 2976898 - RNA, 19 nt, Artificial Sequence
  Description of Artificial Sequence: Synthetic oligonucleotide
uauucagaagcaucuuugg

SEQ ID NO: 2976899 - RNA, 19 nt, Artificial Sequence
  Description of Artificial Sequence: Synthetic oligonucleotide
cauauugucugcuauucag

SEQ ID NO: 2976900 - RNA, 19 nt, Artificial Sequence
  Description of Artificial Sequence: Synthetic oligonucleotide
uauauuggguccaacuucu

SEQ ID NO: 2976901 - RNA, 19 nt, Artificial Sequence
  Description of Artificial Sequence: Synthetic oligonucleotide
aaauggcuaucccaauaac

SEQ ID NO: 2976902 - RNA, 19 nt, Artificial Sequence
  Description of Artificial Sequence: Synthetic oligonucleotide
acuucuucaaauucugcag

SEQ ID NO: 2976903 - RNA, 19 nt, Artificial Sequence
  Description of Artificial Sequence: Synthetic oligonucleotide
aaaauggcuaucccaauaa

SEQ ID NO: 2976904 - RNA, 19 nt, Artificial Sequence
  Description of Artificial Sequence: Synthetic oligonucleotide
uucuauuuccagaauuacc

SEQ ID NO: 2976905 - RNA, 19 nt, Artificial Sequence
  Description of Artificial Sequence: Synthetic oligonucleotide
cuuugguguacuauauugg

SEQ ID NO: 2976906 - RNA, 19 nt, Artificial Sequence
  Description of Artificial Sequence: Synthetic oligonucleotide
cucaaaacauguuuuacuc

SEQ ID NO: 2976907 - RNA, 19 nt, Artificial Sequence
  Description of Artificial Sequence: Synthetic oligonucleotide
gacucuagguucuauuucc

SEQ ID NO: 2976908 - RNA, 19 nt, Artificial Sequence
  Description of Artificial Sequence: Synthetic oligonucleotide
uaaguuacugguagagugc

SEQ ID NO: 2976909 - RNA, 19 nt, Artificial Sequence
  Description of Artificial Sequence: Synthetic oligonucleotide
uaucccaauaacagaaaug

SEQ ID NO: 2976910 - RNA, 19 nt, Artificial Sequence
  Description of Artificial Sequence: Synthetic oligonucleotide
aaggaugcaagaauagauc

SEQ ID NO: 2976911 - RNA, 19 nt, Artificial Sequence
  Description of Artificial Sequence: Synthetic oligonucleotide
ucagaagcaucuuuggugu

SEQ ID NO: 2976912 - RNA, 19 nt, Artificial Sequence
  Description of Artificial Sequence: Synthetic oligonucleotide
gaugcaagaauagaucccc

SEQ ID NO: 2976913 - RNA, 19 nt, Artificial Sequence
  Description of Artificial Sequence: Synthetic oligonucleotide
agcuguaaccugcacaggg

SEQ ID NO: 2976914 - RNA, 19 nt, Artificial Sequence
  Description of Artificial Sequence: Synthetic oligonucleotide
uggaaggcagacaaggaug

SEQ ID NO: 2976915 - RNA, 19 nt, Artificial Sequence
  Description of Artificial Sequence: Synthetic oligonucleotide
uccaacuucuucaaauucu

SEQ ID NO: 2976916 - RNA, 19 nt, Artificial Sequence
  Description of Artificial Sequence: Synthetic oligonucleotide
ggauauaaguuacugguag

SEQ ID NO: 2976917 - RNA, 19 nt, Artificial Sequence
  Description of Artificial Sequence: Synthetic oligonucleotide
cuauucagaagcaucuuug

SEQ ID NO: 2976918 - RNA, 19 nt, Artificial Sequence
  Description of Artificial Sequence: Synthetic oligonucleotide
auauaaguuacugguagag

SEQ ID NO: 2976919 - RNA, 19 nt, Artificial Sequence
  Description of Artificial Sequence: Synthetic oligonucleotide
ugucuuggaaggcagacaa

SEQ ID NO: 2976920 - RNA, 19 nt, Artificial Sequence
  Description of Artificial Sequence: Synthetic oligonucleotide
uauccaaaguguuuugcug

SEQ ID NO: 2976921 - RNA, 19 nt, Artificial Sequence
  Description of Artificial Sequence: Synthetic oligonucleotide
uuuacucaucauauugucu

SEQ ID NO: 2976922 - RNA, 19 nt, Artificial Sequence
  Description of Artificial Sequence: Synthetic oligonucleotide
acucaaaacauguuuuacu

SEQ ID NO: 2976923 - RNA, 19 nt, Artificial Sequence
  Description of Artificial Sequence: Synthetic oligonucleotide
ucugcuauucagaagcauc

SEQ ID NO: 2976924 - RNA, 19 nt, Artificial Sequence
  Description of Artificial Sequence: Synthetic oligonucleotide
uggggauauaaguuacugg

SEQ ID NO: 2976925 - RNA, 19 nt, Artificial Sequence
  Description of Artificial Sequence: Synthetic oligonucleotide
ugguguacuauauuggguc

SEQ ID NO: 2976926 - RNA, 19 nt, Artificial Sequence
  Description of Artificial Sequence: Synthetic oligonucleotide
uuuuacucaucauauuguc

SEQ ID NO: 2976927 - RNA, 19 nt, Artificial Sequence
  Description of Artificial Sequence: Synthetic oligonucleotide
ucaaaacauguuuuacuca

SEQ ID NO: 2976928 - RNA, 19 nt, Artificial Sequence
  Description of Artificial Sequence: Synthetic oligonucleotide
ucuagguucuauuuccaga

SEQ ID NO: 2976929 - RNA, 19 nt, Artificial Sequence
  Description of Artificial Sequence: Synthetic oligonucleotide
uguugcauacacucaaaac

SEQ ID NO: 2976930 - RNA, 19 nt, Artificial Sequence
  Description of Artificial Sequence: Synthetic oligonucleotide
aagaaaauggcuaucccaa

SEQ ID NO: 2976931 - RNA, 19 nt, Artificial Sequence
  Description of Artificial Sequence: Synthetic oligonucleotide
uacuauauuggguccaacu

SEQ ID NO: 2976932 - RNA, 19 nt, Artificial Sequence
  Description of Artificial Sequence: Synthetic oligonucleotide
aucauauugucugcuauuc

SEQ ID NO: 2976933 - RNA, 19 nt, Artificial Sequence
  Description of Artificial Sequence: Synthetic oligonucleotide
ugcacagggguauuggcag

SEQ ID NO: 2976934 - RNA, 19 nt, Artificial Sequence
  Description of Artificial Sequence: Synthetic oligonucleotide
aauggcuaucccaauaaca

SEQ ID NO: 2976935 - RNA, 19 nt, Artificial Sequence
  Description of Artificial Sequence: Synthetic oligonucleotide
auggcuaucccaauaacag

SEQ ID NO: 2976936 - RNA, 19 nt, Artificial Sequence
  Description of Artificial Sequence: Synthetic oligonucleotide
acauguuuuacucaucaua

SEQ ID NO: 2976937 - RNA, 19 nt, Artificial Sequence
  Description of Artificial Sequence: Synthetic oligonucleotide
uacacucaaaacauguuuu

SEQ ID NO: 2976938 - RNA, 19 nt, Artificial Sequence
  Description of Artificial Sequence: Synthetic oligonucleotide
caaaguguuuugcuguugc

SEQ ID NO: 2976939 - RNA, 19 nt, Artificial Sequence
  Description of Artificial Sequence: Synthetic oligonucleotide
auauccaaaguguuuugcu

SEQ ID NO: 2976940 - RNA, 19 nt, Artificial Sequence
  Description of Artificial Sequence: Synthetic oligonucleotide
agacucuagguucuauuuc

SEQ ID NO: 2976941 - RNA, 19 nt, Artificial Sequence
  Description of Artificial Sequence: Synthetic oligonucleotide
uuuuguuccccagaaucag

SEQ ID NO: 2976942 - RNA, 19 nt, Artificial Sequence
  Description of Artificial Sequence: Synthetic oligonucleotide
cuauauuggguccaacuuc

SEQ ID NO: 2976943 - RNA, 19 nt, Artificial Sequence
  Description of Artificial Sequence: Synthetic oligonucleotide
aucagaauauccaaagugu

SEQ ID NO: 2976944 - RNA, 19 nt, Artificial Sequence
  Description of Artificial Sequence: Synthetic oligonucleotide
uauuuccagaauuaccaaa

SEQ ID NO: 2976945 - RNA, 19 nt, Artificial Sequence
  Description of Artificial Sequence: Synthetic oligonucleotide
ucagaauauccaaaguguu

SEQ ID NO: 2976946 - RNA, 19 nt, Artificial Sequence
  Description of Artificial Sequence: Synthetic oligonucleotide
aaauucugcagcagugauc

SEQ ID NO: 2976947 - RNA, 19 nt, Artificial Sequence
  Description of Artificial Sequence: Synthetic oligonucleotide
accgauaucuuccuuucug

SEQ ID NO: 2976948 - RNA, 19 nt, Artificial Sequence
  Description of Artificial Sequence: Synthetic oligonucleotide
cuuugcaugugugagacuc

SEQ ID NO: 2976949 - RNA, 19 nt, Artificial Sequence
  Description of Artificial Sequence: Synthetic oligonucleotide
ugguagagugcuuugcaug

SEQ ID NO: 2976950 - RNA, 19 nt, Artificial Sequence
  Description of Artificial Sequence: Synthetic oligonucleotide
ggagcuguaaccugcacag

SEQ ID NO: 2976951 - RNA, 19 nt, Artificial Sequence
  Description of Artificial Sequence: Synthetic oligonucleotide
auccacaccgauaucuucc

SEQ ID NO: 2976952 - RNA, 19 nt, Artificial Sequence
  Description of Artificial Sequence: Synthetic oligonucleotide
agugcuuugcaugugugag

SEQ ID NO: 2976953 - RNA, 19 nt, Artificial Sequence
  Description of Artificial Sequence: Synthetic oligonucleotide
auacacucaaaacauguuu

SEQ ID NO: 2976954 - RNA, 19 nt, Artificial Sequence
  Description of Artificial Sequence: Synthetic oligonucleotide
auccaaaguguuuugcugu

SEQ ID NO: 2976955 - RNA, 19 nt, Artificial Sequence
  Description of Artificial Sequence: Synthetic oligonucleotide
acuauauuggguccaacuu

SEQ ID NO: 2976956 - RNA, 19 nt, Artificial Sequence
  Description of Artificial Sequence: Synthetic oligonucleotide
gauauaaguuacugguaga

SEQ ID NO: 2976957 - RNA, 19 nt, Artificial Sequence
  Description of Artificial Sequence: Synthetic oligonucleotide
aaaacauguuuuacucauc

SEQ ID NO: 2976958 - RNA, 19 nt, Artificial Sequence
  Description of Artificial Sequence: Synthetic oligonucleotide
ugccaucuuugccacaucc

SEQ ID NO: 2976959 - RNA, 19 nt, Artificial Sequence
  Description of Artificial Sequence: Synthetic oligonucleotide
uuagcaggagagccuaucu

SEQ ID NO: 2976960 - RNA, 19 nt, Artificial Sequence
  Description of Artificial Sequence: Synthetic oligonucleotide
acaccgauaucuuccuuuc

SEQ ID NO: 2976961 - RNA, 19 nt, Artificial Sequence
  Description of Artificial Sequence: Synthetic oligonucleotide
agaauauccaaaguguuuu

SEQ ID NO: 2976962 - RNA, 19 nt, Artificial Sequence
  Description of Artificial Sequence: Synthetic oligonucleotide
ucauauugucugcuauuca

SEQ ID NO: 2976963 - RNA, 19 nt, Artificial Sequence
  Description of Artificial Sequence: Synthetic oligonucleotide
uuggaaggcagacaaggau

SEQ ID NO: 2976964 - RNA, 19 nt, Artificial Sequence
  Description of Artificial Sequence: Synthetic oligonucleotide
aaaguguuuugcuguugca

SEQ ID NO: 2976965 - RNA, 19 nt, Artificial Sequence
  Description of Artificial Sequence: Synthetic oligonucleotide
aaaagagggauggggauau

SEQ ID NO: 2976966 - RNA, 19 nt, Artificial Sequence
  Description of Artificial Sequence: Synthetic oligonucleotide
agaagcaucuuugguguac

SEQ ID NO: 2976967 - RNA, 19 nt, Artificial Sequence
  Description of Artificial Sequence: Synthetic oligonucleotide
auugucugcuauucagaag

SEQ ID NO: 2976968 - RNA, 19 nt, Artificial Sequence
  Description of Artificial Sequence: Synthetic oligonucleotide
ugauccacaugucuuggaa

SEQ ID NO: 2976969 - RNA, 19 nt, Artificial Sequence
  Description of Artificial Sequence: Synthetic oligonucleotide
ugcuguugcauacacucaa

SEQ ID NO: 2976970 - RNA, 19 nt, Artificial Sequence
  Description of Artificial Sequence: Synthetic oligonucleotide
uugguguacuauauugggu

SEQ ID NO: 2976971 - RNA, 19 nt, Artificial Sequence
  Description of Artificial Sequence: Synthetic oligonucleotide
ugcauacacucaaaacaug

SEQ ID NO: 2976972 - RNA, 19 nt, Artificial Sequence
  Description of Artificial Sequence: Synthetic oligonucleotide
gacaaggaugcaagaauag

SEQ ID NO: 2976973 - RNA, 19 nt, Artificial Sequence
  Description of Artificial Sequence: Synthetic oligonucleotide
ucaaauucugcagcaguga

SEQ ID NO: 2976974 - RNA, 19 nt, Artificial Sequence
  Description of Artificial Sequence: Synthetic oligonucleotide
auucagaagcaucuuuggu

SEQ ID NO: 2976975 - RNA, 19 nt, Artificial Sequence
  Description of Artificial Sequence: Synthetic oligonucleotide
uauaaguuacugguagagu

SEQ ID NO: 2976976 - RNA, 19 nt, Artificial Sequence
  Description of Artificial Sequence: Synthetic oligonucleotide
aauuuagcaggagagccua

SEQ ID NO: 2976977 - RNA, 19 nt, Artificial Sequence
  Description of Artificial Sequence: Synthetic oligonucleotide
ucugcagcagugauccaca

SEQ ID NO: 2976978 - RNA, 19 nt, Artificial Sequence
  Description of Artificial Sequence: Synthetic oligonucleotide
aaguuacugguagagugcu

SEQ ID NO: 2976979 - RNA, 19 nt, Artificial Sequence
  Description of Artificial Sequence: Synthetic oligonucleotide
uauuggguccaacuucuuc

SEQ ID NO: 2976980 - RNA, 19 nt, Artificial Sequence
  Description of Artificial Sequence: Synthetic oligonucleotide
uacucaucauauugucugc

SEQ ID NO: 2976981 - RNA, 19 nt, Artificial Sequence
  Description of Artificial Sequence: Synthetic oligonucleotide
uuuguuccccagaaucaga

SEQ ID NO: 2976982 - RNA, 19 nt, Artificial Sequence
  Description of Artificial Sequence: Synthetic oligonucleotide
gcaugugugagacucuagg

SEQ ID NO: 2976983 - RNA, 19 nt, Artificial Sequence
  Description of Artificial Sequence: Synthetic oligonucleotide
ucuucaaauucugcagcag

SEQ ID NO: 2976984 - RNA, 19 nt, Artificial Sequence
  Description of Artificial Sequence: Synthetic oligonucleotide
aacauguuuuacucaucau

SEQ ID NO: 2976985 - RNA, 19 nt, Artificial Sequence
  Description of Artificial Sequence: Synthetic oligonucleotide
ugcuuugcaugugugagac

SEQ ID NO: 2976986 - RNA, 19 nt, Artificial Sequence
  Description of Artificial Sequence: Synthetic oligonucleotide
aguguuuugcuguugcaua

SEQ ID NO: 2976987 - RNA, 19 nt, Artificial Sequence
  Description of Artificial Sequence: Synthetic oligonucleotide
agcagugauccacaugucu

SEQ ID NO: 2976988 - RNA, 19 nt, Artificial Sequence
  Description of Artificial Sequence: Synthetic oligonucleotide
uuggcaggugccaucuuug

SEQ ID NO: 2976989 - RNA, 19 nt, Artificial Sequence
  Description of Artificial Sequence: Synthetic oligonucleotide
cuagguucuauuuccagaa

SEQ ID NO: 2976990 - RNA, 19 nt, Artificial Sequence
  Description of Artificial Sequence: Synthetic oligonucleotide
uagagugcuuugcaugugu

SEQ ID NO: 2976991 - RNA, 19 nt, Artificial Sequence
  Description of Artificial Sequence: Synthetic oligonucleotide
acugguagagugcuuugca

SEQ ID NO: 2976992 - RNA, 19 nt, Artificial Sequence
  Description of Artificial Sequence: Synthetic oligonucleotide
aaguguuuugcuguugcau

SEQ ID NO: 2976993 - RNA, 19 nt, Artificial Sequence
  Description of Artificial Sequence: Synthetic oligonucleotide
gaaaauggcuaucccaaua

SEQ ID NO: 2976994 - RNA, 19 nt, Artificial Sequence
  Description of Artificial Sequence: Synthetic oligonucleotide
cacaugucuuggaaggcag

SEQ ID NO: 2976995 - RNA, 19 nt, Artificial Sequence
  Description of Artificial Sequence: Synthetic oligonucleotide
agggguauuggcaggugcc

SEQ ID NO: 2976996 - RNA, 19 nt, Artificial Sequence
  Description of Artificial Sequence: Synthetic oligonucleotide
uuuugcuguugcauacacu

SEQ ID NO: 2976997 - RNA, 19 nt, Artificial Sequence
  Description of Artificial Sequence: Synthetic oligonucleotide
augugugagacucuagguu

SEQ ID NO: 2976998 - RNA, 19 nt, Artificial Sequence
  Description of Artificial Sequence: Synthetic oligonucleotide
cauguuuuacucaucauau

SEQ ID NO: 2976999 - RNA, 19 nt, Artificial Sequence
  Description of Artificial Sequence: Synthetic oligonucleotide
aggagagccuaucuuaaaa

SEQ ID NO: 2977000 - RNA, 19 nt, Artificial Sequence
  Description of Artificial Sequence: Synthetic oligonucleotide
auggggauauaaguuacug

SEQ ID NO: 2977001 - RNA, 19 nt, Artificial Sequence
  Description of Artificial Sequence: Synthetic oligonucleotide
agguucuauuuccagaauu

SEQ ID NO: 2977002 - RNA, 19 nt, Artificial Sequence
  Description of Artificial Sequence: Synthetic oligonucleotide
guuuugcuguugcauacac

SEQ ID NO: 2977003 - RNA, 19 nt, Artificial Sequence
  Description of Artificial Sequence: Synthetic oligonucleotide
agcaggagagccuaucuua

SEQ ID NO: 2977004 - RNA, 19 nt, Artificial Sequence
  Description of Artificial Sequence: Synthetic oligonucleotide
cucuagguucuauuuccag

SEQ ID NO: 2977005 - RNA, 19 nt, Artificial Sequence
  Description of Artificial Sequence: Synthetic oligonucleotide
uuugcaugugugagacucu

SEQ ID NO: 2977006 - RNA, 19 nt, Artificial Sequence
  Description of Artificial Sequence: Synthetic oligonucleotide
aaggcagacaaggaugcaa

SEQ ID NO: 2977007 - RNA, 19 nt, Artificial Sequence
  Description of Artificial Sequence: Synthetic oligonucleotide
uucugcagcagugauccac

SEQ ID NO: 2977008 - RNA, 19 nt, Artificial Sequence
  Description of Artificial Sequence: Synthetic oligonucleotide
acaaggaugcaagaauaga

SEQ ID NO: 2977009 - RNA, 19 nt, Artificial Sequence
  Description of Artificial Sequence: Synthetic oligonucleotide
uggcuaucccaauaacaga

SEQ ID NO: 2977010 - RNA, 19 nt, Artificial Sequence
  Description of Artificial Sequence: Synthetic oligonucleotide
guguuuugcuguugcauac

SEQ ID NO: 2977011 - RNA, 19 nt, Artificial Sequence
  Description of Artificial Sequence: Synthetic oligonucleotide
uuacugguagagugcuuug

SEQ ID NO: 2977012 - RNA, 19 nt, Artificial Sequence
  Description of Artificial Sequence: Synthetic oligonucleotide
ggggauauaaguuacuggu

SEQ ID NO: 2977013 - RNA, 19 nt, Artificial Sequence
  Description of Artificial Sequence: Synthetic oligonucleotide
caaaacauguuuuacucau

SEQ ID NO: 2977014 - RNA, 19 nt, Artificial Sequence
  Description of Artificial Sequence: Synthetic oligonucleotide
ugcaugugugagacucuag

SEQ ID NO: 2977015 - RNA, 19 nt, Artificial Sequence
  Description of Artificial Sequence: Synthetic oligonucleotide
ugucugcuauucagaagca

SEQ ID NO: 2977016 - RNA, 19 nt, Artificial Sequence
  Description of Artificial Sequence: Synthetic oligonucleotide
aagagggauggggauauaa

SEQ ID NO: 2977017 - RNA, 19 nt, Artificial Sequence
  Description of Artificial Sequence: Synthetic oligonucleotide
guuccccagaaucagaaua

SEQ ID NO: 2977018 - RNA, 19 nt, Artificial Sequence
  Description of Artificial Sequence: Synthetic oligonucleotide
gaaucagaauauccaaagu

SEQ ID NO: 2977019 - RNA, 19 nt, Artificial Sequence
  Description of Artificial Sequence: Synthetic oligonucleotide
ugagacucuagguucuauu

SEQ ID NO: 2977020 - RNA, 19 nt, Artificial Sequence
  Description of Artificial Sequence: Synthetic oligonucleotide
guucuauuuccagaauuac

SEQ ID NO: 2977021 - RNA, 19 nt, Artificial Sequence
  Description of Artificial Sequence: Synthetic oligonucleotide
gguguacuauauugggucc

SEQ ID NO: 2977022 - RNA, 19 nt, Artificial Sequence
  Description of Artificial Sequence: Synthetic oligonucleotide
gagggauggggauauaagu

SEQ ID NO: 2977023 - RNA, 19 nt, Artificial Sequence
  Description of Artificial Sequence: Synthetic oligonucleotide
acacucaaaacauguuuua

SEQ ID NO: 2977024 - RNA, 19 nt, Artificial Sequence
  Description of Artificial Sequence: Synthetic oligonucleotide
uugcuguugcauacacuca

SEQ ID NO: 2977025 - RNA, 19 nt, Artificial Sequence
  Description of Artificial Sequence: Synthetic oligonucleotide
cacucaaaacauguuuuac

SEQ ID NO: 2977026 - RNA, 19 nt, Artificial Sequence
  Description of Artificial Sequence: Synthetic oligonucleotide
agagggauggggauauaag

SEQ ID NO: 2977027 - RNA, 19 nt, Artificial Sequence
  Description of Artificial Sequence: Synthetic oligonucleotide
ugcagcagugauccacaug

SEQ ID NO: 2977028 - RNA, 19 nt, Artificial Sequence
  Description of Artificial Sequence: Synthetic oligonucleotide
auauugucugcuauucaga

SEQ ID NO: 2977029 - RNA, 19 nt, Artificial Sequence
  Description of Artificial Sequence: Synthetic oligonucleotide
agaaaauggcuaucccaau

SEQ ID NO: 2977030 - RNA, 19 nt, Artificial Sequence
  Description of Artificial Sequence: Synthetic oligonucleotide
caugucuuggaaggcagac

SEQ ID NO: 2977031 - RNA, 19 nt, Artificial Sequence
  Description of Artificial Sequence: Synthetic oligonucleotide
uguuuugcuguugcauaca

SEQ ID NO: 2977032 - RNA, 19 nt, Artificial Sequence
  Description of Artificial Sequence: Synthetic oligonucleotide
uuuagcaggagagccuauc

SEQ ID NO: 2977033 - RNA, 19 nt, Artificial Sequence
  Description of Artificial Sequence: Synthetic oligonucleotide
uacugguagagugcuuugc

SEQ ID NO: 2977034 - RNA, 19 nt, Artificial Sequence
  Description of Artificial Sequence: Synthetic oligonucleotide
gcagcagugauccacaugu

SEQ ID NO: 2977035 - RNA, 19 nt, Artificial Sequence
  Description of Artificial Sequence: Synthetic oligonucleotide
uguaaccugcacaggggua

SEQ ID NO: 2977036 - RNA, 19 nt, Artificial Sequence
  Description of Artificial Sequence: Synthetic oligonucleotide
auuggcaggugccaucuuu

SEQ ID NO: 2977037 - RNA, 19 nt, Artificial Sequence
  Description of Artificial Sequence: Synthetic oligonucleotide
uguacuauauuggguccaa

SEQ ID NO: 2977038 - RNA, 19 nt, Artificial Sequence
  Description of Artificial Sequence: Synthetic oligonucleotide
caaggaugcaagaauagau

SEQ ID NO: 2977039 - RNA, 19 nt, Artificial Sequence
  Description of Artificial Sequence: Synthetic oligonucleotide
uccacaccgauaucuuccu

SEQ ID NO: 2977040 - RNA, 19 nt, Artificial Sequence
  Description of Artificial Sequence: Synthetic oligonucleotide
cagaaucagaauauccaaa

SEQ ID NO: 2977041 - RNA, 19 nt, Artificial Sequence
  Description of Artificial Sequence: Synthetic oligonucleotide
aggcagacaaggaugcaag

SEQ ID NO: 2977042 - RNA, 19 nt, Artificial Sequence
  Description of Artificial Sequence: Synthetic oligonucleotide
ccaacuucuucaaauucug

SEQ ID NO: 2977043 - RNA, 19 nt, Artificial Sequence
  Description of Artificial Sequence: Synthetic oligonucleotide
ccgauaucuuccuuucugg

SEQ ID NO: 2977044 - RNA, 19 nt, Artificial Sequence
  Description of Artificial Sequence: Synthetic oligonucleotide
gagugcuuugcauguguga

SEQ ID NO: 2977045 - RNA, 19 nt, Artificial Sequence
  Description of Artificial Sequence: Synthetic oligonucleotide
guuuuacucaucauauugu

SEQ ID NO: 2977046 - RNA, 19 nt, Artificial Sequence
  Description of Artificial Sequence: Synthetic oligonucleotide
agacaaggaugcaagaaua

SEQ ID NO: 2977047 - RNA, 19 nt, Artificial Sequence
  Description of Artificial Sequence: Synthetic oligonucleotide
ggaaggcagacaaggaugc

SEQ ID NO: 2977048 - RNA, 19 nt, Artificial Sequence
  Description of Artificial Sequence: Synthetic oligonucleotide
cagggguauuggcaggugc

SEQ ID NO: 2977049 - RNA, 19 nt, Artificial Sequence
  Description of Artificial Sequence: Synthetic oligonucleotide
uccaaaguguuuugcuguu

SEQ ID NO: 2977050 - RNA, 19 nt, Artificial Sequence
  Description of Artificial Sequence: Synthetic oligonucleotide
cuuggaaggcagacaagga

SEQ ID NO: 2977051 - RNA, 19 nt, Artificial Sequence
  Description of Artificial Sequence: Synthetic oligonucleotide
auguuuuacucaucauauu

SEQ ID NO: 2977052 - RNA, 19 nt, Artificial Sequence
  Description of Artificial Sequence: Synthetic oligonucleotide
gcaggugccaucuuugcca

SEQ ID NO: 2977053 - RNA, 19 nt, Artificial Sequence
  Description of Artificial Sequence: Synthetic oligonucleotide
ucccaauaacagaaauguu

SEQ ID NO: 2977054 - RNA, 19 nt, Artificial Sequence
  Description of Artificial Sequence: Synthetic oligonucleotide
cuauuuccagaauuaccaa

SEQ ID NO: 2977055 - RNA, 19 nt, Artificial Sequence
  Description of Artificial Sequence: Synthetic oligonucleotide
uagguucuauuuccagaau

SEQ ID NO: 2977056 - RNA, 19 nt, Artificial Sequence
  Description of Artificial Sequence: Synthetic oligonucleotide
ggaugcaagaauagauccc

SEQ ID NO: 2977057 - RNA, 19 nt, Artificial Sequence
  Description of Artificial Sequence: Synthetic oligonucleotide
cccagaaucagaauaucca

SEQ ID NO: 2977058 - RNA, 19 nt, Artificial Sequence
  Description of Artificial Sequence: Synthetic oligonucleotide
cauccacaccgauaucuuc

SEQ ID NO: 2977059 - RNA, 19 nt, Artificial Sequence
  Description of Artificial Sequence: Synthetic oligonucleotide
accugcacagggguauugg

SEQ ID NO: 2977060 - RNA, 19 nt, Artificial Sequence
  Description of Artificial Sequence: Synthetic oligonucleotide
uagcaggagagccuaucuu

SEQ ID NO: 2977061 - RNA, 19 nt, Artificial Sequence
  Description of Artificial Sequence: Synthetic oligonucleotide
aucuuugguguacuauauu

SEQ ID NO: 2977062 - RNA, 19 nt, Artificial Sequence
  Description of Artificial Sequence: Synthetic oligonucleotide
ccccagaaucagaauaucc

SEQ ID NO: 2977063 - RNA, 19 nt, Artificial Sequence
  Description of Artificial Sequence: Synthetic oligonucleotide
gagacucuagguucuauuu

SEQ ID NO: 2977064 - RNA, 19 nt, Artificial Sequence
  Description of Artificial Sequence: Synthetic oligonucleotide
cuucaaauucugcagcagu

SEQ ID NO: 2977065 - RNA, 19 nt, Artificial Sequence
  Description of Artificial Sequence: Synthetic oligonucleotide
agcaucuuugguguacuau

SEQ ID NO: 2977066 - RNA, 19 nt, Artificial Sequence
  Description of Artificial Sequence: Synthetic oligonucleotide
agggauggggauauaaguu

SEQ ID NO: 2977067 - RNA, 19 nt, Artificial Sequence
  Description of Artificial Sequence: Synthetic oligonucleotide
gcuguaaccugcacagggg

SEQ ID NO: 2977068 - RNA, 19 nt, Artificial Sequence
  Description of Artificial Sequence: Synthetic oligonucleotide
ggcuaucccaauaacagaa

SEQ ID NO: 2977069 - RNA, 19 nt, Artificial Sequence
  Description of Artificial Sequence: Synthetic oligonucleotide
uguuccccagaaucagaau

SEQ ID NO: 2977070 - RNA, 19 nt, Artificial Sequence
  Description of Artificial Sequence: Synthetic oligonucleotide
caggugccaucuuugccac

SEQ ID NO: 2977071 - RNA, 19 nt, Artificial Sequence
  Description of Artificial Sequence: Synthetic oligonucleotide
caugugugagacucuaggu

SEQ ID NO: 2977072 - RNA, 19 nt, Artificial Sequence
  Description of Artificial Sequence: Synthetic oligonucleotide
ggauggggauauaaguuac

SEQ ID NO: 2977073 - RNA, 19 nt, Artificial Sequence
  Description of Artificial Sequence: Synthetic oligonucleotide
gguagagugcuuugcaugu

SEQ ID NO: 2977074 - RNA, 19 nt, Artificial Sequence
  Description of Artificial Sequence: Synthetic oligonucleotide
gguucuauuuccagaauua

SEQ ID NO: 2977075 - RNA, 19 nt, Artificial Sequence
  Description of Artificial Sequence: Synthetic oligonucleotide
gggauggggauauaaguua

SEQ ID NO: 2977076 - RNA, 19 nt, Artificial Sequence
  Description of Artificial Sequence: Synthetic oligonucleotide
cgauaucuuccuuucuggg

SEQ ID NO: 2977077 - RNA, 19 nt, Artificial Sequence
  Description of Artificial Sequence: Synthetic oligonucleotide
aaccugcacagggguauug

SEQ ID NO: 2977078 - RNA, 19 nt, Artificial Sequence
  Description of Artificial Sequence: Synthetic oligonucleotide
agagugcuuugcaugugug

SEQ ID NO: 2977079 - RNA, 19 nt, Artificial Sequence
  Description of Artificial Sequence: Synthetic oligonucleotide
gcaucuuugguguacuaua

SEQ ID NO: 2977080 - RNA, 19 nt, Artificial Sequence
  Description of Artificial Sequence: Synthetic oligonucleotide
cuguugcauacacucaaaa

SEQ ID NO: 2977081 - RNA, 19 nt, Artificial Sequence
  Description of Artificial Sequence: Synthetic oligonucleotide
augucuuggaaggcagaca

SEQ ID NO: 2977082 - RNA, 19 nt, Artificial Sequence
  Description of Artificial Sequence: Synthetic oligonucleotide
aagcaucuuugguguacua

SEQ ID NO: 2977083 - RNA, 19 nt, Artificial Sequence
  Description of Artificial Sequence: Synthetic oligonucleotide
uugcaugugugagacucua

SEQ ID NO: 2977084 - RNA, 19 nt, Artificial Sequence
  Description of Artificial Sequence: Synthetic oligonucleotide
gagcuguaaccugcacagg

SEQ ID NO: 2977085 - RNA, 19 nt, Artificial Sequence
  Description of Artificial Sequence: Synthetic oligonucleotide
cagacaaggaugcaagaau

SEQ ID NO: 2977086 - RNA, 19 nt, Artificial Sequence
  Description of Artificial Sequence: Synthetic oligonucleotide
gguauuggcaggugccauc

SEQ ID NO: 2977087 - RNA, 19 nt, Artificial Sequence
  Description of Artificial Sequence: Synthetic oligonucleotide
cucaucauauugucugcua

SEQ ID NO: 2977088 - RNA, 19 nt, Artificial Sequence
  Description of Artificial Sequence: Synthetic oligonucleotide
gugcuuugcaugugugaga

SEQ ID NO: 2977089 - RNA, 19 nt, Artificial Sequence
  Description of Artificial Sequence: Synthetic oligonucleotide
guguacuauauugggucca

SEQ ID NO: 2977090 - RNA, 19 nt, Artificial Sequence
  Description of Artificial Sequence: Synthetic oligonucleotide
cuaucccaauaacagaaau

SEQ ID NO: 2977091 - RNA, 19 nt, Artificial Sequence
  Description of Artificial Sequence: Synthetic oligonucleotide
ggcaggugccaucuuugcc

SEQ ID NO: 2977092 - RNA, 19 nt, Artificial Sequence
  Description of Artificial Sequence: Synthetic oligonucleotide
guagagugcuuugcaugug

SEQ ID NO: 2977093 - RNA, 19 nt, Artificial Sequence
  Description of Artificial Sequence: Synthetic oligonucleotide
acucuagguucuauuucca

SEQ ID NO: 2977094 - RNA, 19 nt, Artificial Sequence
  Description of Artificial Sequence: Synthetic oligonucleotide
guuacugguagagugcuuu

SEQ ID NO: 2977095 - RNA, 19 nt, Artificial Sequence
  Description of Artificial Sequence: Synthetic oligonucleotide
uccccagaaucagaauauc

SEQ ID NO: 2977096 - RNA, 19 nt, Artificial Sequence
  Description of Artificial Sequence: Synthetic oligonucleotide
cagaauauccaaaguguuu

SEQ ID NO: 2977097 - RNA, 19 nt, Artificial Sequence
  Description of Artificial Sequence: Synthetic oligonucleotide
gaagcaucuuugguguacu

SEQ ID NO: 2977098 - RNA, 19 nt, Artificial Sequence
  Description of Artificial Sequence: Synthetic oligonucleotide
gugauccacaugucuugga

SEQ ID NO: 2977099 - RNA, 19 nt, Artificial Sequence
  Description of Artificial Sequence: Synthetic oligonucleotide
caucuuugguguacuauau

SEQ ID NO: 2977100 - RNA, 19 nt, Artificial Sequence
  Description of Artificial Sequence: Synthetic oligonucleotide
gucuuggaaggcagacaag

SEQ ID NO: 2977101 - RNA, 19 nt, Artificial Sequence
  Description of Artificial Sequence: Synthetic oligonucleotide
cauacacucaaaacauguu

SEQ ID NO: 2977102 - RNA, 19 nt, Artificial Sequence
  Description of Artificial Sequence: Synthetic oligonucleotide
caaauucugcagcagugau

SEQ ID NO: 2977103 - RNA, 19 nt, Artificial Sequence
  Description of Artificial Sequence: Synthetic oligonucleotide
ccugcacagggguauuggc

SEQ ID NO: 2977104 - RNA, 19 nt, Artificial Sequence
  Description of Artificial Sequence: Synthetic oligonucleotide
guacuauauuggguccaac

SEQ ID NO: 2977105 - RNA, 19 nt, Artificial Sequence
  Description of Artificial Sequence: Synthetic oligonucleotide
gcacagggguauuggcagg

SEQ ID NO: 2977106 - RNA, 19 nt, Artificial Sequence
  Description of Artificial Sequence: Synthetic oligonucleotide
gauggggauauaaguuacu

SEQ ID NO: 2977107 - RNA, 19 nt, Artificial Sequence
  Description of Artificial Sequence: Synthetic oligonucleotide
guauuggcaggugccaucu

SEQ ID NO: 2977108 - RNA, 19 nt, Artificial Sequence
  Description of Artificial Sequence: Synthetic oligonucleotide
guaaccugcacagggguau

SEQ ID NO: 2977109 - RNA, 19 nt, Artificial Sequence
  Description of Artificial Sequence: Synthetic oligonucleotide
caucauauugucugcuauu

SEQ ID NO: 2977110 - RNA, 19 nt, Artificial Sequence
  Description of Artificial Sequence: Synthetic oligonucleotide
gaaggcagacaaggaugca

SEQ ID NO: 2977111 - RNA, 19 nt, Artificial Sequence
  Description of Artificial Sequence: Synthetic oligonucleotide
acaugucuuggaaggcaga

SEQ ID NO: 2977112 - RNA, 19 nt, Artificial Sequence
  Description of Artificial Sequence: Synthetic oligonucleotide
cuguaaccugcacaggggu

SEQ ID NO: 2977113 - RNA, 19 nt, Artificial Sequence
  Description of Artificial Sequence: Synthetic oligonucleotide
ugugagacucuagguucua

SEQ ID NO: 2977114 - RNA, 19 nt, Artificial Sequence
  Description of Artificial Sequence: Synthetic oligonucleotide
gcagacaaggaugcaagaa

SEQ ID NO: 2977115 - RNA, 19 nt, Artificial Sequence
  Description of Artificial Sequence: Synthetic oligonucleotide
cagcagugauccacauguc

SEQ ID NO: 2977116 - RNA, 19 nt, Artificial Sequence
  Description of Artificial Sequence: Synthetic oligonucleotide
ggcagacaaggaugcaaga

SEQ ID NO: 2977117 - RNA, 19 nt, Artificial Sequence
  Description of Artificial Sequence: Synthetic oligonucleotide
uauuggcaggugccaucuu

SEQ ID NO: 2977118 - RNA, 19 nt, Artificial Sequence
  Description of Artificial Sequence: Synthetic oligonucleotide
acagggguauuggcaggug

SEQ ID NO: 2977119 - RNA, 19 nt, Artificial Sequence
  Description of Artificial Sequence: Synthetic oligonucleotide
auucugcagcagugaucca

SEQ ID NO: 2977120 - RNA, 19 nt, Artificial Sequence
  Description of Artificial Sequence: Synthetic oligonucleotide
gcuauucagaagcaucuuu

SEQ ID NO: 2977121 - RNA, 19 nt, Artificial Sequence
  Description of Artificial Sequence: Synthetic oligonucleotide
gggauauaaguuacuggua

SEQ ID NO: 2977122 - RNA, 19 nt, Artificial Sequence
  Description of Artificial Sequence: Synthetic oligonucleotide
caggagagccuaucuuaaa

SEQ ID NO: 2977123 - RNA, 19 nt, Artificial Sequence
  Description of Artificial Sequence: Synthetic oligonucleotide
cugguagagugcuuugcau

SEQ ID NO: 2977124 - RNA, 19 nt, Artificial Sequence
  Description of Artificial Sequence: Synthetic oligonucleotide
gguccaacuucuucaaauu

SEQ ID NO: 2977125 - RNA, 19 nt, Artificial Sequence
  Description of Artificial Sequence: Synthetic oligonucleotide
aaagagggauggggauaua

SEQ ID NO: 2977126 - RNA, 19 nt, Artificial Sequence
  Description of Artificial Sequence: Synthetic oligonucleotide
auuuagcaggagagccuau

SEQ ID NO: 2977127 - RNA, 19 nt, Artificial Sequence
  Description of Artificial Sequence: Synthetic oligonucleotide
uaaccugcacagggguauu

SEQ ID NO: 2977128 - RNA, 19 nt, Artificial Sequence
  Description of Artificial Sequence: Synthetic oligonucleotide
gugugagacucuagguucu

SEQ ID NO: 2977129 - RNA, 19 nt, Artificial Sequence
  Description of Artificial Sequence: Synthetic oligonucleotide
ccaaaguguuuugcuguug

SEQ ID NO: 2977130 - RNA, 19 nt, Artificial Sequence
  Description of Artificial Sequence: Synthetic oligonucleotide
gcaggagagccuaucuuaa

SEQ ID NO: 2977131 - RNA, 19 nt, Artificial Sequence
  Description of Artificial Sequence: Synthetic oligonucleotide
aguuacugguagagugcuu

SEQ ID NO: 2977132 - RNA, 19 nt, Artificial Sequence
  Description of Artificial Sequence: Synthetic oligonucleotide
gcuaucccaauaacagaaa

SEQ ID NO: 2977133 - RNA, 19 nt, Artificial Sequence
  Description of Artificial Sequence: Synthetic oligonucleotide
aggugccaucuuugccaca

SEQ ID NO: 2977134 - RNA, 19 nt, Artificial Sequence
  Description of Artificial Sequence: Synthetic oligonucleotide
gggguauuggcaggugcca

SEQ ID NO: 2977135 - RNA, 19 nt, Artificial Sequence
  Description of Artificial Sequence: Synthetic oligonucleotide
ggugccaucuuugccacau

SEQ ID NO: 2977136 - RNA, 19 nt, Artificial Sequence
  Description of Artificial Sequence: Synthetic oligonucleotide
auauuggguccaacuucuu

SEQ ID NO: 2977137 - RNA, 19 nt, Artificial Sequence
  Description of Artificial Sequence: Synthetic oligonucleotide
cagaagcaucuuuggugua

SEQ ID NO: 2977138 - RNA, 19 nt, Artificial Sequence
  Description of Artificial Sequence: Synthetic oligonucleotide
ccacaugucuuggaaggca

SEQ ID NO: 2977139 - RNA, 19 nt, Artificial Sequence
  Description of Artificial Sequence: Synthetic oligonucleotide
gcuguugcauacacucaaa

SEQ ID NO: 2977140 - RNA, 19 nt, Artificial Sequence
  Description of Artificial Sequence: Synthetic oligonucleotide
gucugcuauucagaagcau

SEQ ID NO: 2977141 - RNA, 19 nt, Artificial Sequence
  Description of Artificial Sequence: Synthetic oligonucleotide
ggggagcuguaaccugcac

SEQ ID NO: 2977142 - RNA, 19 nt, Artificial Sequence
  Description of Artificial Sequence: Synthetic oligonucleotide
cacagggguauuggcaggu

SEQ ID NO: 2977143 - RNA, 19 nt, Artificial Sequence
  Description of Artificial Sequence: Synthetic oligonucleotide
ccaucuuugccacauccuu

SEQ ID NO: 2977144 - RNA, 19 nt, Artificial Sequence
  Description of Artificial Sequence: Synthetic oligonucleotide
caccgauaucuuccuuucu

SEQ ID NO: 2977145 - RNA, 19 nt, Artificial Sequence
  Description of Artificial Sequence: Synthetic oligonucleotide
gugagacucuagguucuau

SEQ ID NO: 2977146 - RNA, 19 nt, Artificial Sequence
  Description of Artificial Sequence: Synthetic oligonucleotide
cugcagcagugauccacau

SEQ ID NO: 2977147 - RNA, 19 nt, Artificial Sequence
  Description of Artificial Sequence: Synthetic oligonucleotide
ggguauuggcaggugccau

SEQ ID NO: 2977148 - RNA, 19 nt, Artificial Sequence
  Description of Artificial Sequence: Synthetic oligonucleotide
ccauccacaccgauaucuu

SEQ ID NO: 2977149 - RNA, 19 nt, Artificial Sequence
  Description of Artificial Sequence: Synthetic oligonucleotide
ccacaccgauaucuuccuu

SEQ ID NO: 2977150 - RNA, 19 nt, Artificial Sequence
  Description of Artificial Sequence: Synthetic oligonucleotide
aauaacuuucgccaaagcg

SEQ ID NO: 2977151 - RNA, 19 nt, Artificial Sequence
  Description of Artificial Sequence: Synthetic oligonucleotide
aauacuacauucuauuucu

SEQ ID NO: 2977152 - RNA, 19 nt, Artificial Sequence
  Description of Artificial Sequence: Synthetic oligonucleotide
uucucugagauucauauca

SEQ ID NO: 2977153 - RNA, 19 nt, Artificial Sequence
  Description of Artificial Sequence: Synthetic oligonucleotide
auugaaaacucacacuggg

SEQ ID NO: 2977154 - RNA, 19 nt, Artificial Sequence
  Description of Artificial Sequence: Synthetic oligonucleotide
uuuugcuugaagaauuugc

SEQ ID NO: 2977155 - RNA, 19 nt, Artificial Sequence
  Description of Artificial Sequence: Synthetic oligonucleotide
aaggagauuaauucuccgg

SEQ ID NO: 2977156 - RNA, 19 nt, Artificial Sequence
  Description of Artificial Sequence: Synthetic oligonucleotide
ucauacaccagcaaagucu

SEQ ID NO: 2977157 - RNA, 19 nt, Artificial Sequence
  Description of Artificial Sequence: Synthetic oligonucleotide
ugagauucauaucauacac

SEQ ID NO: 2977158 - RNA, 19 nt, Artificial Sequence
  Description of Artificial Sequence: Synthetic oligonucleotide
uucacaaggagauuaauuc

SEQ ID NO: 2977159 - RNA, 19 nt, Artificial Sequence
  Description of Artificial Sequence: Synthetic oligonucleotide
ucugagauucauaucauac

SEQ ID NO: 2977160 - RNA, 19 nt, Artificial Sequence
  Description of Artificial Sequence: Synthetic oligonucleotide
ugaaaacucacacugggac

SEQ ID NO: 2977161 - RNA, 19 nt, Artificial Sequence
  Description of Artificial Sequence: Synthetic oligonucleotide
agauucauaucauacacca

SEQ ID NO: 2977162 - RNA, 19 nt, Artificial Sequence
  Description of Artificial Sequence: Synthetic oligonucleotide
uucguauucguuuugcuug

SEQ ID NO: 2977163 - RNA, 19 nt, Artificial Sequence
  Description of Artificial Sequence: Synthetic oligonucleotide
ugcugaauaacuuucgcca

SEQ ID NO: 2977164 - RNA, 19 nt, Artificial Sequence
  Description of Artificial Sequence: Synthetic oligonucleotide
ucagucacggcucccaugg

SEQ ID NO: 2977165 - RNA, 19 nt, Artificial Sequence
  Description of Artificial Sequence: Synthetic oligonucleotide
uauucguuuugcuugaaga

SEQ ID NO: 2977166 - RNA, 19 nt, Artificial Sequence
  Description of Artificial Sequence: Synthetic oligonucleotide
acuacauucuauuucuuug

SEQ ID NO: 2977167 - RNA, 19 nt, Artificial Sequence
  Description of Artificial Sequence: Synthetic oligonucleotide
augaagucuuuucacaagg

SEQ ID NO: 2977168 - RNA, 19 nt, Artificial Sequence
  Description of Artificial Sequence: Synthetic oligonucleotide
aaaacucacacugggacag

SEQ ID NO: 2977169 - RNA, 19 nt, Artificial Sequence
  Description of Artificial Sequence: Synthetic oligonucleotide
uuugcuugaagaauuugcu

SEQ ID NO: 2977170 - RNA, 19 nt, Artificial Sequence
  Description of Artificial Sequence: Synthetic oligonucleotide
augcugaauaacuuucgcc

SEQ ID NO: 2977171 - RNA, 19 nt, Artificial Sequence
  Description of Artificial Sequence: Synthetic oligonucleotide
uccaucaaucagaagacgc

SEQ ID NO: 2977172 - RNA, 19 nt, Artificial Sequence
  Description of Artificial Sequence: Synthetic oligonucleotide
auuucucugagauucauau

SEQ ID NO: 2977173 - RNA, 19 nt, Artificial Sequence
  Description of Artificial Sequence: Synthetic oligonucleotide
uuugaugaagucuuuucac

SEQ ID NO: 2977174 - RNA, 19 nt, Artificial Sequence
  Description of Artificial Sequence: Synthetic oligonucleotide
aagucuugcccauugaaaa

SEQ ID NO: 2977175 - RNA, 19 nt, Artificial Sequence
  Description of Artificial Sequence: Synthetic oligonucleotide
ugaugcugaauaacuuucg

SEQ ID NO: 2977176 - RNA, 19 nt, Artificial Sequence
  Description of Artificial Sequence: Synthetic oligonucleotide
aagcgucauauucuugucg

SEQ ID NO: 2977177 - RNA, 19 nt, Artificial Sequence
  Description of Artificial Sequence: Synthetic oligonucleotide
ucucaugucugucuggaug

SEQ ID NO: 2977178 - RNA, 19 nt, Artificial Sequence
  Description of Artificial Sequence: Synthetic oligonucleotide
aaucagaagacgcuuccgu

SEQ ID NO: 2977179 - RNA, 19 nt, Artificial Sequence
  Description of Artificial Sequence: Synthetic oligonucleotide
uaauucuccggucacuccc

SEQ ID NO: 2977180 - RNA, 19 nt, Artificial Sequence
  Description of Artificial Sequence: Synthetic oligonucleotide
auuugaugaagucuuuuca

SEQ ID NO: 2977181 - RNA, 19 nt, Artificial Sequence
  Description of Artificial Sequence: Synthetic oligonucleotide
aaagcgucauauucuuguc

SEQ ID NO: 2977182 - RNA, 19 nt, Artificial Sequence
  Description of Artificial Sequence: Synthetic oligonucleotide
augucugucuggaugaugc

SEQ ID NO: 2977183 - RNA, 19 nt, Artificial Sequence
  Description of Artificial Sequence: Synthetic oligonucleotide
auaacuuucgccaaagcgu

SEQ ID NO: 2977184 - RNA, 19 nt, Artificial Sequence
  Description of Artificial Sequence: Synthetic oligonucleotide
gaugaagucuuuucacaag

SEQ ID NO: 2977185 - RNA, 19 nt, Artificial Sequence
  Description of Artificial Sequence: Synthetic oligonucleotide
ucaaucagaagacgcuucc

SEQ ID NO: 2977186 - RNA, 19 nt, Artificial Sequence
  Description of Artificial Sequence: Synthetic oligonucleotide
agauuaauucuccggucac

SEQ ID NO: 2977187 - RNA, 19 nt, Artificial Sequence
  Description of Artificial Sequence: Synthetic oligonucleotide
uugaugaagucuuuucaca

SEQ ID NO: 2977188 - RNA, 19 nt, Artificial Sequence
  Description of Artificial Sequence: Synthetic oligonucleotide
uucgucgucagucacggcu

SEQ ID NO: 2977189 - RNA, 19 nt, Artificial Sequence
  Description of Artificial Sequence: Synthetic oligonucleotide
ucuccaucaaucagaagac

SEQ ID NO: 2977190 - RNA, 19 nt, Artificial Sequence
  Description of Artificial Sequence: Synthetic oligonucleotide
auuaauucuccggucacuc

SEQ ID NO: 2977191 - RNA, 19 nt, Artificial Sequence
  Description of Artificial Sequence: Synthetic oligonucleotide
aggagauuaauucuccggu

SEQ ID NO: 2977192 - RNA, 19 nt, Artificial Sequence
  Description of Artificial Sequence: Synthetic oligonucleotide
caauacuacauucuauuuc

SEQ ID NO: 2977193 - RNA, 19 nt, Artificial Sequence
  Description of Artificial Sequence: Synthetic oligonucleotide
cuuccguaugacuucgucg

SEQ ID NO: 2977194 - RNA, 19 nt, Artificial Sequence
  Description of Artificial Sequence: Synthetic oligonucleotide
uuccguaugacuucgucgu

SEQ ID NO: 2977195 - RNA, 19 nt, Artificial Sequence
  Description of Artificial Sequence: Synthetic oligonucleotide
ugcuugaagaauuugcuuu

SEQ ID NO: 2977196 - RNA, 19 nt, Artificial Sequence
  Description of Artificial Sequence: Synthetic oligonucleotide
gaugcugaauaacuuucgc

SEQ ID NO: 2977197 - RNA, 19 nt, Artificial Sequence
  Description of Artificial Sequence: Synthetic oligonucleotide
agucuugcccauugaaaac

SEQ ID NO: 2977198 - RNA, 19 nt, Artificial Sequence
  Description of Artificial Sequence: Synthetic oligonucleotide
cauugaaaacucacacugg

SEQ ID NO: 2977199 - RNA, 19 nt, Artificial Sequence
  Description of Artificial Sequence: Synthetic oligonucleotide
gcugguacuggcuauaucc

SEQ ID NO: 2977200 - RNA, 19 nt, Artificial Sequence
  Description of Artificial Sequence: Synthetic oligonucleotide
ugaauaacuuucgccaaag

SEQ ID NO: 2977201 - RNA, 19 nt, Artificial Sequence
  Description of Artificial Sequence: Synthetic oligonucleotide
ucacaaggagauuaauucu

SEQ ID NO: 2977202 - RNA, 19 nt, Artificial Sequence
  Description of Artificial Sequence: Synthetic oligonucleotide
aagucuuuucacaaggaga

SEQ ID NO: 2977203 - RNA, 19 nt, Artificial Sequence
  Description of Artificial Sequence: Synthetic oligonucleotide
uuucacaaggagauuaauu

SEQ ID NO: 2977204 - RNA, 19 nt, Artificial Sequence
  Description of Artificial Sequence: Synthetic oligonucleotide
acaaggagauuaauucucc

SEQ ID NO: 2977205 - RNA, 19 nt, Artificial Sequence
  Description of Artificial Sequence: Synthetic oligonucleotide
uuuucauaauucuccauuu

SEQ ID NO: 2977206 - RNA, 19 nt, Artificial Sequence
  Description of Artificial Sequence: Synthetic oligonucleotide
uaacuuucgccaaagcguc

SEQ ID NO: 2977207 - RNA, 19 nt, Artificial Sequence
  Description of Artificial Sequence: Synthetic oligonucleotide
ugaugaagucuuuucacaa

SEQ ID NO: 2977208 - RNA, 19 nt, Artificial Sequence
  Description of Artificial Sequence: Synthetic oligonucleotide
gagauuaauucuccgguca

SEQ ID NO: 2977209 - RNA, 19 nt, Artificial Sequence
  Description of Artificial Sequence: Synthetic oligonucleotide
ucuuuucacaaggagauua

SEQ ID NO: 2977210 - RNA, 19 nt, Artificial Sequence
  Description of Artificial Sequence: Synthetic oligonucleotide
agaguugcaccauuugaug

SEQ ID NO: 2977211 - RNA, 19 nt, Artificial Sequence
  Description of Artificial Sequence: Synthetic oligonucleotide
acaccagcaaagucuugcc

SEQ ID NO: 2977212 - RNA, 19 nt, Artificial Sequence
  Description of Artificial Sequence: Synthetic oligonucleotide
cauuugaugaagucuuuuc

SEQ ID NO: 2977213 - RNA, 19 nt, Artificial Sequence
  Description of Artificial Sequence: Synthetic oligonucleotide
cuccauuucucugagauuc

SEQ ID NO: 2977214 - RNA, 19 nt, Artificial Sequence
  Description of Artificial Sequence: Synthetic oligonucleotide
cacaaggagauuaauucuc

SEQ ID NO: 2977215 - RNA, 19 nt, Artificial Sequence
  Description of Artificial Sequence: Synthetic oligonucleotide
uugaaaacucacacuggga

SEQ ID NO: 2977216 - RNA, 19 nt, Artificial Sequence
  Description of Artificial Sequence: Synthetic oligonucleotide
uuucauaauucuccauuuc

SEQ ID NO: 2977217 - RNA, 19 nt, Artificial Sequence
  Description of Artificial Sequence: Synthetic oligonucleotide
uacaccagcaaagucuugc

SEQ ID NO: 2977218 - RNA, 19 nt, Artificial Sequence
  Description of Artificial Sequence: Synthetic oligonucleotide
ccauugaaaacucacacug

SEQ ID NO: 2977219 - RNA, 19 nt, Artificial Sequence
  Description of Artificial Sequence: Synthetic oligonucleotide
ugaagucuuuucacaagga

SEQ ID NO: 2977220 - RNA, 19 nt, Artificial Sequence
  Description of Artificial Sequence: Synthetic oligonucleotide
aauucuccggucacucccc

SEQ ID NO: 2977221 - RNA, 19 nt, Artificial Sequence
  Description of Artificial Sequence: Synthetic oligonucleotide
augaugcugaauaacuuuc

SEQ ID NO: 2977222 - RNA, 19 nt, Artificial Sequence
  Description of Artificial Sequence: Synthetic oligonucleotide
accagcaaagucuugccca

SEQ ID NO: 2977223 - RNA, 19 nt, Artificial Sequence
  Description of Artificial Sequence: Synthetic oligonucleotide
ucgccaaagcgucauauuc

SEQ ID NO: 2977224 - RNA, 19 nt, Artificial Sequence
  Description of Artificial Sequence: Synthetic oligonucleotide
uuuucaugugcuccggcaa

SEQ ID NO: 2977225 - RNA, 19 nt, Artificial Sequence
  Description of Artificial Sequence: Synthetic oligonucleotide
agcgucauauucuugucga

SEQ ID NO: 2977226 - RNA, 19 nt, Artificial Sequence
  Description of Artificial Sequence: Synthetic oligonucleotide
caaggagauuaauucuccg

SEQ ID NO: 2977227 - RNA, 19 nt, Artificial Sequence
  Description of Artificial Sequence: Synthetic oligonucleotide
auucguuuugcuugaagaa

SEQ ID NO: 2977228 - RNA, 19 nt, Artificial Sequence
  Description of Artificial Sequence: Synthetic oligonucleotide
gaaaacucacacugggaca

SEQ ID NO: 2977229 - RNA, 19 nt, Artificial Sequence
  Description of Artificial Sequence: Synthetic oligonucleotide
auucuauuucuuuguauau

SEQ ID NO: 2977230 - RNA, 19 nt, Artificial Sequence
  Description of Artificial Sequence: Synthetic oligonucleotide
cauucuauuucuuuguaua

SEQ ID NO: 2977231 - RNA, 19 nt, Artificial Sequence
  Description of Artificial Sequence: Synthetic oligonucleotide
ucguuuugcuugaagaauu

SEQ ID NO: 2977232 - RNA, 19 nt, Artificial Sequence
  Description of Artificial Sequence: Synthetic oligonucleotide
agucuuuucacaaggagau

SEQ ID NO: 2977233 - RNA, 19 nt, Artificial Sequence
  Description of Artificial Sequence: Synthetic oligonucleotide
agcaaagucuugcccauug

SEQ ID NO: 2977234 - RNA, 19 nt, Artificial Sequence
  Description of Artificial Sequence: Synthetic oligonucleotide
uugcccauugaaaacucac

SEQ ID NO: 2977235 - RNA, 19 nt, Artificial Sequence
  Description of Artificial Sequence: Synthetic oligonucleotide
gagauucauaucauacacc

SEQ ID NO: 2977236 - RNA, 19 nt, Artificial Sequence
  Description of Artificial Sequence: Synthetic oligonucleotide
agucacggcucccauggcg

SEQ ID NO: 2977237 - RNA, 19 nt, Artificial Sequence
  Description of Artificial Sequence: Synthetic oligonucleotide
uuaauucuccggucacucc

SEQ ID NO: 2977238 - RNA, 19 nt, Artificial Sequence
  Description of Artificial Sequence: Synthetic oligonucleotide
uuucguauucguuuugcuu

SEQ ID NO: 2977239 - RNA, 19 nt, Artificial Sequence
  Description of Artificial Sequence: Synthetic oligonucleotide
uuuucguauucguuuugcu

SEQ ID NO: 2977240 - RNA, 19 nt, Artificial Sequence
  Description of Artificial Sequence: Synthetic oligonucleotide
gaauaacuuucgccaaagc

SEQ ID NO: 2977241 - RNA, 19 nt, Artificial Sequence
  Description of Artificial Sequence: Synthetic oligonucleotide
ucagaagacgcuuccguau

SEQ ID NO: 2977242 - RNA, 19 nt, Artificial Sequence
  Description of Artificial Sequence: Synthetic oligonucleotide
ugugcuccggcaauacuac

SEQ ID NO: 2977243 - RNA, 19 nt, Artificial Sequence
  Description of Artificial Sequence: Synthetic oligonucleotide
uccggcaauacuacauucu

SEQ ID NO: 2977244 - RNA, 19 nt, Artificial Sequence
  Description of Artificial Sequence: Synthetic oligonucleotide
ugcccauugaaaacucaca

SEQ ID NO: 2977245 - RNA, 19 nt, Artificial Sequence
  Description of Artificial Sequence: Synthetic oligonucleotide
acuucgucgucagucacgg

SEQ ID NO: 2977246 - RNA, 19 nt, Artificial Sequence
  Description of Artificial Sequence: Synthetic oligonucleotide
gcuauaucccuccucuugg

SEQ ID NO: 2977247 - RNA, 19 nt, Artificial Sequence
  Description of Artificial Sequence: Synthetic oligonucleotide
aacucacacugggacaggg

SEQ ID NO: 2977248 - RNA, 19 nt, Artificial Sequence
  Description of Artificial Sequence: Synthetic oligonucleotide
aaagucuugcccauugaaa

SEQ ID NO: 2977249 - RNA, 19 nt, Artificial Sequence
  Description of Artificial Sequence: Synthetic oligonucleotide
ucagcauacgcugguacug

SEQ ID NO: 2977250 - RNA, 19 nt, Artificial Sequence
  Description of Artificial Sequence: Synthetic oligonucleotide
uauaucccuccucuuggga

SEQ ID NO: 2977251 - RNA, 19 nt, Artificial Sequence
  Description of Artificial Sequence: Synthetic oligonucleotide
gaguugcaccauuugauga

SEQ ID NO: 2977252 - RNA, 19 nt, Artificial Sequence
  Description of Artificial Sequence: Synthetic oligonucleotide
ucacacugggacagggugc

SEQ ID NO: 2977253 - RNA, 19 nt, Artificial Sequence
  Description of Artificial Sequence: Synthetic oligonucleotide
uccagaguugcaccauuug

SEQ ID NO: 2977254 - RNA, 19 nt, Artificial Sequence
  Description of Artificial Sequence: Synthetic oligonucleotide
cugguacuggcuauauccc

SEQ ID NO: 2977255 - RNA, 19 nt, Artificial Sequence
  Description of Artificial Sequence: Synthetic oligonucleotide
agcauacgcugguacuggc

SEQ ID NO: 2977256 - RNA, 19 nt, Artificial Sequence
  Description of Artificial Sequence: Synthetic oligonucleotide
cuauaucccuccucuuggg

SEQ ID NO: 2977257 - RNA, 19 nt, Artificial Sequence
  Description of Artificial Sequence: Synthetic oligonucleotide
aagacgcuuccguaugacu

SEQ ID NO: 2977258 - RNA, 19 nt, Artificial Sequence
  Description of Artificial Sequence: Synthetic oligonucleotide
acuggcuauaucccuccuc

SEQ ID NO: 2977259 - RNA, 19 nt, Artificial Sequence
  Description of Artificial Sequence: Synthetic oligonucleotide
ucuccggucacuccccggc

SEQ ID NO: 2977260 - RNA, 19 nt, Artificial Sequence
  Description of Artificial Sequence: Synthetic oligonucleotide
acauucuauuucuuuguau

SEQ ID NO: 2977261 - RNA, 19 nt, Artificial Sequence
  Description of Artificial Sequence: Synthetic oligonucleotide
cucacacugggacagggug

SEQ ID NO: 2977262 - RNA, 19 nt, Artificial Sequence
  Description of Artificial Sequence: Synthetic oligonucleotide
cugagauucauaucauaca

SEQ ID NO: 2977263 - RNA, 19 nt, Artificial Sequence
  Description of Artificial Sequence: Synthetic oligonucleotide
aguugcaccauuugaugaa

SEQ ID NO: 2977264 - RNA, 19 nt, Artificial Sequence
  Description of Artificial Sequence: Synthetic oligonucleotide
uacauucuauuucuuugua

SEQ ID NO: 2977265 - RNA, 19 nt, Artificial Sequence
  Description of Artificial Sequence: Synthetic oligonucleotide
uacuacauucuauuucuuu

SEQ ID NO: 2977266 - RNA, 19 nt, Artificial Sequence
  Description of Artificial Sequence: Synthetic oligonucleotide
ucuggaugaugcugaauaa

SEQ ID NO: 2977267 - RNA, 19 nt, Artificial Sequence
  Description of Artificial Sequence: Synthetic oligonucleotide
gauucauaucauacaccag

SEQ ID NO: 2977268 - RNA, 19 nt, Artificial Sequence
  Description of Artificial Sequence: Synthetic oligonucleotide
gucuggaugaugcugaaua

SEQ ID NO: 2977269 - RNA, 19 nt, Artificial Sequence
  Description of Artificial Sequence: Synthetic oligonucleotide
guauucguuuugcuugaag

SEQ ID NO: 2977270 - RNA, 19 nt, Artificial Sequence
  Description of Artificial Sequence: Synthetic oligonucleotide
uucguuuugcuugaagaau

SEQ ID NO: 2977271 - RNA, 19 nt, Artificial Sequence
  Description of Artificial Sequence: Synthetic oligonucleotide
ugggauccagaguugcacc

SEQ ID NO: 2977272 - RNA, 19 nt, Artificial Sequence
  Description of Artificial Sequence: Synthetic oligonucleotide
aucaaucagaagacgcuuc

SEQ ID NO: 2977273 - RNA, 19 nt, Artificial Sequence
  Description of Artificial Sequence: Synthetic oligonucleotide
ucuugggauccagaguugc

SEQ ID NO: 2977274 - RNA, 19 nt, Artificial Sequence
  Description of Artificial Sequence: Synthetic oligonucleotide
ucguauucguuuugcuuga

SEQ ID NO: 2977275 - RNA, 19 nt, Artificial Sequence
  Description of Artificial Sequence: Synthetic oligonucleotide
cuccucuugggauccagag

SEQ ID NO: 2977276 - RNA, 19 nt, Artificial Sequence
  Description of Artificial Sequence: Synthetic oligonucleotide
augacuucgucgucaguca

SEQ ID NO: 2977277 - RNA, 19 nt, Artificial Sequence
  Description of Artificial Sequence: Synthetic oligonucleotide
ugucucaugucugucugga

SEQ ID NO: 2977278 - RNA, 19 nt, Artificial Sequence
  Description of Artificial Sequence: Synthetic oligonucleotide
uuucaugugcuccggcaau

SEQ ID NO: 2977279 - RNA, 19 nt, Artificial Sequence
  Description of Artificial Sequence: Synthetic oligonucleotide
auaucccuccucuugggau

SEQ ID NO: 2977280 - RNA, 19 nt, Artificial Sequence
  Description of Artificial Sequence: Synthetic oligonucleotide
accaucuccaucaaucaga

SEQ ID NO: 2977281 - RNA, 19 nt, Artificial Sequence
  Description of Artificial Sequence: Synthetic oligonucleotide
gaugaugcugaauaacuuu

SEQ ID NO: 2977282 - RNA, 19 nt, Artificial Sequence
  Description of Artificial Sequence: Synthetic oligonucleotide
ugcuccggcaauacuacau

SEQ ID NO: 2977283 - RNA, 19 nt, Artificial Sequence
  Description of Artificial Sequence: Synthetic oligonucleotide
cauaauucuccauuucucu

SEQ ID NO: 2977284 - RNA, 19 nt, Artificial Sequence
  Description of Artificial Sequence: Synthetic oligonucleotide
uugggauccagaguugcac

SEQ ID NO: 2977285 - RNA, 19 nt, Artificial Sequence
  Description of Artificial Sequence: Synthetic oligonucleotide
uucuauuucuuuguauauu

SEQ ID NO: 2977286 - RNA, 19 nt, Artificial Sequence
  Description of Artificial Sequence: Synthetic oligonucleotide
ucuugcccauugaaaacuc

SEQ ID NO: 2977287 - RNA, 19 nt, Artificial Sequence
  Description of Artificial Sequence: Synthetic oligonucleotide
uccucuugggauccagagu

SEQ ID NO: 2977288 - RNA, 19 nt, Artificial Sequence
  Description of Artificial Sequence: Synthetic oligonucleotide
gacuucgucgucagucacg

SEQ ID NO: 2977289 - RNA, 19 nt, Artificial Sequence
  Description of Artificial Sequence: Synthetic oligonucleotide
uuucucugagauucauauc

SEQ ID NO: 2977290 - RNA, 19 nt, Artificial Sequence
  Description of Artificial Sequence: Synthetic oligonucleotide
guacuggcuauaucccucc

SEQ ID NO: 2977291 - RNA, 19 nt, Artificial Sequence
  Description of Artificial Sequence: Synthetic oligonucleotide
ugguacuggcuauaucccu

SEQ ID NO: 2977292 - RNA, 19 nt, Artificial Sequence
  Description of Artificial Sequence: Synthetic oligonucleotide
uccauuucucugagauuca

SEQ ID NO: 2977293 - RNA, 19 nt, Artificial Sequence
  Description of Artificial Sequence: Synthetic oligonucleotide
acuccccggcaccaucucc

SEQ ID NO: 2977294 - RNA, 19 nt, Artificial Sequence
  Description of Artificial Sequence: Synthetic oligonucleotide
caaucagaagacgcuuccg

SEQ ID NO: 2977295 - RNA, 19 nt, Artificial Sequence
  Description of Artificial Sequence: Synthetic oligonucleotide
cuggaugaugcugaauaac

SEQ ID NO: 2977296 - RNA, 19 nt, Artificial Sequence
  Description of Artificial Sequence: Synthetic oligonucleotide
gacgcuuccguaugacuuc

SEQ ID NO: 2977297 - RNA, 19 nt, Artificial Sequence
  Description of Artificial Sequence: Synthetic oligonucleotide
uaucccuccucuugggauc

SEQ ID NO: 2977298 - RNA, 19 nt, Artificial Sequence
  Description of Artificial Sequence: Synthetic oligonucleotide
guugcaccauuugaugaag

SEQ ID NO: 2977299 - RNA, 19 nt, Artificial Sequence
  Description of Artificial Sequence: Synthetic oligonucleotide
cagaagacgcuuccguaug

SEQ ID NO: 2977300 - RNA, 19 nt, Artificial Sequence
  Description of Artificial Sequence: Synthetic oligonucleotide
ggcuauaucccuccucuug

SEQ ID NO: 2977301 - RNA, 19 nt, Artificial Sequence
  Description of Artificial Sequence: Synthetic oligonucleotide
guuuugcuugaagaauuug

SEQ ID NO: 2977302 - RNA, 19 nt, Artificial Sequence
  Description of Artificial Sequence: Synthetic oligonucleotide
cagggugcucagcauacgc

SEQ ID NO: 2977303 - RNA, 19 nt, Artificial Sequence
  Description of Artificial Sequence: Synthetic oligonucleotide
aaacucacacugggacagg

SEQ ID NO: 2977304 - RNA, 19 nt, Artificial Sequence
  Description of Artificial Sequence: Synthetic oligonucleotide
aucagaagacgcuuccgua

SEQ ID NO: 2977305 - RNA, 19 nt, Artificial Sequence
  Description of Artificial Sequence: Synthetic oligonucleotide
uuuucacaaggagauuaau

SEQ ID NO: 2977306 - RNA, 19 nt, Artificial Sequence
  Description of Artificial Sequence: Synthetic oligonucleotide
uuucgccaaagcgucauau

SEQ ID NO: 2977307 - RNA, 19 nt, Artificial Sequence
  Description of Artificial Sequence: Synthetic oligonucleotide
uugcaccauuugaugaagu

SEQ ID NO: 2977308 - RNA, 19 nt, Artificial Sequence
  Description of Artificial Sequence: Synthetic oligonucleotide
ugacuucgucgucagucac

SEQ ID NO: 2977309 - RNA, 19 nt, Artificial Sequence
  Description of Artificial Sequence: Synthetic oligonucleotide
gcccauugaaaacucacac

SEQ ID NO: 2977310 - RNA, 19 nt, Artificial Sequence
  Description of Artificial Sequence: Synthetic oligonucleotide
agaagacgcuuccguauga

SEQ ID NO: 2977311 - RNA, 19 nt, Artificial Sequence
  Description of Artificial Sequence: Synthetic oligonucleotide
caccaucuccaucaaucag

SEQ ID NO: 2977312 - RNA, 19 nt, Artificial Sequence
  Description of Artificial Sequence: Synthetic oligonucleotide
cuccaucaaucagaagacg

SEQ ID NO: 2977313 - RNA, 19 nt, Artificial Sequence
  Description of Artificial Sequence: Synthetic oligonucleotide
cuuuucacaaggagauuaa

SEQ ID NO: 2977314 - RNA, 19 nt, Artificial Sequence
  Description of Artificial Sequence: Synthetic oligonucleotide
ucgucgucagucacggcuc

SEQ ID NO: 2977315 - RNA, 19 nt, Artificial Sequence
  Description of Artificial Sequence: Synthetic oligonucleotide
caccagcaaagucuugccc

SEQ ID NO: 2977316 - RNA, 19 nt, Artificial Sequence
  Description of Artificial Sequence: Synthetic oligonucleotide
gacagggugcucagcauac

SEQ ID NO: 2977317 - RNA, 19 nt, Artificial Sequence
  Description of Artificial Sequence: Synthetic oligonucleotide
auucuccggucacuccccg

SEQ ID NO: 2977318 - RNA, 19 nt, Artificial Sequence
  Description of Artificial Sequence: Synthetic oligonucleotide
cuacauucuauuucuuugu

SEQ ID NO: 2977319 - RNA, 19 nt, Artificial Sequence
  Description of Artificial Sequence: Synthetic oligonucleotide
ggcaccaucuccaucaauc

SEQ ID NO: 2977320 - RNA, 19 nt, Artificial Sequence
  Description of Artificial Sequence: Synthetic oligonucleotide
ucacuccccggcaccaucu

SEQ ID NO: 2977321 - RNA, 19 nt, Artificial Sequence
  Description of Artificial Sequence: Synthetic oligonucleotide
caaagucuugcccauugaa

SEQ ID NO: 2977322 - RNA, 19 nt, Artificial Sequence
  Description of Artificial Sequence: Synthetic oligonucleotide
ggagauuaauucuccgguc

SEQ ID NO: 2977323 - RNA, 19 nt, Artificial Sequence
  Description of Artificial Sequence: Synthetic oligonucleotide
gucauauucuugucgauuu

SEQ ID NO: 2977324 - RNA, 19 nt, Artificial Sequence
  Description of Artificial Sequence: Synthetic oligonucleotide
ucccauggcgugcgcggcg

SEQ ID NO: 2977325 - RNA, 19 nt, Artificial Sequence
  Description of Artificial Sequence: Synthetic oligonucleotide
cuccggcaauacuacauuc

SEQ ID NO: 2977326 - RNA, 19 nt, Artificial Sequence
  Description of Artificial Sequence: Synthetic oligonucleotide
gucugucuggaugaugcug

SEQ ID NO: 2977327 - RNA, 19 nt, Artificial Sequence
  Description of Artificial Sequence: Synthetic oligonucleotide
gaagacgcuuccguaugac

SEQ ID NO: 2977328 - RNA, 19 nt, Artificial Sequence
  Description of Artificial Sequence: Synthetic oligonucleotide
cagcauacgcugguacugg

SEQ ID NO: 2977329 - RNA, 19 nt, Artificial Sequence
  Description of Artificial Sequence: Synthetic oligonucleotide
ugucugucuggaugaugcu

SEQ ID NO: 2977330 - RNA, 19 nt, Artificial Sequence
  Description of Artificial Sequence: Synthetic oligonucleotide
uucuccggucacuccccgg

SEQ ID NO: 2977331 - RNA, 19 nt, Artificial Sequence
  Description of Artificial Sequence: Synthetic oligonucleotide
gggugcucagcauacgcug

SEQ ID NO: 2977332 - RNA, 19 nt, Artificial Sequence
  Description of Artificial Sequence: Synthetic oligonucleotide
ucaugugcuccggcaauac

SEQ ID NO: 2977333 - RNA, 19 nt, Artificial Sequence
  Description of Artificial Sequence: Synthetic oligonucleotide
ucuccauuucucugagauu

SEQ ID NO: 2977334 - RNA, 19 nt, Artificial Sequence
  Description of Artificial Sequence: Synthetic oligonucleotide
agacgcuuccguaugacuu

SEQ ID NO: 2977335 - RNA, 19 nt, Artificial Sequence
  Description of Artificial Sequence: Synthetic oligonucleotide
uucgccaaagcgucauauu

SEQ ID NO: 2977336 - RNA, 19 nt, Artificial Sequence
  Description of Artificial Sequence: Synthetic oligonucleotide
cuggcuauaucccuccucu

SEQ ID NO: 2977337 - RNA, 19 nt, Artificial Sequence
  Description of Artificial Sequence: Synthetic oligonucleotide
cugaauaacuuucgccaaa

SEQ ID NO: 2977338 - RNA, 19 nt, Artificial Sequence
  Description of Artificial Sequence: Synthetic oligonucleotide
augugcuccggcaauacua

SEQ ID NO: 2977339 - RNA, 19 nt, Artificial Sequence
  Description of Artificial Sequence: Synthetic oligonucleotide
ggcaauacuacauucuauu

SEQ ID NO: 2977340 - RNA, 19 nt, Artificial Sequence
  Description of Artificial Sequence: Synthetic oligonucleotide
acgcuuccguaugacuucg

SEQ ID NO: 2977341 - RNA, 19 nt, Artificial Sequence
  Description of Artificial Sequence: Synthetic oligonucleotide
cuugcccauugaaaacuca

SEQ ID NO: 2977342 - RNA, 19 nt, Artificial Sequence
  Description of Artificial Sequence: Synthetic oligonucleotide
gauuaauucuccggucacu

SEQ ID NO: 2977343 - RNA, 19 nt, Artificial Sequence
  Description of Artificial Sequence: Synthetic oligonucleotide
cagaguugcaccauuugau

SEQ ID NO: 2977344 - RNA, 19 nt, Artificial Sequence
  Description of Artificial Sequence: Synthetic oligonucleotide
caccauuugaugaagucuu

SEQ ID NO: 2977345 - RNA, 19 nt, Artificial Sequence
  Description of Artificial Sequence: Synthetic oligonucleotide
cauacgcugguacuggcua

SEQ ID NO: 2977346 - RNA, 19 nt, Artificial Sequence
  Description of Artificial Sequence: Synthetic oligonucleotide
acuuucgccaaagcgucau

SEQ ID NO: 2977347 - RNA, 19 nt, Artificial Sequence
  Description of Artificial Sequence: Synthetic oligonucleotide
gucagucacggcucccaug

SEQ ID NO: 2977348 - RNA, 19 nt, Artificial Sequence
  Description of Artificial Sequence: Synthetic oligonucleotide
cuugggauccagaguugca

SEQ ID NO: 2977349 - RNA, 19 nt, Artificial Sequence
  Description of Artificial Sequence: Synthetic oligonucleotide
uccguaugacuucgucguc

SEQ ID NO: 2977350 - RNA, 19 nt, Artificial Sequence
  Description of Artificial Sequence: Synthetic oligonucleotide
ggugcucagcauacgcugg

SEQ ID NO: 2977351 - RNA, 19 nt, Artificial Sequence
  Description of Artificial Sequence: Synthetic oligonucleotide
uccggucacuccccggcac

SEQ ID NO: 2977352 - RNA, 19 nt, Artificial Sequence
  Description of Artificial Sequence: Synthetic oligonucleotide
auacgcugguacuggcuau

SEQ ID NO: 2977353 - RNA, 19 nt, Artificial Sequence
  Description of Artificial Sequence: Synthetic oligonucleotide
uacuggcuauaucccuccu

SEQ ID NO: 2977354 - RNA, 19 nt, Artificial Sequence
  Description of Artificial Sequence: Synthetic oligonucleotide
cauacaccagcaaagucuu

SEQ ID NO: 2977355 - RNA, 19 nt, Artificial Sequence
  Description of Artificial Sequence: Synthetic oligonucleotide
caugucugucuggaugaug

SEQ ID NO: 2977356 - RNA, 19 nt, Artificial Sequence
  Description of Artificial Sequence: Synthetic oligonucleotide
uucaugugcuccggcaaua

SEQ ID NO: 2977357 - RNA, 19 nt, Artificial Sequence
  Description of Artificial Sequence: Synthetic oligonucleotide
auucuccauuucucugaga

SEQ ID NO: 2977358 - RNA, 19 nt, Artificial Sequence
  Description of Artificial Sequence: Synthetic oligonucleotide
acagggugcucagcauacg

SEQ ID NO: 2977359 - RNA, 19 nt, Artificial Sequence
  Description of Artificial Sequence: Synthetic oligonucleotide
aacuuucgccaaagcguca

SEQ ID NO: 2977360 - RNA, 19 nt, Artificial Sequence
  Description of Artificial Sequence: Synthetic oligonucleotide
gcucccauggcgugcgcgg

SEQ ID NO: 2977361 - RNA, 19 nt, Artificial Sequence
  Description of Artificial Sequence: Synthetic oligonucleotide
gcugaauaacuuucgccaa

SEQ ID NO: 2977362 - RNA, 19 nt, Artificial Sequence
  Description of Artificial Sequence: Synthetic oligonucleotide
gguacuggcuauaucccuc

SEQ ID NO: 2977363 - RNA, 19 nt, Artificial Sequence
  Description of Artificial Sequence: Synthetic oligonucleotide
cucugagauucauaucaua

SEQ ID NO: 2977364 - RNA, 19 nt, Artificial Sequence
  Description of Artificial Sequence: Synthetic oligonucleotide
ucacggcucccauggcgug

SEQ ID NO: 2977365 - RNA, 19 nt, Artificial Sequence
  Description of Artificial Sequence: Synthetic oligonucleotide
gucuugcccauugaaaacu

SEQ ID NO: 2977366 - RNA, 19 nt, Artificial Sequence
  Description of Artificial Sequence: Synthetic oligonucleotide
agggugcucagcauacgcu

SEQ ID NO: 2977367 - RNA, 19 nt, Artificial Sequence
  Description of Artificial Sequence: Synthetic oligonucleotide
acggcucccauggcgugcg

SEQ ID NO: 2977368 - RNA, 19 nt, Artificial Sequence
  Description of Artificial Sequence: Synthetic oligonucleotide
gcaccaucuccaucaauca

SEQ ID NO: 2977369 - RNA, 19 nt, Artificial Sequence
  Description of Artificial Sequence: Synthetic oligonucleotide
cuccccggcaccaucucca

SEQ ID NO: 2977370 - RNA, 19 nt, Artificial Sequence
  Description of Artificial Sequence: Synthetic oligonucleotide
gcucagcauacgcugguac

SEQ ID NO: 2977371 - RNA, 19 nt, Artificial Sequence
  Description of Artificial Sequence: Synthetic oligonucleotide
cucagcauacgcugguacu

SEQ ID NO: 2977372 - RNA, 19 nt, Artificial Sequence
  Description of Artificial Sequence: Synthetic oligonucleotide
ccagaguugcaccauuuga

SEQ ID NO: 2977373 - RNA, 19 nt, Artificial Sequence
  Description of Artificial Sequence: Synthetic oligonucleotide
auggcgugcgcggcggcgg

SEQ ID NO: 2977374 - RNA, 19 nt, Artificial Sequence
  Description of Artificial Sequence: Synthetic oligonucleotide
cccggcaccaucuccauca

SEQ ID NO: 2977375 - RNA, 19 nt, Artificial Sequence
  Description of Artificial Sequence: Synthetic oligonucleotide
ugucuggaugaugcugaau

SEQ ID NO: 2977376 - RNA, 19 nt, Artificial Sequence
  Description of Artificial Sequence: Synthetic oligonucleotide
cguaugacuucgucgucag

SEQ ID NO: 2977377 - RNA, 19 nt, Artificial Sequence
  Description of Artificial Sequence: Synthetic oligonucleotide
cauggcgugcgcggcggcg

SEQ ID NO: 2977378 - RNA, 19 nt, Artificial Sequence
  Description of Artificial Sequence: Synthetic oligonucleotide
gcuuccguaugacuucguc

SEQ ID NO: 2977379 - RNA, 19 nt, Artificial Sequence
  Description of Artificial Sequence: Synthetic oligonucleotide
uacgcugguacuggcuaua

SEQ ID NO: 2977380 - RNA, 19 nt, Artificial Sequence
  Description of Artificial Sequence: Synthetic oligonucleotide
ucaugucugucuggaugau

SEQ ID NO: 2977381 - RNA, 19 nt, Artificial Sequence
  Description of Artificial Sequence: Synthetic oligonucleotide
cacugggacagggugcuca

SEQ ID NO: 2977382 - RNA, 19 nt, Artificial Sequence
  Description of Artificial Sequence: Synthetic oligonucleotide
gucacuccccggcaccauc

SEQ ID NO: 2977383 - RNA, 19 nt, Artificial Sequence
  Description of Artificial Sequence: Synthetic oligonucleotide
acucacacugggacagggu

SEQ ID NO: 2977384 - RNA, 19 nt, Artificial Sequence
  Description of Artificial Sequence: Synthetic oligonucleotide
gauccagaguugcaccauu

SEQ ID NO: 2977385 - RNA, 19 nt, Artificial Sequence
  Description of Artificial Sequence: Synthetic oligonucleotide
cuucgucgucagucacggc

SEQ ID NO: 2977386 - RNA, 19 nt, Artificial Sequence
  Description of Artificial Sequence: Synthetic oligonucleotide
gcaaagucuugcccauuga

SEQ ID NO: 2977387 - RNA, 19 nt, Artificial Sequence
  Description of Artificial Sequence: Synthetic oligonucleotide
ccaucaaucagaagacgcu

SEQ ID NO: 2977388 - RNA, 19 nt, Artificial Sequence
  Description of Artificial Sequence: Synthetic oligonucleotide
auacuacauucuauuucuu

SEQ ID NO: 2977389 - RNA, 19 nt, Artificial Sequence
  Description of Artificial Sequence: Synthetic oligonucleotide
gcaauacuacauucuauuu

SEQ ID NO: 2977390 - RNA, 19 nt, Artificial Sequence
  Description of Artificial Sequence: Synthetic oligonucleotide
ugcucagcauacgcuggua

SEQ ID NO: 2977391 - RNA, 19 nt, Artificial Sequence
  Description of Artificial Sequence: Synthetic oligonucleotide
cacggcucccauggcgugc

SEQ ID NO: 2977392 - RNA, 19 nt, Artificial Sequence
  Description of Artificial Sequence: Synthetic oligonucleotide
accauuugaugaagucuuu

SEQ ID NO: 2977393 - RNA, 19 nt, Artificial Sequence
  Description of Artificial Sequence: Synthetic oligonucleotide
ggacagggugcucagcaua

SEQ ID NO: 2977394 - RNA, 19 nt, Artificial Sequence
  Description of Artificial Sequence: Synthetic oligonucleotide
auacaccagcaaagucuug

SEQ ID NO: 2977395 - RNA, 19 nt, Artificial Sequence
  Description of Artificial Sequence: Synthetic oligonucleotide
caucaaucagaagacgcuu

SEQ ID NO: 2977396 - RNA, 19 nt, Artificial Sequence
  Description of Artificial Sequence: Synthetic oligonucleotide
ccucuugggauccagaguu

SEQ ID NO: 2977397 - RNA, 19 nt, Artificial Sequence
  Description of Artificial Sequence: Synthetic oligonucleotide
cucccauggcgugcgcggc

SEQ ID NO: 2977398 - RNA, 19 nt, Artificial Sequence
  Description of Artificial Sequence: Synthetic oligonucleotide
uggcgugcgcggcggcggc

SEQ ID NO: 2977399 - RNA, 19 nt, Artificial Sequence
  Description of Artificial Sequence: Synthetic oligonucleotide
cagucacggcucccauggc

SEQ ID NO: 2977400 - RNA, 19 nt, Artificial Sequence
  Description of Artificial Sequence: Synthetic oligonucleotide
gugcuccggcaauacuaca

SEQ ID NO: 2977401 - RNA, 19 nt, Artificial Sequence
  Description of Artificial Sequence: Synthetic oligonucleotide
cccauugaaaacucacacu

SEQ ID NO: 2977402 - RNA, 19 nt, Artificial Sequence
  Description of Artificial Sequence: Synthetic oligonucleotide
gucacggcucccauggcgu

SEQ ID NO: 2977403 - RNA, 19 nt, Artificial Sequence
  Description of Artificial Sequence: Synthetic oligonucleotide
cugucuggaugaugcugaa

SEQ ID NO: 2977404 - RNA, 19 nt, Artificial Sequence
  Description of Artificial Sequence: Synthetic oligonucleotide
ggcucccauggcgugcgcg

SEQ ID NO: 2977405 - RNA, 19 nt, Artificial Sequence
  Description of Artificial Sequence: Synthetic oligonucleotide
gucgucagucacggcuccc

SEQ ID NO: 2977406 - RNA, 19 nt, Artificial Sequence
  Description of Artificial Sequence: Synthetic oligonucleotide
uccccggcaccaucuccau

SEQ ID NO: 2977407 - RNA, 19 nt, Artificial Sequence
  Description of Artificial Sequence: Synthetic oligonucleotide
cacacugggacagggugcu

SEQ ID NO: 2977408 - RNA, 19 nt, Artificial Sequence
  Description of Artificial Sequence: Synthetic oligonucleotide
gugcucagcauacgcuggu

SEQ ID NO: 2977409 - RNA, 19 nt, Artificial Sequence
  Description of Artificial Sequence: Synthetic oligonucleotide
caugugcuccggcaauacu

SEQ ID NO: 2977410 - RNA, 19 nt, Artificial Sequence
  Description of Artificial Sequence: Synthetic oligonucleotide
gccaaagcgucauauucuu

SEQ ID NO: 2977411 - RNA, 19 nt, Artificial Sequence
  Description of Artificial Sequence: Synthetic oligonucleotide
acacugggacagggugcuc

SEQ ID NO: 2977412 - RNA, 19 nt, Artificial Sequence
  Description of Artificial Sequence: Synthetic oligonucleotide
acgcugguacuggcuauau

SEQ ID NO: 2977413 - RNA, 19 nt, Artificial Sequence
  Description of Artificial Sequence: Synthetic oligonucleotide
ccggcaauacuacauucua

SEQ ID NO: 2977414 - RNA, 19 nt, Artificial Sequence
  Description of Artificial Sequence: Synthetic oligonucleotide
ggaugaugcugaauaacuu

SEQ ID NO: 2977415 - RNA, 19 nt, Artificial Sequence
  Description of Artificial Sequence: Synthetic oligonucleotide
cacuccccggcaccaucuc

SEQ ID NO: 2977416 - RNA, 19 nt, Artificial Sequence
  Description of Artificial Sequence: Synthetic oligonucleotide
cuuucgccaaagcgucaua

SEQ ID NO: 2977417 - RNA, 19 nt, Artificial Sequence
  Description of Artificial Sequence: Synthetic oligonucleotide
ccguaugacuucgucguca

SEQ ID NO: 2977418 - RNA, 19 nt, Artificial Sequence
  Description of Artificial Sequence: Synthetic oligonucleotide
guaugacuucgucgucagu

SEQ ID NO: 2977419 - RNA, 19 nt, Artificial Sequence
  Description of Artificial Sequence: Synthetic oligonucleotide
ccggucacuccccggcacc

SEQ ID NO: 2977420 - RNA, 19 nt, Artificial Sequence
  Description of Artificial Sequence: Synthetic oligonucleotide
cuccggucacuccccggca

SEQ ID NO: 2977421 - RNA, 19 nt, Artificial Sequence
  Description of Artificial Sequence: Synthetic oligonucleotide
cgucgucagucacggcucc

SEQ ID NO: 2977422 - RNA, 19 nt, Artificial Sequence
  Description of Artificial Sequence: Synthetic oligonucleotide
gcuccggcaauacuacauu

SEQ ID NO: 2977423 - RNA, 19 nt, Artificial Sequence
  Description of Artificial Sequence: Synthetic oligonucleotide
ccuccucuugggauccaga

SEQ ID NO: 2977424 - RNA, 19 nt, Artificial Sequence
  Description of Artificial Sequence: Synthetic oligonucleotide
gucuuuucacaaggagauu

SEQ ID NO: 2977425 - RNA, 19 nt, Artificial Sequence
  Description of Artificial Sequence: Synthetic oligonucleotide
ucccuccucuugggaucca

SEQ ID NO: 2977426 - RNA, 19 nt, Artificial Sequence
  Description of Artificial Sequence: Synthetic oligonucleotide
cgccaaagcgucauauucu

SEQ ID NO: 2977427 - RNA, 19 nt, Artificial Sequence
  Description of Artificial Sequence: Synthetic oligonucleotide
gcauacgcugguacuggcu

SEQ ID NO: 2977428 - RNA, 19 nt, Artificial Sequence
  Description of Artificial Sequence: Synthetic oligonucleotide
ccagcaaagucuugcccau

SEQ ID NO: 2977429 - RNA, 19 nt, Artificial Sequence
  Description of Artificial Sequence: Synthetic oligonucleotide
gcgugcgcggcggcggcgg

SEQ ID NO: 2977430 - RNA, 19 nt, Artificial Sequence
  Description of Artificial Sequence: Synthetic oligonucleotide
cccuccucuugggauccag

SEQ ID NO: 2977431 - RNA, 19 nt, Artificial Sequence
  Description of Artificial Sequence: Synthetic oligonucleotide
ggauccagaguugcaccau

SEQ ID NO: 2977432 - RNA, 19 nt, Artificial Sequence
  Description of Artificial Sequence: Synthetic oligonucleotide
gggacagggugcucagcau

SEQ ID NO: 2977433 - RNA, 19 nt, Artificial Sequence
  Description of Artificial Sequence: Synthetic oligonucleotide
gcgucauauucuugucgau

SEQ ID NO: 2977434 - RNA, 19 nt, Artificial Sequence
  Description of Artificial Sequence: Synthetic oligonucleotide
cgcugguacuggcuauauc

SEQ ID NO: 2977435 - RNA, 19 nt, Artificial Sequence
  Description of Artificial Sequence: Synthetic oligonucleotide
ccauuugaugaagucuuuu

SEQ ID NO: 2977436 - RNA, 19 nt, Artificial Sequence
  Description of Artificial Sequence: Synthetic oligonucleotide
ggcgugcgcggcggcggcg

SEQ ID NO: 2977437 - RNA, 19 nt, Artificial Sequence
  Description of Artificial Sequence: Synthetic oligonucleotide
ccauggcgugcgcggcggc

SEQ ID NO: 2977438 - RNA, 19 nt, Artificial Sequence
  Description of Artificial Sequence: Synthetic oligonucleotide
cggcaauacuacauucuau

SEQ ID NO: 2977439 - RNA, 19 nt, Artificial Sequence
  Description of Artificial Sequence: Synthetic oligonucleotide
ccauuucucugagauucau

SEQ ID NO: 2977440 - RNA, 19 nt, Artificial Sequence
  Description of Artificial Sequence: Synthetic oligonucleotide
cgucauauucuugucgauu

SEQ ID NO: 2977441 - RNA, 19 nt, Artificial Sequence
  Description of Artificial Sequence: Synthetic oligonucleotide
ccccggcaccaucuccauc

SEQ ID NO: 2977442 - RNA, 19 nt, Artificial Sequence
  Description of Artificial Sequence: Synthetic oligonucleotide
cagcaaagucuugcccauu

SEQ ID NO: 2977443 - RNA, 19 nt, Artificial Sequence
  Description of Artificial Sequence: Synthetic oligonucleotide
cguauucguuuugcuugaa

SEQ ID NO: 2977444 - RNA, 19 nt, Artificial Sequence
  Description of Artificial Sequence: Synthetic oligonucleotide
ccggcaccaucuccaucaa

SEQ ID NO: 2977445 - RNA, 19 nt, Artificial Sequence
  Description of Artificial Sequence: Synthetic oligonucleotide
cggucacuccccggcacca

SEQ ID NO: 2977446 - RNA, 19 nt, Artificial Sequence
  Description of Artificial Sequence: Synthetic oligonucleotide
ggucacuccccggcaccau

SEQ ID NO: 2977447 - RNA, 19 nt, Artificial Sequence
  Description of Artificial Sequence: Synthetic oligonucleotide
cgugcgcggcggcggcggc

SEQ ID NO: 2977448 - RNA, 19 nt, Artificial Sequence
  Description of Artificial Sequence: Synthetic oligonucleotide
cgucagucacggcucccau

SEQ ID NO: 2977449 - RNA, 19 nt, Artificial Sequence
  Description of Artificial Sequence: Synthetic oligonucleotide
cggcucccauggcgugcgc

SEQ ID NO: 2977450 - RNA, 19 nt, Artificial Sequence
  Description of Artificial Sequence: Synthetic oligonucleotide
cgcuuccguaugacuucgu

SEQ ID NO: 2977451 - RNA, 19 nt, Artificial Sequence
  Description of Artificial Sequence: Synthetic oligonucleotide
cggcaccaucuccaucaau

SEQ ID NO: 2977452 - RNA, 19 nt, Artificial Sequence
  Description of Artificial Sequence: Synthetic oligonucleotide
aauccuuucucccaggugg

SEQ ID NO: 2977453 - RNA, 19 nt, Artificial Sequence
  Description of Artificial Sequence: Synthetic oligonucleotide
uucuccauggaacaugccg

SEQ ID NO: 2977454 - RNA, 19 nt, Artificial Sequence
  Description of Artificial Sequence: Synthetic oligonucleotide
ucagcaaagguauacuugc

SEQ ID NO: 2977455 - RNA, 19 nt, Artificial Sequence
  Description of Artificial Sequence: Synthetic oligonucleotide
aacuugucgacaguagugc

SEQ ID NO: 2977456 - RNA, 19 nt, Artificial Sequence
  Description of Artificial Sequence: Synthetic oligonucleotide
uccuguuuacguaugaccc

SEQ ID NO: 2977457 - RNA, 19 nt, Artificial Sequence
  Description of Artificial Sequence: Synthetic oligonucleotide
auagaagccaucuccacag

SEQ ID NO: 2977458 - RNA, 19 nt, Artificial Sequence
  Description of Artificial Sequence: Synthetic oligonucleotide
cauaucuugugucaguagg

SEQ ID NO: 2977459 - RNA, 19 nt, Artificial Sequence
  Description of Artificial Sequence: Synthetic oligonucleotide
uguacugcaugucagcggc

SEQ ID NO: 2977460 - RNA, 19 nt, Artificial Sequence
  Description of Artificial Sequence: Synthetic oligonucleotide
uuuguccucauauuguagc

SEQ ID NO: 2977461 - RNA, 19 nt, Artificial Sequence
  Description of Artificial Sequence: Synthetic oligonucleotide
aguguuuguccucauauug

SEQ ID NO: 2977462 - RNA, 19 nt, Artificial Sequence
  Description of Artificial Sequence: Synthetic oligonucleotide
agaacaggguuccuucucc

SEQ ID NO: 2977463 - RNA, 19 nt, Artificial Sequence
  Description of Artificial Sequence: Synthetic oligonucleotide
auacuugcccuucacugcc

SEQ ID NO: 2977464 - RNA, 19 nt, Artificial Sequence
  Description of Artificial Sequence: Synthetic oligonucleotide
acugccaauccuuucuccc

SEQ ID NO: 2977465 - RNA, 19 nt, Artificial Sequence
  Description of Artificial Sequence: Synthetic oligonucleotide
aguagggagaauguacucc

SEQ ID NO: 2977466 - RNA, 19 nt, Artificial Sequence
  Description of Artificial Sequence: Synthetic oligonucleotide
cagaucucgguguagaacc

SEQ ID NO: 2977467 - RNA, 19 nt, Artificial Sequence
  Description of Artificial Sequence: Synthetic oligonucleotide
uaugacccgacauauuugc

SEQ ID NO: 2977468 - RNA, 19 nt, Artificial Sequence
  Description of Artificial Sequence: Synthetic oligonucleotide
agaaccuccggucauaacu

SEQ ID NO: 2977469 - RNA, 19 nt, Artificial Sequence
  Description of Artificial Sequence: Synthetic oligonucleotide
ucuugugucaguagggaga

SEQ ID NO: 2977470 - RNA, 19 nt, Artificial Sequence
  Description of Artificial Sequence: Synthetic oligonucleotide
gguuauagaagccaucucc

SEQ ID NO: 2977471 - RNA, 19 nt, Artificial Sequence
  Description of Artificial Sequence: Synthetic oligonucleotide
uaacuugucgacaguagug

SEQ ID NO: 2977472 - RNA, 19 nt, Artificial Sequence
  Description of Artificial Sequence: Synthetic oligonucleotide
guauacuugcccuucacug

SEQ ID NO: 2977473 - RNA, 19 nt, Artificial Sequence
  Description of Artificial Sequence: Synthetic oligonucleotide
guagggagaauguacuccg

SEQ ID NO: 2977474 - RNA, 19 nt, Artificial Sequence
  Description of Artificial Sequence: Synthetic oligonucleotide
aagaacaggguuccuucuc

SEQ ID NO: 2977475 - RNA, 19 nt, Artificial Sequence
  Description of Artificial Sequence: Synthetic oligonucleotide
aaagguauacuugcccuuc

SEQ ID NO: 2977476 - RNA, 19 nt, Artificial Sequence
  Description of Artificial Sequence: Synthetic oligonucleotide
ucaguagggagaauguacu

SEQ ID NO: 2977477 - RNA, 19 nt, Artificial Sequence
  Description of Artificial Sequence: Synthetic oligonucleotide
uauacuugcccuucacugc

SEQ ID NO: 2977478 - RNA, 19 nt, Artificial Sequence
  Description of Artificial Sequence: Synthetic oligonucleotide
ugugucaguagggagaaug

SEQ ID NO: 2977479 - RNA, 19 nt, Artificial Sequence
  Description of Artificial Sequence: Synthetic oligonucleotide
uuuacguaugacccgacau

SEQ ID NO: 2977480 - RNA, 19 nt, Artificial Sequence
  Description of Artificial Sequence: Synthetic oligonucleotide
uucacugccaauccuuucu

SEQ ID NO: 2977481 - RNA, 19 nt, Artificial Sequence
  Description of Artificial Sequence: Synthetic oligonucleotide
ucucgguggguccauauug

SEQ ID NO: 2977482 - RNA, 19 nt, Artificial Sequence
  Description of Artificial Sequence: Synthetic oligonucleotide
aacaugccguccuucaugu

SEQ ID NO: 2977483 - RNA, 19 nt, Artificial Sequence
  Description of Artificial Sequence: Synthetic oligonucleotide
ucuccauggaacaugccgu

SEQ ID NO: 2977484 - RNA, 19 nt, Artificial Sequence
  Description of Artificial Sequence: Synthetic oligonucleotide
acuugucgacaguagugcc

SEQ ID NO: 2977485 - RNA, 19 nt, Artificial Sequence
  Description of Artificial Sequence: Synthetic oligonucleotide
auaacuugucgacaguagu

SEQ ID NO: 2977486 - RNA, 19 nt, Artificial Sequence
  Description of Artificial Sequence: Synthetic oligonucleotide
gaauguacuccgcacugcc

SEQ ID NO: 2977487 - RNA, 19 nt, Artificial Sequence
  Description of Artificial Sequence: Synthetic oligonucleotide
acauauuugcucccggugu

SEQ ID NO: 2977488 - RNA, 19 nt, Artificial Sequence
  Description of Artificial Sequence: Synthetic oligonucleotide
gacauauuugcucccggug

SEQ ID NO: 2977489 - RNA, 19 nt, Artificial Sequence
  Description of Artificial Sequence: Synthetic oligonucleotide
gacccgacauauuugcucc

SEQ ID NO: 2977490 - RNA, 19 nt, Artificial Sequence
  Description of Artificial Sequence: Synthetic oligonucleotide
cuccuguuuacguaugacc

SEQ ID NO: 2977491 - RNA, 19 nt, Artificial Sequence
  Description of Artificial Sequence: Synthetic oligonucleotide
cauaacuugucgacaguag

SEQ ID NO: 2977492 - RNA, 19 nt, Artificial Sequence
  Description of Artificial Sequence: Synthetic oligonucleotide
gagaauguacuccgcacug

SEQ ID NO: 2977493 - RNA, 19 nt, Artificial Sequence
  Description of Artificial Sequence: Synthetic oligonucleotide
aauguacuccgcacugccc

SEQ ID NO: 2977494 - RNA, 19 nt, Artificial Sequence
  Description of Artificial Sequence: Synthetic oligonucleotide
uucccaacauaucuugugu

SEQ ID NO: 2977495 - RNA, 19 nt, Artificial Sequence
  Description of Artificial Sequence: Synthetic oligonucleotide
cauauuggugagccgagag

SEQ ID NO: 2977496 - RNA, 19 nt, Artificial Sequence
  Description of Artificial Sequence: Synthetic oligonucleotide
uuggugagccgagagaugc

SEQ ID NO: 2977497 - RNA, 19 nt, Artificial Sequence
  Description of Artificial Sequence: Synthetic oligonucleotide
uagcccaucagcaaaggua

SEQ ID NO: 2977498 - RNA, 19 nt, Artificial Sequence
  Description of Artificial Sequence: Synthetic oligonucleotide
uauuggugagccgagagau

SEQ ID NO: 2977499 - RNA, 19 nt, Artificial Sequence
  Description of Artificial Sequence: Synthetic oligonucleotide
gaacaugccguccuucaug

SEQ ID NO: 2977500 - RNA, 19 nt, Artificial Sequence
  Description of Artificial Sequence: Synthetic oligonucleotide
auaucuugugucaguaggg

SEQ ID NO: 2977501 - RNA, 19 nt, Artificial Sequence
  Description of Artificial Sequence: Synthetic oligonucleotide
aucgaaucggcucccacug

SEQ ID NO: 2977502 - RNA, 19 nt, Artificial Sequence
  Description of Artificial Sequence: Synthetic oligonucleotide
uuguccucauauuguagcc

SEQ ID NO: 2977503 - RNA, 19 nt, Artificial Sequence
  Description of Artificial Sequence: Synthetic oligonucleotide
auuguagcccaucagcaaa

SEQ ID NO: 2977504 - RNA, 19 nt, Artificial Sequence
  Description of Artificial Sequence: Synthetic oligonucleotide
uuguagcccaucagcaaag

SEQ ID NO: 2977505 - RNA, 19 nt, Artificial Sequence
  Description of Artificial Sequence: Synthetic oligonucleotide
caggguuccuucuccaugg

SEQ ID NO: 2977506 - RNA, 19 nt, Artificial Sequence
  Description of Artificial Sequence: Synthetic oligonucleotide
auguucccaacauaucuug

SEQ ID NO: 2977507 - RNA, 19 nt, Artificial Sequence
  Description of Artificial Sequence: Synthetic oligonucleotide
uuacguaugacccgacaua

SEQ ID NO: 2977508 - RNA, 19 nt, Artificial Sequence
  Description of Artificial Sequence: Synthetic oligonucleotide
uuauagaagccaucuccac

SEQ ID NO: 2977509 - RNA, 19 nt, Artificial Sequence
  Description of Artificial Sequence: Synthetic oligonucleotide
ggucauaacuugucgacag

SEQ ID NO: 2977510 - RNA, 19 nt, Artificial Sequence
  Description of Artificial Sequence: Synthetic oligonucleotide
guggugggguuauagaagc

SEQ ID NO: 2977511 - RNA, 19 nt, Artificial Sequence
  Description of Artificial Sequence: Synthetic oligonucleotide
uccauauuggugagccgag

SEQ ID NO: 2977512 - RNA, 19 nt, Artificial Sequence
  Description of Artificial Sequence: Synthetic oligonucleotide
agaauguacuccgcacugc

SEQ ID NO: 2977513 - RNA, 19 nt, Artificial Sequence
  Description of Artificial Sequence: Synthetic oligonucleotide
guucccaacauaucuugug

SEQ ID NO: 2977514 - RNA, 19 nt, Artificial Sequence
  Description of Artificial Sequence: Synthetic oligonucleotide
gaggguuucaggccguagc

SEQ ID NO: 2977515 - RNA, 19 nt, Artificial Sequence
  Description of Artificial Sequence: Synthetic oligonucleotide
uguuuguccucauauugua

SEQ ID NO: 2977516 - RNA, 19 nt, Artificial Sequence
  Description of Artificial Sequence: Synthetic oligonucleotide
ucuccacagucauagcagc

SEQ ID NO: 2977517 - RNA, 19 nt, Artificial Sequence
  Description of Artificial Sequence: Synthetic oligonucleotide
uucaggccguagcagaucu

SEQ ID NO: 2977518 - RNA, 19 nt, Artificial Sequence
  Description of Artificial Sequence: Synthetic oligonucleotide
aucuugugucaguagggag

SEQ ID NO: 2977519 - RNA, 19 nt, Artificial Sequence
  Description of Artificial Sequence: Synthetic oligonucleotide
uugucgacaguagugccag

SEQ ID NO: 2977520 - RNA, 19 nt, Artificial Sequence
  Description of Artificial Sequence: Synthetic oligonucleotide
acauaucuugugucaguag

SEQ ID NO: 2977521 - RNA, 19 nt, Artificial Sequence
  Description of Artificial Sequence: Synthetic oligonucleotide
acagucauagcagcugggg

SEQ ID NO: 2977522 - RNA, 19 nt, Artificial Sequence
  Description of Artificial Sequence: Synthetic oligonucleotide
auauuguagcccaucagca

SEQ ID NO: 2977523 - RNA, 19 nt, Artificial Sequence
  Description of Artificial Sequence: Synthetic oligonucleotide
ugccaauccuuucucccag

SEQ ID NO: 2977524 - RNA, 19 nt, Artificial Sequence
  Description of Artificial Sequence: Synthetic oligonucleotide
uauuguagcccaucagcaa

SEQ ID NO: 2977525 - RNA, 19 nt, Artificial Sequence
  Description of Artificial Sequence: Synthetic oligonucleotide
auauuggugagccgagaga

SEQ ID NO: 2977526 - RNA, 19 nt, Artificial Sequence
  Description of Artificial Sequence: Synthetic oligonucleotide
agguauacuugcccuucac

SEQ ID NO: 2977527 - RNA, 19 nt, Artificial Sequence
  Description of Artificial Sequence: Synthetic oligonucleotide
ucgguguagaaccuccggu

SEQ ID NO: 2977528 - RNA, 19 nt, Artificial Sequence
  Description of Artificial Sequence: Synthetic oligonucleotide
ugacccgacauauuugcuc

SEQ ID NO: 2977529 - RNA, 19 nt, Artificial Sequence
  Description of Artificial Sequence: Synthetic oligonucleotide
uaucuugugucaguaggga

SEQ ID NO: 2977530 - RNA, 19 nt, Artificial Sequence
  Description of Artificial Sequence: Synthetic oligonucleotide
aacauaucuugugucagua

SEQ ID NO: 2977531 - RNA, 19 nt, Artificial Sequence
  Description of Artificial Sequence: Synthetic oligonucleotide
guggcaucgaaucggcucc

SEQ ID NO: 2977532 - RNA, 19 nt, Artificial Sequence
  Description of Artificial Sequence: Synthetic oligonucleotide
uccggucauaacuugucga

SEQ ID NO: 2977533 - RNA, 19 nt, Artificial Sequence
  Description of Artificial Sequence: Synthetic oligonucleotide
guuauagaagccaucucca

SEQ ID NO: 2977534 - RNA, 19 nt, Artificial Sequence
  Description of Artificial Sequence: Synthetic oligonucleotide
aucagcaaagguauacuug

SEQ ID NO: 2977535 - RNA, 19 nt, Artificial Sequence
  Description of Artificial Sequence: Synthetic oligonucleotide
aucucgguguagaaccucc

SEQ ID NO: 2977536 - RNA, 19 nt, Artificial Sequence
  Description of Artificial Sequence: Synthetic oligonucleotide
caugccguccuucauguuc

SEQ ID NO: 2977537 - RNA, 19 nt, Artificial Sequence
  Description of Artificial Sequence: Synthetic oligonucleotide
cucgguggguccauauugg

SEQ ID NO: 2977538 - RNA, 19 nt, Artificial Sequence
  Description of Artificial Sequence: Synthetic oligonucleotide
aaucggcucccacugggga

SEQ ID NO: 2977539 - RNA, 19 nt, Artificial Sequence
  Description of Artificial Sequence: Synthetic oligonucleotide
ucucgguguagaaccuccg

SEQ ID NO: 2977540 - RNA, 19 nt, Artificial Sequence
  Description of Artificial Sequence: Synthetic oligonucleotide
agugccaguguuuguccuc

SEQ ID NO: 2977541 - RNA, 19 nt, Artificial Sequence
  Description of Artificial Sequence: Synthetic oligonucleotide
uccuucauguucccaacau

SEQ ID NO: 2977542 - RNA, 19 nt, Artificial Sequence
  Description of Artificial Sequence: Synthetic oligonucleotide
gguggguccauauugguga

SEQ ID NO: 2977543 - RNA, 19 nt, Artificial Sequence
  Description of Artificial Sequence: Synthetic oligonucleotide
uggaacaugccguccuuca

SEQ ID NO: 2977544 - RNA, 19 nt, Artificial Sequence
  Description of Artificial Sequence: Synthetic oligonucleotide
aagguauacuugcccuuca

SEQ ID NO: 2977545 - RNA, 19 nt, Artificial Sequence
  Description of Artificial Sequence: Synthetic oligonucleotide
ucauaacuugucgacagua

SEQ ID NO: 2977546 - RNA, 19 nt, Artificial Sequence
  Description of Artificial Sequence: Synthetic oligonucleotide
acaguagugccaguguuug

SEQ ID NO: 2977547 - RNA, 19 nt, Artificial Sequence
  Description of Artificial Sequence: Synthetic oligonucleotide
uucauguucccaacauauc

SEQ ID NO: 2977548 - RNA, 19 nt, Artificial Sequence
  Description of Artificial Sequence: Synthetic oligonucleotide
gucaguagggagaauguac

SEQ ID NO: 2977549 - RNA, 19 nt, Artificial Sequence
  Description of Artificial Sequence: Synthetic oligonucleotide
uccacagucauagcagcug

SEQ ID NO: 2977550 - RNA, 19 nt, Artificial Sequence
  Description of Artificial Sequence: Synthetic oligonucleotide
guguacugcaugucagcgg

SEQ ID NO: 2977551 - RNA, 19 nt, Artificial Sequence
  Description of Artificial Sequence: Synthetic oligonucleotide
augccguccuucauguucc

SEQ ID NO: 2977552 - RNA, 19 nt, Artificial Sequence
  Description of Artificial Sequence: Synthetic oligonucleotide
aagccaucuccacagucau

SEQ ID NO: 2977553 - RNA, 19 nt, Artificial Sequence
  Description of Artificial Sequence: Synthetic oligonucleotide
cuggggaagaacaggguuc

SEQ ID NO: 2977554 - RNA, 19 nt, Artificial Sequence
  Description of Artificial Sequence: Synthetic oligonucleotide
uguccucauauuguagccc

SEQ ID NO: 2977555 - RNA, 19 nt, Artificial Sequence
  Description of Artificial Sequence: Synthetic oligonucleotide
acaggguuccuucuccaug

SEQ ID NO: 2977556 - RNA, 19 nt, Artificial Sequence
  Description of Artificial Sequence: Synthetic oligonucleotide
uguucccaacauaucuugu

SEQ ID NO: 2977557 - RNA, 19 nt, Artificial Sequence
  Description of Artificial Sequence: Synthetic oligonucleotide
uacguaugacccgacauau

SEQ ID NO: 2977558 - RNA, 19 nt, Artificial Sequence
  Description of Artificial Sequence: Synthetic oligonucleotide
ucgacaguagugccagugu

SEQ ID NO: 2977559 - RNA, 19 nt, Artificial Sequence
  Description of Artificial Sequence: Synthetic oligonucleotide
uuugcucccgguguacugc

SEQ ID NO: 2977560 - RNA, 19 nt, Artificial Sequence
  Description of Artificial Sequence: Synthetic oligonucleotide
uggggaagaacaggguucc

SEQ ID NO: 2977561 - RNA, 19 nt, Artificial Sequence
  Description of Artificial Sequence: Synthetic oligonucleotide
gaagccaucuccacaguca

SEQ ID NO: 2977562 - RNA, 19 nt, Artificial Sequence
  Description of Artificial Sequence: Synthetic oligonucleotide
ugcccuucacugccaaucc

SEQ ID NO: 2977563 - RNA, 19 nt, Artificial Sequence
  Description of Artificial Sequence: Synthetic oligonucleotide
auauuugcucccgguguac

SEQ ID NO: 2977564 - RNA, 19 nt, Artificial Sequence
  Description of Artificial Sequence: Synthetic oligonucleotide
ugagccgagagaugccuga

SEQ ID NO: 2977565 - RNA, 19 nt, Artificial Sequence
  Description of Artificial Sequence: Synthetic oligonucleotide
uccgcacugcccuccaucc

SEQ ID NO: 2977566 - RNA, 19 nt, Artificial Sequence
  Description of Artificial Sequence: Synthetic oligonucleotide
guagugccaguguuugucc

SEQ ID NO: 2977567 - RNA, 19 nt, Artificial Sequence
  Description of Artificial Sequence: Synthetic oligonucleotide
aggguuucaggccguagca

SEQ ID NO: 2977568 - RNA, 19 nt, Artificial Sequence
  Description of Artificial Sequence: Synthetic oligonucleotide
guuccuucuccauggaaca

SEQ ID NO: 2977569 - RNA, 19 nt, Artificial Sequence
  Description of Artificial Sequence: Synthetic oligonucleotide
ucccagguggcaucgaauc

SEQ ID NO: 2977570 - RNA, 19 nt, Artificial Sequence
  Description of Artificial Sequence: Synthetic oligonucleotide
acuggggaagaacaggguu

SEQ ID NO: 2977571 - RNA, 19 nt, Artificial Sequence
  Description of Artificial Sequence: Synthetic oligonucleotide
uguagcccaucagcaaagg

SEQ ID NO: 2977572 - RNA, 19 nt, Artificial Sequence
  Description of Artificial Sequence: Synthetic oligonucleotide
gccgagagaugccugaggg

SEQ ID NO: 2977573 - RNA, 19 nt, Artificial Sequence
  Description of Artificial Sequence: Synthetic oligonucleotide
agggagaauguacuccgca

SEQ ID NO: 2977574 - RNA, 19 nt, Artificial Sequence
  Description of Artificial Sequence: Synthetic oligonucleotide
gccaucuccacagucauag

SEQ ID NO: 2977575 - RNA, 19 nt, Artificial Sequence
  Description of Artificial Sequence: Synthetic oligonucleotide
ucccaacauaucuuguguc

SEQ ID NO: 2977576 - RNA, 19 nt, Artificial Sequence
  Description of Artificial Sequence: Synthetic oligonucleotide
uccauccuccuguuuacgu

SEQ ID NO: 2977577 - RNA, 19 nt, Artificial Sequence
  Description of Artificial Sequence: Synthetic oligonucleotide
cucauauuguagcccauca

SEQ ID NO: 2977578 - RNA, 19 nt, Artificial Sequence
  Description of Artificial Sequence: Synthetic oligonucleotide
aaccuccggucauaacuug

SEQ ID NO: 2977579 - RNA, 19 nt, Artificial Sequence
  Description of Artificial Sequence: Synthetic oligonucleotide
caggccguagcagaucucg

SEQ ID NO: 2977580 - RNA, 19 nt, Artificial Sequence
  Description of Artificial Sequence: Synthetic oligonucleotide
cucgguguagaaccuccgg

SEQ ID NO: 2977581 - RNA, 19 nt, Artificial Sequence
  Description of Artificial Sequence: Synthetic oligonucleotide
uccuucuccauggaacaug

SEQ ID NO: 2977582 - RNA, 19 nt, Artificial Sequence
  Description of Artificial Sequence: Synthetic oligonucleotide
uuucucccagguggcaucg

SEQ ID NO: 2977583 - RNA, 19 nt, Artificial Sequence
  Description of Artificial Sequence: Synthetic oligonucleotide
cuccggucauaacuugucg

SEQ ID NO: 2977584 - RNA, 19 nt, Artificial Sequence
  Description of Artificial Sequence: Synthetic oligonucleotide
ucgaaucggcucccacugg

SEQ ID NO: 2977585 - RNA, 19 nt, Artificial Sequence
  Description of Artificial Sequence: Synthetic oligonucleotide
auuugcucccgguguacug

SEQ ID NO: 2977586 - RNA, 19 nt, Artificial Sequence
  Description of Artificial Sequence: Synthetic oligonucleotide
cuucauguucccaacauau

SEQ ID NO: 2977587 - RNA, 19 nt, Artificial Sequence
  Description of Artificial Sequence: Synthetic oligonucleotide
gguguacugcaugucagcg

SEQ ID NO: 2977588 - RNA, 19 nt, Artificial Sequence
  Description of Artificial Sequence: Synthetic oligonucleotide
ucagcggcuagugucuagc

SEQ ID NO: 2977589 - RNA, 19 nt, Artificial Sequence
  Description of Artificial Sequence: Synthetic oligonucleotide
guuuguccucauauuguag

SEQ ID NO: 2977590 - RNA, 19 nt, Artificial Sequence
  Description of Artificial Sequence: Synthetic oligonucleotide
ucccacuggggaagaacag

SEQ ID NO: 2977591 - RNA, 19 nt, Artificial Sequence
  Description of Artificial Sequence: Synthetic oligonucleotide
guccucauauuguagccca

SEQ ID NO: 2977592 - RNA, 19 nt, Artificial Sequence
  Description of Artificial Sequence: Synthetic oligonucleotide
ugccugaggguuucaggcc

SEQ ID NO: 2977593 - RNA, 19 nt, Artificial Sequence
  Description of Artificial Sequence: Synthetic oligonucleotide
agcggcuagugucuagcag

SEQ ID NO: 2977594 - RNA, 19 nt, Artificial Sequence
  Description of Artificial Sequence: Synthetic oligonucleotide
aacaggguuccuucuccau

SEQ ID NO: 2977595 - RNA, 19 nt, Artificial Sequence
  Description of Artificial Sequence: Synthetic oligonucleotide
ggaagaacaggguuccuuc

SEQ ID NO: 2977596 - RNA, 19 nt, Artificial Sequence
  Description of Artificial Sequence: Synthetic oligonucleotide
cagcaaagguauacuugcc

SEQ ID NO: 2977597 - RNA, 19 nt, Artificial Sequence
  Description of Artificial Sequence: Synthetic oligonucleotide
uagggagaauguacuccgc

SEQ ID NO: 2977598 - RNA, 19 nt, Artificial Sequence
  Description of Artificial Sequence: Synthetic oligonucleotide
cuugucgacaguagugcca

SEQ ID NO: 2977599 - RNA, 19 nt, Artificial Sequence
  Description of Artificial Sequence: Synthetic oligonucleotide
guccauauuggugagccga

SEQ ID NO: 2977600 - RNA, 19 nt, Artificial Sequence
  Description of Artificial Sequence: Synthetic oligonucleotide
uugcccuucacugccaauc

SEQ ID NO: 2977601 - RNA, 19 nt, Artificial Sequence
  Description of Artificial Sequence: Synthetic oligonucleotide
acccgacauauuugcuccc

SEQ ID NO: 2977602 - RNA, 19 nt, Artificial Sequence
  Description of Artificial Sequence: Synthetic oligonucleotide
ugcaugucagcggcuagug

SEQ ID NO: 2977603 - RNA, 19 nt, Artificial Sequence
  Description of Artificial Sequence: Synthetic oligonucleotide
gguuccuucuccauggaac

SEQ ID NO: 2977604 - RNA, 19 nt, Artificial Sequence
  Description of Artificial Sequence: Synthetic oligonucleotide
uccuccuguuuacguauga

SEQ ID NO: 2977605 - RNA, 19 nt, Artificial Sequence
  Description of Artificial Sequence: Synthetic oligonucleotide
ccacuggggaagaacaggg

SEQ ID NO: 2977606 - RNA, 19 nt, Artificial Sequence
  Description of Artificial Sequence: Synthetic oligonucleotide
gaaucggcucccacugggg

SEQ ID NO: 2977607 - RNA, 19 nt, Artificial Sequence
  Description of Artificial Sequence: Synthetic oligonucleotide
agccgagagaugccugagg

SEQ ID NO: 2977608 - RNA, 19 nt, Artificial Sequence
  Description of Artificial Sequence: Synthetic oligonucleotide
uagcagaucucgguguaga

SEQ ID NO: 2977609 - RNA, 19 nt, Artificial Sequence
  Description of Artificial Sequence: Synthetic oligonucleotide
ucacugccaauccuuucuc

SEQ ID NO: 2977610 - RNA, 19 nt, Artificial Sequence
  Description of Artificial Sequence: Synthetic oligonucleotide
ccuguuuacguaugacccg

SEQ ID NO: 2977611 - RNA, 19 nt, Artificial Sequence
  Description of Artificial Sequence: Synthetic oligonucleotide
guaugacccgacauauuug

SEQ ID NO: 2977612 - RNA, 19 nt, Artificial Sequence
  Description of Artificial Sequence: Synthetic oligonucleotide
ugaugacccuggugguggg

SEQ ID NO: 2977613 - RNA, 19 nt, Artificial Sequence
  Description of Artificial Sequence: Synthetic oligonucleotide
uggugggguuauagaagcc

SEQ ID NO: 2977614 - RNA, 19 nt, Artificial Sequence
  Description of Artificial Sequence: Synthetic oligonucleotide
uguuuacguaugacccgac

SEQ ID NO: 2977615 - RNA, 19 nt, Artificial Sequence
  Description of Artificial Sequence: Synthetic oligonucleotide
gguggcaucgaaucggcuc

SEQ ID NO: 2977616 - RNA, 19 nt, Artificial Sequence
  Description of Artificial Sequence: Synthetic oligonucleotide
ugggguuauagaagccauc

SEQ ID NO: 2977617 - RNA, 19 nt, Artificial Sequence
  Description of Artificial Sequence: Synthetic oligonucleotide
gucgacaguagugccagug

SEQ ID NO: 2977618 - RNA, 19 nt, Artificial Sequence
  Description of Artificial Sequence: Synthetic oligonucleotide
acugcaugucagcggcuag

SEQ ID NO: 2977619 - RNA, 19 nt, Artificial Sequence
  Description of Artificial Sequence: Synthetic oligonucleotide
cacugccaauccuuucucc

SEQ ID NO: 2977620 - RNA, 19 nt, Artificial Sequence
  Description of Artificial Sequence: Synthetic oligonucleotide
cuuucucccagguggcauc

SEQ ID NO: 2977621 - RNA, 19 nt, Artificial Sequence
  Description of Artificial Sequence: Synthetic oligonucleotide
guuuacguaugacccgaca

SEQ ID NO: 2977622 - RNA, 19 nt, Artificial Sequence
  Description of Artificial Sequence: Synthetic oligonucleotide
agcccaucagcaaagguau

SEQ ID NO: 2977623 - RNA, 19 nt, Artificial Sequence
  Description of Artificial Sequence: Synthetic oligonucleotide
caauccuuucucccaggug

SEQ ID NO: 2977624 - RNA, 19 nt, Artificial Sequence
  Description of Artificial Sequence: Synthetic oligonucleotide
gguggugggguuauagaag

SEQ ID NO: 2977625 - RNA, 19 nt, Artificial Sequence
  Description of Artificial Sequence: Synthetic oligonucleotide
cagguggcaucgaaucggc

SEQ ID NO: 2977626 - RNA, 19 nt, Artificial Sequence
  Description of Artificial Sequence: Synthetic oligonucleotide
ggguccauauuggugagcc

SEQ ID NO: 2977627 - RNA, 19 nt, Artificial Sequence
  Description of Artificial Sequence: Synthetic oligonucleotide
ccuucuccauggaacaugc

SEQ ID NO: 2977628 - RNA, 19 nt, Artificial Sequence
  Description of Artificial Sequence: Synthetic oligonucleotide
uccauggaacaugccgucc

SEQ ID NO: 2977629 - RNA, 19 nt, Artificial Sequence
  Description of Artificial Sequence: Synthetic oligonucleotide
gaacaggguuccuucucca

SEQ ID NO: 2977630 - RNA, 19 nt, Artificial Sequence
  Description of Artificial Sequence: Synthetic oligonucleotide
uauuugcucccgguguacu

SEQ ID NO: 2977631 - RNA, 19 nt, Artificial Sequence
  Description of Artificial Sequence: Synthetic oligonucleotide
auggaacaugccguccuuc

SEQ ID NO: 2977632 - RNA, 19 nt, Artificial Sequence
  Description of Artificial Sequence: Synthetic oligonucleotide
gccugaggguuucaggccg

SEQ ID NO: 2977633 - RNA, 19 nt, Artificial Sequence
  Description of Artificial Sequence: Synthetic oligonucleotide
uagugccaguguuuguccu

SEQ ID NO: 2977634 - RNA, 19 nt, Artificial Sequence
  Description of Artificial Sequence: Synthetic oligonucleotide
caguagggagaauguacuc

SEQ ID NO: 2977635 - RNA, 19 nt, Artificial Sequence
  Description of Artificial Sequence: Synthetic oligonucleotide
ucucccagguggcaucgaa

SEQ ID NO: 2977636 - RNA, 19 nt, Artificial Sequence
  Description of Artificial Sequence: Synthetic oligonucleotide
ucggcucccacuggggaag

SEQ ID NO: 2977637 - RNA, 19 nt, Artificial Sequence
  Description of Artificial Sequence: Synthetic oligonucleotide
ugucaguagggagaaugua

SEQ ID NO: 2977638 - RNA, 19 nt, Artificial Sequence
  Description of Artificial Sequence: Synthetic oligonucleotide
uuucucgguggguccauau

SEQ ID NO: 2977639 - RNA, 19 nt, Artificial Sequence
  Description of Artificial Sequence: Synthetic oligonucleotide
gguuucaggccguagcaga

SEQ ID NO: 2977640 - RNA, 19 nt, Artificial Sequence
  Description of Artificial Sequence: Synthetic oligonucleotide
gggagaauguacuccgcac

SEQ ID NO: 2977641 - RNA, 19 nt, Artificial Sequence
  Description of Artificial Sequence: Synthetic oligonucleotide
gguguagaaccuccgguca

SEQ ID NO: 2977642 - RNA, 19 nt, Artificial Sequence
  Description of Artificial Sequence: Synthetic oligonucleotide
cuccauggaacaugccguc

SEQ ID NO: 2977643 - RNA, 19 nt, Artificial Sequence
  Description of Artificial Sequence: Synthetic oligonucleotide
cuucacugccaauccuuuc

SEQ ID NO: 2977644 - RNA, 19 nt, Artificial Sequence
  Description of Artificial Sequence: Synthetic oligonucleotide
ucgguggguccauauuggu

SEQ ID NO: 2977645 - RNA, 19 nt, Artificial Sequence
  Description of Artificial Sequence: Synthetic oligonucleotide
gaagaacaggguuccuucu

SEQ ID NO: 2977646 - RNA, 19 nt, Artificial Sequence
  Description of Artificial Sequence: Synthetic oligonucleotide
cuguuuacguaugacccga

SEQ ID NO: 2977647 - RNA, 19 nt, Artificial Sequence
  Description of Artificial Sequence: Synthetic oligonucleotide
uguagaaccuccggucaua

SEQ ID NO: 2977648 - RNA, 19 nt, Artificial Sequence
  Description of Artificial Sequence: Synthetic oligonucleotide
uagaagccaucuccacagu

SEQ ID NO: 2977649 - RNA, 19 nt, Artificial Sequence
  Description of Artificial Sequence: Synthetic oligonucleotide
ugaggguuucaggccguag

SEQ ID NO: 2977650 - RNA, 19 nt, Artificial Sequence
  Description of Artificial Sequence: Synthetic oligonucleotide
agaugccugaggguuucag

SEQ ID NO: 2977651 - RNA, 19 nt, Artificial Sequence
  Description of Artificial Sequence: Synthetic oligonucleotide
gaugacccugguggugggg

SEQ ID NO: 2977652 - RNA, 19 nt, Artificial Sequence
  Description of Artificial Sequence: Synthetic oligonucleotide
uucucgguggguccauauu

SEQ ID NO: 2977653 - RNA, 19 nt, Artificial Sequence
  Description of Artificial Sequence: Synthetic oligonucleotide
uacuugcccuucacugcca

SEQ ID NO: 2977654 - RNA, 19 nt, Artificial Sequence
  Description of Artificial Sequence: Synthetic oligonucleotide
cuucuccauggaacaugcc

SEQ ID NO: 2977655 - RNA, 19 nt, Artificial Sequence
  Description of Artificial Sequence: Synthetic oligonucleotide
ccaacauaucuugugucag

SEQ ID NO: 2977656 - RNA, 19 nt, Artificial Sequence
  Description of Artificial Sequence: Synthetic oligonucleotide
cauauuugcucccggugua

SEQ ID NO: 2977657 - RNA, 19 nt, Artificial Sequence
  Description of Artificial Sequence: Synthetic oligonucleotide
uguacuccgcacugcccuc

SEQ ID NO: 2977658 - RNA, 19 nt, Artificial Sequence
  Description of Artificial Sequence: Synthetic oligonucleotide
agcagaucucgguguagaa

SEQ ID NO: 2977659 - RNA, 19 nt, Artificial Sequence
  Description of Artificial Sequence: Synthetic oligonucleotide
guagcagaucucgguguag

SEQ ID NO: 2977660 - RNA, 19 nt, Artificial Sequence
  Description of Artificial Sequence: Synthetic oligonucleotide
cuugugucaguagggagaa

SEQ ID NO: 2977661 - RNA, 19 nt, Artificial Sequence
  Description of Artificial Sequence: Synthetic oligonucleotide
ccggucauaacuugucgac

SEQ ID NO: 2977662 - RNA, 19 nt, Artificial Sequence
  Description of Artificial Sequence: Synthetic oligonucleotide
ccagguggcaucgaaucgg

SEQ ID NO: 2977663 - RNA, 19 nt, Artificial Sequence
  Description of Artificial Sequence: Synthetic oligonucleotide
gcaaagguauacuugcccu

SEQ ID NO: 2977664 - RNA, 19 nt, Artificial Sequence
  Description of Artificial Sequence: Synthetic oligonucleotide
cugccaauccuuucuccca

SEQ ID NO: 2977665 - RNA, 19 nt, Artificial Sequence
  Description of Artificial Sequence: Synthetic oligonucleotide
uugcucccgguguacugca

SEQ ID NO: 2977666 - RNA, 19 nt, Artificial Sequence
  Description of Artificial Sequence: Synthetic oligonucleotide
uacugcaugucagcggcua

SEQ ID NO: 2977667 - RNA, 19 nt, Artificial Sequence
  Description of Artificial Sequence: Synthetic oligonucleotide
augucagcggcuagugucu

SEQ ID NO: 2977668 - RNA, 19 nt, Artificial Sequence
  Description of Artificial Sequence: Synthetic oligonucleotide
uccucauauuguagcccau

SEQ ID NO: 2977669 - RNA, 19 nt, Artificial Sequence
  Description of Artificial Sequence: Synthetic oligonucleotide
gccguagcagaucucggug

SEQ ID NO: 2977670 - RNA, 19 nt, Artificial Sequence
  Description of Artificial Sequence: Synthetic oligonucleotide
ggugggguuauagaagcca

SEQ ID NO: 2977671 - RNA, 19 nt, Artificial Sequence
  Description of Artificial Sequence: Synthetic oligonucleotide
uagaaccuccggucauaac

SEQ ID NO: 2977672 - RNA, 19 nt, Artificial Sequence
  Description of Artificial Sequence: Synthetic oligonucleotide
gguccauauuggugagccg

SEQ ID NO: 2977673 - RNA, 19 nt, Artificial Sequence
  Description of Artificial Sequence: Synthetic oligonucleotide
uuucaggccguagcagauc

SEQ ID NO: 2977674 - RNA, 19 nt, Artificial Sequence
  Description of Artificial Sequence: Synthetic oligonucleotide
acugcccuccauccuccug

SEQ ID NO: 2977675 - RNA, 19 nt, Artificial Sequence
  Description of Artificial Sequence: Synthetic oligonucleotide
aucggcucccacuggggaa

SEQ ID NO: 2977676 - RNA, 19 nt, Artificial Sequence
  Description of Artificial Sequence: Synthetic oligonucleotide
auuggugagccgagagaug

SEQ ID NO: 2977677 - RNA, 19 nt, Artificial Sequence
  Description of Artificial Sequence: Synthetic oligonucleotide
gaucucgguguagaaccuc

SEQ ID NO: 2977678 - RNA, 19 nt, Artificial Sequence
  Description of Artificial Sequence: Synthetic oligonucleotide
ggagaauguacuccgcacu

SEQ ID NO: 2977679 - RNA, 19 nt, Artificial Sequence
  Description of Artificial Sequence: Synthetic oligonucleotide
cccaacauaucuuguguca

SEQ ID NO: 2977680 - RNA, 19 nt, Artificial Sequence
  Description of Artificial Sequence: Synthetic oligonucleotide
augacccuggugguggggu

SEQ ID NO: 2977681 - RNA, 19 nt, Artificial Sequence
  Description of Artificial Sequence: Synthetic oligonucleotide
gagccgagagaugccugag

SEQ ID NO: 2977682 - RNA, 19 nt, Artificial Sequence
  Description of Artificial Sequence: Synthetic oligonucleotide
guccuucauguucccaaca

SEQ ID NO: 2977683 - RNA, 19 nt, Artificial Sequence
  Description of Artificial Sequence: Synthetic oligonucleotide
gucagcggcuagugucuag

SEQ ID NO: 2977684 - RNA, 19 nt, Artificial Sequence
  Description of Artificial Sequence: Synthetic oligonucleotide
guguuuguccucauauugu

SEQ ID NO: 2977685 - RNA, 19 nt, Artificial Sequence
  Description of Artificial Sequence: Synthetic oligonucleotide
caucgaaucggcucccacu

SEQ ID NO: 2977686 - RNA, 19 nt, Artificial Sequence
  Description of Artificial Sequence: Synthetic oligonucleotide
cuccgcacugcccuccauc

SEQ ID NO: 2977687 - RNA, 19 nt, Artificial Sequence
  Description of Artificial Sequence: Synthetic oligonucleotide
uacuccgcacugcccucca

SEQ ID NO: 2977688 - RNA, 19 nt, Artificial Sequence
  Description of Artificial Sequence: Synthetic oligonucleotide
cauguucccaacauaucuu

SEQ ID NO: 2977689 - RNA, 19 nt, Artificial Sequence
  Description of Artificial Sequence: Synthetic oligonucleotide
gguauacuugcccuucacu

SEQ ID NO: 2977690 - RNA, 19 nt, Artificial Sequence
  Description of Artificial Sequence: Synthetic oligonucleotide
agaucucgguguagaaccu

SEQ ID NO: 2977691 - RNA, 19 nt, Artificial Sequence
  Description of Artificial Sequence: Synthetic oligonucleotide
ccgguguacugcaugucag

SEQ ID NO: 2977692 - RNA, 19 nt, Artificial Sequence
  Description of Artificial Sequence: Synthetic oligonucleotide
caacauaucuugugucagu

SEQ ID NO: 2977693 - RNA, 19 nt, Artificial Sequence
  Description of Artificial Sequence: Synthetic oligonucleotide
cgaaucggcucccacuggg

SEQ ID NO: 2977694 - RNA, 19 nt, Artificial Sequence
  Description of Artificial Sequence: Synthetic oligonucleotide
uccuuucucccagguggca

SEQ ID NO: 2977695 - RNA, 19 nt, Artificial Sequence
  Description of Artificial Sequence: Synthetic oligonucleotide
gggguuauagaagccaucu

SEQ ID NO: 2977696 - RNA, 19 nt, Artificial Sequence
  Description of Artificial Sequence: Synthetic oligonucleotide
cccagguggcaucgaaucg

SEQ ID NO: 2977697 - RNA, 19 nt, Artificial Sequence
  Description of Artificial Sequence: Synthetic oligonucleotide
gccaauccuuucucccagg

SEQ ID NO: 2977698 - RNA, 19 nt, Artificial Sequence
  Description of Artificial Sequence: Synthetic oligonucleotide
ggguuauagaagccaucuc

SEQ ID NO: 2977699 - RNA, 19 nt, Artificial Sequence
  Description of Artificial Sequence: Synthetic oligonucleotide
caucagcaaagguauacuu

SEQ ID NO: 2977700 - RNA, 19 nt, Artificial Sequence
  Description of Artificial Sequence: Synthetic oligonucleotide
cccacuggggaagaacagg

SEQ ID NO: 2977701 - RNA, 19 nt, Artificial Sequence
  Description of Artificial Sequence: Synthetic oligonucleotide
uuccuucuccauggaacau

SEQ ID NO: 2977702 - RNA, 19 nt, Artificial Sequence
  Description of Artificial Sequence: Synthetic oligonucleotide
ccgacauauuugcucccgg

SEQ ID NO: 2977703 - RNA, 19 nt, Artificial Sequence
  Description of Artificial Sequence: Synthetic oligonucleotide
cauccuccuguuuacguau

SEQ ID NO: 2977704 - RNA, 19 nt, Artificial Sequence
  Description of Artificial Sequence: Synthetic oligonucleotide
ucaggccguagcagaucuc

SEQ ID NO: 2977705 - RNA, 19 nt, Artificial Sequence
  Description of Artificial Sequence: Synthetic oligonucleotide
guagaaccuccggucauaa

SEQ ID NO: 2977706 - RNA, 19 nt, Artificial Sequence
  Description of Artificial Sequence: Synthetic oligonucleotide
gucauaacuugucgacagu

SEQ ID NO: 2977707 - RNA, 19 nt, Artificial Sequence
  Description of Artificial Sequence: Synthetic oligonucleotide
aggguuccuucuccaugga

SEQ ID NO: 2977708 - RNA, 19 nt, Artificial Sequence
  Description of Artificial Sequence: Synthetic oligonucleotide
guacuccgcacugcccucc

SEQ ID NO: 2977709 - RNA, 19 nt, Artificial Sequence
  Description of Artificial Sequence: Synthetic oligonucleotide
aggccguagcagaucucgg

SEQ ID NO: 2977710 - RNA, 19 nt, Artificial Sequence
  Description of Artificial Sequence: Synthetic oligonucleotide
accuccggucauaacuugu

SEQ ID NO: 2977711 - RNA, 19 nt, Artificial Sequence
  Description of Artificial Sequence: Synthetic oligonucleotide
augacccgacauauuugcu

SEQ ID NO: 2977712 - RNA, 19 nt, Artificial Sequence
  Description of Artificial Sequence: Synthetic oligonucleotide
uggcaucgaaucggcuccc

SEQ ID NO: 2977713 - RNA, 19 nt, Artificial Sequence
  Description of Artificial Sequence: Synthetic oligonucleotide
ggguuucaggccguagcag

SEQ ID NO: 2977714 - RNA, 19 nt, Artificial Sequence
  Description of Artificial Sequence: Synthetic oligonucleotide
gaaccuccggucauaacuu

SEQ ID NO: 2977715 - RNA, 19 nt, Artificial Sequence
  Description of Artificial Sequence: Synthetic oligonucleotide
ccugguggugggguuauag

SEQ ID NO: 2977716 - RNA, 19 nt, Artificial Sequence
  Description of Artificial Sequence: Synthetic oligonucleotide
guagcccaucagcaaaggu

SEQ ID NO: 2977717 - RNA, 19 nt, Artificial Sequence
  Description of Artificial Sequence: Synthetic oligonucleotide
caaagguauacuugcccuu

SEQ ID NO: 2977718 - RNA, 19 nt, Artificial Sequence
  Description of Artificial Sequence: Synthetic oligonucleotide
ccuccggucauaacuuguc

SEQ ID NO: 2977719 - RNA, 19 nt, Artificial Sequence
  Description of Artificial Sequence: Synthetic oligonucleotide
ugccguccuucauguuccc

SEQ ID NO: 2977720 - RNA, 19 nt, Artificial Sequence
  Description of Artificial Sequence: Synthetic oligonucleotide
gacaguagugccaguguuu

SEQ ID NO: 2977721 - RNA, 19 nt, Artificial Sequence
  Description of Artificial Sequence: Synthetic oligonucleotide
gugagccgagagaugccug

SEQ ID NO: 2977722 - RNA, 19 nt, Artificial Sequence
  Description of Artificial Sequence: Synthetic oligonucleotide
gcucccgguguacugcaug

SEQ ID NO: 2977723 - RNA, 19 nt, Artificial Sequence
  Description of Artificial Sequence: Synthetic oligonucleotide
gugucaguagggagaaugu

SEQ ID NO: 2977724 - RNA, 19 nt, Artificial Sequence
  Description of Artificial Sequence: Synthetic oligonucleotide
ugucgacaguagugccagu

SEQ ID NO: 2977725 - RNA, 19 nt, Artificial Sequence
  Description of Artificial Sequence: Synthetic oligonucleotide
uuuucucgguggguccaua

SEQ ID NO: 2977726 - RNA, 19 nt, Artificial Sequence
  Description of Artificial Sequence: Synthetic oligonucleotide
cccgacauauuugcucccg

SEQ ID NO: 2977727 - RNA, 19 nt, Artificial Sequence
  Description of Artificial Sequence: Synthetic oligonucleotide
auccuccuguuuacguaug

SEQ ID NO: 2977728 - RNA, 19 nt, Artificial Sequence
  Description of Artificial Sequence: Synthetic oligonucleotide
cgguguagaaccuccgguc

SEQ ID NO: 2977729 - RNA, 19 nt, Artificial Sequence
  Description of Artificial Sequence: Synthetic oligonucleotide
ugacccugguggugggguu

SEQ ID NO: 2977730 - RNA, 19 nt, Artificial Sequence
  Description of Artificial Sequence: Synthetic oligonucleotide
gcaucgaaucggcucccac

SEQ ID NO: 2977731 - RNA, 19 nt, Artificial Sequence
  Description of Artificial Sequence: Synthetic oligonucleotide
ccucauauuguagcccauc

SEQ ID NO: 2977732 - RNA, 19 nt, Artificial Sequence
  Description of Artificial Sequence: Synthetic oligonucleotide
cuccacagucauagcagcu

SEQ ID NO: 2977733 - RNA, 19 nt, Artificial Sequence
  Description of Artificial Sequence: Synthetic oligonucleotide
cgguguacugcaugucagc

SEQ ID NO: 2977734 - RNA, 19 nt, Artificial Sequence
  Description of Artificial Sequence: Synthetic oligonucleotide
ucccgguguacugcauguc

SEQ ID NO: 2977735 - RNA, 19 nt, Artificial Sequence
  Description of Artificial Sequence: Synthetic oligonucleotide
guguagaaccuccggucau

SEQ ID NO: 2977736 - RNA, 19 nt, Artificial Sequence
  Description of Artificial Sequence: Synthetic oligonucleotide
ccuccuguuuacguaugac

SEQ ID NO: 2977737 - RNA, 19 nt, Artificial Sequence
  Description of Artificial Sequence: Synthetic oligonucleotide
cucccgguguacugcaugu

SEQ ID NO: 2977738 - RNA, 19 nt, Artificial Sequence
  Description of Artificial Sequence: Synthetic oligonucleotide
cagcggcuagugucuagca

SEQ ID NO: 2977739 - RNA, 19 nt, Artificial Sequence
  Description of Artificial Sequence: Synthetic oligonucleotide
ugucagcggcuagugucua

SEQ ID NO: 2977740 - RNA, 19 nt, Artificial Sequence
  Description of Artificial Sequence: Synthetic oligonucleotide
ugcucccgguguacugcau

SEQ ID NO: 2977741 - RNA, 19 nt, Artificial Sequence
  Description of Artificial Sequence: Synthetic oligonucleotide
guuucaggccguagcagau

SEQ ID NO: 2977742 - RNA, 19 nt, Artificial Sequence
  Description of Artificial Sequence: Synthetic oligonucleotide
gugggguuauagaagccau

SEQ ID NO: 2977743 - RNA, 19 nt, Artificial Sequence
  Description of Artificial Sequence: Synthetic oligonucleotide
cccgguguacugcauguca

SEQ ID NO: 2977744 - RNA, 19 nt, Artificial Sequence
  Description of Artificial Sequence: Synthetic oligonucleotide
cgguggguccauauuggug

SEQ ID NO: 2977745 - RNA, 19 nt, Artificial Sequence
  Description of Artificial Sequence: Synthetic oligonucleotide
ugcccuccauccuccuguu

SEQ ID NO: 2977746 - RNA, 19 nt, Artificial Sequence
  Description of Artificial Sequence: Synthetic oligonucleotide
gcucccacuggggaagaac

SEQ ID NO: 2977747 - RNA, 19 nt, Artificial Sequence
  Description of Artificial Sequence: Synthetic oligonucleotide
cguccuucauguucccaac

SEQ ID NO: 2977748 - RNA, 19 nt, Artificial Sequence
  Description of Artificial Sequence: Synthetic oligonucleotide
uucucccagguggcaucga

SEQ ID NO: 2977749 - RNA, 19 nt, Artificial Sequence
  Description of Artificial Sequence: Synthetic oligonucleotide
ccguccuucauguucccaa

SEQ ID NO: 2977750 - RNA, 19 nt, Artificial Sequence
  Description of Artificial Sequence: Synthetic oligonucleotide
cacuggggaagaacagggu

SEQ ID NO: 2977751 - RNA, 19 nt, Artificial Sequence
  Description of Artificial Sequence: Synthetic oligonucleotide
acaugccguccuucauguu

SEQ ID NO: 2977752 - RNA, 19 nt, Artificial Sequence
  Description of Artificial Sequence: Synthetic oligonucleotide
cguaugacccgacauauuu

SEQ ID NO: 2977753 - RNA, 19 nt, Artificial Sequence
  Description of Artificial Sequence: Synthetic oligonucleotide
ggguuccuucuccauggaa

SEQ ID NO: 2977754 - RNA, 19 nt, Artificial Sequence
  Description of Artificial Sequence: Synthetic oligonucleotide
acguaugacccgacauauu

SEQ ID NO: 2977755 - RNA, 19 nt, Artificial Sequence
  Description of Artificial Sequence: Synthetic oligonucleotide
ggugagccgagagaugccu

SEQ ID NO: 2977756 - RNA, 19 nt, Artificial Sequence
  Description of Artificial Sequence: Synthetic oligonucleotide
ggccguagcagaucucggu

SEQ ID NO: 2977757 - RNA, 19 nt, Artificial Sequence
  Description of Artificial Sequence: Synthetic oligonucleotide
cgcacugcccuccauccuc

SEQ ID NO: 2977758 - RNA, 19 nt, Artificial Sequence
  Description of Artificial Sequence: Synthetic oligonucleotide
gacccugguggugggguua

SEQ ID NO: 2977759 - RNA, 19 nt, Artificial Sequence
  Description of Artificial Sequence: Synthetic oligonucleotide
uugugucaguagggagaau

SEQ ID NO: 2977760 - RNA, 19 nt, Artificial Sequence
  Description of Artificial Sequence: Synthetic oligonucleotide
gcacugcccuccauccucc

SEQ ID NO: 2977761 - RNA, 19 nt, Artificial Sequence
  Description of Artificial Sequence: Synthetic oligonucleotide
ccauccuccuguuuacgua

SEQ ID NO: 2977762 - RNA, 19 nt, Artificial Sequence
  Description of Artificial Sequence: Synthetic oligonucleotide
gagagaugccugaggguuu

SEQ ID NO: 2977763 - RNA, 19 nt, Artificial Sequence
  Description of Artificial Sequence: Synthetic oligonucleotide
acuccgcacugcccuccau

SEQ ID NO: 2977764 - RNA, 19 nt, Artificial Sequence
  Description of Artificial Sequence: Synthetic oligonucleotide
ggaacaugccguccuucau

SEQ ID NO: 2977765 - RNA, 19 nt, Artificial Sequence
  Description of Artificial Sequence: Synthetic oligonucleotide
acccugguggugggguuau

SEQ ID NO: 2977766 - RNA, 19 nt, Artificial Sequence
  Description of Artificial Sequence: Synthetic oligonucleotide
cugcaugucagcggcuagu

SEQ ID NO: 2977767 - RNA, 19 nt, Artificial Sequence
  Description of Artificial Sequence: Synthetic oligonucleotide
cauggaacaugccguccuu

SEQ ID NO: 2977768 - RNA, 19 nt, Artificial Sequence
  Description of Artificial Sequence: Synthetic oligonucleotide
cucccagguggcaucgaau

SEQ ID NO: 2977769 - RNA, 19 nt, Artificial Sequence
  Description of Artificial Sequence: Synthetic oligonucleotide
ccauggaacaugccguccu

SEQ ID NO: 2977770 - RNA, 19 nt, Artificial Sequence
  Description of Artificial Sequence: Synthetic oligonucleotide
caguagugccaguguuugu

SEQ ID NO: 2977771 - RNA, 19 nt, Artificial Sequence
  Description of Artificial Sequence: Synthetic oligonucleotide
gggaagaacaggguuccuu

SEQ ID NO: 2977772 - RNA, 19 nt, Artificial Sequence
  Description of Artificial Sequence: Synthetic oligonucleotide
agccaucuccacagucaua

SEQ ID NO: 2977773 - RNA, 19 nt, Artificial Sequence
  Description of Artificial Sequence: Synthetic oligonucleotide
ccaucagcaaagguauacu

SEQ ID NO: 2977774 - RNA, 19 nt, Artificial Sequence
  Description of Artificial Sequence: Synthetic oligonucleotide
ccauauuggugagccgaga

SEQ ID NO: 2977775 - RNA, 19 nt, Artificial Sequence
  Description of Artificial Sequence: Synthetic oligonucleotide
ccaauccuuucucccaggu

SEQ ID NO: 2977776 - RNA, 19 nt, Artificial Sequence
  Description of Artificial Sequence: Synthetic oligonucleotide
ccguagcagaucucggugu

SEQ ID NO: 2977777 - RNA, 19 nt, Artificial Sequence
  Description of Artificial Sequence: Synthetic oligonucleotide
cuugcccuucacugccaau

SEQ ID NO: 2977778 - RNA, 19 nt, Artificial Sequence
  Description of Artificial Sequence: Synthetic oligonucleotide
cggucauaacuugucgaca

SEQ ID NO: 2977779 - RNA, 19 nt, Artificial Sequence
  Description of Artificial Sequence: Synthetic oligonucleotide
ggcaucgaaucggcuccca

SEQ ID NO: 2977780 - RNA, 19 nt, Artificial Sequence
  Description of Artificial Sequence: Synthetic oligonucleotide
guacugcaugucagcggcu

SEQ ID NO: 2977781 - RNA, 19 nt, Artificial Sequence
  Description of Artificial Sequence: Synthetic oligonucleotide
cccuucacugccaauccuu

SEQ ID NO: 2977782 - RNA, 19 nt, Artificial Sequence
  Description of Artificial Sequence: Synthetic oligonucleotide
cguagcagaucucggugua

SEQ ID NO: 2977783 - RNA, 19 nt, Artificial Sequence
  Description of Artificial Sequence: Synthetic oligonucleotide
cgacauauuugcucccggu

SEQ ID NO: 2977784 - RNA, 19 nt, Artificial Sequence
  Description of Artificial Sequence: Synthetic oligonucleotide
cgagagaugccugaggguu

SEQ ID NO: 2977785 - RNA, 19 nt, Artificial Sequence
  Description of Artificial Sequence: Synthetic oligonucleotide
cugaggguuucaggccgua

SEQ ID NO: 2977786 - RNA, 19 nt, Artificial Sequence
  Description of Artificial Sequence: Synthetic oligonucleotide
ccuucacugccaauccuuu

SEQ ID NO: 2977787 - RNA, 19 nt, Artificial Sequence
  Description of Artificial Sequence: Synthetic oligonucleotide
gcccuucacugccaauccu

SEQ ID NO: 2977788 - RNA, 19 nt, Artificial Sequence
  Description of Artificial Sequence: Synthetic oligonucleotide
ccgagagaugccugagggu

SEQ ID NO: 2977789 - RNA, 19 nt, Artificial Sequence
  Description of Artificial Sequence: Synthetic oligonucleotide
gccguccuucauguuccca

SEQ ID NO: 2977790 - RNA, 19 nt, Artificial Sequence
  Description of Artificial Sequence: Synthetic oligonucleotide
cacugcccuccauccuccu

SEQ ID NO: 2977791 - RNA, 19 nt, Artificial Sequence
  Description of Artificial Sequence: Synthetic oligonucleotide
ccugaggguuucaggccgu

SEQ ID NO: 2977792 - RNA, 19 nt, Artificial Sequence
  Description of Artificial Sequence: Synthetic oligonucleotide
ccuuucucccagguggcau

SEQ ID NO: 2977793 - RNA, 19 nt, Artificial Sequence
  Description of Artificial Sequence: Synthetic oligonucleotide
cgacaguagugccaguguu

SEQ ID NO: 2977794 - RNA, 19 nt, Artificial Sequence
  Description of Artificial Sequence: Synthetic oligonucleotide
ggggaagaacaggguuccu

SEQ ID NO: 2977795 - RNA, 19 nt, Artificial Sequence
  Description of Artificial Sequence: Synthetic oligonucleotide
gcccaucagcaaagguaua

SEQ ID NO: 2977796 - RNA, 19 nt, Artificial Sequence
  Description of Artificial Sequence: Synthetic oligonucleotide
ggcucccacuggggaagaa

SEQ ID NO: 2977797 - RNA, 19 nt, Artificial Sequence
  Description of Artificial Sequence: Synthetic oligonucleotide
ccgcacugcccuccauccu

SEQ ID NO: 2977798 - RNA, 19 nt, Artificial Sequence
  Description of Artificial Sequence: Synthetic oligonucleotide
cggcucccacuggggaaga

SEQ ID NO: 2977799 - RNA, 19 nt, Artificial Sequence
  Description of Artificial Sequence: Synthetic oligonucleotide
aaagcaauacaauaguaac

SEQ ID NO: 2977800 - RNA, 19 nt, Artificial Sequence
  Description of Artificial Sequence: Synthetic oligonucleotide
aauaguaaguucuggggcc

SEQ ID NO: 2977801 - RNA, 19 nt, Artificial Sequence
  Description of Artificial Sequence: Synthetic oligonucleotide
uaaaacaugaauauuccag

SEQ ID NO: 2977802 - RNA, 19 nt, Artificial Sequence
  Description of Artificial Sequence: Synthetic oligonucleotide
ucacaguucuuacagaucg

SEQ ID NO: 2977803 - RNA, 19 nt, Artificial Sequence
  Description of Artificial Sequence: Synthetic oligonucleotide
uuaguugagauuuaauucc

SEQ ID NO: 2977804 - RNA, 19 nt, Artificial Sequence
  Description of Artificial Sequence: Synthetic oligonucleotide
uuugucaacugcaagauga

SEQ ID NO: 2977805 - RNA, 19 nt, Artificial Sequence
  Description of Artificial Sequence: Synthetic oligonucleotide
aauaagguucauuaguuga

SEQ ID NO: 2977806 - RNA, 19 nt, Artificial Sequence
  Description of Artificial Sequence: Synthetic oligonucleotide
aauaacaaaagcaauacaa

SEQ ID NO: 2977807 - RNA, 19 nt, Artificial Sequence
  Description of Artificial Sequence: Synthetic oligonucleotide
gaguuuacuauuaucaacg

SEQ ID NO: 2977808 - RNA, 19 nt, Artificial Sequence
  Description of Artificial Sequence: Synthetic oligonucleotide
ucuuacagaucgaauaagg

SEQ ID NO: 2977809 - RNA, 19 nt, Artificial Sequence
  Description of Artificial Sequence: Synthetic oligonucleotide
aaaacaugaauauuccagu

SEQ ID NO: 2977810 - RNA, 19 nt, Artificial Sequence
  Description of Artificial Sequence: Synthetic oligonucleotide
gaauauuccagucacgaug

SEQ ID NO: 2977811 - RNA, 19 nt, Artificial Sequence
  Description of Artificial Sequence: Synthetic oligonucleotide
ugcuaaaacaugaauauuc

SEQ ID NO: 2977812 - RNA, 19 nt, Artificial Sequence
  Description of Artificial Sequence: Synthetic oligonucleotide
aaacaugaauauuccaguc

SEQ ID NO: 2977813 - RNA, 19 nt, Artificial Sequence
  Description of Artificial Sequence: Synthetic oligonucleotide
aauauuccagucacgaugg

SEQ ID NO: 2977814 - RNA, 19 nt, Artificial Sequence
  Description of Artificial Sequence: Synthetic oligonucleotide
uacagaucgaauaagguuc

SEQ ID NO: 2977815 - RNA, 19 nt, Artificial Sequence
  Description of Artificial Sequence: Synthetic oligonucleotide
agauuuaauuccuggcucc

SEQ ID NO: 2977816 - RNA, 19 nt, Artificial Sequence
  Description of Artificial Sequence: Synthetic oligonucleotide
ucagccaaauaacaaaagc

SEQ ID NO: 2977817 - RNA, 19 nt, Artificial Sequence
  Description of Artificial Sequence: Synthetic oligonucleotide
uucccaaugauguucagcc

SEQ ID NO: 2977818 - RNA, 19 nt, Artificial Sequence
  Description of Artificial Sequence: Synthetic oligonucleotide
aagaugagccugcuaaaac

SEQ ID NO: 2977819 - RNA, 19 nt, Artificial Sequence
  Description of Artificial Sequence: Synthetic oligonucleotide
acuauuaucaacggcacuc

SEQ ID NO: 2977820 - RNA, 19 nt, Artificial Sequence
  Description of Artificial Sequence: Synthetic oligonucleotide
ugagauuuaauuccuggcu

SEQ ID NO: 2977821 - RNA, 19 nt, Artificial Sequence
  Description of Artificial Sequence: Synthetic oligonucleotide
caauacaauaguaacugag

SEQ ID NO: 2977822 - RNA, 19 nt, Artificial Sequence
  Description of Artificial Sequence: Synthetic oligonucleotide
aacugaguuuacuauuauc

SEQ ID NO: 2977823 - RNA, 19 nt, Artificial Sequence
  Description of Artificial Sequence: Synthetic oligonucleotide
augauguucagccaaauaa

SEQ ID NO: 2977824 - RNA, 19 nt, Artificial Sequence
  Description of Artificial Sequence: Synthetic oligonucleotide
ucgaauaagguucauuagu

SEQ ID NO: 2977825 - RNA, 19 nt, Artificial Sequence
  Description of Artificial Sequence: Synthetic oligonucleotide
guugagauuuaauuccugg

SEQ ID NO: 2977826 - RNA, 19 nt, Artificial Sequence
  Description of Artificial Sequence: Synthetic oligonucleotide
aaauaacaaaagcaauaca

SEQ ID NO: 2977827 - RNA, 19 nt, Artificial Sequence
  Description of Artificial Sequence: Synthetic oligonucleotide
ugcaagaugagccugcuaa

SEQ ID NO: 2977828 - RNA, 19 nt, Artificial Sequence
  Description of Artificial Sequence: Synthetic oligonucleotide
agcaauacaauaguaacug

SEQ ID NO: 2977829 - RNA, 19 nt, Artificial Sequence
  Description of Artificial Sequence: Synthetic oligonucleotide
acaaaagcaauacaauagu

SEQ ID NO: 2977830 - RNA, 19 nt, Artificial Sequence
  Description of Artificial Sequence: Synthetic oligonucleotide
aauacaauaguaacugagu

SEQ ID NO: 2977831 - RNA, 19 nt, Artificial Sequence
  Description of Artificial Sequence: Synthetic oligonucleotide
aauguucuugaggaagcgc

SEQ ID NO: 2977832 - RNA, 19 nt, Artificial Sequence
  Description of Artificial Sequence: Synthetic oligonucleotide
agggaauacagcgugaagg

SEQ ID NO: 2977833 - RNA, 19 nt, Artificial Sequence
  Description of Artificial Sequence: Synthetic oligonucleotide
caaauaacaaaagcaauac

SEQ ID NO: 2977834 - RNA, 19 nt, Artificial Sequence
  Description of Artificial Sequence: Synthetic oligonucleotide
ugauguucagccaaauaac

SEQ ID NO: 2977835 - RNA, 19 nt, Artificial Sequence
  Description of Artificial Sequence: Synthetic oligonucleotide
aucaacggcacucucauca

SEQ ID NO: 2977836 - RNA, 19 nt, Artificial Sequence
  Description of Artificial Sequence: Synthetic oligonucleotide
ugaguuuacuauuaucaac

SEQ ID NO: 2977837 - RNA, 19 nt, Artificial Sequence
  Description of Artificial Sequence: Synthetic oligonucleotide
acggcgauggcguucacgc

SEQ ID NO: 2977838 - RNA, 19 nt, Artificial Sequence
  Description of Artificial Sequence: Synthetic oligonucleotide
aauucccuggucuguuccc

SEQ ID NO: 2977839 - RNA, 19 nt, Artificial Sequence
  Description of Artificial Sequence: Synthetic oligonucleotide
cucaucacaguucuuacag

SEQ ID NO: 2977840 - RNA, 19 nt, Artificial Sequence
  Description of Artificial Sequence: Synthetic oligonucleotide
caauaguaaguucuggggc

SEQ ID NO: 2977841 - RNA, 19 nt, Artificial Sequence
  Description of Artificial Sequence: Synthetic oligonucleotide
acugaguuuacuauuauca

SEQ ID NO: 2977842 - RNA, 19 nt, Artificial Sequence
  Description of Artificial Sequence: Synthetic oligonucleotide
aauuccuggcuccucuccg

SEQ ID NO: 2977843 - RNA, 19 nt, Artificial Sequence
  Description of Artificial Sequence: Synthetic oligonucleotide
uugagauuuaauuccuggc

SEQ ID NO: 2977844 - RNA, 19 nt, Artificial Sequence
  Description of Artificial Sequence: Synthetic oligonucleotide
uuuaauuccuggcuccucu

SEQ ID NO: 2977845 - RNA, 19 nt, Artificial Sequence
  Description of Artificial Sequence: Synthetic oligonucleotide
gaauccgccaauucccugg

SEQ ID NO: 2977846 - RNA, 19 nt, Artificial Sequence
  Description of Artificial Sequence: Synthetic oligonucleotide
ugagccugcuaaaacauga

SEQ ID NO: 2977847 - RNA, 19 nt, Artificial Sequence
  Description of Artificial Sequence: Synthetic oligonucleotide
aguucuuacagaucgaaua

SEQ ID NO: 2977848 - RNA, 19 nt, Artificial Sequence
  Description of Artificial Sequence: Synthetic oligonucleotide
agcagugccggacugacuc

SEQ ID NO: 2977849 - RNA, 19 nt, Artificial Sequence
  Description of Artificial Sequence: Synthetic oligonucleotide
aguuuacuauuaucaacgg

SEQ ID NO: 2977850 - RNA, 19 nt, Artificial Sequence
  Description of Artificial Sequence: Synthetic oligonucleotide
gaucgaauaagguucauua

SEQ ID NO: 2977851 - RNA, 19 nt, Artificial Sequence
  Description of Artificial Sequence: Synthetic oligonucleotide
aauaguaacugaguuuacu

SEQ ID NO: 2977852 - RNA, 19 nt, Artificial Sequence
  Description of Artificial Sequence: Synthetic oligonucleotide
aguucuggggccuuucuuc

SEQ ID NO: 2977853 - RNA, 19 nt, Artificial Sequence
  Description of Artificial Sequence: Synthetic oligonucleotide
uccgaauccgccaauuccc

SEQ ID NO: 2977854 - RNA, 19 nt, Artificial Sequence
  Description of Artificial Sequence: Synthetic oligonucleotide
uuacagaucgaauaagguu

SEQ ID NO: 2977855 - RNA, 19 nt, Artificial Sequence
  Description of Artificial Sequence: Synthetic oligonucleotide
acaauaguaacugaguuua

SEQ ID NO: 2977856 - RNA, 19 nt, Artificial Sequence
  Description of Artificial Sequence: Synthetic oligonucleotide
uucagccaaauaacaaaag

SEQ ID NO: 2977857 - RNA, 19 nt, Artificial Sequence
  Description of Artificial Sequence: Synthetic oligonucleotide
agaugagccugcuaaaaca

SEQ ID NO: 2977858 - RNA, 19 nt, Artificial Sequence
  Description of Artificial Sequence: Synthetic oligonucleotide
gucaacugcaagaugagcc

SEQ ID NO: 2977859 - RNA, 19 nt, Artificial Sequence
  Description of Artificial Sequence: Synthetic oligonucleotide
gagauuuaauuccuggcuc

SEQ ID NO: 2977860 - RNA, 19 nt, Artificial Sequence
  Description of Artificial Sequence: Synthetic oligonucleotide
gcaauaguaaguucugggg

SEQ ID NO: 2977861 - RNA, 19 nt, Artificial Sequence
  Description of Artificial Sequence: Synthetic oligonucleotide
uuaucaacggcacucucau

SEQ ID NO: 2977862 - RNA, 19 nt, Artificial Sequence
  Description of Artificial Sequence: Synthetic oligonucleotide
aucgaauaagguucauuag

SEQ ID NO: 2977863 - RNA, 19 nt, Artificial Sequence
  Description of Artificial Sequence: Synthetic oligonucleotide
auaguaacugaguuuacua

SEQ ID NO: 2977864 - RNA, 19 nt, Artificial Sequence
  Description of Artificial Sequence: Synthetic oligonucleotide
auacaauaguaacugaguu

SEQ ID NO: 2977865 - RNA, 19 nt, Artificial Sequence
  Description of Artificial Sequence: Synthetic oligonucleotide
guuuacuauuaucaacggc

SEQ ID NO: 2977866 - RNA, 19 nt, Artificial Sequence
  Description of Artificial Sequence: Synthetic oligonucleotide
ggcaauaguaaguucuggg

SEQ ID NO: 2977867 - RNA, 19 nt, Artificial Sequence
  Description of Artificial Sequence: Synthetic oligonucleotide
ucacgauggcaauaguaag

SEQ ID NO: 2977868 - RNA, 19 nt, Artificial Sequence
  Description of Artificial Sequence: Synthetic oligonucleotide
ucaacugcaagaugagccu

SEQ ID NO: 2977869 - RNA, 19 nt, Artificial Sequence
  Description of Artificial Sequence: Synthetic oligonucleotide
aagcaauacaauaguaacu

SEQ ID NO: 2977870 - RNA, 19 nt, Artificial Sequence
  Description of Artificial Sequence: Synthetic oligonucleotide
augaauauuccagucacga

SEQ ID NO: 2977871 - RNA, 19 nt, Artificial Sequence
  Description of Artificial Sequence: Synthetic oligonucleotide
cagccaaauaacaaaagca

SEQ ID NO: 2977872 - RNA, 19 nt, Artificial Sequence
  Description of Artificial Sequence: Synthetic oligonucleotide
aacugcaagaugagccugc

SEQ ID NO: 2977873 - RNA, 19 nt, Artificial Sequence
  Description of Artificial Sequence: Synthetic oligonucleotide
uacaauaguaacugaguuu

SEQ ID NO: 2977874 - RNA, 19 nt, Artificial Sequence
  Description of Artificial Sequence: Synthetic oligonucleotide
uaguugagauuuaauuccu

SEQ ID NO: 2977875 - RNA, 19 nt, Artificial Sequence
  Description of Artificial Sequence: Synthetic oligonucleotide
acugacuccuucccggacg

SEQ ID NO: 2977876 - RNA, 19 nt, Artificial Sequence
  Description of Artificial Sequence: Synthetic oligonucleotide
uucacgcacagcagggccg

SEQ ID NO: 2977877 - RNA, 19 nt, Artificial Sequence
  Description of Artificial Sequence: Synthetic oligonucleotide
aguaacugaguuuacuauu

SEQ ID NO: 2977878 - RNA, 19 nt, Artificial Sequence
  Description of Artificial Sequence: Synthetic oligonucleotide
aaugauguucagccaaaua

SEQ ID NO: 2977879 - RNA, 19 nt, Artificial Sequence
  Description of Artificial Sequence: Synthetic oligonucleotide
auaagguucauuaguugag

SEQ ID NO: 2977880 - RNA, 19 nt, Artificial Sequence
  Description of Artificial Sequence: Synthetic oligonucleotide
caugaauauuccagucacg

SEQ ID NO: 2977881 - RNA, 19 nt, Artificial Sequence
  Description of Artificial Sequence: Synthetic oligonucleotide
uugucaacugcaagaugag

SEQ ID NO: 2977882 - RNA, 19 nt, Artificial Sequence
  Description of Artificial Sequence: Synthetic oligonucleotide
uuuugucaacugcaagaug

SEQ ID NO: 2977883 - RNA, 19 nt, Artificial Sequence
  Description of Artificial Sequence: Synthetic oligonucleotide
cuugaggaagcgcuccucg

SEQ ID NO: 2977884 - RNA, 19 nt, Artificial Sequence
  Description of Artificial Sequence: Synthetic oligonucleotide
aagguucauuaguugagau

SEQ ID NO: 2977885 - RNA, 19 nt, Artificial Sequence
  Description of Artificial Sequence: Synthetic oligonucleotide
auaacaaaagcaauacaau

SEQ ID NO: 2977886 - RNA, 19 nt, Artificial Sequence
  Description of Artificial Sequence: Synthetic oligonucleotide
gaauacagcgugaaggcca

SEQ ID NO: 2977887 - RNA, 19 nt, Artificial Sequence
  Description of Artificial Sequence: Synthetic oligonucleotide
ugauuucccaaugauguuc

SEQ ID NO: 2977888 - RNA, 19 nt, Artificial Sequence
  Description of Artificial Sequence: Synthetic oligonucleotide
gauggcaauaguaaguucu

SEQ ID NO: 2977889 - RNA, 19 nt, Artificial Sequence
  Description of Artificial Sequence: Synthetic oligonucleotide
gugaaggccauugucaccc

SEQ ID NO: 2977890 - RNA, 19 nt, Artificial Sequence
  Description of Artificial Sequence: Synthetic oligonucleotide
uucuuacagaucgaauaag

SEQ ID NO: 2977891 - RNA, 19 nt, Artificial Sequence
  Description of Artificial Sequence: Synthetic oligonucleotide
uccgccaauucccuggucu

SEQ ID NO: 2977892 - RNA, 19 nt, Artificial Sequence
  Description of Artificial Sequence: Synthetic oligonucleotide
uaauuccuggcuccucucc

SEQ ID NO: 2977893 - RNA, 19 nt, Artificial Sequence
  Description of Artificial Sequence: Synthetic oligonucleotide
gauguucagccaaauaaca

SEQ ID NO: 2977894 - RNA, 19 nt, Artificial Sequence
  Description of Artificial Sequence: Synthetic oligonucleotide
aacggcacucucaucacag

SEQ ID NO: 2977895 - RNA, 19 nt, Artificial Sequence
  Description of Artificial Sequence: Synthetic oligonucleotide
ucucugauuucccaaugau

SEQ ID NO: 2977896 - RNA, 19 nt, Artificial Sequence
  Description of Artificial Sequence: Synthetic oligonucleotide
ucauuaguugagauuuaau

SEQ ID NO: 2977897 - RNA, 19 nt, Artificial Sequence
  Description of Artificial Sequence: Synthetic oligonucleotide
ucgugcagcacggcgaugg

SEQ ID NO: 2977898 - RNA, 19 nt, Artificial Sequence
  Description of Artificial Sequence: Synthetic oligonucleotide
cagccaauguucuugagga

SEQ ID NO: 2977899 - RNA, 19 nt, Artificial Sequence
  Description of Artificial Sequence: Synthetic oligonucleotide
ugcagcacggcgauggcgu

SEQ ID NO: 2977900 - RNA, 19 nt, Artificial Sequence
  Description of Artificial Sequence: Synthetic oligonucleotide
agccaaauaacaaaagcaa

SEQ ID NO: 2977901 - RNA, 19 nt, Artificial Sequence
  Description of Artificial Sequence: Synthetic oligonucleotide
cuccgaauccgccaauucc

SEQ ID NO: 2977902 - RNA, 19 nt, Artificial Sequence
  Description of Artificial Sequence: Synthetic oligonucleotide
cuaaaacaugaauauucca

SEQ ID NO: 2977903 - RNA, 19 nt, Artificial Sequence
  Description of Artificial Sequence: Synthetic oligonucleotide
uguuccccagccaauguuc

SEQ ID NO: 2977904 - RNA, 19 nt, Artificial Sequence
  Description of Artificial Sequence: Synthetic oligonucleotide
guucuuacagaucgaauaa

SEQ ID NO: 2977905 - RNA, 19 nt, Artificial Sequence
  Description of Artificial Sequence: Synthetic oligonucleotide
uaagguucauuaguugaga

SEQ ID NO: 2977906 - RNA, 19 nt, Artificial Sequence
  Description of Artificial Sequence: Synthetic oligonucleotide
ucucaucacaguucuuaca

SEQ ID NO: 2977907 - RNA, 19 nt, Artificial Sequence
  Description of Artificial Sequence: Synthetic oligonucleotide
gcuaaaacaugaauauucc

SEQ ID NO: 2977908 - RNA, 19 nt, Artificial Sequence
  Description of Artificial Sequence: Synthetic oligonucleotide
gaggaagcgcuccucgugc

SEQ ID NO: 2977909 - RNA, 19 nt, Artificial Sequence
  Description of Artificial Sequence: Synthetic oligonucleotide
gggaauacagcgugaaggc

SEQ ID NO: 2977910 - RNA, 19 nt, Artificial Sequence
  Description of Artificial Sequence: Synthetic oligonucleotide
ugagucucugauuucccaa

SEQ ID NO: 2977911 - RNA, 19 nt, Artificial Sequence
  Description of Artificial Sequence: Synthetic oligonucleotide
uauuccagucacgauggca

SEQ ID NO: 2977912 - RNA, 19 nt, Artificial Sequence
  Description of Artificial Sequence: Synthetic oligonucleotide
uucauuaguugagauuuaa

SEQ ID NO: 2977913 - RNA, 19 nt, Artificial Sequence
  Description of Artificial Sequence: Synthetic oligonucleotide
uacuauuaucaacggcacu

SEQ ID NO: 2977914 - RNA, 19 nt, Artificial Sequence
  Description of Artificial Sequence: Synthetic oligonucleotide
uggucuguuccccagccaa

SEQ ID NO: 2977915 - RNA, 19 nt, Artificial Sequence
  Description of Artificial Sequence: Synthetic oligonucleotide
uacagcgugaaggccauug

SEQ ID NO: 2977916 - RNA, 19 nt, Artificial Sequence
  Description of Artificial Sequence: Synthetic oligonucleotide
ugaauauuccagucacgau

SEQ ID NO: 2977917 - RNA, 19 nt, Artificial Sequence
  Description of Artificial Sequence: Synthetic oligonucleotide
uggcaauaguaaguucugg

SEQ ID NO: 2977918 - RNA, 19 nt, Artificial Sequence
  Description of Artificial Sequence: Synthetic oligonucleotide
cauuaguugagauuuaauu

SEQ ID NO: 2977919 - RNA, 19 nt, Artificial Sequence
  Description of Artificial Sequence: Synthetic oligonucleotide
auguucuugaggaagcgcu

SEQ ID NO: 2977920 - RNA, 19 nt, Artificial Sequence
  Description of Artificial Sequence: Synthetic oligonucleotide
auauuccagucacgauggc

SEQ ID NO: 2977921 - RNA, 19 nt, Artificial Sequence
  Description of Artificial Sequence: Synthetic oligonucleotide
ucaucacaguucuuacaga

SEQ ID NO: 2977922 - RNA, 19 nt, Artificial Sequence
  Description of Artificial Sequence: Synthetic oligonucleotide
caauucccuggucuguucc

SEQ ID NO: 2977923 - RNA, 19 nt, Artificial Sequence
  Description of Artificial Sequence: Synthetic oligonucleotide
uauuaucaacggcacucuc

SEQ ID NO: 2977924 - RNA, 19 nt, Artificial Sequence
  Description of Artificial Sequence: Synthetic oligonucleotide
uguucuugaggaagcgcuc

SEQ ID NO: 2977925 - RNA, 19 nt, Artificial Sequence
  Description of Artificial Sequence: Synthetic oligonucleotide
auuccagucacgauggcaa

SEQ ID NO: 2977926 - RNA, 19 nt, Artificial Sequence
  Description of Artificial Sequence: Synthetic oligonucleotide
guucacgcacagcagggcc

SEQ ID NO: 2977927 - RNA, 19 nt, Artificial Sequence
  Description of Artificial Sequence: Synthetic oligonucleotide
agucucugauuucccaaug

SEQ ID NO: 2977928 - RNA, 19 nt, Artificial Sequence
  Description of Artificial Sequence: Synthetic oligonucleotide
uccucgugcagcacggcga

SEQ ID NO: 2977929 - RNA, 19 nt, Artificial Sequence
  Description of Artificial Sequence: Synthetic oligonucleotide
auuuaauuccuggcuccuc

SEQ ID NO: 2977930 - RNA, 19 nt, Artificial Sequence
  Description of Artificial Sequence: Synthetic oligonucleotide
cucucaucacaguucuuac

SEQ ID NO: 2977931 - RNA, 19 nt, Artificial Sequence
  Description of Artificial Sequence: Synthetic oligonucleotide
uaacugaguuuacuauuau

SEQ ID NO: 2977932 - RNA, 19 nt, Artificial Sequence
  Description of Artificial Sequence: Synthetic oligonucleotide
uaaguucuggggccuuucu

SEQ ID NO: 2977933 - RNA, 19 nt, Artificial Sequence
  Description of Artificial Sequence: Synthetic oligonucleotide
ugucaacugcaagaugagc

SEQ ID NO: 2977934 - RNA, 19 nt, Artificial Sequence
  Description of Artificial Sequence: Synthetic oligonucleotide
aauccgccaauucccuggu

SEQ ID NO: 2977935 - RNA, 19 nt, Artificial Sequence
  Description of Artificial Sequence: Synthetic oligonucleotide
caauguucuugaggaagcg

SEQ ID NO: 2977936 - RNA, 19 nt, Artificial Sequence
  Description of Artificial Sequence: Synthetic oligonucleotide
auugucaccccaagcagug

SEQ ID NO: 2977937 - RNA, 19 nt, Artificial Sequence
  Description of Artificial Sequence: Synthetic oligonucleotide
caaaagcaauacaauagua

SEQ ID NO: 2977938 - RNA, 19 nt, Artificial Sequence
  Description of Artificial Sequence: Synthetic oligonucleotide
ucuguuccccagccaaugu

SEQ ID NO: 2977939 - RNA, 19 nt, Artificial Sequence
  Description of Artificial Sequence: Synthetic oligonucleotide
gucacgauggcaauaguaa

SEQ ID NO: 2977940 - RNA, 19 nt, Artificial Sequence
  Description of Artificial Sequence: Synthetic oligonucleotide
aucacaguucuuacagauc

SEQ ID NO: 2977941 - RNA, 19 nt, Artificial Sequence
  Description of Artificial Sequence: Synthetic oligonucleotide
ccaauguucuugaggaagc

SEQ ID NO: 2977942 - RNA, 19 nt, Artificial Sequence
  Description of Artificial Sequence: Synthetic oligonucleotide
cuuacagaucgaauaaggu

SEQ ID NO: 2977943 - RNA, 19 nt, Artificial Sequence
  Description of Artificial Sequence: Synthetic oligonucleotide
agcgugaaggccauuguca

SEQ ID NO: 2977944 - RNA, 19 nt, Artificial Sequence
  Description of Artificial Sequence: Synthetic oligonucleotide
uccccagccaauguucuug

SEQ ID NO: 2977945 - RNA, 19 nt, Artificial Sequence
  Description of Artificial Sequence: Synthetic oligonucleotide
agguucauuaguugagauu

SEQ ID NO: 2977946 - RNA, 19 nt, Artificial Sequence
  Description of Artificial Sequence: Synthetic oligonucleotide
uucuugaggaagcgcuccu

SEQ ID NO: 2977947 - RNA, 19 nt, Artificial Sequence
  Description of Artificial Sequence: Synthetic oligonucleotide
uuaauuccuggcuccucuc

SEQ ID NO: 2977948 - RNA, 19 nt, Artificial Sequence
  Description of Artificial Sequence: Synthetic oligonucleotide
ggcguucacgcacagcagg

SEQ ID NO: 2977949 - RNA, 19 nt, Artificial Sequence
  Description of Artificial Sequence: Synthetic oligonucleotide
cagcagggaauacagcgug

SEQ ID NO: 2977950 - RNA, 19 nt, Artificial Sequence
  Description of Artificial Sequence: Synthetic oligonucleotide
ucuccgaauccgccaauuc

SEQ ID NO: 2977951 - RNA, 19 nt, Artificial Sequence
  Description of Artificial Sequence: Synthetic oligonucleotide
guucagccaaauaacaaaa

SEQ ID NO: 2977952 - RNA, 19 nt, Artificial Sequence
  Description of Artificial Sequence: Synthetic oligonucleotide
ccaaauaacaaaagcaaua

SEQ ID NO: 2977953 - RNA, 19 nt, Artificial Sequence
  Description of Artificial Sequence: Synthetic oligonucleotide
ucaacggcacucucaucac

SEQ ID NO: 2977954 - RNA, 19 nt, Artificial Sequence
  Description of Artificial Sequence: Synthetic oligonucleotide
aaguucuggggccuuucuu

SEQ ID NO: 2977955 - RNA, 19 nt, Artificial Sequence
  Description of Artificial Sequence: Synthetic oligonucleotide
caauaguaacugaguuuac

SEQ ID NO: 2977956 - RNA, 19 nt, Artificial Sequence
  Description of Artificial Sequence: Synthetic oligonucleotide
guaacugaguuuacuauua

SEQ ID NO: 2977957 - RNA, 19 nt, Artificial Sequence
  Description of Artificial Sequence: Synthetic oligonucleotide
gccaauguucuugaggaag

SEQ ID NO: 2977958 - RNA, 19 nt, Artificial Sequence
  Description of Artificial Sequence: Synthetic oligonucleotide
guucuugaggaagcgcucc

SEQ ID NO: 2977959 - RNA, 19 nt, Artificial Sequence
  Description of Artificial Sequence: Synthetic oligonucleotide
aauacagcgugaaggccau

SEQ ID NO: 2977960 - RNA, 19 nt, Artificial Sequence
  Description of Artificial Sequence: Synthetic oligonucleotide
ccagccaauguucuugagg

SEQ ID NO: 2977961 - RNA, 19 nt, Artificial Sequence
  Description of Artificial Sequence: Synthetic oligonucleotide
acaguucuuacagaucgaa

SEQ ID NO: 2977962 - RNA, 19 nt, Artificial Sequence
  Description of Artificial Sequence: Synthetic oligonucleotide
auaguaaguucuggggccu

SEQ ID NO: 2977963 - RNA, 19 nt, Artificial Sequence
  Description of Artificial Sequence: Synthetic oligonucleotide
auggcaauaguaaguucug

SEQ ID NO: 2977964 - RNA, 19 nt, Artificial Sequence
  Description of Artificial Sequence: Synthetic oligonucleotide
agcagggccgccugcagca

SEQ ID NO: 2977965 - RNA, 19 nt, Artificial Sequence
  Description of Artificial Sequence: Synthetic oligonucleotide
uccucuccgaauccgccaa

SEQ ID NO: 2977966 - RNA, 19 nt, Artificial Sequence
  Description of Artificial Sequence: Synthetic oligonucleotide
cugacuccuucccggacgc

SEQ ID NO: 2977967 - RNA, 19 nt, Artificial Sequence
  Description of Artificial Sequence: Synthetic oligonucleotide
acuccuucccggacgcugc

SEQ ID NO: 2977968 - RNA, 19 nt, Artificial Sequence
  Description of Artificial Sequence: Synthetic oligonucleotide
uugaggaagcgcuccucgu

SEQ ID NO: 2977969 - RNA, 19 nt, Artificial Sequence
  Description of Artificial Sequence: Synthetic oligonucleotide
gguucauuaguugagauuu

SEQ ID NO: 2977970 - RNA, 19 nt, Artificial Sequence
  Description of Artificial Sequence: Synthetic oligonucleotide
agccugcuaaaacaugaau

SEQ ID NO: 2977971 - RNA, 19 nt, Artificial Sequence
  Description of Artificial Sequence: Synthetic oligonucleotide
acgauggcaauaguaaguu

SEQ ID NO: 2977972 - RNA, 19 nt, Artificial Sequence
  Description of Artificial Sequence: Synthetic oligonucleotide
ucaccccaagcagugccgg

SEQ ID NO: 2977973 - RNA, 19 nt, Artificial Sequence
  Description of Artificial Sequence: Synthetic oligonucleotide
gucucugauuucccaauga

SEQ ID NO: 2977974 - RNA, 19 nt, Artificial Sequence
  Description of Artificial Sequence: Synthetic oligonucleotide
ucccaaugauguucagcca

SEQ ID NO: 2977975 - RNA, 19 nt, Artificial Sequence
  Description of Artificial Sequence: Synthetic oligonucleotide
aguugagauuuaauuccug

SEQ ID NO: 2977976 - RNA, 19 nt, Artificial Sequence
  Description of Artificial Sequence: Synthetic oligonucleotide
auuucccaaugauguucag

SEQ ID NO: 2977977 - RNA, 19 nt, Artificial Sequence
  Description of Artificial Sequence: Synthetic oligonucleotide
aagcgcuccucgugcagca

SEQ ID NO: 2977978 - RNA, 19 nt, Artificial Sequence
  Description of Artificial Sequence: Synthetic oligonucleotide
cuccucgugcagcacggcg

SEQ ID NO: 2977979 - RNA, 19 nt, Artificial Sequence
  Description of Artificial Sequence: Synthetic oligonucleotide
ugccggacugacuccuucc

SEQ ID NO: 2977980 - RNA, 19 nt, Artificial Sequence
  Description of Artificial Sequence: Synthetic oligonucleotide
acagaucgaauaagguuca

SEQ ID NO: 2977981 - RNA, 19 nt, Artificial Sequence
  Description of Artificial Sequence: Synthetic oligonucleotide
accccaagcagugccggac

SEQ ID NO: 2977982 - RNA, 19 nt, Artificial Sequence
  Description of Artificial Sequence: Synthetic oligonucleotide
gaagcgcuccucgugcagc

SEQ ID NO: 2977983 - RNA, 19 nt, Artificial Sequence
  Description of Artificial Sequence: Synthetic oligonucleotide
auguucagccaaauaacaa

SEQ ID NO: 2977984 - RNA, 19 nt, Artificial Sequence
  Description of Artificial Sequence: Synthetic oligonucleotide
acagcgugaaggccauugu

SEQ ID NO: 2977985 - RNA, 19 nt, Artificial Sequence
  Description of Artificial Sequence: Synthetic oligonucleotide
gacuccuucccggacgcug

SEQ ID NO: 2977986 - RNA, 19 nt, Artificial Sequence
  Description of Artificial Sequence: Synthetic oligonucleotide
auuccuggcuccucuccga

SEQ ID NO: 2977987 - RNA, 19 nt, Artificial Sequence
  Description of Artificial Sequence: Synthetic oligonucleotide
aggccauugucaccccaag

SEQ ID NO: 2977988 - RNA, 19 nt, Artificial Sequence
  Description of Artificial Sequence: Synthetic oligonucleotide
caucacaguucuuacagau

SEQ ID NO: 2977989 - RNA, 19 nt, Artificial Sequence
  Description of Artificial Sequence: Synthetic oligonucleotide
cagggaauacagcgugaag

SEQ ID NO: 2977990 - RNA, 19 nt, Artificial Sequence
  Description of Artificial Sequence: Synthetic oligonucleotide
agucacgauggcaauagua

SEQ ID NO: 2977991 - RNA, 19 nt, Artificial Sequence
  Description of Artificial Sequence: Synthetic oligonucleotide
caagcagugccggacugac

SEQ ID NO: 2977992 - RNA, 19 nt, Artificial Sequence
  Description of Artificial Sequence: Synthetic oligonucleotide
cacgauggcaauaguaagu

SEQ ID NO: 2977993 - RNA, 19 nt, Artificial Sequence
  Description of Artificial Sequence: Synthetic oligonucleotide
ggcgauggcguucacgcac

SEQ ID NO: 2977994 - RNA, 19 nt, Artificial Sequence
  Description of Artificial Sequence: Synthetic oligonucleotide
agaucgaauaagguucauu

SEQ ID NO: 2977995 - RNA, 19 nt, Artificial Sequence
  Description of Artificial Sequence: Synthetic oligonucleotide
ucccuggucuguuccccag

SEQ ID NO: 2977996 - RNA, 19 nt, Artificial Sequence
  Description of Artificial Sequence: Synthetic oligonucleotide
cugagucucugauuuccca

SEQ ID NO: 2977997 - RNA, 19 nt, Artificial Sequence
  Description of Artificial Sequence: Synthetic oligonucleotide
uggcuccucuccgaauccg

SEQ ID NO: 2977998 - RNA, 19 nt, Artificial Sequence
  Description of Artificial Sequence: Synthetic oligonucleotide
gaugagccugcuaaaacau

SEQ ID NO: 2977999 - RNA, 19 nt, Artificial Sequence
  Description of Artificial Sequence: Synthetic oligonucleotide
ggaauacagcgugaaggcc

SEQ ID NO: 2978000 - RNA, 19 nt, Artificial Sequence
  Description of Artificial Sequence: Synthetic oligonucleotide
uucuggggccuuucuucug

SEQ ID NO: 2978001 - RNA, 19 nt, Artificial Sequence
  Description of Artificial Sequence: Synthetic oligonucleotide
ugaaggccauugucacccc

SEQ ID NO: 2978002 - RNA, 19 nt, Artificial Sequence
  Description of Artificial Sequence: Synthetic oligonucleotide
cagcgugaaggccauuguc

SEQ ID NO: 2978003 - RNA, 19 nt, Artificial Sequence
  Description of Artificial Sequence: Synthetic oligonucleotide
gucuguuccccagccaaug

SEQ ID NO: 2978004 - RNA, 19 nt, Artificial Sequence
  Description of Artificial Sequence: Synthetic oligonucleotide
gucaccccaagcagugccg

SEQ ID NO: 2978005 - RNA, 19 nt, Artificial Sequence
  Description of Artificial Sequence: Synthetic oligonucleotide
cuggcuccucuccgaaucc

SEQ ID NO: 2978006 - RNA, 19 nt, Artificial Sequence
  Description of Artificial Sequence: Synthetic oligonucleotide
caacugcaagaugagccug

SEQ ID NO: 2978007 - RNA, 19 nt, Artificial Sequence
  Description of Artificial Sequence: Synthetic oligonucleotide
ucacgcacagcagggccgc

SEQ ID NO: 2978008 - RNA, 19 nt, Artificial Sequence
  Description of Artificial Sequence: Synthetic oligonucleotide
cugcagcagggaauacagc

SEQ ID NO: 2978009 - RNA, 19 nt, Artificial Sequence
  Description of Artificial Sequence: Synthetic oligonucleotide
gcaauacaauaguaacuga

SEQ ID NO: 2978010 - RNA, 19 nt, Artificial Sequence
  Description of Artificial Sequence: Synthetic oligonucleotide
gauuuaauuccuggcuccu

SEQ ID NO: 2978011 - RNA, 19 nt, Artificial Sequence
  Description of Artificial Sequence: Synthetic oligonucleotide
gacugacuccuucccggac

SEQ ID NO: 2978012 - RNA, 19 nt, Artificial Sequence
  Description of Artificial Sequence: Synthetic oligonucleotide
gaaggccauugucacccca

SEQ ID NO: 2978013 - RNA, 19 nt, Artificial Sequence
  Description of Artificial Sequence: Synthetic oligonucleotide
cauugucaccccaagcagu

SEQ ID NO: 2978014 - RNA, 19 nt, Artificial Sequence
  Description of Artificial Sequence: Synthetic oligonucleotide
augagccugcuaaaacaug

SEQ ID NO: 2978015 - RNA, 19 nt, Artificial Sequence
  Description of Artificial Sequence: Synthetic oligonucleotide
uuccuggcuccucuccgaa

SEQ ID NO: 2978016 - RNA, 19 nt, Artificial Sequence
  Description of Artificial Sequence: Synthetic oligonucleotide
caagaugagccugcuaaaa

SEQ ID NO: 2978017 - RNA, 19 nt, Artificial Sequence
  Description of Artificial Sequence: Synthetic oligonucleotide
aggaagcgcuccucgugca

SEQ ID NO: 2978018 - RNA, 19 nt, Artificial Sequence
  Description of Artificial Sequence: Synthetic oligonucleotide
uucccggacgcugcccggg

SEQ ID NO: 2978019 - RNA, 19 nt, Artificial Sequence
  Description of Artificial Sequence: Synthetic oligonucleotide
uaucaacggcacucucauc

SEQ ID NO: 2978020 - RNA, 19 nt, Artificial Sequence
  Description of Artificial Sequence: Synthetic oligonucleotide
uuccagucacgauggcaau

SEQ ID NO: 2978021 - RNA, 19 nt, Artificial Sequence
  Description of Artificial Sequence: Synthetic oligonucleotide
gcgugaaggccauugucac

SEQ ID NO: 2978022 - RNA, 19 nt, Artificial Sequence
  Description of Artificial Sequence: Synthetic oligonucleotide
gagucucugauuucccaau

SEQ ID NO: 2978023 - RNA, 19 nt, Artificial Sequence
  Description of Artificial Sequence: Synthetic oligonucleotide
gccugcuaaaacaugaaua

SEQ ID NO: 2978024 - RNA, 19 nt, Artificial Sequence
  Description of Artificial Sequence: Synthetic oligonucleotide
gugcagcacggcgauggcg

SEQ ID NO: 2978025 - RNA, 19 nt, Artificial Sequence
  Description of Artificial Sequence: Synthetic oligonucleotide
cacaguucuuacagaucga

SEQ ID NO: 2978026 - RNA, 19 nt, Artificial Sequence
  Description of Artificial Sequence: Synthetic oligonucleotide
agccaauguucuugaggaa

SEQ ID NO: 2978027 - RNA, 19 nt, Artificial Sequence
  Description of Artificial Sequence: Synthetic oligonucleotide
uccagucacgauggcaaua

SEQ ID NO: 2978028 - RNA, 19 nt, Artificial Sequence
  Description of Artificial Sequence: Synthetic oligonucleotide
cacggcgauggcguucacg

SEQ ID NO: 2978029 - RNA, 19 nt, Artificial Sequence
  Description of Artificial Sequence: Synthetic oligonucleotide
cggacugacuccuucccgg

SEQ ID NO: 2978030 - RNA, 19 nt, Artificial Sequence
  Description of Artificial Sequence: Synthetic oligonucleotide
uugucaccccaagcagugc

SEQ ID NO: 2978031 - RNA, 19 nt, Artificial Sequence
  Description of Artificial Sequence: Synthetic oligonucleotide
ggcacucucaucacaguuc

SEQ ID NO: 2978032 - RNA, 19 nt, Artificial Sequence
  Description of Artificial Sequence: Synthetic oligonucleotide
cuucccggacgcugcccgg

SEQ ID NO: 2978033 - RNA, 19 nt, Artificial Sequence
  Description of Artificial Sequence: Synthetic oligonucleotide
guaaguucuggggccuuuc

SEQ ID NO: 2978034 - RNA, 19 nt, Artificial Sequence
  Description of Artificial Sequence: Synthetic oligonucleotide
cuggggccuuucuucugag

SEQ ID NO: 2978035 - RNA, 19 nt, Artificial Sequence
  Description of Artificial Sequence: Synthetic oligonucleotide
ccuggucuguuccccagcc

SEQ ID NO: 2978036 - RNA, 19 nt, Artificial Sequence
  Description of Artificial Sequence: Synthetic oligonucleotide
cuauuaucaacggcacucu

SEQ ID NO: 2978037 - RNA, 19 nt, Artificial Sequence
  Description of Artificial Sequence: Synthetic oligonucleotide
guucuggggccuuucuucu

SEQ ID NO: 2978038 - RNA, 19 nt, Artificial Sequence
  Description of Artificial Sequence: Synthetic oligonucleotide
uggggccuuucuucugagu

SEQ ID NO: 2978039 - RNA, 19 nt, Artificial Sequence
  Description of Artificial Sequence: Synthetic oligonucleotide
auccgccaauucccugguc

SEQ ID NO: 2978040 - RNA, 19 nt, Artificial Sequence
  Description of Artificial Sequence: Synthetic oligonucleotide
gcguucacgcacagcaggg

SEQ ID NO: 2978041 - RNA, 19 nt, Artificial Sequence
  Description of Artificial Sequence: Synthetic oligonucleotide
ccuggcuccucuccgaauc

SEQ ID NO: 2978042 - RNA, 19 nt, Artificial Sequence
  Description of Artificial Sequence: Synthetic oligonucleotide
cccaaugauguucagccaa

SEQ ID NO: 2978043 - RNA, 19 nt, Artificial Sequence
  Description of Artificial Sequence: Synthetic oligonucleotide
ggaagcgcuccucgugcag

SEQ ID NO: 2978044 - RNA, 19 nt, Artificial Sequence
  Description of Artificial Sequence: Synthetic oligonucleotide
cuccucuccgaauccgcca

SEQ ID NO: 2978045 - RNA, 19 nt, Artificial Sequence
  Description of Artificial Sequence: Synthetic oligonucleotide
gagccugcuaaaacaugaa

SEQ ID NO: 2978046 - RNA, 19 nt, Artificial Sequence
  Description of Artificial Sequence: Synthetic oligonucleotide
ccuucccggacgcugcccg

SEQ ID NO: 2978047 - RNA, 19 nt, Artificial Sequence
  Description of Artificial Sequence: Synthetic oligonucleotide
aguaaguucuggggccuuu

SEQ ID NO: 2978048 - RNA, 19 nt, Artificial Sequence
  Description of Artificial Sequence: Synthetic oligonucleotide
agcagggaauacagcguga

SEQ ID NO: 2978049 - RNA, 19 nt, Artificial Sequence
  Description of Artificial Sequence: Synthetic oligonucleotide
gcgcuccucgugcagcacg

SEQ ID NO: 2978050 - RNA, 19 nt, Artificial Sequence
  Description of Artificial Sequence: Synthetic oligonucleotide
caacggcacucucaucaca

SEQ ID NO: 2978051 - RNA, 19 nt, Artificial Sequence
  Description of Artificial Sequence: Synthetic oligonucleotide
gccggacugacuccuuccc

SEQ ID NO: 2978052 - RNA, 19 nt, Artificial Sequence
  Description of Artificial Sequence: Synthetic oligonucleotide
gcacucucaucacaguucu

SEQ ID NO: 2978053 - RNA, 19 nt, Artificial Sequence
  Description of Artificial Sequence: Synthetic oligonucleotide
gcaagaugagccugcuaaa

SEQ ID NO: 2978054 - RNA, 19 nt, Artificial Sequence
  Description of Artificial Sequence: Synthetic oligonucleotide
cuccuucccggacgcugcc

SEQ ID NO: 2978055 - RNA, 19 nt, Artificial Sequence
  Description of Artificial Sequence: Synthetic oligonucleotide
ucccggacgcugcccggga

SEQ ID NO: 2978056 - RNA, 19 nt, Artificial Sequence
  Description of Artificial Sequence: Synthetic oligonucleotide
uuccccagccaauguucuu

SEQ ID NO: 2978057 - RNA, 19 nt, Artificial Sequence
  Description of Artificial Sequence: Synthetic oligonucleotide
uccuggcuccucuccgaau

SEQ ID NO: 2978058 - RNA, 19 nt, Artificial Sequence
  Description of Artificial Sequence: Synthetic oligonucleotide
ggccuuucuucugagucuc

SEQ ID NO: 2978059 - RNA, 19 nt, Artificial Sequence
  Description of Artificial Sequence: Synthetic oligonucleotide
uccuucccggacgcugccc

SEQ ID NO: 2978060 - RNA, 19 nt, Artificial Sequence
  Description of Artificial Sequence: Synthetic oligonucleotide
guucauuaguugagauuua

SEQ ID NO: 2978061 - RNA, 19 nt, Artificial Sequence
  Description of Artificial Sequence: Synthetic oligonucleotide
aagcagugccggacugacu

SEQ ID NO: 2978062 - RNA, 19 nt, Artificial Sequence
  Description of Artificial Sequence: Synthetic oligonucleotide
gugccggacugacuccuuc

SEQ ID NO: 2978063 - RNA, 19 nt, Artificial Sequence
  Description of Artificial Sequence: Synthetic oligonucleotide
ccggacugacuccuucccg

SEQ ID NO: 2978064 - RNA, 19 nt, Artificial Sequence
  Description of Artificial Sequence: Synthetic oligonucleotide
gccaaauaacaaaagcaau

SEQ ID NO: 2978065 - RNA, 19 nt, Artificial Sequence
  Description of Artificial Sequence: Synthetic oligonucleotide
cgugaaggccauugucacc

SEQ ID NO: 2978066 - RNA, 19 nt, Artificial Sequence
  Description of Artificial Sequence: Synthetic oligonucleotide
agcgcuccucgugcagcac

SEQ ID NO: 2978067 - RNA, 19 nt, Artificial Sequence
  Description of Artificial Sequence: Synthetic oligonucleotide
caguucuuacagaucgaau

SEQ ID NO: 2978068 - RNA, 19 nt, Artificial Sequence
  Description of Artificial Sequence: Synthetic oligonucleotide
gcagugccggacugacucc

SEQ ID NO: 2978069 - RNA, 19 nt, Artificial Sequence
  Description of Artificial Sequence: Synthetic oligonucleotide
ggacugacuccuucccgga

SEQ ID NO: 2978070 - RNA, 19 nt, Artificial Sequence
  Description of Artificial Sequence: Synthetic oligonucleotide
ccaaugauguucagccaaa

SEQ ID NO: 2978071 - RNA, 19 nt, Artificial Sequence
  Description of Artificial Sequence: Synthetic oligonucleotide
ccaauucccuggucuguuc

SEQ ID NO: 2978072 - RNA, 19 nt, Artificial Sequence
  Description of Artificial Sequence: Synthetic oligonucleotide
cgaauaagguucauuaguu

SEQ ID NO: 2978073 - RNA, 19 nt, Artificial Sequence
  Description of Artificial Sequence: Synthetic oligonucleotide
ccgccaauucccuggucug

SEQ ID NO: 2978074 - RNA, 19 nt, Artificial Sequence
  Description of Artificial Sequence: Synthetic oligonucleotide
gcuccucuccgaauccgcc

SEQ ID NO: 2978075 - RNA, 19 nt, Artificial Sequence
  Description of Artificial Sequence: Synthetic oligonucleotide
cugauuucccaaugauguu

SEQ ID NO: 2978076 - RNA, 19 nt, Artificial Sequence
  Description of Artificial Sequence: Synthetic oligonucleotide
cuggucuguuccccagcca

SEQ ID NO: 2978077 - RNA, 19 nt, Artificial Sequence
  Description of Artificial Sequence: Synthetic oligonucleotide
gcagggaauacagcgugaa

SEQ ID NO: 2978078 - RNA, 19 nt, Artificial Sequence
  Description of Artificial Sequence: Synthetic oligonucleotide
ggcuccucuccgaauccgc

SEQ ID NO: 2978079 - RNA, 19 nt, Artificial Sequence
  Description of Artificial Sequence: Synthetic oligonucleotide
ccggacgcugcccgggacg

SEQ ID NO: 2978080 - RNA, 19 nt, Artificial Sequence
  Description of Artificial Sequence: Synthetic oligonucleotide
guuccccagccaauguucu

SEQ ID NO: 2978081 - RNA, 19 nt, Artificial Sequence
  Description of Artificial Sequence: Synthetic oligonucleotide
acgcacagcagggccgccu

SEQ ID NO: 2978082 - RNA, 19 nt, Artificial Sequence
  Description of Artificial Sequence: Synthetic oligonucleotide
gggccuuucuucugagucu

SEQ ID NO: 2978083 - RNA, 19 nt, Artificial Sequence
  Description of Artificial Sequence: Synthetic oligonucleotide
cgcuccucgugcagcacgg

SEQ ID NO: 2978084 - RNA, 19 nt, Artificial Sequence
  Description of Artificial Sequence: Synthetic oligonucleotide
cgauggcaauaguaaguuc

SEQ ID NO: 2978085 - RNA, 19 nt, Artificial Sequence
  Description of Artificial Sequence: Synthetic oligonucleotide
cugcuaaaacaugaauauu

SEQ ID NO: 2978086 - RNA, 19 nt, Artificial Sequence
  Description of Artificial Sequence: Synthetic oligonucleotide
ugacuccuucccggacgcu

SEQ ID NO: 2978087 - RNA, 19 nt, Artificial Sequence
  Description of Artificial Sequence: Synthetic oligonucleotide
cccaagcagugccggacug

SEQ ID NO: 2978088 - RNA, 19 nt, Artificial Sequence
  Description of Artificial Sequence: Synthetic oligonucleotide
caaugauguucagccaaau

SEQ ID NO: 2978089 - RNA, 19 nt, Artificial Sequence
  Description of Artificial Sequence: Synthetic oligonucleotide
cgaauccgccaauucccug

SEQ ID NO: 2978090 - RNA, 19 nt, Artificial Sequence
  Description of Artificial Sequence: Synthetic oligonucleotide
cuguuccccagccaauguu

SEQ ID NO: 2978091 - RNA, 19 nt, Artificial Sequence
  Description of Artificial Sequence: Synthetic oligonucleotide
caccccaagcagugccgga

SEQ ID NO: 2978092 - RNA, 19 nt, Artificial Sequence
  Description of Artificial Sequence: Synthetic oligonucleotide
gcagcagggaauacagcgu

SEQ ID NO: 2978093 - RNA, 19 nt, Artificial Sequence
  Description of Artificial Sequence: Synthetic oligonucleotide
cugcaagaugagccugcua

SEQ ID NO: 2978094 - RNA, 19 nt, Artificial Sequence
  Description of Artificial Sequence: Synthetic oligonucleotide
cguucacgcacagcagggc

SEQ ID NO: 2978095 - RNA, 19 nt, Artificial Sequence
  Description of Artificial Sequence: Synthetic oligonucleotide
gcacagcagggccgccugc

SEQ ID NO: 2978096 - RNA, 19 nt, Artificial Sequence
  Description of Artificial Sequence: Synthetic oligonucleotide
cucgugcagcacggcgaug

SEQ ID NO: 2978097 - RNA, 19 nt, Artificial Sequence
  Description of Artificial Sequence: Synthetic oligonucleotide
gcgauggcguucacgcaca

SEQ ID NO: 2978098 - RNA, 19 nt, Artificial Sequence
  Description of Artificial Sequence: Synthetic oligonucleotide
cacgcacagcagggccgcc

SEQ ID NO: 2978099 - RNA, 19 nt, Artificial Sequence
  Description of Artificial Sequence: Synthetic oligonucleotide
agugccggacugacuccuu

SEQ ID NO: 2978100 - RNA, 19 nt, Artificial Sequence
  Description of Artificial Sequence: Synthetic oligonucleotide
cagugccggacugacuccu

SEQ ID NO: 2978101 - RNA, 19 nt, Artificial Sequence
  Description of Artificial Sequence: Synthetic oligonucleotide
cgugcagcacggcgauggc

SEQ ID NO: 2978102 - RNA, 19 nt, Artificial Sequence
  Description of Artificial Sequence: Synthetic oligonucleotide
ccaagcagugccggacuga

SEQ ID NO: 2978103 - RNA, 19 nt, Artificial Sequence
  Description of Artificial Sequence: Synthetic oligonucleotide
ggccgccugcagcagggaa

SEQ ID NO: 2978104 - RNA, 19 nt, Artificial Sequence
  Description of Artificial Sequence: Synthetic oligonucleotide
cucuccgaauccgccaauu

SEQ ID NO: 2978105 - RNA, 19 nt, Artificial Sequence
  Description of Artificial Sequence: Synthetic oligonucleotide
auacagcgugaaggccauu

SEQ ID NO: 2978106 - RNA, 19 nt, Artificial Sequence
  Description of Artificial Sequence: Synthetic oligonucleotide
ccgaauccgccaauucccu

SEQ ID NO: 2978107 - RNA, 19 nt, Artificial Sequence
  Description of Artificial Sequence: Synthetic oligonucleotide
gcuccucgugcagcacggc

SEQ ID NO: 2978108 - RNA, 19 nt, Artificial Sequence
  Description of Artificial Sequence: Synthetic oligonucleotide
cgauggcguucacgcacag

SEQ ID NO: 2978109 - RNA, 19 nt, Artificial Sequence
  Description of Artificial Sequence: Synthetic oligonucleotide
cagaucgaauaagguucau

SEQ ID NO: 2978110 - RNA, 19 nt, Artificial Sequence
  Description of Artificial Sequence: Synthetic oligonucleotide
ggucuguuccccagccaau

SEQ ID NO: 2978111 - RNA, 19 nt, Artificial Sequence
  Description of Artificial Sequence: Synthetic oligonucleotide
gccaauucccuggucuguu

SEQ ID NO: 2978112 - RNA, 19 nt, Artificial Sequence
  Description of Artificial Sequence: Synthetic oligonucleotide
cccggacgcugcccgggac

SEQ ID NO: 2978113 - RNA, 19 nt, Artificial Sequence
  Description of Artificial Sequence: Synthetic oligonucleotide
cacucucaucacaguucuu

SEQ ID NO: 2978114 - RNA, 19 nt, Artificial Sequence
  Description of Artificial Sequence: Synthetic oligonucleotide
gccgccugcagcagggaau

SEQ ID NO: 2978115 - RNA, 19 nt, Artificial Sequence
  Description of Artificial Sequence: Synthetic oligonucleotide
ggacgcugcccgggacgug

SEQ ID NO: 2978116 - RNA, 19 nt, Artificial Sequence
  Description of Artificial Sequence: Synthetic oligonucleotide
ccccaagcagugccggacu

SEQ ID NO: 2978117 - RNA, 19 nt, Artificial Sequence
  Description of Artificial Sequence: Synthetic oligonucleotide
ccucgugcagcacggcgau

SEQ ID NO: 2978118 - RNA, 19 nt, Artificial Sequence
  Description of Artificial Sequence: Synthetic oligonucleotide
gccuuucuucugagucucu

SEQ ID NO: 2978119 - RNA, 19 nt, Artificial Sequence
  Description of Artificial Sequence: Synthetic oligonucleotide
cggcacucucaucacaguu

SEQ ID NO: 2978120 - RNA, 19 nt, Artificial Sequence
  Description of Artificial Sequence: Synthetic oligonucleotide
cggcgauggcguucacgca

SEQ ID NO: 2978121 - RNA, 19 nt, Artificial Sequence
  Description of Artificial Sequence: Synthetic oligonucleotide
gcagcacggcgauggcguu

SEQ ID NO: 2978122 - RNA, 19 nt, Artificial Sequence
  Description of Artificial Sequence: Synthetic oligonucleotide
gcacggcgauggcguucac

SEQ ID NO: 2978123 - RNA, 19 nt, Artificial Sequence
  Description of Artificial Sequence: Synthetic oligonucleotide
gggccgccugcagcaggga

SEQ ID NO: 2978124 - RNA, 19 nt, Artificial Sequence
  Description of Artificial Sequence: Synthetic oligonucleotide
cgccaauucccuggucugu

SEQ ID NO: 2978125 - RNA, 19 nt, Artificial Sequence
  Description of Artificial Sequence: Synthetic oligonucleotide
ccucuccgaauccgccaau

SEQ ID NO: 2978126 - RNA, 19 nt, Artificial Sequence
  Description of Artificial Sequence: Synthetic oligonucleotide
cggacgcugcccgggacgu

SEQ ID NO: 2978127 - RNA, 19 nt, Artificial Sequence
  Description of Artificial Sequence: Synthetic oligonucleotide
  modified_base (14)..(14): a, c, u, g, unknown or other
auggauucuguccngaagu

SEQ ID NO: 2978128 - RNA, 19 nt, Artificial Sequence
  Description of Artificial Sequence: Synthetic oligonucleotide
uaggagucagugaugaacc

SEQ ID NO: 2978129 - RNA, 19 nt, Artificial Sequence
  Description of Artificial Sequence: Synthetic oligonucleotide
ucagugaugaaccgcuucc

SEQ ID NO: 2978130 - RNA, 19 nt, Artificial Sequence
  Description of Artificial Sequence: Synthetic oligonucleotide
agagugugucuucagcacc

SEQ ID NO: 2978131 - RNA, 19 nt, Artificial Sequence
  Description of Artificial Sequence: Synthetic oligonucleotide
ucagaguggguagagaugc

SEQ ID NO: 2978132 - RNA, 19 nt, Artificial Sequence
  Description of Artificial Sequence: Synthetic oligonucleotide
aagcccaucugcucugccc

SEQ ID NO: 2978133 - RNA, 19 nt, Artificial Sequence
  Description of Artificial Sequence: Synthetic oligonucleotide
guucuugguggcuaggagg

SEQ ID NO: 2978134 - RNA, 19 nt, Artificial Sequence
  Description of Artificial Sequence: Synthetic oligonucleotide
auccgugugauaccugugc

SEQ ID NO: 2978135 - RNA, 19 nt, Artificial Sequence
  Description of Artificial Sequence: Synthetic oligonucleotide
  modified_base (5)..(5): a, c, u, g, unknown or other
guccngaaguucuuggugg

SEQ ID NO: 2978136 - RNA, 19 nt, Artificial Sequence
  Description of Artificial Sequence: Synthetic oligonucleotide
ucagagugugucuucagca

SEQ ID NO: 2978137 - RNA, 19 nt, Artificial Sequence
  Description of Artificial Sequence: Synthetic oligonucleotide
  modified_base (8)..(8): a, c, u, g, unknown or other
ucuguccngaaguucuugg

SEQ ID NO: 2978138 - RNA, 19 nt, Artificial Sequence
  Description of Artificial Sequence: Synthetic oligonucleotide
ugaugaaccgcuuccggcc

SEQ ID NO: 2978139 - RNA, 19 nt, Artificial Sequence
  Description of Artificial Sequence: Synthetic oligonucleotide
ucuucuucacaacagggua

SEQ ID NO: 2978140 - RNA, 19 nt, Artificial Sequence
  Description of Artificial Sequence: Synthetic oligonucleotide
  modified_base (6)..(6): a, c, u, g, unknown or other
uguccngaaguucuuggug

SEQ ID NO: 2978141 - RNA, 19 nt, Artificial Sequence
  Description of Artificial Sequence: Synthetic oligonucleotide
gaugccagaggcugaauug

SEQ ID NO: 2978142 - RNA, 19 nt, Artificial Sequence
  Description of Artificial Sequence: Synthetic oligonucleotide
ugauaccugugcaaggccc

SEQ ID NO: 2978143 - RNA, 19 nt, Artificial Sequence
  Description of Artificial Sequence: Synthetic oligonucleotide
uucagagugugucuucagc

SEQ ID NO: 2978144 - RNA, 19 nt, Artificial Sequence
  Description of Artificial Sequence: Synthetic oligonucleotide
ugugauaccugugcaaggc

SEQ ID NO: 2978145 - RNA, 19 nt, Artificial Sequence
  Description of Artificial Sequence: Synthetic oligonucleotide
uucuugguggcuaggaggu

SEQ ID NO: 2978146 - RNA, 19 nt, Artificial Sequence
  Description of Artificial Sequence: Synthetic oligonucleotide
uucuucacaacaggguagg

SEQ ID NO: 2978147 - RNA, 19 nt, Artificial Sequence
  Description of Artificial Sequence: Synthetic oligonucleotide
aacaggguaggagucagug

SEQ ID NO: 2978148 - RNA, 19 nt, Artificial Sequence
  Description of Artificial Sequence: Synthetic oligonucleotide
agugaugaaccgcuuccgg

SEQ ID NO: 2978149 - RNA, 19 nt, Artificial Sequence
  Description of Artificial Sequence: Synthetic oligonucleotide
auggcggccacccaggcag

SEQ ID NO: 2978150 - RNA, 19 nt, Artificial Sequence
  Description of Artificial Sequence: Synthetic oligonucleotide
ugugucuucagcaccuggu

SEQ ID NO: 2978151 - RNA, 19 nt, Artificial Sequence
  Description of Artificial Sequence: Synthetic oligonucleotide
aggucaaacugccucagca

SEQ ID NO: 2978152 - RNA, 19 nt, Artificial Sequence
  Description of Artificial Sequence: Synthetic oligonucleotide
ugucuucagcaccuggugc

SEQ ID NO: 2978153 - RNA, 19 nt, Artificial Sequence
  Description of Artificial Sequence: Synthetic oligonucleotide
cuggugcaccucuagaggg

SEQ ID NO: 2978154 - RNA, 19 nt, Artificial Sequence
  Description of Artificial Sequence: Synthetic oligonucleotide
cugugcaaggcccauacug

SEQ ID NO: 2978155 - RNA, 19 nt, Artificial Sequence
  Description of Artificial Sequence: Synthetic oligonucleotide
cuucuccuagcucuggugc

SEQ ID NO: 2978156 - RNA, 19 nt, Artificial Sequence
  Description of Artificial Sequence: Synthetic oligonucleotide
uggguagagaugccagagg

SEQ ID NO: 2978157 - RNA, 19 nt, Artificial Sequence
  Description of Artificial Sequence: Synthetic oligonucleotide
guagagaugccagaggcug

SEQ ID NO: 2978158 - RNA, 19 nt, Artificial Sequence
  Description of Artificial Sequence: Synthetic oligonucleotide
ugugcuuccuccuggcuga

SEQ ID NO: 2978159 - RNA, 19 nt, Artificial Sequence
  Description of Artificial Sequence: Synthetic oligonucleotide
accuggugcaccucuagag

SEQ ID NO: 2978160 - RNA, 19 nt, Artificial Sequence
  Description of Artificial Sequence: Synthetic oligonucleotide
guaggagucagugaugaac

SEQ ID NO: 2978161 - RNA, 19 nt, Artificial Sequence
  Description of Artificial Sequence: Synthetic oligonucleotide
ucccucuucuucacaacag

SEQ ID NO: 2978162 - RNA, 19 nt, Artificial Sequence
  Description of Artificial Sequence: Synthetic oligonucleotide
uaggaggugucaagggaag

SEQ ID NO: 2978163 - RNA, 19 nt, Artificial Sequence
  Description of Artificial Sequence: Synthetic oligonucleotide
agaggcugaauuggaagcg

SEQ ID NO: 2978164 - RNA, 19 nt, Artificial Sequence
  Description of Artificial Sequence: Synthetic oligonucleotide
  modified_base (4)..(4): a, c, u, g, unknown or other
uccngaaguucuugguggc

SEQ ID NO: 2978165 - RNA, 19 nt, Artificial Sequence
  Description of Artificial Sequence: Synthetic oligonucleotide
aguucuugguggcuaggag

SEQ ID NO: 2978166 - RNA, 19 nt, Artificial Sequence
  Description of Artificial Sequence: Synthetic oligonucleotide
aaccgcuuccggcccaugg

SEQ ID NO: 2978167 - RNA, 19 nt, Artificial Sequence
  Description of Artificial Sequence: Synthetic oligonucleotide
ucuggugccagcucccucu

SEQ ID NO: 2978168 - RNA, 19 nt, Artificial Sequence
  Description of Artificial Sequence: Synthetic oligonucleotide
  modified_base (15)..(15): a, c, u, g, unknown or other
cauggauucuguccngaag

SEQ ID NO: 2978169 - RNA, 19 nt, Artificial Sequence
  Description of Artificial Sequence: Synthetic oligonucleotide
uggugcaccucuagagggg

SEQ ID NO: 2978170 - RNA, 19 nt, Artificial Sequence
  Description of Artificial Sequence: Synthetic oligonucleotide
ucuucuccuagcucuggug

SEQ ID NO: 2978171 - RNA, 19 nt, Artificial Sequence
  Description of Artificial Sequence: Synthetic oligonucleotide
gugaugaaccgcuuccggc

SEQ ID NO: 2978172 - RNA, 19 nt, Artificial Sequence
  Description of Artificial Sequence: Synthetic oligonucleotide
accgcuuccggcccauggc

SEQ ID NO: 2978173 - RNA, 19 nt, Artificial Sequence
  Description of Artificial Sequence: Synthetic oligonucleotide
ggguagagaugccagaggc

SEQ ID NO: 2978174 - RNA, 19 nt, Artificial Sequence
  Description of Artificial Sequence: Synthetic oligonucleotide
gguggaaccucagaguggg

SEQ ID NO: 2978175 - RNA, 19 nt, Artificial Sequence
  Description of Artificial Sequence: Synthetic oligonucleotide
uccgugugauaccugugca

SEQ ID NO: 2978176 - RNA, 19 nt, Artificial Sequence
  Description of Artificial Sequence: Synthetic oligonucleotide
gaugaaccgcuuccggccc

SEQ ID NO: 2978177 - RNA, 19 nt, Artificial Sequence
  Description of Artificial Sequence: Synthetic oligonucleotide
aggagucagugaugaaccg

SEQ ID NO: 2978178 - RNA, 19 nt, Artificial Sequence
  Description of Artificial Sequence: Synthetic oligonucleotide
  modified_base (11)..(11): a, c, u, g, unknown or other
gauucuguccngaaguucu

SEQ ID NO: 2978179 - RNA, 19 nt, Artificial Sequence
  Description of Artificial Sequence: Synthetic oligonucleotide
uggcuaggaggugucaagg

SEQ ID NO: 2978180 - RNA, 19 nt, Artificial Sequence
  Description of Artificial Sequence: Synthetic oligonucleotide
agcucccucuugcugugcc

SEQ ID NO: 2978181 - RNA, 19 nt, Artificial Sequence
  Description of Artificial Sequence: Synthetic oligonucleotide
ugccucagcagcuccagcu

SEQ ID NO: 2978182 - RNA, 19 nt, Artificial Sequence
  Description of Artificial Sequence: Synthetic oligonucleotide
augccagaggcugaauugg

SEQ ID NO: 2978183 - RNA, 19 nt, Artificial Sequence
  Description of Artificial Sequence: Synthetic oligonucleotide
agcugugcuuccuccuggc

SEQ ID NO: 2978184 - RNA, 19 nt, Artificial Sequence
  Description of Artificial Sequence: Synthetic oligonucleotide
aucugcucugcccgaugcc

SEQ ID NO: 2978185 - RNA, 19 nt, Artificial Sequence
  Description of Artificial Sequence: Synthetic oligonucleotide
gugugauaccugugcaagg

SEQ ID NO: 2978186 - RNA, 19 nt, Artificial Sequence
  Description of Artificial Sequence: Synthetic oligonucleotide
auacugccaggccagguca

SEQ ID NO: 2978187 - RNA, 19 nt, Artificial Sequence
  Description of Artificial Sequence: Synthetic oligonucleotide
ucacaacaggguaggaguc

SEQ ID NO: 2978188 - RNA, 19 nt, Artificial Sequence
  Description of Artificial Sequence: Synthetic oligonucleotide
gaggcugaauuggaagcgg

SEQ ID NO: 2978189 - RNA, 19 nt, Artificial Sequence
  Description of Artificial Sequence: Synthetic oligonucleotide
caggccaggucaaacugcc

SEQ ID NO: 2978190 - RNA, 19 nt, Artificial Sequence
  Description of Artificial Sequence: Synthetic oligonucleotide
uucuccuagcucuggugcc

SEQ ID NO: 2978191 - RNA, 19 nt, Artificial Sequence
  Description of Artificial Sequence: Synthetic oligonucleotide
aaguucuugguggcuagga

SEQ ID NO: 2978192 - RNA, 19 nt, Artificial Sequence
  Description of Artificial Sequence: Synthetic oligonucleotide
aaaacccggguggaaccuc

SEQ ID NO: 2978193 - RNA, 19 nt, Artificial Sequence
  Description of Artificial Sequence: Synthetic oligonucleotide
cucagaguggguagagaug

SEQ ID NO: 2978194 - RNA, 19 nt, Artificial Sequence
  Description of Artificial Sequence: Synthetic oligonucleotide
cuggcugagggacugggug

SEQ ID NO: 2978195 - RNA, 19 nt, Artificial Sequence
  Description of Artificial Sequence: Synthetic oligonucleotide
uucaagcccaucugcucug

SEQ ID NO: 2978196 - RNA, 19 nt, Artificial Sequence
  Description of Artificial Sequence: Synthetic oligonucleotide
ggaaccucagaguggguag

SEQ ID NO: 2978197 - RNA, 19 nt, Artificial Sequence
  Description of Artificial Sequence: Synthetic oligonucleotide
cauacugccaggccagguc

SEQ ID NO: 2978198 - RNA, 19 nt, Artificial Sequence
  Description of Artificial Sequence: Synthetic oligonucleotide
acaacaggguaggagucag

SEQ ID NO: 2978199 - RNA, 19 nt, Artificial Sequence
  Description of Artificial Sequence: Synthetic oligonucleotide
ggucaaacugccucagcag

SEQ ID NO: 2978200 - RNA, 19 nt, Artificial Sequence
  Description of Artificial Sequence: Synthetic oligonucleotide
gaguggguagagaugccag

SEQ ID NO: 2978201 - RNA, 19 nt, Artificial Sequence
  Description of Artificial Sequence: Synthetic oligonucleotide
aggcccauacugccaggcc

SEQ ID NO: 2978202 - RNA, 19 nt, Artificial Sequence
  Description of Artificial Sequence: Synthetic oligonucleotide
ucugcucugcccgaugcca

SEQ ID NO: 2978203 - RNA, 19 nt, Artificial Sequence
  Description of Artificial Sequence: Synthetic oligonucleotide
guggguagagaugccagag

SEQ ID NO: 2978204 - RNA, 19 nt, Artificial Sequence
  Description of Artificial Sequence: Synthetic oligonucleotide
caucugcucugcccgaugc

SEQ ID NO: 2978205 - RNA, 19 nt, Artificial Sequence
  Description of Artificial Sequence: Synthetic oligonucleotide
gugucuucagcaccuggug

SEQ ID NO: 2978206 - RNA, 19 nt, Artificial Sequence
  Description of Artificial Sequence: Synthetic oligonucleotide
  modified_base (13)..(13): a, c, u, g, unknown or other
uggauucuguccngaaguu

SEQ ID NO: 2978207 - RNA, 19 nt, Artificial Sequence
  Description of Artificial Sequence: Synthetic oligonucleotide
cuaggaggugucaagggaa

SEQ ID NO: 2978208 - RNA, 19 nt, Artificial Sequence
  Description of Artificial Sequence: Synthetic oligonucleotide
ccucuucuucacaacaggg

SEQ ID NO: 2978209 - RNA, 19 nt, Artificial Sequence
  Description of Artificial Sequence: Synthetic oligonucleotide
guggcuaggaggugucaag

SEQ ID NO: 2978210 - RNA, 19 nt, Artificial Sequence
  Description of Artificial Sequence: Synthetic oligonucleotide
aaccucagaguggguagag

SEQ ID NO: 2978211 - RNA, 19 nt, Artificial Sequence
  Description of Artificial Sequence: Synthetic oligonucleotide
gugauaccugugcaaggcc

SEQ ID NO: 2978212 - RNA, 19 nt, Artificial Sequence
  Description of Artificial Sequence: Synthetic oligonucleotide
agaugccagaggcugaauu

SEQ ID NO: 2978213 - RNA, 19 nt, Artificial Sequence
  Description of Artificial Sequence: Synthetic oligonucleotide
  modified_base (9)..(9): a, c, u, g, unknown or other
uucuguccngaaguucuug

SEQ ID NO: 2978214 - RNA, 19 nt, Artificial Sequence
  Description of Artificial Sequence: Synthetic oligonucleotide
ugccagaggcugaauugga

SEQ ID NO: 2978215 - RNA, 19 nt, Artificial Sequence
  Description of Artificial Sequence: Synthetic oligonucleotide
ugccaggccaggucaaacu

SEQ ID NO: 2978216 - RNA, 19 nt, Artificial Sequence
  Description of Artificial Sequence: Synthetic oligonucleotide
guucagagugugucuucag

SEQ ID NO: 2978217 - RNA, 19 nt, Artificial Sequence
  Description of Artificial Sequence: Synthetic oligonucleotide
gugugucuucagcaccugg

SEQ ID NO: 2978218 - RNA, 19 nt, Artificial Sequence
  Description of Artificial Sequence: Synthetic oligonucleotide
acaggguaggagucaguga

SEQ ID NO: 2978219 - RNA, 19 nt, Artificial Sequence
  Description of Artificial Sequence: Synthetic oligonucleotide
ucugcccgaugccagcgcu

SEQ ID NO: 2978220 - RNA, 19 nt, Artificial Sequence
  Description of Artificial Sequence: Synthetic oligonucleotide
uggaaccucagagugggua

SEQ ID NO: 2978221 - RNA, 19 nt, Artificial Sequence
  Description of Artificial Sequence: Synthetic oligonucleotide
ggcuaggaggugucaaggg

SEQ ID NO: 2978222 - RNA, 19 nt, Artificial Sequence
  Description of Artificial Sequence: Synthetic oligonucleotide
gucagugaugaaccgcuuc

SEQ ID NO: 2978223 - RNA, 19 nt, Artificial Sequence
  Description of Artificial Sequence: Synthetic oligonucleotide
agaguggguagagaugcca

SEQ ID NO: 2978224 - RNA, 19 nt, Artificial Sequence
  Description of Artificial Sequence: Synthetic oligonucleotide
cagugaugaaccgcuuccg

SEQ ID NO: 2978225 - RNA, 19 nt, Artificial Sequence
  Description of Artificial Sequence: Synthetic oligonucleotide
uggcugagggacugggugu

SEQ ID NO: 2978226 - RNA, 19 nt, Artificial Sequence
  Description of Artificial Sequence: Synthetic oligonucleotide
gauaccugugcaaggccca

SEQ ID NO: 2978227 - RNA, 19 nt, Artificial Sequence
  Description of Artificial Sequence: Synthetic oligonucleotide
gcaaggcccauacugccag

SEQ ID NO: 2978228 - RNA, 19 nt, Artificial Sequence
  Description of Artificial Sequence: Synthetic oligonucleotide
aggcugaauuggaagcggg

SEQ ID NO: 2978229 - RNA, 19 nt, Artificial Sequence
  Description of Artificial Sequence: Synthetic oligonucleotide
ucuccuagcucuggugcca

SEQ ID NO: 2978230 - RNA, 19 nt, Artificial Sequence
  Description of Artificial Sequence: Synthetic oligonucleotide
ccuggugcaccucuagagg

SEQ ID NO: 2978231 - RNA, 19 nt, Artificial Sequence
  Description of Artificial Sequence: Synthetic oligonucleotide
gggacugggugucuucucc

SEQ ID NO: 2978232 - RNA, 19 nt, Artificial Sequence
  Description of Artificial Sequence: Synthetic oligonucleotide
ugcauccgugugauaccug

SEQ ID NO: 2978233 - RNA, 19 nt, Artificial Sequence
  Description of Artificial Sequence: Synthetic oligonucleotide
cucuucuucacaacagggu

SEQ ID NO: 2978234 - RNA, 19 nt, Artificial Sequence
  Description of Artificial Sequence: Synthetic oligonucleotide
uugguggcuaggagguguc

SEQ ID NO: 2978235 - RNA, 19 nt, Artificial Sequence
  Description of Artificial Sequence: Synthetic oligonucleotide
ggagucagugaugaaccgc

SEQ ID NO: 2978236 - RNA, 19 nt, Artificial Sequence
  Description of Artificial Sequence: Synthetic oligonucleotide
ugcucugcccgaugccagc

SEQ ID NO: 2978237 - RNA, 19 nt, Artificial Sequence
  Description of Artificial Sequence: Synthetic oligonucleotide
agcucuggugccagcuccc

SEQ ID NO: 2978238 - RNA, 19 nt, Artificial Sequence
  Description of Artificial Sequence: Synthetic oligonucleotide
cucccucuucuucacaaca

SEQ ID NO: 2978239 - RNA, 19 nt, Artificial Sequence
  Description of Artificial Sequence: Synthetic oligonucleotide
cauccgugugauaccugug

SEQ ID NO: 2978240 - RNA, 19 nt, Artificial Sequence
  Description of Artificial Sequence: Synthetic oligonucleotide
gaggugucaagggaagaaa

SEQ ID NO: 2978241 - RNA, 19 nt, Artificial Sequence
  Description of Artificial Sequence: Synthetic oligonucleotide
aaacccggguggaaccuca

SEQ ID NO: 2978242 - RNA, 19 nt, Artificial Sequence
  Description of Artificial Sequence: Synthetic oligonucleotide
ucguucagagugugucuuc

SEQ ID NO: 2978243 - RNA, 19 nt, Artificial Sequence
  Description of Artificial Sequence: Synthetic oligonucleotide
aggugucaagggaagaaaa

SEQ ID NO: 2978244 - RNA, 19 nt, Artificial Sequence
  Description of Artificial Sequence: Synthetic oligonucleotide
gcuaggaggugucaaggga

SEQ ID NO: 2978245 - RNA, 19 nt, Artificial Sequence
  Description of Artificial Sequence: Synthetic oligonucleotide
ugagggacugggugucuuc

SEQ ID NO: 2978246 - RNA, 19 nt, Artificial Sequence
  Description of Artificial Sequence: Synthetic oligonucleotide
cagaguggguagagaugcc

SEQ ID NO: 2978247 - RNA, 19 nt, Artificial Sequence
  Description of Artificial Sequence: Synthetic oligonucleotide
caaacugccucagcagcuc

SEQ ID NO: 2978248 - RNA, 19 nt, Artificial Sequence
  Description of Artificial Sequence: Synthetic oligonucleotide
ggcugaauuggaagcgggg

SEQ ID NO: 2978249 - RNA, 19 nt, Artificial Sequence
  Description of Artificial Sequence: Synthetic oligonucleotide
ugcccgaugccagcgcugc

SEQ ID NO: 2978250 - RNA, 19 nt, Artificial Sequence
  Description of Artificial Sequence: Synthetic oligonucleotide
ggccaggucaaacugccuc

SEQ ID NO: 2978251 - RNA, 19 nt, Artificial Sequence
  Description of Artificial Sequence: Synthetic oligonucleotide
agagaugccagaggcugaa

SEQ ID NO: 2978252 - RNA, 19 nt, Artificial Sequence
  Description of Artificial Sequence: Synthetic oligonucleotide
ucuucacaacaggguagga

SEQ ID NO: 2978253 - RNA, 19 nt, Artificial Sequence
  Description of Artificial Sequence: Synthetic oligonucleotide
caggucaaacugccucagc

SEQ ID NO: 2978254 - RNA, 19 nt, Artificial Sequence
  Description of Artificial Sequence: Synthetic oligonucleotide
ucaagcccaucugcucugc

SEQ ID NO: 2978255 - RNA, 19 nt, Artificial Sequence
  Description of Artificial Sequence: Synthetic oligonucleotide
cucuugcugugcccagggg

SEQ ID NO: 2978256 - RNA, 19 nt, Artificial Sequence
  Description of Artificial Sequence: Synthetic oligonucleotide
cccggguggaaccucagag

SEQ ID NO: 2978257 - RNA, 19 nt, Artificial Sequence
  Description of Artificial Sequence: Synthetic oligonucleotide
caaggcccauacugccagg

SEQ ID NO: 2978258 - RNA, 19 nt, Artificial Sequence
  Description of Artificial Sequence: Synthetic oligonucleotide
gggcuucaagcccaucugc

SEQ ID NO: 2978259 - RNA, 19 nt, Artificial Sequence
  Description of Artificial Sequence: Synthetic oligonucleotide
gcugcauccgugugauacc

SEQ ID NO: 2978260 - RNA, 19 nt, Artificial Sequence
  Description of Artificial Sequence: Synthetic oligonucleotide
gaaccucagaguggguaga

SEQ ID NO: 2978261 - RNA, 19 nt, Artificial Sequence
  Description of Artificial Sequence: Synthetic oligonucleotide
uccuccuggcugagggacu

SEQ ID NO: 2978262 - RNA, 19 nt, Artificial Sequence
  Description of Artificial Sequence: Synthetic oligonucleotide
ucccucuugcugugcccag

SEQ ID NO: 2978263 - RNA, 19 nt, Artificial Sequence
  Description of Artificial Sequence: Synthetic oligonucleotide
gccaggccaggucaaacug

SEQ ID NO: 2978264 - RNA, 19 nt, Artificial Sequence
  Description of Artificial Sequence: Synthetic oligonucleotide
agcgcugcauccgugugau

SEQ ID NO: 2978265 - RNA, 19 nt, Artificial Sequence
  Description of Artificial Sequence: Synthetic oligonucleotide
uacugccaggccaggucaa

SEQ ID NO: 2978266 - RNA, 19 nt, Artificial Sequence
  Description of Artificial Sequence: Synthetic oligonucleotide
cgugugauaccugugcaag

SEQ ID NO: 2978267 - RNA, 19 nt, Artificial Sequence
  Description of Artificial Sequence: Synthetic oligonucleotide
ggguaggagucagugauga

SEQ ID NO: 2978268 - RNA, 19 nt, Artificial Sequence
  Description of Artificial Sequence: Synthetic oligonucleotide
gggucguucagaguguguc

SEQ ID NO: 2978269 - RNA, 19 nt, Artificial Sequence
  Description of Artificial Sequence: Synthetic oligonucleotide
ucuugguggcuaggaggug

SEQ ID NO: 2978270 - RNA, 19 nt, Artificial Sequence
  Description of Artificial Sequence: Synthetic oligonucleotide
gcuucaagcccaucugcuc

SEQ ID NO: 2978271 - RNA, 19 nt, Artificial Sequence
  Description of Artificial Sequence: Synthetic oligonucleotide
  modified_base (7)..(7): a, c, u, g, unknown or other
cuguccngaaguucuuggu

SEQ ID NO: 2978272 - RNA, 19 nt, Artificial Sequence
  Description of Artificial Sequence: Synthetic oligonucleotide
ggcccauacugccaggcca

SEQ ID NO: 2978273 - RNA, 19 nt, Artificial Sequence
  Description of Artificial Sequence: Synthetic oligonucleotide
agugugucuucagcaccug

SEQ ID NO: 2978274 - RNA, 19 nt, Artificial Sequence
  Description of Artificial Sequence: Synthetic oligonucleotide
ccucuugcugugcccaggg

SEQ ID NO: 2978275 - RNA, 19 nt, Artificial Sequence
  Description of Artificial Sequence: Synthetic oligonucleotide
augaaccgcuuccggccca

SEQ ID NO: 2978276 - RNA, 19 nt, Artificial Sequence
  Description of Artificial Sequence: Synthetic oligonucleotide
cacaacaggguaggaguca

SEQ ID NO: 2978277 - RNA, 19 nt, Artificial Sequence
  Description of Artificial Sequence: Synthetic oligonucleotide
  modified_base (12)..(12): a, c, u, g, unknown or other
ggauucuguccngaaguuc

SEQ ID NO: 2978278 - RNA, 19 nt, Artificial Sequence
  Description of Artificial Sequence: Synthetic oligonucleotide
aggguaggagucagugaug

SEQ ID NO: 2978279 - RNA, 19 nt, Artificial Sequence
  Description of Artificial Sequence: Synthetic oligonucleotide
gacugggugucuucuccua

SEQ ID NO: 2978280 - RNA, 19 nt, Artificial Sequence
  Description of Artificial Sequence: Synthetic oligonucleotide
ugccagcgcugcauccgug

SEQ ID NO: 2978281 - RNA, 19 nt, Artificial Sequence
  Description of Artificial Sequence: Synthetic oligonucleotide
  modified_base (10)..(10): a, c, u, g, unknown or other
auucuguccngaaguucuu

SEQ ID NO: 2978282 - RNA, 19 nt, Artificial Sequence
  Description of Artificial Sequence: Synthetic oligonucleotide
uccuagcucuggugccagc

SEQ ID NO: 2978283 - RNA, 19 nt, Artificial Sequence
  Description of Artificial Sequence: Synthetic oligonucleotide
ugcuuccuccuggcugagg

SEQ ID NO: 2978284 - RNA, 19 nt, Artificial Sequence
  Description of Artificial Sequence: Synthetic oligonucleotide
cggguggaaccucagagug

SEQ ID NO: 2978285 - RNA, 19 nt, Artificial Sequence
  Description of Artificial Sequence: Synthetic oligonucleotide
aggaggugucaagggaaga

SEQ ID NO: 2978286 - RNA, 19 nt, Artificial Sequence
  Description of Artificial Sequence: Synthetic oligonucleotide
  modified_base (2)..(2): a, c, u, g, unknown or other
cngaaguucuugguggcua

SEQ ID NO: 2978287 - RNA, 19 nt, Artificial Sequence
  Description of Artificial Sequence: Synthetic oligonucleotide
uggugccagcucccucuug

SEQ ID NO: 2978288 - RNA, 19 nt, Artificial Sequence
  Description of Artificial Sequence: Synthetic oligonucleotide
uggcggccacccaggcagg

SEQ ID NO: 2978289 - RNA, 19 nt, Artificial Sequence
  Description of Artificial Sequence: Synthetic oligonucleotide
ggaggugucaagggaagaa

SEQ ID NO: 2978290 - RNA, 19 nt, Artificial Sequence
  Description of Artificial Sequence: Synthetic oligonucleotide
cucugcccgaugccagcgc

SEQ ID NO: 2978291 - RNA, 19 nt, Artificial Sequence
  Description of Artificial Sequence: Synthetic oligonucleotide
cacccaggcaggcggagca

SEQ ID NO: 2978292 - RNA, 19 nt, Artificial Sequence
  Description of Artificial Sequence: Synthetic oligonucleotide
cgcugcauccgugugauac

SEQ ID NO: 2978293 - RNA, 19 nt, Artificial Sequence
  Description of Artificial Sequence: Synthetic oligonucleotide
aacccggguggaaccucag

SEQ ID NO: 2978294 - RNA, 19 nt, Artificial Sequence
  Description of Artificial Sequence: Synthetic oligonucleotide
gcccauggcggccacccag

SEQ ID NO: 2978295 - RNA, 19 nt, Artificial Sequence
  Description of Artificial Sequence: Synthetic oligonucleotide
cuugguggcuaggaggugu

SEQ ID NO: 2978296 - RNA, 19 nt, Artificial Sequence
  Description of Artificial Sequence: Synthetic oligonucleotide
accucagaguggguagaga

SEQ ID NO: 2978297 - RNA, 19 nt, Artificial Sequence
  Description of Artificial Sequence: Synthetic oligonucleotide
gccucagcagcuccagcug

SEQ ID NO: 2978298 - RNA, 19 nt, Artificial Sequence
  Description of Artificial Sequence: Synthetic oligonucleotide
cugccaggccaggucaaac

SEQ ID NO: 2978299 - RNA, 19 nt, Artificial Sequence
  Description of Artificial Sequence: Synthetic oligonucleotide
gcaccuggugcaccucuag

SEQ ID NO: 2978300 - RNA, 19 nt, Artificial Sequence
  Description of Artificial Sequence: Synthetic oligonucleotide
acccggguggaaccucaga

SEQ ID NO: 2978301 - RNA, 19 nt, Artificial Sequence
  Description of Artificial Sequence: Synthetic oligonucleotide
cuuccggcccauggcggcc

SEQ ID NO: 2978302 - RNA, 19 nt, Artificial Sequence
  Description of Artificial Sequence: Synthetic oligonucleotide
cugcccgaugccagcgcug

SEQ ID NO: 2978303 - RNA, 19 nt, Artificial Sequence
  Description of Artificial Sequence: Synthetic oligonucleotide
gcccauacugccaggccag

SEQ ID NO: 2978304 - RNA, 19 nt, Artificial Sequence
  Description of Artificial Sequence: Synthetic oligonucleotide
gcauccgugugauaccugu

SEQ ID NO: 2978305 - RNA, 19 nt, Artificial Sequence
  Description of Artificial Sequence: Synthetic oligonucleotide
cuuccuccuggcugaggga

SEQ ID NO: 2978306 - RNA, 19 nt, Artificial Sequence
  Description of Artificial Sequence: Synthetic oligonucleotide
ugguggcuaggagguguca

SEQ ID NO: 2978307 - RNA, 19 nt, Artificial Sequence
  Description of Artificial Sequence: Synthetic oligonucleotide
ccgcuuccggcccauggcg

SEQ ID NO: 2978308 - RNA, 19 nt, Artificial Sequence
  Description of Artificial Sequence: Synthetic oligonucleotide
gcagcuccagcugugcuuc

SEQ ID NO: 2978309 - RNA, 19 nt, Artificial Sequence
  Description of Artificial Sequence: Synthetic oligonucleotide
caccuggugcaccucuaga

SEQ ID NO: 2978310 - RNA, 19 nt, Artificial Sequence
  Description of Artificial Sequence: Synthetic oligonucleotide
caggcaggcggagcaggag

SEQ ID NO: 2978311 - RNA, 19 nt, Artificial Sequence
  Description of Artificial Sequence: Synthetic oligonucleotide
cucccucuugcugugccca

SEQ ID NO: 2978312 - RNA, 19 nt, Artificial Sequence
  Description of Artificial Sequence: Synthetic oligonucleotide
gcuuccggcccauggcggc

SEQ ID NO: 2978313 - RNA, 19 nt, Artificial Sequence
  Description of Artificial Sequence: Synthetic oligonucleotide
ccagcugugcuuccuccug

SEQ ID NO: 2978314 - RNA, 19 nt, Artificial Sequence
  Description of Artificial Sequence: Synthetic oligonucleotide
cucuggugccagcucccuc

SEQ ID NO: 2978315 - RNA, 19 nt, Artificial Sequence
  Description of Artificial Sequence: Synthetic oligonucleotide
auaccugugcaaggcccau

SEQ ID NO: 2978316 - RNA, 19 nt, Artificial Sequence
  Description of Artificial Sequence: Synthetic oligonucleotide
gucuucuccuagcucuggu

SEQ ID NO: 2978317 - RNA, 19 nt, Artificial Sequence
  Description of Artificial Sequence: Synthetic oligonucleotide
gagggacugggugucuucu

SEQ ID NO: 2978318 - RNA, 19 nt, Artificial Sequence
  Description of Artificial Sequence: Synthetic oligonucleotide
ugaaccgcuuccggcccau

SEQ ID NO: 2978319 - RNA, 19 nt, Artificial Sequence
  Description of Artificial Sequence: Synthetic oligonucleotide
gcucugcccgaugccagcg

SEQ ID NO: 2978320 - RNA, 19 nt, Artificial Sequence
  Description of Artificial Sequence: Synthetic oligonucleotide
ggccccucccucuucuuca

SEQ ID NO: 2978321 - RNA, 19 nt, Artificial Sequence
  Description of Artificial Sequence: Synthetic oligonucleotide
cagcgcugcauccguguga

SEQ ID NO: 2978322 - RNA, 19 nt, Artificial Sequence
  Description of Artificial Sequence: Synthetic oligonucleotide
cauggcggccacccaggca

SEQ ID NO: 2978323 - RNA, 19 nt, Artificial Sequence
  Description of Artificial Sequence: Synthetic oligonucleotide
ggucguucagagugugucu

SEQ ID NO: 2978324 - RNA, 19 nt, Artificial Sequence
  Description of Artificial Sequence: Synthetic oligonucleotide
uuccggcccauggcggcca

SEQ ID NO: 2978325 - RNA, 19 nt, Artificial Sequence
  Description of Artificial Sequence: Synthetic oligonucleotide
  modified_base (16)..(16): a, c, u, g, unknown or other
ccauggauucuguccngaa

SEQ ID NO: 2978326 - RNA, 19 nt, Artificial Sequence
  Description of Artificial Sequence: Synthetic oligonucleotide
gcucccucuugcugugccc

SEQ ID NO: 2978327 - RNA, 19 nt, Artificial Sequence
  Description of Artificial Sequence: Synthetic oligonucleotide
acugccaggccaggucaaa

SEQ ID NO: 2978328 - RNA, 19 nt, Artificial Sequence
  Description of Artificial Sequence: Synthetic oligonucleotide
ccucagaguggguagagau

SEQ ID NO: 2978329 - RNA, 19 nt, Artificial Sequence
  Description of Artificial Sequence: Synthetic oligonucleotide
gguggcuaggaggugucaa

SEQ ID NO: 2978330 - RNA, 19 nt, Artificial Sequence
  Description of Artificial Sequence: Synthetic oligonucleotide
ccucccucuucuucacaac

SEQ ID NO: 2978331 - RNA, 19 nt, Artificial Sequence
  Description of Artificial Sequence: Synthetic oligonucleotide
cagcuccagcugugcuucc

SEQ ID NO: 2978332 - RNA, 19 nt, Artificial Sequence
  Description of Artificial Sequence: Synthetic oligonucleotide
gucguucagagugugucuu

SEQ ID NO: 2978333 - RNA, 19 nt, Artificial Sequence
  Description of Artificial Sequence: Synthetic oligonucleotide
gguagagaugccagaggcu

SEQ ID NO: 2978334 - RNA, 19 nt, Artificial Sequence
  Description of Artificial Sequence: Synthetic oligonucleotide
gguaggagucagugaugaa

SEQ ID NO: 2978335 - RNA, 19 nt, Artificial Sequence
  Description of Artificial Sequence: Synthetic oligonucleotide
cugcauccgugugauaccu

SEQ ID NO: 2978336 - RNA, 19 nt, Artificial Sequence
  Description of Artificial Sequence: Synthetic oligonucleotide
ggcugagggacuggguguc

SEQ ID NO: 2978337 - RNA, 19 nt, Artificial Sequence
  Description of Artificial Sequence: Synthetic oligonucleotide
ggcuucaagcccaucugcu

SEQ ID NO: 2978338 - RNA, 19 nt, Artificial Sequence
  Description of Artificial Sequence: Synthetic oligonucleotide
cgaugccagcgcugcaucc

SEQ ID NO: 2978339 - RNA, 19 nt, Artificial Sequence
  Description of Artificial Sequence: Synthetic oligonucleotide
ggacugggugucuucuccu

SEQ ID NO: 2978340 - RNA, 19 nt, Artificial Sequence
  Description of Artificial Sequence: Synthetic oligonucleotide
cggccacccaggcaggcgg

SEQ ID NO: 2978341 - RNA, 19 nt, Artificial Sequence
  Description of Artificial Sequence: Synthetic oligonucleotide
cgcuuccggcccauggcgg

SEQ ID NO: 2978342 - RNA, 19 nt, Artificial Sequence
  Description of Artificial Sequence: Synthetic oligonucleotide
ccagcgcugcauccgugug

SEQ ID NO: 2978343 - RNA, 19 nt, Artificial Sequence
  Description of Artificial Sequence: Synthetic oligonucleotide
ccaucugcucugcccgaug

SEQ ID NO: 2978344 - RNA, 19 nt, Artificial Sequence
  Description of Artificial Sequence: Synthetic oligonucleotide
uccggcccauggcggccac

SEQ ID NO: 2978345 - RNA, 19 nt, Artificial Sequence
  Description of Artificial Sequence: Synthetic oligonucleotide
gaaccgcuuccggcccaug

SEQ ID NO: 2978346 - RNA, 19 nt, Artificial Sequence
  Description of Artificial Sequence: Synthetic oligonucleotide
cccucccucuucuucacaa

SEQ ID NO: 2978347 - RNA, 19 nt, Artificial Sequence
  Description of Artificial Sequence: Synthetic oligonucleotide
caggcggagcaggaggcaa

SEQ ID NO: 2978348 - RNA, 19 nt, Artificial Sequence
  Description of Artificial Sequence: Synthetic oligonucleotide
ccgugugauaccugugcaa

SEQ ID NO: 2978349 - RNA, 19 nt, Artificial Sequence
  Description of Artificial Sequence: Synthetic oligonucleotide
aggccaggucaaacugccu

SEQ ID NO: 2978350 - RNA, 19 nt, Artificial Sequence
  Description of Artificial Sequence: Synthetic oligonucleotide
cccucuugcugugcccagg

SEQ ID NO: 2978351 - RNA, 19 nt, Artificial Sequence
  Description of Artificial Sequence: Synthetic oligonucleotide
gccagaggcugaauuggaa

SEQ ID NO: 2978352 - RNA, 19 nt, Artificial Sequence
  Description of Artificial Sequence: Synthetic oligonucleotide
agcaccuggugcaccucua

SEQ ID NO: 2978353 - RNA, 19 nt, Artificial Sequence
  Description of Artificial Sequence: Synthetic oligonucleotide
gggccccucccucuucuuc

SEQ ID NO: 2978354 - RNA, 19 nt, Artificial Sequence
  Description of Artificial Sequence: Synthetic oligonucleotide
cagcucccucuugcugugc

SEQ ID NO: 2978355 - RNA, 19 nt, Artificial Sequence
  Description of Artificial Sequence: Synthetic oligonucleotide
ccauggcggccacccaggc

SEQ ID NO: 2978356 - RNA, 19 nt, Artificial Sequence
  Description of Artificial Sequence: Synthetic oligonucleotide
ccgaugccagcgcugcauc

SEQ ID NO: 2978357 - RNA, 19 nt, Artificial Sequence
  Description of Artificial Sequence: Synthetic oligonucleotide
caacaggguaggagucagu

SEQ ID NO: 2978358 - RNA, 19 nt, Artificial Sequence
  Description of Artificial Sequence: Synthetic oligonucleotide
cagcaccuggugcaccucu

SEQ ID NO: 2978359 - RNA, 19 nt, Artificial Sequence
  Description of Artificial Sequence: Synthetic oligonucleotide
gcggccacccaggcaggcg

SEQ ID NO: 2978360 - RNA, 19 nt, Artificial Sequence
  Description of Artificial Sequence: Synthetic oligonucleotide
cguucagagugugucuuca

SEQ ID NO: 2978361 - RNA, 19 nt, Artificial Sequence
  Description of Artificial Sequence: Synthetic oligonucleotide
gccagcgcugcauccgugu

SEQ ID NO: 2978362 - RNA, 19 nt, Artificial Sequence
  Description of Artificial Sequence: Synthetic oligonucleotide
ccacccaggcaggcggagc

SEQ ID NO: 2978363 - RNA, 19 nt, Artificial Sequence
  Description of Artificial Sequence: Synthetic oligonucleotide
ccggguggaaccucagagu

SEQ ID NO: 2978364 - RNA, 19 nt, Artificial Sequence
  Description of Artificial Sequence: Synthetic oligonucleotide
gccacccaggcaggcggag

SEQ ID NO: 2978365 - RNA, 19 nt, Artificial Sequence
  Description of Artificial Sequence: Synthetic oligonucleotide
gagaugccagaggcugaau

SEQ ID NO: 2978366 - RNA, 19 nt, Artificial Sequence
  Description of Artificial Sequence: Synthetic oligonucleotide
gcugugcuuccuccuggcu

SEQ ID NO: 2978367 - RNA, 19 nt, Artificial Sequence
  Description of Artificial Sequence: Synthetic oligonucleotide
cggcccauggcggccaccc

SEQ ID NO: 2978368 - RNA, 19 nt, Artificial Sequence
  Description of Artificial Sequence: Synthetic oligonucleotide
gcccaucugcucugcccga

SEQ ID NO: 2978369 - RNA, 19 nt, Artificial Sequence
  Description of Artificial Sequence: Synthetic oligonucleotide
ggcggccacccaggcaggc

SEQ ID NO: 2978370 - RNA, 19 nt, Artificial Sequence
  Description of Artificial Sequence: Synthetic oligonucleotide
ccucagcagcuccagcugu

SEQ ID NO: 2978371 - RNA, 19 nt, Artificial Sequence
  Description of Artificial Sequence: Synthetic oligonucleotide
  modified_base (3)..(3): a, c, u, g, unknown or other
ccngaaguucuugguggcu

SEQ ID NO: 2978372 - RNA, 19 nt, Artificial Sequence
  Description of Artificial Sequence: Synthetic oligonucleotide
cugagggacugggugucuu

SEQ ID NO: 2978373 - RNA, 19 nt, Artificial Sequence
  Description of Artificial Sequence: Synthetic oligonucleotide
ggcccauggcggccaccca

SEQ ID NO: 2978374 - RNA, 19 nt, Artificial Sequence
  Description of Artificial Sequence: Synthetic oligonucleotide
guggaaccucagagugggu

SEQ ID NO: 2978375 - RNA, 19 nt, Artificial Sequence
  Description of Artificial Sequence: Synthetic oligonucleotide
ccuggcugagggacugggu

SEQ ID NO: 2978376 - RNA, 19 nt, Artificial Sequence
  Description of Artificial Sequence: Synthetic oligonucleotide
cuggugccagcucccucuu

SEQ ID NO: 2978377 - RNA, 19 nt, Artificial Sequence
  Description of Artificial Sequence: Synthetic oligonucleotide
ggccacccaggcaggcgga

SEQ ID NO: 2978378 - RNA, 19 nt, Artificial Sequence
  Description of Artificial Sequence: Synthetic oligonucleotide
ggggucguucagagugugu

SEQ ID NO: 2978379 - RNA, 19 nt, Artificial Sequence
  Description of Artificial Sequence: Synthetic oligonucleotide
gcccgaugccagcgcugca

SEQ ID NO: 2978380 - RNA, 19 nt, Artificial Sequence
  Description of Artificial Sequence: Synthetic oligonucleotide
ccugugcaaggcccauacu

SEQ ID NO: 2978381 - RNA, 19 nt, Artificial Sequence
  Description of Artificial Sequence: Synthetic oligonucleotide
gcugagggacugggugucu

SEQ ID NO: 2978382 - RNA, 19 nt, Artificial Sequence
  Description of Artificial Sequence: Synthetic oligonucleotide
gcucuggugccagcucccu

SEQ ID NO: 2978383 - RNA, 19 nt, Artificial Sequence
  Description of Artificial Sequence: Synthetic oligonucleotide
ccccucccucuucuucaca

SEQ ID NO: 2978384 - RNA, 19 nt, Artificial Sequence
  Description of Artificial Sequence: Synthetic oligonucleotide
ccggcccauggcggccacc

SEQ ID NO: 2978385 - RNA, 19 nt, Artificial Sequence
  Description of Artificial Sequence: Synthetic oligonucleotide
gcgcugcauccgugugaua

SEQ ID NO: 2978386 - RNA, 19 nt, Artificial Sequence
  Description of Artificial Sequence: Synthetic oligonucleotide
ggggccccucccucuucuu

SEQ ID NO: 2978387 - RNA, 19 nt, Artificial Sequence
  Description of Artificial Sequence: Synthetic oligonucleotide
  modified_base (1)..(1): a, c, u, g, unknown or other
ngaaguucuugguggcuag

SEQ ID NO: 2978388 - RNA, 19 nt, Artificial Sequence
  Description of Artificial Sequence: Synthetic oligonucleotide
uuaaucuuggccauagcug

SEQ ID NO: 2978389 - RNA, 19 nt, Artificial Sequence
  Description of Artificial Sequence: Synthetic oligonucleotide
uuaauuacggugaggacac

SEQ ID NO: 2978390 - RNA, 19 nt, Artificial Sequence
  Description of Artificial Sequence: Synthetic oligonucleotide
uugagucugguuaauuacg

SEQ ID NO: 2978391 - RNA, 19 nt, Artificial Sequence
  Description of Artificial Sequence: Synthetic oligonucleotide
agucuugcacuuuauugcc

SEQ ID NO: 2978392 - RNA, 19 nt, Artificial Sequence
  Description of Artificial Sequence: Synthetic oligonucleotide
uaaucuuggccauagcugc

SEQ ID NO: 2978393 - RNA, 19 nt, Artificial Sequence
  Description of Artificial Sequence: Synthetic oligonucleotide
ucucaucaggccuuaaccg

SEQ ID NO: 2978394 - RNA, 19 nt, Artificial Sequence
  Description of Artificial Sequence: Synthetic oligonucleotide
ugagucugguuaauuacgg

SEQ ID NO: 2978395 - RNA, 19 nt, Artificial Sequence
  Description of Artificial Sequence: Synthetic oligonucleotide
uucucaucaggccuuaacc

SEQ ID NO: 2978396 - RNA, 19 nt, Artificial Sequence
  Description of Artificial Sequence: Synthetic oligonucleotide
auugccuucucaucaggcc

SEQ ID NO: 2978397 - RNA, 19 nt, Artificial Sequence
  Description of Artificial Sequence: Synthetic oligonucleotide
auagcucuagucuucuugg

SEQ ID NO: 2978398 - RNA, 19 nt, Artificial Sequence
  Description of Artificial Sequence: Synthetic oligonucleotide
aggcuuguacuucuuaccc

SEQ ID NO: 2978399 - RNA, 19 nt, Artificial Sequence
  Description of Artificial Sequence: Synthetic oligonucleotide
agaguuuggaagcggcucc

SEQ ID NO: 2978400 - RNA, 19 nt, Artificial Sequence
  Description of Artificial Sequence: Synthetic oligonucleotide
uuguagaauuuccugaggu

SEQ ID NO: 2978401 - RNA, 19 nt, Artificial Sequence
  Description of Artificial Sequence: Synthetic oligonucleotide
uuugagucugguuaauuac

SEQ ID NO: 2978402 - RNA, 19 nt, Artificial Sequence
  Description of Artificial Sequence: Synthetic oligonucleotide
uggauuuucggacgacucg

SEQ ID NO: 2978403 - RNA, 19 nt, Artificial Sequence
  Description of Artificial Sequence: Synthetic oligonucleotide
ugguuaauuacggugagga

SEQ ID NO: 2978404 - RNA, 19 nt, Artificial Sequence
  Description of Artificial Sequence: Synthetic oligonucleotide
agaggcuuguacuucuuac

SEQ ID NO: 2978405 - RNA, 19 nt, Artificial Sequence
  Description of Artificial Sequence: Synthetic oligonucleotide
aauuacggugaggacacgg

SEQ ID NO: 2978406 - RNA, 19 nt, Artificial Sequence
  Description of Artificial Sequence: Synthetic oligonucleotide
uuuauugccuucucaucag

SEQ ID NO: 2978407 - RNA, 19 nt, Artificial Sequence
  Description of Artificial Sequence: Synthetic oligonucleotide
agucugguuaauuacggug

SEQ ID NO: 2978408 - RNA, 19 nt, Artificial Sequence
  Description of Artificial Sequence: Synthetic oligonucleotide
uuucggacgacucguaucu

SEQ ID NO: 2978409 - RNA, 19 nt, Artificial Sequence
  Description of Artificial Sequence: Synthetic oligonucleotide
aaccgcauacuugcgaagc

SEQ ID NO: 2978410 - RNA, 19 nt, Artificial Sequence
  Description of Artificial Sequence: Synthetic oligonucleotide
uucucuucguguuugguga

SEQ ID NO: 2978411 - RNA, 19 nt, Artificial Sequence
  Description of Artificial Sequence: Synthetic oligonucleotide
guuaauuacggugaggaca

SEQ ID NO: 2978412 - RNA, 19 nt, Artificial Sequence
  Description of Artificial Sequence: Synthetic oligonucleotide
uuacccuuguagaauuucc

SEQ ID NO: 2978413 - RNA, 19 nt, Artificial Sequence
  Description of Artificial Sequence: Synthetic oligonucleotide
auacuugcgaagcggguac

SEQ ID NO: 2978414 - RNA, 19 nt, Artificial Sequence
  Description of Artificial Sequence: Synthetic oligonucleotide
acuuuauugccuucucauc

SEQ ID NO: 2978415 - RNA, 19 nt, Artificial Sequence
  Description of Artificial Sequence: Synthetic oligonucleotide
auagcugcgccgcucaccg

SEQ ID NO: 2978416 - RNA, 19 nt, Artificial Sequence
  Description of Artificial Sequence: Synthetic oligonucleotide
uguuuuagcagcuccuccu

SEQ ID NO: 2978417 - RNA, 19 nt, Artificial Sequence
  Description of Artificial Sequence: Synthetic oligonucleotide
uuuugagucugguuaauua

SEQ ID NO: 2978418 - RNA, 19 nt, Artificial Sequence
  Description of Artificial Sequence: Synthetic oligonucleotide
cuuggcgacgcgaagcugg

SEQ ID NO: 2978419 - RNA, 19 nt, Artificial Sequence
  Description of Artificial Sequence: Synthetic oligonucleotide
uacuucuuacccuuguaga

SEQ ID NO: 2978420 - RNA, 19 nt, Artificial Sequence
  Description of Artificial Sequence: Synthetic oligonucleotide
cuucuugccgcgcaggucc

SEQ ID NO: 2978421 - RNA, 19 nt, Artificial Sequence
  Description of Artificial Sequence: Synthetic oligonucleotide
uuauugccuucucaucagg

SEQ ID NO: 2978422 - RNA, 19 nt, Artificial Sequence
  Description of Artificial Sequence: Synthetic oligonucleotide
ucugguuaauuacggugag

SEQ ID NO: 2978423 - RNA, 19 nt, Artificial Sequence
  Description of Artificial Sequence: Synthetic oligonucleotide
guacuucuuacccuuguag

SEQ ID NO: 2978424 - RNA, 19 nt, Artificial Sequence
  Description of Artificial Sequence: Synthetic oligonucleotide
cuuuauugccuucucauca

SEQ ID NO: 2978425 - RNA, 19 nt, Artificial Sequence
  Description of Artificial Sequence: Synthetic oligonucleotide
uauugccuucucaucaggc

SEQ ID NO: 2978426 - RNA, 19 nt, Artificial Sequence
  Description of Artificial Sequence: Synthetic oligonucleotide
uucguguuuggugagccgg

SEQ ID NO: 2978427 - RNA, 19 nt, Artificial Sequence
  Description of Artificial Sequence: Synthetic oligonucleotide
uguuuggugagccggcggc

SEQ ID NO: 2978428 - RNA, 19 nt, Artificial Sequence
  Description of Artificial Sequence: Synthetic oligonucleotide
uccaccuucagaucgucca

SEQ ID NO: 2978429 - RNA, 19 nt, Artificial Sequence
  Description of Artificial Sequence: Synthetic oligonucleotide
uuaaccgcauacuugcgaa

SEQ ID NO: 2978430 - RNA, 19 nt, Artificial Sequence
  Description of Artificial Sequence: Synthetic oligonucleotide
uugcgaagcggguacagcc

SEQ ID NO: 2978431 - RNA, 19 nt, Artificial Sequence
  Description of Artificial Sequence: Synthetic oligonucleotide
uuguuuuagcagcuccucc

SEQ ID NO: 2978432 - RNA, 19 nt, Artificial Sequence
  Description of Artificial Sequence: Synthetic oligonucleotide
cauagcucuagucuucuug

SEQ ID NO: 2978433 - RNA, 19 nt, Artificial Sequence
  Description of Artificial Sequence: Synthetic oligonucleotide
cucaucaggccuuaaccgc

SEQ ID NO: 2978434 - RNA, 19 nt, Artificial Sequence
  Description of Artificial Sequence: Synthetic oligonucleotide
aggucuagaggcuuguacu

SEQ ID NO: 2978435 - RNA, 19 nt, Artificial Sequence
  Description of Artificial Sequence: Synthetic oligonucleotide
cuuguagaauuuccugagg

SEQ ID NO: 2978436 - RNA, 19 nt, Artificial Sequence
  Description of Artificial Sequence: Synthetic oligonucleotide
aauggauuuucggacgacu

SEQ ID NO: 2978437 - RNA, 19 nt, Artificial Sequence
  Description of Artificial Sequence: Synthetic oligonucleotide
ucaucaggccuuaaccgca

SEQ ID NO: 2978438 - RNA, 19 nt, Artificial Sequence
  Description of Artificial Sequence: Synthetic oligonucleotide
uccuccuucuucuugccgc

SEQ ID NO: 2978439 - RNA, 19 nt, Artificial Sequence
  Description of Artificial Sequence: Synthetic oligonucleotide
guccaguuguuuuagcagc

SEQ ID NO: 2978440 - RNA, 19 nt, Artificial Sequence
  Description of Artificial Sequence: Synthetic oligonucleotide
uggagaguuuggaagcggc

SEQ ID NO: 2978441 - RNA, 19 nt, Artificial Sequence
  Description of Artificial Sequence: Synthetic oligonucleotide
gacgacucguaucuuggag

SEQ ID NO: 2978442 - RNA, 19 nt, Artificial Sequence
  Description of Artificial Sequence: Synthetic oligonucleotide
ucuagaggcuuguacuucu

SEQ ID NO: 2978443 - RNA, 19 nt, Artificial Sequence
  Description of Artificial Sequence: Synthetic oligonucleotide
ugggucgcaggucuagagg

SEQ ID NO: 2978444 - RNA, 19 nt, Artificial Sequence
  Description of Artificial Sequence: Synthetic oligonucleotide
uuuggaagcggcuccgcca

SEQ ID NO: 2978445 - RNA, 19 nt, Artificial Sequence
  Description of Artificial Sequence: Synthetic oligonucleotide
cucuagucuucuugggucg

SEQ ID NO: 2978446 - RNA, 19 nt, Artificial Sequence
  Description of Artificial Sequence: Synthetic oligonucleotide
acuucuuacccuuguagaa

SEQ ID NO: 2978447 - RNA, 19 nt, Artificial Sequence
  Description of Artificial Sequence: Synthetic oligonucleotide
uuacggugaggacacgggc

SEQ ID NO: 2978448 - RNA, 19 nt, Artificial Sequence
  Description of Artificial Sequence: Synthetic oligonucleotide
uuggaagcggcuccgccag

SEQ ID NO: 2978449 - RNA, 19 nt, Artificial Sequence
  Description of Artificial Sequence: Synthetic oligonucleotide
ucguccaguuguuuuagca

SEQ ID NO: 2978450 - RNA, 19 nt, Artificial Sequence
  Description of Artificial Sequence: Synthetic oligonucleotide
uugccuucucaucaggccu

SEQ ID NO: 2978451 - RNA, 19 nt, Artificial Sequence
  Description of Artificial Sequence: Synthetic oligonucleotide
aauuuccugagguuuucuu

SEQ ID NO: 2978452 - RNA, 19 nt, Artificial Sequence
  Description of Artificial Sequence: Synthetic oligonucleotide
uacggugaggacacgggca

SEQ ID NO: 2978453 - RNA, 19 nt, Artificial Sequence
  Description of Artificial Sequence: Synthetic oligonucleotide
uccgccagucaccuuggcg

SEQ ID NO: 2978454 - RNA, 19 nt, Artificial Sequence
  Description of Artificial Sequence: Synthetic oligonucleotide
uguagaauuuccugagguu

SEQ ID NO: 2978455 - RNA, 19 nt, Artificial Sequence
  Description of Artificial Sequence: Synthetic oligonucleotide
uacccuuguagaauuuccu

SEQ ID NO: 2978456 - RNA, 19 nt, Artificial Sequence
  Description of Artificial Sequence: Synthetic oligonucleotide
uuuucggacgacucguauc

SEQ ID NO: 2978457 - RNA, 19 nt, Artificial Sequence
  Description of Artificial Sequence: Synthetic oligonucleotide
caguuguuuuagcagcucc

SEQ ID NO: 2978458 - RNA, 19 nt, Artificial Sequence
  Description of Artificial Sequence: Synthetic oligonucleotide
acgggcaauggauuuucgg

SEQ ID NO: 2978459 - RNA, 19 nt, Artificial Sequence
  Description of Artificial Sequence: Synthetic oligonucleotide
ucccgagccuuaaucuugg

SEQ ID NO: 2978460 - RNA, 19 nt, Artificial Sequence
  Description of Artificial Sequence: Synthetic oligonucleotide
ggcaauggauuuucggacg

SEQ ID NO: 2978461 - RNA, 19 nt, Artificial Sequence
  Description of Artificial Sequence: Synthetic oligonucleotide
uuggucuucagcuucucuu

SEQ ID NO: 2978462 - RNA, 19 nt, Artificial Sequence
  Description of Artificial Sequence: Synthetic oligonucleotide
acccuuguagaauuuccug

SEQ ID NO: 2978463 - RNA, 19 nt, Artificial Sequence
  Description of Artificial Sequence: Synthetic oligonucleotide
uccaguuguuuuagcagcu

SEQ ID NO: 2978464 - RNA, 19 nt, Artificial Sequence
  Description of Artificial Sequence: Synthetic oligonucleotide
acgacucguaucuuggaga

SEQ ID NO: 2978465 - RNA, 19 nt, Artificial Sequence
  Description of Artificial Sequence: Synthetic oligonucleotide
auuacggugaggacacggg

SEQ ID NO: 2978466 - RNA, 19 nt, Artificial Sequence
  Description of Artificial Sequence: Synthetic oligonucleotide
ucuucguguuuggugagcc

SEQ ID NO: 2978467 - RNA, 19 nt, Artificial Sequence
  Description of Artificial Sequence: Synthetic oligonucleotide
gacagcuccaccuucagau

SEQ ID NO: 2978468 - RNA, 19 nt, Artificial Sequence
  Description of Artificial Sequence: Synthetic oligonucleotide
ucaggccuuaaccgcauac

SEQ ID NO: 2978469 - RNA, 19 nt, Artificial Sequence
  Description of Artificial Sequence: Synthetic oligonucleotide
aagcugggacagcuccacc

SEQ ID NO: 2978470 - RNA, 19 nt, Artificial Sequence
  Description of Artificial Sequence: Synthetic oligonucleotide
gccuuaaccgcauacuugc

SEQ ID NO: 2978471 - RNA, 19 nt, Artificial Sequence
  Description of Artificial Sequence: Synthetic oligonucleotide
cuuaaucuuggccauagcu

SEQ ID NO: 2978472 - RNA, 19 nt, Artificial Sequence
  Description of Artificial Sequence: Synthetic oligonucleotide
auuuccugagguuuucuuu

SEQ ID NO: 2978473 - RNA, 19 nt, Artificial Sequence
  Description of Artificial Sequence: Synthetic oligonucleotide
uagaauuuccugagguuuu

SEQ ID NO: 2978474 - RNA, 19 nt, Artificial Sequence
  Description of Artificial Sequence: Synthetic oligonucleotide
uuguacuucuuacccuugu

SEQ ID NO: 2978475 - RNA, 19 nt, Artificial Sequence
  Description of Artificial Sequence: Synthetic oligonucleotide
aagcggguacagccucucc

SEQ ID NO: 2978476 - RNA, 19 nt, Artificial Sequence
  Description of Artificial Sequence: Synthetic oligonucleotide
accgcauacuugcgaagcg

SEQ ID NO: 2978477 - RNA, 19 nt, Artificial Sequence
  Description of Artificial Sequence: Synthetic oligonucleotide
uagcucuagucuucuuggg

SEQ ID NO: 2978478 - RNA, 19 nt, Artificial Sequence
  Description of Artificial Sequence: Synthetic oligonucleotide
cuuggagaguuuggaagcg

SEQ ID NO: 2978479 - RNA, 19 nt, Artificial Sequence
  Description of Artificial Sequence: Synthetic oligonucleotide
ucguaucuuggagaguuug

SEQ ID NO: 2978480 - RNA, 19 nt, Artificial Sequence
  Description of Artificial Sequence: Synthetic oligonucleotide
uucuuacccuuguagaauu

SEQ ID NO: 2978481 - RNA, 19 nt, Artificial Sequence
  Description of Artificial Sequence: Synthetic oligonucleotide
auggauuuucggacgacuc

SEQ ID NO: 2978482 - RNA, 19 nt, Artificial Sequence
  Description of Artificial Sequence: Synthetic oligonucleotide
aucguccaguuguuuuagc

SEQ ID NO: 2978483 - RNA, 19 nt, Artificial Sequence
  Description of Artificial Sequence: Synthetic oligonucleotide
uguacuucuuacccuugua

SEQ ID NO: 2978484 - RNA, 19 nt, Artificial Sequence
  Description of Artificial Sequence: Synthetic oligonucleotide
aucuuggccauagcugcgc

SEQ ID NO: 2978485 - RNA, 19 nt, Artificial Sequence
  Description of Artificial Sequence: Synthetic oligonucleotide
uggucuucagcuucucuuc

SEQ ID NO: 2978486 - RNA, 19 nt, Artificial Sequence
  Description of Artificial Sequence: Synthetic oligonucleotide
ucggacgacucguaucuug

SEQ ID NO: 2978487 - RNA, 19 nt, Artificial Sequence
  Description of Artificial Sequence: Synthetic oligonucleotide
uuggagaguuuggaagcgg

SEQ ID NO: 2978488 - RNA, 19 nt, Artificial Sequence
  Description of Artificial Sequence: Synthetic oligonucleotide
ucuugcacuuuauugccuu

SEQ ID NO: 2978489 - RNA, 19 nt, Artificial Sequence
  Description of Artificial Sequence: Synthetic oligonucleotide
cuucagaucguccaguugu

SEQ ID NO: 2978490 - RNA, 19 nt, Artificial Sequence
  Description of Artificial Sequence: Synthetic oligonucleotide
uugggucgcaggucuagag

SEQ ID NO: 2978491 - RNA, 19 nt, Artificial Sequence
  Description of Artificial Sequence: Synthetic oligonucleotide
agcucuagucuucuugggu

SEQ ID NO: 2978492 - RNA, 19 nt, Artificial Sequence
  Description of Artificial Sequence: Synthetic oligonucleotide
cuucucaucaggccuuaac

SEQ ID NO: 2978493 - RNA, 19 nt, Artificial Sequence
  Description of Artificial Sequence: Synthetic oligonucleotide
acucguaucuuggagaguu

SEQ ID NO: 2978494 - RNA, 19 nt, Artificial Sequence
  Description of Artificial Sequence: Synthetic oligonucleotide
uuggccauagcugcgccgc

SEQ ID NO: 2978495 - RNA, 19 nt, Artificial Sequence
  Description of Artificial Sequence: Synthetic oligonucleotide
agucuucuugggucgcagg

SEQ ID NO: 2978496 - RNA, 19 nt, Artificial Sequence
  Description of Artificial Sequence: Synthetic oligonucleotide
uucagcuucucuucguguu

SEQ ID NO: 2978497 - RNA, 19 nt, Artificial Sequence
  Description of Artificial Sequence: Synthetic oligonucleotide
uaaccgcauacuugcgaag

SEQ ID NO: 2978498 - RNA, 19 nt, Artificial Sequence
  Description of Artificial Sequence: Synthetic oligonucleotide
ccuuguagaauuuccugag

SEQ ID NO: 2978499 - RNA, 19 nt, Artificial Sequence
  Description of Artificial Sequence: Synthetic oligonucleotide
uacagccucuccuuccucu

SEQ ID NO: 2978500 - RNA, 19 nt, Artificial Sequence
  Description of Artificial Sequence: Synthetic oligonucleotide
agcugggacagcuccaccu

SEQ ID NO: 2978501 - RNA, 19 nt, Artificial Sequence
  Description of Artificial Sequence: Synthetic oligonucleotide
gaucguccaguuguuuuag

SEQ ID NO: 2978502 - RNA, 19 nt, Artificial Sequence
  Description of Artificial Sequence: Synthetic oligonucleotide
caggucuagaggcuuguac

SEQ ID NO: 2978503 - RNA, 19 nt, Artificial Sequence
  Description of Artificial Sequence: Synthetic oligonucleotide
gucugguuaauuacgguga

SEQ ID NO: 2978504 - RNA, 19 nt, Artificial Sequence
  Description of Artificial Sequence: Synthetic oligonucleotide
uuggcgacgcgaagcuggg

SEQ ID NO: 2978505 - RNA, 19 nt, Artificial Sequence
  Description of Artificial Sequence: Synthetic oligonucleotide
ucucuucguguuuggugag

SEQ ID NO: 2978506 - RNA, 19 nt, Artificial Sequence
  Description of Artificial Sequence: Synthetic oligonucleotide
aggucccgagccuuaaucu

SEQ ID NO: 2978507 - RNA, 19 nt, Artificial Sequence
  Description of Artificial Sequence: Synthetic oligonucleotide
ugcacuuuauugccuucuc

SEQ ID NO: 2978508 - RNA, 19 nt, Artificial Sequence
  Description of Artificial Sequence: Synthetic oligonucleotide
ugaggacacgggcaaugga

SEQ ID NO: 2978509 - RNA, 19 nt, Artificial Sequence
  Description of Artificial Sequence: Synthetic oligonucleotide
ucguguuuggugagccggc

SEQ ID NO: 2978510 - RNA, 19 nt, Artificial Sequence
  Description of Artificial Sequence: Synthetic oligonucleotide
gagaguuuggaagcggcuc

SEQ ID NO: 2978511 - RNA, 19 nt, Artificial Sequence
  Description of Artificial Sequence: Synthetic oligonucleotide
agaucguccaguuguuuua

SEQ ID NO: 2978512 - RNA, 19 nt, Artificial Sequence
  Description of Artificial Sequence: Synthetic oligonucleotide
ugcgaagcggguacagccu

SEQ ID NO: 2978513 - RNA, 19 nt, Artificial Sequence
  Description of Artificial Sequence: Synthetic oligonucleotide
cuuaaccgcauacuugcga

SEQ ID NO: 2978514 - RNA, 19 nt, Artificial Sequence
  Description of Artificial Sequence: Synthetic oligonucleotide
ucuuggccauagcugcgcc

SEQ ID NO: 2978515 - RNA, 19 nt, Artificial Sequence
  Description of Artificial Sequence: Synthetic oligonucleotide
auuuucggacgacucguau

SEQ ID NO: 2978516 - RNA, 19 nt, Artificial Sequence
  Description of Artificial Sequence: Synthetic oligonucleotide
guaucuuggagaguuugga

SEQ ID NO: 2978517 - RNA, 19 nt, Artificial Sequence
  Description of Artificial Sequence: Synthetic oligonucleotide
agcggguacagccucuccu

SEQ ID NO: 2978518 - RNA, 19 nt, Artificial Sequence
  Description of Artificial Sequence: Synthetic oligonucleotide
gaguuuggaagcggcuccg

SEQ ID NO: 2978519 - RNA, 19 nt, Artificial Sequence
  Description of Artificial Sequence: Synthetic oligonucleotide
guuuggaagcggcuccgcc

SEQ ID NO: 2978520 - RNA, 19 nt, Artificial Sequence
  Description of Artificial Sequence: Synthetic oligonucleotide
cuuguacuucuuacccuug

SEQ ID NO: 2978521 - RNA, 19 nt, Artificial Sequence
  Description of Artificial Sequence: Synthetic oligonucleotide
cuuggccauagcugcgccg

SEQ ID NO: 2978522 - RNA, 19 nt, Artificial Sequence
  Description of Artificial Sequence: Synthetic oligonucleotide
cuucguguuuggugagccg

SEQ ID NO: 2978523 - RNA, 19 nt, Artificial Sequence
  Description of Artificial Sequence: Synthetic oligonucleotide
ucuugggucgcaggucuag

SEQ ID NO: 2978524 - RNA, 19 nt, Artificial Sequence
  Description of Artificial Sequence: Synthetic oligonucleotide
acacgggcaauggauuuuc

SEQ ID NO: 2978525 - RNA, 19 nt, Artificial Sequence
  Description of Artificial Sequence: Synthetic oligonucleotide
gggucgcaggucuagaggc

SEQ ID NO: 2978526 - RNA, 19 nt, Artificial Sequence
  Description of Artificial Sequence: Synthetic oligonucleotide
aguuuggaagcggcuccgc

SEQ ID NO: 2978527 - RNA, 19 nt, Artificial Sequence
  Description of Artificial Sequence: Synthetic oligonucleotide
caccgcugaagccuccugg

SEQ ID NO: 2978528 - RNA, 19 nt, Artificial Sequence
  Description of Artificial Sequence: Synthetic oligonucleotide
cuuacccuuguagaauuuc

SEQ ID NO: 2978529 - RNA, 19 nt, Artificial Sequence
  Description of Artificial Sequence: Synthetic oligonucleotide
uugcacuuuauugccuucu

SEQ ID NO: 2978530 - RNA, 19 nt, Artificial Sequence
  Description of Artificial Sequence: Synthetic oligonucleotide
uccucugcugcuucuuggu

SEQ ID NO: 2978531 - RNA, 19 nt, Artificial Sequence
  Description of Artificial Sequence: Synthetic oligonucleotide
cugguuaauuacggugagg

SEQ ID NO: 2978532 - RNA, 19 nt, Artificial Sequence
  Description of Artificial Sequence: Synthetic oligonucleotide
guguuuggugagccggcgg

SEQ ID NO: 2978533 - RNA, 19 nt, Artificial Sequence
  Description of Artificial Sequence: Synthetic oligonucleotide
ucaccuuggcgacgcgaag

SEQ ID NO: 2978534 - RNA, 19 nt, Artificial Sequence
  Description of Artificial Sequence: Synthetic oligonucleotide
gggcaauggauuuucggac

SEQ ID NO: 2978535 - RNA, 19 nt, Artificial Sequence
  Description of Artificial Sequence: Synthetic oligonucleotide
ggucuucagcuucucuucg

SEQ ID NO: 2978536 - RNA, 19 nt, Artificial Sequence
  Description of Artificial Sequence: Synthetic oligonucleotide
guuguuuuagcagcuccuc

SEQ ID NO: 2978537 - RNA, 19 nt, Artificial Sequence
  Description of Artificial Sequence: Synthetic oligonucleotide
ucagcuucucuucguguuu

SEQ ID NO: 2978538 - RNA, 19 nt, Artificial Sequence
  Description of Artificial Sequence: Synthetic oligonucleotide
ucuagucuucuugggucgc

SEQ ID NO: 2978539 - RNA, 19 nt, Artificial Sequence
  Description of Artificial Sequence: Synthetic oligonucleotide
gaagcugggacagcuccac

SEQ ID NO: 2978540 - RNA, 19 nt, Artificial Sequence
  Description of Artificial Sequence: Synthetic oligonucleotide
uuuggugagccggcggcgc

SEQ ID NO: 2978541 - RNA, 19 nt, Artificial Sequence
  Description of Artificial Sequence: Synthetic oligonucleotide
uagucuucuugggucgcag

SEQ ID NO: 2978542 - RNA, 19 nt, Artificial Sequence
  Description of Artificial Sequence: Synthetic oligonucleotide
gcucuagucuucuuggguc

SEQ ID NO: 2978543 - RNA, 19 nt, Artificial Sequence
  Description of Artificial Sequence: Synthetic oligonucleotide
uucagaucguccaguuguu

SEQ ID NO: 2978544 - RNA, 19 nt, Artificial Sequence
  Description of Artificial Sequence: Synthetic oligonucleotide
aggccuuaaccgcauacuu

SEQ ID NO: 2978545 - RNA, 19 nt, Artificial Sequence
  Description of Artificial Sequence: Synthetic oligonucleotide
agcugcgccgcucaccgcu

SEQ ID NO: 2978546 - RNA, 19 nt, Artificial Sequence
  Description of Artificial Sequence: Synthetic oligonucleotide
accuuggcgacgcgaagcu

SEQ ID NO: 2978547 - RNA, 19 nt, Artificial Sequence
  Description of Artificial Sequence: Synthetic oligonucleotide
uagaggcuuguacuucuua

SEQ ID NO: 2978548 - RNA, 19 nt, Artificial Sequence
  Description of Artificial Sequence: Synthetic oligonucleotide
gugaggacacgggcaaugg

SEQ ID NO: 2978549 - RNA, 19 nt, Artificial Sequence
  Description of Artificial Sequence: Synthetic oligonucleotide
cuugcacuuuauugccuuc

SEQ ID NO: 2978550 - RNA, 19 nt, Artificial Sequence
  Description of Artificial Sequence: Synthetic oligonucleotide
gguuaauuacggugaggac

SEQ ID NO: 2978551 - RNA, 19 nt, Artificial Sequence
  Description of Artificial Sequence: Synthetic oligonucleotide
caggucccgagccuuaauc

SEQ ID NO: 2978552 - RNA, 19 nt, Artificial Sequence
  Description of Artificial Sequence: Synthetic oligonucleotide
ucuuacccuuguagaauuu

SEQ ID NO: 2978553 - RNA, 19 nt, Artificial Sequence
  Description of Artificial Sequence: Synthetic oligonucleotide
guagaauuuccugagguuu

SEQ ID NO: 2978554 - RNA, 19 nt, Artificial Sequence
  Description of Artificial Sequence: Synthetic oligonucleotide
cuugcgaagcggguacagc

SEQ ID NO: 2978555 - RNA, 19 nt, Artificial Sequence
  Description of Artificial Sequence: Synthetic oligonucleotide
ggcuccgccagucaccuug

SEQ ID NO: 2978556 - RNA, 19 nt, Artificial Sequence
  Description of Artificial Sequence: Synthetic oligonucleotide
cacuuuauugccuucucau

SEQ ID NO: 2978557 - RNA, 19 nt, Artificial Sequence
  Description of Artificial Sequence: Synthetic oligonucleotide
guuuggugagccggcggcg

SEQ ID NO: 2978558 - RNA, 19 nt, Artificial Sequence
  Description of Artificial Sequence: Synthetic oligonucleotide
cauagcugcgccgcucacc

SEQ ID NO: 2978559 - RNA, 19 nt, Artificial Sequence
  Description of Artificial Sequence: Synthetic oligonucleotide
caccuuggcgacgcgaagc

SEQ ID NO: 2978560 - RNA, 19 nt, Artificial Sequence
  Description of Artificial Sequence: Synthetic oligonucleotide
ucgcaggucuagaggcuug

SEQ ID NO: 2978561 - RNA, 19 nt, Artificial Sequence
  Description of Artificial Sequence: Synthetic oligonucleotide
gcgaagcugggacagcucc

SEQ ID NO: 2978562 - RNA, 19 nt, Artificial Sequence
  Description of Artificial Sequence: Synthetic oligonucleotide
cgagccuuaaucuuggcca

SEQ ID NO: 2978563 - RNA, 19 nt, Artificial Sequence
  Description of Artificial Sequence: Synthetic oligonucleotide
cuccuccuucuucuugccg

SEQ ID NO: 2978564 - RNA, 19 nt, Artificial Sequence
  Description of Artificial Sequence: Synthetic oligonucleotide
uaauuacggugaggacacg

SEQ ID NO: 2978565 - RNA, 19 nt, Artificial Sequence
  Description of Artificial Sequence: Synthetic oligonucleotide
acuugcgaagcggguacag

SEQ ID NO: 2978566 - RNA, 19 nt, Artificial Sequence
  Description of Artificial Sequence: Synthetic oligonucleotide
ugccuucucaucaggccuu

SEQ ID NO: 2978567 - RNA, 19 nt, Artificial Sequence
  Description of Artificial Sequence: Synthetic oligonucleotide
ucaccgcugaagccuccug

SEQ ID NO: 2978568 - RNA, 19 nt, Artificial Sequence
  Description of Artificial Sequence: Synthetic oligonucleotide
gucccgagccuuaaucuug

SEQ ID NO: 2978569 - RNA, 19 nt, Artificial Sequence
  Description of Artificial Sequence: Synthetic oligonucleotide
cuccaccuucagaucgucc

SEQ ID NO: 2978570 - RNA, 19 nt, Artificial Sequence
  Description of Artificial Sequence: Synthetic oligonucleotide
cacgggcaauggauuuucg

SEQ ID NO: 2978571 - RNA, 19 nt, Artificial Sequence
  Description of Artificial Sequence: Synthetic oligonucleotide
cguaucuuggagaguuugg

SEQ ID NO: 2978572 - RNA, 19 nt, Artificial Sequence
  Description of Artificial Sequence: Synthetic oligonucleotide
agcggcuccgccagucacc

SEQ ID NO: 2978573 - RNA, 19 nt, Artificial Sequence
  Description of Artificial Sequence: Synthetic oligonucleotide
gccuuaaucuuggccauag

SEQ ID NO: 2978574 - RNA, 19 nt, Artificial Sequence
  Description of Artificial Sequence: Synthetic oligonucleotide
accuucagaucguccaguu

SEQ ID NO: 2978575 - RNA, 19 nt, Artificial Sequence
  Description of Artificial Sequence: Synthetic oligonucleotide
uucuugccgcgcagguccc

SEQ ID NO: 2978576 - RNA, 19 nt, Artificial Sequence
  Description of Artificial Sequence: Synthetic oligonucleotide
ggcgacgcgaagcugggac

SEQ ID NO: 2978577 - RNA, 19 nt, Artificial Sequence
  Description of Artificial Sequence: Synthetic oligonucleotide
cguccaguuguuuuagcag

SEQ ID NO: 2978578 - RNA, 19 nt, Artificial Sequence
  Description of Artificial Sequence: Synthetic oligonucleotide
uuggugagccggcggcgca

SEQ ID NO: 2978579 - RNA, 19 nt, Artificial Sequence
  Description of Artificial Sequence: Synthetic oligonucleotide
ucuucuugccgcgcagguc

SEQ ID NO: 2978580 - RNA, 19 nt, Artificial Sequence
  Description of Artificial Sequence: Synthetic oligonucleotide
gcaauggauuuucggacga

SEQ ID NO: 2978581 - RNA, 19 nt, Artificial Sequence
  Description of Artificial Sequence: Synthetic oligonucleotide
gagucugguuaauuacggu

SEQ ID NO: 2978582 - RNA, 19 nt, Artificial Sequence
  Description of Artificial Sequence: Synthetic oligonucleotide
cuucuugggucgcaggucu

SEQ ID NO: 2978583 - RNA, 19 nt, Artificial Sequence
  Description of Artificial Sequence: Synthetic oligonucleotide
caauggauuuucggacgac

SEQ ID NO: 2978584 - RNA, 19 nt, Artificial Sequence
  Description of Artificial Sequence: Synthetic oligonucleotide
ggguacagccucuccuucc

SEQ ID NO: 2978585 - RNA, 19 nt, Artificial Sequence
  Description of Artificial Sequence: Synthetic oligonucleotide
cgcauacuugcgaagcggg

SEQ ID NO: 2978586 - RNA, 19 nt, Artificial Sequence
  Description of Artificial Sequence: Synthetic oligonucleotide
gucuagaggcuuguacuuc

SEQ ID NO: 2978587 - RNA, 19 nt, Artificial Sequence
  Description of Artificial Sequence: Synthetic oligonucleotide
cagcuucucuucguguuug

SEQ ID NO: 2978588 - RNA, 19 nt, Artificial Sequence
  Description of Artificial Sequence: Synthetic oligonucleotide
gaggacacgggcaauggau

SEQ ID NO: 2978589 - RNA, 19 nt, Artificial Sequence
  Description of Artificial Sequence: Synthetic oligonucleotide
cauacuugcgaagcgggua

SEQ ID NO: 2978590 - RNA, 19 nt, Artificial Sequence
  Description of Artificial Sequence: Synthetic oligonucleotide
ggugaggacacgggcaaug

SEQ ID NO: 2978591 - RNA, 19 nt, Artificial Sequence
  Description of Artificial Sequence: Synthetic oligonucleotide
cgacucguaucuuggagag

SEQ ID NO: 2978592 - RNA, 19 nt, Artificial Sequence
  Description of Artificial Sequence: Synthetic oligonucleotide
ggccuuaaccgcauacuug

SEQ ID NO: 2978593 - RNA, 19 nt, Artificial Sequence
  Description of Artificial Sequence: Synthetic oligonucleotide
ccgagccuuaaucuuggcc

SEQ ID NO: 2978594 - RNA, 19 nt, Artificial Sequence
  Description of Artificial Sequence: Synthetic oligonucleotide
ccuuaaccgcauacuugcg

SEQ ID NO: 2978595 - RNA, 19 nt, Artificial Sequence
  Description of Artificial Sequence: Synthetic oligonucleotide
ugccgcgcaggucccgagc

SEQ ID NO: 2978596 - RNA, 19 nt, Artificial Sequence
  Description of Artificial Sequence: Synthetic oligonucleotide
gaagcggcuccgccaguca

SEQ ID NO: 2978597 - RNA, 19 nt, Artificial Sequence
  Description of Artificial Sequence: Synthetic oligonucleotide
agucaccuuggcgacgcga

SEQ ID NO: 2978598 - RNA, 19 nt, Artificial Sequence
  Description of Artificial Sequence: Synthetic oligonucleotide
cugggacagcuccaccuuc

SEQ ID NO: 2978599 - RNA, 19 nt, Artificial Sequence
  Description of Artificial Sequence: Synthetic oligonucleotide
uacuugcgaagcggguaca

SEQ ID NO: 2978600 - RNA, 19 nt, Artificial Sequence
  Description of Artificial Sequence: Synthetic oligonucleotide
acgcgaagcugggacagcu

SEQ ID NO: 2978601 - RNA, 19 nt, Artificial Sequence
  Description of Artificial Sequence: Synthetic oligonucleotide
ucagaucguccaguuguuu

SEQ ID NO: 2978602 - RNA, 19 nt, Artificial Sequence
  Description of Artificial Sequence: Synthetic oligonucleotide
ccuccuucuucuugccgcg

SEQ ID NO: 2978603 - RNA, 19 nt, Artificial Sequence
  Description of Artificial Sequence: Synthetic oligonucleotide
cggacgacucguaucuugg

SEQ ID NO: 2978604 - RNA, 19 nt, Artificial Sequence
  Description of Artificial Sequence: Synthetic oligonucleotide
ugagccggcggcgcauagc

SEQ ID NO: 2978605 - RNA, 19 nt, Artificial Sequence
  Description of Artificial Sequence: Synthetic oligonucleotide
gagccggcggcgcauagcu

SEQ ID NO: 2978606 - RNA, 19 nt, Artificial Sequence
  Description of Artificial Sequence: Synthetic oligonucleotide
ucuugccgcgcaggucccg

SEQ ID NO: 2978607 - RNA, 19 nt, Artificial Sequence
  Description of Artificial Sequence: Synthetic oligonucleotide
ccgccagucaccuuggcga

SEQ ID NO: 2978608 - RNA, 19 nt, Artificial Sequence
  Description of Artificial Sequence: Synthetic oligonucleotide
gauuuucggacgacucgua

SEQ ID NO: 2978609 - RNA, 19 nt, Artificial Sequence
  Description of Artificial Sequence: Synthetic oligonucleotide
gagccuuaaucuuggccau

SEQ ID NO: 2978610 - RNA, 19 nt, Artificial Sequence
  Description of Artificial Sequence: Synthetic oligonucleotide
ucuuggucuucagcuucuc

SEQ ID NO: 2978611 - RNA, 19 nt, Artificial Sequence
  Description of Artificial Sequence: Synthetic oligonucleotide
uucuugggucgcaggucua

SEQ ID NO: 2978612 - RNA, 19 nt, Artificial Sequence
  Description of Artificial Sequence: Synthetic oligonucleotide
gucaccuuggcgacgcgaa

SEQ ID NO: 2978613 - RNA, 19 nt, Artificial Sequence
  Description of Artificial Sequence: Synthetic oligonucleotide
aggacacgggcaauggauu

SEQ ID NO: 2978614 - RNA, 19 nt, Artificial Sequence
  Description of Artificial Sequence: Synthetic oligonucleotide
cuucuuacccuuguagaau

SEQ ID NO: 2978615 - RNA, 19 nt, Artificial Sequence
  Description of Artificial Sequence: Synthetic oligonucleotide
guuuuagcagcuccuccuu

SEQ ID NO: 2978616 - RNA, 19 nt, Artificial Sequence
  Description of Artificial Sequence: Synthetic oligonucleotide
ggauuuucggacgacucgu

SEQ ID NO: 2978617 - RNA, 19 nt, Artificial Sequence
  Description of Artificial Sequence: Synthetic oligonucleotide
cuucagcuucucuucgugu

SEQ ID NO: 2978618 - RNA, 19 nt, Artificial Sequence
  Description of Artificial Sequence: Synthetic oligonucleotide
ccagucaccuuggcgacgc

SEQ ID NO: 2978619 - RNA, 19 nt, Artificial Sequence
  Description of Artificial Sequence: Synthetic oligonucleotide
uugccgcgcaggucccgag

SEQ ID NO: 2978620 - RNA, 19 nt, Artificial Sequence
  Description of Artificial Sequence: Synthetic oligonucleotide
ccgcauacuugcgaagcgg

SEQ ID NO: 2978621 - RNA, 19 nt, Artificial Sequence
  Description of Artificial Sequence: Synthetic oligonucleotide
cgggcaauggauuuucgga

SEQ ID NO: 2978622 - RNA, 19 nt, Artificial Sequence
  Description of Artificial Sequence: Synthetic oligonucleotide
ccuuaaucuuggccauagc

SEQ ID NO: 2978623 - RNA, 19 nt, Artificial Sequence
  Description of Artificial Sequence: Synthetic oligonucleotide
gacgcgaagcugggacagc

SEQ ID NO: 2978624 - RNA, 19 nt, Artificial Sequence
  Description of Artificial Sequence: Synthetic oligonucleotide
uggccauagcugcgccgcu

SEQ ID NO: 2978625 - RNA, 19 nt, Artificial Sequence
  Description of Artificial Sequence: Synthetic oligonucleotide
gcuuguacuucuuacccuu

SEQ ID NO: 2978626 - RNA, 19 nt, Artificial Sequence
  Description of Artificial Sequence: Synthetic oligonucleotide
cagaucguccaguuguuuu

SEQ ID NO: 2978627 - RNA, 19 nt, Artificial Sequence
  Description of Artificial Sequence: Synthetic oligonucleotide
gguacagccucuccuuccu

SEQ ID NO: 2978628 - RNA, 19 nt, Artificial Sequence
  Description of Artificial Sequence: Synthetic oligonucleotide
guacagccucuccuuccuc

SEQ ID NO: 2978629 - RNA, 19 nt, Artificial Sequence
  Description of Artificial Sequence: Synthetic oligonucleotide
ggcuuguacuucuuacccu

SEQ ID NO: 2978630 - RNA, 19 nt, Artificial Sequence
  Description of Artificial Sequence: Synthetic oligonucleotide
uggaagcggcuccgccagu

SEQ ID NO: 2978631 - RNA, 19 nt, Artificial Sequence
  Description of Artificial Sequence: Synthetic oligonucleotide
cuuggucuucagcuucucu

SEQ ID NO: 2978632 - RNA, 19 nt, Artificial Sequence
  Description of Artificial Sequence: Synthetic oligonucleotide
cuccuucuucuugccgcgc

SEQ ID NO: 2978633 - RNA, 19 nt, Artificial Sequence
  Description of Artificial Sequence: Synthetic oligonucleotide
gccgcucaccgcugaagcc

SEQ ID NO: 2978634 - RNA, 19 nt, Artificial Sequence
  Description of Artificial Sequence: Synthetic oligonucleotide
cuagucuucuugggucgca

SEQ ID NO: 2978635 - RNA, 19 nt, Artificial Sequence
  Description of Artificial Sequence: Synthetic oligonucleotide
gugagccggcggcgcauag

SEQ ID NO: 2978636 - RNA, 19 nt, Artificial Sequence
  Description of Artificial Sequence: Synthetic oligonucleotide
gccgcgcaggucccgagcc

SEQ ID NO: 2978637 - RNA, 19 nt, Artificial Sequence
  Description of Artificial Sequence: Synthetic oligonucleotide
ggacgacucguaucuugga

SEQ ID NO: 2978638 - RNA, 19 nt, Artificial Sequence
  Description of Artificial Sequence: Synthetic oligonucleotide
ugcgccgcucaccgcugaa

SEQ ID NO: 2978639 - RNA, 19 nt, Artificial Sequence
  Description of Artificial Sequence: Synthetic oligonucleotide
cuugggucgcaggucuaga

SEQ ID NO: 2978640 - RNA, 19 nt, Artificial Sequence
  Description of Artificial Sequence: Synthetic oligonucleotide
ggucuagaggcuuguacuu

SEQ ID NO: 2978641 - RNA, 19 nt, Artificial Sequence
  Description of Artificial Sequence: Synthetic oligonucleotide
gccauagcugcgccgcuca

SEQ ID NO: 2978642 - RNA, 19 nt, Artificial Sequence
  Description of Artificial Sequence: Synthetic oligonucleotide
ggcgcauagcucuagucuu

SEQ ID NO: 2978643 - RNA, 19 nt, Artificial Sequence
  Description of Artificial Sequence: Synthetic oligonucleotide
aucaggccuuaaccgcaua

SEQ ID NO: 2978644 - RNA, 19 nt, Artificial Sequence
  Description of Artificial Sequence: Synthetic oligonucleotide
ggacagcuccaccuucaga

SEQ ID NO: 2978645 - RNA, 19 nt, Artificial Sequence
  Description of Artificial Sequence: Synthetic oligonucleotide
gcgaagcggguacagccuc

SEQ ID NO: 2978646 - RNA, 19 nt, Artificial Sequence
  Description of Artificial Sequence: Synthetic oligonucleotide
cagucaccuuggcgacgcg

SEQ ID NO: 2978647 - RNA, 19 nt, Artificial Sequence
  Description of Artificial Sequence: Synthetic oligonucleotide
uagcugcgccgcucaccgc

SEQ ID NO: 2978648 - RNA, 19 nt, Artificial Sequence
  Description of Artificial Sequence: Synthetic oligonucleotide
caggccuuaaccgcauacu

SEQ ID NO: 2978649 - RNA, 19 nt, Artificial Sequence
  Description of Artificial Sequence: Synthetic oligonucleotide
cuccgccagucaccuuggc

SEQ ID NO: 2978650 - RNA, 19 nt, Artificial Sequence
  Description of Artificial Sequence: Synthetic oligonucleotide
ggaagcggcuccgccaguc

SEQ ID NO: 2978651 - RNA, 19 nt, Artificial Sequence
  Description of Artificial Sequence: Synthetic oligonucleotide
gucuugcacuuuauugccu

SEQ ID NO: 2978652 - RNA, 19 nt, Artificial Sequence
  Description of Artificial Sequence: Synthetic oligonucleotide
gcggcgcauagcucuaguc

SEQ ID NO: 2978653 - RNA, 19 nt, Artificial Sequence
  Description of Artificial Sequence: Synthetic oligonucleotide
uggugagccggcggcgcau

SEQ ID NO: 2978654 - RNA, 19 nt, Artificial Sequence
  Description of Artificial Sequence: Synthetic oligonucleotide
uucggacgacucguaucuu

SEQ ID NO: 2978655 - RNA, 19 nt, Artificial Sequence
  Description of Artificial Sequence: Synthetic oligonucleotide
gacacgggcaauggauuuu

SEQ ID NO: 2978656 - RNA, 19 nt, Artificial Sequence
  Description of Artificial Sequence: Synthetic oligonucleotide
gcgacgcgaagcugggaca

SEQ ID NO: 2978657 - RNA, 19 nt, Artificial Sequence
  Description of Artificial Sequence: Synthetic oligonucleotide
cguguuuggugagccggcg

SEQ ID NO: 2978658 - RNA, 19 nt, Artificial Sequence
  Description of Artificial Sequence: Synthetic oligonucleotide
agccuuaaucuuggccaua

SEQ ID NO: 2978659 - RNA, 19 nt, Artificial Sequence
  Description of Artificial Sequence: Synthetic oligonucleotide
ccaguuguuuuagcagcuc

SEQ ID NO: 2978660 - RNA, 19 nt, Artificial Sequence
  Description of Artificial Sequence: Synthetic oligonucleotide
gcuccgccagucaccuugg

SEQ ID NO: 2978661 - RNA, 19 nt, Artificial Sequence
  Description of Artificial Sequence: Synthetic oligonucleotide
gccagucaccuuggcgacg

SEQ ID NO: 2978662 - RNA, 19 nt, Artificial Sequence
  Description of Artificial Sequence: Synthetic oligonucleotide
gccggcggcgcauagcucu

SEQ ID NO: 2978663 - RNA, 19 nt, Artificial Sequence
  Description of Artificial Sequence: Synthetic oligonucleotide
ccucugcugcuucuugguc

SEQ ID NO: 2978664 - RNA, 19 nt, Artificial Sequence
  Description of Artificial Sequence: Synthetic oligonucleotide
cgccgcucaccgcugaagc

SEQ ID NO: 2978665 - RNA, 19 nt, Artificial Sequence
  Description of Artificial Sequence: Synthetic oligonucleotide
cuugccgcgcaggucccga

SEQ ID NO: 2978666 - RNA, 19 nt, Artificial Sequence
  Description of Artificial Sequence: Synthetic oligonucleotide
gacucguaucuuggagagu

SEQ ID NO: 2978667 - RNA, 19 nt, Artificial Sequence
  Description of Artificial Sequence: Synthetic oligonucleotide
caucaggccuuaaccgcau

SEQ ID NO: 2978668 - RNA, 19 nt, Artificial Sequence
  Description of Artificial Sequence: Synthetic oligonucleotide
gcgcauagcucuagucuuc

SEQ ID NO: 2978669 - RNA, 19 nt, Artificial Sequence
  Description of Artificial Sequence: Synthetic oligonucleotide
ggucccgagccuuaaucuu

SEQ ID NO: 2978670 - RNA, 19 nt, Artificial Sequence
  Description of Artificial Sequence: Synthetic oligonucleotide
cgacgcgaagcugggacag

SEQ ID NO: 2978671 - RNA, 19 nt, Artificial Sequence
  Description of Artificial Sequence: Synthetic oligonucleotide
cuagaggcuuguacuucuu

SEQ ID NO: 2978672 - RNA, 19 nt, Artificial Sequence
  Description of Artificial Sequence: Synthetic oligonucleotide
ggacacgggcaauggauuu

SEQ ID NO: 2978673 - RNA, 19 nt, Artificial Sequence
  Description of Artificial Sequence: Synthetic oligonucleotide
agccggcggcgcauagcuc

SEQ ID NO: 2978674 - RNA, 19 nt, Artificial Sequence
  Description of Artificial Sequence: Synthetic oligonucleotide
caccuucagaucguccagu

SEQ ID NO: 2978675 - RNA, 19 nt, Artificial Sequence
  Description of Artificial Sequence: Synthetic oligonucleotide
cccgagccuuaaucuuggc

SEQ ID NO: 2978676 - RNA, 19 nt, Artificial Sequence
  Description of Artificial Sequence: Synthetic oligonucleotide
gucgcaggucuagaggcuu

SEQ ID NO: 2978677 - RNA, 19 nt, Artificial Sequence
  Description of Artificial Sequence: Synthetic oligonucleotide
cucguaucuuggagaguuu

SEQ ID NO: 2978678 - RNA, 19 nt, Artificial Sequence
  Description of Artificial Sequence: Synthetic oligonucleotide
cgccagucaccuuggcgac

SEQ ID NO: 2978679 - RNA, 19 nt, Artificial Sequence
  Description of Artificial Sequence: Synthetic oligonucleotide
ggccauagcugcgccgcuc

SEQ ID NO: 2978680 - RNA, 19 nt, Artificial Sequence
  Description of Artificial Sequence: Synthetic oligonucleotide
gcgccgcucaccgcugaag

SEQ ID NO: 2978681 - RNA, 19 nt, Artificial Sequence
  Description of Artificial Sequence: Synthetic oligonucleotide
gcauacuugcgaagcgggu

SEQ ID NO: 2978682 - RNA, 19 nt, Artificial Sequence
  Description of Artificial Sequence: Synthetic oligonucleotide
cgaagcugggacagcucca

SEQ ID NO: 2978683 - RNA, 19 nt, Artificial Sequence
  Description of Artificial Sequence: Synthetic oligonucleotide
gcuccaccuucagaucguc

SEQ ID NO: 2978684 - RNA, 19 nt, Artificial Sequence
  Description of Artificial Sequence: Synthetic oligonucleotide
cugcugcuucuuggucuuc

SEQ ID NO: 2978685 - RNA, 19 nt, Artificial Sequence
  Description of Artificial Sequence: Synthetic oligonucleotide
gcugggacagcuccaccuu

SEQ ID NO: 2978686 - RNA, 19 nt, Artificial Sequence
  Description of Artificial Sequence: Synthetic oligonucleotide
gcggguacagccucuccuu

SEQ ID NO: 2978687 - RNA, 19 nt, Artificial Sequence
  Description of Artificial Sequence: Synthetic oligonucleotide
cgcucaccgcugaagccuc

SEQ ID NO: 2978688 - RNA, 19 nt, Artificial Sequence
  Description of Artificial Sequence: Synthetic oligonucleotide
cggguacagccucuccuuc

SEQ ID NO: 2978689 - RNA, 19 nt, Artificial Sequence
  Description of Artificial Sequence: Synthetic oligonucleotide
ccuuggcgacgcgaagcug

SEQ ID NO: 2978690 - RNA, 19 nt, Artificial Sequence
  Description of Artificial Sequence: Synthetic oligonucleotide
cucaccgcugaagccuccu

SEQ ID NO: 2978691 - RNA, 19 nt, Artificial Sequence
  Description of Artificial Sequence: Synthetic oligonucleotide
cggcgcauagcucuagucu

SEQ ID NO: 2978692 - RNA, 19 nt, Artificial Sequence
  Description of Artificial Sequence: Synthetic oligonucleotide
cugcgccgcucaccgcuga

SEQ ID NO: 2978693 - RNA, 19 nt, Artificial Sequence
  Description of Artificial Sequence: Synthetic oligonucleotide
gcugcgccgcucaccgcug

SEQ ID NO: 2978694 - RNA, 19 nt, Artificial Sequence
  Description of Artificial Sequence: Synthetic oligonucleotide
cgcgaagcugggacagcuc

SEQ ID NO: 2978695 - RNA, 19 nt, Artificial Sequence
  Description of Artificial Sequence: Synthetic oligonucleotide
gcucaccgcugaagccucc

SEQ ID NO: 2978696 - RNA, 19 nt, Artificial Sequence
  Description of Artificial Sequence: Synthetic oligonucleotide
ggcggcgcauagcucuagu

SEQ ID NO: 2978697 - RNA, 19 nt, Artificial Sequence
  Description of Artificial Sequence: Synthetic oligonucleotide
ccgcucaccgcugaagccu

SEQ ID NO: 2978698 - RNA, 19 nt, Artificial Sequence
  Description of Artificial Sequence: Synthetic oligonucleotide
gcggcuccgccagucaccu

SEQ ID NO: 2978699 - RNA, 19 nt, Artificial Sequence
  Description of Artificial Sequence: Synthetic oligonucleotide
gcauagcucuagucuucuu

SEQ ID NO: 2978700 - RNA, 19 nt, Artificial Sequence
  Description of Artificial Sequence: Synthetic oligonucleotide
ggugagccggcggcgcaua

SEQ ID NO: 2978701 - RNA, 19 nt, Artificial Sequence
  Description of Artificial Sequence: Synthetic oligonucleotide
gccuucucaucaggccuua

SEQ ID NO: 2978702 - RNA, 19 nt, Artificial Sequence
  Description of Artificial Sequence: Synthetic oligonucleotide
gcaggucccgagccuuaau

SEQ ID NO: 2978703 - RNA, 19 nt, Artificial Sequence
  Description of Artificial Sequence: Synthetic oligonucleotide
cgcauagcucuagucuucu

SEQ ID NO: 2978704 - RNA, 19 nt, Artificial Sequence
  Description of Artificial Sequence: Synthetic oligonucleotide
ccuucucaucaggccuuaa

SEQ ID NO: 2978705 - RNA, 19 nt, Artificial Sequence
  Description of Artificial Sequence: Synthetic oligonucleotide
ccggcggcgcauagcucua

SEQ ID NO: 2978706 - RNA, 19 nt, Artificial Sequence
  Description of Artificial Sequence: Synthetic oligonucleotide
cggcggcgcauagcucuag

SEQ ID NO: 2978707 - RNA, 19 nt, Artificial Sequence
  Description of Artificial Sequence: Synthetic oligonucleotide
gcgcaggucccgagccuua

SEQ ID NO: 2978708 - RNA, 19 nt, Artificial Sequence
  Description of Artificial Sequence: Synthetic oligonucleotide
cgcaggucuagaggcuugu

SEQ ID NO: 2978709 - RNA, 19 nt, Artificial Sequence
  Description of Artificial Sequence: Synthetic oligonucleotide
cgcaggucccgagccuuaa

SEQ ID NO: 2978710 - RNA, 19 nt, Artificial Sequence
  Description of Artificial Sequence: Synthetic oligonucleotide
ccgcgcaggucccgagccu

SEQ ID NO: 2978711 - RNA, 19 nt, Artificial Sequence
  Description of Artificial Sequence: Synthetic oligonucleotide
cgcgcaggucccgagccuu

SEQ ID NO: 2978712 - RNA, 19 nt, Artificial Sequence
  Description of Artificial Sequence: Synthetic oligonucleotide
cggugaggacacgggcaau

SEQ ID NO: 2978713 - RNA, 19 nt, Artificial Sequence
  Description of Artificial Sequence: Synthetic oligonucleotide
cggcuccgccagucaccuu

SEQ ID NO: 2978714 - RNA, 19 nt, Artificial Sequence
  Description of Artificial Sequence: Synthetic oligonucleotide
auuucaauggaguuuuccc

SEQ ID NO: 2978715 - RNA, 19 nt, Artificial Sequence
  Description of Artificial Sequence: Synthetic oligonucleotide
uuaauaucacugaagacug

SEQ ID NO: 2978716 - RNA, 19 nt, Artificial Sequence
  Description of Artificial Sequence: Synthetic oligonucleotide
aagucaacugguucaaggc

SEQ ID NO: 2978717 - RNA, 19 nt, Artificial Sequence
  Description of Artificial Sequence: Synthetic oligonucleotide
auuaauaucacugaagacu

SEQ ID NO: 2978718 - RNA, 19 nt, Artificial Sequence
  Description of Artificial Sequence: Synthetic oligonucleotide
ucuacgauugucuugaacu

SEQ ID NO: 2978719 - RNA, 19 nt, Artificial Sequence
  Description of Artificial Sequence: Synthetic oligonucleotide
aaauugaugggucaccuca

SEQ ID NO: 2978720 - RNA, 19 nt, Artificial Sequence
  Description of Artificial Sequence: Synthetic oligonucleotide
agauuaauaucacugaaga

SEQ ID NO: 2978721 - RNA, 19 nt, Artificial Sequence
  Description of Artificial Sequence: Synthetic oligonucleotide
aauuucaauggaguuuucc

SEQ ID NO: 2978722 - RNA, 19 nt, Artificial Sequence
  Description of Artificial Sequence: Synthetic oligonucleotide
uuuucaggaagacaguuca

SEQ ID NO: 2978723 - RNA, 19 nt, Artificial Sequence
  Description of Artificial Sequence: Synthetic oligonucleotide
uuucaauggaguuuucccg

SEQ ID NO: 2978724 - RNA, 19 nt, Artificial Sequence
  Description of Artificial Sequence: Synthetic oligonucleotide
uuuucuugcagauuaauau

SEQ ID NO: 2978725 - RNA, 19 nt, Artificial Sequence
  Description of Artificial Sequence: Synthetic oligonucleotide
uugcagauuaauaucacug

SEQ ID NO: 2978726 - RNA, 19 nt, Artificial Sequence
  Description of Artificial Sequence: Synthetic oligonucleotide
gcacuuuacaaauugaugg

SEQ ID NO: 2978727 - RNA, 19 nt, Artificial Sequence
  Description of Artificial Sequence: Synthetic oligonucleotide
gaagucaacugguucaagg

SEQ ID NO: 2978728 - RNA, 19 nt, Artificial Sequence
  Description of Artificial Sequence: Synthetic oligonucleotide
aauaucacugaagacuguc

SEQ ID NO: 2978729 - RNA, 19 nt, Artificial Sequence
  Description of Artificial Sequence: Synthetic oligonucleotide
agaugagaagcuuccaugg

SEQ ID NO: 2978730 - RNA, 19 nt, Artificial Sequence
  Description of Artificial Sequence: Synthetic oligonucleotide
aaagauacccacagacucc

SEQ ID NO: 2978731 - RNA, 19 nt, Artificial Sequence
  Description of Artificial Sequence: Synthetic oligonucleotide
uuaugggcaaguuuucagg

SEQ ID NO: 2978732 - RNA, 19 nt, Artificial Sequence
  Description of Artificial Sequence: Synthetic oligonucleotide
uucagcacuuuacaaauug

SEQ ID NO: 2978733 - RNA, 19 nt, Artificial Sequence
  Description of Artificial Sequence: Synthetic oligonucleotide
agucaacugguucaaggcc

SEQ ID NO: 2978734 - RNA, 19 nt, Artificial Sequence
  Description of Artificial Sequence: Synthetic oligonucleotide
uugucuucagcauuguaag

SEQ ID NO: 2978735 - RNA, 19 nt, Artificial Sequence
  Description of Artificial Sequence: Synthetic oligonucleotide
aaaauuucaauggaguuuu

SEQ ID NO: 2978736 - RNA, 19 nt, Artificial Sequence
  Description of Artificial Sequence: Synthetic oligonucleotide
uuuacaaauugauggguca

SEQ ID NO: 2978737 - RNA, 19 nt, Artificial Sequence
  Description of Artificial Sequence: Synthetic oligonucleotide
ugggucaccucaaagauac

SEQ ID NO: 2978738 - RNA, 19 nt, Artificial Sequence
  Description of Artificial Sequence: Synthetic oligonucleotide
ucaaacucuacgauugucu

SEQ ID NO: 2978739 - RNA, 19 nt, Artificial Sequence
  Description of Artificial Sequence: Synthetic oligonucleotide
cugcucaaaauuucaaugg

SEQ ID NO: 2978740 - RNA, 19 nt, Artificial Sequence
  Description of Artificial Sequence: Synthetic oligonucleotide
ugucuugaacuucucauug

SEQ ID NO: 2978741 - RNA, 19 nt, Artificial Sequence
  Description of Artificial Sequence: Synthetic oligonucleotide
acuucuggaccauggaggc

SEQ ID NO: 2978742 - RNA, 19 nt, Artificial Sequence
  Description of Artificial Sequence: Synthetic oligonucleotide
gagaucagagaugagaagc

SEQ ID NO: 2978743 - RNA, 19 nt, Artificial Sequence
  Description of Artificial Sequence: Synthetic oligonucleotide
gcauuguaagacuugaugg

SEQ ID NO: 2978744 - RNA, 19 nt, Artificial Sequence
  Description of Artificial Sequence: Synthetic oligonucleotide
ucagagaugagaagcuucc

SEQ ID NO: 2978745 - RNA, 19 nt, Artificial Sequence
  Description of Artificial Sequence: Synthetic oligonucleotide
aaggccccgacacucaaac

SEQ ID NO: 2978746 - RNA, 19 nt, Artificial Sequence
  Description of Artificial Sequence: Synthetic oligonucleotide
agcauuguaagacuugaug

SEQ ID NO: 2978747 - RNA, 19 nt, Artificial Sequence
  Description of Artificial Sequence: Synthetic oligonucleotide
uggguuuugcugcucaggg

SEQ ID NO: 2978748 - RNA, 19 nt, Artificial Sequence
  Description of Artificial Sequence: Synthetic oligonucleotide
cacuuuacaaauugauggg

SEQ ID NO: 2978749 - RNA, 19 nt, Artificial Sequence
  Description of Artificial Sequence: Synthetic oligonucleotide
caaagauacccacagacuc

SEQ ID NO: 2978750 - RNA, 19 nt, Artificial Sequence
  Description of Artificial Sequence: Synthetic oligonucleotide
cagauuaauaucacugaag

SEQ ID NO: 2978751 - RNA, 19 nt, Artificial Sequence
  Description of Artificial Sequence: Synthetic oligonucleotide
uaagacuugauggugcugc

SEQ ID NO: 2978752 - RNA, 19 nt, Artificial Sequence
  Description of Artificial Sequence: Synthetic oligonucleotide
aacucuacgauugucuuga

SEQ ID NO: 2978753 - RNA, 19 nt, Artificial Sequence
  Description of Artificial Sequence: Synthetic oligonucleotide
acccacagacuccugagcc

SEQ ID NO: 2978754 - RNA, 19 nt, Artificial Sequence
  Description of Artificial Sequence: Synthetic oligonucleotide
uuguaagacuugauggugc

SEQ ID NO: 2978755 - RNA, 19 nt, Artificial Sequence
  Description of Artificial Sequence: Synthetic oligonucleotide
ucaaagauacccacagacu

SEQ ID NO: 2978756 - RNA, 19 nt, Artificial Sequence
  Description of Artificial Sequence: Synthetic oligonucleotide
ugaugggucaccucaaaga

SEQ ID NO: 2978757 - RNA, 19 nt, Artificial Sequence
  Description of Artificial Sequence: Synthetic oligonucleotide
ugggcaaguuuucaggaag

SEQ ID NO: 2978758 - RNA, 19 nt, Artificial Sequence
  Description of Artificial Sequence: Synthetic oligonucleotide
accucaaagauacccacag

SEQ ID NO: 2978759 - RNA, 19 nt, Artificial Sequence
  Description of Artificial Sequence: Synthetic oligonucleotide
cacuucuggaccauggagg

SEQ ID NO: 2978760 - RNA, 19 nt, Artificial Sequence
  Description of Artificial Sequence: Synthetic oligonucleotide
ugcagauuaauaucacuga

SEQ ID NO: 2978761 - RNA, 19 nt, Artificial Sequence
  Description of Artificial Sequence: Synthetic oligonucleotide
gagaugagaagcuuccaug

SEQ ID NO: 2978762 - RNA, 19 nt, Artificial Sequence
  Description of Artificial Sequence: Synthetic oligonucleotide
gauuaauaucacugaagac

SEQ ID NO: 2978763 - RNA, 19 nt, Artificial Sequence
  Description of Artificial Sequence: Synthetic oligonucleotide
cuuccauggguuuugcugc

SEQ ID NO: 2978764 - RNA, 19 nt, Artificial Sequence
  Description of Artificial Sequence: Synthetic oligonucleotide
ugcucaaaauuucaaugga

SEQ ID NO: 2978765 - RNA, 19 nt, Artificial Sequence
  Description of Artificial Sequence: Synthetic oligonucleotide
aggaagacaguucagcacu

SEQ ID NO: 2978766 - RNA, 19 nt, Artificial Sequence
  Description of Artificial Sequence: Synthetic oligonucleotide
ucauacucuguccaguccu

SEQ ID NO: 2978767 - RNA, 19 nt, Artificial Sequence
  Description of Artificial Sequence: Synthetic oligonucleotide
gaugagaagcuuccauggg

SEQ ID NO: 2978768 - RNA, 19 nt, Artificial Sequence
  Description of Artificial Sequence: Synthetic oligonucleotide
ucaaaauuucaauggaguu

SEQ ID NO: 2978769 - RNA, 19 nt, Artificial Sequence
  Description of Artificial Sequence: Synthetic oligonucleotide
uucccgugcacacaguuug

SEQ ID NO: 2978770 - RNA, 19 nt, Artificial Sequence
  Description of Artificial Sequence: Synthetic oligonucleotide
aguucagcacuuuacaaau

SEQ ID NO: 2978771 - RNA, 19 nt, Artificial Sequence
  Description of Artificial Sequence: Synthetic oligonucleotide
acacaguuugcacuucugg

SEQ ID NO: 2978772 - RNA, 19 nt, Artificial Sequence
  Description of Artificial Sequence: Synthetic oligonucleotide
aaacucuacgauugucuug

SEQ ID NO: 2978773 - RNA, 19 nt, Artificial Sequence
  Description of Artificial Sequence: Synthetic oligonucleotide
cuuuacaaauugauggguc

SEQ ID NO: 2978774 - RNA, 19 nt, Artificial Sequence
  Description of Artificial Sequence: Synthetic oligonucleotide
ucaggaagacaguucagca

SEQ ID NO: 2978775 - RNA, 19 nt, Artificial Sequence
  Description of Artificial Sequence: Synthetic oligonucleotide
cuuaugggcaaguuuucag

SEQ ID NO: 2978776 - RNA, 19 nt, Artificial Sequence
  Description of Artificial Sequence: Synthetic oligonucleotide
aguuuucccgugcacacag

SEQ ID NO: 2978777 - RNA, 19 nt, Artificial Sequence
  Description of Artificial Sequence: Synthetic oligonucleotide
uaggagaucagagaugaga

SEQ ID NO: 2978778 - RNA, 19 nt, Artificial Sequence
  Description of Artificial Sequence: Synthetic oligonucleotide
uucaauggaguuuucccgu

SEQ ID NO: 2978779 - RNA, 19 nt, Artificial Sequence
  Description of Artificial Sequence: Synthetic oligonucleotide
aauggaguuuucccgugca

SEQ ID NO: 2978780 - RNA, 19 nt, Artificial Sequence
  Description of Artificial Sequence: Synthetic oligonucleotide
uaugggcaaguuuucagga

SEQ ID NO: 2978781 - RNA, 19 nt, Artificial Sequence
  Description of Artificial Sequence: Synthetic oligonucleotide
uugaugggucaccucaaag

SEQ ID NO: 2978782 - RNA, 19 nt, Artificial Sequence
  Description of Artificial Sequence: Synthetic oligonucleotide
uucaggaagacaguucagc

SEQ ID NO: 2978783 - RNA, 19 nt, Artificial Sequence
  Description of Artificial Sequence: Synthetic oligonucleotide
auaucacugaagacugucc

SEQ ID NO: 2978784 - RNA, 19 nt, Artificial Sequence
  Description of Artificial Sequence: Synthetic oligonucleotide
uugcacuucuggaccaugg

SEQ ID NO: 2978785 - RNA, 19 nt, Artificial Sequence
  Description of Artificial Sequence: Synthetic oligonucleotide
uucagcauuguaagacuug

SEQ ID NO: 2978786 - RNA, 19 nt, Artificial Sequence
  Description of Artificial Sequence: Synthetic oligonucleotide
ugguucaaggccccgacac

SEQ ID NO: 2978787 - RNA, 19 nt, Artificial Sequence
  Description of Artificial Sequence: Synthetic oligonucleotide
auuguaagacuugauggug

SEQ ID NO: 2978788 - RNA, 19 nt, Artificial Sequence
  Description of Artificial Sequence: Synthetic oligonucleotide
ucuucagcauuguaagacu

SEQ ID NO: 2978789 - RNA, 19 nt, Artificial Sequence
  Description of Artificial Sequence: Synthetic oligonucleotide
ucucgucauacucugucca

SEQ ID NO: 2978790 - RNA, 19 nt, Artificial Sequence
  Description of Artificial Sequence: Synthetic oligonucleotide
ucagcacuuuacaaauuga

SEQ ID NO: 2978791 - RNA, 19 nt, Artificial Sequence
  Description of Artificial Sequence: Synthetic oligonucleotide
acaccuuccgcagcaaacc

SEQ ID NO: 2978792 - RNA, 19 nt, Artificial Sequence
  Description of Artificial Sequence: Synthetic oligonucleotide
agacuccugagccuucucg

SEQ ID NO: 2978793 - RNA, 19 nt, Artificial Sequence
  Description of Artificial Sequence: Synthetic oligonucleotide
augagaagcuuccaugggu

SEQ ID NO: 2978794 - RNA, 19 nt, Artificial Sequence
  Description of Artificial Sequence: Synthetic oligonucleotide
uuccgcagcaaacccagcc

SEQ ID NO: 2978795 - RNA, 19 nt, Artificial Sequence
  Description of Artificial Sequence: Synthetic oligonucleotide
ucagcauuguaagacuuga

SEQ ID NO: 2978796 - RNA, 19 nt, Artificial Sequence
  Description of Artificial Sequence: Synthetic oligonucleotide
uguaagacuugauggugcu

SEQ ID NO: 2978797 - RNA, 19 nt, Artificial Sequence
  Description of Artificial Sequence: Synthetic oligonucleotide
gacaguucagcacuuuaca

SEQ ID NO: 2978798 - RNA, 19 nt, Artificial Sequence
  Description of Artificial Sequence: Synthetic oligonucleotide
ucuugcagauuaauaucac

SEQ ID NO: 2978799 - RNA, 19 nt, Artificial Sequence
  Description of Artificial Sequence: Synthetic oligonucleotide
gacuugauggugcugcuca

SEQ ID NO: 2978800 - RNA, 19 nt, Artificial Sequence
  Description of Artificial Sequence: Synthetic oligonucleotide
gcugcucaaaauuucaaug

SEQ ID NO: 2978801 - RNA, 19 nt, Artificial Sequence
  Description of Artificial Sequence: Synthetic oligonucleotide
acugguucaaggccccgac

SEQ ID NO: 2978802 - RNA, 19 nt, Artificial Sequence
  Description of Artificial Sequence: Synthetic oligonucleotide
acugaagacugucccugac

SEQ ID NO: 2978803 - RNA, 19 nt, Artificial Sequence
  Description of Artificial Sequence: Synthetic oligonucleotide
uuucaggaagacaguucag

SEQ ID NO: 2978804 - RNA, 19 nt, Artificial Sequence
  Description of Artificial Sequence: Synthetic oligonucleotide
cuccgcucgguucuuaugg

SEQ ID NO: 2978805 - RNA, 19 nt, Artificial Sequence
  Description of Artificial Sequence: Synthetic oligonucleotide
aagauacccacagacuccu

SEQ ID NO: 2978806 - RNA, 19 nt, Artificial Sequence
  Description of Artificial Sequence: Synthetic oligonucleotide
ugucccugacuccacaccu

SEQ ID NO: 2978807 - RNA, 19 nt, Artificial Sequence
  Description of Artificial Sequence: Synthetic oligonucleotide
uacaaauugaugggucacc

SEQ ID NO: 2978808 - RNA, 19 nt, Artificial Sequence
  Description of Artificial Sequence: Synthetic oligonucleotide
uugauggugcugcucaaaa

SEQ ID NO: 2978809 - RNA, 19 nt, Artificial Sequence
  Description of Artificial Sequence: Synthetic oligonucleotide
ugagaagcuuccauggguu

SEQ ID NO: 2978810 - RNA, 19 nt, Artificial Sequence
  Description of Artificial Sequence: Synthetic oligonucleotide
uacaggugcuaggagauca

SEQ ID NO: 2978811 - RNA, 19 nt, Artificial Sequence
  Description of Artificial Sequence: Synthetic oligonucleotide
ucacugaagacugucccug

SEQ ID NO: 2978812 - RNA, 19 nt, Artificial Sequence
  Description of Artificial Sequence: Synthetic oligonucleotide
gucuucagcauuguaagac

SEQ ID NO: 2978813 - RNA, 19 nt, Artificial Sequence
  Description of Artificial Sequence: Synthetic oligonucleotide
ucaccucaaagauacccac

SEQ ID NO: 2978814 - RNA, 19 nt, Artificial Sequence
  Description of Artificial Sequence: Synthetic oligonucleotide
agagaugagaagcuuccau

SEQ ID NO: 2978815 - RNA, 19 nt, Artificial Sequence
  Description of Artificial Sequence: Synthetic oligonucleotide
gauugucuugaacuucuca

SEQ ID NO: 2978816 - RNA, 19 nt, Artificial Sequence
  Description of Artificial Sequence: Synthetic oligonucleotide
uucucgucauacucugucc

SEQ ID NO: 2978817 - RNA, 19 nt, Artificial Sequence
  Description of Artificial Sequence: Synthetic oligonucleotide
auacccacagacuccugag

SEQ ID NO: 2978818 - RNA, 19 nt, Artificial Sequence
  Description of Artificial Sequence: Synthetic oligonucleotide
uuacaaauugaugggucac

SEQ ID NO: 2978819 - RNA, 19 nt, Artificial Sequence
  Description of Artificial Sequence: Synthetic oligonucleotide
ugcuaggagaucagagaug

SEQ ID NO: 2978820 - RNA, 19 nt, Artificial Sequence
  Description of Artificial Sequence: Synthetic oligonucleotide
uucuggaccauggaggcac

SEQ ID NO: 2978821 - RNA, 19 nt, Artificial Sequence
  Description of Artificial Sequence: Synthetic oligonucleotide
gauacccacagacuccuga

SEQ ID NO: 2978822 - RNA, 19 nt, Artificial Sequence
  Description of Artificial Sequence: Synthetic oligonucleotide
agcacuuuacaaauugaug

SEQ ID NO: 2978823 - RNA, 19 nt, Artificial Sequence
  Description of Artificial Sequence: Synthetic oligonucleotide
acuuuacaaauugaugggu

SEQ ID NO: 2978824 - RNA, 19 nt, Artificial Sequence
  Description of Artificial Sequence: Synthetic oligonucleotide
cucaaaauuucaauggagu

SEQ ID NO: 2978825 - RNA, 19 nt, Artificial Sequence
  Description of Artificial Sequence: Synthetic oligonucleotide
ucaauggaguuuucccgug

SEQ ID NO: 2978826 - RNA, 19 nt, Artificial Sequence
  Description of Artificial Sequence: Synthetic oligonucleotide
cuggaagucaacugguuca

SEQ ID NO: 2978827 - RNA, 19 nt, Artificial Sequence
  Description of Artificial Sequence: Synthetic oligonucleotide
acugucccugacuccacac

SEQ ID NO: 2978828 - RNA, 19 nt, Artificial Sequence
  Description of Artificial Sequence: Synthetic oligonucleotide
ugaacuucucauugucuuc

SEQ ID NO: 2978829 - RNA, 19 nt, Artificial Sequence
  Description of Artificial Sequence: Synthetic oligonucleotide
cuucucgucauacucuguc

SEQ ID NO: 2978830 - RNA, 19 nt, Artificial Sequence
  Description of Artificial Sequence: Synthetic oligonucleotide
ucagggcaccauuucuccg

SEQ ID NO: 2978831 - RNA, 19 nt, Artificial Sequence
  Description of Artificial Sequence: Synthetic oligonucleotide
cucagggcaccauuucucc

SEQ ID NO: 2978832 - RNA, 19 nt, Artificial Sequence
  Description of Artificial Sequence: Synthetic oligonucleotide
caggaagacaguucagcac

SEQ ID NO: 2978833 - RNA, 19 nt, Artificial Sequence
  Description of Artificial Sequence: Synthetic oligonucleotide
uugguacaggugcuaggag

SEQ ID NO: 2978834 - RNA, 19 nt, Artificial Sequence
  Description of Artificial Sequence: Synthetic oligonucleotide
ggggcuggaagucaacugg

SEQ ID NO: 2978835 - RNA, 19 nt, Artificial Sequence
  Description of Artificial Sequence: Synthetic oligonucleotide
uccaguccuuuucuugcag

SEQ ID NO: 2978836 - RNA, 19 nt, Artificial Sequence
  Description of Artificial Sequence: Synthetic oligonucleotide
gcuuccauggguuuugcug

SEQ ID NO: 2978837 - RNA, 19 nt, Artificial Sequence
  Description of Artificial Sequence: Synthetic oligonucleotide
auggaguuuucccgugcac

SEQ ID NO: 2978838 - RNA, 19 nt, Artificial Sequence
  Description of Artificial Sequence: Synthetic oligonucleotide
gguuuugcugcucagggca

SEQ ID NO: 2978839 - RNA, 19 nt, Artificial Sequence
  Description of Artificial Sequence: Synthetic oligonucleotide
ucuuaugggcaaguuuuca

SEQ ID NO: 2978840 - RNA, 19 nt, Artificial Sequence
  Description of Artificial Sequence: Synthetic oligonucleotide
acaguucagcacuuuacaa

SEQ ID NO: 2978841 - RNA, 19 nt, Artificial Sequence
  Description of Artificial Sequence: Synthetic oligonucleotide
acaaauugaugggucaccu

SEQ ID NO: 2978842 - RNA, 19 nt, Artificial Sequence
  Description of Artificial Sequence: Synthetic oligonucleotide
gaacuucucauugucuuca

SEQ ID NO: 2978843 - RNA, 19 nt, Artificial Sequence
  Description of Artificial Sequence: Synthetic oligonucleotide
uggaguuuucccgugcaca

SEQ ID NO: 2978844 - RNA, 19 nt, Artificial Sequence
  Description of Artificial Sequence: Synthetic oligonucleotide
aucacugaagacugucccu

SEQ ID NO: 2978845 - RNA, 19 nt, Artificial Sequence
  Description of Artificial Sequence: Synthetic oligonucleotide
uugucuugaacuucucauu

SEQ ID NO: 2978846 - RNA, 19 nt, Artificial Sequence
  Description of Artificial Sequence: Synthetic oligonucleotide
ggcaccauuucuccgcucg

SEQ ID NO: 2978847 - RNA, 19 nt, Artificial Sequence
  Description of Artificial Sequence: Synthetic oligonucleotide
aagacuugauggugcugcu

SEQ ID NO: 2978848 - RNA, 19 nt, Artificial Sequence
  Description of Artificial Sequence: Synthetic oligonucleotide
ugcucagggcaccauuucu

SEQ ID NO: 2978849 - RNA, 19 nt, Artificial Sequence
  Description of Artificial Sequence: Synthetic oligonucleotide
uuuucccgugcacacaguu

SEQ ID NO: 2978850 - RNA, 19 nt, Artificial Sequence
  Description of Artificial Sequence: Synthetic oligonucleotide
cagggcaccauuucuccgc

SEQ ID NO: 2978851 - RNA, 19 nt, Artificial Sequence
  Description of Artificial Sequence: Synthetic oligonucleotide
gaagcuuccauggguuuug

SEQ ID NO: 2978852 - RNA, 19 nt, Artificial Sequence
  Description of Artificial Sequence: Synthetic oligonucleotide
uaauaucacugaagacugu

SEQ ID NO: 2978853 - RNA, 19 nt, Artificial Sequence
  Description of Artificial Sequence: Synthetic oligonucleotide
uucuuaugggcaaguuuuc

SEQ ID NO: 2978854 - RNA, 19 nt, Artificial Sequence
  Description of Artificial Sequence: Synthetic oligonucleotide
acuccugagccuucucguc

SEQ ID NO: 2978855 - RNA, 19 nt, Artificial Sequence
  Description of Artificial Sequence: Synthetic oligonucleotide
gagccuucucgucauacuc

SEQ ID NO: 2978856 - RNA, 19 nt, Artificial Sequence
  Description of Artificial Sequence: Synthetic oligonucleotide
ugcacuucuggaccaugga

SEQ ID NO: 2978857 - RNA, 19 nt, Artificial Sequence
  Description of Artificial Sequence: Synthetic oligonucleotide
uccgcagcaaacccagccu

SEQ ID NO: 2978858 - RNA, 19 nt, Artificial Sequence
  Description of Artificial Sequence: Synthetic oligonucleotide
gauggugcugcucaaaauu

SEQ ID NO: 2978859 - RNA, 19 nt, Artificial Sequence
  Description of Artificial Sequence: Synthetic oligonucleotide
acacucaaacucuacgauu

SEQ ID NO: 2978860 - RNA, 19 nt, Artificial Sequence
  Description of Artificial Sequence: Synthetic oligonucleotide
uccgcucgguucuuauggg

SEQ ID NO: 2978861 - RNA, 19 nt, Artificial Sequence
  Description of Artificial Sequence: Synthetic oligonucleotide
cacaguuugcacuucugga

SEQ ID NO: 2978862 - RNA, 19 nt, Artificial Sequence
  Description of Artificial Sequence: Synthetic oligonucleotide
cuuuucuugcagauuaaua

SEQ ID NO: 2978863 - RNA, 19 nt, Artificial Sequence
  Description of Artificial Sequence: Synthetic oligonucleotide
aaauuucaauggaguuuuc

SEQ ID NO: 2978864 - RNA, 19 nt, Artificial Sequence
  Description of Artificial Sequence: Synthetic oligonucleotide
gaugggucaccucaaagau

SEQ ID NO: 2978865 - RNA, 19 nt, Artificial Sequence
  Description of Artificial Sequence: Synthetic oligonucleotide
cacaccuuccgcagcaaac

SEQ ID NO: 2978866 - RNA, 19 nt, Artificial Sequence
  Description of Artificial Sequence: Synthetic oligonucleotide
aggagaucagagaugagaa

SEQ ID NO: 2978867 - RNA, 19 nt, Artificial Sequence
  Description of Artificial Sequence: Synthetic oligonucleotide
uacccacagacuccugagc

SEQ ID NO: 2978868 - RNA, 19 nt, Artificial Sequence
  Description of Artificial Sequence: Synthetic oligonucleotide
agaucagagaugagaagcu

SEQ ID NO: 2978869 - RNA, 19 nt, Artificial Sequence
  Description of Artificial Sequence: Synthetic oligonucleotide
cucgucauacucuguccag

SEQ ID NO: 2978870 - RNA, 19 nt, Artificial Sequence
  Description of Artificial Sequence: Synthetic oligonucleotide
uggugcugcucaaaauuuc

SEQ ID NO: 2978871 - RNA, 19 nt, Artificial Sequence
  Description of Artificial Sequence: Synthetic oligonucleotide
cauuguaagacuugauggu

SEQ ID NO: 2978872 - RNA, 19 nt, Artificial Sequence
  Description of Artificial Sequence: Synthetic oligonucleotide
gucauacucuguccagucc

SEQ ID NO: 2978873 - RNA, 19 nt, Artificial Sequence
  Description of Artificial Sequence: Synthetic oligonucleotide
auggguuuugcugcucagg

SEQ ID NO: 2978874 - RNA, 19 nt, Artificial Sequence
  Description of Artificial Sequence: Synthetic oligonucleotide
ggucaccucaaagauaccc

SEQ ID NO: 2978875 - RNA, 19 nt, Artificial Sequence
  Description of Artificial Sequence: Synthetic oligonucleotide
ugagccuucucgucauacu

SEQ ID NO: 2978876 - RNA, 19 nt, Artificial Sequence
  Description of Artificial Sequence: Synthetic oligonucleotide
gcucaaaauuucaauggag

SEQ ID NO: 2978877 - RNA, 19 nt, Artificial Sequence
  Description of Artificial Sequence: Synthetic oligonucleotide
caauggaguuuucccgugc

SEQ ID NO: 2978878 - RNA, 19 nt, Artificial Sequence
  Description of Artificial Sequence: Synthetic oligonucleotide
aguuuucaggaagacaguu

SEQ ID NO: 2978879 - RNA, 19 nt, Artificial Sequence
  Description of Artificial Sequence: Synthetic oligonucleotide
acgauugucuugaacuucu

SEQ ID NO: 2978880 - RNA, 19 nt, Artificial Sequence
  Description of Artificial Sequence: Synthetic oligonucleotide
uucaaggccccgacacuca

SEQ ID NO: 2978881 - RNA, 19 nt, Artificial Sequence
  Description of Artificial Sequence: Synthetic oligonucleotide
cuugguacaggugcuagga

SEQ ID NO: 2978882 - RNA, 19 nt, Artificial Sequence
  Description of Artificial Sequence: Synthetic oligonucleotide
uacgauugucuugaacuuc

SEQ ID NO: 2978883 - RNA, 19 nt, Artificial Sequence
  Description of Artificial Sequence: Synthetic oligonucleotide
ggagaucagagaugagaag

SEQ ID NO: 2978884 - RNA, 19 nt, Artificial Sequence
  Description of Artificial Sequence: Synthetic oligonucleotide
uggaggcacugccacgacc

SEQ ID NO: 2978885 - RNA, 19 nt, Artificial Sequence
  Description of Artificial Sequence: Synthetic oligonucleotide
ugauggugcugcucaaaau

SEQ ID NO: 2978886 - RNA, 19 nt, Artificial Sequence
  Description of Artificial Sequence: Synthetic oligonucleotide
aaguuuucaggaagacagu

SEQ ID NO: 2978887 - RNA, 19 nt, Artificial Sequence
  Description of Artificial Sequence: Synthetic oligonucleotide
caaauugaugggucaccuc

SEQ ID NO: 2978888 - RNA, 19 nt, Artificial Sequence
  Description of Artificial Sequence: Synthetic oligonucleotide
guuuucaggaagacaguuc

SEQ ID NO: 2978889 - RNA, 19 nt, Artificial Sequence
  Description of Artificial Sequence: Synthetic oligonucleotide
aaacccagccuggggcugg

SEQ ID NO: 2978890 - RNA, 19 nt, Artificial Sequence
  Description of Artificial Sequence: Synthetic oligonucleotide
aggugcuaggagaucagag

SEQ ID NO: 2978891 - RNA, 19 nt, Artificial Sequence
  Description of Artificial Sequence: Synthetic oligonucleotide
gcuaggagaucagagauga

SEQ ID NO: 2978892 - RNA, 19 nt, Artificial Sequence
  Description of Artificial Sequence: Synthetic oligonucleotide
guucuuaugggcaaguuuu

SEQ ID NO: 2978893 - RNA, 19 nt, Artificial Sequence
  Description of Artificial Sequence: Synthetic oligonucleotide
aauugaugggucaccucaa

SEQ ID NO: 2978894 - RNA, 19 nt, Artificial Sequence
  Description of Artificial Sequence: Synthetic oligonucleotide
acucaaacucuacgauugu

SEQ ID NO: 2978895 - RNA, 19 nt, Artificial Sequence
  Description of Artificial Sequence: Synthetic oligonucleotide
ggaguuuucccgugcacac

SEQ ID NO: 2978896 - RNA, 19 nt, Artificial Sequence
  Description of Artificial Sequence: Synthetic oligonucleotide
cucuacgauugucuugaac

SEQ ID NO: 2978897 - RNA, 19 nt, Artificial Sequence
  Description of Artificial Sequence: Synthetic oligonucleotide
aggcacugccacgaccucc

SEQ ID NO: 2978898 - RNA, 19 nt, Artificial Sequence
  Description of Artificial Sequence: Synthetic oligonucleotide
cauggguuuugcugcucag

SEQ ID NO: 2978899 - RNA, 19 nt, Artificial Sequence
  Description of Artificial Sequence: Synthetic oligonucleotide
gacacucaaacucuacgau

SEQ ID NO: 2978900 - RNA, 19 nt, Artificial Sequence
  Description of Artificial Sequence: Synthetic oligonucleotide
uuuugcugcucagggcacc

SEQ ID NO: 2978901 - RNA, 19 nt, Artificial Sequence
  Description of Artificial Sequence: Synthetic oligonucleotide
ucccugacuccacaccuuc

SEQ ID NO: 2978902 - RNA, 19 nt, Artificial Sequence
  Description of Artificial Sequence: Synthetic oligonucleotide
cacacaguuugcacuucug

SEQ ID NO: 2978903 - RNA, 19 nt, Artificial Sequence
  Description of Artificial Sequence: Synthetic oligonucleotide
gcacuucuggaccauggag

SEQ ID NO: 2978904 - RNA, 19 nt, Artificial Sequence
  Description of Artificial Sequence: Synthetic oligonucleotide
uuugcacuucuggaccaug

SEQ ID NO: 2978905 - RNA, 19 nt, Artificial Sequence
  Description of Artificial Sequence: Synthetic oligonucleotide
uuucccgugcacacaguuu

SEQ ID NO: 2978906 - RNA, 19 nt, Artificial Sequence
  Description of Artificial Sequence: Synthetic oligonucleotide
ucgucauacucuguccagu

SEQ ID NO: 2978907 - RNA, 19 nt, Artificial Sequence
  Description of Artificial Sequence: Synthetic oligonucleotide
cucaaacucuacgauuguc

SEQ ID NO: 2978908 - RNA, 19 nt, Artificial Sequence
  Description of Artificial Sequence: Synthetic oligonucleotide
cugucccugacuccacacc

SEQ ID NO: 2978909 - RNA, 19 nt, Artificial Sequence
  Description of Artificial Sequence: Synthetic oligonucleotide
ccgacacucaaacucuacg

SEQ ID NO: 2978910 - RNA, 19 nt, Artificial Sequence
  Description of Artificial Sequence: Synthetic oligonucleotide
aacugguucaaggccccga

SEQ ID NO: 2978911 - RNA, 19 nt, Artificial Sequence
  Description of Artificial Sequence: Synthetic oligonucleotide
ggaccauggaggcacugcc

SEQ ID NO: 2978912 - RNA, 19 nt, Artificial Sequence
  Description of Artificial Sequence: Synthetic oligonucleotide
augggcaaguuuucaggaa

SEQ ID NO: 2978913 - RNA, 19 nt, Artificial Sequence
  Description of Artificial Sequence: Synthetic oligonucleotide
gucaccucaaagauaccca

SEQ ID NO: 2978914 - RNA, 19 nt, Artificial Sequence
  Description of Artificial Sequence: Synthetic oligonucleotide
ccugacuccacaccuuccg

SEQ ID NO: 2978915 - RNA, 19 nt, Artificial Sequence
  Description of Artificial Sequence: Synthetic oligonucleotide
cuugcagauuaauaucacu

SEQ ID NO: 2978916 - RNA, 19 nt, Artificial Sequence
  Description of Artificial Sequence: Synthetic oligonucleotide
ucuccgcucgguucuuaug

SEQ ID NO: 2978917 - RNA, 19 nt, Artificial Sequence
  Description of Artificial Sequence: Synthetic oligonucleotide
agacuugauggugcugcuc

SEQ ID NO: 2978918 - RNA, 19 nt, Artificial Sequence
  Description of Artificial Sequence: Synthetic oligonucleotide
guucaaggccccgacacuc

SEQ ID NO: 2978919 - RNA, 19 nt, Artificial Sequence
  Description of Artificial Sequence: Synthetic oligonucleotide
caccuuccgcagcaaaccc

SEQ ID NO: 2978920 - RNA, 19 nt, Artificial Sequence
  Description of Artificial Sequence: Synthetic oligonucleotide
uuugcugcucagggcacca

SEQ ID NO: 2978921 - RNA, 19 nt, Artificial Sequence
  Description of Artificial Sequence: Synthetic oligonucleotide
ggccccgacacucaaacuc

SEQ ID NO: 2978922 - RNA, 19 nt, Artificial Sequence
  Description of Artificial Sequence: Synthetic oligonucleotide
uuccauggguuuugcugcu

SEQ ID NO: 2978923 - RNA, 19 nt, Artificial Sequence
  Description of Artificial Sequence: Synthetic oligonucleotide
ucaaggccccgacacucaa

SEQ ID NO: 2978924 - RNA, 19 nt, Artificial Sequence
  Description of Artificial Sequence: Synthetic oligonucleotide
cuugaacuucucauugucu

SEQ ID NO: 2978925 - RNA, 19 nt, Artificial Sequence
  Description of Artificial Sequence: Synthetic oligonucleotide
cagcaaacccagccugggg

SEQ ID NO: 2978926 - RNA, 19 nt, Artificial Sequence
  Description of Artificial Sequence: Synthetic oligonucleotide
cuaggagaucagagaugag

SEQ ID NO: 2978927 - RNA, 19 nt, Artificial Sequence
  Description of Artificial Sequence: Synthetic oligonucleotide
ucccgugcacacaguuugc

SEQ ID NO: 2978928 - RNA, 19 nt, Artificial Sequence
  Description of Artificial Sequence: Synthetic oligonucleotide
auggaggcacugccacgac

SEQ ID NO: 2978929 - RNA, 19 nt, Artificial Sequence
  Description of Artificial Sequence: Synthetic oligonucleotide
caaaauuucaauggaguuu

SEQ ID NO: 2978930 - RNA, 19 nt, Artificial Sequence
  Description of Artificial Sequence: Synthetic oligonucleotide
gcuggaagucaacugguuc

SEQ ID NO: 2978931 - RNA, 19 nt, Artificial Sequence
  Description of Artificial Sequence: Synthetic oligonucleotide
gugcuaggagaucagagau

SEQ ID NO: 2978932 - RNA, 19 nt, Artificial Sequence
  Description of Artificial Sequence: Synthetic oligonucleotide
ccuuccgcagcaaacccag

SEQ ID NO: 2978933 - RNA, 19 nt, Artificial Sequence
  Description of Artificial Sequence: Synthetic oligonucleotide
uacucuguccaguccuuuu

SEQ ID NO: 2978934 - RNA, 19 nt, Artificial Sequence
  Description of Artificial Sequence: Synthetic oligonucleotide
accauuucuccgcucgguu

SEQ ID NO: 2978935 - RNA, 19 nt, Artificial Sequence
  Description of Artificial Sequence: Synthetic oligonucleotide
cauggaggcacugccacga

SEQ ID NO: 2978936 - RNA, 19 nt, Artificial Sequence
  Description of Artificial Sequence: Synthetic oligonucleotide
guaagacuugauggugcug

SEQ ID NO: 2978937 - RNA, 19 nt, Artificial Sequence
  Description of Artificial Sequence: Synthetic oligonucleotide
gacuccugagccuucucgu

SEQ ID NO: 2978938 - RNA, 19 nt, Artificial Sequence
  Description of Artificial Sequence: Synthetic oligonucleotide
cugagccuucucgucauac

SEQ ID NO: 2978939 - RNA, 19 nt, Artificial Sequence
  Description of Artificial Sequence: Synthetic oligonucleotide
ucgguucuuaugggcaagu

SEQ ID NO: 2978940 - RNA, 19 nt, Artificial Sequence
  Description of Artificial Sequence: Synthetic oligonucleotide
agaagcuuccauggguuuu

SEQ ID NO: 2978941 - RNA, 19 nt, Artificial Sequence
  Description of Artificial Sequence: Synthetic oligonucleotide
ugcugcucagggcaccauu

SEQ ID NO: 2978942 - RNA, 19 nt, Artificial Sequence
  Description of Artificial Sequence: Synthetic oligonucleotide
ggugcugcucaaaauuuca

SEQ ID NO: 2978943 - RNA, 19 nt, Artificial Sequence
  Description of Artificial Sequence: Synthetic oligonucleotide
agggcaccauuucuccgcu

SEQ ID NO: 2978944 - RNA, 19 nt, Artificial Sequence
  Description of Artificial Sequence: Synthetic oligonucleotide
gccuucucgucauacucug

SEQ ID NO: 2978945 - RNA, 19 nt, Artificial Sequence
  Description of Artificial Sequence: Synthetic oligonucleotide
caccucaaagauacccaca

SEQ ID NO: 2978946 - RNA, 19 nt, Artificial Sequence
  Description of Artificial Sequence: Synthetic oligonucleotide
agccuucucgucauacucu

SEQ ID NO: 2978947 - RNA, 19 nt, Artificial Sequence
  Description of Artificial Sequence: Synthetic oligonucleotide
acuugauggugcugcucaa

SEQ ID NO: 2978948 - RNA, 19 nt, Artificial Sequence
  Description of Artificial Sequence: Synthetic oligonucleotide
auggugcugcucaaaauuu

SEQ ID NO: 2978949 - RNA, 19 nt, Artificial Sequence
  Description of Artificial Sequence: Synthetic oligonucleotide
ggguuuugcugcucagggc

SEQ ID NO: 2978950 - RNA, 19 nt, Artificial Sequence
  Description of Artificial Sequence: Synthetic oligonucleotide
cauuucuccgcucgguucu

SEQ ID NO: 2978951 - RNA, 19 nt, Artificial Sequence
  Description of Artificial Sequence: Synthetic oligonucleotide
cuccugagccuucucguca

SEQ ID NO: 2978952 - RNA, 19 nt, Artificial Sequence
  Description of Artificial Sequence: Synthetic oligonucleotide
uucuccgcucgguucuuau

SEQ ID NO: 2978953 - RNA, 19 nt, Artificial Sequence
  Description of Artificial Sequence: Synthetic oligonucleotide
cucgguucuuaugggcaag

SEQ ID NO: 2978954 - RNA, 19 nt, Artificial Sequence
  Description of Artificial Sequence: Synthetic oligonucleotide
gacugucccugacuccaca

SEQ ID NO: 2978955 - RNA, 19 nt, Artificial Sequence
  Description of Artificial Sequence: Synthetic oligonucleotide
gcaaguuuucaggaagaca

SEQ ID NO: 2978956 - RNA, 19 nt, Artificial Sequence
  Description of Artificial Sequence: Synthetic oligonucleotide
guuuugcugcucagggcac

SEQ ID NO: 2978957 - RNA, 19 nt, Artificial Sequence
  Description of Artificial Sequence: Synthetic oligonucleotide
gaguuuucccgugcacaca

SEQ ID NO: 2978958 - RNA, 19 nt, Artificial Sequence
  Description of Artificial Sequence: Synthetic oligonucleotide
caaacucuacgauugucuu

SEQ ID NO: 2978959 - RNA, 19 nt, Artificial Sequence
  Description of Artificial Sequence: Synthetic oligonucleotide
acagacuccugagccuucu

SEQ ID NO: 2978960 - RNA, 19 nt, Artificial Sequence
  Description of Artificial Sequence: Synthetic oligonucleotide
cugcucagggcaccauuuc

SEQ ID NO: 2978961 - RNA, 19 nt, Artificial Sequence
  Description of Artificial Sequence: Synthetic oligonucleotide
cuuccgcagcaaacccagc

SEQ ID NO: 2978962 - RNA, 19 nt, Artificial Sequence
  Description of Artificial Sequence: Synthetic oligonucleotide
ggcaaguuuucaggaagac

SEQ ID NO: 2978963 - RNA, 19 nt, Artificial Sequence
  Description of Artificial Sequence: Synthetic oligonucleotide
gaccauggaggcacugcca

SEQ ID NO: 2978964 - RNA, 19 nt, Artificial Sequence
  Description of Artificial Sequence: Synthetic oligonucleotide
gcaccauuucuccgcucgg

SEQ ID NO: 2978965 - RNA, 19 nt, Artificial Sequence
  Description of Artificial Sequence: Synthetic oligonucleotide
cuacgauugucuugaacuu

SEQ ID NO: 2978966 - RNA, 19 nt, Artificial Sequence
  Description of Artificial Sequence: Synthetic oligonucleotide
aguccuuuucuugcagauu

SEQ ID NO: 2978967 - RNA, 19 nt, Artificial Sequence
  Description of Artificial Sequence: Synthetic oligonucleotide
accuuccgcagcaaaccca

SEQ ID NO: 2978968 - RNA, 19 nt, Artificial Sequence
  Description of Artificial Sequence: Synthetic oligonucleotide
cuucagcauuguaagacuu

SEQ ID NO: 2978969 - RNA, 19 nt, Artificial Sequence
  Description of Artificial Sequence: Synthetic oligonucleotide
cugaagacugucccugacu

SEQ ID NO: 2978970 - RNA, 19 nt, Artificial Sequence
  Description of Artificial Sequence: Synthetic oligonucleotide
cacugaagacugucccuga

SEQ ID NO: 2978971 - RNA, 19 nt, Artificial Sequence
  Description of Artificial Sequence: Synthetic oligonucleotide
ggaagucaacugguucaag

SEQ ID NO: 2978972 - RNA, 19 nt, Artificial Sequence
  Description of Artificial Sequence: Synthetic oligonucleotide
ugcacacaguuugcacuuc

SEQ ID NO: 2978973 - RNA, 19 nt, Artificial Sequence
  Description of Artificial Sequence: Synthetic oligonucleotide
gguucuuaugggcaaguuu

SEQ ID NO: 2978974 - RNA, 19 nt, Artificial Sequence
  Description of Artificial Sequence: Synthetic oligonucleotide
caacugguucaaggccccg

SEQ ID NO: 2978975 - RNA, 19 nt, Artificial Sequence
  Description of Artificial Sequence: Synthetic oligonucleotide
caaacccagccuggggcug

SEQ ID NO: 2978976 - RNA, 19 nt, Artificial Sequence
  Description of Artificial Sequence: Synthetic oligonucleotide
ccauggaggcacugccacg

SEQ ID NO: 2978977 - RNA, 19 nt, Artificial Sequence
  Description of Artificial Sequence: Synthetic oligonucleotide
cauugucuucagcauugua

SEQ ID NO: 2978978 - RNA, 19 nt, Artificial Sequence
  Description of Artificial Sequence: Synthetic oligonucleotide
cgacacucaaacucuacga

SEQ ID NO: 2978979 - RNA, 19 nt, Artificial Sequence
  Description of Artificial Sequence: Synthetic oligonucleotide
cacagacuccugagccuuc

SEQ ID NO: 2978980 - RNA, 19 nt, Artificial Sequence
  Description of Artificial Sequence: Synthetic oligonucleotide
gaucagagaugagaagcuu

SEQ ID NO: 2978981 - RNA, 19 nt, Artificial Sequence
  Description of Artificial Sequence: Synthetic oligonucleotide
cuugauggugcugcucaaa

SEQ ID NO: 2978982 - RNA, 19 nt, Artificial Sequence
  Description of Artificial Sequence: Synthetic oligonucleotide
augggucaccucaaagaua

SEQ ID NO: 2978983 - RNA, 19 nt, Artificial Sequence
  Description of Artificial Sequence: Synthetic oligonucleotide
gugcacacaguuugcacuu

SEQ ID NO: 2978984 - RNA, 19 nt, Artificial Sequence
  Description of Artificial Sequence: Synthetic oligonucleotide
cugguucaaggccccgaca

SEQ ID NO: 2978985 - RNA, 19 nt, Artificial Sequence
  Description of Artificial Sequence: Synthetic oligonucleotide
aggccccgacacucaaacu

SEQ ID NO: 2978986 - RNA, 19 nt, Artificial Sequence
  Description of Artificial Sequence: Synthetic oligonucleotide
gagaagcuuccauggguuu

SEQ ID NO: 2978987 - RNA, 19 nt, Artificial Sequence
  Description of Artificial Sequence: Synthetic oligonucleotide
gaggcacugccacgaccuc

SEQ ID NO: 2978988 - RNA, 19 nt, Artificial Sequence
  Description of Artificial Sequence: Synthetic oligonucleotide
cagagaugagaagcuucca

SEQ ID NO: 2978989 - RNA, 19 nt, Artificial Sequence
  Description of Artificial Sequence: Synthetic oligonucleotide
uccauggguuuugcugcuc

SEQ ID NO: 2978990 - RNA, 19 nt, Artificial Sequence
  Description of Artificial Sequence: Synthetic oligonucleotide
caguccuuuucuugcagau

SEQ ID NO: 2978991 - RNA, 19 nt, Artificial Sequence
  Description of Artificial Sequence: Synthetic oligonucleotide
cgucauacucuguccaguc

SEQ ID NO: 2978992 - RNA, 19 nt, Artificial Sequence
  Description of Artificial Sequence: Synthetic oligonucleotide
auacucuguccaguccuuu

SEQ ID NO: 2978993 - RNA, 19 nt, Artificial Sequence
  Description of Artificial Sequence: Synthetic oligonucleotide
gguacaggugcuaggagau

SEQ ID NO: 2978994 - RNA, 19 nt, Artificial Sequence
  Description of Artificial Sequence: Synthetic oligonucleotide
gggcaaguuuucaggaaga

SEQ ID NO: 2978995 - RNA, 19 nt, Artificial Sequence
  Description of Artificial Sequence: Synthetic oligonucleotide
cgcagcaaacccagccugg

SEQ ID NO: 2978996 - RNA, 19 nt, Artificial Sequence
  Description of Artificial Sequence: Synthetic oligonucleotide
ggaggcacugccacgaccu

SEQ ID NO: 2978997 - RNA, 19 nt, Artificial Sequence
  Description of Artificial Sequence: Synthetic oligonucleotide
acucuacgauugucuugaa

SEQ ID NO: 2978998 - RNA, 19 nt, Artificial Sequence
  Description of Artificial Sequence: Synthetic oligonucleotide
ccgcucgguucuuaugggc

SEQ ID NO: 2978999 - RNA, 19 nt, Artificial Sequence
  Description of Artificial Sequence: Synthetic oligonucleotide
ccgcagcaaacccagccug

SEQ ID NO: 2979000 - RNA, 19 nt, Artificial Sequence
  Description of Artificial Sequence: Synthetic oligonucleotide
guacaggugcuaggagauc

SEQ ID NO: 2979001 - RNA, 19 nt, Artificial Sequence
  Description of Artificial Sequence: Synthetic oligonucleotide
caggugcuaggagaucaga

SEQ ID NO: 2979002 - RNA, 19 nt, Artificial Sequence
  Description of Artificial Sequence: Synthetic oligonucleotide
ccaguccuuuucuugcaga

SEQ ID NO: 2979003 - RNA, 19 nt, Artificial Sequence
  Description of Artificial Sequence: Synthetic oligonucleotide
agauacccacagacuccug

SEQ ID NO: 2979004 - RNA, 19 nt, Artificial Sequence
  Description of Artificial Sequence: Synthetic oligonucleotide
uuucuccgcucgguucuua

SEQ ID NO: 2979005 - RNA, 19 nt, Artificial Sequence
  Description of Artificial Sequence: Synthetic oligonucleotide
gcucgguucuuaugggcaa

SEQ ID NO: 2979006 - RNA, 19 nt, Artificial Sequence
  Description of Artificial Sequence: Synthetic oligonucleotide
agccuggggcuggaaguca

SEQ ID NO: 2979007 - RNA, 19 nt, Artificial Sequence
  Description of Artificial Sequence: Synthetic oligonucleotide
cuucuggaccauggaggca

SEQ ID NO: 2979008 - RNA, 19 nt, Artificial Sequence
  Description of Artificial Sequence: Synthetic oligonucleotide
gaagacaguucagcacuuu

SEQ ID NO: 2979009 - RNA, 19 nt, Artificial Sequence
  Description of Artificial Sequence: Synthetic oligonucleotide
aacccagccuggggcugga

SEQ ID NO: 2979010 - RNA, 19 nt, Artificial Sequence
  Description of Artificial Sequence: Synthetic oligonucleotide
ccauggguuuugcugcuca

SEQ ID NO: 2979011 - RNA, 19 nt, Artificial Sequence
  Description of Artificial Sequence: Synthetic oligonucleotide
cauacucuguccaguccuu

SEQ ID NO: 2979012 - RNA, 19 nt, Artificial Sequence
  Description of Artificial Sequence: Synthetic oligonucleotide
caaggccccgacacucaaa

SEQ ID NO: 2979013 - RNA, 19 nt, Artificial Sequence
  Description of Artificial Sequence: Synthetic oligonucleotide
gguucaaggccccgacacu

SEQ ID NO: 2979014 - RNA, 19 nt, Artificial Sequence
  Description of Artificial Sequence: Synthetic oligonucleotide
auuucuccgcucgguucuu

SEQ ID NO: 2979015 - RNA, 19 nt, Artificial Sequence
  Description of Artificial Sequence: Synthetic oligonucleotide
cgugcacacaguuugcacu

SEQ ID NO: 2979016 - RNA, 19 nt, Artificial Sequence
  Description of Artificial Sequence: Synthetic oligonucleotide
cagcauuguaagacuugau

SEQ ID NO: 2979017 - RNA, 19 nt, Artificial Sequence
  Description of Artificial Sequence: Synthetic oligonucleotide
gcacacaguuugcacuucu

SEQ ID NO: 2979018 - RNA, 19 nt, Artificial Sequence
  Description of Artificial Sequence: Synthetic oligonucleotide
cgcucgguucuuaugggca

SEQ ID NO: 2979019 - RNA, 19 nt, Artificial Sequence
  Description of Artificial Sequence: Synthetic oligonucleotide
uugcugcucagggcaccau

SEQ ID NO: 2979020 - RNA, 19 nt, Artificial Sequence
  Description of Artificial Sequence: Synthetic oligonucleotide
ccuggggcuggaagucaac

SEQ ID NO: 2979021 - RNA, 19 nt, Artificial Sequence
  Description of Artificial Sequence: Synthetic oligonucleotide
guucagcacuuuacaaauu

SEQ ID NO: 2979022 - RNA, 19 nt, Artificial Sequence
  Description of Artificial Sequence: Synthetic oligonucleotide
caccauuucuccgcucggu

SEQ ID NO: 2979023 - RNA, 19 nt, Artificial Sequence
  Description of Artificial Sequence: Synthetic oligonucleotide
ggcacugccacgaccuccu

SEQ ID NO: 2979024 - RNA, 19 nt, Artificial Sequence
  Description of Artificial Sequence: Synthetic oligonucleotide
cgauugucuugaacuucuc

SEQ ID NO: 2979025 - RNA, 19 nt, Artificial Sequence
  Description of Artificial Sequence: Synthetic oligonucleotide
ccagccuggggcuggaagu

SEQ ID NO: 2979026 - RNA, 19 nt, Artificial Sequence
  Description of Artificial Sequence: Synthetic oligonucleotide
guuugcacuucuggaccau

SEQ ID NO: 2979027 - RNA, 19 nt, Artificial Sequence
  Description of Artificial Sequence: Synthetic oligonucleotide
gggucaccucaaagauacc

SEQ ID NO: 2979028 - RNA, 19 nt, Artificial Sequence
  Description of Artificial Sequence: Synthetic oligonucleotide
guuuucccgugcacacagu

SEQ ID NO: 2979029 - RNA, 19 nt, Artificial Sequence
  Description of Artificial Sequence: Synthetic oligonucleotide
gccccgacacucaaacucu

SEQ ID NO: 2979030 - RNA, 19 nt, Artificial Sequence
  Description of Artificial Sequence: Synthetic oligonucleotide
ccuuuucuugcagauuaau

SEQ ID NO: 2979031 - RNA, 19 nt, Artificial Sequence
  Description of Artificial Sequence: Synthetic oligonucleotide
cccacagacuccugagccu

SEQ ID NO: 2979032 - RNA, 19 nt, Artificial Sequence
  Description of Artificial Sequence: Synthetic oligonucleotide
cccgugcacacaguuugca

SEQ ID NO: 2979033 - RNA, 19 nt, Artificial Sequence
  Description of Artificial Sequence: Synthetic oligonucleotide
ggaagacaguucagcacuu

SEQ ID NO: 2979034 - RNA, 19 nt, Artificial Sequence
  Description of Artificial Sequence: Synthetic oligonucleotide
gcugcucagggcaccauuu

SEQ ID NO: 2979035 - RNA, 19 nt, Artificial Sequence
  Description of Artificial Sequence: Synthetic oligonucleotide
gggcaccauuucuccgcuc

SEQ ID NO: 2979036 - RNA, 19 nt, Artificial Sequence
  Description of Artificial Sequence: Synthetic oligonucleotide
ccacaccuuccgcagcaaa

SEQ ID NO: 2979037 - RNA, 19 nt, Artificial Sequence
  Description of Artificial Sequence: Synthetic oligonucleotide
gucccugacuccacaccuu

SEQ ID NO: 2979038 - RNA, 19 nt, Artificial Sequence
  Description of Artificial Sequence: Synthetic oligonucleotide
gccuggggcuggaagucaa

SEQ ID NO: 2979039 - RNA, 19 nt, Artificial Sequence
  Description of Artificial Sequence: Synthetic oligonucleotide
ggcuggaagucaacugguu

SEQ ID NO: 2979040 - RNA, 19 nt, Artificial Sequence
  Description of Artificial Sequence: Synthetic oligonucleotide
ccuucucgucauacucugu

SEQ ID NO: 2979041 - RNA, 19 nt, Artificial Sequence
  Description of Artificial Sequence: Synthetic oligonucleotide
ccccgacacucaaacucua

SEQ ID NO: 2979042 - RNA, 19 nt, Artificial Sequence
  Description of Artificial Sequence: Synthetic oligonucleotide
ccacagacuccugagccuu

SEQ ID NO: 2979043 - RNA, 19 nt, Artificial Sequence
  Description of Artificial Sequence: Synthetic oligonucleotide
acccagccuggggcuggaa

SEQ ID NO: 2979044 - RNA, 19 nt, Artificial Sequence
  Description of Artificial Sequence: Synthetic oligonucleotide
ccugagccuucucgucaua

SEQ ID NO: 2979045 - RNA, 19 nt, Artificial Sequence
  Description of Artificial Sequence: Synthetic oligonucleotide
cgguucuuaugggcaaguu

SEQ ID NO: 2979046 - RNA, 19 nt, Artificial Sequence
  Description of Artificial Sequence: Synthetic oligonucleotide
ucuccugucaccuuaggcg

SEQ ID NO: 2979047 - RNA, 19 nt, Artificial Sequence
  Description of Artificial Sequence: Synthetic oligonucleotide
ucuguguccaucaugcccg

SEQ ID NO: 2979048 - RNA, 19 nt, Artificial Sequence
  Description of Artificial Sequence: Synthetic oligonucleotide
ucuucuuccggucaaagug

SEQ ID NO: 2979049 - RNA, 19 nt, Artificial Sequence
  Description of Artificial Sequence: Synthetic oligonucleotide
ucaucuguguccaucaugc

SEQ ID NO: 2979050 - RNA, 19 nt, Artificial Sequence
  Description of Artificial Sequence: Synthetic oligonucleotide
uuuguuggggucuacaaug

SEQ ID NO: 2979051 - RNA, 19 nt, Artificial Sequence
  Description of Artificial Sequence: Synthetic oligonucleotide
uggaggauaaggcaggcgc

SEQ ID NO: 2979052 - RNA, 19 nt, Artificial Sequence
  Description of Artificial Sequence: Synthetic oligonucleotide
aaaucaucuguguccauca

SEQ ID NO: 2979053 - RNA, 19 nt, Artificial Sequence
  Description of Artificial Sequence: Synthetic oligonucleotide
uaacccauggaggauaagg

SEQ ID NO: 2979054 - RNA, 19 nt, Artificial Sequence
  Description of Artificial Sequence: Synthetic oligonucleotide
uucauuggcguguugaagu

SEQ ID NO: 2979055 - RNA, 19 nt, Artificial Sequence
  Description of Artificial Sequence: Synthetic oligonucleotide
aacccauggaggauaaggc

SEQ ID NO: 2979056 - RNA, 19 nt, Artificial Sequence
  Description of Artificial Sequence: Synthetic oligonucleotide
aucaugcccgucuucuucc

SEQ ID NO: 2979057 - RNA, 19 nt, Artificial Sequence
  Description of Artificial Sequence: Synthetic oligonucleotide
cuucuuccggucaaagugg

SEQ ID NO: 2979058 - RNA, 19 nt, Artificial Sequence
  Description of Artificial Sequence: Synthetic oligonucleotide
cuccugucaccuuaggcgg

SEQ ID NO: 2979059 - RNA, 19 nt, Artificial Sequence
  Description of Artificial Sequence: Synthetic oligonucleotide
uucuccugucaccuuaggc

SEQ ID NO: 2979060 - RNA, 19 nt, Artificial Sequence
  Description of Artificial Sequence: Synthetic oligonucleotide
uucuccacuucauuggcgu

SEQ ID NO: 2979061 - RNA, 19 nt, Artificial Sequence
  Description of Artificial Sequence: Synthetic oligonucleotide
aaauucugccucucccaug

SEQ ID NO: 2979062 - RNA, 19 nt, Artificial Sequence
  Description of Artificial Sequence: Synthetic oligonucleotide
ucugccucucccauguugu

SEQ ID NO: 2979063 - RNA, 19 nt, Artificial Sequence
  Description of Artificial Sequence: Synthetic oligonucleotide
uuguuggggucuacaaugc

SEQ ID NO: 2979064 - RNA, 19 nt, Artificial Sequence
  Description of Artificial Sequence: Synthetic oligonucleotide
auguuguaacccauggagg

SEQ ID NO: 2979065 - RNA, 19 nt, Artificial Sequence
  Description of Artificial Sequence: Synthetic oligonucleotide
cuuccggucaaagugguug

SEQ ID NO: 2979066 - RNA, 19 nt, Artificial Sequence
  Description of Artificial Sequence: Synthetic oligonucleotide
aaggcaggcgcggaaauca

SEQ ID NO: 2979067 - RNA, 19 nt, Artificial Sequence
  Description of Artificial Sequence: Synthetic oligonucleotide
gcggaaaucaucugugucc

SEQ ID NO: 2979068 - RNA, 19 nt, Artificial Sequence
  Description of Artificial Sequence: Synthetic oligonucleotide
gaggauaaggcaggcgcgg

SEQ ID NO: 2979069 - RNA, 19 nt, Artificial Sequence
  Description of Artificial Sequence: Synthetic oligonucleotide
uccaucaugcccgucuucu

SEQ ID NO: 2979070 - RNA, 19 nt, Artificial Sequence
  Description of Artificial Sequence: Synthetic oligonucleotide
uguaacccauggaggauaa

SEQ ID NO: 2979071 - RNA, 19 nt, Artificial Sequence
  Description of Artificial Sequence: Synthetic oligonucleotide
acccauggaggauaaggca

SEQ ID NO: 2979072 - RNA, 19 nt, Artificial Sequence
  Description of Artificial Sequence: Synthetic oligonucleotide
ucccauguuguaacccaug

SEQ ID NO: 2979073 - RNA, 19 nt, Artificial Sequence
  Description of Artificial Sequence: Synthetic oligonucleotide
aaucaucuguguccaucau

SEQ ID NO: 2979074 - RNA, 19 nt, Artificial Sequence
  Description of Artificial Sequence: Synthetic oligonucleotide
uucuuccggucaaaguggu

SEQ ID NO: 2979075 - RNA, 19 nt, Artificial Sequence
  Description of Artificial Sequence: Synthetic oligonucleotide
auuggcguguugaaguuga

SEQ ID NO: 2979076 - RNA, 19 nt, Artificial Sequence
  Description of Artificial Sequence: Synthetic oligonucleotide
cuucauuggcguguugaag

SEQ ID NO: 2979077 - RNA, 19 nt, Artificial Sequence
  Description of Artificial Sequence: Synthetic oligonucleotide
acuucauuggcguguugaa

SEQ ID NO: 2979078 - RNA, 19 nt, Artificial Sequence
  Description of Artificial Sequence: Synthetic oligonucleotide
uuccggucaaagugguuga

SEQ ID NO: 2979079 - RNA, 19 nt, Artificial Sequence
  Description of Artificial Sequence: Synthetic oligonucleotide
ucaugcccgucuucuuccg

SEQ ID NO: 2979080 - RNA, 19 nt, Artificial Sequence
  Description of Artificial Sequence: Synthetic oligonucleotide
cccauggaggauaaggcag

SEQ ID NO: 2979081 - RNA, 19 nt, Artificial Sequence
  Description of Artificial Sequence: Synthetic oligonucleotide
caucaugcccgucuucuuc

SEQ ID NO: 2979082 - RNA, 19 nt, Artificial Sequence
  Description of Artificial Sequence: Synthetic oligonucleotide
ugucaccuuaggcggcuug

SEQ ID NO: 2979083 - RNA, 19 nt, Artificial Sequence
  Description of Artificial Sequence: Synthetic oligonucleotide
uuguaacccauggaggaua

SEQ ID NO: 2979084 - RNA, 19 nt, Artificial Sequence
  Description of Artificial Sequence: Synthetic oligonucleotide
aggcgcggaaaucaucugu

SEQ ID NO: 2979085 - RNA, 19 nt, Artificial Sequence
  Description of Artificial Sequence: Synthetic oligonucleotide
guucuccacuucauuggcg

SEQ ID NO: 2979086 - RNA, 19 nt, Artificial Sequence
  Description of Artificial Sequence: Synthetic oligonucleotide
uggcacuucuccugucacc

SEQ ID NO: 2979087 - RNA, 19 nt, Artificial Sequence
  Description of Artificial Sequence: Synthetic oligonucleotide
ucauuggcguguugaaguu

SEQ ID NO: 2979088 - RNA, 19 nt, Artificial Sequence
  Description of Artificial Sequence: Synthetic oligonucleotide
ucuccacuucauuggcgug

SEQ ID NO: 2979089 - RNA, 19 nt, Artificial Sequence
  Description of Artificial Sequence: Synthetic oligonucleotide
cccauguuguaacccaugg

SEQ ID NO: 2979090 - RNA, 19 nt, Artificial Sequence
  Description of Artificial Sequence: Synthetic oligonucleotide
ccauggaggauaaggcagg

SEQ ID NO: 2979091 - RNA, 19 nt, Artificial Sequence
  Description of Artificial Sequence: Synthetic oligonucleotide
auaaggcaggcgcggaaau

SEQ ID NO: 2979092 - RNA, 19 nt, Artificial Sequence
  Description of Artificial Sequence: Synthetic oligonucleotide
auggaggauaaggcaggcg

SEQ ID NO: 2979093 - RNA, 19 nt, Artificial Sequence
  Description of Artificial Sequence: Synthetic oligonucleotide
uccugucaccuuaggcggc

SEQ ID NO: 2979094 - RNA, 19 nt, Artificial Sequence
  Description of Artificial Sequence: Synthetic oligonucleotide
ggaggauaaggcaggcgcg

SEQ ID NO: 2979095 - RNA, 19 nt, Artificial Sequence
  Description of Artificial Sequence: Synthetic oligonucleotide
gauaaggcaggcgcggaaa

SEQ ID NO: 2979096 - RNA, 19 nt, Artificial Sequence
  Description of Artificial Sequence: Synthetic oligonucleotide
caucuguguccaucaugcc

SEQ ID NO: 2979097 - RNA, 19 nt, Artificial Sequence
  Description of Artificial Sequence: Synthetic oligonucleotide
cacuucauuggcguguuga

SEQ ID NO: 2979098 - RNA, 19 nt, Artificial Sequence
  Description of Artificial Sequence: Synthetic oligonucleotide
augcccgucuucuuccggu

SEQ ID NO: 2979099 - RNA, 19 nt, Artificial Sequence
  Description of Artificial Sequence: Synthetic oligonucleotide
cauggaggauaaggcaggc

SEQ ID NO: 2979100 - RNA, 19 nt, Artificial Sequence
  Description of Artificial Sequence: Synthetic oligonucleotide
cuucuccugucaccuuagg

SEQ ID NO: 2979101 - RNA, 19 nt, Artificial Sequence
  Description of Artificial Sequence: Synthetic oligonucleotide
cuggcacuucuccugucac

SEQ ID NO: 2979102 - RNA, 19 nt, Artificial Sequence
  Description of Artificial Sequence: Synthetic oligonucleotide
acuucuccugucaccuuag

SEQ ID NO: 2979103 - RNA, 19 nt, Artificial Sequence
  Description of Artificial Sequence: Synthetic oligonucleotide
caugcccgucuucuuccgg

SEQ ID NO: 2979104 - RNA, 19 nt, Artificial Sequence
  Description of Artificial Sequence: Synthetic oligonucleotide
cauuggcguguugaaguug

SEQ ID NO: 2979105 - RNA, 19 nt, Artificial Sequence
  Description of Artificial Sequence: Synthetic oligonucleotide
guguccaucaugcccgucu

SEQ ID NO: 2979106 - RNA, 19 nt, Artificial Sequence
  Description of Artificial Sequence: Synthetic oligonucleotide
uaaggcaggcgcggaaauc

SEQ ID NO: 2979107 - RNA, 19 nt, Artificial Sequence
  Description of Artificial Sequence: Synthetic oligonucleotide
uggcguguugaaguugauc

SEQ ID NO: 2979108 - RNA, 19 nt, Artificial Sequence
  Description of Artificial Sequence: Synthetic oligonucleotide
ugccucucccauguuguaa

SEQ ID NO: 2979109 - RNA, 19 nt, Artificial Sequence
  Description of Artificial Sequence: Synthetic oligonucleotide
gccucucccauguuguaac

SEQ ID NO: 2979110 - RNA, 19 nt, Artificial Sequence
  Description of Artificial Sequence: Synthetic oligonucleotide
ggcgcggaaaucaucugug

SEQ ID NO: 2979111 - RNA, 19 nt, Artificial Sequence
  Description of Artificial Sequence: Synthetic oligonucleotide
ucuuccggucaaagugguu

SEQ ID NO: 2979112 - RNA, 19 nt, Artificial Sequence
  Description of Artificial Sequence: Synthetic oligonucleotide
gucuucuuccggucaaagu

SEQ ID NO: 2979113 - RNA, 19 nt, Artificial Sequence
  Description of Artificial Sequence: Synthetic oligonucleotide
uccacuucauuggcguguu

SEQ ID NO: 2979114 - RNA, 19 nt, Artificial Sequence
  Description of Artificial Sequence: Synthetic oligonucleotide
aggauaaggcaggcgcgga

SEQ ID NO: 2979115 - RNA, 19 nt, Artificial Sequence
  Description of Artificial Sequence: Synthetic oligonucleotide
cacuucuccugucaccuua

SEQ ID NO: 2979116 - RNA, 19 nt, Artificial Sequence
  Description of Artificial Sequence: Synthetic oligonucleotide
caggcgcggaaaucaucug

SEQ ID NO: 2979117 - RNA, 19 nt, Artificial Sequence
  Description of Artificial Sequence: Synthetic oligonucleotide
uuggcguguugaaguugau

SEQ ID NO: 2979118 - RNA, 19 nt, Artificial Sequence
  Description of Artificial Sequence: Synthetic oligonucleotide
guaacccauggaggauaag

SEQ ID NO: 2979119 - RNA, 19 nt, Artificial Sequence
  Description of Artificial Sequence: Synthetic oligonucleotide
gcuggcacuucuccuguca

SEQ ID NO: 2979120 - RNA, 19 nt, Artificial Sequence
  Description of Artificial Sequence: Synthetic oligonucleotide
ggcacuucuccugucaccu

SEQ ID NO: 2979121 - RNA, 19 nt, Artificial Sequence
  Description of Artificial Sequence: Synthetic oligonucleotide
ggauaaggcaggcgcggaa

SEQ ID NO: 2979122 - RNA, 19 nt, Artificial Sequence
  Description of Artificial Sequence: Synthetic oligonucleotide
guccaucaugcccgucuuc

SEQ ID NO: 2979123 - RNA, 19 nt, Artificial Sequence
  Description of Artificial Sequence: Synthetic oligonucleotide
ccauguuguaacccaugga

SEQ ID NO: 2979124 - RNA, 19 nt, Artificial Sequence
  Description of Artificial Sequence: Synthetic oligonucleotide
cgcggaaaucaucuguguc

SEQ ID NO: 2979125 - RNA, 19 nt, Artificial Sequence
  Description of Artificial Sequence: Synthetic oligonucleotide
cuccacuucauuggcgugu

SEQ ID NO: 2979126 - RNA, 19 nt, Artificial Sequence
  Description of Artificial Sequence: Synthetic oligonucleotide
gcaggcgcggaaaucaucu

SEQ ID NO: 2979127 - RNA, 19 nt, Artificial Sequence
  Description of Artificial Sequence: Synthetic oligonucleotide
uguguccaucaugcccguc

SEQ ID NO: 2979128 - RNA, 19 nt, Artificial Sequence
  Description of Artificial Sequence: Synthetic oligonucleotide
gucaccuuaggcggcuugu

SEQ ID NO: 2979129 - RNA, 19 nt, Artificial Sequence
  Description of Artificial Sequence: Synthetic oligonucleotide
cggaaaucaucugugucca

SEQ ID NO: 2979130 - RNA, 19 nt, Artificial Sequence
  Description of Artificial Sequence: Synthetic oligonucleotide
cucccauguuguaacccau

SEQ ID NO: 2979131 - RNA, 19 nt, Artificial Sequence
  Description of Artificial Sequence: Synthetic oligonucleotide
cgucuucuuccggucaaag

SEQ ID NO: 2979132 - RNA, 19 nt, Artificial Sequence
  Description of Artificial Sequence: Synthetic oligonucleotide
aggcaggcgcggaaaucau

SEQ ID NO: 2979133 - RNA, 19 nt, Artificial Sequence
  Description of Artificial Sequence: Synthetic oligonucleotide
ggcaggcgcggaaaucauc

SEQ ID NO: 2979134 - RNA, 19 nt, Artificial Sequence
  Description of Artificial Sequence: Synthetic oligonucleotide
cugccucucccauguugua

SEQ ID NO: 2979135 - RNA, 19 nt, Artificial Sequence
  Description of Artificial Sequence: Synthetic oligonucleotide
gcccgucuucuuccgguca

SEQ ID NO: 2979136 - RNA, 19 nt, Artificial Sequence
  Description of Artificial Sequence: Synthetic oligonucleotide
gcgcggaaaucaucugugu

SEQ ID NO: 2979137 - RNA, 19 nt, Artificial Sequence
  Description of Artificial Sequence: Synthetic oligonucleotide
cuguguccaucaugcccgu

SEQ ID NO: 2979138 - RNA, 19 nt, Artificial Sequence
  Description of Artificial Sequence: Synthetic oligonucleotide
ccacuucauuggcguguug

SEQ ID NO: 2979139 - RNA, 19 nt, Artificial Sequence
  Description of Artificial Sequence: Synthetic oligonucleotide
cccgucuucuuccggucaa

SEQ ID NO: 2979140 - RNA, 19 nt, Artificial Sequence
  Description of Artificial Sequence: Synthetic oligonucleotide
ccugucaccuuaggcggcu

SEQ ID NO: 2979141 - RNA, 19 nt, Artificial Sequence
  Description of Artificial Sequence: Synthetic oligonucleotide
ccaucaugcccgucuucuu

SEQ ID NO: 2979142 - RNA, 19 nt, Artificial Sequence
  Description of Artificial Sequence: Synthetic oligonucleotide
ccgucuucuuccggucaaa

SEQ ID NO: 2979143 - RNA, 19 nt, Artificial Sequence
  Description of Artificial Sequence: Synthetic oligonucleotide
aaguuaaacgaaaauauac

SEQ ID NO: 2979144 - RNA, 19 nt, Artificial Sequence
  Description of Artificial Sequence: Synthetic oligonucleotide
uauacuaaaaguuuugagu

SEQ ID NO: 2979145 - RNA, 19 nt, Artificial Sequence
  Description of Artificial Sequence: Synthetic oligonucleotide
uucuuugcgaauaauacag

SEQ ID NO: 2979146 - RNA, 19 nt, Artificial Sequence
  Description of Artificial Sequence: Synthetic oligonucleotide
cucauugacacaaagaaac

SEQ ID NO: 2979147 - RNA, 19 nt, Artificial Sequence
  Description of Artificial Sequence: Synthetic oligonucleotide
guugagucaaaguuaaacg

SEQ ID NO: 2979148 - RNA, 19 nt, Artificial Sequence
  Description of Artificial Sequence: Synthetic oligonucleotide
uuuucuuugcgaauaauac

SEQ ID NO: 2979149 - RNA, 19 nt, Artificial Sequence
  Description of Artificial Sequence: Synthetic oligonucleotide
auugacacaaagaaacucc

SEQ ID NO: 2979150 - RNA, 19 nt, Artificial Sequence
  Description of Artificial Sequence: Synthetic oligonucleotide
acgaaaauauacuaaaagu

SEQ ID NO: 2979151 - RNA, 19 nt, Artificial Sequence
  Description of Artificial Sequence: Synthetic oligonucleotide
uuguccaucuaauucauag

SEQ ID NO: 2979152 - RNA, 19 nt, Artificial Sequence
  Description of Artificial Sequence: Synthetic oligonucleotide
uaaacgaaaauauacuaaa

SEQ ID NO: 2979153 - RNA, 19 nt, Artificial Sequence
  Description of Artificial Sequence: Synthetic oligonucleotide
gacacaaagaaacuccucc

SEQ ID NO: 2979154 - RNA, 19 nt, Artificial Sequence
  Description of Artificial Sequence: Synthetic oligonucleotide
uuaaacgaaaauauacuaa

SEQ ID NO: 2979155 - RNA, 19 nt, Artificial Sequence
  Description of Artificial Sequence: Synthetic oligonucleotide
auauacuaaaaguuuugag

SEQ ID NO: 2979156 - RNA, 19 nt, Artificial Sequence
  Description of Artificial Sequence: Synthetic oligonucleotide
uugagucaaaguuaaacga

SEQ ID NO: 2979157 - RNA, 19 nt, Artificial Sequence
  Description of Artificial Sequence: Synthetic oligonucleotide
auacuaaaaguuuugaguu

SEQ ID NO: 2979158 - RNA, 19 nt, Artificial Sequence
  Description of Artificial Sequence: Synthetic oligonucleotide
guuguuucugucaagaagc

SEQ ID NO: 2979159 - RNA, 19 nt, Artificial Sequence
  Description of Artificial Sequence: Synthetic oligonucleotide
ucaaaguuaaacgaaaaua

SEQ ID NO: 2979160 - RNA, 19 nt, Artificial Sequence
  Description of Artificial Sequence: Synthetic oligonucleotide
aauauacuaaaaguuuuga

SEQ ID NO: 2979161 - RNA, 19 nt, Artificial Sequence
  Description of Artificial Sequence: Synthetic oligonucleotide
ucauuguucuccaaguacu

SEQ ID NO: 2979162 - RNA, 19 nt, Artificial Sequence
  Description of Artificial Sequence: Synthetic oligonucleotide
aaauauacuaaaaguuuug

SEQ ID NO: 2979163 - RNA, 19 nt, Artificial Sequence
  Description of Artificial Sequence: Synthetic oligonucleotide
acaaagaaacuccuccagg

SEQ ID NO: 2979164 - RNA, 19 nt, Artificial Sequence
  Description of Artificial Sequence: Synthetic oligonucleotide
uuguuguugagucaaaguu

SEQ ID NO: 2979165 - RNA, 19 nt, Artificial Sequence
  Description of Artificial Sequence: Synthetic oligonucleotide
uuucuuugcgaauaauaca

SEQ ID NO: 2979166 - RNA, 19 nt, Artificial Sequence
  Description of Artificial Sequence: Synthetic oligonucleotide
uguugagucaaaguuaaac

SEQ ID NO: 2979167 - RNA, 19 nt, Artificial Sequence
  Description of Artificial Sequence: Synthetic oligonucleotide
aaaauauacuaaaaguuuu

SEQ ID NO: 2979168 - RNA, 19 nt, Artificial Sequence
  Description of Artificial Sequence: Synthetic oligonucleotide
acuaaaaguuuugaguuag

SEQ ID NO: 2979169 - RNA, 19 nt, Artificial Sequence
  Description of Artificial Sequence: Synthetic oligonucleotide
ugagucaaaguuaaacgaa

SEQ ID NO: 2979170 - RNA, 19 nt, Artificial Sequence
  Description of Artificial Sequence: Synthetic oligonucleotide
uguuguugagucaaaguua

SEQ ID NO: 2979171 - RNA, 19 nt, Artificial Sequence
  Description of Artificial Sequence: Synthetic oligonucleotide
aagaaacuccuccaggaau

SEQ ID NO: 2979172 - RNA, 19 nt, Artificial Sequence
  Description of Artificial Sequence: Synthetic oligonucleotide
aguuaaacgaaaauauacu

SEQ ID NO: 2979173 - RNA, 19 nt, Artificial Sequence
  Description of Artificial Sequence: Synthetic oligonucleotide
uauuugguuguuucuguca

SEQ ID NO: 2979174 - RNA, 19 nt, Artificial Sequence
  Description of Artificial Sequence: Synthetic oligonucleotide
uacaguauuugguuguuuc

SEQ ID NO: 2979175 - RNA, 19 nt, Artificial Sequence
  Description of Artificial Sequence: Synthetic oligonucleotide
guuaaacgaaaauauacua

SEQ ID NO: 2979176 - RNA, 19 nt, Artificial Sequence
  Description of Artificial Sequence: Synthetic oligonucleotide
uugacacaaagaaacuccu

SEQ ID NO: 2979177 - RNA, 19 nt, Artificial Sequence
  Description of Artificial Sequence: Synthetic oligonucleotide
aaagaaacuccuccaggaa

SEQ ID NO: 2979178 - RNA, 19 nt, Artificial Sequence
  Description of Artificial Sequence: Synthetic oligonucleotide
ucauugacacaaagaaacu

SEQ ID NO: 2979179 - RNA, 19 nt, Artificial Sequence
  Description of Artificial Sequence: Synthetic oligonucleotide
caaaguuaaacgaaaauau

SEQ ID NO: 2979180 - RNA, 19 nt, Artificial Sequence
  Description of Artificial Sequence: Synthetic oligonucleotide
aguauuugguuguuucugu

SEQ ID NO: 2979181 - RNA, 19 nt, Artificial Sequence
  Description of Artificial Sequence: Synthetic oligonucleotide
gguuguuucugucaagaag

SEQ ID NO: 2979182 - RNA, 19 nt, Artificial Sequence
  Description of Artificial Sequence: Synthetic oligonucleotide
uguugguugguuguuguug

SEQ ID NO: 2979183 - RNA, 19 nt, Artificial Sequence
  Description of Artificial Sequence: Synthetic oligonucleotide
aaaguuaaacgaaaauaua

SEQ ID NO: 2979184 - RNA, 19 nt, Artificial Sequence
  Description of Artificial Sequence: Synthetic oligonucleotide
gucauuguucuccaaguac

SEQ ID NO: 2979185 - RNA, 19 nt, Artificial Sequence
  Description of Artificial Sequence: Synthetic oligonucleotide
gaaaauauacuaaaaguuu

SEQ ID NO: 2979186 - RNA, 19 nt, Artificial Sequence
  Description of Artificial Sequence: Synthetic oligonucleotide
agcgucauuguucuccaag

SEQ ID NO: 2979187 - RNA, 19 nt, Artificial Sequence
  Description of Artificial Sequence: Synthetic oligonucleotide
caaagaaacuccuccagga

SEQ ID NO: 2979188 - RNA, 19 nt, Artificial Sequence
  Description of Artificial Sequence: Synthetic oligonucleotide
uuuguugguugguuguugu

SEQ ID NO: 2979189 - RNA, 19 nt, Artificial Sequence
  Description of Artificial Sequence: Synthetic oligonucleotide
cacaaagaaacuccuccag

SEQ ID NO: 2979190 - RNA, 19 nt, Artificial Sequence
  Description of Artificial Sequence: Synthetic oligonucleotide
acacaaagaaacuccucca

SEQ ID NO: 2979191 - RNA, 19 nt, Artificial Sequence
  Description of Artificial Sequence: Synthetic oligonucleotide
uugguuguuucugucaaga

SEQ ID NO: 2979192 - RNA, 19 nt, Artificial Sequence
  Description of Artificial Sequence: Synthetic oligonucleotide
acaguauuugguuguuucu

SEQ ID NO: 2979193 - RNA, 19 nt, Artificial Sequence
  Description of Artificial Sequence: Synthetic oligonucleotide
aaacgaaaauauacuaaaa

SEQ ID NO: 2979194 - RNA, 19 nt, Artificial Sequence
  Description of Artificial Sequence: Synthetic oligonucleotide
ucuuugcgaauaauacagu

SEQ ID NO: 2979195 - RNA, 19 nt, Artificial Sequence
  Description of Artificial Sequence: Synthetic oligonucleotide
uacuaaaaguuuugaguua

SEQ ID NO: 2979196 - RNA, 19 nt, Artificial Sequence
  Description of Artificial Sequence: Synthetic oligonucleotide
cauugacacaaagaaacuc

SEQ ID NO: 2979197 - RNA, 19 nt, Artificial Sequence
  Description of Artificial Sequence: Synthetic oligonucleotide
ggcucauugacacaaagaa

SEQ ID NO: 2979198 - RNA, 19 nt, Artificial Sequence
  Description of Artificial Sequence: Synthetic oligonucleotide
uugguuguuguugagucaa

SEQ ID NO: 2979199 - RNA, 19 nt, Artificial Sequence
  Description of Artificial Sequence: Synthetic oligonucleotide
uuuuguugguugguuguug

SEQ ID NO: 2979200 - RNA, 19 nt, Artificial Sequence
  Description of Artificial Sequence: Synthetic oligonucleotide
ucuuguccaucuaauucau

SEQ ID NO: 2979201 - RNA, 19 nt, Artificial Sequence
  Description of Artificial Sequence: Synthetic oligonucleotide
guuguugagucaaaguuaa

SEQ ID NO: 2979202 - RNA, 19 nt, Artificial Sequence
  Description of Artificial Sequence: Synthetic oligonucleotide
agggcucauugacacaaag

SEQ ID NO: 2979203 - RNA, 19 nt, Artificial Sequence
  Description of Artificial Sequence: Synthetic oligonucleotide
guugguugguuguuguuga

SEQ ID NO: 2979204 - RNA, 19 nt, Artificial Sequence
  Description of Artificial Sequence: Synthetic oligonucleotide
ugacacaaagaaacuccuc

SEQ ID NO: 2979205 - RNA, 19 nt, Artificial Sequence
  Description of Artificial Sequence: Synthetic oligonucleotide
caguauuugguuguuucug

SEQ ID NO: 2979206 - RNA, 19 nt, Artificial Sequence
  Description of Artificial Sequence: Synthetic oligonucleotide
gguugguuguuguugaguc

SEQ ID NO: 2979207 - RNA, 19 nt, Artificial Sequence
  Description of Artificial Sequence: Synthetic oligonucleotide
cuuugcgaauaauacagua

SEQ ID NO: 2979208 - RNA, 19 nt, Artificial Sequence
  Description of Artificial Sequence: Synthetic oligonucleotide
aauacaguauuugguuguu

SEQ ID NO: 2979209 - RNA, 19 nt, Artificial Sequence
  Description of Artificial Sequence: Synthetic oligonucleotide
gaacuucuuguccaucuaa

SEQ ID NO: 2979210 - RNA, 19 nt, Artificial Sequence
  Description of Artificial Sequence: Synthetic oligonucleotide
gagucaaaguuaaacgaaa

SEQ ID NO: 2979211 - RNA, 19 nt, Artificial Sequence
  Description of Artificial Sequence: Synthetic oligonucleotide
ugaacuucuuguccaucua

SEQ ID NO: 2979212 - RNA, 19 nt, Artificial Sequence
  Description of Artificial Sequence: Synthetic oligonucleotide
guauuugguuguuucuguc

SEQ ID NO: 2979213 - RNA, 19 nt, Artificial Sequence
  Description of Artificial Sequence: Synthetic oligonucleotide
uugguugguuguuguugag

SEQ ID NO: 2979214 - RNA, 19 nt, Artificial Sequence
  Description of Artificial Sequence: Synthetic oligonucleotide
guuguuguugagucaaagu

SEQ ID NO: 2979215 - RNA, 19 nt, Artificial Sequence
  Description of Artificial Sequence: Synthetic oligonucleotide
agucaaaguuaaacgaaaa

SEQ ID NO: 2979216 - RNA, 19 nt, Artificial Sequence
  Description of Artificial Sequence: Synthetic oligonucleotide
gucaaaguuaaacgaaaau

SEQ ID NO: 2979217 - RNA, 19 nt, Artificial Sequence
  Description of Artificial Sequence: Synthetic oligonucleotide
ugguuguuucugucaagaa

SEQ ID NO: 2979218 - RNA, 19 nt, Artificial Sequence
  Description of Artificial Sequence: Synthetic oligonucleotide
agaaacuccuccaggaauu

SEQ ID NO: 2979219 - RNA, 19 nt, Artificial Sequence
  Description of Artificial Sequence: Synthetic oligonucleotide
guugguuguuguugaguca

SEQ ID NO: 2979220 - RNA, 19 nt, Artificial Sequence
  Description of Artificial Sequence: Synthetic oligonucleotide
ugguugguuguuguugagu

SEQ ID NO: 2979221 - RNA, 19 nt, Artificial Sequence
  Description of Artificial Sequence: Synthetic oligonucleotide
gguuguuguugagucaaag

SEQ ID NO: 2979222 - RNA, 19 nt, Artificial Sequence
  Description of Artificial Sequence: Synthetic oligonucleotide
aguuauggcagcaguuuau

SEQ ID NO: 2979223 - RNA, 19 nt, Artificial Sequence
  Description of Artificial Sequence: Synthetic oligonucleotide
uuguugagucaaaguuaaa

SEQ ID NO: 2979224 - RNA, 19 nt, Artificial Sequence
  Description of Artificial Sequence: Synthetic oligonucleotide
uuguugguugguuguuguu

SEQ ID NO: 2979225 - RNA, 19 nt, Artificial Sequence
  Description of Artificial Sequence: Synthetic oligonucleotide
ugguuguuguugagucaaa

SEQ ID NO: 2979226 - RNA, 19 nt, Artificial Sequence
  Description of Artificial Sequence: Synthetic oligonucleotide
caugaacuucuuguccauc

SEQ ID NO: 2979227 - RNA, 19 nt, Artificial Sequence
  Description of Artificial Sequence: Synthetic oligonucleotide
aaacuccuccaggaauuuu

SEQ ID NO: 2979228 - RNA, 19 nt, Artificial Sequence
  Description of Artificial Sequence: Synthetic oligonucleotide
cuaaaaguuuugaguuagu

SEQ ID NO: 2979229 - RNA, 19 nt, Artificial Sequence
  Description of Artificial Sequence: Synthetic oligonucleotide
cauuguucuccaaguacuu

SEQ ID NO: 2979230 - RNA, 19 nt, Artificial Sequence
  Description of Artificial Sequence: Synthetic oligonucleotide
gggcucauugacacaaaga

SEQ ID NO: 2979231 - RNA, 19 nt, Artificial Sequence
  Description of Artificial Sequence: Synthetic oligonucleotide
cuuguccaucuaauucaua

SEQ ID NO: 2979232 - RNA, 19 nt, Artificial Sequence
  Description of Artificial Sequence: Synthetic oligonucleotide
gcgucauuguucuccaagu

SEQ ID NO: 2979233 - RNA, 19 nt, Artificial Sequence
  Description of Artificial Sequence: Synthetic oligonucleotide
cgucauuguucuccaagua

SEQ ID NO: 2979234 - RNA, 19 nt, Artificial Sequence
  Description of Artificial Sequence: Synthetic oligonucleotide
ccaugaacuucuuguccau

SEQ ID NO: 2979235 - RNA, 19 nt, Artificial Sequence
  Description of Artificial Sequence: Synthetic oligonucleotide
aacucggucacacagagcc

SEQ ID NO: 2979236 - RNA, 19 nt, Artificial Sequence
  Description of Artificial Sequence: Synthetic oligonucleotide
aaugguagcauccuucuuc

SEQ ID NO: 2979237 - RNA, 19 nt, Artificial Sequence
  Description of Artificial Sequence: Synthetic oligonucleotide
cuugaaauggcaaugguag

SEQ ID NO: 2979238 - RNA, 19 nt, Artificial Sequence
  Description of Artificial Sequence: Synthetic oligonucleotide
aacacagcuuccuaguggc

SEQ ID NO: 2979239 - RNA, 19 nt, Artificial Sequence
  Description of Artificial Sequence: Synthetic oligonucleotide
uuuaaaagcauucacuaau

SEQ ID NO: 2979240 - RNA, 19 nt, Artificial Sequence
  Description of Artificial Sequence: Synthetic oligonucleotide
aaagcauucacuaaucuug

SEQ ID NO: 2979241 - RNA, 19 nt, Artificial Sequence
  Description of Artificial Sequence: Synthetic oligonucleotide
ucauccagaauuaggauag

SEQ ID NO: 2979242 - RNA, 19 nt, Artificial Sequence
  Description of Artificial Sequence: Synthetic oligonucleotide
uucacuaaucuugaaaugg

SEQ ID NO: 2979243 - RNA, 19 nt, Artificial Sequence
  Description of Artificial Sequence: Synthetic oligonucleotide
cuuccagacaccaugauag

SEQ ID NO: 2979244 - RNA, 19 nt, Artificial Sequence
  Description of Artificial Sequence: Synthetic oligonucleotide
uuaggauagaugaaucucc

SEQ ID NO: 2979245 - RNA, 19 nt, Artificial Sequence
  Description of Artificial Sequence: Synthetic oligonucleotide
ugcacuaggacauucagcu

SEQ ID NO: 2979246 - RNA, 19 nt, Artificial Sequence
  Description of Artificial Sequence: Synthetic oligonucleotide
ucauggguagucaagagga

SEQ ID NO: 2979247 - RNA, 19 nt, Artificial Sequence
  Description of Artificial Sequence: Synthetic oligonucleotide
aauuaggauagaugaaucu

SEQ ID NO: 2979248 - RNA, 19 nt, Artificial Sequence
  Description of Artificial Sequence: Synthetic oligonucleotide
aaacacagcuuccuagugg

SEQ ID NO: 2979249 - RNA, 19 nt, Artificial Sequence
  Description of Artificial Sequence: Synthetic oligonucleotide
caucuaagccuguagaugg

SEQ ID NO: 2979250 - RNA, 19 nt, Artificial Sequence
  Description of Artificial Sequence: Synthetic oligonucleotide
aauggcaaugguagcaucc

SEQ ID NO: 2979251 - RNA, 19 nt, Artificial Sequence
  Description of Artificial Sequence: Synthetic oligonucleotide
gauagaugaaucucccagg

SEQ ID NO: 2979252 - RNA, 19 nt, Artificial Sequence
  Description of Artificial Sequence: Synthetic oligonucleotide
gaaccaaugcaucucagcc

SEQ ID NO: 2979253 - RNA, 19 nt, Artificial Sequence
  Description of Artificial Sequence: Synthetic oligonucleotide
agaugaaucucccaggaug

SEQ ID NO: 2979254 - RNA, 19 nt, Artificial Sequence
  Description of Artificial Sequence: Synthetic oligonucleotide
uuaacagcugccuggauug

SEQ ID NO: 2979255 - RNA, 19 nt, Artificial Sequence
  Description of Artificial Sequence: Synthetic oligonucleotide
uaguuuaaaagcauucacu

SEQ ID NO: 2979256 - RNA, 19 nt, Artificial Sequence
  Description of Artificial Sequence: Synthetic oligonucleotide
aaucuugaaauggcaaugg

SEQ ID NO: 2979257 - RNA, 19 nt, Artificial Sequence
  Description of Artificial Sequence: Synthetic oligonucleotide
aucucagccuuccagacac

SEQ ID NO: 2979258 - RNA, 19 nt, Artificial Sequence
  Description of Artificial Sequence: Synthetic oligonucleotide
uuuacagaggcauacacuu

SEQ ID NO: 2979259 - RNA, 19 nt, Artificial Sequence
  Description of Artificial Sequence: Synthetic oligonucleotide
agaggcauacacuugcagg

SEQ ID NO: 2979260 - RNA, 19 nt, Artificial Sequence
  Description of Artificial Sequence: Synthetic oligonucleotide
uaggacauucagcuggucg

SEQ ID NO: 2979261 - RNA, 19 nt, Artificial Sequence
  Description of Artificial Sequence: Synthetic oligonucleotide
auuaggauagaugaaucuc

SEQ ID NO: 2979262 - RNA, 19 nt, Artificial Sequence
  Description of Artificial Sequence: Synthetic oligonucleotide
aguuuaaaagcauucacua

SEQ ID NO: 2979263 - RNA, 19 nt, Artificial Sequence
  Description of Artificial Sequence: Synthetic oligonucleotide
agaugguucauccagaauu

SEQ ID NO: 2979264 - RNA, 19 nt, Artificial Sequence
  Description of Artificial Sequence: Synthetic oligonucleotide
uccagaauuaggauagaug

SEQ ID NO: 2979265 - RNA, 19 nt, Artificial Sequence
  Description of Artificial Sequence: Synthetic oligonucleotide
acaaaacacagcuuccuag

SEQ ID NO: 2979266 - RNA, 19 nt, Artificial Sequence
  Description of Artificial Sequence: Synthetic oligonucleotide
uacagaggcauacacuugc

SEQ ID NO: 2979267 - RNA, 19 nt, Artificial Sequence
  Description of Artificial Sequence: Synthetic oligonucleotide
cuugcugcugcucagacac

SEQ ID NO: 2979268 - RNA, 19 nt, Artificial Sequence
  Description of Artificial Sequence: Synthetic oligonucleotide
cacuaggacauucagcugg

SEQ ID NO: 2979269 - RNA, 19 nt, Artificial Sequence
  Description of Artificial Sequence: Synthetic oligonucleotide
augguagcauccuucuucc

SEQ ID NO: 2979270 - RNA, 19 nt, Artificial Sequence
  Description of Artificial Sequence: Synthetic oligonucleotide
augauagcaacucggucac

SEQ ID NO: 2979271 - RNA, 19 nt, Artificial Sequence
  Description of Artificial Sequence: Synthetic oligonucleotide
aaaagcauucacuaaucuu

SEQ ID NO: 2979272 - RNA, 19 nt, Artificial Sequence
  Description of Artificial Sequence: Synthetic oligonucleotide
ucacuaaucuugaaauggc

SEQ ID NO: 2979273 - RNA, 19 nt, Artificial Sequence
  Description of Artificial Sequence: Synthetic oligonucleotide
uuaaaagcauucacuaauc

SEQ ID NO: 2979274 - RNA, 19 nt, Artificial Sequence
  Description of Artificial Sequence: Synthetic oligonucleotide
uuuuacagaggcauacacu

SEQ ID NO: 2979275 - RNA, 19 nt, Artificial Sequence
  Description of Artificial Sequence: Synthetic oligonucleotide
ugguucauccagaauuagg

SEQ ID NO: 2979276 - RNA, 19 nt, Artificial Sequence
  Description of Artificial Sequence: Synthetic oligonucleotide
ugcucagcacaaaacacag

SEQ ID NO: 2979277 - RNA, 19 nt, Artificial Sequence
  Description of Artificial Sequence: Synthetic oligonucleotide
uggucguguaguuuaaaag

SEQ ID NO: 2979278 - RNA, 19 nt, Artificial Sequence
  Description of Artificial Sequence: Synthetic oligonucleotide
uguaguuuaaaagcauuca

SEQ ID NO: 2979279 - RNA, 19 nt, Artificial Sequence
  Description of Artificial Sequence: Synthetic oligonucleotide
aaaacacagcuuccuagug

SEQ ID NO: 2979280 - RNA, 19 nt, Artificial Sequence
  Description of Artificial Sequence: Synthetic oligonucleotide
gucuuuaacagcugccugg

SEQ ID NO: 2979281 - RNA, 19 nt, Artificial Sequence
  Description of Artificial Sequence: Synthetic oligonucleotide
caugauagcaacucgguca

SEQ ID NO: 2979282 - RNA, 19 nt, Artificial Sequence
  Description of Artificial Sequence: Synthetic oligonucleotide
uaaaagcauucacuaaucu

SEQ ID NO: 2979283 - RNA, 19 nt, Artificial Sequence
  Description of Artificial Sequence: Synthetic oligonucleotide
guaguuuaaaagcauucac

SEQ ID NO: 2979284 - RNA, 19 nt, Artificial Sequence
  Description of Artificial Sequence: Synthetic oligonucleotide
ugaaauggcaaugguagca

SEQ ID NO: 2979285 - RNA, 19 nt, Artificial Sequence
  Description of Artificial Sequence: Synthetic oligonucleotide
ucagcccuuuuacagaggc

SEQ ID NO: 2979286 - RNA, 19 nt, Artificial Sequence
  Description of Artificial Sequence: Synthetic oligonucleotide
uaaucuugaaauggcaaug

SEQ ID NO: 2979287 - RNA, 19 nt, Artificial Sequence
  Description of Artificial Sequence: Synthetic oligonucleotide
ggucguguaguuuaaaagc

SEQ ID NO: 2979288 - RNA, 19 nt, Artificial Sequence
  Description of Artificial Sequence: Synthetic oligonucleotide
uagcaacucggucacacag

SEQ ID NO: 2979289 - RNA, 19 nt, Artificial Sequence
  Description of Artificial Sequence: Synthetic oligonucleotide
uagcauguucuccugagga

SEQ ID NO: 2979290 - RNA, 19 nt, Artificial Sequence
  Description of Artificial Sequence: Synthetic oligonucleotide
aaauggcaaugguagcauc

SEQ ID NO: 2979291 - RNA, 19 nt, Artificial Sequence
  Description of Artificial Sequence: Synthetic oligonucleotide
acagcuuccuaguggcucc

SEQ ID NO: 2979292 - RNA, 19 nt, Artificial Sequence
  Description of Artificial Sequence: Synthetic oligonucleotide
ggauagaugaaucucccag

SEQ ID NO: 2979293 - RNA, 19 nt, Artificial Sequence
  Description of Artificial Sequence: Synthetic oligonucleotide
uuuaacagcugccuggauu

SEQ ID NO: 2979294 - RNA, 19 nt, Artificial Sequence
  Description of Artificial Sequence: Synthetic oligonucleotide
auugucuuuaacagcugcc

SEQ ID NO: 2979295 - RNA, 19 nt, Artificial Sequence
  Description of Artificial Sequence: Synthetic oligonucleotide
uaggauagaugaaucuccc

SEQ ID NO: 2979296 - RNA, 19 nt, Artificial Sequence
  Description of Artificial Sequence: Synthetic oligonucleotide
gaugaaucucccaggaugc

SEQ ID NO: 2979297 - RNA, 19 nt, Artificial Sequence
  Description of Artificial Sequence: Synthetic oligonucleotide
uuccucagcccuuuuacag

SEQ ID NO: 2979298 - RNA, 19 nt, Artificial Sequence
  Description of Artificial Sequence: Synthetic oligonucleotide
ucagccaagucauggguag

SEQ ID NO: 2979299 - RNA, 19 nt, Artificial Sequence
  Description of Artificial Sequence: Synthetic oligonucleotide
auagaugaaucucccagga

SEQ ID NO: 2979300 - RNA, 19 nt, Artificial Sequence
  Description of Artificial Sequence: Synthetic oligonucleotide
agaauuaggauagaugaau

SEQ ID NO: 2979301 - RNA, 19 nt, Artificial Sequence
  Description of Artificial Sequence: Synthetic oligonucleotide
cuguagaugguucauccag

SEQ ID NO: 2979302 - RNA, 19 nt, Artificial Sequence
  Description of Artificial Sequence: Synthetic oligonucleotide
uucuuucacugucaggaug

SEQ ID NO: 2979303 - RNA, 19 nt, Artificial Sequence
  Description of Artificial Sequence: Synthetic oligonucleotide
cuuuuacagaggcauacac

SEQ ID NO: 2979304 - RNA, 19 nt, Artificial Sequence
  Description of Artificial Sequence: Synthetic oligonucleotide
ucuuccucagcccuuuuac

SEQ ID NO: 2979305 - RNA, 19 nt, Artificial Sequence
  Description of Artificial Sequence: Synthetic oligonucleotide
uucauccagaauuaggaua

SEQ ID NO: 2979306 - RNA, 19 nt, Artificial Sequence
  Description of Artificial Sequence: Synthetic oligonucleotide
gucauggguagucaagagg

SEQ ID NO: 2979307 - RNA, 19 nt, Artificial Sequence
  Description of Artificial Sequence: Synthetic oligonucleotide
ugaaccaaugcaucucagc

SEQ ID NO: 2979308 - RNA, 19 nt, Artificial Sequence
  Description of Artificial Sequence: Synthetic oligonucleotide
aaccaaugcaucucagccu

SEQ ID NO: 2979309 - RNA, 19 nt, Artificial Sequence
  Description of Artificial Sequence: Synthetic oligonucleotide
uggguagucaagaggacac

SEQ ID NO: 2979310 - RNA, 19 nt, Artificial Sequence
  Description of Artificial Sequence: Synthetic oligonucleotide
uguagaugguucauccaga

SEQ ID NO: 2979311 - RNA, 19 nt, Artificial Sequence
  Description of Artificial Sequence: Synthetic oligonucleotide
auugaaccaaugcaucuca

SEQ ID NO: 2979312 - RNA, 19 nt, Artificial Sequence
  Description of Artificial Sequence: Synthetic oligonucleotide
auucacuaaucuugaaaug

SEQ ID NO: 2979313 - RNA, 19 nt, Artificial Sequence
  Description of Artificial Sequence: Synthetic oligonucleotide
gacacaucuaagccuguag

SEQ ID NO: 2979314 - RNA, 19 nt, Artificial Sequence
  Description of Artificial Sequence: Synthetic oligonucleotide
caccaugauagcaacucgg

SEQ ID NO: 2979315 - RNA, 19 nt, Artificial Sequence
  Description of Artificial Sequence: Synthetic oligonucleotide
gucaggaugggccauagca

SEQ ID NO: 2979316 - RNA, 19 nt, Artificial Sequence
  Description of Artificial Sequence: Synthetic oligonucleotide
agcauguucuccugaggac

SEQ ID NO: 2979317 - RNA, 19 nt, Artificial Sequence
  Description of Artificial Sequence: Synthetic oligonucleotide
cuaguuucugcacuaggac

SEQ ID NO: 2979318 - RNA, 19 nt, Artificial Sequence
  Description of Artificial Sequence: Synthetic oligonucleotide
ugucuuuaacagcugccug

SEQ ID NO: 2979319 - RNA, 19 nt, Artificial Sequence
  Description of Artificial Sequence: Synthetic oligonucleotide
ucagccucagccaagucau

SEQ ID NO: 2979320 - RNA, 19 nt, Artificial Sequence
  Description of Artificial Sequence: Synthetic oligonucleotide
gucacacagagccucagcc

SEQ ID NO: 2979321 - RNA, 19 nt, Artificial Sequence
  Description of Artificial Sequence: Synthetic oligonucleotide
uugccugccacacuugcug

SEQ ID NO: 2979322 - RNA, 19 nt, Artificial Sequence
  Description of Artificial Sequence: Synthetic oligonucleotide
cauagcauguucuccugag

SEQ ID NO: 2979323 - RNA, 19 nt, Artificial Sequence
  Description of Artificial Sequence: Synthetic oligonucleotide
ccagaauuaggauagauga

SEQ ID NO: 2979324 - RNA, 19 nt, Artificial Sequence
  Description of Artificial Sequence: Synthetic oligonucleotide
cagcacaaaacacagcuuc

SEQ ID NO: 2979325 - RNA, 19 nt, Artificial Sequence
  Description of Artificial Sequence: Synthetic oligonucleotide
aagaggacaccccugucau

SEQ ID NO: 2979326 - RNA, 19 nt, Artificial Sequence
  Description of Artificial Sequence: Synthetic oligonucleotide
aggacauucagcuggucgu

SEQ ID NO: 2979327 - RNA, 19 nt, Artificial Sequence
  Description of Artificial Sequence: Synthetic oligonucleotide
auagcauguucuccugagg

SEQ ID NO: 2979328 - RNA, 19 nt, Artificial Sequence
  Description of Artificial Sequence: Synthetic oligonucleotide
acacaucuaagccuguaga

SEQ ID NO: 2979329 - RNA, 19 nt, Artificial Sequence
  Description of Artificial Sequence: Synthetic oligonucleotide
aacagcugccuggauugcc

SEQ ID NO: 2979330 - RNA, 19 nt, Artificial Sequence
  Description of Artificial Sequence: Synthetic oligonucleotide
ugcagguguucuuucacug

SEQ ID NO: 2979331 - RNA, 19 nt, Artificial Sequence
  Description of Artificial Sequence: Synthetic oligonucleotide
uugaaauggcaaugguagc

SEQ ID NO: 2979332 - RNA, 19 nt, Artificial Sequence
  Description of Artificial Sequence: Synthetic oligonucleotide
uaagccuguagaugguuca

SEQ ID NO: 2979333 - RNA, 19 nt, Artificial Sequence
  Description of Artificial Sequence: Synthetic oligonucleotide
acaccaugauagcaacucg

SEQ ID NO: 2979334 - RNA, 19 nt, Artificial Sequence
  Description of Artificial Sequence: Synthetic oligonucleotide
ugcaucucagccuuccaga

SEQ ID NO: 2979335 - RNA, 19 nt, Artificial Sequence
  Description of Artificial Sequence: Synthetic oligonucleotide
gauagcaacucggucacac

SEQ ID NO: 2979336 - RNA, 19 nt, Artificial Sequence
  Description of Artificial Sequence: Synthetic oligonucleotide
aagucauggguagucaaga

SEQ ID NO: 2979337 - RNA, 19 nt, Artificial Sequence
  Description of Artificial Sequence: Synthetic oligonucleotide
gaauuaggauagaugaauc

SEQ ID NO: 2979338 - RNA, 19 nt, Artificial Sequence
  Description of Artificial Sequence: Synthetic oligonucleotide
gaugcucagcacaaaacac

SEQ ID NO: 2979339 - RNA, 19 nt, Artificial Sequence
  Description of Artificial Sequence: Synthetic oligonucleotide
gacaccaugauagcaacuc

SEQ ID NO: 2979340 - RNA, 19 nt, Artificial Sequence
  Description of Artificial Sequence: Synthetic oligonucleotide
ugcagcuaguuucugcacu

SEQ ID NO: 2979341 - RNA, 19 nt, Artificial Sequence
  Description of Artificial Sequence: Synthetic oligonucleotide
caagucauggguagucaag

SEQ ID NO: 2979342 - RNA, 19 nt, Artificial Sequence
  Description of Artificial Sequence: Synthetic oligonucleotide
gaggacaccccugucauug

SEQ ID NO: 2979343 - RNA, 19 nt, Artificial Sequence
  Description of Artificial Sequence: Synthetic oligonucleotide
agcuaguuucugcacuagg

SEQ ID NO: 2979344 - RNA, 19 nt, Artificial Sequence
  Description of Artificial Sequence: Synthetic oligonucleotide
uuacagaggcauacacuug

SEQ ID NO: 2979345 - RNA, 19 nt, Artificial Sequence
  Description of Artificial Sequence: Synthetic oligonucleotide
acaucuaagccuguagaug

SEQ ID NO: 2979346 - RNA, 19 nt, Artificial Sequence
  Description of Artificial Sequence: Synthetic oligonucleotide
uggauugccugccacacuu

SEQ ID NO: 2979347 - RNA, 19 nt, Artificial Sequence
  Description of Artificial Sequence: Synthetic oligonucleotide
gauugccugccacacuugc

SEQ ID NO: 2979348 - RNA, 19 nt, Artificial Sequence
  Description of Artificial Sequence: Synthetic oligonucleotide
uugaaccaaugcaucucag

SEQ ID NO: 2979349 - RNA, 19 nt, Artificial Sequence
  Description of Artificial Sequence: Synthetic oligonucleotide
agucauggguagucaagag

SEQ ID NO: 2979350 - RNA, 19 nt, Artificial Sequence
  Description of Artificial Sequence: Synthetic oligonucleotide
ucaggaugggccauagcau

SEQ ID NO: 2979351 - RNA, 19 nt, Artificial Sequence
  Description of Artificial Sequence: Synthetic oligonucleotide
ucuuuaacagcugccugga

SEQ ID NO: 2979352 - RNA, 19 nt, Artificial Sequence
  Description of Artificial Sequence: Synthetic oligonucleotide
cauucacuaaucuugaaau

SEQ ID NO: 2979353 - RNA, 19 nt, Artificial Sequence
  Description of Artificial Sequence: Synthetic oligonucleotide
guagcauccuucuuccuca

SEQ ID NO: 2979354 - RNA, 19 nt, Artificial Sequence
  Description of Artificial Sequence: Synthetic oligonucleotide
guuuaaaagcauucacuaa

SEQ ID NO: 2979355 - RNA, 19 nt, Artificial Sequence
  Description of Artificial Sequence: Synthetic oligonucleotide
cucagcacaaaacacagcu

SEQ ID NO: 2979356 - RNA, 19 nt, Artificial Sequence
  Description of Artificial Sequence: Synthetic oligonucleotide
ucauugucuuuaacagcug

SEQ ID NO: 2979357 - RNA, 19 nt, Artificial Sequence
  Description of Artificial Sequence: Synthetic oligonucleotide
aggaugcucagcacaaaac

SEQ ID NO: 2979358 - RNA, 19 nt, Artificial Sequence
  Description of Artificial Sequence: Synthetic oligonucleotide
accaaugcaucucagccuu

SEQ ID NO: 2979359 - RNA, 19 nt, Artificial Sequence
  Description of Artificial Sequence: Synthetic oligonucleotide
ucguguaguuuaaaagcau

SEQ ID NO: 2979360 - RNA, 19 nt, Artificial Sequence
  Description of Artificial Sequence: Synthetic oligonucleotide
gguucauccagaauuagga

SEQ ID NO: 2979361 - RNA, 19 nt, Artificial Sequence
  Description of Artificial Sequence: Synthetic oligonucleotide
aaugcaucucagccuucca

SEQ ID NO: 2979362 - RNA, 19 nt, Artificial Sequence
  Description of Artificial Sequence: Synthetic oligonucleotide
caggaugggccauagcaug

SEQ ID NO: 2979363 - RNA, 19 nt, Artificial Sequence
  Description of Artificial Sequence: Synthetic oligonucleotide
gaggcauacacuugcaggu

SEQ ID NO: 2979364 - RNA, 19 nt, Artificial Sequence
  Description of Artificial Sequence: Synthetic oligonucleotide
cugcacuaggacauucagc

SEQ ID NO: 2979365 - RNA, 19 nt, Artificial Sequence
  Description of Artificial Sequence: Synthetic oligonucleotide
acuaaucuugaaauggcaa

SEQ ID NO: 2979366 - RNA, 19 nt, Artificial Sequence
  Description of Artificial Sequence: Synthetic oligonucleotide
aucuugaaauggcaauggu

SEQ ID NO: 2979367 - RNA, 19 nt, Artificial Sequence
  Description of Artificial Sequence: Synthetic oligonucleotide
aagcauucacuaaucuuga

SEQ ID NO: 2979368 - RNA, 19 nt, Artificial Sequence
  Description of Artificial Sequence: Synthetic oligonucleotide
gcucagacacaucuaagcc

SEQ ID NO: 2979369 - RNA, 19 nt, Artificial Sequence
  Description of Artificial Sequence: Synthetic oligonucleotide
cauccuucuuccucagccc

SEQ ID NO: 2979370 - RNA, 19 nt, Artificial Sequence
  Description of Artificial Sequence: Synthetic oligonucleotide
cuaagccuguagaugguuc

SEQ ID NO: 2979371 - RNA, 19 nt, Artificial Sequence
  Description of Artificial Sequence: Synthetic oligonucleotide
aguuucugcacuaggacau

SEQ ID NO: 2979372 - RNA, 19 nt, Artificial Sequence
  Description of Artificial Sequence: Synthetic oligonucleotide
ucacacagagccucagccu

SEQ ID NO: 2979373 - RNA, 19 nt, Artificial Sequence
  Description of Artificial Sequence: Synthetic oligonucleotide
cuugcagguguucuuucac

SEQ ID NO: 2979374 - RNA, 19 nt, Artificial Sequence
  Description of Artificial Sequence: Synthetic oligonucleotide
uaguggcuccugcagcuag

SEQ ID NO: 2979375 - RNA, 19 nt, Artificial Sequence
  Description of Artificial Sequence: Synthetic oligonucleotide
ggaugcucagcacaaaaca

SEQ ID NO: 2979376 - RNA, 19 nt, Artificial Sequence
  Description of Artificial Sequence: Synthetic oligonucleotide
uccagacaccaugauagca

SEQ ID NO: 2979377 - RNA, 19 nt, Artificial Sequence
  Description of Artificial Sequence: Synthetic oligonucleotide
uccucagcccuuuuacaga

SEQ ID NO: 2979378 - RNA, 19 nt, Artificial Sequence
  Description of Artificial Sequence: Synthetic oligonucleotide
cacacagagccucagccuc

SEQ ID NO: 2979379 - RNA, 19 nt, Artificial Sequence
  Description of Artificial Sequence: Synthetic oligonucleotide
gucguguaguuuaaaagca

SEQ ID NO: 2979380 - RNA, 19 nt, Artificial Sequence
  Description of Artificial Sequence: Synthetic oligonucleotide
uccugcagcuaguuucugc

SEQ ID NO: 2979381 - RNA, 19 nt, Artificial Sequence
  Description of Artificial Sequence: Synthetic oligonucleotide
guguaguuuaaaagcauuc

SEQ ID NO: 2979382 - RNA, 19 nt, Artificial Sequence
  Description of Artificial Sequence: Synthetic oligonucleotide
cagacaccaugauagcaac

SEQ ID NO: 2979383 - RNA, 19 nt, Artificial Sequence
  Description of Artificial Sequence: Synthetic oligonucleotide
cauucagcuggucguguag

SEQ ID NO: 2979384 - RNA, 19 nt, Artificial Sequence
  Description of Artificial Sequence: Synthetic oligonucleotide
uugcagguguucuuucacu

SEQ ID NO: 2979385 - RNA, 19 nt, Artificial Sequence
  Description of Artificial Sequence: Synthetic oligonucleotide
agcccuuuuacagaggcau

SEQ ID NO: 2979386 - RNA, 19 nt, Artificial Sequence
  Description of Artificial Sequence: Synthetic oligonucleotide
cagccuuccagacaccaug

SEQ ID NO: 2979387 - RNA, 19 nt, Artificial Sequence
  Description of Artificial Sequence: Synthetic oligonucleotide
cacuaaucuugaaauggca

SEQ ID NO: 2979388 - RNA, 19 nt, Artificial Sequence
  Description of Artificial Sequence: Synthetic oligonucleotide
agcauccuucuuccucagc

SEQ ID NO: 2979389 - RNA, 19 nt, Artificial Sequence
  Description of Artificial Sequence: Synthetic oligonucleotide
gguguucuuucacugucag

SEQ ID NO: 2979390 - RNA, 19 nt, Artificial Sequence
  Description of Artificial Sequence: Synthetic oligonucleotide
acuugcagguguucuuuca

SEQ ID NO: 2979391 - RNA, 19 nt, Artificial Sequence
  Description of Artificial Sequence: Synthetic oligonucleotide
aggauagaugaaucuccca

SEQ ID NO: 2979392 - RNA, 19 nt, Artificial Sequence
  Description of Artificial Sequence: Synthetic oligonucleotide
gcaacucggucacacagag

SEQ ID NO: 2979393 - RNA, 19 nt, Artificial Sequence
  Description of Artificial Sequence: Synthetic oligonucleotide
guguucuuucacugucagg

SEQ ID NO: 2979394 - RNA, 19 nt, Artificial Sequence
  Description of Artificial Sequence: Synthetic oligonucleotide
caaugcaucucagccuucc

SEQ ID NO: 2979395 - RNA, 19 nt, Artificial Sequence
  Description of Artificial Sequence: Synthetic oligonucleotide
uuccagacaccaugauagc

SEQ ID NO: 2979396 - RNA, 19 nt, Artificial Sequence
  Description of Artificial Sequence: Synthetic oligonucleotide
agccaagucauggguaguc

SEQ ID NO: 2979397 - RNA, 19 nt, Artificial Sequence
  Description of Artificial Sequence: Synthetic oligonucleotide
guagucaagaggacacccc

SEQ ID NO: 2979398 - RNA, 19 nt, Artificial Sequence
  Description of Artificial Sequence: Synthetic oligonucleotide
ucagcacaaaacacagcuu

SEQ ID NO: 2979399 - RNA, 19 nt, Artificial Sequence
  Description of Artificial Sequence: Synthetic oligonucleotide
caagaggacaccccuguca

SEQ ID NO: 2979400 - RNA, 19 nt, Artificial Sequence
  Description of Artificial Sequence: Synthetic oligonucleotide
cagguguucuuucacuguc

SEQ ID NO: 2979401 - RNA, 19 nt, Artificial Sequence
  Description of Artificial Sequence: Synthetic oligonucleotide
auccuucuuccucagcccu

SEQ ID NO: 2979402 - RNA, 19 nt, Artificial Sequence
  Description of Artificial Sequence: Synthetic oligonucleotide
gaugguucauccagaauua

SEQ ID NO: 2979403 - RNA, 19 nt, Artificial Sequence
  Description of Artificial Sequence: Synthetic oligonucleotide
gccuguagaugguucaucc

SEQ ID NO: 2979404 - RNA, 19 nt, Artificial Sequence
  Description of Artificial Sequence: Synthetic oligonucleotide
augcucagcacaaaacaca

SEQ ID NO: 2979405 - RNA, 19 nt, Artificial Sequence
  Description of Artificial Sequence: Synthetic oligonucleotide
cucagccucagccaaguca

SEQ ID NO: 2979406 - RNA, 19 nt, Artificial Sequence
  Description of Artificial Sequence: Synthetic oligonucleotide
cuaaucuugaaauggcaau

SEQ ID NO: 2979407 - RNA, 19 nt, Artificial Sequence
  Description of Artificial Sequence: Synthetic oligonucleotide
auggguagucaagaggaca

SEQ ID NO: 2979408 - RNA, 19 nt, Artificial Sequence
  Description of Artificial Sequence: Synthetic oligonucleotide
auagcaacucggucacaca

SEQ ID NO: 2979409 - RNA, 19 nt, Artificial Sequence
  Description of Artificial Sequence: Synthetic oligonucleotide
auacacuugcagguguucu

SEQ ID NO: 2979410 - RNA, 19 nt, Artificial Sequence
  Description of Artificial Sequence: Synthetic oligonucleotide
gguagcauccuucuuccuc

SEQ ID NO: 2979411 - RNA, 19 nt, Artificial Sequence
  Description of Artificial Sequence: Synthetic oligonucleotide
cugcucagacacaucuaag

SEQ ID NO: 2979412 - RNA, 19 nt, Artificial Sequence
  Description of Artificial Sequence: Synthetic oligonucleotide
ugaaucucccaggaugcuc

SEQ ID NO: 2979413 - RNA, 19 nt, Artificial Sequence
  Description of Artificial Sequence: Synthetic oligonucleotide
cagaggcauacacuugcag

SEQ ID NO: 2979414 - RNA, 19 nt, Artificial Sequence
  Description of Artificial Sequence: Synthetic oligonucleotide
gguagucaagaggacaccc

SEQ ID NO: 2979415 - RNA, 19 nt, Artificial Sequence
  Description of Artificial Sequence: Synthetic oligonucleotide
uuucacugucaggaugggc

SEQ ID NO: 2979416 - RNA, 19 nt, Artificial Sequence
  Description of Artificial Sequence: Synthetic oligonucleotide
ugggccauagcauguucuc

SEQ ID NO: 2979417 - RNA, 19 nt, Artificial Sequence
  Description of Artificial Sequence: Synthetic oligonucleotide
uagaugguucauccagaau

SEQ ID NO: 2979418 - RNA, 19 nt, Artificial Sequence
  Description of Artificial Sequence: Synthetic oligonucleotide
cauggguagucaagaggac

SEQ ID NO: 2979419 - RNA, 19 nt, Artificial Sequence
  Description of Artificial Sequence: Synthetic oligonucleotide
caaaacacagcuuccuagu

SEQ ID NO: 2979420 - RNA, 19 nt, Artificial Sequence
  Description of Artificial Sequence: Synthetic oligonucleotide
cagaauuaggauagaugaa

SEQ ID NO: 2979421 - RNA, 19 nt, Artificial Sequence
  Description of Artificial Sequence: Synthetic oligonucleotide
gcauucacuaaucuugaaa

SEQ ID NO: 2979422 - RNA, 19 nt, Artificial Sequence
  Description of Artificial Sequence: Synthetic oligonucleotide
accaugauagcaacucggu

SEQ ID NO: 2979423 - RNA, 19 nt, Artificial Sequence
  Description of Artificial Sequence: Synthetic oligonucleotide
gaugggccauagcauguuc

SEQ ID NO: 2979424 - RNA, 19 nt, Artificial Sequence
  Description of Artificial Sequence: Synthetic oligonucleotide
acuugcugcugcucagaca

SEQ ID NO: 2979425 - RNA, 19 nt, Artificial Sequence
  Description of Artificial Sequence: Synthetic oligonucleotide
augguucauccagaauuag

SEQ ID NO: 2979426 - RNA, 19 nt, Artificial Sequence
  Description of Artificial Sequence: Synthetic oligonucleotide
ugccugccacacuugcugc

SEQ ID NO: 2979427 - RNA, 19 nt, Artificial Sequence
  Description of Artificial Sequence: Synthetic oligonucleotide
auggcaaugguagcauccu

SEQ ID NO: 2979428 - RNA, 19 nt, Artificial Sequence
  Description of Artificial Sequence: Synthetic oligonucleotide
ugucaggaugggccauagc

SEQ ID NO: 2979429 - RNA, 19 nt, Artificial Sequence
  Description of Artificial Sequence: Synthetic oligonucleotide
agccuguagaugguucauc

SEQ ID NO: 2979430 - RNA, 19 nt, Artificial Sequence
  Description of Artificial Sequence: Synthetic oligonucleotide
cacagcuuccuaguggcuc

SEQ ID NO: 2979431 - RNA, 19 nt, Artificial Sequence
  Description of Artificial Sequence: Synthetic oligonucleotide
cucggucacacagagccuc

SEQ ID NO: 2979432 - RNA, 19 nt, Artificial Sequence
  Description of Artificial Sequence: Synthetic oligonucleotide
cuggucguguaguuuaaaa

SEQ ID NO: 2979433 - RNA, 19 nt, Artificial Sequence
  Description of Artificial Sequence: Synthetic oligonucleotide
uagcauccuucuuccucag

SEQ ID NO: 2979434 - RNA, 19 nt, Artificial Sequence
  Description of Artificial Sequence: Synthetic oligonucleotide
ucggucacacagagccuca

SEQ ID NO: 2979435 - RNA, 19 nt, Artificial Sequence
  Description of Artificial Sequence: Synthetic oligonucleotide
cuuucacugucaggauggg

SEQ ID NO: 2979436 - RNA, 19 nt, Artificial Sequence
  Description of Artificial Sequence: Synthetic oligonucleotide
cuuccuaguggcuccugca

SEQ ID NO: 2979437 - RNA, 19 nt, Artificial Sequence
  Description of Artificial Sequence: Synthetic oligonucleotide
ucuaagccuguagaugguu

SEQ ID NO: 2979438 - RNA, 19 nt, Artificial Sequence
  Description of Artificial Sequence: Synthetic oligonucleotide
auccagaauuaggauagau

SEQ ID NO: 2979439 - RNA, 19 nt, Artificial Sequence
  Description of Artificial Sequence: Synthetic oligonucleotide
cucagcccuuuuacagagg

SEQ ID NO: 2979440 - RNA, 19 nt, Artificial Sequence
  Description of Artificial Sequence: Synthetic oligonucleotide
gcuaguuucugcacuagga

SEQ ID NO: 2979441 - RNA, 19 nt, Artificial Sequence
  Description of Artificial Sequence: Synthetic oligonucleotide
ucagccuuccagacaccau

SEQ ID NO: 2979442 - RNA, 19 nt, Artificial Sequence
  Description of Artificial Sequence: Synthetic oligonucleotide
uccugaggacaguauccaa

SEQ ID NO: 2979443 - RNA, 19 nt, Artificial Sequence
  Description of Artificial Sequence: Synthetic oligonucleotide
ugcugcugcucagacacau

SEQ ID NO: 2979444 - RNA, 19 nt, Artificial Sequence
  Description of Artificial Sequence: Synthetic oligonucleotide
agcauucacuaaucuugaa

SEQ ID NO: 2979445 - RNA, 19 nt, Artificial Sequence
  Description of Artificial Sequence: Synthetic oligonucleotide
ccucagcccuuuuacagag

SEQ ID NO: 2979446 - RNA, 19 nt, Artificial Sequence
  Description of Artificial Sequence: Synthetic oligonucleotide
ugccuggauugccugccac

SEQ ID NO: 2979447 - RNA, 19 nt, Artificial Sequence
  Description of Artificial Sequence: Synthetic oligonucleotide
gucaagaggacaccccugu

SEQ ID NO: 2979448 - RNA, 19 nt, Artificial Sequence
  Description of Artificial Sequence: Synthetic oligonucleotide
cacuugcugcugcucagac

SEQ ID NO: 2979449 - RNA, 19 nt, Artificial Sequence
  Description of Artificial Sequence: Synthetic oligonucleotide
gccucagccaagucauggg

SEQ ID NO: 2979450 - RNA, 19 nt, Artificial Sequence
  Description of Artificial Sequence: Synthetic oligonucleotide
accccugucauugucuuua

SEQ ID NO: 2979451 - RNA, 19 nt, Artificial Sequence
  Description of Artificial Sequence: Synthetic oligonucleotide
cauacacuugcagguguuc

SEQ ID NO: 2979452 - RNA, 19 nt, Artificial Sequence
  Description of Artificial Sequence: Synthetic oligonucleotide
gaaauggcaaugguagcau

SEQ ID NO: 2979453 - RNA, 19 nt, Artificial Sequence
  Description of Artificial Sequence: Synthetic oligonucleotide
agucaagaggacaccccug

SEQ ID NO: 2979454 - RNA, 19 nt, Artificial Sequence
  Description of Artificial Sequence: Synthetic oligonucleotide
ugcugcucagacacaucua

SEQ ID NO: 2979455 - RNA, 19 nt, Artificial Sequence
  Description of Artificial Sequence: Synthetic oligonucleotide
acauucagcuggucgugua

SEQ ID NO: 2979456 - RNA, 19 nt, Artificial Sequence
  Description of Artificial Sequence: Synthetic oligonucleotide
aagccuguagaugguucau

SEQ ID NO: 2979457 - RNA, 19 nt, Artificial Sequence
  Description of Artificial Sequence: Synthetic oligonucleotide
gcugcucagacacaucuaa

SEQ ID NO: 2979458 - RNA, 19 nt, Artificial Sequence
  Description of Artificial Sequence: Synthetic oligonucleotide
cugcagcuaguuucugcac

SEQ ID NO: 2979459 - RNA, 19 nt, Artificial Sequence
  Description of Artificial Sequence: Synthetic oligonucleotide
acuaggacauucagcuggu

SEQ ID NO: 2979460 - RNA, 19 nt, Artificial Sequence
  Description of Artificial Sequence: Synthetic oligonucleotide
aggcauacacuugcaggug

SEQ ID NO: 2979461 - RNA, 19 nt, Artificial Sequence
  Description of Artificial Sequence: Synthetic oligonucleotide
caacucggucacacagagc

SEQ ID NO: 2979462 - RNA, 19 nt, Artificial Sequence
  Description of Artificial Sequence: Synthetic oligonucleotide
ggcaaugguagcauccuuc

SEQ ID NO: 2979463 - RNA, 19 nt, Artificial Sequence
  Description of Artificial Sequence: Synthetic oligonucleotide
augggccauagcauguucu

SEQ ID NO: 2979464 - RNA, 19 nt, Artificial Sequence
  Description of Artificial Sequence: Synthetic oligonucleotide
caggaugcucagcacaaaa

SEQ ID NO: 2979465 - RNA, 19 nt, Artificial Sequence
  Description of Artificial Sequence: Synthetic oligonucleotide
cugccacacuugcugcugc

SEQ ID NO: 2979466 - RNA, 19 nt, Artificial Sequence
  Description of Artificial Sequence: Synthetic oligonucleotide
acagcugccuggauugccu

SEQ ID NO: 2979467 - RNA, 19 nt, Artificial Sequence
  Description of Artificial Sequence: Synthetic oligonucleotide
cacuugcagguguucuuuc

SEQ ID NO: 2979468 - RNA, 19 nt, Artificial Sequence
  Description of Artificial Sequence: Synthetic oligonucleotide
cacaaaacacagcuuccua

SEQ ID NO: 2979469 - RNA, 19 nt, Artificial Sequence
  Description of Artificial Sequence: Synthetic oligonucleotide
ucagcuggucguguaguuu

SEQ ID NO: 2979470 - RNA, 19 nt, Artificial Sequence
  Description of Artificial Sequence: Synthetic oligonucleotide
uggcaaugguagcauccuu

SEQ ID NO: 2979471 - RNA, 19 nt, Artificial Sequence
  Description of Artificial Sequence: Synthetic oligonucleotide
cacaucuaagccuguagau

SEQ ID NO: 2979472 - RNA, 19 nt, Artificial Sequence
  Description of Artificial Sequence: Synthetic oligonucleotide
agcaacucggucacacaga

SEQ ID NO: 2979473 - RNA, 19 nt, Artificial Sequence
  Description of Artificial Sequence: Synthetic oligonucleotide
gcaucucagccuuccagac

SEQ ID NO: 2979474 - RNA, 19 nt, Artificial Sequence
  Description of Artificial Sequence: Synthetic oligonucleotide
uaacagcugccuggauugc

SEQ ID NO: 2979475 - RNA, 19 nt, Artificial Sequence
  Description of Artificial Sequence: Synthetic oligonucleotide
acacuugcagguguucuuu

SEQ ID NO: 2979476 - RNA, 19 nt, Artificial Sequence
  Description of Artificial Sequence: Synthetic oligonucleotide
ccugcagcuaguuucugca

SEQ ID NO: 2979477 - RNA, 19 nt, Artificial Sequence
  Description of Artificial Sequence: Synthetic oligonucleotide
ggucacacagagccucagc

SEQ ID NO: 2979478 - RNA, 19 nt, Artificial Sequence
  Description of Artificial Sequence: Synthetic oligonucleotide
ugccacacuugcugcugcu

SEQ ID NO: 2979479 - RNA, 19 nt, Artificial Sequence
  Description of Artificial Sequence: Synthetic oligonucleotide
cucagccaagucaugggua

SEQ ID NO: 2979480 - RNA, 19 nt, Artificial Sequence
  Description of Artificial Sequence: Synthetic oligonucleotide
uccuucuuccucagcccuu

SEQ ID NO: 2979481 - RNA, 19 nt, Artificial Sequence
  Description of Artificial Sequence: Synthetic oligonucleotide
cccuuuuacagaggcauac

SEQ ID NO: 2979482 - RNA, 19 nt, Artificial Sequence
  Description of Artificial Sequence: Synthetic oligonucleotide
cagcuggucguguaguuua

SEQ ID NO: 2979483 - RNA, 19 nt, Artificial Sequence
  Description of Artificial Sequence: Synthetic oligonucleotide
agguguucuuucacuguca

SEQ ID NO: 2979484 - RNA, 19 nt, Artificial Sequence
  Description of Artificial Sequence: Synthetic oligonucleotide
aggaugggccauagcaugu

SEQ ID NO: 2979485 - RNA, 19 nt, Artificial Sequence
  Description of Artificial Sequence: Synthetic oligonucleotide
auugccugccacacuugcu

SEQ ID NO: 2979486 - RNA, 19 nt, Artificial Sequence
  Description of Artificial Sequence: Synthetic oligonucleotide
ccagacaccaugauagcaa

SEQ ID NO: 2979487 - RNA, 19 nt, Artificial Sequence
  Description of Artificial Sequence: Synthetic oligonucleotide
caucucagccuuccagaca

SEQ ID NO: 2979488 - RNA, 19 nt, Artificial Sequence
  Description of Artificial Sequence: Synthetic oligonucleotide
augaaucucccaggaugcu

SEQ ID NO: 2979489 - RNA, 19 nt, Artificial Sequence
  Description of Artificial Sequence: Synthetic oligonucleotide
cugucaggaugggccauag

SEQ ID NO: 2979490 - RNA, 19 nt, Artificial Sequence
  Description of Artificial Sequence: Synthetic oligonucleotide
acagaggcauacacuugca

SEQ ID NO: 2979491 - RNA, 19 nt, Artificial Sequence
  Description of Artificial Sequence: Synthetic oligonucleotide
ugguagcauccuucuuccu

SEQ ID NO: 2979492 - RNA, 19 nt, Artificial Sequence
  Description of Artificial Sequence: Synthetic oligonucleotide
aucuaagccuguagauggu

SEQ ID NO: 2979493 - RNA, 19 nt, Artificial Sequence
  Description of Artificial Sequence: Synthetic oligonucleotide
cagcuaguuucugcacuag

SEQ ID NO: 2979494 - RNA, 19 nt, Artificial Sequence
  Description of Artificial Sequence: Synthetic oligonucleotide
agccuuccagacaccauga

SEQ ID NO: 2979495 - RNA, 19 nt, Artificial Sequence
  Description of Artificial Sequence: Synthetic oligonucleotide
ccaugauagcaacucgguc

SEQ ID NO: 2979496 - RNA, 19 nt, Artificial Sequence
  Description of Artificial Sequence: Synthetic oligonucleotide
aggacaccccugucauugu

SEQ ID NO: 2979497 - RNA, 19 nt, Artificial Sequence
  Description of Artificial Sequence: Synthetic oligonucleotide
agacaccaugauagcaacu

SEQ ID NO: 2979498 - RNA, 19 nt, Artificial Sequence
  Description of Artificial Sequence: Synthetic oligonucleotide
gccauagcauguucuccug

SEQ ID NO: 2979499 - RNA, 19 nt, Artificial Sequence
  Description of Artificial Sequence: Synthetic oligonucleotide
uugcugcugcucagacaca

SEQ ID NO: 2979500 - RNA, 19 nt, Artificial Sequence
  Description of Artificial Sequence: Synthetic oligonucleotide
gcaaugguagcauccuucu

SEQ ID NO: 2979501 - RNA, 19 nt, Artificial Sequence
  Description of Artificial Sequence: Synthetic oligonucleotide
cucagccuuccagacacca

SEQ ID NO: 2979502 - RNA, 19 nt, Artificial Sequence
  Description of Artificial Sequence: Synthetic oligonucleotide
cacagagccucagccucag

SEQ ID NO: 2979503 - RNA, 19 nt, Artificial Sequence
  Description of Artificial Sequence: Synthetic oligonucleotide
ggacauucagcuggucgug

SEQ ID NO: 2979504 - RNA, 19 nt, Artificial Sequence
  Description of Artificial Sequence: Synthetic oligonucleotide
ggccauagcauguucuccu

SEQ ID NO: 2979505 - RNA, 19 nt, Artificial Sequence
  Description of Artificial Sequence: Synthetic oligonucleotide
agacacaucuaagccugua

SEQ ID NO: 2979506 - RNA, 19 nt, Artificial Sequence
  Description of Artificial Sequence: Synthetic oligonucleotide
cagcugccuggauugccug

SEQ ID NO: 2979507 - RNA, 19 nt, Artificial Sequence
  Description of Artificial Sequence: Synthetic oligonucleotide
gcacuaggacauucagcug

SEQ ID NO: 2979508 - RNA, 19 nt, Artificial Sequence
  Description of Artificial Sequence: Synthetic oligonucleotide
gacaccccugucauugucu

SEQ ID NO: 2979509 - RNA, 19 nt, Artificial Sequence
  Description of Artificial Sequence: Synthetic oligonucleotide
ccuggauugccugccacac

SEQ ID NO: 2979510 - RNA, 19 nt, Artificial Sequence
  Description of Artificial Sequence: Synthetic oligonucleotide
gggccauagcauguucucc

SEQ ID NO: 2979511 - RNA, 19 nt, Artificial Sequence
  Description of Artificial Sequence: Synthetic oligonucleotide
acacagagccucagccuca

SEQ ID NO: 2979512 - RNA, 19 nt, Artificial Sequence
  Description of Artificial Sequence: Synthetic oligonucleotide
gcagcuaguuucugcacua

SEQ ID NO: 2979513 - RNA, 19 nt, Artificial Sequence
  Description of Artificial Sequence: Synthetic oligonucleotide
guucuuucacugucaggau

SEQ ID NO: 2979514 - RNA, 19 nt, Artificial Sequence
  Description of Artificial Sequence: Synthetic oligonucleotide
ggguagucaagaggacacc

SEQ ID NO: 2979515 - RNA, 19 nt, Artificial Sequence
  Description of Artificial Sequence: Synthetic oligonucleotide
agaggacaccccugucauu

SEQ ID NO: 2979516 - RNA, 19 nt, Artificial Sequence
  Description of Artificial Sequence: Synthetic oligonucleotide
ggcauacacuugcaggugu

SEQ ID NO: 2979517 - RNA, 19 nt, Artificial Sequence
  Description of Artificial Sequence: Synthetic oligonucleotide
aguggcuccugcagcuagu

SEQ ID NO: 2979518 - RNA, 19 nt, Artificial Sequence
  Description of Artificial Sequence: Synthetic oligonucleotide
gacauucagcuggucgugu

SEQ ID NO: 2979519 - RNA, 19 nt, Artificial Sequence
  Description of Artificial Sequence: Synthetic oligonucleotide
acugucaggaugggccaua

SEQ ID NO: 2979520 - RNA, 19 nt, Artificial Sequence
  Description of Artificial Sequence: Synthetic oligonucleotide
ccuguagaugguucaucca

SEQ ID NO: 2979521 - RNA, 19 nt, Artificial Sequence
  Description of Artificial Sequence: Synthetic oligonucleotide
cuaggacauucagcugguc

SEQ ID NO: 2979522 - RNA, 19 nt, Artificial Sequence
  Description of Artificial Sequence: Synthetic oligonucleotide
ggacaccccugucauuguc

SEQ ID NO: 2979523 - RNA, 19 nt, Artificial Sequence
  Description of Artificial Sequence: Synthetic oligonucleotide
gcucagcacaaaacacagc

SEQ ID NO: 2979524 - RNA, 19 nt, Artificial Sequence
  Description of Artificial Sequence: Synthetic oligonucleotide
ccaagucauggguagucaa

SEQ ID NO: 2979525 - RNA, 19 nt, Artificial Sequence
  Description of Artificial Sequence: Synthetic oligonucleotide
agccucagccucagccaag

SEQ ID NO: 2979526 - RNA, 19 nt, Artificial Sequence
  Description of Artificial Sequence: Synthetic oligonucleotide
gccuggauugccugccaca

SEQ ID NO: 2979527 - RNA, 19 nt, Artificial Sequence
  Description of Artificial Sequence: Synthetic oligonucleotide
cagccucagccaagucaug

SEQ ID NO: 2979528 - RNA, 19 nt, Artificial Sequence
  Description of Artificial Sequence: Synthetic oligonucleotide
ccacacuugcugcugcuca

SEQ ID NO: 2979529 - RNA, 19 nt, Artificial Sequence
  Description of Artificial Sequence: Synthetic oligonucleotide
acacagcuuccuaguggcu

SEQ ID NO: 2979530 - RNA, 19 nt, Artificial Sequence
  Description of Artificial Sequence: Synthetic oligonucleotide
gcacaaaacacagcuuccu

SEQ ID NO: 2979531 - RNA, 19 nt, Artificial Sequence
  Description of Artificial Sequence: Synthetic oligonucleotide
cauccagaauuaggauaga

SEQ ID NO: 2979532 - RNA, 19 nt, Artificial Sequence
  Description of Artificial Sequence: Synthetic oligonucleotide
ccuuccagacaccaugaua

SEQ ID NO: 2979533 - RNA, 19 nt, Artificial Sequence
  Description of Artificial Sequence: Synthetic oligonucleotide
ggauugccugccacacuug

SEQ ID NO: 2979534 - RNA, 19 nt, Artificial Sequence
  Description of Artificial Sequence: Synthetic oligonucleotide
gcagguguucuuucacugu

SEQ ID NO: 2979535 - RNA, 19 nt, Artificial Sequence
  Description of Artificial Sequence: Synthetic oligonucleotide
gccaagucauggguaguca

SEQ ID NO: 2979536 - RNA, 19 nt, Artificial Sequence
  Description of Artificial Sequence: Synthetic oligonucleotide
agcuuccuaguggcuccug

SEQ ID NO: 2979537 - RNA, 19 nt, Artificial Sequence
  Description of Artificial Sequence: Synthetic oligonucleotide
ccuuuuacagaggcauaca

SEQ ID NO: 2979538 - RNA, 19 nt, Artificial Sequence
  Description of Artificial Sequence: Synthetic oligonucleotide
cccaggaugcucagcacaa

SEQ ID NO: 2979539 - RNA, 19 nt, Artificial Sequence
  Description of Artificial Sequence: Synthetic oligonucleotide
agcuggucguguaguuuaa

SEQ ID NO: 2979540 - RNA, 19 nt, Artificial Sequence
  Description of Artificial Sequence: Synthetic oligonucleotide
ccauagcauguucuccuga

SEQ ID NO: 2979541 - RNA, 19 nt, Artificial Sequence
  Description of Artificial Sequence: Synthetic oligonucleotide
ccuaguggcuccugcagcu

SEQ ID NO: 2979542 - RNA, 19 nt, Artificial Sequence
  Description of Artificial Sequence: Synthetic oligonucleotide
ccugccacacuugcugcug

SEQ ID NO: 2979543 - RNA, 19 nt, Artificial Sequence
  Description of Artificial Sequence: Synthetic oligonucleotide
cuccugcagcuaguuucug

SEQ ID NO: 2979544 - RNA, 19 nt, Artificial Sequence
  Description of Artificial Sequence: Synthetic oligonucleotide
cccugucauugucuuuaac

SEQ ID NO: 2979545 - RNA, 19 nt, Artificial Sequence
  Description of Artificial Sequence: Synthetic oligonucleotide
cugccuggauugccugcca

SEQ ID NO: 2979546 - RNA, 19 nt, Artificial Sequence
  Description of Artificial Sequence: Synthetic oligonucleotide
cuuuaacagcugccuggau

SEQ ID NO: 2979547 - RNA, 19 nt, Artificial Sequence
  Description of Artificial Sequence: Synthetic oligonucleotide
guucuccugaggacaguau

SEQ ID NO: 2979548 - RNA, 19 nt, Artificial Sequence
  Description of Artificial Sequence: Synthetic oligonucleotide
ccaaugcaucucagccuuc

SEQ ID NO: 2979549 - RNA, 19 nt, Artificial Sequence
  Description of Artificial Sequence: Synthetic oligonucleotide
cuggauugccugccacacu

SEQ ID NO: 2979550 - RNA, 19 nt, Artificial Sequence
  Description of Artificial Sequence: Synthetic oligonucleotide
cguguaguuuaaaagcauu

SEQ ID NO: 2979551 - RNA, 19 nt, Artificial Sequence
  Description of Artificial Sequence: Synthetic oligonucleotide
caaugguagcauccuucuu

SEQ ID NO: 2979552 - RNA, 19 nt, Artificial Sequence
  Description of Artificial Sequence: Synthetic oligonucleotide
cuaguggcuccugcagcua

SEQ ID NO: 2979553 - RNA, 19 nt, Artificial Sequence
  Description of Artificial Sequence: Synthetic oligonucleotide
cagacacaucuaagccugu

SEQ ID NO: 2979554 - RNA, 19 nt, Artificial Sequence
  Description of Artificial Sequence: Synthetic oligonucleotide
gcuccugcagcuaguuucu

SEQ ID NO: 2979555 - RNA, 19 nt, Artificial Sequence
  Description of Artificial Sequence: Synthetic oligonucleotide
gccacacuugcugcugcuc

SEQ ID NO: 2979556 - RNA, 19 nt, Artificial Sequence
  Description of Artificial Sequence: Synthetic oligonucleotide
guuucugcacuaggacauu

SEQ ID NO: 2979557 - RNA, 19 nt, Artificial Sequence
  Description of Artificial Sequence: Synthetic oligonucleotide
gcugcugcucagacacauc

SEQ ID NO: 2979558 - RNA, 19 nt, Artificial Sequence
  Description of Artificial Sequence: Synthetic oligonucleotide
gcuggucguguaguuuaaa

SEQ ID NO: 2979559 - RNA, 19 nt, Artificial Sequence
  Description of Artificial Sequence: Synthetic oligonucleotide
guggcuccugcagcuaguu

SEQ ID NO: 2979560 - RNA, 19 nt, Artificial Sequence
  Description of Artificial Sequence: Synthetic oligonucleotide
ccucagccucagccaaguc

SEQ ID NO: 2979561 - RNA, 19 nt, Artificial Sequence
  Description of Artificial Sequence: Synthetic oligonucleotide
gcccuuuuacagaggcaua

SEQ ID NO: 2979562 - RNA, 19 nt, Artificial Sequence
  Description of Artificial Sequence: Synthetic oligonucleotide
cagccaagucauggguagu

SEQ ID NO: 2979563 - RNA, 19 nt, Artificial Sequence
  Description of Artificial Sequence: Synthetic oligonucleotide
gcauacacuugcagguguu

SEQ ID NO: 2979564 - RNA, 19 nt, Artificial Sequence
  Description of Artificial Sequence: Synthetic oligonucleotide
ggaugggccauagcauguu

SEQ ID NO: 2979565 - RNA, 19 nt, Artificial Sequence
  Description of Artificial Sequence: Synthetic oligonucleotide
cggucacacagagccucag

SEQ ID NO: 2979566 - RNA, 19 nt, Artificial Sequence
  Description of Artificial Sequence: Synthetic oligonucleotide
gccuuccagacaccaugau

SEQ ID NO: 2979567 - RNA, 19 nt, Artificial Sequence
  Description of Artificial Sequence: Synthetic oligonucleotide
cacugucaggaugggccau

SEQ ID NO: 2979568 - RNA, 19 nt, Artificial Sequence
  Description of Artificial Sequence: Synthetic oligonucleotide
ccccugucauugucuuuaa

SEQ ID NO: 2979569 - RNA, 19 nt, Artificial Sequence
  Description of Artificial Sequence: Synthetic oligonucleotide
caccccugucauugucuuu

SEQ ID NO: 2979570 - RNA, 19 nt, Artificial Sequence
  Description of Artificial Sequence: Synthetic oligonucleotide
ccaggaugcucagcacaaa

SEQ ID NO: 2979571 - RNA, 19 nt, Artificial Sequence
  Description of Artificial Sequence: Synthetic oligonucleotide
cagcuuccuaguggcuccu

SEQ ID NO: 2979572 - RNA, 19 nt, Artificial Sequence
  Description of Artificial Sequence: Synthetic oligonucleotide
aauucauuugucuugcagg

SEQ ID NO: 2979573 - RNA, 19 nt, Artificial Sequence
  Description of Artificial Sequence: Synthetic oligonucleotide
aaguauaggauguuccugc

SEQ ID NO: 2979574 - RNA, 19 nt, Artificial Sequence
  Description of Artificial Sequence: Synthetic oligonucleotide
uuaaaugagaacccgcucg

SEQ ID NO: 2979575 - RNA, 19 nt, Artificial Sequence
  Description of Artificial Sequence: Synthetic oligonucleotide
uauaggauguuccugcugg

SEQ ID NO: 2979576 - RNA, 19 nt, Artificial Sequence
  Description of Artificial Sequence: Synthetic oligonucleotide
ugcacaauaauguuggaag

SEQ ID NO: 2979577 - RNA, 19 nt, Artificial Sequence
  Description of Artificial Sequence: Synthetic oligonucleotide
uccauguuaaaugagaacc

SEQ ID NO: 2979578 - RNA, 19 nt, Artificial Sequence
  Description of Artificial Sequence: Synthetic oligonucleotide
uuucuauugauuuucugug

SEQ ID NO: 2979579 - RNA, 19 nt, Artificial Sequence
  Description of Artificial Sequence: Synthetic oligonucleotide
uuuccauucccaaccaucg

SEQ ID NO: 2979580 - RNA, 19 nt, Artificial Sequence
  Description of Artificial Sequence: Synthetic oligonucleotide
auuucuauugauuuucugu

SEQ ID NO: 2979581 - RNA, 19 nt, Artificial Sequence
  Description of Artificial Sequence: Synthetic oligonucleotide
ugaauucugcacaauaaug

SEQ ID NO: 2979582 - RNA, 19 nt, Artificial Sequence
  Description of Artificial Sequence: Synthetic oligonucleotide
uguugugaauguuugauga

SEQ ID NO: 2979583 - RNA, 19 nt, Artificial Sequence
  Description of Artificial Sequence: Synthetic oligonucleotide
aauguuugaugaauucugc

SEQ ID NO: 2979584 - RNA, 19 nt, Artificial Sequence
  Description of Artificial Sequence: Synthetic oligonucleotide
auucauuugucuugcaggg

SEQ ID NO: 2979585 - RNA, 19 nt, Artificial Sequence
  Description of Artificial Sequence: Synthetic oligonucleotide
aacaaaucacucauccugc

SEQ ID NO: 2979586 - RNA, 19 nt, Artificial Sequence
  Description of Artificial Sequence: Synthetic oligonucleotide
guaguugacauuucuauug

SEQ ID NO: 2979587 - RNA, 19 nt, Artificial Sequence
  Description of Artificial Sequence: Synthetic oligonucleotide
ugaugcucagccaugaugu

SEQ ID NO: 2979588 - RNA, 19 nt, Artificial Sequence
  Description of Artificial Sequence: Synthetic oligonucleotide
guugcuuuagcauagcuca

SEQ ID NO: 2979589 - RNA, 19 nt, Artificial Sequence
  Description of Artificial Sequence: Synthetic oligonucleotide
auucagaccaacaacuggc

SEQ ID NO: 2979590 - RNA, 19 nt, Artificial Sequence
  Description of Artificial Sequence: Synthetic oligonucleotide
acaacuggccccaugaugc

SEQ ID NO: 2979591 - RNA, 19 nt, Artificial Sequence
  Description of Artificial Sequence: Synthetic oligonucleotide
gauucagaccaacaacugg

SEQ ID NO: 2979592 - RNA, 19 nt, Artificial Sequence
  Description of Artificial Sequence: Synthetic oligonucleotide
uguuaaaugagaacccgcu

SEQ ID NO: 2979593 - RNA, 19 nt, Artificial Sequence
  Description of Artificial Sequence: Synthetic oligonucleotide
caacaaaucacucauccug

SEQ ID NO: 2979594 - RNA, 19 nt, Artificial Sequence
  Description of Artificial Sequence: Synthetic oligonucleotide
ucuuccauguuaaaugaga

SEQ ID NO: 2979595 - RNA, 19 nt, Artificial Sequence
  Description of Artificial Sequence: Synthetic oligonucleotide
agaacaaagaaugguugcc

SEQ ID NO: 2979596 - RNA, 19 nt, Artificial Sequence
  Description of Artificial Sequence: Synthetic oligonucleotide
uguagaacaaagaaugguu

SEQ ID NO: 2979597 - RNA, 19 nt, Artificial Sequence
  Description of Artificial Sequence: Synthetic oligonucleotide
gucaacaaaucacucaucc

SEQ ID NO: 2979598 - RNA, 19 nt, Artificial Sequence
  Description of Artificial Sequence: Synthetic oligonucleotide
uguuugaugaauucugcac

SEQ ID NO: 2979599 - RNA, 19 nt, Artificial Sequence
  Description of Artificial Sequence: Synthetic oligonucleotide
ucuauugauuuucugugga

SEQ ID NO: 2979600 - RNA, 19 nt, Artificial Sequence
  Description of Artificial Sequence: Synthetic oligonucleotide
aagauucagaccaacaacu

SEQ ID NO: 2979601 - RNA, 19 nt, Artificial Sequence
  Description of Artificial Sequence: Synthetic oligonucleotide
aaaucacucauccugcgau

SEQ ID NO: 2979602 - RNA, 19 nt, Artificial Sequence
  Description of Artificial Sequence: Synthetic oligonucleotide
gaagauucagaccaacaac

SEQ ID NO: 2979603 - RNA, 19 nt, Artificial Sequence
  Description of Artificial Sequence: Synthetic oligonucleotide
gaauucauuugucuugcag

SEQ ID NO: 2979604 - RNA, 19 nt, Artificial Sequence
  Description of Artificial Sequence: Synthetic oligonucleotide
uucuauugauuuucugugg

SEQ ID NO: 2979605 - RNA, 19 nt, Artificial Sequence
  Description of Artificial Sequence: Synthetic oligonucleotide
caugaauucauuugucuug

SEQ ID NO: 2979606 - RNA, 19 nt, Artificial Sequence
  Description of Artificial Sequence: Synthetic oligonucleotide
caugaugugauguaguuga

SEQ ID NO: 2979607 - RNA, 19 nt, Artificial Sequence
  Description of Artificial Sequence: Synthetic oligonucleotide
ggauguagaacaaagaaug

SEQ ID NO: 2979608 - RNA, 19 nt, Artificial Sequence
  Description of Artificial Sequence: Synthetic oligonucleotide
augaauucauuugucuugc

SEQ ID NO: 2979609 - RNA, 19 nt, Artificial Sequence
  Description of Artificial Sequence: Synthetic oligonucleotide
uucuugucaacaaaucacu

SEQ ID NO: 2979610 - RNA, 19 nt, Artificial Sequence
  Description of Artificial Sequence: Synthetic oligonucleotide
uagaacaaagaaugguugc

SEQ ID NO: 2979611 - RNA, 19 nt, Artificial Sequence
  Description of Artificial Sequence: Synthetic oligonucleotide
auagcucagaggaagauuc

SEQ ID NO: 2979612 - RNA, 19 nt, Artificial Sequence
  Description of Artificial Sequence: Synthetic oligonucleotide
uugucaacaaaucacucau

SEQ ID NO: 2979613 - RNA, 19 nt, Artificial Sequence
  Description of Artificial Sequence: Synthetic oligonucleotide
aacaacuggccccaugaug

SEQ ID NO: 2979614 - RNA, 19 nt, Artificial Sequence
  Description of Artificial Sequence: Synthetic oligonucleotide
uccaaagaacucaucuucc

SEQ ID NO: 2979615 - RNA, 19 nt, Artificial Sequence
  Description of Artificial Sequence: Synthetic oligonucleotide
ugugauguaguugacauuu

SEQ ID NO: 2979616 - RNA, 19 nt, Artificial Sequence
  Description of Artificial Sequence: Synthetic oligonucleotide
gauguagaacaaagaaugg

SEQ ID NO: 2979617 - RNA, 19 nt, Artificial Sequence
  Description of Artificial Sequence: Synthetic oligonucleotide
aauucugcacaauaauguu

SEQ ID NO: 2979618 - RNA, 19 nt, Artificial Sequence
  Description of Artificial Sequence: Synthetic oligonucleotide
cagaggaagauucagacca

SEQ ID NO: 2979619 - RNA, 19 nt, Artificial Sequence
  Description of Artificial Sequence: Synthetic oligonucleotide
uccauucccaaccaucgcc

SEQ ID NO: 2979620 - RNA, 19 nt, Artificial Sequence
  Description of Artificial Sequence: Synthetic oligonucleotide
cuugcagggauguagaaca

SEQ ID NO: 2979621 - RNA, 19 nt, Artificial Sequence
  Description of Artificial Sequence: Synthetic oligonucleotide
uuuuccauucccaaccauc

SEQ ID NO: 2979622 - RNA, 19 nt, Artificial Sequence
  Description of Artificial Sequence: Synthetic oligonucleotide
cucagaggaagauucagac

SEQ ID NO: 2979623 - RNA, 19 nt, Artificial Sequence
  Description of Artificial Sequence: Synthetic oligonucleotide
uaauggugucccauggucc

SEQ ID NO: 2979624 - RNA, 19 nt, Artificial Sequence
  Description of Artificial Sequence: Synthetic oligonucleotide
ugaauguuugaugaauucu

SEQ ID NO: 2979625 - RNA, 19 nt, Artificial Sequence
  Description of Artificial Sequence: Synthetic oligonucleotide
uguugcuuuagcauagcuc

SEQ ID NO: 2979626 - RNA, 19 nt, Artificial Sequence
  Description of Artificial Sequence: Synthetic oligonucleotide
agggauguagaacaaagaa

SEQ ID NO: 2979627 - RNA, 19 nt, Artificial Sequence
  Description of Artificial Sequence: Synthetic oligonucleotide
ucauuugucuugcagggau

SEQ ID NO: 2979628 - RNA, 19 nt, Artificial Sequence
  Description of Artificial Sequence: Synthetic oligonucleotide
ugaugaauucugcacaaua

SEQ ID NO: 2979629 - RNA, 19 nt, Artificial Sequence
  Description of Artificial Sequence: Synthetic oligonucleotide
cauguuaaaugagaacccg

SEQ ID NO: 2979630 - RNA, 19 nt, Artificial Sequence
  Description of Artificial Sequence: Synthetic oligonucleotide
ugauguaguugacauuucu

SEQ ID NO: 2979631 - RNA, 19 nt, Artificial Sequence
  Description of Artificial Sequence: Synthetic oligonucleotide
auguaguugacauuucuau

SEQ ID NO: 2979632 - RNA, 19 nt, Artificial Sequence
  Description of Artificial Sequence: Synthetic oligonucleotide
aaugguugcccaaguauag

SEQ ID NO: 2979633 - RNA, 19 nt, Artificial Sequence
  Description of Artificial Sequence: Synthetic oligonucleotide
uuugaugaauucugcacaa

SEQ ID NO: 2979634 - RNA, 19 nt, Artificial Sequence
  Description of Artificial Sequence: Synthetic oligonucleotide
gacauuucuauugauuuuc

SEQ ID NO: 2979635 - RNA, 19 nt, Artificial Sequence
  Description of Artificial Sequence: Synthetic oligonucleotide
uucagcacagcagucauga

SEQ ID NO: 2979636 - RNA, 19 nt, Artificial Sequence
  Description of Artificial Sequence: Synthetic oligonucleotide
aaagaaugguugcccaagu

SEQ ID NO: 2979637 - RNA, 19 nt, Artificial Sequence
  Description of Artificial Sequence: Synthetic oligonucleotide
ucuuucuugucaacaaauc

SEQ ID NO: 2979638 - RNA, 19 nt, Artificial Sequence
  Description of Artificial Sequence: Synthetic oligonucleotide
agaaugguugcccaaguau

SEQ ID NO: 2979639 - RNA, 19 nt, Artificial Sequence
  Description of Artificial Sequence: Synthetic oligonucleotide
auguuaaaugagaacccgc

SEQ ID NO: 2979640 - RNA, 19 nt, Artificial Sequence
  Description of Artificial Sequence: Synthetic oligonucleotide
uaguugacauuucuauuga

SEQ ID NO: 2979641 - RNA, 19 nt, Artificial Sequence
  Description of Artificial Sequence: Synthetic oligonucleotide
cagaccaacaacuggcccc

SEQ ID NO: 2979642 - RNA, 19 nt, Artificial Sequence
  Description of Artificial Sequence: Synthetic oligonucleotide
guagaacaaagaaugguug

SEQ ID NO: 2979643 - RNA, 19 nt, Artificial Sequence
  Description of Artificial Sequence: Synthetic oligonucleotide
gaacaaagaaugguugccc

SEQ ID NO: 2979644 - RNA, 19 nt, Artificial Sequence
  Description of Artificial Sequence: Synthetic oligonucleotide
ucagaggaagauucagacc

SEQ ID NO: 2979645 - RNA, 19 nt, Artificial Sequence
  Description of Artificial Sequence: Synthetic oligonucleotide
acaaaucacucauccugcg

SEQ ID NO: 2979646 - RNA, 19 nt, Artificial Sequence
  Description of Artificial Sequence: Synthetic oligonucleotide
uugucuugcagggauguag

SEQ ID NO: 2979647 - RNA, 19 nt, Artificial Sequence
  Description of Artificial Sequence: Synthetic oligonucleotide
auugauuuucuguggauuu

SEQ ID NO: 2979648 - RNA, 19 nt, Artificial Sequence
  Description of Artificial Sequence: Synthetic oligonucleotide
ugugaauguuugaugaauu

SEQ ID NO: 2979649 - RNA, 19 nt, Artificial Sequence
  Description of Artificial Sequence: Synthetic oligonucleotide
cuccaaagaacucaucuuc

SEQ ID NO: 2979650 - RNA, 19 nt, Artificial Sequence
  Description of Artificial Sequence: Synthetic oligonucleotide
augaugcucagccaugaug

SEQ ID NO: 2979651 - RNA, 19 nt, Artificial Sequence
  Description of Artificial Sequence: Synthetic oligonucleotide
uccaucaugcugcagcuuc

SEQ ID NO: 2979652 - RNA, 19 nt, Artificial Sequence
  Description of Artificial Sequence: Synthetic oligonucleotide
aaucacucauccugcgaug

SEQ ID NO: 2979653 - RNA, 19 nt, Artificial Sequence
  Description of Artificial Sequence: Synthetic oligonucleotide
augaauucugcacaauaau

SEQ ID NO: 2979654 - RNA, 19 nt, Artificial Sequence
  Description of Artificial Sequence: Synthetic oligonucleotide
uucagaccaacaacuggcc

SEQ ID NO: 2979655 - RNA, 19 nt, Artificial Sequence
  Description of Artificial Sequence: Synthetic oligonucleotide
ucuguugugaauguuugau

SEQ ID NO: 2979656 - RNA, 19 nt, Artificial Sequence
  Description of Artificial Sequence: Synthetic oligonucleotide
cuuucuugucaacaaauca

SEQ ID NO: 2979657 - RNA, 19 nt, Artificial Sequence
  Description of Artificial Sequence: Synthetic oligonucleotide
ucaacaaaucacucauccu

SEQ ID NO: 2979658 - RNA, 19 nt, Artificial Sequence
  Description of Artificial Sequence: Synthetic oligonucleotide
cuugucaacaaaucacuca

SEQ ID NO: 2979659 - RNA, 19 nt, Artificial Sequence
  Description of Artificial Sequence: Synthetic oligonucleotide
ugucuugcagggauguaga

SEQ ID NO: 2979660 - RNA, 19 nt, Artificial Sequence
  Description of Artificial Sequence: Synthetic oligonucleotide
gaugugauguaguugacau

SEQ ID NO: 2979661 - RNA, 19 nt, Artificial Sequence
  Description of Artificial Sequence: Synthetic oligonucleotide
guugcccaaguauaggaug

SEQ ID NO: 2979662 - RNA, 19 nt, Artificial Sequence
  Description of Artificial Sequence: Synthetic oligonucleotide
uguuccugcuggguaaugg

SEQ ID NO: 2979663 - RNA, 19 nt, Artificial Sequence
  Description of Artificial Sequence: Synthetic oligonucleotide
gaauucugcacaauaaugu

SEQ ID NO: 2979664 - RNA, 19 nt, Artificial Sequence
  Description of Artificial Sequence: Synthetic oligonucleotide
ucuugucaacaaaucacuc

SEQ ID NO: 2979665 - RNA, 19 nt, Artificial Sequence
  Description of Artificial Sequence: Synthetic oligonucleotide
uugcccaaguauaggaugu

SEQ ID NO: 2979666 - RNA, 19 nt, Artificial Sequence
  Description of Artificial Sequence: Synthetic oligonucleotide
ugcgauguugcuuuagcau

SEQ ID NO: 2979667 - RNA, 19 nt, Artificial Sequence
  Description of Artificial Sequence: Synthetic oligonucleotide
cuuuagcauagcucagagg

SEQ ID NO: 2979668 - RNA, 19 nt, Artificial Sequence
  Description of Artificial Sequence: Synthetic oligonucleotide
ucaugcugcagcuuccgga

SEQ ID NO: 2979669 - RNA, 19 nt, Artificial Sequence
  Description of Artificial Sequence: Synthetic oligonucleotide
ucagaccaacaacuggccc

SEQ ID NO: 2979670 - RNA, 19 nt, Artificial Sequence
  Description of Artificial Sequence: Synthetic oligonucleotide
gaugaauucugcacaauaa

SEQ ID NO: 2979671 - RNA, 19 nt, Artificial Sequence
  Description of Artificial Sequence: Synthetic oligonucleotide
guaauggugucccaugguc

SEQ ID NO: 2979672 - RNA, 19 nt, Artificial Sequence
  Description of Artificial Sequence: Synthetic oligonucleotide
auguagaacaaagaauggu

SEQ ID NO: 2979673 - RNA, 19 nt, Artificial Sequence
  Description of Artificial Sequence: Synthetic oligonucleotide
agaucuuucuugucaacaa

SEQ ID NO: 2979674 - RNA, 19 nt, Artificial Sequence
  Description of Artificial Sequence: Synthetic oligonucleotide
ugguugcccaaguauagga

SEQ ID NO: 2979675 - RNA, 19 nt, Artificial Sequence
  Description of Artificial Sequence: Synthetic oligonucleotide
uguaguugacauuucuauu

SEQ ID NO: 2979676 - RNA, 19 nt, Artificial Sequence
  Description of Artificial Sequence: Synthetic oligonucleotide
gaacucaucuuccauguua

SEQ ID NO: 2979677 - RNA, 19 nt, Artificial Sequence
  Description of Artificial Sequence: Synthetic oligonucleotide
gcagucaugaauucauuug

SEQ ID NO: 2979678 - RNA, 19 nt, Artificial Sequence
  Description of Artificial Sequence: Synthetic oligonucleotide
caaagaaugguugcccaag

SEQ ID NO: 2979679 - RNA, 19 nt, Artificial Sequence
  Description of Artificial Sequence: Synthetic oligonucleotide
uccugcuggguaauggugu

SEQ ID NO: 2979680 - RNA, 19 nt, Artificial Sequence
  Description of Artificial Sequence: Synthetic oligonucleotide
uauugauuuucuguggauu

SEQ ID NO: 2979681 - RNA, 19 nt, Artificial Sequence
  Description of Artificial Sequence: Synthetic oligonucleotide
agcaggagaucuuucuugu

SEQ ID NO: 2979682 - RNA, 19 nt, Artificial Sequence
  Description of Artificial Sequence: Synthetic oligonucleotide
caugcugcagcuuccggac

SEQ ID NO: 2979683 - RNA, 19 nt, Artificial Sequence
  Description of Artificial Sequence: Synthetic oligonucleotide
cuguugugaauguuugaug

SEQ ID NO: 2979684 - RNA, 19 nt, Artificial Sequence
  Description of Artificial Sequence: Synthetic oligonucleotide
acucuuggcguccaucaug

SEQ ID NO: 2979685 - RNA, 19 nt, Artificial Sequence
  Description of Artificial Sequence: Synthetic oligonucleotide
cauuucuauugauuuucug

SEQ ID NO: 2979686 - RNA, 19 nt, Artificial Sequence
  Description of Artificial Sequence: Synthetic oligonucleotide
auucugcacaauaauguug

SEQ ID NO: 2979687 - RNA, 19 nt, Artificial Sequence
  Description of Artificial Sequence: Synthetic oligonucleotide
gugaauguuugaugaauuc

SEQ ID NO: 2979688 - RNA, 19 nt, Artificial Sequence
  Description of Artificial Sequence: Synthetic oligonucleotide
agucaugaauucauuuguc

SEQ ID NO: 2979689 - RNA, 19 nt, Artificial Sequence
  Description of Artificial Sequence: Synthetic oligonucleotide
uugugaauguuugaugaau

SEQ ID NO: 2979690 - RNA, 19 nt, Artificial Sequence
  Description of Artificial Sequence: Synthetic oligonucleotide
auaggauguuccugcuggg

SEQ ID NO: 2979691 - RNA, 19 nt, Artificial Sequence
  Description of Artificial Sequence: Synthetic oligonucleotide
acacucuuggcguccauca

SEQ ID NO: 2979692 - RNA, 19 nt, Artificial Sequence
  Description of Artificial Sequence: Synthetic oligonucleotide
cuuggcguccaucaugcug

SEQ ID NO: 2979693 - RNA, 19 nt, Artificial Sequence
  Description of Artificial Sequence: Synthetic oligonucleotide
uuccggaccagcaggagau

SEQ ID NO: 2979694 - RNA, 19 nt, Artificial Sequence
  Description of Artificial Sequence: Synthetic oligonucleotide
guuaaaugagaacccgcuc

SEQ ID NO: 2979695 - RNA, 19 nt, Artificial Sequence
  Description of Artificial Sequence: Synthetic oligonucleotide
aacucaucuuccauguuaa

SEQ ID NO: 2979696 - RNA, 19 nt, Artificial Sequence
  Description of Artificial Sequence: Synthetic oligonucleotide
uggguaauggugucccaug

SEQ ID NO: 2979697 - RNA, 19 nt, Artificial Sequence
  Description of Artificial Sequence: Synthetic oligonucleotide
uuccugcuggguaauggug

SEQ ID NO: 2979698 - RNA, 19 nt, Artificial Sequence
  Description of Artificial Sequence: Synthetic oligonucleotide
aagaaugguugcccaagua

SEQ ID NO: 2979699 - RNA, 19 nt, Artificial Sequence
  Description of Artificial Sequence: Synthetic oligonucleotide
aguauaggauguuccugcu

SEQ ID NO: 2979700 - RNA, 19 nt, Artificial Sequence
  Description of Artificial Sequence: Synthetic oligonucleotide
accaucgccuaucuguugu

SEQ ID NO: 2979701 - RNA, 19 nt, Artificial Sequence
  Description of Artificial Sequence: Synthetic oligonucleotide
acucauccugcgauguugc

SEQ ID NO: 2979702 - RNA, 19 nt, Artificial Sequence
  Description of Artificial Sequence: Synthetic oligonucleotide
uugcuuuagcauagcucag

SEQ ID NO: 2979703 - RNA, 19 nt, Artificial Sequence
  Description of Artificial Sequence: Synthetic oligonucleotide
ucuugcagggauguagaac

SEQ ID NO: 2979704 - RNA, 19 nt, Artificial Sequence
  Description of Artificial Sequence: Synthetic oligonucleotide
caaguauaggauguuccug

SEQ ID NO: 2979705 - RNA, 19 nt, Artificial Sequence
  Description of Artificial Sequence: Synthetic oligonucleotide
ugacauuucuauugauuuu

SEQ ID NO: 2979706 - RNA, 19 nt, Artificial Sequence
  Description of Artificial Sequence: Synthetic oligonucleotide
ccauguuaaaugagaaccc

SEQ ID NO: 2979707 - RNA, 19 nt, Artificial Sequence
  Description of Artificial Sequence: Synthetic oligonucleotide
agcagucaugaauucauuu

SEQ ID NO: 2979708 - RNA, 19 nt, Artificial Sequence
  Description of Artificial Sequence: Synthetic oligonucleotide
ugcugcagcuuccggacca

SEQ ID NO: 2979709 - RNA, 19 nt, Artificial Sequence
  Description of Artificial Sequence: Synthetic oligonucleotide
cuuccauguuaaaugagaa

SEQ ID NO: 2979710 - RNA, 19 nt, Artificial Sequence
  Description of Artificial Sequence: Synthetic oligonucleotide
ggaagauucagaccaacaa

SEQ ID NO: 2979711 - RNA, 19 nt, Artificial Sequence
  Description of Artificial Sequence: Synthetic oligonucleotide
gaucuuucuugucaacaaa

SEQ ID NO: 2979712 - RNA, 19 nt, Artificial Sequence
  Description of Artificial Sequence: Synthetic oligonucleotide
ucagccaugaugugaugua

SEQ ID NO: 2979713 - RNA, 19 nt, Artificial Sequence
  Description of Artificial Sequence: Synthetic oligonucleotide
ugucaacaaaucacucauc

SEQ ID NO: 2979714 - RNA, 19 nt, Artificial Sequence
  Description of Artificial Sequence: Synthetic oligonucleotide
ugcuggguaaugguguccc

SEQ ID NO: 2979715 - RNA, 19 nt, Artificial Sequence
  Description of Artificial Sequence: Synthetic oligonucleotide
caggagaucuuucuuguca

SEQ ID NO: 2979716 - RNA, 19 nt, Artificial Sequence
  Description of Artificial Sequence: Synthetic oligonucleotide
aggagaucuuucuugucaa

SEQ ID NO: 2979717 - RNA, 19 nt, Artificial Sequence
  Description of Artificial Sequence: Synthetic oligonucleotide
uuccauucccaaccaucgc

SEQ ID NO: 2979718 - RNA, 19 nt, Artificial Sequence
  Description of Artificial Sequence: Synthetic oligonucleotide
gcacaauaauguuggaagc

SEQ ID NO: 2979719 - RNA, 19 nt, Artificial Sequence
  Description of Artificial Sequence: Synthetic oligonucleotide
acaauaauguuggaagcuu

SEQ ID NO: 2979720 - RNA, 19 nt, Artificial Sequence
  Description of Artificial Sequence: Synthetic oligonucleotide
uuucagcacagcagucaug

SEQ ID NO: 2979721 - RNA, 19 nt, Artificial Sequence
  Description of Artificial Sequence: Synthetic oligonucleotide
auuugucuugcagggaugu

SEQ ID NO: 2979722 - RNA, 19 nt, Artificial Sequence
  Description of Artificial Sequence: Synthetic oligonucleotide
ugcuuuagcauagcucaga

SEQ ID NO: 2979723 - RNA, 19 nt, Artificial Sequence
  Description of Artificial Sequence: Synthetic oligonucleotide
acaaagaaugguugcccaa

SEQ ID NO: 2979724 - RNA, 19 nt, Artificial Sequence
  Description of Artificial Sequence: Synthetic oligonucleotide
gcuuuagcauagcucagag

SEQ ID NO: 2979725 - RNA, 19 nt, Artificial Sequence
  Description of Artificial Sequence: Synthetic oligonucleotide
cccaaguauaggauguucc

SEQ ID NO: 2979726 - RNA, 19 nt, Artificial Sequence
  Description of Artificial Sequence: Synthetic oligonucleotide
guauaggauguuccugcug

SEQ ID NO: 2979727 - RNA, 19 nt, Artificial Sequence
  Description of Artificial Sequence: Synthetic oligonucleotide
ggccccaugaugcucagcc

SEQ ID NO: 2979728 - RNA, 19 nt, Artificial Sequence
  Description of Artificial Sequence: Synthetic oligonucleotide
agcacagcagucaugaauu

SEQ ID NO: 2979729 - RNA, 19 nt, Artificial Sequence
  Description of Artificial Sequence: Synthetic oligonucleotide
auguugcuuuagcauagcu

SEQ ID NO: 2979730 - RNA, 19 nt, Artificial Sequence
  Description of Artificial Sequence: Synthetic oligonucleotide
aaccaucgccuaucuguug

SEQ ID NO: 2979731 - RNA, 19 nt, Artificial Sequence
  Description of Artificial Sequence: Synthetic oligonucleotide
agauucagaccaacaacug

SEQ ID NO: 2979732 - RNA, 19 nt, Artificial Sequence
  Description of Artificial Sequence: Synthetic oligonucleotide
acagcagucaugaauucau

SEQ ID NO: 2979733 - RNA, 19 nt, Artificial Sequence
  Description of Artificial Sequence: Synthetic oligonucleotide
gaaugguugcccaaguaua

SEQ ID NO: 2979734 - RNA, 19 nt, Artificial Sequence
  Description of Artificial Sequence: Synthetic oligonucleotide
augguugcccaaguauagg

SEQ ID NO: 2979735 - RNA, 19 nt, Artificial Sequence
  Description of Artificial Sequence: Synthetic oligonucleotide
cauuugucuugcagggaug

SEQ ID NO: 2979736 - RNA, 19 nt, Artificial Sequence
  Description of Artificial Sequence: Synthetic oligonucleotide
gucaugaauucauuugucu

SEQ ID NO: 2979737 - RNA, 19 nt, Artificial Sequence
  Description of Artificial Sequence: Synthetic oligonucleotide
ggguaauggugucccaugg

SEQ ID NO: 2979738 - RNA, 19 nt, Artificial Sequence
  Description of Artificial Sequence: Synthetic oligonucleotide
agcucagaggaagauucag

SEQ ID NO: 2979739 - RNA, 19 nt, Artificial Sequence
  Description of Artificial Sequence: Synthetic oligonucleotide
gauguaguugacauuucua

SEQ ID NO: 2979740 - RNA, 19 nt, Artificial Sequence
  Description of Artificial Sequence: Synthetic oligonucleotide
gaugcucagccaugaugug

SEQ ID NO: 2979741 - RNA, 19 nt, Artificial Sequence
  Description of Artificial Sequence: Synthetic oligonucleotide
aguugacauuucuauugau

SEQ ID NO: 2979742 - RNA, 19 nt, Artificial Sequence
  Description of Artificial Sequence: Synthetic oligonucleotide
cauggucccugcagcagcc

SEQ ID NO: 2979743 - RNA, 19 nt, Artificial Sequence
  Description of Artificial Sequence: Synthetic oligonucleotide
aucuguugugaauguuuga

SEQ ID NO: 2979744 - RNA, 19 nt, Artificial Sequence
  Description of Artificial Sequence: Synthetic oligonucleotide
gcguccaucaugcugcagc

SEQ ID NO: 2979745 - RNA, 19 nt, Artificial Sequence
  Description of Artificial Sequence: Synthetic oligonucleotide
aacuggccccaugaugcuc

SEQ ID NO: 2979746 - RNA, 19 nt, Artificial Sequence
  Description of Artificial Sequence: Synthetic oligonucleotide
gauguugcuuuagcauagc

SEQ ID NO: 2979747 - RNA, 19 nt, Artificial Sequence
  Description of Artificial Sequence: Synthetic oligonucleotide
uucauuugucuugcaggga

SEQ ID NO: 2979748 - RNA, 19 nt, Artificial Sequence
  Description of Artificial Sequence: Synthetic oligonucleotide
aggauguuccugcugggua

SEQ ID NO: 2979749 - RNA, 19 nt, Artificial Sequence
  Description of Artificial Sequence: Synthetic oligonucleotide
guugugaauguuugaugaa

SEQ ID NO: 2979750 - RNA, 19 nt, Artificial Sequence
  Description of Artificial Sequence: Synthetic oligonucleotide
cacucauccugcgauguug

SEQ ID NO: 2979751 - RNA, 19 nt, Artificial Sequence
  Description of Artificial Sequence: Synthetic oligonucleotide
ucgccuaucuguugugaau

SEQ ID NO: 2979752 - RNA, 19 nt, Artificial Sequence
  Description of Artificial Sequence: Synthetic oligonucleotide
gaggaagauucagaccaac

SEQ ID NO: 2979753 - RNA, 19 nt, Artificial Sequence
  Description of Artificial Sequence: Synthetic oligonucleotide
gucccauggucccugcagc

SEQ ID NO: 2979754 - RNA, 19 nt, Artificial Sequence
  Description of Artificial Sequence: Synthetic oligonucleotide
aucuuccauguuaaaugag

SEQ ID NO: 2979755 - RNA, 19 nt, Artificial Sequence
  Description of Artificial Sequence: Synthetic oligonucleotide
aucacucauccugcgaugu

SEQ ID NO: 2979756 - RNA, 19 nt, Artificial Sequence
  Description of Artificial Sequence: Synthetic oligonucleotide
acauuucuauugauuuucu

SEQ ID NO: 2979757 - RNA, 19 nt, Artificial Sequence
  Description of Artificial Sequence: Synthetic oligonucleotide
cagucaugaauucauuugu

SEQ ID NO: 2979758 - RNA, 19 nt, Artificial Sequence
  Description of Artificial Sequence: Synthetic oligonucleotide
caucaugcugcagcuuccg

SEQ ID NO: 2979759 - RNA, 19 nt, Artificial Sequence
  Description of Artificial Sequence: Synthetic oligonucleotide
augaugugauguaguugac

SEQ ID NO: 2979760 - RNA, 19 nt, Artificial Sequence
  Description of Artificial Sequence: Synthetic oligonucleotide
cagggauguagaacaaaga

SEQ ID NO: 2979761 - RNA, 19 nt, Artificial Sequence
  Description of Artificial Sequence: Synthetic oligonucleotide
uugauuuucuguggauuuu

SEQ ID NO: 2979762 - RNA, 19 nt, Artificial Sequence
  Description of Artificial Sequence: Synthetic oligonucleotide
agaccaacaacuggcccca

SEQ ID NO: 2979763 - RNA, 19 nt, Artificial Sequence
  Description of Artificial Sequence: Synthetic oligonucleotide
ucccauggucccugcagca

SEQ ID NO: 2979764 - RNA, 19 nt, Artificial Sequence
  Description of Artificial Sequence: Synthetic oligonucleotide
caaaucacucauccugcga

SEQ ID NO: 2979765 - RNA, 19 nt, Artificial Sequence
  Description of Artificial Sequence: Synthetic oligonucleotide
aucgccuaucuguugugaa

SEQ ID NO: 2979766 - RNA, 19 nt, Artificial Sequence
  Description of Artificial Sequence: Synthetic oligonucleotide
accaacaacuggccccaug

SEQ ID NO: 2979767 - RNA, 19 nt, Artificial Sequence
  Description of Artificial Sequence: Synthetic oligonucleotide
auucccaaccaucgccuau

SEQ ID NO: 2979768 - RNA, 19 nt, Artificial Sequence
  Description of Artificial Sequence: Synthetic oligonucleotide
uaggauguuccugcugggu

SEQ ID NO: 2979769 - RNA, 19 nt, Artificial Sequence
  Description of Artificial Sequence: Synthetic oligonucleotide
uucccaaccaucgccuauc

SEQ ID NO: 2979770 - RNA, 19 nt, Artificial Sequence
  Description of Artificial Sequence: Synthetic oligonucleotide
cuaucuguugugaauguuu

SEQ ID NO: 2979771 - RNA, 19 nt, Artificial Sequence
  Description of Artificial Sequence: Synthetic oligonucleotide
ucauccugcgauguugcuu

SEQ ID NO: 2979772 - RNA, 19 nt, Artificial Sequence
  Description of Artificial Sequence: Synthetic oligonucleotide
uugcagggauguagaacaa

SEQ ID NO: 2979773 - RNA, 19 nt, Artificial Sequence
  Description of Artificial Sequence: Synthetic oligonucleotide
cugcgauguugcuuuagca

SEQ ID NO: 2979774 - RNA, 19 nt, Artificial Sequence
  Description of Artificial Sequence: Synthetic oligonucleotide
ucccaaccaucgccuaucu

SEQ ID NO: 2979775 - RNA, 19 nt, Artificial Sequence
  Description of Artificial Sequence: Synthetic oligonucleotide
uugaugaauucugcacaau

SEQ ID NO: 2979776 - RNA, 19 nt, Artificial Sequence
  Description of Artificial Sequence: Synthetic oligonucleotide
augugauguaguugacauu

SEQ ID NO: 2979777 - RNA, 19 nt, Artificial Sequence
  Description of Artificial Sequence: Synthetic oligonucleotide
cacaauaauguuggaagcu

SEQ ID NO: 2979778 - RNA, 19 nt, Artificial Sequence
  Description of Artificial Sequence: Synthetic oligonucleotide
ccaaccaucgccuaucugu

SEQ ID NO: 2979779 - RNA, 19 nt, Artificial Sequence
  Description of Artificial Sequence: Synthetic oligonucleotide
ccugcgauguugcuuuagc

SEQ ID NO: 2979780 - RNA, 19 nt, Artificial Sequence
  Description of Artificial Sequence: Synthetic oligonucleotide
uccugcgauguugcuuuag

SEQ ID NO: 2979781 - RNA, 19 nt, Artificial Sequence
  Description of Artificial Sequence: Synthetic oligonucleotide
acuggccccaugaugcuca

SEQ ID NO: 2979782 - RNA, 19 nt, Artificial Sequence
  Description of Artificial Sequence: Synthetic oligonucleotide
guugacauuucuauugauu

SEQ ID NO: 2979783 - RNA, 19 nt, Artificial Sequence
  Description of Artificial Sequence: Synthetic oligonucleotide
cgauguugcuuuagcauag

SEQ ID NO: 2979784 - RNA, 19 nt, Artificial Sequence
  Description of Artificial Sequence: Synthetic oligonucleotide
cuuccggaccagcaggaga

SEQ ID NO: 2979785 - RNA, 19 nt, Artificial Sequence
  Description of Artificial Sequence: Synthetic oligonucleotide
agccaugaugugauguagu

SEQ ID NO: 2979786 - RNA, 19 nt, Artificial Sequence
  Description of Artificial Sequence: Synthetic oligonucleotide
agcauagcucagaggaaga

SEQ ID NO: 2979787 - RNA, 19 nt, Artificial Sequence
  Description of Artificial Sequence: Synthetic oligonucleotide
ccaacaacuggccccauga

SEQ ID NO: 2979788 - RNA, 19 nt, Artificial Sequence
  Description of Artificial Sequence: Synthetic oligonucleotide
ggauguuccugcuggguaa

SEQ ID NO: 2979789 - RNA, 19 nt, Artificial Sequence
  Description of Artificial Sequence: Synthetic oligonucleotide
gcgauguugcuuuagcaua

SEQ ID NO: 2979790 - RNA, 19 nt, Artificial Sequence
  Description of Artificial Sequence: Synthetic oligonucleotide
ucacucauccugcgauguu

SEQ ID NO: 2979791 - RNA, 19 nt, Artificial Sequence
  Description of Artificial Sequence: Synthetic oligonucleotide
ggagaucuuucuugucaac

SEQ ID NO: 2979792 - RNA, 19 nt, Artificial Sequence
  Description of Artificial Sequence: Synthetic oligonucleotide
uggugucccauggucccug

SEQ ID NO: 2979793 - RNA, 19 nt, Artificial Sequence
  Description of Artificial Sequence: Synthetic oligonucleotide
cauccugcgauguugcuuu

SEQ ID NO: 2979794 - RNA, 19 nt, Artificial Sequence
  Description of Artificial Sequence: Synthetic oligonucleotide
cacagcagucaugaauuca

SEQ ID NO: 2979795 - RNA, 19 nt, Artificial Sequence
  Description of Artificial Sequence: Synthetic oligonucleotide
acucaucuuccauguuaaa

SEQ ID NO: 2979796 - RNA, 19 nt, Artificial Sequence
  Description of Artificial Sequence: Synthetic oligonucleotide
guuccugcuggguaauggu

SEQ ID NO: 2979797 - RNA, 19 nt, Artificial Sequence
  Description of Artificial Sequence: Synthetic oligonucleotide
cuauugauuuucuguggau

SEQ ID NO: 2979798 - RNA, 19 nt, Artificial Sequence
  Description of Artificial Sequence: Synthetic oligonucleotide
caauaauguuggaagcuuu

SEQ ID NO: 2979799 - RNA, 19 nt, Artificial Sequence
  Description of Artificial Sequence: Synthetic oligonucleotide
ucagcacagcagucaugaa

SEQ ID NO: 2979800 - RNA, 19 nt, Artificial Sequence
  Description of Artificial Sequence: Synthetic oligonucleotide
uuugucuugcagggaugua

SEQ ID NO: 2979801 - RNA, 19 nt, Artificial Sequence
  Description of Artificial Sequence: Synthetic oligonucleotide
ccaucaugcugcagcuucc

SEQ ID NO: 2979802 - RNA, 19 nt, Artificial Sequence
  Description of Artificial Sequence: Synthetic oligonucleotide
ccauggucccugcagcagc

SEQ ID NO: 2979803 - RNA, 19 nt, Artificial Sequence
  Description of Artificial Sequence: Synthetic oligonucleotide
ccaugaugugauguaguug

SEQ ID NO: 2979804 - RNA, 19 nt, Artificial Sequence
  Description of Artificial Sequence: Synthetic oligonucleotide
gggauguagaacaaagaau

SEQ ID NO: 2979805 - RNA, 19 nt, Artificial Sequence
  Description of Artificial Sequence: Synthetic oligonucleotide
gugauguaguugacauuuc

SEQ ID NO: 2979806 - RNA, 19 nt, Artificial Sequence
  Description of Artificial Sequence: Synthetic oligonucleotide
agaggaagauucagaccaa

SEQ ID NO: 2979807 - RNA, 19 nt, Artificial Sequence
  Description of Artificial Sequence: Synthetic oligonucleotide
gucuugcagggauguagaa

SEQ ID NO: 2979808 - RNA, 19 nt, Artificial Sequence
  Description of Artificial Sequence: Synthetic oligonucleotide
gcucagaggaagauucaga

SEQ ID NO: 2979809 - RNA, 19 nt, Artificial Sequence
  Description of Artificial Sequence: Synthetic oligonucleotide
cucagccaugaugugaugu

SEQ ID NO: 2979810 - RNA, 19 nt, Artificial Sequence
  Description of Artificial Sequence: Synthetic oligonucleotide
cccaugaugcucagccaug

SEQ ID NO: 2979811 - RNA, 19 nt, Artificial Sequence
  Description of Artificial Sequence: Synthetic oligonucleotide
uggcguccaucaugcugca

SEQ ID NO: 2979812 - RNA, 19 nt, Artificial Sequence
  Description of Artificial Sequence: Synthetic oligonucleotide
gguaauggugucccauggu

SEQ ID NO: 2979813 - RNA, 19 nt, Artificial Sequence
  Description of Artificial Sequence: Synthetic oligonucleotide
ccaaguauaggauguuccu

SEQ ID NO: 2979814 - RNA, 19 nt, Artificial Sequence
  Description of Artificial Sequence: Synthetic oligonucleotide
gaccagcaggagaucuuuc

SEQ ID NO: 2979815 - RNA, 19 nt, Artificial Sequence
  Description of Artificial Sequence: Synthetic oligonucleotide
caucgccuaucuguuguga

SEQ ID NO: 2979816 - RNA, 19 nt, Artificial Sequence
  Description of Artificial Sequence: Synthetic oligonucleotide
ugcccaaguauaggauguu

SEQ ID NO: 2979817 - RNA, 19 nt, Artificial Sequence
  Description of Artificial Sequence: Synthetic oligonucleotide
auguuccugcuggguaaug

SEQ ID NO: 2979818 - RNA, 19 nt, Artificial Sequence
  Description of Artificial Sequence: Synthetic oligonucleotide
ccugcuggguaaugguguc

SEQ ID NO: 2979819 - RNA, 19 nt, Artificial Sequence
  Description of Artificial Sequence: Synthetic oligonucleotide
gcaggagaucuuucuuguc

SEQ ID NO: 2979820 - RNA, 19 nt, Artificial Sequence
  Description of Artificial Sequence: Synthetic oligonucleotide
cgccuaucuguugugaaug

SEQ ID NO: 2979821 - RNA, 19 nt, Artificial Sequence
  Description of Artificial Sequence: Synthetic oligonucleotide
caaccaucgccuaucuguu

SEQ ID NO: 2979822 - RNA, 19 nt, Artificial Sequence
  Description of Artificial Sequence: Synthetic oligonucleotide
cuggccccaugaugcucag

SEQ ID NO: 2979823 - RNA, 19 nt, Artificial Sequence
  Description of Artificial Sequence: Synthetic oligonucleotide
cauucccaaccaucgccua

SEQ ID NO: 2979824 - RNA, 19 nt, Artificial Sequence
  Description of Artificial Sequence: Synthetic oligonucleotide
cauagcucagaggaagauu

SEQ ID NO: 2979825 - RNA, 19 nt, Artificial Sequence
  Description of Artificial Sequence: Synthetic oligonucleotide
gauguuccugcuggguaau

SEQ ID NO: 2979826 - RNA, 19 nt, Artificial Sequence
  Description of Artificial Sequence: Synthetic oligonucleotide
ggugucccauggucccugc

SEQ ID NO: 2979827 - RNA, 19 nt, Artificial Sequence
  Description of Artificial Sequence: Synthetic oligonucleotide
gcccaaguauaggauguuc

SEQ ID NO: 2979828 - RNA, 19 nt, Artificial Sequence
  Description of Artificial Sequence: Synthetic oligonucleotide
ccaucgccuaucuguugug

SEQ ID NO: 2979829 - RNA, 19 nt, Artificial Sequence
  Description of Artificial Sequence: Synthetic oligonucleotide
uccggaccagcaggagauc

SEQ ID NO: 2979830 - RNA, 19 nt, Artificial Sequence
  Description of Artificial Sequence: Synthetic oligonucleotide
gugucccauggucccugca

SEQ ID NO: 2979831 - RNA, 19 nt, Artificial Sequence
  Description of Artificial Sequence: Synthetic oligonucleotide
uggccccaugaugcucagc

SEQ ID NO: 2979832 - RNA, 19 nt, Artificial Sequence
  Description of Artificial Sequence: Synthetic oligonucleotide
cuggguaauggugucccau

SEQ ID NO: 2979833 - RNA, 19 nt, Artificial Sequence
  Description of Artificial Sequence: Synthetic oligonucleotide
auggucccugcagcagccu

SEQ ID NO: 2979834 - RNA, 19 nt, Artificial Sequence
  Description of Artificial Sequence: Synthetic oligonucleotide
gcuuccggaccagcaggag

SEQ ID NO: 2979835 - RNA, 19 nt, Artificial Sequence
  Description of Artificial Sequence: Synthetic oligonucleotide
ccauucccaaccaucgccu

SEQ ID NO: 2979836 - RNA, 19 nt, Artificial Sequence
  Description of Artificial Sequence: Synthetic oligonucleotide
gcucagccaugaugugaug

SEQ ID NO: 2979837 - RNA, 19 nt, Artificial Sequence
  Description of Artificial Sequence: Synthetic oligonucleotide
ccaugaugcucagccauga

SEQ ID NO: 2979838 - RNA, 19 nt, Artificial Sequence
  Description of Artificial Sequence: Synthetic oligonucleotide
gccuaucuguugugaaugu

SEQ ID NO: 2979839 - RNA, 19 nt, Artificial Sequence
  Description of Artificial Sequence: Synthetic oligonucleotide
caacaacuggccccaugau

SEQ ID NO: 2979840 - RNA, 19 nt, Artificial Sequence
  Description of Artificial Sequence: Synthetic oligonucleotide
gguugcccaaguauaggau

SEQ ID NO: 2979841 - RNA, 19 nt, Artificial Sequence
  Description of Artificial Sequence: Synthetic oligonucleotide
cucauccugcgauguugcu

SEQ ID NO: 2979842 - RNA, 19 nt, Artificial Sequence
  Description of Artificial Sequence: Synthetic oligonucleotide
caacuggccccaugaugcu

SEQ ID NO: 2979843 - RNA, 19 nt, Artificial Sequence
  Description of Artificial Sequence: Synthetic oligonucleotide
auccugcgauguugcuuua

SEQ ID NO: 2979844 - RNA, 19 nt, Artificial Sequence
  Description of Artificial Sequence: Synthetic oligonucleotide
caugaugcucagccaugau

SEQ ID NO: 2979845 - RNA, 19 nt, Artificial Sequence
  Description of Artificial Sequence: Synthetic oligonucleotide
gccccaugaugcucagcca

SEQ ID NO: 2979846 - RNA, 19 nt, Artificial Sequence
  Description of Artificial Sequence: Synthetic oligonucleotide
cccaaccaucgccuaucug

SEQ ID NO: 2979847 - RNA, 19 nt, Artificial Sequence
  Description of Artificial Sequence: Synthetic oligonucleotide
cagcagucaugaauucauu

SEQ ID NO: 2979848 - RNA, 19 nt, Artificial Sequence
  Description of Artificial Sequence: Synthetic oligonucleotide
gcauagcucagaggaagau

SEQ ID NO: 2979849 - RNA, 19 nt, Artificial Sequence
  Description of Artificial Sequence: Synthetic oligonucleotide
cacucuuggcguccaucau

SEQ ID NO: 2979850 - RNA, 19 nt, Artificial Sequence
  Description of Artificial Sequence: Synthetic oligonucleotide
cugcagcagccuuggcugu

SEQ ID NO: 2979851 - RNA, 19 nt, Artificial Sequence
  Description of Artificial Sequence: Synthetic oligonucleotide
ggcguccaucaugcugcag

SEQ ID NO: 2979852 - RNA, 19 nt, Artificial Sequence
  Description of Artificial Sequence: Synthetic oligonucleotide
ccccaugaugcucagccau

SEQ ID NO: 2979853 - RNA, 19 nt, Artificial Sequence
  Description of Artificial Sequence: Synthetic oligonucleotide
cguccaucaugcugcagcu

SEQ ID NO: 2979854 - RNA, 19 nt, Artificial Sequence
  Description of Artificial Sequence: Synthetic oligonucleotide
guccaucaugcugcagcuu

SEQ ID NO: 2979855 - RNA, 19 nt, Artificial Sequence
  Description of Artificial Sequence: Synthetic oligonucleotide
ccuaucuguugugaauguu

SEQ ID NO: 2979856 - RNA, 19 nt, Artificial Sequence
  Description of Artificial Sequence: Synthetic oligonucleotide
ccggaccagcaggagaucu

SEQ ID NO: 2979857 - RNA, 19 nt, Artificial Sequence
  Description of Artificial Sequence: Synthetic oligonucleotide
gaccaacaacuggccccau

SEQ ID NO: 2979858 - RNA, 19 nt, Artificial Sequence
  Description of Artificial Sequence: Synthetic oligonucleotide
cagcagccuuggcuguuuu

SEQ ID NO: 2979859 - RNA, 19 nt, Artificial Sequence
  Description of Artificial Sequence: Synthetic oligonucleotide
cggaccagcaggagaucuu

SEQ ID NO: 2979860 - RNA, 19 nt, Artificial Sequence
  Description of Artificial Sequence: Synthetic oligonucleotide
aacuauuugaaauagaugg

SEQ ID NO: 2979861 - RNA, 19 nt, Artificial Sequence
  Description of Artificial Sequence: Synthetic oligonucleotide
aagaauauguaauacaaag

SEQ ID NO: 2979862 - RNA, 19 nt, Artificial Sequence
  Description of Artificial Sequence: Synthetic oligonucleotide
uguaauacaaagaagaaaa

SEQ ID NO: 2979863 - RNA, 19 nt, Artificial Sequence
  Description of Artificial Sequence: Synthetic oligonucleotide
uuuauuaauaugcacagca

SEQ ID NO: 2979864 - RNA, 19 nt, Artificial Sequence
  Description of Artificial Sequence: Synthetic oligonucleotide
uuauuuucaauuaaaaccu

SEQ ID NO: 2979865 - RNA, 19 nt, Artificial Sequence
  Description of Artificial Sequence: Synthetic oligonucleotide
uucaauuaaaaccuaauac

SEQ ID NO: 2979866 - RNA, 19 nt, Artificial Sequence
  Description of Artificial Sequence: Synthetic oligonucleotide
ucaauuaaaaccuaauaca

SEQ ID NO: 2979867 - RNA, 19 nt, Artificial Sequence
  Description of Artificial Sequence: Synthetic oligonucleotide
uuaaagauggcacuuguag

SEQ ID NO: 2979868 - RNA, 19 nt, Artificial Sequence
  Description of Artificial Sequence: Synthetic oligonucleotide
aaaguaacugucuagagaa

SEQ ID NO: 2979869 - RNA, 19 nt, Artificial Sequence
  Description of Artificial Sequence: Synthetic oligonucleotide
guuacuauuacagugaucc

SEQ ID NO: 2979870 - RNA, 19 nt, Artificial Sequence
  Description of Artificial Sequence: Synthetic oligonucleotide
uaaggaaacauuaagaaua

SEQ ID NO: 2979871 - RNA, 19 nt, Artificial Sequence
  Description of Artificial Sequence: Synthetic oligonucleotide
acagugauccaauaaacgc

SEQ ID NO: 2979872 - RNA, 19 nt, Artificial Sequence
  Description of Artificial Sequence: Synthetic oligonucleotide
uuaagaauauguaauacaa

SEQ ID NO: 2979873 - RNA, 19 nt, Artificial Sequence
  Description of Artificial Sequence: Synthetic oligonucleotide
  modified_base (7)..(7): a, c, u, g, unknown or other
uguugunuuccccuuaaag

SEQ ID NO: 2979874 - RNA, 19 nt, Artificial Sequence
  Description of Artificial Sequence: Synthetic oligonucleotide
aacuuaaggaaacauuaag

SEQ ID NO: 2979875 - RNA, 19 nt, Artificial Sequence
  Description of Artificial Sequence: Synthetic oligonucleotide
aauagaugguuacuauuac

SEQ ID NO: 2979876 - RNA, 19 nt, Artificial Sequence
  Description of Artificial Sequence: Synthetic oligonucleotide
uagaugguuacuauuacag

SEQ ID NO: 2979877 - RNA, 19 nt, Artificial Sequence
  Description of Artificial Sequence: Synthetic oligonucleotide
aaauuacugaaauggugac

SEQ ID NO: 2979878 - RNA, 19 nt, Artificial Sequence
  Description of Artificial Sequence: Synthetic oligonucleotide
caauuaaaaccuaauacag

SEQ ID NO: 2979879 - RNA, 19 nt, Artificial Sequence
  Description of Artificial Sequence: Synthetic oligonucleotide
aaccuaauacaguagacug

SEQ ID NO: 2979880 - RNA, 19 nt, Artificial Sequence
  Description of Artificial Sequence: Synthetic oligonucleotide
uucuacagcaguuugauac

SEQ ID NO: 2979881 - RNA, 19 nt, Artificial Sequence
  Description of Artificial Sequence: Synthetic oligonucleotide
gaauauguaauacaaagaa

SEQ ID NO: 2979882 - RNA, 19 nt, Artificial Sequence
  Description of Artificial Sequence: Synthetic oligonucleotide
aaaagacucuucuacagca

SEQ ID NO: 2979883 - RNA, 19 nt, Artificial Sequence
  Description of Artificial Sequence: Synthetic oligonucleotide
auuugaaauagaugguuac

SEQ ID NO: 2979884 - RNA, 19 nt, Artificial Sequence
  Description of Artificial Sequence: Synthetic oligonucleotide
aaacauuaagaauauguaa

SEQ ID NO: 2979885 - RNA, 19 nt, Artificial Sequence
  Description of Artificial Sequence: Synthetic oligonucleotide
acaggaaucccuuuucacc

SEQ ID NO: 2979886 - RNA, 19 nt, Artificial Sequence
  Description of Artificial Sequence: Synthetic oligonucleotide
aaagauggcacuuguaggu

SEQ ID NO: 2979887 - RNA, 19 nt, Artificial Sequence
  Description of Artificial Sequence: Synthetic oligonucleotide
cacacaagaaaacacaacc

SEQ ID NO: 2979888 - RNA, 19 nt, Artificial Sequence
  Description of Artificial Sequence: Synthetic oligonucleotide
auauguaauacaaagaaga

SEQ ID NO: 2979889 - RNA, 19 nt, Artificial Sequence
  Description of Artificial Sequence: Synthetic oligonucleotide
ucuagcugaagauucacag

SEQ ID NO: 2979890 - RNA, 19 nt, Artificial Sequence
  Description of Artificial Sequence: Synthetic oligonucleotide
agagaauggaguuagggug

SEQ ID NO: 2979891 - RNA, 19 nt, Artificial Sequence
  Description of Artificial Sequence: Synthetic oligonucleotide
uaaaaccuaauacaguaga

SEQ ID NO: 2979892 - RNA, 19 nt, Artificial Sequence
  Description of Artificial Sequence: Synthetic oligonucleotide
aauggaguuaggguggccc

SEQ ID NO: 2979893 - RNA, 19 nt, Artificial Sequence
  Description of Artificial Sequence: Synthetic oligonucleotide
auuaaaaccuaauacagua

SEQ ID NO: 2979894 - RNA, 19 nt, Artificial Sequence
  Description of Artificial Sequence: Synthetic oligonucleotide
uacagugauccaauaaacg

SEQ ID NO: 2979895 - RNA, 19 nt, Artificial Sequence
  Description of Artificial Sequence: Synthetic oligonucleotide
auuaagaauauguaauaca

SEQ ID NO: 2979896 - RNA, 19 nt, Artificial Sequence
  Description of Artificial Sequence: Synthetic oligonucleotide
aauaugcacagcaaauuac

SEQ ID NO: 2979897 - RNA, 19 nt, Artificial Sequence
  Description of Artificial Sequence: Synthetic oligonucleotide
uaaagauggcacuuguagg

SEQ ID NO: 2979898 - RNA, 19 nt, Artificial Sequence
  Description of Artificial Sequence: Synthetic oligonucleotide
aauacaguagacugaauua

SEQ ID NO: 2979899 - RNA, 19 nt, Artificial Sequence
  Description of Artificial Sequence: Synthetic oligonucleotide
ugaaaagacucuucuacag

SEQ ID NO: 2979900 - RNA, 19 nt, Artificial Sequence
  Description of Artificial Sequence: Synthetic oligonucleotide
uaaaguaacugucuagaga

SEQ ID NO: 2979901 - RNA, 19 nt, Artificial Sequence
  Description of Artificial Sequence: Synthetic oligonucleotide
aacauuaagaauauguaau

SEQ ID NO: 2979902 - RNA, 19 nt, Artificial Sequence
  Description of Artificial Sequence: Synthetic oligonucleotide
ugaaauggugacuucaugu

SEQ ID NO: 2979903 - RNA, 19 nt, Artificial Sequence
  Description of Artificial Sequence: Synthetic oligonucleotide
aacaggaaucccuuuucac

SEQ ID NO: 2979904 - RNA, 19 nt, Artificial Sequence
  Description of Artificial Sequence: Synthetic oligonucleotide
cagcaaauuacugaaaugg

SEQ ID NO: 2979905 - RNA, 19 nt, Artificial Sequence
  Description of Artificial Sequence: Synthetic oligonucleotide
uuaaaaccuaauacaguag

SEQ ID NO: 2979906 - RNA, 19 nt, Artificial Sequence
  Description of Artificial Sequence: Synthetic oligonucleotide
aagaaaacacaaccuuuuc

SEQ ID NO: 2979907 - RNA, 19 nt, Artificial Sequence
  Description of Artificial Sequence: Synthetic oligonucleotide
auacacaucagauguuuac

SEQ ID NO: 2979908 - RNA, 19 nt, Artificial Sequence
  Description of Artificial Sequence: Synthetic oligonucleotide
aguagacugaauuauauuu

SEQ ID NO: 2979909 - RNA, 19 nt, Artificial Sequence
  Description of Artificial Sequence: Synthetic oligonucleotide
ucagauguuuacuugaaaa

SEQ ID NO: 2979910 - RNA, 19 nt, Artificial Sequence
  Description of Artificial Sequence: Synthetic oligonucleotide
uagcugaagauucacagga

SEQ ID NO: 2979911 - RNA, 19 nt, Artificial Sequence
  Description of Artificial Sequence: Synthetic oligonucleotide
auuacagugauccaauaaa

SEQ ID NO: 2979912 - RNA, 19 nt, Artificial Sequence
  Description of Artificial Sequence: Synthetic oligonucleotide
uguuuacuugaaaagacuc

SEQ ID NO: 2979913 - RNA, 19 nt, Artificial Sequence
  Description of Artificial Sequence: Synthetic oligonucleotide
uaauacaguagacugaauu

SEQ ID NO: 2979914 - RNA, 19 nt, Artificial Sequence
  Description of Artificial Sequence: Synthetic oligonucleotide
aaaaccuaauacaguagac

SEQ ID NO: 2979915 - RNA, 19 nt, Artificial Sequence
  Description of Artificial Sequence: Synthetic oligonucleotide
uguuuccucaucuagcuga

SEQ ID NO: 2979916 - RNA, 19 nt, Artificial Sequence
  Description of Artificial Sequence: Synthetic oligonucleotide
uuucaauuaaaaccuaaua

SEQ ID NO: 2979917 - RNA, 19 nt, Artificial Sequence
  Description of Artificial Sequence: Synthetic oligonucleotide
aauaaacgcugucugguga

SEQ ID NO: 2979918 - RNA, 19 nt, Artificial Sequence
  Description of Artificial Sequence: Synthetic oligonucleotide
uguguauacacaucagaug

SEQ ID NO: 2979919 - RNA, 19 nt, Artificial Sequence
  Description of Artificial Sequence: Synthetic oligonucleotide
aaacacaaccuuuuccaug

SEQ ID NO: 2979920 - RNA, 19 nt, Artificial Sequence
  Description of Artificial Sequence: Synthetic oligonucleotide
aaauggugacuucauguug

SEQ ID NO: 2979921 - RNA, 19 nt, Artificial Sequence
  Description of Artificial Sequence: Synthetic oligonucleotide
uauguaauacaaagaagaa

SEQ ID NO: 2979922 - RNA, 19 nt, Artificial Sequence
  Description of Artificial Sequence: Synthetic oligonucleotide
auucacaggaacuauuuga

SEQ ID NO: 2979923 - RNA, 19 nt, Artificial Sequence
  Description of Artificial Sequence: Synthetic oligonucleotide
  modified_base (5)..(5): a, c, u, g, unknown or other
uugunuuccccuuaaagau

SEQ ID NO: 2979924 - RNA, 19 nt, Artificial Sequence
  Description of Artificial Sequence: Synthetic oligonucleotide
caaauuacugaaaugguga

SEQ ID NO: 2979925 - RNA, 19 nt, Artificial Sequence
  Description of Artificial Sequence: Synthetic oligonucleotide
uuuuccaugcugcuaaagu

SEQ ID NO: 2979926 - RNA, 19 nt, Artificial Sequence
  Description of Artificial Sequence: Synthetic oligonucleotide
  modified_base (4)..(4): a, c, u, g, unknown or other
ugunuuccccuuaaagaug

SEQ ID NO: 2979927 - RNA, 19 nt, Artificial Sequence
  Description of Artificial Sequence: Synthetic oligonucleotide
aguuugauacuguguuucc

SEQ ID NO: 2979928 - RNA, 19 nt, Artificial Sequence
  Description of Artificial Sequence: Synthetic oligonucleotide
uuuucaauuaaaaccuaau

SEQ ID NO: 2979929 - RNA, 19 nt, Artificial Sequence
  Description of Artificial Sequence: Synthetic oligonucleotide
uuaaggaaacauuaagaau

SEQ ID NO: 2979930 - RNA, 19 nt, Artificial Sequence
  Description of Artificial Sequence: Synthetic oligonucleotide
cuuaaggaaacauuaagaa

SEQ ID NO: 2979931 - RNA, 19 nt, Artificial Sequence
  Description of Artificial Sequence: Synthetic oligonucleotide
uuacagugauccaauaaac

SEQ ID NO: 2979932 - RNA, 19 nt, Artificial Sequence
  Description of Artificial Sequence: Synthetic oligonucleotide
  modified_base (6)..(6): a, c, u, g, unknown or other
guugunuuccccuuaaaga

SEQ ID NO: 2979933 - RNA, 19 nt, Artificial Sequence
  Description of Artificial Sequence: Synthetic oligonucleotide
aaaccuaauacaguagacu

SEQ ID NO: 2979934 - RNA, 19 nt, Artificial Sequence
  Description of Artificial Sequence: Synthetic oligonucleotide
cuuguagguacaaggacgc

SEQ ID NO: 2979935 - RNA, 19 nt, Artificial Sequence
  Description of Artificial Sequence: Synthetic oligonucleotide
gagauguguauacacauca

SEQ ID NO: 2979936 - RNA, 19 nt, Artificial Sequence
  Description of Artificial Sequence: Synthetic oligonucleotide
gauguuuacuugaaaagac

SEQ ID NO: 2979937 - RNA, 19 nt, Artificial Sequence
  Description of Artificial Sequence: Synthetic oligonucleotide
cagauguuuacuugaaaag

SEQ ID NO: 2979938 - RNA, 19 nt, Artificial Sequence
  Description of Artificial Sequence: Synthetic oligonucleotide
uccaauaaacgcugucugg

SEQ ID NO: 2979939 - RNA, 19 nt, Artificial Sequence
  Description of Artificial Sequence: Synthetic oligonucleotide
gaaaagacucuucuacagc

SEQ ID NO: 2979940 - RNA, 19 nt, Artificial Sequence
  Description of Artificial Sequence: Synthetic oligonucleotide
uaauaugcacagcaaauua

SEQ ID NO: 2979941 - RNA, 19 nt, Artificial Sequence
  Description of Artificial Sequence: Synthetic oligonucleotide
acuuguagguacaaggacg

SEQ ID NO: 2979942 - RNA, 19 nt, Artificial Sequence
  Description of Artificial Sequence: Synthetic oligonucleotide
aauuaaaaccuaauacagu

SEQ ID NO: 2979943 - RNA, 19 nt, Artificial Sequence
  Description of Artificial Sequence: Synthetic oligonucleotide
uauuacagugauccaauaa

SEQ ID NO: 2979944 - RNA, 19 nt, Artificial Sequence
  Description of Artificial Sequence: Synthetic oligonucleotide
uauuugaaauagaugguua

SEQ ID NO: 2979945 - RNA, 19 nt, Artificial Sequence
  Description of Artificial Sequence: Synthetic oligonucleotide
uacaaggacgcagagaugu

SEQ ID NO: 2979946 - RNA, 19 nt, Artificial Sequence
  Description of Artificial Sequence: Synthetic oligonucleotide
aaauagaugguuacuauua

SEQ ID NO: 2979947 - RNA, 19 nt, Artificial Sequence
  Description of Artificial Sequence: Synthetic oligonucleotide
uguguuuccucaucuagcu

SEQ ID NO: 2979948 - RNA, 19 nt, Artificial Sequence
  Description of Artificial Sequence: Synthetic oligonucleotide
uucacaggaacuauuugaa

SEQ ID NO: 2979949 - RNA, 19 nt, Artificial Sequence
  Description of Artificial Sequence: Synthetic oligonucleotide
uagagaauggaguuagggu

SEQ ID NO: 2979950 - RNA, 19 nt, Artificial Sequence
  Description of Artificial Sequence: Synthetic oligonucleotide
uaagaauauguaauacaaa

SEQ ID NO: 2979951 - RNA, 19 nt, Artificial Sequence
  Description of Artificial Sequence: Synthetic oligonucleotide
ugcacagcaaauuacugaa

SEQ ID NO: 2979952 - RNA, 19 nt, Artificial Sequence
  Description of Artificial Sequence: Synthetic oligonucleotide
  modified_base (14)..(14): a, c, u, g, unknown or other
gacuucauguugunuuccc

SEQ ID NO: 2979953 - RNA, 19 nt, Artificial Sequence
  Description of Artificial Sequence: Synthetic oligonucleotide
aaaagacaacaggaauccc

SEQ ID NO: 2979954 - RNA, 19 nt, Artificial Sequence
  Description of Artificial Sequence: Synthetic oligonucleotide
cuagagaauggaguuaggg

SEQ ID NO: 2979955 - RNA, 19 nt, Artificial Sequence
  Description of Artificial Sequence: Synthetic oligonucleotide
acuguguuuccucaucuag

SEQ ID NO: 2979956 - RNA, 19 nt, Artificial Sequence
  Description of Artificial Sequence: Synthetic oligonucleotide
ugucuggugaaauuugacu

SEQ ID NO: 2979957 - RNA, 19 nt, Artificial Sequence
  Description of Artificial Sequence: Synthetic oligonucleotide
acaacaggaaucccuuuuc

SEQ ID NO: 2979958 - RNA, 19 nt, Artificial Sequence
  Description of Artificial Sequence: Synthetic oligonucleotide
uaugcacagcaaauuacug

SEQ ID NO: 2979959 - RNA, 19 nt, Artificial Sequence
  Description of Artificial Sequence: Synthetic oligonucleotide
  modified_base (3)..(3): a, c, u, g, unknown or other
gunuuccccuuaaagaugg

SEQ ID NO: 2979960 - RNA, 19 nt, Artificial Sequence
  Description of Artificial Sequence: Synthetic oligonucleotide
gauguguauacacaucaga

SEQ ID NO: 2979961 - RNA, 19 nt, Artificial Sequence
  Description of Artificial Sequence: Synthetic oligonucleotide
uuugauacuguguuuccuc

SEQ ID NO: 2979962 - RNA, 19 nt, Artificial Sequence
  Description of Artificial Sequence: Synthetic oligonucleotide
ugcuaaaguaacugucuag

SEQ ID NO: 2979963 - RNA, 19 nt, Artificial Sequence
  Description of Artificial Sequence: Synthetic oligonucleotide
cuaaaguaacugucuagag

SEQ ID NO: 2979964 - RNA, 19 nt, Artificial Sequence
  Description of Artificial Sequence: Synthetic oligonucleotide
ggcacuuguagguacaagg

SEQ ID NO: 2979965 - RNA, 19 nt, Artificial Sequence
  Description of Artificial Sequence: Synthetic oligonucleotide
uguagguacaaggacgcag

SEQ ID NO: 2979966 - RNA, 19 nt, Artificial Sequence
  Description of Artificial Sequence: Synthetic oligonucleotide
ucccuuuucaccacacaag

SEQ ID NO: 2979967 - RNA, 19 nt, Artificial Sequence
  Description of Artificial Sequence: Synthetic oligonucleotide
cucaucuagcugaagauuc

SEQ ID NO: 2979968 - RNA, 19 nt, Artificial Sequence
  Description of Artificial Sequence: Synthetic oligonucleotide
gagaauggaguuagggugg

SEQ ID NO: 2979969 - RNA, 19 nt, Artificial Sequence
  Description of Artificial Sequence: Synthetic oligonucleotide
aauggugacuucauguugu

SEQ ID NO: 2979970 - RNA, 19 nt, Artificial Sequence
  Description of Artificial Sequence: Synthetic oligonucleotide
cuagcugaagauucacagg

SEQ ID NO: 2979971 - RNA, 19 nt, Artificial Sequence
  Description of Artificial Sequence: Synthetic oligonucleotide
guaacugucuagagaaugg

SEQ ID NO: 2979972 - RNA, 19 nt, Artificial Sequence
  Description of Artificial Sequence: Synthetic oligonucleotide
agauguuuacuugaaaaga

SEQ ID NO: 2979973 - RNA, 19 nt, Artificial Sequence
  Description of Artificial Sequence: Synthetic oligonucleotide
acuuaaggaaacauuaaga

SEQ ID NO: 2979974 - RNA, 19 nt, Artificial Sequence
  Description of Artificial Sequence: Synthetic oligonucleotide
acaucagauguuuacuuga

SEQ ID NO: 2979975 - RNA, 19 nt, Artificial Sequence
  Description of Artificial Sequence: Synthetic oligonucleotide
ucaccacacaagaaaacac

SEQ ID NO: 2979976 - RNA, 19 nt, Artificial Sequence
  Description of Artificial Sequence: Synthetic oligonucleotide
uuccccuuaaagauggcac

SEQ ID NO: 2979977 - RNA, 19 nt, Artificial Sequence
  Description of Artificial Sequence: Synthetic oligonucleotide
ugaaauagaugguuacuau

SEQ ID NO: 2979978 - RNA, 19 nt, Artificial Sequence
  Description of Artificial Sequence: Synthetic oligonucleotide
ucuggugaaauuugacucu

SEQ ID NO: 2979979 - RNA, 19 nt, Artificial Sequence
  Description of Artificial Sequence: Synthetic oligonucleotide
aagacucuucuacagcagu

SEQ ID NO: 2979980 - RNA, 19 nt, Artificial Sequence
  Description of Artificial Sequence: Synthetic oligonucleotide
auuacugaaauggugacuu

SEQ ID NO: 2979981 - RNA, 19 nt, Artificial Sequence
  Description of Artificial Sequence: Synthetic oligonucleotide
auccaauaaacgcugucug

SEQ ID NO: 2979982 - RNA, 19 nt, Artificial Sequence
  Description of Artificial Sequence: Synthetic oligonucleotide
agcaguuugauacuguguu

SEQ ID NO: 2979983 - RNA, 19 nt, Artificial Sequence
  Description of Artificial Sequence: Synthetic oligonucleotide
acauuaagaauauguaaua

SEQ ID NO: 2979984 - RNA, 19 nt, Artificial Sequence
  Description of Artificial Sequence: Synthetic oligonucleotide
acagcaaauuacugaaaug

SEQ ID NO: 2979985 - RNA, 19 nt, Artificial Sequence
  Description of Artificial Sequence: Synthetic oligonucleotide
auagaugguuacuauuaca

SEQ ID NO: 2979986 - RNA, 19 nt, Artificial Sequence
  Description of Artificial Sequence: Synthetic oligonucleotide
uuugaaauagaugguuacu

SEQ ID NO: 2979987 - RNA, 19 nt, Artificial Sequence
  Description of Artificial Sequence: Synthetic oligonucleotide
gucuggugaaauuugacuc

SEQ ID NO: 2979988 - RNA, 19 nt, Artificial Sequence
  Description of Artificial Sequence: Synthetic oligonucleotide
gaacuauuugaaauagaug

SEQ ID NO: 2979989 - RNA, 19 nt, Artificial Sequence
  Description of Artificial Sequence: Synthetic oligonucleotide
aguaacugucuagagaaug

SEQ ID NO: 2979990 - RNA, 19 nt, Artificial Sequence
  Description of Artificial Sequence: Synthetic oligonucleotide
uuuacuugaaaagacucuu

SEQ ID NO: 2979991 - RNA, 19 nt, Artificial Sequence
  Description of Artificial Sequence: Synthetic oligonucleotide
guguauacacaucagaugu

SEQ ID NO: 2979992 - RNA, 19 nt, Artificial Sequence
  Description of Artificial Sequence: Synthetic oligonucleotide
gaaacauuaagaauaugua

SEQ ID NO: 2979993 - RNA, 19 nt, Artificial Sequence
  Description of Artificial Sequence: Synthetic oligonucleotide
agauggcacuuguagguac

SEQ ID NO: 2979994 - RNA, 19 nt, Artificial Sequence
  Description of Artificial Sequence: Synthetic oligonucleotide
uuccaugcugcuaaaguaa

SEQ ID NO: 2979995 - RNA, 19 nt, Artificial Sequence
  Description of Artificial Sequence: Synthetic oligonucleotide
uuuccaugcugcuaaagua

SEQ ID NO: 2979996 - RNA, 19 nt, Artificial Sequence
  Description of Artificial Sequence: Synthetic oligonucleotide
auuaauaugcacagcaaau

SEQ ID NO: 2979997 - RNA, 19 nt, Artificial Sequence
  Description of Artificial Sequence: Synthetic oligonucleotide
aauuacugaaauggugacu

SEQ ID NO: 2979998 - RNA, 19 nt, Artificial Sequence
  Description of Artificial Sequence: Synthetic oligonucleotide
uugaaauagaugguuacua

SEQ ID NO: 2979999 - RNA, 19 nt, Artificial Sequence
  Description of Artificial Sequence: Synthetic oligonucleotide
gauucacaggaacuauuug

SEQ ID NO: 2980000 - RNA, 19 nt, Artificial Sequence
  Description of Artificial Sequence: Synthetic oligonucleotide
agaauauguaauacaaaga

SEQ ID NO: 2980001 - RNA, 19 nt, Artificial Sequence
  Description of Artificial Sequence: Synthetic oligonucleotide
uacuauuacagugauccaa

SEQ ID NO: 2980002 - RNA, 19 nt, Artificial Sequence
  Description of Artificial Sequence: Synthetic oligonucleotide
uuaauaugcacagcaaauu

SEQ ID NO: 2980003 - RNA, 19 nt, Artificial Sequence
  Description of Artificial Sequence: Synthetic oligonucleotide
ugcugcuaaaguaacuguc

SEQ ID NO: 2980004 - RNA, 19 nt, Artificial Sequence
  Description of Artificial Sequence: Synthetic oligonucleotide
uuucaccacacaagaaaac

SEQ ID NO: 2980005 - RNA, 19 nt, Artificial Sequence
  Description of Artificial Sequence: Synthetic oligonucleotide
caugcugcuaaaguaacug

SEQ ID NO: 2980006 - RNA, 19 nt, Artificial Sequence
  Description of Artificial Sequence: Synthetic oligonucleotide
uugauacuguguuuccuca

SEQ ID NO: 2980007 - RNA, 19 nt, Artificial Sequence
  Description of Artificial Sequence: Synthetic oligonucleotide
cuguguuuccucaucuagc

SEQ ID NO: 2980008 - RNA, 19 nt, Artificial Sequence
  Description of Artificial Sequence: Synthetic oligonucleotide
ucuagagaauggaguuagg

SEQ ID NO: 2980009 - RNA, 19 nt, Artificial Sequence
  Description of Artificial Sequence: Synthetic oligonucleotide
ugaagauucacaggaacua

SEQ ID NO: 2980010 - RNA, 19 nt, Artificial Sequence
  Description of Artificial Sequence: Synthetic oligonucleotide
acagcaguuugauacugug

SEQ ID NO: 2980011 - RNA, 19 nt, Artificial Sequence
  Description of Artificial Sequence: Synthetic oligonucleotide
gacgcagagauguguauac

SEQ ID NO: 2980012 - RNA, 19 nt, Artificial Sequence
  Description of Artificial Sequence: Synthetic oligonucleotide
ucuacagcaguuugauacu

SEQ ID NO: 2980013 - RNA, 19 nt, Artificial Sequence
  Description of Artificial Sequence: Synthetic oligonucleotide
gucuagagaauggaguuag

SEQ ID NO: 2980014 - RNA, 19 nt, Artificial Sequence
  Description of Artificial Sequence: Synthetic oligonucleotide
augcacagcaaauuacuga

SEQ ID NO: 2980015 - RNA, 19 nt, Artificial Sequence
  Description of Artificial Sequence: Synthetic oligonucleotide
acaggaacuauuugaaaua

SEQ ID NO: 2980016 - RNA, 19 nt, Artificial Sequence
  Description of Artificial Sequence: Synthetic oligonucleotide
uuacuugaaaagacucuuc

SEQ ID NO: 2980017 - RNA, 19 nt, Artificial Sequence
  Description of Artificial Sequence: Synthetic oligonucleotide
  modified_base (13)..(13): a, c, u, g, unknown or other
acuucauguugunuucccc

SEQ ID NO: 2980018 - RNA, 19 nt, Artificial Sequence
  Description of Artificial Sequence: Synthetic oligonucleotide
ucaucuagcugaagauuca

SEQ ID NO: 2980019 - RNA, 19 nt, Artificial Sequence
  Description of Artificial Sequence: Synthetic oligonucleotide
aacugucuagagaauggag

SEQ ID NO: 2980020 - RNA, 19 nt, Artificial Sequence
  Description of Artificial Sequence: Synthetic oligonucleotide
uacugaaauggugacuuca

SEQ ID NO: 2980021 - RNA, 19 nt, Artificial Sequence
  Description of Artificial Sequence: Synthetic oligonucleotide
agugauccaauaaacgcug

SEQ ID NO: 2980022 - RNA, 19 nt, Artificial Sequence
  Description of Artificial Sequence: Synthetic oligonucleotide
uauuuucaauuaaaaccua

SEQ ID NO: 2980023 - RNA, 19 nt, Artificial Sequence
  Description of Artificial Sequence: Synthetic oligonucleotide
cacaucagauguuuacuug

SEQ ID NO: 2980024 - RNA, 19 nt, Artificial Sequence
  Description of Artificial Sequence: Synthetic oligonucleotide
accuuuuccaugcugcuaa

SEQ ID NO: 2980025 - RNA, 19 nt, Artificial Sequence
  Description of Artificial Sequence: Synthetic oligonucleotide
auguaauacaaagaagaaa

SEQ ID NO: 2980026 - RNA, 19 nt, Artificial Sequence
  Description of Artificial Sequence: Synthetic oligonucleotide
uacacaucagauguuuacu

SEQ ID NO: 2980027 - RNA, 19 nt, Artificial Sequence
  Description of Artificial Sequence: Synthetic oligonucleotide
agaugguuacuauuacagu

SEQ ID NO: 2980028 - RNA, 19 nt, Artificial Sequence
  Description of Artificial Sequence: Synthetic oligonucleotide
auacuguguuuccucaucu

SEQ ID NO: 2980029 - RNA, 19 nt, Artificial Sequence
  Description of Artificial Sequence: Synthetic oligonucleotide
acugucuagagaauggagu

SEQ ID NO: 2980030 - RNA, 19 nt, Artificial Sequence
  Description of Artificial Sequence: Synthetic oligonucleotide
ucuucuacagcaguuugau

SEQ ID NO: 2980031 - RNA, 19 nt, Artificial Sequence
  Description of Artificial Sequence: Synthetic oligonucleotide
auaugcacagcaaauuacu

SEQ ID NO: 2980032 - RNA, 19 nt, Artificial Sequence
  Description of Artificial Sequence: Synthetic oligonucleotide
uccaugcugcuaaaguaac

SEQ ID NO: 2980033 - RNA, 19 nt, Artificial Sequence
  Description of Artificial Sequence: Synthetic oligonucleotide
caggaacuauuugaaauag

SEQ ID NO: 2980034 - RNA, 19 nt, Artificial Sequence
  Description of Artificial Sequence: Synthetic oligonucleotide
uacaguagacugaauuaua

SEQ ID NO: 2980035 - RNA, 19 nt, Artificial Sequence
  Description of Artificial Sequence: Synthetic oligonucleotide
ugauccaauaaacgcuguc

SEQ ID NO: 2980036 - RNA, 19 nt, Artificial Sequence
  Description of Artificial Sequence: Synthetic oligonucleotide
ggaaacauuaagaauaugu

SEQ ID NO: 2980037 - RNA, 19 nt, Artificial Sequence
  Description of Artificial Sequence: Synthetic oligonucleotide
  modified_base (10)..(10): a, c, u, g, unknown or other
ucauguugunuuccccuua

SEQ ID NO: 2980038 - RNA, 19 nt, Artificial Sequence
  Description of Artificial Sequence: Synthetic oligonucleotide
acucuucuacagcaguuug

SEQ ID NO: 2980039 - RNA, 19 nt, Artificial Sequence
  Description of Artificial Sequence: Synthetic oligonucleotide
auacaguagacugaauuau

SEQ ID NO: 2980040 - RNA, 19 nt, Artificial Sequence
  Description of Artificial Sequence: Synthetic oligonucleotide
aaucccuuuucaccacaca

SEQ ID NO: 2980041 - RNA, 19 nt, Artificial Sequence
  Description of Artificial Sequence: Synthetic oligonucleotide
auguguauacacaucagau

SEQ ID NO: 2980042 - RNA, 19 nt, Artificial Sequence
  Description of Artificial Sequence: Synthetic oligonucleotide
acuauuugaaauagauggu

SEQ ID NO: 2980043 - RNA, 19 nt, Artificial Sequence
  Description of Artificial Sequence: Synthetic oligonucleotide
caauaaacgcugucuggug

SEQ ID NO: 2980044 - RNA, 19 nt, Artificial Sequence
  Description of Artificial Sequence: Synthetic oligonucleotide
uauacacaucagauguuua

SEQ ID NO: 2980045 - RNA, 19 nt, Artificial Sequence
  Description of Artificial Sequence: Synthetic oligonucleotide
cacuuguagguacaaggac

SEQ ID NO: 2980046 - RNA, 19 nt, Artificial Sequence
  Description of Artificial Sequence: Synthetic oligonucleotide
agaauggaguuaggguggc

SEQ ID NO: 2980047 - RNA, 19 nt, Artificial Sequence
  Description of Artificial Sequence: Synthetic oligonucleotide
aggaaucccuuuucaccac

SEQ ID NO: 2980048 - RNA, 19 nt, Artificial Sequence
  Description of Artificial Sequence: Synthetic oligonucleotide
agagauguguauacacauc

SEQ ID NO: 2980049 - RNA, 19 nt, Artificial Sequence
  Description of Artificial Sequence: Synthetic oligonucleotide
caggaaucccuuuucacca

SEQ ID NO: 2980050 - RNA, 19 nt, Artificial Sequence
  Description of Artificial Sequence: Synthetic oligonucleotide
uagguacaaggacgcagag

SEQ ID NO: 2980051 - RNA, 19 nt, Artificial Sequence
  Description of Artificial Sequence: Synthetic oligonucleotide
uaacugucuagagaaugga

SEQ ID NO: 2980052 - RNA, 19 nt, Artificial Sequence
  Description of Artificial Sequence: Synthetic oligonucleotide
gguacaaggacgcagagau

SEQ ID NO: 2980053 - RNA, 19 nt, Artificial Sequence
  Description of Artificial Sequence: Synthetic oligonucleotide
acacaagaaaacacaaccu

SEQ ID NO: 2980054 - RNA, 19 nt, Artificial Sequence
  Description of Artificial Sequence: Synthetic oligonucleotide
uccccuuaaagauggcacu

SEQ ID NO: 2980055 - RNA, 19 nt, Artificial Sequence
  Description of Artificial Sequence: Synthetic oligonucleotide
uuacuauuacagugaucca

SEQ ID NO: 2980056 - RNA, 19 nt, Artificial Sequence
  Description of Artificial Sequence: Synthetic oligonucleotide
ugguuacuauuacagugau

SEQ ID NO: 2980057 - RNA, 19 nt, Artificial Sequence
  Description of Artificial Sequence: Synthetic oligonucleotide
uguauacacaucagauguu

SEQ ID NO: 2980058 - RNA, 19 nt, Artificial Sequence
  Description of Artificial Sequence: Synthetic oligonucleotide
gcaaauuacugaaauggug

SEQ ID NO: 2980059 - RNA, 19 nt, Artificial Sequence
  Description of Artificial Sequence: Synthetic oligonucleotide
acacaucagauguuuacuu

SEQ ID NO: 2980060 - RNA, 19 nt, Artificial Sequence
  Description of Artificial Sequence: Synthetic oligonucleotide
auaaacgcugucuggugaa

SEQ ID NO: 2980061 - RNA, 19 nt, Artificial Sequence
  Description of Artificial Sequence: Synthetic oligonucleotide
acuauuacagugauccaau

SEQ ID NO: 2980062 - RNA, 19 nt, Artificial Sequence
  Description of Artificial Sequence: Synthetic oligonucleotide
aagacaacaggaaucccuu

SEQ ID NO: 2980063 - RNA, 19 nt, Artificial Sequence
  Description of Artificial Sequence: Synthetic oligonucleotide
acuugaaaagacucuucua

SEQ ID NO: 2980064 - RNA, 19 nt, Artificial Sequence
  Description of Artificial Sequence: Synthetic oligonucleotide
auguuuacuugaaaagacu

SEQ ID NO: 2980065 - RNA, 19 nt, Artificial Sequence
  Description of Artificial Sequence: Synthetic oligonucleotide
uacagcaguuugauacugu

SEQ ID NO: 2980066 - RNA, 19 nt, Artificial Sequence
  Description of Artificial Sequence: Synthetic oligonucleotide
aacgcugucuggugaaauu

SEQ ID NO: 2980067 - RNA, 19 nt, Artificial Sequence
  Description of Artificial Sequence: Synthetic oligonucleotide
gaaauagaugguuacuauu

SEQ ID NO: 2980068 - RNA, 19 nt, Artificial Sequence
  Description of Artificial Sequence: Synthetic oligonucleotide
uuaggguggcccaucuuau

SEQ ID NO: 2980069 - RNA, 19 nt, Artificial Sequence
  Description of Artificial Sequence: Synthetic oligonucleotide
agcaaauuacugaaauggu

SEQ ID NO: 2980070 - RNA, 19 nt, Artificial Sequence
  Description of Artificial Sequence: Synthetic oligonucleotide
gauccaauaaacgcugucu

SEQ ID NO: 2980071 - RNA, 19 nt, Artificial Sequence
  Description of Artificial Sequence: Synthetic oligonucleotide
  modified_base (15)..(15): a, c, u, g, unknown or other
ugacuucauguugunuucc

SEQ ID NO: 2980072 - RNA, 19 nt, Artificial Sequence
  Description of Artificial Sequence: Synthetic oligonucleotide
ucacaggaacuauuugaaa

SEQ ID NO: 2980073 - RNA, 19 nt, Artificial Sequence
  Description of Artificial Sequence: Synthetic oligonucleotide
cugaaauggugacuucaug

SEQ ID NO: 2980074 - RNA, 19 nt, Artificial Sequence
  Description of Artificial Sequence: Synthetic oligonucleotide
guuaggguggcccaucuua

SEQ ID NO: 2980075 - RNA, 19 nt, Artificial Sequence
  Description of Artificial Sequence: Synthetic oligonucleotide
acaguagacugaauuauau

SEQ ID NO: 2980076 - RNA, 19 nt, Artificial Sequence
  Description of Artificial Sequence: Synthetic oligonucleotide
cugucuggugaaauuugac

SEQ ID NO: 2980077 - RNA, 19 nt, Artificial Sequence
  Description of Artificial Sequence: Synthetic oligonucleotide
augcugcuaaaguaacugu

SEQ ID NO: 2980078 - RNA, 19 nt, Artificial Sequence
  Description of Artificial Sequence: Synthetic oligonucleotide
gcuaaaguaacugucuaga

SEQ ID NO: 2980079 - RNA, 19 nt, Artificial Sequence
  Description of Artificial Sequence: Synthetic oligonucleotide
  modified_base (11)..(11): a, c, u, g, unknown or other
uucauguugunuuccccuu

SEQ ID NO: 2980080 - RNA, 19 nt, Artificial Sequence
  Description of Artificial Sequence: Synthetic oligonucleotide
aagauucacaggaacuauu

SEQ ID NO: 2980081 - RNA, 19 nt, Artificial Sequence
  Description of Artificial Sequence: Synthetic oligonucleotide
agauguguauacacaucag

SEQ ID NO: 2980082 - RNA, 19 nt, Artificial Sequence
  Description of Artificial Sequence: Synthetic oligonucleotide
aucagauguuuacuugaaa

SEQ ID NO: 2980083 - RNA, 19 nt, Artificial Sequence
  Description of Artificial Sequence: Synthetic oligonucleotide
uggcccaucuuauuuucaa

SEQ ID NO: 2980084 - RNA, 19 nt, Artificial Sequence
  Description of Artificial Sequence: Synthetic oligonucleotide
caacuuaaggaaacauuaa

SEQ ID NO: 2980085 - RNA, 19 nt, Artificial Sequence
  Description of Artificial Sequence: Synthetic oligonucleotide
guagguacaaggacgcaga

SEQ ID NO: 2980086 - RNA, 19 nt, Artificial Sequence
  Description of Artificial Sequence: Synthetic oligonucleotide
ugauacuguguuuccucau

SEQ ID NO: 2980087 - RNA, 19 nt, Artificial Sequence
  Description of Artificial Sequence: Synthetic oligonucleotide
cacaaccuuuuccaugcug

SEQ ID NO: 2980088 - RNA, 19 nt, Artificial Sequence
  Description of Artificial Sequence: Synthetic oligonucleotide
auggaguuaggguggccca

SEQ ID NO: 2980089 - RNA, 19 nt, Artificial Sequence
  Description of Artificial Sequence: Synthetic oligonucleotide
cugaagauucacaggaacu

SEQ ID NO: 2980090 - RNA, 19 nt, Artificial Sequence
  Description of Artificial Sequence: Synthetic oligonucleotide
cagugauccaauaaacgcu

SEQ ID NO: 2980091 - RNA, 19 nt, Artificial Sequence
  Description of Artificial Sequence: Synthetic oligonucleotide
accuaauacaguagacuga

SEQ ID NO: 2980092 - RNA, 19 nt, Artificial Sequence
  Description of Artificial Sequence: Synthetic oligonucleotide
cuuuuccaugcugcuaaag

SEQ ID NO: 2980093 - RNA, 19 nt, Artificial Sequence
  Description of Artificial Sequence: Synthetic oligonucleotide
  modified_base (2)..(2): a, c, u, g, unknown or other
unuuccccuuaaagauggc

SEQ ID NO: 2980094 - RNA, 19 nt, Artificial Sequence
  Description of Artificial Sequence: Synthetic oligonucleotide
ggaacuauuugaaauagau

SEQ ID NO: 2980095 - RNA, 19 nt, Artificial Sequence
  Description of Artificial Sequence: Synthetic oligonucleotide
uuacugaaauggugacuuc

SEQ ID NO: 2980096 - RNA, 19 nt, Artificial Sequence
  Description of Artificial Sequence: Synthetic oligonucleotide
  modified_base (12)..(12): a, c, u, g, unknown or other
cuucauguugunuuccccu

SEQ ID NO: 2980097 - RNA, 19 nt, Artificial Sequence
  Description of Artificial Sequence: Synthetic oligonucleotide
caagaaaacacaaccuuuu

SEQ ID NO: 2980098 - RNA, 19 nt, Artificial Sequence
  Description of Artificial Sequence: Synthetic oligonucleotide
ugucuagagaauggaguua

SEQ ID NO: 2980099 - RNA, 19 nt, Artificial Sequence
  Description of Artificial Sequence: Synthetic oligonucleotide
cuacagcaguuugauacug

SEQ ID NO: 2980100 - RNA, 19 nt, Artificial Sequence
  Description of Artificial Sequence: Synthetic oligonucleotide
aggguggcccaucuuauuu

SEQ ID NO: 2980101 - RNA, 19 nt, Artificial Sequence
  Description of Artificial Sequence: Synthetic oligonucleotide
cucuucuacagcaguuuga

SEQ ID NO: 2980102 - RNA, 19 nt, Artificial Sequence
  Description of Artificial Sequence: Synthetic oligonucleotide
caucuagcugaagauucac

SEQ ID NO: 2980103 - RNA, 19 nt, Artificial Sequence
  Description of Artificial Sequence: Synthetic oligonucleotide
guuuacuugaaaagacucu

SEQ ID NO: 2980104 - RNA, 19 nt, Artificial Sequence
  Description of Artificial Sequence: Synthetic oligonucleotide
aaacgcugucuggugaaau

SEQ ID NO: 2980105 - RNA, 19 nt, Artificial Sequence
  Description of Artificial Sequence: Synthetic oligonucleotide
aagauggcacuuguaggua

SEQ ID NO: 2980106 - RNA, 19 nt, Artificial Sequence
  Description of Artificial Sequence: Synthetic oligonucleotide
cuuaaagauggcacuugua

SEQ ID NO: 2980107 - RNA, 19 nt, Artificial Sequence
  Description of Artificial Sequence: Synthetic oligonucleotide
acugaaauggugacuucau

SEQ ID NO: 2980108 - RNA, 19 nt, Artificial Sequence
  Description of Artificial Sequence: Synthetic oligonucleotide
gaaucccuuuucaccacac

SEQ ID NO: 2980109 - RNA, 19 nt, Artificial Sequence
  Description of Artificial Sequence: Synthetic oligonucleotide
  modified_base (9)..(9): a, c, u, g, unknown or other
cauguugunuuccccuuaa

SEQ ID NO: 2980110 - RNA, 19 nt, Artificial Sequence
  Description of Artificial Sequence: Synthetic oligonucleotide
uacuguguuuccucaucua

SEQ ID NO: 2980111 - RNA, 19 nt, Artificial Sequence
  Description of Artificial Sequence: Synthetic oligonucleotide
cacaagaaaacacaaccuu

SEQ ID NO: 2980112 - RNA, 19 nt, Artificial Sequence
  Description of Artificial Sequence: Synthetic oligonucleotide
caucagauguuuacuugaa

SEQ ID NO: 2980113 - RNA, 19 nt, Artificial Sequence
  Description of Artificial Sequence: Synthetic oligonucleotide
cacagcaaauuacugaaau

SEQ ID NO: 2980114 - RNA, 19 nt, Artificial Sequence
  Description of Artificial Sequence: Synthetic oligonucleotide
gauggcacuuguagguaca

SEQ ID NO: 2980115 - RNA, 19 nt, Artificial Sequence
  Description of Artificial Sequence: Synthetic oligonucleotide
gacaacaggaaucccuuuu

SEQ ID NO: 2980116 - RNA, 19 nt, Artificial Sequence
  Description of Artificial Sequence: Synthetic oligonucleotide
aggaaacauuaagaauaug

SEQ ID NO: 2980117 - RNA, 19 nt, Artificial Sequence
  Description of Artificial Sequence: Synthetic oligonucleotide
guguuuccucaucuagcug

SEQ ID NO: 2980118 - RNA, 19 nt, Artificial Sequence
  Description of Artificial Sequence: Synthetic oligonucleotide
aaggacgcagagaugugua

SEQ ID NO: 2980119 - RNA, 19 nt, Artificial Sequence
  Description of Artificial Sequence: Synthetic oligonucleotide
aucuagcugaagauucaca

SEQ ID NO: 2980120 - RNA, 19 nt, Artificial Sequence
  Description of Artificial Sequence: Synthetic oligonucleotide
aggaacuauuugaaauaga

SEQ ID NO: 2980121 - RNA, 19 nt, Artificial Sequence
  Description of Artificial Sequence: Synthetic oligonucleotide
cagagauguguauacacau

SEQ ID NO: 2980122 - RNA, 19 nt, Artificial Sequence
  Description of Artificial Sequence: Synthetic oligonucleotide
uggcacuuguagguacaag

SEQ ID NO: 2980123 - RNA, 19 nt, Artificial Sequence
  Description of Artificial Sequence: Synthetic oligonucleotide
aaccuuuuccaugcugcua

SEQ ID NO: 2980124 - RNA, 19 nt, Artificial Sequence
  Description of Artificial Sequence: Synthetic oligonucleotide
cuauuugaaauagaugguu

SEQ ID NO: 2980125 - RNA, 19 nt, Artificial Sequence
  Description of Artificial Sequence: Synthetic oligonucleotide
aaguaacugucuagagaau

SEQ ID NO: 2980126 - RNA, 19 nt, Artificial Sequence
  Description of Artificial Sequence: Synthetic oligonucleotide
ccacacaagaaaacacaac

SEQ ID NO: 2980127 - RNA, 19 nt, Artificial Sequence
  Description of Artificial Sequence: Synthetic oligonucleotide
gaagauucacaggaacuau

SEQ ID NO: 2980128 - RNA, 19 nt, Artificial Sequence
  Description of Artificial Sequence: Synthetic oligonucleotide
guagacugaauuauauuuu

SEQ ID NO: 2980129 - RNA, 19 nt, Artificial Sequence
  Description of Artificial Sequence: Synthetic oligonucleotide
agguacaaggacgcagaga

SEQ ID NO: 2980130 - RNA, 19 nt, Artificial Sequence
  Description of Artificial Sequence: Synthetic oligonucleotide
aggacgcagagauguguau

SEQ ID NO: 2980131 - RNA, 19 nt, Artificial Sequence
  Description of Artificial Sequence: Synthetic oligonucleotide
  modified_base (8)..(8): a, c, u, g, unknown or other
auguugunuuccccuuaaa

SEQ ID NO: 2980132 - RNA, 19 nt, Artificial Sequence
  Description of Artificial Sequence: Synthetic oligonucleotide
cugucuagagaauggaguu

SEQ ID NO: 2980133 - RNA, 19 nt, Artificial Sequence
  Description of Artificial Sequence: Synthetic oligonucleotide
uuguagguacaaggacgca

SEQ ID NO: 2980134 - RNA, 19 nt, Artificial Sequence
  Description of Artificial Sequence: Synthetic oligonucleotide
uaaacgcugucuggugaaa

SEQ ID NO: 2980135 - RNA, 19 nt, Artificial Sequence
  Description of Artificial Sequence: Synthetic oligonucleotide
gaauggaguuaggguggcc

SEQ ID NO: 2980136 - RNA, 19 nt, Artificial Sequence
  Description of Artificial Sequence: Synthetic oligonucleotide
guauacacaucagauguuu

SEQ ID NO: 2980137 - RNA, 19 nt, Artificial Sequence
  Description of Artificial Sequence: Synthetic oligonucleotide
gcagagauguguauacaca

SEQ ID NO: 2980138 - RNA, 19 nt, Artificial Sequence
  Description of Artificial Sequence: Synthetic oligonucleotide
ccuaauacaguagacugaa

SEQ ID NO: 2980139 - RNA, 19 nt, Artificial Sequence
  Description of Artificial Sequence: Synthetic oligonucleotide
cuauuacagugauccaaua

SEQ ID NO: 2980140 - RNA, 19 nt, Artificial Sequence
  Description of Artificial Sequence: Synthetic oligonucleotide
cugcuaaaguaacugucua

SEQ ID NO: 2980141 - RNA, 19 nt, Artificial Sequence
  Description of Artificial Sequence: Synthetic oligonucleotide
cgcagagauguguauacac

SEQ ID NO: 2980142 - RNA, 19 nt, Artificial Sequence
  Description of Artificial Sequence: Synthetic oligonucleotide
agacaacaggaaucccuuu

SEQ ID NO: 2980143 - RNA, 19 nt, Artificial Sequence
  Description of Artificial Sequence: Synthetic oligonucleotide
  modified_base (19)..(19): a, c, u, g, unknown or other
auggugacuucauguugun

SEQ ID NO: 2980144 - RNA, 19 nt, Artificial Sequence
  Description of Artificial Sequence: Synthetic oligonucleotide
gguggcccaucuuauuuuc

SEQ ID NO: 2980145 - RNA, 19 nt, Artificial Sequence
  Description of Artificial Sequence: Synthetic oligonucleotide
cccuuuucaccacacaaga

SEQ ID NO: 2980146 - RNA, 19 nt, Artificial Sequence
  Description of Artificial Sequence: Synthetic oligonucleotide
gcacuuguagguacaagga

SEQ ID NO: 2980147 - RNA, 19 nt, Artificial Sequence
  Description of Artificial Sequence: Synthetic oligonucleotide
  modified_base (18)..(18): a, c, u, g, unknown or other
uggugacuucauguugunu

SEQ ID NO: 2980148 - RNA, 19 nt, Artificial Sequence
  Description of Artificial Sequence: Synthetic oligonucleotide
acacaaccuuuuccaugcu

SEQ ID NO: 2980149 - RNA, 19 nt, Artificial Sequence
  Description of Artificial Sequence: Synthetic oligonucleotide
acaaggacgcagagaugug

SEQ ID NO: 2980150 - RNA, 19 nt, Artificial Sequence
  Description of Artificial Sequence: Synthetic oligonucleotide
ccaucuuauuuucaauuaa

SEQ ID NO: 2980151 - RNA, 19 nt, Artificial Sequence
  Description of Artificial Sequence: Synthetic oligonucleotide
ggaaucccuuuucaccaca

SEQ ID NO: 2980152 - RNA, 19 nt, Artificial Sequence
  Description of Artificial Sequence: Synthetic oligonucleotide
guacaaggacgcagagaug

SEQ ID NO: 2980153 - RNA, 19 nt, Artificial Sequence
  Description of Artificial Sequence: Synthetic oligonucleotide
uggaguuaggguggcccau

SEQ ID NO: 2980154 - RNA, 19 nt, Artificial Sequence
  Description of Artificial Sequence: Synthetic oligonucleotide
aguuaggguggcccaucuu

SEQ ID NO: 2980155 - RNA, 19 nt, Artificial Sequence
  Description of Artificial Sequence: Synthetic oligonucleotide
uaggguggcccaucuuauu

SEQ ID NO: 2980156 - RNA, 19 nt, Artificial Sequence
  Description of Artificial Sequence: Synthetic oligonucleotide
acgcagagauguguauaca

SEQ ID NO: 2980157 - RNA, 19 nt, Artificial Sequence
  Description of Artificial Sequence: Synthetic oligonucleotide
gaguuaggguggcccaucu

SEQ ID NO: 2980158 - RNA, 19 nt, Artificial Sequence
  Description of Artificial Sequence: Synthetic oligonucleotide
agcugaagauucacaggaa

SEQ ID NO: 2980159 - RNA, 19 nt, Artificial Sequence
  Description of Artificial Sequence: Synthetic oligonucleotide
gcugcuaaaguaacugucu

SEQ ID NO: 2980160 - RNA, 19 nt, Artificial Sequence
  Description of Artificial Sequence: Synthetic oligonucleotide
cccaucuuauuuucaauua

SEQ ID NO: 2980161 - RNA, 19 nt, Artificial Sequence
  Description of Artificial Sequence: Synthetic oligonucleotide
gacucuucuacagcaguuu

SEQ ID NO: 2980162 - RNA, 19 nt, Artificial Sequence
  Description of Artificial Sequence: Synthetic oligonucleotide
caguagacugaauuauauu

SEQ ID NO: 2980163 - RNA, 19 nt, Artificial Sequence
  Description of Artificial Sequence: Synthetic oligonucleotide
cuucuacagcaguuugaua

SEQ ID NO: 2980164 - RNA, 19 nt, Artificial Sequence
  Description of Artificial Sequence: Synthetic oligonucleotide
cagcaguuugauacugugu

SEQ ID NO: 2980165 - RNA, 19 nt, Artificial Sequence
  Description of Artificial Sequence: Synthetic oligonucleotide
gguuacuauuacagugauc

SEQ ID NO: 2980166 - RNA, 19 nt, Artificial Sequence
  Description of Artificial Sequence: Synthetic oligonucleotide
auggcacuuguagguacaa

SEQ ID NO: 2980167 - RNA, 19 nt, Artificial Sequence
  Description of Artificial Sequence: Synthetic oligonucleotide
cccuuaaagauggcacuug

SEQ ID NO: 2980168 - RNA, 19 nt, Artificial Sequence
  Description of Artificial Sequence: Synthetic oligonucleotide
caaggacgcagagaugugu

SEQ ID NO: 2980169 - RNA, 19 nt, Artificial Sequence
  Description of Artificial Sequence: Synthetic oligonucleotide
ccaauaaacgcugucuggu

SEQ ID NO: 2980170 - RNA, 19 nt, Artificial Sequence
  Description of Artificial Sequence: Synthetic oligonucleotide
gcccaucuuauuuucaauu

SEQ ID NO: 2980171 - RNA, 19 nt, Artificial Sequence
  Description of Artificial Sequence: Synthetic oligonucleotide
cgcugucuggugaaauuug

SEQ ID NO: 2980172 - RNA, 19 nt, Artificial Sequence
  Description of Artificial Sequence: Synthetic oligonucleotide
cuaauacaguagacugaau

SEQ ID NO: 2980173 - RNA, 19 nt, Artificial Sequence
  Description of Artificial Sequence: Synthetic oligonucleotide
ggaguuaggguggcccauc

SEQ ID NO: 2980174 - RNA, 19 nt, Artificial Sequence
  Description of Artificial Sequence: Synthetic oligonucleotide
ggacgcagagauguguaua

SEQ ID NO: 2980175 - RNA, 19 nt, Artificial Sequence
  Description of Artificial Sequence: Synthetic oligonucleotide
gugauccaauaaacgcugu

SEQ ID NO: 2980176 - RNA, 19 nt, Artificial Sequence
  Description of Artificial Sequence: Synthetic oligonucleotide
gcacagcaaauuacugaaa

SEQ ID NO: 2980177 - RNA, 19 nt, Artificial Sequence
  Description of Artificial Sequence: Synthetic oligonucleotide
ggcccaucuuauuuucaau

SEQ ID NO: 2980178 - RNA, 19 nt, Artificial Sequence
  Description of Artificial Sequence: Synthetic oligonucleotide
ccaugcugcuaaaguaacu

SEQ ID NO: 2980179 - RNA, 19 nt, Artificial Sequence
  Description of Artificial Sequence: Synthetic oligonucleotide
ccuuuuccaugcugcuaaa

SEQ ID NO: 2980180 - RNA, 19 nt, Artificial Sequence
  Description of Artificial Sequence: Synthetic oligonucleotide
ccucaucuagcugaagauu

SEQ ID NO: 2980181 - RNA, 19 nt, Artificial Sequence
  Description of Artificial Sequence: Synthetic oligonucleotide
ccccuuaaagauggcacuu

SEQ ID NO: 2980182 - RNA, 19 nt, Artificial Sequence
  Description of Artificial Sequence: Synthetic oligonucleotide
  modified_base (1)..(1): a, c, u, g, unknown or other
nuuccccuuaaagauggca

SEQ ID NO: 2980183 - RNA, 19 nt, Artificial Sequence
  Description of Artificial Sequence: Synthetic oligonucleotide
agccugaugagcuagagcg

SEQ ID NO: 2980184 - RNA, 19 nt, Artificial Sequence
  Description of Artificial Sequence: Synthetic oligonucleotide
ucugaucuaauuuucuccg

SEQ ID NO: 2980185 - RNA, 19 nt, Artificial Sequence
  Description of Artificial Sequence: Synthetic oligonucleotide
uccauucucagucugaucu

SEQ ID NO: 2980186 - RNA, 19 nt, Artificial Sequence
  Description of Artificial Sequence: Synthetic oligonucleotide
uggagaucgaucuucaaca

SEQ ID NO: 2980187 - RNA, 19 nt, Artificial Sequence
  Description of Artificial Sequence: Synthetic oligonucleotide
uccaaguuagcauuggucu

SEQ ID NO: 2980188 - RNA, 19 nt, Artificial Sequence
  Description of Artificial Sequence: Synthetic oligonucleotide
cauuaagugagccugauga

SEQ ID NO: 2980189 - RNA, 19 nt, Artificial Sequence
  Description of Artificial Sequence: Synthetic oligonucleotide
auuggucugugucauuugc

SEQ ID NO: 2980190 - RNA, 19 nt, Artificial Sequence
  Description of Artificial Sequence: Synthetic oligonucleotide
ugggaaguuguccacagcc

SEQ ID NO: 2980191 - RNA, 19 nt, Artificial Sequence
  Description of Artificial Sequence: Synthetic oligonucleotide
uaacucgucuuucaguucc

SEQ ID NO: 2980192 - RNA, 19 nt, Artificial Sequence
  Description of Artificial Sequence: Synthetic oligonucleotide
guaguuuccauucucaguc

SEQ ID NO: 2980193 - RNA, 19 nt, Artificial Sequence
  Description of Artificial Sequence: Synthetic oligonucleotide
uuugaccucugccugagug

SEQ ID NO: 2980194 - RNA, 19 nt, Artificial Sequence
  Description of Artificial Sequence: Synthetic oligonucleotide
uguacuuccucucuccgca

SEQ ID NO: 2980195 - RNA, 19 nt, Artificial Sequence
  Description of Artificial Sequence: Synthetic oligonucleotide
ugaucuaauuuucuccgug

SEQ ID NO: 2980196 - RNA, 19 nt, Artificial Sequence
  Description of Artificial Sequence: Synthetic oligonucleotide
agguccuugacguuggcgg

SEQ ID NO: 2980197 - RNA, 19 nt, Artificial Sequence
  Description of Artificial Sequence: Synthetic oligonucleotide
ucuucaacacugcugcgag

SEQ ID NO: 2980198 - RNA, 19 nt, Artificial Sequence
  Description of Artificial Sequence: Synthetic oligonucleotide
ugguauucucuggagaucg

SEQ ID NO: 2980199 - RNA, 19 nt, Artificial Sequence
  Description of Artificial Sequence: Synthetic oligonucleotide
uaagugagccugaugagcu

SEQ ID NO: 2980200 - RNA, 19 nt, Artificial Sequence
  Description of Artificial Sequence: Synthetic oligonucleotide
uuagcauuggucuguguca

SEQ ID NO: 2980201 - RNA, 19 nt, Artificial Sequence
  Description of Artificial Sequence: Synthetic oligonucleotide
gaucuaauuuucuccgugc

SEQ ID NO: 2980202 - RNA, 19 nt, Artificial Sequence
  Description of Artificial Sequence: Synthetic oligonucleotide
agucugaucuaauuuucuc

SEQ ID NO: 2980203 - RNA, 19 nt, Artificial Sequence
  Description of Artificial Sequence: Synthetic oligonucleotide
cuugcugagguccuugacg

SEQ ID NO: 2980204 - RNA, 19 nt, Artificial Sequence
  Description of Artificial Sequence: Synthetic oligonucleotide
aucagcauggccuugucca

SEQ ID NO: 2980205 - RNA, 19 nt, Artificial Sequence
  Description of Artificial Sequence: Synthetic oligonucleotide
uccacagccacugaggagc

SEQ ID NO: 2980206 - RNA, 19 nt, Artificial Sequence
  Description of Artificial Sequence: Synthetic oligonucleotide
auucucuggagaucgaucu

SEQ ID NO: 2980207 - RNA, 19 nt, Artificial Sequence
  Description of Artificial Sequence: Synthetic oligonucleotide
ucgaucuucaacacugcug

SEQ ID NO: 2980208 - RNA, 19 nt, Artificial Sequence
  Description of Artificial Sequence: Synthetic oligonucleotide
gucugaucuaauuuucucc

SEQ ID NO: 2980209 - RNA, 19 nt, Artificial Sequence
  Description of Artificial Sequence: Synthetic oligonucleotide
aguggcagagagcucggcc

SEQ ID NO: 2980210 - RNA, 19 nt, Artificial Sequence
  Description of Artificial Sequence: Synthetic oligonucleotide
uuaagugagccugaugagc

SEQ ID NO: 2980211 - RNA, 19 nt, Artificial Sequence
  Description of Artificial Sequence: Synthetic oligonucleotide
aagcuugcgccucuguguc

SEQ ID NO: 2980212 - RNA, 19 nt, Artificial Sequence
  Description of Artificial Sequence: Synthetic oligonucleotide
auuaagugagccugaugag

SEQ ID NO: 2980213 - RNA, 19 nt, Artificial Sequence
  Description of Artificial Sequence: Synthetic oligonucleotide
agaucgaucuucaacacug

SEQ ID NO: 2980214 - RNA, 19 nt, Artificial Sequence
  Description of Artificial Sequence: Synthetic oligonucleotide
ucuguacuuccucucuccg

SEQ ID NO: 2980215 - RNA, 19 nt, Artificial Sequence
  Description of Artificial Sequence: Synthetic oligonucleotide
ucugucguaguuuccauuc

SEQ ID NO: 2980216 - RNA, 19 nt, Artificial Sequence
  Description of Artificial Sequence: Synthetic oligonucleotide
uccacuucugggaaguugu

SEQ ID NO: 2980217 - RNA, 19 nt, Artificial Sequence
  Description of Artificial Sequence: Synthetic oligonucleotide
acuaacucgucuuucaguu

SEQ ID NO: 2980218 - RNA, 19 nt, Artificial Sequence
  Description of Artificial Sequence: Synthetic oligonucleotide
ugaagcugcuugcugaggu

SEQ ID NO: 2980219 - RNA, 19 nt, Artificial Sequence
  Description of Artificial Sequence: Synthetic oligonucleotide
ucucggugcaaucugcucu

SEQ ID NO: 2980220 - RNA, 19 nt, Artificial Sequence
  Description of Artificial Sequence: Synthetic oligonucleotide
acuucugggaaguugucca

SEQ ID NO: 2980221 - RNA, 19 nt, Artificial Sequence
  Description of Artificial Sequence: Synthetic oligonucleotide
guuagcauuggucuguguc

SEQ ID NO: 2980222 - RNA, 19 nt, Artificial Sequence
  Description of Artificial Sequence: Synthetic oligonucleotide
uucaacacugcugcgagca

SEQ ID NO: 2980223 - RNA, 19 nt, Artificial Sequence
  Description of Artificial Sequence: Synthetic oligonucleotide
aaucugcucuccaaguuag

SEQ ID NO: 2980224 - RNA, 19 nt, Artificial Sequence
  Description of Artificial Sequence: Synthetic oligonucleotide
uugaccucugccugagugg

SEQ ID NO: 2980225 - RNA, 19 nt, Artificial Sequence
  Description of Artificial Sequence: Synthetic oligonucleotide
uuggcggcaagcuugcgcc

SEQ ID NO: 2980226 - RNA, 19 nt, Artificial Sequence
  Description of Artificial Sequence: Synthetic oligonucleotide
ucacuaacucgucuuucag

SEQ ID NO: 2980227 - RNA, 19 nt, Artificial Sequence
  Description of Artificial Sequence: Synthetic oligonucleotide
cugaguggcagagagcucg

SEQ ID NO: 2980228 - RNA, 19 nt, Artificial Sequence
  Description of Artificial Sequence: Synthetic oligonucleotide
ucgucuuucaguuccucca

SEQ ID NO: 2980229 - RNA, 19 nt, Artificial Sequence
  Description of Artificial Sequence: Synthetic oligonucleotide
ucagucugaucuaauuuuc

SEQ ID NO: 2980230 - RNA, 19 nt, Artificial Sequence
  Description of Artificial Sequence: Synthetic oligonucleotide
uuuucuccgugcuugcuga

SEQ ID NO: 2980231 - RNA, 19 nt, Artificial Sequence
  Description of Artificial Sequence: Synthetic oligonucleotide
uggucugugucauuugcug

SEQ ID NO: 2980232 - RNA, 19 nt, Artificial Sequence
  Description of Artificial Sequence: Synthetic oligonucleotide
ucucagucugaucuaauuu

SEQ ID NO: 2980233 - RNA, 19 nt, Artificial Sequence
  Description of Artificial Sequence: Synthetic oligonucleotide
ucugggaaguuguccacag

SEQ ID NO: 2980234 - RNA, 19 nt, Artificial Sequence
  Description of Artificial Sequence: Synthetic oligonucleotide
auuuucuccgugcuugcug

SEQ ID NO: 2980235 - RNA, 19 nt, Artificial Sequence
  Description of Artificial Sequence: Synthetic oligonucleotide
uugcugagguccuugacgu

SEQ ID NO: 2980236 - RNA, 19 nt, Artificial Sequence
  Description of Artificial Sequence: Synthetic oligonucleotide
ucuccgugcuugcugaagc

SEQ ID NO: 2980237 - RNA, 19 nt, Artificial Sequence
  Description of Artificial Sequence: Synthetic oligonucleotide
agggcuuugaccucugccu

SEQ ID NO: 2980238 - RNA, 19 nt, Artificial Sequence
  Description of Artificial Sequence: Synthetic oligonucleotide
ucuuucaguuccuccaccu

SEQ ID NO: 2980239 - RNA, 19 nt, Artificial Sequence
  Description of Artificial Sequence: Synthetic oligonucleotide
ugcugaagcugcuugcuga

SEQ ID NO: 2980240 - RNA, 19 nt, Artificial Sequence
  Description of Artificial Sequence: Synthetic oligonucleotide
acugcugcgagcauuaagu

SEQ ID NO: 2980241 - RNA, 19 nt, Artificial Sequence
  Description of Artificial Sequence: Synthetic oligonucleotide
ucguaguuuccauucucag

SEQ ID NO: 2980242 - RNA, 19 nt, Artificial Sequence
  Description of Artificial Sequence: Synthetic oligonucleotide
uauucucuggagaucgauc

SEQ ID NO: 2980243 - RNA, 19 nt, Artificial Sequence
  Description of Artificial Sequence: Synthetic oligonucleotide
cuggagaucgaucuucaac

SEQ ID NO: 2980244 - RNA, 19 nt, Artificial Sequence
  Description of Artificial Sequence: Synthetic oligonucleotide
uguccacagccacugagga

SEQ ID NO: 2980245 - RNA, 19 nt, Artificial Sequence
  Description of Artificial Sequence: Synthetic oligonucleotide
aucuaauuuucuccgugcu

SEQ ID NO: 2980246 - RNA, 19 nt, Artificial Sequence
  Description of Artificial Sequence: Synthetic oligonucleotide
guuguccacagccacugag

SEQ ID NO: 2980247 - RNA, 19 nt, Artificial Sequence
  Description of Artificial Sequence: Synthetic oligonucleotide
ugugucacuaacucgucuu

SEQ ID NO: 2980248 - RNA, 19 nt, Artificial Sequence
  Description of Artificial Sequence: Synthetic oligonucleotide
gucugugucauuugcuggc

SEQ ID NO: 2980249 - RNA, 19 nt, Artificial Sequence
  Description of Artificial Sequence: Synthetic oligonucleotide
ugugucauuugcuggcacu

SEQ ID NO: 2980250 - RNA, 19 nt, Artificial Sequence
  Description of Artificial Sequence: Synthetic oligonucleotide
gacguuggcggcaagcuug

SEQ ID NO: 2980251 - RNA, 19 nt, Artificial Sequence
  Description of Artificial Sequence: Synthetic oligonucleotide
ucuaauuuucuccgugcuu

SEQ ID NO: 2980252 - RNA, 19 nt, Artificial Sequence
  Description of Artificial Sequence: Synthetic oligonucleotide
cuccaaguuagcauugguc

SEQ ID NO: 2980253 - RNA, 19 nt, Artificial Sequence
  Description of Artificial Sequence: Synthetic oligonucleotide
ucauuugcuggcacuggcu

SEQ ID NO: 2980254 - RNA, 19 nt, Artificial Sequence
  Description of Artificial Sequence: Synthetic oligonucleotide
cugucaaucagcauggccu

SEQ ID NO: 2980255 - RNA, 19 nt, Artificial Sequence
  Description of Artificial Sequence: Synthetic oligonucleotide
ucugcucuccaaguuagca

SEQ ID NO: 2980256 - RNA, 19 nt, Artificial Sequence
  Description of Artificial Sequence: Synthetic oligonucleotide
ugcaaucugcucuccaagu

SEQ ID NO: 2980257 - RNA, 19 nt, Artificial Sequence
  Description of Artificial Sequence: Synthetic oligonucleotide
cucuguacuuccucucucc

SEQ ID NO: 2980258 - RNA, 19 nt, Artificial Sequence
  Description of Artificial Sequence: Synthetic oligonucleotide
ugcugcgagcauuaaguga

SEQ ID NO: 2980259 - RNA, 19 nt, Artificial Sequence
  Description of Artificial Sequence: Synthetic oligonucleotide
aguuuccauucucagucug

SEQ ID NO: 2980260 - RNA, 19 nt, Artificial Sequence
  Description of Artificial Sequence: Synthetic oligonucleotide
gcugcgagcauuaagugag

SEQ ID NO: 2980261 - RNA, 19 nt, Artificial Sequence
  Description of Artificial Sequence: Synthetic oligonucleotide
auccugucaaucagcaugg

SEQ ID NO: 2980262 - RNA, 19 nt, Artificial Sequence
  Description of Artificial Sequence: Synthetic oligonucleotide
uucucugucguaguuucca

SEQ ID NO: 2980263 - RNA, 19 nt, Artificial Sequence
  Description of Artificial Sequence: Synthetic oligonucleotide
ugucguaguuuccauucuc

SEQ ID NO: 2980264 - RNA, 19 nt, Artificial Sequence
  Description of Artificial Sequence: Synthetic oligonucleotide
gaucuucaacacugcugcg

SEQ ID NO: 2980265 - RNA, 19 nt, Artificial Sequence
  Description of Artificial Sequence: Synthetic oligonucleotide
ugcucuccaaguuagcauu

SEQ ID NO: 2980266 - RNA, 19 nt, Artificial Sequence
  Description of Artificial Sequence: Synthetic oligonucleotide
uuggucugugucauuugcu

SEQ ID NO: 2980267 - RNA, 19 nt, Artificial Sequence
  Description of Artificial Sequence: Synthetic oligonucleotide
ucuccaaguuagcauuggu

SEQ ID NO: 2980268 - RNA, 19 nt, Artificial Sequence
  Description of Artificial Sequence: Synthetic oligonucleotide
cucgucuuucaguuccucc

SEQ ID NO: 2980269 - RNA, 19 nt, Artificial Sequence
  Description of Artificial Sequence: Synthetic oligonucleotide
gaugagcuagagcggcucc

SEQ ID NO: 2980270 - RNA, 19 nt, Artificial Sequence
  Description of Artificial Sequence: Synthetic oligonucleotide
ugaguggcagagagcucgg

SEQ ID NO: 2980271 - RNA, 19 nt, Artificial Sequence
  Description of Artificial Sequence: Synthetic oligonucleotide
uucucagucugaucuaauu

SEQ ID NO: 2980272 - RNA, 19 nt, Artificial Sequence
  Description of Artificial Sequence: Synthetic oligonucleotide
uccgcagcucuuccucucg

SEQ ID NO: 2980273 - RNA, 19 nt, Artificial Sequence
  Description of Artificial Sequence: Synthetic oligonucleotide
uuccucucggugcaaucug

SEQ ID NO: 2980274 - RNA, 19 nt, Artificial Sequence
  Description of Artificial Sequence: Synthetic oligonucleotide
ggucugugucauuugcugg

SEQ ID NO: 2980275 - RNA, 19 nt, Artificial Sequence
  Description of Artificial Sequence: Synthetic oligonucleotide
agugagccugaugagcuag

SEQ ID NO: 2980276 - RNA, 19 nt, Artificial Sequence
  Description of Artificial Sequence: Synthetic oligonucleotide
augagcuagagcggcuccc

SEQ ID NO: 2980277 - RNA, 19 nt, Artificial Sequence
  Description of Artificial Sequence: Synthetic oligonucleotide
gcugcugacuucucugucg

SEQ ID NO: 2980278 - RNA, 19 nt, Artificial Sequence
  Description of Artificial Sequence: Synthetic oligonucleotide
ucucuggagaucgaucuuc

SEQ ID NO: 2980279 - RNA, 19 nt, Artificial Sequence
  Description of Artificial Sequence: Synthetic oligonucleotide
gucacuaacucgucuuuca

SEQ ID NO: 2980280 - RNA, 19 nt, Artificial Sequence
  Description of Artificial Sequence: Synthetic oligonucleotide
aucgaucuucaacacugcu

SEQ ID NO: 2980281 - RNA, 19 nt, Artificial Sequence
  Description of Artificial Sequence: Synthetic oligonucleotide
ugaccucugccugaguggc

SEQ ID NO: 2980282 - RNA, 19 nt, Artificial Sequence
  Description of Artificial Sequence: Synthetic oligonucleotide
guuggcggcaagcuugcgc

SEQ ID NO: 2980283 - RNA, 19 nt, Artificial Sequence
  Description of Artificial Sequence: Synthetic oligonucleotide
cuguacuuccucucuccgc

SEQ ID NO: 2980284 - RNA, 19 nt, Artificial Sequence
  Description of Artificial Sequence: Synthetic oligonucleotide
uccucucggugcaaucugc

SEQ ID NO: 2980285 - RNA, 19 nt, Artificial Sequence
  Description of Artificial Sequence: Synthetic oligonucleotide
uugcugaagcugcuugcug

SEQ ID NO: 2980286 - RNA, 19 nt, Artificial Sequence
  Description of Artificial Sequence: Synthetic oligonucleotide
aauuuucuccgugcuugcu

SEQ ID NO: 2980287 - RNA, 19 nt, Artificial Sequence
  Description of Artificial Sequence: Synthetic oligonucleotide
cagcucuuccucucggugc

SEQ ID NO: 2980288 - RNA, 19 nt, Artificial Sequence
  Description of Artificial Sequence: Synthetic oligonucleotide
uuuccauucucagucugau

SEQ ID NO: 2980289 - RNA, 19 nt, Artificial Sequence
  Description of Artificial Sequence: Synthetic oligonucleotide
gagcugguauucucuggag

SEQ ID NO: 2980290 - RNA, 19 nt, Artificial Sequence
  Description of Artificial Sequence: Synthetic oligonucleotide
uacuuccucucuccgcagc

SEQ ID NO: 2980291 - RNA, 19 nt, Artificial Sequence
  Description of Artificial Sequence: Synthetic oligonucleotide
cucugugucacuaacucgu

SEQ ID NO: 2980292 - RNA, 19 nt, Artificial Sequence
  Description of Artificial Sequence: Synthetic oligonucleotide
uugacguuggcggcaagcu

SEQ ID NO: 2980293 - RNA, 19 nt, Artificial Sequence
  Description of Artificial Sequence: Synthetic oligonucleotide
aucuucaacacugcugcga

SEQ ID NO: 2980294 - RNA, 19 nt, Artificial Sequence
  Description of Artificial Sequence: Synthetic oligonucleotide
ugucaaucagcauggccuu

SEQ ID NO: 2980295 - RNA, 19 nt, Artificial Sequence
  Description of Artificial Sequence: Synthetic oligonucleotide
agagcggcuccccaugcug

SEQ ID NO: 2980296 - RNA, 19 nt, Artificial Sequence
  Description of Artificial Sequence: Synthetic oligonucleotide
gagccugaugagcuagagc

SEQ ID NO: 2980297 - RNA, 19 nt, Artificial Sequence
  Description of Artificial Sequence: Synthetic oligonucleotide
cuuguccacuucugggaag

SEQ ID NO: 2980298 - RNA, 19 nt, Artificial Sequence
  Description of Artificial Sequence: Synthetic oligonucleotide
cagggcuuugaccucugcc

SEQ ID NO: 2980299 - RNA, 19 nt, Artificial Sequence
  Description of Artificial Sequence: Synthetic oligonucleotide
cuugacguuggcggcaagc

SEQ ID NO: 2980300 - RNA, 19 nt, Artificial Sequence
  Description of Artificial Sequence: Synthetic oligonucleotide
ugagccugaugagcuagag

SEQ ID NO: 2980301 - RNA, 19 nt, Artificial Sequence
  Description of Artificial Sequence: Synthetic oligonucleotide
aaguuagcauuggucugug

SEQ ID NO: 2980302 - RNA, 19 nt, Artificial Sequence
  Description of Artificial Sequence: Synthetic oligonucleotide
ggaaguuguccacagccac

SEQ ID NO: 2980303 - RNA, 19 nt, Artificial Sequence
  Description of Artificial Sequence: Synthetic oligonucleotide
uaguuuccauucucagucu

SEQ ID NO: 2980304 - RNA, 19 nt, Artificial Sequence
  Description of Artificial Sequence: Synthetic oligonucleotide
ugcgagcauuaagugagcc

SEQ ID NO: 2980305 - RNA, 19 nt, Artificial Sequence
  Description of Artificial Sequence: Synthetic oligonucleotide
agcucuuccucucggugca

SEQ ID NO: 2980306 - RNA, 19 nt, Artificial Sequence
  Description of Artificial Sequence: Synthetic oligonucleotide
aggcucuguacuuccucuc

SEQ ID NO: 2980307 - RNA, 19 nt, Artificial Sequence
  Description of Artificial Sequence: Synthetic oligonucleotide
ucugugucacuaacucguc

SEQ ID NO: 2980308 - RNA, 19 nt, Artificial Sequence
  Description of Artificial Sequence: Synthetic oligonucleotide
uuguccacuucugggaagu

SEQ ID NO: 2980309 - RNA, 19 nt, Artificial Sequence
  Description of Artificial Sequence: Synthetic oligonucleotide
gagguccuugacguuggcg

SEQ ID NO: 2980310 - RNA, 19 nt, Artificial Sequence
  Description of Artificial Sequence: Synthetic oligonucleotide
ggccuuguccacuucuggg

SEQ ID NO: 2980311 - RNA, 19 nt, Artificial Sequence
  Description of Artificial Sequence: Synthetic oligonucleotide
uggcagagagcucggccug

SEQ ID NO: 2980312 - RNA, 19 nt, Artificial Sequence
  Description of Artificial Sequence: Synthetic oligonucleotide
gaucgaucuucaacacugc

SEQ ID NO: 2980313 - RNA, 19 nt, Artificial Sequence
  Description of Artificial Sequence: Synthetic oligonucleotide
acuuccucucuccgcagcu

SEQ ID NO: 2980314 - RNA, 19 nt, Artificial Sequence
  Description of Artificial Sequence: Synthetic oligonucleotide
ucugugucauuugcuggca

SEQ ID NO: 2980315 - RNA, 19 nt, Artificial Sequence
  Description of Artificial Sequence: Synthetic oligonucleotide
gcugacuucucugucguag

SEQ ID NO: 2980316 - RNA, 19 nt, Artificial Sequence
  Description of Artificial Sequence: Synthetic oligonucleotide
cuaacucgucuuucaguuc

SEQ ID NO: 2980317 - RNA, 19 nt, Artificial Sequence
  Description of Artificial Sequence: Synthetic oligonucleotide
cauuggucugugucauuug

SEQ ID NO: 2980318 - RNA, 19 nt, Artificial Sequence
  Description of Artificial Sequence: Synthetic oligonucleotide
cuucugggaaguuguccac

SEQ ID NO: 2980319 - RNA, 19 nt, Artificial Sequence
  Description of Artificial Sequence: Synthetic oligonucleotide
uucugggaaguuguccaca

SEQ ID NO: 2980320 - RNA, 19 nt, Artificial Sequence
  Description of Artificial Sequence: Synthetic oligonucleotide
cuucucugucguaguuucc

SEQ ID NO: 2980321 - RNA, 19 nt, Artificial Sequence
  Description of Artificial Sequence: Synthetic oligonucleotide
ugucacuaacucgucuuuc

SEQ ID NO: 2980322 - RNA, 19 nt, Artificial Sequence
  Description of Artificial Sequence: Synthetic oligonucleotide
cucuccaaguuagcauugg

SEQ ID NO: 2980323 - RNA, 19 nt, Artificial Sequence
  Description of Artificial Sequence: Synthetic oligonucleotide
cucggugcaaucugcucuc

SEQ ID NO: 2980324 - RNA, 19 nt, Artificial Sequence
  Description of Artificial Sequence: Synthetic oligonucleotide
ugaugagcuagagcggcuc

SEQ ID NO: 2980325 - RNA, 19 nt, Artificial Sequence
  Description of Artificial Sequence: Synthetic oligonucleotide
cuucaacacugcugcgagc

SEQ ID NO: 2980326 - RNA, 19 nt, Artificial Sequence
  Description of Artificial Sequence: Synthetic oligonucleotide
cacugcugcgagcauuaag

SEQ ID NO: 2980327 - RNA, 19 nt, Artificial Sequence
  Description of Artificial Sequence: Synthetic oligonucleotide
cugcugcgagcauuaagug

SEQ ID NO: 2980328 - RNA, 19 nt, Artificial Sequence
  Description of Artificial Sequence: Synthetic oligonucleotide
ugacuucucugucguaguu

SEQ ID NO: 2980329 - RNA, 19 nt, Artificial Sequence
  Description of Artificial Sequence: Synthetic oligonucleotide
cuagagcggcuccccaugc

SEQ ID NO: 2980330 - RNA, 19 nt, Artificial Sequence
  Description of Artificial Sequence: Synthetic oligonucleotide
cugcaggcucuguacuucc

SEQ ID NO: 2980331 - RNA, 19 nt, Artificial Sequence
  Description of Artificial Sequence: Synthetic oligonucleotide
ggagcugguauucucugga

SEQ ID NO: 2980332 - RNA, 19 nt, Artificial Sequence
  Description of Artificial Sequence: Synthetic oligonucleotide
gucguaguuuccauucuca

SEQ ID NO: 2980333 - RNA, 19 nt, Artificial Sequence
  Description of Artificial Sequence: Synthetic oligonucleotide
uccgugcuugcugaagcug

SEQ ID NO: 2980334 - RNA, 19 nt, Artificial Sequence
  Description of Artificial Sequence: Synthetic oligonucleotide
ucuuccucucggugcaauc

SEQ ID NO: 2980335 - RNA, 19 nt, Artificial Sequence
  Description of Artificial Sequence: Synthetic oligonucleotide
ggagaucgaucuucaacac

SEQ ID NO: 2980336 - RNA, 19 nt, Artificial Sequence
  Description of Artificial Sequence: Synthetic oligonucleotide
ucucugucguaguuuccau

SEQ ID NO: 2980337 - RNA, 19 nt, Artificial Sequence
  Description of Artificial Sequence: Synthetic oligonucleotide
uagcauuggucugugucau

SEQ ID NO: 2980338 - RNA, 19 nt, Artificial Sequence
  Description of Artificial Sequence: Synthetic oligonucleotide
auuugcuggcacuggcuuu

SEQ ID NO: 2980339 - RNA, 19 nt, Artificial Sequence
  Description of Artificial Sequence: Synthetic oligonucleotide
ucuggagaucgaucuucaa

SEQ ID NO: 2980340 - RNA, 19 nt, Artificial Sequence
  Description of Artificial Sequence: Synthetic oligonucleotide
aagugagccugaugagcua

SEQ ID NO: 2980341 - RNA, 19 nt, Artificial Sequence
  Description of Artificial Sequence: Synthetic oligonucleotide
gagaucgaucuucaacacu

SEQ ID NO: 2980342 - RNA, 19 nt, Artificial Sequence
  Description of Artificial Sequence: Synthetic oligonucleotide
caaucugcucuccaaguua

SEQ ID NO: 2980343 - RNA, 19 nt, Artificial Sequence
  Description of Artificial Sequence: Synthetic oligonucleotide
cgagcauuaagugagccug

SEQ ID NO: 2980344 - RNA, 19 nt, Artificial Sequence
  Description of Artificial Sequence: Synthetic oligonucleotide
ccaaguuagcauuggucug

SEQ ID NO: 2980345 - RNA, 19 nt, Artificial Sequence
  Description of Artificial Sequence: Synthetic oligonucleotide
ccucugugucacuaacucg

SEQ ID NO: 2980346 - RNA, 19 nt, Artificial Sequence
  Description of Artificial Sequence: Synthetic oligonucleotide
ccugucaaucagcauggcc

SEQ ID NO: 2980347 - RNA, 19 nt, Artificial Sequence
  Description of Artificial Sequence: Synthetic oligonucleotide
ucuccgcagcucuuccucu

SEQ ID NO: 2980348 - RNA, 19 nt, Artificial Sequence
  Description of Artificial Sequence: Synthetic oligonucleotide
uucucuggagaucgaucuu

SEQ ID NO: 2980349 - RNA, 19 nt, Artificial Sequence
  Description of Artificial Sequence: Synthetic oligonucleotide
cucuccgcagcucuuccuc

SEQ ID NO: 2980350 - RNA, 19 nt, Artificial Sequence
  Description of Artificial Sequence: Synthetic oligonucleotide
uuccauucucagucugauc

SEQ ID NO: 2980351 - RNA, 19 nt, Artificial Sequence
  Description of Artificial Sequence: Synthetic oligonucleotide
guccacagccacugaggag

SEQ ID NO: 2980352 - RNA, 19 nt, Artificial Sequence
  Description of Artificial Sequence: Synthetic oligonucleotide
acguuggcggcaagcuugc

SEQ ID NO: 2980353 - RNA, 19 nt, Artificial Sequence
  Description of Artificial Sequence: Synthetic oligonucleotide
ggugcccagggcuuugacc

SEQ ID NO: 2980354 - RNA, 19 nt, Artificial Sequence
  Description of Artificial Sequence: Synthetic oligonucleotide
guuuccauucucagucuga

SEQ ID NO: 2980355 - RNA, 19 nt, Artificial Sequence
  Description of Artificial Sequence: Synthetic oligonucleotide
aucugcucuccaaguuagc

SEQ ID NO: 2980356 - RNA, 19 nt, Artificial Sequence
  Description of Artificial Sequence: Synthetic oligonucleotide
gcuugcugaagcugcuugc

SEQ ID NO: 2980357 - RNA, 19 nt, Artificial Sequence
  Description of Artificial Sequence: Synthetic oligonucleotide
ccugaugagcuagagcggc

SEQ ID NO: 2980358 - RNA, 19 nt, Artificial Sequence
  Description of Artificial Sequence: Synthetic oligonucleotide
cugggaaguuguccacagc

SEQ ID NO: 2980359 - RNA, 19 nt, Artificial Sequence
  Description of Artificial Sequence: Synthetic oligonucleotide
uagagcggcuccccaugcu

SEQ ID NO: 2980360 - RNA, 19 nt, Artificial Sequence
  Description of Artificial Sequence: Synthetic oligonucleotide
gcaagcuugcgccucugug

SEQ ID NO: 2980361 - RNA, 19 nt, Artificial Sequence
  Description of Artificial Sequence: Synthetic oligonucleotide
guccacuucugggaaguug

SEQ ID NO: 2980362 - RNA, 19 nt, Artificial Sequence
  Description of Artificial Sequence: Synthetic oligonucleotide
ugacguuggcggcaagcuu

SEQ ID NO: 2980363 - RNA, 19 nt, Artificial Sequence
  Description of Artificial Sequence: Synthetic oligonucleotide
guacuuccucucuccgcag

SEQ ID NO: 2980364 - RNA, 19 nt, Artificial Sequence
  Description of Artificial Sequence: Synthetic oligonucleotide
ugcaggcucuguacuuccu

SEQ ID NO: 2980365 - RNA, 19 nt, Artificial Sequence
  Description of Artificial Sequence: Synthetic oligonucleotide
ucaacacugcugcgagcau

SEQ ID NO: 2980366 - RNA, 19 nt, Artificial Sequence
  Description of Artificial Sequence: Synthetic oligonucleotide
ucucuccgcagcucuuccu

SEQ ID NO: 2980367 - RNA, 19 nt, Artificial Sequence
  Description of Artificial Sequence: Synthetic oligonucleotide
cucucggugcaaucugcuc

SEQ ID NO: 2980368 - RNA, 19 nt, Artificial Sequence
  Description of Artificial Sequence: Synthetic oligonucleotide
caagcuugcgccucugugu

SEQ ID NO: 2980369 - RNA, 19 nt, Artificial Sequence
  Description of Artificial Sequence: Synthetic oligonucleotide
acucgucuuucaguuccuc

SEQ ID NO: 2980370 - RNA, 19 nt, Artificial Sequence
  Description of Artificial Sequence: Synthetic oligonucleotide
aguuagcauuggucugugu

SEQ ID NO: 2980371 - RNA, 19 nt, Artificial Sequence
  Description of Artificial Sequence: Synthetic oligonucleotide
cugcgagcauuaagugagc

SEQ ID NO: 2980372 - RNA, 19 nt, Artificial Sequence
  Description of Artificial Sequence: Synthetic oligonucleotide
uccuccaccugggugccca

SEQ ID NO: 2980373 - RNA, 19 nt, Artificial Sequence
  Description of Artificial Sequence: Synthetic oligonucleotide
agcuagagcggcuccccau

SEQ ID NO: 2980374 - RNA, 19 nt, Artificial Sequence
  Description of Artificial Sequence: Synthetic oligonucleotide
cugugucauuugcuggcac

SEQ ID NO: 2980375 - RNA, 19 nt, Artificial Sequence
  Description of Artificial Sequence: Synthetic oligonucleotide
cugguauucucuggagauc

SEQ ID NO: 2980376 - RNA, 19 nt, Artificial Sequence
  Description of Artificial Sequence: Synthetic oligonucleotide
ggugcaaucugcucuccaa

SEQ ID NO: 2980377 - RNA, 19 nt, Artificial Sequence
  Description of Artificial Sequence: Synthetic oligonucleotide
guggcagagagcucggccu

SEQ ID NO: 2980378 - RNA, 19 nt, Artificial Sequence
  Description of Artificial Sequence: Synthetic oligonucleotide
gguccuugacguuggcggc

SEQ ID NO: 2980379 - RNA, 19 nt, Artificial Sequence
  Description of Artificial Sequence: Synthetic oligonucleotide
gcauuaagugagccugaug

SEQ ID NO: 2980380 - RNA, 19 nt, Artificial Sequence
  Description of Artificial Sequence: Synthetic oligonucleotide
agcauuaagugagccugau

SEQ ID NO: 2980381 - RNA, 19 nt, Artificial Sequence
  Description of Artificial Sequence: Synthetic oligonucleotide
aacucgucuuucaguuccu

SEQ ID NO: 2980382 - RNA, 19 nt, Artificial Sequence
  Description of Artificial Sequence: Synthetic oligonucleotide
agcauggccuuguccacuu

SEQ ID NO: 2980383 - RNA, 19 nt, Artificial Sequence
  Description of Artificial Sequence: Synthetic oligonucleotide
gggcuuugaccucugccug

SEQ ID NO: 2980384 - RNA, 19 nt, Artificial Sequence
  Description of Artificial Sequence: Synthetic oligonucleotide
cacugaggagcugguauuc

SEQ ID NO: 2980385 - RNA, 19 nt, Artificial Sequence
  Description of Artificial Sequence: Synthetic oligonucleotide
gcuagagcggcuccccaug

SEQ ID NO: 2980386 - RNA, 19 nt, Artificial Sequence
  Description of Artificial Sequence: Synthetic oligonucleotide
gagcggcuccccaugcugc

SEQ ID NO: 2980387 - RNA, 19 nt, Artificial Sequence
  Description of Artificial Sequence: Synthetic oligonucleotide
gcagcucuuccucucggug

SEQ ID NO: 2980388 - RNA, 19 nt, Artificial Sequence
  Description of Artificial Sequence: Synthetic oligonucleotide
gagcauuaagugagccuga

SEQ ID NO: 2980389 - RNA, 19 nt, Artificial Sequence
  Description of Artificial Sequence: Synthetic oligonucleotide
ugcgccucugugucacuaa

SEQ ID NO: 2980390 - RNA, 19 nt, Artificial Sequence
  Description of Artificial Sequence: Synthetic oligonucleotide
cauucucagucugaucuaa

SEQ ID NO: 2980391 - RNA, 19 nt, Artificial Sequence
  Description of Artificial Sequence: Synthetic oligonucleotide
gaaguuguccacagccacu

SEQ ID NO: 2980392 - RNA, 19 nt, Artificial Sequence
  Description of Artificial Sequence: Synthetic oligonucleotide
caaguuagcauuggucugu

SEQ ID NO: 2980393 - RNA, 19 nt, Artificial Sequence
  Description of Artificial Sequence: Synthetic oligonucleotide
gccuuguccacuucuggga

SEQ ID NO: 2980394 - RNA, 19 nt, Artificial Sequence
  Description of Artificial Sequence: Synthetic oligonucleotide
caaucagcauggccuuguc

SEQ ID NO: 2980395 - RNA, 19 nt, Artificial Sequence
  Description of Artificial Sequence: Synthetic oligonucleotide
gcugguauucucuggagau

SEQ ID NO: 2980396 - RNA, 19 nt, Artificial Sequence
  Description of Artificial Sequence: Synthetic oligonucleotide
gagcucggccugcaggcuc

SEQ ID NO: 2980397 - RNA, 19 nt, Artificial Sequence
  Description of Artificial Sequence: Synthetic oligonucleotide
uuucuccgugcuugcugaa

SEQ ID NO: 2980398 - RNA, 19 nt, Artificial Sequence
  Description of Artificial Sequence: Synthetic oligonucleotide
cagucugaucuaauuuucu

SEQ ID NO: 2980399 - RNA, 19 nt, Artificial Sequence
  Description of Artificial Sequence: Synthetic oligonucleotide
gucaaucagcauggccuug

SEQ ID NO: 2980400 - RNA, 19 nt, Artificial Sequence
  Description of Artificial Sequence: Synthetic oligonucleotide
uccugucaaucagcauggc

SEQ ID NO: 2980401 - RNA, 19 nt, Artificial Sequence
  Description of Artificial Sequence: Synthetic oligonucleotide
gcuuugaccucugccugag

SEQ ID NO: 2980402 - RNA, 19 nt, Artificial Sequence
  Description of Artificial Sequence: Synthetic oligonucleotide
uccuugacguuggcggcaa

SEQ ID NO: 2980403 - RNA, 19 nt, Artificial Sequence
  Description of Artificial Sequence: Synthetic oligonucleotide
agcggcuccccaugcugcu

SEQ ID NO: 2980404 - RNA, 19 nt, Artificial Sequence
  Description of Artificial Sequence: Synthetic oligonucleotide
uccccaugcugcugacuuc

SEQ ID NO: 2980405 - RNA, 19 nt, Artificial Sequence
  Description of Artificial Sequence: Synthetic oligonucleotide
cugaucuaauuuucuccgu

SEQ ID NO: 2980406 - RNA, 19 nt, Artificial Sequence
  Description of Artificial Sequence: Synthetic oligonucleotide
cuccgcagcucuuccucuc

SEQ ID NO: 2980407 - RNA, 19 nt, Artificial Sequence
  Description of Artificial Sequence: Synthetic oligonucleotide
gagcuagagcggcucccca

SEQ ID NO: 2980408 - RNA, 19 nt, Artificial Sequence
  Description of Artificial Sequence: Synthetic oligonucleotide
gccugaugagcuagagcgg

SEQ ID NO: 2980409 - RNA, 19 nt, Artificial Sequence
  Description of Artificial Sequence: Synthetic oligonucleotide
ucggugcaaucugcucucc

SEQ ID NO: 2980410 - RNA, 19 nt, Artificial Sequence
  Description of Artificial Sequence: Synthetic oligonucleotide
auucucagucugaucuaau

SEQ ID NO: 2980411 - RNA, 19 nt, Artificial Sequence
  Description of Artificial Sequence: Synthetic oligonucleotide
cagagagcucggccugcag

SEQ ID NO: 2980412 - RNA, 19 nt, Artificial Sequence
  Description of Artificial Sequence: Synthetic oligonucleotide
agcuugcgccucuguguca

SEQ ID NO: 2980413 - RNA, 19 nt, Artificial Sequence
  Description of Artificial Sequence: Synthetic oligonucleotide
gaguggcagagagcucggc

SEQ ID NO: 2980414 - RNA, 19 nt, Artificial Sequence
  Description of Artificial Sequence: Synthetic oligonucleotide
caggcucuguacuuccucu

SEQ ID NO: 2980415 - RNA, 19 nt, Artificial Sequence
  Description of Artificial Sequence: Synthetic oligonucleotide
cuugcugaagcugcuugcu

SEQ ID NO: 2980416 - RNA, 19 nt, Artificial Sequence
  Description of Artificial Sequence: Synthetic oligonucleotide
gcucuguacuuccucucuc

SEQ ID NO: 2980417 - RNA, 19 nt, Artificial Sequence
  Description of Artificial Sequence: Synthetic oligonucleotide
cugacuucucugucguagu

SEQ ID NO: 2980418 - RNA, 19 nt, Artificial Sequence
  Description of Artificial Sequence: Synthetic oligonucleotide
cauuugcuggcacuggcuu

SEQ ID NO: 2980419 - RNA, 19 nt, Artificial Sequence
  Description of Artificial Sequence: Synthetic oligonucleotide
ggcuuugaccucugccuga

SEQ ID NO: 2980420 - RNA, 19 nt, Artificial Sequence
  Description of Artificial Sequence: Synthetic oligonucleotide
gcuugcugagguccuugac

SEQ ID NO: 2980421 - RNA, 19 nt, Artificial Sequence
  Description of Artificial Sequence: Synthetic oligonucleotide
agcauuggucugugucauu

SEQ ID NO: 2980422 - RNA, 19 nt, Artificial Sequence
  Description of Artificial Sequence: Synthetic oligonucleotide
gcaggcucuguacuuccuc

SEQ ID NO: 2980423 - RNA, 19 nt, Artificial Sequence
  Description of Artificial Sequence: Synthetic oligonucleotide
uugcgccucugugucacua

SEQ ID NO: 2980424 - RNA, 19 nt, Artificial Sequence
  Description of Artificial Sequence: Synthetic oligonucleotide
cuuccucucggugcaaucu

SEQ ID NO: 2980425 - RNA, 19 nt, Artificial Sequence
  Description of Artificial Sequence: Synthetic oligonucleotide
guauucucuggagaucgau

SEQ ID NO: 2980426 - RNA, 19 nt, Artificial Sequence
  Description of Artificial Sequence: Synthetic oligonucleotide
cugcucuccaaguuagcau

SEQ ID NO: 2980427 - RNA, 19 nt, Artificial Sequence
  Description of Artificial Sequence: Synthetic oligonucleotide
gcucuccaaguuagcauug

SEQ ID NO: 2980428 - RNA, 19 nt, Artificial Sequence
  Description of Artificial Sequence: Synthetic oligonucleotide
ugcugacuucucugucgua

SEQ ID NO: 2980429 - RNA, 19 nt, Artificial Sequence
  Description of Artificial Sequence: Synthetic oligonucleotide
gacuucucugucguaguuu

SEQ ID NO: 2980430 - RNA, 19 nt, Artificial Sequence
  Description of Artificial Sequence: Synthetic oligonucleotide
uggcggcaagcuugcgccu

SEQ ID NO: 2980431 - RNA, 19 nt, Artificial Sequence
  Description of Artificial Sequence: Synthetic oligonucleotide
ugcugagguccuugacguu

SEQ ID NO: 2980432 - RNA, 19 nt, Artificial Sequence
  Description of Artificial Sequence: Synthetic oligonucleotide
cugcugacuucucugucgu

SEQ ID NO: 2980433 - RNA, 19 nt, Artificial Sequence
  Description of Artificial Sequence: Synthetic oligonucleotide
gcuugcgccucugugucac

SEQ ID NO: 2980434 - RNA, 19 nt, Artificial Sequence
  Description of Artificial Sequence: Synthetic oligonucleotide
guccuugacguuggcggca

SEQ ID NO: 2980435 - RNA, 19 nt, Artificial Sequence
  Description of Artificial Sequence: Synthetic oligonucleotide
agagcucggccugcaggcu

SEQ ID NO: 2980436 - RNA, 19 nt, Artificial Sequence
  Description of Artificial Sequence: Synthetic oligonucleotide
cugugucacuaacucgucu

SEQ ID NO: 2980437 - RNA, 19 nt, Artificial Sequence
  Description of Artificial Sequence: Synthetic oligonucleotide
gccacugaggagcugguau

SEQ ID NO: 2980438 - RNA, 19 nt, Artificial Sequence
  Description of Artificial Sequence: Synthetic oligonucleotide
cgucuuucaguuccuccac

SEQ ID NO: 2980439 - RNA, 19 nt, Artificial Sequence
  Description of Artificial Sequence: Synthetic oligonucleotide
cuccccaugcugcugacuu

SEQ ID NO: 2980440 - RNA, 19 nt, Artificial Sequence
  Description of Artificial Sequence: Synthetic oligonucleotide
gugucacuaacucgucuuu

SEQ ID NO: 2980441 - RNA, 19 nt, Artificial Sequence
  Description of Artificial Sequence: Synthetic oligonucleotide
ugggugcccagggcuuuga

SEQ ID NO: 2980442 - RNA, 19 nt, Artificial Sequence
  Description of Artificial Sequence: Synthetic oligonucleotide
cugucguaguuuccauucu

SEQ ID NO: 2980443 - RNA, 19 nt, Artificial Sequence
  Description of Artificial Sequence: Synthetic oligonucleotide
cugaugagcuagagcggcu

SEQ ID NO: 2980444 - RNA, 19 nt, Artificial Sequence
  Description of Artificial Sequence: Synthetic oligonucleotide
gcgagcauuaagugagccu

SEQ ID NO: 2980445 - RNA, 19 nt, Artificial Sequence
  Description of Artificial Sequence: Synthetic oligonucleotide
ggcucuguacuuccucucu

SEQ ID NO: 2980446 - RNA, 19 nt, Artificial Sequence
  Description of Artificial Sequence: Synthetic oligonucleotide
gugagccugaugagcuaga

SEQ ID NO: 2980447 - RNA, 19 nt, Artificial Sequence
  Description of Artificial Sequence: Synthetic oligonucleotide
gcgccucugugucacuaac

SEQ ID NO: 2980448 - RNA, 19 nt, Artificial Sequence
  Description of Artificial Sequence: Synthetic oligonucleotide
caccugggugcccagggcu

SEQ ID NO: 2980449 - RNA, 19 nt, Artificial Sequence
  Description of Artificial Sequence: Synthetic oligonucleotide
uguccacuucugggaaguu

SEQ ID NO: 2980450 - RNA, 19 nt, Artificial Sequence
  Description of Artificial Sequence: Synthetic oligonucleotide
gguauucucuggagaucga

SEQ ID NO: 2980451 - RNA, 19 nt, Artificial Sequence
  Description of Artificial Sequence: Synthetic oligonucleotide
gcaaucugcucuccaaguu

SEQ ID NO: 2980452 - RNA, 19 nt, Artificial Sequence
  Description of Artificial Sequence: Synthetic oligonucleotide
ccuuguccacuucugggaa

SEQ ID NO: 2980453 - RNA, 19 nt, Artificial Sequence
  Description of Artificial Sequence: Synthetic oligonucleotide
cuccgugcuugcugaagcu

SEQ ID NO: 2980454 - RNA, 19 nt, Artificial Sequence
  Description of Artificial Sequence: Synthetic oligonucleotide
cucugucguaguuuccauu

SEQ ID NO: 2980455 - RNA, 19 nt, Artificial Sequence
  Description of Artificial Sequence: Synthetic oligonucleotide
ggcagagagcucggccugc

SEQ ID NO: 2980456 - RNA, 19 nt, Artificial Sequence
  Description of Artificial Sequence: Synthetic oligonucleotide
cugggugcccagggcuuug

SEQ ID NO: 2980457 - RNA, 19 nt, Artificial Sequence
  Description of Artificial Sequence: Synthetic oligonucleotide
cguaguuuccauucucagu

SEQ ID NO: 2980458 - RNA, 19 nt, Artificial Sequence
  Description of Artificial Sequence: Synthetic oligonucleotide
gcauuggucugugucauuu

SEQ ID NO: 2980459 - RNA, 19 nt, Artificial Sequence
  Description of Artificial Sequence: Synthetic oligonucleotide
gaccucugccugaguggca

SEQ ID NO: 2980460 - RNA, 19 nt, Artificial Sequence
  Description of Artificial Sequence: Synthetic oligonucleotide
ccgcagcucuuccucucgg

SEQ ID NO: 2980461 - RNA, 19 nt, Artificial Sequence
  Description of Artificial Sequence: Synthetic oligonucleotide
uuccuccaccugggugccc

SEQ ID NO: 2980462 - RNA, 19 nt, Artificial Sequence
  Description of Artificial Sequence: Synthetic oligonucleotide
accugggugcccagggcuu

SEQ ID NO: 2980463 - RNA, 19 nt, Artificial Sequence
  Description of Artificial Sequence: Synthetic oligonucleotide
ccugaguggcagagagcuc

SEQ ID NO: 2980464 - RNA, 19 nt, Artificial Sequence
  Description of Artificial Sequence: Synthetic oligonucleotide
cacagccacugaggagcug

SEQ ID NO: 2980465 - RNA, 19 nt, Artificial Sequence
  Description of Artificial Sequence: Synthetic oligonucleotide
agccacugaggagcuggua

SEQ ID NO: 2980466 - RNA, 19 nt, Artificial Sequence
  Description of Artificial Sequence: Synthetic oligonucleotide
acacugcugcgagcauuaa

SEQ ID NO: 2980467 - RNA, 19 nt, Artificial Sequence
  Description of Artificial Sequence: Synthetic oligonucleotide
gggugcccagggcuuugac

SEQ ID NO: 2980468 - RNA, 19 nt, Artificial Sequence
  Description of Artificial Sequence: Synthetic oligonucleotide
ggcggcaagcuugcgccuc

SEQ ID NO: 2980469 - RNA, 19 nt, Artificial Sequence
  Description of Artificial Sequence: Synthetic oligonucleotide
cuuugaccucugccugagu

SEQ ID NO: 2980470 - RNA, 19 nt, Artificial Sequence
  Description of Artificial Sequence: Synthetic oligonucleotide
gcagagagcucggccugca

SEQ ID NO: 2980471 - RNA, 19 nt, Artificial Sequence
  Description of Artificial Sequence: Synthetic oligonucleotide
cagcauggccuuguccacu

SEQ ID NO: 2980472 - RNA, 19 nt, Artificial Sequence
  Description of Artificial Sequence: Synthetic oligonucleotide
ggcuccccaugcugcugac

SEQ ID NO: 2980473 - RNA, 19 nt, Artificial Sequence
  Description of Artificial Sequence: Synthetic oligonucleotide
ggcaagcuugcgccucugu

SEQ ID NO: 2980474 - RNA, 19 nt, Artificial Sequence
  Description of Artificial Sequence: Synthetic oligonucleotide
ccaugcugcugacuucucu

SEQ ID NO: 2980475 - RNA, 19 nt, Artificial Sequence
  Description of Artificial Sequence: Synthetic oligonucleotide
cccaugcugcugacuucuc

SEQ ID NO: 2980476 - RNA, 19 nt, Artificial Sequence
  Description of Artificial Sequence: Synthetic oligonucleotide
ccuugacguuggcggcaag

SEQ ID NO: 2980477 - RNA, 19 nt, Artificial Sequence
  Description of Artificial Sequence: Synthetic oligonucleotide
ccucucggugcaaucugcu

SEQ ID NO: 2980478 - RNA, 19 nt, Artificial Sequence
  Description of Artificial Sequence: Synthetic oligonucleotide
cucuuccucucggugcaau

SEQ ID NO: 2980479 - RNA, 19 nt, Artificial Sequence
  Description of Artificial Sequence: Synthetic oligonucleotide
ccuccaccugggugcccag

SEQ ID NO: 2980480 - RNA, 19 nt, Artificial Sequence
  Description of Artificial Sequence: Synthetic oligonucleotide
cuugcgccucugugucacu

SEQ ID NO: 2980481 - RNA, 19 nt, Artificial Sequence
  Description of Artificial Sequence: Synthetic oligonucleotide
gcggcuccccaugcugcug

SEQ ID NO: 2980482 - RNA, 19 nt, Artificial Sequence
  Description of Artificial Sequence: Synthetic oligonucleotide
gccugcaggcucuguacuu

SEQ ID NO: 2980483 - RNA, 19 nt, Artificial Sequence
  Description of Artificial Sequence: Synthetic oligonucleotide
gugcuugcugaagcugcuu

SEQ ID NO: 2980484 - RNA, 19 nt, Artificial Sequence
  Description of Artificial Sequence: Synthetic oligonucleotide
gcggcaagcuugcgccucu

SEQ ID NO: 2980485 - RNA, 19 nt, Artificial Sequence
  Description of Artificial Sequence: Synthetic oligonucleotide
cggugcaaucugcucucca

SEQ ID NO: 2980486 - RNA, 19 nt, Artificial Sequence
  Description of Artificial Sequence: Synthetic oligonucleotide
cggcuccccaugcugcuga

SEQ ID NO: 2980487 - RNA, 19 nt, Artificial Sequence
  Description of Artificial Sequence: Synthetic oligonucleotide
cguuggcggcaagcuugcg

SEQ ID NO: 2980488 - RNA, 19 nt, Artificial Sequence
  Description of Artificial Sequence: Synthetic oligonucleotide
ccacagccacugaggagcu

SEQ ID NO: 2980489 - RNA, 19 nt, Artificial Sequence
  Description of Artificial Sequence: Synthetic oligonucleotide
gcucuuccucucggugcaa

SEQ ID NO: 2980490 - RNA, 19 nt, Artificial Sequence
  Description of Artificial Sequence: Synthetic oligonucleotide
gcuccccaugcugcugacu

SEQ ID NO: 2980491 - RNA, 19 nt, Artificial Sequence
  Description of Artificial Sequence: Synthetic oligonucleotide
cggcaagcuugcgccucug

SEQ ID NO: 2980492 - RNA, 19 nt, Artificial Sequence
  Description of Artificial Sequence: Synthetic oligonucleotide
uguguuucccuuuugaggg

SEQ ID NO: 2980493 - RNA, 19 nt, Artificial Sequence
  Description of Artificial Sequence: Synthetic oligonucleotide
auacucauugcucuuaggc

SEQ ID NO: 2980494 - RNA, 19 nt, Artificial Sequence
  Description of Artificial Sequence: Synthetic oligonucleotide
ucagcuaugggcauggcag

SEQ ID NO: 2980495 - RNA, 19 nt, Artificial Sequence
  Description of Artificial Sequence: Synthetic oligonucleotide
acuaaaugaagccccauuc

SEQ ID NO: 2980496 - RNA, 19 nt, Artificial Sequence
  Description of Artificial Sequence: Synthetic oligonucleotide
aguucagagaucucuauuc

SEQ ID NO: 2980497 - RNA, 19 nt, Artificial Sequence
  Description of Artificial Sequence: Synthetic oligonucleotide
gaagaggucagcuaugggc

SEQ ID NO: 2980498 - RNA, 19 nt, Artificial Sequence
  Description of Artificial Sequence: Synthetic oligonucleotide
acagcagacacacucacgg

SEQ ID NO: 2980499 - RNA, 19 nt, Artificial Sequence
  Description of Artificial Sequence: Synthetic oligonucleotide
acuguguuucaucugaggg

SEQ ID NO: 2980500 - RNA, 19 nt, Artificial Sequence
  Description of Artificial Sequence: Synthetic oligonucleotide
aggugaacuaaaugaagcc

SEQ ID NO: 2980501 - RNA, 19 nt, Artificial Sequence
  Description of Artificial Sequence: Synthetic oligonucleotide
uuccaggugaacuaaauga

SEQ ID NO: 2980502 - RNA, 19 nt, Artificial Sequence
  Description of Artificial Sequence: Synthetic oligonucleotide
ugaaggaguguucucacag

SEQ ID NO: 2980503 - RNA, 19 nt, Artificial Sequence
  Description of Artificial Sequence: Synthetic oligonucleotide
uuaggcugugacuuuaggg

SEQ ID NO: 2980504 - RNA, 19 nt, Artificial Sequence
  Description of Artificial Sequence: Synthetic oligonucleotide
ucagagaucucuauuccag

SEQ ID NO: 2980505 - RNA, 19 nt, Artificial Sequence
  Description of Artificial Sequence: Synthetic oligonucleotide
aggaacaucacuguguuuc

SEQ ID NO: 2980506 - RNA, 19 nt, Artificial Sequence
  Description of Artificial Sequence: Synthetic oligonucleotide
uaggcugugacuuuagggc

SEQ ID NO: 2980507 - RNA, 19 nt, Artificial Sequence
  Description of Artificial Sequence: Synthetic oligonucleotide
aacaucacuguguuucauc

SEQ ID NO: 2980508 - RNA, 19 nt, Artificial Sequence
  Description of Artificial Sequence: Synthetic oligonucleotide
aaguugagggaagaaggcc

SEQ ID NO: 2980509 - RNA, 19 nt, Artificial Sequence
  Description of Artificial Sequence: Synthetic oligonucleotide
ugacuuuagggcaugcucc

SEQ ID NO: 2980510 - RNA, 19 nt, Artificial Sequence
  Description of Artificial Sequence: Synthetic oligonucleotide
auugcucuuaggcugugac

SEQ ID NO: 2980511 - RNA, 19 nt, Artificial Sequence
  Description of Artificial Sequence: Synthetic oligonucleotide
caggugaacuaaaugaagc

SEQ ID NO: 2980512 - RNA, 19 nt, Artificial Sequence
  Description of Artificial Sequence: Synthetic oligonucleotide
ucucacagcagacacacuc

SEQ ID NO: 2980513 - RNA, 19 nt, Artificial Sequence
  Description of Artificial Sequence: Synthetic oligonucleotide
acucauugcucuuaggcug

SEQ ID NO: 2980514 - RNA, 19 nt, Artificial Sequence
  Description of Artificial Sequence: Synthetic oligonucleotide
cuguguuucccuuuugagg

SEQ ID NO: 2980515 - RNA, 19 nt, Artificial Sequence
  Description of Artificial Sequence: Synthetic oligonucleotide
uaaaugaagccccauucuc

SEQ ID NO: 2980516 - RNA, 19 nt, Artificial Sequence
  Description of Artificial Sequence: Synthetic oligonucleotide
aaggaguguucucacagca

SEQ ID NO: 2980517 - RNA, 19 nt, Artificial Sequence
  Description of Artificial Sequence: Synthetic oligonucleotide
gcagaguccaaguugaggg

SEQ ID NO: 2980518 - RNA, 19 nt, Artificial Sequence
  Description of Artificial Sequence: Synthetic oligonucleotide
aauguccagguccugggug

SEQ ID NO: 2980519 - RNA, 19 nt, Artificial Sequence
  Description of Artificial Sequence: Synthetic oligonucleotide
aacaauguccagguccugg

SEQ ID NO: 2980520 - RNA, 19 nt, Artificial Sequence
  Description of Artificial Sequence: Synthetic oligonucleotide
gaggaggucauccagguga

SEQ ID NO: 2980521 - RNA, 19 nt, Artificial Sequence
  Description of Artificial Sequence: Synthetic oligonucleotide
cuuuugaggguccauacuc

SEQ ID NO: 2980522 - RNA, 19 nt, Artificial Sequence
  Description of Artificial Sequence: Synthetic oligonucleotide
ugaagccccauucucaagu

SEQ ID NO: 2980523 - RNA, 19 nt, Artificial Sequence
  Description of Artificial Sequence: Synthetic oligonucleotide
uucucaagucggaagaggu

SEQ ID NO: 2980524 - RNA, 19 nt, Artificial Sequence
  Description of Artificial Sequence: Synthetic oligonucleotide
aaugaagccccauucucaa

SEQ ID NO: 2980525 - RNA, 19 nt, Artificial Sequence
  Description of Artificial Sequence: Synthetic oligonucleotide
aggguuguugaguuccagc

SEQ ID NO: 2980526 - RNA, 19 nt, Artificial Sequence
  Description of Artificial Sequence: Synthetic oligonucleotide
ucuccuaguucagagaucu

SEQ ID NO: 2980527 - RNA, 19 nt, Artificial Sequence
  Description of Artificial Sequence: Synthetic oligonucleotide
aagaaggccuguguuuccc

SEQ ID NO: 2980528 - RNA, 19 nt, Artificial Sequence
  Description of Artificial Sequence: Synthetic oligonucleotide
agcaggggcaacaaugucc

SEQ ID NO: 2980529 - RNA, 19 nt, Artificial Sequence
  Description of Artificial Sequence: Synthetic oligonucleotide
agaucucuauuccagguga

SEQ ID NO: 2980530 - RNA, 19 nt, Artificial Sequence
  Description of Artificial Sequence: Synthetic oligonucleotide
cuaggugaacucuccaugc

SEQ ID NO: 2980531 - RNA, 19 nt, Artificial Sequence
  Description of Artificial Sequence: Synthetic oligonucleotide
uuuugaggguccauacuca

SEQ ID NO: 2980532 - RNA, 19 nt, Artificial Sequence
  Description of Artificial Sequence: Synthetic oligonucleotide
ucuccaugcugcuuucugg

SEQ ID NO: 2980533 - RNA, 19 nt, Artificial Sequence
  Description of Artificial Sequence: Synthetic oligonucleotide
uccaaguugagggaagaag

SEQ ID NO: 2980534 - RNA, 19 nt, Artificial Sequence
  Description of Artificial Sequence: Synthetic oligonucleotide
ugucuccuaguucagagau

SEQ ID NO: 2980535 - RNA, 19 nt, Artificial Sequence
  Description of Artificial Sequence: Synthetic oligonucleotide
ugaacuaaaugaagcccca

SEQ ID NO: 2980536 - RNA, 19 nt, Artificial Sequence
  Description of Artificial Sequence: Synthetic oligonucleotide
uccaggugaacuaaaugaa

SEQ ID NO: 2980537 - RNA, 19 nt, Artificial Sequence
  Description of Artificial Sequence: Synthetic oligonucleotide
acaucacuguguuucaucu

SEQ ID NO: 2980538 - RNA, 19 nt, Artificial Sequence
  Description of Artificial Sequence: Synthetic oligonucleotide
uggcccaggaacaucacug

SEQ ID NO: 2980539 - RNA, 19 nt, Artificial Sequence
  Description of Artificial Sequence: Synthetic oligonucleotide
uacucauugcucuuaggcu

SEQ ID NO: 2980540 - RNA, 19 nt, Artificial Sequence
  Description of Artificial Sequence: Synthetic oligonucleotide
ugcuuucuggcccaggaac

SEQ ID NO: 2980541 - RNA, 19 nt, Artificial Sequence
  Description of Artificial Sequence: Synthetic oligonucleotide
caaguugagggaagaaggc

SEQ ID NO: 2980542 - RNA, 19 nt, Artificial Sequence
  Description of Artificial Sequence: Synthetic oligonucleotide
gugaacuaaaugaagcccc

SEQ ID NO: 2980543 - RNA, 19 nt, Artificial Sequence
  Description of Artificial Sequence: Synthetic oligonucleotide
ccaaguugagggaagaagg

SEQ ID NO: 2980544 - RNA, 19 nt, Artificial Sequence
  Description of Artificial Sequence: Synthetic oligonucleotide
ugaccuucgugucuccuag

SEQ ID NO: 2980545 - RNA, 19 nt, Artificial Sequence
  Description of Artificial Sequence: Synthetic oligonucleotide
ggcaacaauguccaggucc

SEQ ID NO: 2980546 - RNA, 19 nt, Artificial Sequence
  Description of Artificial Sequence: Synthetic oligonucleotide
aaaugaagccccauucuca

SEQ ID NO: 2980547 - RNA, 19 nt, Artificial Sequence
  Description of Artificial Sequence: Synthetic oligonucleotide
aacuaaaugaagccccauu

SEQ ID NO: 2980548 - RNA, 19 nt, Artificial Sequence
  Description of Artificial Sequence: Synthetic oligonucleotide
uucaucugaggguuguuga

SEQ ID NO: 2980549 - RNA, 19 nt, Artificial Sequence
  Description of Artificial Sequence: Synthetic oligonucleotide
auuccaggugaacuaaaug

SEQ ID NO: 2980550 - RNA, 19 nt, Artificial Sequence
  Description of Artificial Sequence: Synthetic oligonucleotide
auccaggugaccuucgugu

SEQ ID NO: 2980551 - RNA, 19 nt, Artificial Sequence
  Description of Artificial Sequence: Synthetic oligonucleotide
uucagagaucucuauucca

SEQ ID NO: 2980552 - RNA, 19 nt, Artificial Sequence
  Description of Artificial Sequence: Synthetic oligonucleotide
cagagcaggggcaacaaug

SEQ ID NO: 2980553 - RNA, 19 nt, Artificial Sequence
  Description of Artificial Sequence: Synthetic oligonucleotide
uguccugggaguucccagg

SEQ ID NO: 2980554 - RNA, 19 nt, Artificial Sequence
  Description of Artificial Sequence: Synthetic oligonucleotide
guucagagaucucuauucc

SEQ ID NO: 2980555 - RNA, 19 nt, Artificial Sequence
  Description of Artificial Sequence: Synthetic oligonucleotide
cuucgugucuccuaguuca

SEQ ID NO: 2980556 - RNA, 19 nt, Artificial Sequence
  Description of Artificial Sequence: Synthetic oligonucleotide
uucuggcccaggaacauca

SEQ ID NO: 2980557 - RNA, 19 nt, Artificial Sequence
  Description of Artificial Sequence: Synthetic oligonucleotide
agagaucucuauuccaggu

SEQ ID NO: 2980558 - RNA, 19 nt, Artificial Sequence
  Description of Artificial Sequence: Synthetic oligonucleotide
aagccccauucucaagucg

SEQ ID NO: 2980559 - RNA, 19 nt, Artificial Sequence
  Description of Artificial Sequence: Synthetic oligonucleotide
ucucuauuccaggugaacu

SEQ ID NO: 2980560 - RNA, 19 nt, Artificial Sequence
  Description of Artificial Sequence: Synthetic oligonucleotide
uccuaguucagagaucucu

SEQ ID NO: 2980561 - RNA, 19 nt, Artificial Sequence
  Description of Artificial Sequence: Synthetic oligonucleotide
gagaucucuauuccaggug

SEQ ID NO: 2980562 - RNA, 19 nt, Artificial Sequence
  Description of Artificial Sequence: Synthetic oligonucleotide
gacuuuagggcaugcuccc

SEQ ID NO: 2980563 - RNA, 19 nt, Artificial Sequence
  Description of Artificial Sequence: Synthetic oligonucleotide
uguguuucaucugaggguu

SEQ ID NO: 2980564 - RNA, 19 nt, Artificial Sequence
  Description of Artificial Sequence: Synthetic oligonucleotide
uuucaucugaggguuguug

SEQ ID NO: 2980565 - RNA, 19 nt, Artificial Sequence
  Description of Artificial Sequence: Synthetic oligonucleotide
agcagacacacucacggga

SEQ ID NO: 2980566 - RNA, 19 nt, Artificial Sequence
  Description of Artificial Sequence: Synthetic oligonucleotide
uguuuacggugagaggagg

SEQ ID NO: 2980567 - RNA, 19 nt, Artificial Sequence
  Description of Artificial Sequence: Synthetic oligonucleotide
ucaagucggaagaggucag

SEQ ID NO: 2980568 - RNA, 19 nt, Artificial Sequence
  Description of Artificial Sequence: Synthetic oligonucleotide
cagagaucucuauuccagg

SEQ ID NO: 2980569 - RNA, 19 nt, Artificial Sequence
  Description of Artificial Sequence: Synthetic oligonucleotide
cugaggguuguugaguucc

SEQ ID NO: 2980570 - RNA, 19 nt, Artificial Sequence
  Description of Artificial Sequence: Synthetic oligonucleotide
ucuuaggcugugacuuuag

SEQ ID NO: 2980571 - RNA, 19 nt, Artificial Sequence
  Description of Artificial Sequence: Synthetic oligonucleotide
uguucucacagcagacaca

SEQ ID NO: 2980572 - RNA, 19 nt, Artificial Sequence
  Description of Artificial Sequence: Synthetic oligonucleotide
guucucacagcagacacac

SEQ ID NO: 2980573 - RNA, 19 nt, Artificial Sequence
  Description of Artificial Sequence: Synthetic oligonucleotide
gugacuuuagggcaugcuc

SEQ ID NO: 2980574 - RNA, 19 nt, Artificial Sequence
  Description of Artificial Sequence: Synthetic oligonucleotide
aguuccggcggccugucag

SEQ ID NO: 2980575 - RNA, 19 nt, Artificial Sequence
  Description of Artificial Sequence: Synthetic oligonucleotide
aacucuccaugcugcuuuc

SEQ ID NO: 2980576 - RNA, 19 nt, Artificial Sequence
  Description of Artificial Sequence: Synthetic oligonucleotide
ugcucuuaggcugugacuu

SEQ ID NO: 2980577 - RNA, 19 nt, Artificial Sequence
  Description of Artificial Sequence: Synthetic oligonucleotide
cuccaugcugcuuucuggc

SEQ ID NO: 2980578 - RNA, 19 nt, Artificial Sequence
  Description of Artificial Sequence: Synthetic oligonucleotide
aggggcaacaauguccagg

SEQ ID NO: 2980579 - RNA, 19 nt, Artificial Sequence
  Description of Artificial Sequence: Synthetic oligonucleotide
uuuagggcaugcuccccag

SEQ ID NO: 2980580 - RNA, 19 nt, Artificial Sequence
  Description of Artificial Sequence: Synthetic oligonucleotide
ggugaacuaaaugaagccc

SEQ ID NO: 2980581 - RNA, 19 nt, Artificial Sequence
  Description of Artificial Sequence: Synthetic oligonucleotide
caugaaggaguguucucac

SEQ ID NO: 2980582 - RNA, 19 nt, Artificial Sequence
  Description of Artificial Sequence: Synthetic oligonucleotide
ucacuguguuucaucugag

SEQ ID NO: 2980583 - RNA, 19 nt, Artificial Sequence
  Description of Artificial Sequence: Synthetic oligonucleotide
cucacgggagcugaguucc

SEQ ID NO: 2980584 - RNA, 19 nt, Artificial Sequence
  Description of Artificial Sequence: Synthetic oligonucleotide
cuuaggcugugacuuuagg

SEQ ID NO: 2980585 - RNA, 19 nt, Artificial Sequence
  Description of Artificial Sequence: Synthetic oligonucleotide
ucuauuccaggugaacuaa

SEQ ID NO: 2980586 - RNA, 19 nt, Artificial Sequence
  Description of Artificial Sequence: Synthetic oligonucleotide
aggugaacucuccaugcug

SEQ ID NO: 2980587 - RNA, 19 nt, Artificial Sequence
  Description of Artificial Sequence: Synthetic oligonucleotide
acucacgggagcugaguuc

SEQ ID NO: 2980588 - RNA, 19 nt, Artificial Sequence
  Description of Artificial Sequence: Synthetic oligonucleotide
aguugagggaagaaggccu

SEQ ID NO: 2980589 - RNA, 19 nt, Artificial Sequence
  Description of Artificial Sequence: Synthetic oligonucleotide
cauacucauugcucuuagg

SEQ ID NO: 2980590 - RNA, 19 nt, Artificial Sequence
  Description of Artificial Sequence: Synthetic oligonucleotide
aucucuauuccaggugaac

SEQ ID NO: 2980591 - RNA, 19 nt, Artificial Sequence
  Description of Artificial Sequence: Synthetic oligonucleotide
cuguuuacggugagaggag

SEQ ID NO: 2980592 - RNA, 19 nt, Artificial Sequence
  Description of Artificial Sequence: Synthetic oligonucleotide
cuaugggcauggcagaguc

SEQ ID NO: 2980593 - RNA, 19 nt, Artificial Sequence
  Description of Artificial Sequence: Synthetic oligonucleotide
gaagaaggccuguguuucc

SEQ ID NO: 2980594 - RNA, 19 nt, Artificial Sequence
  Description of Artificial Sequence: Synthetic oligonucleotide
acgggagcugaguuccggc

SEQ ID NO: 2980595 - RNA, 19 nt, Artificial Sequence
  Description of Artificial Sequence: Synthetic oligonucleotide
aagucggaagaggucagcu

SEQ ID NO: 2980596 - RNA, 19 nt, Artificial Sequence
  Description of Artificial Sequence: Synthetic oligonucleotide
ucucaagucggaagagguc

SEQ ID NO: 2980597 - RNA, 19 nt, Artificial Sequence
  Description of Artificial Sequence: Synthetic oligonucleotide
uaggugaacucuccaugcu

SEQ ID NO: 2980598 - RNA, 19 nt, Artificial Sequence
  Description of Artificial Sequence: Synthetic oligonucleotide
uuacggugagaggagguca

SEQ ID NO: 2980599 - RNA, 19 nt, Artificial Sequence
  Description of Artificial Sequence: Synthetic oligonucleotide
uguuucaucugaggguugu

SEQ ID NO: 2980600 - RNA, 19 nt, Artificial Sequence
  Description of Artificial Sequence: Synthetic oligonucleotide
uaguucagagaucucuauu

SEQ ID NO: 2980601 - RNA, 19 nt, Artificial Sequence
  Description of Artificial Sequence: Synthetic oligonucleotide
uuugaggguccauacucau

SEQ ID NO: 2980602 - RNA, 19 nt, Artificial Sequence
  Description of Artificial Sequence: Synthetic oligonucleotide
guuguugaguuccagcugu

SEQ ID NO: 2980603 - RNA, 19 nt, Artificial Sequence
  Description of Artificial Sequence: Synthetic oligonucleotide
gcuguuuacggugagagga

SEQ ID NO: 2980604 - RNA, 19 nt, Artificial Sequence
  Description of Artificial Sequence: Synthetic oligonucleotide
uuuacggugagaggagguc

SEQ ID NO: 2980605 - RNA, 19 nt, Artificial Sequence
  Description of Artificial Sequence: Synthetic oligonucleotide
aggcugugacuuuagggca

SEQ ID NO: 2980606 - RNA, 19 nt, Artificial Sequence
  Description of Artificial Sequence: Synthetic oligonucleotide
cucaagucggaagagguca

SEQ ID NO: 2980607 - RNA, 19 nt, Artificial Sequence
  Description of Artificial Sequence: Synthetic oligonucleotide
uucccaggggcuguuuacg

SEQ ID NO: 2980608 - RNA, 19 nt, Artificial Sequence
  Description of Artificial Sequence: Synthetic oligonucleotide
agccccauucucaagucgg

SEQ ID NO: 2980609 - RNA, 19 nt, Artificial Sequence
  Description of Artificial Sequence: Synthetic oligonucleotide
cacagcagacacacucacg

SEQ ID NO: 2980610 - RNA, 19 nt, Artificial Sequence
  Description of Artificial Sequence: Synthetic oligonucleotide
ucggaagaggucagcuaug

SEQ ID NO: 2980611 - RNA, 19 nt, Artificial Sequence
  Description of Artificial Sequence: Synthetic oligonucleotide
uucgugucuccuaguucag

SEQ ID NO: 2980612 - RNA, 19 nt, Artificial Sequence
  Description of Artificial Sequence: Synthetic oligonucleotide
auggcagaguccaaguuga

SEQ ID NO: 2980613 - RNA, 19 nt, Artificial Sequence
  Description of Artificial Sequence: Synthetic oligonucleotide
acuuuagggcaugcucccc

SEQ ID NO: 2980614 - RNA, 19 nt, Artificial Sequence
  Description of Artificial Sequence: Synthetic oligonucleotide
aggguccauacucauugcu

SEQ ID NO: 2980615 - RNA, 19 nt, Artificial Sequence
  Description of Artificial Sequence: Synthetic oligonucleotide
aguguucucacagcagaca

SEQ ID NO: 2980616 - RNA, 19 nt, Artificial Sequence
  Description of Artificial Sequence: Synthetic oligonucleotide
uccaugcugcuuucuggcc

SEQ ID NO: 2980617 - RNA, 19 nt, Artificial Sequence
  Description of Artificial Sequence: Synthetic oligonucleotide
aucugaggguuguugaguu

SEQ ID NO: 2980618 - RNA, 19 nt, Artificial Sequence
  Description of Artificial Sequence: Synthetic oligonucleotide
uccugggaguucccagggg

SEQ ID NO: 2980619 - RNA, 19 nt, Artificial Sequence
  Description of Artificial Sequence: Synthetic oligonucleotide
uuguugaguuccagcugug

SEQ ID NO: 2980620 - RNA, 19 nt, Artificial Sequence
  Description of Artificial Sequence: Synthetic oligonucleotide
uugcucuuaggcugugacu

SEQ ID NO: 2980621 - RNA, 19 nt, Artificial Sequence
  Description of Artificial Sequence: Synthetic oligonucleotide
cauucucaagucggaagag

SEQ ID NO: 2980622 - RNA, 19 nt, Artificial Sequence
  Description of Artificial Sequence: Synthetic oligonucleotide
augaaggaguguucucaca

SEQ ID NO: 2980623 - RNA, 19 nt, Artificial Sequence
  Description of Artificial Sequence: Synthetic oligonucleotide
ugucagagcaggggcaaca

SEQ ID NO: 2980624 - RNA, 19 nt, Artificial Sequence
  Description of Artificial Sequence: Synthetic oligonucleotide
aggucagcuaugggcaugg

SEQ ID NO: 2980625 - RNA, 19 nt, Artificial Sequence
  Description of Artificial Sequence: Synthetic oligonucleotide
gugaggugcugucuugagc

SEQ ID NO: 2980626 - RNA, 19 nt, Artificial Sequence
  Description of Artificial Sequence: Synthetic oligonucleotide
ugagcccuaggugaacucu

SEQ ID NO: 2980627 - RNA, 19 nt, Artificial Sequence
  Description of Artificial Sequence: Synthetic oligonucleotide
ugugacuuuagggcaugcu

SEQ ID NO: 2980628 - RNA, 19 nt, Artificial Sequence
  Description of Artificial Sequence: Synthetic oligonucleotide
ggugaacucuccaugcugc

SEQ ID NO: 2980629 - RNA, 19 nt, Artificial Sequence
  Description of Artificial Sequence: Synthetic oligonucleotide
ugaggguuguugaguucca

SEQ ID NO: 2980630 - RNA, 19 nt, Artificial Sequence
  Description of Artificial Sequence: Synthetic oligonucleotide
ugcugucuugagcccuagg

SEQ ID NO: 2980631 - RNA, 19 nt, Artificial Sequence
  Description of Artificial Sequence: Synthetic oligonucleotide
ccaggugaacuaaaugaag

SEQ ID NO: 2980632 - RNA, 19 nt, Artificial Sequence
  Description of Artificial Sequence: Synthetic oligonucleotide
guccugggaguucccaggg

SEQ ID NO: 2980633 - RNA, 19 nt, Artificial Sequence
  Description of Artificial Sequence: Synthetic oligonucleotide
gaagccccauucucaaguc

SEQ ID NO: 2980634 - RNA, 19 nt, Artificial Sequence
  Description of Artificial Sequence: Synthetic oligonucleotide
agagcaggggcaacaaugu

SEQ ID NO: 2980635 - RNA, 19 nt, Artificial Sequence
  Description of Artificial Sequence: Synthetic oligonucleotide
cuaaaugaagccccauucu

SEQ ID NO: 2980636 - RNA, 19 nt, Artificial Sequence
  Description of Artificial Sequence: Synthetic oligonucleotide
uacggugagaggaggucau

SEQ ID NO: 2980637 - RNA, 19 nt, Artificial Sequence
  Description of Artificial Sequence: Synthetic oligonucleotide
ucauccaggugaccuucgu

SEQ ID NO: 2980638 - RNA, 19 nt, Artificial Sequence
  Description of Artificial Sequence: Synthetic oligonucleotide
gaguccaaguugagggaag

SEQ ID NO: 2980639 - RNA, 19 nt, Artificial Sequence
  Description of Artificial Sequence: Synthetic oligonucleotide
ugcuccccaggugaggugc

SEQ ID NO: 2980640 - RNA, 19 nt, Artificial Sequence
  Description of Artificial Sequence: Synthetic oligonucleotide
cagcagacacacucacggg

SEQ ID NO: 2980641 - RNA, 19 nt, Artificial Sequence
  Description of Artificial Sequence: Synthetic oligonucleotide
cucuccaugcugcuuucug

SEQ ID NO: 2980642 - RNA, 19 nt, Artificial Sequence
  Description of Artificial Sequence: Synthetic oligonucleotide
uggguguccugggaguucc

SEQ ID NO: 2980643 - RNA, 19 nt, Artificial Sequence
  Description of Artificial Sequence: Synthetic oligonucleotide
augaagccccauucucaag

SEQ ID NO: 2980644 - RNA, 19 nt, Artificial Sequence
  Description of Artificial Sequence: Synthetic oligonucleotide
caucacuguguuucaucug

SEQ ID NO: 2980645 - RNA, 19 nt, Artificial Sequence
  Description of Artificial Sequence: Synthetic oligonucleotide
gguuguugaguuccagcug

SEQ ID NO: 2980646 - RNA, 19 nt, Artificial Sequence
  Description of Artificial Sequence: Synthetic oligonucleotide
cucacagcagacacacuca

SEQ ID NO: 2980647 - RNA, 19 nt, Artificial Sequence
  Description of Artificial Sequence: Synthetic oligonucleotide
guugagggaagaaggccug

SEQ ID NO: 2980648 - RNA, 19 nt, Artificial Sequence
  Description of Artificial Sequence: Synthetic oligonucleotide
cucuauuccaggugaacua

SEQ ID NO: 2980649 - RNA, 19 nt, Artificial Sequence
  Description of Artificial Sequence: Synthetic oligonucleotide
agcccuaggugaacucucc

SEQ ID NO: 2980650 - RNA, 19 nt, Artificial Sequence
  Description of Artificial Sequence: Synthetic oligonucleotide
cuuuagggcaugcucccca

SEQ ID NO: 2980651 - RNA, 19 nt, Artificial Sequence
  Description of Artificial Sequence: Synthetic oligonucleotide
gggcuguuuacggugagag

SEQ ID NO: 2980652 - RNA, 19 nt, Artificial Sequence
  Description of Artificial Sequence: Synthetic oligonucleotide
aaggccuguguuucccuuu

SEQ ID NO: 2980653 - RNA, 19 nt, Artificial Sequence
  Description of Artificial Sequence: Synthetic oligonucleotide
uguuucccuuuugaggguc

SEQ ID NO: 2980654 - RNA, 19 nt, Artificial Sequence
  Description of Artificial Sequence: Synthetic oligonucleotide
ccuguguuucccuuuugag

SEQ ID NO: 2980655 - RNA, 19 nt, Artificial Sequence
  Description of Artificial Sequence: Synthetic oligonucleotide
guguccugggaguucccag

SEQ ID NO: 2980656 - RNA, 19 nt, Artificial Sequence
  Description of Artificial Sequence: Synthetic oligonucleotide
cauccaggugaccuucgug

SEQ ID NO: 2980657 - RNA, 19 nt, Artificial Sequence
  Description of Artificial Sequence: Synthetic oligonucleotide
uccaggugaccuucguguc

SEQ ID NO: 2980658 - RNA, 19 nt, Artificial Sequence
  Description of Artificial Sequence: Synthetic oligonucleotide
gaguguucucacagcagac

SEQ ID NO: 2980659 - RNA, 19 nt, Artificial Sequence
  Description of Artificial Sequence: Synthetic oligonucleotide
aggaggucauccaggugac

SEQ ID NO: 2980660 - RNA, 19 nt, Artificial Sequence
  Description of Artificial Sequence: Synthetic oligonucleotide
ccuaggugaacucuccaug

SEQ ID NO: 2980661 - RNA, 19 nt, Artificial Sequence
  Description of Artificial Sequence: Synthetic oligonucleotide
agaguccaaguugagggaa

SEQ ID NO: 2980662 - RNA, 19 nt, Artificial Sequence
  Description of Artificial Sequence: Synthetic oligonucleotide
gaggugcugucuugagccc

SEQ ID NO: 2980663 - RNA, 19 nt, Artificial Sequence
  Description of Artificial Sequence: Synthetic oligonucleotide
ggcagaguccaaguugagg

SEQ ID NO: 2980664 - RNA, 19 nt, Artificial Sequence
  Description of Artificial Sequence: Synthetic oligonucleotide
ggaagaggucagcuauggg

SEQ ID NO: 2980665 - RNA, 19 nt, Artificial Sequence
  Description of Artificial Sequence: Synthetic oligonucleotide
ucugaggguuguugaguuc

SEQ ID NO: 2980666 - RNA, 19 nt, Artificial Sequence
  Description of Artificial Sequence: Synthetic oligonucleotide
agaggaggucauccaggug

SEQ ID NO: 2980667 - RNA, 19 nt, Artificial Sequence
  Description of Artificial Sequence: Synthetic oligonucleotide
ggaagaaggccuguguuuc

SEQ ID NO: 2980668 - RNA, 19 nt, Artificial Sequence
  Description of Artificial Sequence: Synthetic oligonucleotide
uccauacucauugcucuua

SEQ ID NO: 2980669 - RNA, 19 nt, Artificial Sequence
  Description of Artificial Sequence: Synthetic oligonucleotide
agguccuggguguccuggg

SEQ ID NO: 2980670 - RNA, 19 nt, Artificial Sequence
  Description of Artificial Sequence: Synthetic oligonucleotide
guucccaggggcuguuuac

SEQ ID NO: 2980671 - RNA, 19 nt, Artificial Sequence
  Description of Artificial Sequence: Synthetic oligonucleotide
gggagcugaguuccggcgg

SEQ ID NO: 2980672 - RNA, 19 nt, Artificial Sequence
  Description of Artificial Sequence: Synthetic oligonucleotide
agcuaugggcauggcagag

SEQ ID NO: 2980673 - RNA, 19 nt, Artificial Sequence
  Description of Artificial Sequence: Synthetic oligonucleotide
uugaggguccauacucauu

SEQ ID NO: 2980674 - RNA, 19 nt, Artificial Sequence
  Description of Artificial Sequence: Synthetic oligonucleotide
uggcagaguccaaguugag

SEQ ID NO: 2980675 - RNA, 19 nt, Artificial Sequence
  Description of Artificial Sequence: Synthetic oligonucleotide
agacacacucacgggagcu

SEQ ID NO: 2980676 - RNA, 19 nt, Artificial Sequence
  Description of Artificial Sequence: Synthetic oligonucleotide
gaggucauccaggugaccu

SEQ ID NO: 2980677 - RNA, 19 nt, Artificial Sequence
  Description of Artificial Sequence: Synthetic oligonucleotide
cagacacacucacgggagc

SEQ ID NO: 2980678 - RNA, 19 nt, Artificial Sequence
  Description of Artificial Sequence: Synthetic oligonucleotide
gagaggaggucauccaggu

SEQ ID NO: 2980679 - RNA, 19 nt, Artificial Sequence
  Description of Artificial Sequence: Synthetic oligonucleotide
agaaggccuguguuucccu

SEQ ID NO: 2980680 - RNA, 19 nt, Artificial Sequence
  Description of Artificial Sequence: Synthetic oligonucleotide
cuguguuucaucugagggu

SEQ ID NO: 2980681 - RNA, 19 nt, Artificial Sequence
  Description of Artificial Sequence: Synthetic oligonucleotide
accuucgugucuccuaguu

SEQ ID NO: 2980682 - RNA, 19 nt, Artificial Sequence
  Description of Artificial Sequence: Synthetic oligonucleotide
gaacucuccaugcugcuuu

SEQ ID NO: 2980683 - RNA, 19 nt, Artificial Sequence
  Description of Artificial Sequence: Synthetic oligonucleotide
ucacgggagcugaguuccg

SEQ ID NO: 2980684 - RNA, 19 nt, Artificial Sequence
  Description of Artificial Sequence: Synthetic oligonucleotide
aggugaccuucgugucucc

SEQ ID NO: 2980685 - RNA, 19 nt, Artificial Sequence
  Description of Artificial Sequence: Synthetic oligonucleotide
gacacacucacgggagcug

SEQ ID NO: 2980686 - RNA, 19 nt, Artificial Sequence
  Description of Artificial Sequence: Synthetic oligonucleotide
aggaguguucucacagcag

SEQ ID NO: 2980687 - RNA, 19 nt, Artificial Sequence
  Description of Artificial Sequence: Synthetic oligonucleotide
aguccaaguugagggaaga

SEQ ID NO: 2980688 - RNA, 19 nt, Artificial Sequence
  Description of Artificial Sequence: Synthetic oligonucleotide
agggcaugcuccccaggug

SEQ ID NO: 2980689 - RNA, 19 nt, Artificial Sequence
  Description of Artificial Sequence: Synthetic oligonucleotide
uuucccuuuugagggucca

SEQ ID NO: 2980690 - RNA, 19 nt, Artificial Sequence
  Description of Artificial Sequence: Synthetic oligonucleotide
ggcuguuuacggugagagg

SEQ ID NO: 2980691 - RNA, 19 nt, Artificial Sequence
  Description of Artificial Sequence: Synthetic oligonucleotide
gaggguuguugaguuccag

SEQ ID NO: 2980692 - RNA, 19 nt, Artificial Sequence
  Description of Artificial Sequence: Synthetic oligonucleotide
ugggaguucccaggggcug

SEQ ID NO: 2980693 - RNA, 19 nt, Artificial Sequence
  Description of Artificial Sequence: Synthetic oligonucleotide
caugcugcuuucuggccca

SEQ ID NO: 2980694 - RNA, 19 nt, Artificial Sequence
  Description of Artificial Sequence: Synthetic oligonucleotide
uugagcccuaggugaacuc

SEQ ID NO: 2980695 - RNA, 19 nt, Artificial Sequence
  Description of Artificial Sequence: Synthetic oligonucleotide
ucccuuuugaggguccaua

SEQ ID NO: 2980696 - RNA, 19 nt, Artificial Sequence
  Description of Artificial Sequence: Synthetic oligonucleotide
gguccauacucauugcucu

SEQ ID NO: 2980697 - RNA, 19 nt, Artificial Sequence
  Description of Artificial Sequence: Synthetic oligonucleotide
cgugucuccuaguucagag

SEQ ID NO: 2980698 - RNA, 19 nt, Artificial Sequence
  Description of Artificial Sequence: Synthetic oligonucleotide
ccaugcugcuuucuggccc

SEQ ID NO: 2980699 - RNA, 19 nt, Artificial Sequence
  Description of Artificial Sequence: Synthetic oligonucleotide
gcagacacacucacgggag

SEQ ID NO: 2980700 - RNA, 19 nt, Artificial Sequence
  Description of Artificial Sequence: Synthetic oligonucleotide
ggugaggugcugucuugag

SEQ ID NO: 2980701 - RNA, 19 nt, Artificial Sequence
  Description of Artificial Sequence: Synthetic oligonucleotide
gugucuccuaguucagaga

SEQ ID NO: 2980702 - RNA, 19 nt, Artificial Sequence
  Description of Artificial Sequence: Synthetic oligonucleotide
ggguuguugaguuccagcu

SEQ ID NO: 2980703 - RNA, 19 nt, Artificial Sequence
  Description of Artificial Sequence: Synthetic oligonucleotide
ggccugucagagcaggggc

SEQ ID NO: 2980704 - RNA, 19 nt, Artificial Sequence
  Description of Artificial Sequence: Synthetic oligonucleotide
cagaguccaaguugaggga

SEQ ID NO: 2980705 - RNA, 19 nt, Artificial Sequence
  Description of Artificial Sequence: Synthetic oligonucleotide
ucuggcccaggaacaucac

SEQ ID NO: 2980706 - RNA, 19 nt, Artificial Sequence
  Description of Artificial Sequence: Synthetic oligonucleotide
caagucggaagaggucagc

SEQ ID NO: 2980707 - RNA, 19 nt, Artificial Sequence
  Description of Artificial Sequence: Synthetic oligonucleotide
aguucccaggggcuguuua

SEQ ID NO: 2980708 - RNA, 19 nt, Artificial Sequence
  Description of Artificial Sequence: Synthetic oligonucleotide
agaggucagcuaugggcau

SEQ ID NO: 2980709 - RNA, 19 nt, Artificial Sequence
  Description of Artificial Sequence: Synthetic oligonucleotide
ggagcugaguuccggcggc

SEQ ID NO: 2980710 - RNA, 19 nt, Artificial Sequence
  Description of Artificial Sequence: Synthetic oligonucleotide
acacacucacgggagcuga

SEQ ID NO: 2980711 - RNA, 19 nt, Artificial Sequence
  Description of Artificial Sequence: Synthetic oligonucleotide
gagggaagaaggccugugu

SEQ ID NO: 2980712 - RNA, 19 nt, Artificial Sequence
  Description of Artificial Sequence: Synthetic oligonucleotide
ggugagaggaggucaucca

SEQ ID NO: 2980713 - RNA, 19 nt, Artificial Sequence
  Description of Artificial Sequence: Synthetic oligonucleotide
caggugaccuucgugucuc

SEQ ID NO: 2980714 - RNA, 19 nt, Artificial Sequence
  Description of Artificial Sequence: Synthetic oligonucleotide
ggaacaucacuguguuuca

SEQ ID NO: 2980715 - RNA, 19 nt, Artificial Sequence
  Description of Artificial Sequence: Synthetic oligonucleotide
ucuugagcccuaggugaac

SEQ ID NO: 2980716 - RNA, 19 nt, Artificial Sequence
  Description of Artificial Sequence: Synthetic oligonucleotide
guuucccuuuugagggucc

SEQ ID NO: 2980717 - RNA, 19 nt, Artificial Sequence
  Description of Artificial Sequence: Synthetic oligonucleotide
gucauccaggugaccuucg

SEQ ID NO: 2980718 - RNA, 19 nt, Artificial Sequence
  Description of Artificial Sequence: Synthetic oligonucleotide
caggugaggugcugucuug

SEQ ID NO: 2980719 - RNA, 19 nt, Artificial Sequence
  Description of Artificial Sequence: Synthetic oligonucleotide
cuauuccaggugaacuaaa

SEQ ID NO: 2980720 - RNA, 19 nt, Artificial Sequence
  Description of Artificial Sequence: Synthetic oligonucleotide
gagcaggggcaacaauguc

SEQ ID NO: 2980721 - RNA, 19 nt, Artificial Sequence
  Description of Artificial Sequence: Synthetic oligonucleotide
cacacucacgggagcugag

SEQ ID NO: 2980722 - RNA, 19 nt, Artificial Sequence
  Description of Artificial Sequence: Synthetic oligonucleotide
uucucacagcagacacacu

SEQ ID NO: 2980723 - RNA, 19 nt, Artificial Sequence
  Description of Artificial Sequence: Synthetic oligonucleotide
uugagggaagaaggccugu

SEQ ID NO: 2980724 - RNA, 19 nt, Artificial Sequence
  Description of Artificial Sequence: Synthetic oligonucleotide
gcugucuugagcccuaggu

SEQ ID NO: 2980725 - RNA, 19 nt, Artificial Sequence
  Description of Artificial Sequence: Synthetic oligonucleotide
aggggcuguuuacggugag

SEQ ID NO: 2980726 - RNA, 19 nt, Artificial Sequence
  Description of Artificial Sequence: Synthetic oligonucleotide
ucgugucuccuaguucaga

SEQ ID NO: 2980727 - RNA, 19 nt, Artificial Sequence
  Description of Artificial Sequence: Synthetic oligonucleotide
uuucuggcccaggaacauc

SEQ ID NO: 2980728 - RNA, 19 nt, Artificial Sequence
  Description of Artificial Sequence: Synthetic oligonucleotide
cccuuuugaggguccauac

SEQ ID NO: 2980729 - RNA, 19 nt, Artificial Sequence
  Description of Artificial Sequence: Synthetic oligonucleotide
ccaggggcuguuuacggug

SEQ ID NO: 2980730 - RNA, 19 nt, Artificial Sequence
  Description of Artificial Sequence: Synthetic oligonucleotide
cacgggagcugaguuccgg

SEQ ID NO: 2980731 - RNA, 19 nt, Artificial Sequence
  Description of Artificial Sequence: Synthetic oligonucleotide
gcugcuuucuggcccagga

SEQ ID NO: 2980732 - RNA, 19 nt, Artificial Sequence
  Description of Artificial Sequence: Synthetic oligonucleotide
aggucauccaggugaccuu

SEQ ID NO: 2980733 - RNA, 19 nt, Artificial Sequence
  Description of Artificial Sequence: Synthetic oligonucleotide
gaucucuauuccaggugaa

SEQ ID NO: 2980734 - RNA, 19 nt, Artificial Sequence
  Description of Artificial Sequence: Synthetic oligonucleotide
aggugaggugcugucuuga

SEQ ID NO: 2980735 - RNA, 19 nt, Artificial Sequence
  Description of Artificial Sequence: Synthetic oligonucleotide
ggggcaacaauguccaggu

SEQ ID NO: 2980736 - RNA, 19 nt, Artificial Sequence
  Description of Artificial Sequence: Synthetic oligonucleotide
gggcaugcuccccagguga

SEQ ID NO: 2980737 - RNA, 19 nt, Artificial Sequence
  Description of Artificial Sequence: Synthetic oligonucleotide
gagcccuaggugaacucuc

SEQ ID NO: 2980738 - RNA, 19 nt, Artificial Sequence
  Description of Artificial Sequence: Synthetic oligonucleotide
ucauugcucuuaggcugug

SEQ ID NO: 2980739 - RNA, 19 nt, Artificial Sequence
  Description of Artificial Sequence: Synthetic oligonucleotide
gcaggggcaacaaugucca

SEQ ID NO: 2980740 - RNA, 19 nt, Artificial Sequence
  Description of Artificial Sequence: Synthetic oligonucleotide
ugcugcuuucuggcccagg

SEQ ID NO: 2980741 - RNA, 19 nt, Artificial Sequence
  Description of Artificial Sequence: Synthetic oligonucleotide
uuccggcggccugucagag

SEQ ID NO: 2980742 - RNA, 19 nt, Artificial Sequence
  Description of Artificial Sequence: Synthetic oligonucleotide
cuaguucagagaucucuau

SEQ ID NO: 2980743 - RNA, 19 nt, Artificial Sequence
  Description of Artificial Sequence: Synthetic oligonucleotide
cucauugcucuuaggcugu

SEQ ID NO: 2980744 - RNA, 19 nt, Artificial Sequence
  Description of Artificial Sequence: Synthetic oligonucleotide
ggguccauacucauugcuc

SEQ ID NO: 2980745 - RNA, 19 nt, Artificial Sequence
  Description of Artificial Sequence: Synthetic oligonucleotide
acacucacgggagcugagu

SEQ ID NO: 2980746 - RNA, 19 nt, Artificial Sequence
  Description of Artificial Sequence: Synthetic oligonucleotide
aggccuguguuucccuuuu

SEQ ID NO: 2980747 - RNA, 19 nt, Artificial Sequence
  Description of Artificial Sequence: Synthetic oligonucleotide
acggugagaggaggucauc

SEQ ID NO: 2980748 - RNA, 19 nt, Artificial Sequence
  Description of Artificial Sequence: Synthetic oligonucleotide
cagcuaugggcauggcaga

SEQ ID NO: 2980749 - RNA, 19 nt, Artificial Sequence
  Description of Artificial Sequence: Synthetic oligonucleotide
gugaccuucgugucuccua

SEQ ID NO: 2980750 - RNA, 19 nt, Artificial Sequence
  Description of Artificial Sequence: Synthetic oligonucleotide
gccuguguuucccuuuuga

SEQ ID NO: 2980751 - RNA, 19 nt, Artificial Sequence
  Description of Artificial Sequence: Synthetic oligonucleotide
cugugacuuuagggcaugc

SEQ ID NO: 2980752 - RNA, 19 nt, Artificial Sequence
  Description of Artificial Sequence: Synthetic oligonucleotide
guuccggcggccugucaga

SEQ ID NO: 2980753 - RNA, 19 nt, Artificial Sequence
  Description of Artificial Sequence: Synthetic oligonucleotide
gggcauggcagaguccaag

SEQ ID NO: 2980754 - RNA, 19 nt, Artificial Sequence
  Description of Artificial Sequence: Synthetic oligonucleotide
augcuccccaggugaggug

SEQ ID NO: 2980755 - RNA, 19 nt, Artificial Sequence
  Description of Artificial Sequence: Synthetic oligonucleotide
uccggcggccugucagagc

SEQ ID NO: 2980756 - RNA, 19 nt, Artificial Sequence
  Description of Artificial Sequence: Synthetic oligonucleotide
guuuacggugagaggaggu

SEQ ID NO: 2980757 - RNA, 19 nt, Artificial Sequence
  Description of Artificial Sequence: Synthetic oligonucleotide
ugggcauggcagaguccaa

SEQ ID NO: 2980758 - RNA, 19 nt, Artificial Sequence
  Description of Artificial Sequence: Synthetic oligonucleotide
caggggcuguuuacgguga

SEQ ID NO: 2980759 - RNA, 19 nt, Artificial Sequence
  Description of Artificial Sequence: Synthetic oligonucleotide
gcaacaauguccagguccu

SEQ ID NO: 2980760 - RNA, 19 nt, Artificial Sequence
  Description of Artificial Sequence: Synthetic oligonucleotide
gcuuucuggcccaggaaca

SEQ ID NO: 2980761 - RNA, 19 nt, Artificial Sequence
  Description of Artificial Sequence: Synthetic oligonucleotide
cuccuaguucagagaucuc

SEQ ID NO: 2980762 - RNA, 19 nt, Artificial Sequence
  Description of Artificial Sequence: Synthetic oligonucleotide
ggucauccaggugaccuuc

SEQ ID NO: 2980763 - RNA, 19 nt, Artificial Sequence
  Description of Artificial Sequence: Synthetic oligonucleotide
cggaagaggucagcuaugg

SEQ ID NO: 2980764 - RNA, 19 nt, Artificial Sequence
  Description of Artificial Sequence: Synthetic oligonucleotide
gucuccuaguucagagauc

SEQ ID NO: 2980765 - RNA, 19 nt, Artificial Sequence
  Description of Artificial Sequence: Synthetic oligonucleotide
gagcugaguuccggcggcc

SEQ ID NO: 2980766 - RNA, 19 nt, Artificial Sequence
  Description of Artificial Sequence: Synthetic oligonucleotide
ccuucgugucuccuaguuc

SEQ ID NO: 2980767 - RNA, 19 nt, Artificial Sequence
  Description of Artificial Sequence: Synthetic oligonucleotide
uucccuuuugaggguccau

SEQ ID NO: 2980768 - RNA, 19 nt, Artificial Sequence
  Description of Artificial Sequence: Synthetic oligonucleotide
gcugaguuccggcggccug

SEQ ID NO: 2980769 - RNA, 19 nt, Artificial Sequence
  Description of Artificial Sequence: Synthetic oligonucleotide
gaacuaaaugaagccccau

SEQ ID NO: 2980770 - RNA, 19 nt, Artificial Sequence
  Description of Artificial Sequence: Synthetic oligonucleotide
agcugaguuccggcggccu

SEQ ID NO: 2980771 - RNA, 19 nt, Artificial Sequence
  Description of Artificial Sequence: Synthetic oligonucleotide
cuugagcccuaggugaacu

SEQ ID NO: 2980772 - RNA, 19 nt, Artificial Sequence
  Description of Artificial Sequence: Synthetic oligonucleotide
ugaguuccggcggccuguc

SEQ ID NO: 2980773 - RNA, 19 nt, Artificial Sequence
  Description of Artificial Sequence: Synthetic oligonucleotide
gaaggccuguguuucccuu

SEQ ID NO: 2980774 - RNA, 19 nt, Artificial Sequence
  Description of Artificial Sequence: Synthetic oligonucleotide
cucuuaggcugugacuuua

SEQ ID NO: 2980775 - RNA, 19 nt, Artificial Sequence
  Description of Artificial Sequence: Synthetic oligonucleotide
gucagagcaggggcaacaa

SEQ ID NO: 2980776 - RNA, 19 nt, Artificial Sequence
  Description of Artificial Sequence: Synthetic oligonucleotide
cgggagcugaguuccggcg

SEQ ID NO: 2980777 - RNA, 19 nt, Artificial Sequence
  Description of Artificial Sequence: Synthetic oligonucleotide
acucuccaugcugcuuucu

SEQ ID NO: 2980778 - RNA, 19 nt, Artificial Sequence
  Description of Artificial Sequence: Synthetic oligonucleotide
caggggcaacaauguccag

SEQ ID NO: 2980779 - RNA, 19 nt, Artificial Sequence
  Description of Artificial Sequence: Synthetic oligonucleotide
gcugugacuuuagggcaug

SEQ ID NO: 2980780 - RNA, 19 nt, Artificial Sequence
  Description of Artificial Sequence: Synthetic oligonucleotide
ggcaugcuccccaggugag

SEQ ID NO: 2980781 - RNA, 19 nt, Artificial Sequence
  Description of Artificial Sequence: Synthetic oligonucleotide
cugucagagcaggggcaac

SEQ ID NO: 2980782 - RNA, 19 nt, Artificial Sequence
  Description of Artificial Sequence: Synthetic oligonucleotide
guccaaguugagggaagaa

SEQ ID NO: 2980783 - RNA, 19 nt, Artificial Sequence
  Description of Artificial Sequence: Synthetic oligonucleotide
gggaagaaggccuguguuu

SEQ ID NO: 2980784 - RNA, 19 nt, Artificial Sequence
  Description of Artificial Sequence: Synthetic oligonucleotide
caugcuccccaggugaggu

SEQ ID NO: 2980785 - RNA, 19 nt, Artificial Sequence
  Description of Artificial Sequence: Synthetic oligonucleotide
cuggguguccugggaguuc

SEQ ID NO: 2980786 - RNA, 19 nt, Artificial Sequence
  Description of Artificial Sequence: Synthetic oligonucleotide
gcaugcuccccaggugagg

SEQ ID NO: 2980787 - RNA, 19 nt, Artificial Sequence
  Description of Artificial Sequence: Synthetic oligonucleotide
ggcauggcagaguccaagu

SEQ ID NO: 2980788 - RNA, 19 nt, Artificial Sequence
  Description of Artificial Sequence: Synthetic oligonucleotide
gaacaucacuguguuucau

SEQ ID NO: 2980789 - RNA, 19 nt, Artificial Sequence
  Description of Artificial Sequence: Synthetic oligonucleotide
guguuucccuuuugagggu

SEQ ID NO: 2980790 - RNA, 19 nt, Artificial Sequence
  Description of Artificial Sequence: Synthetic oligonucleotide
ccggcggccugucagagca

SEQ ID NO: 2980791 - RNA, 19 nt, Artificial Sequence
  Description of Artificial Sequence: Synthetic oligonucleotide
cauugcucuuaggcuguga

SEQ ID NO: 2980792 - RNA, 19 nt, Artificial Sequence
  Description of Artificial Sequence: Synthetic oligonucleotide
caauguccagguccugggu

SEQ ID NO: 2980793 - RNA, 19 nt, Artificial Sequence
  Description of Artificial Sequence: Synthetic oligonucleotide
gugcugucuugagcccuag

SEQ ID NO: 2980794 - RNA, 19 nt, Artificial Sequence
  Description of Artificial Sequence: Synthetic oligonucleotide
gguccuggguguccuggga

SEQ ID NO: 2980795 - RNA, 19 nt, Artificial Sequence
  Description of Artificial Sequence: Synthetic oligonucleotide
ggccuguguuucccuuuug

SEQ ID NO: 2980796 - RNA, 19 nt, Artificial Sequence
  Description of Artificial Sequence: Synthetic oligonucleotide
gaccuucgugucuccuagu

SEQ ID NO: 2980797 - RNA, 19 nt, Artificial Sequence
  Description of Artificial Sequence: Synthetic oligonucleotide
guccauacucauugcucuu

SEQ ID NO: 2980798 - RNA, 19 nt, Artificial Sequence
  Description of Artificial Sequence: Synthetic oligonucleotide
gaguuccggcggccuguca

SEQ ID NO: 2980799 - RNA, 19 nt, Artificial Sequence
  Description of Artificial Sequence: Synthetic oligonucleotide
augcugcuuucuggcccag

SEQ ID NO: 2980800 - RNA, 19 nt, Artificial Sequence
  Description of Artificial Sequence: Synthetic oligonucleotide
gcccuaggugaacucucca

SEQ ID NO: 2980801 - RNA, 19 nt, Artificial Sequence
  Description of Artificial Sequence: Synthetic oligonucleotide
ggaggucauccaggugacc

SEQ ID NO: 2980802 - RNA, 19 nt, Artificial Sequence
  Description of Artificial Sequence: Synthetic oligonucleotide
cacucacgggagcugaguu

SEQ ID NO: 2980803 - RNA, 19 nt, Artificial Sequence
  Description of Artificial Sequence: Synthetic oligonucleotide
gccugucagagcaggggca

SEQ ID NO: 2980804 - RNA, 19 nt, Artificial Sequence
  Description of Artificial Sequence: Synthetic oligonucleotide
cggccugucagagcagggg

SEQ ID NO: 2980805 - RNA, 19 nt, Artificial Sequence
  Description of Artificial Sequence: Synthetic oligonucleotide
ccuuuugaggguccauacu

SEQ ID NO: 2980806 - RNA, 19 nt, Artificial Sequence
  Description of Artificial Sequence: Synthetic oligonucleotide
ccaggaacaucacuguguu

SEQ ID NO: 2980807 - RNA, 19 nt, Artificial Sequence
  Description of Artificial Sequence: Synthetic oligonucleotide
gcggccugucagagcaggg

SEQ ID NO: 2980808 - RNA, 19 nt, Artificial Sequence
  Description of Artificial Sequence: Synthetic oligonucleotide
cugaguuccggcggccugu

SEQ ID NO: 2980809 - RNA, 19 nt, Artificial Sequence
  Description of Artificial Sequence: Synthetic oligonucleotide
gggcaacaauguccagguc

SEQ ID NO: 2980810 - RNA, 19 nt, Artificial Sequence
  Description of Artificial Sequence: Synthetic oligonucleotide
ggggcuguuuacggugaga

SEQ ID NO: 2980811 - RNA, 19 nt, Artificial Sequence
  Description of Artificial Sequence: Synthetic oligonucleotide
ccccaggugaggugcuguc

SEQ ID NO: 2980812 - RNA, 19 nt, Artificial Sequence
  Description of Artificial Sequence: Synthetic oligonucleotide
guuucaucugaggguuguu

SEQ ID NO: 2980813 - RNA, 19 nt, Artificial Sequence
  Description of Artificial Sequence: Synthetic oligonucleotide
ggugcugucuugagcccua

SEQ ID NO: 2980814 - RNA, 19 nt, Artificial Sequence
  Description of Artificial Sequence: Synthetic oligonucleotide
gcauggcagaguccaaguu

SEQ ID NO: 2980815 - RNA, 19 nt, Artificial Sequence
  Description of Artificial Sequence: Synthetic oligonucleotide
ggucagcuaugggcauggc

SEQ ID NO: 2980816 - RNA, 19 nt, Artificial Sequence
  Description of Artificial Sequence: Synthetic oligonucleotide
gccccauucucaagucgga

SEQ ID NO: 2980817 - RNA, 19 nt, Artificial Sequence
  Description of Artificial Sequence: Synthetic oligonucleotide
gcuaugggcauggcagagu

SEQ ID NO: 2980818 - RNA, 19 nt, Artificial Sequence
  Description of Artificial Sequence: Synthetic oligonucleotide
ccugucagagcaggggcaa

SEQ ID NO: 2980819 - RNA, 19 nt, Artificial Sequence
  Description of Artificial Sequence: Synthetic oligonucleotide
cccuaggugaacucuccau

SEQ ID NO: 2980820 - RNA, 19 nt, Artificial Sequence
  Description of Artificial Sequence: Synthetic oligonucleotide
caggaacaucacuguguuu

SEQ ID NO: 2980821 - RNA, 19 nt, Artificial Sequence
  Description of Artificial Sequence: Synthetic oligonucleotide
ggcugugacuuuagggcau

SEQ ID NO: 2980822 - RNA, 19 nt, Artificial Sequence
  Description of Artificial Sequence: Synthetic oligonucleotide
ccaggugaccuucgugucu

SEQ ID NO: 2980823 - RNA, 19 nt, Artificial Sequence
  Description of Artificial Sequence: Synthetic oligonucleotide
ggugaccuucgugucuccu

SEQ ID NO: 2980824 - RNA, 19 nt, Artificial Sequence
  Description of Artificial Sequence: Synthetic oligonucleotide
ggguguccugggaguuccc

SEQ ID NO: 2980825 - RNA, 19 nt, Artificial Sequence
  Description of Artificial Sequence: Synthetic oligonucleotide
gcucuuaggcugugacuuu

SEQ ID NO: 2980826 - RNA, 19 nt, Artificial Sequence
  Description of Artificial Sequence: Synthetic oligonucleotide
ccaggugaggugcugucuu

SEQ ID NO: 2980827 - RNA, 19 nt, Artificial Sequence
  Description of Artificial Sequence: Synthetic oligonucleotide
gggaguucccaggggcugu

SEQ ID NO: 2980828 - RNA, 19 nt, Artificial Sequence
  Description of Artificial Sequence: Synthetic oligonucleotide
ccccauucucaagucggaa

SEQ ID NO: 2980829 - RNA, 19 nt, Artificial Sequence
  Description of Artificial Sequence: Synthetic oligonucleotide
cccaggggcuguuuacggu

SEQ ID NO: 2980830 - RNA, 19 nt, Artificial Sequence
  Description of Artificial Sequence: Synthetic oligonucleotide
gaguucccaggggcuguuu

SEQ ID NO: 2980831 - RNA, 19 nt, Artificial Sequence
  Description of Artificial Sequence: Synthetic oligonucleotide
ggaguucccaggggcuguu

SEQ ID NO: 2980832 - RNA, 19 nt, Artificial Sequence
  Description of Artificial Sequence: Synthetic oligonucleotide
cggcggccugucagagcag

SEQ ID NO: 2980833 - RNA, 19 nt, Artificial Sequence
  Description of Artificial Sequence: Synthetic oligonucleotide
gcuccccaggugaggugcu

SEQ ID NO: 2980834 - RNA, 19 nt, Artificial Sequence
  Description of Artificial Sequence: Synthetic oligonucleotide
auagcugagaggcugagcc

SEQ ID NO: 2980835 - RNA, 19 nt, Artificial Sequence
  Description of Artificial Sequence: Synthetic oligonucleotide
uucuuaaugaaguugaacu

SEQ ID NO: 2980836 - RNA, 19 nt, Artificial Sequence
  Description of Artificial Sequence: Synthetic oligonucleotide
ugugucuccucaaacaugg

SEQ ID NO: 2980837 - RNA, 19 nt, Artificial Sequence
  Description of Artificial Sequence: Synthetic oligonucleotide
aaugaaguugaacugguga

SEQ ID NO: 2980838 - RNA, 19 nt, Artificial Sequence
  Description of Artificial Sequence: Synthetic oligonucleotide
aaagcaugcuucuuaauga

SEQ ID NO: 2980839 - RNA, 19 nt, Artificial Sequence
  Description of Artificial Sequence: Synthetic oligonucleotide
gaaagcaugcuucuuaaug

SEQ ID NO: 2980840 - RNA, 19 nt, Artificial Sequence
  Description of Artificial Sequence: Synthetic oligonucleotide
ucagcaaacggaaagcaug

SEQ ID NO: 2980841 - RNA, 19 nt, Artificial Sequence
  Description of Artificial Sequence: Synthetic oligonucleotide
uaugugucauauaggaucc

SEQ ID NO: 2980842 - RNA, 19 nt, Artificial Sequence
  Description of Artificial Sequence: Synthetic oligonucleotide
uacacuccagccaucaagg

SEQ ID NO: 2980843 - RNA, 19 nt, Artificial Sequence
  Description of Artificial Sequence: Synthetic oligonucleotide
cuuaaugaaguugaacugg

SEQ ID NO: 2980844 - RNA, 19 nt, Artificial Sequence
  Description of Artificial Sequence: Synthetic oligonucleotide
ucuuaaugaaguugaacug

SEQ ID NO: 2980845 - RNA, 19 nt, Artificial Sequence
  Description of Artificial Sequence: Synthetic oligonucleotide
ugcuucuuaaugaaguuga

SEQ ID NO: 2980846 - RNA, 19 nt, Artificial Sequence
  Description of Artificial Sequence: Synthetic oligonucleotide
guggguaugugucauauag

SEQ ID NO: 2980847 - RNA, 19 nt, Artificial Sequence
  Description of Artificial Sequence: Synthetic oligonucleotide
augucugugaacuuggacu

SEQ ID NO: 2980848 - RNA, 19 nt, Artificial Sequence
  Description of Artificial Sequence: Synthetic oligonucleotide
augaaguugaacuggugag

SEQ ID NO: 2980849 - RNA, 19 nt, Artificial Sequence
  Description of Artificial Sequence: Synthetic oligonucleotide
agaggcugagccuacacuc

SEQ ID NO: 2980850 - RNA, 19 nt, Artificial Sequence
  Description of Artificial Sequence: Synthetic oligonucleotide
cugaagaggacauaggcuc

SEQ ID NO: 2980851 - RNA, 19 nt, Artificial Sequence
  Description of Artificial Sequence: Synthetic oligonucleotide
gaugugagguugcaguagg

SEQ ID NO: 2980852 - RNA, 19 nt, Artificial Sequence
  Description of Artificial Sequence: Synthetic oligonucleotide
uuaaugaaguugaacuggu

SEQ ID NO: 2980853 - RNA, 19 nt, Artificial Sequence
  Description of Artificial Sequence: Synthetic oligonucleotide
ugagguugcaguaggugag

SEQ ID NO: 2980854 - RNA, 19 nt, Artificial Sequence
  Description of Artificial Sequence: Synthetic oligonucleotide
ugaagaggacauaggcucg

SEQ ID NO: 2980855 - RNA, 19 nt, Artificial Sequence
  Description of Artificial Sequence: Synthetic oligonucleotide
ucagauaguggguaugugu

SEQ ID NO: 2980856 - RNA, 19 nt, Artificial Sequence
  Description of Artificial Sequence: Synthetic oligonucleotide
uuucuucuccggaagcccg

SEQ ID NO: 2980857 - RNA, 19 nt, Artificial Sequence
  Description of Artificial Sequence: Synthetic oligonucleotide
aguaacggcaguccgcggg

SEQ ID NO: 2980858 - RNA, 19 nt, Artificial Sequence
  Description of Artificial Sequence: Synthetic oligonucleotide
caaacggaaagcaugcuuc

SEQ ID NO: 2980859 - RNA, 19 nt, Artificial Sequence
  Description of Artificial Sequence: Synthetic oligonucleotide
gucuccucaaacauggugg

SEQ ID NO: 2980860 - RNA, 19 nt, Artificial Sequence
  Description of Artificial Sequence: Synthetic oligonucleotide
gaacuuggacuucaggagc

SEQ ID NO: 2980861 - RNA, 19 nt, Artificial Sequence
  Description of Artificial Sequence: Synthetic oligonucleotide
guugcucagugcuuggugg

SEQ ID NO: 2980862 - RNA, 19 nt, Artificial Sequence
  Description of Artificial Sequence: Synthetic oligonucleotide
cacugaagaggacauaggc

SEQ ID NO: 2980863 - RNA, 19 nt, Artificial Sequence
  Description of Artificial Sequence: Synthetic oligonucleotide
acuccagccaucaaggcac

SEQ ID NO: 2980864 - RNA, 19 nt, Artificial Sequence
  Description of Artificial Sequence: Synthetic oligonucleotide
ugucuccucaaacauggug

SEQ ID NO: 2980865 - RNA, 19 nt, Artificial Sequence
  Description of Artificial Sequence: Synthetic oligonucleotide
uggguaugugucauauagg

SEQ ID NO: 2980866 - RNA, 19 nt, Artificial Sequence
  Description of Artificial Sequence: Synthetic oligonucleotide
gaugccaccaggcuucagc

SEQ ID NO: 2980867 - RNA, 19 nt, Artificial Sequence
  Description of Artificial Sequence: Synthetic oligonucleotide
uguuuucuucuccggaagc

SEQ ID NO: 2980868 - RNA, 19 nt, Artificial Sequence
  Description of Artificial Sequence: Synthetic oligonucleotide
gaucaucugagggaaggcg

SEQ ID NO: 2980869 - RNA, 19 nt, Artificial Sequence
  Description of Artificial Sequence: Synthetic oligonucleotide
ugcagagauagcugagagg

SEQ ID NO: 2980870 - RNA, 19 nt, Artificial Sequence
  Description of Artificial Sequence: Synthetic oligonucleotide
uucauuccaaccccugggc

SEQ ID NO: 2980871 - RNA, 19 nt, Artificial Sequence
  Description of Artificial Sequence: Synthetic oligonucleotide
ugagccuacacuccagcca

SEQ ID NO: 2980872 - RNA, 19 nt, Artificial Sequence
  Description of Artificial Sequence: Synthetic oligonucleotide
caucaaggcacugaagagg

SEQ ID NO: 2980873 - RNA, 19 nt, Artificial Sequence
  Description of Artificial Sequence: Synthetic oligonucleotide
uccucaaacauggugguga

SEQ ID NO: 2980874 - RNA, 19 nt, Artificial Sequence
  Description of Artificial Sequence: Synthetic oligonucleotide
gaaguugaacuggugagug

SEQ ID NO: 2980875 - RNA, 19 nt, Artificial Sequence
  Description of Artificial Sequence: Synthetic oligonucleotide
gcagagauagcugagaggc

SEQ ID NO: 2980876 - RNA, 19 nt, Artificial Sequence
  Description of Artificial Sequence: Synthetic oligonucleotide
aaacggaaagcaugcuucu

SEQ ID NO: 2980877 - RNA, 19 nt, Artificial Sequence
  Description of Artificial Sequence: Synthetic oligonucleotide
aguaggugaggaugccacc

SEQ ID NO: 2980878 - RNA, 19 nt, Artificial Sequence
  Description of Artificial Sequence: Synthetic oligonucleotide
ugcuugguggaccaggggu

SEQ ID NO: 2980879 - RNA, 19 nt, Artificial Sequence
  Description of Artificial Sequence: Synthetic oligonucleotide
guugcaguaggugaggaug

SEQ ID NO: 2980880 - RNA, 19 nt, Artificial Sequence
  Description of Artificial Sequence: Synthetic oligonucleotide
uggaccaggggugugauca

SEQ ID NO: 2980881 - RNA, 19 nt, Artificial Sequence
  Description of Artificial Sequence: Synthetic oligonucleotide
uggugagugugccaggucu

SEQ ID NO: 2980882 - RNA, 19 nt, Artificial Sequence
  Description of Artificial Sequence: Synthetic oligonucleotide
cuacacuccagccaucaag

SEQ ID NO: 2980883 - RNA, 19 nt, Artificial Sequence
  Description of Artificial Sequence: Synthetic oligonucleotide
guaguaacggcaguccgcg

SEQ ID NO: 2980884 - RNA, 19 nt, Artificial Sequence
  Description of Artificial Sequence: Synthetic oligonucleotide
cagauaguggguauguguc

SEQ ID NO: 2980885 - RNA, 19 nt, Artificial Sequence
  Description of Artificial Sequence: Synthetic oligonucleotide
acauaggcucguucauucc

SEQ ID NO: 2980886 - RNA, 19 nt, Artificial Sequence
  Description of Artificial Sequence: Synthetic oligonucleotide
gacauaggcucguucauuc

SEQ ID NO: 2980887 - RNA, 19 nt, Artificial Sequence
  Description of Artificial Sequence: Synthetic oligonucleotide
aguugaacuggugagugug

SEQ ID NO: 2980888 - RNA, 19 nt, Artificial Sequence
  Description of Artificial Sequence: Synthetic oligonucleotide
agagauagcugagaggcug

SEQ ID NO: 2980889 - RNA, 19 nt, Artificial Sequence
  Description of Artificial Sequence: Synthetic oligonucleotide
ucacacugcagagauagcu

SEQ ID NO: 2980890 - RNA, 19 nt, Artificial Sequence
  Description of Artificial Sequence: Synthetic oligonucleotide
gaggacauaggcucguuca

SEQ ID NO: 2980891 - RNA, 19 nt, Artificial Sequence
  Description of Artificial Sequence: Synthetic oligonucleotide
gaacuggugagugugccag

SEQ ID NO: 2980892 - RNA, 19 nt, Artificial Sequence
  Description of Artificial Sequence: Synthetic oligonucleotide
uugcaguaggugaggaugc

SEQ ID NO: 2980893 - RNA, 19 nt, Artificial Sequence
  Description of Artificial Sequence: Synthetic oligonucleotide
aagcccgccucuugcagcg

SEQ ID NO: 2980894 - RNA, 19 nt, Artificial Sequence
  Description of Artificial Sequence: Synthetic oligonucleotide
uaaugaaguugaacuggug

SEQ ID NO: 2980895 - RNA, 19 nt, Artificial Sequence
  Description of Artificial Sequence: Synthetic oligonucleotide
cagcaaacggaaagcaugc

SEQ ID NO: 2980896 - RNA, 19 nt, Artificial Sequence
  Description of Artificial Sequence: Synthetic oligonucleotide
aagcaugcuucuuaaugaa

SEQ ID NO: 2980897 - RNA, 19 nt, Artificial Sequence
  Description of Artificial Sequence: Synthetic oligonucleotide
ucauuccaaccccugggcc

SEQ ID NO: 2980898 - RNA, 19 nt, Artificial Sequence
  Description of Artificial Sequence: Synthetic oligonucleotide
gugccaucaccucagugcg

SEQ ID NO: 2980899 - RNA, 19 nt, Artificial Sequence
  Description of Artificial Sequence: Synthetic oligonucleotide
uuuucuucuccggaagccc

SEQ ID NO: 2980900 - RNA, 19 nt, Artificial Sequence
  Description of Artificial Sequence: Synthetic oligonucleotide
gaugucugugaacuuggac

SEQ ID NO: 2980901 - RNA, 19 nt, Artificial Sequence
  Description of Artificial Sequence: Synthetic oligonucleotide
gauguuuucuucuccggaa

SEQ ID NO: 2980902 - RNA, 19 nt, Artificial Sequence
  Description of Artificial Sequence: Synthetic oligonucleotide
aggcucguucauuccaacc

SEQ ID NO: 2980903 - RNA, 19 nt, Artificial Sequence
  Description of Artificial Sequence: Synthetic oligonucleotide
gugaucaucugagggaagg

SEQ ID NO: 2980904 - RNA, 19 nt, Artificial Sequence
  Description of Artificial Sequence: Synthetic oligonucleotide
ggucuccucagauaguggg

SEQ ID NO: 2980905 - RNA, 19 nt, Artificial Sequence
  Description of Artificial Sequence: Synthetic oligonucleotide
agugcggauguuuucuucu

SEQ ID NO: 2980906 - RNA, 19 nt, Artificial Sequence
  Description of Artificial Sequence: Synthetic oligonucleotide
ugucugugaacuuggacuu

SEQ ID NO: 2980907 - RNA, 19 nt, Artificial Sequence
  Description of Artificial Sequence: Synthetic oligonucleotide
cuucuuaaugaaguugaac

SEQ ID NO: 2980908 - RNA, 19 nt, Artificial Sequence
  Description of Artificial Sequence: Synthetic oligonucleotide
uuggacuucaggagcuccc

SEQ ID NO: 2980909 - RNA, 19 nt, Artificial Sequence
  Description of Artificial Sequence: Synthetic oligonucleotide
ugaaguugaacuggugagu

SEQ ID NO: 2980910 - RNA, 19 nt, Artificial Sequence
  Description of Artificial Sequence: Synthetic oligonucleotide
agaggacauaggcucguuc

SEQ ID NO: 2980911 - RNA, 19 nt, Artificial Sequence
  Description of Artificial Sequence: Synthetic oligonucleotide
ugugagguugcaguaggug

SEQ ID NO: 2980912 - RNA, 19 nt, Artificial Sequence
  Description of Artificial Sequence: Synthetic oligonucleotide
gaaggcguaguaacggcag

SEQ ID NO: 2980913 - RNA, 19 nt, Artificial Sequence
  Description of Artificial Sequence: Synthetic oligonucleotide
ugcggauguuuucuucucc

SEQ ID NO: 2980914 - RNA, 19 nt, Artificial Sequence
  Description of Artificial Sequence: Synthetic oligonucleotide
gggugugaucaucugaggg

SEQ ID NO: 2980915 - RNA, 19 nt, Artificial Sequence
  Description of Artificial Sequence: Synthetic oligonucleotide
aucaccucagugcggaugu

SEQ ID NO: 2980916 - RNA, 19 nt, Artificial Sequence
  Description of Artificial Sequence: Synthetic oligonucleotide
uucagcaaacggaaagcau

SEQ ID NO: 2980917 - RNA, 19 nt, Artificial Sequence
  Description of Artificial Sequence: Synthetic oligonucleotide
acacugcagagauagcuga

SEQ ID NO: 2980918 - RNA, 19 nt, Artificial Sequence
  Description of Artificial Sequence: Synthetic oligonucleotide
ucugugaacuuggacuuca

SEQ ID NO: 2980919 - RNA, 19 nt, Artificial Sequence
  Description of Artificial Sequence: Synthetic oligonucleotide
accugugucuccucaaaca

SEQ ID NO: 2980920 - RNA, 19 nt, Artificial Sequence
  Description of Artificial Sequence: Synthetic oligonucleotide
ggguaugugucauauagga

SEQ ID NO: 2980921 - RNA, 19 nt, Artificial Sequence
  Description of Artificial Sequence: Synthetic oligonucleotide
aguugcucagugcuuggug

SEQ ID NO: 2980922 - RNA, 19 nt, Artificial Sequence
  Description of Artificial Sequence: Synthetic oligonucleotide
agggaaggcguaguaacgg

SEQ ID NO: 2980923 - RNA, 19 nt, Artificial Sequence
  Description of Artificial Sequence: Synthetic oligonucleotide
caguaggugaggaugccac

SEQ ID NO: 2980924 - RNA, 19 nt, Artificial Sequence
  Description of Artificial Sequence: Synthetic oligonucleotide
acacuccagccaucaaggc

SEQ ID NO: 2980925 - RNA, 19 nt, Artificial Sequence
  Description of Artificial Sequence: Synthetic oligonucleotide
cacacugcagagauagcug

SEQ ID NO: 2980926 - RNA, 19 nt, Artificial Sequence
  Description of Artificial Sequence: Synthetic oligonucleotide
cugcagagauagcugagag

SEQ ID NO: 2980927 - RNA, 19 nt, Artificial Sequence
  Description of Artificial Sequence: Synthetic oligonucleotide
aacuggugagugugccagg

SEQ ID NO: 2980928 - RNA, 19 nt, Artificial Sequence
  Description of Artificial Sequence: Synthetic oligonucleotide
ugaggaugccaccaggcuu

SEQ ID NO: 2980929 - RNA, 19 nt, Artificial Sequence
  Description of Artificial Sequence: Synthetic oligonucleotide
gugaugucugugaacuugg

SEQ ID NO: 2980930 - RNA, 19 nt, Artificial Sequence
  Description of Artificial Sequence: Synthetic oligonucleotide
agauaguggguauguguca

SEQ ID NO: 2980931 - RNA, 19 nt, Artificial Sequence
  Description of Artificial Sequence: Synthetic oligonucleotide
guuuucuucuccggaagcc

SEQ ID NO: 2980932 - RNA, 19 nt, Artificial Sequence
  Description of Artificial Sequence: Synthetic oligonucleotide
gagggaaggcguaguaacg

SEQ ID NO: 2980933 - RNA, 19 nt, Artificial Sequence
  Description of Artificial Sequence: Synthetic oligonucleotide
acugaagaggacauaggcu

SEQ ID NO: 2980934 - RNA, 19 nt, Artificial Sequence
  Description of Artificial Sequence: Synthetic oligonucleotide
ggcucguucauuccaaccc

SEQ ID NO: 2980935 - RNA, 19 nt, Artificial Sequence
  Description of Artificial Sequence: Synthetic oligonucleotide
aggggugugaucaucugag

SEQ ID NO: 2980936 - RNA, 19 nt, Artificial Sequence
  Description of Artificial Sequence: Synthetic oligonucleotide
ugugaucaucugagggaag

SEQ ID NO: 2980937 - RNA, 19 nt, Artificial Sequence
  Description of Artificial Sequence: Synthetic oligonucleotide
ucuccucaaacaugguggu

SEQ ID NO: 2980938 - RNA, 19 nt, Artificial Sequence
  Description of Artificial Sequence: Synthetic oligonucleotide
uaggugaggaugccaccag

SEQ ID NO: 2980939 - RNA, 19 nt, Artificial Sequence
  Description of Artificial Sequence: Synthetic oligonucleotide
aucaaggcacugaagagga

SEQ ID NO: 2980940 - RNA, 19 nt, Artificial Sequence
  Description of Artificial Sequence: Synthetic oligonucleotide
accaggcuucagcaaacgg

SEQ ID NO: 2980941 - RNA, 19 nt, Artificial Sequence
  Description of Artificial Sequence: Synthetic oligonucleotide
aacuuggacuucaggagcu

SEQ ID NO: 2980942 - RNA, 19 nt, Artificial Sequence
  Description of Artificial Sequence: Synthetic oligonucleotide
gccaggucuccucagauag

SEQ ID NO: 2980943 - RNA, 19 nt, Artificial Sequence
  Description of Artificial Sequence: Synthetic oligonucleotide
augguggugaugucuguga

SEQ ID NO: 2980944 - RNA, 19 nt, Artificial Sequence
  Description of Artificial Sequence: Synthetic oligonucleotide
ggcacugaagaggacauag

SEQ ID NO: 2980945 - RNA, 19 nt, Artificial Sequence
  Description of Artificial Sequence: Synthetic oligonucleotide
gccaucaaggcacugaaga

SEQ ID NO: 2980946 - RNA, 19 nt, Artificial Sequence
  Description of Artificial Sequence: Synthetic oligonucleotide
ugagaggcugagccuacac

SEQ ID NO: 2980947 - RNA, 19 nt, Artificial Sequence
  Description of Artificial Sequence: Synthetic oligonucleotide
ugugccaggucuccucaga

SEQ ID NO: 2980948 - RNA, 19 nt, Artificial Sequence
  Description of Artificial Sequence: Synthetic oligonucleotide
ggugugaucaucugaggga

SEQ ID NO: 2980949 - RNA, 19 nt, Artificial Sequence
  Description of Artificial Sequence: Synthetic oligonucleotide
ugaucaucugagggaaggc

SEQ ID NO: 2980950 - RNA, 19 nt, Artificial Sequence
  Description of Artificial Sequence: Synthetic oligonucleotide
caaccccugggccaguugc

SEQ ID NO: 2980951 - RNA, 19 nt, Artificial Sequence
  Description of Artificial Sequence: Synthetic oligonucleotide
ucguucauuccaaccccug

SEQ ID NO: 2980952 - RNA, 19 nt, Artificial Sequence
  Description of Artificial Sequence: Synthetic oligonucleotide
aacggcaguccgcgggcgg

SEQ ID NO: 2980953 - RNA, 19 nt, Artificial Sequence
  Description of Artificial Sequence: Synthetic oligonucleotide
cugagccuacacuccagcc

SEQ ID NO: 2980954 - RNA, 19 nt, Artificial Sequence
  Description of Artificial Sequence: Synthetic oligonucleotide
aaggcguaguaacggcagu

SEQ ID NO: 2980955 - RNA, 19 nt, Artificial Sequence
  Description of Artificial Sequence: Synthetic oligonucleotide
acggaaagcaugcuucuua

SEQ ID NO: 2980956 - RNA, 19 nt, Artificial Sequence
  Description of Artificial Sequence: Synthetic oligonucleotide
gaagcccgccucuugcagc

SEQ ID NO: 2980957 - RNA, 19 nt, Artificial Sequence
  Description of Artificial Sequence: Synthetic oligonucleotide
gaggaugccaccaggcuuc

SEQ ID NO: 2980958 - RNA, 19 nt, Artificial Sequence
  Description of Artificial Sequence: Synthetic oligonucleotide
ggugaugucugugaacuug

SEQ ID NO: 2980959 - RNA, 19 nt, Artificial Sequence
  Description of Artificial Sequence: Synthetic oligonucleotide
agcgcaggcaccugugucu

SEQ ID NO: 2980960 - RNA, 19 nt, Artificial Sequence
  Description of Artificial Sequence: Synthetic oligonucleotide
ucugagggaaggcguagua

SEQ ID NO: 2980961 - RNA, 19 nt, Artificial Sequence
  Description of Artificial Sequence: Synthetic oligonucleotide
agugcuugguggaccaggg

SEQ ID NO: 2980962 - RNA, 19 nt, Artificial Sequence
  Description of Artificial Sequence: Synthetic oligonucleotide
uucuucuccggaagcccgc

SEQ ID NO: 2980963 - RNA, 19 nt, Artificial Sequence
  Description of Artificial Sequence: Synthetic oligonucleotide
ugaugucugugaacuugga

SEQ ID NO: 2980964 - RNA, 19 nt, Artificial Sequence
  Description of Artificial Sequence: Synthetic oligonucleotide
gagguugcaguaggugagg

SEQ ID NO: 2980965 - RNA, 19 nt, Artificial Sequence
  Description of Artificial Sequence: Synthetic oligonucleotide
gcggauguuuucuucuccg

SEQ ID NO: 2980966 - RNA, 19 nt, Artificial Sequence
  Description of Artificial Sequence: Synthetic oligonucleotide
augccaccaggcuucagca

SEQ ID NO: 2980967 - RNA, 19 nt, Artificial Sequence
  Description of Artificial Sequence: Synthetic oligonucleotide
cauaggcucguucauucca

SEQ ID NO: 2980968 - RNA, 19 nt, Artificial Sequence
  Description of Artificial Sequence: Synthetic oligonucleotide
guaacggcaguccgcgggc

SEQ ID NO: 2980969 - RNA, 19 nt, Artificial Sequence
  Description of Artificial Sequence: Synthetic oligonucleotide
caggcuucagcaaacggaa

SEQ ID NO: 2980970 - RNA, 19 nt, Artificial Sequence
  Description of Artificial Sequence: Synthetic oligonucleotide
caggucuccucagauagug

SEQ ID NO: 2980971 - RNA, 19 nt, Artificial Sequence
  Description of Artificial Sequence: Synthetic oligonucleotide
aucaucugagggaaggcgu

SEQ ID NO: 2980972 - RNA, 19 nt, Artificial Sequence
  Description of Artificial Sequence: Synthetic oligonucleotide
agugugccaggucuccuca

SEQ ID NO: 2980973 - RNA, 19 nt, Artificial Sequence
  Description of Artificial Sequence: Synthetic oligonucleotide
uaguggguaugugucauau

SEQ ID NO: 2980974 - RNA, 19 nt, Artificial Sequence
  Description of Artificial Sequence: Synthetic oligonucleotide
ucuugcagcgcaggcaccu

SEQ ID NO: 2980975 - RNA, 19 nt, Artificial Sequence
  Description of Artificial Sequence: Synthetic oligonucleotide
ugguggugaugucugugaa

SEQ ID NO: 2980976 - RNA, 19 nt, Artificial Sequence
  Description of Artificial Sequence: Synthetic oligonucleotide
ucuccucagauagugggua

SEQ ID NO: 2980977 - RNA, 19 nt, Artificial Sequence
  Description of Artificial Sequence: Synthetic oligonucleotide
aggcguaguaacggcaguc

SEQ ID NO: 2980978 - RNA, 19 nt, Artificial Sequence
  Description of Artificial Sequence: Synthetic oligonucleotide
gauagcugagaggcugagc

SEQ ID NO: 2980979 - RNA, 19 nt, Artificial Sequence
  Description of Artificial Sequence: Synthetic oligonucleotide
auuccaaccccugggccag

SEQ ID NO: 2980980 - RNA, 19 nt, Artificial Sequence
  Description of Artificial Sequence: Synthetic oligonucleotide
augugucauauaggauccc

SEQ ID NO: 2980981 - RNA, 19 nt, Artificial Sequence
  Description of Artificial Sequence: Synthetic oligonucleotide
uccucagauaguggguaug

SEQ ID NO: 2980982 - RNA, 19 nt, Artificial Sequence
  Description of Artificial Sequence: Synthetic oligonucleotide
agcaugcuucuuaaugaag

SEQ ID NO: 2980983 - RNA, 19 nt, Artificial Sequence
  Description of Artificial Sequence: Synthetic oligonucleotide
uggacuucaggagcucccc

SEQ ID NO: 2980984 - RNA, 19 nt, Artificial Sequence
  Description of Artificial Sequence: Synthetic oligonucleotide
cacugcagagauagcugag

SEQ ID NO: 2980985 - RNA, 19 nt, Artificial Sequence
  Description of Artificial Sequence: Synthetic oligonucleotide
ugccaucaccucagugcgg

SEQ ID NO: 2980986 - RNA, 19 nt, Artificial Sequence
  Description of Artificial Sequence: Synthetic oligonucleotide
gaggcugagccuacacucc

SEQ ID NO: 2980987 - RNA, 19 nt, Artificial Sequence
  Description of Artificial Sequence: Synthetic oligonucleotide
uucuccggaagcccgccuc

SEQ ID NO: 2980988 - RNA, 19 nt, Artificial Sequence
  Description of Artificial Sequence: Synthetic oligonucleotide
ugggccaguugcucagugc

SEQ ID NO: 2980989 - RNA, 19 nt, Artificial Sequence
  Description of Artificial Sequence: Synthetic oligonucleotide
ugcagcgcaggcaccugug

SEQ ID NO: 2980990 - RNA, 19 nt, Artificial Sequence
  Description of Artificial Sequence: Synthetic oligonucleotide
aggaugugagguugcagua

SEQ ID NO: 2980991 - RNA, 19 nt, Artificial Sequence
  Description of Artificial Sequence: Synthetic oligonucleotide
guggugaugucugugaacu

SEQ ID NO: 2980992 - RNA, 19 nt, Artificial Sequence
  Description of Artificial Sequence: Synthetic oligonucleotide
aggacauaggcucguucau

SEQ ID NO: 2980993 - RNA, 19 nt, Artificial Sequence
  Description of Artificial Sequence: Synthetic oligonucleotide
ccaucaaggcacugaagag

SEQ ID NO: 2980994 - RNA, 19 nt, Artificial Sequence
  Description of Artificial Sequence: Synthetic oligonucleotide
cuucagcaaacggaaagca

SEQ ID NO: 2980995 - RNA, 19 nt, Artificial Sequence
  Description of Artificial Sequence: Synthetic oligonucleotide
guaggugaggaugccacca

SEQ ID NO: 2980996 - RNA, 19 nt, Artificial Sequence
  Description of Artificial Sequence: Synthetic oligonucleotide
cagugcuugguggaccagg

SEQ ID NO: 2980997 - RNA, 19 nt, Artificial Sequence
  Description of Artificial Sequence: Synthetic oligonucleotide
caggaugugagguugcagu

SEQ ID NO: 2980998 - RNA, 19 nt, Artificial Sequence
  Description of Artificial Sequence: Synthetic oligonucleotide
ucuccggaagcccgccucu

SEQ ID NO: 2980999 - RNA, 19 nt, Artificial Sequence
  Description of Artificial Sequence: Synthetic oligonucleotide
uaguaacggcaguccgcgg

SEQ ID NO: 2981000 - RNA, 19 nt, Artificial Sequence
  Description of Artificial Sequence: Synthetic oligonucleotide
ggauguuuucuucuccgga

SEQ ID NO: 2981001 - RNA, 19 nt, Artificial Sequence
  Description of Artificial Sequence: Synthetic oligonucleotide
gcucguucauuccaacccc

SEQ ID NO: 2981002 - RNA, 19 nt, Artificial Sequence
  Description of Artificial Sequence: Synthetic oligonucleotide
gagugugccaggucuccuc

SEQ ID NO: 2981003 - RNA, 19 nt, Artificial Sequence
  Description of Artificial Sequence: Synthetic oligonucleotide
cacuccagccaucaaggca

SEQ ID NO: 2981004 - RNA, 19 nt, Artificial Sequence
  Description of Artificial Sequence: Synthetic oligonucleotide
gcguaguaacggcaguccg

SEQ ID NO: 2981005 - RNA, 19 nt, Artificial Sequence
  Description of Artificial Sequence: Synthetic oligonucleotide
uccggaagcccgccucuug

SEQ ID NO: 2981006 - RNA, 19 nt, Artificial Sequence
  Description of Artificial Sequence: Synthetic oligonucleotide
ucaaggcacugaagaggac

SEQ ID NO: 2981007 - RNA, 19 nt, Artificial Sequence
  Description of Artificial Sequence: Synthetic oligonucleotide
uagcugagaggcugagccu

SEQ ID NO: 2981008 - RNA, 19 nt, Artificial Sequence
  Description of Artificial Sequence: Synthetic oligonucleotide
cugugaacuuggacuucag

SEQ ID NO: 2981009 - RNA, 19 nt, Artificial Sequence
  Description of Artificial Sequence: Synthetic oligonucleotide
acuggugagugugccaggu

SEQ ID NO: 2981010 - RNA, 19 nt, Artificial Sequence
  Description of Artificial Sequence: Synthetic oligonucleotide
agauagcugagaggcugag

SEQ ID NO: 2981011 - RNA, 19 nt, Artificial Sequence
  Description of Artificial Sequence: Synthetic oligonucleotide
caucaccucagugcggaug

SEQ ID NO: 2981012 - RNA, 19 nt, Artificial Sequence
  Description of Artificial Sequence: Synthetic oligonucleotide
uaggcucguucauuccaac

SEQ ID NO: 2981013 - RNA, 19 nt, Artificial Sequence
  Description of Artificial Sequence: Synthetic oligonucleotide
aggcugagccuacacucca

SEQ ID NO: 2981014 - RNA, 19 nt, Artificial Sequence
  Description of Artificial Sequence: Synthetic oligonucleotide
gugugaucaucugagggaa

SEQ ID NO: 2981015 - RNA, 19 nt, Artificial Sequence
  Description of Artificial Sequence: Synthetic oligonucleotide
ggaugugagguugcaguag

SEQ ID NO: 2981016 - RNA, 19 nt, Artificial Sequence
  Description of Artificial Sequence: Synthetic oligonucleotide
uugcagcgcaggcaccugu

SEQ ID NO: 2981017 - RNA, 19 nt, Artificial Sequence
  Description of Artificial Sequence: Synthetic oligonucleotide
ggugaggaugccaccaggc

SEQ ID NO: 2981018 - RNA, 19 nt, Artificial Sequence
  Description of Artificial Sequence: Synthetic oligonucleotide
caccugugucuccucaaac

SEQ ID NO: 2981019 - RNA, 19 nt, Artificial Sequence
  Description of Artificial Sequence: Synthetic oligonucleotide
gggaaggcguaguaacggc

SEQ ID NO: 2981020 - RNA, 19 nt, Artificial Sequence
  Description of Artificial Sequence: Synthetic oligonucleotide
cucagugcuugguggacca

SEQ ID NO: 2981021 - RNA, 19 nt, Artificial Sequence
  Description of Artificial Sequence: Synthetic oligonucleotide
ucuucuccggaagcccgcc

SEQ ID NO: 2981022 - RNA, 19 nt, Artificial Sequence
  Description of Artificial Sequence: Synthetic oligonucleotide
gguggugaugucugugaac

SEQ ID NO: 2981023 - RNA, 19 nt, Artificial Sequence
  Description of Artificial Sequence: Synthetic oligonucleotide
ucagugcggauguuuucuu

SEQ ID NO: 2981024 - RNA, 19 nt, Artificial Sequence
  Description of Artificial Sequence: Synthetic oligonucleotide
gauaguggguaugugucau

SEQ ID NO: 2981025 - RNA, 19 nt, Artificial Sequence
  Description of Artificial Sequence: Synthetic oligonucleotide
cucagauaguggguaugug

SEQ ID NO: 2981026 - RNA, 19 nt, Artificial Sequence
  Description of Artificial Sequence: Synthetic oligonucleotide
gagauagcugagaggcuga

SEQ ID NO: 2981027 - RNA, 19 nt, Artificial Sequence
  Description of Artificial Sequence: Synthetic oligonucleotide
ccaggcuucagcaaacgga

SEQ ID NO: 2981028 - RNA, 19 nt, Artificial Sequence
  Description of Artificial Sequence: Synthetic oligonucleotide
cagugcggauguuuucuuc

SEQ ID NO: 2981029 - RNA, 19 nt, Artificial Sequence
  Description of Artificial Sequence: Synthetic oligonucleotide
uaacggcaguccgcgggcg

SEQ ID NO: 2981030 - RNA, 19 nt, Artificial Sequence
  Description of Artificial Sequence: Synthetic oligonucleotide
aacggaaagcaugcuucuu

SEQ ID NO: 2981031 - RNA, 19 nt, Artificial Sequence
  Description of Artificial Sequence: Synthetic oligonucleotide
cguaguaacggcaguccgc

SEQ ID NO: 2981032 - RNA, 19 nt, Artificial Sequence
  Description of Artificial Sequence: Synthetic oligonucleotide
ggggugugaucaucugagg

SEQ ID NO: 2981033 - RNA, 19 nt, Artificial Sequence
  Description of Artificial Sequence: Synthetic oligonucleotide
acggcaguccgcgggcggc

SEQ ID NO: 2981034 - RNA, 19 nt, Artificial Sequence
  Description of Artificial Sequence: Synthetic oligonucleotide
gagaggcugagccuacacu

SEQ ID NO: 2981035 - RNA, 19 nt, Artificial Sequence
  Description of Artificial Sequence: Synthetic oligonucleotide
gugagugugccaggucucc

SEQ ID NO: 2981036 - RNA, 19 nt, Artificial Sequence
  Description of Artificial Sequence: Synthetic oligonucleotide
accaggggugugaucaucu

SEQ ID NO: 2981037 - RNA, 19 nt, Artificial Sequence
  Description of Artificial Sequence: Synthetic oligonucleotide
ccucuugcagcgcaggcac

SEQ ID NO: 2981038 - RNA, 19 nt, Artificial Sequence
  Description of Artificial Sequence: Synthetic oligonucleotide
agcugagaggcugagccua

SEQ ID NO: 2981039 - RNA, 19 nt, Artificial Sequence
  Description of Artificial Sequence: Synthetic oligonucleotide
aggucuccucagauagugg

SEQ ID NO: 2981040 - RNA, 19 nt, Artificial Sequence
  Description of Artificial Sequence: Synthetic oligonucleotide
ggcguaguaacggcagucc

SEQ ID NO: 2981041 - RNA, 19 nt, Artificial Sequence
  Description of Artificial Sequence: Synthetic oligonucleotide
ugguggaccagggguguga

SEQ ID NO: 2981042 - RNA, 19 nt, Artificial Sequence
  Description of Artificial Sequence: Synthetic oligonucleotide
auaguggguaugugucaua

SEQ ID NO: 2981043 - RNA, 19 nt, Artificial Sequence
  Description of Artificial Sequence: Synthetic oligonucleotide
gcugagccuacacuccagc

SEQ ID NO: 2981044 - RNA, 19 nt, Artificial Sequence
  Description of Artificial Sequence: Synthetic oligonucleotide
ggaagcccgccucuugcag

SEQ ID NO: 2981045 - RNA, 19 nt, Artificial Sequence
  Description of Artificial Sequence: Synthetic oligonucleotide
auaggcucguucauuccaa

SEQ ID NO: 2981046 - RNA, 19 nt, Artificial Sequence
  Description of Artificial Sequence: Synthetic oligonucleotide
ugcucagugcuugguggac

SEQ ID NO: 2981047 - RNA, 19 nt, Artificial Sequence
  Description of Artificial Sequence: Synthetic oligonucleotide
ugccaggucuccucagaua

SEQ ID NO: 2981048 - RNA, 19 nt, Artificial Sequence
  Description of Artificial Sequence: Synthetic oligonucleotide
ugagugugccaggucuccu

SEQ ID NO: 2981049 - RNA, 19 nt, Artificial Sequence
  Description of Artificial Sequence: Synthetic oligonucleotide
aguggguaugugucauaua

SEQ ID NO: 2981050 - RNA, 19 nt, Artificial Sequence
  Description of Artificial Sequence: Synthetic oligonucleotide
gcacugaagaggacauagg

SEQ ID NO: 2981051 - RNA, 19 nt, Artificial Sequence
  Description of Artificial Sequence: Synthetic oligonucleotide
caccaggcuucagcaaacg

SEQ ID NO: 2981052 - RNA, 19 nt, Artificial Sequence
  Description of Artificial Sequence: Synthetic oligonucleotide
cguucauuccaaccccugg

SEQ ID NO: 2981053 - RNA, 19 nt, Artificial Sequence
  Description of Artificial Sequence: Synthetic oligonucleotide
agcaaacggaaagcaugcu

SEQ ID NO: 2981054 - RNA, 19 nt, Artificial Sequence
  Description of Artificial Sequence: Synthetic oligonucleotide
cagugccaucaccucagug

SEQ ID NO: 2981055 - RNA, 19 nt, Artificial Sequence
  Description of Artificial Sequence: Synthetic oligonucleotide
gugcggauguuuucuucuc

SEQ ID NO: 2981056 - RNA, 19 nt, Artificial Sequence
  Description of Artificial Sequence: Synthetic oligonucleotide
caggggugugaucaucuga

SEQ ID NO: 2981057 - RNA, 19 nt, Artificial Sequence
  Description of Artificial Sequence: Synthetic oligonucleotide
ucagugcuugguggaccag

SEQ ID NO: 2981058 - RNA, 19 nt, Artificial Sequence
  Description of Artificial Sequence: Synthetic oligonucleotide
cucuugcagcgcaggcacc

SEQ ID NO: 2981059 - RNA, 19 nt, Artificial Sequence
  Description of Artificial Sequence: Synthetic oligonucleotide
aucugagggaaggcguagu

SEQ ID NO: 2981060 - RNA, 19 nt, Artificial Sequence
  Description of Artificial Sequence: Synthetic oligonucleotide
caccagugccaucaccuca

SEQ ID NO: 2981061 - RNA, 19 nt, Artificial Sequence
  Description of Artificial Sequence: Synthetic oligonucleotide
agguugcaguaggugagga

SEQ ID NO: 2981062 - RNA, 19 nt, Artificial Sequence
  Description of Artificial Sequence: Synthetic oligonucleotide
gcuugguggaccaggggug

SEQ ID NO: 2981063 - RNA, 19 nt, Artificial Sequence
  Description of Artificial Sequence: Synthetic oligonucleotide
cagccaucaaggcacugaa

SEQ ID NO: 2981064 - RNA, 19 nt, Artificial Sequence
  Description of Artificial Sequence: Synthetic oligonucleotide
cugggccaguugcucagug

SEQ ID NO: 2981065 - RNA, 19 nt, Artificial Sequence
  Description of Artificial Sequence: Synthetic oligonucleotide
caugcuucuuaaugaaguu

SEQ ID NO: 2981066 - RNA, 19 nt, Artificial Sequence
  Description of Artificial Sequence: Synthetic oligonucleotide
agccaucaaggcacugaag

SEQ ID NO: 2981067 - RNA, 19 nt, Artificial Sequence
  Description of Artificial Sequence: Synthetic oligonucleotide
aagaggacauaggcucguu

SEQ ID NO: 2981068 - RNA, 19 nt, Artificial Sequence
  Description of Artificial Sequence: Synthetic oligonucleotide
accccugggccaguugcuc

SEQ ID NO: 2981069 - RNA, 19 nt, Artificial Sequence
  Description of Artificial Sequence: Synthetic oligonucleotide
cagcgcaggcaccuguguc

SEQ ID NO: 2981070 - RNA, 19 nt, Artificial Sequence
  Description of Artificial Sequence: Synthetic oligonucleotide
aaccccugggccaguugcu

SEQ ID NO: 2981071 - RNA, 19 nt, Artificial Sequence
  Description of Artificial Sequence: Synthetic oligonucleotide
gugaggaugccaccaggcu

SEQ ID NO: 2981072 - RNA, 19 nt, Artificial Sequence
  Description of Artificial Sequence: Synthetic oligonucleotide
gaagaggacauaggcucgu

SEQ ID NO: 2981073 - RNA, 19 nt, Artificial Sequence
  Description of Artificial Sequence: Synthetic oligonucleotide
ggaaggcguaguaacggca

SEQ ID NO: 2981074 - RNA, 19 nt, Artificial Sequence
  Description of Artificial Sequence: Synthetic oligonucleotide
cucagugcggauguuuucu

SEQ ID NO: 2981075 - RNA, 19 nt, Artificial Sequence
  Description of Artificial Sequence: Synthetic oligonucleotide
ggcggcaccagugccauca

SEQ ID NO: 2981076 - RNA, 19 nt, Artificial Sequence
  Description of Artificial Sequence: Synthetic oligonucleotide
cggauguuuucuucuccgg

SEQ ID NO: 2981077 - RNA, 19 nt, Artificial Sequence
  Description of Artificial Sequence: Synthetic oligonucleotide
cuccucaaacaugguggug

SEQ ID NO: 2981078 - RNA, 19 nt, Artificial Sequence
  Description of Artificial Sequence: Synthetic oligonucleotide
cuggugagugugccagguc

SEQ ID NO: 2981079 - RNA, 19 nt, Artificial Sequence
  Description of Artificial Sequence: Synthetic oligonucleotide
ccaguugcucagugcuugg

SEQ ID NO: 2981080 - RNA, 19 nt, Artificial Sequence
  Description of Artificial Sequence: Synthetic oligonucleotide
gccaccaggcuucagcaaa

SEQ ID NO: 2981081 - RNA, 19 nt, Artificial Sequence
  Description of Artificial Sequence: Synthetic oligonucleotide
accucagugcggauguuuu

SEQ ID NO: 2981082 - RNA, 19 nt, Artificial Sequence
  Description of Artificial Sequence: Synthetic oligonucleotide
uugguggaccaggggugug

SEQ ID NO: 2981083 - RNA, 19 nt, Artificial Sequence
  Description of Artificial Sequence: Synthetic oligonucleotide
augugagguugcaguaggu

SEQ ID NO: 2981084 - RNA, 19 nt, Artificial Sequence
  Description of Artificial Sequence: Synthetic oligonucleotide
cugagggaaggcguaguaa

SEQ ID NO: 2981085 - RNA, 19 nt, Artificial Sequence
  Description of Artificial Sequence: Synthetic oligonucleotide
gaccaggggugugaucauc

SEQ ID NO: 2981086 - RNA, 19 nt, Artificial Sequence
  Description of Artificial Sequence: Synthetic oligonucleotide
uccagccaucaaggcacug

SEQ ID NO: 2981087 - RNA, 19 nt, Artificial Sequence
  Description of Artificial Sequence: Synthetic oligonucleotide
cucguucauuccaaccccu

SEQ ID NO: 2981088 - RNA, 19 nt, Artificial Sequence
  Description of Artificial Sequence: Synthetic oligonucleotide
gccaucaccucagugcgga

SEQ ID NO: 2981089 - RNA, 19 nt, Artificial Sequence
  Description of Artificial Sequence: Synthetic oligonucleotide
gcucagugcuugguggacc

SEQ ID NO: 2981090 - RNA, 19 nt, Artificial Sequence
  Description of Artificial Sequence: Synthetic oligonucleotide
cuugcagcgcaggcaccug

SEQ ID NO: 2981091 - RNA, 19 nt, Artificial Sequence
  Description of Artificial Sequence: Synthetic oligonucleotide
ccggaagcccgccucuugc

SEQ ID NO: 2981092 - RNA, 19 nt, Artificial Sequence
  Description of Artificial Sequence: Synthetic oligonucleotide
gucugugaacuuggacuuc

SEQ ID NO: 2981093 - RNA, 19 nt, Artificial Sequence
  Description of Artificial Sequence: Synthetic oligonucleotide
ccaccaggcuucagcaaac

SEQ ID NO: 2981094 - RNA, 19 nt, Artificial Sequence
  Description of Artificial Sequence: Synthetic oligonucleotide
gcaaacggaaagcaugcuu

SEQ ID NO: 2981095 - RNA, 19 nt, Artificial Sequence
  Description of Artificial Sequence: Synthetic oligonucleotide
ggugagugugccaggucuc

SEQ ID NO: 2981096 - RNA, 19 nt, Artificial Sequence
  Description of Artificial Sequence: Synthetic oligonucleotide
ccaggaugugagguugcag

SEQ ID NO: 2981097 - RNA, 19 nt, Artificial Sequence
  Description of Artificial Sequence: Synthetic oligonucleotide
agccuacacuccagccauc

SEQ ID NO: 2981098 - RNA, 19 nt, Artificial Sequence
  Description of Artificial Sequence: Synthetic oligonucleotide
gcaccagugccaucaccuc

SEQ ID NO: 2981099 - RNA, 19 nt, Artificial Sequence
  Description of Artificial Sequence: Synthetic oligonucleotide
gcaguaggugaggaugcca

SEQ ID NO: 2981100 - RNA, 19 nt, Artificial Sequence
  Description of Artificial Sequence: Synthetic oligonucleotide
gguaugugucauauaggau

SEQ ID NO: 2981101 - RNA, 19 nt, Artificial Sequence
  Description of Artificial Sequence: Synthetic oligonucleotide
ccaggggugugaucaucug

SEQ ID NO: 2981102 - RNA, 19 nt, Artificial Sequence
  Description of Artificial Sequence: Synthetic oligonucleotide
cagagauagcugagaggcu

SEQ ID NO: 2981103 - RNA, 19 nt, Artificial Sequence
  Description of Artificial Sequence: Synthetic oligonucleotide
ccucagugcggauguuuuc

SEQ ID NO: 2981104 - RNA, 19 nt, Artificial Sequence
  Description of Artificial Sequence: Synthetic oligonucleotide
gucuccucagauagugggu

SEQ ID NO: 2981105 - RNA, 19 nt, Artificial Sequence
  Description of Artificial Sequence: Synthetic oligonucleotide
gccuacacuccagccauca

SEQ ID NO: 2981106 - RNA, 19 nt, Artificial Sequence
  Description of Artificial Sequence: Synthetic oligonucleotide
guggaccaggggugugauc

SEQ ID NO: 2981107 - RNA, 19 nt, Artificial Sequence
  Description of Artificial Sequence: Synthetic oligonucleotide
gcaccugugucuccucaaa

SEQ ID NO: 2981108 - RNA, 19 nt, Artificial Sequence
  Description of Artificial Sequence: Synthetic oligonucleotide
agcccgccucuugcagcgc

SEQ ID NO: 2981109 - RNA, 19 nt, Artificial Sequence
  Description of Artificial Sequence: Synthetic oligonucleotide
gugccaggucuccucagau

SEQ ID NO: 2981110 - RNA, 19 nt, Artificial Sequence
  Description of Artificial Sequence: Synthetic oligonucleotide
ccagccaucaaggcacuga

SEQ ID NO: 2981111 - RNA, 19 nt, Artificial Sequence
  Description of Artificial Sequence: Synthetic oligonucleotide
cuugguggaccaggggugu

SEQ ID NO: 2981112 - RNA, 19 nt, Artificial Sequence
  Description of Artificial Sequence: Synthetic oligonucleotide
ggcaccugugucuccucaa

SEQ ID NO: 2981113 - RNA, 19 nt, Artificial Sequence
  Description of Artificial Sequence: Synthetic oligonucleotide
gccucuugcagcgcaggca

SEQ ID NO: 2981114 - RNA, 19 nt, Artificial Sequence
  Description of Artificial Sequence: Synthetic oligonucleotide
ggaaagcaugcuucuuaau

SEQ ID NO: 2981115 - RNA, 19 nt, Artificial Sequence
  Description of Artificial Sequence: Synthetic oligonucleotide
ccccaggaugugagguugc

SEQ ID NO: 2981116 - RNA, 19 nt, Artificial Sequence
  Description of Artificial Sequence: Synthetic oligonucleotide
cggaaagcaugcuucuuaa

SEQ ID NO: 2981117 - RNA, 19 nt, Artificial Sequence
  Description of Artificial Sequence: Synthetic oligonucleotide
uccaaccccugggccaguu

SEQ ID NO: 2981118 - RNA, 19 nt, Artificial Sequence
  Description of Artificial Sequence: Synthetic oligonucleotide
gguugcaguaggugaggau

SEQ ID NO: 2981119 - RNA, 19 nt, Artificial Sequence
  Description of Artificial Sequence: Synthetic oligonucleotide
cugagaggcugagccuaca

SEQ ID NO: 2981120 - RNA, 19 nt, Artificial Sequence
  Description of Artificial Sequence: Synthetic oligonucleotide
cuccucagauaguggguau

SEQ ID NO: 2981121 - RNA, 19 nt, Artificial Sequence
  Description of Artificial Sequence: Synthetic oligonucleotide
gcugagaggcugagccuac

SEQ ID NO: 2981122 - RNA, 19 nt, Artificial Sequence
  Description of Artificial Sequence: Synthetic oligonucleotide
aggcacugaagaggacaua

SEQ ID NO: 2981123 - RNA, 19 nt, Artificial Sequence
  Description of Artificial Sequence: Synthetic oligonucleotide
caguccgcgggcggcacca

SEQ ID NO: 2981124 - RNA, 19 nt, Artificial Sequence
  Description of Artificial Sequence: Synthetic oligonucleotide
ucaccucagugcggauguu

SEQ ID NO: 2981125 - RNA, 19 nt, Artificial Sequence
  Description of Artificial Sequence: Synthetic oligonucleotide
cccgccucuugcagcgcag

SEQ ID NO: 2981126 - RNA, 19 nt, Artificial Sequence
  Description of Artificial Sequence: Synthetic oligonucleotide
uuccaaccccugggccagu

SEQ ID NO: 2981127 - RNA, 19 nt, Artificial Sequence
  Description of Artificial Sequence: Synthetic oligonucleotide
aguccgcgggcggcaccag

SEQ ID NO: 2981128 - RNA, 19 nt, Artificial Sequence
  Description of Artificial Sequence: Synthetic oligonucleotide
ccaaccccugggccaguug

SEQ ID NO: 2981129 - RNA, 19 nt, Artificial Sequence
  Description of Artificial Sequence: Synthetic oligonucleotide
gcaguccgcgggcggcacc

SEQ ID NO: 2981130 - RNA, 19 nt, Artificial Sequence
  Description of Artificial Sequence: Synthetic oligonucleotide
ccucagauaguggguaugu

SEQ ID NO: 2981131 - RNA, 19 nt, Artificial Sequence
  Description of Artificial Sequence: Synthetic oligonucleotide
ggacauaggcucguucauu

SEQ ID NO: 2981132 - RNA, 19 nt, Artificial Sequence
  Description of Artificial Sequence: Synthetic oligonucleotide
caguugcucagugcuuggu

SEQ ID NO: 2981133 - RNA, 19 nt, Artificial Sequence
  Description of Artificial Sequence: Synthetic oligonucleotide
cuucuccggaagcccgccu

SEQ ID NO: 2981134 - RNA, 19 nt, Artificial Sequence
  Description of Artificial Sequence: Synthetic oligonucleotide
cgccucuugcagcgcaggc

SEQ ID NO: 2981135 - RNA, 19 nt, Artificial Sequence
  Description of Artificial Sequence: Synthetic oligonucleotide
ccgccucuugcagcgcagg

SEQ ID NO: 2981136 - RNA, 19 nt, Artificial Sequence
  Description of Artificial Sequence: Synthetic oligonucleotide
cuccagccaucaaggcacu

SEQ ID NO: 2981137 - RNA, 19 nt, Artificial Sequence
  Description of Artificial Sequence: Synthetic oligonucleotide
gcgcaggcaccugugucuc

SEQ ID NO: 2981138 - RNA, 19 nt, Artificial Sequence
  Description of Artificial Sequence: Synthetic oligonucleotide
gcccgccucuugcagcgca

SEQ ID NO: 2981139 - RNA, 19 nt, Artificial Sequence
  Description of Artificial Sequence: Synthetic oligonucleotide
caccucagugcggauguuu

SEQ ID NO: 2981140 - RNA, 19 nt, Artificial Sequence
  Description of Artificial Sequence: Synthetic oligonucleotide
ccucaaacaugguggugau

SEQ ID NO: 2981141 - RNA, 19 nt, Artificial Sequence
  Description of Artificial Sequence: Synthetic oligonucleotide
gcagcgcaggcaccugugu

SEQ ID NO: 2981142 - RNA, 19 nt, Artificial Sequence
  Description of Artificial Sequence: Synthetic oligonucleotide
cggcaccagugccaucacc

SEQ ID NO: 2981143 - RNA, 19 nt, Artificial Sequence
  Description of Artificial Sequence: Synthetic oligonucleotide
gugucuccucaaacauggu

SEQ ID NO: 2981144 - RNA, 19 nt, Artificial Sequence
  Description of Artificial Sequence: Synthetic oligonucleotide
gcggcaccagugccaucac

SEQ ID NO: 2981145 - RNA, 19 nt, Artificial Sequence
  Description of Artificial Sequence: Synthetic oligonucleotide
ccuacacuccagccaucaa

SEQ ID NO: 2981146 - RNA, 19 nt, Artificial Sequence
  Description of Artificial Sequence: Synthetic oligonucleotide
gcgggcggcaccagugcca

SEQ ID NO: 2981147 - RNA, 19 nt, Artificial Sequence
  Description of Artificial Sequence: Synthetic oligonucleotide
cccaggaugugagguugca

SEQ ID NO: 2981148 - RNA, 19 nt, Artificial Sequence
  Description of Artificial Sequence: Synthetic oligonucleotide
cgcaggcaccugugucucc

SEQ ID NO: 2981149 - RNA, 19 nt, Artificial Sequence
  Description of Artificial Sequence: Synthetic oligonucleotide
ggcaguccgcgggcggcac

SEQ ID NO: 2981150 - RNA, 19 nt, Artificial Sequence
  Description of Artificial Sequence: Synthetic oligonucleotide
gguggaccaggggugugau

SEQ ID NO: 2981151 - RNA, 19 nt, Artificial Sequence
  Description of Artificial Sequence: Synthetic oligonucleotide
cggaagcccgccucuugca

SEQ ID NO: 2981152 - RNA, 19 nt, Artificial Sequence
  Description of Artificial Sequence: Synthetic oligonucleotide
ggaccaggggugugaucau

SEQ ID NO: 2981153 - RNA, 19 nt, Artificial Sequence
  Description of Artificial Sequence: Synthetic oligonucleotide
guccgcgggcggcaccagu

SEQ ID NO: 2981154 - RNA, 19 nt, Artificial Sequence
  Description of Artificial Sequence: Synthetic oligonucleotide
ccaggucuccucagauagu

SEQ ID NO: 2981155 - RNA, 19 nt, Artificial Sequence
  Description of Artificial Sequence: Synthetic oligonucleotide
ggccaguugcucagugcuu

SEQ ID NO: 2981156 - RNA, 19 nt, Artificial Sequence
  Description of Artificial Sequence: Synthetic oligonucleotide
cuccggaagcccgccucuu

SEQ ID NO: 2981157 - RNA, 19 nt, Artificial Sequence
  Description of Artificial Sequence: Synthetic oligonucleotide
ccaucaccucagugcggau

SEQ ID NO: 2981158 - RNA, 19 nt, Artificial Sequence
  Description of Artificial Sequence: Synthetic oligonucleotide
ccugggccaguugcucagu

SEQ ID NO: 2981159 - RNA, 19 nt, Artificial Sequence
  Description of Artificial Sequence: Synthetic oligonucleotide
cggcaguccgcgggcggca

SEQ ID NO: 2981160 - RNA, 19 nt, Artificial Sequence
  Description of Artificial Sequence: Synthetic oligonucleotide
ugaucugucauccggaugg

SEQ ID NO: 2981161 - RNA, 19 nt, Artificial Sequence
  Description of Artificial Sequence: Synthetic oligonucleotide
accaacuggaauuagaguc

SEQ ID NO: 2981162 - RNA, 19 nt, Artificial Sequence
  Description of Artificial Sequence: Synthetic oligonucleotide
ucuucugccauguagaggc

SEQ ID NO: 2981163 - RNA, 19 nt, Artificial Sequence
  Description of Artificial Sequence: Synthetic oligonucleotide
aaaucguacacuuuguggu

SEQ ID NO: 2981164 - RNA, 19 nt, Artificial Sequence
  Description of Artificial Sequence: Synthetic oligonucleotide
aguagagugcccaacaucc

SEQ ID NO: 2981165 - RNA, 19 nt, Artificial Sequence
  Description of Artificial Sequence: Synthetic oligonucleotide
uacaauuauuuucuugggg

SEQ ID NO: 2981166 - RNA, 19 nt, Artificial Sequence
  Description of Artificial Sequence: Synthetic oligonucleotide
auacaucagggcuacagcc

SEQ ID NO: 2981167 - RNA, 19 nt, Artificial Sequence
  Description of Artificial Sequence: Synthetic oligonucleotide
ucuuugaucugucauccgg

SEQ ID NO: 2981168 - RNA, 19 nt, Artificial Sequence
  Description of Artificial Sequence: Synthetic oligonucleotide
aacaguagugaucagaguu

SEQ ID NO: 2981169 - RNA, 19 nt, Artificial Sequence
  Description of Artificial Sequence: Synthetic oligonucleotide
uuagucuucugccauguag

SEQ ID NO: 2981170 - RNA, 19 nt, Artificial Sequence
  Description of Artificial Sequence: Synthetic oligonucleotide
gaugauguagguuuuggac

SEQ ID NO: 2981171 - RNA, 19 nt, Artificial Sequence
  Description of Artificial Sequence: Synthetic oligonucleotide
acuuggacaaaucguacac

SEQ ID NO: 2981172 - RNA, 19 nt, Artificial Sequence
  Description of Artificial Sequence: Synthetic oligonucleotide
uggaauuagagucaacagu

SEQ ID NO: 2981173 - RNA, 19 nt, Artificial Sequence
  Description of Artificial Sequence: Synthetic oligonucleotide
aauuagagucaacaguagu

SEQ ID NO: 2981174 - RNA, 19 nt, Artificial Sequence
  Description of Artificial Sequence: Synthetic oligonucleotide
caaaucguacacuuugugg

SEQ ID NO: 2981175 - RNA, 19 nt, Artificial Sequence
  Description of Artificial Sequence: Synthetic oligonucleotide
uuacaauuauuuucuuggg

SEQ ID NO: 2981176 - RNA, 19 nt, Artificial Sequence
  Description of Artificial Sequence: Synthetic oligonucleotide
ugauguagguuuuggacag

SEQ ID NO: 2981177 - RNA, 19 nt, Artificial Sequence
  Description of Artificial Sequence: Synthetic oligonucleotide
aagugauuaacacuggcuu

SEQ ID NO: 2981178 - RNA, 19 nt, Artificial Sequence
  Description of Artificial Sequence: Synthetic oligonucleotide
guagguuuuggacaguucc

SEQ ID NO: 2981179 - RNA, 19 nt, Artificial Sequence
  Description of Artificial Sequence: Synthetic oligonucleotide
acagccagggcugagaugg

SEQ ID NO: 2981180 - RNA, 19 nt, Artificial Sequence
  Description of Artificial Sequence: Synthetic oligonucleotide
cuugguuucaagaggcagg

SEQ ID NO: 2981181 - RNA, 19 nt, Artificial Sequence
  Description of Artificial Sequence: Synthetic oligonucleotide
agugauuaacacuggcuuc

SEQ ID NO: 2981182 - RNA, 19 nt, Artificial Sequence
  Description of Artificial Sequence: Synthetic oligonucleotide
ucucuuagcacuucuuccc

SEQ ID NO: 2981183 - RNA, 19 nt, Artificial Sequence
  Description of Artificial Sequence: Synthetic oligonucleotide
guagaggcgauacaucagg

SEQ ID NO: 2981184 - RNA, 19 nt, Artificial Sequence
  Description of Artificial Sequence: Synthetic oligonucleotide
guggaagugauuaacacug

SEQ ID NO: 2981185 - RNA, 19 nt, Artificial Sequence
  Description of Artificial Sequence: Synthetic oligonucleotide
augauguagguuuuggaca

SEQ ID NO: 2981186 - RNA, 19 nt, Artificial Sequence
  Description of Artificial Sequence: Synthetic oligonucleotide
uaucuuugaucugucaucc

SEQ ID NO: 2981187 - RNA, 19 nt, Artificial Sequence
  Description of Artificial Sequence: Synthetic oligonucleotide
aacuuggacaaaucguaca

SEQ ID NO: 2981188 - RNA, 19 nt, Artificial Sequence
  Description of Artificial Sequence: Synthetic oligonucleotide
uuagagucaacaguaguga

SEQ ID NO: 2981189 - RNA, 19 nt, Artificial Sequence
  Description of Artificial Sequence: Synthetic oligonucleotide
ucucaguagcaucaccccg

SEQ ID NO: 2981190 - RNA, 19 nt, Artificial Sequence
  Description of Artificial Sequence: Synthetic oligonucleotide
gaagguuucugucagugga

SEQ ID NO: 2981191 - RNA, 19 nt, Artificial Sequence
  Description of Artificial Sequence: Synthetic oligonucleotide
aaucguacacuuuguggug

SEQ ID NO: 2981192 - RNA, 19 nt, Artificial Sequence
  Description of Artificial Sequence: Synthetic oligonucleotide
auuagagucaacaguagug

SEQ ID NO: 2981193 - RNA, 19 nt, Artificial Sequence
  Description of Artificial Sequence: Synthetic oligonucleotide
uggaguuccccgaugaugu

SEQ ID NO: 2981194 - RNA, 19 nt, Artificial Sequence
  Description of Artificial Sequence: Synthetic oligonucleotide
aaaguucucaguagcauca

SEQ ID NO: 2981195 - RNA, 19 nt, Artificial Sequence
  Description of Artificial Sequence: Synthetic oligonucleotide
ucaguggaagugauuaaca

SEQ ID NO: 2981196 - RNA, 19 nt, Artificial Sequence
  Description of Artificial Sequence: Synthetic oligonucleotide
agaggcgauacaucagggc

SEQ ID NO: 2981197 - RNA, 19 nt, Artificial Sequence
  Description of Artificial Sequence: Synthetic oligonucleotide
ugaucagaguuuccgcagg

SEQ ID NO: 2981198 - RNA, 19 nt, Artificial Sequence
  Description of Artificial Sequence: Synthetic oligonucleotide
uuuuggacaguucccgagc

SEQ ID NO: 2981199 - RNA, 19 nt, Artificial Sequence
  Description of Artificial Sequence: Synthetic oligonucleotide
aguggaagugauuaacacu

SEQ ID NO: 2981200 - RNA, 19 nt, Artificial Sequence
  Description of Artificial Sequence: Synthetic oligonucleotide
acuggaauuagagucaaca

SEQ ID NO: 2981201 - RNA, 19 nt, Artificial Sequence
  Description of Artificial Sequence: Synthetic oligonucleotide
aggcagguuagucuucugc

SEQ ID NO: 2981202 - RNA, 19 nt, Artificial Sequence
  Description of Artificial Sequence: Synthetic oligonucleotide
ucaagaggcagguuagucu

SEQ ID NO: 2981203 - RNA, 19 nt, Artificial Sequence
  Description of Artificial Sequence: Synthetic oligonucleotide
auguagaggcgauacauca

SEQ ID NO: 2981204 - RNA, 19 nt, Artificial Sequence
  Description of Artificial Sequence: Synthetic oligonucleotide
aguucucaguagcaucacc

SEQ ID NO: 2981205 - RNA, 19 nt, Artificial Sequence
  Description of Artificial Sequence: Synthetic oligonucleotide
ucugucauccggauggagu

SEQ ID NO: 2981206 - RNA, 19 nt, Artificial Sequence
  Description of Artificial Sequence: Synthetic oligonucleotide
gagucaacaguagugauca

SEQ ID NO: 2981207 - RNA, 19 nt, Artificial Sequence
  Description of Artificial Sequence: Synthetic oligonucleotide
cucaguagcaucaccccgg

SEQ ID NO: 2981208 - RNA, 19 nt, Artificial Sequence
  Description of Artificial Sequence: Synthetic oligonucleotide
auccuugguuucaagaggc

SEQ ID NO: 2981209 - RNA, 19 nt, Artificial Sequence
  Description of Artificial Sequence: Synthetic oligonucleotide
cuggaauuagagucaacag

SEQ ID NO: 2981210 - RNA, 19 nt, Artificial Sequence
  Description of Artificial Sequence: Synthetic oligonucleotide
uucccgagcaucaguagag

SEQ ID NO: 2981211 - RNA, 19 nt, Artificial Sequence
  Description of Artificial Sequence: Synthetic oligonucleotide
uguagaggcgauacaucag

SEQ ID NO: 2981212 - RNA, 19 nt, Artificial Sequence
  Description of Artificial Sequence: Synthetic oligonucleotide
acacuggcuucuuuucucc

SEQ ID NO: 2981213 - RNA, 19 nt, Artificial Sequence
  Description of Artificial Sequence: Synthetic oligonucleotide
cuaucuuugaucugucauc

SEQ ID NO: 2981214 - RNA, 19 nt, Artificial Sequence
  Description of Artificial Sequence: Synthetic oligonucleotide
cucucuuagcacuucuucc

SEQ ID NO: 2981215 - RNA, 19 nt, Artificial Sequence
  Description of Artificial Sequence: Synthetic oligonucleotide
auuaacacuggcuucuuuu

SEQ ID NO: 2981216 - RNA, 19 nt, Artificial Sequence
  Description of Artificial Sequence: Synthetic oligonucleotide
agugaucagaguuuccgca

SEQ ID NO: 2981217 - RNA, 19 nt, Artificial Sequence
  Description of Artificial Sequence: Synthetic oligonucleotide
uccucaaaguucucaguag

SEQ ID NO: 2981218 - RNA, 19 nt, Artificial Sequence
  Description of Artificial Sequence: Synthetic oligonucleotide
cauccuugguuucaagagg

SEQ ID NO: 2981219 - RNA, 19 nt, Artificial Sequence
  Description of Artificial Sequence: Synthetic oligonucleotide
uagguuuuggacaguuccc

SEQ ID NO: 2981220 - RNA, 19 nt, Artificial Sequence
  Description of Artificial Sequence: Synthetic oligonucleotide
uuuucucccuucucugggg

SEQ ID NO: 2981221 - RNA, 19 nt, Artificial Sequence
  Description of Artificial Sequence: Synthetic oligonucleotide
acaaaucguacacuuugug

SEQ ID NO: 2981222 - RNA, 19 nt, Artificial Sequence
  Description of Artificial Sequence: Synthetic oligonucleotide
aguagcaucaccccggcuu

SEQ ID NO: 2981223 - RNA, 19 nt, Artificial Sequence
  Description of Artificial Sequence: Synthetic oligonucleotide
uagaggcgauacaucaggg

SEQ ID NO: 2981224 - RNA, 19 nt, Artificial Sequence
  Description of Artificial Sequence: Synthetic oligonucleotide
gauggcugggaucacccag

SEQ ID NO: 2981225 - RNA, 19 nt, Artificial Sequence
  Description of Artificial Sequence: Synthetic oligonucleotide
uuggcuaucuuugaucugu

SEQ ID NO: 2981226 - RNA, 19 nt, Artificial Sequence
  Description of Artificial Sequence: Synthetic oligonucleotide
ggacaaaucguacacuuug

SEQ ID NO: 2981227 - RNA, 19 nt, Artificial Sequence
  Description of Artificial Sequence: Synthetic oligonucleotide
uggaagugauuaacacugg

SEQ ID NO: 2981228 - RNA, 19 nt, Artificial Sequence
  Description of Artificial Sequence: Synthetic oligonucleotide
uuuggacaguucccgagca

SEQ ID NO: 2981229 - RNA, 19 nt, Artificial Sequence
  Description of Artificial Sequence: Synthetic oligonucleotide
aggaugcucuuccagaacu

SEQ ID NO: 2981230 - RNA, 19 nt, Artificial Sequence
  Description of Artificial Sequence: Synthetic oligonucleotide
guucucaguagcaucaccc

SEQ ID NO: 2981231 - RNA, 19 nt, Artificial Sequence
  Description of Artificial Sequence: Synthetic oligonucleotide
uucucaguagcaucacccc

SEQ ID NO: 2981232 - RNA, 19 nt, Artificial Sequence
  Description of Artificial Sequence: Synthetic oligonucleotide
guuuuggacaguucccgag

SEQ ID NO: 2981233 - RNA, 19 nt, Artificial Sequence
  Description of Artificial Sequence: Synthetic oligonucleotide
acccaguugguccaccaac

SEQ ID NO: 2981234 - RNA, 19 nt, Artificial Sequence
  Description of Artificial Sequence: Synthetic oligonucleotide
caaaguucucaguagcauc

SEQ ID NO: 2981235 - RNA, 19 nt, Artificial Sequence
  Description of Artificial Sequence: Synthetic oligonucleotide
aucguacacuuuguggugc

SEQ ID NO: 2981236 - RNA, 19 nt, Artificial Sequence
  Description of Artificial Sequence: Synthetic oligonucleotide
uccccgaugauguagguuu

SEQ ID NO: 2981237 - RNA, 19 nt, Artificial Sequence
  Description of Artificial Sequence: Synthetic oligonucleotide
uccaccaacuggaauuaga

SEQ ID NO: 2981238 - RNA, 19 nt, Artificial Sequence
  Description of Artificial Sequence: Synthetic oligonucleotide
agagucaacaguagugauc

SEQ ID NO: 2981239 - RNA, 19 nt, Artificial Sequence
  Description of Artificial Sequence: Synthetic oligonucleotide
aucaguagagugcccaaca

SEQ ID NO: 2981240 - RNA, 19 nt, Artificial Sequence
  Description of Artificial Sequence: Synthetic oligonucleotide
agguuuuggacaguucccg

SEQ ID NO: 2981241 - RNA, 19 nt, Artificial Sequence
  Description of Artificial Sequence: Synthetic oligonucleotide
uagugaucagaguuuccgc

SEQ ID NO: 2981242 - RNA, 19 nt, Artificial Sequence
  Description of Artificial Sequence: Synthetic oligonucleotide
guuucaagaggcagguuag

SEQ ID NO: 2981243 - RNA, 19 nt, Artificial Sequence
  Description of Artificial Sequence: Synthetic oligonucleotide
auccggauggaguuccccg

SEQ ID NO: 2981244 - RNA, 19 nt, Artificial Sequence
  Description of Artificial Sequence: Synthetic oligonucleotide
ugguccaccaacuggaauu

SEQ ID NO: 2981245 - RNA, 19 nt, Artificial Sequence
  Description of Artificial Sequence: Synthetic oligonucleotide
caguggaagugauuaacac

SEQ ID NO: 2981246 - RNA, 19 nt, Artificial Sequence
  Description of Artificial Sequence: Synthetic oligonucleotide
gugaucagaguuuccgcag

SEQ ID NO: 2981247 - RNA, 19 nt, Artificial Sequence
  Description of Artificial Sequence: Synthetic oligonucleotide
agucuucugccauguagag

SEQ ID NO: 2981248 - RNA, 19 nt, Artificial Sequence
  Description of Artificial Sequence: Synthetic oligonucleotide
caguugguccaccaacugg

SEQ ID NO: 2981249 - RNA, 19 nt, Artificial Sequence
  Description of Artificial Sequence: Synthetic oligonucleotide
aaguucucaguagcaucac

SEQ ID NO: 2981250 - RNA, 19 nt, Artificial Sequence
  Description of Artificial Sequence: Synthetic oligonucleotide
gaucagaguuuccgcaggc

SEQ ID NO: 2981251 - RNA, 19 nt, Artificial Sequence
  Description of Artificial Sequence: Synthetic oligonucleotide
uugaucugucauccggaug

SEQ ID NO: 2981252 - RNA, 19 nt, Artificial Sequence
  Description of Artificial Sequence: Synthetic oligonucleotide
agaacuuggacaaaucgua

SEQ ID NO: 2981253 - RNA, 19 nt, Artificial Sequence
  Description of Artificial Sequence: Synthetic oligonucleotide
ucaaaguucucaguagcau

SEQ ID NO: 2981254 - RNA, 19 nt, Artificial Sequence
  Description of Artificial Sequence: Synthetic oligonucleotide
ccagaacuuggacaaaucg

SEQ ID NO: 2981255 - RNA, 19 nt, Artificial Sequence
  Description of Artificial Sequence: Synthetic oligonucleotide
auccucaaaguucucagua

SEQ ID NO: 2981256 - RNA, 19 nt, Artificial Sequence
  Description of Artificial Sequence: Synthetic oligonucleotide
ucagaguuuccgcaggcuu

SEQ ID NO: 2981257 - RNA, 19 nt, Artificial Sequence
  Description of Artificial Sequence: Synthetic oligonucleotide
aguugguccaccaacugga

SEQ ID NO: 2981258 - RNA, 19 nt, Artificial Sequence
  Description of Artificial Sequence: Synthetic oligonucleotide
uagagugcccaacauccuc

SEQ ID NO: 2981259 - RNA, 19 nt, Artificial Sequence
  Description of Artificial Sequence: Synthetic oligonucleotide
cuuagcacuucuuccccac

SEQ ID NO: 2981260 - RNA, 19 nt, Artificial Sequence
  Description of Artificial Sequence: Synthetic oligonucleotide
cauguagaggcgauacauc

SEQ ID NO: 2981261 - RNA, 19 nt, Artificial Sequence
  Description of Artificial Sequence: Synthetic oligonucleotide
uuugaucugucauccggau

SEQ ID NO: 2981262 - RNA, 19 nt, Artificial Sequence
  Description of Artificial Sequence: Synthetic oligonucleotide
agaguuuccgcaggcuugg

SEQ ID NO: 2981263 - RNA, 19 nt, Artificial Sequence
  Description of Artificial Sequence: Synthetic oligonucleotide
accaggaugcucuuccaga

SEQ ID NO: 2981264 - RNA, 19 nt, Artificial Sequence
  Description of Artificial Sequence: Synthetic oligonucleotide
ucaguagcaucaccccggc

SEQ ID NO: 2981265 - RNA, 19 nt, Artificial Sequence
  Description of Artificial Sequence: Synthetic oligonucleotide
ggaauuagagucaacagua

SEQ ID NO: 2981266 - RNA, 19 nt, Artificial Sequence
  Description of Artificial Sequence: Synthetic oligonucleotide
gaggcgauacaucagggcu

SEQ ID NO: 2981267 - RNA, 19 nt, Artificial Sequence
  Description of Artificial Sequence: Synthetic oligonucleotide
ucaguagagugcccaacau

SEQ ID NO: 2981268 - RNA, 19 nt, Artificial Sequence
  Description of Artificial Sequence: Synthetic oligonucleotide
aucuuugaucugucauccg

SEQ ID NO: 2981269 - RNA, 19 nt, Artificial Sequence
  Description of Artificial Sequence: Synthetic oligonucleotide
cucuuagcacuucuucccc

SEQ ID NO: 2981270 - RNA, 19 nt, Artificial Sequence
  Description of Artificial Sequence: Synthetic oligonucleotide
ucuuagcacuucuucccca

SEQ ID NO: 2981271 - RNA, 19 nt, Artificial Sequence
  Description of Artificial Sequence: Synthetic oligonucleotide
ggaagugauuaacacuggc

SEQ ID NO: 2981272 - RNA, 19 nt, Artificial Sequence
  Description of Artificial Sequence: Synthetic oligonucleotide
gaugcucuuccagaacuug

SEQ ID NO: 2981273 - RNA, 19 nt, Artificial Sequence
  Description of Artificial Sequence: Synthetic oligonucleotide
uuagcacuucuuccccacc

SEQ ID NO: 2981274 - RNA, 19 nt, Artificial Sequence
  Description of Artificial Sequence: Synthetic oligonucleotide
cagaguuuccgcaggcuug

SEQ ID NO: 2981275 - RNA, 19 nt, Artificial Sequence
  Description of Artificial Sequence: Synthetic oligonucleotide
gggaucacccaguuggucc

SEQ ID NO: 2981276 - RNA, 19 nt, Artificial Sequence
  Description of Artificial Sequence: Synthetic oligonucleotide
uguagguuuuggacaguuc

SEQ ID NO: 2981277 - RNA, 19 nt, Artificial Sequence
  Description of Artificial Sequence: Synthetic oligonucleotide
cuuugaucugucauccgga

SEQ ID NO: 2981278 - RNA, 19 nt, Artificial Sequence
  Description of Artificial Sequence: Synthetic oligonucleotide
ggcagguuagucuucugcc

SEQ ID NO: 2981279 - RNA, 19 nt, Artificial Sequence
  Description of Artificial Sequence: Synthetic oligonucleotide
gaacuuggacaaaucguac

SEQ ID NO: 2981280 - RNA, 19 nt, Artificial Sequence
  Description of Artificial Sequence: Synthetic oligonucleotide
cuucuuccccaccaggaug

SEQ ID NO: 2981281 - RNA, 19 nt, Artificial Sequence
  Description of Artificial Sequence: Synthetic oligonucleotide
aguuccccgaugauguagg

SEQ ID NO: 2981282 - RNA, 19 nt, Artificial Sequence
  Description of Artificial Sequence: Synthetic oligonucleotide
gagauggcugggaucaccc

SEQ ID NO: 2981283 - RNA, 19 nt, Artificial Sequence
  Description of Artificial Sequence: Synthetic oligonucleotide
ucuuucccauccuugguuu

SEQ ID NO: 2981284 - RNA, 19 nt, Artificial Sequence
  Description of Artificial Sequence: Synthetic oligonucleotide
ugccauguagaggcgauac

SEQ ID NO: 2981285 - RNA, 19 nt, Artificial Sequence
  Description of Artificial Sequence: Synthetic oligonucleotide
ccauccuugguuucaagag

SEQ ID NO: 2981286 - RNA, 19 nt, Artificial Sequence
  Description of Artificial Sequence: Synthetic oligonucleotide
guagcaucaccccggcuug

SEQ ID NO: 2981287 - RNA, 19 nt, Artificial Sequence
  Description of Artificial Sequence: Synthetic oligonucleotide
uucaagaggcagguuaguc

SEQ ID NO: 2981288 - RNA, 19 nt, Artificial Sequence
  Description of Artificial Sequence: Synthetic oligonucleotide
gaagugauuaacacuggcu

SEQ ID NO: 2981289 - RNA, 19 nt, Artificial Sequence
  Description of Artificial Sequence: Synthetic oligonucleotide
gucaguggaagugauuaac

SEQ ID NO: 2981290 - RNA, 19 nt, Artificial Sequence
  Description of Artificial Sequence: Synthetic oligonucleotide
gguuucaagaggcagguua

SEQ ID NO: 2981291 - RNA, 19 nt, Artificial Sequence
  Description of Artificial Sequence: Synthetic oligonucleotide
cucuuccagaacuuggaca

SEQ ID NO: 2981292 - RNA, 19 nt, Artificial Sequence
  Description of Artificial Sequence: Synthetic oligonucleotide
auggaguuccccgaugaug

SEQ ID NO: 2981293 - RNA, 19 nt, Artificial Sequence
  Description of Artificial Sequence: Synthetic oligonucleotide
aguucccgagcaucaguag

SEQ ID NO: 2981294 - RNA, 19 nt, Artificial Sequence
  Description of Artificial Sequence: Synthetic oligonucleotide
uagagucaacaguagugau

SEQ ID NO: 2981295 - RNA, 19 nt, Artificial Sequence
  Description of Artificial Sequence: Synthetic oligonucleotide
ccaccaacuggaauuagag

SEQ ID NO: 2981296 - RNA, 19 nt, Artificial Sequence
  Description of Artificial Sequence: Synthetic oligonucleotide
ucugccauguagaggcgau

SEQ ID NO: 2981297 - RNA, 19 nt, Artificial Sequence
  Description of Artificial Sequence: Synthetic oligonucleotide
agcaucaguagagugccca

SEQ ID NO: 2981298 - RNA, 19 nt, Artificial Sequence
  Description of Artificial Sequence: Synthetic oligonucleotide
cucuggggcagucuuuccc

SEQ ID NO: 2981299 - RNA, 19 nt, Artificial Sequence
  Description of Artificial Sequence: Synthetic oligonucleotide
ggaagguuucugucagugg

SEQ ID NO: 2981300 - RNA, 19 nt, Artificial Sequence
  Description of Artificial Sequence: Synthetic oligonucleotide
gaguuccccgaugauguag

SEQ ID NO: 2981301 - RNA, 19 nt, Artificial Sequence
  Description of Artificial Sequence: Synthetic oligonucleotide
gucaacaguagugaucaga

SEQ ID NO: 2981302 - RNA, 19 nt, Artificial Sequence
  Description of Artificial Sequence: Synthetic oligonucleotide
cccaacauccucaaaguuc

SEQ ID NO: 2981303 - RNA, 19 nt, Artificial Sequence
  Description of Artificial Sequence: Synthetic oligonucleotide
agguuucugucaguggaag

SEQ ID NO: 2981304 - RNA, 19 nt, Artificial Sequence
  Description of Artificial Sequence: Synthetic oligonucleotide
ccucaaaguucucaguagc

SEQ ID NO: 2981305 - RNA, 19 nt, Artificial Sequence
  Description of Artificial Sequence: Synthetic oligonucleotide
augcucuuccagaacuugg

SEQ ID NO: 2981306 - RNA, 19 nt, Artificial Sequence
  Description of Artificial Sequence: Synthetic oligonucleotide
agucuuucccauccuuggu

SEQ ID NO: 2981307 - RNA, 19 nt, Artificial Sequence
  Description of Artificial Sequence: Synthetic oligonucleotide
ucucccuucucuggggcag

SEQ ID NO: 2981308 - RNA, 19 nt, Artificial Sequence
  Description of Artificial Sequence: Synthetic oligonucleotide
uggacaguucccgagcauc

SEQ ID NO: 2981309 - RNA, 19 nt, Artificial Sequence
  Description of Artificial Sequence: Synthetic oligonucleotide
aacuggaauuagagucaac

SEQ ID NO: 2981310 - RNA, 19 nt, Artificial Sequence
  Description of Artificial Sequence: Synthetic oligonucleotide
acaguucccgagcaucagu

SEQ ID NO: 2981311 - RNA, 19 nt, Artificial Sequence
  Description of Artificial Sequence: Synthetic oligonucleotide
uggacaaaucguacacuuu

SEQ ID NO: 2981312 - RNA, 19 nt, Artificial Sequence
  Description of Artificial Sequence: Synthetic oligonucleotide
ugucaguggaagugauuaa

SEQ ID NO: 2981313 - RNA, 19 nt, Artificial Sequence
  Description of Artificial Sequence: Synthetic oligonucleotide
uccggauggaguuccccga

SEQ ID NO: 2981314 - RNA, 19 nt, Artificial Sequence
  Description of Artificial Sequence: Synthetic oligonucleotide
caguagagugcccaacauc

SEQ ID NO: 2981315 - RNA, 19 nt, Artificial Sequence
  Description of Artificial Sequence: Synthetic oligonucleotide
agguuagucuucugccaug

SEQ ID NO: 2981316 - RNA, 19 nt, Artificial Sequence
  Description of Artificial Sequence: Synthetic oligonucleotide
acuucuuccccaccaggau

SEQ ID NO: 2981317 - RNA, 19 nt, Artificial Sequence
  Description of Artificial Sequence: Synthetic oligonucleotide
uugcucucuuagcacuucu

SEQ ID NO: 2981318 - RNA, 19 nt, Artificial Sequence
  Description of Artificial Sequence: Synthetic oligonucleotide
uucugucaguggaagugau

SEQ ID NO: 2981319 - RNA, 19 nt, Artificial Sequence
  Description of Artificial Sequence: Synthetic oligonucleotide
aguuuccgcaggcuuggcu

SEQ ID NO: 2981320 - RNA, 19 nt, Artificial Sequence
  Description of Artificial Sequence: Synthetic oligonucleotide
ccgagcaucaguagagugc

SEQ ID NO: 2981321 - RNA, 19 nt, Artificial Sequence
  Description of Artificial Sequence: Synthetic oligonucleotide
gucuucugccauguagagg

SEQ ID NO: 2981322 - RNA, 19 nt, Artificial Sequence
  Description of Artificial Sequence: Synthetic oligonucleotide
guucccgagcaucaguaga

SEQ ID NO: 2981323 - RNA, 19 nt, Artificial Sequence
  Description of Artificial Sequence: Synthetic oligonucleotide
guuuccgcaggcuuggcua

SEQ ID NO: 2981324 - RNA, 19 nt, Artificial Sequence
  Description of Artificial Sequence: Synthetic oligonucleotide
cagaacuuggacaaaucgu

SEQ ID NO: 2981325 - RNA, 19 nt, Artificial Sequence
  Description of Artificial Sequence: Synthetic oligonucleotide
ucguacacuuuguggugca

SEQ ID NO: 2981326 - RNA, 19 nt, Artificial Sequence
  Description of Artificial Sequence: Synthetic oligonucleotide
gcugagauggcugggauca

SEQ ID NO: 2981327 - RNA, 19 nt, Artificial Sequence
  Description of Artificial Sequence: Synthetic oligonucleotide
cuuggcuaucuuugaucug

SEQ ID NO: 2981328 - RNA, 19 nt, Artificial Sequence
  Description of Artificial Sequence: Synthetic oligonucleotide
cugucaguggaagugauua

SEQ ID NO: 2981329 - RNA, 19 nt, Artificial Sequence
  Description of Artificial Sequence: Synthetic oligonucleotide
cacuucuuccccaccagga

SEQ ID NO: 2981330 - RNA, 19 nt, Artificial Sequence
  Description of Artificial Sequence: Synthetic oligonucleotide
agggcuacagccagggcug

SEQ ID NO: 2981331 - RNA, 19 nt, Artificial Sequence
  Description of Artificial Sequence: Synthetic oligonucleotide
uucucuggggcagucuuuc

SEQ ID NO: 2981332 - RNA, 19 nt, Artificial Sequence
  Description of Artificial Sequence: Synthetic oligonucleotide
ucugucaguggaagugauu

SEQ ID NO: 2981333 - RNA, 19 nt, Artificial Sequence
  Description of Artificial Sequence: Synthetic oligonucleotide
uuucaagaggcagguuagu

SEQ ID NO: 2981334 - RNA, 19 nt, Artificial Sequence
  Description of Artificial Sequence: Synthetic oligonucleotide
ucacccaguugguccacca

SEQ ID NO: 2981335 - RNA, 19 nt, Artificial Sequence
  Description of Artificial Sequence: Synthetic oligonucleotide
uugguccaccaacuggaau

SEQ ID NO: 2981336 - RNA, 19 nt, Artificial Sequence
  Description of Artificial Sequence: Synthetic oligonucleotide
aagguuucugucaguggaa

SEQ ID NO: 2981337 - RNA, 19 nt, Artificial Sequence
  Description of Artificial Sequence: Synthetic oligonucleotide
agagugcccaacauccuca

SEQ ID NO: 2981338 - RNA, 19 nt, Artificial Sequence
  Description of Artificial Sequence: Synthetic oligonucleotide
gacaguucccgagcaucag

SEQ ID NO: 2981339 - RNA, 19 nt, Artificial Sequence
  Description of Artificial Sequence: Synthetic oligonucleotide
gugauuaacacuggcuucu

SEQ ID NO: 2981340 - RNA, 19 nt, Artificial Sequence
  Description of Artificial Sequence: Synthetic oligonucleotide
cuucugccauguagaggcg

SEQ ID NO: 2981341 - RNA, 19 nt, Artificial Sequence
  Description of Artificial Sequence: Synthetic oligonucleotide
caccaggaugcucuuccag

SEQ ID NO: 2981342 - RNA, 19 nt, Artificial Sequence
  Description of Artificial Sequence: Synthetic oligonucleotide
cacuggcuucuuuucuccc

SEQ ID NO: 2981343 - RNA, 19 nt, Artificial Sequence
  Description of Artificial Sequence: Synthetic oligonucleotide
gggaagguuucugucagug

SEQ ID NO: 2981344 - RNA, 19 nt, Artificial Sequence
  Description of Artificial Sequence: Synthetic oligonucleotide
uucugccauguagaggcga

SEQ ID NO: 2981345 - RNA, 19 nt, Artificial Sequence
  Description of Artificial Sequence: Synthetic oligonucleotide
caucagggcuacagccagg

SEQ ID NO: 2981346 - RNA, 19 nt, Artificial Sequence
  Description of Artificial Sequence: Synthetic oligonucleotide
uuuccgcaggcuuggcuau

SEQ ID NO: 2981347 - RNA, 19 nt, Artificial Sequence
  Description of Artificial Sequence: Synthetic oligonucleotide
aucacccaguugguccacc

SEQ ID NO: 2981348 - RNA, 19 nt, Artificial Sequence
  Description of Artificial Sequence: Synthetic oligonucleotide
caucaguagagugcccaac

SEQ ID NO: 2981349 - RNA, 19 nt, Artificial Sequence
  Description of Artificial Sequence: Synthetic oligonucleotide
uacagccagggcugagaug

SEQ ID NO: 2981350 - RNA, 19 nt, Artificial Sequence
  Description of Artificial Sequence: Synthetic oligonucleotide
gcaggcuuggcuaucuuug

SEQ ID NO: 2981351 - RNA, 19 nt, Artificial Sequence
  Description of Artificial Sequence: Synthetic oligonucleotide
cuuucccauccuugguuuc

SEQ ID NO: 2981352 - RNA, 19 nt, Artificial Sequence
  Description of Artificial Sequence: Synthetic oligonucleotide
ggauggaguuccccgauga

SEQ ID NO: 2981353 - RNA, 19 nt, Artificial Sequence
  Description of Artificial Sequence: Synthetic oligonucleotide
agucaacaguagugaucag

SEQ ID NO: 2981354 - RNA, 19 nt, Artificial Sequence
  Description of Artificial Sequence: Synthetic oligonucleotide
ggcuuggcuaucuuugauc

SEQ ID NO: 2981355 - RNA, 19 nt, Artificial Sequence
  Description of Artificial Sequence: Synthetic oligonucleotide
ucucuggggcagucuuucc

SEQ ID NO: 2981356 - RNA, 19 nt, Artificial Sequence
  Description of Artificial Sequence: Synthetic oligonucleotide
uggcuaucuuugaucuguc

SEQ ID NO: 2981357 - RNA, 19 nt, Artificial Sequence
  Description of Artificial Sequence: Synthetic oligonucleotide
gcucucuuagcacuucuuc

SEQ ID NO: 2981358 - RNA, 19 nt, Artificial Sequence
  Description of Artificial Sequence: Synthetic oligonucleotide
ccaacuggaauuagaguca

SEQ ID NO: 2981359 - RNA, 19 nt, Artificial Sequence
  Description of Artificial Sequence: Synthetic oligonucleotide
uuggacaguucccgagcau

SEQ ID NO: 2981360 - RNA, 19 nt, Artificial Sequence
  Description of Artificial Sequence: Synthetic oligonucleotide
cccaccaggaugcucuucc

SEQ ID NO: 2981361 - RNA, 19 nt, Artificial Sequence
  Description of Artificial Sequence: Synthetic oligonucleotide
ucccauccuugguuucaag

SEQ ID NO: 2981362 - RNA, 19 nt, Artificial Sequence
  Description of Artificial Sequence: Synthetic oligonucleotide
caggaugcucuuccagaac

SEQ ID NO: 2981363 - RNA, 19 nt, Artificial Sequence
  Description of Artificial Sequence: Synthetic oligonucleotide
gcacuucuuccccaccagg

SEQ ID NO: 2981364 - RNA, 19 nt, Artificial Sequence
  Description of Artificial Sequence: Synthetic oligonucleotide
gcuuggcuaucuuugaucu

SEQ ID NO: 2981365 - RNA, 19 nt, Artificial Sequence
  Description of Artificial Sequence: Synthetic oligonucleotide
aucagaguuuccgcaggcu

SEQ ID NO: 2981366 - RNA, 19 nt, Artificial Sequence
  Description of Artificial Sequence: Synthetic oligonucleotide
gacaaaucguacacuuugu

SEQ ID NO: 2981367 - RNA, 19 nt, Artificial Sequence
  Description of Artificial Sequence: Synthetic oligonucleotide
agauggcugggaucaccca

SEQ ID NO: 2981368 - RNA, 19 nt, Artificial Sequence
  Description of Artificial Sequence: Synthetic oligonucleotide
ccaacauccucaaaguucu

SEQ ID NO: 2981369 - RNA, 19 nt, Artificial Sequence
  Description of Artificial Sequence: Synthetic oligonucleotide
auguagguuuuggacaguu

SEQ ID NO: 2981370 - RNA, 19 nt, Artificial Sequence
  Description of Artificial Sequence: Synthetic oligonucleotide
aggcuuggcuaucuuugau

SEQ ID NO: 2981371 - RNA, 19 nt, Artificial Sequence
  Description of Artificial Sequence: Synthetic oligonucleotide
cgagcaucaguagagugcc

SEQ ID NO: 2981372 - RNA, 19 nt, Artificial Sequence
  Description of Artificial Sequence: Synthetic oligonucleotide
caagaggcagguuagucuu

SEQ ID NO: 2981373 - RNA, 19 nt, Artificial Sequence
  Description of Artificial Sequence: Synthetic oligonucleotide
gcuaucuuugaucugucau

SEQ ID NO: 2981374 - RNA, 19 nt, Artificial Sequence
  Description of Artificial Sequence: Synthetic oligonucleotide
aucugucauccggauggag

SEQ ID NO: 2981375 - RNA, 19 nt, Artificial Sequence
  Description of Artificial Sequence: Synthetic oligonucleotide
ggaucacccaguuggucca

SEQ ID NO: 2981376 - RNA, 19 nt, Artificial Sequence
  Description of Artificial Sequence: Synthetic oligonucleotide
gcagucuuucccauccuug

SEQ ID NO: 2981377 - RNA, 19 nt, Artificial Sequence
  Description of Artificial Sequence: Synthetic oligonucleotide
cgauacaucagggcuacag

SEQ ID NO: 2981378 - RNA, 19 nt, Artificial Sequence
  Description of Artificial Sequence: Synthetic oligonucleotide
caguucccgagcaucagua

SEQ ID NO: 2981379 - RNA, 19 nt, Artificial Sequence
  Description of Artificial Sequence: Synthetic oligonucleotide
gguuuuggacaguucccga

SEQ ID NO: 2981380 - RNA, 19 nt, Artificial Sequence
  Description of Artificial Sequence: Synthetic oligonucleotide
ccgaugauguagguuuugg

SEQ ID NO: 2981381 - RNA, 19 nt, Artificial Sequence
  Description of Artificial Sequence: Synthetic oligonucleotide
ugucauccggauggaguuc

SEQ ID NO: 2981382 - RNA, 19 nt, Artificial Sequence
  Description of Artificial Sequence: Synthetic oligonucleotide
ugauuaacacuggcuucuu

SEQ ID NO: 2981383 - RNA, 19 nt, Artificial Sequence
  Description of Artificial Sequence: Synthetic oligonucleotide
auggcugggaucacccagu

SEQ ID NO: 2981384 - RNA, 19 nt, Artificial Sequence
  Description of Artificial Sequence: Synthetic oligonucleotide
ugggaucacccaguugguc

SEQ ID NO: 2981385 - RNA, 19 nt, Artificial Sequence
  Description of Artificial Sequence: Synthetic oligonucleotide
uccgcaggcuuggcuaucu

SEQ ID NO: 2981386 - RNA, 19 nt, Artificial Sequence
  Description of Artificial Sequence: Synthetic oligonucleotide
ucccgagcaucaguagagu

SEQ ID NO: 2981387 - RNA, 19 nt, Artificial Sequence
  Description of Artificial Sequence: Synthetic oligonucleotide
uggcuucuuuucucccuuc

SEQ ID NO: 2981388 - RNA, 19 nt, Artificial Sequence
  Description of Artificial Sequence: Synthetic oligonucleotide
uucccauccuugguuucaa

SEQ ID NO: 2981389 - RNA, 19 nt, Artificial Sequence
  Description of Artificial Sequence: Synthetic oligonucleotide
ggcgauacaucagggcuac

SEQ ID NO: 2981390 - RNA, 19 nt, Artificial Sequence
  Description of Artificial Sequence: Synthetic oligonucleotide
gagugcccaacauccucaa

SEQ ID NO: 2981391 - RNA, 19 nt, Artificial Sequence
  Description of Artificial Sequence: Synthetic oligonucleotide
uggggcagucuuucccauc

SEQ ID NO: 2981392 - RNA, 19 nt, Artificial Sequence
  Description of Artificial Sequence: Synthetic oligonucleotide
gauuaacacuggcuucuuu

SEQ ID NO: 2981393 - RNA, 19 nt, Artificial Sequence
  Description of Artificial Sequence: Synthetic oligonucleotide
gaucugucauccggaugga

SEQ ID NO: 2981394 - RNA, 19 nt, Artificial Sequence
  Description of Artificial Sequence: Synthetic oligonucleotide
gucuuucccauccuugguu

SEQ ID NO: 2981395 - RNA, 19 nt, Artificial Sequence
  Description of Artificial Sequence: Synthetic oligonucleotide
cugucauccggauggaguu

SEQ ID NO: 2981396 - RNA, 19 nt, Artificial Sequence
  Description of Artificial Sequence: Synthetic oligonucleotide
agugcccaacauccucaaa

SEQ ID NO: 2981397 - RNA, 19 nt, Artificial Sequence
  Description of Artificial Sequence: Synthetic oligonucleotide
caacuggaauuagagucaa

SEQ ID NO: 2981398 - RNA, 19 nt, Artificial Sequence
  Description of Artificial Sequence: Synthetic oligonucleotide
uuccccgaugauguagguu

SEQ ID NO: 2981399 - RNA, 19 nt, Artificial Sequence
  Description of Artificial Sequence: Synthetic oligonucleotide
ggcuaucuuugaucuguca

SEQ ID NO: 2981400 - RNA, 19 nt, Artificial Sequence
  Description of Artificial Sequence: Synthetic oligonucleotide
caccaacuggaauuagagu

SEQ ID NO: 2981401 - RNA, 19 nt, Artificial Sequence
  Description of Artificial Sequence: Synthetic oligonucleotide
caacauccucaaaguucuc

SEQ ID NO: 2981402 - RNA, 19 nt, Artificial Sequence
  Description of Artificial Sequence: Synthetic oligonucleotide
uggcugggaucacccaguu

SEQ ID NO: 2981403 - RNA, 19 nt, Artificial Sequence
  Description of Artificial Sequence: Synthetic oligonucleotide
cuuggacaaaucguacacu

SEQ ID NO: 2981404 - RNA, 19 nt, Artificial Sequence
  Description of Artificial Sequence: Synthetic oligonucleotide
gauggaguuccccgaugau

SEQ ID NO: 2981405 - RNA, 19 nt, Artificial Sequence
  Description of Artificial Sequence: Synthetic oligonucleotide
cccgagcaucaguagagug

SEQ ID NO: 2981406 - RNA, 19 nt, Artificial Sequence
  Description of Artificial Sequence: Synthetic oligonucleotide
aggcgauacaucagggcua

SEQ ID NO: 2981407 - RNA, 19 nt, Artificial Sequence
  Description of Artificial Sequence: Synthetic oligonucleotide
agcaucaccccggcuugcu

SEQ ID NO: 2981408 - RNA, 19 nt, Artificial Sequence
  Description of Artificial Sequence: Synthetic oligonucleotide
cagggcugagauggcuggg

SEQ ID NO: 2981409 - RNA, 19 nt, Artificial Sequence
  Description of Artificial Sequence: Synthetic oligonucleotide
ccggcuugcucucuuagca

SEQ ID NO: 2981410 - RNA, 19 nt, Artificial Sequence
  Description of Artificial Sequence: Synthetic oligonucleotide
uagcaucaccccggcuugc

SEQ ID NO: 2981411 - RNA, 19 nt, Artificial Sequence
  Description of Artificial Sequence: Synthetic oligonucleotide
gagcaucaguagagugccc

SEQ ID NO: 2981412 - RNA, 19 nt, Artificial Sequence
  Description of Artificial Sequence: Synthetic oligonucleotide
ccaguugguccaccaacug

SEQ ID NO: 2981413 - RNA, 19 nt, Artificial Sequence
  Description of Artificial Sequence: Synthetic oligonucleotide
guccaccaacuggaauuag

SEQ ID NO: 2981414 - RNA, 19 nt, Artificial Sequence
  Description of Artificial Sequence: Synthetic oligonucleotide
gaucacccaguugguccac

SEQ ID NO: 2981415 - RNA, 19 nt, Artificial Sequence
  Description of Artificial Sequence: Synthetic oligonucleotide
ggacaguucccgagcauca

SEQ ID NO: 2981416 - RNA, 19 nt, Artificial Sequence
  Description of Artificial Sequence: Synthetic oligonucleotide
ggcugagauggcugggauc

SEQ ID NO: 2981417 - RNA, 19 nt, Artificial Sequence
  Description of Artificial Sequence: Synthetic oligonucleotide
cagguuagucuucugccau

SEQ ID NO: 2981418 - RNA, 19 nt, Artificial Sequence
  Description of Artificial Sequence: Synthetic oligonucleotide
agccagggcugagauggcu

SEQ ID NO: 2981419 - RNA, 19 nt, Artificial Sequence
  Description of Artificial Sequence: Synthetic oligonucleotide
caacaguagugaucagagu

SEQ ID NO: 2981420 - RNA, 19 nt, Artificial Sequence
  Description of Artificial Sequence: Synthetic oligonucleotide
guuagucuucugccaugua

SEQ ID NO: 2981421 - RNA, 19 nt, Artificial Sequence
  Description of Artificial Sequence: Synthetic oligonucleotide
gaguuuccgcaggcuuggc

SEQ ID NO: 2981422 - RNA, 19 nt, Artificial Sequence
  Description of Artificial Sequence: Synthetic oligonucleotide
ccaggaugcucuuccagaa

SEQ ID NO: 2981423 - RNA, 19 nt, Artificial Sequence
  Description of Artificial Sequence: Synthetic oligonucleotide
gccauguagaggcgauaca

SEQ ID NO: 2981424 - RNA, 19 nt, Artificial Sequence
  Description of Artificial Sequence: Synthetic oligonucleotide
gguuagucuucugccaugu

SEQ ID NO: 2981425 - RNA, 19 nt, Artificial Sequence
  Description of Artificial Sequence: Synthetic oligonucleotide
cccggcuugcucucuuagc

SEQ ID NO: 2981426 - RNA, 19 nt, Artificial Sequence
  Description of Artificial Sequence: Synthetic oligonucleotide
guugguccaccaacuggaa

SEQ ID NO: 2981427 - RNA, 19 nt, Artificial Sequence
  Description of Artificial Sequence: Synthetic oligonucleotide
gcuacagccagggcugaga

SEQ ID NO: 2981428 - RNA, 19 nt, Artificial Sequence
  Description of Artificial Sequence: Synthetic oligonucleotide
gcaucaguagagugcccaa

SEQ ID NO: 2981429 - RNA, 19 nt, Artificial Sequence
  Description of Artificial Sequence: Synthetic oligonucleotide
cuacagccagggcugagau

SEQ ID NO: 2981430 - RNA, 19 nt, Artificial Sequence
  Description of Artificial Sequence: Synthetic oligonucleotide
gccagggcugagauggcug

SEQ ID NO: 2981431 - RNA, 19 nt, Artificial Sequence
  Description of Artificial Sequence: Synthetic oligonucleotide
gauguagguuuuggacagu

SEQ ID NO: 2981432 - RNA, 19 nt, Artificial Sequence
  Description of Artificial Sequence: Synthetic oligonucleotide
ggcugggaucacccaguug

SEQ ID NO: 2981433 - RNA, 19 nt, Artificial Sequence
  Description of Artificial Sequence: Synthetic oligonucleotide
cgaugauguagguuuugga

SEQ ID NO: 2981434 - RNA, 19 nt, Artificial Sequence
  Description of Artificial Sequence: Synthetic oligonucleotide
ugguuucaagaggcagguu

SEQ ID NO: 2981435 - RNA, 19 nt, Artificial Sequence
  Description of Artificial Sequence: Synthetic oligonucleotide
guagagugcccaacauccu

SEQ ID NO: 2981436 - RNA, 19 nt, Artificial Sequence
  Description of Artificial Sequence: Synthetic oligonucleotide
cugagauggcugggaucac

SEQ ID NO: 2981437 - RNA, 19 nt, Artificial Sequence
  Description of Artificial Sequence: Synthetic oligonucleotide
ucccuucucuggggcaguc

SEQ ID NO: 2981438 - RNA, 19 nt, Artificial Sequence
  Description of Artificial Sequence: Synthetic oligonucleotide
ccauguagaggcgauacau

SEQ ID NO: 2981439 - RNA, 19 nt, Artificial Sequence
  Description of Artificial Sequence: Synthetic oligonucleotide
uuccgcaggcuuggcuauc

SEQ ID NO: 2981440 - RNA, 19 nt, Artificial Sequence
  Description of Artificial Sequence: Synthetic oligonucleotide
cugggaucacccaguuggu

SEQ ID NO: 2981441 - RNA, 19 nt, Artificial Sequence
  Description of Artificial Sequence: Synthetic oligonucleotide
cacccaguugguccaccaa

SEQ ID NO: 2981442 - RNA, 19 nt, Artificial Sequence
  Description of Artificial Sequence: Synthetic oligonucleotide
guuccccgaugauguaggu

SEQ ID NO: 2981443 - RNA, 19 nt, Artificial Sequence
  Description of Artificial Sequence: Synthetic oligonucleotide
ucaccccggcuugcucucu

SEQ ID NO: 2981444 - RNA, 19 nt, Artificial Sequence
  Description of Artificial Sequence: Synthetic oligonucleotide
cggcuugcucucuuagcac

SEQ ID NO: 2981445 - RNA, 19 nt, Artificial Sequence
  Description of Artificial Sequence: Synthetic oligonucleotide
accccggcuugcucucuua

SEQ ID NO: 2981446 - RNA, 19 nt, Artificial Sequence
  Description of Artificial Sequence: Synthetic oligonucleotide
cccaguugguccaccaacu

SEQ ID NO: 2981447 - RNA, 19 nt, Artificial Sequence
  Description of Artificial Sequence: Synthetic oligonucleotide
cccgaugauguagguuuug

SEQ ID NO: 2981448 - RNA, 19 nt, Artificial Sequence
  Description of Artificial Sequence: Synthetic oligonucleotide
ccccggcuugcucucuuag

SEQ ID NO: 2981449 - RNA, 19 nt, Artificial Sequence
  Description of Artificial Sequence: Synthetic oligonucleotide
ggcuacagccagggcugag

SEQ ID NO: 2981450 - RNA, 19 nt, Artificial Sequence
  Description of Artificial Sequence: Synthetic oligonucleotide
cuucucuggggcagucuuu

SEQ ID NO: 2981451 - RNA, 19 nt, Artificial Sequence
  Description of Artificial Sequence: Synthetic oligonucleotide
ggaguuccccgaugaugua

SEQ ID NO: 2981452 - RNA, 19 nt, Artificial Sequence
  Description of Artificial Sequence: Synthetic oligonucleotide
ggcagucuuucccauccuu

SEQ ID NO: 2981453 - RNA, 19 nt, Artificial Sequence
  Description of Artificial Sequence: Synthetic oligonucleotide
cggauggaguuccccgaug

SEQ ID NO: 2981454 - RNA, 19 nt, Artificial Sequence
  Description of Artificial Sequence: Synthetic oligonucleotide
cuggggcagucuuucccau

SEQ ID NO: 2981455 - RNA, 19 nt, Artificial Sequence
  Description of Artificial Sequence: Synthetic oligonucleotide
cugccauguagaggcgaua

SEQ ID NO: 2981456 - RNA, 19 nt, Artificial Sequence
  Description of Artificial Sequence: Synthetic oligonucleotide
ccaccaggaugcucuucca

SEQ ID NO: 2981457 - RNA, 19 nt, Artificial Sequence
  Description of Artificial Sequence: Synthetic oligonucleotide
ggggaagguuucugucagu

SEQ ID NO: 2981458 - RNA, 19 nt, Artificial Sequence
  Description of Artificial Sequence: Synthetic oligonucleotide
gggcugagauggcugggau

SEQ ID NO: 2981459 - RNA, 19 nt, Artificial Sequence
  Description of Artificial Sequence: Synthetic oligonucleotide
ggaugcucuuccagaacuu

SEQ ID NO: 2981460 - RNA, 19 nt, Artificial Sequence
  Description of Artificial Sequence: Synthetic oligonucleotide
ccuucucuggggcagucuu

SEQ ID NO: 2981461 - RNA, 19 nt, Artificial Sequence
  Description of Artificial Sequence: Synthetic oligonucleotide
caguagcaucaccccggcu

SEQ ID NO: 2981462 - RNA, 19 nt, Artificial Sequence
  Description of Artificial Sequence: Synthetic oligonucleotide
gggcagucuuucccauccu

SEQ ID NO: 2981463 - RNA, 19 nt, Artificial Sequence
  Description of Artificial Sequence: Synthetic oligonucleotide
gcuugcucucuuagcacuu

SEQ ID NO: 2981464 - RNA, 19 nt, Artificial Sequence
  Description of Artificial Sequence: Synthetic oligonucleotide
cucccuucucuggggcagu

SEQ ID NO: 2981465 - RNA, 19 nt, Artificial Sequence
  Description of Artificial Sequence: Synthetic oligonucleotide
gcgauacaucagggcuaca

SEQ ID NO: 2981466 - RNA, 19 nt, Artificial Sequence
  Description of Artificial Sequence: Synthetic oligonucleotide
ccggauggaguuccccgau

SEQ ID NO: 2981467 - RNA, 19 nt, Artificial Sequence
  Description of Artificial Sequence: Synthetic oligonucleotide
cgcaggcuuggcuaucuuu

SEQ ID NO: 2981468 - RNA, 19 nt, Artificial Sequence
  Description of Artificial Sequence: Synthetic oligonucleotide
caccccggcuugcucucuu

SEQ ID NO: 2981469 - RNA, 19 nt, Artificial Sequence
  Description of Artificial Sequence: Synthetic oligonucleotide
ccccgaugauguagguuuu

SEQ ID NO: 2981470 - RNA, 19 nt, Artificial Sequence
  Description of Artificial Sequence: Synthetic oligonucleotide
cccuucucuggggcagucu

SEQ ID NO: 2981471 - RNA, 19 nt, Artificial Sequence
  Description of Artificial Sequence: Synthetic oligonucleotide
ccgcaggcuuggcuaucuu

SEQ ID NO: 2981472 - RNA, 19 nt, Artificial Sequence
  Description of Artificial Sequence: Synthetic oligonucleotide
uaaaacaccaacuugauca

SEQ ID NO: 2981473 - RNA, 19 nt, Artificial Sequence
  Description of Artificial Sequence: Synthetic oligonucleotide
aaaacuuuucgagagaagc

SEQ ID NO: 2981474 - RNA, 19 nt, Artificial Sequence
  Description of Artificial Sequence: Synthetic oligonucleotide
ucaucuauuggaaacaggg

SEQ ID NO: 2981475 - RNA, 19 nt, Artificial Sequence
  Description of Artificial Sequence: Synthetic oligonucleotide
aauaggauuugcuuucugc

SEQ ID NO: 2981476 - RNA, 19 nt, Artificial Sequence
  Description of Artificial Sequence: Synthetic oligonucleotide
uuggaaacagggaagaucg

SEQ ID NO: 2981477 - RNA, 19 nt, Artificial Sequence
  Description of Artificial Sequence: Synthetic oligonucleotide
aucaaugagugcuugaacc

SEQ ID NO: 2981478 - RNA, 19 nt, Artificial Sequence
  Description of Artificial Sequence: Synthetic oligonucleotide
aacaucaacagauugucag

SEQ ID NO: 2981479 - RNA, 19 nt, Artificial Sequence
  Description of Artificial Sequence: Synthetic oligonucleotide
aauuuaaaacaccaacuug

SEQ ID NO: 2981480 - RNA, 19 nt, Artificial Sequence
  Description of Artificial Sequence: Synthetic oligonucleotide
acagguuuguccuugauag

SEQ ID NO: 2981481 - RNA, 19 nt, Artificial Sequence
  Description of Artificial Sequence: Synthetic oligonucleotide
uuugcuuucugcuuuauga

SEQ ID NO: 2981482 - RNA, 19 nt, Artificial Sequence
  Description of Artificial Sequence: Synthetic oligonucleotide
aaucuucugaaacuggcag

SEQ ID NO: 2981483 - RNA, 19 nt, Artificial Sequence
  Description of Artificial Sequence: Synthetic oligonucleotide
aacuugaucacugugacca

SEQ ID NO: 2981484 - RNA, 19 nt, Artificial Sequence
  Description of Artificial Sequence: Synthetic oligonucleotide
agaggaggaaugcauagcc

SEQ ID NO: 2981485 - RNA, 19 nt, Artificial Sequence
  Description of Artificial Sequence: Synthetic oligonucleotide
uuuaacaucaacagauugu

SEQ ID NO: 2981486 - RNA, 19 nt, Artificial Sequence
  Description of Artificial Sequence: Synthetic oligonucleotide
agaucgaccauuuaacauc

SEQ ID NO: 2981487 - RNA, 19 nt, Artificial Sequence
  Description of Artificial Sequence: Synthetic oligonucleotide
agugaucucaucuucauca

SEQ ID NO: 2981488 - RNA, 19 nt, Artificial Sequence
  Description of Artificial Sequence: Synthetic oligonucleotide
ugagcugaauaacaugugg

SEQ ID NO: 2981489 - RNA, 19 nt, Artificial Sequence
  Description of Artificial Sequence: Synthetic oligonucleotide
aaucuacuaccaaaggucc

SEQ ID NO: 2981490 - RNA, 19 nt, Artificial Sequence
  Description of Artificial Sequence: Synthetic oligonucleotide
aaugcauagccuuuuggug

SEQ ID NO: 2981491 - RNA, 19 nt, Artificial Sequence
  Description of Artificial Sequence: Synthetic oligonucleotide
aaaacaccaacuugaucac

SEQ ID NO: 2981492 - RNA, 19 nt, Artificial Sequence
  Description of Artificial Sequence: Synthetic oligonucleotide
aucacugugaccaucgucc

SEQ ID NO: 2981493 - RNA, 19 nt, Artificial Sequence
  Description of Artificial Sequence: Synthetic oligonucleotide
ucuauuggaaacagggaag

SEQ ID NO: 2981494 - RNA, 19 nt, Artificial Sequence
  Description of Artificial Sequence: Synthetic oligonucleotide
gaccauuuaacaucaacag

SEQ ID NO: 2981495 - RNA, 19 nt, Artificial Sequence
  Description of Artificial Sequence: Synthetic oligonucleotide
agcugaauaacaugugggc

SEQ ID NO: 2981496 - RNA, 19 nt, Artificial Sequence
  Description of Artificial Sequence: Synthetic oligonucleotide
aaagaggaggaaugcauag

SEQ ID NO: 2981497 - RNA, 19 nt, Artificial Sequence
  Description of Artificial Sequence: Synthetic oligonucleotide
uuugaugagcugaauaaca

SEQ ID NO: 2981498 - RNA, 19 nt, Artificial Sequence
  Description of Artificial Sequence: Synthetic oligonucleotide
uucaucaauaucuggagga

SEQ ID NO: 2981499 - RNA, 19 nt, Artificial Sequence
  Description of Artificial Sequence: Synthetic oligonucleotide
ucaaugagugcuugaaccg

SEQ ID NO: 2981500 - RNA, 19 nt, Artificial Sequence
  Description of Artificial Sequence: Synthetic oligonucleotide
ucaacagauugucaguucc

SEQ ID NO: 2981501 - RNA, 19 nt, Artificial Sequence
  Description of Artificial Sequence: Synthetic oligonucleotide
augugggcgaauuuaaaac

SEQ ID NO: 2981502 - RNA, 19 nt, Artificial Sequence
  Description of Artificial Sequence: Synthetic oligonucleotide
auuuaaaacaccaacuuga

SEQ ID NO: 2981503 - RNA, 19 nt, Artificial Sequence
  Description of Artificial Sequence: Synthetic oligonucleotide
gagagaagcguucuauucg

SEQ ID NO: 2981504 - RNA, 19 nt, Artificial Sequence
  Description of Artificial Sequence: Synthetic oligonucleotide
gaaaauaggauuugcuuuc

SEQ ID NO: 2981505 - RNA, 19 nt, Artificial Sequence
  Description of Artificial Sequence: Synthetic oligonucleotide
caaucuacuaccaaagguc

SEQ ID NO: 2981506 - RNA, 19 nt, Artificial Sequence
  Description of Artificial Sequence: Synthetic oligonucleotide
acuaccaaagguccaaauc

SEQ ID NO: 2981507 - RNA, 19 nt, Artificial Sequence
  Description of Artificial Sequence: Synthetic oligonucleotide
auuuaacaucaacagauug

SEQ ID NO: 2981508 - RNA, 19 nt, Artificial Sequence
  Description of Artificial Sequence: Synthetic oligonucleotide
uucaaugcacgcaucaaug

SEQ ID NO: 2981509 - RNA, 19 nt, Artificial Sequence
  Description of Artificial Sequence: Synthetic oligonucleotide
augcauagccuuuuggugg

SEQ ID NO: 2981510 - RNA, 19 nt, Artificial Sequence
  Description of Artificial Sequence: Synthetic oligonucleotide
cuuuaugaggccaaucuac

SEQ ID NO: 2981511 - RNA, 19 nt, Artificial Sequence
  Description of Artificial Sequence: Synthetic oligonucleotide
auuuugaugagcugaauaa

SEQ ID NO: 2981512 - RNA, 19 nt, Artificial Sequence
  Description of Artificial Sequence: Synthetic oligonucleotide
aucaauaucuggaggaagc

SEQ ID NO: 2981513 - RNA, 19 nt, Artificial Sequence
  Description of Artificial Sequence: Synthetic oligonucleotide
caagcuaucaucuauugga

SEQ ID NO: 2981514 - RNA, 19 nt, Artificial Sequence
  Description of Artificial Sequence: Synthetic oligonucleotide
aguagaguuuuccaucuuc

SEQ ID NO: 2981515 - RNA, 19 nt, Artificial Sequence
  Description of Artificial Sequence: Synthetic oligonucleotide
ugcuuuaugaggccaaucu

SEQ ID NO: 2981516 - RNA, 19 nt, Artificial Sequence
  Description of Artificial Sequence: Synthetic oligonucleotide
aaacuuuucgagagaagcg

SEQ ID NO: 2981517 - RNA, 19 nt, Artificial Sequence
  Description of Artificial Sequence: Synthetic oligonucleotide
uaugaggccaaucuacuac

SEQ ID NO: 2981518 - RNA, 19 nt, Artificial Sequence
  Description of Artificial Sequence: Synthetic oligonucleotide
aaacagggaagaucgacca

SEQ ID NO: 2981519 - RNA, 19 nt, Artificial Sequence
  Description of Artificial Sequence: Synthetic oligonucleotide
uauucguucuccauuuuga

SEQ ID NO: 2981520 - RNA, 19 nt, Artificial Sequence
  Description of Artificial Sequence: Synthetic oligonucleotide
uuugguggaaaauaggauu

SEQ ID NO: 2981521 - RNA, 19 nt, Artificial Sequence
  Description of Artificial Sequence: Synthetic oligonucleotide
augaggccaaucuacuacc

SEQ ID NO: 2981522 - RNA, 19 nt, Artificial Sequence
  Description of Artificial Sequence: Synthetic oligonucleotide
aacaagcuaucaucuauug

SEQ ID NO: 2981523 - RNA, 19 nt, Artificial Sequence
  Description of Artificial Sequence: Synthetic oligonucleotide
uugauaguaggcuggaaac

SEQ ID NO: 2981524 - RNA, 19 nt, Artificial Sequence
  Description of Artificial Sequence: Synthetic oligonucleotide
uucuccauuuugaugagcu

SEQ ID NO: 2981525 - RNA, 19 nt, Artificial Sequence
  Description of Artificial Sequence: Synthetic oligonucleotide
uuaacaucaacagauuguc

SEQ ID NO: 2981526 - RNA, 19 nt, Artificial Sequence
  Description of Artificial Sequence: Synthetic oligonucleotide
uggaaacacacaaguagag

SEQ ID NO: 2981527 - RNA, 19 nt, Artificial Sequence
  Description of Artificial Sequence: Synthetic oligonucleotide
aguuccuggauguggauag

SEQ ID NO: 2981528 - RNA, 19 nt, Artificial Sequence
  Description of Artificial Sequence: Synthetic oligonucleotide
cucuucuugaaagaggagg

SEQ ID NO: 2981529 - RNA, 19 nt, Artificial Sequence
  Description of Artificial Sequence: Synthetic oligonucleotide
auuggaaacagggaagauc

SEQ ID NO: 2981530 - RNA, 19 nt, Artificial Sequence
  Description of Artificial Sequence: Synthetic oligonucleotide
uuuccaucuucuucaaugc

SEQ ID NO: 2981531 - RNA, 19 nt, Artificial Sequence
  Description of Artificial Sequence: Synthetic oligonucleotide
aagaucgaccauuuaacau

SEQ ID NO: 2981532 - RNA, 19 nt, Artificial Sequence
  Description of Artificial Sequence: Synthetic oligonucleotide
ugaaagaggaggaaugcau

SEQ ID NO: 2981533 - RNA, 19 nt, Artificial Sequence
  Description of Artificial Sequence: Synthetic oligonucleotide
aauaucuggaggaagccca

SEQ ID NO: 2981534 - RNA, 19 nt, Artificial Sequence
  Description of Artificial Sequence: Synthetic oligonucleotide
ugugggcgaauuuaaaaca

SEQ ID NO: 2981535 - RNA, 19 nt, Artificial Sequence
  Description of Artificial Sequence: Synthetic oligonucleotide
aagaggaggaaugcauagc

SEQ ID NO: 2981536 - RNA, 19 nt, Artificial Sequence
  Description of Artificial Sequence: Synthetic oligonucleotide
gcuggaaacacacaaguag

SEQ ID NO: 2981537 - RNA, 19 nt, Artificial Sequence
  Description of Artificial Sequence: Synthetic oligonucleotide
uuuaaaacaccaacuugau

SEQ ID NO: 2981538 - RNA, 19 nt, Artificial Sequence
  Description of Artificial Sequence: Synthetic oligonucleotide
cuuuugguggaaaauagga

SEQ ID NO: 2981539 - RNA, 19 nt, Artificial Sequence
  Description of Artificial Sequence: Synthetic oligonucleotide
agaagcguucuauucguuc

SEQ ID NO: 2981540 - RNA, 19 nt, Artificial Sequence
  Description of Artificial Sequence: Synthetic oligonucleotide
uccaucuucuucaaugcac

SEQ ID NO: 2981541 - RNA, 19 nt, Artificial Sequence
  Description of Artificial Sequence: Synthetic oligonucleotide
aacuuuucgagagaagcgu

SEQ ID NO: 2981542 - RNA, 19 nt, Artificial Sequence
  Description of Artificial Sequence: Synthetic oligonucleotide
gagcugaauaacauguggg

SEQ ID NO: 2981543 - RNA, 19 nt, Artificial Sequence
  Description of Artificial Sequence: Synthetic oligonucleotide
gugaccaucguccaacaag

SEQ ID NO: 2981544 - RNA, 19 nt, Artificial Sequence
  Description of Artificial Sequence: Synthetic oligonucleotide
uggaaaauaggauuugcuu

SEQ ID NO: 2981545 - RNA, 19 nt, Artificial Sequence
  Description of Artificial Sequence: Synthetic oligonucleotide
uuuugguggaaaauaggau

SEQ ID NO: 2981546 - RNA, 19 nt, Artificial Sequence
  Description of Artificial Sequence: Synthetic oligonucleotide
uccaaaucuucugaaacug

SEQ ID NO: 2981547 - RNA, 19 nt, Artificial Sequence
  Description of Artificial Sequence: Synthetic oligonucleotide
ucuucugaaacuggcagug

SEQ ID NO: 2981548 - RNA, 19 nt, Artificial Sequence
  Description of Artificial Sequence: Synthetic oligonucleotide
gaaacagggaagaucgacc

SEQ ID NO: 2981549 - RNA, 19 nt, Artificial Sequence
  Description of Artificial Sequence: Synthetic oligonucleotide
uucuucaaugcacgcauca

SEQ ID NO: 2981550 - RNA, 19 nt, Artificial Sequence
  Description of Artificial Sequence: Synthetic oligonucleotide
agugcuugaaccgagcucu

SEQ ID NO: 2981551 - RNA, 19 nt, Artificial Sequence
  Description of Artificial Sequence: Synthetic oligonucleotide
uugcuuucugcuuuaugag

SEQ ID NO: 2981552 - RNA, 19 nt, Artificial Sequence
  Description of Artificial Sequence: Synthetic oligonucleotide
auugucaguuccuggaugu

SEQ ID NO: 2981553 - RNA, 19 nt, Artificial Sequence
  Description of Artificial Sequence: Synthetic oligonucleotide
ugaugagcugaauaacaug

SEQ ID NO: 2981554 - RNA, 19 nt, Artificial Sequence
  Description of Artificial Sequence: Synthetic oligonucleotide
uuuguccuugauaguaggc

SEQ ID NO: 2981555 - RNA, 19 nt, Artificial Sequence
  Description of Artificial Sequence: Synthetic oligonucleotide
acugugaccaucguccaac

SEQ ID NO: 2981556 - RNA, 19 nt, Artificial Sequence
  Description of Artificial Sequence: Synthetic oligonucleotide
uguccuugauaguaggcug

SEQ ID NO: 2981557 - RNA, 19 nt, Artificial Sequence
  Description of Artificial Sequence: Synthetic oligonucleotide
acuggcagugaucucaucu

SEQ ID NO: 2981558 - RNA, 19 nt, Artificial Sequence
  Description of Artificial Sequence: Synthetic oligonucleotide
gaaacuggcagugaucuca

SEQ ID NO: 2981559 - RNA, 19 nt, Artificial Sequence
  Description of Artificial Sequence: Synthetic oligonucleotide
uugaugagcugaauaacau

SEQ ID NO: 2981560 - RNA, 19 nt, Artificial Sequence
  Description of Artificial Sequence: Synthetic oligonucleotide
guuuguccuugauaguagg

SEQ ID NO: 2981561 - RNA, 19 nt, Artificial Sequence
  Description of Artificial Sequence: Synthetic oligonucleotide
aaauaggauuugcuuucug

SEQ ID NO: 2981562 - RNA, 19 nt, Artificial Sequence
  Description of Artificial Sequence: Synthetic oligonucleotide
ucgaccauuuaacaucaac

SEQ ID NO: 2981563 - RNA, 19 nt, Artificial Sequence
  Description of Artificial Sequence: Synthetic oligonucleotide
uuaaaacaccaacuugauc

SEQ ID NO: 2981564 - RNA, 19 nt, Artificial Sequence
  Description of Artificial Sequence: Synthetic oligonucleotide
uaguaggcuggaaacacac

SEQ ID NO: 2981565 - RNA, 19 nt, Artificial Sequence
  Description of Artificial Sequence: Synthetic oligonucleotide
ucaaugcacgcaucaauga

SEQ ID NO: 2981566 - RNA, 19 nt, Artificial Sequence
  Description of Artificial Sequence: Synthetic oligonucleotide
uugguggaaaauaggauuu

SEQ ID NO: 2981567 - RNA, 19 nt, Artificial Sequence
  Description of Artificial Sequence: Synthetic oligonucleotide
accauuuaacaucaacaga

SEQ ID NO: 2981568 - RNA, 19 nt, Artificial Sequence
  Description of Artificial Sequence: Synthetic oligonucleotide
uaucaucuauuggaaacag

SEQ ID NO: 2981569 - RNA, 19 nt, Artificial Sequence
  Description of Artificial Sequence: Synthetic oligonucleotide
uuuugaugagcugaauaac

SEQ ID NO: 2981570 - RNA, 19 nt, Artificial Sequence
  Description of Artificial Sequence: Synthetic oligonucleotide
aauaacaugugggcgaauu

SEQ ID NO: 2981571 - RNA, 19 nt, Artificial Sequence
  Description of Artificial Sequence: Synthetic oligonucleotide
gaagaucgaccauuuaaca

SEQ ID NO: 2981572 - RNA, 19 nt, Artificial Sequence
  Description of Artificial Sequence: Synthetic oligonucleotide
aaugcacgcaucaaugagu

SEQ ID NO: 2981573 - RNA, 19 nt, Artificial Sequence
  Description of Artificial Sequence: Synthetic oligonucleotide
aagcguucuauucguucuc

SEQ ID NO: 2981574 - RNA, 19 nt, Artificial Sequence
  Description of Artificial Sequence: Synthetic oligonucleotide
gauugucaguuccuggaug

SEQ ID NO: 2981575 - RNA, 19 nt, Artificial Sequence
  Description of Artificial Sequence: Synthetic oligonucleotide
cuugaaagaggaggaaugc

SEQ ID NO: 2981576 - RNA, 19 nt, Artificial Sequence
  Description of Artificial Sequence: Synthetic oligonucleotide
aucaacagauugucaguuc

SEQ ID NO: 2981577 - RNA, 19 nt, Artificial Sequence
  Description of Artificial Sequence: Synthetic oligonucleotide
uucguucuccauuuugaug

SEQ ID NO: 2981578 - RNA, 19 nt, Artificial Sequence
  Description of Artificial Sequence: Synthetic oligonucleotide
ugucaguuccuggaugugg

SEQ ID NO: 2981579 - RNA, 19 nt, Artificial Sequence
  Description of Artificial Sequence: Synthetic oligonucleotide
gaaacacacaaguagaguu

SEQ ID NO: 2981580 - RNA, 19 nt, Artificial Sequence
  Description of Artificial Sequence: Synthetic oligonucleotide
uaggcuggaaacacacaag

SEQ ID NO: 2981581 - RNA, 19 nt, Artificial Sequence
  Description of Artificial Sequence: Synthetic oligonucleotide
ugggcgaauuuaaaacacc

SEQ ID NO: 2981582 - RNA, 19 nt, Artificial Sequence
  Description of Artificial Sequence: Synthetic oligonucleotide
gcuaucaucuauuggaaac

SEQ ID NO: 2981583 - RNA, 19 nt, Artificial Sequence
  Description of Artificial Sequence: Synthetic oligonucleotide
agagaagcguucuauucgu

SEQ ID NO: 2981584 - RNA, 19 nt, Artificial Sequence
  Description of Artificial Sequence: Synthetic oligonucleotide
aacagguuuguccuugaua

SEQ ID NO: 2981585 - RNA, 19 nt, Artificial Sequence
  Description of Artificial Sequence: Synthetic oligonucleotide
gaugagcugaauaacaugu

SEQ ID NO: 2981586 - RNA, 19 nt, Artificial Sequence
  Description of Artificial Sequence: Synthetic oligonucleotide
ucaauaucuggaggaagcc

SEQ ID NO: 2981587 - RNA, 19 nt, Artificial Sequence
  Description of Artificial Sequence: Synthetic oligonucleotide
aaugagugcuugaaccgag

SEQ ID NO: 2981588 - RNA, 19 nt, Artificial Sequence
  Description of Artificial Sequence: Synthetic oligonucleotide
cugaauaacaugugggcga

SEQ ID NO: 2981589 - RNA, 19 nt, Artificial Sequence
  Description of Artificial Sequence: Synthetic oligonucleotide
gcgaauuuaaaacaccaac

SEQ ID NO: 2981590 - RNA, 19 nt, Artificial Sequence
  Description of Artificial Sequence: Synthetic oligonucleotide
cucucuucuugaaagagga

SEQ ID NO: 2981591 - RNA, 19 nt, Artificial Sequence
  Description of Artificial Sequence: Synthetic oligonucleotide
uccauuuugaugagcugaa

SEQ ID NO: 2981592 - RNA, 19 nt, Artificial Sequence
  Description of Artificial Sequence: Synthetic oligonucleotide
aggcuggaaacacacaagu

SEQ ID NO: 2981593 - RNA, 19 nt, Artificial Sequence
  Description of Artificial Sequence: Synthetic oligonucleotide
caaugcacgcaucaaugag

SEQ ID NO: 2981594 - RNA, 19 nt, Artificial Sequence
  Description of Artificial Sequence: Synthetic oligonucleotide
caaagguccaaaucuucug

SEQ ID NO: 2981595 - RNA, 19 nt, Artificial Sequence
  Description of Artificial Sequence: Synthetic oligonucleotide
cacacaaguagaguuuucc

SEQ ID NO: 2981596 - RNA, 19 nt, Artificial Sequence
  Description of Artificial Sequence: Synthetic oligonucleotide
gaaugcauagccuuuuggu

SEQ ID NO: 2981597 - RNA, 19 nt, Artificial Sequence
  Description of Artificial Sequence: Synthetic oligonucleotide
uggaggaagcccaccaaca

SEQ ID NO: 2981598 - RNA, 19 nt, Artificial Sequence
  Description of Artificial Sequence: Synthetic oligonucleotide
uucuauucguucuccauuu

SEQ ID NO: 2981599 - RNA, 19 nt, Artificial Sequence
  Description of Artificial Sequence: Synthetic oligonucleotide
uucugaaacuggcagugau

SEQ ID NO: 2981600 - RNA, 19 nt, Artificial Sequence
  Description of Artificial Sequence: Synthetic oligonucleotide
uaacaucaacagauuguca

SEQ ID NO: 2981601 - RNA, 19 nt, Artificial Sequence
  Description of Artificial Sequence: Synthetic oligonucleotide
acaucaacagauugucagu

SEQ ID NO: 2981602 - RNA, 19 nt, Artificial Sequence
  Description of Artificial Sequence: Synthetic oligonucleotide
aaaauaggauuugcuuucu

SEQ ID NO: 2981603 - RNA, 19 nt, Artificial Sequence
  Description of Artificial Sequence: Synthetic oligonucleotide
uuguccuugauaguaggcu

SEQ ID NO: 2981604 - RNA, 19 nt, Artificial Sequence
  Description of Artificial Sequence: Synthetic oligonucleotide
ucugaaacuggcagugauc

SEQ ID NO: 2981605 - RNA, 19 nt, Artificial Sequence
  Description of Artificial Sequence: Synthetic oligonucleotide
cuauucguucuccauuuug

SEQ ID NO: 2981606 - RNA, 19 nt, Artificial Sequence
  Description of Artificial Sequence: Synthetic oligonucleotide
cuggaaacacacaaguaga

SEQ ID NO: 2981607 - RNA, 19 nt, Artificial Sequence
  Description of Artificial Sequence: Synthetic oligonucleotide
ugagugcuugaaccgagcu

SEQ ID NO: 2981608 - RNA, 19 nt, Artificial Sequence
  Description of Artificial Sequence: Synthetic oligonucleotide
ugauaguaggcuggaaaca

SEQ ID NO: 2981609 - RNA, 19 nt, Artificial Sequence
  Description of Artificial Sequence: Synthetic oligonucleotide
gaaccgagcucucuucuug

SEQ ID NO: 2981610 - RNA, 19 nt, Artificial Sequence
  Description of Artificial Sequence: Synthetic oligonucleotide
acacaaguagaguuuucca

SEQ ID NO: 2981611 - RNA, 19 nt, Artificial Sequence
  Description of Artificial Sequence: Synthetic oligonucleotide
ucuacuaccaaagguccaa

SEQ ID NO: 2981612 - RNA, 19 nt, Artificial Sequence
  Description of Artificial Sequence: Synthetic oligonucleotide
cuugauaguaggcuggaaa

SEQ ID NO: 2981613 - RNA, 19 nt, Artificial Sequence
  Description of Artificial Sequence: Synthetic oligonucleotide
uugaaagaggaggaaugca

SEQ ID NO: 2981614 - RNA, 19 nt, Artificial Sequence
  Description of Artificial Sequence: Synthetic oligonucleotide
guaggcuggaaacacacaa

SEQ ID NO: 2981615 - RNA, 19 nt, Artificial Sequence
  Description of Artificial Sequence: Synthetic oligonucleotide
cuaccaaagguccaaaucu

SEQ ID NO: 2981616 - RNA, 19 nt, Artificial Sequence
  Description of Artificial Sequence: Synthetic oligonucleotide
uuuucgagagaagcguucu

SEQ ID NO: 2981617 - RNA, 19 nt, Artificial Sequence
  Description of Artificial Sequence: Synthetic oligonucleotide
ucucuucuugaaagaggag

SEQ ID NO: 2981618 - RNA, 19 nt, Artificial Sequence
  Description of Artificial Sequence: Synthetic oligonucleotide
gcugaauaacaugugggcg

SEQ ID NO: 2981619 - RNA, 19 nt, Artificial Sequence
  Description of Artificial Sequence: Synthetic oligonucleotide
uuccaucuucuucaaugca

SEQ ID NO: 2981620 - RNA, 19 nt, Artificial Sequence
  Description of Artificial Sequence: Synthetic oligonucleotide
agcguucuauucguucucc

SEQ ID NO: 2981621 - RNA, 19 nt, Artificial Sequence
  Description of Artificial Sequence: Synthetic oligonucleotide
ggaaugcauagccuuuugg

SEQ ID NO: 2981622 - RNA, 19 nt, Artificial Sequence
  Description of Artificial Sequence: Synthetic oligonucleotide
cuuuucgagagaagcguuc

SEQ ID NO: 2981623 - RNA, 19 nt, Artificial Sequence
  Description of Artificial Sequence: Synthetic oligonucleotide
uugaaccgagcucucuucu

SEQ ID NO: 2981624 - RNA, 19 nt, Artificial Sequence
  Description of Artificial Sequence: Synthetic oligonucleotide
ugcauagccuuuuggugga

SEQ ID NO: 2981625 - RNA, 19 nt, Artificial Sequence
  Description of Artificial Sequence: Synthetic oligonucleotide
aucuucugaaacuggcagu

SEQ ID NO: 2981626 - RNA, 19 nt, Artificial Sequence
  Description of Artificial Sequence: Synthetic oligonucleotide
uucuugaaagaggaggaau

SEQ ID NO: 2981627 - RNA, 19 nt, Artificial Sequence
  Description of Artificial Sequence: Synthetic oligonucleotide
caauaucuggaggaagccc

SEQ ID NO: 2981628 - RNA, 19 nt, Artificial Sequence
  Description of Artificial Sequence: Synthetic oligonucleotide
gaucucaucuucaucaaua

SEQ ID NO: 2981629 - RNA, 19 nt, Artificial Sequence
  Description of Artificial Sequence: Synthetic oligonucleotide
aggaggaaugcauagccuu

SEQ ID NO: 2981630 - RNA, 19 nt, Artificial Sequence
  Description of Artificial Sequence: Synthetic oligonucleotide
aggauuugcuuucugcuuu

SEQ ID NO: 2981631 - RNA, 19 nt, Artificial Sequence
  Description of Artificial Sequence: Synthetic oligonucleotide
uaacaugugggcgaauuua

SEQ ID NO: 2981632 - RNA, 19 nt, Artificial Sequence
  Description of Artificial Sequence: Synthetic oligonucleotide
aaacacacaaguagaguuu

SEQ ID NO: 2981633 - RNA, 19 nt, Artificial Sequence
  Description of Artificial Sequence: Synthetic oligonucleotide
ucguccaacaagcuaucau

SEQ ID NO: 2981634 - RNA, 19 nt, Artificial Sequence
  Description of Artificial Sequence: Synthetic oligonucleotide
ccaucuucuucaaugcacg

SEQ ID NO: 2981635 - RNA, 19 nt, Artificial Sequence
  Description of Artificial Sequence: Synthetic oligonucleotide
cagauugucaguuccugga

SEQ ID NO: 2981636 - RNA, 19 nt, Artificial Sequence
  Description of Artificial Sequence: Synthetic oligonucleotide
gaucgaccauuuaacauca

SEQ ID NO: 2981637 - RNA, 19 nt, Artificial Sequence
  Description of Artificial Sequence: Synthetic oligonucleotide
caucaaugagugcuugaac

SEQ ID NO: 2981638 - RNA, 19 nt, Artificial Sequence
  Description of Artificial Sequence: Synthetic oligonucleotide
gaucacugugaccaucguc

SEQ ID NO: 2981639 - RNA, 19 nt, Artificial Sequence
  Description of Artificial Sequence: Synthetic oligonucleotide
gaagcguucuauucguucu

SEQ ID NO: 2981640 - RNA, 19 nt, Artificial Sequence
  Description of Artificial Sequence: Synthetic oligonucleotide
aggccaaucuacuaccaaa

SEQ ID NO: 2981641 - RNA, 19 nt, Artificial Sequence
  Description of Artificial Sequence: Synthetic oligonucleotide
ggaagaucgaccauuuaac

SEQ ID NO: 2981642 - RNA, 19 nt, Artificial Sequence
  Description of Artificial Sequence: Synthetic oligonucleotide
ucuccauuuugaugagcug

SEQ ID NO: 2981643 - RNA, 19 nt, Artificial Sequence
  Description of Artificial Sequence: Synthetic oligonucleotide
aaccgagcucucuucuuga

SEQ ID NO: 2981644 - RNA, 19 nt, Artificial Sequence
  Description of Artificial Sequence: Synthetic oligonucleotide
ugaggccaaucuacuacca

SEQ ID NO: 2981645 - RNA, 19 nt, Artificial Sequence
  Description of Artificial Sequence: Synthetic oligonucleotide
ucaucaauaucuggaggaa

SEQ ID NO: 2981646 - RNA, 19 nt, Artificial Sequence
  Description of Artificial Sequence: Synthetic oligonucleotide
ugaauaacaugugggcgaa

SEQ ID NO: 2981647 - RNA, 19 nt, Artificial Sequence
  Description of Artificial Sequence: Synthetic oligonucleotide
aacaugugggcgaauuuaa

SEQ ID NO: 2981648 - RNA, 19 nt, Artificial Sequence
  Description of Artificial Sequence: Synthetic oligonucleotide
caucaauaucuggaggaag

SEQ ID NO: 2981649 - RNA, 19 nt, Artificial Sequence
  Description of Artificial Sequence: Synthetic oligonucleotide
uaccaaagguccaaaucuu

SEQ ID NO: 2981650 - RNA, 19 nt, Artificial Sequence
  Description of Artificial Sequence: Synthetic oligonucleotide
agcucucuucuugaaagag

SEQ ID NO: 2981651 - RNA, 19 nt, Artificial Sequence
  Description of Artificial Sequence: Synthetic oligonucleotide
cauuuugaugagcugaaua

SEQ ID NO: 2981652 - RNA, 19 nt, Artificial Sequence
  Description of Artificial Sequence: Synthetic oligonucleotide
uuaugaggccaaucuacua

SEQ ID NO: 2981653 - RNA, 19 nt, Artificial Sequence
  Description of Artificial Sequence: Synthetic oligonucleotide
auagccuuuugguggaaaa

SEQ ID NO: 2981654 - RNA, 19 nt, Artificial Sequence
  Description of Artificial Sequence: Synthetic oligonucleotide
cuugaaccgagcucucuuc

SEQ ID NO: 2981655 - RNA, 19 nt, Artificial Sequence
  Description of Artificial Sequence: Synthetic oligonucleotide
aucaucuauuggaaacagg

SEQ ID NO: 2981656 - RNA, 19 nt, Artificial Sequence
  Description of Artificial Sequence: Synthetic oligonucleotide
uucgagagaagcguucuau

SEQ ID NO: 2981657 - RNA, 19 nt, Artificial Sequence
  Description of Artificial Sequence: Synthetic oligonucleotide
caucuucuucaaugcacgc

SEQ ID NO: 2981658 - RNA, 19 nt, Artificial Sequence
  Description of Artificial Sequence: Synthetic oligonucleotide
accaaagguccaaaucuuc

SEQ ID NO: 2981659 - RNA, 19 nt, Artificial Sequence
  Description of Artificial Sequence: Synthetic oligonucleotide
guccuugauaguaggcugg

SEQ ID NO: 2981660 - RNA, 19 nt, Artificial Sequence
  Description of Artificial Sequence: Synthetic oligonucleotide
uuucugcuuuaugaggcca

SEQ ID NO: 2981661 - RNA, 19 nt, Artificial Sequence
  Description of Artificial Sequence: Synthetic oligonucleotide
auucguucuccauuuugau

SEQ ID NO: 2981662 - RNA, 19 nt, Artificial Sequence
  Description of Artificial Sequence: Synthetic oligonucleotide
uaggauuugcuuucugcuu

SEQ ID NO: 2981663 - RNA, 19 nt, Artificial Sequence
  Description of Artificial Sequence: Synthetic oligonucleotide
caugugggcgaauuuaaaa

SEQ ID NO: 2981664 - RNA, 19 nt, Artificial Sequence
  Description of Artificial Sequence: Synthetic oligonucleotide
uucugcuuuaugaggccaa

SEQ ID NO: 2981665 - RNA, 19 nt, Artificial Sequence
  Description of Artificial Sequence: Synthetic oligonucleotide
caacuugaucacugugacc

SEQ ID NO: 2981666 - RNA, 19 nt, Artificial Sequence
  Description of Artificial Sequence: Synthetic oligonucleotide
cuaucaucuauuggaaaca

SEQ ID NO: 2981667 - RNA, 19 nt, Artificial Sequence
  Description of Artificial Sequence: Synthetic oligonucleotide
ccuuuugguggaaaauagg

SEQ ID NO: 2981668 - RNA, 19 nt, Artificial Sequence
  Description of Artificial Sequence: Synthetic oligonucleotide
caucuauuggaaacaggga

SEQ ID NO: 2981669 - RNA, 19 nt, Artificial Sequence
  Description of Artificial Sequence: Synthetic oligonucleotide
auaacaugugggcgaauuu

SEQ ID NO: 2981670 - RNA, 19 nt, Artificial Sequence
  Description of Artificial Sequence: Synthetic oligonucleotide
agauugucaguuccuggau

SEQ ID NO: 2981671 - RNA, 19 nt, Artificial Sequence
  Description of Artificial Sequence: Synthetic oligonucleotide
aagcuaucaucuauuggaa

SEQ ID NO: 2981672 - RNA, 19 nt, Artificial Sequence
  Description of Artificial Sequence: Synthetic oligonucleotide
gggaagaucgaccauuuaa

SEQ ID NO: 2981673 - RNA, 19 nt, Artificial Sequence
  Description of Artificial Sequence: Synthetic oligonucleotide
cuauuggaaacagggaaga

SEQ ID NO: 2981674 - RNA, 19 nt, Artificial Sequence
  Description of Artificial Sequence: Synthetic oligonucleotide
cuggaggaagcccaccaac

SEQ ID NO: 2981675 - RNA, 19 nt, Artificial Sequence
  Description of Artificial Sequence: Synthetic oligonucleotide
cuccauuuugaugagcuga

SEQ ID NO: 2981676 - RNA, 19 nt, Artificial Sequence
  Description of Artificial Sequence: Synthetic oligonucleotide
aggaaugcauagccuuuug

SEQ ID NO: 2981677 - RNA, 19 nt, Artificial Sequence
  Description of Artificial Sequence: Synthetic oligonucleotide
ccauuuaacaucaacagau

SEQ ID NO: 2981678 - RNA, 19 nt, Artificial Sequence
  Description of Artificial Sequence: Synthetic oligonucleotide
aacagggaagaucgaccau

SEQ ID NO: 2981679 - RNA, 19 nt, Artificial Sequence
  Description of Artificial Sequence: Synthetic oligonucleotide
augcacgcaucaaugagug

SEQ ID NO: 2981680 - RNA, 19 nt, Artificial Sequence
  Description of Artificial Sequence: Synthetic oligonucleotide
ugguggaaaauaggauuug

SEQ ID NO: 2981681 - RNA, 19 nt, Artificial Sequence
  Description of Artificial Sequence: Synthetic oligonucleotide
agguuuguccuugauagua

SEQ ID NO: 2981682 - RNA, 19 nt, Artificial Sequence
  Description of Artificial Sequence: Synthetic oligonucleotide
aucuucuucaaugcacgca

SEQ ID NO: 2981683 - RNA, 19 nt, Artificial Sequence
  Description of Artificial Sequence: Synthetic oligonucleotide
uggcagugaucucaucuuc

SEQ ID NO: 2981684 - RNA, 19 nt, Artificial Sequence
  Description of Artificial Sequence: Synthetic oligonucleotide
aggaagcccaccaacaaaa

SEQ ID NO: 2981685 - RNA, 19 nt, Artificial Sequence
  Description of Artificial Sequence: Synthetic oligonucleotide
gagugcuugaaccgagcuc

SEQ ID NO: 2981686 - RNA, 19 nt, Artificial Sequence
  Description of Artificial Sequence: Synthetic oligonucleotide
agcuaucaucuauuggaaa

SEQ ID NO: 2981687 - RNA, 19 nt, Artificial Sequence
  Description of Artificial Sequence: Synthetic oligonucleotide
aaacaccaacuugaucacu

SEQ ID NO: 2981688 - RNA, 19 nt, Artificial Sequence
  Description of Artificial Sequence: Synthetic oligonucleotide
aacuggcagugaucucauc

SEQ ID NO: 2981689 - RNA, 19 nt, Artificial Sequence
  Description of Artificial Sequence: Synthetic oligonucleotide
gccaaucuacuaccaaagg

SEQ ID NO: 2981690 - RNA, 19 nt, Artificial Sequence
  Description of Artificial Sequence: Synthetic oligonucleotide
ucacugugaccaucgucca

SEQ ID NO: 2981691 - RNA, 19 nt, Artificial Sequence
  Description of Artificial Sequence: Synthetic oligonucleotide
gaaagaggaggaaugcaua

SEQ ID NO: 2981692 - RNA, 19 nt, Artificial Sequence
  Description of Artificial Sequence: Synthetic oligonucleotide
gugggcgaauuuaaaacac

SEQ ID NO: 2981693 - RNA, 19 nt, Artificial Sequence
  Description of Artificial Sequence: Synthetic oligonucleotide
uacuaccaaagguccaaau

SEQ ID NO: 2981694 - RNA, 19 nt, Artificial Sequence
  Description of Artificial Sequence: Synthetic oligonucleotide
gguggaaaauaggauuugc

SEQ ID NO: 2981695 - RNA, 19 nt, Artificial Sequence
  Description of Artificial Sequence: Synthetic oligonucleotide
uagaguuuuccaucuucuu

SEQ ID NO: 2981696 - RNA, 19 nt, Artificial Sequence
  Description of Artificial Sequence: Synthetic oligonucleotide
accaucguccaacaagcua

SEQ ID NO: 2981697 - RNA, 19 nt, Artificial Sequence
  Description of Artificial Sequence: Synthetic oligonucleotide
ccaacuugaucacugugac

SEQ ID NO: 2981698 - RNA, 19 nt, Artificial Sequence
  Description of Artificial Sequence: Synthetic oligonucleotide
caaguagaguuuuccaucu

SEQ ID NO: 2981699 - RNA, 19 nt, Artificial Sequence
  Description of Artificial Sequence: Synthetic oligonucleotide
ggccaaucuacuaccaaag

SEQ ID NO: 2981700 - RNA, 19 nt, Artificial Sequence
  Description of Artificial Sequence: Synthetic oligonucleotide
ucgagagaagcguucuauu

SEQ ID NO: 2981701 - RNA, 19 nt, Artificial Sequence
  Description of Artificial Sequence: Synthetic oligonucleotide
aaguagaguuuuccaucuu

SEQ ID NO: 2981702 - RNA, 19 nt, Artificial Sequence
  Description of Artificial Sequence: Synthetic oligonucleotide
ggaaacagggaagaucgac

SEQ ID NO: 2981703 - RNA, 19 nt, Artificial Sequence
  Description of Artificial Sequence: Synthetic oligonucleotide
uggaaacagggaagaucga

SEQ ID NO: 2981704 - RNA, 19 nt, Artificial Sequence
  Description of Artificial Sequence: Synthetic oligonucleotide
acagggaagaucgaccauu

SEQ ID NO: 2981705 - RNA, 19 nt, Artificial Sequence
  Description of Artificial Sequence: Synthetic oligonucleotide
guccaaaucuucugaaacu

SEQ ID NO: 2981706 - RNA, 19 nt, Artificial Sequence
  Description of Artificial Sequence: Synthetic oligonucleotide
gguuuguccuugauaguag

SEQ ID NO: 2981707 - RNA, 19 nt, Artificial Sequence
  Description of Artificial Sequence: Synthetic oligonucleotide
ugugaccaucguccaacaa

SEQ ID NO: 2981708 - RNA, 19 nt, Artificial Sequence
  Description of Artificial Sequence: Synthetic oligonucleotide
ugaucacugugaccaucgu

SEQ ID NO: 2981709 - RNA, 19 nt, Artificial Sequence
  Description of Artificial Sequence: Synthetic oligonucleotide
uuucgagagaagcguucua

SEQ ID NO: 2981710 - RNA, 19 nt, Artificial Sequence
  Description of Artificial Sequence: Synthetic oligonucleotide
augagcugaauaacaugug

SEQ ID NO: 2981711 - RNA, 19 nt, Artificial Sequence
  Description of Artificial Sequence: Synthetic oligonucleotide
ucuauucguucuccauuuu

SEQ ID NO: 2981712 - RNA, 19 nt, Artificial Sequence
  Description of Artificial Sequence: Synthetic oligonucleotide
agccuuuugguggaaaaua

SEQ ID NO: 2981713 - RNA, 19 nt, Artificial Sequence
  Description of Artificial Sequence: Synthetic oligonucleotide
uauuggaaacagggaagau

SEQ ID NO: 2981714 - RNA, 19 nt, Artificial Sequence
  Description of Artificial Sequence: Synthetic oligonucleotide
uccuugauaguaggcugga

SEQ ID NO: 2981715 - RNA, 19 nt, Artificial Sequence
  Description of Artificial Sequence: Synthetic oligonucleotide
gccuuuugguggaaaauag

SEQ ID NO: 2981716 - RNA, 19 nt, Artificial Sequence
  Description of Artificial Sequence: Synthetic oligonucleotide
gcucucuucuugaaagagg

SEQ ID NO: 2981717 - RNA, 19 nt, Artificial Sequence
  Description of Artificial Sequence: Synthetic oligonucleotide
cugaaacuggcagugaucu

SEQ ID NO: 2981718 - RNA, 19 nt, Artificial Sequence
  Description of Artificial Sequence: Synthetic oligonucleotide
gagcucucuucuugaaaga

SEQ ID NO: 2981719 - RNA, 19 nt, Artificial Sequence
  Description of Artificial Sequence: Synthetic oligonucleotide
ugaaacuggcagugaucuc

SEQ ID NO: 2981720 - RNA, 19 nt, Artificial Sequence
  Description of Artificial Sequence: Synthetic oligonucleotide
cgaccauuuaacaucaaca

SEQ ID NO: 2981721 - RNA, 19 nt, Artificial Sequence
  Description of Artificial Sequence: Synthetic oligonucleotide
cacaaguagaguuuuccau

SEQ ID NO: 2981722 - RNA, 19 nt, Artificial Sequence
  Description of Artificial Sequence: Synthetic oligonucleotide
cuucuucaaugcacgcauc

SEQ ID NO: 2981723 - RNA, 19 nt, Artificial Sequence
  Description of Artificial Sequence: Synthetic oligonucleotide
aaacuggcagugaucucau

SEQ ID NO: 2981724 - RNA, 19 nt, Artificial Sequence
  Description of Artificial Sequence: Synthetic oligonucleotide
ugaaccgagcucucuucuu

SEQ ID NO: 2981725 - RNA, 19 nt, Artificial Sequence
  Description of Artificial Sequence: Synthetic oligonucleotide
uagccuuuugguggaaaau

SEQ ID NO: 2981726 - RNA, 19 nt, Artificial Sequence
  Description of Artificial Sequence: Synthetic oligonucleotide
guagaguuuuccaucuucu

SEQ ID NO: 2981727 - RNA, 19 nt, Artificial Sequence
  Description of Artificial Sequence: Synthetic oligonucleotide
ugcacgcaucaaugagugc

SEQ ID NO: 2981728 - RNA, 19 nt, Artificial Sequence
  Description of Artificial Sequence: Synthetic oligonucleotide
acacacaaguagaguuuuc

SEQ ID NO: 2981729 - RNA, 19 nt, Artificial Sequence
  Description of Artificial Sequence: Synthetic oligonucleotide
gucaguuccuggaugugga

SEQ ID NO: 2981730 - RNA, 19 nt, Artificial Sequence
  Description of Artificial Sequence: Synthetic oligonucleotide
cagugaucucaucuucauc

SEQ ID NO: 2981731 - RNA, 19 nt, Artificial Sequence
  Description of Artificial Sequence: Synthetic oligonucleotide
caucguccaacaagcuauc

SEQ ID NO: 2981732 - RNA, 19 nt, Artificial Sequence
  Description of Artificial Sequence: Synthetic oligonucleotide
caaugagugcuugaaccga

SEQ ID NO: 2981733 - RNA, 19 nt, Artificial Sequence
  Description of Artificial Sequence: Synthetic oligonucleotide
ucugcuuuaugaggccaau

SEQ ID NO: 2981734 - RNA, 19 nt, Artificial Sequence
  Description of Artificial Sequence: Synthetic oligonucleotide
uugucaguuccuggaugug

SEQ ID NO: 2981735 - RNA, 19 nt, Artificial Sequence
  Description of Artificial Sequence: Synthetic oligonucleotide
guucuauucguucuccauu

SEQ ID NO: 2981736 - RNA, 19 nt, Artificial Sequence
  Description of Artificial Sequence: Synthetic oligonucleotide
gaggccaaucuacuaccaa

SEQ ID NO: 2981737 - RNA, 19 nt, Artificial Sequence
  Description of Artificial Sequence: Synthetic oligonucleotide
ucaguuccuggauguggau

SEQ ID NO: 2981738 - RNA, 19 nt, Artificial Sequence
  Description of Artificial Sequence: Synthetic oligonucleotide
guggaaaauaggauuugcu

SEQ ID NO: 2981739 - RNA, 19 nt, Artificial Sequence
  Description of Artificial Sequence: Synthetic oligonucleotide
gggcgaauuuaaaacacca

SEQ ID NO: 2981740 - RNA, 19 nt, Artificial Sequence
  Description of Artificial Sequence: Synthetic oligonucleotide
guucuccauuuugaugagc

SEQ ID NO: 2981741 - RNA, 19 nt, Artificial Sequence
  Description of Artificial Sequence: Synthetic oligonucleotide
cgaauuuaaaacaccaacu

SEQ ID NO: 2981742 - RNA, 19 nt, Artificial Sequence
  Description of Artificial Sequence: Synthetic oligonucleotide
cuucaaugcacgcaucaau

SEQ ID NO: 2981743 - RNA, 19 nt, Artificial Sequence
  Description of Artificial Sequence: Synthetic oligonucleotide
ugcuugaaccgagcucucu

SEQ ID NO: 2981744 - RNA, 19 nt, Artificial Sequence
  Description of Artificial Sequence: Synthetic oligonucleotide
acuuuucgagagaagcguu

SEQ ID NO: 2981745 - RNA, 19 nt, Artificial Sequence
  Description of Artificial Sequence: Synthetic oligonucleotide
cgagagaagcguucuauuc

SEQ ID NO: 2981746 - RNA, 19 nt, Artificial Sequence
  Description of Artificial Sequence: Synthetic oligonucleotide
cauuuaacaucaacagauu

SEQ ID NO: 2981747 - RNA, 19 nt, Artificial Sequence
  Description of Artificial Sequence: Synthetic oligonucleotide
aguaggcuggaaacacaca

SEQ ID NO: 2981748 - RNA, 19 nt, Artificial Sequence
  Description of Artificial Sequence: Synthetic oligonucleotide
acgcaucaaugagugcuug

SEQ ID NO: 2981749 - RNA, 19 nt, Artificial Sequence
  Description of Artificial Sequence: Synthetic oligonucleotide
ccaaucuacuaccaaaggu

SEQ ID NO: 2981750 - RNA, 19 nt, Artificial Sequence
  Description of Artificial Sequence: Synthetic oligonucleotide
ggaggaagcccaccaacaa

SEQ ID NO: 2981751 - RNA, 19 nt, Artificial Sequence
  Description of Artificial Sequence: Synthetic oligonucleotide
cugcuuuaugaggccaauc

SEQ ID NO: 2981752 - RNA, 19 nt, Artificial Sequence
  Description of Artificial Sequence: Synthetic oligonucleotide
caacaagcuaucaucuauu

SEQ ID NO: 2981753 - RNA, 19 nt, Artificial Sequence
  Description of Artificial Sequence: Synthetic oligonucleotide
gcacgcaucaaugagugcu

SEQ ID NO: 2981754 - RNA, 19 nt, Artificial Sequence
  Description of Artificial Sequence: Synthetic oligonucleotide
cuucuugaaagaggaggaa

SEQ ID NO: 2981755 - RNA, 19 nt, Artificial Sequence
  Description of Artificial Sequence: Synthetic oligonucleotide
gcaucaaugagugcuugaa

SEQ ID NO: 2981756 - RNA, 19 nt, Artificial Sequence
  Description of Artificial Sequence: Synthetic oligonucleotide
aucguccaacaagcuauca

SEQ ID NO: 2981757 - RNA, 19 nt, Artificial Sequence
  Description of Artificial Sequence: Synthetic oligonucleotide
caacagauugucaguuccu

SEQ ID NO: 2981758 - RNA, 19 nt, Artificial Sequence
  Description of Artificial Sequence: Synthetic oligonucleotide
accgagcucucuucuugaa

SEQ ID NO: 2981759 - RNA, 19 nt, Artificial Sequence
  Description of Artificial Sequence: Synthetic oligonucleotide
acaugugggcgaauuuaaa

SEQ ID NO: 2981760 - RNA, 19 nt, Artificial Sequence
  Description of Artificial Sequence: Synthetic oligonucleotide
ccaucguccaacaagcuau

SEQ ID NO: 2981761 - RNA, 19 nt, Artificial Sequence
  Description of Artificial Sequence: Synthetic oligonucleotide
guuccuggauguggauagc

SEQ ID NO: 2981762 - RNA, 19 nt, Artificial Sequence
  Description of Artificial Sequence: Synthetic oligonucleotide
ggaaacacacaaguagagu

SEQ ID NO: 2981763 - RNA, 19 nt, Artificial Sequence
  Description of Artificial Sequence: Synthetic oligonucleotide
agggaagaucgaccauuua

SEQ ID NO: 2981764 - RNA, 19 nt, Artificial Sequence
  Description of Artificial Sequence: Synthetic oligonucleotide
ggcagugaucucaucuuca

SEQ ID NO: 2981765 - RNA, 19 nt, Artificial Sequence
  Description of Artificial Sequence: Synthetic oligonucleotide
ggcgaauuuaaaacaccaa

SEQ ID NO: 2981766 - RNA, 19 nt, Artificial Sequence
  Description of Artificial Sequence: Synthetic oligonucleotide
cugugaccaucguccaaca

SEQ ID NO: 2981767 - RNA, 19 nt, Artificial Sequence
  Description of Artificial Sequence: Synthetic oligonucleotide
caucaacagauugucaguu

SEQ ID NO: 2981768 - RNA, 19 nt, Artificial Sequence
  Description of Artificial Sequence: Synthetic oligonucleotide
cuucugaaacuggcaguga

SEQ ID NO: 2981769 - RNA, 19 nt, Artificial Sequence
  Description of Artificial Sequence: Synthetic oligonucleotide
cuggcagugaucucaucuu

SEQ ID NO: 2981770 - RNA, 19 nt, Artificial Sequence
  Description of Artificial Sequence: Synthetic oligonucleotide
ggauuugcuuucugcuuua

SEQ ID NO: 2981771 - RNA, 19 nt, Artificial Sequence
  Description of Artificial Sequence: Synthetic oligonucleotide
ccaacaagcuaucaucuau

SEQ ID NO: 2981772 - RNA, 19 nt, Artificial Sequence
  Description of Artificial Sequence: Synthetic oligonucleotide
cauagccuuuugguggaaa

SEQ ID NO: 2981773 - RNA, 19 nt, Artificial Sequence
  Description of Artificial Sequence: Synthetic oligonucleotide
cuacuaccaaagguccaaa

SEQ ID NO: 2981774 - RNA, 19 nt, Artificial Sequence
  Description of Artificial Sequence: Synthetic oligonucleotide
caguuccuggauguggaua

SEQ ID NO: 2981775 - RNA, 19 nt, Artificial Sequence
  Description of Artificial Sequence: Synthetic oligonucleotide
gcguucuauucguucucca

SEQ ID NO: 2981776 - RNA, 19 nt, Artificial Sequence
  Description of Artificial Sequence: Synthetic oligonucleotide
gcagugaucucaucuucau

SEQ ID NO: 2981777 - RNA, 19 nt, Artificial Sequence
  Description of Artificial Sequence: Synthetic oligonucleotide
cagggaagaucgaccauuu

SEQ ID NO: 2981778 - RNA, 19 nt, Artificial Sequence
  Description of Artificial Sequence: Synthetic oligonucleotide
cacugugaccaucguccaa

SEQ ID NO: 2981779 - RNA, 19 nt, Artificial Sequence
  Description of Artificial Sequence: Synthetic oligonucleotide
cagguuuguccuugauagu

SEQ ID NO: 2981780 - RNA, 19 nt, Artificial Sequence
  Description of Artificial Sequence: Synthetic oligonucleotide
ggcuggaaacacacaagua

SEQ ID NO: 2981781 - RNA, 19 nt, Artificial Sequence
  Description of Artificial Sequence: Synthetic oligonucleotide
cacgcaucaaugagugcuu

SEQ ID NO: 2981782 - RNA, 19 nt, Artificial Sequence
  Description of Artificial Sequence: Synthetic oligonucleotide
gcuugaaccgagcucucuu

SEQ ID NO: 2981783 - RNA, 19 nt, Artificial Sequence
  Description of Artificial Sequence: Synthetic oligonucleotide
gaauaacaugugggcgaau

SEQ ID NO: 2981784 - RNA, 19 nt, Artificial Sequence
  Description of Artificial Sequence: Synthetic oligonucleotide
gugcuugaaccgagcucuc

SEQ ID NO: 2981785 - RNA, 19 nt, Artificial Sequence
  Description of Artificial Sequence: Synthetic oligonucleotide
aucgaccauuuaacaucaa

SEQ ID NO: 2981786 - RNA, 19 nt, Artificial Sequence
  Description of Artificial Sequence: Synthetic oligonucleotide
gagaagcguucuauucguu

SEQ ID NO: 2981787 - RNA, 19 nt, Artificial Sequence
  Description of Artificial Sequence: Synthetic oligonucleotide
ggaggaaugcauagccuuu

SEQ ID NO: 2981788 - RNA, 19 nt, Artificial Sequence
  Description of Artificial Sequence: Synthetic oligonucleotide
cgcaucaaugagugcuuga

SEQ ID NO: 2981789 - RNA, 19 nt, Artificial Sequence
  Description of Artificial Sequence: Synthetic oligonucleotide
ccgagcucucuucuugaaa

SEQ ID NO: 2981790 - RNA, 19 nt, Artificial Sequence
  Description of Artificial Sequence: Synthetic oligonucleotide
cguucuauucguucuccau

SEQ ID NO: 2981791 - RNA, 19 nt, Artificial Sequence
  Description of Artificial Sequence: Synthetic oligonucleotide
ccuugauaguaggcuggaa

SEQ ID NO: 2981792 - RNA, 19 nt, Artificial Sequence
  Description of Artificial Sequence: Synthetic oligonucleotide
ccauuuugaugagcugaau

SEQ ID NO: 2981793 - RNA, 19 nt, Artificial Sequence
  Description of Artificial Sequence: Synthetic oligonucleotide
uauuaugacaacaugaucu

SEQ ID NO: 2981794 - RNA, 19 nt, Artificial Sequence
  Description of Artificial Sequence: Synthetic oligonucleotide
aauucuuaagaauaucuuc

SEQ ID NO: 2981795 - RNA, 19 nt, Artificial Sequence
  Description of Artificial Sequence: Synthetic oligonucleotide
  modified_base (7)..(7): a, c, u, g, unknown or other
aaucaunaccgguggagcc

SEQ ID NO: 2981796 - RNA, 19 nt, Artificial Sequence
  Description of Artificial Sequence: Synthetic oligonucleotide
uguuguuucaccaucuccg

SEQ ID NO: 2981797 - RNA, 19 nt, Artificial Sequence
  Description of Artificial Sequence: Synthetic oligonucleotide
  modified_base (16)..(16): a, c, u, g, unknown or other
acagccgauaaucaunacc

SEQ ID NO: 2981798 - RNA, 19 nt, Artificial Sequence
  Description of Artificial Sequence: Synthetic oligonucleotide
aaugcaauaugucuugugu

SEQ ID NO: 2981799 - RNA, 19 nt, Artificial Sequence
  Description of Artificial Sequence: Synthetic oligonucleotide
aagcucuuccacuaaauuc

SEQ ID NO: 2981800 - RNA, 19 nt, Artificial Sequence
  Description of Artificial Sequence: Synthetic oligonucleotide
uuuauuaugacaacaugau

SEQ ID NO: 2981801 - RNA, 19 nt, Artificial Sequence
  Description of Artificial Sequence: Synthetic oligonucleotide
aaaagaugcaaccuuugca

SEQ ID NO: 2981802 - RNA, 19 nt, Artificial Sequence
  Description of Artificial Sequence: Synthetic oligonucleotide
aaagaugcaaccuuugcau

SEQ ID NO: 2981803 - RNA, 19 nt, Artificial Sequence
  Description of Artificial Sequence: Synthetic oligonucleotide
aguagcuaauuucacaauc

SEQ ID NO: 2981804 - RNA, 19 nt, Artificial Sequence
  Description of Artificial Sequence: Synthetic oligonucleotide
aagaauaucuucuggaaua

SEQ ID NO: 2981805 - RNA, 19 nt, Artificial Sequence
  Description of Artificial Sequence: Synthetic oligonucleotide
aauauccucaucuggaaaa

SEQ ID NO: 2981806 - RNA, 19 nt, Artificial Sequence
  Description of Artificial Sequence: Synthetic oligonucleotide
acuuguuuccagaaaaugc

SEQ ID NO: 2981807 - RNA, 19 nt, Artificial Sequence
  Description of Artificial Sequence: Synthetic oligonucleotide
uccagaaaaugcaauaugu

SEQ ID NO: 2981808 - RNA, 19 nt, Artificial Sequence
  Description of Artificial Sequence: Synthetic oligonucleotide
auuaugacaacaugaucuc

SEQ ID NO: 2981809 - RNA, 19 nt, Artificial Sequence
  Description of Artificial Sequence: Synthetic oligonucleotide
ugucuuguguuuauuauga

SEQ ID NO: 2981810 - RNA, 19 nt, Artificial Sequence
  Description of Artificial Sequence: Synthetic oligonucleotide
  modified_base (15)..(15): a, c, u, g, unknown or other
cagccgauaaucaunaccg

SEQ ID NO: 2981811 - RNA, 19 nt, Artificial Sequence
  Description of Artificial Sequence: Synthetic oligonucleotide
gaaaaugcaauaugucuug

SEQ ID NO: 2981812 - RNA, 19 nt, Artificial Sequence
  Description of Artificial Sequence: Synthetic oligonucleotide
uaaguagcuaauuucacaa

SEQ ID NO: 2981813 - RNA, 19 nt, Artificial Sequence
  Description of Artificial Sequence: Synthetic oligonucleotide
uaugacaacaugaucucca

SEQ ID NO: 2981814 - RNA, 19 nt, Artificial Sequence
  Description of Artificial Sequence: Synthetic oligonucleotide
uucuggaauauccucaucu

SEQ ID NO: 2981815 - RNA, 19 nt, Artificial Sequence
  Description of Artificial Sequence: Synthetic oligonucleotide
uuccacuaaauucuuaaga

SEQ ID NO: 2981816 - RNA, 19 nt, Artificial Sequence
  Description of Artificial Sequence: Synthetic oligonucleotide
aauuucacaaucgccacug

SEQ ID NO: 2981817 - RNA, 19 nt, Artificial Sequence
  Description of Artificial Sequence: Synthetic oligonucleotide
uccacuaaauucuuaagaa

SEQ ID NO: 2981818 - RNA, 19 nt, Artificial Sequence
  Description of Artificial Sequence: Synthetic oligonucleotide
cuugucgaaacccaccugg

SEQ ID NO: 2981819 - RNA, 19 nt, Artificial Sequence
  Description of Artificial Sequence: Synthetic oligonucleotide
uggaauauccucaucugga

SEQ ID NO: 2981820 - RNA, 19 nt, Artificial Sequence
  Description of Artificial Sequence: Synthetic oligonucleotide
ucuuguguuuauuaugaca

SEQ ID NO: 2981821 - RNA, 19 nt, Artificial Sequence
  Description of Artificial Sequence: Synthetic oligonucleotide
uuaagaauaucuucuggaa

SEQ ID NO: 2981822 - RNA, 19 nt, Artificial Sequence
  Description of Artificial Sequence: Synthetic oligonucleotide
uuucacaaucgccacuggg

SEQ ID NO: 2981823 - RNA, 19 nt, Artificial Sequence
  Description of Artificial Sequence: Synthetic oligonucleotide
uggguagccaguaugugag

SEQ ID NO: 2981824 - RNA, 19 nt, Artificial Sequence
  Description of Artificial Sequence: Synthetic oligonucleotide
cuuguguuuauuaugacaa

SEQ ID NO: 2981825 - RNA, 19 nt, Artificial Sequence
  Description of Artificial Sequence: Synthetic oligonucleotide
aaccuuugcaucauuguuc

SEQ ID NO: 2981826 - RNA, 19 nt, Artificial Sequence
  Description of Artificial Sequence: Synthetic oligonucleotide
aaaugcaauaugucuugug

SEQ ID NO: 2981827 - RNA, 19 nt, Artificial Sequence
  Description of Artificial Sequence: Synthetic oligonucleotide
aagaugcaaccuuugcauc

SEQ ID NO: 2981828 - RNA, 19 nt, Artificial Sequence
  Description of Artificial Sequence: Synthetic oligonucleotide
uguguuuauuaugacaaca

SEQ ID NO: 2981829 - RNA, 19 nt, Artificial Sequence
  Description of Artificial Sequence: Synthetic oligonucleotide
uuuuguucccacuuguuuc

SEQ ID NO: 2981830 - RNA, 19 nt, Artificial Sequence
  Description of Artificial Sequence: Synthetic oligonucleotide
auaaguagcuaauuucaca

SEQ ID NO: 2981831 - RNA, 19 nt, Artificial Sequence
  Description of Artificial Sequence: Synthetic oligonucleotide
  modified_base (9)..(9): a, c, u, g, unknown or other
auaaucaunaccgguggag

SEQ ID NO: 2981832 - RNA, 19 nt, Artificial Sequence
  Description of Artificial Sequence: Synthetic oligonucleotide
uucacaaucgccacugggu

SEQ ID NO: 2981833 - RNA, 19 nt, Artificial Sequence
  Description of Artificial Sequence: Synthetic oligonucleotide
cuuaagaauaucuucugga

SEQ ID NO: 2981834 - RNA, 19 nt, Artificial Sequence
  Description of Artificial Sequence: Synthetic oligonucleotide
guagcuaauuucacaaucg

SEQ ID NO: 2981835 - RNA, 19 nt, Artificial Sequence
  Description of Artificial Sequence: Synthetic oligonucleotide
ucuuccacuaaauucuuaa

SEQ ID NO: 2981836 - RNA, 19 nt, Artificial Sequence
  Description of Artificial Sequence: Synthetic oligonucleotide
uuuccuacagccgauaauc

SEQ ID NO: 2981837 - RNA, 19 nt, Artificial Sequence
  Description of Artificial Sequence: Synthetic oligonucleotide
auucuuaagaauaucuucu

SEQ ID NO: 2981838 - RNA, 19 nt, Artificial Sequence
  Description of Artificial Sequence: Synthetic oligonucleotide
ugcaucauuguucuucugu

SEQ ID NO: 2981839 - RNA, 19 nt, Artificial Sequence
  Description of Artificial Sequence: Synthetic oligonucleotide
uuccagaaaaugcaauaug

SEQ ID NO: 2981840 - RNA, 19 nt, Artificial Sequence
  Description of Artificial Sequence: Synthetic oligonucleotide
uuuguucccacuuguuucc

SEQ ID NO: 2981841 - RNA, 19 nt, Artificial Sequence
  Description of Artificial Sequence: Synthetic oligonucleotide
uaagaauaucuucuggaau

SEQ ID NO: 2981842 - RNA, 19 nt, Artificial Sequence
  Description of Artificial Sequence: Synthetic oligonucleotide
uuauuaugacaacaugauc

SEQ ID NO: 2981843 - RNA, 19 nt, Artificial Sequence
  Description of Artificial Sequence: Synthetic oligonucleotide
uguuacuugucgaaaccca

SEQ ID NO: 2981844 - RNA, 19 nt, Artificial Sequence
  Description of Artificial Sequence: Synthetic oligonucleotide
agcuguuacuugucgaaac

SEQ ID NO: 2981845 - RNA, 19 nt, Artificial Sequence
  Description of Artificial Sequence: Synthetic oligonucleotide
uagcuaauuucacaaucgc

SEQ ID NO: 2981846 - RNA, 19 nt, Artificial Sequence
  Description of Artificial Sequence: Synthetic oligonucleotide
agcuaauuucacaaucgcc

SEQ ID NO: 2981847 - RNA, 19 nt, Artificial Sequence
  Description of Artificial Sequence: Synthetic oligonucleotide
uucagaugcaguugugcag

SEQ ID NO: 2981848 - RNA, 19 nt, Artificial Sequence
  Description of Artificial Sequence: Synthetic oligonucleotide
uuacuugucgaaacccacc

SEQ ID NO: 2981849 - RNA, 19 nt, Artificial Sequence
  Description of Artificial Sequence: Synthetic oligonucleotide
cacuggguccuucagaugc

SEQ ID NO: 2981850 - RNA, 19 nt, Artificial Sequence
  Description of Artificial Sequence: Synthetic oligonucleotide
aucauuguucuucugugca

SEQ ID NO: 2981851 - RNA, 19 nt, Artificial Sequence
  Description of Artificial Sequence: Synthetic oligonucleotide
ucuggaauauccucaucug

SEQ ID NO: 2981852 - RNA, 19 nt, Artificial Sequence
  Description of Artificial Sequence: Synthetic oligonucleotide
agucucuugcuguuguuuc

SEQ ID NO: 2981853 - RNA, 19 nt, Artificial Sequence
  Description of Artificial Sequence: Synthetic oligonucleotide
ucgaaacccaccuggguag

SEQ ID NO: 2981854 - RNA, 19 nt, Artificial Sequence
  Description of Artificial Sequence: Synthetic oligonucleotide
cuaauuucacaaucgccac

SEQ ID NO: 2981855 - RNA, 19 nt, Artificial Sequence
  Description of Artificial Sequence: Synthetic oligonucleotide
uuugcaucauuguucuucu

SEQ ID NO: 2981856 - RNA, 19 nt, Artificial Sequence
  Description of Artificial Sequence: Synthetic oligonucleotide
augacaacaugaucuccac

SEQ ID NO: 2981857 - RNA, 19 nt, Artificial Sequence
  Description of Artificial Sequence: Synthetic oligonucleotide
uguucuucugugcagguuu

SEQ ID NO: 2981858 - RNA, 19 nt, Artificial Sequence
  Description of Artificial Sequence: Synthetic oligonucleotide
uccgcuuuccuacagccga

SEQ ID NO: 2981859 - RNA, 19 nt, Artificial Sequence
  Description of Artificial Sequence: Synthetic oligonucleotide
cuggaauauccucaucugg

SEQ ID NO: 2981860 - RNA, 19 nt, Artificial Sequence
  Description of Artificial Sequence: Synthetic oligonucleotide
augucuuguguuuauuaug

SEQ ID NO: 2981861 - RNA, 19 nt, Artificial Sequence
  Description of Artificial Sequence: Synthetic oligonucleotide
ucagaugcaguugugcagc

SEQ ID NO: 2981862 - RNA, 19 nt, Artificial Sequence
  Description of Artificial Sequence: Synthetic oligonucleotide
  modified_base (6)..(6): a, c, u, g, unknown or other
aucaunaccgguggagccc

SEQ ID NO: 2981863 - RNA, 19 nt, Artificial Sequence
  Description of Artificial Sequence: Synthetic oligonucleotide
cauaaguagcuaauuucac

SEQ ID NO: 2981864 - RNA, 19 nt, Artificial Sequence
  Description of Artificial Sequence: Synthetic oligonucleotide
uacuugucgaaacccaccu

SEQ ID NO: 2981865 - RNA, 19 nt, Artificial Sequence
  Description of Artificial Sequence: Synthetic oligonucleotide
cacuaaauucuuaagaaua

SEQ ID NO: 2981866 - RNA, 19 nt, Artificial Sequence
  Description of Artificial Sequence: Synthetic oligonucleotide
ugcaaccuuugcaucauug

SEQ ID NO: 2981867 - RNA, 19 nt, Artificial Sequence
  Description of Artificial Sequence: Synthetic oligonucleotide
cuuuccguggcugaggaag

SEQ ID NO: 2981868 - RNA, 19 nt, Artificial Sequence
  Description of Artificial Sequence: Synthetic oligonucleotide
  modified_base (8)..(8): a, c, u, g, unknown or other
uaaucaunaccgguggagc

SEQ ID NO: 2981869 - RNA, 19 nt, Artificial Sequence
  Description of Artificial Sequence: Synthetic oligonucleotide
ucauuguucuucugugcag

SEQ ID NO: 2981870 - RNA, 19 nt, Artificial Sequence
  Description of Artificial Sequence: Synthetic oligonucleotide
  modified_base (10)..(10): a, c, u, g, unknown or other
gauaaucaunaccggugga

SEQ ID NO: 2981871 - RNA, 19 nt, Artificial Sequence
  Description of Artificial Sequence: Synthetic oligonucleotide
  modified_base (14)..(14): a, c, u, g, unknown or other
agccgauaaucaunaccgg

SEQ ID NO: 2981872 - RNA, 19 nt, Artificial Sequence
  Description of Artificial Sequence: Synthetic oligonucleotide
ugggaaagccucuaucucu

SEQ ID NO: 2981873 - RNA, 19 nt, Artificial Sequence
  Description of Artificial Sequence: Synthetic oligonucleotide
accgguggagcccacacuc

SEQ ID NO: 2981874 - RNA, 19 nt, Artificial Sequence
  Description of Artificial Sequence: Synthetic oligonucleotide
guuuaggcacuuuccgugg

SEQ ID NO: 2981875 - RNA, 19 nt, Artificial Sequence
  Description of Artificial Sequence: Synthetic oligonucleotide
agaugcaaccuuugcauca

SEQ ID NO: 2981876 - RNA, 19 nt, Artificial Sequence
  Description of Artificial Sequence: Synthetic oligonucleotide
uugucgaaacccaccuggg

SEQ ID NO: 2981877 - RNA, 19 nt, Artificial Sequence
  Description of Artificial Sequence: Synthetic oligonucleotide
ucuucuuggguguacucgu

SEQ ID NO: 2981878 - RNA, 19 nt, Artificial Sequence
  Description of Artificial Sequence: Synthetic oligonucleotide
uguuuccagaaaaugcaau

SEQ ID NO: 2981879 - RNA, 19 nt, Artificial Sequence
  Description of Artificial Sequence: Synthetic oligonucleotide
accuuugcaucauuguucu

SEQ ID NO: 2981880 - RNA, 19 nt, Artificial Sequence
  Description of Artificial Sequence: Synthetic oligonucleotide
agaaaaugcaauaugucuu

SEQ ID NO: 2981881 - RNA, 19 nt, Artificial Sequence
  Description of Artificial Sequence: Synthetic oligonucleotide
cucuaucucuucuugggug

SEQ ID NO: 2981882 - RNA, 19 nt, Artificial Sequence
  Description of Artificial Sequence: Synthetic oligonucleotide
ucuccgcuuuccuacagcc

SEQ ID NO: 2981883 - RNA, 19 nt, Artificial Sequence
  Description of Artificial Sequence: Synthetic oligonucleotide
uaauuucacaaucgccacu

SEQ ID NO: 2981884 - RNA, 19 nt, Artificial Sequence
  Description of Artificial Sequence: Synthetic oligonucleotide
cauuguucuucugugcagg

SEQ ID NO: 2981885 - RNA, 19 nt, Artificial Sequence
  Description of Artificial Sequence: Synthetic oligonucleotide
cuuccacuaaauucuuaag

SEQ ID NO: 2981886 - RNA, 19 nt, Artificial Sequence
  Description of Artificial Sequence: Synthetic oligonucleotide
ggcagcaugccauaaguag

SEQ ID NO: 2981887 - RNA, 19 nt, Artificial Sequence
  Description of Artificial Sequence: Synthetic oligonucleotide
uuuccagaaaaugcaauau

SEQ ID NO: 2981888 - RNA, 19 nt, Artificial Sequence
  Description of Artificial Sequence: Synthetic oligonucleotide
caucauuguucuucugugc

SEQ ID NO: 2981889 - RNA, 19 nt, Artificial Sequence
  Description of Artificial Sequence: Synthetic oligonucleotide
ucacaaucgccacuggguc

SEQ ID NO: 2981890 - RNA, 19 nt, Artificial Sequence
  Description of Artificial Sequence: Synthetic oligonucleotide
ugggcagcaugccauaagu

SEQ ID NO: 2981891 - RNA, 19 nt, Artificial Sequence
  Description of Artificial Sequence: Synthetic oligonucleotide
uucuuggguguacucgucc

SEQ ID NO: 2981892 - RNA, 19 nt, Artificial Sequence
  Description of Artificial Sequence: Synthetic oligonucleotide
gcuaauuucacaaucgcca

SEQ ID NO: 2981893 - RNA, 19 nt, Artificial Sequence
  Description of Artificial Sequence: Synthetic oligonucleotide
uaugugaggaguacacuuu

SEQ ID NO: 2981894 - RNA, 19 nt, Artificial Sequence
  Description of Artificial Sequence: Synthetic oligonucleotide
ucuugggaaagccucuauc

SEQ ID NO: 2981895 - RNA, 19 nt, Artificial Sequence
  Description of Artificial Sequence: Synthetic oligonucleotide
uacucguccagccguuuag

SEQ ID NO: 2981896 - RNA, 19 nt, Artificial Sequence
  Description of Artificial Sequence: Synthetic oligonucleotide
caguaugugaggaguacac

SEQ ID NO: 2981897 - RNA, 19 nt, Artificial Sequence
  Description of Artificial Sequence: Synthetic oligonucleotide
uuguuuccagaaaaugcaa

SEQ ID NO: 2981898 - RNA, 19 nt, Artificial Sequence
  Description of Artificial Sequence: Synthetic oligonucleotide
cuguuguuucaccaucucc

SEQ ID NO: 2981899 - RNA, 19 nt, Artificial Sequence
  Description of Artificial Sequence: Synthetic oligonucleotide
uguuucaccaucuccgcuu

SEQ ID NO: 2981900 - RNA, 19 nt, Artificial Sequence
  Description of Artificial Sequence: Synthetic oligonucleotide
acuaaauucuuaagaauau

SEQ ID NO: 2981901 - RNA, 19 nt, Artificial Sequence
  Description of Artificial Sequence: Synthetic oligonucleotide
ugccauaaguagcuaauuu

SEQ ID NO: 2981902 - RNA, 19 nt, Artificial Sequence
  Description of Artificial Sequence: Synthetic oligonucleotide
auaugucuuguguuuauua

SEQ ID NO: 2981903 - RNA, 19 nt, Artificial Sequence
  Description of Artificial Sequence: Synthetic oligonucleotide
cagaaaaugcaauaugucu

SEQ ID NO: 2981904 - RNA, 19 nt, Artificial Sequence
  Description of Artificial Sequence: Synthetic oligonucleotide
aaguagcuaauuucacaau

SEQ ID NO: 2981905 - RNA, 19 nt, Artificial Sequence
  Description of Artificial Sequence: Synthetic oligonucleotide
cuaaauucuuaagaauauc

SEQ ID NO: 2981906 - RNA, 19 nt, Artificial Sequence
  Description of Artificial Sequence: Synthetic oligonucleotide
uuuaggcacuuuccguggc

SEQ ID NO: 2981907 - RNA, 19 nt, Artificial Sequence
  Description of Artificial Sequence: Synthetic oligonucleotide
uuaugacaacaugaucucc

SEQ ID NO: 2981908 - RNA, 19 nt, Artificial Sequence
  Description of Artificial Sequence: Synthetic oligonucleotide
aucuccgcuuuccuacagc

SEQ ID NO: 2981909 - RNA, 19 nt, Artificial Sequence
  Description of Artificial Sequence: Synthetic oligonucleotide
guuguuucaccaucuccgc

SEQ ID NO: 2981910 - RNA, 19 nt, Artificial Sequence
  Description of Artificial Sequence: Synthetic oligonucleotide
aaaaugcaauaugucuugu

SEQ ID NO: 2981911 - RNA, 19 nt, Artificial Sequence
  Description of Artificial Sequence: Synthetic oligonucleotide
uugggaaagccucuaucuc

SEQ ID NO: 2981912 - RNA, 19 nt, Artificial Sequence
  Description of Artificial Sequence: Synthetic oligonucleotide
cucuucuuggguguacucg

SEQ ID NO: 2981913 - RNA, 19 nt, Artificial Sequence
  Description of Artificial Sequence: Synthetic oligonucleotide
uggcugaggaagcucuucc

SEQ ID NO: 2981914 - RNA, 19 nt, Artificial Sequence
  Description of Artificial Sequence: Synthetic oligonucleotide
acacucuugggaaagccuc

SEQ ID NO: 2981915 - RNA, 19 nt, Artificial Sequence
  Description of Artificial Sequence: Synthetic oligonucleotide
ugaggaagcucuuccacua

SEQ ID NO: 2981916 - RNA, 19 nt, Artificial Sequence
  Description of Artificial Sequence: Synthetic oligonucleotide
uucaccaucuccgcuuucc

SEQ ID NO: 2981917 - RNA, 19 nt, Artificial Sequence
  Description of Artificial Sequence: Synthetic oligonucleotide
ugcuguuguuucaccaucu

SEQ ID NO: 2981918 - RNA, 19 nt, Artificial Sequence
  Description of Artificial Sequence: Synthetic oligonucleotide
ucuucuggaauauccucau

SEQ ID NO: 2981919 - RNA, 19 nt, Artificial Sequence
  Description of Artificial Sequence: Synthetic oligonucleotide
ucuuggguguacucgucca

SEQ ID NO: 2981920 - RNA, 19 nt, Artificial Sequence
  Description of Artificial Sequence: Synthetic oligonucleotide
cuguuacuugucgaaaccc

SEQ ID NO: 2981921 - RNA, 19 nt, Artificial Sequence
  Description of Artificial Sequence: Synthetic oligonucleotide
uuguguuuauuaugacaac

SEQ ID NO: 2981922 - RNA, 19 nt, Artificial Sequence
  Description of Artificial Sequence: Synthetic oligonucleotide
uuuccguggcugaggaagc

SEQ ID NO: 2981923 - RNA, 19 nt, Artificial Sequence
  Description of Artificial Sequence: Synthetic oligonucleotide
guuuccagaaaaugcaaua

SEQ ID NO: 2981924 - RNA, 19 nt, Artificial Sequence
  Description of Artificial Sequence: Synthetic oligonucleotide
uuccuacagccgauaauca

SEQ ID NO: 2981925 - RNA, 19 nt, Artificial Sequence
  Description of Artificial Sequence: Synthetic oligonucleotide
guagccaguaugugaggag

SEQ ID NO: 2981926 - RNA, 19 nt, Artificial Sequence
  Description of Artificial Sequence: Synthetic oligonucleotide
ugacaacaugaucuccaca

SEQ ID NO: 2981927 - RNA, 19 nt, Artificial Sequence
  Description of Artificial Sequence: Synthetic oligonucleotide
uugggcagcaugccauaag

SEQ ID NO: 2981928 - RNA, 19 nt, Artificial Sequence
  Description of Artificial Sequence: Synthetic oligonucleotide
auuucacaaucgccacugg

SEQ ID NO: 2981929 - RNA, 19 nt, Artificial Sequence
  Description of Artificial Sequence: Synthetic oligonucleotide
aacccaccuggguagccag

SEQ ID NO: 2981930 - RNA, 19 nt, Artificial Sequence
  Description of Artificial Sequence: Synthetic oligonucleotide
guggagcccacacucuugg

SEQ ID NO: 2981931 - RNA, 19 nt, Artificial Sequence
  Description of Artificial Sequence: Synthetic oligonucleotide
uccagucucuugcuguugu

SEQ ID NO: 2981932 - RNA, 19 nt, Artificial Sequence
  Description of Artificial Sequence: Synthetic oligonucleotide
gaauauccucaucuggaaa

SEQ ID NO: 2981933 - RNA, 19 nt, Artificial Sequence
  Description of Artificial Sequence: Synthetic oligonucleotide
agccguuuaggcacuuucc

SEQ ID NO: 2981934 - RNA, 19 nt, Artificial Sequence
  Description of Artificial Sequence: Synthetic oligonucleotide
ugucgaaacccaccugggu

SEQ ID NO: 2981935 - RNA, 19 nt, Artificial Sequence
  Description of Artificial Sequence: Synthetic oligonucleotide
gccauaaguagcuaauuuc

SEQ ID NO: 2981936 - RNA, 19 nt, Artificial Sequence
  Description of Artificial Sequence: Synthetic oligonucleotide
  modified_base (2)..(2): a, c, u, g, unknown or other
unaccgguggagcccacac

SEQ ID NO: 2981937 - RNA, 19 nt, Artificial Sequence
  Description of Artificial Sequence: Synthetic oligonucleotide
ucguccagccguuuaggca

SEQ ID NO: 2981938 - RNA, 19 nt, Artificial Sequence
  Description of Artificial Sequence: Synthetic oligonucleotide
acaacaugaucuccacagu

SEQ ID NO: 2981939 - RNA, 19 nt, Artificial Sequence
  Description of Artificial Sequence: Synthetic oligonucleotide
uggguguacucguccagcc

SEQ ID NO: 2981940 - RNA, 19 nt, Artificial Sequence
  Description of Artificial Sequence: Synthetic oligonucleotide
  modified_base (12)..(12): a, c, u, g, unknown or other
ccgauaaucaunaccggug

SEQ ID NO: 2981941 - RNA, 19 nt, Artificial Sequence
  Description of Artificial Sequence: Synthetic oligonucleotide
gccucuaucucuucuuggg

SEQ ID NO: 2981942 - RNA, 19 nt, Artificial Sequence
  Description of Artificial Sequence: Synthetic oligonucleotide
augcaauaugucuuguguu

SEQ ID NO: 2981943 - RNA, 19 nt, Artificial Sequence
  Description of Artificial Sequence: Synthetic oligonucleotide
uuguuucaccaucuccgcu

SEQ ID NO: 2981944 - RNA, 19 nt, Artificial Sequence
  Description of Artificial Sequence: Synthetic oligonucleotide
aauaugucuuguguuuauu

SEQ ID NO: 2981945 - RNA, 19 nt, Artificial Sequence
  Description of Artificial Sequence: Synthetic oligonucleotide
cacuuguuuccagaaaaug

SEQ ID NO: 2981946 - RNA, 19 nt, Artificial Sequence
  Description of Artificial Sequence: Synthetic oligonucleotide
uuaggcacuuuccguggcu

SEQ ID NO: 2981947 - RNA, 19 nt, Artificial Sequence
  Description of Artificial Sequence: Synthetic oligonucleotide
ccauaaguagcuaauuuca

SEQ ID NO: 2981948 - RNA, 19 nt, Artificial Sequence
  Description of Artificial Sequence: Synthetic oligonucleotide
gcaucauuguucuucugug

SEQ ID NO: 2981949 - RNA, 19 nt, Artificial Sequence
  Description of Artificial Sequence: Synthetic oligonucleotide
cuugggaaagccucuaucu

SEQ ID NO: 2981950 - RNA, 19 nt, Artificial Sequence
  Description of Artificial Sequence: Synthetic oligonucleotide
cacaaucgccacugggucc

SEQ ID NO: 2981951 - RNA, 19 nt, Artificial Sequence
  Description of Artificial Sequence: Synthetic oligonucleotide
aguugugcagcuguuacuu

SEQ ID NO: 2981952 - RNA, 19 nt, Artificial Sequence
  Description of Artificial Sequence: Synthetic oligonucleotide
guuacuugucgaaacccac

SEQ ID NO: 2981953 - RNA, 19 nt, Artificial Sequence
  Description of Artificial Sequence: Synthetic oligonucleotide
  modified_base (18)..(18): a, c, u, g, unknown or other
cuacagccgauaaucauna

SEQ ID NO: 2981954 - RNA, 19 nt, Artificial Sequence
  Description of Artificial Sequence: Synthetic oligonucleotide
uguucccacuuguuuccag

SEQ ID NO: 2981955 - RNA, 19 nt, Artificial Sequence
  Description of Artificial Sequence: Synthetic oligonucleotide
gccguuuaggcacuuuccg

SEQ ID NO: 2981956 - RNA, 19 nt, Artificial Sequence
  Description of Artificial Sequence: Synthetic oligonucleotide
agaauaucuucuggaauau

SEQ ID NO: 2981957 - RNA, 19 nt, Artificial Sequence
  Description of Artificial Sequence: Synthetic oligonucleotide
uagccaguaugugaggagu

SEQ ID NO: 2981958 - RNA, 19 nt, Artificial Sequence
  Description of Artificial Sequence: Synthetic oligonucleotide
  modified_base (5)..(5): a, c, u, g, unknown or other
ucaunaccgguggagccca

SEQ ID NO: 2981959 - RNA, 19 nt, Artificial Sequence
  Description of Artificial Sequence: Synthetic oligonucleotide
gcuguuacuugucgaaacc

SEQ ID NO: 2981960 - RNA, 19 nt, Artificial Sequence
  Description of Artificial Sequence: Synthetic oligonucleotide
uccuacagccgauaaucau

SEQ ID NO: 2981961 - RNA, 19 nt, Artificial Sequence
  Description of Artificial Sequence: Synthetic oligonucleotide
aguaugugaggaguacacu

SEQ ID NO: 2981962 - RNA, 19 nt, Artificial Sequence
  Description of Artificial Sequence: Synthetic oligonucleotide
uuggguguacucguccagc

SEQ ID NO: 2981963 - RNA, 19 nt, Artificial Sequence
  Description of Artificial Sequence: Synthetic oligonucleotide
ccagaaaaugcaauauguc

SEQ ID NO: 2981964 - RNA, 19 nt, Artificial Sequence
  Description of Artificial Sequence: Synthetic oligonucleotide
cuuggguguacucguccag

SEQ ID NO: 2981965 - RNA, 19 nt, Artificial Sequence
  Description of Artificial Sequence: Synthetic oligonucleotide
acuugucgaaacccaccug

SEQ ID NO: 2981966 - RNA, 19 nt, Artificial Sequence
  Description of Artificial Sequence: Synthetic oligonucleotide
acaaucgccacuggguccu

SEQ ID NO: 2981967 - RNA, 19 nt, Artificial Sequence
  Description of Artificial Sequence: Synthetic oligonucleotide
cucguccagccguuuaggc

SEQ ID NO: 2981968 - RNA, 19 nt, Artificial Sequence
  Description of Artificial Sequence: Synthetic oligonucleotide
cuggguagccaguauguga

SEQ ID NO: 2981969 - RNA, 19 nt, Artificial Sequence
  Description of Artificial Sequence: Synthetic oligonucleotide
uucccacuuguuuccagaa

SEQ ID NO: 2981970 - RNA, 19 nt, Artificial Sequence
  Description of Artificial Sequence: Synthetic oligonucleotide
gucgaaacccaccugggua

SEQ ID NO: 2981971 - RNA, 19 nt, Artificial Sequence
  Description of Artificial Sequence: Synthetic oligonucleotide
aaacccaccuggguagcca

SEQ ID NO: 2981972 - RNA, 19 nt, Artificial Sequence
  Description of Artificial Sequence: Synthetic oligonucleotide
gagcccacacucuugggaa

SEQ ID NO: 2981973 - RNA, 19 nt, Artificial Sequence
  Description of Artificial Sequence: Synthetic oligonucleotide
augugaggaguacacuuuu

SEQ ID NO: 2981974 - RNA, 19 nt, Artificial Sequence
  Description of Artificial Sequence: Synthetic oligonucleotide
guaugugaggaguacacuu

SEQ ID NO: 2981975 - RNA, 19 nt, Artificial Sequence
  Description of Artificial Sequence: Synthetic oligonucleotide
cuccgcuuuccuacagccg

SEQ ID NO: 2981976 - RNA, 19 nt, Artificial Sequence
  Description of Artificial Sequence: Synthetic oligonucleotide
  modified_base (11)..(11): a, c, u, g, unknown or other
cgauaaucaunaccggugg

SEQ ID NO: 2981977 - RNA, 19 nt, Artificial Sequence
  Description of Artificial Sequence: Synthetic oligonucleotide
gucuuguguuuauuaugac

SEQ ID NO: 2981978 - RNA, 19 nt, Artificial Sequence
  Description of Artificial Sequence: Synthetic oligonucleotide
guucccacuuguuuccaga

SEQ ID NO: 2981979 - RNA, 19 nt, Artificial Sequence
  Description of Artificial Sequence: Synthetic oligonucleotide
gaauaucuucuggaauauc

SEQ ID NO: 2981980 - RNA, 19 nt, Artificial Sequence
  Description of Artificial Sequence: Synthetic oligonucleotide
uaggcacuuuccguggcug

SEQ ID NO: 2981981 - RNA, 19 nt, Artificial Sequence
  Description of Artificial Sequence: Synthetic oligonucleotide
aggaagcucuuccacuaaa

SEQ ID NO: 2981982 - RNA, 19 nt, Artificial Sequence
  Description of Artificial Sequence: Synthetic oligonucleotide
gcagcaugccauaaguagc

SEQ ID NO: 2981983 - RNA, 19 nt, Artificial Sequence
  Description of Artificial Sequence: Synthetic oligonucleotide
caccuggguagccaguaug

SEQ ID NO: 2981984 - RNA, 19 nt, Artificial Sequence
  Description of Artificial Sequence: Synthetic oligonucleotide
ucccacuuguuuccagaaa

SEQ ID NO: 2981985 - RNA, 19 nt, Artificial Sequence
  Description of Artificial Sequence: Synthetic oligonucleotide
gcaguugugcagcuguuac

SEQ ID NO: 2981986 - RNA, 19 nt, Artificial Sequence
  Description of Artificial Sequence: Synthetic oligonucleotide
ucucuucuuggguguacuc

SEQ ID NO: 2981987 - RNA, 19 nt, Artificial Sequence
  Description of Artificial Sequence: Synthetic oligonucleotide
uuuugggcagcaugccaua

SEQ ID NO: 2981988 - RNA, 19 nt, Artificial Sequence
  Description of Artificial Sequence: Synthetic oligonucleotide
acucguccagccguuuagg

SEQ ID NO: 2981989 - RNA, 19 nt, Artificial Sequence
  Description of Artificial Sequence: Synthetic oligonucleotide
uggagcccacacucuuggg

SEQ ID NO: 2981990 - RNA, 19 nt, Artificial Sequence
  Description of Artificial Sequence: Synthetic oligonucleotide
cguuuaggcacuuuccgug

SEQ ID NO: 2981991 - RNA, 19 nt, Artificial Sequence
  Description of Artificial Sequence: Synthetic oligonucleotide
cagccguuuaggcacuuuc

SEQ ID NO: 2981992 - RNA, 19 nt, Artificial Sequence
  Description of Artificial Sequence: Synthetic oligonucleotide
ggaauauccucaucuggaa

SEQ ID NO: 2981993 - RNA, 19 nt, Artificial Sequence
  Description of Artificial Sequence: Synthetic oligonucleotide
aucgccacuggguccuuca

SEQ ID NO: 2981994 - RNA, 19 nt, Artificial Sequence
  Description of Artificial Sequence: Synthetic oligonucleotide
uaucucuucuuggguguac

SEQ ID NO: 2981995 - RNA, 19 nt, Artificial Sequence
  Description of Artificial Sequence: Synthetic oligonucleotide
cuucuuggguguacucguc

SEQ ID NO: 2981996 - RNA, 19 nt, Artificial Sequence
  Description of Artificial Sequence: Synthetic oligonucleotide
guguuuauuaugacaacau

SEQ ID NO: 2981997 - RNA, 19 nt, Artificial Sequence
  Description of Artificial Sequence: Synthetic oligonucleotide
aaucgccacuggguccuuc

SEQ ID NO: 2981998 - RNA, 19 nt, Artificial Sequence
  Description of Artificial Sequence: Synthetic oligonucleotide
aucucuucuuggguguacu

SEQ ID NO: 2981999 - RNA, 19 nt, Artificial Sequence
  Description of Artificial Sequence: Synthetic oligonucleotide
gaaacccaccuggguagcc

SEQ ID NO: 2982000 - RNA, 19 nt, Artificial Sequence
  Description of Artificial Sequence: Synthetic oligonucleotide
ucgccacuggguccuucag

SEQ ID NO: 2982001 - RNA, 19 nt, Artificial Sequence
  Description of Artificial Sequence: Synthetic oligonucleotide
caugccauaaguagcuaau

SEQ ID NO: 2982002 - RNA, 19 nt, Artificial Sequence
  Description of Artificial Sequence: Synthetic oligonucleotide
ggguguacucguccagccg

SEQ ID NO: 2982003 - RNA, 19 nt, Artificial Sequence
  Description of Artificial Sequence: Synthetic oligonucleotide
accuggguagccaguaugu

SEQ ID NO: 2982004 - RNA, 19 nt, Artificial Sequence
  Description of Artificial Sequence: Synthetic oligonucleotide
uggguccuucagaugcagu

SEQ ID NO: 2982005 - RNA, 19 nt, Artificial Sequence
  Description of Artificial Sequence: Synthetic oligonucleotide
caucuccgcuuuccuacag

SEQ ID NO: 2982006 - RNA, 19 nt, Artificial Sequence
  Description of Artificial Sequence: Synthetic oligonucleotide
cguccagccguuuaggcac

SEQ ID NO: 2982007 - RNA, 19 nt, Artificial Sequence
  Description of Artificial Sequence: Synthetic oligonucleotide
cuucuggaauauccucauc

SEQ ID NO: 2982008 - RNA, 19 nt, Artificial Sequence
  Description of Artificial Sequence: Synthetic oligonucleotide
ggagcccacacucuuggga

SEQ ID NO: 2982009 - RNA, 19 nt, Artificial Sequence
  Description of Artificial Sequence: Synthetic oligonucleotide
  modified_base (17)..(17): a, c, u, g, unknown or other
uacagccgauaaucaunac

SEQ ID NO: 2982010 - RNA, 19 nt, Artificial Sequence
  Description of Artificial Sequence: Synthetic oligonucleotide
cagcaugccauaaguagcu

SEQ ID NO: 2982011 - RNA, 19 nt, Artificial Sequence
  Description of Artificial Sequence: Synthetic oligonucleotide
gguccuucagaugcaguug

SEQ ID NO: 2982012 - RNA, 19 nt, Artificial Sequence
  Description of Artificial Sequence: Synthetic oligonucleotide
ugcaguugugcagcuguua

SEQ ID NO: 2982013 - RNA, 19 nt, Artificial Sequence
  Description of Artificial Sequence: Synthetic oligonucleotide
cacuuuccguggcugagga

SEQ ID NO: 2982014 - RNA, 19 nt, Artificial Sequence
  Description of Artificial Sequence: Synthetic oligonucleotide
gcagcuguuacuugucgaa

SEQ ID NO: 2982015 - RNA, 19 nt, Artificial Sequence
  Description of Artificial Sequence: Synthetic oligonucleotide
aggcacuuuccguggcuga

SEQ ID NO: 2982016 - RNA, 19 nt, Artificial Sequence
  Description of Artificial Sequence: Synthetic oligonucleotide
gaggaagcucuuccacuaa

SEQ ID NO: 2982017 - RNA, 19 nt, Artificial Sequence
  Description of Artificial Sequence: Synthetic oligonucleotide
  modified_base (19)..(19): a, c, u, g, unknown or other
ccuacagccgauaaucaun

SEQ ID NO: 2982018 - RNA, 19 nt, Artificial Sequence
  Description of Artificial Sequence: Synthetic oligonucleotide
gguagccaguaugugagga

SEQ ID NO: 2982019 - RNA, 19 nt, Artificial Sequence
  Description of Artificial Sequence: Synthetic oligonucleotide
uuguucccacuuguuucca

SEQ ID NO: 2982020 - RNA, 19 nt, Artificial Sequence
  Description of Artificial Sequence: Synthetic oligonucleotide
cugaggaagcucuuccacu

SEQ ID NO: 2982021 - RNA, 19 nt, Artificial Sequence
  Description of Artificial Sequence: Synthetic oligonucleotide
gguguacucguccagccgu

SEQ ID NO: 2982022 - RNA, 19 nt, Artificial Sequence
  Description of Artificial Sequence: Synthetic oligonucleotide
agaugcaguugugcagcug

SEQ ID NO: 2982023 - RNA, 19 nt, Artificial Sequence
  Description of Artificial Sequence: Synthetic oligonucleotide
uuguucuucugugcagguu

SEQ ID NO: 2982024 - RNA, 19 nt, Artificial Sequence
  Description of Artificial Sequence: Synthetic oligonucleotide
augccauaaguagcuaauu

SEQ ID NO: 2982025 - RNA, 19 nt, Artificial Sequence
  Description of Artificial Sequence: Synthetic oligonucleotide
cuggguccuucagaugcag

SEQ ID NO: 2982026 - RNA, 19 nt, Artificial Sequence
  Description of Artificial Sequence: Synthetic oligonucleotide
ggguagccaguaugugagg

SEQ ID NO: 2982027 - RNA, 19 nt, Artificial Sequence
  Description of Artificial Sequence: Synthetic oligonucleotide
  modified_base (3)..(3): a, c, u, g, unknown or other
aunaccgguggagcccaca

SEQ ID NO: 2982028 - RNA, 19 nt, Artificial Sequence
  Description of Artificial Sequence: Synthetic oligonucleotide
caaccuuugcaucauuguu

SEQ ID NO: 2982029 - RNA, 19 nt, Artificial Sequence
  Description of Artificial Sequence: Synthetic oligonucleotide
cacacucuugggaaagccu

SEQ ID NO: 2982030 - RNA, 19 nt, Artificial Sequence
  Description of Artificial Sequence: Synthetic oligonucleotide
gcaugccauaaguagcuaa

SEQ ID NO: 2982031 - RNA, 19 nt, Artificial Sequence
  Description of Artificial Sequence: Synthetic oligonucleotide
caauaugucuuguguuuau

SEQ ID NO: 2982032 - RNA, 19 nt, Artificial Sequence
  Description of Artificial Sequence: Synthetic oligonucleotide
gaugcaaccuuugcaucau

SEQ ID NO: 2982033 - RNA, 19 nt, Artificial Sequence
  Description of Artificial Sequence: Synthetic oligonucleotide
auccagucucuugcuguug

SEQ ID NO: 2982034 - RNA, 19 nt, Artificial Sequence
  Description of Artificial Sequence: Synthetic oligonucleotide
ggcacuuuccguggcugag

SEQ ID NO: 2982035 - RNA, 19 nt, Artificial Sequence
  Description of Artificial Sequence: Synthetic oligonucleotide
uuccguggcugaggaagcu

SEQ ID NO: 2982036 - RNA, 19 nt, Artificial Sequence
  Description of Artificial Sequence: Synthetic oligonucleotide
gcuguuguuucaccaucuc

SEQ ID NO: 2982037 - RNA, 19 nt, Artificial Sequence
  Description of Artificial Sequence: Synthetic oligonucleotide
uccguggcugaggaagcuc

SEQ ID NO: 2982038 - RNA, 19 nt, Artificial Sequence
  Description of Artificial Sequence: Synthetic oligonucleotide
gcaaccuuugcaucauugu

SEQ ID NO: 2982039 - RNA, 19 nt, Artificial Sequence
  Description of Artificial Sequence: Synthetic oligonucleotide
agcccacacucuugggaaa

SEQ ID NO: 2982040 - RNA, 19 nt, Artificial Sequence
  Description of Artificial Sequence: Synthetic oligonucleotide
  modified_base (4)..(4): a, c, u, g, unknown or other
caunaccgguggagcccac

SEQ ID NO: 2982041 - RNA, 19 nt, Artificial Sequence
  Description of Artificial Sequence: Synthetic oligonucleotide
acuggguccuucagaugca

SEQ ID NO: 2982042 - RNA, 19 nt, Artificial Sequence
  Description of Artificial Sequence: Synthetic oligonucleotide
gcacuuuccguggcugagg

SEQ ID NO: 2982043 - RNA, 19 nt, Artificial Sequence
  Description of Artificial Sequence: Synthetic oligonucleotide
cuuuccuacagccgauaau

SEQ ID NO: 2982044 - RNA, 19 nt, Artificial Sequence
  Description of Artificial Sequence: Synthetic oligonucleotide
acuuuccguggcugaggaa

SEQ ID NO: 2982045 - RNA, 19 nt, Artificial Sequence
  Description of Artificial Sequence: Synthetic oligonucleotide
ccacacucuugggaaagcc

SEQ ID NO: 2982046 - RNA, 19 nt, Artificial Sequence
  Description of Artificial Sequence: Synthetic oligonucleotide
gccaguaugugaggaguac

SEQ ID NO: 2982047 - RNA, 19 nt, Artificial Sequence
  Description of Artificial Sequence: Synthetic oligonucleotide
acucuugggaaagccucua

SEQ ID NO: 2982048 - RNA, 19 nt, Artificial Sequence
  Description of Artificial Sequence: Synthetic oligonucleotide
gguggagcccacacucuug

SEQ ID NO: 2982049 - RNA, 19 nt, Artificial Sequence
  Description of Artificial Sequence: Synthetic oligonucleotide
gcaauaugucuuguguuua

SEQ ID NO: 2982050 - RNA, 19 nt, Artificial Sequence
  Description of Artificial Sequence: Synthetic oligonucleotide
cucuuccacuaaauucuua

SEQ ID NO: 2982051 - RNA, 19 nt, Artificial Sequence
  Description of Artificial Sequence: Synthetic oligonucleotide
uguacucguccagccguuu

SEQ ID NO: 2982052 - RNA, 19 nt, Artificial Sequence
  Description of Artificial Sequence: Synthetic oligonucleotide
guacucguccagccguuua

SEQ ID NO: 2982053 - RNA, 19 nt, Artificial Sequence
  Description of Artificial Sequence: Synthetic oligonucleotide
ggaaagccucuaucucuuc

SEQ ID NO: 2982054 - RNA, 19 nt, Artificial Sequence
  Description of Artificial Sequence: Synthetic oligonucleotide
gcuuuccuacagccgauaa

SEQ ID NO: 2982055 - RNA, 19 nt, Artificial Sequence
  Description of Artificial Sequence: Synthetic oligonucleotide
caguugugcagcuguuacu

SEQ ID NO: 2982056 - RNA, 19 nt, Artificial Sequence
  Description of Artificial Sequence: Synthetic oligonucleotide
gcccacacucuugggaaag

SEQ ID NO: 2982057 - RNA, 19 nt, Artificial Sequence
  Description of Artificial Sequence: Synthetic oligonucleotide
gccacuggguccuucagau

SEQ ID NO: 2982058 - RNA, 19 nt, Artificial Sequence
  Description of Artificial Sequence: Synthetic oligonucleotide
augcaaccuuugcaucauu

SEQ ID NO: 2982059 - RNA, 19 nt, Artificial Sequence
  Description of Artificial Sequence: Synthetic oligonucleotide
  modified_base (13)..(13): a, c, u, g, unknown or other
gccgauaaucaunaccggu

SEQ ID NO: 2982060 - RNA, 19 nt, Artificial Sequence
  Description of Artificial Sequence: Synthetic oligonucleotide
ccacuaaauucuuaagaau

SEQ ID NO: 2982061 - RNA, 19 nt, Artificial Sequence
  Description of Artificial Sequence: Synthetic oligonucleotide
agccaguaugugaggagua

SEQ ID NO: 2982062 - RNA, 19 nt, Artificial Sequence
  Description of Artificial Sequence: Synthetic oligonucleotide
guuucaccaucuccgcuuu

SEQ ID NO: 2982063 - RNA, 19 nt, Artificial Sequence
  Description of Artificial Sequence: Synthetic oligonucleotide
ggguccuucagaugcaguu

SEQ ID NO: 2982064 - RNA, 19 nt, Artificial Sequence
  Description of Artificial Sequence: Synthetic oligonucleotide
caccaucuccgcuuuccua

SEQ ID NO: 2982065 - RNA, 19 nt, Artificial Sequence
  Description of Artificial Sequence: Synthetic oligonucleotide
cagcuguuacuugucgaaa

SEQ ID NO: 2982066 - RNA, 19 nt, Artificial Sequence
  Description of Artificial Sequence: Synthetic oligonucleotide
agcaugccauaaguagcua

SEQ ID NO: 2982067 - RNA, 19 nt, Artificial Sequence
  Description of Artificial Sequence: Synthetic oligonucleotide
ccaguaugugaggaguaca

SEQ ID NO: 2982068 - RNA, 19 nt, Artificial Sequence
  Description of Artificial Sequence: Synthetic oligonucleotide
ccuggguagccaguaugug

SEQ ID NO: 2982069 - RNA, 19 nt, Artificial Sequence
  Description of Artificial Sequence: Synthetic oligonucleotide
cauccagucucuugcuguu

SEQ ID NO: 2982070 - RNA, 19 nt, Artificial Sequence
  Description of Artificial Sequence: Synthetic oligonucleotide
cuaucucuucuugggugua

SEQ ID NO: 2982071 - RNA, 19 nt, Artificial Sequence
  Description of Artificial Sequence: Synthetic oligonucleotide
ggaagcucuuccacuaaau

SEQ ID NO: 2982072 - RNA, 19 nt, Artificial Sequence
  Description of Artificial Sequence: Synthetic oligonucleotide
cagaugcaguugugcagcu

SEQ ID NO: 2982073 - RNA, 19 nt, Artificial Sequence
  Description of Artificial Sequence: Synthetic oligonucleotide
augcaguugugcagcuguu

SEQ ID NO: 2982074 - RNA, 19 nt, Artificial Sequence
  Description of Artificial Sequence: Synthetic oligonucleotide
ccacuggguccuucagaug

SEQ ID NO: 2982075 - RNA, 19 nt, Artificial Sequence
  Description of Artificial Sequence: Synthetic oligonucleotide
cccacacucuugggaaagc

SEQ ID NO: 2982076 - RNA, 19 nt, Artificial Sequence
  Description of Artificial Sequence: Synthetic oligonucleotide
cucuugggaaagccucuau

SEQ ID NO: 2982077 - RNA, 19 nt, Artificial Sequence
  Description of Artificial Sequence: Synthetic oligonucleotide
ccguuuaggcacuuuccgu

SEQ ID NO: 2982078 - RNA, 19 nt, Artificial Sequence
  Description of Artificial Sequence: Synthetic oligonucleotide
cagucucuugcuguuguuu

SEQ ID NO: 2982079 - RNA, 19 nt, Artificial Sequence
  Description of Artificial Sequence: Synthetic oligonucleotide
guucuucugugcagguuuu

SEQ ID NO: 2982080 - RNA, 19 nt, Artificial Sequence
  Description of Artificial Sequence: Synthetic oligonucleotide
ccaucuccgcuuuccuaca

SEQ ID NO: 2982081 - RNA, 19 nt, Artificial Sequence
  Description of Artificial Sequence: Synthetic oligonucleotide
gggaaagccucuaucucuu

SEQ ID NO: 2982082 - RNA, 19 nt, Artificial Sequence
  Description of Artificial Sequence: Synthetic oligonucleotide
ccucuaucucuucuugggu

SEQ ID NO: 2982083 - RNA, 19 nt, Artificial Sequence
  Description of Artificial Sequence: Synthetic oligonucleotide
acccaccuggguagccagu

SEQ ID NO: 2982084 - RNA, 19 nt, Artificial Sequence
  Description of Artificial Sequence: Synthetic oligonucleotide
ccacuuguuuccagaaaau

SEQ ID NO: 2982085 - RNA, 19 nt, Artificial Sequence
  Description of Artificial Sequence: Synthetic oligonucleotide
uccagccguuuaggcacuu

SEQ ID NO: 2982086 - RNA, 19 nt, Artificial Sequence
  Description of Artificial Sequence: Synthetic oligonucleotide
gggcagcaugccauaagua

SEQ ID NO: 2982087 - RNA, 19 nt, Artificial Sequence
  Description of Artificial Sequence: Synthetic oligonucleotide
cgaaacccaccuggguagc

SEQ ID NO: 2982088 - RNA, 19 nt, Artificial Sequence
  Description of Artificial Sequence: Synthetic oligonucleotide
ccguggcugaggaagcucu

SEQ ID NO: 2982089 - RNA, 19 nt, Artificial Sequence
  Description of Artificial Sequence: Synthetic oligonucleotide
guguacucguccagccguu

SEQ ID NO: 2982090 - RNA, 19 nt, Artificial Sequence
  Description of Artificial Sequence: Synthetic oligonucleotide
guccagccguuuaggcacu

SEQ ID NO: 2982091 - RNA, 19 nt, Artificial Sequence
  Description of Artificial Sequence: Synthetic oligonucleotide
cgccacuggguccuucaga

SEQ ID NO: 2982092 - RNA, 19 nt, Artificial Sequence
  Description of Artificial Sequence: Synthetic oligonucleotide
cccaccuggguagccagua

SEQ ID NO: 2982093 - RNA, 19 nt, Artificial Sequence
  Description of Artificial Sequence: Synthetic oligonucleotide
ccgguggagcccacacucu

SEQ ID NO: 2982094 - RNA, 19 nt, Artificial Sequence
  Description of Artificial Sequence: Synthetic oligonucleotide
ccagucucuugcuguuguu

SEQ ID NO: 2982095 - RNA, 19 nt, Artificial Sequence
  Description of Artificial Sequence: Synthetic oligonucleotide
ccgcuuuccuacagccgau

SEQ ID NO: 2982096 - RNA, 19 nt, Artificial Sequence
  Description of Artificial Sequence: Synthetic oligonucleotide
ccaccuggguagccaguau

SEQ ID NO: 2982097 - RNA, 19 nt, Artificial Sequence
  Description of Artificial Sequence: Synthetic oligonucleotide
cgcuuuccuacagccgaua

SEQ ID NO: 2982098 - RNA, 19 nt, Artificial Sequence
  Description of Artificial Sequence: Synthetic oligonucleotide
cgguggagcccacacucuu

SEQ ID NO: 2982099 - RNA, 19 nt, Artificial Sequence
  Description of Artificial Sequence: Synthetic oligonucleotide
caaucgccacuggguccuu

SEQ ID NO: 2982100 - RNA, 19 nt, Artificial Sequence
  Description of Artificial Sequence: Synthetic oligonucleotide
ccagccguuuaggcacuuu

SEQ ID NO: 2982101 - RNA, 19 nt, Artificial Sequence
  Description of Artificial Sequence: Synthetic oligonucleotide
  modified_base (1)..(1): a, c, u, g, unknown or other
naccgguggagcccacacu

SEQ ID NO: 2982102 - RNA, 19 nt, Artificial Sequence
  Description of Artificial Sequence: Synthetic oligonucleotide
aaacaaacaaaauagaccu

SEQ ID NO: 2982103 - RNA, 19 nt, Artificial Sequence
  Description of Artificial Sequence: Synthetic oligonucleotide
ucuaccaucuauuaguugg

SEQ ID NO: 2982104 - RNA, 19 nt, Artificial Sequence
  Description of Artificial Sequence: Synthetic oligonucleotide
aaaucuaccaucuauuagu

SEQ ID NO: 2982105 - RNA, 19 nt, Artificial Sequence
  Description of Artificial Sequence: Synthetic oligonucleotide
uuuacuuccugucagagca

SEQ ID NO: 2982106 - RNA, 19 nt, Artificial Sequence
  Description of Artificial Sequence: Synthetic oligonucleotide
aauagaccucauuaaaauc

SEQ ID NO: 2982107 - RNA, 19 nt, Artificial Sequence
  Description of Artificial Sequence: Synthetic oligonucleotide
uuuucuuguaaccuggcag

SEQ ID NO: 2982108 - RNA, 19 nt, Artificial Sequence
  Description of Artificial Sequence: Synthetic oligonucleotide
uauaaauuuguuauucugu

SEQ ID NO: 2982109 - RNA, 19 nt, Artificial Sequence
  Description of Artificial Sequence: Synthetic oligonucleotide
aaaaucuaccaucuauuag

SEQ ID NO: 2982110 - RNA, 19 nt, Artificial Sequence
  Description of Artificial Sequence: Synthetic oligonucleotide
aaauuuguuauucuguuuu

SEQ ID NO: 2982111 - RNA, 19 nt, Artificial Sequence
  Description of Artificial Sequence: Synthetic oligonucleotide
cuuuuaaaggacaauggag

SEQ ID NO: 2982112 - RNA, 19 nt, Artificial Sequence
  Description of Artificial Sequence: Synthetic oligonucleotide
aaauagaccucauuaaaau

SEQ ID NO: 2982113 - RNA, 19 nt, Artificial Sequence
  Description of Artificial Sequence: Synthetic oligonucleotide
uuucuuguaaccuggcagg

SEQ ID NO: 2982114 - RNA, 19 nt, Artificial Sequence
  Description of Artificial Sequence: Synthetic oligonucleotide
  modified_base (15)..(15): a, c, u, g, unknown or other
acauauacaucaganaccg

SEQ ID NO: 2982115 - RNA, 19 nt, Artificial Sequence
  Description of Artificial Sequence: Synthetic oligonucleotide
  modified_base (12)..(12): a, c, u, g, unknown or other
uauacaucaganaccguag

SEQ ID NO: 2982116 - RNA, 19 nt, Artificial Sequence
  Description of Artificial Sequence: Synthetic oligonucleotide
uuaguugguccuuagacug

SEQ ID NO: 2982117 - RNA, 19 nt, Artificial Sequence
  Description of Artificial Sequence: Synthetic oligonucleotide
auuaaaaucuaccaucuau

SEQ ID NO: 2982118 - RNA, 19 nt, Artificial Sequence
  Description of Artificial Sequence: Synthetic oligonucleotide
acucaguuuuccuaguggc

SEQ ID NO: 2982119 - RNA, 19 nt, Artificial Sequence
  Description of Artificial Sequence: Synthetic oligonucleotide
uucauagucacccugccac

SEQ ID NO: 2982120 - RNA, 19 nt, Artificial Sequence
  Description of Artificial Sequence: Synthetic oligonucleotide
ucauuaaaaucuaccaucu

SEQ ID NO: 2982121 - RNA, 19 nt, Artificial Sequence
  Description of Artificial Sequence: Synthetic oligonucleotide
cucauuaaaaucuaccauc

SEQ ID NO: 2982122 - RNA, 19 nt, Artificial Sequence
  Description of Artificial Sequence: Synthetic oligonucleotide
uucaggaggcuuuuaaagg

SEQ ID NO: 2982123 - RNA, 19 nt, Artificial Sequence
  Description of Artificial Sequence: Synthetic oligonucleotide
aauggagcccacucucucc

SEQ ID NO: 2982124 - RNA, 19 nt, Artificial Sequence
  Description of Artificial Sequence: Synthetic oligonucleotide
uuaaaaucuaccaucuauu

SEQ ID NO: 2982125 - RNA, 19 nt, Artificial Sequence
  Description of Artificial Sequence: Synthetic oligonucleotide
accaucuauuaguuggucc

SEQ ID NO: 2982126 - RNA, 19 nt, Artificial Sequence
  Description of Artificial Sequence: Synthetic oligonucleotide
uccucauugcuuauuauac

SEQ ID NO: 2982127 - RNA, 19 nt, Artificial Sequence
  Description of Artificial Sequence: Synthetic oligonucleotide
aguaacuccccauucuggg

SEQ ID NO: 2982128 - RNA, 19 nt, Artificial Sequence
  Description of Artificial Sequence: Synthetic oligonucleotide
auucugggaguucauaguc

SEQ ID NO: 2982129 - RNA, 19 nt, Artificial Sequence
  Description of Artificial Sequence: Synthetic oligonucleotide
agacugagcacuuucagga

SEQ ID NO: 2982130 - RNA, 19 nt, Artificial Sequence
  Description of Artificial Sequence: Synthetic oligonucleotide
uuuggagaggcgcacagcu

SEQ ID NO: 2982131 - RNA, 19 nt, Artificial Sequence
  Description of Artificial Sequence: Synthetic oligonucleotide
uuagacugagcacuuucag

SEQ ID NO: 2982132 - RNA, 19 nt, Artificial Sequence
  Description of Artificial Sequence: Synthetic oligonucleotide
uagacugagcacuuucagg

SEQ ID NO: 2982133 - RNA, 19 nt, Artificial Sequence
  Description of Artificial Sequence: Synthetic oligonucleotide
auuaguugguccuuagacu

SEQ ID NO: 2982134 - RNA, 19 nt, Artificial Sequence
  Description of Artificial Sequence: Synthetic oligonucleotide
auagaccucauuaaaaucu

SEQ ID NO: 2982135 - RNA, 19 nt, Artificial Sequence
  Description of Artificial Sequence: Synthetic oligonucleotide
accucauuaaaaucuacca

SEQ ID NO: 2982136 - RNA, 19 nt, Artificial Sequence
  Description of Artificial Sequence: Synthetic oligonucleotide
aaaauagaccucauuaaaa

SEQ ID NO: 2982137 - RNA, 19 nt, Artificial Sequence
  Description of Artificial Sequence: Synthetic oligonucleotide
auaaauuuguuauucuguu

SEQ ID NO: 2982138 - RNA, 19 nt, Artificial Sequence
  Description of Artificial Sequence: Synthetic oligonucleotide
uugguuuucacguguuucc

SEQ ID NO: 2982139 - RNA, 19 nt, Artificial Sequence
  Description of Artificial Sequence: Synthetic oligonucleotide
acaaaauagaccucauuaa

SEQ ID NO: 2982140 - RNA, 19 nt, Artificial Sequence
  Description of Artificial Sequence: Synthetic oligonucleotide
ucaggaggcuuuuaaagga

SEQ ID NO: 2982141 - RNA, 19 nt, Artificial Sequence
  Description of Artificial Sequence: Synthetic oligonucleotide
uaaaggacaauggagccca

SEQ ID NO: 2982142 - RNA, 19 nt, Artificial Sequence
  Description of Artificial Sequence: Synthetic oligonucleotide
ucaguuuuccuaguggcag

SEQ ID NO: 2982143 - RNA, 19 nt, Artificial Sequence
  Description of Artificial Sequence: Synthetic oligonucleotide
aguucauagucacccugcc

SEQ ID NO: 2982144 - RNA, 19 nt, Artificial Sequence
  Description of Artificial Sequence: Synthetic oligonucleotide
ucuggugugugugaguggg

SEQ ID NO: 2982145 - RNA, 19 nt, Artificial Sequence
  Description of Artificial Sequence: Synthetic oligonucleotide
uugguccuuagacugagca

SEQ ID NO: 2982146 - RNA, 19 nt, Artificial Sequence
  Description of Artificial Sequence: Synthetic oligonucleotide
ugggaguucauagucaccc

SEQ ID NO: 2982147 - RNA, 19 nt, Artificial Sequence
  Description of Artificial Sequence: Synthetic oligonucleotide
aggacaauggagcccacuc

SEQ ID NO: 2982148 - RNA, 19 nt, Artificial Sequence
  Description of Artificial Sequence: Synthetic oligonucleotide
uggagaggcgcacagcucc

SEQ ID NO: 2982149 - RNA, 19 nt, Artificial Sequence
  Description of Artificial Sequence: Synthetic oligonucleotide
uaaaaucuaccaucuauua

SEQ ID NO: 2982150 - RNA, 19 nt, Artificial Sequence
  Description of Artificial Sequence: Synthetic oligonucleotide
gaaaggguguauaaauuug

SEQ ID NO: 2982151 - RNA, 19 nt, Artificial Sequence
  Description of Artificial Sequence: Synthetic oligonucleotide
aggucuggaacucuggugu

SEQ ID NO: 2982152 - RNA, 19 nt, Artificial Sequence
  Description of Artificial Sequence: Synthetic oligonucleotide
uuccacucaguuuuccuag

SEQ ID NO: 2982153 - RNA, 19 nt, Artificial Sequence
  Description of Artificial Sequence: Synthetic oligonucleotide
  modified_base (10)..(10): a, c, u, g, unknown or other
uacaucaganaccguagua

SEQ ID NO: 2982154 - RNA, 19 nt, Artificial Sequence
  Description of Artificial Sequence: Synthetic oligonucleotide
ucuauuaguugguccuuag

SEQ ID NO: 2982155 - RNA, 19 nt, Artificial Sequence
  Description of Artificial Sequence: Synthetic oligonucleotide
uuuuccuaguggcaguaac

SEQ ID NO: 2982156 - RNA, 19 nt, Artificial Sequence
  Description of Artificial Sequence: Synthetic oligonucleotide
uuaaaggacaauggagccc

SEQ ID NO: 2982157 - RNA, 19 nt, Artificial Sequence
  Description of Artificial Sequence: Synthetic oligonucleotide
aaaggguguauaaauuugu

SEQ ID NO: 2982158 - RNA, 19 nt, Artificial Sequence
  Description of Artificial Sequence: Synthetic oligonucleotide
uuuccuaguggcaguaacu

SEQ ID NO: 2982159 - RNA, 19 nt, Artificial Sequence
  Description of Artificial Sequence: Synthetic oligonucleotide
ucuuuggagaggcgcacag

SEQ ID NO: 2982160 - RNA, 19 nt, Artificial Sequence
  Description of Artificial Sequence: Synthetic oligonucleotide
uaaccuggcaggaaagggu

SEQ ID NO: 2982161 - RNA, 19 nt, Artificial Sequence
  Description of Artificial Sequence: Synthetic oligonucleotide
aaacaaaauagaccucauu

SEQ ID NO: 2982162 - RNA, 19 nt, Artificial Sequence
  Description of Artificial Sequence: Synthetic oligonucleotide
aacaaacaaaauagaccuc

SEQ ID NO: 2982163 - RNA, 19 nt, Artificial Sequence
  Description of Artificial Sequence: Synthetic oligonucleotide
gaccucauuaaaaucuacc

SEQ ID NO: 2982164 - RNA, 19 nt, Artificial Sequence
  Description of Artificial Sequence: Synthetic oligonucleotide
ucugggaguucauagucac

SEQ ID NO: 2982165 - RNA, 19 nt, Artificial Sequence
  Description of Artificial Sequence: Synthetic oligonucleotide
uguaaccuggcaggaaagg

SEQ ID NO: 2982166 - RNA, 19 nt, Artificial Sequence
  Description of Artificial Sequence: Synthetic oligonucleotide
  modified_base (13)..(13): a, c, u, g, unknown or other
auauacaucaganaccgua

SEQ ID NO: 2982167 - RNA, 19 nt, Artificial Sequence
  Description of Artificial Sequence: Synthetic oligonucleotide
uucacguguuuccacucag

SEQ ID NO: 2982168 - RNA, 19 nt, Artificial Sequence
  Description of Artificial Sequence: Synthetic oligonucleotide
uuguaaccuggcaggaaag

SEQ ID NO: 2982169 - RNA, 19 nt, Artificial Sequence
  Description of Artificial Sequence: Synthetic oligonucleotide
uuugguuuucacguguuuc

SEQ ID NO: 2982170 - RNA, 19 nt, Artificial Sequence
  Description of Artificial Sequence: Synthetic oligonucleotide
cacucaguuuuccuagugg

SEQ ID NO: 2982171 - RNA, 19 nt, Artificial Sequence
  Description of Artificial Sequence: Synthetic oligonucleotide
cuuuacuuccugucagagc

SEQ ID NO: 2982172 - RNA, 19 nt, Artificial Sequence
  Description of Artificial Sequence: Synthetic oligonucleotide
uaaauuuguuauucuguuu

SEQ ID NO: 2982173 - RNA, 19 nt, Artificial Sequence
  Description of Artificial Sequence: Synthetic oligonucleotide
cugagcacuuucaggaggc

SEQ ID NO: 2982174 - RNA, 19 nt, Artificial Sequence
  Description of Artificial Sequence: Synthetic oligonucleotide
caaaauagaccucauuaaa

SEQ ID NO: 2982175 - RNA, 19 nt, Artificial Sequence
  Description of Artificial Sequence: Synthetic oligonucleotide
guaaccuggcaggaaaggg

SEQ ID NO: 2982176 - RNA, 19 nt, Artificial Sequence
  Description of Artificial Sequence: Synthetic oligonucleotide
uucugggaguucauaguca

SEQ ID NO: 2982177 - RNA, 19 nt, Artificial Sequence
  Description of Artificial Sequence: Synthetic oligonucleotide
uuucacguguuuccacuca

SEQ ID NO: 2982178 - RNA, 19 nt, Artificial Sequence
  Description of Artificial Sequence: Synthetic oligonucleotide
caguaacuccccauucugg

SEQ ID NO: 2982179 - RNA, 19 nt, Artificial Sequence
  Description of Artificial Sequence: Synthetic oligonucleotide
ucauugcuuauuauacuuu

SEQ ID NO: 2982180 - RNA, 19 nt, Artificial Sequence
  Description of Artificial Sequence: Synthetic oligonucleotide
uuuccacucaguuuuccua

SEQ ID NO: 2982181 - RNA, 19 nt, Artificial Sequence
  Description of Artificial Sequence: Synthetic oligonucleotide
  modified_base (11)..(11): a, c, u, g, unknown or other
auacaucaganaccguagu

SEQ ID NO: 2982182 - RNA, 19 nt, Artificial Sequence
  Description of Artificial Sequence: Synthetic oligonucleotide
ggcuuuuaaaggacaaugg

SEQ ID NO: 2982183 - RNA, 19 nt, Artificial Sequence
  Description of Artificial Sequence: Synthetic oligonucleotide
gucagagcaggucuggaac

SEQ ID NO: 2982184 - RNA, 19 nt, Artificial Sequence
  Description of Artificial Sequence: Synthetic oligonucleotide
ccuaguggcaguaacuccc

SEQ ID NO: 2982185 - RNA, 19 nt, Artificial Sequence
  Description of Artificial Sequence: Synthetic oligonucleotide
  modified_base (9)..(9): a, c, u, g, unknown or other
acaucaganaccguaguaa

SEQ ID NO: 2982186 - RNA, 19 nt, Artificial Sequence
  Description of Artificial Sequence: Synthetic oligonucleotide
ucagagcaggucuggaacu

SEQ ID NO: 2982187 - RNA, 19 nt, Artificial Sequence
  Description of Artificial Sequence: Synthetic oligonucleotide
gaguucauagucacccugc

SEQ ID NO: 2982188 - RNA, 19 nt, Artificial Sequence
  Description of Artificial Sequence: Synthetic oligonucleotide
uucuccucauugcuuauua

SEQ ID NO: 2982189 - RNA, 19 nt, Artificial Sequence
  Description of Artificial Sequence: Synthetic oligonucleotide
uccagcuuuacuuccuguc

SEQ ID NO: 2982190 - RNA, 19 nt, Artificial Sequence
  Description of Artificial Sequence: Synthetic oligonucleotide
uagaccucauuaaaaucua

SEQ ID NO: 2982191 - RNA, 19 nt, Artificial Sequence
  Description of Artificial Sequence: Synthetic oligonucleotide
uccuaguggcaguaacucc

SEQ ID NO: 2982192 - RNA, 19 nt, Artificial Sequence
  Description of Artificial Sequence: Synthetic oligonucleotide
auagucacccugccaccac

SEQ ID NO: 2982193 - RNA, 19 nt, Artificial Sequence
  Description of Artificial Sequence: Synthetic oligonucleotide
uacuuccugucagagcagg

SEQ ID NO: 2982194 - RNA, 19 nt, Artificial Sequence
  Description of Artificial Sequence: Synthetic oligonucleotide
aggguguauaaauuuguua

SEQ ID NO: 2982195 - RNA, 19 nt, Artificial Sequence
  Description of Artificial Sequence: Synthetic oligonucleotide
gacugagcacuuucaggag

SEQ ID NO: 2982196 - RNA, 19 nt, Artificial Sequence
  Description of Artificial Sequence: Synthetic oligonucleotide
ucauagucacccugccacc

SEQ ID NO: 2982197 - RNA, 19 nt, Artificial Sequence
  Description of Artificial Sequence: Synthetic oligonucleotide
cuuagacugagcacuuuca

SEQ ID NO: 2982198 - RNA, 19 nt, Artificial Sequence
  Description of Artificial Sequence: Synthetic oligonucleotide
uuuucacguguuuccacuc

SEQ ID NO: 2982199 - RNA, 19 nt, Artificial Sequence
  Description of Artificial Sequence: Synthetic oligonucleotide
gcuuuuaaaggacaaugga

SEQ ID NO: 2982200 - RNA, 19 nt, Artificial Sequence
  Description of Artificial Sequence: Synthetic oligonucleotide
uggaacucuggugugugug

SEQ ID NO: 2982201 - RNA, 19 nt, Artificial Sequence
  Description of Artificial Sequence: Synthetic oligonucleotide
cagcuuuacuuccugucag

SEQ ID NO: 2982202 - RNA, 19 nt, Artificial Sequence
  Description of Artificial Sequence: Synthetic oligonucleotide
cuaguggcaguaacucccc

SEQ ID NO: 2982203 - RNA, 19 nt, Artificial Sequence
  Description of Artificial Sequence: Synthetic oligonucleotide
acucuggugugugugagug

SEQ ID NO: 2982204 - RNA, 19 nt, Artificial Sequence
  Description of Artificial Sequence: Synthetic oligonucleotide
cagcuccucacccuggugc

SEQ ID NO: 2982205 - RNA, 19 nt, Artificial Sequence
  Description of Artificial Sequence: Synthetic oligonucleotide
uuacuuccugucagagcag

SEQ ID NO: 2982206 - RNA, 19 nt, Artificial Sequence
  Description of Artificial Sequence: Synthetic oligonucleotide
cuuguaaccuggcaggaaa

SEQ ID NO: 2982207 - RNA, 19 nt, Artificial Sequence
  Description of Artificial Sequence: Synthetic oligonucleotide
aaucuaccaucuauuaguu

SEQ ID NO: 2982208 - RNA, 19 nt, Artificial Sequence
  Description of Artificial Sequence: Synthetic oligonucleotide
ccugccaccaccucuuugg

SEQ ID NO: 2982209 - RNA, 19 nt, Artificial Sequence
  Description of Artificial Sequence: Synthetic oligonucleotide
ggguguauaaauuuguuau

SEQ ID NO: 2982210 - RNA, 19 nt, Artificial Sequence
  Description of Artificial Sequence: Synthetic oligonucleotide
ucuggaacucuggugugug

SEQ ID NO: 2982211 - RNA, 19 nt, Artificial Sequence
  Description of Artificial Sequence: Synthetic oligonucleotide
uggugugugugaguggggc

SEQ ID NO: 2982212 - RNA, 19 nt, Artificial Sequence
  Description of Artificial Sequence: Synthetic oligonucleotide
ugucagagcaggucuggaa

SEQ ID NO: 2982213 - RNA, 19 nt, Artificial Sequence
  Description of Artificial Sequence: Synthetic oligonucleotide
  modified_base (8)..(8): a, c, u, g, unknown or other
caucaganaccguaguaaa

SEQ ID NO: 2982214 - RNA, 19 nt, Artificial Sequence
  Description of Artificial Sequence: Synthetic oligonucleotide
aucuaccaucuauuaguug

SEQ ID NO: 2982215 - RNA, 19 nt, Artificial Sequence
  Description of Artificial Sequence: Synthetic oligonucleotide
uaguugguccuuagacuga

SEQ ID NO: 2982216 - RNA, 19 nt, Artificial Sequence
  Description of Artificial Sequence: Synthetic oligonucleotide
aguugguccuuagacugag

SEQ ID NO: 2982217 - RNA, 19 nt, Artificial Sequence
  Description of Artificial Sequence: Synthetic oligonucleotide
ugguccuuagacugagcac

SEQ ID NO: 2982218 - RNA, 19 nt, Artificial Sequence
  Description of Artificial Sequence: Synthetic oligonucleotide
ucacccugccaccaccucu

SEQ ID NO: 2982219 - RNA, 19 nt, Artificial Sequence
  Description of Artificial Sequence: Synthetic oligonucleotide
caggaggcuuuuaaaggac

SEQ ID NO: 2982220 - RNA, 19 nt, Artificial Sequence
  Description of Artificial Sequence: Synthetic oligonucleotide
uccaccuccaguucuccuc

SEQ ID NO: 2982221 - RNA, 19 nt, Artificial Sequence
  Description of Artificial Sequence: Synthetic oligonucleotide
uagucacccugccaccacc

SEQ ID NO: 2982222 - RNA, 19 nt, Artificial Sequence
  Description of Artificial Sequence: Synthetic oligonucleotide
aacucuggugugugugagu

SEQ ID NO: 2982223 - RNA, 19 nt, Artificial Sequence
  Description of Artificial Sequence: Synthetic oligonucleotide
agaccucauuaaaaucuac

SEQ ID NO: 2982224 - RNA, 19 nt, Artificial Sequence
  Description of Artificial Sequence: Synthetic oligonucleotide
gaacucuggugugugugag

SEQ ID NO: 2982225 - RNA, 19 nt, Artificial Sequence
  Description of Artificial Sequence: Synthetic oligonucleotide
uccugucagagcaggucug

SEQ ID NO: 2982226 - RNA, 19 nt, Artificial Sequence
  Description of Artificial Sequence: Synthetic oligonucleotide
gugugaguggggcaaggug

SEQ ID NO: 2982227 - RNA, 19 nt, Artificial Sequence
  Description of Artificial Sequence: Synthetic oligonucleotide
ccauucugggaguucauag

SEQ ID NO: 2982228 - RNA, 19 nt, Artificial Sequence
  Description of Artificial Sequence: Synthetic oligonucleotide
agcuuuacuuccugucaga

SEQ ID NO: 2982229 - RNA, 19 nt, Artificial Sequence
  Description of Artificial Sequence: Synthetic oligonucleotide
ggaguucauagucacccug

SEQ ID NO: 2982230 - RNA, 19 nt, Artificial Sequence
  Description of Artificial Sequence: Synthetic oligonucleotide
auggagcccacucucucca

SEQ ID NO: 2982231 - RNA, 19 nt, Artificial Sequence
  Description of Artificial Sequence: Synthetic oligonucleotide
caggucuggaacucuggug

SEQ ID NO: 2982232 - RNA, 19 nt, Artificial Sequence
  Description of Artificial Sequence: Synthetic oligonucleotide
ugguuuucacguguuucca

SEQ ID NO: 2982233 - RNA, 19 nt, Artificial Sequence
  Description of Artificial Sequence: Synthetic oligonucleotide
ucacguguuuccacucagu

SEQ ID NO: 2982234 - RNA, 19 nt, Artificial Sequence
  Description of Artificial Sequence: Synthetic oligonucleotide
aguggcaguaacuccccau

SEQ ID NO: 2982235 - RNA, 19 nt, Artificial Sequence
  Description of Artificial Sequence: Synthetic oligonucleotide
aaggguguauaaauuuguu

SEQ ID NO: 2982236 - RNA, 19 nt, Artificial Sequence
  Description of Artificial Sequence: Synthetic oligonucleotide
ugccuccagcuuuacuucc

SEQ ID NO: 2982237 - RNA, 19 nt, Artificial Sequence
  Description of Artificial Sequence: Synthetic oligonucleotide
guuuucacguguuuccacu

SEQ ID NO: 2982238 - RNA, 19 nt, Artificial Sequence
  Description of Artificial Sequence: Synthetic oligonucleotide
gcaguaacuccccauucug

SEQ ID NO: 2982239 - RNA, 19 nt, Artificial Sequence
  Description of Artificial Sequence: Synthetic oligonucleotide
uggcaguaacuccccauuc

SEQ ID NO: 2982240 - RNA, 19 nt, Artificial Sequence
  Description of Artificial Sequence: Synthetic oligonucleotide
  modified_base (7)..(7): a, c, u, g, unknown or other
aucaganaccguaguaaaa

SEQ ID NO: 2982241 - RNA, 19 nt, Artificial Sequence
  Description of Artificial Sequence: Synthetic oligonucleotide
ucacccuggugccuccagc

SEQ ID NO: 2982242 - RNA, 19 nt, Artificial Sequence
  Description of Artificial Sequence: Synthetic oligonucleotide
caccucuuuggagaggcgc

SEQ ID NO: 2982243 - RNA, 19 nt, Artificial Sequence
  Description of Artificial Sequence: Synthetic oligonucleotide
cuauuaguugguccuuaga

SEQ ID NO: 2982244 - RNA, 19 nt, Artificial Sequence
  Description of Artificial Sequence: Synthetic oligonucleotide
cuccucauugcuuauuaua

SEQ ID NO: 2982245 - RNA, 19 nt, Artificial Sequence
  Description of Artificial Sequence: Synthetic oligonucleotide
guaacuccccauucuggga

SEQ ID NO: 2982246 - RNA, 19 nt, Artificial Sequence
  Description of Artificial Sequence: Synthetic oligonucleotide
cugggaguucauagucacc

SEQ ID NO: 2982247 - RNA, 19 nt, Artificial Sequence
  Description of Artificial Sequence: Synthetic oligonucleotide
cucauugcuuauuauacuu

SEQ ID NO: 2982248 - RNA, 19 nt, Artificial Sequence
  Description of Artificial Sequence: Synthetic oligonucleotide
aaggacaauggagcccacu

SEQ ID NO: 2982249 - RNA, 19 nt, Artificial Sequence
  Description of Artificial Sequence: Synthetic oligonucleotide
acguguuuccacucaguuu

SEQ ID NO: 2982250 - RNA, 19 nt, Artificial Sequence
  Description of Artificial Sequence: Synthetic oligonucleotide
uccacucaguuuuccuagu

SEQ ID NO: 2982251 - RNA, 19 nt, Artificial Sequence
  Description of Artificial Sequence: Synthetic oligonucleotide
ucuccucauugcuuauuau

SEQ ID NO: 2982252 - RNA, 19 nt, Artificial Sequence
  Description of Artificial Sequence: Synthetic oligonucleotide
caauggagcccacucucuc

SEQ ID NO: 2982253 - RNA, 19 nt, Artificial Sequence
  Description of Artificial Sequence: Synthetic oligonucleotide
gccaccaccucuuuggaga

SEQ ID NO: 2982254 - RNA, 19 nt, Artificial Sequence
  Description of Artificial Sequence: Synthetic oligonucleotide
caggaaaggguguauaaau

SEQ ID NO: 2982255 - RNA, 19 nt, Artificial Sequence
  Description of Artificial Sequence: Synthetic oligonucleotide
ucuuguaaccuggcaggaa

SEQ ID NO: 2982256 - RNA, 19 nt, Artificial Sequence
  Description of Artificial Sequence: Synthetic oligonucleotide
ugugugaguggggcaaggu

SEQ ID NO: 2982257 - RNA, 19 nt, Artificial Sequence
  Description of Artificial Sequence: Synthetic oligonucleotide
uuggagaggcgcacagcuc

SEQ ID NO: 2982258 - RNA, 19 nt, Artificial Sequence
  Description of Artificial Sequence: Synthetic oligonucleotide
aaaggacaauggagcccac

SEQ ID NO: 2982259 - RNA, 19 nt, Artificial Sequence
  Description of Artificial Sequence: Synthetic oligonucleotide
aggaaaggguguauaaauu

SEQ ID NO: 2982260 - RNA, 19 nt, Artificial Sequence
  Description of Artificial Sequence: Synthetic oligonucleotide
agcacuuucaggaggcuuu

SEQ ID NO: 2982261 - RNA, 19 nt, Artificial Sequence
  Description of Artificial Sequence: Synthetic oligonucleotide
gcuuuacuuccugucagag

SEQ ID NO: 2982262 - RNA, 19 nt, Artificial Sequence
  Description of Artificial Sequence: Synthetic oligonucleotide
gguuuucacguguuuccac

SEQ ID NO: 2982263 - RNA, 19 nt, Artificial Sequence
  Description of Artificial Sequence: Synthetic oligonucleotide
agaggcgcacagcuccuca

SEQ ID NO: 2982264 - RNA, 19 nt, Artificial Sequence
  Description of Artificial Sequence: Synthetic oligonucleotide
agcaggucuggaacucugg

SEQ ID NO: 2982265 - RNA, 19 nt, Artificial Sequence
  Description of Artificial Sequence: Synthetic oligonucleotide
ggaaaggguguauaaauuu

SEQ ID NO: 2982266 - RNA, 19 nt, Artificial Sequence
  Description of Artificial Sequence: Synthetic oligonucleotide
uaguggcaguaacucccca

SEQ ID NO: 2982267 - RNA, 19 nt, Artificial Sequence
  Description of Artificial Sequence: Synthetic oligonucleotide
cauugcuuauuauacuuuu

SEQ ID NO: 2982268 - RNA, 19 nt, Artificial Sequence
  Description of Artificial Sequence: Synthetic oligonucleotide
uaccaucuauuaguugguc

SEQ ID NO: 2982269 - RNA, 19 nt, Artificial Sequence
  Description of Artificial Sequence: Synthetic oligonucleotide
caguucuccucauugcuua

SEQ ID NO: 2982270 - RNA, 19 nt, Artificial Sequence
  Description of Artificial Sequence: Synthetic oligonucleotide
gugccuccagcuuuacuuc

SEQ ID NO: 2982271 - RNA, 19 nt, Artificial Sequence
  Description of Artificial Sequence: Synthetic oligonucleotide
cauucugggaguucauagu

SEQ ID NO: 2982272 - RNA, 19 nt, Artificial Sequence
  Description of Artificial Sequence: Synthetic oligonucleotide
gguccuuagacugagcacu

SEQ ID NO: 2982273 - RNA, 19 nt, Artificial Sequence
  Description of Artificial Sequence: Synthetic oligonucleotide
cucuccaccuccaguucuc

SEQ ID NO: 2982274 - RNA, 19 nt, Artificial Sequence
  Description of Artificial Sequence: Synthetic oligonucleotide
gagcaggucuggaacucug

SEQ ID NO: 2982275 - RNA, 19 nt, Artificial Sequence
  Description of Artificial Sequence: Synthetic oligonucleotide
acaauggagcccacucucu

SEQ ID NO: 2982276 - RNA, 19 nt, Artificial Sequence
  Description of Artificial Sequence: Synthetic oligonucleotide
ccuuagacugagcacuuuc

SEQ ID NO: 2982277 - RNA, 19 nt, Artificial Sequence
  Description of Artificial Sequence: Synthetic oligonucleotide
aguucuccucauugcuuau

SEQ ID NO: 2982278 - RNA, 19 nt, Artificial Sequence
  Description of Artificial Sequence: Synthetic oligonucleotide
ucuccaccuccaguucucc

SEQ ID NO: 2982279 - RNA, 19 nt, Artificial Sequence
  Description of Artificial Sequence: Synthetic oligonucleotide
cauuaaaaucuaccaucua

SEQ ID NO: 2982280 - RNA, 19 nt, Artificial Sequence
  Description of Artificial Sequence: Synthetic oligonucleotide
gaggcgcacagcuccucac

SEQ ID NO: 2982281 - RNA, 19 nt, Artificial Sequence
  Description of Artificial Sequence: Synthetic oligonucleotide
aucuauuaguugguccuua

SEQ ID NO: 2982282 - RNA, 19 nt, Artificial Sequence
  Description of Artificial Sequence: Synthetic oligonucleotide
aguuuuccuaguggcagua

SEQ ID NO: 2982283 - RNA, 19 nt, Artificial Sequence
  Description of Artificial Sequence: Synthetic oligonucleotide
ggugccuccagcuuuacuu

SEQ ID NO: 2982284 - RNA, 19 nt, Artificial Sequence
  Description of Artificial Sequence: Synthetic oligonucleotide
accucuuuggagaggcgca

SEQ ID NO: 2982285 - RNA, 19 nt, Artificial Sequence
  Description of Artificial Sequence: Synthetic oligonucleotide
agcccacucucuccaccuc

SEQ ID NO: 2982286 - RNA, 19 nt, Artificial Sequence
  Description of Artificial Sequence: Synthetic oligonucleotide
ggaacucugguguguguga

SEQ ID NO: 2982287 - RNA, 19 nt, Artificial Sequence
  Description of Artificial Sequence: Synthetic oligonucleotide
gugugugaguggggcaagg

SEQ ID NO: 2982288 - RNA, 19 nt, Artificial Sequence
  Description of Artificial Sequence: Synthetic oligonucleotide
agagcaggucuggaacucu

SEQ ID NO: 2982289 - RNA, 19 nt, Artificial Sequence
  Description of Artificial Sequence: Synthetic oligonucleotide
uggugccuccagcuuuacu

SEQ ID NO: 2982290 - RNA, 19 nt, Artificial Sequence
  Description of Artificial Sequence: Synthetic oligonucleotide
cuaccaucuauuaguuggu

SEQ ID NO: 2982291 - RNA, 19 nt, Artificial Sequence
  Description of Artificial Sequence: Synthetic oligonucleotide
cauagucacccugccacca

SEQ ID NO: 2982292 - RNA, 19 nt, Artificial Sequence
  Description of Artificial Sequence: Synthetic oligonucleotide
ccaucuauuaguugguccu

SEQ ID NO: 2982293 - RNA, 19 nt, Artificial Sequence
  Description of Artificial Sequence: Synthetic oligonucleotide
ggcaggaaaggguguauaa

SEQ ID NO: 2982294 - RNA, 19 nt, Artificial Sequence
  Description of Artificial Sequence: Synthetic oligonucleotide
cucucuccaccuccaguuc

SEQ ID NO: 2982295 - RNA, 19 nt, Artificial Sequence
  Description of Artificial Sequence: Synthetic oligonucleotide
  modified_base (14)..(14): a, c, u, g, unknown or other
cauauacaucaganaccgu

SEQ ID NO: 2982296 - RNA, 19 nt, Artificial Sequence
  Description of Artificial Sequence: Synthetic oligonucleotide
uggcaggaaaggguguaua

SEQ ID NO: 2982297 - RNA, 19 nt, Artificial Sequence
  Description of Artificial Sequence: Synthetic oligonucleotide
caaacaaaauagaccucau

SEQ ID NO: 2982298 - RNA, 19 nt, Artificial Sequence
  Description of Artificial Sequence: Synthetic oligonucleotide
gguguauaaauuuguuauu

SEQ ID NO: 2982299 - RNA, 19 nt, Artificial Sequence
  Description of Artificial Sequence: Synthetic oligonucleotide
ggucuggaacucuggugug

SEQ ID NO: 2982300 - RNA, 19 nt, Artificial Sequence
  Description of Artificial Sequence: Synthetic oligonucleotide
cagagcaggucuggaacuc

SEQ ID NO: 2982301 - RNA, 19 nt, Artificial Sequence
  Description of Artificial Sequence: Synthetic oligonucleotide
cucacccuggugccuccag

SEQ ID NO: 2982302 - RNA, 19 nt, Artificial Sequence
  Description of Artificial Sequence: Synthetic oligonucleotide
uccucacccuggugccucc

SEQ ID NO: 2982303 - RNA, 19 nt, Artificial Sequence
  Description of Artificial Sequence: Synthetic oligonucleotide
gagcccacucucuccaccu

SEQ ID NO: 2982304 - RNA, 19 nt, Artificial Sequence
  Description of Artificial Sequence: Synthetic oligonucleotide
guugguccuuagacugagc

SEQ ID NO: 2982305 - RNA, 19 nt, Artificial Sequence
  Description of Artificial Sequence: Synthetic oligonucleotide
agucacccugccaccaccu

SEQ ID NO: 2982306 - RNA, 19 nt, Artificial Sequence
  Description of Artificial Sequence: Synthetic oligonucleotide
ggcaguaacuccccauucu

SEQ ID NO: 2982307 - RNA, 19 nt, Artificial Sequence
  Description of Artificial Sequence: Synthetic oligonucleotide
uggagcccacucucuccac

SEQ ID NO: 2982308 - RNA, 19 nt, Artificial Sequence
  Description of Artificial Sequence: Synthetic oligonucleotide
acuuccugucagagcaggu

SEQ ID NO: 2982309 - RNA, 19 nt, Artificial Sequence
  Description of Artificial Sequence: Synthetic oligonucleotide
ggaggcuuuuaaaggacaa

SEQ ID NO: 2982310 - RNA, 19 nt, Artificial Sequence
  Description of Artificial Sequence: Synthetic oligonucleotide
gaggcuuuuaaaggacaau

SEQ ID NO: 2982311 - RNA, 19 nt, Artificial Sequence
  Description of Artificial Sequence: Synthetic oligonucleotide
gcccacucucuccaccucc

SEQ ID NO: 2982312 - RNA, 19 nt, Artificial Sequence
  Description of Artificial Sequence: Synthetic oligonucleotide
ccacucaguuuuccuagug

SEQ ID NO: 2982313 - RNA, 19 nt, Artificial Sequence
  Description of Artificial Sequence: Synthetic oligonucleotide
guggcaguaacuccccauu

SEQ ID NO: 2982314 - RNA, 19 nt, Artificial Sequence
  Description of Artificial Sequence: Synthetic oligonucleotide
cguguuuccacucaguuuu

SEQ ID NO: 2982315 - RNA, 19 nt, Artificial Sequence
  Description of Artificial Sequence: Synthetic oligonucleotide
gcaggaaaggguguauaaa

SEQ ID NO: 2982316 - RNA, 19 nt, Artificial Sequence
  Description of Artificial Sequence: Synthetic oligonucleotide
uccuuagacugagcacuuu

SEQ ID NO: 2982317 - RNA, 19 nt, Artificial Sequence
  Description of Artificial Sequence: Synthetic oligonucleotide
ggacaauggagcccacucu

SEQ ID NO: 2982318 - RNA, 19 nt, Artificial Sequence
  Description of Artificial Sequence: Synthetic oligonucleotide
cuccucacccuggugccuc

SEQ ID NO: 2982319 - RNA, 19 nt, Artificial Sequence
  Description of Artificial Sequence: Synthetic oligonucleotide
caccaccucuuuggagagg

SEQ ID NO: 2982320 - RNA, 19 nt, Artificial Sequence
  Description of Artificial Sequence: Synthetic oligonucleotide
ccucauuaaaaucuaccau

SEQ ID NO: 2982321 - RNA, 19 nt, Artificial Sequence
  Description of Artificial Sequence: Synthetic oligonucleotide
ugaguggggcaagguggaa

SEQ ID NO: 2982322 - RNA, 19 nt, Artificial Sequence
  Description of Artificial Sequence: Synthetic oligonucleotide
cacguguuuccacucaguu

SEQ ID NO: 2982323 - RNA, 19 nt, Artificial Sequence
  Description of Artificial Sequence: Synthetic oligonucleotide
guuuuccuaguggcaguaa

SEQ ID NO: 2982324 - RNA, 19 nt, Artificial Sequence
  Description of Artificial Sequence: Synthetic oligonucleotide
cucuuuggagaggcgcaca

SEQ ID NO: 2982325 - RNA, 19 nt, Artificial Sequence
  Description of Artificial Sequence: Synthetic oligonucleotide
caguuuuccuaguggcagu

SEQ ID NO: 2982326 - RNA, 19 nt, Artificial Sequence
  Description of Artificial Sequence: Synthetic oligonucleotide
guguuuccacucaguuuuc

SEQ ID NO: 2982327 - RNA, 19 nt, Artificial Sequence
  Description of Artificial Sequence: Synthetic oligonucleotide
acccuggugccuccagcuu

SEQ ID NO: 2982328 - RNA, 19 nt, Artificial Sequence
  Description of Artificial Sequence: Synthetic oligonucleotide
cugccaccaccucuuugga

SEQ ID NO: 2982329 - RNA, 19 nt, Artificial Sequence
  Description of Artificial Sequence: Synthetic oligonucleotide
gagaggcgcacagcuccuc

SEQ ID NO: 2982330 - RNA, 19 nt, Artificial Sequence
  Description of Artificial Sequence: Synthetic oligonucleotide
ccucauugcuuauuauacu

SEQ ID NO: 2982331 - RNA, 19 nt, Artificial Sequence
  Description of Artificial Sequence: Synthetic oligonucleotide
cacucucuccaccuccagu

SEQ ID NO: 2982332 - RNA, 19 nt, Artificial Sequence
  Description of Artificial Sequence: Synthetic oligonucleotide
gcaggucuggaacucuggu

SEQ ID NO: 2982333 - RNA, 19 nt, Artificial Sequence
  Description of Artificial Sequence: Synthetic oligonucleotide
gucuggaacucuggugugu

SEQ ID NO: 2982334 - RNA, 19 nt, Artificial Sequence
  Description of Artificial Sequence: Synthetic oligonucleotide
ccaccucuuuggagaggcg

SEQ ID NO: 2982335 - RNA, 19 nt, Artificial Sequence
  Description of Artificial Sequence: Synthetic oligonucleotide
ccucuuuggagaggcgcac

SEQ ID NO: 2982336 - RNA, 19 nt, Artificial Sequence
  Description of Artificial Sequence: Synthetic oligonucleotide
gagcacuuucaggaggcuu

SEQ ID NO: 2982337 - RNA, 19 nt, Artificial Sequence
  Description of Artificial Sequence: Synthetic oligonucleotide
ccaccuccaguucuccuca

SEQ ID NO: 2982338 - RNA, 19 nt, Artificial Sequence
  Description of Artificial Sequence: Synthetic oligonucleotide
cuggaacucuggugugugu

SEQ ID NO: 2982339 - RNA, 19 nt, Artificial Sequence
  Description of Artificial Sequence: Synthetic oligonucleotide
cacagcuccucacccuggu

SEQ ID NO: 2982340 - RNA, 19 nt, Artificial Sequence
  Description of Artificial Sequence: Synthetic oligonucleotide
caucuauuaguugguccuu

SEQ ID NO: 2982341 - RNA, 19 nt, Artificial Sequence
  Description of Artificial Sequence: Synthetic oligonucleotide
ccacucucuccaccuccag

SEQ ID NO: 2982342 - RNA, 19 nt, Artificial Sequence
  Description of Artificial Sequence: Synthetic oligonucleotide
cacccugccaccaccucuu

SEQ ID NO: 2982343 - RNA, 19 nt, Artificial Sequence
  Description of Artificial Sequence: Synthetic oligonucleotide
cuggugccuccagcuuuac

SEQ ID NO: 2982344 - RNA, 19 nt, Artificial Sequence
  Description of Artificial Sequence: Synthetic oligonucleotide
cccacucucuccaccucca

SEQ ID NO: 2982345 - RNA, 19 nt, Artificial Sequence
  Description of Artificial Sequence: Synthetic oligonucleotide
guucuccucauugcuuauu

SEQ ID NO: 2982346 - RNA, 19 nt, Artificial Sequence
  Description of Artificial Sequence: Synthetic oligonucleotide
cccugccaccaccucuuug

SEQ ID NO: 2982347 - RNA, 19 nt, Artificial Sequence
  Description of Artificial Sequence: Synthetic oligonucleotide
guccuuagacugagcacuu

SEQ ID NO: 2982348 - RNA, 19 nt, Artificial Sequence
  Description of Artificial Sequence: Synthetic oligonucleotide
ccuggugccuccagcuuua

SEQ ID NO: 2982349 - RNA, 19 nt, Artificial Sequence
  Description of Artificial Sequence: Synthetic oligonucleotide
cacuuucaggaggcuuuua

SEQ ID NO: 2982350 - RNA, 19 nt, Artificial Sequence
  Description of Artificial Sequence: Synthetic oligonucleotide
cuggcaggaaaggguguau

SEQ ID NO: 2982351 - RNA, 19 nt, Artificial Sequence
  Description of Artificial Sequence: Synthetic oligonucleotide
ccuggcaggaaagggugua

SEQ ID NO: 2982352 - RNA, 19 nt, Artificial Sequence
  Description of Artificial Sequence: Synthetic oligonucleotide
ggagaggcgcacagcuccu

SEQ ID NO: 2982353 - RNA, 19 nt, Artificial Sequence
  Description of Artificial Sequence: Synthetic oligonucleotide
gcacuuucaggaggcuuuu

SEQ ID NO: 2982354 - RNA, 19 nt, Artificial Sequence
  Description of Artificial Sequence: Synthetic oligonucleotide
caccuccaguucuccucau

SEQ ID NO: 2982355 - RNA, 19 nt, Artificial Sequence
  Description of Artificial Sequence: Synthetic oligonucleotide
cccuggugccuccagcuuu

SEQ ID NO: 2982356 - RNA, 19 nt, Artificial Sequence
  Description of Artificial Sequence: Synthetic oligonucleotide
gcuccucacccuggugccu

SEQ ID NO: 2982357 - RNA, 19 nt, Artificial Sequence
  Description of Artificial Sequence: Synthetic oligonucleotide
ccucacccuggugccucca

SEQ ID NO: 2982358 - RNA, 19 nt, Artificial Sequence
  Description of Artificial Sequence: Synthetic oligonucleotide
ccccauucugggaguucau

SEQ ID NO: 2982359 - RNA, 19 nt, Artificial Sequence
  Description of Artificial Sequence: Synthetic oligonucleotide
aguagaaugaguuugcugg

SEQ ID NO: 2982360 - RNA, 19 nt, Artificial Sequence
  Description of Artificial Sequence: Synthetic oligonucleotide
gauguuaucucagucaccg

SEQ ID NO: 2982361 - RNA, 19 nt, Artificial Sequence
  Description of Artificial Sequence: Synthetic oligonucleotide
ucaacaauuucauugcccc

SEQ ID NO: 2982362 - RNA, 19 nt, Artificial Sequence
  Description of Artificial Sequence: Synthetic oligonucleotide
auuguuagcaggcugaaca

SEQ ID NO: 2982363 - RNA, 19 nt, Artificial Sequence
  Description of Artificial Sequence: Synthetic oligonucleotide
auuucauugccccugcugg

SEQ ID NO: 2982364 - RNA, 19 nt, Artificial Sequence
  Description of Artificial Sequence: Synthetic oligonucleotide
gaggcaaagacuucaggcg

SEQ ID NO: 2982365 - RNA, 19 nt, Artificial Sequence
  Description of Artificial Sequence: Synthetic oligonucleotide
uguuaucucagucaccgug

SEQ ID NO: 2982366 - RNA, 19 nt, Artificial Sequence
  Description of Artificial Sequence: Synthetic oligonucleotide
aggauguuaucucagucac

SEQ ID NO: 2982367 - RNA, 19 nt, Artificial Sequence
  Description of Artificial Sequence: Synthetic oligonucleotide
aauuucauugccccugcug

SEQ ID NO: 2982368 - RNA, 19 nt, Artificial Sequence
  Description of Artificial Sequence: Synthetic oligonucleotide
aacgaguucugcucuuggc

SEQ ID NO: 2982369 - RNA, 19 nt, Artificial Sequence
  Description of Artificial Sequence: Synthetic oligonucleotide
  modified_base (2)..(2): a, c, u, g, unknown or other
anaugaggauguuaucuca

SEQ ID NO: 2982370 - RNA, 19 nt, Artificial Sequence
  Description of Artificial Sequence: Synthetic oligonucleotide
ugaacacggacauaacgag

SEQ ID NO: 2982371 - RNA, 19 nt, Artificial Sequence
  Description of Artificial Sequence: Synthetic oligonucleotide
gcugucaacaauuucauug

SEQ ID NO: 2982372 - RNA, 19 nt, Artificial Sequence
  Description of Artificial Sequence: Synthetic oligonucleotide
aaggcugucaacaauuuca

SEQ ID NO: 2982373 - RNA, 19 nt, Artificial Sequence
  Description of Artificial Sequence: Synthetic oligonucleotide
aaaggcugucaacaauuuc

SEQ ID NO: 2982374 - RNA, 19 nt, Artificial Sequence
  Description of Artificial Sequence: Synthetic oligonucleotide
aacaauuucauugccccug

SEQ ID NO: 2982375 - RNA, 19 nt, Artificial Sequence
  Description of Artificial Sequence: Synthetic oligonucleotide
ugucucuggaacugaaagg

SEQ ID NO: 2982376 - RNA, 19 nt, Artificial Sequence
  Description of Artificial Sequence: Synthetic oligonucleotide
aacugaaaggcugucaaca

SEQ ID NO: 2982377 - RNA, 19 nt, Artificial Sequence
  Description of Artificial Sequence: Synthetic oligonucleotide
  modified_base (3)..(3): a, c, u, g, unknown or other
ganaugaggauguuaucuc

SEQ ID NO: 2982378 - RNA, 19 nt, Artificial Sequence
  Description of Artificial Sequence: Synthetic oligonucleotide
acaauuucauugccccugc

SEQ ID NO: 2982379 - RNA, 19 nt, Artificial Sequence
  Description of Artificial Sequence: Synthetic oligonucleotide
gucacuuuggcaaugggag

SEQ ID NO: 2982380 - RNA, 19 nt, Artificial Sequence
  Description of Artificial Sequence: Synthetic oligonucleotide
gaaaccucgcaguccagcg

SEQ ID NO: 2982381 - RNA, 19 nt, Artificial Sequence
  Description of Artificial Sequence: Synthetic oligonucleotide
uguccuguggggaugguug

SEQ ID NO: 2982382 - RNA, 19 nt, Artificial Sequence
  Description of Artificial Sequence: Synthetic oligonucleotide
aggaugaccacagggaaac

SEQ ID NO: 2982383 - RNA, 19 nt, Artificial Sequence
  Description of Artificial Sequence: Synthetic oligonucleotide
ugaaaggcugucaacaauu

SEQ ID NO: 2982384 - RNA, 19 nt, Artificial Sequence
  Description of Artificial Sequence: Synthetic oligonucleotide
acgaaggucacuuuggcaa

SEQ ID NO: 2982385 - RNA, 19 nt, Artificial Sequence
  Description of Artificial Sequence: Synthetic oligonucleotide
gaugguugcaaaagguuag

SEQ ID NO: 2982386 - RNA, 19 nt, Artificial Sequence
  Description of Artificial Sequence: Synthetic oligonucleotide
aaagacuucaggcgugggu

SEQ ID NO: 2982387 - RNA, 19 nt, Artificial Sequence
  Description of Artificial Sequence: Synthetic oligonucleotide
gacauaacgaguucugcuc

SEQ ID NO: 2982388 - RNA, 19 nt, Artificial Sequence
  Description of Artificial Sequence: Synthetic oligonucleotide
gaagguggagcaaaggccc

SEQ ID NO: 2982389 - RNA, 19 nt, Artificial Sequence
  Description of Artificial Sequence: Synthetic oligonucleotide
ugguccuccacacaauccc

SEQ ID NO: 2982390 - RNA, 19 nt, Artificial Sequence
  Description of Artificial Sequence: Synthetic oligonucleotide
uggggaugguugcaaaagg

SEQ ID NO: 2982391 - RNA, 19 nt, Artificial Sequence
  Description of Artificial Sequence: Synthetic oligonucleotide
gugucucuggaacugaaag

SEQ ID NO: 2982392 - RNA, 19 nt, Artificial Sequence
  Description of Artificial Sequence: Synthetic oligonucleotide
ccaacuuuccacauggucc

SEQ ID NO: 2982393 - RNA, 19 nt, Artificial Sequence
  Description of Artificial Sequence: Synthetic oligonucleotide
gguugcaaaagguuagggg

SEQ ID NO: 2982394 - RNA, 19 nt, Artificial Sequence
  Description of Artificial Sequence: Synthetic oligonucleotide
aaggcccugggacucugcc

SEQ ID NO: 2982395 - RNA, 19 nt, Artificial Sequence
  Description of Artificial Sequence: Synthetic oligonucleotide
ugaccacagggaaaccucg

SEQ ID NO: 2982396 - RNA, 19 nt, Artificial Sequence
  Description of Artificial Sequence: Synthetic oligonucleotide
guagaaugaguuugcuggg

SEQ ID NO: 2982397 - RNA, 19 nt, Artificial Sequence
  Description of Artificial Sequence: Synthetic oligonucleotide
uuugcuggggugacugggg

SEQ ID NO: 2982398 - RNA, 19 nt, Artificial Sequence
  Description of Artificial Sequence: Synthetic oligonucleotide
aaugaguuugcugggguga

SEQ ID NO: 2982399 - RNA, 19 nt, Artificial Sequence
  Description of Artificial Sequence: Synthetic oligonucleotide
aaaccucgcaguccagcgg

SEQ ID NO: 2982400 - RNA, 19 nt, Artificial Sequence
  Description of Artificial Sequence: Synthetic oligonucleotide
guuagcaggcugaacacgg

SEQ ID NO: 2982401 - RNA, 19 nt, Artificial Sequence
  Description of Artificial Sequence: Synthetic oligonucleotide
gaggauguuaucucaguca

SEQ ID NO: 2982402 - RNA, 19 nt, Artificial Sequence
  Description of Artificial Sequence: Synthetic oligonucleotide
ucaagcucagggcaggggu

SEQ ID NO: 2982403 - RNA, 19 nt, Artificial Sequence
  Description of Artificial Sequence: Synthetic oligonucleotide
gucucuggaacugaaaggc

SEQ ID NO: 2982404 - RNA, 19 nt, Artificial Sequence
  Description of Artificial Sequence: Synthetic oligonucleotide
ugucaacaauuucauugcc

SEQ ID NO: 2982405 - RNA, 19 nt, Artificial Sequence
  Description of Artificial Sequence: Synthetic oligonucleotide
uaguagaaugaguuugcug

SEQ ID NO: 2982406 - RNA, 19 nt, Artificial Sequence
  Description of Artificial Sequence: Synthetic oligonucleotide
ggaggcaaagacuucaggc

SEQ ID NO: 2982407 - RNA, 19 nt, Artificial Sequence
  Description of Artificial Sequence: Synthetic oligonucleotide
uaacgaguucugcucuugg

SEQ ID NO: 2982408 - RNA, 19 nt, Artificial Sequence
  Description of Artificial Sequence: Synthetic oligonucleotide
aaggugaagccgcugucug

SEQ ID NO: 2982409 - RNA, 19 nt, Artificial Sequence
  Description of Artificial Sequence: Synthetic oligonucleotide
cugaacacggacauaacga

SEQ ID NO: 2982410 - RNA, 19 nt, Artificial Sequence
  Description of Artificial Sequence: Synthetic oligonucleotide
ugccguagccgcacgaagg

SEQ ID NO: 2982411 - RNA, 19 nt, Artificial Sequence
  Description of Artificial Sequence: Synthetic oligonucleotide
ucacuuuggcaaugggagg

SEQ ID NO: 2982412 - RNA, 19 nt, Artificial Sequence
  Description of Artificial Sequence: Synthetic oligonucleotide
ugaggauguuaucucaguc

SEQ ID NO: 2982413 - RNA, 19 nt, Artificial Sequence
  Description of Artificial Sequence: Synthetic oligonucleotide
ucuggaacugaaaggcugu

SEQ ID NO: 2982414 - RNA, 19 nt, Artificial Sequence
  Description of Artificial Sequence: Synthetic oligonucleotide
uguuagcaggcugaacacg

SEQ ID NO: 2982415 - RNA, 19 nt, Artificial Sequence
  Description of Artificial Sequence: Synthetic oligonucleotide
acagggaaaccucgcaguc

SEQ ID NO: 2982416 - RNA, 19 nt, Artificial Sequence
  Description of Artificial Sequence: Synthetic oligonucleotide
uagaaugaguuugcugggg

SEQ ID NO: 2982417 - RNA, 19 nt, Artificial Sequence
  Description of Artificial Sequence: Synthetic oligonucleotide
gaaugaguuugcuggggug

SEQ ID NO: 2982418 - RNA, 19 nt, Artificial Sequence
  Description of Artificial Sequence: Synthetic oligonucleotide
gcugaacacggacauaacg

SEQ ID NO: 2982419 - RNA, 19 nt, Artificial Sequence
  Description of Artificial Sequence: Synthetic oligonucleotide
cucuggaacugaaaggcug

SEQ ID NO: 2982420 - RNA, 19 nt, Artificial Sequence
  Description of Artificial Sequence: Synthetic oligonucleotide
uuggcaaugggaggcaaag

SEQ ID NO: 2982421 - RNA, 19 nt, Artificial Sequence
  Description of Artificial Sequence: Synthetic oligonucleotide
aaccucgcaguccagcggu

SEQ ID NO: 2982422 - RNA, 19 nt, Artificial Sequence
  Description of Artificial Sequence: Synthetic oligonucleotide
acauaacgaguucugcucu

SEQ ID NO: 2982423 - RNA, 19 nt, Artificial Sequence
  Description of Artificial Sequence: Synthetic oligonucleotide
aacacggacauaacgaguu

SEQ ID NO: 2982424 - RNA, 19 nt, Artificial Sequence
  Description of Artificial Sequence: Synthetic oligonucleotide
aaggucacuuuggcaaugg

SEQ ID NO: 2982425 - RNA, 19 nt, Artificial Sequence
  Description of Artificial Sequence: Synthetic oligonucleotide
gaggagaaggugaagccgc

SEQ ID NO: 2982426 - RNA, 19 nt, Artificial Sequence
  Description of Artificial Sequence: Synthetic oligonucleotide
  modified_base (10)..(10): a, c, u, g, unknown or other
gacugggganaugaggaug

SEQ ID NO: 2982427 - RNA, 19 nt, Artificial Sequence
  Description of Artificial Sequence: Synthetic oligonucleotide
ucuucaagcucagggcagg

SEQ ID NO: 2982428 - RNA, 19 nt, Artificial Sequence
  Description of Artificial Sequence: Synthetic oligonucleotide
acgaguucugcucuuggcu

SEQ ID NO: 2982429 - RNA, 19 nt, Artificial Sequence
  Description of Artificial Sequence: Synthetic oligonucleotide
aucucagucaccguguccu

SEQ ID NO: 2982430 - RNA, 19 nt, Artificial Sequence
  Description of Artificial Sequence: Synthetic oligonucleotide
agggaaaccucgcagucca

SEQ ID NO: 2982431 - RNA, 19 nt, Artificial Sequence
  Description of Artificial Sequence: Synthetic oligonucleotide
agaaggugaagccgcuguc

SEQ ID NO: 2982432 - RNA, 19 nt, Artificial Sequence
  Description of Artificial Sequence: Synthetic oligonucleotide
uuguuagcaggcugaacac

SEQ ID NO: 2982433 - RNA, 19 nt, Artificial Sequence
  Description of Artificial Sequence: Synthetic oligonucleotide
aagacuucaggcgugggua

SEQ ID NO: 2982434 - RNA, 19 nt, Artificial Sequence
  Description of Artificial Sequence: Synthetic oligonucleotide
ugguugcaaaagguuaggg

SEQ ID NO: 2982435 - RNA, 19 nt, Artificial Sequence
  Description of Artificial Sequence: Synthetic oligonucleotide
gucaacaauuucauugccc

SEQ ID NO: 2982436 - RNA, 19 nt, Artificial Sequence
  Description of Artificial Sequence: Synthetic oligonucleotide
ggagcaaaggcccugggac

SEQ ID NO: 2982437 - RNA, 19 nt, Artificial Sequence
  Description of Artificial Sequence: Synthetic oligonucleotide
aggcaaagacuucaggcgu

SEQ ID NO: 2982438 - RNA, 19 nt, Artificial Sequence
  Description of Artificial Sequence: Synthetic oligonucleotide
cacuuuggcaaugggaggc

SEQ ID NO: 2982439 - RNA, 19 nt, Artificial Sequence
  Description of Artificial Sequence: Synthetic oligonucleotide
uuggcucccaacuuuccac

SEQ ID NO: 2982440 - RNA, 19 nt, Artificial Sequence
  Description of Artificial Sequence: Synthetic oligonucleotide
uccacaugguccuccacac

SEQ ID NO: 2982441 - RNA, 19 nt, Artificial Sequence
  Description of Artificial Sequence: Synthetic oligonucleotide
ucccauuguuagcaggcug

SEQ ID NO: 2982442 - RNA, 19 nt, Artificial Sequence
  Description of Artificial Sequence: Synthetic oligonucleotide
ugucccugcgucagugggg

SEQ ID NO: 2982443 - RNA, 19 nt, Artificial Sequence
  Description of Artificial Sequence: Synthetic oligonucleotide
ggcaaugggaggcaaagac

SEQ ID NO: 2982444 - RNA, 19 nt, Artificial Sequence
  Description of Artificial Sequence: Synthetic oligonucleotide
gaguucugcucuuggcucc

SEQ ID NO: 2982445 - RNA, 19 nt, Artificial Sequence
  Description of Artificial Sequence: Synthetic oligonucleotide
ucaggcguggguaguagaa

SEQ ID NO: 2982446 - RNA, 19 nt, Artificial Sequence
  Description of Artificial Sequence: Synthetic oligonucleotide
gggaagguggagcaaaggc

SEQ ID NO: 2982447 - RNA, 19 nt, Artificial Sequence
  Description of Artificial Sequence: Synthetic oligonucleotide
uaucucagucaccgugucc

SEQ ID NO: 2982448 - RNA, 19 nt, Artificial Sequence
  Description of Artificial Sequence: Synthetic oligonucleotide
aaugggaggcaaagacuuc

SEQ ID NO: 2982449 - RNA, 19 nt, Artificial Sequence
  Description of Artificial Sequence: Synthetic oligonucleotide
ucagucaccguguccugug

SEQ ID NO: 2982450 - RNA, 19 nt, Artificial Sequence
  Description of Artificial Sequence: Synthetic oligonucleotide
aggcguggguaguagaaug

SEQ ID NO: 2982451 - RNA, 19 nt, Artificial Sequence
  Description of Artificial Sequence: Synthetic oligonucleotide
ugaagccgcugucuguccc

SEQ ID NO: 2982452 - RNA, 19 nt, Artificial Sequence
  Description of Artificial Sequence: Synthetic oligonucleotide
uggagcaaaggcccuggga

SEQ ID NO: 2982453 - RNA, 19 nt, Artificial Sequence
  Description of Artificial Sequence: Synthetic oligonucleotide
gaacugaaaggcugucaac

SEQ ID NO: 2982454 - RNA, 19 nt, Artificial Sequence
  Description of Artificial Sequence: Synthetic oligonucleotide
acugaaaggcugucaacaa

SEQ ID NO: 2982455 - RNA, 19 nt, Artificial Sequence
  Description of Artificial Sequence: Synthetic oligonucleotide
  modified_base (13)..(13): a, c, u, g, unknown or other
ggugacugggganaugagg

SEQ ID NO: 2982456 - RNA, 19 nt, Artificial Sequence
  Description of Artificial Sequence: Synthetic oligonucleotide
augaggauguuaucucagu

SEQ ID NO: 2982457 - RNA, 19 nt, Artificial Sequence
  Description of Artificial Sequence: Synthetic oligonucleotide
augaccacagggaaaccuc

SEQ ID NO: 2982458 - RNA, 19 nt, Artificial Sequence
  Description of Artificial Sequence: Synthetic oligonucleotide
ugggacucugccguagccg

SEQ ID NO: 2982459 - RNA, 19 nt, Artificial Sequence
  Description of Artificial Sequence: Synthetic oligonucleotide
gaguuugcuggggugacug

SEQ ID NO: 2982460 - RNA, 19 nt, Artificial Sequence
  Description of Artificial Sequence: Synthetic oligonucleotide
gucaccguguccugugggg

SEQ ID NO: 2982461 - RNA, 19 nt, Artificial Sequence
  Description of Artificial Sequence: Synthetic oligonucleotide
ugggaggcaaagacuucag

SEQ ID NO: 2982462 - RNA, 19 nt, Artificial Sequence
  Description of Artificial Sequence: Synthetic oligonucleotide
guuugcuggggugacuggg

SEQ ID NO: 2982463 - RNA, 19 nt, Artificial Sequence
  Description of Artificial Sequence: Synthetic oligonucleotide
acaauccccaggaugacca

SEQ ID NO: 2982464 - RNA, 19 nt, Artificial Sequence
  Description of Artificial Sequence: Synthetic oligonucleotide
ggguaguagaaugaguuug

SEQ ID NO: 2982465 - RNA, 19 nt, Artificial Sequence
  Description of Artificial Sequence: Synthetic oligonucleotide
augguccuccacacaaucc

SEQ ID NO: 2982466 - RNA, 19 nt, Artificial Sequence
  Description of Artificial Sequence: Synthetic oligonucleotide
augguugcaaaagguuagg

SEQ ID NO: 2982467 - RNA, 19 nt, Artificial Sequence
  Description of Artificial Sequence: Synthetic oligonucleotide
ggaagguggagcaaaggcc

SEQ ID NO: 2982468 - RNA, 19 nt, Artificial Sequence
  Description of Artificial Sequence: Synthetic oligonucleotide
uuaucucagucaccguguc

SEQ ID NO: 2982469 - RNA, 19 nt, Artificial Sequence
  Description of Artificial Sequence: Synthetic oligonucleotide
agucaccguguccuguggg

SEQ ID NO: 2982470 - RNA, 19 nt, Artificial Sequence
  Description of Artificial Sequence: Synthetic oligonucleotide
ucuuggcucccaacuuucc

SEQ ID NO: 2982471 - RNA, 19 nt, Artificial Sequence
  Description of Artificial Sequence: Synthetic oligonucleotide
uucauugccccugcuggcc

SEQ ID NO: 2982472 - RNA, 19 nt, Artificial Sequence
  Description of Artificial Sequence: Synthetic oligonucleotide
agacuucaggcguggguag

SEQ ID NO: 2982473 - RNA, 19 nt, Artificial Sequence
  Description of Artificial Sequence: Synthetic oligonucleotide
uucaagcucagggcagggg

SEQ ID NO: 2982474 - RNA, 19 nt, Artificial Sequence
  Description of Artificial Sequence: Synthetic oligonucleotide
uuagcaggcugaacacgga

SEQ ID NO: 2982475 - RNA, 19 nt, Artificial Sequence
  Description of Artificial Sequence: Synthetic oligonucleotide
ucugucccugcgucagugg

SEQ ID NO: 2982476 - RNA, 19 nt, Artificial Sequence
  Description of Artificial Sequence: Synthetic oligonucleotide
uuuggcaaugggaggcaaa

SEQ ID NO: 2982477 - RNA, 19 nt, Artificial Sequence
  Description of Artificial Sequence: Synthetic oligonucleotide
acacggacauaacgaguuc

SEQ ID NO: 2982478 - RNA, 19 nt, Artificial Sequence
  Description of Artificial Sequence: Synthetic oligonucleotide
uagcaggcugaacacggac

SEQ ID NO: 2982479 - RNA, 19 nt, Artificial Sequence
  Description of Artificial Sequence: Synthetic oligonucleotide
aguuugcuggggugacugg

SEQ ID NO: 2982480 - RNA, 19 nt, Artificial Sequence
  Description of Artificial Sequence: Synthetic oligonucleotide
guggggaugguugcaaaag

SEQ ID NO: 2982481 - RNA, 19 nt, Artificial Sequence
  Description of Artificial Sequence: Synthetic oligonucleotide
  modified_base (9)..(9): a, c, u, g, unknown or other
acugggganaugaggaugu

SEQ ID NO: 2982482 - RNA, 19 nt, Artificial Sequence
  Description of Artificial Sequence: Synthetic oligonucleotide
gguaguagaaugaguuugc

SEQ ID NO: 2982483 - RNA, 19 nt, Artificial Sequence
  Description of Artificial Sequence: Synthetic oligonucleotide
ggaggagaaggugaagccg

SEQ ID NO: 2982484 - RNA, 19 nt, Artificial Sequence
  Description of Artificial Sequence: Synthetic oligonucleotide
augaguuugcuggggugac

SEQ ID NO: 2982485 - RNA, 19 nt, Artificial Sequence
  Description of Artificial Sequence: Synthetic oligonucleotide
  modified_base (4)..(4): a, c, u, g, unknown or other
gganaugaggauguuaucu

SEQ ID NO: 2982486 - RNA, 19 nt, Artificial Sequence
  Description of Artificial Sequence: Synthetic oligonucleotide
aggcugaacacggacauaa

SEQ ID NO: 2982487 - RNA, 19 nt, Artificial Sequence
  Description of Artificial Sequence: Synthetic oligonucleotide
caugguccuccacacaauc

SEQ ID NO: 2982488 - RNA, 19 nt, Artificial Sequence
  Description of Artificial Sequence: Synthetic oligonucleotide
cugucccugcgucaguggg

SEQ ID NO: 2982489 - RNA, 19 nt, Artificial Sequence
  Description of Artificial Sequence: Synthetic oligonucleotide
aguucugcucuuggcuccc

SEQ ID NO: 2982490 - RNA, 19 nt, Artificial Sequence
  Description of Artificial Sequence: Synthetic oligonucleotide
gcaggggucccauuguuag

SEQ ID NO: 2982491 - RNA, 19 nt, Artificial Sequence
  Description of Artificial Sequence: Synthetic oligonucleotide
uggaacugaaaggcuguca

SEQ ID NO: 2982492 - RNA, 19 nt, Artificial Sequence
  Description of Artificial Sequence: Synthetic oligonucleotide
aggucacuuuggcaauggg

SEQ ID NO: 2982493 - RNA, 19 nt, Artificial Sequence
  Description of Artificial Sequence: Synthetic oligonucleotide
augggaggcaaagacuuca

SEQ ID NO: 2982494 - RNA, 19 nt, Artificial Sequence
  Description of Artificial Sequence: Synthetic oligonucleotide
ggaacugaaaggcugucaa

SEQ ID NO: 2982495 - RNA, 19 nt, Artificial Sequence
  Description of Artificial Sequence: Synthetic oligonucleotide
ucauugccccugcuggcca

SEQ ID NO: 2982496 - RNA, 19 nt, Artificial Sequence
  Description of Artificial Sequence: Synthetic oligonucleotide
accacagggaaaccucgca

SEQ ID NO: 2982497 - RNA, 19 nt, Artificial Sequence
  Description of Artificial Sequence: Synthetic oligonucleotide
uggguaguagaaugaguuu

SEQ ID NO: 2982498 - RNA, 19 nt, Artificial Sequence
  Description of Artificial Sequence: Synthetic oligonucleotide
auaacgaguucugcucuug

SEQ ID NO: 2982499 - RNA, 19 nt, Artificial Sequence
  Description of Artificial Sequence: Synthetic oligonucleotide
aauccccaggaugaccaca

SEQ ID NO: 2982500 - RNA, 19 nt, Artificial Sequence
  Description of Artificial Sequence: Synthetic oligonucleotide
cuccacacaauccccagga

SEQ ID NO: 2982501 - RNA, 19 nt, Artificial Sequence
  Description of Artificial Sequence: Synthetic oligonucleotide
cacaugguccuccacacaa

SEQ ID NO: 2982502 - RNA, 19 nt, Artificial Sequence
  Description of Artificial Sequence: Synthetic oligonucleotide
cucuuggcucccaacuuuc

SEQ ID NO: 2982503 - RNA, 19 nt, Artificial Sequence
  Description of Artificial Sequence: Synthetic oligonucleotide
gagaaggugaagccgcugu

SEQ ID NO: 2982504 - RNA, 19 nt, Artificial Sequence
  Description of Artificial Sequence: Synthetic oligonucleotide
uucaggcguggguaguaga

SEQ ID NO: 2982505 - RNA, 19 nt, Artificial Sequence
  Description of Artificial Sequence: Synthetic oligonucleotide
  modified_base (7)..(7): a, c, u, g, unknown or other
ugggganaugaggauguua

SEQ ID NO: 2982506 - RNA, 19 nt, Artificial Sequence
  Description of Artificial Sequence: Synthetic oligonucleotide
aaaggcccugggacucugc

SEQ ID NO: 2982507 - RNA, 19 nt, Artificial Sequence
  Description of Artificial Sequence: Synthetic oligonucleotide
  modified_base (11)..(11): a, c, u, g, unknown or other
ugacugggganaugaggau

SEQ ID NO: 2982508 - RNA, 19 nt, Artificial Sequence
  Description of Artificial Sequence: Synthetic oligonucleotide
ugcucuuggcucccaacuu

SEQ ID NO: 2982509 - RNA, 19 nt, Artificial Sequence
  Description of Artificial Sequence: Synthetic oligonucleotide
gaugaccacagggaaaccu

SEQ ID NO: 2982510 - RNA, 19 nt, Artificial Sequence
  Description of Artificial Sequence: Synthetic oligonucleotide
ccagguccagggaaggugg

SEQ ID NO: 2982511 - RNA, 19 nt, Artificial Sequence
  Description of Artificial Sequence: Synthetic oligonucleotide
ggggaggagaaggugaagc

SEQ ID NO: 2982512 - RNA, 19 nt, Artificial Sequence
  Description of Artificial Sequence: Synthetic oligonucleotide
aacuuuccacaugguccuc

SEQ ID NO: 2982513 - RNA, 19 nt, Artificial Sequence
  Description of Artificial Sequence: Synthetic oligonucleotide
cagggaagguggagcaaag

SEQ ID NO: 2982514 - RNA, 19 nt, Artificial Sequence
  Description of Artificial Sequence: Synthetic oligonucleotide
cagggcaggggucccauug

SEQ ID NO: 2982515 - RNA, 19 nt, Artificial Sequence
  Description of Artificial Sequence: Synthetic oligonucleotide
ggucccauuguuagcaggc

SEQ ID NO: 2982516 - RNA, 19 nt, Artificial Sequence
  Description of Artificial Sequence: Synthetic oligonucleotide
caaugggaggcaaagacuu

SEQ ID NO: 2982517 - RNA, 19 nt, Artificial Sequence
  Description of Artificial Sequence: Synthetic oligonucleotide
caacuuuccacaugguccu

SEQ ID NO: 2982518 - RNA, 19 nt, Artificial Sequence
  Description of Artificial Sequence: Synthetic oligonucleotide
cacaauccccaggaugacc

SEQ ID NO: 2982519 - RNA, 19 nt, Artificial Sequence
  Description of Artificial Sequence: Synthetic oligonucleotide
acacaauccccaggaugac

SEQ ID NO: 2982520 - RNA, 19 nt, Artificial Sequence
  Description of Artificial Sequence: Synthetic oligonucleotide
uuuccacaugguccuccac

SEQ ID NO: 2982521 - RNA, 19 nt, Artificial Sequence
  Description of Artificial Sequence: Synthetic oligonucleotide
acggacauaacgaguucug

SEQ ID NO: 2982522 - RNA, 19 nt, Artificial Sequence
  Description of Artificial Sequence: Synthetic oligonucleotide
gggaggcaaagacuucagg

SEQ ID NO: 2982523 - RNA, 19 nt, Artificial Sequence
  Description of Artificial Sequence: Synthetic oligonucleotide
cugucugucccugcgucag

SEQ ID NO: 2982524 - RNA, 19 nt, Artificial Sequence
  Description of Artificial Sequence: Synthetic oligonucleotide
caagcucagggcagggguc

SEQ ID NO: 2982525 - RNA, 19 nt, Artificial Sequence
  Description of Artificial Sequence: Synthetic oligonucleotide
uccccaggaugaccacagg

SEQ ID NO: 2982526 - RNA, 19 nt, Artificial Sequence
  Description of Artificial Sequence: Synthetic oligonucleotide
agcggugucucuggaacug

SEQ ID NO: 2982527 - RNA, 19 nt, Artificial Sequence
  Description of Artificial Sequence: Synthetic oligonucleotide
cagggaaaccucgcagucc

SEQ ID NO: 2982528 - RNA, 19 nt, Artificial Sequence
  Description of Artificial Sequence: Synthetic oligonucleotide
gggacucugccguagccgc

SEQ ID NO: 2982529 - RNA, 19 nt, Artificial Sequence
  Description of Artificial Sequence: Synthetic oligonucleotide
ucaccguguccugugggga

SEQ ID NO: 2982530 - RNA, 19 nt, Artificial Sequence
  Description of Artificial Sequence: Synthetic oligonucleotide
cugggacucugccguagcc

SEQ ID NO: 2982531 - RNA, 19 nt, Artificial Sequence
  Description of Artificial Sequence: Synthetic oligonucleotide
cuuggcucccaacuuucca

SEQ ID NO: 2982532 - RNA, 19 nt, Artificial Sequence
  Description of Artificial Sequence: Synthetic oligonucleotide
cacgaaggucacuuuggca

SEQ ID NO: 2982533 - RNA, 19 nt, Artificial Sequence
  Description of Artificial Sequence: Synthetic oligonucleotide
gggucccauuguuagcagg

SEQ ID NO: 2982534 - RNA, 19 nt, Artificial Sequence
  Description of Artificial Sequence: Synthetic oligonucleotide
auguuaucucagucaccgu

SEQ ID NO: 2982535 - RNA, 19 nt, Artificial Sequence
  Description of Artificial Sequence: Synthetic oligonucleotide
uccacacaauccccaggau

SEQ ID NO: 2982536 - RNA, 19 nt, Artificial Sequence
  Description of Artificial Sequence: Synthetic oligonucleotide
guccagggaagguggagca

SEQ ID NO: 2982537 - RNA, 19 nt, Artificial Sequence
  Description of Artificial Sequence: Synthetic oligonucleotide
guggguaguagaaugaguu

SEQ ID NO: 2982538 - RNA, 19 nt, Artificial Sequence
  Description of Artificial Sequence: Synthetic oligonucleotide
guccuguggggaugguugc

SEQ ID NO: 2982539 - RNA, 19 nt, Artificial Sequence
  Description of Artificial Sequence: Synthetic oligonucleotide
aggugaagccgcugucugu

SEQ ID NO: 2982540 - RNA, 19 nt, Artificial Sequence
  Description of Artificial Sequence: Synthetic oligonucleotide
gaccacagggaaaccucgc

SEQ ID NO: 2982541 - RNA, 19 nt, Artificial Sequence
  Description of Artificial Sequence: Synthetic oligonucleotide
agcaggcugaacacggaca

SEQ ID NO: 2982542 - RNA, 19 nt, Artificial Sequence
  Description of Artificial Sequence: Synthetic oligonucleotide
gcaaagacuucaggcgugg

SEQ ID NO: 2982543 - RNA, 19 nt, Artificial Sequence
  Description of Artificial Sequence: Synthetic oligonucleotide
caaagacuucaggcguggg

SEQ ID NO: 2982544 - RNA, 19 nt, Artificial Sequence
  Description of Artificial Sequence: Synthetic oligonucleotide
uggccagguccagggaagg

SEQ ID NO: 2982545 - RNA, 19 nt, Artificial Sequence
  Description of Artificial Sequence: Synthetic oligonucleotide
ggacauaacgaguucugcu

SEQ ID NO: 2982546 - RNA, 19 nt, Artificial Sequence
  Description of Artificial Sequence: Synthetic oligonucleotide
cauuguuagcaggcugaac

SEQ ID NO: 2982547 - RNA, 19 nt, Artificial Sequence
  Description of Artificial Sequence: Synthetic oligonucleotide
cugccguagccgcacgaag

SEQ ID NO: 2982548 - RNA, 19 nt, Artificial Sequence
  Description of Artificial Sequence: Synthetic oligonucleotide
caggggucccauuguuagc

SEQ ID NO: 2982549 - RNA, 19 nt, Artificial Sequence
  Description of Artificial Sequence: Synthetic oligonucleotide
ggucacuuuggcaauggga

SEQ ID NO: 2982550 - RNA, 19 nt, Artificial Sequence
  Description of Artificial Sequence: Synthetic oligonucleotide
guggagcaaaggcccuggg

SEQ ID NO: 2982551 - RNA, 19 nt, Artificial Sequence
  Description of Artificial Sequence: Synthetic oligonucleotide
ucugccguagccgcacgaa

SEQ ID NO: 2982552 - RNA, 19 nt, Artificial Sequence
  Description of Artificial Sequence: Synthetic oligonucleotide
ccccaggaugaccacaggg

SEQ ID NO: 2982553 - RNA, 19 nt, Artificial Sequence
  Description of Artificial Sequence: Synthetic oligonucleotide
cuucaggcguggguaguag

SEQ ID NO: 2982554 - RNA, 19 nt, Artificial Sequence
  Description of Artificial Sequence: Synthetic oligonucleotide
ccagcggugucucuggaac

SEQ ID NO: 2982555 - RNA, 19 nt, Artificial Sequence
  Description of Artificial Sequence: Synthetic oligonucleotide
ggaaaccucgcaguccagc

SEQ ID NO: 2982556 - RNA, 19 nt, Artificial Sequence
  Description of Artificial Sequence: Synthetic oligonucleotide
uggcaaugggaggcaaaga

SEQ ID NO: 2982557 - RNA, 19 nt, Artificial Sequence
  Description of Artificial Sequence: Synthetic oligonucleotide
gguggagcaaaggcccugg

SEQ ID NO: 2982558 - RNA, 19 nt, Artificial Sequence
  Description of Artificial Sequence: Synthetic oligonucleotide
gaaggugaagccgcugucu

SEQ ID NO: 2982559 - RNA, 19 nt, Artificial Sequence
  Description of Artificial Sequence: Synthetic oligonucleotide
uccagcggugucucuggaa

SEQ ID NO: 2982560 - RNA, 19 nt, Artificial Sequence
  Description of Artificial Sequence: Synthetic oligonucleotide
gcacgaaggucacuuuggc

SEQ ID NO: 2982561 - RNA, 19 nt, Artificial Sequence
  Description of Artificial Sequence: Synthetic oligonucleotide
aagguggagcaaaggcccu

SEQ ID NO: 2982562 - RNA, 19 nt, Artificial Sequence
  Description of Artificial Sequence: Synthetic oligonucleotide
gacucugccguagccgcac

SEQ ID NO: 2982563 - RNA, 19 nt, Artificial Sequence
  Description of Artificial Sequence: Synthetic oligonucleotide
ucccaacuuuccacauggu

SEQ ID NO: 2982564 - RNA, 19 nt, Artificial Sequence
  Description of Artificial Sequence: Synthetic oligonucleotide
ggaugguugcaaaagguua

SEQ ID NO: 2982565 - RNA, 19 nt, Artificial Sequence
  Description of Artificial Sequence: Synthetic oligonucleotide
gccccugcuggccaggucc

SEQ ID NO: 2982566 - RNA, 19 nt, Artificial Sequence
  Description of Artificial Sequence: Synthetic oligonucleotide
uucugcucuuggcucccaa

SEQ ID NO: 2982567 - RNA, 19 nt, Artificial Sequence
  Description of Artificial Sequence: Synthetic oligonucleotide
agggcaggggucccauugu

SEQ ID NO: 2982568 - RNA, 19 nt, Artificial Sequence
  Description of Artificial Sequence: Synthetic oligonucleotide
  modified_base (19)..(19): a, c, u, g, unknown or other
ugcuggggugacuggggan

SEQ ID NO: 2982569 - RNA, 19 nt, Artificial Sequence
  Description of Artificial Sequence: Synthetic oligonucleotide
gagcaaaggcccugggacu

SEQ ID NO: 2982570 - RNA, 19 nt, Artificial Sequence
  Description of Artificial Sequence: Synthetic oligonucleotide
acucugccguagccgcacg

SEQ ID NO: 2982571 - RNA, 19 nt, Artificial Sequence
  Description of Artificial Sequence: Synthetic oligonucleotide
gugaagccgcugucugucc

SEQ ID NO: 2982572 - RNA, 19 nt, Artificial Sequence
  Description of Artificial Sequence: Synthetic oligonucleotide
cgcacgaaggucacuuugg

SEQ ID NO: 2982573 - RNA, 19 nt, Artificial Sequence
  Description of Artificial Sequence: Synthetic oligonucleotide
ugaguuugcuggggugacu

SEQ ID NO: 2982574 - RNA, 19 nt, Artificial Sequence
  Description of Artificial Sequence: Synthetic oligonucleotide
  modified_base (5)..(5): a, c, u, g, unknown or other
ggganaugaggauguuauc

SEQ ID NO: 2982575 - RNA, 19 nt, Artificial Sequence
  Description of Artificial Sequence: Synthetic oligonucleotide
agccgcugucugucccugc

SEQ ID NO: 2982576 - RNA, 19 nt, Artificial Sequence
  Description of Artificial Sequence: Synthetic oligonucleotide
aggcugucaacaauuucau

SEQ ID NO: 2982577 - RNA, 19 nt, Artificial Sequence
  Description of Artificial Sequence: Synthetic oligonucleotide
cauugccccugcuggccag

SEQ ID NO: 2982578 - RNA, 19 nt, Artificial Sequence
  Description of Artificial Sequence: Synthetic oligonucleotide
  modified_base (16)..(16): a, c, u, g, unknown or other
uggggugacugggganaug

SEQ ID NO: 2982579 - RNA, 19 nt, Artificial Sequence
  Description of Artificial Sequence: Synthetic oligonucleotide
cccaacuuuccacaugguc

SEQ ID NO: 2982580 - RNA, 19 nt, Artificial Sequence
  Description of Artificial Sequence: Synthetic oligonucleotide
gucugucccugcgucagug

SEQ ID NO: 2982581 - RNA, 19 nt, Artificial Sequence
  Description of Artificial Sequence: Synthetic oligonucleotide
ccacagggaaaccucgcag

SEQ ID NO: 2982582 - RNA, 19 nt, Artificial Sequence
  Description of Artificial Sequence: Synthetic oligonucleotide
ucgcaguccagcggugucu

SEQ ID NO: 2982583 - RNA, 19 nt, Artificial Sequence
  Description of Artificial Sequence: Synthetic oligonucleotide
ggugaagccgcugucuguc

SEQ ID NO: 2982584 - RNA, 19 nt, Artificial Sequence
  Description of Artificial Sequence: Synthetic oligonucleotide
gaacacggacauaacgagu

SEQ ID NO: 2982585 - RNA, 19 nt, Artificial Sequence
  Description of Artificial Sequence: Synthetic oligonucleotide
caguccagcggugucucug

SEQ ID NO: 2982586 - RNA, 19 nt, Artificial Sequence
  Description of Artificial Sequence: Synthetic oligonucleotide
cacagggaaaccucgcagu

SEQ ID NO: 2982587 - RNA, 19 nt, Artificial Sequence
  Description of Artificial Sequence: Synthetic oligonucleotide
  modified_base (6)..(6): a, c, u, g, unknown or other
gggganaugaggauguuau

SEQ ID NO: 2982588 - RNA, 19 nt, Artificial Sequence
  Description of Artificial Sequence: Synthetic oligonucleotide
ugucugucccugcgucagu

SEQ ID NO: 2982589 - RNA, 19 nt, Artificial Sequence
  Description of Artificial Sequence: Synthetic oligonucleotide
cccauuguuagcaggcuga

SEQ ID NO: 2982590 - RNA, 19 nt, Artificial Sequence
  Description of Artificial Sequence: Synthetic oligonucleotide
gccgcugucugucccugcg

SEQ ID NO: 2982591 - RNA, 19 nt, Artificial Sequence
  Description of Artificial Sequence: Synthetic oligonucleotide
caauccccaggaugaccac

SEQ ID NO: 2982592 - RNA, 19 nt, Artificial Sequence
  Description of Artificial Sequence: Synthetic oligonucleotide
ggcaaagacuucaggcgug

SEQ ID NO: 2982593 - RNA, 19 nt, Artificial Sequence
  Description of Artificial Sequence: Synthetic oligonucleotide
ugcuggccagguccaggga

SEQ ID NO: 2982594 - RNA, 19 nt, Artificial Sequence
  Description of Artificial Sequence: Synthetic oligonucleotide
ggauguuaucucagucacc

SEQ ID NO: 2982595 - RNA, 19 nt, Artificial Sequence
  Description of Artificial Sequence: Synthetic oligonucleotide
uccuguggggaugguugca

SEQ ID NO: 2982596 - RNA, 19 nt, Artificial Sequence
  Description of Artificial Sequence: Synthetic oligonucleotide
auugccccugcuggccagg

SEQ ID NO: 2982597 - RNA, 19 nt, Artificial Sequence
  Description of Artificial Sequence: Synthetic oligonucleotide
cucgcaguccagcgguguc

SEQ ID NO: 2982598 - RNA, 19 nt, Artificial Sequence
  Description of Artificial Sequence: Synthetic oligonucleotide
guaguagaaugaguuugcu

SEQ ID NO: 2982599 - RNA, 19 nt, Artificial Sequence
  Description of Artificial Sequence: Synthetic oligonucleotide
agccgcacgaaggucacuu

SEQ ID NO: 2982600 - RNA, 19 nt, Artificial Sequence
  Description of Artificial Sequence: Synthetic oligonucleotide
  modified_base (15)..(15): a, c, u, g, unknown or other
ggggugacugggganauga

SEQ ID NO: 2982601 - RNA, 19 nt, Artificial Sequence
  Description of Artificial Sequence: Synthetic oligonucleotide
cuggaacugaaaggcuguc

SEQ ID NO: 2982602 - RNA, 19 nt, Artificial Sequence
  Description of Artificial Sequence: Synthetic oligonucleotide
agguggagcaaaggcccug

SEQ ID NO: 2982603 - RNA, 19 nt, Artificial Sequence
  Description of Artificial Sequence: Synthetic oligonucleotide
gguccuccacacaaucccc

SEQ ID NO: 2982604 - RNA, 19 nt, Artificial Sequence
  Description of Artificial Sequence: Synthetic oligonucleotide
gaaaggcugucaacaauuu

SEQ ID NO: 2982605 - RNA, 19 nt, Artificial Sequence
  Description of Artificial Sequence: Synthetic oligonucleotide
gcguggguaguagaaugag

SEQ ID NO: 2982606 - RNA, 19 nt, Artificial Sequence
  Description of Artificial Sequence: Synthetic oligonucleotide
caacaauuucauugccccu

SEQ ID NO: 2982607 - RNA, 19 nt, Artificial Sequence
  Description of Artificial Sequence: Synthetic oligonucleotide
gaagccgcugucugucccu

SEQ ID NO: 2982608 - RNA, 19 nt, Artificial Sequence
  Description of Artificial Sequence: Synthetic oligonucleotide
ccuccacacaauccccagg

SEQ ID NO: 2982609 - RNA, 19 nt, Artificial Sequence
  Description of Artificial Sequence: Synthetic oligonucleotide
cgaguucugcucuuggcuc

SEQ ID NO: 2982610 - RNA, 19 nt, Artificial Sequence
  Description of Artificial Sequence: Synthetic oligonucleotide
accguguccuguggggaug

SEQ ID NO: 2982611 - RNA, 19 nt, Artificial Sequence
  Description of Artificial Sequence: Synthetic oligonucleotide
gccagguccagggaaggug

SEQ ID NO: 2982612 - RNA, 19 nt, Artificial Sequence
  Description of Artificial Sequence: Synthetic oligonucleotide
uccagggaagguggagcaa

SEQ ID NO: 2982613 - RNA, 19 nt, Artificial Sequence
  Description of Artificial Sequence: Synthetic oligonucleotide
cugaaaggcugucaacaau

SEQ ID NO: 2982614 - RNA, 19 nt, Artificial Sequence
  Description of Artificial Sequence: Synthetic oligonucleotide
guagccgcacgaaggucac

SEQ ID NO: 2982615 - RNA, 19 nt, Artificial Sequence
  Description of Artificial Sequence: Synthetic oligonucleotide
aggagaaggugaagccgcu

SEQ ID NO: 2982616 - RNA, 19 nt, Artificial Sequence
  Description of Artificial Sequence: Synthetic oligonucleotide
acuucaggcguggguagua

SEQ ID NO: 2982617 - RNA, 19 nt, Artificial Sequence
  Description of Artificial Sequence: Synthetic oligonucleotide
guccuccacacaaucccca

SEQ ID NO: 2982618 - RNA, 19 nt, Artificial Sequence
  Description of Artificial Sequence: Synthetic oligonucleotide
cguagccgcacgaagguca

SEQ ID NO: 2982619 - RNA, 19 nt, Artificial Sequence
  Description of Artificial Sequence: Synthetic oligonucleotide
cacggacauaacgaguucu

SEQ ID NO: 2982620 - RNA, 19 nt, Artificial Sequence
  Description of Artificial Sequence: Synthetic oligonucleotide
ggggucccauuguuagcag

SEQ ID NO: 2982621 - RNA, 19 nt, Artificial Sequence
  Description of Artificial Sequence: Synthetic oligonucleotide
acaugguccuccacacaau

SEQ ID NO: 2982622 - RNA, 19 nt, Artificial Sequence
  Description of Artificial Sequence: Synthetic oligonucleotide
caaaggcccugggacucug

SEQ ID NO: 2982623 - RNA, 19 nt, Artificial Sequence
  Description of Artificial Sequence: Synthetic oligonucleotide
ggagaaggugaagccgcug

SEQ ID NO: 2982624 - RNA, 19 nt, Artificial Sequence
  Description of Artificial Sequence: Synthetic oligonucleotide
ccgcacgaaggucacuuug

SEQ ID NO: 2982625 - RNA, 19 nt, Artificial Sequence
  Description of Artificial Sequence: Synthetic oligonucleotide
ggcguggguaguagaauga

SEQ ID NO: 2982626 - RNA, 19 nt, Artificial Sequence
  Description of Artificial Sequence: Synthetic oligonucleotide
gcuggccagguccagggaa

SEQ ID NO: 2982627 - RNA, 19 nt, Artificial Sequence
  Description of Artificial Sequence: Synthetic oligonucleotide
cuguggggaugguugcaaa

SEQ ID NO: 2982628 - RNA, 19 nt, Artificial Sequence
  Description of Artificial Sequence: Synthetic oligonucleotide
gcaaugggaggcaaagacu

SEQ ID NO: 2982629 - RNA, 19 nt, Artificial Sequence
  Description of Artificial Sequence: Synthetic oligonucleotide
gcugucugucccugcguca

SEQ ID NO: 2982630 - RNA, 19 nt, Artificial Sequence
  Description of Artificial Sequence: Synthetic oligonucleotide
  modified_base (18)..(18): a, c, u, g, unknown or other
gcuggggugacuggggana

SEQ ID NO: 2982631 - RNA, 19 nt, Artificial Sequence
  Description of Artificial Sequence: Synthetic oligonucleotide
gcaggcugaacacggacau

SEQ ID NO: 2982632 - RNA, 19 nt, Artificial Sequence
  Description of Artificial Sequence: Synthetic oligonucleotide
ggggaugguugcaaaaggu

SEQ ID NO: 2982633 - RNA, 19 nt, Artificial Sequence
  Description of Artificial Sequence: Synthetic oligonucleotide
cauaacgaguucugcucuu

SEQ ID NO: 2982634 - RNA, 19 nt, Artificial Sequence
  Description of Artificial Sequence: Synthetic oligonucleotide
cggacauaacgaguucugc

SEQ ID NO: 2982635 - RNA, 19 nt, Artificial Sequence
  Description of Artificial Sequence: Synthetic oligonucleotide
ggcccugggacucugccgu

SEQ ID NO: 2982636 - RNA, 19 nt, Artificial Sequence
  Description of Artificial Sequence: Synthetic oligonucleotide
ccugggacucugccguagc

SEQ ID NO: 2982637 - RNA, 19 nt, Artificial Sequence
  Description of Artificial Sequence: Synthetic oligonucleotide
cagguccagggaaggugga

SEQ ID NO: 2982638 - RNA, 19 nt, Artificial Sequence
  Description of Artificial Sequence: Synthetic oligonucleotide
ugccccugcuggccagguc

SEQ ID NO: 2982639 - RNA, 19 nt, Artificial Sequence
  Description of Artificial Sequence: Synthetic oligonucleotide
ccugcuggccagguccagg

SEQ ID NO: 2982640 - RNA, 19 nt, Artificial Sequence
  Description of Artificial Sequence: Synthetic oligonucleotide
ggugucucuggaacugaaa

SEQ ID NO: 2982641 - RNA, 19 nt, Artificial Sequence
  Description of Artificial Sequence: Synthetic oligonucleotide
cucugccguagccgcacga

SEQ ID NO: 2982642 - RNA, 19 nt, Artificial Sequence
  Description of Artificial Sequence: Synthetic oligonucleotide
gacuucaggcguggguagu

SEQ ID NO: 2982643 - RNA, 19 nt, Artificial Sequence
  Description of Artificial Sequence: Synthetic oligonucleotide
uugccccugcuggccaggu

SEQ ID NO: 2982644 - RNA, 19 nt, Artificial Sequence
  Description of Artificial Sequence: Synthetic oligonucleotide
ggcugaacacggacauaac

SEQ ID NO: 2982645 - RNA, 19 nt, Artificial Sequence
  Description of Artificial Sequence: Synthetic oligonucleotide
gggaugguugcaaaagguu

SEQ ID NO: 2982646 - RNA, 19 nt, Artificial Sequence
  Description of Artificial Sequence: Synthetic oligonucleotide
guccagcggugucucugga

SEQ ID NO: 2982647 - RNA, 19 nt, Artificial Sequence
  Description of Artificial Sequence: Synthetic oligonucleotide
caauuucauugccccugcu

SEQ ID NO: 2982648 - RNA, 19 nt, Artificial Sequence
  Description of Artificial Sequence: Synthetic oligonucleotide
gucccauuguuagcaggcu

SEQ ID NO: 2982649 - RNA, 19 nt, Artificial Sequence
  Description of Artificial Sequence: Synthetic oligonucleotide
uagccgcacgaaggucacu

SEQ ID NO: 2982650 - RNA, 19 nt, Artificial Sequence
  Description of Artificial Sequence: Synthetic oligonucleotide
gccguagccgcacgaaggu

SEQ ID NO: 2982651 - RNA, 19 nt, Artificial Sequence
  Description of Artificial Sequence: Synthetic oligonucleotide
cagcggugucucuggaacu

SEQ ID NO: 2982652 - RNA, 19 nt, Artificial Sequence
  Description of Artificial Sequence: Synthetic oligonucleotide
accucgcaguccagcggug

SEQ ID NO: 2982653 - RNA, 19 nt, Artificial Sequence
  Description of Artificial Sequence: Synthetic oligonucleotide
ccagggaagguggagcaaa

SEQ ID NO: 2982654 - RNA, 19 nt, Artificial Sequence
  Description of Artificial Sequence: Synthetic oligonucleotide
gcucuuggcucccaacuuu

SEQ ID NO: 2982655 - RNA, 19 nt, Artificial Sequence
  Description of Artificial Sequence: Synthetic oligonucleotide
cucagucaccguguccugu

SEQ ID NO: 2982656 - RNA, 19 nt, Artificial Sequence
  Description of Artificial Sequence: Synthetic oligonucleotide
gggaaaccucgcaguccag

SEQ ID NO: 2982657 - RNA, 19 nt, Artificial Sequence
  Description of Artificial Sequence: Synthetic oligonucleotide
cgcugucugucccugcguc

SEQ ID NO: 2982658 - RNA, 19 nt, Artificial Sequence
  Description of Artificial Sequence: Synthetic oligonucleotide
guucugcucuuggcuccca

SEQ ID NO: 2982659 - RNA, 19 nt, Artificial Sequence
  Description of Artificial Sequence: Synthetic oligonucleotide
caccguguccuguggggau

SEQ ID NO: 2982660 - RNA, 19 nt, Artificial Sequence
  Description of Artificial Sequence: Synthetic oligonucleotide
ggcaggggucccauuguua

SEQ ID NO: 2982661 - RNA, 19 nt, Artificial Sequence
  Description of Artificial Sequence: Synthetic oligonucleotide
cccugggacucugccguag

SEQ ID NO: 2982662 - RNA, 19 nt, Artificial Sequence
  Description of Artificial Sequence: Synthetic oligonucleotide
ccauuguuagcaggcugaa

SEQ ID NO: 2982663 - RNA, 19 nt, Artificial Sequence
  Description of Artificial Sequence: Synthetic oligonucleotide
caggcguggguaguagaau

SEQ ID NO: 2982664 - RNA, 19 nt, Artificial Sequence
  Description of Artificial Sequence: Synthetic oligonucleotide
ccacaugguccuccacaca

SEQ ID NO: 2982665 - RNA, 19 nt, Artificial Sequence
  Description of Artificial Sequence: Synthetic oligonucleotide
cguggguaguagaaugagu

SEQ ID NO: 2982666 - RNA, 19 nt, Artificial Sequence
  Description of Artificial Sequence: Synthetic oligonucleotide
ccuguggggaugguugcaa

SEQ ID NO: 2982667 - RNA, 19 nt, Artificial Sequence
  Description of Artificial Sequence: Synthetic oligonucleotide
gcggugucucuggaacuga

SEQ ID NO: 2982668 - RNA, 19 nt, Artificial Sequence
  Description of Artificial Sequence: Synthetic oligonucleotide
caggcugaacacggacaua

SEQ ID NO: 2982669 - RNA, 19 nt, Artificial Sequence
  Description of Artificial Sequence: Synthetic oligonucleotide
ggacucugccguagccgca

SEQ ID NO: 2982670 - RNA, 19 nt, Artificial Sequence
  Description of Artificial Sequence: Synthetic oligonucleotide
guguccuguggggaugguu

SEQ ID NO: 2982671 - RNA, 19 nt, Artificial Sequence
  Description of Artificial Sequence: Synthetic oligonucleotide
ccguagccgcacgaagguc

SEQ ID NO: 2982672 - RNA, 19 nt, Artificial Sequence
  Description of Artificial Sequence: Synthetic oligonucleotide
cgcaguccagcggugucuc

SEQ ID NO: 2982673 - RNA, 19 nt, Artificial Sequence
  Description of Artificial Sequence: Synthetic oligonucleotide
  modified_base (17)..(17): a, c, u, g, unknown or other
cuggggugacugggganau

SEQ ID NO: 2982674 - RNA, 19 nt, Artificial Sequence
  Description of Artificial Sequence: Synthetic oligonucleotide
gcucagggcagggguccca

SEQ ID NO: 2982675 - RNA, 19 nt, Artificial Sequence
  Description of Artificial Sequence: Synthetic oligonucleotide
cggugucucuggaacugaa

SEQ ID NO: 2982676 - RNA, 19 nt, Artificial Sequence
  Description of Artificial Sequence: Synthetic oligonucleotide
gcaaaggcccugggacucu

SEQ ID NO: 2982677 - RNA, 19 nt, Artificial Sequence
  Description of Artificial Sequence: Synthetic oligonucleotide
  modified_base (8)..(8): a, c, u, g, unknown or other
cugggganaugaggauguu

SEQ ID NO: 2982678 - RNA, 19 nt, Artificial Sequence
  Description of Artificial Sequence: Synthetic oligonucleotide
cccugcuggccagguccag

SEQ ID NO: 2982679 - RNA, 19 nt, Artificial Sequence
  Description of Artificial Sequence: Synthetic oligonucleotide
gcaguccagcggugucucu

SEQ ID NO: 2982680 - RNA, 19 nt, Artificial Sequence
  Description of Artificial Sequence: Synthetic oligonucleotide
ggccagguccagggaaggu

SEQ ID NO: 2982681 - RNA, 19 nt, Artificial Sequence
  Description of Artificial Sequence: Synthetic oligonucleotide
gccgcacgaaggucacuuu

SEQ ID NO: 2982682 - RNA, 19 nt, Artificial Sequence
  Description of Artificial Sequence: Synthetic oligonucleotide
gcccugggacucugccgua

SEQ ID NO: 2982683 - RNA, 19 nt, Artificial Sequence
  Description of Artificial Sequence: Synthetic oligonucleotide
ccucgcaguccagcggugu

SEQ ID NO: 2982684 - RNA, 19 nt, Artificial Sequence
  Description of Artificial Sequence: Synthetic oligonucleotide
ccgcugucugucccugcgu

SEQ ID NO: 2982685 - RNA, 19 nt, Artificial Sequence
  Description of Artificial Sequence: Synthetic oligonucleotide
cguguccuguggggauggu

SEQ ID NO: 2982686 - RNA, 19 nt, Artificial Sequence
  Description of Artificial Sequence: Synthetic oligonucleotide
  modified_base (1)..(1): a, c, u, g, unknown or other
naugaggauguuaucucag

SEQ ID NO: 2982687 - RNA, 19 nt, Artificial Sequence
  Description of Artificial Sequence: Synthetic oligonucleotide
aaaauuguuguccugcagc

SEQ ID NO: 2982688 - RNA, 19 nt, Artificial Sequence
  Description of Artificial Sequence: Synthetic oligonucleotide
gauacugagaccccgagcc

SEQ ID NO: 2982689 - RNA, 19 nt, Artificial Sequence
  Description of Artificial Sequence: Synthetic oligonucleotide
uugcacaggaacuugaggg

SEQ ID NO: 2982690 - RNA, 19 nt, Artificial Sequence
  Description of Artificial Sequence: Synthetic oligonucleotide
aaggccaggaacuugggag

SEQ ID NO: 2982691 - RNA, 19 nt, Artificial Sequence
  Description of Artificial Sequence: Synthetic oligonucleotide
gaggugaccacucaggcag

SEQ ID NO: 2982692 - RNA, 19 nt, Artificial Sequence
  Description of Artificial Sequence: Synthetic oligonucleotide
uccugcagcacauaggucc

SEQ ID NO: 2982693 - RNA, 19 nt, Artificial Sequence
  Description of Artificial Sequence: Synthetic oligonucleotide
aaauuguuguccugcagca

SEQ ID NO: 2982694 - RNA, 19 nt, Artificial Sequence
  Description of Artificial Sequence: Synthetic oligonucleotide
ucaggcagggccaaggugc

SEQ ID NO: 2982695 - RNA, 19 nt, Artificial Sequence
  Description of Artificial Sequence: Synthetic oligonucleotide
uuccucuagauacugagac

SEQ ID NO: 2982696 - RNA, 19 nt, Artificial Sequence
  Description of Artificial Sequence: Synthetic oligonucleotide
uggaucaccaccuggaacu

SEQ ID NO: 2982697 - RNA, 19 nt, Artificial Sequence
  Description of Artificial Sequence: Synthetic oligonucleotide
agggaagucacagaggcgg

SEQ ID NO: 2982698 - RNA, 19 nt, Artificial Sequence
  Description of Artificial Sequence: Synthetic oligonucleotide
ggaacuuacaggcaggcag

SEQ ID NO: 2982699 - RNA, 19 nt, Artificial Sequence
  Description of Artificial Sequence: Synthetic oligonucleotide
uggaaaauuguuguccugc

SEQ ID NO: 2982700 - RNA, 19 nt, Artificial Sequence
  Description of Artificial Sequence: Synthetic oligonucleotide
aggaguggaaaauuguugu

SEQ ID NO: 2982701 - RNA, 19 nt, Artificial Sequence
  Description of Artificial Sequence: Synthetic oligonucleotide
accaccuggaacuuacagg

SEQ ID NO: 2982702 - RNA, 19 nt, Artificial Sequence
  Description of Artificial Sequence: Synthetic oligonucleotide
ucuagauacugagaccccg

SEQ ID NO: 2982703 - RNA, 19 nt, Artificial Sequence
  Description of Artificial Sequence: Synthetic oligonucleotide
caaggugccagucuccugg

SEQ ID NO: 2982704 - RNA, 19 nt, Artificial Sequence
  Description of Artificial Sequence: Synthetic oligonucleotide
agauacugagaccccgagc

SEQ ID NO: 2982705 - RNA, 19 nt, Artificial Sequence
  Description of Artificial Sequence: Synthetic oligonucleotide
auuguuguccugcagcaca

SEQ ID NO: 2982706 - RNA, 19 nt, Artificial Sequence
  Description of Artificial Sequence: Synthetic oligonucleotide
ucuccuggggcugaggugg

SEQ ID NO: 2982707 - RNA, 19 nt, Artificial Sequence
  Description of Artificial Sequence: Synthetic oligonucleotide
gaaaauuguuguccugcag

SEQ ID NO: 2982708 - RNA, 19 nt, Artificial Sequence
  Description of Artificial Sequence: Synthetic oligonucleotide
gaguggaaaauuguugucc

SEQ ID NO: 2982709 - RNA, 19 nt, Artificial Sequence
  Description of Artificial Sequence: Synthetic oligonucleotide
aaggccgcaggugaaggcc

SEQ ID NO: 2982710 - RNA, 19 nt, Artificial Sequence
  Description of Artificial Sequence: Synthetic oligonucleotide
aagguggcugcccacaggu

SEQ ID NO: 2982711 - RNA, 19 nt, Artificial Sequence
  Description of Artificial Sequence: Synthetic oligonucleotide
aguggaaaauuguuguccu

SEQ ID NO: 2982712 - RNA, 19 nt, Artificial Sequence
  Description of Artificial Sequence: Synthetic oligonucleotide
gaugaggaguggaaaauug

SEQ ID NO: 2982713 - RNA, 19 nt, Artificial Sequence
  Description of Artificial Sequence: Synthetic oligonucleotide
gaacuuacaggcaggcagg

SEQ ID NO: 2982714 - RNA, 19 nt, Artificial Sequence
  Description of Artificial Sequence: Synthetic oligonucleotide
accuggaacuuacaggcag

SEQ ID NO: 2982715 - RNA, 19 nt, Artificial Sequence
  Description of Artificial Sequence: Synthetic oligonucleotide
aauuguuguccugcagcac

SEQ ID NO: 2982716 - RNA, 19 nt, Artificial Sequence
  Description of Artificial Sequence: Synthetic oligonucleotide
ugcacaggaacuugagggc

SEQ ID NO: 2982717 - RNA, 19 nt, Artificial Sequence
  Description of Artificial Sequence: Synthetic oligonucleotide
ucuuugcacaggaacuuga

SEQ ID NO: 2982718 - RNA, 19 nt, Artificial Sequence
  Description of Artificial Sequence: Synthetic oligonucleotide
ugaggaguggaaaauuguu

SEQ ID NO: 2982719 - RNA, 19 nt, Artificial Sequence
  Description of Artificial Sequence: Synthetic oligonucleotide
uagauacugagaccccgag

SEQ ID NO: 2982720 - RNA, 19 nt, Artificial Sequence
  Description of Artificial Sequence: Synthetic oligonucleotide
aagucacagaggcggugac

SEQ ID NO: 2982721 - RNA, 19 nt, Artificial Sequence
  Description of Artificial Sequence: Synthetic oligonucleotide
guuggugcggaguccaucc

SEQ ID NO: 2982722 - RNA, 19 nt, Artificial Sequence
  Description of Artificial Sequence: Synthetic oligonucleotide
gaggaguggaaaauuguug

SEQ ID NO: 2982723 - RNA, 19 nt, Artificial Sequence
  Description of Artificial Sequence: Synthetic oligonucleotide
cacauagguccccuggugg

SEQ ID NO: 2982724 - RNA, 19 nt, Artificial Sequence
  Description of Artificial Sequence: Synthetic oligonucleotide
uuacaggcaggcagggaag

SEQ ID NO: 2982725 - RNA, 19 nt, Artificial Sequence
  Description of Artificial Sequence: Synthetic oligonucleotide
uccucucugacagccagcg

SEQ ID NO: 2982726 - RNA, 19 nt, Artificial Sequence
  Description of Artificial Sequence: Synthetic oligonucleotide
cucucugacagccagcguc

SEQ ID NO: 2982727 - RNA, 19 nt, Artificial Sequence
  Description of Artificial Sequence: Synthetic oligonucleotide
guuguccugcagcacauag

SEQ ID NO: 2982728 - RNA, 19 nt, Artificial Sequence
  Description of Artificial Sequence: Synthetic oligonucleotide
agaggcggugaccaggcuc

SEQ ID NO: 2982729 - RNA, 19 nt, Artificial Sequence
  Description of Artificial Sequence: Synthetic oligonucleotide
ccaccuggaacuuacaggc

SEQ ID NO: 2982730 - RNA, 19 nt, Artificial Sequence
  Description of Artificial Sequence: Synthetic oligonucleotide
auacugagaccccgagccc

SEQ ID NO: 2982731 - RNA, 19 nt, Artificial Sequence
  Description of Artificial Sequence: Synthetic oligonucleotide
ugagaccccgagcccaugg

SEQ ID NO: 2982732 - RNA, 19 nt, Artificial Sequence
  Description of Artificial Sequence: Synthetic oligonucleotide
gugaaggccaggaacuugg

SEQ ID NO: 2982733 - RNA, 19 nt, Artificial Sequence
  Description of Artificial Sequence: Synthetic oligonucleotide
caggucuuugcacaggaac

SEQ ID NO: 2982734 - RNA, 19 nt, Artificial Sequence
  Description of Artificial Sequence: Synthetic oligonucleotide
cuuugcacaggaacuugag

SEQ ID NO: 2982735 - RNA, 19 nt, Artificial Sequence
  Description of Artificial Sequence: Synthetic oligonucleotide
ugcuuuuggaagguggcug

SEQ ID NO: 2982736 - RNA, 19 nt, Artificial Sequence
  Description of Artificial Sequence: Synthetic oligonucleotide
gcagggaagucacagaggc

SEQ ID NO: 2982737 - RNA, 19 nt, Artificial Sequence
  Description of Artificial Sequence: Synthetic oligonucleotide
uccucuagauacugagacc

SEQ ID NO: 2982738 - RNA, 19 nt, Artificial Sequence
  Description of Artificial Sequence: Synthetic oligonucleotide
ucucugacagccagcgucu

SEQ ID NO: 2982739 - RNA, 19 nt, Artificial Sequence
  Description of Artificial Sequence: Synthetic oligonucleotide
uccauccaugugcuuuugg

SEQ ID NO: 2982740 - RNA, 19 nt, Artificial Sequence
  Description of Artificial Sequence: Synthetic oligonucleotide
acagccagcgucucccggg

SEQ ID NO: 2982741 - RNA, 19 nt, Artificial Sequence
  Description of Artificial Sequence: Synthetic oligonucleotide
agggcauccagcuccucuc

SEQ ID NO: 2982742 - RNA, 19 nt, Artificial Sequence
  Description of Artificial Sequence: Synthetic oligonucleotide
gugaccaggcucuggaagc

SEQ ID NO: 2982743 - RNA, 19 nt, Artificial Sequence
  Description of Artificial Sequence: Synthetic oligonucleotide
aaggugccagucuccuggg

SEQ ID NO: 2982744 - RNA, 19 nt, Artificial Sequence
  Description of Artificial Sequence: Synthetic oligonucleotide
cuuacaggcaggcagggaa

SEQ ID NO: 2982745 - RNA, 19 nt, Artificial Sequence
  Description of Artificial Sequence: Synthetic oligonucleotide
ccucuagauacugagaccc

SEQ ID NO: 2982746 - RNA, 19 nt, Artificial Sequence
  Description of Artificial Sequence: Synthetic oligonucleotide
ggauccucaggacuucugg

SEQ ID NO: 2982747 - RNA, 19 nt, Artificial Sequence
  Description of Artificial Sequence: Synthetic oligonucleotide
cagaggugaccacucaggc

SEQ ID NO: 2982748 - RNA, 19 nt, Artificial Sequence
  Description of Artificial Sequence: Synthetic oligonucleotide
ggaacuugagggcauccag

SEQ ID NO: 2982749 - RNA, 19 nt, Artificial Sequence
  Description of Artificial Sequence: Synthetic oligonucleotide
gaagguggcugcccacagg

SEQ ID NO: 2982750 - RNA, 19 nt, Artificial Sequence
  Description of Artificial Sequence: Synthetic oligonucleotide
uccucaggacuucuggauc

SEQ ID NO: 2982751 - RNA, 19 nt, Artificial Sequence
  Description of Artificial Sequence: Synthetic oligonucleotide
gagcccauggugaugagga

SEQ ID NO: 2982752 - RNA, 19 nt, Artificial Sequence
  Description of Artificial Sequence: Synthetic oligonucleotide
acagaggcggugaccaggc

SEQ ID NO: 2982753 - RNA, 19 nt, Artificial Sequence
  Description of Artificial Sequence: Synthetic oligonucleotide
gaacuugggagcuuccucu

SEQ ID NO: 2982754 - RNA, 19 nt, Artificial Sequence
  Description of Artificial Sequence: Synthetic oligonucleotide
aggcucuggaagcccagcg

SEQ ID NO: 2982755 - RNA, 19 nt, Artificial Sequence
  Description of Artificial Sequence: Synthetic oligonucleotide
cagcacauagguccccugg

SEQ ID NO: 2982756 - RNA, 19 nt, Artificial Sequence
  Description of Artificial Sequence: Synthetic oligonucleotide
acauagguccccugguggu

SEQ ID NO: 2982757 - RNA, 19 nt, Artificial Sequence
  Description of Artificial Sequence: Synthetic oligonucleotide
uguggagggcgccgcacag

SEQ ID NO: 2982758 - RNA, 19 nt, Artificial Sequence
  Description of Artificial Sequence: Synthetic oligonucleotide
uuuuggaagguggcugccc

SEQ ID NO: 2982759 - RNA, 19 nt, Artificial Sequence
  Description of Artificial Sequence: Synthetic oligonucleotide
agucacagaggcggugacc

SEQ ID NO: 2982760 - RNA, 19 nt, Artificial Sequence
  Description of Artificial Sequence: Synthetic oligonucleotide
uggggcagggcaagccugg

SEQ ID NO: 2982761 - RNA, 19 nt, Artificial Sequence
  Description of Artificial Sequence: Synthetic oligonucleotide
agaggugaccacucaggca

SEQ ID NO: 2982762 - RNA, 19 nt, Artificial Sequence
  Description of Artificial Sequence: Synthetic oligonucleotide
gauccucaggacuucugga

SEQ ID NO: 2982763 - RNA, 19 nt, Artificial Sequence
  Description of Artificial Sequence: Synthetic oligonucleotide
ucuggaucaccaccuggaa

SEQ ID NO: 2982764 - RNA, 19 nt, Artificial Sequence
  Description of Artificial Sequence: Synthetic oligonucleotide
cucuagauacugagacccc

SEQ ID NO: 2982765 - RNA, 19 nt, Artificial Sequence
  Description of Artificial Sequence: Synthetic oligonucleotide
gcggaguccauccaugugc

SEQ ID NO: 2982766 - RNA, 19 nt, Artificial Sequence
  Description of Artificial Sequence: Synthetic oligonucleotide
ggugaccaggcucuggaag

SEQ ID NO: 2982767 - RNA, 19 nt, Artificial Sequence
  Description of Artificial Sequence: Synthetic oligonucleotide
uacugagaccccgagccca

SEQ ID NO: 2982768 - RNA, 19 nt, Artificial Sequence
  Description of Artificial Sequence: Synthetic oligonucleotide
gaagcccagcguguggagg

SEQ ID NO: 2982769 - RNA, 19 nt, Artificial Sequence
  Description of Artificial Sequence: Synthetic oligonucleotide
agcacauagguccccuggu

SEQ ID NO: 2982770 - RNA, 19 nt, Artificial Sequence
  Description of Artificial Sequence: Synthetic oligonucleotide
aggucuuugcacaggaacu

SEQ ID NO: 2982771 - RNA, 19 nt, Artificial Sequence
  Description of Artificial Sequence: Synthetic oligonucleotide
agaaggccgcaggugaagg

SEQ ID NO: 2982772 - RNA, 19 nt, Artificial Sequence
  Description of Artificial Sequence: Synthetic oligonucleotide
uccccuggugguuggugcg

SEQ ID NO: 2982773 - RNA, 19 nt, Artificial Sequence
  Description of Artificial Sequence: Synthetic oligonucleotide
auccucaggacuucuggau

SEQ ID NO: 2982774 - RNA, 19 nt, Artificial Sequence
  Description of Artificial Sequence: Synthetic oligonucleotide
ugcggaguccauccaugug

SEQ ID NO: 2982775 - RNA, 19 nt, Artificial Sequence
  Description of Artificial Sequence: Synthetic oligonucleotide
caccaccuggaacuuacag

SEQ ID NO: 2982776 - RNA, 19 nt, Artificial Sequence
  Description of Artificial Sequence: Synthetic oligonucleotide
acuugggagcuuccucuag

SEQ ID NO: 2982777 - RNA, 19 nt, Artificial Sequence
  Description of Artificial Sequence: Synthetic oligonucleotide
cuggaucaccaccuggaac

SEQ ID NO: 2982778 - RNA, 19 nt, Artificial Sequence
  Description of Artificial Sequence: Synthetic oligonucleotide
gaaggccgcaggugaaggc

SEQ ID NO: 2982779 - RNA, 19 nt, Artificial Sequence
  Description of Artificial Sequence: Synthetic oligonucleotide
guggaaaauuguuguccug

SEQ ID NO: 2982780 - RNA, 19 nt, Artificial Sequence
  Description of Artificial Sequence: Synthetic oligonucleotide
gucacagaggcggugacca

SEQ ID NO: 2982781 - RNA, 19 nt, Artificial Sequence
  Description of Artificial Sequence: Synthetic oligonucleotide
gcaggugaaggccaggaac

SEQ ID NO: 2982782 - RNA, 19 nt, Artificial Sequence
  Description of Artificial Sequence: Synthetic oligonucleotide
uggagggcgccgcacagaa

SEQ ID NO: 2982783 - RNA, 19 nt, Artificial Sequence
  Description of Artificial Sequence: Synthetic oligonucleotide
ucuggaagcccagcgugug

SEQ ID NO: 2982784 - RNA, 19 nt, Artificial Sequence
  Description of Artificial Sequence: Synthetic oligonucleotide
ugaugaggaguggaaaauu

SEQ ID NO: 2982785 - RNA, 19 nt, Artificial Sequence
  Description of Artificial Sequence: Synthetic oligonucleotide
cacagaggcggugaccagg

SEQ ID NO: 2982786 - RNA, 19 nt, Artificial Sequence
  Description of Artificial Sequence: Synthetic oligonucleotide
cuggaacuuacaggcaggc

SEQ ID NO: 2982787 - RNA, 19 nt, Artificial Sequence
  Description of Artificial Sequence: Synthetic oligonucleotide
augaggaguggaaaauugu

SEQ ID NO: 2982788 - RNA, 19 nt, Artificial Sequence
  Description of Artificial Sequence: Synthetic oligonucleotide
caggacuucuggaucacca

SEQ ID NO: 2982789 - RNA, 19 nt, Artificial Sequence
  Description of Artificial Sequence: Synthetic oligonucleotide
cuagauacugagaccccga

SEQ ID NO: 2982790 - RNA, 19 nt, Artificial Sequence
  Description of Artificial Sequence: Synthetic oligonucleotide
cagggaagucacagaggcg

SEQ ID NO: 2982791 - RNA, 19 nt, Artificial Sequence
  Description of Artificial Sequence: Synthetic oligonucleotide
uugggagcuuccucuagau

SEQ ID NO: 2982792 - RNA, 19 nt, Artificial Sequence
  Description of Artificial Sequence: Synthetic oligonucleotide
uggaagcccagcgugugga

SEQ ID NO: 2982793 - RNA, 19 nt, Artificial Sequence
  Description of Artificial Sequence: Synthetic oligonucleotide
cagggcaagccugggaucc

SEQ ID NO: 2982794 - RNA, 19 nt, Artificial Sequence
  Description of Artificial Sequence: Synthetic oligonucleotide
gcuuuuggaagguggcugc

SEQ ID NO: 2982795 - RNA, 19 nt, Artificial Sequence
  Description of Artificial Sequence: Synthetic oligonucleotide
cauccaugugcuuuuggaa

SEQ ID NO: 2982796 - RNA, 19 nt, Artificial Sequence
  Description of Artificial Sequence: Synthetic oligonucleotide
ggaaaauuguuguccugca

SEQ ID NO: 2982797 - RNA, 19 nt, Artificial Sequence
  Description of Artificial Sequence: Synthetic oligonucleotide
ggugccagucuccuggggc

SEQ ID NO: 2982798 - RNA, 19 nt, Artificial Sequence
  Description of Artificial Sequence: Synthetic oligonucleotide
gaaggccaggaacuuggga

SEQ ID NO: 2982799 - RNA, 19 nt, Artificial Sequence
  Description of Artificial Sequence: Synthetic oligonucleotide
ggugaugaggaguggaaaa

SEQ ID NO: 2982800 - RNA, 19 nt, Artificial Sequence
  Description of Artificial Sequence: Synthetic oligonucleotide
ugaccaggcucuggaagcc

SEQ ID NO: 2982801 - RNA, 19 nt, Artificial Sequence
  Description of Artificial Sequence: Synthetic oligonucleotide
uggugaugaggaguggaaa

SEQ ID NO: 2982802 - RNA, 19 nt, Artificial Sequence
  Description of Artificial Sequence: Synthetic oligonucleotide
ugacagccagcgucucccg

SEQ ID NO: 2982803 - RNA, 19 nt, Artificial Sequence
  Description of Artificial Sequence: Synthetic oligonucleotide
aguccauccaugugcuuuu

SEQ ID NO: 2982804 - RNA, 19 nt, Artificial Sequence
  Description of Artificial Sequence: Synthetic oligonucleotide
gcagaggugaccacucagg

SEQ ID NO: 2982805 - RNA, 19 nt, Artificial Sequence
  Description of Artificial Sequence: Synthetic oligonucleotide
cuuccucuagauacugaga

SEQ ID NO: 2982806 - RNA, 19 nt, Artificial Sequence
  Description of Artificial Sequence: Synthetic oligonucleotide
cauccagcuccucucugac

SEQ ID NO: 2982807 - RNA, 19 nt, Artificial Sequence
  Description of Artificial Sequence: Synthetic oligonucleotide
agguggggcagggcaagcc

SEQ ID NO: 2982808 - RNA, 19 nt, Artificial Sequence
  Description of Artificial Sequence: Synthetic oligonucleotide
cuuuuggaagguggcugcc

SEQ ID NO: 2982809 - RNA, 19 nt, Artificial Sequence
  Description of Artificial Sequence: Synthetic oligonucleotide
ugcccacaggucuuugcac

SEQ ID NO: 2982810 - RNA, 19 nt, Artificial Sequence
  Description of Artificial Sequence: Synthetic oligonucleotide
agaccccgagcccauggug

SEQ ID NO: 2982811 - RNA, 19 nt, Artificial Sequence
  Description of Artificial Sequence: Synthetic oligonucleotide
uggaagguggcugcccaca

SEQ ID NO: 2982812 - RNA, 19 nt, Artificial Sequence
  Description of Artificial Sequence: Synthetic oligonucleotide
cacucaggcagggccaagg

SEQ ID NO: 2982813 - RNA, 19 nt, Artificial Sequence
  Description of Artificial Sequence: Synthetic oligonucleotide
cccauggugaugaggagug

SEQ ID NO: 2982814 - RNA, 19 nt, Artificial Sequence
  Description of Artificial Sequence: Synthetic oligonucleotide
aggcaggcagggaagucac

SEQ ID NO: 2982815 - RNA, 19 nt, Artificial Sequence
  Description of Artificial Sequence: Synthetic oligonucleotide
gcucuggaagcccagcgug

SEQ ID NO: 2982816 - RNA, 19 nt, Artificial Sequence
  Description of Artificial Sequence: Synthetic oligonucleotide
acucaggcagggccaaggu

SEQ ID NO: 2982817 - RNA, 19 nt, Artificial Sequence
  Description of Artificial Sequence: Synthetic oligonucleotide
uggaacuuacaggcaggca

SEQ ID NO: 2982818 - RNA, 19 nt, Artificial Sequence
  Description of Artificial Sequence: Synthetic oligonucleotide
agggccaaggugccagucu

SEQ ID NO: 2982819 - RNA, 19 nt, Artificial Sequence
  Description of Artificial Sequence: Synthetic oligonucleotide
gucuuugcacaggaacuug

SEQ ID NO: 2982820 - RNA, 19 nt, Artificial Sequence
  Description of Artificial Sequence: Synthetic oligonucleotide
ggaguggaaaauuguuguc

SEQ ID NO: 2982821 - RNA, 19 nt, Artificial Sequence
  Description of Artificial Sequence: Synthetic oligonucleotide
cuggaagcccagcgugugg

SEQ ID NO: 2982822 - RNA, 19 nt, Artificial Sequence
  Description of Artificial Sequence: Synthetic oligonucleotide
cuugggagcuuccucuaga

SEQ ID NO: 2982823 - RNA, 19 nt, Artificial Sequence
  Description of Artificial Sequence: Synthetic oligonucleotide
cagcuccucucugacagcc

SEQ ID NO: 2982824 - RNA, 19 nt, Artificial Sequence
  Description of Artificial Sequence: Synthetic oligonucleotide
auagguccccuggugguug

SEQ ID NO: 2982825 - RNA, 19 nt, Artificial Sequence
  Description of Artificial Sequence: Synthetic oligonucleotide
ccuggaacuuacaggcagg

SEQ ID NO: 2982826 - RNA, 19 nt, Artificial Sequence
  Description of Artificial Sequence: Synthetic oligonucleotide
ucaggacuucuggaucacc

SEQ ID NO: 2982827 - RNA, 19 nt, Artificial Sequence
  Description of Artificial Sequence: Synthetic oligonucleotide
guccccuggugguuggugc

SEQ ID NO: 2982828 - RNA, 19 nt, Artificial Sequence
  Description of Artificial Sequence: Synthetic oligonucleotide
uggugcggaguccauccau

SEQ ID NO: 2982829 - RNA, 19 nt, Artificial Sequence
  Description of Artificial Sequence: Synthetic oligonucleotide
cacaggucuuugcacagga

SEQ ID NO: 2982830 - RNA, 19 nt, Artificial Sequence
  Description of Artificial Sequence: Synthetic oligonucleotide
ggaacuugggagcuuccuc

SEQ ID NO: 2982831 - RNA, 19 nt, Artificial Sequence
  Description of Artificial Sequence: Synthetic oligonucleotide
agcguguggagggcgccgc

SEQ ID NO: 2982832 - RNA, 19 nt, Artificial Sequence
  Description of Artificial Sequence: Synthetic oligonucleotide
uuggugcggaguccaucca

SEQ ID NO: 2982833 - RNA, 19 nt, Artificial Sequence
  Description of Artificial Sequence: Synthetic oligonucleotide
caggugaaggccaggaacu

SEQ ID NO: 2982834 - RNA, 19 nt, Artificial Sequence
  Description of Artificial Sequence: Synthetic oligonucleotide
uuggaagguggcugcccac

SEQ ID NO: 2982835 - RNA, 19 nt, Artificial Sequence
  Description of Artificial Sequence: Synthetic oligonucleotide
ucaccaccuggaacuuaca

SEQ ID NO: 2982836 - RNA, 19 nt, Artificial Sequence
  Description of Artificial Sequence: Synthetic oligonucleotide
uacaggcaggcagggaagu

SEQ ID NO: 2982837 - RNA, 19 nt, Artificial Sequence
  Description of Artificial Sequence: Synthetic oligonucleotide
gcugagguggggcagggca

SEQ ID NO: 2982838 - RNA, 19 nt, Artificial Sequence
  Description of Artificial Sequence: Synthetic oligonucleotide
ugcagcacauagguccccu

SEQ ID NO: 2982839 - RNA, 19 nt, Artificial Sequence
  Description of Artificial Sequence: Synthetic oligonucleotide
ugggagcuuccucuagaua

SEQ ID NO: 2982840 - RNA, 19 nt, Artificial Sequence
  Description of Artificial Sequence: Synthetic oligonucleotide
agcgucucccggggcagcc

SEQ ID NO: 2982841 - RNA, 19 nt, Artificial Sequence
  Description of Artificial Sequence: Synthetic oligonucleotide
aggugccagucuccugggg

SEQ ID NO: 2982842 - RNA, 19 nt, Artificial Sequence
  Description of Artificial Sequence: Synthetic oligonucleotide
cuccucucugacagccagc

SEQ ID NO: 2982843 - RNA, 19 nt, Artificial Sequence
  Description of Artificial Sequence: Synthetic oligonucleotide
gaccccgagcccaugguga

SEQ ID NO: 2982844 - RNA, 19 nt, Artificial Sequence
  Description of Artificial Sequence: Synthetic oligonucleotide
ggaagguggcugcccacag

SEQ ID NO: 2982845 - RNA, 19 nt, Artificial Sequence
  Description of Artificial Sequence: Synthetic oligonucleotide
auggugaugaggaguggaa

SEQ ID NO: 2982846 - RNA, 19 nt, Artificial Sequence
  Description of Artificial Sequence: Synthetic oligonucleotide
caugugcuuuuggaaggug

SEQ ID NO: 2982847 - RNA, 19 nt, Artificial Sequence
  Description of Artificial Sequence: Synthetic oligonucleotide
ccugcagcacauagguccc

SEQ ID NO: 2982848 - RNA, 19 nt, Artificial Sequence
  Description of Artificial Sequence: Synthetic oligonucleotide
gcacauagguccccuggug

SEQ ID NO: 2982849 - RNA, 19 nt, Artificial Sequence
  Description of Artificial Sequence: Synthetic oligonucleotide
cagccagcgucucccgggg

SEQ ID NO: 2982850 - RNA, 19 nt, Artificial Sequence
  Description of Artificial Sequence: Synthetic oligonucleotide
cagaaggccgcaggugaag

SEQ ID NO: 2982851 - RNA, 19 nt, Artificial Sequence
  Description of Artificial Sequence: Synthetic oligonucleotide
ggcagggaagucacagagg

SEQ ID NO: 2982852 - RNA, 19 nt, Artificial Sequence
  Description of Artificial Sequence: Synthetic oligonucleotide
ccauccaugugcuuuugga

SEQ ID NO: 2982853 - RNA, 19 nt, Artificial Sequence
  Description of Artificial Sequence: Synthetic oligonucleotide
ggugaaggccaggaacuug

SEQ ID NO: 2982854 - RNA, 19 nt, Artificial Sequence
  Description of Artificial Sequence: Synthetic oligonucleotide
gaggcggugaccaggcucu

SEQ ID NO: 2982855 - RNA, 19 nt, Artificial Sequence
  Description of Artificial Sequence: Synthetic oligonucleotide
gaccacucaggcagggcca

SEQ ID NO: 2982856 - RNA, 19 nt, Artificial Sequence
  Description of Artificial Sequence: Synthetic oligonucleotide
ggcgccgcacagaaggccg

SEQ ID NO: 2982857 - RNA, 19 nt, Artificial Sequence
  Description of Artificial Sequence: Synthetic oligonucleotide
gaguccauccaugugcuuu

SEQ ID NO: 2982858 - RNA, 19 nt, Artificial Sequence
  Description of Artificial Sequence: Synthetic oligonucleotide
agcccagcguguggagggc

SEQ ID NO: 2982859 - RNA, 19 nt, Artificial Sequence
  Description of Artificial Sequence: Synthetic oligonucleotide
caggcaggcagggaaguca

SEQ ID NO: 2982860 - RNA, 19 nt, Artificial Sequence
  Description of Artificial Sequence: Synthetic oligonucleotide
gaccaggcucuggaagccc

SEQ ID NO: 2982861 - RNA, 19 nt, Artificial Sequence
  Description of Artificial Sequence: Synthetic oligonucleotide
gugguuggugcggagucca

SEQ ID NO: 2982862 - RNA, 19 nt, Artificial Sequence
  Description of Artificial Sequence: Synthetic oligonucleotide
acuuacaggcaggcaggga

SEQ ID NO: 2982863 - RNA, 19 nt, Artificial Sequence
  Description of Artificial Sequence: Synthetic oligonucleotide
ugggauccucaggacuucu

SEQ ID NO: 2982864 - RNA, 19 nt, Artificial Sequence
  Description of Artificial Sequence: Synthetic oligonucleotide
ggugcggaguccauccaug

SEQ ID NO: 2982865 - RNA, 19 nt, Artificial Sequence
  Description of Artificial Sequence: Synthetic oligonucleotide
ggugaccacucaggcaggg

SEQ ID NO: 2982866 - RNA, 19 nt, Artificial Sequence
  Description of Artificial Sequence: Synthetic oligonucleotide
cucaggacuucuggaucac

SEQ ID NO: 2982867 - RNA, 19 nt, Artificial Sequence
  Description of Artificial Sequence: Synthetic oligonucleotide
gguggcugcccacaggucu

SEQ ID NO: 2982868 - RNA, 19 nt, Artificial Sequence
  Description of Artificial Sequence: Synthetic oligonucleotide
gcccacaggucuuugcaca

SEQ ID NO: 2982869 - RNA, 19 nt, Artificial Sequence
  Description of Artificial Sequence: Synthetic oligonucleotide
caggcagggaagucacaga

SEQ ID NO: 2982870 - RNA, 19 nt, Artificial Sequence
  Description of Artificial Sequence: Synthetic oligonucleotide
guggggcagggcaagccug

SEQ ID NO: 2982871 - RNA, 19 nt, Artificial Sequence
  Description of Artificial Sequence: Synthetic oligonucleotide
ggaagucacagaggcggug

SEQ ID NO: 2982872 - RNA, 19 nt, Artificial Sequence
  Description of Artificial Sequence: Synthetic oligonucleotide
ccucaggacuucuggauca

SEQ ID NO: 2982873 - RNA, 19 nt, Artificial Sequence
  Description of Artificial Sequence: Synthetic oligonucleotide
ggaagcccagcguguggag

SEQ ID NO: 2982874 - RNA, 19 nt, Artificial Sequence
  Description of Artificial Sequence: Synthetic oligonucleotide
gggccaaggugccagucuc

SEQ ID NO: 2982875 - RNA, 19 nt, Artificial Sequence
  Description of Artificial Sequence: Synthetic oligonucleotide
guguggagggcgccgcaca

SEQ ID NO: 2982876 - RNA, 19 nt, Artificial Sequence
  Description of Artificial Sequence: Synthetic oligonucleotide
gugaccacucaggcagggc

SEQ ID NO: 2982877 - RNA, 19 nt, Artificial Sequence
  Description of Artificial Sequence: Synthetic oligonucleotide
accaggcucuggaagccca

SEQ ID NO: 2982878 - RNA, 19 nt, Artificial Sequence
  Description of Artificial Sequence: Synthetic oligonucleotide
cugagguggggcagggcaa

SEQ ID NO: 2982879 - RNA, 19 nt, Artificial Sequence
  Description of Artificial Sequence: Synthetic oligonucleotide
accccgagcccauggugau

SEQ ID NO: 2982880 - RNA, 19 nt, Artificial Sequence
  Description of Artificial Sequence: Synthetic oligonucleotide
gcacaggaacuugagggca

SEQ ID NO: 2982881 - RNA, 19 nt, Artificial Sequence
  Description of Artificial Sequence: Synthetic oligonucleotide
caccuggaacuuacaggca

SEQ ID NO: 2982882 - RNA, 19 nt, Artificial Sequence
  Description of Artificial Sequence: Synthetic oligonucleotide
acagaaggccgcaggugaa

SEQ ID NO: 2982883 - RNA, 19 nt, Artificial Sequence
  Description of Artificial Sequence: Synthetic oligonucleotide
ugguuggugcggaguccau

SEQ ID NO: 2982884 - RNA, 19 nt, Artificial Sequence
  Description of Artificial Sequence: Synthetic oligonucleotide
uguuguccugcagcacaua

SEQ ID NO: 2982885 - RNA, 19 nt, Artificial Sequence
  Description of Artificial Sequence: Synthetic oligonucleotide
cagcguguggagggcgccg

SEQ ID NO: 2982886 - RNA, 19 nt, Artificial Sequence
  Description of Artificial Sequence: Synthetic oligonucleotide
gcggugaccaggcucugga

SEQ ID NO: 2982887 - RNA, 19 nt, Artificial Sequence
  Description of Artificial Sequence: Synthetic oligonucleotide
cuggggcugagguggggca

SEQ ID NO: 2982888 - RNA, 19 nt, Artificial Sequence
  Description of Artificial Sequence: Synthetic oligonucleotide
gagguggggcagggcaagc

SEQ ID NO: 2982889 - RNA, 19 nt, Artificial Sequence
  Description of Artificial Sequence: Synthetic oligonucleotide
gcacagaaggccgcaggug

SEQ ID NO: 2982890 - RNA, 19 nt, Artificial Sequence
  Description of Artificial Sequence: Synthetic oligonucleotide
aggugaaggccaggaacuu

SEQ ID NO: 2982891 - RNA, 19 nt, Artificial Sequence
  Description of Artificial Sequence: Synthetic oligonucleotide
cugggauccucaggacuuc

SEQ ID NO: 2982892 - RNA, 19 nt, Artificial Sequence
  Description of Artificial Sequence: Synthetic oligonucleotide
ggcagggcaagccugggau

SEQ ID NO: 2982893 - RNA, 19 nt, Artificial Sequence
  Description of Artificial Sequence: Synthetic oligonucleotide
cugcagcacauaggucccc

SEQ ID NO: 2982894 - RNA, 19 nt, Artificial Sequence
  Description of Artificial Sequence: Synthetic oligonucleotide
agguggcugcccacagguc

SEQ ID NO: 2982895 - RNA, 19 nt, Artificial Sequence
  Description of Artificial Sequence: Synthetic oligonucleotide
gagaccccgagcccauggu

SEQ ID NO: 2982896 - RNA, 19 nt, Artificial Sequence
  Description of Artificial Sequence: Synthetic oligonucleotide
gcagcacauagguccccug

SEQ ID NO: 2982897 - RNA, 19 nt, Artificial Sequence
  Description of Artificial Sequence: Synthetic oligonucleotide
cucuggaagcccagcgugu

SEQ ID NO: 2982898 - RNA, 19 nt, Artificial Sequence
  Description of Artificial Sequence: Synthetic oligonucleotide
acaggucuuugcacaggaa

SEQ ID NO: 2982899 - RNA, 19 nt, Artificial Sequence
  Description of Artificial Sequence: Synthetic oligonucleotide
cgcagaggugaccacucag

SEQ ID NO: 2982900 - RNA, 19 nt, Artificial Sequence
  Description of Artificial Sequence: Synthetic oligonucleotide
acugagaccccgagcccau

SEQ ID NO: 2982901 - RNA, 19 nt, Artificial Sequence
  Description of Artificial Sequence: Synthetic oligonucleotide
gugcggaguccauccaugu

SEQ ID NO: 2982902 - RNA, 19 nt, Artificial Sequence
  Description of Artificial Sequence: Synthetic oligonucleotide
gaucaccaccuggaacuua

SEQ ID NO: 2982903 - RNA, 19 nt, Artificial Sequence
  Description of Artificial Sequence: Synthetic oligonucleotide
accacucaggcagggccaa

SEQ ID NO: 2982904 - RNA, 19 nt, Artificial Sequence
  Description of Artificial Sequence: Synthetic oligonucleotide
aggccgcaggugaaggcca

SEQ ID NO: 2982905 - RNA, 19 nt, Artificial Sequence
  Description of Artificial Sequence: Synthetic oligonucleotide
gguuggugcggaguccauc

SEQ ID NO: 2982906 - RNA, 19 nt, Artificial Sequence
  Description of Artificial Sequence: Synthetic oligonucleotide
gggauccucaggacuucug

SEQ ID NO: 2982907 - RNA, 19 nt, Artificial Sequence
  Description of Artificial Sequence: Synthetic oligonucleotide
cccgcagaggugaccacuc

SEQ ID NO: 2982908 - RNA, 19 nt, Artificial Sequence
  Description of Artificial Sequence: Synthetic oligonucleotide
gugcuuuuggaagguggcu

SEQ ID NO: 2982909 - RNA, 19 nt, Artificial Sequence
  Description of Artificial Sequence: Synthetic oligonucleotide
cacaggaacuugagggcau

SEQ ID NO: 2982910 - RNA, 19 nt, Artificial Sequence
  Description of Artificial Sequence: Synthetic oligonucleotide
gcagggcaagccugggauc

SEQ ID NO: 2982911 - RNA, 19 nt, Artificial Sequence
  Description of Artificial Sequence: Synthetic oligonucleotide
cccagcguguggagggcgc

SEQ ID NO: 2982912 - RNA, 19 nt, Artificial Sequence
  Description of Artificial Sequence: Synthetic oligonucleotide
ggcggugaccaggcucugg

SEQ ID NO: 2982913 - RNA, 19 nt, Artificial Sequence
  Description of Artificial Sequence: Synthetic oligonucleotide
gguggggcagggcaagccu

SEQ ID NO: 2982914 - RNA, 19 nt, Artificial Sequence
  Description of Artificial Sequence: Synthetic oligonucleotide
agcuccucucugacagcca

SEQ ID NO: 2982915 - RNA, 19 nt, Artificial Sequence
  Description of Artificial Sequence: Synthetic oligonucleotide
agggcaagccugggauccu

SEQ ID NO: 2982916 - RNA, 19 nt, Artificial Sequence
  Description of Artificial Sequence: Synthetic oligonucleotide
ggccaaggugccagucucc

SEQ ID NO: 2982917 - RNA, 19 nt, Artificial Sequence
  Description of Artificial Sequence: Synthetic oligonucleotide
ccaaggugccagucuccug

SEQ ID NO: 2982918 - RNA, 19 nt, Artificial Sequence
  Description of Artificial Sequence: Synthetic oligonucleotide
ccauggugaugaggagugg

SEQ ID NO: 2982919 - RNA, 19 nt, Artificial Sequence
  Description of Artificial Sequence: Synthetic oligonucleotide
ccagcuccucucugacagc

SEQ ID NO: 2982920 - RNA, 19 nt, Artificial Sequence
  Description of Artificial Sequence: Synthetic oligonucleotide
gguccccuggugguuggug

SEQ ID NO: 2982921 - RNA, 19 nt, Artificial Sequence
  Description of Artificial Sequence: Synthetic oligonucleotide
ggcucuggaagcccagcgu

SEQ ID NO: 2982922 - RNA, 19 nt, Artificial Sequence
  Description of Artificial Sequence: Synthetic oligonucleotide
cgagcccauggugaugagg

SEQ ID NO: 2982923 - RNA, 19 nt, Artificial Sequence
  Description of Artificial Sequence: Synthetic oligonucleotide
ggucuuugcacaggaacuu

SEQ ID NO: 2982924 - RNA, 19 nt, Artificial Sequence
  Description of Artificial Sequence: Synthetic oligonucleotide
cugagaccccgagcccaug

SEQ ID NO: 2982925 - RNA, 19 nt, Artificial Sequence
  Description of Artificial Sequence: Synthetic oligonucleotide
cccgagcccauggugauga

SEQ ID NO: 2982926 - RNA, 19 nt, Artificial Sequence
  Description of Artificial Sequence: Synthetic oligonucleotide
guggagggcgccgcacaga

SEQ ID NO: 2982927 - RNA, 19 nt, Artificial Sequence
  Description of Artificial Sequence: Synthetic oligonucleotide
gcccagcguguggagggcg

SEQ ID NO: 2982928 - RNA, 19 nt, Artificial Sequence
  Description of Artificial Sequence: Synthetic oligonucleotide
ggcaagccugggauccuca

SEQ ID NO: 2982929 - RNA, 19 nt, Artificial Sequence
  Description of Artificial Sequence: Synthetic oligonucleotide
gggcagggcaagccuggga

SEQ ID NO: 2982930 - RNA, 19 nt, Artificial Sequence
  Description of Artificial Sequence: Synthetic oligonucleotide
gcccauggugaugaggagu

SEQ ID NO: 2982931 - RNA, 19 nt, Artificial Sequence
  Description of Artificial Sequence: Synthetic oligonucleotide
ggccgcaggugaaggccag

SEQ ID NO: 2982932 - RNA, 19 nt, Artificial Sequence
  Description of Artificial Sequence: Synthetic oligonucleotide
ccagcguguggagggcgcc

SEQ ID NO: 2982933 - RNA, 19 nt, Artificial Sequence
  Description of Artificial Sequence: Synthetic oligonucleotide
gccgcaggugaaggccagg

SEQ ID NO: 2982934 - RNA, 19 nt, Artificial Sequence
  Description of Artificial Sequence: Synthetic oligonucleotide
gccgcacagaaggccgcag

SEQ ID NO: 2982935 - RNA, 19 nt, Artificial Sequence
  Description of Artificial Sequence: Synthetic oligonucleotide
ccccuggugguuggugcgg

SEQ ID NO: 2982936 - RNA, 19 nt, Artificial Sequence
  Description of Artificial Sequence: Synthetic oligonucleotide
ggagggcgccgcacagaag

SEQ ID NO: 2982937 - RNA, 19 nt, Artificial Sequence
  Description of Artificial Sequence: Synthetic oligonucleotide
aggcggugaccaggcucug

SEQ ID NO: 2982938 - RNA, 19 nt, Artificial Sequence
  Description of Artificial Sequence: Synthetic oligonucleotide
agguccccuggugguuggu

SEQ ID NO: 2982939 - RNA, 19 nt, Artificial Sequence
  Description of Artificial Sequence: Synthetic oligonucleotide
cauagguccccuggugguu

SEQ ID NO: 2982940 - RNA, 19 nt, Artificial Sequence
  Description of Artificial Sequence: Synthetic oligonucleotide
gccaaggugccagucuccu

SEQ ID NO: 2982941 - RNA, 19 nt, Artificial Sequence
  Description of Artificial Sequence: Synthetic oligonucleotide
gggcaagccugggauccuc

SEQ ID NO: 2982942 - RNA, 19 nt, Artificial Sequence
  Description of Artificial Sequence: Synthetic oligonucleotide
ggccaggaacuugggagcu

SEQ ID NO: 2982943 - RNA, 19 nt, Artificial Sequence
  Description of Artificial Sequence: Synthetic oligonucleotide
ggcugcccacaggucuuug

SEQ ID NO: 2982944 - RNA, 19 nt, Artificial Sequence
  Description of Artificial Sequence: Synthetic oligonucleotide
guggcugcccacaggucuu

SEQ ID NO: 2982945 - RNA, 19 nt, Artificial Sequence
  Description of Artificial Sequence: Synthetic oligonucleotide
gcgccgcacagaaggccgc

SEQ ID NO: 2982946 - RNA, 19 nt, Artificial Sequence
  Description of Artificial Sequence: Synthetic oligonucleotide
ggcaggcagggaagucaca

SEQ ID NO: 2982947 - RNA, 19 nt, Artificial Sequence
  Description of Artificial Sequence: Synthetic oligonucleotide
cguguggagggcgccgcac

SEQ ID NO: 2982948 - RNA, 19 nt, Artificial Sequence
  Description of Artificial Sequence: Synthetic oligonucleotide
ccgagcccauggugaugag

SEQ ID NO: 2982949 - RNA, 19 nt, Artificial Sequence
  Description of Artificial Sequence: Synthetic oligonucleotide
cggaguccauccaugugcu

SEQ ID NO: 2982950 - RNA, 19 nt, Artificial Sequence
  Description of Artificial Sequence: Synthetic oligonucleotide
gccagucuccuggggcuga

SEQ ID NO: 2982951 - RNA, 19 nt, Artificial Sequence
  Description of Artificial Sequence: Synthetic oligonucleotide
gcguguggagggcgccgca

SEQ ID NO: 2982952 - RNA, 19 nt, Artificial Sequence
  Description of Artificial Sequence: Synthetic oligonucleotide
ccaugugcuuuuggaaggu

SEQ ID NO: 2982953 - RNA, 19 nt, Artificial Sequence
  Description of Artificial Sequence: Synthetic oligonucleotide
ccgcagaggugaccacuca

SEQ ID NO: 2982954 - RNA, 19 nt, Artificial Sequence
  Description of Artificial Sequence: Synthetic oligonucleotide
ccacucaggcagggccaag

SEQ ID NO: 2982955 - RNA, 19 nt, Artificial Sequence
  Description of Artificial Sequence: Synthetic oligonucleotide
ggaucaccaccuggaacuu

SEQ ID NO: 2982956 - RNA, 19 nt, Artificial Sequence
  Description of Artificial Sequence: Synthetic oligonucleotide
cagaggcggugaccaggcu

SEQ ID NO: 2982957 - RNA, 19 nt, Artificial Sequence
  Description of Artificial Sequence: Synthetic oligonucleotide
ggaguccauccaugugcuu

SEQ ID NO: 2982958 - RNA, 19 nt, Artificial Sequence
  Description of Artificial Sequence: Synthetic oligonucleotide
ccccgagcccauggugaug

SEQ ID NO: 2982959 - RNA, 19 nt, Artificial Sequence
  Description of Artificial Sequence: Synthetic oligonucleotide
cccuggugguuggugcgga

SEQ ID NO: 2982960 - RNA, 19 nt, Artificial Sequence
  Description of Artificial Sequence: Synthetic oligonucleotide
cggugaccaggcucuggaa

SEQ ID NO: 2982961 - RNA, 19 nt, Artificial Sequence
  Description of Artificial Sequence: Synthetic oligonucleotide
ccucucugacagccagcgu

SEQ ID NO: 2982962 - RNA, 19 nt, Artificial Sequence
  Description of Artificial Sequence: Synthetic oligonucleotide
cgccgcacagaaggccgca

SEQ ID NO: 2982963 - RNA, 19 nt, Artificial Sequence
  Description of Artificial Sequence: Synthetic oligonucleotide
ucaacaucuggccagaugg

SEQ ID NO: 2982964 - RNA, 19 nt, Artificial Sequence
  Description of Artificial Sequence: Synthetic oligonucleotide
aauauccacagacauauug

SEQ ID NO: 2982965 - RNA, 19 nt, Artificial Sequence
  Description of Artificial Sequence: Synthetic oligonucleotide
uccacagacauauugaugc

SEQ ID NO: 2982966 - RNA, 19 nt, Artificial Sequence
  Description of Artificial Sequence: Synthetic oligonucleotide
aauuugugcaucgaucucc

SEQ ID NO: 2982967 - RNA, 19 nt, Artificial Sequence
  Description of Artificial Sequence: Synthetic oligonucleotide
aaauucaacaucuggccag

SEQ ID NO: 2982968 - RNA, 19 nt, Artificial Sequence
  Description of Artificial Sequence: Synthetic oligonucleotide
auauugaugcucccaaugc

SEQ ID NO: 2982969 - RNA, 19 nt, Artificial Sequence
  Description of Artificial Sequence: Synthetic oligonucleotide
uuugaugugagcuccauga

SEQ ID NO: 2982970 - RNA, 19 nt, Artificial Sequence
  Description of Artificial Sequence: Synthetic oligonucleotide
uccaaauucaacaucuggc

SEQ ID NO: 2982971 - RNA, 19 nt, Artificial Sequence
  Description of Artificial Sequence: Synthetic oligonucleotide
agaugagguaaauuugugc

SEQ ID NO: 2982972 - RNA, 19 nt, Artificial Sequence
  Description of Artificial Sequence: Synthetic oligonucleotide
uaaauuugugcaucgaucu

SEQ ID NO: 2982973 - RNA, 19 nt, Artificial Sequence
  Description of Artificial Sequence: Synthetic oligonucleotide
uacagcagaaccugaaugg

SEQ ID NO: 2982974 - RNA, 19 nt, Artificial Sequence
  Description of Artificial Sequence: Synthetic oligonucleotide
cuuguagucaaguucagug

SEQ ID NO: 2982975 - RNA, 19 nt, Artificial Sequence
  Description of Artificial Sequence: Synthetic oligonucleotide
uuccaaauucaacaucugg

SEQ ID NO: 2982976 - RNA, 19 nt, Artificial Sequence
  Description of Artificial Sequence: Synthetic oligonucleotide
ucaauauccacagacauau

SEQ ID NO: 2982977 - RNA, 19 nt, Artificial Sequence
  Description of Artificial Sequence: Synthetic oligonucleotide
aaacagcacaccuguauag

SEQ ID NO: 2982978 - RNA, 19 nt, Artificial Sequence
  Description of Artificial Sequence: Synthetic oligonucleotide
aaugagguggaccacuggu

SEQ ID NO: 2982979 - RNA, 19 nt, Artificial Sequence
  Description of Artificial Sequence: Synthetic oligonucleotide
ugagaugagguaaauuugu

SEQ ID NO: 2982980 - RNA, 19 nt, Artificial Sequence
  Description of Artificial Sequence: Synthetic oligonucleotide
ugagguaggacuuggugag

SEQ ID NO: 2982981 - RNA, 19 nt, Artificial Sequence
  Description of Artificial Sequence: Synthetic oligonucleotide
aaauuugugcaucgaucuc

SEQ ID NO: 2982982 - RNA, 19 nt, Artificial Sequence
  Description of Artificial Sequence: Synthetic oligonucleotide
agagggaccaggcuggugg

SEQ ID NO: 2982983 - RNA, 19 nt, Artificial Sequence
  Description of Artificial Sequence: Synthetic oligonucleotide
uguagucaaguucagugcu

SEQ ID NO: 2982984 - RNA, 19 nt, Artificial Sequence
  Description of Artificial Sequence: Synthetic oligonucleotide
acagacauauugaugcucc

SEQ ID NO: 2982985 - RNA, 19 nt, Artificial Sequence
  Description of Artificial Sequence: Synthetic oligonucleotide
agagccugcaaugaggugg

SEQ ID NO: 2982986 - RNA, 19 nt, Artificial Sequence
  Description of Artificial Sequence: Synthetic oligonucleotide
uuucugggcaaacagcaca

SEQ ID NO: 2982987 - RNA, 19 nt, Artificial Sequence
  Description of Artificial Sequence: Synthetic oligonucleotide
agcacaccuguauaggugg

SEQ ID NO: 2982988 - RNA, 19 nt, Artificial Sequence
  Description of Artificial Sequence: Synthetic oligonucleotide
gagguaaauuugugcaucg

SEQ ID NO: 2982989 - RNA, 19 nt, Artificial Sequence
  Description of Artificial Sequence: Synthetic oligonucleotide
uuggugagcagugagagcu

SEQ ID NO: 2982990 - RNA, 19 nt, Artificial Sequence
  Description of Artificial Sequence: Synthetic oligonucleotide
uuguagucaaguucagugc

SEQ ID NO: 2982991 - RNA, 19 nt, Artificial Sequence
  Description of Artificial Sequence: Synthetic oligonucleotide
gaugagguaggacuuggug

SEQ ID NO: 2982992 - RNA, 19 nt, Artificial Sequence
  Description of Artificial Sequence: Synthetic oligonucleotide
uggaccacugguuucuggg

SEQ ID NO: 2982993 - RNA, 19 nt, Artificial Sequence
  Description of Artificial Sequence: Synthetic oligonucleotide
agcagaaccugaauggagc

SEQ ID NO: 2982994 - RNA, 19 nt, Artificial Sequence
  Description of Artificial Sequence: Synthetic oligonucleotide
uauugaugcucccaaugcu

SEQ ID NO: 2982995 - RNA, 19 nt, Artificial Sequence
  Description of Artificial Sequence: Synthetic oligonucleotide
cuuacucucugcaggagag

SEQ ID NO: 2982996 - RNA, 19 nt, Artificial Sequence
  Description of Artificial Sequence: Synthetic oligonucleotide
ggugcugcucaucagaggg

SEQ ID NO: 2982997 - RNA, 19 nt, Artificial Sequence
  Description of Artificial Sequence: Synthetic oligonucleotide
cauauugaugcucccaaug

SEQ ID NO: 2982998 - RNA, 19 nt, Artificial Sequence
  Description of Artificial Sequence: Synthetic oligonucleotide
aacagcacaccuguauagg

SEQ ID NO: 2982999 - RNA, 19 nt, Artificial Sequence
  Description of Artificial Sequence: Synthetic oligonucleotide
gguggugccaucaauaucc

SEQ ID NO: 2983000 - RNA, 19 nt, Artificial Sequence
  Description of Artificial Sequence: Synthetic oligonucleotide
auggagccuggccagaugg

SEQ ID NO: 2983001 - RNA, 19 nt, Artificial Sequence
  Description of Artificial Sequence: Synthetic oligonucleotide
ugaugugagcuccaugaga

SEQ ID NO: 2983002 - RNA, 19 nt, Artificial Sequence
  Description of Artificial Sequence: Synthetic oligonucleotide
aucgaucucccuuacucuc

SEQ ID NO: 2983003 - RNA, 19 nt, Artificial Sequence
  Description of Artificial Sequence: Synthetic oligonucleotide
ugugagcuccaugagauga

SEQ ID NO: 2983004 - RNA, 19 nt, Artificial Sequence
  Description of Artificial Sequence: Synthetic oligonucleotide
accugaauggagccuggcc

SEQ ID NO: 2983005 - RNA, 19 nt, Artificial Sequence
  Description of Artificial Sequence: Synthetic oligonucleotide
gauggacacuuccaaauuc

SEQ ID NO: 2983006 - RNA, 19 nt, Artificial Sequence
  Description of Artificial Sequence: Synthetic oligonucleotide
uagucaaguucagugcugg

SEQ ID NO: 2983007 - RNA, 19 nt, Artificial Sequence
  Description of Artificial Sequence: Synthetic oligonucleotide
acaccuguauagguggugc

SEQ ID NO: 2983008 - RNA, 19 nt, Artificial Sequence
  Description of Artificial Sequence: Synthetic oligonucleotide
ccaaauucaacaucuggcc

SEQ ID NO: 2983009 - RNA, 19 nt, Artificial Sequence
  Description of Artificial Sequence: Synthetic oligonucleotide
aaguuucugcucugucuuc

SEQ ID NO: 2983010 - RNA, 19 nt, Artificial Sequence
  Description of Artificial Sequence: Synthetic oligonucleotide
uugaugugagcuccaugag

SEQ ID NO: 2983011 - RNA, 19 nt, Artificial Sequence
  Description of Artificial Sequence: Synthetic oligonucleotide
guaaauuugugcaucgauc

SEQ ID NO: 2983012 - RNA, 19 nt, Artificial Sequence
  Description of Artificial Sequence: Synthetic oligonucleotide
acuuggugagcagugagag

SEQ ID NO: 2983013 - RNA, 19 nt, Artificial Sequence
  Description of Artificial Sequence: Synthetic oligonucleotide
ugguuucugggcaaacagc

SEQ ID NO: 2983014 - RNA, 19 nt, Artificial Sequence
  Description of Artificial Sequence: Synthetic oligonucleotide
auuugugcaucgaucuccc

SEQ ID NO: 2983015 - RNA, 19 nt, Artificial Sequence
  Description of Artificial Sequence: Synthetic oligonucleotide
uucaacaucuggccagaug

SEQ ID NO: 2983016 - RNA, 19 nt, Artificial Sequence
  Description of Artificial Sequence: Synthetic oligonucleotide
ugggcaaacagcacaccug

SEQ ID NO: 2983017 - RNA, 19 nt, Artificial Sequence
  Description of Artificial Sequence: Synthetic oligonucleotide
gugccaucaauauccacag

SEQ ID NO: 2983018 - RNA, 19 nt, Artificial Sequence
  Description of Artificial Sequence: Synthetic oligonucleotide
agccuggccagauggacac

SEQ ID NO: 2983019 - RNA, 19 nt, Artificial Sequence
  Description of Artificial Sequence: Synthetic oligonucleotide
cugguuucugggcaaacag

SEQ ID NO: 2983020 - RNA, 19 nt, Artificial Sequence
  Description of Artificial Sequence: Synthetic oligonucleotide
caucagagggaccaggcug

SEQ ID NO: 2983021 - RNA, 19 nt, Artificial Sequence
  Description of Artificial Sequence: Synthetic oligonucleotide
uauccacagacauauugau

SEQ ID NO: 2983022 - RNA, 19 nt, Artificial Sequence
  Description of Artificial Sequence: Synthetic oligonucleotide
cucccuuacucucugcagg

SEQ ID NO: 2983023 - RNA, 19 nt, Artificial Sequence
  Description of Artificial Sequence: Synthetic oligonucleotide
uaggacuuggugagcagug

SEQ ID NO: 2983024 - RNA, 19 nt, Artificial Sequence
  Description of Artificial Sequence: Synthetic oligonucleotide
gccaucaauauccacagac

SEQ ID NO: 2983025 - RNA, 19 nt, Artificial Sequence
  Description of Artificial Sequence: Synthetic oligonucleotide
gaugguguuugaugugagc

SEQ ID NO: 2983026 - RNA, 19 nt, Artificial Sequence
  Description of Artificial Sequence: Synthetic oligonucleotide
augguguuugaugugagcu

SEQ ID NO: 2983027 - RNA, 19 nt, Artificial Sequence
  Description of Artificial Sequence: Synthetic oligonucleotide
cugcuuguagucaaguuca

SEQ ID NO: 2983028 - RNA, 19 nt, Artificial Sequence
  Description of Artificial Sequence: Synthetic oligonucleotide
caugagaugagguaaauuu

SEQ ID NO: 2983029 - RNA, 19 nt, Artificial Sequence
  Description of Artificial Sequence: Synthetic oligonucleotide
uguauagguggugccauca

SEQ ID NO: 2983030 - RNA, 19 nt, Artificial Sequence
  Description of Artificial Sequence: Synthetic oligonucleotide
uucugggcaaacagcacac

SEQ ID NO: 2983031 - RNA, 19 nt, Artificial Sequence
  Description of Artificial Sequence: Synthetic oligonucleotide
aacaucuggccagauggug

SEQ ID NO: 2983032 - RNA, 19 nt, Artificial Sequence
  Description of Artificial Sequence: Synthetic oligonucleotide
cucaucagagggaccaggc

SEQ ID NO: 2983033 - RNA, 19 nt, Artificial Sequence
  Description of Artificial Sequence: Synthetic oligonucleotide
auauccacagacauauuga

SEQ ID NO: 2983034 - RNA, 19 nt, Artificial Sequence
  Description of Artificial Sequence: Synthetic oligonucleotide
agaaccugaauggagccug

SEQ ID NO: 2983035 - RNA, 19 nt, Artificial Sequence
  Description of Artificial Sequence: Synthetic oligonucleotide
ugggugcugcucaucagag

SEQ ID NO: 2983036 - RNA, 19 nt, Artificial Sequence
  Description of Artificial Sequence: Synthetic oligonucleotide
auugaugcucccaaugcug

SEQ ID NO: 2983037 - RNA, 19 nt, Artificial Sequence
  Description of Artificial Sequence: Synthetic oligonucleotide
aauucaacaucuggccaga

SEQ ID NO: 2983038 - RNA, 19 nt, Artificial Sequence
  Description of Artificial Sequence: Synthetic oligonucleotide
uauagguggugccaucaau

SEQ ID NO: 2983039 - RNA, 19 nt, Artificial Sequence
  Description of Artificial Sequence: Synthetic oligonucleotide
cugaauggagccuggccag

SEQ ID NO: 2983040 - RNA, 19 nt, Artificial Sequence
  Description of Artificial Sequence: Synthetic oligonucleotide
ucucccuuacucucugcag

SEQ ID NO: 2983041 - RNA, 19 nt, Artificial Sequence
  Description of Artificial Sequence: Synthetic oligonucleotide
augagaugagguaaauuug

SEQ ID NO: 2983042 - RNA, 19 nt, Artificial Sequence
  Description of Artificial Sequence: Synthetic oligonucleotide
uacucucugcaggagaggc

SEQ ID NO: 2983043 - RNA, 19 nt, Artificial Sequence
  Description of Artificial Sequence: Synthetic oligonucleotide
cuggagcugaaguuucugc

SEQ ID NO: 2983044 - RNA, 19 nt, Artificial Sequence
  Description of Artificial Sequence: Synthetic oligonucleotide
ugagcuccaugagaugagg

SEQ ID NO: 2983045 - RNA, 19 nt, Artificial Sequence
  Description of Artificial Sequence: Synthetic oligonucleotide
acagcacaccuguauaggu

SEQ ID NO: 2983046 - RNA, 19 nt, Artificial Sequence
  Description of Artificial Sequence: Synthetic oligonucleotide
ugcugggugcugcucauca

SEQ ID NO: 2983047 - RNA, 19 nt, Artificial Sequence
  Description of Artificial Sequence: Synthetic oligonucleotide
aucagagggaccaggcugg

SEQ ID NO: 2983048 - RNA, 19 nt, Artificial Sequence
  Description of Artificial Sequence: Synthetic oligonucleotide
ucaucagagggaccaggcu

SEQ ID NO: 2983049 - RNA, 19 nt, Artificial Sequence
  Description of Artificial Sequence: Synthetic oligonucleotide
uggccagauggacacuucc

SEQ ID NO: 2983050 - RNA, 19 nt, Artificial Sequence
  Description of Artificial Sequence: Synthetic oligonucleotide
gagaugagguaaauuugug

SEQ ID NO: 2983051 - RNA, 19 nt, Artificial Sequence
  Description of Artificial Sequence: Synthetic oligonucleotide
aaccugaauggagccuggc

SEQ ID NO: 2983052 - RNA, 19 nt, Artificial Sequence
  Description of Artificial Sequence: Synthetic oligonucleotide
ugagcagugagagcugcug

SEQ ID NO: 2983053 - RNA, 19 nt, Artificial Sequence
  Description of Artificial Sequence: Synthetic oligonucleotide
caaauucaacaucuggcca

SEQ ID NO: 2983054 - RNA, 19 nt, Artificial Sequence
  Description of Artificial Sequence: Synthetic oligonucleotide
aggagaggcagggaguggg

SEQ ID NO: 2983055 - RNA, 19 nt, Artificial Sequence
  Description of Artificial Sequence: Synthetic oligonucleotide
cucccaaugcugcuuguag

SEQ ID NO: 2983056 - RNA, 19 nt, Artificial Sequence
  Description of Artificial Sequence: Synthetic oligonucleotide
cugccaaugcucuggggag

SEQ ID NO: 2983057 - RNA, 19 nt, Artificial Sequence
  Description of Artificial Sequence: Synthetic oligonucleotide
cucucugcaggagaggcag

SEQ ID NO: 2983058 - RNA, 19 nt, Artificial Sequence
  Description of Artificial Sequence: Synthetic oligonucleotide
aaugcugcuuguagucaag

SEQ ID NO: 2983059 - RNA, 19 nt, Artificial Sequence
  Description of Artificial Sequence: Synthetic oligonucleotide
agguggugccaucaauauc

SEQ ID NO: 2983060 - RNA, 19 nt, Artificial Sequence
  Description of Artificial Sequence: Synthetic oligonucleotide
cuuccaaauucaacaucug

SEQ ID NO: 2983061 - RNA, 19 nt, Artificial Sequence
  Description of Artificial Sequence: Synthetic oligonucleotide
gguguuugaugugagcucc

SEQ ID NO: 2983062 - RNA, 19 nt, Artificial Sequence
  Description of Artificial Sequence: Synthetic oligonucleotide
agcagugagagcugcugcu

SEQ ID NO: 2983063 - RNA, 19 nt, Artificial Sequence
  Description of Artificial Sequence: Synthetic oligonucleotide
ugguguuugaugugagcuc

SEQ ID NO: 2983064 - RNA, 19 nt, Artificial Sequence
  Description of Artificial Sequence: Synthetic oligonucleotide
aucucccuuacucucugca

SEQ ID NO: 2983065 - RNA, 19 nt, Artificial Sequence
  Description of Artificial Sequence: Synthetic oligonucleotide
gagcagugagagcugcugc

SEQ ID NO: 2983066 - RNA, 19 nt, Artificial Sequence
  Description of Artificial Sequence: Synthetic oligonucleotide
ugcuuguagucaaguucag

SEQ ID NO: 2983067 - RNA, 19 nt, Artificial Sequence
  Description of Artificial Sequence: Synthetic oligonucleotide
ucccuuacucucugcagga

SEQ ID NO: 2983068 - RNA, 19 nt, Artificial Sequence
  Description of Artificial Sequence: Synthetic oligonucleotide
uagguggugccaucaauau

SEQ ID NO: 2983069 - RNA, 19 nt, Artificial Sequence
  Description of Artificial Sequence: Synthetic oligonucleotide
ugcaggagaggcagggagu

SEQ ID NO: 2983070 - RNA, 19 nt, Artificial Sequence
  Description of Artificial Sequence: Synthetic oligonucleotide
ucgaucucccuuacucucu

SEQ ID NO: 2983071 - RNA, 19 nt, Artificial Sequence
  Description of Artificial Sequence: Synthetic oligonucleotide
ggugccaucaauauccaca

SEQ ID NO: 2983072 - RNA, 19 nt, Artificial Sequence
  Description of Artificial Sequence: Synthetic oligonucleotide
gcugcuuguagucaaguuc

SEQ ID NO: 2983073 - RNA, 19 nt, Artificial Sequence
  Description of Artificial Sequence: Synthetic oligonucleotide
gaugugagcuccaugagau

SEQ ID NO: 2983074 - RNA, 19 nt, Artificial Sequence
  Description of Artificial Sequence: Synthetic oligonucleotide
aguucagugcuggagcuga

SEQ ID NO: 2983075 - RNA, 19 nt, Artificial Sequence
  Description of Artificial Sequence: Synthetic oligonucleotide
uggacacuuccaaauucaa

SEQ ID NO: 2983076 - RNA, 19 nt, Artificial Sequence
  Description of Artificial Sequence: Synthetic oligonucleotide
uggagggcucugcacuggg

SEQ ID NO: 2983077 - RNA, 19 nt, Artificial Sequence
  Description of Artificial Sequence: Synthetic oligonucleotide
guuugaugugagcuccaug

SEQ ID NO: 2983078 - RNA, 19 nt, Artificial Sequence
  Description of Artificial Sequence: Synthetic oligonucleotide
gcaucgaucucccuuacuc

SEQ ID NO: 2983079 - RNA, 19 nt, Artificial Sequence
  Description of Artificial Sequence: Synthetic oligonucleotide
cuuggugagcagugagagc

SEQ ID NO: 2983080 - RNA, 19 nt, Artificial Sequence
  Description of Artificial Sequence: Synthetic oligonucleotide
uuacucucugcaggagagg

SEQ ID NO: 2983081 - RNA, 19 nt, Artificial Sequence
  Description of Artificial Sequence: Synthetic oligonucleotide
auggacacuuccaaauuca

SEQ ID NO: 2983082 - RNA, 19 nt, Artificial Sequence
  Description of Artificial Sequence: Synthetic oligonucleotide
agauggacacuuccaaauu

SEQ ID NO: 2983083 - RNA, 19 nt, Artificial Sequence
  Description of Artificial Sequence: Synthetic oligonucleotide
cagcacaccuguauaggug

SEQ ID NO: 2983084 - RNA, 19 nt, Artificial Sequence
  Description of Artificial Sequence: Synthetic oligonucleotide
agacauauugaugcuccca

SEQ ID NO: 2983085 - RNA, 19 nt, Artificial Sequence
  Description of Artificial Sequence: Synthetic oligonucleotide
cagacauauugaugcuccc

SEQ ID NO: 2983086 - RNA, 19 nt, Artificial Sequence
  Description of Artificial Sequence: Synthetic oligonucleotide
ggugcugccaaugcucugg

SEQ ID NO: 2983087 - RNA, 19 nt, Artificial Sequence
  Description of Artificial Sequence: Synthetic oligonucleotide
ucuggccagaugguguuug

SEQ ID NO: 2983088 - RNA, 19 nt, Artificial Sequence
  Description of Artificial Sequence: Synthetic oligonucleotide
agcuccaugagaugaggua

SEQ ID NO: 2983089 - RNA, 19 nt, Artificial Sequence
  Description of Artificial Sequence: Synthetic oligonucleotide
gaccacugguuucugggca

SEQ ID NO: 2983090 - RNA, 19 nt, Artificial Sequence
  Description of Artificial Sequence: Synthetic oligonucleotide
ugcugcucaucagagggac

SEQ ID NO: 2983091 - RNA, 19 nt, Artificial Sequence
  Description of Artificial Sequence: Synthetic oligonucleotide
acauauugaugcucccaau

SEQ ID NO: 2983092 - RNA, 19 nt, Artificial Sequence
  Description of Artificial Sequence: Synthetic oligonucleotide
caaugagguggaccacugg

SEQ ID NO: 2983093 - RNA, 19 nt, Artificial Sequence
  Description of Artificial Sequence: Synthetic oligonucleotide
agugagagcugcugcugcu

SEQ ID NO: 2983094 - RNA, 19 nt, Artificial Sequence
  Description of Artificial Sequence: Synthetic oligonucleotide
gguuucugggcaaacagca

SEQ ID NO: 2983095 - RNA, 19 nt, Artificial Sequence
  Description of Artificial Sequence: Synthetic oligonucleotide
acagcagaaccugaaugga

SEQ ID NO: 2983096 - RNA, 19 nt, Artificial Sequence
  Description of Artificial Sequence: Synthetic oligonucleotide
ccugcaaugagguggacca

SEQ ID NO: 2983097 - RNA, 19 nt, Artificial Sequence
  Description of Artificial Sequence: Synthetic oligonucleotide
cagugagagcugcugcugc

SEQ ID NO: 2983098 - RNA, 19 nt, Artificial Sequence
  Description of Artificial Sequence: Synthetic oligonucleotide
ugccccgggaugagguagg

SEQ ID NO: 2983099 - RNA, 19 nt, Artificial Sequence
  Description of Artificial Sequence: Synthetic oligonucleotide
augcucccaaugcugcuug

SEQ ID NO: 2983100 - RNA, 19 nt, Artificial Sequence
  Description of Artificial Sequence: Synthetic oligonucleotide
auagguggugccaucaaua

SEQ ID NO: 2983101 - RNA, 19 nt, Artificial Sequence
  Description of Artificial Sequence: Synthetic oligonucleotide
ggacuuggugagcagugag

SEQ ID NO: 2983102 - RNA, 19 nt, Artificial Sequence
  Description of Artificial Sequence: Synthetic oligonucleotide
guagucaaguucagugcug

SEQ ID NO: 2983103 - RNA, 19 nt, Artificial Sequence
  Description of Artificial Sequence: Synthetic oligonucleotide
gaaccugaauggagccugg

SEQ ID NO: 2983104 - RNA, 19 nt, Artificial Sequence
  Description of Artificial Sequence: Synthetic oligonucleotide
caccuguauagguggugcc

SEQ ID NO: 2983105 - RNA, 19 nt, Artificial Sequence
  Description of Artificial Sequence: Synthetic oligonucleotide
gcugccaaugcucugggga

SEQ ID NO: 2983106 - RNA, 19 nt, Artificial Sequence
  Description of Artificial Sequence: Synthetic oligonucleotide
gcagaaccugaauggagcc

SEQ ID NO: 2983107 - RNA, 19 nt, Artificial Sequence
  Description of Artificial Sequence: Synthetic oligonucleotide
acaucuggccagauggugu

SEQ ID NO: 2983108 - RNA, 19 nt, Artificial Sequence
  Description of Artificial Sequence: Synthetic oligonucleotide
gagcugaaguuucugcucu

SEQ ID NO: 2983109 - RNA, 19 nt, Artificial Sequence
  Description of Artificial Sequence: Synthetic oligonucleotide
auccacagacauauugaug

SEQ ID NO: 2983110 - RNA, 19 nt, Artificial Sequence
  Description of Artificial Sequence: Synthetic oligonucleotide
cugaaguuucugcucuguc

SEQ ID NO: 2983111 - RNA, 19 nt, Artificial Sequence
  Description of Artificial Sequence: Synthetic oligonucleotide
ggccagaugguguuugaug

SEQ ID NO: 2983112 - RNA, 19 nt, Artificial Sequence
  Description of Artificial Sequence: Synthetic oligonucleotide
cacagacauauugaugcuc

SEQ ID NO: 2983113 - RNA, 19 nt, Artificial Sequence
  Description of Artificial Sequence: Synthetic oligonucleotide
caaacagcacaccuguaua

SEQ ID NO: 2983114 - RNA, 19 nt, Artificial Sequence
  Description of Artificial Sequence: Synthetic oligonucleotide
guggaccacugguuucugg

SEQ ID NO: 2983115 - RNA, 19 nt, Artificial Sequence
  Description of Artificial Sequence: Synthetic oligonucleotide
uggugagcagugagagcug

SEQ ID NO: 2983116 - RNA, 19 nt, Artificial Sequence
  Description of Artificial Sequence: Synthetic oligonucleotide
gggagcagagccugcaaug

SEQ ID NO: 2983117 - RNA, 19 nt, Artificial Sequence
  Description of Artificial Sequence: Synthetic oligonucleotide
ugcaucgaucucccuuacu

SEQ ID NO: 2983118 - RNA, 19 nt, Artificial Sequence
  Description of Artificial Sequence: Synthetic oligonucleotide
aucaauauccacagacaua

SEQ ID NO: 2983119 - RNA, 19 nt, Artificial Sequence
  Description of Artificial Sequence: Synthetic oligonucleotide
agaugguguuugaugugag

SEQ ID NO: 2983120 - RNA, 19 nt, Artificial Sequence
  Description of Artificial Sequence: Synthetic oligonucleotide
ggagcugaaguuucugcuc

SEQ ID NO: 2983121 - RNA, 19 nt, Artificial Sequence
  Description of Artificial Sequence: Synthetic oligonucleotide
ugcugccaaugcucugggg

SEQ ID NO: 2983122 - RNA, 19 nt, Artificial Sequence
  Description of Artificial Sequence: Synthetic oligonucleotide
gacuuggugagcagugaga

SEQ ID NO: 2983123 - RNA, 19 nt, Artificial Sequence
  Description of Artificial Sequence: Synthetic oligonucleotide
ugcuggagcugaaguuucu

SEQ ID NO: 2983124 - RNA, 19 nt, Artificial Sequence
  Description of Artificial Sequence: Synthetic oligonucleotide
gagguggaccacugguuuc

SEQ ID NO: 2983125 - RNA, 19 nt, Artificial Sequence
  Description of Artificial Sequence: Synthetic oligonucleotide
gaucucccuuacucucugc

SEQ ID NO: 2983126 - RNA, 19 nt, Artificial Sequence
  Description of Artificial Sequence: Synthetic oligonucleotide
agcugaaguuucugcucug

SEQ ID NO: 2983127 - RNA, 19 nt, Artificial Sequence
  Description of Artificial Sequence: Synthetic oligonucleotide
accuguauagguggugcca

SEQ ID NO: 2983128 - RNA, 19 nt, Artificial Sequence
  Description of Artificial Sequence: Synthetic oligonucleotide
cagaugguguuugauguga

SEQ ID NO: 2983129 - RNA, 19 nt, Artificial Sequence
  Description of Artificial Sequence: Synthetic oligonucleotide
ugcugcuuguagucaaguu

SEQ ID NO: 2983130 - RNA, 19 nt, Artificial Sequence
  Description of Artificial Sequence: Synthetic oligonucleotide
augugagcuccaugagaug

SEQ ID NO: 2983131 - RNA, 19 nt, Artificial Sequence
  Description of Artificial Sequence: Synthetic oligonucleotide
ucugggcaaacagcacacc

SEQ ID NO: 2983132 - RNA, 19 nt, Artificial Sequence
  Description of Artificial Sequence: Synthetic oligonucleotide
ucuggggagcagagccugc

SEQ ID NO: 2983133 - RNA, 19 nt, Artificial Sequence
  Description of Artificial Sequence: Synthetic oligonucleotide
uguuugaugugagcuccau

SEQ ID NO: 2983134 - RNA, 19 nt, Artificial Sequence
  Description of Artificial Sequence: Synthetic oligonucleotide
cugcucaucagagggacca

SEQ ID NO: 2983135 - RNA, 19 nt, Artificial Sequence
  Description of Artificial Sequence: Synthetic oligonucleotide
agucaaguucagugcugga

SEQ ID NO: 2983136 - RNA, 19 nt, Artificial Sequence
  Description of Artificial Sequence: Synthetic oligonucleotide
ccugaauggagccuggcca

SEQ ID NO: 2983137 - RNA, 19 nt, Artificial Sequence
  Description of Artificial Sequence: Synthetic oligonucleotide
caaugcugcuuguagucaa

SEQ ID NO: 2983138 - RNA, 19 nt, Artificial Sequence
  Description of Artificial Sequence: Synthetic oligonucleotide
gguaaauuugugcaucgau

SEQ ID NO: 2983139 - RNA, 19 nt, Artificial Sequence
  Description of Artificial Sequence: Synthetic oligonucleotide
cagauggacacuuccaaau

SEQ ID NO: 2983140 - RNA, 19 nt, Artificial Sequence
  Description of Artificial Sequence: Synthetic oligonucleotide
cugcuggugcugccaaugc

SEQ ID NO: 2983141 - RNA, 19 nt, Artificial Sequence
  Description of Artificial Sequence: Synthetic oligonucleotide
gugagcuccaugagaugag

SEQ ID NO: 2983142 - RNA, 19 nt, Artificial Sequence
  Description of Artificial Sequence: Synthetic oligonucleotide
gugcugccaaugcucuggg

SEQ ID NO: 2983143 - RNA, 19 nt, Artificial Sequence
  Description of Artificial Sequence: Synthetic oligonucleotide
ggaccaggcugguggaggg

SEQ ID NO: 2983144 - RNA, 19 nt, Artificial Sequence
  Description of Artificial Sequence: Synthetic oligonucleotide
ugccaaugcucuggggagc

SEQ ID NO: 2983145 - RNA, 19 nt, Artificial Sequence
  Description of Artificial Sequence: Synthetic oligonucleotide
uggagccuggccagaugga

SEQ ID NO: 2983146 - RNA, 19 nt, Artificial Sequence
  Description of Artificial Sequence: Synthetic oligonucleotide
agguaaauuugugcaucga

SEQ ID NO: 2983147 - RNA, 19 nt, Artificial Sequence
  Description of Artificial Sequence: Synthetic oligonucleotide
agguggaccacugguuucu

SEQ ID NO: 2983148 - RNA, 19 nt, Artificial Sequence
  Description of Artificial Sequence: Synthetic oligonucleotide
cugggugcugcucaucaga

SEQ ID NO: 2983149 - RNA, 19 nt, Artificial Sequence
  Description of Artificial Sequence: Synthetic oligonucleotide
cugguggagggcucugcac

SEQ ID NO: 2983150 - RNA, 19 nt, Artificial Sequence
  Description of Artificial Sequence: Synthetic oligonucleotide
accacugguuucugggcaa

SEQ ID NO: 2983151 - RNA, 19 nt, Artificial Sequence
  Description of Artificial Sequence: Synthetic oligonucleotide
gggaugagguaggacuugg

SEQ ID NO: 2983152 - RNA, 19 nt, Artificial Sequence
  Description of Artificial Sequence: Synthetic oligonucleotide
uccaugagaugagguaaau

SEQ ID NO: 2983153 - RNA, 19 nt, Artificial Sequence
  Description of Artificial Sequence: Synthetic oligonucleotide
ugaauggagccuggccaga

SEQ ID NO: 2983154 - RNA, 19 nt, Artificial Sequence
  Description of Artificial Sequence: Synthetic oligonucleotide
uuugugcaucgaucucccu

SEQ ID NO: 2983155 - RNA, 19 nt, Artificial Sequence
  Description of Artificial Sequence: Synthetic oligonucleotide
cccaaugcugcuuguaguc

SEQ ID NO: 2983156 - RNA, 19 nt, Artificial Sequence
  Description of Artificial Sequence: Synthetic oligonucleotide
guuucugggcaaacagcac

SEQ ID NO: 2983157 - RNA, 19 nt, Artificial Sequence
  Description of Artificial Sequence: Synthetic oligonucleotide
cuguauagguggugccauc

SEQ ID NO: 2983158 - RNA, 19 nt, Artificial Sequence
  Description of Artificial Sequence: Synthetic oligonucleotide
ugcucaucagagggaccag

SEQ ID NO: 2983159 - RNA, 19 nt, Artificial Sequence
  Description of Artificial Sequence: Synthetic oligonucleotide
ggaccacugguuucugggc

SEQ ID NO: 2983160 - RNA, 19 nt, Artificial Sequence
  Description of Artificial Sequence: Synthetic oligonucleotide
uggugccaucaauauccac

SEQ ID NO: 2983161 - RNA, 19 nt, Artificial Sequence
  Description of Artificial Sequence: Synthetic oligonucleotide
cucuggggagcagagccug

SEQ ID NO: 2983162 - RNA, 19 nt, Artificial Sequence
  Description of Artificial Sequence: Synthetic oligonucleotide
gguggagggcucugcacug

SEQ ID NO: 2983163 - RNA, 19 nt, Artificial Sequence
  Description of Artificial Sequence: Synthetic oligonucleotide
cuccaugagaugagguaaa

SEQ ID NO: 2983164 - RNA, 19 nt, Artificial Sequence
  Description of Artificial Sequence: Synthetic oligonucleotide
ggacacuuccaaauucaac

SEQ ID NO: 2983165 - RNA, 19 nt, Artificial Sequence
  Description of Artificial Sequence: Synthetic oligonucleotide
guauagguggugccaucaa

SEQ ID NO: 2983166 - RNA, 19 nt, Artificial Sequence
  Description of Artificial Sequence: Synthetic oligonucleotide
caaguucagugcuggagcu

SEQ ID NO: 2983167 - RNA, 19 nt, Artificial Sequence
  Description of Artificial Sequence: Synthetic oligonucleotide
cacaccuguauagguggug

SEQ ID NO: 2983168 - RNA, 19 nt, Artificial Sequence
  Description of Artificial Sequence: Synthetic oligonucleotide
uggggagcagagccugcaa

SEQ ID NO: 2983169 - RNA, 19 nt, Artificial Sequence
  Description of Artificial Sequence: Synthetic oligonucleotide
gggugcugcucaucagagg

SEQ ID NO: 2983170 - RNA, 19 nt, Artificial Sequence
  Description of Artificial Sequence: Synthetic oligonucleotide
aggacuuggugagcaguga

SEQ ID NO: 2983171 - RNA, 19 nt, Artificial Sequence
  Description of Artificial Sequence: Synthetic oligonucleotide
gagccugcaaugaggugga

SEQ ID NO: 2983172 - RNA, 19 nt, Artificial Sequence
  Description of Artificial Sequence: Synthetic oligonucleotide
gcucaucagagggaccagg

SEQ ID NO: 2983173 - RNA, 19 nt, Artificial Sequence
  Description of Artificial Sequence: Synthetic oligonucleotide
accaggcugguggagggcu

SEQ ID NO: 2983174 - RNA, 19 nt, Artificial Sequence
  Description of Artificial Sequence: Synthetic oligonucleotide
augcugcuuguagucaagu

SEQ ID NO: 2983175 - RNA, 19 nt, Artificial Sequence
  Description of Artificial Sequence: Synthetic oligonucleotide
caucgaucucccuuacucu

SEQ ID NO: 2983176 - RNA, 19 nt, Artificial Sequence
  Description of Artificial Sequence: Synthetic oligonucleotide
gagccuggccagauggaca

SEQ ID NO: 2983177 - RNA, 19 nt, Artificial Sequence
  Description of Artificial Sequence: Synthetic oligonucleotide
gcaaacagcacaccuguau

SEQ ID NO: 2983178 - RNA, 19 nt, Artificial Sequence
  Description of Artificial Sequence: Synthetic oligonucleotide
guggagggcucugcacugg

SEQ ID NO: 2983179 - RNA, 19 nt, Artificial Sequence
  Description of Artificial Sequence: Synthetic oligonucleotide
cugggcaaacagcacaccu

SEQ ID NO: 2983180 - RNA, 19 nt, Artificial Sequence
  Description of Artificial Sequence: Synthetic oligonucleotide
gugccccgggaugagguag

SEQ ID NO: 2983181 - RNA, 19 nt, Artificial Sequence
  Description of Artificial Sequence: Synthetic oligonucleotide
gcuccaugagaugagguaa

SEQ ID NO: 2983182 - RNA, 19 nt, Artificial Sequence
  Description of Artificial Sequence: Synthetic oligonucleotide
cagagccugcaaugaggug

SEQ ID NO: 2983183 - RNA, 19 nt, Artificial Sequence
  Description of Artificial Sequence: Synthetic oligonucleotide
gagggaccaggcuggugga

SEQ ID NO: 2983184 - RNA, 19 nt, Artificial Sequence
  Description of Artificial Sequence: Synthetic oligonucleotide
gcuggugcugccaaugcuc

SEQ ID NO: 2983185 - RNA, 19 nt, Artificial Sequence
  Description of Artificial Sequence: Synthetic oligonucleotide
augagguggaccacugguu

SEQ ID NO: 2983186 - RNA, 19 nt, Artificial Sequence
  Description of Artificial Sequence: Synthetic oligonucleotide
gccagauggacacuuccaa

SEQ ID NO: 2983187 - RNA, 19 nt, Artificial Sequence
  Description of Artificial Sequence: Synthetic oligonucleotide
ccagaugguguuugaugug

SEQ ID NO: 2983188 - RNA, 19 nt, Artificial Sequence
  Description of Artificial Sequence: Synthetic oligonucleotide
gggcaaacagcacaccugu

SEQ ID NO: 2983189 - RNA, 19 nt, Artificial Sequence
  Description of Artificial Sequence: Synthetic oligonucleotide
cuggccagauggacacuuc

SEQ ID NO: 2983190 - RNA, 19 nt, Artificial Sequence
  Description of Artificial Sequence: Synthetic oligonucleotide
caaugcucuggggagcaga

SEQ ID NO: 2983191 - RNA, 19 nt, Artificial Sequence
  Description of Artificial Sequence: Synthetic oligonucleotide
gcaaugagguggaccacug

SEQ ID NO: 2983192 - RNA, 19 nt, Artificial Sequence
  Description of Artificial Sequence: Synthetic oligonucleotide
ugcucccaaugcugcuugu

SEQ ID NO: 2983193 - RNA, 19 nt, Artificial Sequence
  Description of Artificial Sequence: Synthetic oligonucleotide
uggccagaugguguuugau

SEQ ID NO: 2983194 - RNA, 19 nt, Artificial Sequence
  Description of Artificial Sequence: Synthetic oligonucleotide
acucucugcaggagaggca

SEQ ID NO: 2983195 - RNA, 19 nt, Artificial Sequence
  Description of Artificial Sequence: Synthetic oligonucleotide
gccugcaaugagguggacc

SEQ ID NO: 2983196 - RNA, 19 nt, Artificial Sequence
  Description of Artificial Sequence: Synthetic oligonucleotide
gugcaucgaucucccuuac

SEQ ID NO: 2983197 - RNA, 19 nt, Artificial Sequence
  Description of Artificial Sequence: Synthetic oligonucleotide
ggagccuggccagauggac

SEQ ID NO: 2983198 - RNA, 19 nt, Artificial Sequence
  Description of Artificial Sequence: Synthetic oligonucleotide
gcagugagagcugcugcug

SEQ ID NO: 2983199 - RNA, 19 nt, Artificial Sequence
  Description of Artificial Sequence: Synthetic oligonucleotide
ucagagggaccaggcuggu

SEQ ID NO: 2983200 - RNA, 19 nt, Artificial Sequence
  Description of Artificial Sequence: Synthetic oligonucleotide
gcuggagcugaaguuucug

SEQ ID NO: 2983201 - RNA, 19 nt, Artificial Sequence
  Description of Artificial Sequence: Synthetic oligonucleotide
ccuuacucucugcaggaga

SEQ ID NO: 2983202 - RNA, 19 nt, Artificial Sequence
  Description of Artificial Sequence: Synthetic oligonucleotide
cacugguuucugggcaaac

SEQ ID NO: 2983203 - RNA, 19 nt, Artificial Sequence
  Description of Artificial Sequence: Synthetic oligonucleotide
cuggugcugccaaugcucu

SEQ ID NO: 2983204 - RNA, 19 nt, Artificial Sequence
  Description of Artificial Sequence: Synthetic oligonucleotide
gaccaggcugguggagggc

SEQ ID NO: 2983205 - RNA, 19 nt, Artificial Sequence
  Description of Artificial Sequence: Synthetic oligonucleotide
cugcaaugagguggaccac

SEQ ID NO: 2983206 - RNA, 19 nt, Artificial Sequence
  Description of Artificial Sequence: Synthetic oligonucleotide
cccgggaugagguaggacu

SEQ ID NO: 2983207 - RNA, 19 nt, Artificial Sequence
  Description of Artificial Sequence: Synthetic oligonucleotide
ugcugcuggugcugccaau

SEQ ID NO: 2983208 - RNA, 19 nt, Artificial Sequence
  Description of Artificial Sequence: Synthetic oligonucleotide
cuggccagaugguguuuga

SEQ ID NO: 2983209 - RNA, 19 nt, Artificial Sequence
  Description of Artificial Sequence: Synthetic oligonucleotide
gaugcucccaaugcugcuu

SEQ ID NO: 2983210 - RNA, 19 nt, Artificial Sequence
  Description of Artificial Sequence: Synthetic oligonucleotide
auucaacaucuggccagau

SEQ ID NO: 2983211 - RNA, 19 nt, Artificial Sequence
  Description of Artificial Sequence: Synthetic oligonucleotide
caacaucuggccagauggu

SEQ ID NO: 2983212 - RNA, 19 nt, Artificial Sequence
  Description of Artificial Sequence: Synthetic oligonucleotide
guguuugaugugagcucca

SEQ ID NO: 2983213 - RNA, 19 nt, Artificial Sequence
  Description of Artificial Sequence: Synthetic oligonucleotide
gagcuccaugagaugaggu

SEQ ID NO: 2983214 - RNA, 19 nt, Artificial Sequence
  Description of Artificial Sequence: Synthetic oligonucleotide
gcugguggagggcucugca

SEQ ID NO: 2983215 - RNA, 19 nt, Artificial Sequence
  Description of Artificial Sequence: Synthetic oligonucleotide
ccagauggacacuuccaaa

SEQ ID NO: 2983216 - RNA, 19 nt, Artificial Sequence
  Description of Artificial Sequence: Synthetic oligonucleotide
guggugccaucaauaucca

SEQ ID NO: 2983217 - RNA, 19 nt, Artificial Sequence
  Description of Artificial Sequence: Synthetic oligonucleotide
ggccagauggacacuucca

SEQ ID NO: 2983218 - RNA, 19 nt, Artificial Sequence
  Description of Artificial Sequence: Synthetic oligonucleotide
cuggggagcagagccugca

SEQ ID NO: 2983219 - RNA, 19 nt, Artificial Sequence
  Description of Artificial Sequence: Synthetic oligonucleotide
gaauggagccuggccagau

SEQ ID NO: 2983220 - RNA, 19 nt, Artificial Sequence
  Description of Artificial Sequence: Synthetic oligonucleotide
caucuggccagaugguguu

SEQ ID NO: 2983221 - RNA, 19 nt, Artificial Sequence
  Description of Artificial Sequence: Synthetic oligonucleotide
gcagagccugcaaugaggu

SEQ ID NO: 2983222 - RNA, 19 nt, Artificial Sequence
  Description of Artificial Sequence: Synthetic oligonucleotide
cagagggaccaggcuggug

SEQ ID NO: 2983223 - RNA, 19 nt, Artificial Sequence
  Description of Artificial Sequence: Synthetic oligonucleotide
ccaaugcugcuuguaguca

SEQ ID NO: 2983224 - RNA, 19 nt, Artificial Sequence
  Description of Artificial Sequence: Synthetic oligonucleotide
gccaaugcucuggggagca

SEQ ID NO: 2983225 - RNA, 19 nt, Artificial Sequence
  Description of Artificial Sequence: Synthetic oligonucleotide
gcugcucaucagagggacc

SEQ ID NO: 2983226 - RNA, 19 nt, Artificial Sequence
  Description of Artificial Sequence: Synthetic oligonucleotide
cagaaccugaauggagccu

SEQ ID NO: 2983227 - RNA, 19 nt, Artificial Sequence
  Description of Artificial Sequence: Synthetic oligonucleotide
gguggaccacugguuucug

SEQ ID NO: 2983228 - RNA, 19 nt, Artificial Sequence
  Description of Artificial Sequence: Synthetic oligonucleotide
gcuuguagucaaguucagu

SEQ ID NO: 2983229 - RNA, 19 nt, Artificial Sequence
  Description of Artificial Sequence: Synthetic oligonucleotide
ggcugguggagggcucugc

SEQ ID NO: 2983230 - RNA, 19 nt, Artificial Sequence
  Description of Artificial Sequence: Synthetic oligonucleotide
aucuggccagaugguguuu

SEQ ID NO: 2983231 - RNA, 19 nt, Artificial Sequence
  Description of Artificial Sequence: Synthetic oligonucleotide
cccuuacucucugcaggag

SEQ ID NO: 2983232 - RNA, 19 nt, Artificial Sequence
  Description of Artificial Sequence: Synthetic oligonucleotide
gcugaaguuucugcucugu

SEQ ID NO: 2983233 - RNA, 19 nt, Artificial Sequence
  Description of Artificial Sequence: Synthetic oligonucleotide
ggggugccccgggaugagg

SEQ ID NO: 2983234 - RNA, 19 nt, Artificial Sequence
  Description of Artificial Sequence: Synthetic oligonucleotide
aggcagggagugggugcug

SEQ ID NO: 2983235 - RNA, 19 nt, Artificial Sequence
  Description of Artificial Sequence: Synthetic oligonucleotide
guucagugcuggagcugaa

SEQ ID NO: 2983236 - RNA, 19 nt, Artificial Sequence
  Description of Artificial Sequence: Synthetic oligonucleotide
ccacagacauauugaugcu

SEQ ID NO: 2983237 - RNA, 19 nt, Artificial Sequence
  Description of Artificial Sequence: Synthetic oligonucleotide
ccaggcugguggagggcuc

SEQ ID NO: 2983238 - RNA, 19 nt, Artificial Sequence
  Description of Artificial Sequence: Synthetic oligonucleotide
gugcugggugcugcucauc

SEQ ID NO: 2983239 - RNA, 19 nt, Artificial Sequence
  Description of Artificial Sequence: Synthetic oligonucleotide
ggaugagguaggacuuggu

SEQ ID NO: 2983240 - RNA, 19 nt, Artificial Sequence
  Description of Artificial Sequence: Synthetic oligonucleotide
ggugccccgggaugaggua

SEQ ID NO: 2983241 - RNA, 19 nt, Artificial Sequence
  Description of Artificial Sequence: Synthetic oligonucleotide
ggugcugggugcugcucau

SEQ ID NO: 2983242 - RNA, 19 nt, Artificial Sequence
  Description of Artificial Sequence: Synthetic oligonucleotide
gcucccaaugcugcuugua

SEQ ID NO: 2983243 - RNA, 19 nt, Artificial Sequence
  Description of Artificial Sequence: Synthetic oligonucleotide
cgggaugagguaggacuug

SEQ ID NO: 2983244 - RNA, 19 nt, Artificial Sequence
  Description of Artificial Sequence: Synthetic oligonucleotide
ggcaaacagcacaccugua

SEQ ID NO: 2983245 - RNA, 19 nt, Artificial Sequence
  Description of Artificial Sequence: Synthetic oligonucleotide
ccuguauagguggugccau

SEQ ID NO: 2983246 - RNA, 19 nt, Artificial Sequence
  Description of Artificial Sequence: Synthetic oligonucleotide
ggagugggugcugggugcu

SEQ ID NO: 2983247 - RNA, 19 nt, Artificial Sequence
  Description of Artificial Sequence: Synthetic oligonucleotide
gggugccccgggaugaggu

SEQ ID NO: 2983248 - RNA, 19 nt, Artificial Sequence
  Description of Artificial Sequence: Synthetic oligonucleotide
ggagaggcagggagugggu

SEQ ID NO: 2983249 - RNA, 19 nt, Artificial Sequence
  Description of Artificial Sequence: Synthetic oligonucleotide
ccgggaugagguaggacuu

SEQ ID NO: 2983250 - RNA, 19 nt, Artificial Sequence
  Description of Artificial Sequence: Synthetic oligonucleotide
ccaugagaugagguaaauu

SEQ ID NO: 2983251 - RNA, 19 nt, Artificial Sequence
  Description of Artificial Sequence: Synthetic oligonucleotide
gcacaccuguauagguggu

SEQ ID NO: 2983252 - RNA, 19 nt, Artificial Sequence
  Description of Artificial Sequence: Synthetic oligonucleotide
ccccgggaugagguaggac

SEQ ID NO: 2983253 - RNA, 19 nt, Artificial Sequence
  Description of Artificial Sequence: Synthetic oligonucleotide
ccacugguuucugggcaaa

SEQ ID NO: 2983254 - RNA, 19 nt, Artificial Sequence
  Description of Artificial Sequence: Synthetic oligonucleotide
ccuggccagauggacacuu

SEQ ID NO: 2983255 - RNA, 19 nt, Artificial Sequence
  Description of Artificial Sequence: Synthetic oligonucleotide
gccccgggaugagguagga

SEQ ID NO: 2983256 - RNA, 19 nt, Artificial Sequence
  Description of Artificial Sequence: Synthetic oligonucleotide
gccuggccagauggacacu

SEQ ID NO: 2983257 - RNA, 19 nt, Artificial Sequence
  Description of Artificial Sequence: Synthetic oligonucleotide
aauagcacagcucacacag

SEQ ID NO: 2983258 - RNA, 19 nt, Artificial Sequence
  Description of Artificial Sequence: Synthetic oligonucleotide
uuugcuaugaauagcacag

SEQ ID NO: 2983259 - RNA, 19 nt, Artificial Sequence
  Description of Artificial Sequence: Synthetic oligonucleotide
aaaccaucucuuuacaugg

SEQ ID NO: 2983260 - RNA, 19 nt, Artificial Sequence
  Description of Artificial Sequence: Synthetic oligonucleotide
uuuacaugggcuuuggcgg

SEQ ID NO: 2983261 - RNA, 19 nt, Artificial Sequence
  Description of Artificial Sequence: Synthetic oligonucleotide
aaaaccaucucuuuacaug

SEQ ID NO: 2983262 - RNA, 19 nt, Artificial Sequence
  Description of Artificial Sequence: Synthetic oligonucleotide
augacgaacuucuugaugg

SEQ ID NO: 2983263 - RNA, 19 nt, Artificial Sequence
  Description of Artificial Sequence: Synthetic oligonucleotide
ucuuggucaucuuagaucc

SEQ ID NO: 2983264 - RNA, 19 nt, Artificial Sequence
  Description of Artificial Sequence: Synthetic oligonucleotide
ucggauaugucccugacag

SEQ ID NO: 2983265 - RNA, 19 nt, Artificial Sequence
  Description of Artificial Sequence: Synthetic oligonucleotide
ugcagcuugacauagagcu

SEQ ID NO: 2983266 - RNA, 19 nt, Artificial Sequence
  Description of Artificial Sequence: Synthetic oligonucleotide
uguucauaaaaccaucucu

SEQ ID NO: 2983267 - RNA, 19 nt, Artificial Sequence
  Description of Artificial Sequence: Synthetic oligonucleotide
cuuuacaugggcuuuggcg

SEQ ID NO: 2983268 - RNA, 19 nt, Artificial Sequence
  Description of Artificial Sequence: Synthetic oligonucleotide
aaugcagcuugacauagag

SEQ ID NO: 2983269 - RNA, 19 nt, Artificial Sequence
  Description of Artificial Sequence: Synthetic oligonucleotide
cauaaaaccaucucuuuac

SEQ ID NO: 2983270 - RNA, 19 nt, Artificial Sequence
  Description of Artificial Sequence: Synthetic oligonucleotide
acuacuuugcuaugaauag

SEQ ID NO: 2983271 - RNA, 19 nt, Artificial Sequence
  Description of Artificial Sequence: Synthetic oligonucleotide
uacuuugcuaugaauagca

SEQ ID NO: 2983272 - RNA, 19 nt, Artificial Sequence
  Description of Artificial Sequence: Synthetic oligonucleotide
ucaucuuagauccaagauc

SEQ ID NO: 2983273 - RNA, 19 nt, Artificial Sequence
  Description of Artificial Sequence: Synthetic oligonucleotide
uugacauagagcuugggaa

SEQ ID NO: 2983274 - RNA, 19 nt, Artificial Sequence
  Description of Artificial Sequence: Synthetic oligonucleotide
uucuguguucauaaaacca

SEQ ID NO: 2983275 - RNA, 19 nt, Artificial Sequence
  Description of Artificial Sequence: Synthetic oligonucleotide
uacgauguuccgaaugacg

SEQ ID NO: 2983276 - RNA, 19 nt, Artificial Sequence
  Description of Artificial Sequence: Synthetic oligonucleotide
acagcucacacaguaaugc

SEQ ID NO: 2983277 - RNA, 19 nt, Artificial Sequence
  Description of Artificial Sequence: Synthetic oligonucleotide
aaugacgaacuucuugaug

SEQ ID NO: 2983278 - RNA, 19 nt, Artificial Sequence
  Description of Artificial Sequence: Synthetic oligonucleotide
ucuacgauguuccgaauga

SEQ ID NO: 2983279 - RNA, 19 nt, Artificial Sequence
  Description of Artificial Sequence: Synthetic oligonucleotide
uuucuguguucauaaaacc

SEQ ID NO: 2983280 - RNA, 19 nt, Artificial Sequence
  Description of Artificial Sequence: Synthetic oligonucleotide
ucuguguucauaaaaccau

SEQ ID NO: 2983281 - RNA, 19 nt, Artificial Sequence
  Description of Artificial Sequence: Synthetic oligonucleotide
ugacauagagcuugggaag

SEQ ID NO: 2983282 - RNA, 19 nt, Artificial Sequence
  Description of Artificial Sequence: Synthetic oligonucleotide
uuauuuuccaaggugauuu

SEQ ID NO: 2983283 - RNA, 19 nt, Artificial Sequence
  Description of Artificial Sequence: Synthetic oligonucleotide
uuccgaaugacgaacuucu

SEQ ID NO: 2983284 - RNA, 19 nt, Artificial Sequence
  Description of Artificial Sequence: Synthetic oligonucleotide
cuaugaauagcacagcuca

SEQ ID NO: 2983285 - RNA, 19 nt, Artificial Sequence
  Description of Artificial Sequence: Synthetic oligonucleotide
agcaggucuaaaucguggc

SEQ ID NO: 2983286 - RNA, 19 nt, Artificial Sequence
  Description of Artificial Sequence: Synthetic oligonucleotide
uugggaagaacguaggcgu

SEQ ID NO: 2983287 - RNA, 19 nt, Artificial Sequence
  Description of Artificial Sequence: Synthetic oligonucleotide
auuuuauuuuccaagguga

SEQ ID NO: 2983288 - RNA, 19 nt, Artificial Sequence
  Description of Artificial Sequence: Synthetic oligonucleotide
auaugucccugacagcagc

SEQ ID NO: 2983289 - RNA, 19 nt, Artificial Sequence
  Description of Artificial Sequence: Synthetic oligonucleotide
uguguucauaaaaccaucu

SEQ ID NO: 2983290 - RNA, 19 nt, Artificial Sequence
  Description of Artificial Sequence: Synthetic oligonucleotide
uuucuuucuguguucauaa

SEQ ID NO: 2983291 - RNA, 19 nt, Artificial Sequence
  Description of Artificial Sequence: Synthetic oligonucleotide
accaucucuuuacaugggc

SEQ ID NO: 2983292 - RNA, 19 nt, Artificial Sequence
  Description of Artificial Sequence: Synthetic oligonucleotide
gauccaagauccgaaagag

SEQ ID NO: 2983293 - RNA, 19 nt, Artificial Sequence
  Description of Artificial Sequence: Synthetic oligonucleotide
cacacaguaaugcagcuug

SEQ ID NO: 2983294 - RNA, 19 nt, Artificial Sequence
  Description of Artificial Sequence: Synthetic oligonucleotide
ucauaaaaccaucucuuua

SEQ ID NO: 2983295 - RNA, 19 nt, Artificial Sequence
  Description of Artificial Sequence: Synthetic oligonucleotide
ugaauagcacagcucacac

SEQ ID NO: 2983296 - RNA, 19 nt, Artificial Sequence
  Description of Artificial Sequence: Synthetic oligonucleotide
ugcuaugaauagcacagcu

SEQ ID NO: 2983297 - RNA, 19 nt, Artificial Sequence
  Description of Artificial Sequence: Synthetic oligonucleotide
cuugggaagaacguaggcg

SEQ ID NO: 2983298 - RNA, 19 nt, Artificial Sequence
  Description of Artificial Sequence: Synthetic oligonucleotide
uagauccaagauccgaaag

SEQ ID NO: 2983299 - RNA, 19 nt, Artificial Sequence
  Description of Artificial Sequence: Synthetic oligonucleotide
aacguaggcgucgaagacg

SEQ ID NO: 2983300 - RNA, 19 nt, Artificial Sequence
  Description of Artificial Sequence: Synthetic oligonucleotide
uucuuggucaucuuagauc

SEQ ID NO: 2983301 - RNA, 19 nt, Artificial Sequence
  Description of Artificial Sequence: Synthetic oligonucleotide
uguccuugggcacgcaccg

SEQ ID NO: 2983302 - RNA, 19 nt, Artificial Sequence
  Description of Artificial Sequence: Synthetic oligonucleotide
cuggcuucggauauguccc

SEQ ID NO: 2983303 - RNA, 19 nt, Artificial Sequence
  Description of Artificial Sequence: Synthetic oligonucleotide
agauccaagauccgaaaga

SEQ ID NO: 2983304 - RNA, 19 nt, Artificial Sequence
  Description of Artificial Sequence: Synthetic oligonucleotide
uuuuauuuuccaaggugau

SEQ ID NO: 2983305 - RNA, 19 nt, Artificial Sequence
  Description of Artificial Sequence: Synthetic oligonucleotide
aagaacguaggcgucgaag

SEQ ID NO: 2983306 - RNA, 19 nt, Artificial Sequence
  Description of Artificial Sequence: Synthetic oligonucleotide
auagagcuugggaagaacg

SEQ ID NO: 2983307 - RNA, 19 nt, Artificial Sequence
  Description of Artificial Sequence: Synthetic oligonucleotide
agaacguaggcgucgaaga

SEQ ID NO: 2983308 - RNA, 19 nt, Artificial Sequence
  Description of Artificial Sequence: Synthetic oligonucleotide
uaggcgucgaagacgcugg

SEQ ID NO: 2983309 - RNA, 19 nt, Artificial Sequence
  Description of Artificial Sequence: Synthetic oligonucleotide
gacagcagcggccucuacg

SEQ ID NO: 2983310 - RNA, 19 nt, Artificial Sequence
  Description of Artificial Sequence: Synthetic oligonucleotide
uaugucccugacagcagcg

SEQ ID NO: 2983311 - RNA, 19 nt, Artificial Sequence
  Description of Artificial Sequence: Synthetic oligonucleotide
acaguaaugcagcuugaca

SEQ ID NO: 2983312 - RNA, 19 nt, Artificial Sequence
  Description of Artificial Sequence: Synthetic oligonucleotide
caccagcaggucuaaaucg

SEQ ID NO: 2983313 - RNA, 19 nt, Artificial Sequence
  Description of Artificial Sequence: Synthetic oligonucleotide
aucggcugcacauggccgc

SEQ ID NO: 2983314 - RNA, 19 nt, Artificial Sequence
  Description of Artificial Sequence: Synthetic oligonucleotide
ucuuagauccaagauccga

SEQ ID NO: 2983315 - RNA, 19 nt, Artificial Sequence
  Description of Artificial Sequence: Synthetic oligonucleotide
uuucuuggucaucuuagau

SEQ ID NO: 2983316 - RNA, 19 nt, Artificial Sequence
  Description of Artificial Sequence: Synthetic oligonucleotide
ucgauuccugacuacuuug

SEQ ID NO: 2983317 - RNA, 19 nt, Artificial Sequence
  Description of Artificial Sequence: Synthetic oligonucleotide
gauguuccgaaugacgaac

SEQ ID NO: 2983318 - RNA, 19 nt, Artificial Sequence
  Description of Artificial Sequence: Synthetic oligonucleotide
uccuugggcacgcaccggg

SEQ ID NO: 2983319 - RNA, 19 nt, Artificial Sequence
  Description of Artificial Sequence: Synthetic oligonucleotide
auggccuuguccuugggca

SEQ ID NO: 2983320 - RNA, 19 nt, Artificial Sequence
  Description of Artificial Sequence: Synthetic oligonucleotide
uuguccuugggcacgcacc

SEQ ID NO: 2983321 - RNA, 19 nt, Artificial Sequence
  Description of Artificial Sequence: Synthetic oligonucleotide
aggucuaaaucguggcggg

SEQ ID NO: 2983322 - RNA, 19 nt, Artificial Sequence
  Description of Artificial Sequence: Synthetic oligonucleotide
cuuugcuaugaauagcaca

SEQ ID NO: 2983323 - RNA, 19 nt, Artificial Sequence
  Description of Artificial Sequence: Synthetic oligonucleotide
uaaaaccaucucuuuacau

SEQ ID NO: 2983324 - RNA, 19 nt, Artificial Sequence
  Description of Artificial Sequence: Synthetic oligonucleotide
caggucuaaaucguggcgg

SEQ ID NO: 2983325 - RNA, 19 nt, Artificial Sequence
  Description of Artificial Sequence: Synthetic oligonucleotide
uagagcuugggaagaacgu

SEQ ID NO: 2983326 - RNA, 19 nt, Artificial Sequence
  Description of Artificial Sequence: Synthetic oligonucleotide
acguaggcgucgaagacgc

SEQ ID NO: 2983327 - RNA, 19 nt, Artificial Sequence
  Description of Artificial Sequence: Synthetic oligonucleotide
gacuacuuugcuaugaaua

SEQ ID NO: 2983328 - RNA, 19 nt, Artificial Sequence
  Description of Artificial Sequence: Synthetic oligonucleotide
guaaugcagcuugacauag

SEQ ID NO: 2983329 - RNA, 19 nt, Artificial Sequence
  Description of Artificial Sequence: Synthetic oligonucleotide
uuagauccaagauccgaaa

SEQ ID NO: 2983330 - RNA, 19 nt, Artificial Sequence
  Description of Artificial Sequence: Synthetic oligonucleotide
guuguuccgucuuuucuug

SEQ ID NO: 2983331 - RNA, 19 nt, Artificial Sequence
  Description of Artificial Sequence: Synthetic oligonucleotide
cuugacauagagcuuggga

SEQ ID NO: 2983332 - RNA, 19 nt, Artificial Sequence
  Description of Artificial Sequence: Synthetic oligonucleotide
uucauaaaaccaucucuuu

SEQ ID NO: 2983333 - RNA, 19 nt, Artificial Sequence
  Description of Artificial Sequence: Synthetic oligonucleotide
gagcuugggaagaacguag

SEQ ID NO: 2983334 - RNA, 19 nt, Artificial Sequence
  Description of Artificial Sequence: Synthetic oligonucleotide
cagcaggucuaaaucgugg

SEQ ID NO: 2983335 - RNA, 19 nt, Artificial Sequence
  Description of Artificial Sequence: Synthetic oligonucleotide
cuuagauccaagauccgaa

SEQ ID NO: 2983336 - RNA, 19 nt, Artificial Sequence
  Description of Artificial Sequence: Synthetic oligonucleotide
ugggcuuuggcggcggucg

SEQ ID NO: 2983337 - RNA, 19 nt, Artificial Sequence
  Description of Artificial Sequence: Synthetic oligonucleotide
gcuggcuucggauaugucc

SEQ ID NO: 2983338 - RNA, 19 nt, Artificial Sequence
  Description of Artificial Sequence: Synthetic oligonucleotide
uuacaugggcuuuggcggc

SEQ ID NO: 2983339 - RNA, 19 nt, Artificial Sequence
  Description of Artificial Sequence: Synthetic oligonucleotide
acagcagcggccucuacga

SEQ ID NO: 2983340 - RNA, 19 nt, Artificial Sequence
  Description of Artificial Sequence: Synthetic oligonucleotide
uuccgucuuuucuugguca

SEQ ID NO: 2983341 - RNA, 19 nt, Artificial Sequence
  Description of Artificial Sequence: Synthetic oligonucleotide
uagcacagcucacacagua

SEQ ID NO: 2983342 - RNA, 19 nt, Artificial Sequence
  Description of Artificial Sequence: Synthetic oligonucleotide
aguaaugcagcuugacaua

SEQ ID NO: 2983343 - RNA, 19 nt, Artificial Sequence
  Description of Artificial Sequence: Synthetic oligonucleotide
ucguggugcagcaccagca

SEQ ID NO: 2983344 - RNA, 19 nt, Artificial Sequence
  Description of Artificial Sequence: Synthetic oligonucleotide
uucggauaugucccugaca

SEQ ID NO: 2983345 - RNA, 19 nt, Artificial Sequence
  Description of Artificial Sequence: Synthetic oligonucleotide
uccgggcuucccgagaucg

SEQ ID NO: 2983346 - RNA, 19 nt, Artificial Sequence
  Description of Artificial Sequence: Synthetic oligonucleotide
ucuuuacaugggcuuuggc

SEQ ID NO: 2983347 - RNA, 19 nt, Artificial Sequence
  Description of Artificial Sequence: Synthetic oligonucleotide
uggucaucuuagauccaag

SEQ ID NO: 2983348 - RNA, 19 nt, Artificial Sequence
  Description of Artificial Sequence: Synthetic oligonucleotide
augaauagcacagcucaca

SEQ ID NO: 2983349 - RNA, 19 nt, Artificial Sequence
  Description of Artificial Sequence: Synthetic oligonucleotide
cuacuuugcuaugaauagc

SEQ ID NO: 2983350 - RNA, 19 nt, Artificial Sequence
  Description of Artificial Sequence: Synthetic oligonucleotide
cucuacgauguuccgaaug

SEQ ID NO: 2983351 - RNA, 19 nt, Artificial Sequence
  Description of Artificial Sequence: Synthetic oligonucleotide
cuguguucauaaaaccauc

SEQ ID NO: 2983352 - RNA, 19 nt, Artificial Sequence
  Description of Artificial Sequence: Synthetic oligonucleotide
ugucccugacagcagcggc

SEQ ID NO: 2983353 - RNA, 19 nt, Artificial Sequence
  Description of Artificial Sequence: Synthetic oligonucleotide
cagcuugacauagagcuug

SEQ ID NO: 2983354 - RNA, 19 nt, Artificial Sequence
  Description of Artificial Sequence: Synthetic oligonucleotide
ugacgaacuucuugauggc

SEQ ID NO: 2983355 - RNA, 19 nt, Artificial Sequence
  Description of Artificial Sequence: Synthetic oligonucleotide
acgauguuccgaaugacga

SEQ ID NO: 2983356 - RNA, 19 nt, Artificial Sequence
  Description of Artificial Sequence: Synthetic oligonucleotide
agcaccagcaggucuaaau

SEQ ID NO: 2983357 - RNA, 19 nt, Artificial Sequence
  Description of Artificial Sequence: Synthetic oligonucleotide
aagacgcuggcuucggaua

SEQ ID NO: 2983358 - RNA, 19 nt, Artificial Sequence
  Description of Artificial Sequence: Synthetic oligonucleotide
gaacguaggcgucgaagac

SEQ ID NO: 2983359 - RNA, 19 nt, Artificial Sequence
  Description of Artificial Sequence: Synthetic oligonucleotide
uuguuccgucuuuucuugg

SEQ ID NO: 2983360 - RNA, 19 nt, Artificial Sequence
  Description of Artificial Sequence: Synthetic oligonucleotide
agaucgauuccugacuacu

SEQ ID NO: 2983361 - RNA, 19 nt, Artificial Sequence
  Description of Artificial Sequence: Synthetic oligonucleotide
auuccugacuacuuugcua

SEQ ID NO: 2983362 - RNA, 19 nt, Artificial Sequence
  Description of Artificial Sequence: Synthetic oligonucleotide
guguucauaaaaccaucuc

SEQ ID NO: 2983363 - RNA, 19 nt, Artificial Sequence
  Description of Artificial Sequence: Synthetic oligonucleotide
aacuucuugauggccuugu

SEQ ID NO: 2983364 - RNA, 19 nt, Artificial Sequence
  Description of Artificial Sequence: Synthetic oligonucleotide
uuuauuuuccaaggugauu

SEQ ID NO: 2983365 - RNA, 19 nt, Artificial Sequence
  Description of Artificial Sequence: Synthetic oligonucleotide
gauaugucccugacagcag

SEQ ID NO: 2983366 - RNA, 19 nt, Artificial Sequence
  Description of Artificial Sequence: Synthetic oligonucleotide
agcucacacaguaaugcag

SEQ ID NO: 2983367 - RNA, 19 nt, Artificial Sequence
  Description of Artificial Sequence: Synthetic oligonucleotide
caguucgugcagcggaucg

SEQ ID NO: 2983368 - RNA, 19 nt, Artificial Sequence
  Description of Artificial Sequence: Synthetic oligonucleotide
aaccaucucuuuacauggg

SEQ ID NO: 2983369 - RNA, 19 nt, Artificial Sequence
  Description of Artificial Sequence: Synthetic oligonucleotide
ggauaugucccugacagca

SEQ ID NO: 2983370 - RNA, 19 nt, Artificial Sequence
  Description of Artificial Sequence: Synthetic oligonucleotide
gaucggcugcacauggccg

SEQ ID NO: 2983371 - RNA, 19 nt, Artificial Sequence
  Description of Artificial Sequence: Synthetic oligonucleotide
gaauagcacagcucacaca

SEQ ID NO: 2983372 - RNA, 19 nt, Artificial Sequence
  Description of Artificial Sequence: Synthetic oligonucleotide
ugcagcaccagcaggucua

SEQ ID NO: 2983373 - RNA, 19 nt, Artificial Sequence
  Description of Artificial Sequence: Synthetic oligonucleotide
acuuugcuaugaauagcac

SEQ ID NO: 2983374 - RNA, 19 nt, Artificial Sequence
  Description of Artificial Sequence: Synthetic oligonucleotide
ucucuuuacaugggcuuug

SEQ ID NO: 2983375 - RNA, 19 nt, Artificial Sequence
  Description of Artificial Sequence: Synthetic oligonucleotide
uaaugcagcuugacauaga

SEQ ID NO: 2983376 - RNA, 19 nt, Artificial Sequence
  Description of Artificial Sequence: Synthetic oligonucleotide
caguaaugcagcuugacau

SEQ ID NO: 2983377 - RNA, 19 nt, Artificial Sequence
  Description of Artificial Sequence: Synthetic oligonucleotide
gacgaacuucuugauggcc

SEQ ID NO: 2983378 - RNA, 19 nt, Artificial Sequence
  Description of Artificial Sequence: Synthetic oligonucleotide
uuggcucgcccguuguucc

SEQ ID NO: 2983379 - RNA, 19 nt, Artificial Sequence
  Description of Artificial Sequence: Synthetic oligonucleotide
agcagcggccucuacgaug

SEQ ID NO: 2983380 - RNA, 19 nt, Artificial Sequence
  Description of Artificial Sequence: Synthetic oligonucleotide
aucgauuccugacuacuuu

SEQ ID NO: 2983381 - RNA, 19 nt, Artificial Sequence
  Description of Artificial Sequence: Synthetic oligonucleotide
ugacuacuuugcuaugaau

SEQ ID NO: 2983382 - RNA, 19 nt, Artificial Sequence
  Description of Artificial Sequence: Synthetic oligonucleotide
cacagcucacacaguaaug

SEQ ID NO: 2983383 - RNA, 19 nt, Artificial Sequence
  Description of Artificial Sequence: Synthetic oligonucleotide
uuuggcggcggucguggug

SEQ ID NO: 2983384 - RNA, 19 nt, Artificial Sequence
  Description of Artificial Sequence: Synthetic oligonucleotide
gacauagagcuugggaaga

SEQ ID NO: 2983385 - RNA, 19 nt, Artificial Sequence
  Description of Artificial Sequence: Synthetic oligonucleotide
ucgugcagcggaucggcug

SEQ ID NO: 2983386 - RNA, 19 nt, Artificial Sequence
  Description of Artificial Sequence: Synthetic oligonucleotide
gcaggucuaaaucguggcg

SEQ ID NO: 2983387 - RNA, 19 nt, Artificial Sequence
  Description of Artificial Sequence: Synthetic oligonucleotide
augcagcuugacauagagc

SEQ ID NO: 2983388 - RNA, 19 nt, Artificial Sequence
  Description of Artificial Sequence: Synthetic oligonucleotide
guaggcgucgaagacgcug

SEQ ID NO: 2983389 - RNA, 19 nt, Artificial Sequence
  Description of Artificial Sequence: Synthetic oligonucleotide
uucccgagaucgauuccug

SEQ ID NO: 2983390 - RNA, 19 nt, Artificial Sequence
  Description of Artificial Sequence: Synthetic oligonucleotide
cuugggcacgcaccgggcg

SEQ ID NO: 2983391 - RNA, 19 nt, Artificial Sequence
  Description of Artificial Sequence: Synthetic oligonucleotide
uauuuuccaaggugauuuu

SEQ ID NO: 2983392 - RNA, 19 nt, Artificial Sequence
  Description of Artificial Sequence: Synthetic oligonucleotide
uugggcacgcaccgggcgc

SEQ ID NO: 2983393 - RNA, 19 nt, Artificial Sequence
  Description of Artificial Sequence: Synthetic oligonucleotide
acgaacuucuugauggccu

SEQ ID NO: 2983394 - RNA, 19 nt, Artificial Sequence
  Description of Artificial Sequence: Synthetic oligonucleotide
gagaucgauuccugacuac

SEQ ID NO: 2983395 - RNA, 19 nt, Artificial Sequence
  Description of Artificial Sequence: Synthetic oligonucleotide
uuuggcucgcccguuguuc

SEQ ID NO: 2983396 - RNA, 19 nt, Artificial Sequence
  Description of Artificial Sequence: Synthetic oligonucleotide
guggugcagcaccagcagg

SEQ ID NO: 2983397 - RNA, 19 nt, Artificial Sequence
  Description of Artificial Sequence: Synthetic oligonucleotide
gucgaagacgcuggcuucg

SEQ ID NO: 2983398 - RNA, 19 nt, Artificial Sequence
  Description of Artificial Sequence: Synthetic oligonucleotide
ggaucggcugcacauggcc

SEQ ID NO: 2983399 - RNA, 19 nt, Artificial Sequence
  Description of Artificial Sequence: Synthetic oligonucleotide
uugcuaugaauagcacagc

SEQ ID NO: 2983400 - RNA, 19 nt, Artificial Sequence
  Description of Artificial Sequence: Synthetic oligonucleotide
agcuugggaagaacguagg

SEQ ID NO: 2983401 - RNA, 19 nt, Artificial Sequence
  Description of Artificial Sequence: Synthetic oligonucleotide
ggguguucgguccuuccgg

SEQ ID NO: 2983402 - RNA, 19 nt, Artificial Sequence
  Description of Artificial Sequence: Synthetic oligonucleotide
aguucgugcagcggaucgg

SEQ ID NO: 2983403 - RNA, 19 nt, Artificial Sequence
  Description of Artificial Sequence: Synthetic oligonucleotide
cucuuuacaugggcuuugg

SEQ ID NO: 2983404 - RNA, 19 nt, Artificial Sequence
  Description of Artificial Sequence: Synthetic oligonucleotide
cuucggauaugucccugac

SEQ ID NO: 2983405 - RNA, 19 nt, Artificial Sequence
  Description of Artificial Sequence: Synthetic oligonucleotide
uucuuucuguguucauaaa

SEQ ID NO: 2983406 - RNA, 19 nt, Artificial Sequence
  Description of Artificial Sequence: Synthetic oligonucleotide
uguuccgaaugacgaacuu

SEQ ID NO: 2983407 - RNA, 19 nt, Artificial Sequence
  Description of Artificial Sequence: Synthetic oligonucleotide
gguguucgguccuuccggg

SEQ ID NO: 2983408 - RNA, 19 nt, Artificial Sequence
  Description of Artificial Sequence: Synthetic oligonucleotide
uacaugggcuuuggcggcg

SEQ ID NO: 2983409 - RNA, 19 nt, Artificial Sequence
  Description of Artificial Sequence: Synthetic oligonucleotide
guucauaaaaccaucucuu

SEQ ID NO: 2983410 - RNA, 19 nt, Artificial Sequence
  Description of Artificial Sequence: Synthetic oligonucleotide
gguccuuccgggcuucccg

SEQ ID NO: 2983411 - RNA, 19 nt, Artificial Sequence
  Description of Artificial Sequence: Synthetic oligonucleotide
guuccgaaugacgaacuuc

SEQ ID NO: 2983412 - RNA, 19 nt, Artificial Sequence
  Description of Artificial Sequence: Synthetic oligonucleotide
ugggaagaacguaggcguc

SEQ ID NO: 2983413 - RNA, 19 nt, Artificial Sequence
  Description of Artificial Sequence: Synthetic oligonucleotide
ggucaucuuagauccaaga

SEQ ID NO: 2983414 - RNA, 19 nt, Artificial Sequence
  Description of Artificial Sequence: Synthetic oligonucleotide
gucaucuuagauccaagau

SEQ ID NO: 2983415 - RNA, 19 nt, Artificial Sequence
  Description of Artificial Sequence: Synthetic oligonucleotide
ugauggccuuguccuuggg

SEQ ID NO: 2983416 - RNA, 19 nt, Artificial Sequence
  Description of Artificial Sequence: Synthetic oligonucleotide
cuuguccuugggcacgcac

SEQ ID NO: 2983417 - RNA, 19 nt, Artificial Sequence
  Description of Artificial Sequence: Synthetic oligonucleotide
gcucacacaguaaugcagc

SEQ ID NO: 2983418 - RNA, 19 nt, Artificial Sequence
  Description of Artificial Sequence: Synthetic oligonucleotide
cauagagcuugggaagaac

SEQ ID NO: 2983419 - RNA, 19 nt, Artificial Sequence
  Description of Artificial Sequence: Synthetic oligonucleotide
cacaguaaugcagcuugac

SEQ ID NO: 2983420 - RNA, 19 nt, Artificial Sequence
  Description of Artificial Sequence: Synthetic oligonucleotide
uccgucuuuucuuggucau

SEQ ID NO: 2983421 - RNA, 19 nt, Artificial Sequence
  Description of Artificial Sequence: Synthetic oligonucleotide
cugcacauggccgcggccc

SEQ ID NO: 2983422 - RNA, 19 nt, Artificial Sequence
  Description of Artificial Sequence: Synthetic oligonucleotide
gauuccugacuacuuugcu

SEQ ID NO: 2983423 - RNA, 19 nt, Artificial Sequence
  Description of Artificial Sequence: Synthetic oligonucleotide
guuccgucuuuucuugguc

SEQ ID NO: 2983424 - RNA, 19 nt, Artificial Sequence
  Description of Artificial Sequence: Synthetic oligonucleotide
ucgaagacgcuggcuucgg

SEQ ID NO: 2983425 - RNA, 19 nt, Artificial Sequence
  Description of Artificial Sequence: Synthetic oligonucleotide
cgaaugacgaacuucuuga

SEQ ID NO: 2983426 - RNA, 19 nt, Artificial Sequence
  Description of Artificial Sequence: Synthetic oligonucleotide
gucguggugcagcaccagc

SEQ ID NO: 2983427 - RNA, 19 nt, Artificial Sequence
  Description of Artificial Sequence: Synthetic oligonucleotide
aucuuagauccaagauccg

SEQ ID NO: 2983428 - RNA, 19 nt, Artificial Sequence
  Description of Artificial Sequence: Synthetic oligonucleotide
augucccugacagcagcgg

SEQ ID NO: 2983429 - RNA, 19 nt, Artificial Sequence
  Description of Artificial Sequence: Synthetic oligonucleotide
guucgugcagcggaucggc

SEQ ID NO: 2983430 - RNA, 19 nt, Artificial Sequence
  Description of Artificial Sequence: Synthetic oligonucleotide
accagcaggucuaaaucgu

SEQ ID NO: 2983431 - RNA, 19 nt, Artificial Sequence
  Description of Artificial Sequence: Synthetic oligonucleotide
agagcuugggaagaacgua

SEQ ID NO: 2983432 - RNA, 19 nt, Artificial Sequence
  Description of Artificial Sequence: Synthetic oligonucleotide
agacgcuggcuucggauau

SEQ ID NO: 2983433 - RNA, 19 nt, Artificial Sequence
  Description of Artificial Sequence: Synthetic oligonucleotide
ccgaaugacgaacuucuug

SEQ ID NO: 2983434 - RNA, 19 nt, Artificial Sequence
  Description of Artificial Sequence: Synthetic oligonucleotide
ucccgagaucgauuccuga

SEQ ID NO: 2983435 - RNA, 19 nt, Artificial Sequence
  Description of Artificial Sequence: Synthetic oligonucleotide
gggguguucgguccuuccg

SEQ ID NO: 2983436 - RNA, 19 nt, Artificial Sequence
  Description of Artificial Sequence: Synthetic oligonucleotide
agcggccucuacgauguuc

SEQ ID NO: 2983437 - RNA, 19 nt, Artificial Sequence
  Description of Artificial Sequence: Synthetic oligonucleotide
cuacgauguuccgaaugac

SEQ ID NO: 2983438 - RNA, 19 nt, Artificial Sequence
  Description of Artificial Sequence: Synthetic oligonucleotide
gaagacgcuggcuucggau

SEQ ID NO: 2983439 - RNA, 19 nt, Artificial Sequence
  Description of Artificial Sequence: Synthetic oligonucleotide
aggcgucgaagacgcuggc

SEQ ID NO: 2983440 - RNA, 19 nt, Artificial Sequence
  Description of Artificial Sequence: Synthetic oligonucleotide
gcuugggaagaacguaggc

SEQ ID NO: 2983441 - RNA, 19 nt, Artificial Sequence
  Description of Artificial Sequence: Synthetic oligonucleotide
gaacuucuugauggccuug

SEQ ID NO: 2983442 - RNA, 19 nt, Artificial Sequence
  Description of Artificial Sequence: Synthetic oligonucleotide
agcuugacauagagcuugg

SEQ ID NO: 2983443 - RNA, 19 nt, Artificial Sequence
  Description of Artificial Sequence: Synthetic oligonucleotide
ugcacauggccgcggcccu

SEQ ID NO: 2983444 - RNA, 19 nt, Artificial Sequence
  Description of Artificial Sequence: Synthetic oligonucleotide
uggccuuguccuugggcac

SEQ ID NO: 2983445 - RNA, 19 nt, Artificial Sequence
  Description of Artificial Sequence: Synthetic oligonucleotide
gcaccagcaggucuaaauc

SEQ ID NO: 2983446 - RNA, 19 nt, Artificial Sequence
  Description of Artificial Sequence: Synthetic oligonucleotide
uuuuggcucgcccguuguu

SEQ ID NO: 2983447 - RNA, 19 nt, Artificial Sequence
  Description of Artificial Sequence: Synthetic oligonucleotide
cugacuacuuugcuaugaa

SEQ ID NO: 2983448 - RNA, 19 nt, Artificial Sequence
  Description of Artificial Sequence: Synthetic oligonucleotide
gcuaugaauagcacagcuc

SEQ ID NO: 2983449 - RNA, 19 nt, Artificial Sequence
  Description of Artificial Sequence: Synthetic oligonucleotide
aucucuuuacaugggcuuu

SEQ ID NO: 2983450 - RNA, 19 nt, Artificial Sequence
  Description of Artificial Sequence: Synthetic oligonucleotide
uggcucgcccguuguuccg

SEQ ID NO: 2983451 - RNA, 19 nt, Artificial Sequence
  Description of Artificial Sequence: Synthetic oligonucleotide
uccuuccgggcuucccgag

SEQ ID NO: 2983452 - RNA, 19 nt, Artificial Sequence
  Description of Artificial Sequence: Synthetic oligonucleotide
ucggcugcacauggccgcg

SEQ ID NO: 2983453 - RNA, 19 nt, Artificial Sequence
  Description of Artificial Sequence: Synthetic oligonucleotide
auguuccgaaugacgaacu

SEQ ID NO: 2983454 - RNA, 19 nt, Artificial Sequence
  Description of Artificial Sequence: Synthetic oligonucleotide
gucccugacagcagcggcc

SEQ ID NO: 2983455 - RNA, 19 nt, Artificial Sequence
  Description of Artificial Sequence: Synthetic oligonucleotide
gaaugacgaacuucuugau

SEQ ID NO: 2983456 - RNA, 19 nt, Artificial Sequence
  Description of Artificial Sequence: Synthetic oligonucleotide
gcggaucggcugcacaugg

SEQ ID NO: 2983457 - RNA, 19 nt, Artificial Sequence
  Description of Artificial Sequence: Synthetic oligonucleotide
uucgugcagcggaucggcu

SEQ ID NO: 2983458 - RNA, 19 nt, Artificial Sequence
  Description of Artificial Sequence: Synthetic oligonucleotide
ucccugacagcagcggccu

SEQ ID NO: 2983459 - RNA, 19 nt, Artificial Sequence
  Description of Artificial Sequence: Synthetic oligonucleotide
ggcuucccgagaucgauuc

SEQ ID NO: 2983460 - RNA, 19 nt, Artificial Sequence
  Description of Artificial Sequence: Synthetic oligonucleotide
cagcucacacaguaaugca

SEQ ID NO: 2983461 - RNA, 19 nt, Artificial Sequence
  Description of Artificial Sequence: Synthetic oligonucleotide
uccgaaugacgaacuucuu

SEQ ID NO: 2983462 - RNA, 19 nt, Artificial Sequence
  Description of Artificial Sequence: Synthetic oligonucleotide
cccgagaucgauuccugac

SEQ ID NO: 2983463 - RNA, 19 nt, Artificial Sequence
  Description of Artificial Sequence: Synthetic oligonucleotide
gccucuacgauguuccgaa

SEQ ID NO: 2983464 - RNA, 19 nt, Artificial Sequence
  Description of Artificial Sequence: Synthetic oligonucleotide
gcggucguggugcagcacc

SEQ ID NO: 2983465 - RNA, 19 nt, Artificial Sequence
  Description of Artificial Sequence: Synthetic oligonucleotide
cgauuccugacuacuuugc

SEQ ID NO: 2983466 - RNA, 19 nt, Artificial Sequence
  Description of Artificial Sequence: Synthetic oligonucleotide
guguucgguccuuccgggc

SEQ ID NO: 2983467 - RNA, 19 nt, Artificial Sequence
  Description of Artificial Sequence: Synthetic oligonucleotide
uggcuucggauaugucccu

SEQ ID NO: 2983468 - RNA, 19 nt, Artificial Sequence
  Description of Artificial Sequence: Synthetic oligonucleotide
gcuuuggcggcggucgugg

SEQ ID NO: 2983469 - RNA, 19 nt, Artificial Sequence
  Description of Artificial Sequence: Synthetic oligonucleotide
caccgggcgcaguucgugc

SEQ ID NO: 2983470 - RNA, 19 nt, Artificial Sequence
  Description of Artificial Sequence: Synthetic oligonucleotide
ggucuaaaucguggcgggg

SEQ ID NO: 2983471 - RNA, 19 nt, Artificial Sequence
  Description of Artificial Sequence: Synthetic oligonucleotide
gcggccucuacgauguucc

SEQ ID NO: 2983472 - RNA, 19 nt, Artificial Sequence
  Description of Artificial Sequence: Synthetic oligonucleotide
augggcuuuggcggcgguc

SEQ ID NO: 2983473 - RNA, 19 nt, Artificial Sequence
  Description of Artificial Sequence: Synthetic oligonucleotide
accgggcgcaguucgugca

SEQ ID NO: 2983474 - RNA, 19 nt, Artificial Sequence
  Description of Artificial Sequence: Synthetic oligonucleotide
agcggaucggcugcacaug

SEQ ID NO: 2983475 - RNA, 19 nt, Artificial Sequence
  Description of Artificial Sequence: Synthetic oligonucleotide
acaugggcuuuggcggcgg

SEQ ID NO: 2983476 - RNA, 19 nt, Artificial Sequence
  Description of Artificial Sequence: Synthetic oligonucleotide
caucucuuuacaugggcuu

SEQ ID NO: 2983477 - RNA, 19 nt, Artificial Sequence
  Description of Artificial Sequence: Synthetic oligonucleotide
ccagcaggucuaaaucgug

SEQ ID NO: 2983478 - RNA, 19 nt, Artificial Sequence
  Description of Artificial Sequence: Synthetic oligonucleotide
cuuggucaucuuagaucca

SEQ ID NO: 2983479 - RNA, 19 nt, Artificial Sequence
  Description of Artificial Sequence: Synthetic oligonucleotide
ucgcccguuguuccgucuu

SEQ ID NO: 2983480 - RNA, 19 nt, Artificial Sequence
  Description of Artificial Sequence: Synthetic oligonucleotide
gaagaacguaggcgucgaa

SEQ ID NO: 2983481 - RNA, 19 nt, Artificial Sequence
  Description of Artificial Sequence: Synthetic oligonucleotide
gacgcuggcuucggauaug

SEQ ID NO: 2983482 - RNA, 19 nt, Artificial Sequence
  Description of Artificial Sequence: Synthetic oligonucleotide
acgcuggcuucggauaugu

SEQ ID NO: 2983483 - RNA, 19 nt, Artificial Sequence
  Description of Artificial Sequence: Synthetic oligonucleotide
cucacacaguaaugcagcu

SEQ ID NO: 2983484 - RNA, 19 nt, Artificial Sequence
  Description of Artificial Sequence: Synthetic oligonucleotide
cuucccgagaucgauuccu

SEQ ID NO: 2983485 - RNA, 19 nt, Artificial Sequence
  Description of Artificial Sequence: Synthetic oligonucleotide
ggccuuguccuugggcacg

SEQ ID NO: 2983486 - RNA, 19 nt, Artificial Sequence
  Description of Artificial Sequence: Synthetic oligonucleotide
agcacagcucacacaguaa

SEQ ID NO: 2983487 - RNA, 19 nt, Artificial Sequence
  Description of Artificial Sequence: Synthetic oligonucleotide
guccuuccgggcuucccga

SEQ ID NO: 2983488 - RNA, 19 nt, Artificial Sequence
  Description of Artificial Sequence: Synthetic oligonucleotide
ugggcacgcaccgggcgca

SEQ ID NO: 2983489 - RNA, 19 nt, Artificial Sequence
  Description of Artificial Sequence: Synthetic oligonucleotide
auagcacagcucacacagu

SEQ ID NO: 2983490 - RNA, 19 nt, Artificial Sequence
  Description of Artificial Sequence: Synthetic oligonucleotide
gcuucggauaugucccuga

SEQ ID NO: 2983491 - RNA, 19 nt, Artificial Sequence
  Description of Artificial Sequence: Synthetic oligonucleotide
gcuugacauagagcuuggg

SEQ ID NO: 2983492 - RNA, 19 nt, Artificial Sequence
  Description of Artificial Sequence: Synthetic oligonucleotide
gggcgcaguucgugcagcg

SEQ ID NO: 2983493 - RNA, 19 nt, Artificial Sequence
  Description of Artificial Sequence: Synthetic oligonucleotide
gaucgauuccugacuacuu

SEQ ID NO: 2983494 - RNA, 19 nt, Artificial Sequence
  Description of Artificial Sequence: Synthetic oligonucleotide
cgugcagcggaucggcugc

SEQ ID NO: 2983495 - RNA, 19 nt, Artificial Sequence
  Description of Artificial Sequence: Synthetic oligonucleotide
gcgcaguucgugcagcgga

SEQ ID NO: 2983496 - RNA, 19 nt, Artificial Sequence
  Description of Artificial Sequence: Synthetic oligonucleotide
ggaagaacguaggcgucga

SEQ ID NO: 2983497 - RNA, 19 nt, Artificial Sequence
  Description of Artificial Sequence: Synthetic oligonucleotide
uuccgggcuucccgagauc

SEQ ID NO: 2983498 - RNA, 19 nt, Artificial Sequence
  Description of Artificial Sequence: Synthetic oligonucleotide
gcuucccgagaucgauucc

SEQ ID NO: 2983499 - RNA, 19 nt, Artificial Sequence
  Description of Artificial Sequence: Synthetic oligonucleotide
guccuugggcacgcaccgg

SEQ ID NO: 2983500 - RNA, 19 nt, Artificial Sequence
  Description of Artificial Sequence: Synthetic oligonucleotide
cguggugcagcaccagcag

SEQ ID NO: 2983501 - RNA, 19 nt, Artificial Sequence
  Description of Artificial Sequence: Synthetic oligonucleotide
ggcgcaguucgugcagcgg

SEQ ID NO: 2983502 - RNA, 19 nt, Artificial Sequence
  Description of Artificial Sequence: Synthetic oligonucleotide
uucgguccuuccgggcuuc

SEQ ID NO: 2983503 - RNA, 19 nt, Artificial Sequence
  Description of Artificial Sequence: Synthetic oligonucleotide
ccaucucuuuacaugggcu

SEQ ID NO: 2983504 - RNA, 19 nt, Artificial Sequence
  Description of Artificial Sequence: Synthetic oligonucleotide
ugcagcggaucggcugcac

SEQ ID NO: 2983505 - RNA, 19 nt, Artificial Sequence
  Description of Artificial Sequence: Synthetic oligonucleotide
gcugcacauggccgcggcc

SEQ ID NO: 2983506 - RNA, 19 nt, Artificial Sequence
  Description of Artificial Sequence: Synthetic oligonucleotide
ggcuucggauaugucccug

SEQ ID NO: 2983507 - RNA, 19 nt, Artificial Sequence
  Description of Artificial Sequence: Synthetic oligonucleotide
cagcggaucggcugcacau

SEQ ID NO: 2983508 - RNA, 19 nt, Artificial Sequence
  Description of Artificial Sequence: Synthetic oligonucleotide
cccguuguuccgucuuuuc

SEQ ID NO: 2983509 - RNA, 19 nt, Artificial Sequence
  Description of Artificial Sequence: Synthetic oligonucleotide
cuuccgggcuucccgagau

SEQ ID NO: 2983510 - RNA, 19 nt, Artificial Sequence
  Description of Artificial Sequence: Synthetic oligonucleotide
cggauaugucccugacagc

SEQ ID NO: 2983511 - RNA, 19 nt, Artificial Sequence
  Description of Artificial Sequence: Synthetic oligonucleotide
gcagcggccucuacgaugu

SEQ ID NO: 2983512 - RNA, 19 nt, Artificial Sequence
  Description of Artificial Sequence: Synthetic oligonucleotide
ggucguggugcagcaccag

SEQ ID NO: 2983513 - RNA, 19 nt, Artificial Sequence
  Description of Artificial Sequence: Synthetic oligonucleotide
gcggcggucguggugcagc

SEQ ID NO: 2983514 - RNA, 19 nt, Artificial Sequence
  Description of Artificial Sequence: Synthetic oligonucleotide
gcagcggaucggcugcaca

SEQ ID NO: 2983515 - RNA, 19 nt, Artificial Sequence
  Description of Artificial Sequence: Synthetic oligonucleotide
ggccucuacgauguuccga

SEQ ID NO: 2983516 - RNA, 19 nt, Artificial Sequence
  Description of Artificial Sequence: Synthetic oligonucleotide
gcgucgaagacgcuggcuu

SEQ ID NO: 2983517 - RNA, 19 nt, Artificial Sequence
  Description of Artificial Sequence: Synthetic oligonucleotide
ucgguccuuccgggcuucc

SEQ ID NO: 2983518 - RNA, 19 nt, Artificial Sequence
  Description of Artificial Sequence: Synthetic oligonucleotide
cacgcaccgggcgcaguuc

SEQ ID NO: 2983519 - RNA, 19 nt, Artificial Sequence
  Description of Artificial Sequence: Synthetic oligonucleotide
cgucgaagacgcuggcuuc

SEQ ID NO: 2983520 - RNA, 19 nt, Artificial Sequence
  Description of Artificial Sequence: Synthetic oligonucleotide
ccgagaucgauuccugacu

SEQ ID NO: 2983521 - RNA, 19 nt, Artificial Sequence
  Description of Artificial Sequence: Synthetic oligonucleotide
cgagaucgauuccugacua

SEQ ID NO: 2983522 - RNA, 19 nt, Artificial Sequence
  Description of Artificial Sequence: Synthetic oligonucleotide
ggcuuuggcggcggucgug

SEQ ID NO: 2983523 - RNA, 19 nt, Artificial Sequence
  Description of Artificial Sequence: Synthetic oligonucleotide
gcaccgggcgcaguucgug

SEQ ID NO: 2983524 - RNA, 19 nt, Artificial Sequence
  Description of Artificial Sequence: Synthetic oligonucleotide
gccuuguccuugggcacgc

SEQ ID NO: 2983525 - RNA, 19 nt, Artificial Sequence
  Description of Artificial Sequence: Synthetic oligonucleotide
guucgguccuuccgggcuu

SEQ ID NO: 2983526 - RNA, 19 nt, Artificial Sequence
  Description of Artificial Sequence: Synthetic oligonucleotide
cgauguuccgaaugacgaa

SEQ ID NO: 2983527 - RNA, 19 nt, Artificial Sequence
  Description of Artificial Sequence: Synthetic oligonucleotide
gcaguucgugcagcggauc

SEQ ID NO: 2983528 - RNA, 19 nt, Artificial Sequence
  Description of Artificial Sequence: Synthetic oligonucleotide
cggaucggcugcacauggc

SEQ ID NO: 2983529 - RNA, 19 nt, Artificial Sequence
  Description of Artificial Sequence: Synthetic oligonucleotide
ccgggcgcaguucgugcag

SEQ ID NO: 2983530 - RNA, 19 nt, Artificial Sequence
  Description of Artificial Sequence: Synthetic oligonucleotide
cgucuuuucuuggucaucu

SEQ ID NO: 2983531 - RNA, 19 nt, Artificial Sequence
  Description of Artificial Sequence: Synthetic oligonucleotide
ccguuguuccgucuuuucu

SEQ ID NO: 2983532 - RNA, 19 nt, Artificial Sequence
  Description of Artificial Sequence: Synthetic oligonucleotide
acauggccgcggcccuuuu

SEQ ID NO: 2983533 - RNA, 19 nt, Artificial Sequence
  Description of Artificial Sequence: Synthetic oligonucleotide
cguuguuccgucuuuucuu

SEQ ID NO: 2983534 - RNA, 19 nt, Artificial Sequence
  Description of Artificial Sequence: Synthetic oligonucleotide
ccgucuuuucuuggucauc

SEQ ID NO: 2983535 - RNA, 19 nt, Artificial Sequence
  Description of Artificial Sequence: Synthetic oligonucleotide
cggccucuacgauguuccg

SEQ ID NO: 2983536 - RNA, 19 nt, Artificial Sequence
  Description of Artificial Sequence: Synthetic oligonucleotide
gugcagcggaucggcugca

SEQ ID NO: 2983537 - RNA, 19 nt, Artificial Sequence
  Description of Artificial Sequence: Synthetic oligonucleotide
cuuuggcggcggucguggu

SEQ ID NO: 2983538 - RNA, 19 nt, Artificial Sequence
  Description of Artificial Sequence: Synthetic oligonucleotide
ccuuccgggcuucccgaga

SEQ ID NO: 2983539 - RNA, 19 nt, Artificial Sequence
  Description of Artificial Sequence: Synthetic oligonucleotide
gcucgcccguuguuccguc

SEQ ID NO: 2983540 - RNA, 19 nt, Artificial Sequence
  Description of Artificial Sequence: Synthetic oligonucleotide
cucgcccguuguuccgucu

SEQ ID NO: 2983541 - RNA, 19 nt, Artificial Sequence
  Description of Artificial Sequence: Synthetic oligonucleotide
ggcgucgaagacgcuggcu

SEQ ID NO: 2983542 - RNA, 19 nt, Artificial Sequence
  Description of Artificial Sequence: Synthetic oligonucleotide
caugggcuuuggcggcggu

SEQ ID NO: 2983543 - RNA, 19 nt, Artificial Sequence
  Description of Artificial Sequence: Synthetic oligonucleotide
gcagcuugacauagagcuu

SEQ ID NO: 2983544 - RNA, 19 nt, Artificial Sequence
  Description of Artificial Sequence: Synthetic oligonucleotide
ggcggucguggugcagcac

SEQ ID NO: 2983545 - RNA, 19 nt, Artificial Sequence
  Description of Artificial Sequence: Synthetic oligonucleotide
cggucguggugcagcacca

SEQ ID NO: 2983546 - RNA, 19 nt, Artificial Sequence
  Description of Artificial Sequence: Synthetic oligonucleotide
ggcggcggucguggugcag

SEQ ID NO: 2983547 - RNA, 19 nt, Artificial Sequence
  Description of Artificial Sequence: Synthetic oligonucleotide
cgggcgcaguucgugcagc

SEQ ID NO: 2983548 - RNA, 19 nt, Artificial Sequence
  Description of Artificial Sequence: Synthetic oligonucleotide
gggcacgcaccgggcgcag

SEQ ID NO: 2983549 - RNA, 19 nt, Artificial Sequence
  Description of Artificial Sequence: Synthetic oligonucleotide
ccgggcuucccgagaucga

SEQ ID NO: 2983550 - RNA, 19 nt, Artificial Sequence
  Description of Artificial Sequence: Synthetic oligonucleotide
cgaagacgcuggcuucgga

SEQ ID NO: 2983551 - RNA, 19 nt, Artificial Sequence
  Description of Artificial Sequence: Synthetic oligonucleotide
gcacgcaccgggcgcaguu

SEQ ID NO: 2983552 - RNA, 19 nt, Artificial Sequence
  Description of Artificial Sequence: Synthetic oligonucleotide
ggcucgcccguuguuccgu

SEQ ID NO: 2983553 - RNA, 19 nt, Artificial Sequence
  Description of Artificial Sequence: Synthetic oligonucleotide
cacauggccgcggcccuuu

SEQ ID NO: 2983554 - RNA, 19 nt, Artificial Sequence
  Description of Artificial Sequence: Synthetic oligonucleotide
cagcagcggccucuacgau

SEQ ID NO: 2983555 - RNA, 19 nt, Artificial Sequence
  Description of Artificial Sequence: Synthetic oligonucleotide
gggcuuuggcggcggucgu

SEQ ID NO: 2983556 - RNA, 19 nt, Artificial Sequence
  Description of Artificial Sequence: Synthetic oligonucleotide
cggcugcacauggccgcgg

SEQ ID NO: 2983557 - RNA, 19 nt, Artificial Sequence
  Description of Artificial Sequence: Synthetic oligonucleotide
gggcuucccgagaucgauu

SEQ ID NO: 2983558 - RNA, 19 nt, Artificial Sequence
  Description of Artificial Sequence: Synthetic oligonucleotide
ccucuacgauguuccgaau

SEQ ID NO: 2983559 - RNA, 19 nt, Artificial Sequence
  Description of Artificial Sequence: Synthetic oligonucleotide
cgcaguucgugcagcggau

SEQ ID NO: 2983560 - RNA, 19 nt, Artificial Sequence
  Description of Artificial Sequence: Synthetic oligonucleotide
cggcggucguggugcagca

SEQ ID NO: 2983561 - RNA, 19 nt, Artificial Sequence
  Description of Artificial Sequence: Synthetic oligonucleotide
gcccguuguuccgucuuuu

SEQ ID NO: 2983562 - RNA, 19 nt, Artificial Sequence
  Description of Artificial Sequence: Synthetic oligonucleotide
cgggcuucccgagaucgau

SEQ ID NO: 2983563 - RNA, 19 nt, Artificial Sequence
  Description of Artificial Sequence: Synthetic oligonucleotide
ggcacgcaccgggcgcagu

SEQ ID NO: 2983564 - RNA, 19 nt, Artificial Sequence
  Description of Artificial Sequence: Synthetic oligonucleotide
gcacauggccgcggcccuu

SEQ ID NO: 2983565 - RNA, 19 nt, Artificial Sequence
  Description of Artificial Sequence: Synthetic oligonucleotide
cguaggcgucgaagacgcu

SEQ ID NO: 2983566 - RNA, 19 nt, Artificial Sequence
  Description of Artificial Sequence: Synthetic oligonucleotide
cgcaccgggcgcaguucgu

SEQ ID NO: 2983567 - RNA, 19 nt, Artificial Sequence
  Description of Artificial Sequence: Synthetic oligonucleotide
cagcggccucuacgauguu

SEQ ID NO: 2983568 - RNA, 19 nt, Artificial Sequence
  Description of Artificial Sequence: Synthetic oligonucleotide
cgcccguuguuccgucuuu

SEQ ID NO: 2983569 - RNA, 19 nt, Artificial Sequence
  Description of Artificial Sequence: Synthetic oligonucleotide
aagucaaaucuguugaugc

SEQ ID NO: 2983570 - RNA, 19 nt, Artificial Sequence
  Description of Artificial Sequence: Synthetic oligonucleotide
aacaucuucuccaaggacc

SEQ ID NO: 2983571 - RNA, 19 nt, Artificial Sequence
  Description of Artificial Sequence: Synthetic oligonucleotide
gaagacgauagccagagag

SEQ ID NO: 2983572 - RNA, 19 nt, Artificial Sequence
  Description of Artificial Sequence: Synthetic oligonucleotide
aagggagccacuuugguug

SEQ ID NO: 2983573 - RNA, 19 nt, Artificial Sequence
  Description of Artificial Sequence: Synthetic oligonucleotide
aagggcaucagguacucgg

SEQ ID NO: 2983574 - RNA, 19 nt, Artificial Sequence
  Description of Artificial Sequence: Synthetic oligonucleotide
ucuguugaugccaagguca

SEQ ID NO: 2983575 - RNA, 19 nt, Artificial Sequence
  Description of Artificial Sequence: Synthetic oligonucleotide
aagugugauuccuaugacg

SEQ ID NO: 2983576 - RNA, 19 nt, Artificial Sequence
  Description of Artificial Sequence: Synthetic oligonucleotide
ucaaguaguagacaaggga

SEQ ID NO: 2983577 - RNA, 19 nt, Artificial Sequence
  Description of Artificial Sequence: Synthetic oligonucleotide
caaguaguagacaagggag

SEQ ID NO: 2983578 - RNA, 19 nt, Artificial Sequence
  Description of Artificial Sequence: Synthetic oligonucleotide
aaaucuguugaugccaagg

SEQ ID NO: 2983579 - RNA, 19 nt, Artificial Sequence
  Description of Artificial Sequence: Synthetic oligonucleotide
agucaaaucuguugaugcc

SEQ ID NO: 2983580 - RNA, 19 nt, Artificial Sequence
  Description of Artificial Sequence: Synthetic oligonucleotide
agugugauuccuaugacgg

SEQ ID NO: 2983581 - RNA, 19 nt, Artificial Sequence
  Description of Artificial Sequence: Synthetic oligonucleotide
aaguaguagacaagggagc

SEQ ID NO: 2983582 - RNA, 19 nt, Artificial Sequence
  Description of Artificial Sequence: Synthetic oligonucleotide
accaacaucuucuccaagg

SEQ ID NO: 2983583 - RNA, 19 nt, Artificial Sequence
  Description of Artificial Sequence: Synthetic oligonucleotide
uacucgguauucaagaaga

SEQ ID NO: 2983584 - RNA, 19 nt, Artificial Sequence
  Description of Artificial Sequence: Synthetic oligonucleotide
aaggucaaguaguagacaa

SEQ ID NO: 2983585 - RNA, 19 nt, Artificial Sequence
  Description of Artificial Sequence: Synthetic oligonucleotide
auuccuaugacggugagca

SEQ ID NO: 2983586 - RNA, 19 nt, Artificial Sequence
  Description of Artificial Sequence: Synthetic oligonucleotide
aguaguagacaagggagcc

SEQ ID NO: 2983587 - RNA, 19 nt, Artificial Sequence
  Description of Artificial Sequence: Synthetic oligonucleotide
ugcugagcacagcagaacg

SEQ ID NO: 2983588 - RNA, 19 nt, Artificial Sequence
  Description of Artificial Sequence: Synthetic oligonucleotide
aaucuguugaugccaaggu

SEQ ID NO: 2983589 - RNA, 19 nt, Artificial Sequence
  Description of Artificial Sequence: Synthetic oligonucleotide
cuaaagucaaaucuguuga

SEQ ID NO: 2983590 - RNA, 19 nt, Artificial Sequence
  Description of Artificial Sequence: Synthetic oligonucleotide
cuuugguugaggagaaagg

SEQ ID NO: 2983591 - RNA, 19 nt, Artificial Sequence
  Description of Artificial Sequence: Synthetic oligonucleotide
aaagucaaaucuguugaug

SEQ ID NO: 2983592 - RNA, 19 nt, Artificial Sequence
  Description of Artificial Sequence: Synthetic oligonucleotide
aacaaucagugugaagacg

SEQ ID NO: 2983593 - RNA, 19 nt, Artificial Sequence
  Description of Artificial Sequence: Synthetic oligonucleotide
gaagagagucuucaucucc

SEQ ID NO: 2983594 - RNA, 19 nt, Artificial Sequence
  Description of Artificial Sequence: Synthetic oligonucleotide
acgauagccagagaguuac

SEQ ID NO: 2983595 - RNA, 19 nt, Artificial Sequence
  Description of Artificial Sequence: Synthetic oligonucleotide
aucagugugaagacgauag

SEQ ID NO: 2983596 - RNA, 19 nt, Artificial Sequence
  Description of Artificial Sequence: Synthetic oligonucleotide
augacggugagcaccaugc

SEQ ID NO: 2983597 - RNA, 19 nt, Artificial Sequence
  Description of Artificial Sequence: Synthetic oligonucleotide
agcacagcagaacggaagg

SEQ ID NO: 2983598 - RNA, 19 nt, Artificial Sequence
  Description of Artificial Sequence: Synthetic oligonucleotide
caaagugugauuccuauga

SEQ ID NO: 2983599 - RNA, 19 nt, Artificial Sequence
  Description of Artificial Sequence: Synthetic oligonucleotide
uggucuugggucuugguca

SEQ ID NO: 2983600 - RNA, 19 nt, Artificial Sequence
  Description of Artificial Sequence: Synthetic oligonucleotide
agagaggcaagcuggugcg

SEQ ID NO: 2983601 - RNA, 19 nt, Artificial Sequence
  Description of Artificial Sequence: Synthetic oligonucleotide
aagaggacgacgguugguc

SEQ ID NO: 2983602 - RNA, 19 nt, Artificial Sequence
  Description of Artificial Sequence: Synthetic oligonucleotide
ugugauuccuaugacggug

SEQ ID NO: 2983603 - RNA, 19 nt, Artificial Sequence
  Description of Artificial Sequence: Synthetic oligonucleotide
gagaguuacagaugggcac

SEQ ID NO: 2983604 - RNA, 19 nt, Artificial Sequence
  Description of Artificial Sequence: Synthetic oligonucleotide
gaugggcacagcuaaaguc

SEQ ID NO: 2983605 - RNA, 19 nt, Artificial Sequence
  Description of Artificial Sequence: Synthetic oligonucleotide
ugaugccaaggucaaguag

SEQ ID NO: 2983606 - RNA, 19 nt, Artificial Sequence
  Description of Artificial Sequence: Synthetic oligonucleotide
uggugcgucacucugccug

SEQ ID NO: 2983607 - RNA, 19 nt, Artificial Sequence
  Description of Artificial Sequence: Synthetic oligonucleotide
uagccagagaguuacagau

SEQ ID NO: 2983608 - RNA, 19 nt, Artificial Sequence
  Description of Artificial Sequence: Synthetic oligonucleotide
cuuguuuuccaccaacauc

SEQ ID NO: 2983609 - RNA, 19 nt, Artificial Sequence
  Description of Artificial Sequence: Synthetic oligonucleotide
gcuaaagucaaaucuguug

SEQ ID NO: 2983610 - RNA, 19 nt, Artificial Sequence
  Description of Artificial Sequence: Synthetic oligonucleotide
acuuugguugaggagaaag

SEQ ID NO: 2983611 - RNA, 19 nt, Artificial Sequence
  Description of Artificial Sequence: Synthetic oligonucleotide
gauagccagagaguuacag

SEQ ID NO: 2983612 - RNA, 19 nt, Artificial Sequence
  Description of Artificial Sequence: Synthetic oligonucleotide
aucuguugaugccaagguc

SEQ ID NO: 2983613 - RNA, 19 nt, Artificial Sequence
  Description of Artificial Sequence: Synthetic oligonucleotide
agagucuucaucuccugca

SEQ ID NO: 2983614 - RNA, 19 nt, Artificial Sequence
  Description of Artificial Sequence: Synthetic oligonucleotide
acagcuaaagucaaaucug

SEQ ID NO: 2983615 - RNA, 19 nt, Artificial Sequence
  Description of Artificial Sequence: Synthetic oligonucleotide
agacaagggagccacuuug

SEQ ID NO: 2983616 - RNA, 19 nt, Artificial Sequence
  Description of Artificial Sequence: Synthetic oligonucleotide
gucacugagcuugugaugc

SEQ ID NO: 2983617 - RNA, 19 nt, Artificial Sequence
  Description of Artificial Sequence: Synthetic oligonucleotide
gccagagaguuacagaugg

SEQ ID NO: 2983618 - RNA, 19 nt, Artificial Sequence
  Description of Artificial Sequence: Synthetic oligonucleotide
cucaagaggacgacgguug

SEQ ID NO: 2983619 - RNA, 19 nt, Artificial Sequence
  Description of Artificial Sequence: Synthetic oligonucleotide
ucaagaggacgacgguugg

SEQ ID NO: 2983620 - RNA, 19 nt, Artificial Sequence
  Description of Artificial Sequence: Synthetic oligonucleotide
ucuccaaggaccuucccaa

SEQ ID NO: 2983621 - RNA, 19 nt, Artificial Sequence
  Description of Artificial Sequence: Synthetic oligonucleotide
agguacucgguauucaaga

SEQ ID NO: 2983622 - RNA, 19 nt, Artificial Sequence
  Description of Artificial Sequence: Synthetic oligonucleotide
ggucaaguaguagacaagg

SEQ ID NO: 2983623 - RNA, 19 nt, Artificial Sequence
  Description of Artificial Sequence: Synthetic oligonucleotide
uccuaugacggugagcacc

SEQ ID NO: 2983624 - RNA, 19 nt, Artificial Sequence
  Description of Artificial Sequence: Synthetic oligonucleotide
ucaaaucuguugaugccaa

SEQ ID NO: 2983625 - RNA, 19 nt, Artificial Sequence
  Description of Artificial Sequence: Synthetic oligonucleotide
acaaucagugugaagacga

SEQ ID NO: 2983626 - RNA, 19 nt, Artificial Sequence
  Description of Artificial Sequence: Synthetic oligonucleotide
aacggaaggucggggaugg

SEQ ID NO: 2983627 - RNA, 19 nt, Artificial Sequence
  Description of Artificial Sequence: Synthetic oligonucleotide
cagagaguuacagaugggc

SEQ ID NO: 2983628 - RNA, 19 nt, Artificial Sequence
  Description of Artificial Sequence: Synthetic oligonucleotide
ugugaagacgauagccaga

SEQ ID NO: 2983629 - RNA, 19 nt, Artificial Sequence
  Description of Artificial Sequence: Synthetic oligonucleotide
guacucgguauucaagaag

SEQ ID NO: 2983630 - RNA, 19 nt, Artificial Sequence
  Description of Artificial Sequence: Synthetic oligonucleotide
gucuuggucacugagcuug

SEQ ID NO: 2983631 - RNA, 19 nt, Artificial Sequence
  Description of Artificial Sequence: Synthetic oligonucleotide
cagugugaagacgauagcc

SEQ ID NO: 2983632 - RNA, 19 nt, Artificial Sequence
  Description of Artificial Sequence: Synthetic oligonucleotide
gugugaagacgauagccag

SEQ ID NO: 2983633 - RNA, 19 nt, Artificial Sequence
  Description of Artificial Sequence: Synthetic oligonucleotide
ugaugcaaagugugauucc

SEQ ID NO: 2983634 - RNA, 19 nt, Artificial Sequence
  Description of Artificial Sequence: Synthetic oligonucleotide
uugggucuuggucacugag

SEQ ID NO: 2983635 - RNA, 19 nt, Artificial Sequence
  Description of Artificial Sequence: Synthetic oligonucleotide
gugaagacgauagccagag

SEQ ID NO: 2983636 - RNA, 19 nt, Artificial Sequence
  Description of Artificial Sequence: Synthetic oligonucleotide
uccugcaacagcugccggg

SEQ ID NO: 2983637 - RNA, 19 nt, Artificial Sequence
  Description of Artificial Sequence: Synthetic oligonucleotide
acagcagaacggaaggucg

SEQ ID NO: 2983638 - RNA, 19 nt, Artificial Sequence
  Description of Artificial Sequence: Synthetic oligonucleotide
uuggucuugggucuugguc

SEQ ID NO: 2983639 - RNA, 19 nt, Artificial Sequence
  Description of Artificial Sequence: Synthetic oligonucleotide
ugcaaagugugauuccuau

SEQ ID NO: 2983640 - RNA, 19 nt, Artificial Sequence
  Description of Artificial Sequence: Synthetic oligonucleotide
ucuccugcaacagcugccg

SEQ ID NO: 2983641 - RNA, 19 nt, Artificial Sequence
  Description of Artificial Sequence: Synthetic oligonucleotide
ucuucuccaaggaccuucc

SEQ ID NO: 2983642 - RNA, 19 nt, Artificial Sequence
  Description of Artificial Sequence: Synthetic oligonucleotide
uaugacggugagcaccaug

SEQ ID NO: 2983643 - RNA, 19 nt, Artificial Sequence
  Description of Artificial Sequence: Synthetic oligonucleotide
agucuucaucuccugcaac

SEQ ID NO: 2983644 - RNA, 19 nt, Artificial Sequence
  Description of Artificial Sequence: Synthetic oligonucleotide
uccaaggaccuucccaaca

SEQ ID NO: 2983645 - RNA, 19 nt, Artificial Sequence
  Description of Artificial Sequence: Synthetic oligonucleotide
gacggugagcaccaugccc

SEQ ID NO: 2983646 - RNA, 19 nt, Artificial Sequence
  Description of Artificial Sequence: Synthetic oligonucleotide
ucagugugaagacgauagc

SEQ ID NO: 2983647 - RNA, 19 nt, Artificial Sequence
  Description of Artificial Sequence: Synthetic oligonucleotide
auagccagagaguuacaga

SEQ ID NO: 2983648 - RNA, 19 nt, Artificial Sequence
  Description of Artificial Sequence: Synthetic oligonucleotide
acggugagcaccaugcccg

SEQ ID NO: 2983649 - RNA, 19 nt, Artificial Sequence
  Description of Artificial Sequence: Synthetic oligonucleotide
uaguagacaagggagccac

SEQ ID NO: 2983650 - RNA, 19 nt, Artificial Sequence
  Description of Artificial Sequence: Synthetic oligonucleotide
aagacgauagccagagagu

SEQ ID NO: 2983651 - RNA, 19 nt, Artificial Sequence
  Description of Artificial Sequence: Synthetic oligonucleotide
uaaagucaaaucuguugau

SEQ ID NO: 2983652 - RNA, 19 nt, Artificial Sequence
  Description of Artificial Sequence: Synthetic oligonucleotide
agugugaagacgauagcca

SEQ ID NO: 2983653 - RNA, 19 nt, Artificial Sequence
  Description of Artificial Sequence: Synthetic oligonucleotide
caacaaucagugugaagac

SEQ ID NO: 2983654 - RNA, 19 nt, Artificial Sequence
  Description of Artificial Sequence: Synthetic oligonucleotide
ugggucuuggucacugagc

SEQ ID NO: 2983655 - RNA, 19 nt, Artificial Sequence
  Description of Artificial Sequence: Synthetic oligonucleotide
aggagaaagggcaucaggu

SEQ ID NO: 2983656 - RNA, 19 nt, Artificial Sequence
  Description of Artificial Sequence: Synthetic oligonucleotide
ucugcugagcacagcagaa

SEQ ID NO: 2983657 - RNA, 19 nt, Artificial Sequence
  Description of Artificial Sequence: Synthetic oligonucleotide
ccaacaaucagugugaaga

SEQ ID NO: 2983658 - RNA, 19 nt, Artificial Sequence
  Description of Artificial Sequence: Synthetic oligonucleotide
cugagcuugugaugcaaag

SEQ ID NO: 2983659 - RNA, 19 nt, Artificial Sequence
  Description of Artificial Sequence: Synthetic oligonucleotide
uuacagaugggcacagcua

SEQ ID NO: 2983660 - RNA, 19 nt, Artificial Sequence
  Description of Artificial Sequence: Synthetic oligonucleotide
aagcuggugcgucacucug

SEQ ID NO: 2983661 - RNA, 19 nt, Artificial Sequence
  Description of Artificial Sequence: Synthetic oligonucleotide
gagagucuucaucuccugc

SEQ ID NO: 2983662 - RNA, 19 nt, Artificial Sequence
  Description of Artificial Sequence: Synthetic oligonucleotide
cacagcuaaagucaaaucu

SEQ ID NO: 2983663 - RNA, 19 nt, Artificial Sequence
  Description of Artificial Sequence: Synthetic oligonucleotide
gacaagggagccacuuugg

SEQ ID NO: 2983664 - RNA, 19 nt, Artificial Sequence
  Description of Artificial Sequence: Synthetic oligonucleotide
gucaaguaguagacaaggg

SEQ ID NO: 2983665 - RNA, 19 nt, Artificial Sequence
  Description of Artificial Sequence: Synthetic oligonucleotide
ucggggauggcccacucaa

SEQ ID NO: 2983666 - RNA, 19 nt, Artificial Sequence
  Description of Artificial Sequence: Synthetic oligonucleotide
ugugaugcaaagugugauu

SEQ ID NO: 2983667 - RNA, 19 nt, Artificial Sequence
  Description of Artificial Sequence: Synthetic oligonucleotide
gaugccaaggucaaguagu

SEQ ID NO: 2983668 - RNA, 19 nt, Artificial Sequence
  Description of Artificial Sequence: Synthetic oligonucleotide
gguauucaagaagagaguc

SEQ ID NO: 2983669 - RNA, 19 nt, Artificial Sequence
  Description of Artificial Sequence: Synthetic oligonucleotide
ggauggcccacucaagagg

SEQ ID NO: 2983670 - RNA, 19 nt, Artificial Sequence
  Description of Artificial Sequence: Synthetic oligonucleotide
cugccugcaccucagugcc

SEQ ID NO: 2983671 - RNA, 19 nt, Artificial Sequence
  Description of Artificial Sequence: Synthetic oligonucleotide
ugauuccuaugacggugag

SEQ ID NO: 2983672 - RNA, 19 nt, Artificial Sequence
  Description of Artificial Sequence: Synthetic oligonucleotide
ucaagaagagagucuucau

SEQ ID NO: 2983673 - RNA, 19 nt, Artificial Sequence
  Description of Artificial Sequence: Synthetic oligonucleotide
ugagcuugugaugcaaagu

SEQ ID NO: 2983674 - RNA, 19 nt, Artificial Sequence
  Description of Artificial Sequence: Synthetic oligonucleotide
agugccaggucugcugagc

SEQ ID NO: 2983675 - RNA, 19 nt, Artificial Sequence
  Description of Artificial Sequence: Synthetic oligonucleotide
agaguuacagaugggcaca

SEQ ID NO: 2983676 - RNA, 19 nt, Artificial Sequence
  Description of Artificial Sequence: Synthetic oligonucleotide
gugaugcaaagugugauuc

SEQ ID NO: 2983677 - RNA, 19 nt, Artificial Sequence
  Description of Artificial Sequence: Synthetic oligonucleotide
uugugaugcaaagugugau

SEQ ID NO: 2983678 - RNA, 19 nt, Artificial Sequence
  Description of Artificial Sequence: Synthetic oligonucleotide
ucuugggucuuggucacug

SEQ ID NO: 2983679 - RNA, 19 nt, Artificial Sequence
  Description of Artificial Sequence: Synthetic oligonucleotide
agagaguuacagaugggca

SEQ ID NO: 2983680 - RNA, 19 nt, Artificial Sequence
  Description of Artificial Sequence: Synthetic oligonucleotide
caucuccugcaacagcugc

SEQ ID NO: 2983681 - RNA, 19 nt, Artificial Sequence
  Description of Artificial Sequence: Synthetic oligonucleotide
guuacagaugggcacagcu

SEQ ID NO: 2983682 - RNA, 19 nt, Artificial Sequence
  Description of Artificial Sequence: Synthetic oligonucleotide
uggcccacucaagaggacg

SEQ ID NO: 2983683 - RNA, 19 nt, Artificial Sequence
  Description of Artificial Sequence: Synthetic oligonucleotide
cagguacucgguauucaag

SEQ ID NO: 2983684 - RNA, 19 nt, Artificial Sequence
  Description of Artificial Sequence: Synthetic oligonucleotide
ucaucuccugcaacagcug

SEQ ID NO: 2983685 - RNA, 19 nt, Artificial Sequence
  Description of Artificial Sequence: Synthetic oligonucleotide
gucaaaucuguugaugcca

SEQ ID NO: 2983686 - RNA, 19 nt, Artificial Sequence
  Description of Artificial Sequence: Synthetic oligonucleotide
cuugugaugcaaaguguga

SEQ ID NO: 2983687 - RNA, 19 nt, Artificial Sequence
  Description of Artificial Sequence: Synthetic oligonucleotide
agaugggcacagcuaaagu

SEQ ID NO: 2983688 - RNA, 19 nt, Artificial Sequence
  Description of Artificial Sequence: Synthetic oligonucleotide
caacaucuucuccaaggac

SEQ ID NO: 2983689 - RNA, 19 nt, Artificial Sequence
  Description of Artificial Sequence: Synthetic oligonucleotide
gauggcccacucaagagga

SEQ ID NO: 2983690 - RNA, 19 nt, Artificial Sequence
  Description of Artificial Sequence: Synthetic oligonucleotide
cucagugccaggucugcug

SEQ ID NO: 2983691 - RNA, 19 nt, Artificial Sequence
  Description of Artificial Sequence: Synthetic oligonucleotide
ccacucaagaggacgacgg

SEQ ID NO: 2983692 - RNA, 19 nt, Artificial Sequence
  Description of Artificial Sequence: Synthetic oligonucleotide
cagcagaacggaaggucgg

SEQ ID NO: 2983693 - RNA, 19 nt, Artificial Sequence
  Description of Artificial Sequence: Synthetic oligonucleotide
acgacgguuggucuugggu

SEQ ID NO: 2983694 - RNA, 19 nt, Artificial Sequence
  Description of Artificial Sequence: Synthetic oligonucleotide
agagagucuucaucuccug

SEQ ID NO: 2983695 - RNA, 19 nt, Artificial Sequence
  Description of Artificial Sequence: Synthetic oligonucleotide
acaagggagccacuuuggu

SEQ ID NO: 2983696 - RNA, 19 nt, Artificial Sequence
  Description of Artificial Sequence: Synthetic oligonucleotide
gccaaggucaaguaguaga

SEQ ID NO: 2983697 - RNA, 19 nt, Artificial Sequence
  Description of Artificial Sequence: Synthetic oligonucleotide
ucacucugccugcaccuca

SEQ ID NO: 2983698 - RNA, 19 nt, Artificial Sequence
  Description of Artificial Sequence: Synthetic oligonucleotide
agccacuuugguugaggag

SEQ ID NO: 2983699 - RNA, 19 nt, Artificial Sequence
  Description of Artificial Sequence: Synthetic oligonucleotide
aguuacagaugggcacagc

SEQ ID NO: 2983700 - RNA, 19 nt, Artificial Sequence
  Description of Artificial Sequence: Synthetic oligonucleotide
agaacggaaggucggggau

SEQ ID NO: 2983701 - RNA, 19 nt, Artificial Sequence
  Description of Artificial Sequence: Synthetic oligonucleotide
aaucagugugaagacgaua

SEQ ID NO: 2983702 - RNA, 19 nt, Artificial Sequence
  Description of Artificial Sequence: Synthetic oligonucleotide
gauuccuaugacggugagc

SEQ ID NO: 2983703 - RNA, 19 nt, Artificial Sequence
  Description of Artificial Sequence: Synthetic oligonucleotide
cagaugggcacagcuaaag

SEQ ID NO: 2983704 - RNA, 19 nt, Artificial Sequence
  Description of Artificial Sequence: Synthetic oligonucleotide
acaucuucuccaaggaccu

SEQ ID NO: 2983705 - RNA, 19 nt, Artificial Sequence
  Description of Artificial Sequence: Synthetic oligonucleotide
ccaaggucaaguaguagac

SEQ ID NO: 2983706 - RNA, 19 nt, Artificial Sequence
  Description of Artificial Sequence: Synthetic oligonucleotide
gaugcaaagugugauuccu

SEQ ID NO: 2983707 - RNA, 19 nt, Artificial Sequence
  Description of Artificial Sequence: Synthetic oligonucleotide
auucaagaagagagucuuc

SEQ ID NO: 2983708 - RNA, 19 nt, Artificial Sequence
  Description of Artificial Sequence: Synthetic oligonucleotide
ugaggagaaagggcaucag

SEQ ID NO: 2983709 - RNA, 19 nt, Artificial Sequence
  Description of Artificial Sequence: Synthetic oligonucleotide
aaagggcaucagguacucg

SEQ ID NO: 2983710 - RNA, 19 nt, Artificial Sequence
  Description of Artificial Sequence: Synthetic oligonucleotide
guugaugccaaggucaagu

SEQ ID NO: 2983711 - RNA, 19 nt, Artificial Sequence
  Description of Artificial Sequence: Synthetic oligonucleotide
agaggcaagcuggugcguc

SEQ ID NO: 2983712 - RNA, 19 nt, Artificial Sequence
  Description of Artificial Sequence: Synthetic oligonucleotide
ugacggugagcaccaugcc

SEQ ID NO: 2983713 - RNA, 19 nt, Artificial Sequence
  Description of Artificial Sequence: Synthetic oligonucleotide
accuucccaacaaucagug

SEQ ID NO: 2983714 - RNA, 19 nt, Artificial Sequence
  Description of Artificial Sequence: Synthetic oligonucleotide
cugcuuguuuuccaccaac

SEQ ID NO: 2983715 - RNA, 19 nt, Artificial Sequence
  Description of Artificial Sequence: Synthetic oligonucleotide
caaaucuguugaugccaag

SEQ ID NO: 2983716 - RNA, 19 nt, Artificial Sequence
  Description of Artificial Sequence: Synthetic oligonucleotide
agacgauagccagagaguu

SEQ ID NO: 2983717 - RNA, 19 nt, Artificial Sequence
  Description of Artificial Sequence: Synthetic oligonucleotide
gcuugugaugcaaagugug

SEQ ID NO: 2983718 - RNA, 19 nt, Artificial Sequence
  Description of Artificial Sequence: Synthetic oligonucleotide
uugaugccaaggucaagua

SEQ ID NO: 2983719 - RNA, 19 nt, Artificial Sequence
  Description of Artificial Sequence: Synthetic oligonucleotide
ugggcacagcuaaagucaa

SEQ ID NO: 2983720 - RNA, 19 nt, Artificial Sequence
  Description of Artificial Sequence: Synthetic oligonucleotide
cacagcagaacggaagguc

SEQ ID NO: 2983721 - RNA, 19 nt, Artificial Sequence
  Description of Artificial Sequence: Synthetic oligonucleotide
agcaccaugcccgccacug

SEQ ID NO: 2983722 - RNA, 19 nt, Artificial Sequence
  Description of Artificial Sequence: Synthetic oligonucleotide
uagacaagggagccacuuu

SEQ ID NO: 2983723 - RNA, 19 nt, Artificial Sequence
  Description of Artificial Sequence: Synthetic oligonucleotide
guuuuccaccaacaucuuc

SEQ ID NO: 2983724 - RNA, 19 nt, Artificial Sequence
  Description of Artificial Sequence: Synthetic oligonucleotide
gucugcugagcacagcaga

SEQ ID NO: 2983725 - RNA, 19 nt, Artificial Sequence
  Description of Artificial Sequence: Synthetic oligonucleotide
agaggacgacgguuggucu

SEQ ID NO: 2983726 - RNA, 19 nt, Artificial Sequence
  Description of Artificial Sequence: Synthetic oligonucleotide
gaacggaaggucggggaug

SEQ ID NO: 2983727 - RNA, 19 nt, Artificial Sequence
  Description of Artificial Sequence: Synthetic oligonucleotide
cacugcuuguuuuccacca

SEQ ID NO: 2983728 - RNA, 19 nt, Artificial Sequence
  Description of Artificial Sequence: Synthetic oligonucleotide
gagccacuuugguugagga

SEQ ID NO: 2983729 - RNA, 19 nt, Artificial Sequence
  Description of Artificial Sequence: Synthetic oligonucleotide
gaguuacagaugggcacag

SEQ ID NO: 2983730 - RNA, 19 nt, Artificial Sequence
  Description of Artificial Sequence: Synthetic oligonucleotide
aggucaaguaguagacaag

SEQ ID NO: 2983731 - RNA, 19 nt, Artificial Sequence
  Description of Artificial Sequence: Synthetic oligonucleotide
gccacuuugguugaggaga

SEQ ID NO: 2983732 - RNA, 19 nt, Artificial Sequence
  Description of Artificial Sequence: Synthetic oligonucleotide
accucagugccaggucugc

SEQ ID NO: 2983733 - RNA, 19 nt, Artificial Sequence
  Description of Artificial Sequence: Synthetic oligonucleotide
ucuuggucacugagcuugu

SEQ ID NO: 2983734 - RNA, 19 nt, Artificial Sequence
  Description of Artificial Sequence: Synthetic oligonucleotide
uguugaugccaaggucaag

SEQ ID NO: 2983735 - RNA, 19 nt, Artificial Sequence
  Description of Artificial Sequence: Synthetic oligonucleotide
agcuggugcgucacucugc

SEQ ID NO: 2983736 - RNA, 19 nt, Artificial Sequence
  Description of Artificial Sequence: Synthetic oligonucleotide
ugaagacgauagccagaga

SEQ ID NO: 2983737 - RNA, 19 nt, Artificial Sequence
  Description of Artificial Sequence: Synthetic oligonucleotide
ugccaaggucaaguaguag

SEQ ID NO: 2983738 - RNA, 19 nt, Artificial Sequence
  Description of Artificial Sequence: Synthetic oligonucleotide
gggauggcccacucaagag

SEQ ID NO: 2983739 - RNA, 19 nt, Artificial Sequence
  Description of Artificial Sequence: Synthetic oligonucleotide
ugcaccucagugccagguc

SEQ ID NO: 2983740 - RNA, 19 nt, Artificial Sequence
  Description of Artificial Sequence: Synthetic oligonucleotide
aaggucggggauggcccac

SEQ ID NO: 2983741 - RNA, 19 nt, Artificial Sequence
  Description of Artificial Sequence: Synthetic oligonucleotide
ucccgcacuugcugcaggc

SEQ ID NO: 2983742 - RNA, 19 nt, Artificial Sequence
  Description of Artificial Sequence: Synthetic oligonucleotide
agcuugugaugcaaagugu

SEQ ID NO: 2983743 - RNA, 19 nt, Artificial Sequence
  Description of Artificial Sequence: Synthetic oligonucleotide
ucacugagcuugugaugca

SEQ ID NO: 2983744 - RNA, 19 nt, Artificial Sequence
  Description of Artificial Sequence: Synthetic oligonucleotide
gcaaagugugauuccuaug

SEQ ID NO: 2983745 - RNA, 19 nt, Artificial Sequence
  Description of Artificial Sequence: Synthetic oligonucleotide
guugaggagaaagggcauc

SEQ ID NO: 2983746 - RNA, 19 nt, Artificial Sequence
  Description of Artificial Sequence: Synthetic oligonucleotide
ugagcaccaugcccgccac

SEQ ID NO: 2983747 - RNA, 19 nt, Artificial Sequence
  Description of Artificial Sequence: Synthetic oligonucleotide
gacgacgguuggucuuggg

SEQ ID NO: 2983748 - RNA, 19 nt, Artificial Sequence
  Description of Artificial Sequence: Synthetic oligonucleotide
gacgguuggucuugggucu

SEQ ID NO: 2983749 - RNA, 19 nt, Artificial Sequence
  Description of Artificial Sequence: Synthetic oligonucleotide
ggaaggucggggauggccc

SEQ ID NO: 2983750 - RNA, 19 nt, Artificial Sequence
  Description of Artificial Sequence: Synthetic oligonucleotide
uguuuuccaccaacaucuu

SEQ ID NO: 2983751 - RNA, 19 nt, Artificial Sequence
  Description of Artificial Sequence: Synthetic oligonucleotide
aucagguacucgguauuca

SEQ ID NO: 2983752 - RNA, 19 nt, Artificial Sequence
  Description of Artificial Sequence: Synthetic oligonucleotide
gugagcaccaugcccgcca

SEQ ID NO: 2983753 - RNA, 19 nt, Artificial Sequence
  Description of Artificial Sequence: Synthetic oligonucleotide
acugcuuguuuuccaccaa

SEQ ID NO: 2983754 - RNA, 19 nt, Artificial Sequence
  Description of Artificial Sequence: Synthetic oligonucleotide
acucaagaggacgacgguu

SEQ ID NO: 2983755 - RNA, 19 nt, Artificial Sequence
  Description of Artificial Sequence: Synthetic oligonucleotide
acucgguauucaagaagag

SEQ ID NO: 2983756 - RNA, 19 nt, Artificial Sequence
  Description of Artificial Sequence: Synthetic oligonucleotide
cagaacggaaggucgggga

SEQ ID NO: 2983757 - RNA, 19 nt, Artificial Sequence
  Description of Artificial Sequence: Synthetic oligonucleotide
guauucaagaagagagucu

SEQ ID NO: 2983758 - RNA, 19 nt, Artificial Sequence
  Description of Artificial Sequence: Synthetic oligonucleotide
cugcucccgcacuugcugc

SEQ ID NO: 2983759 - RNA, 19 nt, Artificial Sequence
  Description of Artificial Sequence: Synthetic oligonucleotide
cugagcacagcagaacgga

SEQ ID NO: 2983760 - RNA, 19 nt, Artificial Sequence
  Description of Artificial Sequence: Synthetic oligonucleotide
ggucacugagcuugugaug

SEQ ID NO: 2983761 - RNA, 19 nt, Artificial Sequence
  Description of Artificial Sequence: Synthetic oligonucleotide
gaggcaagcuggugcguca

SEQ ID NO: 2983762 - RNA, 19 nt, Artificial Sequence
  Description of Artificial Sequence: Synthetic oligonucleotide
gcugagcacagcagaacgg

SEQ ID NO: 2983763 - RNA, 19 nt, Artificial Sequence
  Description of Artificial Sequence: Synthetic oligonucleotide
cagcuaaagucaaaucugu

SEQ ID NO: 2983764 - RNA, 19 nt, Artificial Sequence
  Description of Artificial Sequence: Synthetic oligonucleotide
gcuggugcgucacucugcc

SEQ ID NO: 2983765 - RNA, 19 nt, Artificial Sequence
  Description of Artificial Sequence: Synthetic oligonucleotide
aggacgacgguuggucuug

SEQ ID NO: 2983766 - RNA, 19 nt, Artificial Sequence
  Description of Artificial Sequence: Synthetic oligonucleotide
aacagcugccgggcccacg

SEQ ID NO: 2983767 - RNA, 19 nt, Artificial Sequence
  Description of Artificial Sequence: Synthetic oligonucleotide
ugcucccgcacuugcugca

SEQ ID NO: 2983768 - RNA, 19 nt, Artificial Sequence
  Description of Artificial Sequence: Synthetic oligonucleotide
gaaggucggggauggccca

SEQ ID NO: 2983769 - RNA, 19 nt, Artificial Sequence
  Description of Artificial Sequence: Synthetic oligonucleotide
guaguagacaagggagcca

SEQ ID NO: 2983770 - RNA, 19 nt, Artificial Sequence
  Description of Artificial Sequence: Synthetic oligonucleotide
gugauuccuaugacgguga

SEQ ID NO: 2983771 - RNA, 19 nt, Artificial Sequence
  Description of Artificial Sequence: Synthetic oligonucleotide
ggagccacuuugguugagg

SEQ ID NO: 2983772 - RNA, 19 nt, Artificial Sequence
  Description of Artificial Sequence: Synthetic oligonucleotide
aggcaagcuggugcgucac

SEQ ID NO: 2983773 - RNA, 19 nt, Artificial Sequence
  Description of Artificial Sequence: Synthetic oligonucleotide
cuucuccaaggaccuuccc

SEQ ID NO: 2983774 - RNA, 19 nt, Artificial Sequence
  Description of Artificial Sequence: Synthetic oligonucleotide
ugcgucacucugccugcac

SEQ ID NO: 2983775 - RNA, 19 nt, Artificial Sequence
  Description of Artificial Sequence: Synthetic oligonucleotide
cuccaaggaccuucccaac

SEQ ID NO: 2983776 - RNA, 19 nt, Artificial Sequence
  Description of Artificial Sequence: Synthetic oligonucleotide
cuguugaugccaaggucaa

SEQ ID NO: 2983777 - RNA, 19 nt, Artificial Sequence
  Description of Artificial Sequence: Synthetic oligonucleotide
ggagaaagggcaucaggua

SEQ ID NO: 2983778 - RNA, 19 nt, Artificial Sequence
  Description of Artificial Sequence: Synthetic oligonucleotide
caccucagugccaggucug

SEQ ID NO: 2983779 - RNA, 19 nt, Artificial Sequence
  Description of Artificial Sequence: Synthetic oligonucleotide
gguacucgguauucaagaa

SEQ ID NO: 2983780 - RNA, 19 nt, Artificial Sequence
  Description of Artificial Sequence: Synthetic oligonucleotide
agccagagaguuacagaug

SEQ ID NO: 2983781 - RNA, 19 nt, Artificial Sequence
  Description of Artificial Sequence: Synthetic oligonucleotide
ugccaggucugcugagcac

SEQ ID NO: 2983782 - RNA, 19 nt, Artificial Sequence
  Description of Artificial Sequence: Synthetic oligonucleotide
ggggauggcccacucaaga

SEQ ID NO: 2983783 - RNA, 19 nt, Artificial Sequence
  Description of Artificial Sequence: Synthetic oligonucleotide
cugcugagcacagcagaac

SEQ ID NO: 2983784 - RNA, 19 nt, Artificial Sequence
  Description of Artificial Sequence: Synthetic oligonucleotide
ggugcgucacucugccugc

SEQ ID NO: 2983785 - RNA, 19 nt, Artificial Sequence
  Description of Artificial Sequence: Synthetic oligonucleotide
gggucuuggucacugagcu

SEQ ID NO: 2983786 - RNA, 19 nt, Artificial Sequence
  Description of Artificial Sequence: Synthetic oligonucleotide
uuccuaugacggugagcac

SEQ ID NO: 2983787 - RNA, 19 nt, Artificial Sequence
  Description of Artificial Sequence: Synthetic oligonucleotide
caaggucaaguaguagaca

SEQ ID NO: 2983788 - RNA, 19 nt, Artificial Sequence
  Description of Artificial Sequence: Synthetic oligonucleotide
agggagccacuuugguuga

SEQ ID NO: 2983789 - RNA, 19 nt, Artificial Sequence
  Description of Artificial Sequence: Synthetic oligonucleotide
gugccaggucugcugagca

SEQ ID NO: 2983790 - RNA, 19 nt, Artificial Sequence
  Description of Artificial Sequence: Synthetic oligonucleotide
gaccuucccaacaaucagu

SEQ ID NO: 2983791 - RNA, 19 nt, Artificial Sequence
  Description of Artificial Sequence: Synthetic oligonucleotide
gccacugcuuguuuuccac

SEQ ID NO: 2983792 - RNA, 19 nt, Artificial Sequence
  Description of Artificial Sequence: Synthetic oligonucleotide
ggucuugggucuuggucac

SEQ ID NO: 2983793 - RNA, 19 nt, Artificial Sequence
  Description of Artificial Sequence: Synthetic oligonucleotide
agcuaaagucaaaucuguu

SEQ ID NO: 2983794 - RNA, 19 nt, Artificial Sequence
  Description of Artificial Sequence: Synthetic oligonucleotide
ucccaacaaucagugugaa

SEQ ID NO: 2983795 - RNA, 19 nt, Artificial Sequence
  Description of Artificial Sequence: Synthetic oligonucleotide
gcacagcuaaagucaaauc

SEQ ID NO: 2983796 - RNA, 19 nt, Artificial Sequence
  Description of Artificial Sequence: Synthetic oligonucleotide
cuccugcaacagcugccgg

SEQ ID NO: 2983797 - RNA, 19 nt, Artificial Sequence
  Description of Artificial Sequence: Synthetic oligonucleotide
acugagcuugugaugcaaa

SEQ ID NO: 2983798 - RNA, 19 nt, Artificial Sequence
  Description of Artificial Sequence: Synthetic oligonucleotide
ccuaugacggugagcacca

SEQ ID NO: 2983799 - RNA, 19 nt, Artificial Sequence
  Description of Artificial Sequence: Synthetic oligonucleotide
ccaacaucuucuccaagga

SEQ ID NO: 2983800 - RNA, 19 nt, Artificial Sequence
  Description of Artificial Sequence: Synthetic oligonucleotide
ccugcaacagcugccgggc

SEQ ID NO: 2983801 - RNA, 19 nt, Artificial Sequence
  Description of Artificial Sequence: Synthetic oligonucleotide
cucccgcacuugcugcagg

SEQ ID NO: 2983802 - RNA, 19 nt, Artificial Sequence
  Description of Artificial Sequence: Synthetic oligonucleotide
ccgcacuugcugcaggccg

SEQ ID NO: 2983803 - RNA, 19 nt, Artificial Sequence
  Description of Artificial Sequence: Synthetic oligonucleotide
ccacugcuuguuuuccacc

SEQ ID NO: 2983804 - RNA, 19 nt, Artificial Sequence
  Description of Artificial Sequence: Synthetic oligonucleotide
gguuggucuugggucuugg

SEQ ID NO: 2983805 - RNA, 19 nt, Artificial Sequence
  Description of Artificial Sequence: Synthetic oligonucleotide
agggcaucagguacucggu

SEQ ID NO: 2983806 - RNA, 19 nt, Artificial Sequence
  Description of Artificial Sequence: Synthetic oligonucleotide
gacgauagccagagaguua

SEQ ID NO: 2983807 - RNA, 19 nt, Artificial Sequence
  Description of Artificial Sequence: Synthetic oligonucleotide
gcgucacucugccugcacc

SEQ ID NO: 2983808 - RNA, 19 nt, Artificial Sequence
  Description of Artificial Sequence: Synthetic oligonucleotide
cgacgguuggucuuggguc

SEQ ID NO: 2983809 - RNA, 19 nt, Artificial Sequence
  Description of Artificial Sequence: Synthetic oligonucleotide
cugcaacagcugccgggcc

SEQ ID NO: 2983810 - RNA, 19 nt, Artificial Sequence
  Description of Artificial Sequence: Synthetic oligonucleotide
cuugggucuuggucacuga

SEQ ID NO: 2983811 - RNA, 19 nt, Artificial Sequence
  Description of Artificial Sequence: Synthetic oligonucleotide
auggcccacucaagaggac

SEQ ID NO: 2983812 - RNA, 19 nt, Artificial Sequence
  Description of Artificial Sequence: Synthetic oligonucleotide
cagugccaggucugcugag

SEQ ID NO: 2983813 - RNA, 19 nt, Artificial Sequence
  Description of Artificial Sequence: Synthetic oligonucleotide
cccaacaaucagugugaag

SEQ ID NO: 2983814 - RNA, 19 nt, Artificial Sequence
  Description of Artificial Sequence: Synthetic oligonucleotide
ggucugcugagcacagcag

SEQ ID NO: 2983815 - RNA, 19 nt, Artificial Sequence
  Description of Artificial Sequence: Synthetic oligonucleotide
cccacucaagaggacgacg

SEQ ID NO: 2983816 - RNA, 19 nt, Artificial Sequence
  Description of Artificial Sequence: Synthetic oligonucleotide
gugugauuccuaugacggu

SEQ ID NO: 2983817 - RNA, 19 nt, Artificial Sequence
  Description of Artificial Sequence: Synthetic oligonucleotide
augccaaggucaaguagua

SEQ ID NO: 2983818 - RNA, 19 nt, Artificial Sequence
  Description of Artificial Sequence: Synthetic oligonucleotide
aguagacaagggagccacu

SEQ ID NO: 2983819 - RNA, 19 nt, Artificial Sequence
  Description of Artificial Sequence: Synthetic oligonucleotide
ugccugcaccucagugcca

SEQ ID NO: 2983820 - RNA, 19 nt, Artificial Sequence
  Description of Artificial Sequence: Synthetic oligonucleotide
gccugcaccucagugccag

SEQ ID NO: 2983821 - RNA, 19 nt, Artificial Sequence
  Description of Artificial Sequence: Synthetic oligonucleotide
augcaaagugugauuccua

SEQ ID NO: 2983822 - RNA, 19 nt, Artificial Sequence
  Description of Artificial Sequence: Synthetic oligonucleotide
caagggagccacuuugguu

SEQ ID NO: 2983823 - RNA, 19 nt, Artificial Sequence
  Description of Artificial Sequence: Synthetic oligonucleotide
guagacaagggagccacuu

SEQ ID NO: 2983824 - RNA, 19 nt, Artificial Sequence
  Description of Artificial Sequence: Synthetic oligonucleotide
ggcacagcuaaagucaaau

SEQ ID NO: 2983825 - RNA, 19 nt, Artificial Sequence
  Description of Artificial Sequence: Synthetic oligonucleotide
acagaugggcacagcuaaa

SEQ ID NO: 2983826 - RNA, 19 nt, Artificial Sequence
  Description of Artificial Sequence: Synthetic oligonucleotide
acgucugcucccgcacuug

SEQ ID NO: 2983827 - RNA, 19 nt, Artificial Sequence
  Description of Artificial Sequence: Synthetic oligonucleotide
gccaggucugcugagcaca

SEQ ID NO: 2983828 - RNA, 19 nt, Artificial Sequence
  Description of Artificial Sequence: Synthetic oligonucleotide
gcaagcuggugcgucacuc

SEQ ID NO: 2983829 - RNA, 19 nt, Artificial Sequence
  Description of Artificial Sequence: Synthetic oligonucleotide
gaggacgacgguuggucuu

SEQ ID NO: 2983830 - RNA, 19 nt, Artificial Sequence
  Description of Artificial Sequence: Synthetic oligonucleotide
gcuuguuuuccaccaacau

SEQ ID NO: 2983831 - RNA, 19 nt, Artificial Sequence
  Description of Artificial Sequence: Synthetic oligonucleotide
acggaaggucggggauggc

SEQ ID NO: 2983832 - RNA, 19 nt, Artificial Sequence
  Description of Artificial Sequence: Synthetic oligonucleotide
ccaggucugcugagcacag

SEQ ID NO: 2983833 - RNA, 19 nt, Artificial Sequence
  Description of Artificial Sequence: Synthetic oligonucleotide
caagcuggugcgucacucu

SEQ ID NO: 2983834 - RNA, 19 nt, Artificial Sequence
  Description of Artificial Sequence: Synthetic oligonucleotide
ggcaucagguacucgguau

SEQ ID NO: 2983835 - RNA, 19 nt, Artificial Sequence
  Description of Artificial Sequence: Synthetic oligonucleotide
gucggggauggcccacuca

SEQ ID NO: 2983836 - RNA, 19 nt, Artificial Sequence
  Description of Artificial Sequence: Synthetic oligonucleotide
guuggucuugggucuuggu

SEQ ID NO: 2983837 - RNA, 19 nt, Artificial Sequence
  Description of Artificial Sequence: Synthetic oligonucleotide
caaucagugugaagacgau

SEQ ID NO: 2983838 - RNA, 19 nt, Artificial Sequence
  Description of Artificial Sequence: Synthetic oligonucleotide
caggucugcugagcacagc

SEQ ID NO: 2983839 - RNA, 19 nt, Artificial Sequence
  Description of Artificial Sequence: Synthetic oligonucleotide
gucacucugccugcaccuc

SEQ ID NO: 2983840 - RNA, 19 nt, Artificial Sequence
  Description of Artificial Sequence: Synthetic oligonucleotide
cacugagcuugugaugcaa

SEQ ID NO: 2983841 - RNA, 19 nt, Artificial Sequence
  Description of Artificial Sequence: Synthetic oligonucleotide
cccgccacugcuuguuuuc

SEQ ID NO: 2983842 - RNA, 19 nt, Artificial Sequence
  Description of Artificial Sequence: Synthetic oligonucleotide
ugccgggcccacgucugcu

SEQ ID NO: 2983843 - RNA, 19 nt, Artificial Sequence
  Description of Artificial Sequence: Synthetic oligonucleotide
cggaaggucggggauggcc

SEQ ID NO: 2983844 - RNA, 19 nt, Artificial Sequence
  Description of Artificial Sequence: Synthetic oligonucleotide
caccaugcccgccacugcu

SEQ ID NO: 2983845 - RNA, 19 nt, Artificial Sequence
  Description of Artificial Sequence: Synthetic oligonucleotide
ggcccacucaagaggacga

SEQ ID NO: 2983846 - RNA, 19 nt, Artificial Sequence
  Description of Artificial Sequence: Synthetic oligonucleotide
gcaccucagugccaggucu

SEQ ID NO: 2983847 - RNA, 19 nt, Artificial Sequence
  Description of Artificial Sequence: Synthetic oligonucleotide
ugcccgccacugcuuguuu

SEQ ID NO: 2983848 - RNA, 19 nt, Artificial Sequence
  Description of Artificial Sequence: Synthetic oligonucleotide
gcaccaugcccgccacugc

SEQ ID NO: 2983849 - RNA, 19 nt, Artificial Sequence
  Description of Artificial Sequence: Synthetic oligonucleotide
cccacgucugcucccgcac

SEQ ID NO: 2983850 - RNA, 19 nt, Artificial Sequence
  Description of Artificial Sequence: Synthetic oligonucleotide
ccaugcccgccacugcuug

SEQ ID NO: 2983851 - RNA, 19 nt, Artificial Sequence
  Description of Artificial Sequence: Synthetic oligonucleotide
cacucaagaggacgacggu

SEQ ID NO: 2983852 - RNA, 19 nt, Artificial Sequence
  Description of Artificial Sequence: Synthetic oligonucleotide
augcccgccacugcuuguu

SEQ ID NO: 2983853 - RNA, 19 nt, Artificial Sequence
  Description of Artificial Sequence: Synthetic oligonucleotide
ccacuuugguugaggagaa

SEQ ID NO: 2983854 - RNA, 19 nt, Artificial Sequence
  Description of Artificial Sequence: Synthetic oligonucleotide
aggucggggauggcccacu

SEQ ID NO: 2983855 - RNA, 19 nt, Artificial Sequence
  Description of Artificial Sequence: Synthetic oligonucleotide
gcaacagcugccgggccca

SEQ ID NO: 2983856 - RNA, 19 nt, Artificial Sequence
  Description of Artificial Sequence: Synthetic oligonucleotide
gggcccacgucugcucccg

SEQ ID NO: 2983857 - RNA, 19 nt, Artificial Sequence
  Description of Artificial Sequence: Synthetic oligonucleotide
ggacgacgguuggucuugg

SEQ ID NO: 2983858 - RNA, 19 nt, Artificial Sequence
  Description of Artificial Sequence: Synthetic oligonucleotide
ggugagcaccaugcccgcc

SEQ ID NO: 2983859 - RNA, 19 nt, Artificial Sequence
  Description of Artificial Sequence: Synthetic oligonucleotide
caaggaccuucccaacaau

SEQ ID NO: 2983860 - RNA, 19 nt, Artificial Sequence
  Description of Artificial Sequence: Synthetic oligonucleotide
gggcaucagguacucggua

SEQ ID NO: 2983861 - RNA, 19 nt, Artificial Sequence
  Description of Artificial Sequence: Synthetic oligonucleotide
gcugccgggcccacgucug

SEQ ID NO: 2983862 - RNA, 19 nt, Artificial Sequence
  Description of Artificial Sequence: Synthetic oligonucleotide
gcaucagguacucgguauu

SEQ ID NO: 2983863 - RNA, 19 nt, Artificial Sequence
  Description of Artificial Sequence: Synthetic oligonucleotide
accaugcccgccacugcuu

SEQ ID NO: 2983864 - RNA, 19 nt, Artificial Sequence
  Description of Artificial Sequence: Synthetic oligonucleotide
ccugcaccucagugccagg

SEQ ID NO: 2983865 - RNA, 19 nt, Artificial Sequence
  Description of Artificial Sequence: Synthetic oligonucleotide
caagaggacgacgguuggu

SEQ ID NO: 2983866 - RNA, 19 nt, Artificial Sequence
  Description of Artificial Sequence: Synthetic oligonucleotide
ccgggcccacgucugcucc

SEQ ID NO: 2983867 - RNA, 19 nt, Artificial Sequence
  Description of Artificial Sequence: Synthetic oligonucleotide
cugcaccucagugccaggu

SEQ ID NO: 2983868 - RNA, 19 nt, Artificial Sequence
  Description of Artificial Sequence: Synthetic oligonucleotide
gcucccgcacuugcugcag

SEQ ID NO: 2983869 - RNA, 19 nt, Artificial Sequence
  Description of Artificial Sequence: Synthetic oligonucleotide
acgguuggucuugggucuu

SEQ ID NO: 2983870 - RNA, 19 nt, Artificial Sequence
  Description of Artificial Sequence: Synthetic oligonucleotide
gagaggcaagcuggugcgu

SEQ ID NO: 2983871 - RNA, 19 nt, Artificial Sequence
  Description of Artificial Sequence: Synthetic oligonucleotide
ccgccacugcuuguuuucc

SEQ ID NO: 2983872 - RNA, 19 nt, Artificial Sequence
  Description of Artificial Sequence: Synthetic oligonucleotide
cccgcacuugcugcaggcc

SEQ ID NO: 2983873 - RNA, 19 nt, Artificial Sequence
  Description of Artificial Sequence: Synthetic oligonucleotide
ggucggggauggcccacuc

SEQ ID NO: 2983874 - RNA, 19 nt, Artificial Sequence
  Description of Artificial Sequence: Synthetic oligonucleotide
gcccacgucugcucccgca

SEQ ID NO: 2983875 - RNA, 19 nt, Artificial Sequence
  Description of Artificial Sequence: Synthetic oligonucleotide
gggagccacuuugguugag

SEQ ID NO: 2983876 - RNA, 19 nt, Artificial Sequence
  Description of Artificial Sequence: Synthetic oligonucleotide
gcccacucaagaggacgac

SEQ ID NO: 2983877 - RNA, 19 nt, Artificial Sequence
  Description of Artificial Sequence: Synthetic oligonucleotide
cggggauggcccacucaag

SEQ ID NO: 2983878 - RNA, 19 nt, Artificial Sequence
  Description of Artificial Sequence: Synthetic oligonucleotide
gugcgucacucugccugca

SEQ ID NO: 2983879 - RNA, 19 nt, Artificial Sequence
  Description of Artificial Sequence: Synthetic oligonucleotide
caugcccgccacugcuugu

SEQ ID NO: 2983880 - RNA, 19 nt, Artificial Sequence
  Description of Artificial Sequence: Synthetic oligonucleotide
gagcaccaugcccgccacu

SEQ ID NO: 2983881 - RNA, 19 nt, Artificial Sequence
  Description of Artificial Sequence: Synthetic oligonucleotide
caacagcugccgggcccac

SEQ ID NO: 2983882 - RNA, 19 nt, Artificial Sequence
  Description of Artificial Sequence: Synthetic oligonucleotide
cagcugccgggcccacguc

SEQ ID NO: 2983883 - RNA, 19 nt, Artificial Sequence
  Description of Artificial Sequence: Synthetic oligonucleotide
cggugagcaccaugcccgc

SEQ ID NO: 2983884 - RNA, 19 nt, Artificial Sequence
  Description of Artificial Sequence: Synthetic oligonucleotide
cacgucugcucccgcacuu

SEQ ID NO: 2983885 - RNA, 19 nt, Artificial Sequence
  Description of Artificial Sequence: Synthetic oligonucleotide
gccgggcccacgucugcuc

SEQ ID NO: 2983886 - RNA, 19 nt, Artificial Sequence
  Description of Artificial Sequence: Synthetic oligonucleotide
cgucacucugccugcaccu

SEQ ID NO: 2983887 - RNA, 19 nt, Artificial Sequence
  Description of Artificial Sequence: Synthetic oligonucleotide
ggcccacgucugcucccgc

SEQ ID NO: 2983888 - RNA, 19 nt, Artificial Sequence
  Description of Artificial Sequence: Synthetic oligonucleotide
ggcaagcuggugcgucacu

SEQ ID NO: 2983889 - RNA, 19 nt, Artificial Sequence
  Description of Artificial Sequence: Synthetic oligonucleotide
ggucuuggucacugagcuu

SEQ ID NO: 2983890 - RNA, 19 nt, Artificial Sequence
  Description of Artificial Sequence: Synthetic oligonucleotide
gggcacagcuaaagucaaa

SEQ ID NO: 2983891 - RNA, 19 nt, Artificial Sequence
  Description of Artificial Sequence: Synthetic oligonucleotide
ccuucccaacaaucagugu

SEQ ID NO: 2983892 - RNA, 19 nt, Artificial Sequence
  Description of Artificial Sequence: Synthetic oligonucleotide
cuggugcgucacucugccu

SEQ ID NO: 2983893 - RNA, 19 nt, Artificial Sequence
  Description of Artificial Sequence: Synthetic oligonucleotide
cgggcccacgucugcuccc

SEQ ID NO: 2983894 - RNA, 19 nt, Artificial Sequence
  Description of Artificial Sequence: Synthetic oligonucleotide
cgccacugcuuguuuucca

SEQ ID NO: 2983895 - RNA, 19 nt, Artificial Sequence
  Description of Artificial Sequence: Synthetic oligonucleotide
cgauagccagagaguuaca

SEQ ID NO: 2983896 - RNA, 19 nt, Artificial Sequence
  Description of Artificial Sequence: Synthetic oligonucleotide
caucuucuccaaggaccuu

SEQ ID NO: 2983897 - RNA, 19 nt, Artificial Sequence
  Description of Artificial Sequence: Synthetic oligonucleotide
cgguuggucuugggucuug

SEQ ID NO: 2983898 - RNA, 19 nt, Artificial Sequence
  Description of Artificial Sequence: Synthetic oligonucleotide
cuaugacggugagcaccau

SEQ ID NO: 2983899 - RNA, 19 nt, Artificial Sequence
  Description of Artificial Sequence: Synthetic oligonucleotide
gcccgccacugcuuguuuu

SEQ ID NO: 2983900 - RNA, 19 nt, Artificial Sequence
  Description of Artificial Sequence: Synthetic oligonucleotide
ccucagugccaggucugcu

SEQ ID NO: 2983901 - RNA, 19 nt, Artificial Sequence
  Description of Artificial Sequence: Synthetic oligonucleotide
uuauuaaggaggacgacgc

SEQ ID NO: 2983902 - RNA, 19 nt, Artificial Sequence
  Description of Artificial Sequence: Synthetic oligonucleotide
uuaggaaaaggcuucuggg

SEQ ID NO: 2983903 - RNA, 19 nt, Artificial Sequence
  Description of Artificial Sequence: Synthetic oligonucleotide
aaggcuucuggguaaggcc

SEQ ID NO: 2983904 - RNA, 19 nt, Artificial Sequence
  Description of Artificial Sequence: Synthetic oligonucleotide
ucuggggcaauauuggccg

SEQ ID NO: 2983905 - RNA, 19 nt, Artificial Sequence
  Description of Artificial Sequence: Synthetic oligonucleotide
acuagagccaggcaggagg

SEQ ID NO: 2983906 - RNA, 19 nt, Artificial Sequence
  Description of Artificial Sequence: Synthetic oligonucleotide
ucuccagucuccaugauga

SEQ ID NO: 2983907 - RNA, 19 nt, Artificial Sequence
  Description of Artificial Sequence: Synthetic oligonucleotide
uccaucguuaggaaaaggc

SEQ ID NO: 2983908 - RNA, 19 nt, Artificial Sequence
  Description of Artificial Sequence: Synthetic oligonucleotide
guuaggaaaaggcuucugg

SEQ ID NO: 2983909 - RNA, 19 nt, Artificial Sequence
  Description of Artificial Sequence: Synthetic oligonucleotide
cuuauuaaggaggacgacg

SEQ ID NO: 2983910 - RNA, 19 nt, Artificial Sequence
  Description of Artificial Sequence: Synthetic oligonucleotide
ugaaaaggacaccagggca

SEQ ID NO: 2983911 - RNA, 19 nt, Artificial Sequence
  Description of Artificial Sequence: Synthetic oligonucleotide
aaaggcuucuggguaaggc

SEQ ID NO: 2983912 - RNA, 19 nt, Artificial Sequence
  Description of Artificial Sequence: Synthetic oligonucleotide
acuuaggguagccuggcgc

SEQ ID NO: 2983913 - RNA, 19 nt, Artificial Sequence
  Description of Artificial Sequence: Synthetic oligonucleotide
uccaugaugaccccacuag

SEQ ID NO: 2983914 - RNA, 19 nt, Artificial Sequence
  Description of Artificial Sequence: Synthetic oligonucleotide
augaugaccccacuagagc

SEQ ID NO: 2983915 - RNA, 19 nt, Artificial Sequence
  Description of Artificial Sequence: Synthetic oligonucleotide
uacaggaggugacuuaggg

SEQ ID NO: 2983916 - RNA, 19 nt, Artificial Sequence
  Description of Artificial Sequence: Synthetic oligonucleotide
ugaugaccccacuagagcc

SEQ ID NO: 2983917 - RNA, 19 nt, Artificial Sequence
  Description of Artificial Sequence: Synthetic oligonucleotide
aggccaagcagcaaggugc

SEQ ID NO: 2983918 - RNA, 19 nt, Artificial Sequence
  Description of Artificial Sequence: Synthetic oligonucleotide
gaggacgacgccuccaucg

SEQ ID NO: 2983919 - RNA, 19 nt, Artificial Sequence
  Description of Artificial Sequence: Synthetic oligonucleotide
uuaccagcaccuuauuaag

SEQ ID NO: 2983920 - RNA, 19 nt, Artificial Sequence
  Description of Artificial Sequence: Synthetic oligonucleotide
gaaaaggacaccagggcag

SEQ ID NO: 2983921 - RNA, 19 nt, Artificial Sequence
  Description of Artificial Sequence: Synthetic oligonucleotide
aauauuggccgcuggccug

SEQ ID NO: 2983922 - RNA, 19 nt, Artificial Sequence
  Description of Artificial Sequence: Synthetic oligonucleotide
caccuuauuaaggaggacg

SEQ ID NO: 2983923 - RNA, 19 nt, Artificial Sequence
  Description of Artificial Sequence: Synthetic oligonucleotide
caugaugaccccacuagag

SEQ ID NO: 2983924 - RNA, 19 nt, Artificial Sequence
  Description of Artificial Sequence: Synthetic oligonucleotide
acaugccccauccccaucc

SEQ ID NO: 2983925 - RNA, 19 nt, Artificial Sequence
  Description of Artificial Sequence: Synthetic oligonucleotide
guuaccagcaccuuauuaa

SEQ ID NO: 2983926 - RNA, 19 nt, Artificial Sequence
  Description of Artificial Sequence: Synthetic oligonucleotide
cugaaaaggacaccagggc

SEQ ID NO: 2983927 - RNA, 19 nt, Artificial Sequence
  Description of Artificial Sequence: Synthetic oligonucleotide
aaaaggacaccagggcagg

SEQ ID NO: 2983928 - RNA, 19 nt, Artificial Sequence
  Description of Artificial Sequence: Synthetic oligonucleotide
uaccagcaccuuauuaagg

SEQ ID NO: 2983929 - RNA, 19 nt, Artificial Sequence
  Description of Artificial Sequence: Synthetic oligonucleotide
accagcaccuuauuaagga

SEQ ID NO: 2983930 - RNA, 19 nt, Artificial Sequence
  Description of Artificial Sequence: Synthetic oligonucleotide
  modified_base (7)..(7): a, c, u, g, unknown or other
ucuggcnggguccucuggc

SEQ ID NO: 2983931 - RNA, 19 nt, Artificial Sequence
  Description of Artificial Sequence: Synthetic oligonucleotide
  modified_base (17)..(17): a, c, u, g, unknown or other
ucuguggcggucuggcngg

SEQ ID NO: 2983932 - RNA, 19 nt, Artificial Sequence
  Description of Artificial Sequence: Synthetic oligonucleotide
uuaaggaggacgacgccuc

SEQ ID NO: 2983933 - RNA, 19 nt, Artificial Sequence
  Description of Artificial Sequence: Synthetic oligonucleotide
agggaugggccccugcccc

SEQ ID NO: 2983934 - RNA, 19 nt, Artificial Sequence
  Description of Artificial Sequence: Synthetic oligonucleotide
aucguuaggaaaaggcuuc

SEQ ID NO: 2983935 - RNA, 19 nt, Artificial Sequence
  Description of Artificial Sequence: Synthetic oligonucleotide
ugccaggccaagcagcaag

SEQ ID NO: 2983936 - RNA, 19 nt, Artificial Sequence
  Description of Artificial Sequence: Synthetic oligonucleotide
cucuggggcaauauuggcc

SEQ ID NO: 2983937 - RNA, 19 nt, Artificial Sequence
  Description of Artificial Sequence: Synthetic oligonucleotide
uucuccagucuccaugaug

SEQ ID NO: 2983938 - RNA, 19 nt, Artificial Sequence
  Description of Artificial Sequence: Synthetic oligonucleotide
aaggugcggcugcaggggc

SEQ ID NO: 2983939 - RNA, 19 nt, Artificial Sequence
  Description of Artificial Sequence: Synthetic oligonucleotide
aggggcaacccugagcugc

SEQ ID NO: 2983940 - RNA, 19 nt, Artificial Sequence
  Description of Artificial Sequence: Synthetic oligonucleotide
guaaggccggcugaaaagg

SEQ ID NO: 2983941 - RNA, 19 nt, Artificial Sequence
  Description of Artificial Sequence: Synthetic oligonucleotide
aacccugagcugccaggcc

SEQ ID NO: 2983942 - RNA, 19 nt, Artificial Sequence
  Description of Artificial Sequence: Synthetic oligonucleotide
ccagucuccaugaugaccc

SEQ ID NO: 2983943 - RNA, 19 nt, Artificial Sequence
  Description of Artificial Sequence: Synthetic oligonucleotide
cuagagccaggcaggaggg

SEQ ID NO: 2983944 - RNA, 19 nt, Artificial Sequence
  Description of Artificial Sequence: Synthetic oligonucleotide
aggaggggcaacccugagc

SEQ ID NO: 2983945 - RNA, 19 nt, Artificial Sequence
  Description of Artificial Sequence: Synthetic oligonucleotide
gcugaaaaggacaccaggg

SEQ ID NO: 2983946 - RNA, 19 nt, Artificial Sequence
  Description of Artificial Sequence: Synthetic oligonucleotide
agcuucuccagucuccaug

SEQ ID NO: 2983947 - RNA, 19 nt, Artificial Sequence
  Description of Artificial Sequence: Synthetic oligonucleotide
agcaaggugcggcugcagg

SEQ ID NO: 2983948 - RNA, 19 nt, Artificial Sequence
  Description of Artificial Sequence: Synthetic oligonucleotide
ggugacuuaggguagccug

SEQ ID NO: 2983949 - RNA, 19 nt, Artificial Sequence
  Description of Artificial Sequence: Synthetic oligonucleotide
auagccuuccgagcuaggg

SEQ ID NO: 2983950 - RNA, 19 nt, Artificial Sequence
  Description of Artificial Sequence: Synthetic oligonucleotide
aggaaaaggcuucugggua

SEQ ID NO: 2983951 - RNA, 19 nt, Artificial Sequence
  Description of Artificial Sequence: Synthetic oligonucleotide
  modified_base (18)..(18): a, c, u, g, unknown or other
gucuguggcggucuggcng

SEQ ID NO: 2983952 - RNA, 19 nt, Artificial Sequence
  Description of Artificial Sequence: Synthetic oligonucleotide
uucuggguaaggccggcug

SEQ ID NO: 2983953 - RNA, 19 nt, Artificial Sequence
  Description of Artificial Sequence: Synthetic oligonucleotide
acccgcauagccuuccgag

SEQ ID NO: 2983954 - RNA, 19 nt, Artificial Sequence
  Description of Artificial Sequence: Synthetic oligonucleotide
ggcugaaaaggacaccagg

SEQ ID NO: 2983955 - RNA, 19 nt, Artificial Sequence
  Description of Artificial Sequence: Synthetic oligonucleotide
uuccggacaugccccaucc

SEQ ID NO: 2983956 - RNA, 19 nt, Artificial Sequence
  Description of Artificial Sequence: Synthetic oligonucleotide
aaggccggcugaaaaggac

SEQ ID NO: 2983957 - RNA, 19 nt, Artificial Sequence
  Description of Artificial Sequence: Synthetic oligonucleotide
aaaggacaccagggcaggc

SEQ ID NO: 2983958 - RNA, 19 nt, Artificial Sequence
  Description of Artificial Sequence: Synthetic oligonucleotide
gguaaggccggcugaaaag

SEQ ID NO: 2983959 - RNA, 19 nt, Artificial Sequence
  Description of Artificial Sequence: Synthetic oligonucleotide
ucuggguaaggccggcuga

SEQ ID NO: 2983960 - RNA, 19 nt, Artificial Sequence
  Description of Artificial Sequence: Synthetic oligonucleotide
caggaggugacuuagggua

SEQ ID NO: 2983961 - RNA, 19 nt, Artificial Sequence
  Description of Artificial Sequence: Synthetic oligonucleotide
uccgagcuagggaugggcc

SEQ ID NO: 2983962 - RNA, 19 nt, Artificial Sequence
  Description of Artificial Sequence: Synthetic oligonucleotide
  modified_base (5)..(5): a, c, u, g, unknown or other
uggcnggguccucuggcgg

SEQ ID NO: 2983963 - RNA, 19 nt, Artificial Sequence
  Description of Artificial Sequence: Synthetic oligonucleotide
uccagucuccaugaugacc

SEQ ID NO: 2983964 - RNA, 19 nt, Artificial Sequence
  Description of Artificial Sequence: Synthetic oligonucleotide
uagccuuccgagcuaggga

SEQ ID NO: 2983965 - RNA, 19 nt, Artificial Sequence
  Description of Artificial Sequence: Synthetic oligonucleotide
gacgccuccaucguuagga

SEQ ID NO: 2983966 - RNA, 19 nt, Artificial Sequence
  Description of Artificial Sequence: Synthetic oligonucleotide
gugacuuaggguagccugg

SEQ ID NO: 2983967 - RNA, 19 nt, Artificial Sequence
  Description of Artificial Sequence: Synthetic oligonucleotide
acaggaggugacuuagggu

SEQ ID NO: 2983968 - RNA, 19 nt, Artificial Sequence
  Description of Artificial Sequence: Synthetic oligonucleotide
accuuauuaaggaggacga

SEQ ID NO: 2983969 - RNA, 19 nt, Artificial Sequence
  Description of Artificial Sequence: Synthetic oligonucleotide
gaaaaggcuucuggguaag

SEQ ID NO: 2983970 - RNA, 19 nt, Artificial Sequence
  Description of Artificial Sequence: Synthetic oligonucleotide
ugccccauccccaucccug

SEQ ID NO: 2983971 - RNA, 19 nt, Artificial Sequence
  Description of Artificial Sequence: Synthetic oligonucleotide
uaaggccggcugaaaagga

SEQ ID NO: 2983972 - RNA, 19 nt, Artificial Sequence
  Description of Artificial Sequence: Synthetic oligonucleotide
cugggguggcuacaggagg

SEQ ID NO: 2983973 - RNA, 19 nt, Artificial Sequence
  Description of Artificial Sequence: Synthetic oligonucleotide
cuuaggguagccuggcgca

SEQ ID NO: 2983974 - RNA, 19 nt, Artificial Sequence
  Description of Artificial Sequence: Synthetic oligonucleotide
uuggccgcuggccugucug

SEQ ID NO: 2983975 - RNA, 19 nt, Artificial Sequence
  Description of Artificial Sequence: Synthetic oligonucleotide
aguggcaccccuggggugg

SEQ ID NO: 2983976 - RNA, 19 nt, Artificial Sequence
  Description of Artificial Sequence: Synthetic oligonucleotide
uagggaugggccccugccc

SEQ ID NO: 2983977 - RNA, 19 nt, Artificial Sequence
  Description of Artificial Sequence: Synthetic oligonucleotide
agccuuccgagcuagggau

SEQ ID NO: 2983978 - RNA, 19 nt, Artificial Sequence
  Description of Artificial Sequence: Synthetic oligonucleotide
gacuuaggguagccuggcg

SEQ ID NO: 2983979 - RNA, 19 nt, Artificial Sequence
  Description of Artificial Sequence: Synthetic oligonucleotide
ugggguggcuacaggaggu

SEQ ID NO: 2983980 - RNA, 19 nt, Artificial Sequence
  Description of Artificial Sequence: Synthetic oligonucleotide
uccguccacucccuggggc

SEQ ID NO: 2983981 - RNA, 19 nt, Artificial Sequence
  Description of Artificial Sequence: Synthetic oligonucleotide
agcaccuuauuaaggagga

SEQ ID NO: 2983982 - RNA, 19 nt, Artificial Sequence
  Description of Artificial Sequence: Synthetic oligonucleotide
cuacaggaggugacuuagg

SEQ ID NO: 2983983 - RNA, 19 nt, Artificial Sequence
  Description of Artificial Sequence: Synthetic oligonucleotide
agcugccaggccaagcagc

SEQ ID NO: 2983984 - RNA, 19 nt, Artificial Sequence
  Description of Artificial Sequence: Synthetic oligonucleotide
  modified_base (6)..(6): a, c, u, g, unknown or other
cuggcnggguccucuggcg

SEQ ID NO: 2983985 - RNA, 19 nt, Artificial Sequence
  Description of Artificial Sequence: Synthetic oligonucleotide
uaaggaggacgacgccucc

SEQ ID NO: 2983986 - RNA, 19 nt, Artificial Sequence
  Description of Artificial Sequence: Synthetic oligonucleotide
cuguccguccacucccugg

SEQ ID NO: 2983987 - RNA, 19 nt, Artificial Sequence
  Description of Artificial Sequence: Synthetic oligonucleotide
ugccccaucuguccgucca

SEQ ID NO: 2983988 - RNA, 19 nt, Artificial Sequence
  Description of Artificial Sequence: Synthetic oligonucleotide
caggcaguggcaccccugg

SEQ ID NO: 2983989 - RNA, 19 nt, Artificial Sequence
  Description of Artificial Sequence: Synthetic oligonucleotide
ugacuuaggguagccuggc

SEQ ID NO: 2983990 - RNA, 19 nt, Artificial Sequence
  Description of Artificial Sequence: Synthetic oligonucleotide
ggcaauauuggccgcuggc

SEQ ID NO: 2983991 - RNA, 19 nt, Artificial Sequence
  Description of Artificial Sequence: Synthetic oligonucleotide
auccccaucguuaccagca

SEQ ID NO: 2983992 - RNA, 19 nt, Artificial Sequence
  Description of Artificial Sequence: Synthetic oligonucleotide
aucguuaccagcaccuuau

SEQ ID NO: 2983993 - RNA, 19 nt, Artificial Sequence
  Description of Artificial Sequence: Synthetic oligonucleotide
gcaaggugcggcugcaggg

SEQ ID NO: 2983994 - RNA, 19 nt, Artificial Sequence
  Description of Artificial Sequence: Synthetic oligonucleotide
caaggugcggcugcagggg

SEQ ID NO: 2983995 - RNA, 19 nt, Artificial Sequence
  Description of Artificial Sequence: Synthetic oligonucleotide
gaccccacuagagccaggc

SEQ ID NO: 2983996 - RNA, 19 nt, Artificial Sequence
  Description of Artificial Sequence: Synthetic oligonucleotide
acccugagcugccaggcca

SEQ ID NO: 2983997 - RNA, 19 nt, Artificial Sequence
  Description of Artificial Sequence: Synthetic oligonucleotide
gcuacaggaggugacuuag

SEQ ID NO: 2983998 - RNA, 19 nt, Artificial Sequence
  Description of Artificial Sequence: Synthetic oligonucleotide
uuccgagcuagggaugggc

SEQ ID NO: 2983999 - RNA, 19 nt, Artificial Sequence
  Description of Artificial Sequence: Synthetic oligonucleotide
cccacuagagccaggcagg

SEQ ID NO: 2984000 - RNA, 19 nt, Artificial Sequence
  Description of Artificial Sequence: Synthetic oligonucleotide
acauccccaucguuaccag

SEQ ID NO: 2984001 - RNA, 19 nt, Artificial Sequence
  Description of Artificial Sequence: Synthetic oligonucleotide
  modified_base (13)..(13): a, c, u, g, unknown or other
uggcggucuggcngggucc

SEQ ID NO: 2984002 - RNA, 19 nt, Artificial Sequence
  Description of Artificial Sequence: Synthetic oligonucleotide
gcaauauuggccgcuggcc

SEQ ID NO: 2984003 - RNA, 19 nt, Artificial Sequence
  Description of Artificial Sequence: Synthetic oligonucleotide
cugucuguggcggucuggc

SEQ ID NO: 2984004 - RNA, 19 nt, Artificial Sequence
  Description of Artificial Sequence: Synthetic oligonucleotide
gagcugccaggccaagcag

SEQ ID NO: 2984005 - RNA, 19 nt, Artificial Sequence
  Description of Artificial Sequence: Synthetic oligonucleotide
gaugaccccacuagagcca

SEQ ID NO: 2984006 - RNA, 19 nt, Artificial Sequence
  Description of Artificial Sequence: Synthetic oligonucleotide
cacucccuggggcaggccc

SEQ ID NO: 2984007 - RNA, 19 nt, Artificial Sequence
  Description of Artificial Sequence: Synthetic oligonucleotide
cuggcgcacccgcauagcc

SEQ ID NO: 2984008 - RNA, 19 nt, Artificial Sequence
  Description of Artificial Sequence: Synthetic oligonucleotide
ggaggggcaacccugagcu

SEQ ID NO: 2984009 - RNA, 19 nt, Artificial Sequence
  Description of Artificial Sequence: Synthetic oligonucleotide
caacccugagcugccaggc

SEQ ID NO: 2984010 - RNA, 19 nt, Artificial Sequence
  Description of Artificial Sequence: Synthetic oligonucleotide
uggcgcacccgcauagccu

SEQ ID NO: 2984011 - RNA, 19 nt, Artificial Sequence
  Description of Artificial Sequence: Synthetic oligonucleotide
cuggaggcccagcuucucc

SEQ ID NO: 2984012 - RNA, 19 nt, Artificial Sequence
  Description of Artificial Sequence: Synthetic oligonucleotide
ucguuaggaaaaggcuucu

SEQ ID NO: 2984013 - RNA, 19 nt, Artificial Sequence
  Description of Artificial Sequence: Synthetic oligonucleotide
aggacgacgccuccaucgu

SEQ ID NO: 2984014 - RNA, 19 nt, Artificial Sequence
  Description of Artificial Sequence: Synthetic oligonucleotide
caucguuaggaaaaggcuu

SEQ ID NO: 2984015 - RNA, 19 nt, Artificial Sequence
  Description of Artificial Sequence: Synthetic oligonucleotide
gcaacccugagcugccagg

SEQ ID NO: 2984016 - RNA, 19 nt, Artificial Sequence
  Description of Artificial Sequence: Synthetic oligonucleotide
gaggugacuuaggguagcc

SEQ ID NO: 2984017 - RNA, 19 nt, Artificial Sequence
  Description of Artificial Sequence: Synthetic oligonucleotide
ggaaaaggcuucuggguaa

SEQ ID NO: 2984018 - RNA, 19 nt, Artificial Sequence
  Description of Artificial Sequence: Synthetic oligonucleotide
ugcaggggccucuggggca

SEQ ID NO: 2984019 - RNA, 19 nt, Artificial Sequence
  Description of Artificial Sequence: Synthetic oligonucleotide
cuccaucguuaggaaaagg

SEQ ID NO: 2984020 - RNA, 19 nt, Artificial Sequence
  Description of Artificial Sequence: Synthetic oligonucleotide
cauagccuuccgagcuagg

SEQ ID NO: 2984021 - RNA, 19 nt, Artificial Sequence
  Description of Artificial Sequence: Synthetic oligonucleotide
aggaggugacuuaggguag

SEQ ID NO: 2984022 - RNA, 19 nt, Artificial Sequence
  Description of Artificial Sequence: Synthetic oligonucleotide
augaccccacuagagccag

SEQ ID NO: 2984023 - RNA, 19 nt, Artificial Sequence
  Description of Artificial Sequence: Synthetic oligonucleotide
aaggaggacgacgccucca

SEQ ID NO: 2984024 - RNA, 19 nt, Artificial Sequence
  Description of Artificial Sequence: Synthetic oligonucleotide
gucuccaugaugaccccac

SEQ ID NO: 2984025 - RNA, 19 nt, Artificial Sequence
  Description of Artificial Sequence: Synthetic oligonucleotide
  modified_base (14)..(14): a, c, u, g, unknown or other
guggcggucuggcnggguc

SEQ ID NO: 2984026 - RNA, 19 nt, Artificial Sequence
  Description of Artificial Sequence: Synthetic oligonucleotide
ccccacuagagccaggcag

SEQ ID NO: 2984027 - RNA, 19 nt, Artificial Sequence
  Description of Artificial Sequence: Synthetic oligonucleotide
uccccaucguuaccagcac

SEQ ID NO: 2984028 - RNA, 19 nt, Artificial Sequence
  Description of Artificial Sequence: Synthetic oligonucleotide
acgacgccuccaucguuag

SEQ ID NO: 2984029 - RNA, 19 nt, Artificial Sequence
  Description of Artificial Sequence: Synthetic oligonucleotide
  modified_base (19)..(19): a, c, u, g, unknown or other
ugucuguggcggucuggcn

SEQ ID NO: 2984030 - RNA, 19 nt, Artificial Sequence
  Description of Artificial Sequence: Synthetic oligonucleotide
aggaggacgacgccuccau

SEQ ID NO: 2984031 - RNA, 19 nt, Artificial Sequence
  Description of Artificial Sequence: Synthetic oligonucleotide
gccucuggggcaauauugg

SEQ ID NO: 2984032 - RNA, 19 nt, Artificial Sequence
  Description of Artificial Sequence: Synthetic oligonucleotide
uccggacaugccccauccc

SEQ ID NO: 2984033 - RNA, 19 nt, Artificial Sequence
  Description of Artificial Sequence: Synthetic oligonucleotide
uaggguagccuggcgcacc

SEQ ID NO: 2984034 - RNA, 19 nt, Artificial Sequence
  Description of Artificial Sequence: Synthetic oligonucleotide
  modified_base (8)..(8): a, c, u, g, unknown or other
gucuggcnggguccucugg

SEQ ID NO: 2984035 - RNA, 19 nt, Artificial Sequence
  Description of Artificial Sequence: Synthetic oligonucleotide
caauauuggccgcuggccu

SEQ ID NO: 2984036 - RNA, 19 nt, Artificial Sequence
  Description of Artificial Sequence: Synthetic oligonucleotide
ggccucuggggcaauauug

SEQ ID NO: 2984037 - RNA, 19 nt, Artificial Sequence
  Description of Artificial Sequence: Synthetic oligonucleotide
uuaggguagccuggcgcac

SEQ ID NO: 2984038 - RNA, 19 nt, Artificial Sequence
  Description of Artificial Sequence: Synthetic oligonucleotide
auauuggccgcuggccugu

SEQ ID NO: 2984039 - RNA, 19 nt, Artificial Sequence
  Description of Artificial Sequence: Synthetic oligonucleotide
uggggcaauauuggccgcu

SEQ ID NO: 2984040 - RNA, 19 nt, Artificial Sequence
  Description of Artificial Sequence: Synthetic oligonucleotide
ccggacaugccccaucccc

SEQ ID NO: 2984041 - RNA, 19 nt, Artificial Sequence
  Description of Artificial Sequence: Synthetic oligonucleotide
gguagccuggcgcacccgc

SEQ ID NO: 2984042 - RNA, 19 nt, Artificial Sequence
  Description of Artificial Sequence: Synthetic oligonucleotide
ugaccccacuagagccagg

SEQ ID NO: 2984043 - RNA, 19 nt, Artificial Sequence
  Description of Artificial Sequence: Synthetic oligonucleotide
aagcagcaaggugcggcug

SEQ ID NO: 2984044 - RNA, 19 nt, Artificial Sequence
  Description of Artificial Sequence: Synthetic oligonucleotide
ccaucuguccguccacucc

SEQ ID NO: 2984045 - RNA, 19 nt, Artificial Sequence
  Description of Artificial Sequence: Synthetic oligonucleotide
ccugggguggcuacaggag

SEQ ID NO: 2984046 - RNA, 19 nt, Artificial Sequence
  Description of Artificial Sequence: Synthetic oligonucleotide
cuuccggacaugccccauc

SEQ ID NO: 2984047 - RNA, 19 nt, Artificial Sequence
  Description of Artificial Sequence: Synthetic oligonucleotide
caugccccauccccauccc

SEQ ID NO: 2984048 - RNA, 19 nt, Artificial Sequence
  Description of Artificial Sequence: Synthetic oligonucleotide
cagucuccaugaugacccc

SEQ ID NO: 2984049 - RNA, 19 nt, Artificial Sequence
  Description of Artificial Sequence: Synthetic oligonucleotide
cuggggcaauauuggccgc

SEQ ID NO: 2984050 - RNA, 19 nt, Artificial Sequence
  Description of Artificial Sequence: Synthetic oligonucleotide
aggccggcugaaaaggaca

SEQ ID NO: 2984051 - RNA, 19 nt, Artificial Sequence
  Description of Artificial Sequence: Synthetic oligonucleotide
gacgacgccuccaucguua

SEQ ID NO: 2984052 - RNA, 19 nt, Artificial Sequence
  Description of Artificial Sequence: Synthetic oligonucleotide
uagccuggcgcacccgcau

SEQ ID NO: 2984053 - RNA, 19 nt, Artificial Sequence
  Description of Artificial Sequence: Synthetic oligonucleotide
caucguuaccagcaccuua

SEQ ID NO: 2984054 - RNA, 19 nt, Artificial Sequence
  Description of Artificial Sequence: Synthetic oligonucleotide
gggcaauauuggccgcugg

SEQ ID NO: 2984055 - RNA, 19 nt, Artificial Sequence
  Description of Artificial Sequence: Synthetic oligonucleotide
cuccagucuccaugaugac

SEQ ID NO: 2984056 - RNA, 19 nt, Artificial Sequence
  Description of Artificial Sequence: Synthetic oligonucleotide
agucuccaugaugacccca

SEQ ID NO: 2984057 - RNA, 19 nt, Artificial Sequence
  Description of Artificial Sequence: Synthetic oligonucleotide
ucguuaccagcaccuuauu

SEQ ID NO: 2984058 - RNA, 19 nt, Artificial Sequence
  Description of Artificial Sequence: Synthetic oligonucleotide
ccuuccgagcuagggaugg

SEQ ID NO: 2984059 - RNA, 19 nt, Artificial Sequence
  Description of Artificial Sequence: Synthetic oligonucleotide
cugagcugccaggccaagc

SEQ ID NO: 2984060 - RNA, 19 nt, Artificial Sequence
  Description of Artificial Sequence: Synthetic oligonucleotide
ccucuggggcaauauuggc

SEQ ID NO: 2984061 - RNA, 19 nt, Artificial Sequence
  Description of Artificial Sequence: Synthetic oligonucleotide
aggugacuuaggguagccu

SEQ ID NO: 2984062 - RNA, 19 nt, Artificial Sequence
  Description of Artificial Sequence: Synthetic oligonucleotide
ggcaggaggggcaacccug

SEQ ID NO: 2984063 - RNA, 19 nt, Artificial Sequence
  Description of Artificial Sequence: Synthetic oligonucleotide
gcuggccugucuguggcgg

SEQ ID NO: 2984064 - RNA, 19 nt, Artificial Sequence
  Description of Artificial Sequence: Synthetic oligonucleotide
ggcaacccugagcugccag

SEQ ID NO: 2984065 - RNA, 19 nt, Artificial Sequence
  Description of Artificial Sequence: Synthetic oligonucleotide
cuuccgagcuagggauggg

SEQ ID NO: 2984066 - RNA, 19 nt, Artificial Sequence
  Description of Artificial Sequence: Synthetic oligonucleotide
guccguccacucccugggg

SEQ ID NO: 2984067 - RNA, 19 nt, Artificial Sequence
  Description of Artificial Sequence: Synthetic oligonucleotide
gcauagccuuccgagcuag

SEQ ID NO: 2984068 - RNA, 19 nt, Artificial Sequence
  Description of Artificial Sequence: Synthetic oligonucleotide
ccgagcuagggaugggccc

SEQ ID NO: 2984069 - RNA, 19 nt, Artificial Sequence
  Description of Artificial Sequence: Synthetic oligonucleotide
uccacucccuggggcaggc

SEQ ID NO: 2984070 - RNA, 19 nt, Artificial Sequence
  Description of Artificial Sequence: Synthetic oligonucleotide
cccgcauagccuuccgagc

SEQ ID NO: 2984071 - RNA, 19 nt, Artificial Sequence
  Description of Artificial Sequence: Synthetic oligonucleotide
gacaugccccauccccauc

SEQ ID NO: 2984072 - RNA, 19 nt, Artificial Sequence
  Description of Artificial Sequence: Synthetic oligonucleotide
caagcagcaaggugcggcu

SEQ ID NO: 2984073 - RNA, 19 nt, Artificial Sequence
  Description of Artificial Sequence: Synthetic oligonucleotide
uggcuacaggaggugacuu

SEQ ID NO: 2984074 - RNA, 19 nt, Artificial Sequence
  Description of Artificial Sequence: Synthetic oligonucleotide
cccaucccugccuggaggc

SEQ ID NO: 2984075 - RNA, 19 nt, Artificial Sequence
  Description of Artificial Sequence: Synthetic oligonucleotide
ccaucguuaggaaaaggcu

SEQ ID NO: 2984076 - RNA, 19 nt, Artificial Sequence
  Description of Artificial Sequence: Synthetic oligonucleotide
cuccaugaugaccccacua

SEQ ID NO: 2984077 - RNA, 19 nt, Artificial Sequence
  Description of Artificial Sequence: Synthetic oligonucleotide
ggcuucuggguaaggccgg

SEQ ID NO: 2984078 - RNA, 19 nt, Artificial Sequence
  Description of Artificial Sequence: Synthetic oligonucleotide
gguggcuacaggaggugac

SEQ ID NO: 2984079 - RNA, 19 nt, Artificial Sequence
  Description of Artificial Sequence: Synthetic oligonucleotide
ggaggugacuuaggguagc

SEQ ID NO: 2984080 - RNA, 19 nt, Artificial Sequence
  Description of Artificial Sequence: Synthetic oligonucleotide
cacuagagccaggcaggag

SEQ ID NO: 2984081 - RNA, 19 nt, Artificial Sequence
  Description of Artificial Sequence: Synthetic oligonucleotide
ggguaaggccggcugaaaa

SEQ ID NO: 2984082 - RNA, 19 nt, Artificial Sequence
  Description of Artificial Sequence: Synthetic oligonucleotide
augccccauccccaucccu

SEQ ID NO: 2984083 - RNA, 19 nt, Artificial Sequence
  Description of Artificial Sequence: Synthetic oligonucleotide
accccacuagagccaggca

SEQ ID NO: 2984084 - RNA, 19 nt, Artificial Sequence
  Description of Artificial Sequence: Synthetic oligonucleotide
accccugggguggcuacag

SEQ ID NO: 2984085 - RNA, 19 nt, Artificial Sequence
  Description of Artificial Sequence: Synthetic oligonucleotide
caggaggggcaacccugag

SEQ ID NO: 2984086 - RNA, 19 nt, Artificial Sequence
  Description of Artificial Sequence: Synthetic oligonucleotide
auuggccgcuggccugucu

SEQ ID NO: 2984087 - RNA, 19 nt, Artificial Sequence
  Description of Artificial Sequence: Synthetic oligonucleotide
ccuuauuaaggaggacgac

SEQ ID NO: 2984088 - RNA, 19 nt, Artificial Sequence
  Description of Artificial Sequence: Synthetic oligonucleotide
caguggcaccccuggggug

SEQ ID NO: 2984089 - RNA, 19 nt, Artificial Sequence
  Description of Artificial Sequence: Synthetic oligonucleotide
uggccgcuggccugucugu

SEQ ID NO: 2984090 - RNA, 19 nt, Artificial Sequence
  Description of Artificial Sequence: Synthetic oligonucleotide
acgccuccaucguuaggaa

SEQ ID NO: 2984091 - RNA, 19 nt, Artificial Sequence
  Description of Artificial Sequence: Synthetic oligonucleotide
uggguaaggccggcugaaa

SEQ ID NO: 2984092 - RNA, 19 nt, Artificial Sequence
  Description of Artificial Sequence: Synthetic oligonucleotide
ccccuuccggacaugcccc

SEQ ID NO: 2984093 - RNA, 19 nt, Artificial Sequence
  Description of Artificial Sequence: Synthetic oligonucleotide
ccggcugaaaaggacacca

SEQ ID NO: 2984094 - RNA, 19 nt, Artificial Sequence
  Description of Artificial Sequence: Synthetic oligonucleotide
  modified_base (16)..(16): a, c, u, g, unknown or other
cuguggcggucuggcnggg

SEQ ID NO: 2984095 - RNA, 19 nt, Artificial Sequence
  Description of Artificial Sequence: Synthetic oligonucleotide
gccuggcgcacccgcauag

SEQ ID NO: 2984096 - RNA, 19 nt, Artificial Sequence
  Description of Artificial Sequence: Synthetic oligonucleotide
gccccugccccaucugucc

SEQ ID NO: 2984097 - RNA, 19 nt, Artificial Sequence
  Description of Artificial Sequence: Synthetic oligonucleotide
ccaugaugaccccacuaga

SEQ ID NO: 2984098 - RNA, 19 nt, Artificial Sequence
  Description of Artificial Sequence: Synthetic oligonucleotide
  modified_base (9)..(9): a, c, u, g, unknown or other
ggucuggcnggguccucug

SEQ ID NO: 2984099 - RNA, 19 nt, Artificial Sequence
  Description of Artificial Sequence: Synthetic oligonucleotide
ccccaucccugccuggagg

SEQ ID NO: 2984100 - RNA, 19 nt, Artificial Sequence
  Description of Artificial Sequence: Synthetic oligonucleotide
gcuagggaugggccccugc

SEQ ID NO: 2984101 - RNA, 19 nt, Artificial Sequence
  Description of Artificial Sequence: Synthetic oligonucleotide
guccacucccuggggcagg

SEQ ID NO: 2984102 - RNA, 19 nt, Artificial Sequence
  Description of Artificial Sequence: Synthetic oligonucleotide
  modified_base (2)..(2): a, c, u, g, unknown or other
cnggguccucuggcggugg

SEQ ID NO: 2984103 - RNA, 19 nt, Artificial Sequence
  Description of Artificial Sequence: Synthetic oligonucleotide
uggccugucuguggcgguc

SEQ ID NO: 2984104 - RNA, 19 nt, Artificial Sequence
  Description of Artificial Sequence: Synthetic oligonucleotide
ccaggcaggaggggcaacc

SEQ ID NO: 2984105 - RNA, 19 nt, Artificial Sequence
  Description of Artificial Sequence: Synthetic oligonucleotide
ugcggcugcaggggccucu

SEQ ID NO: 2984106 - RNA, 19 nt, Artificial Sequence
  Description of Artificial Sequence: Synthetic oligonucleotide
gccccauccccaucccugc

SEQ ID NO: 2984107 - RNA, 19 nt, Artificial Sequence
  Description of Artificial Sequence: Synthetic oligonucleotide
cugccccaucuguccgucc

SEQ ID NO: 2984108 - RNA, 19 nt, Artificial Sequence
  Description of Artificial Sequence: Synthetic oligonucleotide
ccccaucguuaccagcacc

SEQ ID NO: 2984109 - RNA, 19 nt, Artificial Sequence
  Description of Artificial Sequence: Synthetic oligonucleotide
cgagcuagggaugggcccc

SEQ ID NO: 2984110 - RNA, 19 nt, Artificial Sequence
  Description of Artificial Sequence: Synthetic oligonucleotide
ggccggcugaaaaggacac

SEQ ID NO: 2984111 - RNA, 19 nt, Artificial Sequence
  Description of Artificial Sequence: Synthetic oligonucleotide
gcugccaggccaagcagca

SEQ ID NO: 2984112 - RNA, 19 nt, Artificial Sequence
  Description of Artificial Sequence: Synthetic oligonucleotide
cuggguaaggccggcugaa

SEQ ID NO: 2984113 - RNA, 19 nt, Artificial Sequence
  Description of Artificial Sequence: Synthetic oligonucleotide
guggcuacaggaggugacu

SEQ ID NO: 2984114 - RNA, 19 nt, Artificial Sequence
  Description of Artificial Sequence: Synthetic oligonucleotide
ggcuacaggaggugacuua

SEQ ID NO: 2984115 - RNA, 19 nt, Artificial Sequence
  Description of Artificial Sequence: Synthetic oligonucleotide
ccauccccaucccugccug

SEQ ID NO: 2984116 - RNA, 19 nt, Artificial Sequence
  Description of Artificial Sequence: Synthetic oligonucleotide
  modified_base (15)..(15): a, c, u, g, unknown or other
uguggcggucuggcngggu

SEQ ID NO: 2984117 - RNA, 19 nt, Artificial Sequence
  Description of Artificial Sequence: Synthetic oligonucleotide
gcacccgcauagccuuccg

SEQ ID NO: 2984118 - RNA, 19 nt, Artificial Sequence
  Description of Artificial Sequence: Synthetic oligonucleotide
guagccuggcgcacccgca

SEQ ID NO: 2984119 - RNA, 19 nt, Artificial Sequence
  Description of Artificial Sequence: Synthetic oligonucleotide
cccaucguuaccagcaccu

SEQ ID NO: 2984120 - RNA, 19 nt, Artificial Sequence
  Description of Artificial Sequence: Synthetic oligonucleotide
gcaguggcaccccuggggu

SEQ ID NO: 2984121 - RNA, 19 nt, Artificial Sequence
  Description of Artificial Sequence: Synthetic oligonucleotide
cccugggguggcuacagga

SEQ ID NO: 2984122 - RNA, 19 nt, Artificial Sequence
  Description of Artificial Sequence: Synthetic oligonucleotide
cacccgcauagccuuccga

SEQ ID NO: 2984123 - RNA, 19 nt, Artificial Sequence
  Description of Artificial Sequence: Synthetic oligonucleotide
ccgcuggccugucuguggc

SEQ ID NO: 2984124 - RNA, 19 nt, Artificial Sequence
  Description of Artificial Sequence: Synthetic oligonucleotide
agccuggcgcacccgcaua

SEQ ID NO: 2984125 - RNA, 19 nt, Artificial Sequence
  Description of Artificial Sequence: Synthetic oligonucleotide
ggggcaacccugagcugcc

SEQ ID NO: 2984126 - RNA, 19 nt, Artificial Sequence
  Description of Artificial Sequence: Synthetic oligonucleotide
cccaucuguccguccacuc

SEQ ID NO: 2984127 - RNA, 19 nt, Artificial Sequence
  Description of Artificial Sequence: Synthetic oligonucleotide
gggguggcuacaggaggug

SEQ ID NO: 2984128 - RNA, 19 nt, Artificial Sequence
  Description of Artificial Sequence: Synthetic oligonucleotide
cggcugaaaaggacaccag

SEQ ID NO: 2984129 - RNA, 19 nt, Artificial Sequence
  Description of Artificial Sequence: Synthetic oligonucleotide
ggaggacgacgccuccauc

SEQ ID NO: 2984130 - RNA, 19 nt, Artificial Sequence
  Description of Artificial Sequence: Synthetic oligonucleotide
gcaccuuauuaaggaggac

SEQ ID NO: 2984131 - RNA, 19 nt, Artificial Sequence
  Description of Artificial Sequence: Synthetic oligonucleotide
ccccugccccaucuguccg

SEQ ID NO: 2984132 - RNA, 19 nt, Artificial Sequence
  Description of Artificial Sequence: Synthetic oligonucleotide
  modified_base (3)..(3): a, c, u, g, unknown or other
gcnggguccucuggcggug

SEQ ID NO: 2984133 - RNA, 19 nt, Artificial Sequence
  Description of Artificial Sequence: Synthetic oligonucleotide
agccaggcaggaggggcaa

SEQ ID NO: 2984134 - RNA, 19 nt, Artificial Sequence
  Description of Artificial Sequence: Synthetic oligonucleotide
gccggcugaaaaggacacc

SEQ ID NO: 2984135 - RNA, 19 nt, Artificial Sequence
  Description of Artificial Sequence: Synthetic oligonucleotide
  modified_base (4)..(4): a, c, u, g, unknown or other
ggcnggguccucuggcggu
